United States Patent Application Publication US 2025/0084491 A1 - sequence listing, part 24

SEQ ID NO: 450988 - DNA, 75 bp, synthetic construct
  source 1..75: mol_type = other DNA
gaaagcattgaagagcaggatgacgataccaacctgatcgccttcgccatgaacctgttcgatattatcggtatc

SEQ ID NO: 450989 - DNA, 75 bp, synthetic construct
  source 1..75: mol_type = other DNA
gcgaacagttccgtatgccgtacagcggcctgcgcggtcagcgtaccagcctgatcccgcaccagctcaacatcg

SEQ ID NO: 450990 - DNA, 75 bp, synthetic construct
  source 1..75: mol_type = other DNA
atgacctttaatcagcaaggtcgcccgtgtgttttccaggtcgatggtttttacaccgcaaacgaaactggcgtt

SEQ ID NO: 450991 - DNA, 75 bp, synthetic construct
  source 1..75: mol_type = other DNA
ataacaacttcgcatggagcattggggcaggtgttcgctatgacgtaactccggatatcgctcttgacctcagct

SEQ ID NO: 450992 - DNA, 75 bp, synthetic construct
  source 1..75: mol_type = other DNA
ttgtgactcagactgaccagcgcttccgtcaggacttgggggatgatgtttataagtataagggcggtgataaaa

SEQ ID NO: 450993 - DNA, 75 bp, synthetic construct
  source 1..75: mol_type = other DNA
tatgctgctggataaaaacggcaacaacctggcggcgcaggtagagtttgaaacctttaaccgtcagcttaacgc

SEQ ID NO: 450994 - DNA, 75 bp, synthetic construct
  source 1..75: mol_type = other DNA
ggaacagctggggatggaaagccacttcgcccgtctgcgtctgctggacccgaaccgtttccacgattttgcgca

SEQ ID NO: 450995 - DNA, 75 bp, synthetic construct
  source 1..75: mol_type = other DNA
agtgaatcgccacaccggtagcaagctggttaacgctgtgcagcaagaggttcacgccattctgcaactgggcga

SEQ ID NO: 450996 - DNA, 75 bp, synthetic construct
  source 1..75: mol_type = other DNA
tttgccctgcgttatcgcgcacgtaagtactccagcgagcagttccgtatgccgtacagcggcctgcgcgggcag

SEQ ID NO: 450997 - DNA, 75 bp, synthetic construct
  source 1..75: mol_type = other DNA
gtgcggaagaccgcgcccgcgatatgctctacccggagcgtatttatcaggaatttgaaggtgataacgccacct

SEQ ID NO: 450998 - DNA, 75 bp, synthetic construct
  source 1..75: mol_type = other DNA
agcttaacgcggttaaccgtcacaccggcagcaaactggttaacgccgtgcagcaggatgttcacgctatccttc

SEQ ID NO: 450999 - DNA, 75 bp, synthetic construct
  source 1..75: mol_type = other DNA
aaacagattttctaatttcttcagggagcttgattcgaatggaggtactgcaaaaaatcgggcttatggatgagg

SEQ ID NO: 451000 - DNA, 75 bp, synthetic construct
  source 1..75: mol_type = other DNA
tgacggtgaaatgtgacaaaccggtggtgatggtcggtgcaatgcgcccgtccacgtccatgagcgcagacggtc

SEQ ID NO: 451001 - DNA, 75 bp, synthetic construct
  source 1..75: mol_type = other DNA
cgacgccgcaaattgcagcacaactgcctgaacgtatcgaaaaacgtctgcaacatatcgcgccgcagaaagaga

SEQ ID NO: 451002 - DNA, 75 bp, synthetic construct
  source 1..75: mol_type = other DNA
tgcagtcaggaagtattggtatcgatcgcaaagatattgaaaaggtatttaccgggcgtaccgtattgtcgagca

SEQ ID NO: 451003 - DNA, 75 bp, synthetic construct
  source 1..75: mol_type = other DNA
gttatagttcaggcagcgtggtttgtaaaagcatcactggagcagaatgcactatcgggcaactctccggtaact

SEQ ID NO: 451004 - DNA, 75 bp, synthetic construct
  source 1..75: mol_type = other DNA
gctgaagccgctccggcaaccgctgctccggcagcaaaaccacaggctgtaccaaacgcagtgtctatcgttgaa

SEQ ID NO: 451005 - DNA, 75 bp, synthetic construct
  source 1..75: mol_type = other DNA
tgatcccaaccggtctgcatcaggtgctgaacaccatcgcctggttccagattggtgaattcaccaacgcggcgg

SEQ ID NO: 451006 - DNA, 75 bp, synthetic construct
  source 1..75: mol_type = other DNA
tgattcaaccctgacgtataaagacgggcaggatacatataaatcctctgttgatgtcagaagtaacgaatttac

SEQ ID NO: 451007 - DNA, 75 bp, synthetic construct
  source 1..75: mol_type = other DNA
tcgggcagcgtgcttccgcgctgctgctgtacgtactcagccagcgccagaacgacgtgatcatcatcgaccagc

SEQ ID NO: 451008 - DNA, 75 bp, synthetic construct
  source 1..75: mol_type = other DNA
agcgggcagcacgccggaggtcttcgaaaagaccttcatgcagaacctagtggagttcgtcacctgtcaggtgcc

SEQ ID NO: 451009 - DNA, 75 bp, synthetic construct
  source 1..75: mol_type = other DNA
gtgtccgttaaactcaggctacctcacgctgctgagcagtcgagaagtgttcgccaggaacagcggcgcgccatc

SEQ ID NO: 451010 - DNA, 75 bp, synthetic construct
  source 1..75: mol_type = other DNA
atgggcttcccttctcctgcggcggattatgctgagagccgtatttctcttgatcagcagataattagacatcct

SEQ ID NO: 451011 - DNA, 75 bp, synthetic construct
  source 1..75: mol_type = other DNA
tacacgggcagtaatgctgtttttggtgtgatcactcatgtcatcaatgatgcccgaagtggggaatttgatgat

SEQ ID NO: 451012 - DNA, 75 bp, synthetic construct
  source 1..75: mol_type = other DNA
ggggttctgtgtcattaagtacgttatggcgagattactgggggcgtagcggcagtagtaaggattatcagttga

SEQ ID NO: 451013 - DNA, 75 bp, synthetic construct
  source 1..75: mol_type = other DNA
gaaaaagagctacgtaaagcgcgggagatcgcctttgaggaactaggctcccaggcgcgggcactgggggccgat

SEQ ID NO: 451014 - DNA, 75 bp, synthetic construct
  source 1..75: mol_type = other DNA
gcagtggtcggcattgatatcgactacgaaacggtcgggcaaaacggcagtatgctgatggtcagcgtcagcgga

SEQ ID NO: 451015 - DNA, 75 bp, synthetic construct
  source 1..75: mol_type = other DNA
gccgctgtttagcaccgatttttatcgcgaaaaatggctagtagaggtcgatggcagccgaattgaaatcgctct

SEQ ID NO: 451016 - DNA, 75 bp, synthetic construct
  source 1..75: mol_type = other DNA
cgttagcgcaatggcagtatcatgaagaactgtgggtacgcggcaacgatgcggcgaaagagcaggtgctggcag

SEQ ID NO: 451017 - DNA, 75 bp, synthetic construct
  source 1..75: mol_type = other DNA
ataacgtggcgttgagcgaaccgacgctcgacctggcgcagttaccgacggaagtctggccgaacggcgaattgc

SEQ ID NO: 451018 - DNA, 75 bp, synthetic construct
  source 1..75: mol_type = other DNA
ctggaaaaattaaagatcacgccggagccgcgtgatgagtcaatccgtctggacaagcctgttatgctcggtggc

SEQ ID NO: 451019 - DNA, 75 bp, synthetic construct
  source 1..75: mol_type = other DNA
tcggccaggatcgtcgcttcctgtttaaatacatgccggagctggaagcatacttccactaccgttatcttgatg

SEQ ID NO: 451020 - DNA, 75 bp, synthetic construct
  source 1..75: mol_type = other DNA
aattaagactgccatatcctattgaccaggccagtagtgcgcctaatgttttcaaaacattcttcagagtattaa

SEQ ID NO: 451021 - DNA, 75 bp, synthetic construct
  source 1..75: mol_type = other DNA
caaaacgccgattgccgaccgctggcgcgaggcggcaaaactgattggtgtggatattctcaccatgcctggtgt

SEQ ID NO: 451022 - DNA, 75 bp, synthetic construct
  source 1..75: mol_type = other DNA
ggagaaaggtcaactggaacaagaaattctcgataacgcgtggctaacggccccggcagatctgaatattctgtt

SEQ ID NO: 451023 - DNA, 75 bp, synthetic construct
  source 1..75: mol_type = other DNA
tgcttccagcattcgcatttcagacaacacggtaaatgaccacttcccgcgatgtgctggaaacgctcggcaccg

SEQ ID NO: 451024 - DNA, 75 bp, synthetic construct
  source 1..75: mol_type = other DNA
ataacgttgcgttgagtgaggcgaacctcgatctggcacagtttccagtagaagtctggccaaacaatgaattac

SEQ ID NO: 451025 - DNA, 75 bp, synthetic construct
  source 1..75: mol_type = other DNA
taacctggaacgcgccggttgcgacagtgaatggcagttatagtcagtcgagtgcttatcgacaggctggagcca

SEQ ID NO: 451026 - DNA, 75 bp, synthetic construct
  source 1..75: mol_type = other DNA
tttcggtgctgactgatgagaaatattttcaggggagctttgatttcctccccatcgtcagccaaatcgccccac

SEQ ID NO: 451027 - DNA, 75 bp, synthetic construct
  source 1..75: mol_type = other DNA
gctgcggcaccgttgcaatacgttggcgtgttccgcaatcacaatattgccgatgtggtggacaacgctaaggtg

SEQ ID NO: 451028 - DNA, 75 bp, synthetic construct
  source 1..75: mol_type = other DNA
ttaactctttacgacataaaatatcacatggaaaagatgctctttttaaagacaaatattatctattcaacttag

SEQ ID NO: 451029 - DNA, 75 bp, synthetic construct
  source 1..75: mol_type = other DNA
tggtgaacaacggcggtatacagccatctactgagcaggattacgggaagtcgtttgcggatgtggtgagtacgt

SEQ ID NO: 451030 - DNA, 75 bp, synthetic construct
  source 1..75: mol_type = other DNA
ggaaaattatctgatgttggatgtgtcacaaagcgatagcgaagcagaattacgtggcaaccggaaaattgccgc

SEQ ID NO: 451031 - DNA, 75 bp, synthetic construct
  source 1..75: mol_type = other DNA
gaatttgctgaacctatcagtgagctggagctggaattactcagcggagaaacacgtgcagtgctgaaactggcg

SEQ ID NO: 451032 - DNA, 75 bp, synthetic construct
  source 1..75: mol_type = other DNA
cacgcgcgcggtgctgaaactggcgaaccaactggtatcgcaaaccggattacgtcagggcagcctgagcaaagc

SEQ ID NO: 451033 - DNA, 75 bp, synthetic construct
  source 1..75: mol_type = other DNA
ttagatgccaaagcgcagggcaaaatgagcgactcctttaaacgctttgccgatatccatctttcccgccatgcc

SEQ ID NO: 451034 - DNA, 75 bp, synthetic construct
  source 1..75: mol_type = other DNA
tatcgacccttaccagatctatctggcgcgctattaccaggctgatgcctgcttattaatgctttcagtgctgga

SEQ ID NO: 451035 - DNA, 75 bp, synthetic construct
  source 1..75: mol_type = other DNA
taagtgtcggtgaaactcttcccgcgcgcgattttcagcacatcgataaatatgtattcgacaatggtcagggcg

SEQ ID NO: 451036 - DNA, 75 bp, synthetic construct
  source 1..75: mol_type = other DNA
aaccggaaaattgccgccccttatcgcggcgcggttgtactggttaattttgataccgatcagcgcaagccatgg

SEQ ID NO: 451037 - DNA, 75 bp, synthetic construct
  source 1..75: mol_type = other DNA
gtgattatgggtaacgtgttgcaagccgggttggggcaaaatccggcacgtcaggcactgttaaaaagcgggctg

SEQ ID NO: 451038 - DNA, 75 bp, synthetic construct
  source 1..75: mol_type = other DNA
ggctggttccgctctccgatacctggtacgtcagccagctgcagacgatggtggccacactgaaaatccctatgg

SEQ ID NO: 451039 - DNA, 75 bp, synthetic construct
  source 1..75: mol_type = other DNA
atgataccgactacggtctggcggcgggtatcgtgacggcggacctgaaccgcgcgcatcgcgtcattcatcagc

SEQ ID NO: 451040 - DNA, 75 bp, synthetic construct
  source 1..75: mol_type = other DNA
cagcttcccgcatcgcgataacgtgctgcgctatatcgccaaaggcaaagaggaaggcgcgcgcgtactgtgcgg

SEQ ID NO: 451041 - DNA, 75 bp, synthetic construct
  source 1..75: mol_type = other DNA
gtagagccgctgtacaaggcgctgaatgccggacgtacaaataagcgtattcataaaggtctggtggtgcgtaaa

SEQ ID NO: 451042 - DNA, 75 bp, synthetic construct
  source 1..75: mol_type = other DNA
agcgcttgttttgaatggcagattgtccgcccgatagaaaatgtcgcccgtcaggcactgaaggtggcgaccgga

SEQ ID NO: 451043 - DNA, 75 bp, synthetic construct
  source 1..75: mol_type = other DNA
gcagtgagacgctggcgaaaggcaccgatgaactgaacgaacatacccagcagacagttgataacgttcagcaaa

SEQ ID NO: 451044 - DNA, 75 bp, synthetic construct
  source 1..75: mol_type = other DNA
tttttgagcgcggtcacgccgcagtcttgctaccctttgacccagtgcgtgatgaagttgtgctgattgagcaga

SEQ ID NO: 451045 - DNA, 75 bp, synthetic construct
  source 1..75: mol_type = other DNA
aatgggcaaaagatgaattcggtagtgaagcccctagcgagcgagtattaaaaaaatatgctaaaggccagatga

SEQ ID NO: 451046 - DNA, 75 bp, synthetic construct
  source 1..75: mol_type = other DNA
cgggtgttgctgggtgagaataaagtatgtggcctgacacgtgggcaagatgctaaagcagcttatgacgcgggc

SEQ ID NO: 451047 - DNA, 75 bp, synthetic construct
  source 1..75: mol_type = other DNA
agacaaacagggcgctttattacttgagcaggatggaataataaaaccctggatgggcggtgaaatatccctgcg

SEQ ID NO: 451048 - DNA, 75 bp, synthetic construct
  source 1..75: mol_type = other DNA
gtaccttcttgatcgtatcggagagcttaaatcgggcgatgcctgcgttgcagaataccagcaggctggccgtgg

SEQ ID NO: 451049 - DNA, 75 bp, synthetic construct
  source 1..75: mol_type = other DNA
ggtgctggcggccatttttggttacgtctggccgccggtacagcacgctatccatgcaggcggcgagtggatcgt

SEQ ID NO: 451050 - DNA, 75 bp, synthetic construct
  source 1..75: mol_type = other DNA
cgatatcgccgacagtacccagcgcattggcaccattacttcgctgattaacgatattgcgtttcagaccaatat

SEQ ID NO: 451051 - DNA, 75 bp, synthetic construct
  source 1..75: mol_type = other DNA
ggtgctcggtctgttactgttcttccagcaaatgcttggtcagggcatctccgggattttaccgaaactgattgg

SEQ ID NO: 451052 - DNA, 75 bp, synthetic construct
  source 1..75: mol_type = other DNA
cggtatttgcgattggcggcgcaaacgtctgggtgctcggtctgttactgttcttccagcaaatgcttggacaag

SEQ ID NO: 451053 - DNA, 75 bp, synthetic construct
  source 1..75: mol_type = other DNA
gttctttagtggctttggcgcggcggtgggatgctgcgtcggtggcttcctcggtgactggctgggaacccgcaa

SEQ ID NO: 451054 - DNA, 75 bp, synthetic construct
  source 1..75: mol_type = other DNA
gacgaagtgatcctcgggcaggtgctagcggctggtgtcggacagaatccggcgcgccaggcggcgatcgccgca

SEQ ID NO: 451055 - DNA, 75 bp, synthetic construct
  source 1..75: mol_type = other DNA
tcccggttacgccacatacgttccgccattcctatgcgatgcatatgctgtatgcaggtataccgctgaaggtcc

SEQ ID NO: 451056 - DNA, 75 bp, synthetic construct
  source 1..75: mol_type = other DNA
tagaaaaacgctttggcgatagaccgggatggcccatccagtggctgaccgataacggttcggcttatacaactc

SEQ ID NO: 451057 - DNA, 75 bp, synthetic construct
  source 1..75: mol_type = other DNA
ctgcagagtctgatggggcataagtccatcagctcaacggaggtctacacgaaggtgtttgcactggatgtggct

SEQ ID NO: 451058 - DNA, 75 bp, synthetic construct
  source 1..75: mol_type = other DNA
taaactttctatcaccgccagtaatgcggcagtgcagggcggggaggcgatgactacggtgatcaagacaatgga

SEQ ID NO: 451059 - DNA, 75 bp, synthetic construct
  source 1..75: mol_type = other DNA
cattcaacgctggaacaggctgatgggctttccagcctgacccgtgcggtagatgagcttaacctgatcacccag

SEQ ID NO: 451060 - DNA, 75 bp, synthetic construct
  source 1..75: mol_type = other DNA
cgcccgctgctgctgacggtgtgacgttctctgttccggtcacaccacatacgttccgccattcctatgcgatgc

SEQ ID NO: 451061 - DNA, 75 bp, synthetic construct
  source 1..75: mol_type = other DNA
catacgttccgccattcctatgcgatgcacatgctgtatgccggtataccgctgaaagttctgcaaagcctgatg

SEQ ID NO: 451062 - DNA, 75 bp, synthetic construct
  source 1..75: mol_type = other DNA
tgctgctgacggtgtgacgttctctgttccggtcacaccacatacgttccgccattcctatgcgatgcacatgct

SEQ ID NO: 451063 - DNA, 75 bp, synthetic construct
  source 1..75: mol_type = other DNA
cgttacggacacctatcggctgctttcgtggtgcgttagcgggtcattccgccgtggaacttggtagtctggtcg

SEQ ID NO: 451064 - DNA, 75 bp, synthetic construct
  source 1..75: mol_type = other DNA
tgaaagcattattagagcgcaccggcgttgctgcacatgcggtggatgaagtgattcttggacaggttctgactg

SEQ ID NO: 451065 - DNA, 75 bp, synthetic construct
  source 1..75: mol_type = other DNA
catttgatagtctcggttctgtgacagcgggtaatgcatcatccataaacgatggcgcagctgcggctttgttga

SEQ ID NO: 451066 - DNA, 75 bp, synthetic construct
  source 1..75: mol_type = other DNA
gcaggtggtgcttcaggatgggcgtttgttcggtagccctatcgacatccttaaccgtgcagctcccgttgcgtt

SEQ ID NO: 451067 - DNA, 75 bp, synthetic construct
  source 1..75: mol_type = other DNA
cagatcgtcacgtttaactcgccggatctctcatggtttggcagtggatcgctgttgttcctgccaacgccggtc

SEQ ID NO: 451068 - DNA, 75 bp, synthetic construct
  source 1..75: mol_type = other DNA
acgcaatgcacgcaaagggttggctacactctgcattggcggtggtcagggggtggcattaacgatagaacgcga

SEQ ID NO: 451069 - DNA, 75 bp, synthetic construct
  source 1..75: mol_type = other DNA
cctgttccgtggccctcagccacaccaccaacgggctggctgaaatgtaacggtgcagcattttcttctgaaatg

SEQ ID NO: 451070 - DNA, 75 bp, synthetic construct
  source 1..75: mol_type = other DNA
cctgttccgtggccctcagccacaccaccaaccgggtggctgaaatgtaacggtgcagcattttcttctgaaatg

SEQ ID NO: 451071 - DNA, 75 bp, synthetic construct
  source 1..75: mol_type = other DNA
gtttgtgcgcccggcatttgatgtgcgcagtgaacaggcggcacaggtggtgattgcgcggatgaaccgggccat

SEQ ID NO: 451072 - DNA, 75 bp, synthetic construct
  source 1..75: mol_type = other DNA
ttgtcaaaaaccttggtttaggggaagggtctgctttgccggttggcgtccccattccgtggccgtcagcaacgc

SEQ ID NO: 451073 - DNA, 75 bp, synthetic construct
  source 1..75: mol_type = other DNA
cctgttccgtggccctcagccacaccgccaactggttggctgaaatgtaacggtgcagcattttcttctgaaatg

SEQ ID NO: 451074 - DNA, 75 bp, synthetic construct
  source 1..75: mol_type = other DNA
cctgttccgtggccctcagccacacctccaactggatggctgaaatgtaacggtgcagcattttcttctgaaatg

SEQ ID NO: 451075 - DNA, 75 bp, synthetic construct
  source 1..75: mol_type = other DNA
attctggtggcaatcctcaaaattcagccgtttgtcgccactctgatcctgatggttgccgggcgcggcgtggcg

SEQ ID NO: 451076 - DNA, 75 bp, synthetic construct
  source 1..75: mol_type = other DNA
acgggccggaaattgttaacggcccggcaaatgtgaccagccggaaaaataccgctgcactggctgccgttgttg

SEQ ID NO: 451077 - DNA, 75 bp, synthetic construct
  source 1..75: mol_type = other DNA
cgcggctgaagcgactgggggaagctcagcgcaggatgaatgcagcacgtgccagttatgcccgttcgctggagg

SEQ ID NO: 451078 - DNA, 75 bp, synthetic construct
  source 1..75: mol_type = other DNA
gccagcagagcttccaccgttgcatcctttggcgcttcccgcgaaaggcggtgaagcgatggtgagtcgcgcagc

SEQ ID NO: 451079 - DNA, 75 bp, synthetic construct
  source 1..75: mol_type = other DNA
agcaacctgcgacggtgaatgcagacggtaaagtgatgatcccatcgggtggttttccgtcatggggatatggct

SEQ ID NO: 451080 - DNA, 75 bp, synthetic construct
  source 1..75: mol_type = other DNA
cgctttacgtgctgttgctgtgatgtttatgaatcctctggcggtactgcgcggtggactggtcggcgcaggcac

SEQ ID NO: 451081 - DNA, 75 bp, synthetic construct
  source 1..75: mol_type = other DNA
aataaagcagcttgatcaggccgggagcagtctggacagcttccgaaagctgcaggcagaaaatcagaaattagg

SEQ ID NO: 451082 - DNA, 75 bp, synthetic construct
  source 1..75: mol_type = other DNA
aaaacaggcgaaagaactggagcaggctaaacgccgtgccagccagctaaaagatacctttgacgggctgcgtca

SEQ ID NO: 451083 - DNA, 75 bp, synthetic construct
  source 1..75: mol_type = other DNA
cggtatgctgggtgcgctgctcagtccgatagggctggttgtggctgcgctggctggtgtggcgctggttgtgtg

SEQ ID NO: 451084 - DNA, 75 bp, synthetic construct
  source 1..75: mol_type = other DNA
gcggcatactccaggagtcttgaggtaagggatcgcattgcaggagccggggccaccaccacggcagcggggctg

SEQ ID NO: 451085 - DNA, 75 bp, synthetic construct
  source 1..75: mol_type = other DNA
ggcaccatcccgcgcggtcagtttggcatcgttggggagaatgggccggaaattgtaaacggcccggcaaatata

SEQ ID NO: 451086 - DNA, 75 bp, synthetic construct
  source 1..75: mol_type = other DNA
gctcaatattccagaagtctggaagtgcgggatcgcattgccggggcaggcgcgagcactaccaccgccggggtg

SEQ ID NO: 451087 - DNA, 75 bp, synthetic construct
  source 1..75: mol_type = other DNA
gctggcggttaaggctttaccttctaccgcagctgcagtgacccgtacgggcggggtgctgcgtttgttggtttc

SEQ ID NO: 451088 - DNA, 75 bp, synthetic construct
  source 1..75: mol_type = other DNA
gaaaataaccgggtgctgcgtgaggcaacccgtgcgggtgcgaatgtgctgaaagaagaagtggtgtcacgggca

SEQ ID NO: 451089 - DNA, 75 bp, synthetic construct
  source 1..75: mol_type = other DNA
gatgaacggttacatccagtatgaccttgccgaaggcatcacctggatgaacggtctggaaatcaccgacggcac

SEQ ID NO: 451090 - DNA, 75 bp, synthetic construct
  source 1..75: mol_type = other DNA
gtgggattaaccgtttctatggcggttatcgtaccaatgatggcaccgaaatcatgctcagtctgcgtcaggatt

SEQ ID NO: 451091 - DNA, 75 bp, synthetic construct
  source 1..75: mol_type = other DNA
cactacgacgcgccgcgtccagttcttcgctgaaatcgacaccatctacggaataacgacagtaaccagcgaggc

SEQ ID NO: 451092 - DNA, 75 bp, synthetic construct
  source 1..75: mol_type = other DNA
gagcattacttgctctgccattttgctacgctttttctgcgattggcgaagagattcgcccagcagaacatgacg

SEQ ID NO: 451093 - DNA, 75 bp, synthetic construct
  source 1..75: mol_type = other DNA
cgtttcgcaacggcttttgatagccgcttctacatgaaaaatgcctctcacgatcccagcgaccaaatcttcctg

SEQ ID NO: 451094 - DNA, 75 bp, synthetic construct
  source 1..75: mol_type = other DNA
cgaaagcaaagcctggctacattttggcaaatacgatcgctacgacgacaaatacacctatccggcaatgatgaa

SEQ ID NO: 451095 - DNA, 75 bp, synthetic construct
  source 1..75: mol_type = other DNA
aagctgaactggcaacgctcgaatttttaaaacagtgggtgcctgcgggaaaatcgccgatttgcggtaacagca

SEQ ID NO: 451096 - DNA, 75 bp, synthetic construct
  source 1..75: mol_type = other DNA
tatactgggattcgccctggtgaactctgtgcgcttggatgggaagatatagatctgaaaaatggaacaatgata

SEQ ID NO: 451097 - DNA, 75 bp, synthetic construct
  source 1..75: mol_type = other DNA
gaatacaagcagacatggaaaacactggatgacgaactggcctacgctctctggcctggtaatgtggatgccgga

SEQ ID NO: 451098 - DNA, 75 bp, synthetic construct
  source 1..75: mol_type = other DNA
gggactccgtggatccagtccgtactcggtaagcagaagccggaaacctacaacctggcgatccgtaagcgcatc

SEQ ID NO: 451099 - DNA, 75 bp, synthetic construct
  source 1..75: mol_type = other DNA
cggaacaactcgccgcgtcacgttcacgtccaccataaacaccatttacggacaaaccacagtaaccagcgaggc

SEQ ID NO: 451100 - DNA, 75 bp, synthetic construct
  source 1..75: mol_type = other DNA
aaagcgagcacgatgggcgatcgggaagctgaactggcaacgctcgaatttttaaaacagtgggtgcctgcgggt

SEQ ID NO: 451101 - DNA, 75 bp, synthetic construct
  source 1..75: mol_type = other DNA
acgggcctgctaactcctaactttgccgctcgcgcctggcaccataccggacgcgccgacgggctggacgtaccg

SEQ ID NO: 451102 - DNA, 75 bp, synthetic construct
  source 1..75: mol_type = other DNA
caggattattacggcgtggtgccggatcttacctgcctgggcaaaatcatcggcggtgggatgccagtaggcgca

SEQ ID NO: 451103 - DNA, 75 bp, synthetic construct
  source 1..75: mol_type = other DNA
gctttggtgcaccaaccgaaatggaagtgaaaatggcgcaactggtgaccgaactggtcccgaccatggatatgg

SEQ ID NO: 451104 - DNA, 75 bp, synthetic construct
  source 1..75: mol_type = other DNA
cgttccggcagatttcgccaaacataccttaacctgtacctataacgatctggcgtctgtacgcgccgcgtttga

SEQ ID NO: 451105 - DNA, 75 bp, synthetic construct
  source 1..75: mol_type = other DNA
ggcggtttgtggaaatggggaccgtgaatatgccaccgcacccgtttgtgcgcccggcgtttgatgtgcgcagtg

SEQ ID NO: 451106 - DNA, 75 bp, synthetic construct
  source 1..75: mol_type = other DNA
ggttttatgtctgtggcgcacagcatggaagatatcaataacaccatcgatgctgcacgtcgggtgtttgcgaag

SEQ ID NO: 451107 - DNA, 75 bp, synthetic construct
  source 1..75: mol_type = other DNA
ttaccgacgccgagtccgtgacgtgctatcaggatgtgatggcctgtgacgtggaacgttttaagcgtttcttcc

SEQ ID NO: 451108 - DNA, 75 bp, synthetic construct
  source 1..75: mol_type = other DNA
aataaggtactgcgcgatgccacccgtgccggtgctgaagttatgcgggatgcagttgttgaacgtgcgccggag

SEQ ID NO: 451109 - DNA, 75 bp, synthetic construct
  source 1..75: mol_type = other DNA
aataaccgggtgctgcgtgaggcaacccgtgcgggtgcgaatgtgctgaaagaagaagtggtgtcacgggcaccg

SEQ ID NO: 451110 - DNA, 75 bp, synthetic construct
  source 1..75: mol_type = other DNA
tctccttcatttcgtttttacggcgaattaggggttggtgggtatatggatttagagggtgagaataaacataaa

SEQ ID NO: 451111 - DNA, 75 bp, synthetic construct
  source 1..75: mol_type = other DNA
gcgcagcgcgcgagctgatccctggcggtgtgaactctcctgttcgcgcctttaccggcgtgggcggtactccac

SEQ ID NO: 451112 - DNA, 75 bp, synthetic construct
  source 1..75: mol_type = other DNA
gtccatatccgtggtgttaatccggacaccggtaacagcgataacaccatgaaggcggataacccgcgcaatgct

SEQ ID NO: 451113 - DNA, 75 bp, synthetic construct
  source 1..75: mol_type = other DNA
agaagaagtggtgtcacgggcaccggtacgcaggggaaaactgcgccgcaatgtggtggtcctttcccggtgctc

SEQ ID NO: 451114 - DNA, 75 bp, synthetic construct
  source 1..75: mol_type = other DNA
gcagctttgtcttcccggaaaaagaactcccagaccctatgccaagcgcgttcgacacgctgaagggtgagcctg

SEQ ID NO: 451115 - DNA, 75 bp, synthetic construct
  source 1..75: mol_type = other DNA
ataaggtgctgggcgttatccctctggtatcaacaacagcttatggtggtgtatccagtaatattacaggttcat

SEQ ID NO: 451116 - DNA, 75 bp, synthetic construct
  source 1..75: mol_type = other DNA
aataacaccacgcaggttgcgaccaccgcgtttgttcaggcggcactgacggctcttattaatggtgcgccagcc

SEQ ID NO: 451117 - DNA, 75 bp, synthetic construct
  source 1..75: mol_type = other DNA
atgaaacattcaattattgctgccgctgtcttttcttcttttttcatgagtgctggcgtatttgctgcagacgtt

SEQ ID NO: 451118 - DNA, 75 bp, synthetic construct
  source 1..75: mol_type = other DNA
atctggctacaatgccgcgatgaatgtgcgtattgccagcagaacgcatatcagtattcagaactggtcgccatc

SEQ ID NO: 451119 - DNA, 75 bp, synthetic construct
  source 1..75: mol_type = other DNA
cctcatacccagtatgcacagaaacataatccgacatttaccggagaaccaaaagcgccgacacctcccgcagga

SEQ ID NO: 451120 - DNA, 75 bp, synthetic construct
  source 1..75: mol_type = other DNA
aggttatacctatcagttgatttccggccctgaagtctttgtacagcgtggtgaatctgaatctgtatcactatc

SEQ ID NO: 451121 - DNA, 75 bp, synthetic construct
  source 1..75: mol_type = other DNA
gcgggacacgcaattaactttcatgatggcatcgccggaaatcagccaggattttcacgatttaatttcaccagt

SEQ ID NO: 451122 - DNA, 75 bp, synthetic construct
  source 1..75: mol_type = other DNA
gctataagccgcaactggctgaaggcagtgggcgcacccagaccgtgcgcatggtgctgataaccagcagcacgg

SEQ ID NO: 451123 - DNA, 75 bp, synthetic construct
  source 1..75: mol_type = other DNA
aacattcaaaacgttattcaaatgctaaaggaataaatataaatgagtttttgattgatggtgtagcttttacac

SEQ ID NO: 451124 - DNA, 75 bp, synthetic construct
  source 1..75: mol_type = other DNA
gaaaaaaatactctgaagcaaatggcttcaatttaaaggattttttaatagcaggtgtggcatttactcctatga

SEQ ID NO: 451125 - DNA, 75 bp, synthetic construct
  source 1..75: mol_type = other DNA
gacttaaagatctttacgaagtatgtgggcaggcacagagatgcattcgttggaagcacctgaatctttcctatt

SEQ ID NO: 451126 - DNA, 75 bp, synthetic construct
  source 1..75: mol_type = other DNA
cagtcggtgtaaccagcagcatgttaaaaattagctgcccgaaagaagttgctggtgtaaaactctcgttgatta

SEQ ID NO: 451127 - DNA, 75 bp, synthetic construct
  source 1..75: mol_type = other DNA
ttacaggctggtttggtgcgcacgccacagtggtggctaaacctccgtttgttaaattttctgcgccggaaatag

SEQ ID NO: 451128 - DNA, 75 bp, synthetic construct
  source 1..75: mol_type = other DNA
gcgatactgattctggcactgacgtatcaagaacgcgattcactgtgacgtatacgacacccaatctcggcgaaa

SEQ ID NO: 451129 - DNA, 75 bp, synthetic construct
  source 1..75: mol_type = other DNA
ctgcgtttgtacaggccgctattaccgctctgattaacggtgcccctgacacgctggacacactgaaagaaattg

SEQ ID NO: 451130 - DNA, 75 bp, synthetic construct
  source 1..75: mol_type = other DNA
gcagccatgtttgatagcgccatgtcatttgcgctaatccgtggcggtcatattgatgcctgcgtgctcggcggt

SEQ ID NO: 451131 - DNA, 75 bp, synthetic construct
  source 1..75: mol_type = other DNA
agccaccgtgcgtgccaaaacagaagctcggtttgaagtagctgccgatctgaatacgcaacggggtgatttatg

SEQ ID NO: 451132 - DNA, 75 bp, synthetic construct
  source 1..75: mol_type = other DNA
acagtaaacgaatggatagaacaaatcatgtcagttccggcgccggtgatggtagcccgcgaaacattgcattta

SEQ ID NO: 451133 - DNA, 75 bp, synthetic construct
  source 1..75: mol_type = other DNA
gacctggtctttttcaaaacgggctccggacaaaatggtttgcatgtaggtatttacgataccaacaaccaattt

SEQ ID NO: 451134 - DNA, 75 bp, synthetic construct
  source 1..75: mol_type = other DNA
ttgcagctgccccgagaaaccaaagaacaagcctctatcggcacgcaaattgataaagacgagttgctgcctggt

SEQ ID NO: 451135 - DNA, 75 bp, synthetic construct
  source 1..75: mol_type = other DNA
atgaaacgttcaattattgctgccgctgtcttttcttcttttatgagcgctggagtatttgctgcagacgttgat

SEQ ID NO: 451136 - DNA, 75 bp, synthetic construct
  source 1..75: mol_type = other DNA
taactttcccccggtcgtttacaacaacgaactattccatctcaattaactggaatgatatcggtactgtaacaa

SEQ ID NO: 451137 - DNA, 75 bp, synthetic construct
  source 1..75: mol_type = other DNA
tatctccagatcaggcgaagttttttcgtagtggtaattatgagaaagttgaggcaggtcggtgcaattcagcaa

SEQ ID NO: 451138 - DNA, 75 bp, synthetic construct
  source 1..75: mol_type = other DNA
ggatgttgccggtcttctcgcataccttggtttgggagaaggtgctccagctgttgtggtcccgttcgtttatcc

SEQ ID NO: 451139 - DNA, 75 bp, synthetic construct
  source 1..75: mol_type = other DNA
aacaaagaggataaccgggtatataaatgcacgctctgcgtcgatcgcgtcagcgtcggccaggaaccggcttgt

SEQ ID NO: 451140 - DNA, 75 bp, synthetic construct
  source 1..75: mol_type = other DNA
gctataagccgcaactggctgaaggcagcggacgtacccagaccgtgcgcatggtgctgataaccagcagcacgg

SEQ ID NO: 451141 - DNA, 75 bp, synthetic construct
  source 1..75: mol_type = other DNA
tgtggctggtcttctcgcataccttggtttaggagaagcggcgaaaagggatgtgggcacaggagataatcagat

SEQ ID NO: 451142 - DNA, 75 bp, synthetic construct
  source 1..75: mol_type = other DNA
tatgtggatgataaggcactggagctgaaggtgtacgtggatgacctgatggcaaaacatcttgccgcaccggac

SEQ ID NO: 451143 - DNA, 75 bp, synthetic construct
  source 1..75: mol_type = other DNA
ctggtcgttctgactatccaaaccaggtcaacaacgtgctttgcttcccgttcattttccgtggcgcgctggacg

SEQ ID NO: 451144 - DNA, 75 bp, synthetic construct
  source 1..75: mol_type = other DNA
tgggtctgcaaaaacataacatcgtggtttgcgattcaaaaggcgttatctatcagggccgtgagccaaacatgg

SEQ ID NO: 451145 - DNA, 75 bp, synthetic construct
  source 1..75: mol_type = other DNA
ggtggatgacggcaaacgtaccctcgatgatgtgattgaaggcgcggatattttcctcggctgttccggcccgaa

SEQ ID NO: 451146 - DNA, 75 bp, synthetic construct
  source 1..75: mol_type = other DNA
cgctgactaatttgagtggaaaggatgtcgctggtcttctctcagcttctggtttttttttttgttcggcattac

SEQ ID NO: 451147 - DNA, 75 bp, synthetic construct
  source 1..75: mol_type = other DNA
cgggcaattggtgaaatgtatgtcgttcctgccgatactcgcccacggaatattgcatttaactatatcgtgagg

SEQ ID NO: 451148 - DNA, 75 bp, synthetic construct
  source 1..75: mol_type = other DNA
aaaggcttacccgacaaataaattgcctgatttacgtggtgagtttatgcgtggctgggatgatggaagaggcat

SEQ ID NO: 451149 - DNA, 75 bp, synthetic construct
  source 1..75: mol_type = other DNA
ctggcactgaaagcgccgctgtcaagtccggaactcaccggaacgccaacagcccccactgccgcacagtcggtt

SEQ ID NO: 451150 - DNA, 75 bp, synthetic construct
  source 1..75: mol_type = other DNA
ggcaggaagctacaaacttttctcagtttgccgggaatataggcggaggtgcgggacacgcaattaactttcatg

SEQ ID NO: 451151 - DNA, 75 bp, synthetic construct
  source 1..75: mol_type = other DNA
tgaagttcaacggcgcgaaattctctgccactgattaccctgtgctggcgaaagtgtttccggcgctagcattac

SEQ ID NO: 451152 - DNA, 75 bp, synthetic construct
  source 1..75: mol_type = other DNA
gaagaggcacgcgttctgcatgctactcaggaactggtgactctgggactggcgaaacctatccttatcggtcgt

SEQ ID NO: 451153 - DNA, 75 bp, synthetic construct
  source 1..75: mol_type = other DNA
cctcatacccagtatgcacagaaacataatccgacatttaccggagaaccaaaggcgccgacgcctgccgcagga

SEQ ID NO: 451154 - DNA, 75 bp, synthetic construct
  source 1..75: mol_type = other DNA
aaaaaccgcagtatccacaggcccaataggtattaattcctggggagtgtccgaactaacaaaaacagaattaaa

SEQ ID NO: 451155 - DNA, 75 bp, synthetic construct
  source 1..75: mol_type = other DNA
aacgtacctgaccggctttcgggcgcagtcgggcgtggtcaatgccattgtgtctgaggctattcgcctcactgc

SEQ ID NO: 451156 - DNA, 75 bp, synthetic construct
  source 1..75: mol_type = other DNA
acaatatcatcctgaaaatcgaccctgctgtagtgctggcaacccgtaaatacgtggatgataaagtcctggaat

SEQ ID NO: 451157 - DNA, 75 bp, synthetic construct
  source 1..75: mol_type = other DNA
cagtgggcgtacccagaccgtgcgcatggtgctgattaccagcagcacggacaatatcaccctgaaaatcgaccc

SEQ ID NO: 451158 - DNA, 75 bp, synthetic construct
  source 1..75: mol_type = other DNA
ccgctgccattaataatgacccgaaattcagtaccaccattaacaatgcgctggcactgaaagcgtcgctgtcaa

SEQ ID NO: 451159 - DNA, 75 bp, synthetic construct
  source 1..75: mol_type = other DNA
gtttgcagtacgcaattctaaaacaggtgttccgctaataaactcagcaattactctccaatattttgttaaggg

SEQ ID NO: 451160 - DNA, 75 bp, synthetic construct
  source 1..75: mol_type = other DNA
atttagtaccaccattaacaatgcgctggcactgaaagcgcctctgtcgagtccggcactcaccggaacgccaac

SEQ ID NO: 451161 - DNA, 75 bp, synthetic construct
  source 1..75: mol_type = other DNA
cctgtatgacagcgacggcgacatgatagccgtggcgaactgcgctgaaacctataagccgttattgcaggaagg

SEQ ID NO: 451162 - DNA, 75 bp, synthetic construct
  source 1..75: mol_type = other DNA
ccagcccgacatttaccggaacccccaaagcgccaacgccagcggcagggaataacaccacgcaggttgcgacca

SEQ ID NO: 451163 - DNA, 75 bp, synthetic construct
  source 1..75: mol_type = other DNA
tatgtggatgacaaggtactggagctgaaagtgtacgtggatgacctgatggcaaaacatcttgccgcacaggac

SEQ ID NO: 451164 - DNA, 75 bp, synthetic construct
  source 1..75: mol_type = other DNA
cgcttaccaatttgagtggaaaggatgtagctggtcttctcacataccttggaataggagaaacgggaaaatacg

SEQ ID NO: 451165 - DNA, 75 bp, synthetic construct
  source 1..75: mol_type = other DNA
ttgatacccgtcatcagttttcttcgccggtcaaaggtgtaacgacagaagtggttgttgcaggtagtgatagca

SEQ ID NO: 451166 - DNA, 75 bp, synthetic construct
  source 1..75: mol_type = other DNA
gccctgatggctgacagcatcatcccggcaccaaagcgccataccggtattgcagctgcacgacgcgaagcaaag

SEQ ID NO: 451167 - DNA, 75 bp, synthetic construct
  source 1..75: mol_type = other DNA
gtcctgatggctgacagcatcatcccggcacagaaacgccgtacaggcactgcagcggcacgacgagcagcaaag

SEQ ID NO: 451168 - DNA, 75 bp, synthetic construct
  source 1..75: mol_type = other DNA
gtgcgccagctcaggcggctaaacagcaagcggctccggcagcaggcccctgcatcagcggctggcgtgaaagaa

SEQ ID NO: 451169 - DNA, 75 bp, synthetic construct
  source 1..75: mol_type = other DNA
caattctgcgatgttggcggtgtgtggccggtggcgattggtcacccgtgctatggctgtaacgaagaaggtatc

SEQ ID NO: 451170 - DNA, 75 bp, synthetic construct
  source 1..75: mol_type = other DNA
accacctcgctgtaaagggccagaaacttacggcaactgctcaacgctgcaattctgcgatgttggcggcgtgtg

SEQ ID NO: 451171 - DNA, 75 bp, synthetic construct
  source 1..75: mol_type = other DNA
gctctagaaaagcttatcgttaaaaaacaagccattaaaaccgctactatgcagcgactactgactggtaaaacc

SEQ ID NO: 451172 - DNA, 75 bp, synthetic construct
  source 1..75: mol_type = other DNA
actcaacttccttttaaagaagttaaaagtggttttacttactttgaaaaaggggatgttttattagctaaaata

SEQ ID NO: 451173 - DNA, 75 bp, synthetic construct
  source 1..75: mol_type = other DNA
tagtcacaagcattggacaatttactgactgctgtgctggtggaactccgagtactaaaatttcagcatattggg

SEQ ID NO: 451174 - DNA, 75 bp, synthetic construct
  source 1..75: mol_type = other DNA
tgttcccggcatggatatggacaggctgtagcagaaaaatgcggttattcaagctggtcctactttatttctgta

SEQ ID NO: 451175 - DNA, 75 bp, synthetic construct
  source 1..75: mol_type = other DNA
attcctcttataggctggattttcagtagcaaggcagacagcaatgaacagcgtattatgtatattttgcttaca

SEQ ID NO: 451176 - DNA, 75 bp, synthetic construct
  source 1..75: mol_type = other DNA
gatggcctgcctgtcgctgtttgaatcagatgaacggatgtcattatttttaagtggatgtgtatccagtataag

SEQ ID NO: 451177 - DNA, 75 bp, synthetic construct
  source 1..75: mol_type = other DNA
gcgcgccagctcaggcggctaaacagcaagcggctccggcagcaggcccttgcatcagcggctggcgtgaaagaa

SEQ ID NO: 451178 - DNA, 75 bp, synthetic construct
  source 1..75: mol_type = other DNA
aaaatgggcagaaagaagaggagaaacattttgatgagcaaggccaattaaatggtctggttaagcaatggtata

SEQ ID NO: 451179 - DNA, 75 bp, synthetic construct
  source 1..75: mol_type = other DNA
atgccgacaaattaaaaaaattagaaactccttttcttgatgatcgctatttctttatgaccatcaatcagtgtg

SEQ ID NO: 451180 - DNA, 75 bp, synthetic construct
  source 1..75: mol_type = other DNA
tggccgatgttcgctggcatagcggtactgaaaaagcattctcgctagcgcgccttgcgggggtgacaacgcttt

SEQ ID NO: 451181 - DNA, 75 bp, synthetic construct
  source 1..75: mol_type = other DNA
ggccgcaggcgtggcatggggcgaagcggatatcaccgcgatcaaacgtctttccgatatgggcttcaaagtcac

SEQ ID NO: 451182 - DNA, 75 bp, synthetic construct
  source 1..75: mol_type = other DNA
cgattcatgtgtttatcgctggtcgcagcatccgtgatgccgcttctccggtggaagccgcacgtcagttcaaac

SEQ ID NO: 451183 - DNA, 75 bp, synthetic construct
  source 1..75: mol_type = other DNA
gttatcaatacatgctcaatgccatgtggatttcggcaatggtcggaggaatatgtgcttttttatcctgttatc

SEQ ID NO: 451184 - DNA, 75 bp, synthetic construct
  source 1..75: mol_type = other DNA
cctggcagcagggctatttgcagatcaaccatcacgccaaaattgtcaaagatgcgggggctgtggtcacgcttg

SEQ ID NO: 451185 - DNA, 75 bp, synthetic construct
  source 1..75: mol_type = other DNA
ggttcgttgttgacctttgccgaacataaaggctacgcccttgcagcgatgtgtgaaattcttggcggggcgctt

SEQ ID NO: 451186 - DNA, 75 bp, synthetic construct
  source 1..75: mol_type = other DNA
gggcgccagctcaggcggctaaacagtaagcggctccggcagcaggcccgtgcatcagcggctggcgtgaaagaa

SEQ ID NO: 451187 - DNA, 75 bp, synthetic construct
  source 1..75: mol_type = other DNA
ccgctgttgctcgattacgccaccagcgccatcgcatttggtaaaactcgcgtcgcctggcataaaggcgtcccc

SEQ ID NO: 451188 - DNA, 75 bp, synthetic construct
  source 1..75: mol_type = other DNA
cggggtttgtctctgttcactttgtgagcgtagtggggattccgatggtggcaccgttccatggtcgcgatcgtc

SEQ ID NO: 451189 - DNA, 75 bp, synthetic construct
  source 1..75: mol_type = other DNA
cccggacgctgcacaactttgttctgactgtgtttcgtcagatgggtagcgaggaacaggaagcaaaattagtag

SEQ ID NO: 451190 - DNA, 75 bp, synthetic construct
  source 1..75: mol_type = other DNA
caacagcgtctggacaaaacccgccagcttaagcaagggatgatgcaggaactgttaaccgggaaaatccgctta

SEQ ID NO: 451191 - DNA, 75 bp, synthetic construct
  source 1..75: mol_type = other DNA
ccgtgaaaaactgcgtcatatcttcctgcttggtggctgtgacggcgcacgcggcgagcgccactacttcaccga

SEQ ID NO: 451192 - DNA, 75 bp, synthetic construct
  source 1..75: mol_type = other DNA
cctgcgcatggctacccggagctgcgtaaattcaagcatctggtcggtaactacggcagcggctggcagaatcag

SEQ ID NO: 451193 - DNA, 75 bp, synthetic construct
  source 1..75: mol_type = other DNA
agatgaacttcaaagtgatgagcattctggatgcaggcgaaaccggtaaatacggtcacccgacgccaacccagg

SEQ ID NO: 451194 - DNA, 75 bp, synthetic construct
  source 1..75: mol_type = other DNA
ccacctactctgatcatactatctggcaggatgtttacagacccaggcttgttacaggccaggtttatcttaaaa

SEQ ID NO: 451195 - DNA, 75 bp, synthetic construct
  source 1..75: mol_type = other DNA
tgatctggcagcctgagttcacagataaaacactctccaggaaacccggggcggttcagttcagttcgcggacgt

SEQ ID NO: 451196 - DNA, 75 bp, synthetic construct
  source 1..75: mol_type = other DNA
tggcagcctgagttcacagataaaacactctccaggaaacccggggcggttcactatacaggctctgaatcatct

SEQ ID NO: 451197 - DNA, 75 bp, synthetic construct
  source 1..75: mol_type = other DNA
tcggcgatggcggcggagtattgccaacgccagacgcaaagcagactgcactggtaaatgagaaacgccgggctg

SEQ ID NO: 451198 - DNA, 75 bp, synthetic construct
  source 1..75: mol_type = other DNA
cgtacaaaccgcagttgcaggaaggcagtggtcgtacccagactatccgcatgattctggttgtcacgaataccg

SEQ ID NO: 451199 - DNA, 75 bp, synthetic construct
  source 1..75: mol_type = other DNA
gaacaaccagagccagattattgcggagcaaatcatccctgagaacgagggcggattctggatccgtgagattgg

SEQ ID NO: 451200 - DNA, 75 bp, synthetic construct
  source 1..75: mol_type = other DNA
atgaaaaatatattaattggtttcgtttttggtgcagcctgcgccgccagcattagcgtcatcgccgctcagatt

SEQ ID NO: 451201 - DNA, 75 bp, synthetic construct
  source 1..75: mol_type = other DNA
cataacaatgctctaaatgatcttagaaaaaaatcaaattactcagagttaattaataaaatgatgaatggattg

SEQ ID NO: 451202 - DNA, 75 bp, synthetic construct
  source 1..75: mol_type = other DNA
ccgcattcacagtatgcacccaaagaaagtccgacgtttaccggaacccccaaagcgccaacgccagcagcaggg

SEQ ID NO: 451203 - DNA, 75 bp, synthetic construct
  source 1..75: mol_type = other DNA
ccggtgtttttagcgatgcctactacgttgatttgctcattcgtgaaaacttgaattcactggacaaaacgtaca

SEQ ID NO: 451204 - DNA, 75 bp, synthetic construct
  source 1..75: mol_type = other DNA
tttgccctgcgtgtgcctcgatcatttattgaacgcatggagaaaggtaatcctgatgaccctcttttgcgtcag

SEQ ID NO: 451205 - DNA, 75 bp, synthetic construct
  source 1..75: mol_type = other DNA
gattcacagccgtctgccgattgtgatcccggcacgcatcacagatgcgctggttgaacacttttcacattctac

SEQ ID NO: 451206 - DNA, 75 bp, synthetic construct
  source 1..75: mol_type = other DNA
tcactgcacccggtttttccaccgacccgctggaagaacagcacagcgtggtgcctggtttgttgcataaatacc

SEQ ID NO: 451207 - DNA, 75 bp, synthetic construct
  source 1..75: mol_type = other DNA
gcttatgatgataacgtcttcgtcagcatagaaccacctgagcgcacaattgtgaaagaaggtgatatcttggta

SEQ ID NO: 451208 - DNA, 75 bp, synthetic construct
  source 1..75: mol_type = other DNA
caacgaatgatgaaagcatctttgaaatacctttcaccaaaactagagccaaaagcgacaacgttgtcgctttta

SEQ ID NO: 451209 - DNA, 75 bp, synthetic construct
  source 1..75: mol_type = other DNA
tggcacagagcgctgaggccatgctggaagcaggtaaacgacttattattctcaaagaaaatgaacctcacgggg

SEQ ID NO: 451210 - DNA, 75 bp, synthetic construct
  source 1..75: mol_type = other DNA
tgaaggcgtgtccgtctgccggtgcaatcattcagtacgctaacggcattgtcgattttcagtcggaaaactgca

SEQ ID NO: 451211 - DNA, 75 bp, synthetic construct
  source 1..75: mol_type = other DNA
caggctgcggctattgatattgcccttccagcaagaaacagcgatggtacacaagatttgcagtttgccattgat

SEQ ID NO: 451212 - DNA, 75 bp, synthetic construct
  source 1..75: mol_type = other DNA
tgctggcactggggctgtttatggccggtagtgccatagcatctcccgatgtactgaatgacgacgcaaagctca

SEQ ID NO: 451213 - DNA, 75 bp, synthetic construct
  source 1..75: mol_type = other DNA
aaacattccgtcaggcgatggctaagttgcgccgggtgggcgttactttgctgaaccagagcgttctgttacgtg

SEQ ID NO: 451214 - DNA, 75 bp, synthetic construct
  source 1..75: mol_type = other DNA
atgccgaaaatcagggcaacaagcgtaactggcagactgcacttgagtatgttgctgcgcatccggaactggacg

SEQ ID NO: 451215 - DNA, 75 bp, synthetic construct
  source 1..75: mol_type = other DNA
cggaagatgacgaagacctcgtcgaattagccgatggcggcacgattgcgggtatgagcctcgatgatattgatc

SEQ ID NO: 451216 - DNA, 75 bp, synthetic construct
  source 1..75: mol_type = other DNA
gtttttccctattcgcatcaacaagaaatatgtttactgcatgggttggcagttgtttaaactacattttattaa

SEQ ID NO: 451217 - DNA, 75 bp, synthetic construct
  source 1..75: mol_type = other DNA
ggctgaacagtgccatgtgggatgcccttcaggaggaaatctgtggtgtcattgagaaggccgggatagaactga

SEQ ID NO: 451218 - DNA, 75 bp, synthetic construct
  source 1..75: mol_type = other DNA
tgactgattttggtctatggattaaagctggtcttatatggatcacagggtatgcaggaggatttttgcttgttt

SEQ ID NO: 451219 - DNA, 75 bp, synthetic construct
  source 1..75: mol_type = other DNA
gcctctgttgccaaaaaagctggaaatagagtagtaagcctggcaggtcaattaggaaagaatgtattaggaggg

SEQ ID NO: 451220 - DNA, 75 bp, synthetic construct
  source 1..75: mol_type = other DNA
cggtaaacgcgaacgcattcaactgatcagttccggcggcacacttgagcgcaaatatggctgttacgtcaatcc

SEQ ID NO: 451221 - DNA, 75 bp, synthetic construct
  source 1..75: mol_type = other DNA
ctgccgacactggtgatcagttatgcgctgggcattgtactgaaagggcaaatggctctgggcatgctgctggcg

SEQ ID NO: 451222 - DNA, 75 bp, synthetic construct
  source 1..75: mol_type = other DNA
ctgcttgggctgatggtggtgtcgaataactttgtaccgctggtctttggtgagaagtggaacagcattattccg

SEQ ID NO: 451223 - DNA, 75 bp, synthetic construct
  source 1..75: mol_type = other DNA
agtggggattatcaactttccggcgctgctggggctgatggtggtgtcgaataactttgtaccgctggtctttgg

SEQ ID NO: 451224 - DNA, 75 bp, synthetic construct
  source 1..75: mol_type = other DNA
tggcgcgtattctcggcgcgggcgtggcagggggctacaacctggcgtacaacgtggccgttgtgccaccgatga

SEQ ID NO: 451225 - DNA, 75 bp, synthetic construct
  source 1..75: mol_type = other DNA
tcaacgtattcaaaacctttctgtttattccggcgattgttattggtgggcagatggcgggtgcaatcggcgtca

SEQ ID NO: 451226 - DNA, 75 bp, synthetic construct
  source 1..75: mol_type = other DNA
ggattaaaacccacggtggataaggcaaaaaatgccgttcagcgtgatggtgacaccatgagcggggaactgaaa

SEQ ID NO: 451227 - DNA, 75 bp, synthetic construct
  source 1..75: mol_type = other DNA
aaaccctcgcaccagggaaagacaaactcgataatttattgtcatcgcataatatgacaatgacaacctattata

SEQ ID NO: 451228 - DNA, 75 bp, synthetic construct
  source 1..75: mol_type = other DNA
ctaacaatgcaggatattgacagttttgaacatcatgggacaagaaccctggatttgcccctatatttccagaca

SEQ ID NO: 451229 - DNA, 75 bp, synthetic construct
  source 1..75: mol_type = other DNA
atgggctgggatacagaaacgaaaatgagcatttacgaaaaggaaactgaggtaatgaaaaaattcagcggcatt

SEQ ID NO: 451230 - DNA, 75 bp, synthetic construct
  source 1..75: mol_type = other DNA
tatccgccagcgctaattttgctccggaactctctgtcggtatctaccgcgcctggcgcgagggcgatctggcaa

SEQ ID NO: 451231 - DNA, 75 bp, synthetic construct
  source 1..75: mol_type = other DNA
cggttgatgcggatacactaaaagtgatgtttacgctgcgcgtgctgggtaatttatcctcaccttcagtatgta

SEQ ID NO: 451232 - DNA, 75 bp, synthetic construct
  source 1..75: mol_type = other DNA
cgggattttaaccatacgtgcagcaaatactccagaacaacacgttcaggctgtttacaaagcagaacaagatat

SEQ ID NO: 451233 - DNA, 75 bp, synthetic construct
  source 1..75: mol_type = other DNA
tgccgactctcgaaaacccgatccagaccagcatttctatgtttatgtggaccgatgccattgaacgtggcccgg

SEQ ID NO: 451234 - DNA, 75 bp, synthetic construct
  source 1..75: mol_type = other DNA
gtgtccgttaaactcaggctacctcaggctacctcagttacaagctaccccgtagaaaatggtgctactgtgtct

SEQ ID NO: 451235 - DNA, 75 bp, synthetic construct
  source 1..75: mol_type = other DNA
gacgaccgacagaatcacaagtaaacagcacaagtaacgattctaacgcgaaagcgacgaaaggggagaacggtt

SEQ ID NO: 451236 - DNA, 75 bp, synthetic construct
  source 1..75: mol_type = other DNA
taaatctgtaggaggccaggttaaaatgcaggtaaatacaacagaacagaaaaatcaaaaaagcccagggcaaga

SEQ ID NO: 451237 - DNA, 75 bp, synthetic construct
  source 1..75: mol_type = other DNA
gcgcgggtcgatatcagctttaaattcaacgtattcaaaacctttctgtttattccggcgattgttataggtggg

SEQ ID NO: 451238 - DNA, 75 bp, synthetic construct
  source 1..75: mol_type = other DNA
gtagtgagcctgtcggattattctttgaaccaggtcagtgtaaatatggagaatgtaccagacaacctggagcta

SEQ ID NO: 451239 - DNA, 75 bp, synthetic construct
  source 1..75: mol_type = other DNA
tacatggtaaatataaggcgggaggggtgagtgtgacccagtcgctggggagcttcggagcagtgtcagcgggag

SEQ ID NO: 451240 - DNA, 75 bp, synthetic construct
  source 1..75: mol_type = other DNA
gtgtggttgtccgagtatgcagaaaacagcattaacattaacatggaaaacgtccctgacgacatggatttcagc

SEQ ID NO: 451241 - DNA, 75 bp, synthetic construct
  source 1..75: mol_type = other DNA
gcatcacgggcatcgcttctactccttcacgtattaccgtaaaacagaacgggtatacagtttattcaaaaatgg

SEQ ID NO: 451242 - DNA, 75 bp, synthetic construct
  source 1..75: mol_type = other DNA
acaatggtgttctgctgatgaacatgctggctgagccgaaagctgtcagcgtgaatatagggaacggaaaacagt

SEQ ID NO: 451243 - DNA, 75 bp, synthetic construct
  source 1..75: mol_type = other DNA
caacaacaacgagctggacaaggcgtttcattctgacactggtctgttctggttgggcagtttggactatggctt

SEQ ID NO: 451244 - DNA, 75 bp, synthetic construct
  source 1..75: mol_type = other DNA
ggacattactacgtggacgtctccctcaacggccagcataccggccgcatggtgctgagtatcagcgtggcggag

SEQ ID NO: 451245 - DNA, 75 bp, synthetic construct
  source 1..75: mol_type = other DNA
gtcactacgttgttgatgtgctcgtcaacaacgagcgaacagggcgtgcgaatattgtcattacggaagaggatg

SEQ ID NO: 451246 - DNA, 75 bp, synthetic construct
  source 1..75: mol_type = other DNA
gaatggcagctcaacaatctgcgcgaagaggcgtaccgcgacacacggtcgcaggatgcagcaggtgcacaattc

SEQ ID NO: 451247 - DNA, 75 bp, synthetic construct
  source 1..75: mol_type = other DNA
cagcagaaacaggcctgatgtttagtaaagaagcatccggaactgtaggtattgtcagtgtgcccggagtggaag

SEQ ID NO: 451248 - DNA, 75 bp, synthetic construct
  source 1..75: mol_type = other DNA
gacagcctgaacgcctacgggcactttaacaccgccctgaacgtgggccgctgggtgctgtccagcgacatgaac

SEQ ID NO: 451249 - DNA, 75 bp, synthetic construct
  source 1..75: mol_type = other DNA
ggcgacggtgaatgaccgcttcaactacggcgtgaacgccggggcggacagccggaacaaccgcagtgccgggct

SEQ ID NO: 451250 - DNA, 75 bp, synthetic construct
  source 1..75: mol_type = other DNA
gtcagcctgtctgaatatgcaaaaaacaatatcaatatcaatatggataatgtgccggatgatatcgattttgaa

SEQ ID NO: 451251 - DNA, 75 bp, synthetic construct
  source 1..75: mol_type = other DNA
ctctttcgataaagacaagcgcacgctgactatttccgacaacggcgtggggatgacccgcgacgaagtgatcga

SEQ ID NO: 451252 - DNA, 75 bp, synthetic construct
  source 1..75: mol_type = other DNA
attgtggattccggaaatgacgcttgtgttgctctggctgactatattgccggtgggcaacggcagtttgttgaa

SEQ ID NO: 451253 - DNA, 75 bp, synthetic construct
  source 1..75: mol_type = other DNA
aggtggcgcactggccgctggttaccctggaatctgtcggggaaggcagcatgtttgtaagcgactcgtcagaac

SEQ ID NO: 451254 - DNA, 75 bp, synthetic construct
  source 1..75: mol_type = other DNA
ggcagggggatacaacctggcgtacaacgtggccgttgtgccgccgatgaagctgaacccgatcatcacccgcgt

SEQ ID NO: 451255 - DNA, 75 bp, synthetic construct
  source 1..75: mol_type = other DNA
gaactcaccacgctgtactggctgaacgtcgggctggggatcgtggtgtgcgtggcggtgtttttgttgagtgat

SEQ ID NO: 451256 - DNA, 75 bp, synthetic construct
  source 1..75: mol_type = other DNA
cgttttgcttctacccataccgattcttctgcgcagaccgtgtctctggaagactacgtttcccgcatgaaagaa

SEQ ID NO: 451257 - DNA, 75 bp, synthetic construct
  source 1..75: mol_type = other DNA
tgatgcaaaaagagctggaatttaacaagattggcctgattgaaaccagttcggtgctggcgggtttcactttta

SEQ ID NO: 451258 - DNA, 75 bp, synthetic construct
  source 1..75: mol_type = other DNA
gttgtttccggcgtttgcaaaaattcaggacgatacagaaaagctgcgcgtcaacttctacaagctgctgtcggt

SEQ ID NO: 451259 - DNA, 75 bp, synthetic construct
  source 1..75: mol_type = other DNA
cgctgctgtttggctactttggccgcaaaatttatcgccccggtctgcatttctcgctggcgtcggtggcaccga

SEQ ID NO: 451260 - DNA, 75 bp, synthetic construct
  source 1..75: mol_type = other DNA
gcaacaactggcagattcagagggcggagattttatctcgcaatccagatatggcaatgacaattgataatctgg

SEQ ID NO: 451261 - DNA, 75 bp, synthetic construct
  source 1..75: mol_type = other DNA
tgatatagaaaaacaagttgttcttgatactattgatctttctgttaaaaaaggatattccttattatttggagg

SEQ ID NO: 451262 - DNA, 75 bp, synthetic construct
  source 1..75: mol_type = other DNA
tgtgctggtgttcctgctgagcgatgtgatcgccagcgtgctgcacaacccggatctggtaccgctgatgcgcac

SEQ ID NO: 451263 - DNA, 75 bp, synthetic construct
  source 1..75: mol_type = other DNA
ggcagcaaggtgatgtcgcagtgaatacgcaaggacagtcagcaggcaaaaaaatgagcctgattgaatttggtg

SEQ ID NO: 451264 - DNA, 75 bp, synthetic construct
  source 1..75: mol_type = other DNA
aaaggaaatatcggaaaaaattgaacaatcaaaaggcgcgggcaatttccgtagcatgtttatcaatatcccaaa

SEQ ID NO: 451265 - DNA, 75 bp, synthetic construct
  source 1..75: mol_type = other DNA
agggccgtttatcaacttgatgaagtctatccaatgcaatcgttgattgaaaacgcgattaatagtgattcagaa

SEQ ID NO: 451266 - DNA, 75 bp, synthetic construct
  source 1..75: mol_type = other DNA
acacgccgccatggcggcagcagtaaccaatctgctgatattcggggatatggggttgcttaaagtgcgcaatgg

SEQ ID NO: 451267 - DNA, 75 bp, synthetic construct
  source 1..75: mol_type = other DNA
ggttataacggctattaccagccgcctgttgaacggatggaccttgccgtactggccaatattgccccctatcat

SEQ ID NO: 451268 - DNA, 75 bp, synthetic construct
  source 1..75: mol_type = other DNA
ggcggcatccagtcggcgatgttaaatagtgacgcgaccatgtttcgccgcaaatattatcgtaatggggcgcat

SEQ ID NO: 451269 - DNA, 75 bp, synthetic construct
  source 1..75: mol_type = other DNA
tgaaaccgccctggcgctggccgttaacttcgtgacgttcggtgacgtggcgctgttaaagatccgcaacggctt

SEQ ID NO: 451270 - DNA, 75 bp, synthetic construct
  source 1..75: mol_type = other DNA
aaaaagatgagttttcaaatgtgaagaatatcagcgctcaggatgttcttacggcgcaccgctttccggctggtc

SEQ ID NO: 451271 - DNA, 75 bp, synthetic construct
  source 1..75: mol_type = other DNA
aggagagagaaaacgcggagactgtgccaggggattacgtggttttacaggaaggcgagccgctggcgttcccgc

SEQ ID NO: 451272 - DNA, 75 bp, synthetic construct
  source 1..75: mol_type = other DNA
acccagccgattgaccgtctggcgctggcgcagcttatcaacctgaacggccagcacggcgggattatccacgcc

SEQ ID NO: 451273 - DNA, 75 bp, synthetic construct
  source 1..75: mol_type = other DNA
ggcgacccggaaaagattgagcgcacctacaaaaagaatgaagtgctgcccattcagcgccgcctggcgatggcc

SEQ ID NO: 451274 - DNA, 75 bp, synthetic construct
  source 1..75: mol_type = other DNA
ggctatggtcgaaggatgcggtggaaaggcagatgagccatatggaacgcaattcggtgagggcggcgtatatcc

SEQ ID NO: 451275 - DNA, 75 bp, synthetic construct
  source 1..75: mol_type = other DNA
tgggttctgcacctgcggcactggatacactcaacgaactggcggcggcactggggaatgacccgaactttgcca

SEQ ID NO: 451276 - DNA, 75 bp, synthetic construct
  source 1..75: mol_type = other DNA
atgactatttccatgctcaacgcaaaactactaccaactgcgccatccgccgcagtggtcgtcgtgcgtgtggtg

SEQ ID NO: 451277 - DNA, 75 bp, synthetic construct
  source 1..75: mol_type = other DNA
tcagtgaagaagaatctctctttattacactaggcaaaatttgcgtcgcgtttatccttggtggcattattggcc

SEQ ID NO: 451278 - DNA, 75 bp, synthetic construct
  source 1..75: mol_type = other DNA
accctgaaaatcgaccctgctgtagtactggcaactcgcaagtatgtggatgataaggcactggagctgaaggtg

SEQ ID NO: 451279 - DNA, 75 bp, synthetic construct
  source 1..75: mol_type = other DNA
agtgagttcacctgatgcctcctctttaattaaagaaaccagaccacgtaacctggcatttgcgtatattgtgag

SEQ ID NO: 451280 - DNA, 75 bp, synthetic construct
  source 1..75: mol_type = other DNA
cctgtttgatgagtcaggggcattgattgccgtggggaactgcccggaaagctataaaccgcgactggctgaagg

SEQ ID NO: 451281 - DNA, 75 bp, synthetic construct
  source 1..75: mol_type = other DNA
ttcaacgtttccaggatgacattctggctggacgtaaaaccatcaccatccgcgacgagtctgaatcgcacttca

SEQ ID NO: 451282 - DNA, 75 bp, synthetic construct
  source 1..75: mol_type = other DNA
tgaccattggcgcgggcagcgtggtgctggacgacgttccggaccatgcgctggtggtgggcgaaaaagcgcgag

SEQ ID NO: 451283 - DNA, 75 bp, synthetic construct
  source 1..75: mol_type = other DNA
cgtacaatggcctgtagttcgttaattgagtcagggctatggtcgaaggatgcggtggagcgccagatgagccat

SEQ ID NO: 451284 - DNA, 75 bp, synthetic construct
  source 1..75: mol_type = other DNA
gatgtgactgaaatcaaaaacaacctgattactctcaccacaagaagcgaatcctttgctaccaaatctgatgta

SEQ ID NO: 451285 - DNA, 75 bp, synthetic construct
  source 1..75: mol_type = other DNA
tgatgaaattataaatggacaagagataaataagcttcttgatctgcaaagagataacatcgatatttttattgc

SEQ ID NO: 451286 - DNA, 75 bp, synthetic construct
  source 1..75: mol_type = other DNA
aatctgcctgattattgccatgtatatactgattatgataaaggtatttactcagcttttaaccaagcaatttca

SEQ ID NO: 451287 - DNA, 75 bp, synthetic construct
  source 1..75: mol_type = other DNA
cggcggcggcctgacgcctgaccaggtcgaacaggctgtctttgattacctgctgtttggtgacgtcgctatcct

SEQ ID NO: 451288 - DNA, 75 bp, synthetic construct
  source 1..75: mol_type = other DNA
gtggataacctacagaggaaaactaccgggaagaattactggttctctgaagacgccaccgacggcattgcggtc

SEQ ID NO: 451289 - DNA, 75 bp, synthetic construct
  source 1..75: mol_type = other DNA
ggacgctttggtatgtttattggttgcagtaactatcctgaatgcgaacataccgaacttatcgataaaccggac

SEQ ID NO: 451290 - DNA, 75 bp, synthetic construct
  source 1..75: mol_type = other DNA
acagcgcaaaaggtcgtgaggaagaggcaagaaaattactgcgttgggggcaacaaaactttactacggtgcaaa

SEQ ID NO: 451291 - DNA, 75 bp, synthetic construct
  source 1..75: mol_type = other DNA
gccattcgccagtgggaagcgcgctgccggttgctgaaggtgacaccggtaatcgacggggaacatctgacgtta

SEQ ID NO: 451292 - DNA, 75 bp, synthetic construct
  source 1..75: mol_type = other DNA
gtcagaatacccgctgtgtggcgctgattagcgccatgaatgaacacgggcaatgtaactattacgacgacgtac

SEQ ID NO: 451293 - DNA, 75 bp, synthetic construct
  source 1..75: mol_type = other DNA
gcagagattttctgacgttctttagtaaccgcgaaccttgcctgattggcatgaaagcctgtggaggccccagta

SEQ ID NO: 451294 - DNA, 75 bp, synthetic construct
  source 1..75: mol_type = other DNA
tgaccgtactgaaggtgccacgctggaattttacgaagctgaggcgaaaaagaaggcgaagcagtttttcatgga

SEQ ID NO: 451295 - DNA, 75 bp, synthetic construct
  source 1..75: mol_type = other DNA
ttaaccaaaaacgaccggttacccttctatgtggttactgaggtagccagagccatacatccccttaatccccag

SEQ ID NO: 451296 - DNA, 75 bp, synthetic construct
  source 1..75: mol_type = other DNA
ctgatggccgccattgaactggacgaacggattggttattcagccagcagcctggccgggcagccgtataaaggc

SEQ ID NO: 451297 - DNA, 75 bp, synthetic construct
  source 1..75: mol_type = other DNA
ggaacggtatcacccagcaaaaccgtaacgggttattgtgggataaaaccatgaatgttgacggcctgaaaacgg

SEQ ID NO: 451298 - DNA, 75 bp, synthetic construct
  source 1..75: mol_type = other DNA
cggtgggcaacggcagtttgttgaaatgatgaacaactatgccgagaagctgcatctcaaggatacgcattttga

SEQ ID NO: 451299 - DNA, 75 bp, synthetic construct
  source 1..75: mol_type = other DNA
ttttgttcggtgtggcgcaaaaagaacgttctcaacaatctgtgggcggccccgctgctggtgctgtatcgcatt

SEQ ID NO: 451300 - DNA, 75 bp, synthetic construct
  source 1..75: mol_type = other DNA
ctgctggcccgacatgaaggcaaagccgtcgggcatattttatttacccgggcaaccttcaaaggggaaatggat

SEQ ID NO: 451301 - DNA, 75 bp, synthetic construct
  source 1..75: mol_type = other DNA
ttgcaatgctgggtattcctccgtctgatatgtccatcgactggacgaaagtgatctttaagggcttgttcatta

SEQ ID NO: 451302 - DNA, 75 bp, synthetic construct
  source 1..75: mol_type = other DNA
cttgagctggcgcgtaaaatgggtatcacccgtgcggttaacgtcgccaaagaaaatctcaatgacgtgatggcg

SEQ ID NO: 451303 - DNA, 75 bp, synthetic construct
  source 1..75: mol_type = other DNA
gtggcacaccgttttccacccgggcttgccggcatcattcctgctaacactgctggtcttggtgatccgctgaaa

SEQ ID NO: 451304 - DNA, 75 bp, synthetic construct
  source 1..75: mol_type = other DNA
acccagccgattgaccggctggcactcgcgcaactgattaatcttaacggtcagcacggcggcatcattcacgcc

SEQ ID NO: 451305 - DNA, 75 bp, synthetic construct
  source 1..75: mol_type = other DNA
gcgcgcgccccgcgttatcgctgctagcccggtatgaaggcaaagccgtcgggcatattttatttacccgggcaa

SEQ ID NO: 451306 - DNA, 75 bp, synthetic construct
  source 1..75: mol_type = other DNA
atgcacttttaggtcgcttggtaacttttggcatagtacctacaaccgcagaaacagggtatgggtatatccatc

SEQ ID NO: 451307 - DNA, 75 bp, synthetic construct
  source 1..75: mol_type = other DNA
cctcctctgattatttgtaatgaagagcatcgtttcattgttgcagaacaactccgtggtttaaatctgttatca

SEQ ID NO: 451308 - DNA, 75 bp, synthetic construct
  source 1..75: mol_type = other DNA
gtggtaatggtagtcgtctatggccgctttcaagaacattatatccaaaacagtttctcagtttcgataatagac

SEQ ID NO: 451309 - DNA, 75 bp, synthetic construct
  source 1..75: mol_type = other DNA
aaatgggtatcacccgtgcggttaacgtcgctaaagaaaaccttaatgatgtgatggcagaactgggcatgaccg

SEQ ID NO: 451310 - DNA, 75 bp, synthetic construct
  source 1..75: mol_type = other DNA
atgagtggtcgccaaaaaaccatcccggtgccgatggtcgtgggccatgaatatgtcggtgaagtggtaggtatt

SEQ ID NO: 451311 - DNA, 75 bp, synthetic construct
  source 1..75: mol_type = other DNA
aaatttgttgaaaagccaactttagaagtagctcaaagatatattgaatctggtgagtattattggaatagtggg

SEQ ID NO: 451312 - DNA, 75 bp, synthetic construct
  source 1..75: mol_type = other DNA
tcgagcgtggtcaggtactggctaagccaggcgccatcaagccgcaaaccaagttcgaatctgaagtgtacatac

SEQ ID NO: 451313 - DNA, 75 bp, synthetic construct
  source 1..75: mol_type = other DNA
gacgaaggccgtgctggtgagaacgtaggtgttctgctgcgtggtatcaaacgtgaagaaatcgaacgtggtcag

SEQ ID NO: 451314 - DNA, 75 bp, synthetic construct
  source 1..75: mol_type = other DNA
ccgggcactatcaagccgcacaccaagttcgaatctgaagtgtacattctgtccaaagatgaaggcggtcgtcat

SEQ ID NO: 451315 - DNA, 75 bp, synthetic construct
  source 1..75: mol_type = other DNA
tgaagaaatcgaacgtggtcaggtactggctaagccgggcaccatcaaagccgcacaccaagttcgaatctgaag

SEQ ID NO: 451316 - DNA, 75 bp, synthetic construct
  source 1..75: mol_type = other DNA
gtcgaagggattgatgtggtttctctgccgttctataaactgagcaccaaatttggcgatctcgcaccagaacaa

SEQ ID NO: 451317 - DNA, 75 bp, synthetic construct
  source 1..75: mol_type = other DNA
gtcaatggcttcggcccgaacgacgtgatcctcgatatccgttctgtcgatgaacaggaagataagccactgaaa

SEQ ID NO: 451318 - DNA, 75 bp, synthetic construct
  source 1..75: mol_type = other DNA
cggaaatcaccatcaagagccaatctgtgcgcttgcgctttataaaaatccttaccgggaacattcgtaacgttt

SEQ ID NO: 451319 - DNA, 75 bp, synthetic construct
  source 1..75: mol_type = other DNA
gtactactgacgtgactggtaccatcgaactgccggaaggggtagagatggtaatgccgggcgacaatatcaaaa

SEQ ID NO: 451320 - DNA, 75 bp, synthetic construct
  source 1..75: mol_type = other DNA
ccggacaccgagttagaatctgaagtgtacattcagtccaaagatgaaggcggccgtcatactcagttcgtcaaa

SEQ ID NO: 451321 - DNA, 75 bp, synthetic construct
  source 1..75: mol_type = other DNA
cgttctttccggaaaacattctggagaaatttcgttatatcaaagagatgggtttcgatggttttgagattgacg

SEQ ID NO: 451322 - DNA, 75 bp, synthetic construct
  source 1..75: mol_type = other DNA
caaaaccgcacgttaacgtaggtactatcggccacgttgaccaaggtaaaacgacactgaccgctgcaatcacga

SEQ ID NO: 451323 - DNA, 75 bp, synthetic construct
  source 1..75: mol_type = other DNA
ttgcgatggacgacggcctgcgtttcgcaattcgtgaaggcggccgtaccgttggcgcgggcgttgtagcaaaag

SEQ ID NO: 451324 - DNA, 75 bp, synthetic construct
  source 1..75: mol_type = other DNA
ccgcacaccaagttcgaatctgaagtgtacattctgtccaaagatgaaggcggcgtcatactccgttcttcaaag

SEQ ID NO: 451325 - DNA, 75 bp, synthetic construct
  source 1..75: mol_type = other DNA
tatcggccacgttgaccagggtaaaactacactgaccgctgcaatcactaccgtactggctaaaacctacggcgg

SEQ ID NO: 451326 - DNA, 75 bp, synthetic construct
  source 1..75: mol_type = other DNA
caaaaccgcacgttaacgtaggtactatcggccacgttgaccagggtaaaacaacactgaccgctgcaatcacga

SEQ ID NO: 451327 - DNA, 75 bp, synthetic construct
  source 1..75: mol_type = other DNA
ctcggtcatgtgcatattgcggataaccatcgctaccagccgggcagcggcaccctggatttccacgcgctgttt

SEQ ID NO: 451328 - DNA, 75 bp, synthetic construct
  source 1..75: mol_type = other DNA
agtgattccctgcgcgtactggaacaggtcgccgcgcgtaccggaaccgtggtgtatctcgaaccgttaaaccgt

SEQ ID NO: 451329 - DNA, 75 bp, synthetic construct
  source 1..75: mol_type = other DNA
ggcgctgcatgacaaccgcgacctgctcggtcatgtgcatattgccgataaccatcgctatcagccgggcagcgg

SEQ ID NO: 451330 - DNA, 75 bp, synthetic construct
  source 1..75: mol_type = other DNA
gggcaccatcaagccgcacaccaagttcgaatctgaagtgtacatcctgtccaaagatgaaggcggtcgtcatac

SEQ ID NO: 451331 - DNA, 75 bp, synthetic construct
  source 1..75: mol_type = other DNA
acgcagagtgggaagcgaaaatcctggaactggctggcttcctggattcttatattccggaaccagagcgtgcga

SEQ ID NO: 451332 - DNA, 75 bp, synthetic construct
  source 1..75: mol_type = other DNA
caaaaccgcacgttaacgtgggtactatcggccacgttgaccaaggtaaaaccactctgaccgctgcaatcacta

SEQ ID NO: 451333 - DNA, 75 bp, synthetic construct
  source 1..75: mol_type = other DNA
acaaccctgaccgctgcaatcacaaccgtactggctaaaacctacggcggtgctgctcgtgcattcgaccagatc

SEQ ID NO: 451334 - DNA, 75 bp, synthetic construct
  source 1..75: mol_type = other DNA
tatcggccacgttgaccaaggtaaaacgacactgaccgctgcaatcaccaccgtactggctaaaacctacggcgg

SEQ ID NO: 451335 - DNA, 75 bp, synthetic construct
  source 1..75: mol_type = other DNA
tatcggccacgttgaccaaggtaaaaccacactgaccgctgcaatcacgaccgtactggctaaaacctacggcgg

SEQ ID NO: 451336 - DNA, 75 bp, synthetic construct
  source 1..75: mol_type = other DNA
cgccgctcacggaaaagataaaactgccagtgtaatcactaacgtcgctaacggtgcaatctctgctgccagcag

SEQ ID NO: 451337 - DNA, 75 bp, synthetic construct
  source 1..75: mol_type = other DNA
tggtgagcgccaatggtcgttgggtctacaaattacaaggtagtaccaatagccagggtgaatactccgccgcac

SEQ ID NO: 451338 - DNA, 75 bp, synthetic construct
  source 1..75: mol_type = other DNA
caaaaccgcacgttaacgtaggtactatcggccacgttgaccagggtaaaaccactctgaccgctgcaatcacta

SEQ ID NO: 451339 - DNA, 75 bp, synthetic construct
  source 1..75: mol_type = other DNA
actaccctgaccgctgcaatcactaccgtactggctaaaacctacggcggtgctgctcgtgcattcgaccagatc

SEQ ID NO: 451340 - DNA, 75 bp, synthetic construct
  source 1..75: mol_type = other DNA
acgaaggccgtgctggtgagaacgtaggtgttctgctgcgtggtatcaaacgtgaagaaatcgaacgtggtcagg

SEQ ID NO: 451341 - DNA, 75 bp, synthetic construct
  source 1..75: mol_type = other DNA
gccgggcaccatcaagccgcacaccaagttcgaatctgaagtgtacattctgtccaaagatgaaggcggtcgtca

SEQ ID NO: 451342 - DNA, 75 bp, synthetic construct
  source 1..75: mol_type = other DNA
cctgggagcatccgctgatccgcaacggtctggatctgatcctttctggcgataccggtagcagcacgatttcac

SEQ ID NO: 451343 - DNA, 75 bp, synthetic construct
  source 1..75: mol_type = other DNA
ccggaaggcgtagagatggtaatgccgggcgacaacatcaaaatggttgttaccctgatccacccgatcgcgatg

SEQ ID NO: 451344 - DNA, 75 bp, synthetic construct
  source 1..75: mol_type = other DNA
agccgggcaccatcaagccgcacactaagttcgaatctgaagtgtacattctgtccaaagatgaaggcggccgtc

SEQ ID NO: 451345 - DNA, 75 bp, synthetic construct
  source 1..75: mol_type = other DNA
accacgctgaccgctgcaatcacgaccgtactggctaaaacctacggcggtgctgctcgtgcattcgaccagatc

SEQ ID NO: 451346 - DNA, 75 bp, synthetic construct
  source 1..75: mol_type = other DNA
accaccctgaccgctgcaatcaccaccgtactggctaaaacctacggcggtgctgctcgtgcattcgaccagatc

SEQ ID NO: 451347 - DNA, 75 bp, synthetic construct
  source 1..75: mol_type = other DNA
accacactgaccgctgcaatcacaaccgtactggctaaaacctacggcggtgctgctcgtgcattcgaccagatc

SEQ ID NO: 451348 - DNA, 75 bp, synthetic construct
  source 1..75: mol_type = other DNA
agttagtaaagatcattggtaagagaccttcaagacaatctttaagtagtcatgtcaagatttcggattgtttta

SEQ ID NO: 451349 - DNA, 75 bp, synthetic construct
  source 1..75: mol_type = other DNA
atcaagccgcacaccaagttcgaatctgaagtgtacattctgtccaaagatgaaggcggtcgtcatactccgttc

SEQ ID NO: 451350 - DNA, 75 bp, synthetic construct
  source 1..75: mol_type = other DNA
acgaccctgaccgctgcaatcacgaccgtactggctaaaacctacggcggtgctgctcgtgcattcgaccagatc

SEQ ID NO: 451351 - DNA, 75 bp, synthetic construct
  source 1..75: mol_type = other DNA
atcagtgggctcagttcgttgagcatgcaggctcaaggaatcgctgagttccaggctgagactcagggccgcagt

SEQ ID NO: 451352 - DNA, 75 bp, synthetic construct
  source 1..75: mol_type = other DNA
gtcagtgatagtgaagaagccttgttacgcactgtcagggaacgactggccaacccacaagaggccattaaggtc

SEQ ID NO: 451353 - DNA, 75 bp, synthetic construct
  source 1..75: mol_type = other DNA
atgacaactaaccacccggcgcacggtcatgtatcactcgatcgcctgcaccagatacgcgaaatactcagcaaa

SEQ ID NO: 451354 - DNA, 75 bp, synthetic construct
  source 1..75: mol_type = other DNA
atggccgttaacttactgaaaaagaactcactcgcgctggtcgcttctctgctgctggcgggccatgtacaggca

SEQ ID NO: 451355 - DNA, 75 bp, synthetic construct
  source 1..75: mol_type = other DNA
tgcgcaacgtcactaaacgattcggcagtaatatggttatcgacaatatcaatctcaccatcccacaagggcaaa

SEQ ID NO: 451356 - DNA, 75 bp, synthetic construct
  source 1..75: mol_type = other DNA
ttgtcattgatggtgaagataccatcagtgggctcagtttattgagcattcaggctcctggtatcgctgatttcc

SEQ ID NO: 451357 - DNA, 75 bp, synthetic construct
  source 1..75: mol_type = other DNA
atcctggccagccagcatcttcggtctgtattgatgtctgcaacacctatactaatgtttctgacctaacatctc

SEQ ID NO: 451358 - DNA, 75 bp, synthetic construct
  source 1..75: mol_type = other DNA
ttatacgaccggttcagaaacatctttgccgcataataacttctcaggttcaatctcagaaagaaagcagacaac

SEQ ID NO: 451359 - DNA, 75 bp, synthetic construct
  source 1..75: mol_type = other DNA
gagatcctggaagtggtgagcgactgtccgcagtcgatcaataatattccactggatgcgcgtaatcacggctat

SEQ ID NO: 451360 - DNA, 75 bp, synthetic construct
  source 1..75: mol_type = other DNA
acaggactaatgatggcaaacggtcagggtatcgccattccccatgccgattacacgctggtaaatgtaaacagt

SEQ ID NO: 451361 - DNA, 75 bp, synthetic construct
  source 1..75: mol_type = other DNA
ttagctttggcgttgatgtcgcacagccagctccgcagccagcaaagcctgctcgtatcagtctggaaaagaaac

SEQ ID NO: 451362 - DNA, 75 bp, synthetic construct
  source 1..75: mol_type = other DNA
tcgactactttaaggactcgaaaatcccggtatatgttgtatttattaccgatggcgggatcagcaagacccggg

SEQ ID NO: 451363 - DNA, 75 bp, synthetic construct
  source 1..75: mol_type = other DNA
cgggtcatcaaaacaggcgctggcaattttgcagggcttaaaagccgacgttgtcacttataaccaggtgaccga

SEQ ID NO: 451364 - DNA, 75 bp, synthetic construct
  source 1..75: mol_type = other DNA
taaagctcagtatgaaatgagagttatagagaaagaaattactcacgaagttgtaaaagttagaaatttgcggct

SEQ ID NO: 451365 - DNA, 75 bp, synthetic construct
  source 1..75: mol_type = other DNA
aagcagaagaaatctatacaatttttaaagctcagtatgaaatgagagttatagagaaagaaattactcacgaag

SEQ ID NO: 451366 - DNA, 75 bp, synthetic construct
  source 1..75: mol_type = other DNA
ttttgtgggataccatttaaaatatttctaccctaaaaggatttattccaaatccaatcgtaatattgataacat

SEQ ID NO: 451367 - DNA, 75 bp, synthetic construct
  source 1..75: mol_type = other DNA
ataaaaaataatggcatatcagtttattatggggattctgataatgatattcttgatgccagaaaagccggtgct

SEQ ID NO: 451368 - DNA, 75 bp, synthetic construct
  source 1..75: mol_type = other DNA
ttctaccccaggcggttatatacacgttctaatagaaacatagacaacatcatgacgatgtttagttctgtgtat

SEQ ID NO: 451369 - DNA, 75 bp, synthetic construct
  source 1..75: mol_type = other DNA
ttctatccgaagcagctatacactcgttctaatcgcaatatagacaacatcatgacgatgttcagttctgtgtat

SEQ ID NO: 451370 - DNA, 75 bp, synthetic construct
  source 1..75: mol_type = other DNA
ctggaaggattcgaagaccgctatgtcgatcagatttccggcggtcagcaacagcgtgtggctctggcccgtgcg

SEQ ID NO: 451371 - DNA, 75 bp, synthetic construct
  source 1..75: mol_type = other DNA
gataaagccaaaaccgaacagtttatgactcagttcctgaaaaacgtggaagtgttcgataccggcggtcgtggc

SEQ ID NO: 451372 - DNA, 75 bp, synthetic construct
  source 1..75: mol_type = other DNA
ttccgacgtgaagctgattttcccgaatccgaaaacctccggtaacgcgcgttatacctacttagcagcgtgggg

SEQ ID NO: 451373 - DNA, 75 bp, synthetic construct
  source 1..75: mol_type = other DNA
cctgtaccgtgacgattgacggcgtgtcggtcaatgtggccggaacgttcagatattccgtgggtgaaatcgagc

SEQ ID NO: 451374 - DNA, 75 bp, synthetic construct
  source 1..75: mol_type = other DNA
tgagtcggtacagcgatacattgtgaagccgggagaagtccacgccgtaaggccgcacccgttgccgtcagggca

SEQ ID NO: 451375 - DNA, 75 bp, synthetic construct
  source 1..75: mol_type = other DNA
tttgttttataaggataaattaactaaaatggcaccatcaacaaaaccggaagaggtgctcgcgatgtttcattg

SEQ ID NO: 451376 - DNA, 75 bp, synthetic construct
  source 1..75: mol_type = other DNA
gtgacatccctgagtgatgtgcgggtgaatttccccggtgctgaagagccggtaaaacgctggcaggggaatctg

SEQ ID NO: 451377 - DNA, 75 bp, synthetic construct
  source 1..75: mol_type = other DNA
tggtaccatcgaactgccggaaggcgtagagatggtaatgccgggcgacaacatcaaaatggttgttaccctgat

SEQ ID NO: 451378 - DNA, 75 bp, synthetic construct
  source 1..75: mol_type = other DNA
aatctcccgtttgatcttcataatggccatcagactaccatgacattaagcattggttacgcgatgaccattgag

SEQ ID NO: 451379 - DNA, 75 bp, synthetic construct
  source 1..75: mol_type = other DNA
atgaaaagattgatagtttgttgactgcaacatcagaaggtatgtcaggtaaatactctgatagcatttcattaa

SEQ ID NO: 451380 - DNA, 75 bp, synthetic construct
  source 1..75: mol_type = other DNA
ctgctggaactggttgaaatggaagttcgtgagcttctgtctcagtatgacttcccgggcgacgacactccgatc

SEQ ID NO: 451381 - DNA, 75 bp, synthetic construct
  source 1..75: mol_type = other DNA
tggcgcataccaggtcagcggcgagtacgcgatgatcaagtttgccgcgctggctggtgcaatagatgaagagaa

SEQ ID NO: 451382 - DNA, 75 bp, synthetic construct
  source 1..75: mol_type = other DNA
cgccaggcgctggacgccgcaggctttaaagataccgcgatcatgtcgtattcgaccaaattcgcatcctccttt

SEQ ID NO: 451383 - DNA, 75 bp, synthetic construct
  source 1..75: mol_type = other DNA
agtggtcctcgaaagcctcggcgccatcaaacgcgcaggcgcggatctgatcttcagctacttcgcgctggatct

SEQ ID NO: 451384 - DNA, 75 bp, synthetic construct
  source 1..75: mol_type = other DNA
ggtaatgccgggcgacaacatcaaaatggttgttaccctgatccatccgatcgcgatggacgacggtctgcgttt

SEQ ID NO: 451385 - DNA, 75 bp, synthetic construct
  source 1..75: mol_type = other DNA
gtgatgactttcggcatctctcaccataccgatgaaaccggcagcgatgcctggcgggaagatggtctggtggcg

SEQ ID NO: 451386 - DNA, 75 bp, synthetic construct
  source 1..75: mol_type = other DNA
agtggtgctcgaaagcttaggcgcaattaagcgtgcgggtgcggatctgattttcagctactttgcgctggatct

SEQ ID NO: 451387 - DNA, 75 bp, synthetic construct
  source 1..75: mol_type = other DNA
atcaagccgcacaccaagttcgaatctgaagtgtatattctgtccaaagatgaaggcggccgtcatactccgttc

SEQ ID NO: 451388 - DNA, 75 bp, synthetic construct
  source 1..75: mol_type = other DNA
gtatcttttaccgaaaagtggagaaataaagccaaaccatattaataatttatttcttaaccgacttaataaaat

SEQ ID NO: 451389 - DNA, 75 bp, synthetic construct
  source 1..75: mol_type = other DNA
ttgaacgccgtcatttttttaatgagatagtcaccggtggtcagaaaacattatatgagatgatgcctccatctg

SEQ ID NO: 451390 - DNA, 75 bp, synthetic construct
  source 1..75: mol_type = other DNA
taaactttggtttgggagaagcggcaaaacggaatgtgggcaacggggaaaaccaaatccctgatatgtctttct

SEQ ID NO: 451391 - DNA, 75 bp, synthetic construct
  source 1..75: mol_type = other DNA
cccggggacaggtgcgttacggggaaatcacgttcacgatgcaccatcttctggcatggcaggacaatattactg

SEQ ID NO: 451392 - DNA, 75 bp, synthetic construct
  source 1..75: mol_type = other DNA
agtggcagccccgtgctgtgcggatgagtacaccagacgccgtgcaggccggtctgacaacgggtaaaagcggca

SEQ ID NO: 451393 - DNA, 75 bp, synthetic construct
  source 1..75: mol_type = other DNA
gtgctgaatattattcatcgtctgaagtccggtatgtttccggctctgttttttctgacttcagccagtgtgctg

SEQ ID NO: 451394 - DNA, 75 bp, synthetic construct
  source 1..75: mol_type = other DNA
tgttatggcaaataacaaaatcgtacttaagcacggcgatccggtcgctttatctcttatgagaaaaggccttct

SEQ ID NO: 451395 - DNA, 75 bp, synthetic construct
  source 1..75: mol_type = other DNA
ggtagatataaggaacccagaaatacttccagatcactggatgtattacgcaatgcttttgtgtatcagttatgt

SEQ ID NO: 451396 - DNA, 75 bp, synthetic construct
  source 1..75: mol_type = other DNA
cgttgaaggtaaaacaacgctgaccgctgcaatcactaccgtactggctaaaacctacggcggtgctgctcgcgc

SEQ ID NO: 451397 - DNA, 75 bp, synthetic construct
  source 1..75: mol_type = other DNA
tggaatgcctgttttctggagattccaggcgacagttgaagaagatgggataaaaatattcgcacttcaatatat

SEQ ID NO: 451398 - DNA, 75 bp, synthetic construct
  source 1..75: mol_type = other DNA
tgtcatggcggaaaccacacagctggtgaccgacaccaaagcctttaccgacgcgattaaagcaggcgatatcga

SEQ ID NO: 451399 - DNA, 75 bp, synthetic construct
  source 1..75: mol_type = other DNA
agaaataccatttgatgagaatcaaacaagatttggctgttgtatcaactcttgttgatgggatgaagaatattg

SEQ ID NO: 451400 - DNA, 75 bp, synthetic construct
  source 1..75: mol_type = other DNA
tgcgggcggtctttctaacgcgatgccggagctggtgagcgacggcggacgcggcggtaaatttgaactgcgcga

SEQ ID NO: 451401 - DNA, 75 bp, synthetic construct
  source 1..75: mol_type = other DNA
aacggcactggcgcaggtttatcgtcagcttggcgacaaaccggcagatgtacgcgatgttgcccaactgaaagg

SEQ ID NO: 451402 - DNA, 75 bp, synthetic construct
  source 1..75: mol_type = other DNA
aacagccgtgggaagaagatttcggtaagcctgagcgcattgtcaccgcgctggacatcatgaccgaaggcccgc

SEQ ID NO: 451403 - DNA, 75 bp, synthetic construct
  source 1..75: mol_type = other DNA
tttcacaaagcttggtcgtaacccgaacgacatcgagctgtatatgttcgctcaggcgaactctgagcactgccg

SEQ ID NO: 451404 - DNA, 75 bp, synthetic construct
  source 1..75: mol_type = other DNA
caaagcccgtcgctgctgttgcaggggatggtgggttcacagatgccgattgccgtttctcacggtgaagggcgt

SEQ ID NO: 451405 - DNA, 75 bp, synthetic construct
  source 1..75: mol_type = other DNA
cgaaatcgctgttcaagatgatcaaaaacaccttcgaaaccacgccggatcacgttctctctgcttataaagata

SEQ ID NO: 451406 - DNA, 75 bp, synthetic construct
  source 1..75: mol_type = other DNA
cctcactgcgcctatcgataaaaacccacgcggctacgtggtgaagcaggcgttcagcgatgcctataactatat

SEQ ID NO: 451407 - DNA, 75 bp, synthetic construct
  source 1..75: mol_type = other DNA
gataactatcaatatccgatcccacagcgttatttatggcgcagttgggccgcaaacgctcagggcattaccggt

SEQ ID NO: 451408 - DNA, 75 bp, synthetic construct
  source 1..75: mol_type = other DNA
tggatgtggctgcccggcaccgggtgcagtttttgatgcctgagtccgatgctgtcacaatgctgaaaaacaggc

SEQ ID NO: 451409 - DNA, 75 bp, synthetic construct
  source 1..75: mol_type = other DNA
caggttaccgctgaactgcacgaccgcatgatggaaacggtcttttttgctttagatgatgcagagcaactgttt

SEQ ID NO: 451410 - DNA, 75 bp, synthetic construct
  source 1..75: mol_type = other DNA
gggattctgttgcccgtattgcccgggagcacgatatcaatgataatcttctgttcaaatggctcaggatctggc

SEQ ID NO: 451411 - DNA, 75 bp, synthetic construct
  source 1..75: mol_type = other DNA
tctgtttggtgatatttacgaacagatccttaaagatctgcaatctgcgggcaatgctggcgaattctatactcc

SEQ ID NO: 451412 - DNA, 75 bp, synthetic construct
  source 1..75: mol_type = other DNA
ggcgaagagctgcgcggttatcacaaaccgatcatgctggcgggcgggatcggcaatattcgtgccgatcacgta

SEQ ID NO: 451413 - DNA, 75 bp, synthetic construct
  source 1..75: mol_type = other DNA
ggcgaggtgacaccacagaaacagaacgaggcagaaatgcggctgatggcgctgaatgagaagcgcaaacgccag

SEQ ID NO: 451414 - DNA, 75 bp, synthetic construct
  source 1..75: mol_type = other DNA
ggcaaagcatgactaagctgaccattaacagaaaaccgaaaggcatttacggcacgccgcagaaaacgacgcagg

SEQ ID NO: 451415 - DNA, 75 bp, synthetic construct
  source 1..75: mol_type = other DNA
acctgttgttctttaccaaaggtcagccaaccaaagagatttggttctatgagcatccgtatccggcgggcgtga

SEQ ID NO: 451416 - DNA, 75 bp, synthetic construct
  source 1..75: mol_type = other DNA
tcaacaataatgttgtggtggttattgatgatcaacagcgggaaaaagttgtcatggggcgcggaattggctttc

SEQ ID NO: 451417 - DNA, 75 bp, synthetic construct
  source 1..75: mol_type = other DNA
gggaagcaccgaagccgcttaaggtggggatatttgatgacctgatgcaggatgtcgccgccagggggctggcat

SEQ ID NO: 451418 - DNA, 75 bp, synthetic construct
  source 1..75: mol_type = other DNA
cggtaaccagaaagcgcagcagaagcccacaggggcgacaccgtggcggcatatgaccaaacgccagcgcaaaaa

SEQ ID NO: 451419 - DNA, 75 bp, synthetic construct
  source 1..75: mol_type = other DNA
gcgatggcaattggcgaacgtgcgccagttgcgctgctggatttcgccgcttctgcccgtctggcggtcggtgaa

SEQ ID NO: 451420 - DNA, 75 bp, synthetic construct
  source 1..75: mol_type = other DNA
gcgtaaccggcatggtagcgcgcgatcagatggtgggtccgtggcaggtgccggtcgctaactgcgcggtcacta

SEQ ID NO: 451421 - DNA, 75 bp, synthetic construct
  source 1..75: mol_type = other DNA
ttgaatcgtgcggatatcaccattgctgatgcggtcaaacgtgtgctgcatcttccgaccgtggcagagaaaacc

SEQ ID NO: 451422 - DNA, 75 bp, synthetic construct
  source 1..75: mol_type = other DNA
tgtttttgaaaatcttcgatgcccaggaagaggcgctggaactggagcaggataactatcaatatccgatcccac

SEQ ID NO: 451423 - DNA, 75 bp, synthetic construct
  source 1..75: mol_type = other DNA
ctatcctgttcaatgaccgtgtacgcgatgagtttgcaaccttcttccatcgtccgcaaacgctggcgctggggg

SEQ ID NO: 451424 - DNA, 75 bp, synthetic construct
  source 1..75: mol_type = other DNA
gtctttctaacgccatgccggaactggtgagcgacggcgggcgcggcggtaaatttgaactgcgcgatatcctga

SEQ ID NO: 451425 - DNA, 75 bp, synthetic construct
  source 1..75: mol_type = other DNA
actggatgtggctgcgcggcaccgggtgcagtttgcgatgcctgagtccgatgcagtgtctatgctcaaaagaat

SEQ ID NO: 451426 - DNA, 75 bp, synthetic construct
  source 1..75: mol_type = other DNA
gcagagcctgatgggccacaagtcagtcagttcgacagaggtgtacacgaaggtgtttgcactggacgtggcggc

SEQ ID NO: 451427 - DNA, 75 bp, synthetic construct
  source 1..75: mol_type = other DNA
ttccgctgacagatataagctatgtcaggcagatggaaagctggatgatcaccacccggccccgccggcgggagc

SEQ ID NO: 451428 - DNA, 75 bp, synthetic construct
  source 1..75: mol_type = other DNA
cccactggagcgcagaaacaaacgaaccggaagaatggagaaggcgcgcatctggggaatcaccgaccgcacagt

SEQ ID NO: 451429 - DNA, 75 bp, synthetic construct
  source 1..75: mol_type = other DNA
gtgcgactggctggaaaacggcggccgtcagcatcaacccgcattcagtgttgatgttgtggataccactggcgc

SEQ ID NO: 451430 - DNA, 75 bp, synthetic construct
  source 1..75: mol_type = other DNA
tcaacggaagtctatacgaaggtttttgcgctggatgttgctgcccggcacagggtgcagtttttgatgcctgag

SEQ ID NO: 451431 - DNA, 75 bp, synthetic construct
  source 1..75: mol_type = other DNA
tgttccggttaccccacatactttccgccattcctacgcgatgcatatgctgtatgctggtattccgctgaaggt

SEQ ID NO: 451432 - DNA, 75 bp, synthetic construct
  source 1..75: mol_type = other DNA
gcgcggtattccgttgtgtatccatctgatgtccagtcagctggttggtgacaggattgaatacgggctgcgtga

SEQ ID NO: 451433 - DNA, 75 bp, synthetic construct
  source 1..75: mol_type = other DNA
catcatcttcaaactcacgcagcaaaggtcatgcaaaagcgcgtcgaaaaacacgcgaggagctggatcaggaag

SEQ ID NO: 451434 - DNA, 75 bp, synthetic construct
  source 1..75: mol_type = other DNA
gccgcaatgccgtatacccggaagggcatcacggtaacgcggttctttcacgttatcccattgaacattatgaaa

SEQ ID NO: 451435 - DNA, 75 bp, synthetic construct
  source 1..75: mol_type = other DNA
gggatggagaaaatgtcagccagttttaaagtttctggttctgattctggtgttatgagctatttcgggttaata

SEQ ID NO: 451436 - DNA, 75 bp, synthetic construct
  source 1..75: mol_type = other DNA
ccaggtgctaaaacaaggttcgaaattcgaagtgcatatactgacaattacggtgtcaattttgaacgtattgat

SEQ ID NO: 451437 - DNA, 75 bp, synthetic construct
  source 1..75: mol_type = other DNA
tccacatgctgagtgagcagtgcgatcgcctgctccccgaaaacaaccagggagggggggtgttgtcaccgtctg

SEQ ID NO: 451438 - DNA, 75 bp, synthetic construct
  source 1..75: mol_type = other DNA
tgtgacgttctctgtcccggtcacaccacatacgttccgccattcctatgcgatgcacatgctgtatgccggtat

SEQ ID NO: 451439 - DNA, 75 bp, synthetic construct
  source 1..75: mol_type = other DNA
aagcagactcaccggctggttccgctctccgacacctggtacgtcagtcagctgcaaacgatggtggcaacactg

SEQ ID NO: 451440 - DNA, 75 bp, synthetic construct
  source 1..75: mol_type = other DNA
tggggggatttttcgcttgcgccttcgtatccgtttgcgcagttggtaactctgaagcagcggacagaaaaagca

SEQ ID NO: 451441 - DNA, 75 bp, synthetic construct
  source 1..75: mol_type = other DNA
agaacgcctgccgggcagcagactcaccggctggttccgctctccgactcctggtacgtcagccagctgcagacg

SEQ ID NO: 451442 - DNA, 75 bp, synthetic construct
  source 1..75: mol_type = other DNA
tggatgtggctgcacggcaccgagtgcagttttcgatgcctgagtccgatgcggtgtctatgctcaaaagaattc

SEQ ID NO: 451443 - DNA, 75 bp, synthetic construct
  source 1..75: mol_type = other DNA
tgacgttctctgtcccggtcacgcacatacgttccgccattcctatgcgatgcatatgctgtatgccggtatacc

SEQ ID NO: 451444 - DNA, 75 bp, synthetic construct
  source 1..75: mol_type = other DNA
aggaagtctacacgaaggtttttgcgctggatgtggctgcccggcaccgggtgcagtttgcgatgctgaaacaat

SEQ ID NO: 451445 - DNA, 75 bp, synthetic construct
  source 1..75: mol_type = other DNA
gcggatctgggaagtgacggacagaacggtcaggacctggattggggaggcggttgccgccgctgctgctgacgg

SEQ ID NO: 451446 - DNA, 75 bp, synthetic construct
  source 1..75: mol_type = other DNA
gaagcactggcgctgacgcggggggatttttcgctcgcgcctccgtatccgtttgtgcagctggccactctgaag

SEQ ID NO: 451447 - DNA, 75 bp, synthetic construct
  source 1..75: mol_type = other DNA
gatggttcatgatgaactgccgaaatatctgctggctcccgaggtgagtgccctgctccattacgtcccggatct

SEQ ID NO: 451448 - DNA, 75 bp, synthetic construct
  source 1..75: mol_type = other DNA
ggccaacaatacattgtatccctggaaacagggacgcaaaacacttatcaaacgtatgaatttttttatggggcg

SEQ ID NO: 451449 - DNA, 75 bp, synthetic construct
  source 1..75: mol_type = other DNA
gtcgcacaggaaggacagagaaagcgcggatctgggaagtgacggacagaacggtcaggacctggattggggagg

SEQ ID NO: 451450 - DNA, 75 bp, synthetic construct
  source 1..75: mol_type = other DNA
accgttgttaccggtcgtgtagaacgcggtatcatcaaagtgggcgaagaagttgaaatcgttggtatcaaagag

SEQ ID NO: 451451 - DNA, 75 bp, synthetic construct
  source 1..75: mol_type = other DNA
ttctacttccgtactactgacgtgactggtaccatcgaactgccggaaggtgtagagatggtaatgccgggcgac

SEQ ID NO: 451452 - DNA, 75 bp, synthetic construct
  source 1..75: mol_type = other DNA
agctgttaatgcaaaactggaatgaagatttgcataccgctggatttatcatcgacgccaacccgcagtcagcga

SEQ ID NO: 451453 - DNA, 75 bp, synthetic construct
  source 1..75: mol_type = other DNA
ccgcgccggcattggcgcggagtactggcgcgactatctaaaattaagcagtaacggctatttgcgactgaccaa

SEQ ID NO: 451454 - DNA, 75 bp, synthetic construct
  source 1..75: mol_type = other DNA
ttcccattcaaccgccacactgacttttattgcgcatgatgcagcaggtaatcctgttatcgggctggtgctctc

SEQ ID NO: 451455 - DNA, 75 bp, synthetic construct
  source 1..75: mol_type = other DNA
acccttgaaaataacggcattgccattacccaggccaatggcgaagcgcatgtcaccctcaaaggcaaaaaagcg

SEQ ID NO: 451456 - DNA, 75 bp, synthetic construct
  source 1..75: mol_type = other DNA
tatcggccacgttgaccatggtaaaacaacactgaccgctgcaatcactaccgtactggctaaaacctacggcgg

SEQ ID NO: 451457 - DNA, 75 bp, synthetic construct
  source 1..75: mol_type = other DNA
caaaaccgcacgttaacgtcggtactatcggccacgttgaccaaggtaaaacaacactgaccgctgcaatcacca

SEQ ID NO: 451458 - DNA, 75 bp, synthetic construct
  source 1..75: mol_type = other DNA
taccaatacccgttcctcgagagaaacaggagcgagaccggataccattgaagctagcctggaaaatggtagctc

SEQ ID NO: 451459 - DNA, 75 bp, synthetic construct
  source 1..75: mol_type = other DNA
tatcggccacgttgaccatggtaaaacgacgctgaccgctgcaatcactaccgtactggctaaaacctacggcgg

SEQ ID NO: 451460 - DNA, 75 bp, synthetic construct
  source 1..75: mol_type = other DNA
tatcggccacgttgaccatggtaaaaccaccctgaccgctgcaatcactaccgtactggctaaaacctacggcgg

SEQ ID NO: 451461 - DNA, 75 bp, synthetic construct
  source 1..75: mol_type = other DNA
caaaaccgcacgttaacgtcggtactatcggccacgttgaccaaggtaaaaccaccctgaccgctgcaatcacga

SEQ ID NO: 451462 - DNA, 75 bp, synthetic construct
  source 1..75: mol_type = other DNA
ggatttagacaataccgtctctgtcggcaatagttcattaaaacgcaagatcgttaatgtgaaaaatggcgcgat

SEQ ID NO: 451463 - DNA, 75 bp, synthetic construct
  source 1..75: mol_type = other DNA
ctgaaagcgctggaaggcgacgcagagtgggaagcgaaaatcctggaactggctggcttccttggattcttacat

SEQ ID NO: 451464 - DNA, 75 bp, synthetic construct
  source 1..75: mol_type = other DNA
gtgcgtggtatcaaacgtgaagaaatcgaacgtggtcaggtactggctaagccgggcaccatcaagccgcacacc

SEQ ID NO: 451465 - DNA, 75 bp, synthetic construct
  source 1..75: mol_type = other DNA
cagcaacgtctccgctggcgtcaacaacaacgacgcggtgaattacgcgcagttgaagcaaagcgtgcaggaaac

SEQ ID NO: 451466 - DNA, 75 bp, synthetic construct
  source 1..75: mol_type = other DNA
cgacgccagcgcacagggtgttggcgctacagctataggttataactctgtcgccaaaggcgatagcagcgtagc

SEQ ID NO: 451467 - DNA, 75 bp, synthetic construct
  source 1..75: mol_type = other DNA
aggatgcgctgaaatgggataaggacaatggtgtattcacggcagctcatggcaacaacgccaccagcaaaatca

SEQ ID NO: 451468 - DNA, 75 bp, synthetic construct
  source 1..75: mol_type = other DNA
atccagcaatatgacggcaaaatcaggcattaatacagcagatacaagcaaagtttatcatttgctggtggtagg

SEQ ID NO: 451469 - DNA, 75 bp, synthetic construct
  source 1..75: mol_type = other DNA
tatcggccacgttgaccagggtaaaacgactctgaccgctgcaatcactaccgtactggctaaaacctacggcgg

SEQ ID NO: 451470 - DNA, 75 bp, synthetic construct
  source 1..75: mol_type = other DNA
tatcggccacgttgaccacggtaaaaccactctgaccgctgcaatcactaccgtactggctaaaacctacggcgg

SEQ ID NO: 451471 - DNA, 75 bp, synthetic construct
  source 1..75: mol_type = other DNA
cacaccaagttcgaatctgaagtgtacattctgtccaaagatgaaggcggtcgtcatactccgttctttaaaggc

SEQ ID NO: 451472 - DNA, 75 bp, synthetic construct
  source 1..75: mol_type = other DNA
atgacagatttaatccaacgccctcgtcgcctgcgcaaatctcctgcgctgcgcgctatgtttgaagagataaca

SEQ ID NO: 451473 - DNA, 75 bp, synthetic construct
  source 1..75: mol_type = other DNA
atgctaaccgcccagaagaagatattttcactgactggtatgtcgccaaaatccagcaatatgacagcaaaatca

SEQ ID NO: 451474 - DNA, 75 bp, synthetic construct
  source 1..75: mol_type = other DNA
tcgaaaaccaactcccccatcatttcaaagacactctgcgcatcgctggcgctcgtctcttcaatctgcagagta

SEQ ID NO: 451475 - DNA, 75 bp, synthetic construct
  source 1..75: mol_type = other DNA
ctgaatgcctgtgcaggtgctttccgcgcccgtgatattcagctctggcaggtcgtgttctcacgcggtgttgaa

SEQ ID NO: 451476 - DNA, 75 bp, synthetic construct
  source 1..75: mol_type = other DNA
agcgaaccccacttcgtgatggaagactggcataacttcggtgctgattacgatactacgttgatggcgtggtat

SEQ ID NO: 451477 - DNA, 75 bp, synthetic construct
  source 1..75: mol_type = other DNA
gctgcgaaggtctggatgtcaccatattgctgcaagattaccgtgacctgaacgatcaatttgaccgcattgttt

SEQ ID NO: 451478 - DNA, 75 bp, synthetic construct
  source 1..75: mol_type = other DNA
ctgaatgcttgcgcaggcgctttccgtgcgcgtgatattcagctctggcaggtggtgttctctcgcggggttgaa

SEQ ID NO: 451479 - DNA, 75 bp, synthetic construct
  source 1..75: mol_type = other DNA
cggagggtattttcctgctgcatactatcggctcgaaaaaaacagatctaaatgttgatccgtggattaataaat

SEQ ID NO: 451480 - DNA, 75 bp, synthetic construct
  source 1..75: mol_type = other DNA
taaggcgattattgctggtggccctcggtatggactgaacgggcaaccttgcggtgaagtcacggaagaagataa

SEQ ID NO: 451481 - DNA, 75 bp, synthetic construct
  source 1..75: mol_type = other DNA
ggataaaccgactggctgagtactggcctgaactgtttggggcagagaatataaaaccccttaaggctggcgtga

SEQ ID NO: 451482 - DNA, 75 bp, synthetic construct
  source 1..75: mol_type = other DNA
tttcacccgcagagattatgtttttagccataaataatagagcgcgtgcgcaaagaacactgaaatattattact

SEQ ID NO: 451483 - DNA, 75 bp, synthetic construct
  source 1..75: mol_type = other DNA
ctgaatgcttgcgctggtgctttccgcgcccgtgatattcaactctggcaagtggtgttctctcgaggagtcgaa

SEQ ID NO: 451484 - DNA, 75 bp, synthetic construct
  source 1..75: mol_type = other DNA
cggagactggagcggatgaagcagcaaaacagccagcagcaatcagccggaggtgaagccagtgataacggacag

SEQ ID NO: 451485 - DNA, 75 bp, synthetic construct
  source 1..75: mol_type = other DNA
ggcgtattacgtggcgcattaacctcacaccttcacacgacgcgataccttaaggcgattattgctggtggccca

SEQ ID NO: 451486 - DNA, 75 bp, synthetic construct
  source 1..75: mol_type = other DNA
ggtttgggagaaggtgctccagctattggcgttccgttcttctggccgtccgccgcaatgccagataccgtaatc

SEQ ID NO: 451487 - DNA, 75 bp, synthetic construct
  source 1..75: mol_type = other DNA
gccgtgctggtgagaacgtaggtgttctgctgcgtggtatcaaacgtgaagaaatcgaacgtggtcaggtactgg

SEQ ID NO: 451488 - DNA, 75 bp, synthetic construct
  source 1..75: mol_type = other DNA
gtggtaccgttgttaccggtcgtagtagaacgcggtatcatcaaagttggtgaagaagttgaaatcgttggtatc

SEQ ID NO: 451489 - DNA, 75 bp, synthetic construct
  source 1..75: mol_type = other DNA
agaaggtcagcggctgcgccagagaatttctggtcgtagatggctttctctgctcgcgtagtgactccacaaaaa

SEQ ID NO: 451490 - DNA, 75 bp, synthetic construct
  source 1..75: mol_type = other DNA
caaaaccgcacgttaacgtaggtactatcggccacgttgaccaaggtaaaacaacgctgaccgctgcaatcacga

SEQ ID NO: 451491 - DNA, 75 bp, synthetic construct
  source 1..75: mol_type = other DNA
caaaaccgcacgttaacgtaggtactatcggccacgttgaccaaggtaaaacaaccctgaccgctgcaatcacca

SEQ ID NO: 451492 - DNA, 75 bp, synthetic construct
  source 1..75: mol_type = other DNA
caaaaccgcacgttaacgtaggtactatcggccacgttgaccaaggtaaaacaacactgaccgctgcaatcacaa

SEQ ID NO: 451493 - DNA, 75 bp, synthetic construct
  source 1..75: mol_type = other DNA
cagtatggtgtttttgaagttcaacggggcgaaattttctgcctctgattaccctgtgctggcgaaagtgtttcc

SEQ ID NO: 451494 - DNA, 75 bp, synthetic construct
  source 1..75: mol_type = other DNA
ggggcgaaattttctgccactgattaccctgtgctggcgaaagtgtttccttcgctggtattacctgaagcccgc

SEQ ID NO: 451495 - DNA, 75 bp, synthetic construct
  source 1..75: mol_type = other DNA
aactcagtaggagatggtgttaattttgttgctgtcagaccgcgaaatattgcatttaactttctggtgagggct

SEQ ID NO: 451496 - DNA, 75 bp, synthetic construct
  source 1..75: mol_type = other DNA
gatggaaacggcaacccgttagccaatgaggcggtgacattcacgctaccggcagatgtgagcgcaagcttcact

SEQ ID NO: 451497 - DNA, 75 bp, synthetic construct
  source 1..75: mol_type = other DNA
gtaaacccaggaatactggctacatacggtgacgggggaatagttaaaacggacgaacccggtcttaaggtgcct

SEQ ID NO: 451498 - DNA, 75 bp, synthetic construct
  source 1..75: mol_type = other DNA
atgccatttgctcgttatttctgcattttcataaacgttggtttgggagaaggtgctccagctattggcgttccg

SEQ ID NO: 451499 - DNA, 75 bp, synthetic construct
  source 1..75: mol_type = other DNA
gtgattgaatttaaaaacgtctccaagcattttggtccaacccaggtgctgcacaatatcgatttgaacattgcc

SEQ ID NO: 451500 - DNA, 75 bp, synthetic construct
  source 1..75: mol_type = other DNA
gacccacgaaatcggttttgctgagaaagtggcttcacgtctaatctttattgataaaggccggattgcggaaga

SEQ ID NO: 451501 - DNA, 75 bp, synthetic construct
  source 1..75: mol_type = other DNA
tcgacaaaggccggattgcggaagatggcgatccgcaagtgttgatcaaaaatccgccgagccagcgcttgcagg

SEQ ID NO: 451502 - DNA, 75 bp, synthetic construct
  source 1..75: mol_type = other DNA
cgcttgattgatcgtctgcagcaattcgttccggatgccttacccgtggttcgtaaagccagctggcactgcagg

SEQ ID NO: 451503 - DNA, 75 bp, synthetic construct
  source 1..75: mol_type = other DNA
cgcttgatttatcgtctgcagcaattcgttccggatgccttacccgtggtccgtaaagccagctggcactgcagc

SEQ ID NO: 451504 - DNA, 75 bp, synthetic construct
  source 1..75: mol_type = other DNA
ttgatggcaacggacgtctgacgggcgcccgtaccgcacagactgcaccttatgctcactacacctgccacttgt

SEQ ID NO: 451505 - DNA, 75 bp, synthetic construct
  source 1..75: mol_type = other DNA
ctgtttacggtgcccggtgaccgtatcaccgcggttaacagtctggacggtgtactgaccagtaacgagcagacc

SEQ ID NO: 451506 - DNA, 75 bp, synthetic construct
  source 1..75: mol_type = other DNA
atgagaaaaaataatacagcaataatattcggcggcctgtttttttcctgcagcgtgatggccgcaaacggcacg

SEQ ID NO: 451507 - DNA, 75 bp, synthetic construct
  source 1..75: mol_type = other DNA
tcaacaaaaagccctttacgttcattctggaaacagagcgtggtctgaacctttccattcaggccgttccccgtg

SEQ ID NO: 451508 - DNA, 75 bp, synthetic construct
  source 1..75: mol_type = other DNA
acaaagaagaggcggaaaaactggcgcgtgagctgctggcgaaagtcggcctggcagaacgcgctcaccactacc

SEQ ID NO: 451509 - DNA, 75 bp, synthetic construct
  source 1..75: mol_type = other DNA
cttccgaactttctggtggtcaacagcagcgtgtggcgattgcccgcgcgctggcggtggaagccgaaaatgatg

SEQ ID NO: 451510 - DNA, 75 bp, synthetic construct
  source 1..75: mol_type = other DNA
gacagcgctggaaaacgtgatgtttggtccactgcgtgtacgcggtgcaagcaaagacgcggcagaaaaactggc

SEQ ID NO: 451511 - DNA, 75 bp, synthetic construct
  source 1..75: mol_type = other DNA
cgcttgattgatcgtctgcagcaattcgttccggatgccttacccgtggtgcgtaaagccagctggcactgcagt

SEQ ID NO: 451512 - DNA, 75 bp, synthetic construct
  source 1..75: mol_type = other DNA
tgtcaggccggagcgcagagaggtacgcttgattaagcgtctgcagcaattcttaccggatgccttacccgtggt

SEQ ID NO: 451513 - DNA, 75 bp, synthetic construct
  source 1..75: mol_type = other DNA
atgtacgcaaaatcctttgtcgctcttgatggcaacggacgtctgacgggcgcccgtactgaacaggccgcacct

SEQ ID NO: 451514 - DNA, 75 bp, synthetic construct
  source 1..75: mol_type = other DNA
atgtacgcaaaatcctttgtcgctcttgatagcaacggacgtctgacgggcgcccgtactggacaggccgcacct

SEQ ID NO: 451515 - DNA, 75 bp, synthetic construct
  source 1..75: mol_type = other DNA
caatgtcaccacgattattatggggagcggtactgcacacactgccagaccggacgcttcagtgaggagggggta

SEQ ID NO: 451516 - DNA, 75 bp, synthetic construct
  source 1..75: mol_type = other DNA
tatgtacaaccggaacacagggaagtacagctgattaaacgtctgcagcaattcgtaccggatgccttacccgtg

SEQ ID NO: 451517 - DNA, 75 bp, synthetic construct
  source 1..75: mol_type = other DNA
ttttcaccattactgcaagaaaaactcgctgctgttagccgcaggaataaaaatgttgaagatgattcacctttt

SEQ ID NO: 451518 - DNA, 75 bp, synthetic construct
  source 1..75: mol_type = other DNA
caatgtcaccacgattattatggggagccgtactgcacacactgccagaccgggcggttcagtgaggaggaggta

SEQ ID NO: 451519 - DNA, 75 bp, synthetic construct
  source 1..75: mol_type = other DNA
caatgtcaccacgattattatggggagctgtactgcacacactgccagaccgggcgattcagtgaggaggtggta

SEQ ID NO: 451520 - DNA, 75 bp, synthetic construct
  source 1..75: mol_type = other DNA
caatgtcaccacgattattatggggagcagtactgcacacactgccagaccgggcgtttcagtgaggaggtggta

SEQ ID NO: 451521 - DNA, 75 bp, synthetic construct
  source 1..75: mol_type = other DNA
atgtacgcaaaatcctttttcgctcttgattgcaacggacgtctgacgggcgcccgtactggacaggccgcacct

SEQ ID NO: 451522 - DNA, 75 bp, synthetic construct
  source 1..75: mol_type = other DNA
atgtacgcaaaatcctttatcgctcttgatggcaacggacgtctgacgggcgcccgtactggacaggccgcacct

SEQ ID NO: 451523 - DNA, 75 bp, synthetic construct
  source 1..75: mol_type = other DNA
caatgtcaccacgattattatggggagcggtactgcacacactgccagaccgggcgcttcagtgaggaggaggta

SEQ ID NO: 451524 - DNA, 75 bp, synthetic construct
  source 1..75: mol_type = other DNA
ggctggataatttcggggaaacagacgatgagaaaaaataatacggcaataatattcggcagcctgtttttttcc

SEQ ID NO: 451525 - DNA, 75 bp, synthetic construct
  source 1..75: mol_type = other DNA
tatgccaataaagtggcatttatcgacaccgattttgtgacaactcaggcgttctgcaaaaagtatgaagggcgt

SEQ ID NO: 451526 - DNA, 75 bp, synthetic construct
  source 1..75: mol_type = other DNA
aaaaggcattcagccggatctgatctacacctcggaagagaccgacgcaccacagtacctggagcatctggggat

SEQ ID NO: 451527 - DNA, 75 bp, synthetic construct
  source 1..75: mol_type = other DNA
gaagaggacgattacgacagccgtttcctgcgctgtgtggagctggtgcgggagatgatgggggagcagggataa

SEQ ID NO: 451528 - DNA, 75 bp, synthetic construct
  source 1..75: mol_type = other DNA
cggtaaatccaccctggtaaacaaacttgccaatatcttcaacactaccagtgcatgggaatatggtcgcgatta

SEQ ID NO: 451529 - DNA, 75 bp, synthetic construct
  source 1..75: mol_type = other DNA
ttgaagacagcgccatgtcgcagcagcccacggtgccggatcgtctgcgctggttattgcaaacctttaaatatc

SEQ ID NO: 451530 - DNA, 75 bp, synthetic construct
  source 1..75: mol_type = other DNA
tccagcgcgcctgtagccaggttgacgagctgcatatcattatgggttttgacgatacccgtgaccgcgcgttgt

SEQ ID NO: 451531 - DNA, 75 bp, synthetic construct
  source 1..75: mol_type = other DNA
atgaattcgtcacagcaggcggcgtttgaggccgcagccggtccggggatgtctccgtctgttctgaatctgttg

SEQ ID NO: 451532 - DNA, 75 bp, synthetic construct
  source 1..75: mol_type = other DNA
tgctggcccggctgctgaagctgctgaagaaaaaactgaattcgacgtaattctgaaagctgctggcgctaacaa

SEQ ID NO: 451533 - DNA, 75 bp, synthetic construct
  source 1..75: mol_type = other DNA
gcaatggaagaaaaattcggtgtttctgctgctgctgctgctgtagctgtagctgctggcccggttgaagctgct

SEQ ID NO: 451534 - DNA, 75 bp, synthetic construct
  source 1..75: mol_type = other DNA
atgagaaaaaataagacagtaataatatccgcctgcctgcttttttccggcagcgtgctggcaggaaacggcaca

SEQ ID NO: 451535 - DNA, 75 bp, synthetic construct
  source 1..75: mol_type = other DNA
gaccatcagccaggctgtccgtggcggaaaattacccgctggctggtatcaggttccggtgacaaaggaaaacct

SEQ ID NO: 451536 - DNA, 75 bp, synthetic construct
  source 1..75: mol_type = other DNA
gttatcaggtgtgtttaaagctgttctgctgggcaataccctgcagtttcgggtgatcgctgagatatttcaggg

SEQ ID NO: 451537 - DNA, 75 bp, synthetic construct
  source 1..75: mol_type = other DNA
gcccacggtgccggatcgtctgcgctggttattgcaaacttttaaatatcagaaaaatattcgcattcatgcttt

SEQ ID NO: 451538 - DNA, 75 bp, synthetic construct
  source 1..75: mol_type = other DNA
tgggcattcggtttttacaacgttatgttatcaggtgtgtttaaagctgttctgctgggcaataccctgcagttt

SEQ ID NO: 451539 - DNA, 75 bp, synthetic construct
  source 1..75: mol_type = other DNA
gaagacgtgttatattggagttgcaataatgcgaatagcacccgtaaatactgggctgtaggtggtatttatcag

SEQ ID NO: 451540 - DNA, 75 bp, synthetic construct
  source 1..75: mol_type = other DNA
gcggcaatttaggggcgctgtggcaatatcagcgacaaaaagggcagaagcgttactgtctgaaatgcagggaat

SEQ ID NO: 451541 - DNA, 75 bp, synthetic construct
  source 1..75: mol_type = other DNA
cactgcagacaatgtcaccacgattattatggggagcggtactgcactcactgccatacagggcacttcagtgag

SEQ ID NO: 451542 - DNA, 75 bp, synthetic construct
  source 1..75: mol_type = other DNA
gccacctttgcggcagtgcactcagataccatccgcagtacgacactgaacttccctggtttgaacacactgacg

SEQ ID NO: 451543 - DNA, 75 bp, synthetic construct
  source 1..75: mol_type = other DNA
tgcccgtaccgcacagactgcgccatatgatcgttatacctgtcatctttgtggcagttcgctcagataccaccc

SEQ ID NO: 451544 - DNA, 75 bp, synthetic construct
  source 1..75: mol_type = other DNA
ggaaaattacccgcaggctggtatcaggtcccggtgacaaaggaaaccctgcaggccccggcggggctgtcttca

SEQ ID NO: 451545 - DNA, 75 bp, synthetic construct
  source 1..75: mol_type = other DNA
ctaaagtaaacaatgagactgtttcttatttttgcgaaggttataaaaaccttttttctcaaccatggtacctta

SEQ ID NO: 451546 - DNA, 75 bp, synthetic construct
  source 1..75: mol_type = other DNA
ttatttttgcgaaggttataaaaatccttttttcaaccatggtaccttatatgaacgccatggtagagttagcta

SEQ ID NO: 451547 - DNA, 75 bp, synthetic construct
  source 1..75: mol_type = other DNA
agcctatctcctaccgcccaagtgctgaggtgcgtgagtttttggaaggcaacgcagctaaaagctaccgctcaa

SEQ ID NO: 451548 - DNA, 75 bp, synthetic construct
  source 1..75: mol_type = other DNA
ggcgccgggcgtaccattcagctggtcagcgatttgcgcggaacaggagaaactgccggtgcatgggaaacatcc

SEQ ID NO: 451549 - DNA, 75 bp, synthetic construct
  source 1..75: mol_type = other DNA
cagcgtgctggcaggaaacggcacactggcacctacagtggttccgatggtcaatggcggtcaggcaagtattgc

SEQ ID NO: 451550 - DNA, 75 bp, synthetic construct
  source 1..75: mol_type = other DNA
atgcctcagcggtatcggattttgaactgcggttgccggcagagggcacaccggctcgctggcaggcggggctga

SEQ ID NO: 451551 - DNA, 75 bp, synthetic construct
  source 1..75: mol_type = other DNA
ccgactctcttccctgttactgatgaatcagaattttggcaatggcatgaatgcggtggataacggacaggttat

SEQ ID NO: 451552 - DNA, 75 bp, synthetic construct
  source 1..75: mol_type = other DNA
cagataagttctcccgaccagacctggtctgtggatactgccgatgcccgtacagagaacgggcaactggttttt

SEQ ID NO: 451553 - DNA, 75 bp, synthetic construct
  source 1..75: mol_type = other DNA
atgaacttattggtcagctggcgtttgatgttgatcaaggtcttgctatcagtgtgggcagtcaagaagatagtg

SEQ ID NO: 451554 - DNA, 75 bp, synthetic construct
  source 1..75: mol_type = other DNA
gtgaccctgaaacggggaacgtgttgggacagctttcttttaccctgaatcaggggatggcagtcagtgccggta

SEQ ID NO: 451555 - DNA, 75 bp, synthetic construct
  source 1..75: mol_type = other DNA
gatttacggaataaaggtaccctgccgtttctggaaggccatttatatgaagtggcagagcgcgggggacccggg

SEQ ID NO: 451556 - DNA, 75 bp, synthetic construct
  source 1..75: mol_type = other DNA
cggggaattattcttcccggcgctgttgccctttgcctgggttatatattttctgtgtacagattgtacgcctcg

SEQ ID NO: 451557 - DNA, 75 bp, synthetic construct
  source 1..75: mol_type = other DNA
ccgtgaagatccgcaggcaaatccactgaccacgccatcggggaaaattgagatttattcgcaggcgctggctga

SEQ ID NO: 451558 - DNA, 75 bp, synthetic construct
  source 1..75: mol_type = other DNA
gggaagcgattcctgaactgccaacgtttgaagagttccgtaagcaggggatctttaaaaagcgcgacccacaag

SEQ ID NO: 451559 - DNA, 75 bp, synthetic construct
  source 1..75: mol_type = other DNA
atgaaaatagcgcatcattataaaacccttctttcagccattatttcggtggccctgttttattcgtcagtgtct

SEQ ID NO: 451560 - DNA, 75 bp, synthetic construct
  source 1..75: mol_type = other DNA
gaactgcggttaccggcagagggcacgcctgcagcatggcaggcagggctgaatgtgacggttacagtacagtga

SEQ ID NO: 451561 - DNA, 75 bp, synthetic construct
  source 1..75: mol_type = other DNA
tgcttcacgttttgcctgctcatcggatacacccatctctggcttaattcatcagtcccccatctggaacaggag

SEQ ID NO: 451562 - DNA, 75 bp, synthetic construct
  source 1..75: mol_type = other DNA
gtgatccggaggcagggcgagtgttaggacagctttcttttaccttaaatcaggggatggcggttagttcaggca

SEQ ID NO: 451563 - DNA, 75 bp, synthetic construct
  source 1..75: mol_type = other DNA
ctcaacatttgctcccccatccatttgaaggctctgattttgcgctgttaggatatacaggagcaaaatcacctg

SEQ ID NO: 451564 - DNA, 75 bp, synthetic construct
  source 1..75: mol_type = other DNA
taccgtctgggtcagggttcaacatcagatgcacaaaccgccgcacggaccgggcttatggttggcgtttgtatg

SEQ ID NO: 451565 - DNA, 75 bp, synthetic construct
  source 1..75: mol_type = other DNA
atgcctcagcagtgtcggattttgagctgcggttaccggcagagggcacgcctgcagcatggcaggcagggctga

SEQ ID NO: 451566 - DNA, 75 bp, synthetic construct
  source 1..75: mol_type = other DNA
agtaaagctggtaataacgggccgtgggtaactcactgggaagaaatggcaaagaaaacggctattcgtcgcctg

SEQ ID NO: 451567 - DNA, 75 bp, synthetic construct
  source 1..75: mol_type = other DNA
aagacggaacatattttcaggaatttactttttgggaaaatgcaacacttagagcattatttgaatatcaaaagt

SEQ ID NO: 451568 - DNA, 75 bp, synthetic construct
  source 1..75: mol_type = other DNA
tatgcgccagtaacactatcacttttgatgactaaagaaagtagtgaaatatatgaggcatatttaaaacgaggt

SEQ ID NO: 451569 - DNA, 75 bp, synthetic construct
  source 1..75: mol_type = other DNA
catgcagatattcttgatggtggagaaattcagtttaatggttttgtcactgacgaagcccccaaatggacctgg

SEQ ID NO: 451570 - DNA, 75 bp, synthetic construct
  source 1..75: mol_type = other DNA
aaattcagtttaacggctttgtcactgacgaagcccccaaatggacctggcagataagttctcctgaccagacct

SEQ ID NO: 451571 - DNA, 75 bp, synthetic construct
  source 1..75: mol_type = other DNA
atggtggtgaaatccagtttcatggttttgttactgatgaggcacctaaatggacttggcagataggttcatccg

SEQ ID NO: 451572 - DNA, 75 bp, synthetic construct
  source 1..75: mol_type = other DNA
ggcggctctgttttattcagcagcgtcacatgcagatattcttgatggtggcgaaatccagtttaatggatttgt

SEQ ID NO: 451573 - DNA, 75 bp, synthetic construct
  source 1..75: mol_type = other DNA
taatttgcgtgataaaggaacgctgtcgtttctggaggggcatttgcatgaggtggctgagcgcggtggtcccgg

SEQ ID NO: 451574 - DNA, 75 bp, synthetic construct
  source 1..75: mol_type = other DNA
ggtcagtggatactgccgatgcacgtacagagaatggacagcttgtttttgatttgcgtgacaaaggatccctgc

SEQ ID NO: 451575 - DNA, 75 bp, synthetic construct
  source 1..75: mol_type = other DNA
ctggcagctggagagtgccattaccgacgcgaccgccgcgctgctgtatgtgaagtcgcatcactgcgtgcagaa

SEQ ID NO: 451576 - DNA, 75 bp, synthetic construct
  source 1..75: mol_type = other DNA
tttgaacacactgacgacgggctgactaagcacggtcatgagtgcccttatgtcagaccggaacgcagggaggta

SEQ ID NO: 451577 - DNA, 75 bp, synthetic construct
  source 1..75: mol_type = other DNA
tcatggctcttgacggtaatggccgcctgaccgccgcccgtactgcgcagactgccccttacgaccgctatagct

SEQ ID NO: 451578 - DNA, 75 bp, synthetic construct
  source 1..75: mol_type = other DNA
aaaagcaggtgatgttcatccggtctataaggcgctgaatacgctggattataccgttggcacactcggcaatca

SEQ ID NO: 451579 - DNA, 75 bp, synthetic construct
  source 1..75: mol_type = other DNA
atgtacgcaaaatcctttctcgctcttgatggcaacgggcatctgacaggcgcccgtactgcacaggccgcacct

SEQ ID NO: 451580 - DNA, 75 bp, synthetic construct
  source 1..75: mol_type = other DNA
caatgtcaccacgattattatggggaacgctattgtacacactgtcatacagggcgtttcagtgaggaagtagtg

SEQ ID NO: 451581 - DNA, 75 bp, synthetic construct
  source 1..75: mol_type = other DNA
agcttcagcttcgtctggatgatgatttctctgatgaagatgagttgcttgaactgcttgggaaggccgctcaga

SEQ ID NO: 451582 - DNA, 75 bp, synthetic construct
  source 1..75: mol_type = other DNA
ataccgtcggcacgcttggcaaccatgagtttaactacggtctggattacctgaaaaatgcgctggcgggagcga

SEQ ID NO: 451583 - DNA, 75 bp, synthetic construct
  source 1..75: mol_type = other DNA
gcggcagtgcactcagataccatccgcaatacgacactgaacttccctggtttgaacacactgacgacaggctga

SEQ ID NO: 451584 - DNA, 75 bp, synthetic construct
  source 1..75: mol_type = other DNA
ccggatgccttacccgtggtgcgtaaagccagctggtactgcagacaatgtcaccacgattattatggggagcag

SEQ ID NO: 451585 - DNA, 75 bp, synthetic construct
  source 1..75: mol_type = other DNA
ccgattacatatcggcgaaaggattaaaagcaggtgatgttcatccggtttataaggcgctgaatacgctggatt

SEQ ID NO: 451586 - DNA, 75 bp, synthetic construct
  source 1..75: mol_type = other DNA
ttatctcagtgaaattccgggcgttgacgccattatgtttggccatgctcacgccgtcttcccgagtaaagattt

SEQ ID NO: 451587 - DNA, 75 bp, synthetic construct
  source 1..75: mol_type = other DNA
agccgatcacgatgccacacgccagttcgtcagcaagccaatcggtaaatctgccgacaatatgtatagctatct

SEQ ID NO: 451588 - DNA, 75 bp, synthetic construct
  source 1..75: mol_type = other DNA
tgtcagaccggagcgcagggagatacaactgattaaacgtctgcagcaattcgtaccggatgccttacccgtagt

SEQ ID NO: 451589 - DNA, 75 bp, synthetic construct
  source 1..75: mol_type = other DNA
catgatctggcaaacctgggagcaggataaaaacccgcaacctcaggcccaacagaccacgcagacaacgaccac

SEQ ID NO: 451590 - DNA, 75 bp, synthetic construct
  source 1..75: mol_type = other DNA
aactgatctcggttaagaccgacgtgcttgatctgaccatcaacacccgtggtggtgatgttgagcaggccctgc

SEQ ID NO: 451591 - DNA, 75 bp, synthetic construct
  source 1..75: mol_type = other DNA
ttcgaaaagaacaaaaattagcattacgaattcaatctgagaacgcattcgaaaagattgccagagagtggcatc

SEQ ID NO: 451592 - DNA, 75 bp, synthetic construct
  source 1..75: mol_type = other DNA
aacactcttattcgcatggggttcacatggaacggtggagcctactggcaagcacctcaccccattttatccggc

SEQ ID NO: 451593 - DNA, 75 bp, synthetic construct
  source 1..75: mol_type = other DNA
gataccggtgccaataacgaccatgcagccagaagactgaaacaggtggttgataatttgaacattatttatggc

SEQ ID NO: 451594 - DNA, 75 bp, synthetic construct
  source 1..75: mol_type = other DNA
gtatgctgcagccgaagattcaggcgatgcgcgagcgtctgggcgatgacaaacagcgtatcagccaggaaatga

SEQ ID NO: 451595 - DNA, 75 bp, synthetic construct
  source 1..75: mol_type = other DNA
ctgagcatggtcatgagtgcccttatgtcagaccggagcgcagagaaatactgttgattaaacgcttacggcaat

SEQ ID NO: 451596 - DNA, 75 bp, synthetic construct
  source 1..75: mol_type = other DNA
tttgaacacactggcgaagggctggctgagcacggtcatgagtgcccttatgtcagaccggagcgcagagaaata

SEQ ID NO: 451597 - DNA, 75 bp, synthetic construct
  source 1..75: mol_type = other DNA
atgtacgcaaaatcttttctcgcacttgatggcaacggacgtctgaccggtgcccgtaccgcacaaactgctcct

SEQ ID NO: 451598 - DNA, 75 bp, synthetic construct
  source 1..75: mol_type = other DNA
gggctgcaaagcccactgacaaggtttataaactcactgacggggccggcatgttcctgctggttcatcctaatg

SEQ ID NO: 451599 - DNA, 75 bp, synthetic construct
  source 1..75: mol_type = other DNA
ggacgctgagcgacagataatcacagaggcgcttaatatccatcaggggcgtatcaatgaggttgctgaatattt

SEQ ID NO: 451600 - DNA, 75 bp, synthetic construct
  source 1..75: mol_type = other DNA
aagctgcggaagaagcagcgaagaaagcggctgcagacgcaaagaaaaaagcagaagcagaagccgccaaagccg

SEQ ID NO: 451601 - DNA, 75 bp, synthetic construct
  source 1..75: mol_type = other DNA
ggatggcaaggagaatggaaagggcgcaacaagacaaaagcccgtgttttgtgtcctatacacaatcaaatcatg

SEQ ID NO: 451602 - DNA, 75 bp, synthetic construct
  source 1..75: mol_type = other DNA
atagaacttgcggacggttgccatttaaacctgagctttatgaaaaatctaatggataaatcgattaacagaaac

SEQ ID NO: 451603 - DNA, 75 bp, synthetic construct
  source 1..75: mol_type = other DNA
cccggactggcggccagatgctgattttactcgcctggccgcattatggggcgtggcgctaagagaacccgccac

SEQ ID NO: 451604 - DNA, 75 bp, synthetic construct
  source 1..75: mol_type = other DNA
gaaagctgtcagaaaaactatcgcggcgttgccgggtggttacgctgaagctgctgactggctggatgtaacaga

SEQ ID NO: 451605 - DNA, 75 bp, synthetic construct
  source 1..75: mol_type = other DNA
gtaacagagaacgctttattcaaccgccttcgtgcagatggcgatcagattttcccgctgggatgggcaatgatt

SEQ ID NO: 451606 - DNA, 75 bp, synthetic construct
  source 1..75: mol_type = other DNA
aaaaacagcctgagtggtacgtgaaagctgtcagaaaaactatcgcggcgttgccgggtggttacgctgaagcag

SEQ ID NO: 451607 - DNA, 75 bp, synthetic construct
  source 1..75: mol_type = other DNA
cagaaaagagtgacgcccgcgagtgtgcagctccgggcgtcgtggcgttttgtatctgtggagaaactaacgcat

SEQ ID NO: 451608 - DNA, 75 bp, synthetic construct
  source 1..75: mol_type = other DNA
ttgcatttcagaaagtaatgacgcccgcgagtgtgcagctccgggcgccgtggcgtgtcgtgactgtggagaaac

SEQ ID NO: 451609 - DNA, 75 bp, synthetic construct
  source 1..75: mol_type = other DNA
gatggcgatcagattttcccgctgggatgggcaatgattttacaacgtgctggtggcactcacttcattgctgac

SEQ ID NO: 451610 - DNA, 75 bp, synthetic construct
  source 1..75: mol_type = other DNA
tacccatggggaaattcgccatgtatccggactggcaacccgatgccgactttatccgcctggcggcgctatggg

SEQ ID NO: 451611 - DNA, 75 bp, synthetic construct
  source 1..75: mol_type = other DNA
tccggactggcaacccgatgccgactttatccgtcaggcggcattatggggcgtggcactaagagagccggtgac

SEQ ID NO: 451612 - DNA, 75 bp, synthetic construct
  source 1..75: mol_type = other DNA
ttatgccgtcacgcctgcacgcctggctgaactgctggcgctggaagaaaagctggcgcgtccgggaagcgatgt

SEQ ID NO: 451613 - DNA, 75 bp, synthetic construct
  source 1..75: mol_type = other DNA
cagcgcctgctggaagtcatcgaacagatcgggagttactcaaagcagattcgttcggcaatcgaagacggggta

SEQ ID NO: 451614 - DNA, 75 bp, synthetic construct
  source 1..75: mol_type = other DNA
ccatcgtcacttttttacctgtcttgttactgctgtttttagagcgcatcagcgttaaaaaattgatgattgcct

SEQ ID NO: 451615 - DNA, 75 bp, synthetic construct
  source 1..75: mol_type = other DNA
ttcaaattgagctgggaggaaaacagtttacctatgacttgacgatcaaaaacatggataaaaaaccaacaatca

SEQ ID NO: 451616 - DNA, 75 bp, synthetic construct
  source 1..75: mol_type = other DNA
caaccatgctgtttgtctatattgtgatcattattggcatggtgtggagtattcgctttaaaacgatttcgccac

SEQ ID NO: 451617 - DNA, 75 bp, synthetic construct
  source 1..75: mol_type = other DNA
atttttcctggttcgcggtgtttttatcactgtggtacatggggaaagtgataaaaatgatgatcaacgcttttg

SEQ ID NO: 451618 - DNA, 75 bp, synthetic construct
  source 1..75: mol_type = other DNA
gctgtattcctggttggtgtggtaatcgcgtttccttatatttccacccgcttgggcgatttaggtacggaagga

SEQ ID NO: 451619 - DNA, 75 bp, synthetic construct
  source 1..75: mol_type = other DNA
attatcatttagtcctacgaaagcgaagaactatcagcgttataacgaacggataaaaggaaaacgtcaggaatg

SEQ ID NO: 451620 - DNA, 75 bp, synthetic construct
  source 1..75: mol_type = other DNA
gcttgatgatattaaacggcatttgcccaagggcgaatgtctggttgagccttttgtaggtgccggggggggggg

SEQ ID NO: 451621 - DNA, 75 bp, synthetic construct
  source 1..75: mol_type = other DNA
ctttaaagagtgggctaccttcggctattgacgaagataaggcaatggttagaagaattataagtaatgaagatg

SEQ ID NO: 451622 - DNA, 75 bp, synthetic construct
  source 1..75: mol_type = other DNA
atgaaaaagatggcagaaaacattccagaaatacagattgaagagcttaaaaatgccgatattaatcgccgagtt

SEQ ID NO: 451623 - DNA, 75 bp, synthetic construct
  source 1..75: mol_type = other DNA
ggtcaatggctacgccaacaaactgctgttgccgcgttttgccaaatcggcatttgatgagttttctactcccgc

SEQ ID NO: 451624 - DNA, 75 bp, synthetic construct
  source 1..75: mol_type = other DNA
tgataggggttaacctgccagataaaaggactgagtttacacaacgtctcttattgacgcgcaatatttcgggtt

SEQ ID NO: 451625 - DNA, 75 bp, synthetic construct
  source 1..75: mol_type = other DNA
gaaacacatcacagaactggatgatataacactttgtttagagtggacaaaactacgagaggaaaacaatcgtct

SEQ ID NO: 451626 - DNA, 75 bp, synthetic construct
  source 1..75: mol_type = other DNA
tgaccactctgcgcccttcaccactggcgaaaggcaacccgcagcacaccaatctggttgagatcgagaaggttt

SEQ ID NO: 451627 - DNA, 75 bp, synthetic construct
  source 1..75: mol_type = other DNA
atattgcgttggctacgacgagaaaaccctgccagccagtgcgccgaaaaatggtcactataaagcttatattct

SEQ ID NO: 451628 - DNA, 75 bp, synthetic construct
  source 1..75: mol_type = other DNA
tgatggcatgggcaaaattctggtccagcgtcgtaccgagacaaaagactttttacccggcatgttagatgcgac

SEQ ID NO: 451629 - DNA, 75 bp, synthetic construct
  source 1..75: mol_type = other DNA
gaaattccattatatttattgctggaatgtgtgaaagaaaactctagcttaaaatgtataatatcacaatataaa

SEQ ID NO: 451630 - DNA, 75 bp, synthetic construct
  source 1..75: mol_type = other DNA
attcaacataggggctgtcaccatgactactctcccaacccaatctcaccctgaaatcacgattatcaatggtcg

SEQ ID NO: 451631 - DNA, 75 bp, synthetic construct
  source 1..75: mol_type = other DNA
tagagcacaaccgcgctcatgcggttttttcgtgtcatgagcatcattacgcccaaattatggtggggcgtgcag

SEQ ID NO: 451632 - DNA, 75 bp, synthetic construct
  source 1..75: mol_type = other DNA
gttgccaacttcttctccaagcgtcacgacgatgtgctgaaaaagatccgcactctggattgttcccctgagttt

SEQ ID NO: 451633 - DNA, 75 bp, synthetic construct
  source 1..75: mol_type = other DNA
gagtacgcatttaccgatgatgaaattcttgggccatttggcgaactgcattgcgtggcggcactaccaccgccg

SEQ ID NO: 451634 - DNA, 75 bp, synthetic construct
  source 1..75: mol_type = other DNA
gatctcctgaccgaggcggtaaatcttctggtgcttcaggtattccgcaaagacgattacgcggtgaagtatgct

SEQ ID NO: 451635 - DNA, 75 bp, synthetic construct
  source 1..75: mol_type = other DNA
ctaaatcacgacggcaacgagtacgcctttaccgacgacgaaatccttggaccctttggtgaactgcactgcgtg

SEQ ID NO: 451636 - DNA, 75 bp, synthetic construct
  source 1..75: mol_type = other DNA
tgcgcacgctgttgatagtgcccttccggcaaaatcagacgaaaaggttatctggagcgcctgtacagttaactg

SEQ ID NO: 451637 - DNA, 75 bp, synthetic construct
  source 1..75: mol_type = other DNA
aacagtttaacaacacactaccgtcgctcgcaactgattgcgcttcctgtaccgggtggaaaacgaaggtggaat

SEQ ID NO: 451638 - DNA, 75 bp, synthetic construct
  source 1..75: mol_type = other DNA
gatttcagattaaaaaaaaaaaatgtgttgatgatcttgggcgtccttttgatacggtgccgccggggttactct

SEQ ID NO: 451639 - DNA, 75 bp, synthetic construct
  source 1..75: mol_type = other DNA
ttatcgtgcgcttaaggctatcgcagaccaggtgagcacaaaagtgatcgtcgttcgcgtggctgaacacaaaga

SEQ ID NO: 451640 - DNA, 75 bp, synthetic construct
  source 1..75: mol_type = other DNA
tggctgcgcggtcatttgcgcatgaccgacaccatcgacaacgagcatttctttgtgcgtaagaatggtttgttg

SEQ ID NO: 451641 - DNA, 75 bp, synthetic construct
  source 1..75: mol_type = other DNA
ttcgctgggtgtggtgtttggcattctggtgatgacgtttattatcaacgcctgggggaattatcggcatgataa

SEQ ID NO: 451642 - DNA, 75 bp, synthetic construct
  source 1..75: mol_type = other DNA
aaaaacagcctgagtggtacgtgaaagctgtcagaaaaactatcgcaacgttgccgggtggttacgctgaagcag

SEQ ID NO: 451643 - DNA, 75 bp, synthetic construct
  source 1..75: mol_type = other DNA
acgcaaaggcgagctggcgctggatcgcacctggagcattgctccggcgcaggatgtgccatgggaagggcgcag

SEQ ID NO: 451644 - DNA, 75 bp, synthetic construct
  source 1..75: mol_type = other DNA
ttcagaacggtgttatgcacccccgatttacgatccactcgtggaatgatgatcatactgtcaatgaaccatgga

SEQ ID NO: 451645 - DNA, 75 bp, synthetic construct
  source 1..75: mol_type = other DNA
cggcgctgcgtgatggtgtgcgcgggaaagataagctggatgtgccgatcaaaatgatctggaactatgccggta

SEQ ID NO: 451646 - DNA, 75 bp, synthetic construct
  source 1..75: mol_type = other DNA
acaacgatgaaatcaccaccatcatcaagcgtaacggcttccgcttctggggcaaccgcaccactgacaccaatg

SEQ ID NO: 451647 - DNA, 75 bp, synthetic construct
  source 1..75: mol_type = other DNA
ggcgtggtttgacattgtggacaacccgaccgcaaacctgattcagggaaaagtggcgatccgttacaagtatac

SEQ ID NO: 451648 - DNA, 75 bp, synthetic construct
  source 1..75: mol_type = other DNA
cctggccgccaatatcaagccgtgcctgttgcaggatcacccacgctataacgaagtggcagaaagaggactgtt

SEQ ID NO: 451649 - DNA, 75 bp, synthetic construct
  source 1..75: mol_type = other DNA
atgaaagcttcactggcgttattcagtcttctgacgttatttaccagttactccttaaaatctcccgccgttcca

SEQ ID NO: 451650 - DNA, 75 bp, synthetic construct
  source 1..75: mol_type = other DNA
ctggtgatacataacattggcgcaggcgcgcaggaagaagacgtgctgtttagctggcggatggtggggcactat

SEQ ID NO: 451651 - DNA, 75 bp, synthetic construct
  source 1..75: mol_type = other DNA
ttacgcccgataacaccattatggcgctggcagaagattttctttcccgacgccaggtgatgctgccaacttact

SEQ ID NO: 451652 - DNA, 75 bp, synthetic construct
  source 1..75: mol_type = other DNA
cctggtcagcaagcatacagacatgctggaaccaagtcattatcatggcaattacagattgttttttgtccctaa

SEQ ID NO: 451653 - DNA, 75 bp, synthetic construct
  source 1..75: mol_type = other DNA
gataacgctacgccgacctatctcaacgcgatggtagcgattggtatcgtggttggtgcaggtgcggcagcgaag

SEQ ID NO: 451654 - DNA, 75 bp, synthetic construct
  source 1..75: mol_type = other DNA
gccttctgacagcctttaccagccactccttaaaatctcccgctgttccaccaaccgtggtacaaattcaggcca

SEQ ID NO: 451655 - DNA, 75 bp, synthetic construct
  source 1..75: mol_type = other DNA
tgatgattagctgtgaggcgggcgcctataacaccattgatctggcgtggatagtgtcgcgtaaaaagccgctgg

SEQ ID NO: 451656 - DNA, 75 bp, synthetic construct
  source 1..75: mol_type = other DNA
aagcgctgatgatgattagctgtgaggcaggggcctataacaccattgatttggcatggattgtgtcgcgtaaaa

SEQ ID NO: 451657 - DNA, 75 bp, synthetic construct
  source 1..75: mol_type = other DNA
tggtaaacccaacgccgacgccactctcactcgaagagcgtaatgatttgctggattacggtaactggcggatga

SEQ ID NO: 451658 - DNA, 75 bp, synthetic construct
  source 1..75: mol_type = other DNA
cgaggcttcccactatcggagaatcgcttctggcaagtaattttatattttcaccggggggaaaaggcggaacgc

SEQ ID NO: 451659 - DNA, 75 bp, synthetic construct
  source 1..75: mol_type = other DNA
gacgccactctcactcgaagaacgtaacgatttgctggattatggaaactggcggatgaatggtctgcgctgctc

SEQ ID NO: 451660 - DNA, 75 bp, synthetic construct
  source 1..75: mol_type = other DNA
ccagcgctttcgtctggtgcgttacgccgcagagccaacttgcgataactggcatggaccagacgcctggcccac

SEQ ID NO: 451661 - DNA, 75 bp, synthetic construct
  source 1..75: mol_type = other DNA
ctgttaaaaataaaaagataattgcactacctgagtacttagaaaacccacttcagtttcataccgggggcattc

SEQ ID NO: 451662 - DNA, 75 bp, synthetic construct
  source 1..75: mol_type = other DNA
cggcctttaaggtggcatccggagatgtggatctgaacgtgctgcatctgttctcgctgggattactgattgccg

SEQ ID NO: 451663 - DNA, 75 bp, synthetic construct
  source 1..75: mol_type = other DNA
atgaatacagccctttccatcatcgacgatcccaactcaaacgctgctatcgactatcgactatcgactatcgac

SEQ ID NO: 451664 - DNA, 75 bp, synthetic construct
  source 1..75: mol_type = other DNA
ggcaagcaggaagtcatcaaaactgacagaaccggctatcagatgaaggttaaagagttcgttggtgtaccggag

SEQ ID NO: 451665 - DNA, 75 bp, synthetic construct
  source 1..75: mol_type = other DNA
gttatcggcggcggtaataccgctgttgaagaggcattgtatctgtctaacattgcttctgaagtacacctgatt

SEQ ID NO: 451666 - DNA, 75 bp, synthetic construct
  source 1..75: mol_type = other DNA
ccgcaggtgacgtaatggatcacatttatcgtcaagccatcacctctgccggtactggctgcatggctgcactgg

SEQ ID NO: 451667 - DNA, 75 bp, synthetic construct
  source 1..75: mol_type = other DNA
tgattattgctaccggagcttctgcacgctatctcggcctgccctctgaagaagcctttaaaggacgtggggttt

SEQ ID NO: 451668 - DNA, 75 bp, synthetic construct
  source 1..75: mol_type = other DNA
atatattgcaaccccttcaggcgggacgcgagatgttacttccgttgattggcctcccttgcttagtcactcatt

SEQ ID NO: 451669 - DNA, 75 bp, synthetic construct
  source 1..75: mol_type = other DNA
ctggtgcaagacggcacactttattgctccagcatttttggttatcgcaatgtgcccgtcgtggacattctggct

SEQ ID NO: 451670 - DNA, 75 bp, synthetic construct
  source 1..75: mol_type = other DNA
gaacttcctgcaccgcaaccacttttacgcctgacgatcgaccgtgccctgattaaaggcagtccggttttgatt

SEQ ID NO: 451671 - DNA, 75 bp, synthetic construct
  source 1..75: mol_type = other DNA
caaaagcgaaagccgtgtatcagcaggttatcagtaaataccctggtactgatggcgcgaaacaggcgcaaaaac

SEQ ID NO: 451672 - DNA, 75 bp, synthetic construct
  source 1..75: mol_type = other DNA
ccggaatgagcttcgaacagtctttttattccagattggtagcgattccggtgaacatcttaattgcatggccat

SEQ ID NO: 451673 - DNA, 75 bp, synthetic construct
  source 1..75: mol_type = other DNA
gagtttttcgcgcgaaattaatcttggccttgcgcaacatgagttcgagctattctgtcaacctttactaaacgc

SEQ ID NO: 451674 - DNA, 75 bp, synthetic construct
  source 1..75: mol_type = other DNA
ctggatgccagtaaatacgtcacttcaactatgctgtttgtctatattgtgatcattattggcatggtgtggagt

SEQ ID NO: 451675 - DNA, 75 bp, synthetic construct
  source 1..75: mol_type = other DNA
atgcccagcgtgttgccgccgcgcagctggccgccgcagtcagtaccaccacaacagatctaaaaaaccaggtga

SEQ ID NO: 451676 - DNA, 75 bp, synthetic construct
  source 1..75: mol_type = other DNA
gtatgctggataaccggagtgatgcagatcctgaacaaaccgggaaagcaggcacaactgagtcggtaacatcaa

SEQ ID NO: 451677 - DNA, 75 bp, synthetic construct
  source 1..75: mol_type = other DNA
gggctgagtgacctgaagggtaaaagcgcccgcgcctggtttttcactgccagtgatgatatcggcactacgtta

SEQ ID NO: 451678 - DNA, 75 bp, synthetic construct
  source 1..75: mol_type = other DNA
gaaaggctggccggaacgggcgggaatgccgatgtgatgatcatgatggtgacaggccagacgcatgagaatttt

SEQ ID NO: 451679 - DNA, 75 bp, synthetic construct
  source 1..75: mol_type = other DNA
tcaatacattgattttgcggtgaaatatgccaataaagtggcatttatcgataccgattttgtcaccactcaggc

SEQ ID NO: 451680 - DNA, 75 bp, synthetic construct
  source 1..75: mol_type = other DNA
aaagagcactggacgctaccggatgaaaatccgcccatcggtctggttctctgtgcagagaaaggagccggagaa

SEQ ID NO: 451681 - DNA, 75 bp, synthetic construct
  source 1..75: mol_type = other DNA
atctaaaagtgggcaaattcagctatagcgatgccggacagatgaatatgtatctcaactacgccaaagagcact

SEQ ID NO: 451682 - DNA, 75 bp, synthetic construct
  source 1..75: mol_type = other DNA
aaatgctgatattaatcgccgtgtaaatacactggcacttaccgataatcagggtgaaaatctcacattcctatt

SEQ ID NO: 451683 - DNA, 75 bp, synthetic construct
  source 1..75: mol_type = other DNA
agagcactggacgctaccggatgaaaatccgcccatcggtctggttctctgtgcagagaaaggagccggagaagc

SEQ ID NO: 451684 - DNA, 75 bp, synthetic construct
  source 1..75: mol_type = other DNA
tgcgggttgaagaggaagattacgacagtcgtttcctgcgctgcgtggaactggtgcgggagatgatgggggagc

SEQ ID NO: 451685 - DNA, 75 bp, synthetic construct
  source 1..75: mol_type = other DNA
aacctggcaggttgttgtcgagatagacggtcagcaaggggtaataatgactgaccgtgcgccagacaaagctgg

SEQ ID NO: 451686 - DNA, 75 bp, synthetic construct
  source 1..75: mol_type = other DNA
tgcggatgtcggaaaaaccatagacaatggtttgtatctgctgattatttattttcctggttcgcggtgttttta

SEQ ID NO: 451687 - DNA, 75 bp, synthetic construct
  source 1..75: mol_type = other DNA
agtatccctggcggctgttgtagctttgatttgcccacattgcatatctggctacatttatctcaggcacagcgc

SEQ ID NO: 451688 - DNA, 75 bp, synthetic construct
  source 1..75: mol_type = other DNA
atcagagccgcattgaaacattaattcagcagttgaaagcggcgggtagcgtgttaatttccgcgccgcgtatcg

SEQ ID NO: 451689 - DNA, 75 bp, synthetic construct
  source 1..75: mol_type = other DNA
atttttcctggttcgcagtgtttttatcgctgtggtacatggggaaagtgataaaaatgatgatcaacgcttttg

SEQ ID NO: 451690 - DNA, 75 bp, synthetic construct
  source 1..75: mol_type = other DNA
taatattatccggatcgttttcaggggttatgacctttatcctgttttatttgctggagtgggcatttcaatatc

SEQ ID NO: 451691 - DNA, 75 bp, synthetic construct
  source 1..75: mol_type = other DNA
aatgggttgtatctgctgattatttatttttcctggttcgcggtgtttttatcgctgtggtacatggggaaagtg

SEQ ID NO: 451692 - DNA, 75 bp, synthetic construct
  source 1..75: mol_type = other DNA
tttgattatatgaagtttgtttcagacgcagcacaacagaagacaacgaagcataatgccgtgcacattaaccag

SEQ ID NO: 451693 - DNA, 75 bp, synthetic construct
  source 1..75: mol_type = other DNA
aatataacggggtatccgtcacgctttcggaactgtcggcactgcagcgctttgattatatgaggtttgtttcag

SEQ ID NO: 451694 - DNA, 75 bp, synthetic construct
  source 1..75: mol_type = other DNA
atgtttctgaaaacagaacaatttgaatataacggtgtgtccgtcacgctttccgaattgtctgcgctgcagcgg

SEQ ID NO: 451695 - DNA, 75 bp, synthetic construct
  source 1..75: mol_type = other DNA
gattgccttagtgcgtcagcgtctgagcatccctggcggctgttgtagctttgatttgcccactttgcatatctg

SEQ ID NO: 451696 - DNA, 75 bp, synthetic construct
  source 1..75: mol_type = other DNA
gatgtgttctgtaatgccgtcaacaacatgatgaataaccctctattacctgcccacggtaaaggcgttctggtt

SEQ ID NO: 451697 - DNA, 75 bp, synthetic construct
  source 1..75: mol_type = other DNA
gctcgtctgtggcgttgactggcaacaggtcaatggtcacgacctggctaaatggctcccggaaacaccttccgc

SEQ ID NO: 451698 - DNA, 75 bp, synthetic construct
  source 1..75: mol_type = other DNA
tatcttgcaaagtttatttctcagtactggactacatgctggccatcgcaggaagaaggtcaggaaattcgttac

SEQ ID NO: 451699 - DNA, 75 bp, synthetic construct
  source 1..75: mol_type = other DNA
tgatttctctcctgaaagattacttgggaaaacggcaaaggattttcctgcttttactacgttacatttcccggc

SEQ ID NO: 451700 - DNA, 75 bp, synthetic construct
  source 1..75: mol_type = other DNA
gaaggccgggcgtggccgttgctggatggcaccggcatgatttacggcatgtatgtcatcagcaaggtgagtgaa

SEQ ID NO: 451701 - DNA, 75 bp, synthetic construct
  source 1..75: mol_type = other DNA
tatcttgctaaatttatttctcagcactggactgcatgctggccatcgcaggaagaaggtctggaaatacgttac

SEQ ID NO: 451702 - DNA, 75 bp, synthetic construct
  source 1..75: mol_type = other DNA
agtgaacctcgcagggctgactggagaaaagtaaaaaaattatgtgagactgctttacgcaataagagtaaagat

SEQ ID NO: 451703 - DNA, 75 bp, synthetic construct
  source 1..75: mol_type = other DNA
ctgtttcatcgttatcagttgaacccgggagcaggaagacaggcaagacgttgccggcggaacagcaggcgtttt

SEQ ID NO: 451704 - DNA, 75 bp, synthetic construct
  source 1..75: mol_type = other DNA
aacaccgattgaggtgaagtacctgctggaagagaagctgggtattcgggtaatggtcgataatgactgcgtgat

SEQ ID NO: 451705 - DNA, 75 bp, synthetic construct
  source 1..75: mol_type = other DNA
aaaaaaacaggcgcgagtatggctaaaatcacaaccggttaatactcagcttgatcctgaaaaattgacaaccgc

SEQ ID NO: 451706 - DNA, 75 bp, synthetic construct
  source 1..75: mol_type = other DNA
atcgctccagaaggtgactggacgctgtgtctgaacgttacgcccaccagtattgagtgtcaggttgccaatgcc

SEQ ID NO: 451707 - DNA, 75 bp, synthetic construct
  source 1..75: mol_type = other DNA
aactgaccggcggaaagctgacgatgaccacgctcagactgatggcagaggaaggccgggcgtggccgttgctgg

SEQ ID NO: 451708 - DNA, 75 bp, synthetic construct
  source 1..75: mol_type = other DNA
aaaccatgccgcaagcgccgtggacaacgccggttgaggtgaagtatctgctggaagagaagctcggcattcggg

SEQ ID NO: 451709 - DNA, 75 bp, synthetic construct
  source 1..75: mol_type = other DNA
aaaaaaacaggcgcgggtatggctaaaatcacaaccggttaatactcagcttgatcctgaaaaactgactacagc

SEQ ID NO: 451710 - DNA, 75 bp, synthetic construct
  source 1..75: mol_type = other DNA
tttatgcttccttaacatcctcaatagataaagaaatgtcaagggagaaagcaatagaacaattggaggaaatag

SEQ ID NO: 451711 - DNA, 75 bp, synthetic construct
  source 1..75: mol_type = other DNA
actttgaagagcgccgtattgcccatcaaaccgtggctgatgtggttgaaccgctagtgaactttgagccacatt

SEQ ID NO: 451712 - DNA, 75 bp, synthetic construct
  source 1..75: mol_type = other DNA
ggtaagaagaagcaaccacctaatgtaatgggaaatattgaatatttcactgtccatgacttacgaaggacttgt

SEQ ID NO: 451713 - DNA, 75 bp, synthetic construct
  source 1..75: mol_type = other DNA
cgggaactttacctttaactttctgccactcggtgcaattgatgggatgcgtatcgggtcgacactgagctattt

SEQ ID NO: 451714 - DNA, 75 bp, synthetic construct
  source 1..75: mol_type = other DNA
gcgatgctgggagatattgctcgtcaggtgacatggtgcggaaagcaactcaagcctgagcagtggaaggtattg

SEQ ID NO: 451715 - DNA, 75 bp, synthetic construct
  source 1..75: mol_type = other DNA
acgcgcagatcataaccggtccgggagaccgggtaacccaacgttgctatcttatggatggtgcagagaacgtga

SEQ ID NO: 451716 - DNA, 75 bp, synthetic construct
  source 1..75: mol_type = other DNA
tcaaaccgtggctgatgtggttgaaccgctagtgaactttgagccacattcgcaacagcacgcaggagggcatta

SEQ ID NO: 451717 - DNA, 75 bp, synthetic construct
  source 1..75: mol_type = other DNA
atgttctctggcaatcgcaacgtcaccacgcctatcgtgaagcactcgcctggttacatgaacaaggactaagtt

SEQ ID NO: 451718 - DNA, 75 bp, synthetic construct
  source 1..75: mol_type = other DNA
tttcctctcgatgttgcacagaaatttgcaagacaactagcaacttatcataaagacaacatcagtgatgtgaaa

SEQ ID NO: 451719 - DNA, 75 bp, synthetic construct
  source 1..75: mol_type = other DNA
aacgatcataacgagaacaccattgttgacccttcggtgatctatttcgatttcgctaacccgctgcaggctcag

SEQ ID NO: 451720 - DNA, 75 bp, synthetic construct
  source 1..75: mol_type = other DNA
tcaccgatactctacgacgaattggctgggccggacctgggggccgtaatctgacaacggatcagagcaatgtca

SEQ ID NO: 451721 - DNA, 75 bp, synthetic construct
  source 1..75: mol_type = other DNA
ccgtcacaaactggacgctgactaccattcctgactcggcaattgtaaattcaacattctcaaatgcgtcatgct

SEQ ID NO: 451722 - DNA, 75 bp, synthetic construct
  source 1..75: mol_type = other DNA
agaaactatcctgcgccagctggaacattacggcctgcactgggacggcgacgttctctggcaatcgcaacgtca

SEQ ID NO: 451723 - DNA, 75 bp, synthetic construct
  source 1..75: mol_type = other DNA
accgcgacgaaggaccgagcgtgaaagcgacacaaattggctttgggcaattaagccgcgcacaacaggtgctgg

SEQ ID NO: 451724 - DNA, 75 bp, synthetic construct
  source 1..75: mol_type = other DNA
acgcgccgcagaattctgtcggtgaattctctgtcggcagcgaagacggtcaacgtcagatcaccaacgtcgcgg

SEQ ID NO: 451725 - DNA, 75 bp, synthetic construct
  source 1..75: mol_type = other DNA
tcggtaaacaggcggagtcgctcatcggtaaggccggcagtatggcgaccagattcacaggtatgacgggggcgg

SEQ ID NO: 451726 - DNA, 75 bp, synthetic construct
  source 1..75: mol_type = other DNA
cacggcactgacgccaccagcaagatcaccaatgtcaaagccggtgacctgacagctggcagcactgacgccgtt

SEQ ID NO: 451727 - DNA, 75 bp, synthetic construct
  source 1..75: mol_type = other DNA
acagctctatagcaccaataagtacatcgctgatgcgctgggtggtgatgcagaagtcaacgctgacggaactat

SEQ ID NO: 451728 - DNA, 75 bp, synthetic construct
  source 1..75: mol_type = other DNA
actgtctaaaaccgaaagcaagttgagtggtggtatcgcttctgcaatggcaatgaccggtctgccgcaggctta

SEQ ID NO: 451729 - DNA, 75 bp, synthetic construct
  source 1..75: mol_type = other DNA
tccatgctaattcaacggaagaagattcactggctgtcggtgaagactcgctggcaatgggggcgaaaactgtcg

SEQ ID NO: 451730 - DNA, 75 bp, synthetic construct
  source 1..75: mol_type = other DNA
cctgctgtggaacaaaacagctggcgcattcagcgccgcgcacggcactgacgccaccagcaagatcaccaatgt

SEQ ID NO: 451731 - DNA, 75 bp, synthetic construct
  source 1..75: mol_type = other DNA
tatcggttatgacaccactgacggtgagttgctcggtgcattgtcaattggtgatgacggtaaataccgtcaaat

SEQ ID NO: 451732 - DNA, 75 bp, synthetic construct
  source 1..75: mol_type = other DNA
ggtatcgcttctgcaatggcgatgaccggtctgccgcaggcttacacgccgggtgccagcatggcctctattggt

SEQ ID NO: 451733 - DNA, 75 bp, synthetic construct
  source 1..75: mol_type = other DNA
gccaaatgattaaccagcttgccggtaacaccagtgaaacctacatcgaagataacggtgcaggtattaactatg

SEQ ID NO: 451734 - DNA, 75 bp, synthetic construct
  source 1..75: mol_type = other DNA
actaatctggatactcgcgtgaccaatatcgaaaatggcattggcgatatcgtaaccaccggtagtactaagtac

SEQ ID NO: 451735 - DNA, 75 bp, synthetic construct
  source 1..75: mol_type = other DNA
agcactgacgccgttaacggctctcagctcaaaaccaccaacgataacgtgtcgaccaacaccaccaacatcgcc

SEQ ID NO: 451736 - DNA, 75 bp, synthetic construct
  source 1..75: mol_type = other DNA
tatcttctgacagcaccgatgccattaacggatcacaactttatggcgtagcggattcatttacgtcatatcttg

SEQ ID NO: 451737 - DNA, 75 bp, synthetic construct
  source 1..75: mol_type = other DNA
tatcaactgttcttcctatattttatcttgatcaagacttaggttactcaaaattttattactcgcctagaaatt

SEQ ID NO: 451738 - DNA, 75 bp, synthetic construct
  source 1..75: mol_type = other DNA
tggtcgtttactgattagcgcccacaccgaagatttttttgaacccctgacttttacggtatctcttgatgatta

SEQ ID NO: 451739 - DNA, 75 bp, synthetic construct
  source 1..75: mol_type = other DNA
caatatggctgccggtcaaataagaaatggcagtactgaggccattaacggttcacaactttatggactaagtga

SEQ ID NO: 451740 - DNA, 75 bp, synthetic construct
  source 1..75: mol_type = other DNA
cagatgctattcagaaaaatatgggtgatgcaccgccattaagcaatgaagggatgaaacagaatctttctaatc

SEQ ID NO: 451741 - DNA, 75 bp, synthetic construct
  source 1..75: mol_type = other DNA
gctgaaatcgaaactgttccccggaaaaaacggggggagttatatcggcaggctttgataaccggcctgataatg

SEQ ID NO: 451742 - DNA, 75 bp, synthetic construct
  source 1..75: mol_type = other DNA
gaaaaacattcttttgatgctaaaaagaaaaatattaatctcacagaagaaattaaatatttagataattcatta

SEQ ID NO: 451743 - DNA, 75 bp, synthetic construct
  source 1..75: mol_type = other DNA
tcatgccgacagcattgcaatgggtaatggttctcagactacccgtggtgcgcagaccaactacactgcctacaa

SEQ ID NO: 451744 - DNA, 75 bp, synthetic construct
  source 1..75: mol_type = other DNA
ccgacgctatcaacggttctcagttgaatgcaaccaacatgatgatccagcagaacagcgaaatcatcaatcagc

SEQ ID NO: 451745 - DNA, 75 bp, synthetic construct
  source 1..75: mol_type = other DNA
gacgatggtaaatatcgtcaaatcatcaacgtagccgatggttccgaagcccatgacgccgttacggttcgccag

SEQ ID NO: 451746 - DNA, 75 bp, synthetic construct
  source 1..75: mol_type = other DNA
aacgataacgccatcgcgattgggaaaaaaacgcaagcccagggagtgaattctatagccctgggtaatgcaagc

SEQ ID NO: 451747 - DNA, 75 bp, synthetic construct
  source 1..75: mol_type = other DNA
ctgccaatatcgccgataacactgccaatatcgccactaacactacggatattgcgactaataccgccgatatag

SEQ ID NO: 451748 - DNA, 75 bp, synthetic construct
  source 1..75: mol_type = other DNA
tcgcagagcaagacaataccgtttcggtagggaacagcacaacacaacgcaaaattaccaatatggctgccggtc

SEQ ID NO: 451749 - DNA, 75 bp, synthetic construct
  source 1..75: mol_type = other DNA
tattactggcgattgcactccctgttttggttgcttattttggaggtgctaaagttatgtcagtttattgggtac

SEQ ID NO: 451750 - DNA, 75 bp, synthetic construct
  source 1..75: mol_type = other DNA
gcataatggcttgaatgacctgaaagcgcagctcaatcaatggatggagatctttgatcagaacttgaatgcagc

SEQ ID NO: 451751 - DNA, 75 bp, synthetic construct
  source 1..75: mol_type = other DNA
tgatgggatctatcttcataaattcaatgaatgtgaaatccggttagacacaaataaaaaagaggttttcctcaa

SEQ ID NO: 451752 - DNA, 75 bp, synthetic construct
  source 1..75: mol_type = other DNA
gtcaggctaaaggggattacacggaaaatcggcagattgcagagcaggagcgcaagcgttgcaaggcaatgggcg

SEQ ID NO: 451753 - DNA, 75 bp, synthetic construct
  source 1..75: mol_type = other DNA
caaccgtgactgcatgacgcatacccatatcaattttattggttccggcttgccattgaaattgcagcgtgaagt

SEQ ID NO: 451754 - DNA, 75 bp, synthetic construct
  source 1..75: mol_type = other DNA
ctttatccgtgtaaaagacgttcgtaaaccagaatggcatattcggttctatcctcgtaatgattcttttaattc

SEQ ID NO: 451755 - DNA, 75 bp, synthetic construct
  source 1..75: mol_type = other DNA
atggctaactacttcaatacactgaatctgcgccagcagttggcacagctgggcaaatgtcgctttatggggcgc

SEQ ID NO: 451756 - DNA, 75 bp, synthetic construct
  source 1..75: mol_type = other DNA
cgtacagccactgatgaaagacggcgcggcgctgggttactcgcatggtttcaacatcgtcgaagtgggcgagca

SEQ ID NO: 451757 - DNA, 75 bp, synthetic construct
  source 1..75: mol_type = other DNA
atctgcgccagcagctggcacagttgggtaaatgtcgctttatggggcgcgacgaattcgctgacggcgcgagct

SEQ ID NO: 451758 - DNA, 75 bp, synthetic construct
  source 1..75: mol_type = other DNA
acttcgataaaggcgtactgatgatcgcgatggtaaaagcgggcgttgaactggcgttcgaaaccatggtcgatt

SEQ ID NO: 451759 - DNA, 75 bp, synthetic construct
  source 1..75: mol_type = other DNA
ccatgcgattgagcaggtaggtaaaaaactgcgcggctatatgacagatatgaaacgcattgctgttgcgggtta

SEQ ID NO: 451760 - DNA, 75 bp, synthetic construct
  source 1..75: mol_type = other DNA
tgctgtgcttcgacaagctggtggaagaaggcaccgatccggcatacgcagaaaaactgattcagttcggttggg

SEQ ID NO: 451761 - DNA, 75 bp, synthetic construct
  source 1..75: mol_type = other DNA
gatggagagattgtggagatgttagagggtggggagcaaaaatagatggggaaacagatgattcagatgctttta

SEQ ID NO: 451762 - DNA, 75 bp, synthetic construct
  source 1..75: mol_type = other DNA
gaagacccggcgtggggctgggtgaaatccctgtcgcttaacggcggcgatctgctggctgagcctgaccagctc

SEQ ID NO: 451763 - DNA, 75 bp, synthetic construct
  source 1..75: mol_type = other DNA
accactggcgatggcctttaaagaactattgacaggcgctgcgccggtgctggatttcagcgaagttgccagcaa

SEQ ID NO: 451764 - DNA, 75 bp, synthetic construct
  source 1..75: mol_type = other DNA
atgaatatcatgttattgttaatgccagcgaatgtggcgttgaagatccgttgcgccggtccgggtcccggtcat

SEQ ID NO: 451765 - DNA, 75 bp, synthetic construct
  source 1..75: mol_type = other DNA
caggccatcacgaatgcctccctgtggggaaagctgcgcgattttctgatcgcccgcttcagtctggacgaggca

SEQ ID NO: 451766 - DNA, 75 bp, synthetic construct
  source 1..75: mol_type = other DNA
gtaacgctggctgcgcatttgatgttgctggcggcggtatatcagatttctgactctatccaggtgattggcagt

SEQ ID NO: 451767 - DNA, 75 bp, synthetic construct
  source 1..75: mol_type = other DNA
tgatggcgggcggctatagtgccaccgacatggcggcggtcgctatcggtacttctatctggcttccggcgatcc

SEQ ID NO: 451768 - DNA, 75 bp, synthetic construct
  source 1..75: mol_type = other DNA
ctctgacggcaacgctaacctctgcaaatggcactccagtggagggtcaggtcatcaactttagcgtaacgccag

SEQ ID NO: 451769 - DNA, 75 bp, synthetic construct
  source 1..75: mol_type = other DNA
aatattgccattaaaggtaatttttcaccaattattgataacagcaaatctcttggtgcaccatcatttagatgg

SEQ ID NO: 451770 - DNA, 75 bp, synthetic construct
  source 1..75: mol_type = other DNA
tgatgccgtcagggaaaagggagatggtgcccgctggcattttggtgttatagcacaacaagtgagagacacttt

SEQ ID NO: 451771 - DNA, 75 bp, synthetic construct
  source 1..75: mol_type = other DNA
atcattcaccttgtaaccgggaagtggataagggtttctttgtcatctgaaatactggcaaaaaaactaggcatt

SEQ ID NO: 451772 - DNA, 75 bp, synthetic construct
  source 1..75: mol_type = other DNA
cgcctccataccaaatgcgattaccggaagacttcagagcgcagctagaagaagcagctaaggccgatggcgaca

SEQ ID NO: 451773 - DNA, 75 bp, synthetic construct
  source 1..75: mol_type = other DNA
caagtgcctattttcggggcgttaattgcgggtaacttgctgttagcgcgtctgacctcgcgccgcaccgtacgt

SEQ ID NO: 451774 - DNA, 75 bp, synthetic construct
  source 1..75: mol_type = other DNA
cagaaacatatggacgatatcatctccggcgaattctcctccggcatgatggcagactgggccaacgacgataag

SEQ ID NO: 451775 - DNA, 75 bp, synthetic construct
  source 1..75: mol_type = other DNA
cgttgataccggtattgccctgggtagcagttccgtttccagccgtgtaatagttaaaggttctcgtgacaccag

SEQ ID NO: 451776 - DNA, 75 bp, synthetic construct
  source 1..75: mol_type = other DNA
aaccgatgctctggctggagatatcatccgtagcaacatgatacccgcatttggtgatgctgccaacttactgat

SEQ ID NO: 451777 - DNA, 75 bp, synthetic construct
  source 1..75: mol_type = other DNA
aaactgatggaactgttgtttgttaaatcggagtccacgttttcttacttcgaagccacgcggcgctatatcgat

SEQ ID NO: 451778 - DNA, 75 bp, synthetic construct
  source 1..75: mol_type = other DNA
gtatcgccctgggtagcagttccgtttccagccgtgtaatagttaaaggttctcgtgacaccagcgtgtcggaag

SEQ ID NO: 451779 - DNA, 75 bp, synthetic construct
  source 1..75: mol_type = other DNA
gaacaccaccaatatcaccaacctgacggattccgttggcgaccttaaagacgattccctgctgtggagtgatac

SEQ ID NO: 451780 - DNA, 75 bp, synthetic construct
  source 1..75: mol_type = other DNA
cattcagtgccgcacacggtactgatgccaccagcaaaatcactaacgtcaaagacggtgacctgacggctggca

SEQ ID NO: 451781 - DNA, 75 bp, synthetic construct
  source 1..75: mol_type = other DNA
atgctggcggatatcgcacgtcaggttcaatggtgcgataaatggttaaaaccagaacaatggaaggttttgttg

SEQ ID NO: 451782 - DNA, 75 bp, synthetic construct
  source 1..75: mol_type = other DNA
accagaacaatggaaggttttgttgattagcggtcatgcagtggcaacaaagcaggaagctgatgttttgcccgg

SEQ ID NO: 451783 - DNA, 75 bp, synthetic construct
  source 1..75: mol_type = other DNA
atgaagcaaacaatattcctccgaactaagcaacaacagcaagccgcaatcaacgccatcctcgcaacaccactc

SEQ ID NO: 451784 - DNA, 75 bp, synthetic construct
  source 1..75: mol_type = other DNA
taggggcagcagtttcatttaatgtgtttgcggctgaggttgtttatgtgccaacagatacgaaggctagttaca

SEQ ID NO: 451785 - DNA, 75 bp, synthetic construct
  source 1..75: mol_type = other DNA
agaaatggagtgtatagatagttttgtaacatcaaaagtcatttcttttattaatgactcctcttatttgaatag

SEQ ID NO: 451786 - DNA, 75 bp, synthetic construct
  source 1..75: mol_type = other DNA
atgaagcaaacaatcttcctccgaagtaagcaacaacagcaagccgcaataaatgccatcctctcaacaccactc

SEQ ID NO: 451787 - DNA, 75 bp, synthetic construct
  source 1..75: mol_type = other DNA
tcgttgggtctacaaattacaaggtagtaccaatagccagggtgaatactccgccgcactcggtgccggtattca

SEQ ID NO: 451788 - DNA, 75 bp, synthetic construct
  source 1..75: mol_type = other DNA
cttgtccttccgtacgggaaatcagcggaggtgattccctttcaggggaaagagtgggtacatctgaaggagtga

SEQ ID NO: 451789 - DNA, 75 bp, synthetic construct
  source 1..75: mol_type = other DNA
gagacattgcagaaactgaacgcgaagacatggggcgtggagtttgtgcaggacgggagaaggaaatttctggtc

SEQ ID NO: 451790 - DNA, 75 bp, synthetic construct
  source 1..75: mol_type = other DNA
agcgaagtaaacgaagctctattgcagagggggctgattatggataccaaaaacccacattcaccacacgtttct

SEQ ID NO: 451791 - DNA, 75 bp, synthetic construct
  source 1..75: mol_type = other DNA
gcggcgctgggttactcgcatggtttcaacatcgtggaagtaggcgagcagatccgtaaagacatcaccgtagta

SEQ ID NO: 451792 - DNA, 75 bp, synthetic construct
  source 1..75: mol_type = other DNA
cgtcggttgtggtgcacagggcctgaaccagggcctgaacatgcgtgattctggtctggacatctcttatgccct

SEQ ID NO: 451793 - DNA, 75 bp, synthetic construct
  source 1..75: mol_type = other DNA
cactggaaaaccgtactgaaaatgagcgtgaaacgctggctgtggctgattatcgtctcagtactgatgtttgcc

SEQ ID NO: 451794 - DNA, 75 bp, synthetic construct
  source 1..75: mol_type = other DNA
ctaattcaacggaagaagattcactggcagtaggtactgactcgctggcaatgggcgcgaatactatcgttaatg

SEQ ID NO: 451795 - DNA, 75 bp, synthetic construct
  source 1..75: mol_type = other DNA
cggttcgccagttgcaaaatgccattggtgcagtcgctaccacgccgaccaaatacttccacgccaactcaacgg

SEQ ID NO: 451796 - DNA, 75 bp, synthetic construct
  source 1..75: mol_type = other DNA
gaccactcgcggcgctcagactggctacaccgcctacaacatggatgcaccgcagaactctgtgggtgaattctc

SEQ ID NO: 451797 - DNA, 75 bp, synthetic construct
  source 1..75: mol_type = other DNA
tggcagccaacaccaccaatatcgccacgaacaccaccaacatcaccaacctgactgacgctgttgacagcctcg

SEQ ID NO: 451798 - DNA, 75 bp, synthetic construct
  source 1..75: mol_type = other DNA
attgctatcggtagcaacgcgcgtgcaaaccatgcaaacagcattgctatgggtaatggctcacagacgactcgt

SEQ ID NO: 451799 - DNA, 75 bp, synthetic construct
  source 1..75: mol_type = other DNA
ctatgcgcagttgaagcaaagcgtgcaggaaacgaagcaatacaccgatcagcggatggttgagatggataacaa

SEQ ID NO: 451800 - DNA, 75 bp, synthetic construct
  source 1..75: mol_type = other DNA
ggtgaagacgccctgaaatgggacgacgccgcaggcgcattcaccgctgcacacggtactaacgccaccaacaaa

SEQ ID NO: 451801 - DNA, 75 bp, synthetic construct
  source 1..75: mol_type = other DNA
aggaacatcaagtattgcaatagggcaagaagcccgatctgggataggtagtacctcattaggtttcaagagcca

SEQ ID NO: 451802 - DNA, 75 bp, synthetic construct
  source 1..75: mol_type = other DNA
aaagctgatggctctatcgactacagcaacatcactctcggtggcggcaatagcggtacgactcgcatcagcaac

SEQ ID NO: 451803 - DNA, 75 bp, synthetic construct
  source 1..75: mol_type = other DNA
gggaacgctgtggtgaatgcggacggcagtatcactacaccgacttatgccatagcgggtggaagttacaacaac

SEQ ID NO: 451804 - DNA, 75 bp, synthetic construct
  source 1..75: mol_type = other DNA
cggttaacgtttcgcagctgaagtcttctgaggcaggcggcgttcgttacgacaccaaagctgatggttctatag

SEQ ID NO: 451805 - DNA, 75 bp, synthetic construct
  source 1..75: mol_type = other DNA
aacggctcccagctgaaaaccaccaacgataacgtggcgaccaacaccaccaatatcgccactaacaccaccaat

SEQ ID NO: 451806 - DNA, 75 bp, synthetic construct
  source 1..75: mol_type = other DNA
tgcgatcaacggtattgctatcggttctaacgcacgcgcaaatcatgccgacagcattgctatgggtaatggttc

SEQ ID NO: 451807 - DNA, 75 bp, synthetic construct
  source 1..75: mol_type = other DNA
cacgccaactcaacggctgaagactcactggcagtcggtgaagactcgctggcaatgggcgcgaaaaccatcgtt

SEQ ID NO: 451808 - DNA, 75 bp, synthetic construct
  source 1..75: mol_type = other DNA
gtatcactactctgaacgcggacgttgataccctggaaaaagatgccctgctctggaatggcacagcattcagcg

SEQ ID NO: 451809 - DNA, 75 bp, synthetic construct
  source 1..75: mol_type = other DNA
tatgccgttgcccttggatataaatccaatgcaaatggattgtacagtctggcgctggggcataccagcacagca

SEQ ID NO: 451810 - DNA, 75 bp, synthetic construct
  source 1..75: mol_type = other DNA
ggaacctatgccggaaatacacccggaacaagcattccaacggggacatccgctgatggcgaaagctggattgct

SEQ ID NO: 451811 - DNA, 75 bp, synthetic construct
  source 1..75: mol_type = other DNA
ctgttgctttaggtgtgtcgatggtgagcgccaatggtcgttgggtctacaaattacaaggtagtaccaatagcc

SEQ ID NO: 451812 - DNA, 75 bp, synthetic construct
  source 1..75: mol_type = other DNA
gttgggtctacaaattacaaggtagtaccaatagccagggtgaatactccgccgcactcggtgccggtattcagt

SEQ ID NO: 451813 - DNA, 75 bp, synthetic construct
  source 1..75: mol_type = other DNA
tggcaaacgaagaaaatacgatctccgtaggttcttccactaaccaacgccgtatcaccaacgttgccgctggta

SEQ ID NO: 451814 - DNA, 75 bp, synthetic construct
  source 1..75: mol_type = other DNA
taacggttcgcagttgtataatctgaaacaagatgccttgctatgggatggcactgcgtttagcgccaaacatgg

SEQ ID NO: 451815 - DNA, 75 bp, synthetic construct
  source 1..75: mol_type = other DNA
ttgcgatggtacccgaagacagaaagcgcgacggcatcgttccggtaatggcggttggtaaaaatattaccctcg

SEQ ID NO: 451816 - DNA, 75 bp, synthetic construct
  source 1..75: mol_type = other DNA
ttaaagacggtgatttgactgttgacagtaaagatgccgttaacggctctcagttaaaaaccactaacgacaacg

SEQ ID NO: 451817 - DNA, 75 bp, synthetic construct
  source 1..75: mol_type = other DNA
caccagtatcaccaacctggcggatacggtaactaaccttggtgcggatgcgctggcatgggatgacgcctcagg

SEQ ID NO: 451818 - DNA, 75 bp, synthetic construct
  source 1..75: mol_type = other DNA
accgatgccaccaataaaatcactaacgttaaagacggtgatttgactgttgacagtaaagatgccgttaacggt

SEQ ID NO: 451819 - DNA, 75 bp, synthetic construct
  source 1..75: mol_type = other DNA
caagtattgccaccaacaccaccaatatcaccaatttgacggattccgttggtgaccttcaggatgatgccctgc

SEQ ID NO: 451820 - DNA, 75 bp, synthetic construct
  source 1..75: mol_type = other DNA
gcagctcatggcaacaataccgccagcaaaatcaccaatatcctggacggcacagtcactgcaaccagttccgat

SEQ ID NO: 451821 - DNA, 75 bp, synthetic construct
  source 1..75: mol_type = other DNA
ccgatgcagtgaacggttctcagttgaatgcgacgaatatgatgattgagcagaacagccaaatcatcaatcagc

SEQ ID NO: 451822 - DNA, 75 bp, synthetic construct
  source 1..75: mol_type = other DNA
atgccttatctacttgaaatgaagaacattaccaaaaccttcggcagtgtgaaggcgattgataacgtcagcttg

SEQ ID NO: 451823 - DNA, 75 bp, synthetic construct
  source 1..75: mol_type = other DNA
gtgaactacgcgcagttgaagcaaagcgtgcaggaaacgaagcaatacaccgatcagcggatggttgagatggat

SEQ ID NO: 451824 - DNA, 75 bp, synthetic construct
  source 1..75: mol_type = other DNA
ggttctcgtgacactagcgtaacggaaaatggcgtggtgattggttatgacaccactgacggcgaactgctaggt

SEQ ID NO: 451825 - DNA, 75 bp, synthetic construct
  source 1..75: mol_type = other DNA
ggtgcgggtattaactatgtacgtaccaacgacagcggcttagcgttcaacgatgccagcgcagcaggtattggc

SEQ ID NO: 451826 - DNA, 75 bp, synthetic construct
  source 1..75: mol_type = other DNA
tgggtgttggtgctgcagcctattcaccggcgaaatacggtattctcggcgaattaaccacgggtagtaagttag

SEQ ID NO: 451827 - DNA, 75 bp, synthetic construct
  source 1..75: mol_type = other DNA
accagcaaaatacggcattcttggtgaattaaccaccggcagcaagttagtgaaagctaacggtttaatggaagc

SEQ ID NO: 451828 - DNA, 75 bp, synthetic construct
  source 1..75: mol_type = other DNA
tatgaactgttcagaacagataaccggtttaaggtggtatccgcgccacagctgcgcatggattccggcaaggaa

SEQ ID NO: 451829 - DNA, 75 bp, synthetic construct
  source 1..75: mol_type = other DNA
gtaaaaaaagcgtcggggcggggaatgcgattgcagtacagaacctgggcgaaaacagtgccatgttactgatgt

SEQ ID NO: 451830 - DNA, 75 bp, synthetic construct
  source 1..75: mol_type = other DNA
ctgcaacatgagctgctgccagcctatgccttgctgatgctgattggcgtgctgggcggcttttttgtcgttccg

SEQ ID NO: 451831 - DNA, 75 bp, synthetic construct
  source 1..75: mol_type = other DNA
ggtgccggtggcgctgggcattactgataacgccacaccaacctacctcaacgcgatggtggcgatcggtattgt

SEQ ID NO: 451832 - DNA, 75 bp, synthetic construct
  source 1..75: mol_type = other DNA
tagagtgtttagcggtgttttcctacggaggaccatctgaggacgatgatgcagttaatactgcatactatgcaa

SEQ ID NO: 451833 - DNA, 75 bp, synthetic construct
  source 1..75: mol_type = other DNA
taaggctgggatcagcaaaacgtttacaacccgcaaccagttgaccagtaatcaaagtattctcatgagtctggt

SEQ ID NO: 451834 - DNA, 75 bp, synthetic construct
  source 1..75: mol_type = other DNA
agatgactgctgcggtagatgtgtctaaggctgggatcagcaaaacgtttacaacccgcaaccagttgaccagta

SEQ ID NO: 451835 - DNA, 75 bp, synthetic construct
  source 1..75: mol_type = other DNA
caggccagcacaggattatcatttctgccaaaaagctggagccagaaatctgacgagaagagccgcacggatatg

SEQ ID NO: 451836 - DNA, 75 bp, synthetic construct
  source 1..75: mol_type = other DNA
ttcgataccgccgaagtgtatggtccgtatctgaatgaagaagtggtcggcgaagccggtgatgctgccaactta

SEQ ID NO: 451837 - DNA, 75 bp, synthetic construct
  source 1..75: mol_type = other DNA
cattgttaaaagactcgagaaaaaatatggcaatgagttaataaaggctgaatatataaaaatctcaagcaaact

SEQ ID NO: 451838 - DNA, 75 bp, synthetic construct
  source 1..75: mol_type = other DNA
gctgtatgccagccgggattttgattggcgtggtggtactgatttttccctgcaacacgagctgctgccagccta

SEQ ID NO: 451839 - DNA, 75 bp, synthetic construct
  source 1..75: mol_type = other DNA
tcacaaatgttgctgatggtaacattggcgaaggcagcactgacgccatcaacggttctcagctgtttaacacca

SEQ ID NO: 451840 - DNA, 75 bp, synthetic construct
  source 1..75: mol_type = other DNA
tgccaatatcaccaccaacactaacagtatcaataccctgacggattccgttggcgaccttaaagacgatgccct

SEQ ID NO: 451841 - DNA, 75 bp, synthetic construct
  source 1..75: mol_type = other DNA
gcacatggtacagatactaccagtaccatcaccaacgttaaagacggcgctatttctgataccagtaaggatgcg

SEQ ID NO: 451842 - DNA, 75 bp, synthetic construct
  source 1..75: mol_type = other DNA
cttacgaaattatgagcatcgccctcggtgataatgccaatgcgtcaaaagagtatgcaatggcgctgggagcaa

SEQ ID NO: 451843 - DNA, 75 bp, synthetic construct
  source 1..75: mol_type = other DNA
cgttgccagcgaaacggcgaagagccgtggtaaaaaaagcgggcgcagtaagctgttaatttctgcgttggttgc

SEQ ID NO: 451844 - DNA, 75 bp, synthetic construct
  source 1..75: mol_type = other DNA
accagcgaaacctacatcgaagataacggtgcgggcattaactatgtacgtaccaacgacaacggcttagcgttc

SEQ ID NO: 451845 - DNA, 75 bp, synthetic construct
  source 1..75: mol_type = other DNA
tatcctcagcttgcccgtgcttatcctagctgtaaattgcccgatctgcgcggtgtttttatccgtggctgggat

SEQ ID NO: 451846 - DNA, 75 bp, synthetic construct
  source 1..75: mol_type = other DNA
gcatgtcctcgtcgccctggccgcatgcgcactggcctacggtggtgcggtcgttgccaatatctacattcccaa

SEQ ID NO: 451847 - DNA, 75 bp, synthetic construct
  source 1..75: mol_type = other DNA
atgagtgagtcagtgcacactaacacttcgctgtggtcgaaggggatgaaagcagttatcgtcgcgcagtttctt

SEQ ID NO: 451848 - DNA, 75 bp, synthetic construct
  source 1..75: mol_type = other DNA
gcagctgaagcaaagcgtgcaggaaacgaagcaatataccgatcagcggatggttgagatggataacaaactgtc

SEQ ID NO: 451849 - DNA, 75 bp, synthetic construct
  source 1..75: mol_type = other DNA
cagatcaccaacgtcgcggctggttcagcggataccgatgcggttaacgtaggtcagttgaaagtcactgatgag

SEQ ID NO: 451850 - DNA, 75 bp, synthetic construct
  source 1..75: mol_type = other DNA
agccagacctgacgatcattgaatcctcatcgcaaatcgcctacaagctttcaggccgtgtcgcctcgctgcacg

SEQ ID NO: 451851 - DNA, 75 bp, synthetic construct
  source 1..75: mol_type = other DNA
agtctggcaatggggtcagaaagtaaagctactggtgaagacagtattgcgctgggatataacagtgatgcagcc

SEQ ID NO: 451852 - DNA, 75 bp, synthetic construct
  source 1..75: mol_type = other DNA
atcgctgatgcgctgggcggtgatgcagaagttaacgctgacggcactatcactgcgccgacttacaccattgca

SEQ ID NO: 451853 - DNA, 75 bp, synthetic construct
  source 1..75: mol_type = other DNA
tgccatggcgttgggcaaggatacggtagcaagtgctgcgaatgcccttgcattagggcgattggccaaagcatc

SEQ ID NO: 451854 - DNA, 75 bp, synthetic construct
  source 1..75: mol_type = other DNA
cactgacgccgttaacggctcgcagctcaaaaccaccaacgataacgtgacgaccaacaccaccaacatcgccac

SEQ ID NO: 451855 - DNA, 75 bp, synthetic construct
  source 1..75: mol_type = other DNA
cactgacgccgttaacggctctcagctcaaaaccaccaacgataacgtgtcgaccaacaccaccaacatcgccac

SEQ ID NO: 451856 - DNA, 75 bp, synthetic construct
  source 1..75: mol_type = other DNA
cactgacgccgttaacggctcacagctcaaaaccaccaacgataacgtggcgaccaacaccaccaacatcgccac

SEQ ID NO: 451857 - DNA, 75 bp, synthetic construct
  source 1..75: mol_type = other DNA
acagccttgcattaggtagactgtccattgccagcgccgcaaacgcggttgcggttggcgctgagaccgaagccg

SEQ ID NO: 451858 - DNA, 75 bp, synthetic construct
  source 1..75: mol_type = other DNA
tgtggccaaaggtgatagcagcgtggccatgggttataactctgttgccaaaggcgatagcagcgtggccatggg

SEQ ID NO: 451859 - DNA, 75 bp, synthetic construct
  source 1..75: mol_type = other DNA
acaagctggcatagtctcctctgacagcactgacgccattaatggctcacaactttacggtttggctgattcatt

SEQ ID NO: 451860 - DNA, 75 bp, synthetic construct
  source 1..75: mol_type = other DNA
tggctctatcgactacagcaacattactctcggtggcggcaatggcggtacgactcgcatcagcaacgtttctgc

SEQ ID NO: 451861 - DNA, 75 bp, synthetic construct
  source 1..75: mol_type = other DNA
tcgcctcatcagatacaatgggtacaggcacaacgggtacagggagtgttgctgtcggggcaagagctaatgccg

SEQ ID NO: 451862 - DNA, 75 bp, synthetic construct
  source 1..75: mol_type = other DNA
caatgatgatgccctgctgtggaatggcaccgcgttcagcgccgcacacggcaccgatgtcaccagcaaaatcac

SEQ ID NO: 451863 - DNA, 75 bp, synthetic construct
  source 1..75: mol_type = other DNA
ctgatgttgcaaacggtgcagtctcgtccaccagcagcgacgccattaacggttcacaactttatggtgttagtg

SEQ ID NO: 451864 - DNA, 75 bp, synthetic construct
  source 1..75: mol_type = other DNA
gactgtaatttatgagtcaccaaccaacattgaatgccaggttgctccgcatatttaccgggaactggtcaatgc

SEQ ID NO: 451865 - DNA, 75 bp, synthetic construct
  source 1..75: mol_type = other DNA
cgacaccaaagctgatggttctatcgactatagcaatatcaccctcggtggcggcaacggcggtacgactcgtat

SEQ ID NO: 451866 - DNA, 75 bp, synthetic construct
  source 1..75: mol_type = other DNA
tcggtagtgcggatggtcaacgtcagatcactaacgtcgcagcaggttcggctgataccgatgcggtcaacgtgg

SEQ ID NO: 451867 - DNA, 75 bp, synthetic construct
  source 1..75: mol_type = other DNA
taaccaccggtagcactaagtacttcaagaccaacaccgatggcgcagatgccaacgcgcagggtaaagacagtg

SEQ ID NO: 451868 - DNA, 75 bp, synthetic construct
  source 1..75: mol_type = other DNA
cggcgattggctttaacgcggatgcgatcgggaagtccagcctggcgctgggagacaacgccagcgctggtgaaa

SEQ ID NO: 451869 - DNA, 75 bp, synthetic construct
  source 1..75: mol_type = other DNA
gtgtccgcaggagcacgtgcagaacacgctctggctgaaaaactggggttgacggtaatttatgaagcaccatct

SEQ ID NO: 451870 - DNA, 75 bp, synthetic construct
  source 1..75: mol_type = other DNA
taacattgctgaagatagcaccgacgctatcaacggttctcagttgaatgcaaccaacatgatgatccagcagaa

SEQ ID NO: 451871 - DNA, 75 bp, synthetic construct
  source 1..75: mol_type = other DNA
agaaaacggcattggcgatatcgtaaccaccggtagcaccaaatacttcaagaccaacaccgatggcgtagatgc

SEQ ID NO: 451872 - DNA, 75 bp, synthetic construct
  source 1..75: mol_type = other DNA
cggaactatcactgcaccgacttacaccattgcaaataccgattacaacaacgtcggtgaagctctggatgcgct

SEQ ID NO: 451873 - DNA, 75 bp, synthetic construct
  source 1..75: mol_type = other DNA
caccaacgtagctgccggtgttaatgccaccgatgcggttaacgtgtcgcagctgaaatcttctgaagcaggcgg

SEQ ID NO: 451874 - DNA, 75 bp, synthetic construct
  source 1..75: mol_type = other DNA
tgacgcagaagtcaacgctgacggcaccatcaccgcaccgacttacaccattgcgaacgccgagtacaacaacgt

SEQ ID NO: 451875 - DNA, 75 bp, synthetic construct
  source 1..75: mol_type = other DNA
acacgatacaatgggactccgttaaaaagggatatagtgcggcacatggtacagatgccaccagcaccatcacca

SEQ ID NO: 451876 - DNA, 75 bp, synthetic construct
  source 1..75: mol_type = other DNA
gcgaagtggctggcaacaccactaatatcactaacctgactgatacggtgactaacctcggtgaagacgccctga

SEQ ID NO: 451877 - DNA, 75 bp, synthetic construct
  source 1..75: mol_type = other DNA
gtactgtttcagcctccagtaaagacgccgttaacggctctcagttgaaaaccactcaagacgatgtggatatca

SEQ ID NO: 451878 - DNA, 75 bp, synthetic construct
  source 1..75: mol_type = other DNA
ccgtcggttcttccaccaatcagcgccgtatcaccaacgtcgccgcaggtaaaaatgacaccgatgccgttaacg

SEQ ID NO: 451879 - DNA, 75 bp, synthetic construct
  source 1..75: mol_type = other DNA
gcagaagattcactggctgttggtgaagattctctggcaataggggcgaaaaccatcgtcaatggtgatgcaggt

SEQ ID NO: 451880 - DNA, 75 bp, synthetic construct
  source 1..75: mol_type = other DNA
gttggatcaaacagtcttgcattgggaagttcatcctctgcaggagggaataattccgtcgcgattggtgcaaac

SEQ ID NO: 451881 - DNA, 75 bp, synthetic construct
  source 1..75: mol_type = other DNA
ctgggatgccagcgctggcgcattcagcgcagcgcatggcaccgataccgccagcaaaatcactaacgtggcaaa

SEQ ID NO: 451882 - DNA, 75 bp, synthetic construct
  source 1..75: mol_type = other DNA
ggcggctcgacgataaatgctgacggcaccatcaatgcgccaacttacagtatcgccaataccgactacagcaac

SEQ ID NO: 451883 - DNA, 75 bp, synthetic construct
  source 1..75: mol_type = other DNA
ccaaccaaatactatcacgccaactcaacggctgaagactcactggcagtcggtgaagactcgctggcaatgggc

SEQ ID NO: 451884 - DNA, 75 bp, synthetic construct
  source 1..75: mol_type = other DNA
tttagcacttcactgggcgacgctctgctgtgggatgaaactgcaagtgcattcagcgccggtcacggtggcaat

SEQ ID NO: 451885 - DNA, 75 bp, synthetic construct
  source 1..75: mol_type = other DNA
gcgttcagcgccagccgcgatggcaaagccagcgtaatcactaatgttgctaatggtgatatttctgaaaccagt

SEQ ID NO: 451886 - DNA, 75 bp, synthetic construct
  source 1..75: mol_type = other DNA
aaacacggtgttgatggcgctgacagcaaaatcaccaacgtcgccgcaggtagcctggctgatgacagtactgat

SEQ ID NO: 451887 - DNA, 75 bp, synthetic construct
  source 1..75: mol_type = other DNA
tacagtaacatcaccctcggtggtggcaatggcggtacaacgcgtatcagcaacgtttctgctggcgtgaacaac

SEQ ID NO: 451888 - DNA, 75 bp, synthetic construct
  source 1..75: mol_type = other DNA
gatgtagtaaacggctctcaattgtacgacctgcagcaggatgctctgttgtggaacggcacagcattcagtgcc

SEQ ID NO: 451889 - DNA, 75 bp, synthetic construct
  source 1..75: mol_type = other DNA
gttaacgtttcgcaactgaagtcttctgaagcaggcggcgttcgctacgacaccaaagctgatggctctatcgac

SEQ ID NO: 451890 - DNA, 75 bp, synthetic construct
  source 1..75: mol_type = other DNA
ggttcttctaccaaccagcgccgtatcaccaacgttgctgccggtgttaatgccaccgatgcggttaacgtttca

SEQ ID NO: 451891 - DNA, 75 bp, synthetic construct
  source 1..75: mol_type = other DNA
tgtcgcgctaggtgcagattccattgcggatcaagacaattccgtttctgtcggcagtagctcattacaacgcaa

SEQ ID NO: 451892 - DNA, 75 bp, synthetic construct
  source 1..75: mol_type = other DNA
ttacaacggtgaatcggcagttgctttaggtgtgtcgatggtgagcgccaatggtcgttgggtctacaaattaca

SEQ ID NO: 451893 - DNA, 75 bp, synthetic construct
  source 1..75: mol_type = other DNA
gccggaccgcactggtaccctacagcgcggagcaaatgtatcagttagtgaatgacgttcagtcttatcctcagt

SEQ ID NO: 451894 - DNA, 75 bp, synthetic construct
  source 1..75: mol_type = other DNA
ttagcacatcgctcggcgacgccctactttgggatgcaaccgcaggcaaattcagcgccaaacacggcattaata

SEQ ID NO: 451895 - DNA, 75 bp, synthetic construct
  source 1..75: mol_type = other DNA
accaccaacatcaccaacctgactgacgctgttaacggtctcggtgacgactccctgctgtggaacaaaacagct

SEQ ID NO: 451896 - DNA, 75 bp, synthetic construct
  source 1..75: mol_type = other DNA
aaccgaagaaggcgttgtgattggttacgacaccactgacggcgaactgcttggtgcattgtcgattggcgatga

SEQ ID NO: 451897 - DNA, 75 bp, synthetic construct
  source 1..75: mol_type = other DNA
ggaaccctgcgacgggaagttacagcgtcgccagcgaaacggcaaaaagccgtggaaagaagagcggtcgcagca

SEQ ID NO: 451898 - DNA, 75 bp, synthetic construct
  source 1..75: mol_type = other DNA
ccactaacaccaccaacatcaccaacctgactgacgctgttaacggtctcggtgacgactccctgctgtggaaca

SEQ ID NO: 451899 - DNA, 75 bp, synthetic construct
  source 1..75: mol_type = other DNA
taatgttgctaatggtgatatttctgaaaccagtactgatgcaattaatggttcacagttgttcgccaccaacac

SEQ ID NO: 451900 - DNA, 75 bp, synthetic construct
  source 1..75: mol_type = other DNA
agtctacagtgcaaaacacggttccgatgccaccagcaaaatcaccaacgttacggcgggtgagctgaacgcatc

SEQ ID NO: 451901 - DNA, 75 bp, synthetic construct
  source 1..75: mol_type = other DNA
caccggtagcaccaagtacttcaagaccaacaccgatggcgtagatgctaacgcgcagggtaaagacagtgttgc

SEQ ID NO: 451902 - DNA, 75 bp, synthetic construct
  source 1..75: mol_type = other DNA
caaagaaagcgatctgctggagccactgcgttcgcgggcagatttgattgtcgatacctcagaaatgtccgttca

SEQ ID NO: 451903 - DNA, 75 bp, synthetic construct
  source 1..75: mol_type = other DNA
gctgacgcacaggtgggaacatctgctgtggcgactcttcccggtgacaccctcgctgccgctctgatgctgaaa

SEQ ID NO: 451904 - DNA, 75 bp, synthetic construct
  source 1..75: mol_type = other DNA
attttcctttaattcaacagccgcgacttcatattttgaagcccgcaatgatgcaatggggggaaccggggtagc

SEQ ID NO: 451905 - DNA, 75 bp, synthetic construct
  source 1..75: mol_type = other DNA
ttaactttatcggttcctcgccgattgcaatgtttattgcgatggtggttgcattcgtactctttggcaccgcac

SEQ ID NO: 451906 - DNA, 75 bp, synthetic construct
  source 1..75: mol_type = other DNA
ctggcaaacccggctttactgacaaagcacaacagcaatgatgatttcagcctgttactgccgtccgtgggcgca

SEQ ID NO: 451907 - DNA, 75 bp, synthetic construct
  source 1..75: mol_type = other DNA
caggccactgccggtgtgtcctggcacaacgacctgttcaccaccgcacttgatgttgacctgacgccggccagc

SEQ ID NO: 451908 - DNA, 75 bp, synthetic construct
  source 1..75: mol_type = other DNA
ctgtggcggcccttcccggtgaccgcctctctgccgcactgatggttaaatcacacggcaccgtcagtgtcgacg

SEQ ID NO: 451909 - DNA, 75 bp, synthetic construct
  source 1..75: mol_type = other DNA
cctgtttatattttgatatcaggcgcgataattattggatcagtagtatgtataacgactggagcatttaagaaa

SEQ ID NO: 451910 - DNA, 75 bp, synthetic construct
  source 1..75: mol_type = other DNA
atatagatccgaaagaaaaggcacttgctgaaatcgcgcttgcacttgctgtcaatgttatgggtgaagacgcgg

SEQ ID NO: 451911 - DNA, 75 bp, synthetic construct
  source 1..75: mol_type = other DNA
ctggagatgcagaagaaaaatgccgagaaacaggcgatggaagataacaaatccgacatcggctggggcagccag

SEQ ID NO: 451912 - DNA, 75 bp, synthetic construct
  source 1..75: mol_type = other DNA
tcccggcgatcattatgatctctaccaccatcgccaatatctggctggtaaaagatacccctgcctgggaagtgg

SEQ ID NO: 451913 - DNA, 75 bp, synthetic construct
  source 1..75: mol_type = other DNA
ccaaatctaaccctaactattaccttttatttaaaacctctgatacgagctactgcggcgggatgatatggctgg

SEQ ID NO: 451914 - DNA, 75 bp, synthetic construct
  source 1..75: mol_type = other DNA
ttcgtggatttgccacagtaaacaatgccgatatgccagttcgtctggttgttctgagaaacggcactatcaatc

SEQ ID NO: 451915 - DNA, 75 bp, synthetic construct
  source 1..75: mol_type = other DNA
gatgcgcaggtgggtgtttctgccgttgcggcactgccgaatgacacgctgccggttgccctgatggtgaaatcc

SEQ ID NO: 451916 - DNA, 75 bp, synthetic construct
  source 1..75: mol_type = other DNA
aggtgttaaccactggtatcacatggacatgaactaccgcgggatgatcaatatgctgatcttctgcggttgtgt

SEQ ID NO: 451917 - DNA, 75 bp, synthetic construct
  source 1..75: mol_type = other DNA
gccgccggaacacgctatctgtcgctgttaggtggcacctgtttaagcttctacgactggtattgcgacctgccg

SEQ ID NO: 451918 - DNA, 75 bp, synthetic construct
  source 1..75: mol_type = other DNA
ttgaagttcatcagcagaacagtcagcagctgccgcgcgcaaatgcgcccgaatatcataaacccggagatgagc

SEQ ID NO: 451919 - DNA, 75 bp, synthetic construct
  source 1..75: mol_type = other DNA
atgcgtgcttttggtgaaagcctggtggcttatcgcccgcctatcgacacccgcagtgtcagtgaaatgcgccag

SEQ ID NO: 451920 - DNA, 75 bp, synthetic construct
  source 1..75: mol_type = other DNA
cgcgctgactgcccgcgcggtggtcagccagcgtgtaccgccgggcatgaccatgatgtatcacgctcaggaacg

SEQ ID NO: 451921 - DNA, 75 bp, synthetic construct
  source 1..75: mol_type = other DNA
aactgcggcgattgaaggcaagctcgacctgctggtgacgctcgatttccgtatgtccagcacctgtctgttctc

SEQ ID NO: 451922 - DNA, 75 bp, synthetic construct
  source 1..75: mol_type = other DNA
cgcgccaccgcgtggcgtcgtgcagcgacgtttaacctttacgcaccatcgtatttacccgggcctggttaacat

SEQ ID NO: 451923 - DNA, 75 bp, synthetic construct
  source 1..75: mol_type = other DNA
gtacaccccaggagcactacgcggcggcagccatgtgcatgtctttagcccgaacggtgaaaaggtgagctttac

SEQ ID NO: 451924 - DNA, 75 bp, synthetic construct
  source 1..75: mol_type = other DNA
cgttggcatctctccattcgacgtcgtacatatcgatgtatccggcctggtcgggaccgaccatgattacggtgc

SEQ ID NO: 451925 - DNA, 75 bp, synthetic construct
  source 1..75: mol_type = other DNA
atgtcaaagtggaatatcgcctctttttcaaaggaggagcaggataaagttgccgtcgataaggtggctgctgct

SEQ ID NO: 451926 - DNA, 75 bp, synthetic construct
  source 1..75: mol_type = other DNA
acttctgacagcaaacgtcagtttgcaagtgttggtgctgaatttaacgcatggaaatgggcgcaattgcgtgcc

SEQ ID NO: 451927 - DNA, 75 bp, synthetic construct
  source 1..75: mol_type = other DNA
tgacggtgacaagtaccacaacacgaaaaacggattcaacgccgatattggtgcttatacagacctgaatgacaa

SEQ ID NO: 451928 - DNA, 75 bp, synthetic construct
  source 1..75: mol_type = other DNA
gcgtacagaaactggcgttcaccgcctggtgcgtaagagcccgtttgactccggcggtcgtcgccacacgtcgtt

SEQ ID NO: 451929 - DNA, 75 bp, synthetic construct
  source 1..75: mol_type = other DNA
gcggcgcatatttgtggtatctgatccgccgctatcgcaaagtgccgctgtacgaaggtgacagaacgccagtga

SEQ ID NO: 451930 - DNA, 75 bp, synthetic construct
  source 1..75: mol_type = other DNA
taataaaatgttctcggaattattccggtacttgccctcaaccagaaataacacgtatccagaataaatctaatt

SEQ ID NO: 451931 - DNA, 75 bp, synthetic construct
  source 1..75: mol_type = other DNA
gcgacaaatcatggcgaacttgatgcgaatgtcttccagcatcgaccctttcttgaacaagataatcaggcgcat

SEQ ID NO: 451932 - DNA, 75 bp, synthetic construct
  source 1..75: mol_type = other DNA
atgcatttgctgcatcaatcggtaaaggtgcccccctcccataaaccgaaattttctgaagcattgcgaaccggc

SEQ ID NO: 451933 - DNA, 75 bp, synthetic construct
  source 1..75: mol_type = other DNA
aatacaaagtttgttacccaagggattaagtttaaatacaaataagttgaaggtgtccccacttatcgacaaaag

SEQ ID NO: 451934 - DNA, 75 bp, synthetic construct
  source 1..75: mol_type = other DNA
aagatgaacggcgtttatccagacatactaaaaatttgatagaatggtatcttaaagcttgtgaaagaatccatt

SEQ ID NO: 451935 - DNA, 75 bp, synthetic construct
  source 1..75: mol_type = other DNA
accggacacttgatcgactttaacgtccgtgcggaacgcatgggctggctgccgtctgcaccgcagttaggcact

SEQ ID NO: 451936 - DNA, 75 bp, synthetic construct
  source 1..75: mol_type = other DNA
gctggcgtttgctcttgactggcagcgtccggcgcgtcacatgaacagcacctcttatttctataaccactccag

SEQ ID NO: 451937 - DNA, 75 bp, synthetic construct
  source 1..75: mol_type = other DNA
ctggaagatgaacacgtttcttacaacgccggttacaccaacgttcacgagctgatcccatggcgtacgctctct

SEQ ID NO: 451938 - DNA, 75 bp, synthetic construct
  source 1..75: mol_type = other DNA
cagccgcgcaaaatcatctccagcccgacatggtctggccttgaagatgaacacgtttcttacaacgccggttac

SEQ ID NO: 451939 - DNA, 75 bp, synthetic construct
  source 1..75: mol_type = other DNA
gcgcgtcacatgaacagtacctcttatttctataaccactccagccagtggcgttatgaaaccgtgactgcggaa

SEQ ID NO: 451940 - DNA, 75 bp, synthetic construct
  source 1..75: mol_type = other DNA
gaaagagttcggcgagtccatgccgtttgatggtaagcgaatgatctatggcggattcgagtcaatcatcgacga

SEQ ID NO: 451941 - DNA, 75 bp, synthetic construct
  source 1..75: mol_type = other DNA
gtatttacgttttcgcttattcataactcctgaatttaaacccaagaatggtgtttccagcggaacaacgatagc

SEQ ID NO: 451942 - DNA, 75 bp, synthetic construct
  source 1..75: mol_type = other DNA
tgccagcgtcgcggggaatgggataaaaccggggacattctggctgaggcggcgcttggcttacagcggcgggcg

SEQ ID NO: 451943 - DNA, 75 bp, synthetic construct
  source 1..75: mol_type = other DNA
ggcgtggctgtaaaagtgcattcgacttacgaaaatagcaaagtcttattaaaagcggacggtagcaactccgtt

SEQ ID NO: 451944 - DNA, 75 bp, synthetic construct
  source 1..75: mol_type = other DNA
cgttacgggtattgtttattcagtagaattacaatgtagaaattgtggagccgcggaggatcttagtttgatgct

SEQ ID NO: 451945 - DNA, 75 bp, synthetic construct
  source 1..75: mol_type = other DNA
atattcaggcggggtctggcggtacggaagcacaggactgggcgagcatgcttgagcgtatgtatctgcgctggg

SEQ ID NO: 451946 - DNA, 75 bp, synthetic construct
  source 1..75: mol_type = other DNA
tttttgtagaaatggatgcgcctgattttgaacaagccggggaatggaagcatttcgctcataagttgtatgtag

SEQ ID NO: 451947 - DNA, 75 bp, synthetic construct
  source 1..75: mol_type = other DNA
atggcggcttcatgtgtttttgaagaatataaaaatatagatgatgacggcatgaataaagaaagtgaaatcatt

SEQ ID NO: 451948 - DNA, 75 bp, synthetic construct
  source 1..75: mol_type = other DNA
ctggggtttcagaaggatacgccaaaccaggtagaatcgcctcctggtatataggtaatactgaccagccatgga

SEQ ID NO: 451949 - DNA, 75 bp, synthetic construct
  source 1..75: mol_type = other DNA
aacccagcgacggcacactggtaggtaaaacaacgggctctgcttcaggtgtggctgtaaaagtgcattcaactt

SEQ ID NO: 451950 - DNA, 75 bp, synthetic construct
  source 1..75: mol_type = other DNA
ccggatggtagcggtaatgctgtcggtgttggaacattttcaggtaacgcgaccttctcctttacctacgaataa

SEQ ID NO: 451951 - DNA, 75 bp, synthetic construct
  source 1..75: mol_type = other DNA
ctgggcgaactggcgcagcaaatgaacagcccatcattaattattattggtcgggtcgttggcctgcgcgataaa

SEQ ID NO: 451952 - DNA, 75 bp, synthetic construct
  source 1..75: mol_type = other DNA
cagacgctggtgttctacatggggttgagtcaggccgcgaccattcagcaaaaactcattgaacatggaatgccc

SEQ ID NO: 451953 - DNA, 75 bp, synthetic construct
  source 1..75: mol_type = other DNA
ccggatggcagtggtgctgctgtcggtgttggaacattttcaggtaacgcgaccttctcctttacctacgaataa

SEQ ID NO: 451954 - DNA, 75 bp, synthetic construct
  source 1..75: mol_type = other DNA
gaatattagccgtctcaagctgattggctatttctttacatcgttcattgttggagtgattggagcgccgttagt

SEQ ID NO: 451955 - DNA, 75 bp, synthetic construct
  source 1..75: mol_type = other DNA
aacaggttgatgtcggtaaccaaatctccagcggcgataccactggcattgtggtgatcacccagacgcatccta

SEQ ID NO: 451956 - DNA, 75 bp, synthetic construct
  source 1..75: mol_type = other DNA
gcaacccgccggctggcatatttcatagtgtcgtatatcgccgggatcttatgctccgggttggtaggctcaaag

SEQ ID NO: 451957 - DNA, 75 bp, synthetic construct
  source 1..75: mol_type = other DNA
atggggagtaatagcgttaacattattattattaatacccgaaaaattatcccccctggtaaagcatttatgctt

SEQ ID NO: 451958 - DNA, 75 bp, synthetic construct
  source 1..75: mol_type = other DNA
cacaaaggccgggcagcgatggaacgggagttccccgaagcactggaacggatgaaagagagactgccaccgtat

SEQ ID NO: 451959 - DNA, 75 bp, synthetic construct
  source 1..75: mol_type = other DNA
gcttactaaccgtattctcggtgaagaacgcgttgtggtttacgacatgccaggcacgacgcgtgacagcatcta

SEQ ID NO: 451960 - DNA, 75 bp, synthetic construct
  source 1..75: mol_type = other DNA
gatcgccgcgtctcacggtcgtggcgtattaagtctgctggagcacgtgctgctgccgtggatggaagatctcgc

SEQ ID NO: 451961 - DNA, 75 bp, synthetic construct
  source 1..75: mol_type = other DNA
gtaaacgtattgcctatctgctgattggtaaaattggtagcactaccctgggtctgggttacgttacggtatttc

SEQ ID NO: 451962 - DNA, 75 bp, synthetic construct
  source 1..75: mol_type = other DNA
cgtaatcgtctctgctttagccgttaaaatcctgacgttcctgaataatcaggatatcggctcgctgggggcgct

SEQ ID NO: 451963 - DNA, 75 bp, synthetic construct
  source 1..75: mol_type = other DNA
acgggctgggcatggaggtggtagccgagggtgtggaaaggcactgttgcaaagttagcgatgaggcagcctttt

SEQ ID NO: 451964 - DNA, 75 bp, synthetic construct
  source 1..75: mol_type = other DNA
gagaaaaacctaccttcctggtggcaaacaaaactgatggtttagatccagaccaggcagtcgttgatttctatt

SEQ ID NO: 451965 - DNA, 75 bp, synthetic construct
  source 1..75: mol_type = other DNA
tgatcgcccctccgcacagggggattcaccatgcagaagtgtttttaataaacagcaaacaaaaaaatcaagcat

SEQ ID NO: 451966 - DNA, 75 bp, synthetic construct
  source 1..75: mol_type = other DNA
tgacgaggccatcaataacatgctggcgaaagggacctggcaaattgattcagcccaggccctgagcggttccgt

SEQ ID NO: 451967 - DNA, 75 bp, synthetic construct
  source 1..75: mol_type = other DNA
ccttcgacaaagagtactggtcgccgcaaggcatcccacaggatggtcgtaatggaaaaattttcgtgagttatc

SEQ ID NO: 451968 - DNA, 75 bp, synthetic construct
  source 1..75: mol_type = other DNA
gagcttgatcagtggatggaaagccggatttatccggagatgattgcgatcccggcactggctggactgattacc

SEQ ID NO: 451969 - DNA, 75 bp, synthetic construct
  source 1..75: mol_type = other DNA
attaccacgatggttacgcagggctatgagtatcgtcgtgatgacgatatggcgttatggagttctgcagatctg

SEQ ID NO: 451970 - DNA, 75 bp, synthetic construct
  source 1..75: mol_type = other DNA
atgtttggctcatatgcgcaggcattccgcgccccgacgatgggagaaatgtataacgactctaagcacttctcg

SEQ ID NO: 451971 - DNA, 75 bp, synthetic construct
  source 1..75: mol_type = other DNA
gtatggcggcgagtattatcgtcaggaacagcatccgggcggcgcgacgacggggttccctcaggcaaaaatcga

SEQ ID NO: 451972 - DNA, 75 bp, synthetic construct
  source 1..75: mol_type = other DNA
agtaaaagacacgttgaaaacctggggtctgctggagctggtcaactccgtggttgggcttattattgtgctgat

SEQ ID NO: 451973 - DNA, 75 bp, synthetic construct
  source 1..75: mol_type = other DNA
gcaacacgctgggggaactggctatcatcgtggtgttcggtgcggtcatcggtaaattgatggtcgactccggcg

SEQ ID NO: 451974 - DNA, 75 bp, synthetic construct
  source 1..75: mol_type = other DNA
gaacgcttttgaaagcgcggtgaaaagcattgcaatggtgattctgatcatcggtgcgggtggcgtgctgaagca

SEQ ID NO: 451975 - DNA, 75 bp, synthetic construct
  source 1..75: mol_type = other DNA
ggatttatccggtgatgagcgatatcccggcactggcaggactgattaccacgatggttacgcagggctatgagt

SEQ ID NO: 451976 - DNA, 75 bp, synthetic construct
  source 1..75: mol_type = other DNA
gggctatgactatcgtcgtgatgacgatatggcgttatggagctctgcagatttgacttattccattacatacga

SEQ ID NO: 451977 - DNA, 75 bp, synthetic construct
  source 1..75: mol_type = other DNA
tgttgtgttcggtgcggtcattggtaaattgatggtcgactccggcgcggctcatcagatagcgcatacgctgct

SEQ ID NO: 451978 - DNA, 75 bp, synthetic construct
  source 1..75: mol_type = other DNA
aattgtagggctggtcatcaagcctttcccggaacctgtcgtgctgttaattgcggttgctgcctcgatggtggt

SEQ ID NO: 451979 - DNA, 75 bp, synthetic construct
  source 1..75: mol_type = other DNA
cgtatgggctggctcccttctgcgccgcagctggggcgtaacccgctctccctgaaagccgaagccgacaaggcc

SEQ ID NO: 451980 - DNA, 75 bp, synthetic construct
  source 1..75: mol_type = other DNA
ccatcgccattacccctgactactctgaagtggccaaattgtgcgaccagtggctggcaccgaaacaaggcactg

SEQ ID NO: 451981 - DNA, 75 bp, synthetic construct
  source 1..75: mol_type = other DNA
ggtgttaactgtacaggctcctgcagctggaaaatctacgttaaaaagggtctggtcacctgggaaaaccaacag

SEQ ID NO: 451982 - DNA, 75 bp, synthetic construct
  source 1..75: mol_type = other DNA
ggatacggtgcccaaagtcacccgtatgccggacagtgagccggatgtgtatatcttcagtgacgggggaaacac

SEQ ID NO: 451983 - DNA, 75 bp, synthetic construct
  source 1..75: mol_type = other DNA
aaatgttccgcgatgaatttattggtgatctgctgctggcgctaccgcatccggatctgaattatgaccgctggg

SEQ ID NO: 451984 - DNA, 75 bp, synthetic construct
  source 1..75: mol_type = other DNA
caaacgccgccaggcttgcatcaccaccgtgcgctgtatgactgttacatcaccgctgccttgcttatcgatatt

SEQ ID NO: 451985 - DNA, 75 bp, synthetic construct
  source 1..75: mol_type = other DNA
ggtgttaactgtacaggctcctgcagctggaaaatctacgttaaaaatggtctggtcacctgggaaatccaacag

SEQ ID NO: 451986 - DNA, 75 bp, synthetic construct
  source 1..75: mol_type = other DNA
ggtgttaactgtacaggctcctgcagctggaaaatctacgttaaaaaaggtctggtgacctgggaaacccaacag

SEQ ID NO: 451987 - DNA, 75 bp, synthetic construct
  source 1..75: mol_type = other DNA
ggtgttaactgtacaggctcctgcagctggaaaatctacgttaaaaaaggtctggtcacctgggaaagccaacag

SEQ ID NO: 451988 - DNA, 75 bp, synthetic construct
  source 1..75: mol_type = other DNA
ggtgttaactgtacaggctcctgcagctggaaaatctacgttaaaaagggtctggtaacctgggaaacccaacag

SEQ ID NO: 451989 - DNA, 75 bp, synthetic construct
  source 1..75: mol_type = other DNA
ggtgttaactgtacaggctcctgcagctggaaaatctacgttaaaaacggtctggtgacctgggaaaaccaacag

SEQ ID NO: 451990 - DNA, 75 bp, synthetic construct
  source 1..75: mol_type = other DNA
ggtgttaactgtacaggctcctgcagctggaaaatctacgttaaaaacggtctggtaacctgggaaagccaacag

SEQ ID NO: 451991 - DNA, 75 bp, synthetic construct
  source 1..75: mol_type = other DNA
ttctgacgctggaccagttacgtccgaatccggataacccgcgcaccacgcgcaatccgcgttatgacgacatca

SEQ ID NO: 451992 - DNA, 75 bp, synthetic construct
  source 1..75: mol_type = other DNA
tgccagtgatggctatgtgactagcctggaactgtttgctcatgatggtacgcagattgcgcaactctatggtca

SEQ ID NO: 451993 - DNA, 75 bp, synthetic construct
  source 1..75: mol_type = other DNA
ctggaattgtttgcccatgatggtacgcagatagcgcaactttatggtcaacgtacagaaggcgaacaggagcaa

SEQ ID NO: 451994 - DNA, 75 bp, synthetic construct
  source 1..75: mol_type = other DNA
aaggccgttaatatgcaagcggcgattgattcagtaatcagtaattccggtaaagcaggtttatcacatgtaatt

SEQ ID NO: 451995 - DNA, 75 bp, synthetic construct
  source 1..75: mol_type = other DNA
tcggcttaagctccttattatcgaaagttaaattcttcgaatggttagggaaggtgcgaataagcggggaaattc

SEQ ID NO: 451996 - DNA, 75 bp, synthetic construct
  source 1..75: mol_type = other DNA
tgcatatcaccctcggcggtaatgactccaacttattgatagtgttttatgttcagataatgcccgatgactttg

SEQ ID NO: 451997 - DNA, 75 bp, synthetic construct
  source 1..75: mol_type = other DNA
acgtacagaaggcgaacaggagcaagcgcaatggcgtaagcaaattgcttcgctgataccggaaggcgttactgc

SEQ ID NO: 451998 - DNA, 75 bp, synthetic construct
  source 1..75: mol_type = other DNA
tatctcttgtattcgtcctgatgtgcgcgaacagctggataacaatctggcgaacatcagcagccgctggttgcc

SEQ ID NO: 451999 - DNA, 75 bp, synthetic construct
  source 1..75: mol_type = other DNA
aacccaacgccggatacgtggttttaaaagatcgtcatggcccactgcaatatctgttgatgccaacgtaccgta

SEQ ID NO: 452000 - DNA, 75 bp, synthetic construct
  source 1..75: mol_type = other DNA
gctgtcgtcattactgacggagcagggactgccggttgacgcctccagtatcagcaggatggagaacgccctgaa

SEQ ID NO: 452001 - DNA, 75 bp, synthetic construct
  source 1..75: mol_type = other DNA
accccgcttgtacgcattgcccagggaattgttgatgcttatgaaatctctctggagctgccatcacagacatgg

SEQ ID NO: 452002 - DNA, 75 bp, synthetic construct
  source 1..75: mol_type = other DNA
gttgcgccctaatcctgataacccgagaaccacgcgcaatccccggtacgacgatattaaaagttccattttctc

SEQ ID NO: 452003 - DNA, 75 bp, synthetic construct
  source 1..75: mol_type = other DNA
atgaaaaaaacggttattctcattttggtgatgatagttatcgccgttgctgcgggtatcggctactggaaattt

SEQ ID NO: 452004 - DNA, 75 bp, synthetic construct
  source 1..75: mol_type = other DNA
acggcgagattgttcgtagcctgaaaatccgccagatcgaacctgaattcttgaacctgatgtttgcggaggagg

SEQ ID NO: 452005 - DNA, 75 bp, synthetic construct
  source 1..75: mol_type = other DNA
gacgcaagtacctatggttcggaactattaaatagtttgtttaacgtgactcagattaatttttcttttccaaaa

SEQ ID NO: 452006 - DNA, 75 bp, synthetic construct
  source 1..75: mol_type = other DNA
aaattttatgattgggtaacaaagaataaaaaacttactggaggtgaacaagcttataaatatatcgatgagaaa

SEQ ID NO: 452007 - DNA, 75 bp, synthetic construct
  source 1..75: mol_type = other DNA
aaaaagaatctccgcctatgcagttggccagtggctcaaccggctggatcgaactgcctgatggacagcgctgga

SEQ ID NO: 452008 - DNA, 75 bp, synthetic construct
  source 1..75: mol_type = other DNA
tgggtatatcgaagtatatcctacaactaaacagggggatttttcgtggaaaaatattaaagaatcatttgttga

SEQ ID NO: 452009 - DNA, 75 bp, synthetic construct
  source 1..75: mol_type = other DNA
tgagcatggtttctaaccccatcgacgcgttgctgaaaggcaactacatcgggattctggtgtgggcgattggtc

SEQ ID NO: 452010 - DNA, 75 bp, synthetic construct
  source 1..75: mol_type = other DNA
gtcggcgcactgaaagccgttgcccccatcctggtgttgatgctggtaatggcatctattgctaaccaccagcac

SEQ ID NO: 452011 - DNA, 75 bp, synthetic construct
  source 1..75: mol_type = other DNA
actgctcgcggtgctggttggctgtatgctgttggtggcgctggtggttaatccactgctggtatggtggaaaat

SEQ ID NO: 452012 - DNA, 75 bp, synthetic construct
  source 1..75: mol_type = other DNA
aagtaatgaatcttgataatgtgcaaaatgcggaagtgtttgccaatattgagaagcaattgcgcatgattcaat

SEQ ID NO: 452013 - DNA, 75 bp, synthetic construct
  source 1..75: mol_type = other DNA
atgccgttcatgcaaactatcagcccaatgaagagcatatacaggaacagaattacaagcttgaacttgaactga

SEQ ID NO: 452014 - DNA, 75 bp, synthetic construct
  source 1..75: mol_type = other DNA
atgctgctggtagcgctggtcgttaacccgctgctggtgtggtggaaaattcgtcgcaacccgttcccgttagtt

SEQ ID NO: 452015 - DNA, 75 bp, synthetic construct
  source 1..75: mol_type = other DNA
atattgaccacgagattgccgatttgcaggcgaaacgtacccgcctggtgcagcaacatccgcgaattgatgaat

SEQ ID NO: 452016 - DNA, 75 bp, synthetic construct
  source 1..75: mol_type = other DNA
tgaatatcactgattataagtattatgatttcagccagatttacagttgttctgacagaacattaaatgattatg

SEQ ID NO: 452017 - DNA, 75 bp, synthetic construct
  source 1..75: mol_type = other DNA
actgaagtgcaactttaggactgtcgggaagttaacgggtaaggataatattgttgttgtaagttgtcagggaag

SEQ ID NO: 452018 - DNA, 75 bp, synthetic construct
  source 1..75: mol_type = other DNA
cttaataacggcaactggctgctgcccgtcttttattgccgtacccaacccggcgaaaaatgggtcggcaatgat

SEQ ID NO: 452019 - DNA, 75 bp, synthetic construct
  source 1..75: mol_type = other DNA
ccaacgtcacgatacgccagcaggtagcgaatggctggagagcgtgcgggcatatgagaaagaaactttgagtcg

SEQ ID NO: 452020 - DNA, 75 bp, synthetic construct
  source 1..75: mol_type = other DNA
caaagcgcgtaatgccagcgagctacgtgccgatctggaacaggctatgcggctgattccggggccgaaacggct

SEQ ID NO: 452021 - DNA, 75 bp, synthetic construct
  source 1..75: mol_type = other DNA
catcaggcggtgaatgccggatgcgctttgcttatccggcctacaaaatcgcagcgtgtaggcctgataagacgc

SEQ ID NO: 452022 - DNA, 75 bp, synthetic construct
  source 1..75: mol_type = other DNA
aacgctaatgctcttatcgccacacaagtaccgcgtaataaaagcggctggcgctgggtacgctctccacaggcg

SEQ ID NO: 452023 - DNA, 75 bp, synthetic construct
  source 1..75: mol_type = other DNA
aggaaacgaagaagttgaaggtacctggcctaacaaattgcaacctggaaaatataaaaacatggggagtaatag

SEQ ID NO: 452024 - DNA, 75 bp, synthetic construct
  source 1..75: mol_type = other DNA
gagataaccacggatgaatggctgttactactggatggtcaggataatggcatgaaaatagtcagcaatcaggag

SEQ ID NO: 452025 - DNA, 75 bp, synthetic construct
  source 1..75: mol_type = other DNA
atctatatcagccattccgcggacaacggcgagagctggtcagtaccgcaagcaaccgaatgcccaacaacaatt

SEQ ID NO: 452026 - DNA, 75 bp, synthetic construct
  source 1..75: mol_type = other DNA
ataccggtgcgccaaccaaagtattagcgcccgatacggcaggtaaattttacccgaaccaggattgcagtagtt

SEQ ID NO: 452027 - DNA, 75 bp, synthetic construct
  source 1..75: mol_type = other DNA
atggtgaaaaaagcgatagtgacggcgatggctgtaatcagcctctttactctaatgggttgtaataatcgggcc

SEQ ID NO: 452028 - DNA, 75 bp, synthetic construct
  source 1..75: mol_type = other DNA
cctggtaaaacaaatcctggtcggccttgttctggggattcttctggcatggatctcaaaacccgcggcggaagc

SEQ ID NO: 452029 - DNA, 75 bp, synthetic construct
  source 1..75: mol_type = other DNA
acctgactgacgctgttgacagcctcggtgacgattccctgctgtggaacgctactgcgggggcattcagcgccg

SEQ ID NO: 452030 - DNA, 75 bp, synthetic construct
  source 1..75: mol_type = other DNA
cattactaacctgaacaatcaggtgacgaatctggatactcgcgttaccaatatcgaaaacggcattggcgatat

SEQ ID NO: 452031 - DNA, 75 bp, synthetic construct
  source 1..75: mol_type = other DNA
attggtagcaacgcgcgtgcaaaccatgcaaacagcattgctatgggtagtggctcacagacgactcgtggtgct

SEQ ID NO: 452032 - DNA, 75 bp, synthetic construct
  source 1..75: mol_type = other DNA
gacgcagtgaactatgcgcaactgaagcaaagcgtgcaggaaacgaagcaatacaccgatcagcgcatggttgag

SEQ ID NO: 452033 - DNA, 75 bp, synthetic construct
  source 1..75: mol_type = other DNA
ctgacggtactatcactgcaccgacttacaccattgcaaataccgattacaacaacgtcggtgaagccctggatg

SEQ ID NO: 452034 - DNA, 75 bp, synthetic construct
  source 1..75: mol_type = other DNA
tgtaatcactaacgtcgctaacggtgcagtctctgccaccagcaacgatgccattaatggctcacagctctatag

SEQ ID NO: 452035 - DNA, 75 bp, synthetic construct
  source 1..75: mol_type = other DNA
gtattaactatgtacgtaccaacgacaacggcttagcgttcaacgatgccagcgcctcaggtattggtgctacgg

SEQ ID NO: 452036 - DNA, 75 bp, synthetic construct
  source 1..75: mol_type = other DNA
gaaaacggtgcgggtattaactatgtacgtaccaacgacagcggcttagcgttcaacgatgccagcgcttcaggt

SEQ ID NO: 452037 - DNA, 75 bp, synthetic construct
  source 1..75: mol_type = other DNA
gtatacagggagagttacaccctgattattgagtttaatcatcttattgctgaacatgccgttcatgatgaaaaa

SEQ ID NO: 452038 - DNA, 75 bp, synthetic construct
  source 1..75: mol_type = other DNA
ataacgtcggtgatgctctggctgccattaacacgtcatttagcacatcactcggtgacgccctactctgggatg

SEQ ID NO: 452039 - DNA, 75 bp, synthetic construct
  source 1..75: mol_type = other DNA
gtggcagccaacaccaccaatatcgccacgaacaccactaacatcaccaacctgactgacgctgttgacagtctc

SEQ ID NO: 452040 - DNA, 75 bp, synthetic construct
  source 1..75: mol_type = other DNA
caaatcatgccgacagcattgcaatgggtaatggttctcagactacccgtggtgcgcagaccaactacactgcct

SEQ ID NO: 452041 - DNA, 75 bp, synthetic construct
  source 1..75: mol_type = other DNA
acgtagctgatggttccgaagcccatgacgccgttacggttcgtcaattgcagaatgcgattggtgcggtcgcaa

SEQ ID NO: 452042 - DNA, 75 bp, synthetic construct
  source 1..75: mol_type = other DNA
tttgccacgccacaacttgcttatcaattgcagtttactaaccaggcagacaccacagctattgggattctgttg

SEQ ID NO: 452043 - DNA, 75 bp, synthetic construct
  source 1..75: mol_type = other DNA
cgttttgaccgggacgttacgccggatattgactggttactccaacagggacgaacactgggtgtccgggcaaaa

SEQ ID NO: 452044 - DNA, 75 bp, synthetic construct
  source 1..75: mol_type = other DNA
cgagcagagcgatctgttccggctcacttatgcgcttgaatcggccaaggaggcaggctttgcctatcagttatt

SEQ ID NO: 452045 - DNA, 75 bp, synthetic construct
  source 1..75: mol_type = other DNA
atgaagaccgtaacgacaactgtgaaagaggaatctccgatgactgttgaatcgagaatattttctgtagccgag

SEQ ID NO: 452046 - DNA, 75 bp, synthetic construct
  source 1..75: mol_type = other DNA
gaggtggattttaaaggggttaagcaggcattagccaaaatgcattatacggttctggcggaatcaatatgctga

SEQ ID NO: 452047 - DNA, 75 bp, synthetic construct
  source 1..75: mol_type = other DNA
gaacgctgctgaaaaactgtctgaggtggattttaaagaggttaagcaagcattagccaaaatgcactacactgt

SEQ ID NO: 452048 - DNA, 75 bp, synthetic construct
  source 1..75: mol_type = other DNA
gggtagcagctctgtttccagccgagtgattgcaaaaggctcccgtgacaccagcataacggaaaatggcgttgt

SEQ ID NO: 452049 - DNA, 75 bp, synthetic construct
  source 1..75: mol_type = other DNA
gaaaatggcgtagttatcggttatgacaccactgacggtgagttgctcggtgcattgtcaattggtgatgacggt

SEQ ID NO: 452050 - DNA, 75 bp, synthetic construct
  source 1..75: mol_type = other DNA
gccgttggtgaagactcgctggcaatgggtgcgaaaactgtcgttaatggtaatgcaggtattggtatcggtttg

SEQ ID NO: 452051 - DNA, 75 bp, synthetic construct
  source 1..75: mol_type = other DNA
gctaatgctgattacgataatgtcggtgatgccctgaatgctatcgataccactcttgacgacgctctgctctgg

SEQ ID NO: 452052 - DNA, 75 bp, synthetic construct
  source 1..75: mol_type = other DNA
ttctactaaccaacgccgtatcaccaacgtagctgccggtgttaatgccaccgatgcggttaacgtgtcgcagct

SEQ ID NO: 452053 - DNA, 75 bp, synthetic construct
  source 1..75: mol_type = other DNA
cacgctaattcaacggaagaagattcactggcagtgggaactgactcgctggcaatgggtgcgaaaaccatcgtg

SEQ ID NO: 452054 - DNA, 75 bp, synthetic construct
  source 1..75: mol_type = other DNA
tctgatgaagtggagcgcctgcaaaattacgggcatttcagcgttcccctgccgggcgcagaggcgctgattgcc

SEQ ID NO: 452055 - DNA, 75 bp, synthetic construct
  source 1..75: mol_type = other DNA
ccgggtgatgcaggcatttaccaccatgaggggcatcgtatcaggctgacaaaggacggacgctgcatcattacc

SEQ ID NO: 452056 - DNA, 75 bp, synthetic construct
  source 1..75: mol_type = other DNA
tagaagaggggcacgattacattcgtatcactccaccggaaaaactgaattttgccgagatcgcgacatacaatg

SEQ ID NO: 452057 - DNA, 75 bp, synthetic construct
  source 1..75: mol_type = other DNA
gcgtgggtcattggtacacgcaatatgaaaaaagccctgctgcgtgcgttgctggaacctaccgctgagctgcgc

SEQ ID NO: 452058 - DNA, 75 bp, synthetic construct
  source 1..75: mol_type = other DNA
ccaacgtcacgataccccaacgggtagcgaatggctggagagcgtgcgggcatatgagaaagaaactttgagtcg

SEQ ID NO: 452059 - DNA, 75 bp, synthetic construct
  source 1..75: mol_type = other DNA
cccgaccggactcacagccggagatacgggggtgtatcaccatgaggggcaccggatacggttaacaaaggatgg

SEQ ID NO: 452060 - DNA, 75 bp, synthetic construct
  source 1..75: mol_type = other DNA
aggtgatctggtttctaaaccttatatcgacatcacactcaatctgatgaagacgtttggtgttgaagttgaaaa

SEQ ID NO: 452061 - DNA, 75 bp, synthetic construct
  source 1..75: mol_type = other DNA
ctgaacgctatcgatatggatatgaaccatattcccgatgcggcgatgactatcgcgacggcggcgctgtttgcg

SEQ ID NO: 452062 - DNA, 75 bp, synthetic construct
  source 1..75: mol_type = other DNA
aaaaaagcacgtaagttgagaatgaaaaaagcacaaagattacttgagaaaatgacatgtgatcgtgtttcacca

SEQ ID NO: 452063 - DNA, 75 bp, synthetic construct
  source 1..75: mol_type = other DNA
atcaccggatggcgatgtgtttctcgctggtcgcattatcagatacggcagtgacgattcttgatccaaaatgta

SEQ ID NO: 452064 - DNA, 75 bp, synthetic construct
  source 1..75: mol_type = other DNA
accatattcccgatgcggcgatgaccattgccacggcggcgttatttgcaaaaggcaccaccacgctgcgcaata

SEQ ID NO: 452065 - DNA, 75 bp, synthetic construct
  source 1..75: mol_type = other DNA
gtgacaattcttgacccaaaatgtacggccaaaacatttccggattatttcgagcaactggcgcggattagccag

SEQ ID NO: 452066 - DNA, 75 bp, synthetic construct
  source 1..75: mol_type = other DNA
gccatgctgtatgtgccgcagttgctgctgcacgtcagccgtccggttcgctgggacagcgatcacgtggtgctg

SEQ ID NO: 452067 - DNA, 75 bp, synthetic construct
  source 1..75: mol_type = other DNA
tgcagccagcactgaaagattacggcggtcaactggtggcctgctttgccgttgatcaggatgaaaatccgcagc

SEQ ID NO: 452068 - DNA, 75 bp, synthetic construct
  source 1..75: mol_type = other DNA
acaacatgtacggccagttgctcggcctcactaacgtagggctttctgcggcaggagctaacaacgcggcggctg

SEQ ID NO: 452069 - DNA, 75 bp, synthetic construct
  source 1..75: mol_type = other DNA
caatgaatcaggcacgaatattcagttagtgggttaccgttattcgaccagcggatattttaatttcgctgatac

SEQ ID NO: 452070 - DNA, 75 bp, synthetic construct
  source 1..75: mol_type = other DNA
tttgctgaaccaccgctgacacgacaggaagtgcgggaggggaggcgtgtcacagattttaatccatgggcgcag

SEQ ID NO: 452071 - DNA, 75 bp, synthetic construct
  source 1..75: mol_type = other DNA
agtttgtatgaggttttgagcagggatattgattcggctaagctggacgtatggattgctggactatctctgagt

SEQ ID NO: 452072 - DNA, 75 bp, synthetic construct
  source 1..75: mol_type = other DNA
aaggggcacagttgccacgtgtactggacgacccgaaagtggatgtagcgattatcagcaccacttacatccagc

SEQ ID NO: 452073 - DNA, 75 bp, synthetic construct
  source 1..75: mol_type = other DNA
ctattcgacgtcgggtttctacaccctttccgacaccatgtataaacatatggatggctacgaatttaatgacgg

SEQ ID NO: 452074 - DNA, 75 bp, synthetic construct
  source 1..75: mol_type = other DNA
cgatggctttacgctctcccatgccgacgacagtattcgccaattttggattgatcactgcaaggccagccgccg

SEQ ID NO: 452075 - DNA, 75 bp, synthetic construct
  source 1..75: mol_type = other DNA
cgtgccgatctggaacaggctatgcggctgattccggggccgaaacggcttaatttacatgcgatctatctggaa

SEQ ID NO: 452076 - DNA, 75 bp, synthetic construct
  source 1..75: mol_type = other DNA
atgagcaattccaggctggtttaaatactgcattcgaagatatcaactggacgctcagctatagcctgacgaaaa

SEQ ID NO: 452077 - DNA, 75 bp, synthetic construct
  source 1..75: mol_type = other DNA
ggggcaaagataaaaactcaaactgtattgtcgagtacaagcttcctgaagtttctcctggtaccttactgaacc

SEQ ID NO: 452078 - DNA, 75 bp, synthetic construct
  source 1..75: mol_type = other DNA
acctgagctacagcgtgcaacagggatataacagcgaggggaaaacggctaatggtagcgccagcatggactaca

SEQ ID NO: 452079 - DNA, 75 bp, synthetic construct
  source 1..75: mol_type = other DNA
gtctggaaatgctgcgcgaagcagtgaaagccacaggccgtggtttacacatacacgctgcggaagacctttacg

SEQ ID NO: 452080 - DNA, 75 bp, synthetic construct
  source 1..75: mol_type = other DNA
cgttattttcgccatctgccgccgtatcttaaagcaatgtctgatttgctggcgcatggccgcccggccagcgac

SEQ ID NO: 452081 - DNA, 75 bp, synthetic construct
  source 1..75: mol_type = other DNA
gcatgcgcctggtgatattcagggggaactgacggaatggtcggtgcgccccgatgaatttggtgaatttctggt

SEQ ID NO: 452082 - DNA, 75 bp, synthetic construct
  source 1..75: mol_type = other DNA
tcgctaacctggatgtgctgggactccccgttccgctgattatcttcctgatatgtctcctcgttttctggctct

SEQ ID NO: 452083 - DNA, 75 bp, synthetic construct
  source 1..75: mol_type = other DNA
gctgatcatcaccctgggaacgttatacctgttcggcggcagcgcactgctgttgtcggggatggcgggagcgac

SEQ ID NO: 452084 - DNA, 75 bp, synthetic construct
  source 1..75: mol_type = other DNA
gaagcgtatgtccgtcactatatcgctgccagcgaaccccaaaacgaagtggcttttacctggcagggcggcgaa

SEQ ID NO: 452085 - DNA, 75 bp, synthetic construct
  source 1..75: mol_type = other DNA
atcttaaagcaatggctgatttgctggcgcacggtcgcccggccagcgacattatgcaggcgcatttgatggtgg

SEQ ID NO: 452086 - DNA, 75 bp, synthetic construct
  source 1..75: mol_type = other DNA
acatgattctattgacaaaaatgatgcatctgtgagtgtaaagaaagtaggtctttcagaaggtgatgccttaaa

SEQ ID NO: 452087 - DNA, 75 bp, synthetic construct
  source 1..75: mol_type = other DNA
aatactgatttatataaagagataattgctaaaaaaagacttttaaaaatcacaaacatcacgcgtctttttggt

SEQ ID NO: 452088 - DNA, 75 bp, synthetic construct
  source 1..75: mol_type = other DNA
gcgcaatatgaaaaaagccctgctacgtgcgttgctggaacctaccactgaactgcgcaagctggaagcagcggg

SEQ ID NO: 452089 - DNA, 75 bp, synthetic construct
  source 1..75: mol_type = other DNA
tggacaatatctattcagtcatttcttaatggacacagaaatatcattctgtggcaattttatgatgctgctcat

SEQ ID NO: 452090 - DNA, 75 bp, synthetic construct
  source 1..75: mol_type = other DNA
tttttgcaatacgctgttttatgagtcatttcttacacaagatcaaagtgctgaaaaatggcttctgtcgcagag

SEQ ID NO: 452091 - DNA, 75 bp, synthetic construct
  source 1..75: mol_type = other DNA
gggttacatttattattgaacaaaaaataaaaccttcagaatctcttttagataagccgtggagtttactagagc

SEQ ID NO: 452092 - DNA, 75 bp, synthetic construct
  source 1..75: mol_type = other DNA
tggtgctgttcagtaccggtcgcggcacaccttatggtggctttgtgccaacggtgaaaatcgccactaacagcg

SEQ ID NO: 452093 - DNA, 75 bp, synthetic construct
  source 1..75: mol_type = other DNA
agaaagcagcaaccgagccgtatctggtggaagcacatatcggcgctcacgcgccgtttaccgtgccggatgccg

SEQ ID NO: 452094 - DNA, 75 bp, synthetic construct
  source 1..75: mol_type = other DNA
attcacgctgcggaagacctttacgacgtttcctacagtcaccactggtacgggcaaagacctgctggcacgact

SEQ ID NO: 452095 - DNA, 75 bp, synthetic construct
  source 1..75: mol_type = other DNA
aaaaaagcgcataagttgaaaatgaaaagattacaaagaatgcttgagaaaatggcgtgtgaccgagtctcgcca

SEQ ID NO: 452096 - DNA, 75 bp, synthetic construct
  source 1..75: mol_type = other DNA
tgaagccagctacaaagagatgcatggccggattgtgatgccagggatcgtatgctcgcacaaccatttttactc

SEQ ID NO: 452097 - DNA, 75 bp, synthetic construct
  source 1..75: mol_type = other DNA
aatttggtcttctggaagccggttacaaagctgatttaaccatttgcgattacagctctccgactccgctattgg

SEQ ID NO: 452098 - DNA, 75 bp, synthetic construct
  source 1..75: mol_type = other DNA
tctcaacgctgaaaaatctctggtggcggctcgatcgcgcccttgatgaagagtcgctctattacagcggactga

SEQ ID NO: 452099 - DNA, 75 bp, synthetic construct
  source 1..75: mol_type = other DNA
cccatgaccagccgatctacgaaaacccatcaccggggaacaaagcaggcggtatcactacgctggaagataaat

SEQ ID NO: 452100 - DNA, 75 bp, synthetic construct
  source 1..75: mol_type = other DNA
cagcaggatgatgagatcgaagccgggatcgagcatttgcatcagctgtataacgtgatgcgcaacgataaacgc

SEQ ID NO: 452101 - DNA, 75 bp, synthetic construct
  source 1..75: mol_type = other DNA
ccgtttcctgaaagagaccaacaacgccgaaggtaccgacggcgtgttcctcttcagccacacctacggctgctc

SEQ ID NO: 452102 - DNA, 75 bp, synthetic construct
  source 1..75: mol_type = other DNA
aaaaaagcacataagttgaaaatgaaaagattacaaagattacttgagaaaatggcatgtgaccgggtttcgcca

SEQ ID NO: 452103 - DNA, 75 bp, synthetic construct
  source 1..75: mol_type = other DNA
aaaaaagcgcgtaagttgaaaatgaaaagagcacaaagattgcttgagaaaatggcatgtgaccgggtttcgccg

SEQ ID NO: 452104 - DNA, 75 bp, synthetic construct
  source 1..75: mol_type = other DNA
ccacatcaaagaaacacgcatctctgatatgcgactacttctctgtttctaataaagatgagttaattatcttac

SEQ ID NO: 452105 - DNA, 75 bp, synthetic construct
  source 1..75: mol_type = other DNA
cccgccaggattgggtaagtaatgatgacctggcagaaaaaatcacatcgctggtggataaaattctgcataaag

SEQ ID NO: 452106 - DNA, 75 bp, synthetic construct
  source 1..75: mol_type = other DNA
atgaacacacaaaacaacaatcccgttgaaatcctgaaagctgtttccaccttaccggaagatattctaaatatc

SEQ ID NO: 452107 - DNA, 75 bp, synthetic construct
  source 1..75: mol_type = other DNA
cctgggacagttggtttgatggcgaaaatgtgagtgcggattttatggatatccgtgatcaacccgcaatgcagg

SEQ ID NO: 452108 - DNA, 75 bp, synthetic construct
  source 1..75: mol_type = other DNA
ctgaaagtgattttgtgctccagcggtaataaagaacagcagtgggatttacaccaggcactggaagattttact

SEQ ID NO: 452109 - DNA, 75 bp, synthetic construct
  source 1..75: mol_type = other DNA
aagtctgtatatcaatcttaataacccctgtgtcatgcaactggtgacggcattacaacaccatcaacagccagc

SEQ ID NO: 452110 - DNA, 75 bp, synthetic construct
  source 1..75: mol_type = other DNA
cggacacgatgcgatcgtgcgccgcaggattgagcaacccgatgcaccaaaggataacgcgattcgtgtggtggc

SEQ ID NO: 452111 - DNA, 75 bp, synthetic construct
  source 1..75: mol_type = other DNA
tcgaatttccggcatcgcaaggtgtacagggtggtactgttacactcttccttaccataccaggaagatcgctgg

SEQ ID NO: 452112 - DNA, 75 bp, synthetic construct
  source 1..75: mol_type = other DNA
cagcgcgaaataaacaagtcacgcgtcaaaaagttttacgattatctggttacagcagcagaaaataaagagcca

SEQ ID NO: 452113 - DNA, 75 bp, synthetic construct
  source 1..75: mol_type = other DNA
tatttaataaccttgataacttatcatatattcagaggacttctttccggggtaacgacacgctatacaatgaaa

SEQ ID NO: 452114 - DNA, 75 bp, synthetic construct
  source 1..75: mol_type = other DNA
atatccaccggaaaaaatataccaggtccggagagagggagaccatctgtcattaaaaaattacggtgatgatat

SEQ ID NO: 452115 - DNA, 75 bp, synthetic construct
  source 1..75: mol_type = other DNA
ccggactgaccaggggcaggcgcagcgcctcggcgtgaaatatttcccggccatgatgctggttgacccgaaaca

SEQ ID NO: 452116 - DNA, 75 bp, synthetic construct
  source 1..75: mol_type = other DNA
accggagtcaggcagtcaggctgccgaaggctgtagccctgcctgaagacgtaaaaaaagtcgacgttattgctg

SEQ ID NO: 452117 - DNA, 75 bp, synthetic construct
  source 1..75: mol_type = other DNA
aaaatctcgcctttgccgcccagtttgaatcctccttcgaaccgatttgtaccattccggtagtaccggcgggga

SEQ ID NO: 452118 - DNA, 75 bp, synthetic construct
  source 1..75: mol_type = other DNA
acccctggattatttcattagtgaagctgttacatgctattgaaccgccccggaaatcctggagactaaactccc

SEQ ID NO: 452119 - DNA, 75 bp, synthetic construct
  source 1..75: mol_type = other DNA
aactcattccaggtggtactcgaagcgctgtgcatggcgattattcctttctttgtgaatcgggtagggccaaaa

SEQ ID NO: 452120 - DNA, 75 bp, synthetic construct
  source 1..75: mol_type = other DNA
gagcgtttccgacaggcatttccgaaaacagaagaagagatggaagacggtatctggttttttgatgagagttgt

SEQ ID NO: 452121 - DNA, 75 bp, synthetic construct
  source 1..75: mol_type = other DNA
cgcaccagcgtgctgcccaggcatggtcagaaggcaaactcaaagaagaggtgatgaccgcctttatccctcctt

SEQ ID NO: 452122 - DNA, 75 bp, synthetic construct
  source 1..75: mol_type = other DNA
ggggcgtgcacatgccactggcgaagtggacgatagcaaatttaacgtgcttggcggttcgattgcttatgggca

SEQ ID NO: 452123 - DNA, 75 bp, synthetic construct
  source 1..75: mol_type = other DNA
atattccctgtattccctattatacctttggcagtcctgaactggccgacggtgtatctaaagggatcagagaaa

SEQ ID NO: 452124 - DNA, 75 bp, synthetic construct
  source 1..75: mol_type = other DNA
agcctgagcgactgggcaattattgtcggtatcgcatgcacggtaatcacctgtgcagtgaactggtatttccgc

SEQ ID NO: 452125 - DNA, 75 bp, synthetic construct
  source 1..75: mol_type = other DNA
tacagcgataatgcgggtggcggtaaaacggagctgaccgcagcggcaggcaagacgagttataaactcactgat

SEQ ID NO: 452126 - DNA, 75 bp, synthetic construct
  source 1..75: mol_type = other DNA
cattacaacatcagcaacagccagcggcggcattacggttattaaaatcgctgaaagtgattttgtgctccagcg

SEQ ID NO: 452127 - DNA, 75 bp, synthetic construct
  source 1..75: mol_type = other DNA
taccgatgctgacgttaccgccaattatgacttccgttgggtactttctggcagcagccaacagctcggcacttc

SEQ ID NO: 452128 - DNA, 75 bp, synthetic construct
  source 1..75: mol_type = other DNA
gcgataacgcgaaaactatcgatactatccgctggatgagctacaaggacgctcagggtaacgatccaaaagagc

SEQ ID NO: 452129 - DNA, 75 bp, synthetic construct
  source 1..75: mol_type = other DNA
cctgcaccattaccacctgtggggtgaactggtactacaggcggaaagaacgcgaggatcggctcaatggctatg

SEQ ID NO: 452130 - DNA, 75 bp, synthetic construct
  source 1..75: mol_type = other DNA
gcaggtccacaggtggttcgcgaataaaaacccaaacttaatcaccgccatctacgacataaaggatagcccatt

SEQ ID NO: 452131 - DNA, 75 bp, synthetic construct
  source 1..75: mol_type = other DNA
agtcatcgctcatcgcttgcgataagttgtgatttatccgttgaaattcccgtaaaaagtgaggcggataattta

SEQ ID NO: 452132 - DNA, 75 bp, synthetic construct
  source 1..75: mol_type = other DNA
tgaagccctgaaaacgattcttggcaaaatgcatcaggacgccgcgccgcctgatagcgtagaagtcttctgcta

SEQ ID NO: 452133 - DNA, 75 bp, synthetic construct
  source 1..75: mol_type = other DNA
tagtgttgatctgttgtatcgcaactcgtggaatgaagtgcgtacgctacatttcaacggcgagcagtcgatgat

SEQ ID NO: 452134 - DNA, 75 bp, synthetic construct
  source 1..75: mol_type = other DNA
atatctgctgattaatctggtcttcggcaatattctggaacctcgtattatgggccgcggcctggggctttccac

SEQ ID NO: 452135 - DNA, 75 bp, synthetic construct
  source 1..75: mol_type = other DNA
ttttggggatggttgttaggaccggtgggtatgctgctttccgtgccgttaacaattattgtcaaaattgcgctt

SEQ ID NO: 452136 - DNA, 75 bp, synthetic construct
  source 1..75: mol_type = other DNA
attatctcgataaacagggagtatataaaggaagggataatattgctgaaaacagctaccgtgttggcttactcg

SEQ ID NO: 452137 - DNA, 75 bp, synthetic construct
  source 1..75: mol_type = other DNA
ggctcgatagcgaagagcgccaattattacaacgtaaatgtagcttgctggaaagctgggctgcctcgctggggg

SEQ ID NO: 452138 - DNA, 75 bp, synthetic construct
  source 1..75: mol_type = other DNA
agatttcacccgtctggatttagtacgccgctgcttctatttaaaagtgtgcgaaaaactcagccgtgaacgcgc

SEQ ID NO: 452139 - DNA, 75 bp, synthetic construct
  source 1..75: mol_type = other DNA
gatagcgaagagcgccagttactacaacgtaaatgcagcctgctggaaagctgggccgcctcgctgggcgtggaa

SEQ ID NO: 452140 - DNA, 75 bp, synthetic construct
  source 1..75: mol_type = other DNA
gagctaccgtaatctgatccgctttgcgcgtcgcaataaccttagcgtctccgccagcccacaggatattggcgt

SEQ ID NO: 452141 - DNA, 75 bp, synthetic construct
  source 1..75: mol_type = other DNA
aatatgacccgacgacagcgtttcgtaatcaggtagtacatttcgatttccgtaagctggatgtcttcagctttg

SEQ ID NO: 452142 - DNA, 75 bp, synthetic construct
  source 1..75: mol_type = other DNA
ccgccagcccgcaggatatcggcgtgctgacgcgtaaactgtacgctgcgtttgaagcattaccggggaaagtga

SEQ ID NO: 452143 - DNA, 75 bp, synthetic construct
  source 1..75: mol_type = other DNA
atggtgctattactggcctatctcggctcaacgcttaatgagctgagccgcactttgccacagtatcgcagctca

SEQ ID NO: 452144 - DNA, 75 bp, synthetic construct
  source 1..75: mol_type = other DNA
aaatgatcagaccagtcagtgtcagtaattacatatctatttctaacgatttccccgttaattatatcccaccgc

SEQ ID NO: 452145 - DNA, 75 bp, synthetic construct
  source 1..75: mol_type = other DNA
gctcctttcagcaccatgaaggaagagtatactctttactctgaagatgctcgtgctgctgctaaacatggatta

SEQ ID NO: 452146 - DNA, 75 bp, synthetic construct
  source 1..75: mol_type = other DNA
aaacagattacgggtttgaattttcatcgcctaaagatattgctagatttatagatacattttgtttgagagatc

SEQ ID NO: 452147 - DNA, 75 bp, synthetic construct
  source 1..75: mol_type = other DNA
gcggcgagaagatggaatatatccagtataaacccctgcaaatttatattaacggcgcatggcgcacgatatccg

SEQ ID NO: 452148 - DNA, 75 bp, synthetic construct
  source 1..75: mol_type = other DNA
gtgggaatatggctcagacgacgatactactaatcacaccgttaatattcgcaatcaactcgtaattacatatac

SEQ ID NO: 452149 - DNA, 75 bp, synthetic construct
  source 1..75: mol_type = other DNA
tgatggattcactttgtcataataaacatatattacctgaagtttgcatctgttttttatctcttttagcagaca

SEQ ID NO: 452150 - DNA, 75 bp, synthetic construct
  source 1..75: mol_type = other DNA
gtggcatttgagacgaaaatgcgcgaattgtcgaagacgttgtttgagcagatgaagcaggcggaagaactggat

SEQ ID NO: 452151 - DNA, 75 bp, synthetic construct
  source 1..75: mol_type = other DNA
atgttacgcagcagggcagtcgccctaaaaccaaagttaggccgcatggacacaacgcaggtcacattgatacac

SEQ ID NO: 452152 - DNA, 75 bp, synthetic construct
  source 1..75: mol_type = other DNA
gtgctctcaggcattaactcttaatctacgtgggggatacagaagcgccagtcacgcttatgaaacgttgattca

SEQ ID NO: 452153 - DNA, 75 bp, synthetic construct
  source 1..75: mol_type = other DNA
cgtcattttgttgatgagtacggcaaacattagcagtatgacggcgcgtaatacaatctttctggagccgttgcg

SEQ ID NO: 452154 - DNA, 75 bp, synthetic construct
  source 1..75: mol_type = other DNA
tcaatgaacaagaacgcgctgaaatttacgataaaaataaaaaaatggctgagctaaccgctcaagaaagaaagg

SEQ ID NO: 452155 - DNA, 75 bp, synthetic construct
  source 1..75: mol_type = other DNA
agcgcgcaaggaaggggcaaccgtcctcgaccatagcggtgcgccactggatgaaaaacagaaaatgggcaccgt

SEQ ID NO: 452156 - DNA, 75 bp, synthetic construct
  source 1..75: mol_type = other DNA
cgaagaactactggacaacaggcctcgttcccctgtgaggccacctttaccatcagccaccaaaacgccagacct

SEQ ID NO: 452157 - DNA, 75 bp, synthetic construct
  source 1..75: mol_type = other DNA
ctttttatcgcttttatcaaacaaagaaatacctcactttcagagtctattcttattttttacaaatatgttatt

SEQ ID NO: 452158 - DNA, 75 bp, synthetic construct
  source 1..75: mol_type = other DNA
ataacagacggcgaattaaaagaggatttattgcaaagcctgatggattcattaggttctaacaaacatgtacta

SEQ ID NO: 452159 - DNA, 75 bp, synthetic construct
  source 1..75: mol_type = other DNA
cccttttagcagaacaagaatctcctcattttcaggacttttttatttttcgccaatatgttattgcactatcac

SEQ ID NO: 452160 - DNA, 75 bp, synthetic construct
  source 1..75: mol_type = other DNA
tcctatcaaaagagcgcatacgccacatattgaacccctgcatccggatcaccataccgctgcagattacttacg

SEQ ID NO: 452161 - DNA, 75 bp, synthetic construct
  source 1..75: mol_type = other DNA
aattttgtcatactcccccgattatggaataactctgaggttcacagatggttcgtcaataaagatcctaacttg

SEQ ID NO: 452162 - DNA, 75 bp, synthetic construct
  source 1..75: mol_type = other DNA
ttgctacccgttttttgcaacgactgcggctgtggggcgtgtcatgtgccatcgaaactgccggagacgcgccag

SEQ ID NO: 452163 - DNA, 75 bp, synthetic construct
  source 1..75: mol_type = other DNA
ggcgaagtgttaatgcaggcggagtttgctacccgttttttacagcggctgcggttgtggggtgtgtcatgcgcc

SEQ ID NO: 452164 - DNA, 75 bp, synthetic construct
  source 1..75: mol_type = other DNA
gcgcagagagtcgaaatgtctgcattgcgcgaaatgtttgcgtgatgcggatgaatgcccttctggagcatttga

SEQ ID NO: 452165 - DNA, 75 bp, synthetic construct
  source 1..75: mol_type = other DNA
attgtgcgatgaagtgttgttcgatttaaaaattatggatgcgactcaggcgcgggatgtggtgaagatgaacct

SEQ ID NO: 452166 - DNA, 75 bp, synthetic construct
  source 1..75: mol_type = other DNA
ttgctacccgttttttacagcgactgcggctgtggggtgtgtcatgtgccattgaaactgccggagacgcgccag

SEQ ID NO: 452167 - DNA, 75 bp, synthetic construct
  source 1..75: mol_type = other DNA
cggctatacgctcagcagagagaatatgcagcaggcgctggatgtgttgattcctttgaatatcaggcagatcca

SEQ ID NO: 452168 - DNA, 75 bp, synthetic construct
  source 1..75: mol_type = other DNA
tggaacgtgaaaatcgtgaactgcgccgcagcaacaatatccttcgccaggcttccgcttattttgtgaaggagg

SEQ ID NO: 452169 - DNA, 75 bp, synthetic construct
  source 1..75: mol_type = other DNA
tatggttctggaaagtcagagcgaatatgactcacaatgggcgacaatttgttccattactccaaagactggctg

SEQ ID NO: 452170 - DNA, 75 bp, synthetic construct
  source 1..75: mol_type = other DNA
tgatggtgtttatacccgatcagaaacgacaaatcgtggcgcagttccgtcagaactccttgctgcgcctggctc

SEQ ID NO: 452171 - DNA, 75 bp, synthetic construct
  source 1..75: mol_type = other DNA
ttcctgagaaagaggtaaacaggatgactaaaaaaacacgtttttcccccgaagtccgtcaacgggcagttcgta

SEQ ID NO: 452172 - DNA, 75 bp, synthetic construct
  source 1..75: mol_type = other DNA
ccgcgatgagttcatcatgatccgtaagatgaaaaacgttaactggctggacgatgaaggtcgcgatcaggtaca

SEQ ID NO: 452173 - DNA, 75 bp, synthetic construct
  source 1..75: mol_type = other DNA
cttaaacaacacagcgatccggtactggcgtgggcatcaattatgaatgacccgcaaaagtgcctgagctacaag

SEQ ID NO: 452174 - DNA, 75 bp, synthetic construct
  source 1..75: mol_type = other DNA
ttccattgctccaaagattggctgtacgccagagactctgcgtgtctgggttcgccagcatgagcgggataccgg

SEQ ID NO: 452175 - DNA, 75 bp, synthetic construct
  source 1..75: mol_type = other DNA
gaggcggtgatggagggctcaccaccgctgaacgtcagcgtctgaaagagctggaacgtgaaaatcgtgaactgc

SEQ ID NO: 452176 - DNA, 75 bp, synthetic construct
  source 1..75: mol_type = other DNA
tgccaagctgaagcaaaaagcacctgggcttgcgccgccggagtatattgcttcagctattcaatatgtggtgtc

SEQ ID NO: 452177 - DNA, 75 bp, synthetic construct
  source 1..75: mol_type = other DNA
aatcgcagagcagcttttctctgccgaacaacaacaacgtgaagaccagctcaaaggcagcattgagcaactcat

SEQ ID NO: 452178 - DNA, 75 bp, synthetic construct
  source 1..75: mol_type = other DNA
aggccacgcgggataaattcgctaaagagtatcagcgttacgcacgcggcagccaggcgaaagtaaacccgtttt

SEQ ID NO: 452179 - DNA, 75 bp, synthetic construct
  source 1..75: mol_type = other DNA
ggggcggtgatggtgggctcaccagcgctgaacgtcagcgtctgaaagagctggaacgtgaacgtgactgcgccg

SEQ ID NO: 452180 - DNA, 75 bp, synthetic construct
  source 1..75: mol_type = other DNA
ggggcggtgatggagggctcaccaccgctgaacgtcagcgtctgaaagagctggagcgtgaaatcgtgaactgcg

SEQ ID NO: 452181 - DNA, 75 bp, synthetic construct
  source 1..75: mol_type = other DNA
gcgcaccgcagaggtatgtccgcagctgtgcgaggcgggaacggaacagatgatggtggtattttcaatgagtct

SEQ ID NO: 452182 - DNA, 75 bp, synthetic construct
  source 1..75: mol_type = other DNA
cagctatcaaatcatggtcaatctgggattgctatttgcgttgagcctggtgtattggtatgacagacaacatta

SEQ ID NO: 452183 - DNA, 75 bp, synthetic construct
  source 1..75: mol_type = other DNA
cgccaccatcgaagacgataaaacgtggctcctgcacggtgtgaatcataaaaaatggcttaacggcaaagaaac

SEQ ID NO: 452184 - DNA, 75 bp, synthetic construct
  source 1..75: mol_type = other DNA
atggtggcggtatcggggacggatcatattccctgtattccctattatacctttggcaatcctgaactggccgac

SEQ ID NO: 452185 - DNA, 75 bp, synthetic construct
  source 1..75: mol_type = other DNA
ctggaagaaaacgtcgcgcagttcagcgcgaaggatgccccgaaagataccggtgataacaagccggaaggcagc

SEQ ID NO: 452186 - DNA, 75 bp, synthetic construct
  source 1..75: mol_type = other DNA
atgaatattttcagccgctatttgatacgtcacgtgtttctcgggtttacggctgcggctggattactgctcccg

SEQ ID NO: 452187 - DNA, 75 bp, synthetic construct
  source 1..75: mol_type = other DNA
ggtggctaacggcgcgattcccctcattcctggttttgtggttagtacccggactcatgctaatgggcctgctga

SEQ ID NO: 452188 - DNA, 75 bp, synthetic construct
  source 1..75: mol_type = other DNA
cgtgttggtggatgtcaacaaagcccgcacgatgagccaacgactgaaacttttttctcgcctgcgtttgcgtga

SEQ ID NO: 452189 - DNA, 75 bp, synthetic construct
  source 1..75: mol_type = other DNA
accgatggcgcagcggcggggatcctgatgaccgaatcgcgggcggaagaattaggggtgggaccgctgggggat

SEQ ID NO: 452190 - DNA, 75 bp, synthetic construct
  source 1..75: mol_type = other DNA
gtgatgactgcctttatccctccttataaacaaccgcttgccgaagacaacaatattcgcggtaattcctcgctt

SEQ ID NO: 452191 - DNA, 75 bp, synthetic construct
  source 1..75: mol_type = other DNA
gatggtggtaggcgaactgctggcacgcaccgagatccccgctgaagtgattgaacaactggtcttcggtcaggt

SEQ ID NO: 452192 - DNA, 75 bp, synthetic construct
  source 1..75: mol_type = other DNA
ctgcgtagctacgcgtttaccgcgattgatgtctggcaggacatgttgctcggcccagcctggtcaacaccgctg

SEQ ID NO: 452193 - DNA, 75 bp, synthetic construct
  source 1..75: mol_type = other DNA
ttcgccgtcgcggcggtggatttggtttagtgaccgcctgtgctgcgggtgggcttggtgcggcaatggttctgg

SEQ ID NO: 452194 - DNA, 75 bp, synthetic construct
  source 1..75: mol_type = other DNA
atgtctgatgatcgttcccggcatgatcgtctggcggttcgcttatcactcattatcagccgactgatggccgga

SEQ ID NO: 452195 - DNA, 75 bp, synthetic construct
  source 1..75: mol_type = other DNA
gagaatcagtaccgccgggtggtaccggatgcgggtaatctgctggcgcaacaggcgattgccgatgtgttctgc

SEQ ID NO: 452196 - DNA, 75 bp, synthetic construct
  source 1..75: mol_type = other DNA
ctcaggccgagatccgccgtctccagaaagagctgaagcgggttactgacgaacgggatatattaaaaaaagccg

SEQ ID NO: 452197 - DNA, 75 bp, synthetic construct
  source 1..75: mol_type = other DNA
gataaagaagtacggtccggattcttccactaataaagaacagtcagatgttcaggccgagatccgccgtctcca

SEQ ID NO: 452198 - DNA, 75 bp, synthetic construct
  source 1..75: mol_type = other DNA
gaaaatagcggcccacagcaaggtagagaatcagtatcgtcgggtggtaccggatgccggtaacctgctggcgca

SEQ ID NO: 452199 - DNA, 75 bp, synthetic construct
  source 1..75: mol_type = other DNA
atgccgaccaccgccatcactctgcaacaggcaaaagcccgcgatgtgcagaatttttacttcttctgccagcac

SEQ ID NO: 452200 - DNA, 75 bp, synthetic construct
  source 1..75: mol_type = other DNA
tgacccgcgcgcacgttgtggcgaagtattgacgggcaaatgtaagccgcatcaatgcccgctgtttggtaacac

SEQ ID NO: 452201 - DNA, 75 bp, synthetic construct
  source 1..75: mol_type = other DNA
tggcaatttcaagggtagatgggactgagaaccccacctataacatcgatgttgtgttttttaatgggaccagct

SEQ ID NO: 452202 - DNA, 75 bp, synthetic construct
  source 1..75: mol_type = other DNA
acggatgcaagcctgactacaacaatgatgtgattgtttgtcagtggttatggcttgattttctggttgctcatt

SEQ ID NO: 452203 - DNA, 75 bp, synthetic construct
  source 1..75: mol_type = other DNA
cttgctgtgcttttaatcttacttgccggtgttatcatgtttatgaatatatacacaggaaaatgggatggtgtt

SEQ ID NO: 452204 - DNA, 75 bp, synthetic construct
  source 1..75: mol_type = other DNA
gaaagagctgaagcgggttaccgacgaacgggacatattaaaaaaagccgctgtagattcaatctgtcaatgcaa

SEQ ID NO: 452205 - DNA, 75 bp, synthetic construct
  source 1..75: mol_type = other DNA
aatacctgaaaggaagcatagagcgggcttcaatgtgcacagagtggattctatctaggtttagcgcatacagaa

SEQ ID NO: 452206 - DNA, 75 bp, synthetic construct
  source 1..75: mol_type = other DNA
aacagacgccttatcttcgtgcagttgacattttgcgggcgcgacaggctacaggtctgctgcgccgctgccata

SEQ ID NO: 452207 - DNA, 75 bp, synthetic construct
  source 1..75: mol_type = other DNA
taataccctgacttatattctgtcggaagtcgcagaaataagctgcgaagttaagatgatccctaataagctgga

SEQ ID NO: 452208 - DNA, 75 bp, synthetic construct
  source 1..75: mol_type = other DNA
gatactgggaagggctataagaatggaggggggggatatttggcaaggagtaggacgatatcattcaataacata

SEQ ID NO: 452209 - DNA, 75 bp, synthetic construct
  source 1..75: mol_type = other DNA
cctgctgcgccagctcgaaatccctgagcgctttgtaacgtgcacgctggaaagctatcagccggtggggaagga

SEQ ID NO: 452210 - DNA, 75 bp, synthetic construct
  source 1..75: mol_type = other DNA
gaccggcgtcgatgcccgctggccggaagaggcgctttctcccctgaaaaactatctgcaggagctgcccggctt

SEQ ID NO: 452211 - DNA, 75 bp, synthetic construct
  source 1..75: mol_type = other DNA
ggaagacggtatctggttttttgatgagagttgtccggggggcgctgtttgggtgcttgaagatggctctctcga

SEQ ID NO: 452212 - DNA, 75 bp, synthetic construct
  source 1..75: mol_type = other DNA
gtaagaaagacgccgcgtattccagccattccgctcacggaacttaaccgagagcagaagtggcagatgatgttg

SEQ ID NO: 452213 - DNA, 75 bp, synthetic construct
  source 1..75: mol_type = other DNA
ggcagccatgtacatgtctttagcccggacggtgaaagggtgagctttacctataacgaccatgtaatgcatcaa

SEQ ID NO: 452214 - DNA, 75 bp, synthetic construct
  source 1..75: mol_type = other DNA
agtctgcatttaactggcatccgtcaggagaatggttgggctttgtgctggataatcgaattgcttgtgcccatg

SEQ ID NO: 452215 - DNA, 75 bp, synthetic construct
  source 1..75: mol_type = other DNA
cttccatcatcggcgcggagtcattgttgaaggcggcaagatgagtaaccttgatgcgatggatattaccgcgcc

SEQ ID NO: 452216 - DNA, 75 bp, synthetic construct
  source 1..75: mol_type = other DNA
atcctgatgaaacatggcattacgatttccatcatcgtcgcggcgtgattgctgaaagcggcaaggtgagcaatc

SEQ ID NO: 452217 - DNA, 75 bp, synthetic construct
  source 1..75: mol_type = other DNA
tgtgcaacgtcgtttgacctttacgcatcatcgcgcatttcctggtctggtaaatattccgcgtcactgggtgcg

SEQ ID NO: 452218 - DNA, 75 bp, synthetic construct
  source 1..75: mol_type = other DNA
aaggctgagaaagtgccggagctgtttattgtagagttaccgcaagatgaaaacggctggaaagtggctggcgat

SEQ ID NO: 452219 - DNA, 75 bp, synthetic construct
  source 1..75: mol_type = other DNA
cccaggatgcgggtgatattgaccagcgggacagtattcacagtgaccgtatcctcatcacaatgatcccggctc

SEQ ID NO: 452220 - DNA, 75 bp, synthetic construct
  source 1..75: mol_type = other DNA
gctcctgacggaaagacggccagagtggtcatcgaaacgatgggatatgaagacagtgattactgcgcgagaaaa

SEQ ID NO: 452221 - DNA, 75 bp, synthetic construct
  source 1..75: mol_type = other DNA
aaggtatcacatctgatgagttatcgggggttgtatttattgatgaaattgatgctcatttgcatgtttcattac

SEQ ID NO: 452222 - DNA, 75 bp, synthetic construct
  source 1..75: mol_type = other DNA
tatcgaaattgaaatcccagacaatcatcacagtattaaacaaattgaatatagaggtgtatttgcaaatttagc

SEQ ID NO: 452223 - DNA, 75 bp, synthetic construct
  source 1..75: mol_type = other DNA
gttttgaagcccatattgaaggcataggttcagttgctgcgacattttcaagcgcagccccaaaaggaagtctgt

SEQ ID NO: 452224 - DNA, 75 bp, synthetic construct
  source 1..75: mol_type = other DNA
gcgctggggcgtcgcgttgtggggcgtaaagtgggactgacgcatccgaaagtgcagcaacaactgggggttgat

SEQ ID NO: 452225 - DNA, 75 bp, synthetic construct
  source 1..75: mol_type = other DNA
tggcggcggatttacgccgcgccgcagagcagggcgaagcgattgcgccgctgcgcgatctgattggtatcgata

SEQ ID NO: 452226 - DNA, 75 bp, synthetic construct
  source 1..75: mol_type = other DNA
tcaccgccgaaaccatgcagtccatgctaccccagaacgttcaggggggagaatggcagtcacgggcgatagcca

SEQ ID NO: 452227 - DNA, 75 bp, synthetic construct
  source 1..75: mol_type = other DNA
tgtctgctgttcaccctggtcacctccgtgatattcacgctgcaacgctggcgatgccccctgcgtatgcccatg

SEQ ID NO: 452228 - DNA, 75 bp, synthetic construct
  source 1..75: mol_type = other DNA
actttgccctgctgatggcagcacaggatgcggaacgtatggaagggaccgcaggggggaacagcgtttccaccc

SEQ ID NO: 452229 - DNA, 75 bp, synthetic construct
  source 1..75: mol_type = other DNA
atacgctgcacaatcgccagccgtggcctgaaattgcaattttccctgccagacagtattaccgtatttggcgat

SEQ ID NO: 452230 - DNA, 75 bp, synthetic construct
  source 1..75: mol_type = other DNA
cgttcagtgaatttagaaaatgatgcaaatctgcgagggcgcacaatagcacatccatatgcacatactttaggc

SEQ ID NO: 452231 - DNA, 75 bp, synthetic construct
  source 1..75: mol_type = other DNA
cagtcttcgattgcctttgcattgtacagagccttgttgatgccctgtttcgttcagtgaatttagaaaatgatg

SEQ ID NO: 452232 - DNA, 75 bp, synthetic construct
  source 1..75: mol_type = other DNA
cctatgagaaatatctgaccatctcaggaaaaagaattacttcaagtaaatctgagtgcccacagtgccttgagg

SEQ ID NO: 452233 - DNA, 75 bp, synthetic construct
  source 1..75: mol_type = other DNA
ggtgccgccggtcttcaggaccgcccgcgcattccgcaccattccccgaaccgctcatctgacgacatcacggcc

SEQ ID NO: 452234 - DNA, 75 bp, synthetic construct
  source 1..75: mol_type = other DNA
ccacgatggttcagcagggctatgactatcgtcgtgatgacgatatggcgttatggagctctgcagatttgactt

SEQ ID NO: 452235 - DNA, 75 bp, synthetic construct
  source 1..75: mol_type = other DNA
atggtcgccccgttgtttttgtacgaagaggattttcctgcgatcgcggtttatctgacggatgcagagtatacc

SEQ ID NO: 452236 - DNA, 75 bp, synthetic construct
  source 1..75: mol_type = other DNA
aggaagtttctcccgttcagttacgacaggactatatccatgctcacggcattgggttgcaggcgctcggccaac

SEQ ID NO: 452237 - DNA, 75 bp, synthetic construct
  source 1..75: mol_type = other DNA
tcctggttctaacaaccttggtatgttatgtgtgccaatggatgcgcaaattctgatcaatgatggtcagcatcg

SEQ ID NO: 452238 - DNA, 75 bp, synthetic construct
  source 1..75: mol_type = other DNA
tactttaatatcaggaagttctcctgttagtgtggatgtgttttttattacctgctatttggcaaaatataactg

SEQ ID NO: 452239 - DNA, 75 bp, synthetic construct
  source 1..75: mol_type = other DNA
atcggtctgatttacctggcttgcgtgacgaagagcttccgcaacccggttccgcagtacgaagacgttgcataa

SEQ ID NO: 452240 - DNA, 75 bp, synthetic construct
  source 1..75: mol_type = other DNA
atcggcctgatttacctggcttgcgtaaccaagagtttccgtaacccggttccgcagtacgaagacgtagcataa

SEQ ID NO: 452241 - DNA, 75 bp, synthetic construct
  source 1..75: mol_type = other DNA
gagctacgggaagctggttcgccgctatccttctgctggctctgcatacacttacgcccagaaatccattagccc

SEQ ID NO: 452242 - DNA, 75 bp, synthetic construct
  source 1..75: mol_type = other DNA
gctgattggtggcctgatctttatcttctccacctatttcctgcagctctacttcccggatatctctcgcttcaa

SEQ ID NO: 452243 - DNA, 75 bp, synthetic construct
  source 1..75: mol_type = other DNA
atccctatgattaccggggccacgattctgtgcttctcctttaccggttttgacggtatcagcaacctgtctgaa

SEQ ID NO: 452244 - DNA, 75 bp, synthetic construct
  source 1..75: mol_type = other DNA
cgcctttaacctgcgtagtctgaaatccgtagcgaacttcaacactgtaatcgtggtgttgcaggtagtgctgat

SEQ ID NO: 452245 - DNA, 75 bp, synthetic construct
  source 1..75: mol_type = other DNA
ctactcttttccagctatacgtggcattcaggctggtcgtcctttctacattgccacgtgcccgatgcgcatcat

SEQ ID NO: 452246 - DNA, 75 bp, synthetic construct
  source 1..75: mol_type = other DNA
atttttttttgagatcaaatttaactgttttcttggtagaggatggatttgtacgacaatattattattttgttt

SEQ ID NO: 452247 - DNA, 75 bp, synthetic construct
  source 1..75: mol_type = other DNA
ggcttttcacgaaagctggtttaattgtttataaaataacaaatggattcattgaaggaactcgattccccctaa

SEQ ID NO: 452248 - DNA, 75 bp, synthetic construct
  source 1..75: mol_type = other DNA
aacattctgatagaagaaaatatttttctttattagcggtagttttatttattgcgttttcaggagcctatgcct

SEQ ID NO: 452249 - DNA, 75 bp, synthetic construct
  source 1..75: mol_type = other DNA
ttgctgatttcagttcggcagacttcgtaaactttgaacagttaatctgcgcttttgaaaacacggctaaagatg

SEQ ID NO: 452250 - DNA, 75 bp, synthetic construct
  source 1..75: mol_type = other DNA
aaaggttgaccggagcagggcgacgccccgcagcgccgcgaggagcggtgaactgttccgggacaacctgaactg

SEQ ID NO: 452251 - DNA, 75 bp, synthetic construct
  source 1..75: mol_type = other DNA
ttttgaaaggcagaaaaaaaaaggtgaaaaatataggtgtttcatttgcaattactgatatttctgctatggaaa

SEQ ID NO: 452252 - DNA, 75 bp, synthetic construct
  source 1..75: mol_type = other DNA
tgggaacgctgctgattctgtcatcggtgattttgatttcaatggattcccgtcgccgcgccagaaaaataaatc

SEQ ID NO: 452253 - DNA, 75 bp, synthetic construct
  source 1..75: mol_type = other DNA
tattctggggcattgcctcggcatttgctgctgcattctataccacctatccctcaacgctgattgcccgctatg

SEQ ID NO: 452254 - DNA, 75 bp, synthetic construct
  source 1..75: mol_type = other DNA
gctactcgtttccggctatacgtggcattcaggctggtcgccccttctacattgccacatgtccgatgcgtatca

SEQ ID NO: 452255 - DNA, 75 bp, synthetic construct
  source 1..75: mol_type = other DNA
cacaccattaaaccgtcagccacaagtcgttgaagcggcggatgcaaccaaagaagcctggttggcgcttaaacg

SEQ ID NO: 452256 - DNA, 75 bp, synthetic construct
  source 1..75: mol_type = other DNA
gaataaactgtacttacaggataaacaatacagtgccgaagtcgcttcagcacgtattcagtatcaacaatcttt

SEQ ID NO: 452257 - DNA, 75 bp, synthetic construct
  source 1..75: mol_type = other DNA
gtggaacagattaattcaaataaaaaacagtctaacagaaaaaaatacttttctttattggcgatagttttattt

SEQ ID NO: 452258 - DNA, 75 bp, synthetic construct
  source 1..75: mol_type = other DNA
tggaaagtggggtggtggatggtttggcgaccaggctgcctattgatgtaggggcttcgatagagttagagggta

SEQ ID NO: 452259 - DNA, 75 bp, synthetic construct
  source 1..75: mol_type = other DNA
ccatttagcaggcgatctggtaggttttgacgctattggtagcggtcatcacccgagtttcgcccaggcgctgga

SEQ ID NO: 452260 - DNA, 75 bp, synthetic construct
  source 1..75: mol_type = other DNA
ggacttgcttatggtgtaagcctgccctggcagggggggatgctcattctgggggggagaaaaaagatggtaaag

SEQ ID NO: 452261 - DNA, 75 bp, synthetic construct
  source 1..75: mol_type = other DNA
cacataaaaaagttagagtgttgctaaccattgaaaatggtgaagtaatttactcaaaacatctgttggataatg

SEQ ID NO: 452262 - DNA, 75 bp, synthetic construct
  source 1..75: mol_type = other DNA
tgttgcgggagaaaatggacggagtggcgcttatcctgctgccggattcgtttcctgacaaaaagtacgtcatgt

SEQ ID NO: 452263 - DNA, 75 bp, synthetic construct
  source 1..75: mol_type = other DNA
ggtggttaacacagaacggggcgctaaaaagtaattatccaggaaaggaactatacgctttagtaaaagagattc

SEQ ID NO: 452264 - DNA, 75 bp, synthetic construct
  source 1..75: mol_type = other DNA
ttaccgacattcgcgcggttttcactatatcagcaaagtggggaaggaatacagggaacaagtaagagacatcat

SEQ ID NO: 452265 - DNA, 75 bp, synthetic construct
  source 1..75: mol_type = other DNA
gattgtttattaaagttcgcgaacgcggcgacctgttaccggatattggtgaatacgaaactaatatatggggtg

SEQ ID NO: 452266 - DNA, 75 bp, synthetic construct
  source 1..75: mol_type = other DNA
gaccgacggcattggtaatacatcgggcgtcattcccggcaaaacaatcacggaacgacaggcagcagaagggct

SEQ ID NO: 452267 - DNA, 75 bp, synthetic construct
  source 1..75: mol_type = other DNA
gggtggggagaaaaaagatggtaaagctgtttcagatgttatttatctgaaaaaaaatgacaaacaaataaagat

SEQ ID NO: 452268 - DNA, 75 bp, synthetic construct
  source 1..75: mol_type = other DNA
aataactggtatatgatagatacaaaccagagtgaaaaaaaatggactaagatagcgcaatggccgacagttccc

SEQ ID NO: 452269 - DNA, 75 bp, synthetic construct
  source 1..75: mol_type = other DNA
cggcgattcctcagggaaaatcctaacgttgaagttctttttcgcgaaaagatgcccgcgatgcaaatggccctg

SEQ ID NO: 452270 - DNA, 75 bp, synthetic construct
  source 1..75: mol_type = other DNA
aaaacctgactatcagtgaactaccaccgctgcgattaggctttctcgtttctcgccgttatgaagagcgtcaag

SEQ ID NO: 452271 - DNA, 75 bp, synthetic construct
  source 1..75: mol_type = other DNA
ctggatccgctatccggttgtacgtccgcaagatgtacaggttgaagagcaacgcgaacaggaagaagtacagat

SEQ ID NO: 452272 - DNA, 75 bp, synthetic construct
  source 1..75: mol_type = other DNA
cacagtgactggcagcgccctacttttgccttcgaaggtaaaggtgccgcaggtggtcatacggcaacgcatcat

SEQ ID NO: 452273 - DNA, 75 bp, synthetic construct
  source 1..75: mol_type = other DNA
cggcaacaccagcagctcctgcacaacctgggctgttaagccgcttcttcggcgcactgaaagcgctgttcagcg

SEQ ID NO: 452274 - DNA, 75 bp, synthetic construct
  source 1..75: mol_type = other DNA
gcctgcctgcaccgacgccaaaagcgctctacagcccatgtgagattcgccatctggcgattatcgttaacctgg

SEQ ID NO: 452275 - DNA, 75 bp, synthetic construct
  source 1..75: mol_type = other DNA
ccggttgcacaagcgcaaccggaagtggttgaaacgacgcatcctgaagtgattgccgcagcggtaactgaacag

SEQ ID NO: 452276 - DNA, 75 bp, synthetic construct
  source 1..75: mol_type = other DNA
aacgcgaacaggaagaagtacagatgcagccgatggtgactgaagtccctgtcgccgccgctgtcgaacctgtcg

SEQ ID NO: 452277 - DNA, 75 bp, synthetic construct
  source 1..75: mol_type = other DNA
atcagccatatttctcgctttggcctgctggaaatgtcccgtcagcgcctgagcccatcactgggtgaatccagt

SEQ ID NO: 452278 - DNA, 75 bp, synthetic construct
  source 1..75: mol_type = other DNA
cccataaaaaagcaagagtgttgctaaccattgaaaatggtgaagtaatttactcaaaacatctgttggataatg

SEQ ID NO: 452279 - DNA, 75 bp, synthetic construct
  source 1..75: mol_type = other DNA
caatccaacaatcatttatcgcccctacagttttatggccaaaatcagcgccgttgagcgcggacattttctgac

SEQ ID NO: 452280 - DNA, 75 bp, synthetic construct
  source 1..75: mol_type = other DNA
taaatgccattgaaactcgtcaggacggcgtgcgctgtgtgattgtgccaaacgatcagatggaaaccccgcact

SEQ ID NO: 452281 - DNA, 75 bp, synthetic construct
  source 1..75: mol_type = other DNA
tggttgaaacgacgcatcctgaagtaattgccgccgcggtaactgaacagccgcaggtgattaccgagtctgatg

SEQ ID NO: 452282 - DNA, 75 bp, synthetic construct
  source 1..75: mol_type = other DNA
gcgccggaacagcaagaggagaacaatacagataaccgtgataatggtggcatgccgcgtcgttctcgccgctcg

SEQ ID NO: 452283 - DNA, 75 bp, synthetic construct
  source 1..75: mol_type = other DNA
ctgggtttatgtaaaaggtgtgtttaatcaggggctggataaccgccgtacgcgggagatggcctggtgcttaca

SEQ ID NO: 452284 - DNA, 75 bp, synthetic construct
  source 1..75: mol_type = other DNA
gtacagattggttatcacgaagcattttcgcatcgcattatgggcggcgcggacgtcattctggttcccagtcgt

SEQ ID NO: 452285 - DNA, 75 bp, synthetic construct
  source 1..75: mol_type = other DNA
gcgtgaacaagtactttaaagtgagcgccggtgtcgataatcttctggacaaggattacagcgagcatctcaacc

SEQ ID NO: 452286 - DNA, 75 bp, synthetic construct
  source 1..75: mol_type = other DNA
tttaagtttcaggaaatactactcagtgactccctgccagtggttaaaacaacatggcagggaaattgtgaatga

SEQ ID NO: 452287 - DNA, 75 bp, synthetic construct
  source 1..75: mol_type = other DNA
cctgatcggcaacagttaccatgaagcggaaaaagagcgccacgccattgaggtgttaattcgtcaacgttgtaa

SEQ ID NO: 452288 - DNA, 75 bp, synthetic construct
  source 1..75: mol_type = other DNA
aatagctatcatgaagcggaaaaagagcgtcacgccattgaggtgttaattcgccagcgttgtaatgcgttgatt

SEQ ID NO: 452289 - DNA, 75 bp, synthetic construct
  source 1..75: mol_type = other DNA
ttactcttgccggaaacgaagagatcaccctcaagtgtcacgaacggtgcaatagtgatccacacccaacgcctg

SEQ ID NO: 452290 - DNA, 75 bp, synthetic construct
  source 1..75: mol_type = other DNA
gactttattagcgcaattgatgaagatacatttgaggcatcaaactgtcaaaacatctcagttatagagttttcg

SEQ ID NO: 452291 - DNA, 75 bp, synthetic construct
  source 1..75: mol_type = other DNA
accataaccttagctaaagctgatgagggaatcgaggggcttaagaaggctctaattatagaaaaaccagtagat

SEQ ID NO: 452292 - DNA, 75 bp, synthetic construct
  source 1..75: mol_type = other DNA
ggattggatagtgtcatttggctggacgatttaaaaggtaatgagaattatctttctttattaaatttagttaac

SEQ ID NO: 452293 - DNA, 75 bp, synthetic construct
  source 1..75: mol_type = other DNA
ggactgttttctgctgcgtcttatcaaaagaccgttcgggacaagtatgaaggcataccgaccactgtaccgccc

SEQ ID NO: 452294 - DNA, 75 bp, synthetic construct
  source 1..75: mol_type = other DNA
atgtatttaaccattaagcagttcgcagaaagatttaatctttctgcatccacggttgcgtcagatatatcgcgc

SEQ ID NO: 452295 - DNA, 75 bp, synthetic construct
  source 1..75: mol_type = other DNA
tcgaattcaaaggtaagaaataatatagaacaaataacagttttcagagatcaggctgtacaccttttaatgcca

SEQ ID NO: 452296 - DNA, 75 bp, synthetic construct
  source 1..75: mol_type = other DNA
ttatggataacattcccggcatggtactgattaaccgggttgttccgggatacgctcatcgttgcgtttgcctgg

SEQ ID NO: 452297 - DNA, 75 bp, synthetic construct
  source 1..75: mol_type = other DNA
atctggaaattatctcgacagcaattgaaacgctgcgcacacaaatcgctcttatacagaaacggaatccgggtg

SEQ ID NO: 452298 - DNA, 75 bp, synthetic construct
  source 1..75: mol_type = other DNA
aaattactcaatcagcggcgctgggcagatgcgtgccgacagttgccgcgctgggtgtatgtaaaaggtgttttt

SEQ ID NO: 452299 - DNA, 75 bp, synthetic construct
  source 1..75: mol_type = other DNA
ttggtaatacactgggcgtcatcccgggcaaaaacattacggaacgacaggcagcggaagggctgatctccaacg

SEQ ID NO: 452300 - DNA, 75 bp, synthetic construct
  source 1..75: mol_type = other DNA
taatacatcgggcgtcatcccgggcaaaaccattacggaacgacaggcagcggaagggctgatctccaacatgct

SEQ ID NO: 452301 - DNA, 75 bp, synthetic construct
  source 1..75: mol_type = other DNA
accgcatttctcggtggcgtggtggaaggattcaaagcggcggcaggtcccatcagtgcagcgttcgaaccgctt

SEQ ID NO: 452302 - DNA, 75 bp, synthetic construct
  source 1..75: mol_type = other DNA
cggcaaaaccattacggaacgacaggcagctgaagggctgatctccaacgtgctacgagtggagcgggcgatgga

SEQ ID NO: 452303 - DNA, 75 bp, synthetic construct
  source 1..75: mol_type = other DNA
gttcagattggctatcacgaagcattttcgcatcgcattatgggcggcgcggacgtcattctggtgcccagccgt

SEQ ID NO: 452304 - DNA, 75 bp, synthetic construct
  source 1..75: mol_type = other DNA
cccagcggatcgccgacgcccgtatctcctatgccggacgtggcgcgttaagcgacgccaacgccgcaggctggc

SEQ ID NO: 452305 - DNA, 75 bp, synthetic construct
  source 1..75: mol_type = other DNA
attcgcggcgagaaatggctcaccctcaaccagggcgatgagtacatccgcttaagcggcctggtgcgcgccgac

SEQ ID NO: 452306 - DNA, 75 bp, synthetic construct
  source 1..75: mol_type = other DNA
atggcacattcgattacagtaagactaaacaaacccgcaagagagtttcaggccggtgaaaatatcggattcaat

SEQ ID NO: 452307 - DNA, 75 bp, synthetic construct
  source 1..75: mol_type = other DNA
taaacaaacccgcaagagagtttcaggccggggaaaatatcggattcaacatccgtgctggcgttcagtattacg

SEQ ID NO: 452308 - DNA, 75 bp, synthetic construct
  source 1..75: mol_type = other DNA
tggtgctggaggccttaccgggtcttctggagcagggcgggcaactggcgctactcggcgcgggcgatccggtgc

SEQ ID NO: 452309 - DNA, 75 bp, synthetic construct
  source 1..75: mol_type = other DNA
taccgaggagatgaatgcgggtataacggtcctgcggtggcggatgagttcgacaaccccaccacggatatccgt

SEQ ID NO: 452310 - DNA, 75 bp, synthetic construct
  source 1..75: mol_type = other DNA
gctgacagccatgacggcctcgtttgtgctggcgacaccgaccgagacggagggggcgctgtttcccggtcgaat

SEQ ID NO: 452311 - DNA, 75 bp, synthetic construct
  source 1..75: mol_type = other DNA
gctgacagccatgacggcctcgtttgtgctggcgacaccgaccgagacggaaggggcgctgtttcccggtcggat

SEQ ID NO: 452312 - DNA, 75 bp, synthetic construct
  source 1..75: mol_type = other DNA
gaatgaaaaaggggagccggtcacctggcaggggcggaagtaccaggcatacccgattgacggcagcggctttga

SEQ ID NO: 452313 - DNA, 75 bp, synthetic construct
  source 1..75: mol_type = other DNA
gacggtacagggcggtgagcggtattttttctgtaatgagctgaatgaaaaaggggagccggtgacctggcaggg

SEQ ID NO: 452314 - DNA, 75 bp, synthetic construct
  source 1..75: mol_type = other DNA
tggagtactggacgaaatcagctctatcatggggaccgatataattgctcacctgtatctctgtaaagttaatcc

SEQ ID NO: 452315 - DNA, 75 bp, synthetic construct
  source 1..75: mol_type = other DNA
gctgacagccatgacggcctcgtttgtgctggcaacaccgaccgagacggaaggggcgctgtttcccggtcgaat

SEQ ID NO: 452316 - DNA, 75 bp, synthetic construct
  source 1..75: mol_type = other DNA
accccattcaggggagcggatttgagatgaacggtaaaggagccagcgccaggccaacgctgaaagtctctaatc

SEQ ID NO: 452317 - DNA, 75 bp, synthetic construct
  source 1..75: mol_type = other DNA
tggcaggggcggcagtatcaggcataccccattcaggggacaggatttgaactgaacggcaagggcagtgctgcc

SEQ ID NO: 452318 - DNA, 75 bp, synthetic construct
  source 1..75: mol_type = other DNA
gctgacagccatgacggcctcgtttgtgctggccacaccgaccgagacggacggggcgctgtttcccggtcgaat

SEQ ID NO: 452319 - DNA, 75 bp, synthetic construct
  source 1..75: mol_type = other DNA
gctgacagccatgacggcctcgtttgtgctggccacaccgaccgagacggaaggggcgctgtttcccggtcgcat

SEQ ID NO: 452320 - DNA, 75 bp, synthetic construct
  source 1..75: mol_type = other DNA
gctgacagccatgacggcctcgtttgtgctggctacaccgaccgagacggaaggggcgctgtttcccggtcgtat

SEQ ID NO: 452321 - DNA, 75 bp, synthetic construct
  source 1..75: mol_type = other DNA
tggacggcggaagcggaacagctacgcttgcgtttgttatgcgccgcaaagtggttgccggaatatgactggcca

SEQ ID NO: 452322 - DNA, 75 bp, synthetic construct
  source 1..75: mol_type = other DNA
tgttcggtctggtcaccggaatggcggaggacctgcagagcctggtggggccacggtggtccgccgccgggtgta

SEQ ID NO: 452323 - DNA, 75 bp, synthetic construct
  source 1..75: mol_type = other DNA
atgcaggaaattcatgaggagagtctgaacgagacggtaaaatcagcgcagtccgcccgcgtggtgttgtgggaa

SEQ ID NO: 452324 - DNA, 75 bp, synthetic construct
  source 1..75: mol_type = other DNA
atcgacctgacggtgcagggcggtgagcggtattttttctgcaatgagctgaatgaaaaaggggagccggtgacc

SEQ ID NO: 452325 - DNA, 75 bp, synthetic construct
  source 1..75: mol_type = other DNA
ttctcgcccttggtgaggactacgagatggaaaccaacgaaacgcacaccgttctgaaaacagcagacaacagct

SEQ ID NO: 452326 - DNA, 75 bp, synthetic construct
  source 1..75: mol_type = other DNA
ccggaccaacagggatttatactttcttctcacttttacaacaacaaacgccgctttctatttccatcttcgagc

SEQ ID NO: 452327 - DNA, 75 bp, synthetic construct
  source 1..75: mol_type = other DNA
cgataaacccaccaccgatatccgtaaggacagatgcagcaagtgcatgcgcgggtgtgagatgcgcggcatggt

SEQ ID NO: 452328 - DNA, 75 bp, synthetic construct
  source 1..75: mol_type = other DNA
gtttttacctggcgtcggggaaattcagcgtgtgcaggaacaactggcttcgcgtgtaggcagtgatgtgttgct

SEQ ID NO: 452329 - DNA, 75 bp, synthetic construct
  source 1..75: mol_type = other DNA
gcaacaagggctgcgcgatgacctgaagctgctgattatgtcagccacgctggataacgagcgcttacagcaaat

SEQ ID NO: 452330 - DNA, 75 bp, synthetic construct
  source 1..75: mol_type = other DNA
agagatatcttcttctgtcttgtaacagaagaacagaaaatcgggcttttgcgcctgaatattgcggagaaaaag

SEQ ID NO: 452331 - DNA, 75 bp, synthetic construct
  source 1..75: mol_type = other DNA
caacgctgcccgcagctggtacagcagtctgacactgtggagtgggatgacgcgcaaggtacgctgaaagcctgg

SEQ ID NO: 452332 - DNA, 75 bp, synthetic construct
  source 1..75: mol_type = other DNA
atttaatcgccaaagaacaagcagaacgcgctgccgcgcaaagtgaaccggagatcttacaaagcgatctctccg

SEQ ID NO: 452333 - DNA, 75 bp, synthetic construct
  source 1..75: mol_type = other DNA
atggtgctgtttttccggggcgcatcatgctggctaacacctgcacctggatctatcgcggtgatgagtgcggtt

SEQ ID NO: 452334 - DNA, 75 bp, synthetic construct
  source 1..75: mol_type = other DNA
tttttcaatggtttcatttgcccatacactcttatatgagtttttattaattgctttgtttataatctttttctt

SEQ ID NO: 452335 - DNA, 75 bp, synthetic construct
  source 1..75: mol_type = other DNA
ttcacgacccacgctgacggtttctaacctggacggtatggtcaccggaatggcggaagatttgcagagtctggt

SEQ ID NO: 452336 - DNA, 75 bp, synthetic construct
  source 1..75: mol_type = other DNA
ttcacgacccactctgacggtttctaacctggacggtatggtcaccggaatggcggaagatatgcagagtctggt

SEQ ID NO: 452337 - DNA, 75 bp, synthetic construct
  source 1..75: mol_type = other DNA
ggtgtataccatagatataaatcgttataatctctcagcaatagtctcagtaataggactgttcaaaaaagagtc

SEQ ID NO: 452338 - DNA, 75 bp, synthetic construct
  source 1..75: mol_type = other DNA
ggtgtataccatagatataaatcgttataatctctccgcactagtttcagtaataggtctgttcaaaaaagagtc

SEQ ID NO: 452339 - DNA, 75 bp, synthetic construct
  source 1..75: mol_type = other DNA
actgaagatcttgtcaaatggctatggaaaacgaatcacccggatgcgattcaaattctgatcctcggtgtaatt

SEQ ID NO: 452340 - DNA, 75 bp, synthetic construct
  source 1..75: mol_type = other DNA
ggacgggatttgaactgaacggtaagggcagtgctgcccgtccgacactgacggtctctaacctgcacggcatgg

SEQ ID NO: 452341 - DNA, 75 bp, synthetic construct
  source 1..75: mol_type = other DNA
ttcacgacctacgctgacggtttctaacctggacggtatggtcaccggaatggcggaagatctgcagagtctggt

SEQ ID NO: 452342 - DNA, 75 bp, synthetic construct
  source 1..75: mol_type = other DNA
ttcacgaccaactctgacggtttctaacctggacggtatggtcaccggaatggcggaagatctgcagagtctggt

SEQ ID NO: 452343 - DNA, 75 bp, synthetic construct
  source 1..75: mol_type = other DNA
atcgttatttcttctgtaatgagcagaacgaaaagggtgaaccagtcacctggcaggggcggcagtatcaggctt

SEQ ID NO: 452344 - DNA, 75 bp, synthetic construct
  source 1..75: mol_type = other DNA
atgcgcgttttctggatgcggtgaattttgtggcgggaaatccggaggctgacccggagcaggagctgacggacc

SEQ ID NO: 452345 - DNA, 75 bp, synthetic construct
  source 1..75: mol_type = other DNA
tggcgaacacctgtatgtggacctaccgctctgatgagtgtggttacacgggcggggctgtggcggatgagttcg

SEQ ID NO: 452346 - DNA, 75 bp, synthetic construct
  source 1..75: mol_type = other DNA
aacgaaaaaggtgagccggtcatctggcaggggcggcagtatcaggcgtaccccattcagggaagcggctttgag

SEQ ID NO: 452347 - DNA, 75 bp, synthetic construct
  source 1..75: mol_type = other DNA
ccggggagatgaatgcgggtataacggtcctgcggtggcggatgagttcgataaacccaccaccgatatccgtaa

SEQ ID NO: 452348 - DNA, 75 bp, synthetic construct
  source 1..75: mol_type = other DNA
tggcaggggcgtgaatatcaggcgtacccgattgagggaagaggctttgagatgaacggaaagggcagcagtgcc

SEQ ID NO: 452349 - DNA, 75 bp, synthetic construct
  source 1..75: mol_type = other DNA
tgaatgaatgcacccgtgcggagcagtctgccagcgtggtactctgggaaatcgacctgacggtacagggcggtg

SEQ ID NO: 452350 - DNA, 75 bp, synthetic construct
  source 1..75: mol_type = other DNA
gatccggagcaggaagtgatcagccgctggcgcatcgagcagtgcagcgagctgacggcaatcagtgcttccttt

SEQ ID NO: 452351 - DNA, 75 bp, synthetic construct
  source 1..75: mol_type = other DNA
acccgattgacggcagcggctttgagatgaacggccggggcagcagtgccagaccgtcgctgacggtgtccaatc

SEQ ID NO: 452352 - DNA, 75 bp, synthetic construct
  source 1..75: mol_type = other DNA
tgaacgaggcagtaaaatcagcgcagtccgcccgcgtggtgctgtgggaaatcgacctgacggcgcaggggggcg

SEQ ID NO: 452353 - DNA, 75 bp, synthetic construct
  source 1..75: mol_type = other DNA
actggcagcaggcttttgctgagttacaaatgcaagttaagggtaatcaaccgacagggagtgcgcaatctgatg

SEQ ID NO: 452354 - DNA, 75 bp, synthetic construct
  source 1..75: mol_type = other DNA
acgaaggataaatgcagcaaatgcctgagcggctgtaagctccgtaataacgtcgccaactttggcggttttctg

SEQ ID NO: 452355 - DNA, 75 bp, synthetic construct
  source 1..75: mol_type = other DNA
aagggcagcagtgcctgtccgtcgctgacggtgtcgaatctgttaggtctggtcaccggcatggcggaggacctg

SEQ ID NO: 452356 - DNA, 75 bp, synthetic construct
  source 1..75: mol_type = other DNA
tgctgactgccatgacggcctcgtttgtgctggccacaccgaccgagacggacggggcgctgtttcccggtcgta

SEQ ID NO: 452357 - DNA, 75 bp, synthetic construct
  source 1..75: mol_type = other DNA
cggaaggacagatgcagtaaatgcatgcgcgggtgtgagctgcgcggcatggtggctaatttcggcggtttcctt

SEQ ID NO: 452358 - DNA, 75 bp, synthetic construct
  source 1..75: mol_type = other DNA
ctttgtggcaggcaatccggaggccgacccggagcaggagctgactgaccggtgggtggtggagcagatgtcaga

SEQ ID NO: 452359 - DNA, 75 bp, synthetic construct
  source 1..75: mol_type = other DNA
cgtaaggacagatgcagcaagtgcatgcgcgggtgtgaactgcgcaggaatgtcggcaatttttggcggtttcct

SEQ ID NO: 452360 - DNA, 75 bp, synthetic construct
  source 1..75: mol_type = other DNA
tgggggccacggtggtccgccgccgggtgtatgcccgttttctggatgcggtgaatttggtcgcgggcaatccgg

SEQ ID NO: 452361 - DNA, 75 bp, synthetic construct
  source 1..75: mol_type = other DNA
tgggggccacggtggtccgccgccgggtgtatgcccgttttctggatgcggtgaatttcgtggcgggcaatccgg

SEQ ID NO: 452362 - DNA, 75 bp, synthetic construct
  source 1..75: mol_type = other DNA
aagggcagcagtgcctgtccgtcgctgacggtgtcgaatctgttcggtctggtcaccggaatggcggaggacctg

SEQ ID NO: 452363 - DNA, 75 bp, synthetic construct
  source 1..75: mol_type = other DNA
ctcaacgaactggacgcagatgaacaggccgatatttgtgaatcacttcacgaccacgccgacgagctttaccgc

SEQ ID NO: 452364 - DNA, 75 bp, synthetic construct
  source 1..75: mol_type = other DNA
ttaacatggctaaatttatccaggatcagtccctgcttcttctggacaggcttaatgagctggatctggatcatg

SEQ ID NO: 452365 - DNA, 75 bp, synthetic construct
  source 1..75: mol_type = other DNA
gtgaccaaacaggaaaaaaccgccctgaacatggcgcgcttcatcagaagccagacattaaccctgctggagaag

SEQ ID NO: 452366 - DNA, 75 bp, synthetic construct
  source 1..75: mol_type = other DNA
aacatggcccgcttcatcagaagccagacgctgaccctgctggaaaaactgaatgaactggacgccgacgaccag

SEQ ID NO: 452367 - DNA, 75 bp, synthetic construct
  source 1..75: mol_type = other DNA
gtggtggagcagatgtcagagctgacggccatgacagcctcgtttgtgctggcgacaccgacggagacggacggg

SEQ ID NO: 452368 - DNA, 75 bp, synthetic construct
  source 1..75: mol_type = other DNA
aagggcagcagtgcctggccgtcgctgacggtgtcgaatctgtttggtctggtcaccggcatggcggaggacctg

SEQ ID NO: 452369 - DNA, 75 bp, synthetic construct
  source 1..75: mol_type = other DNA
aagggcagcagtgcctgcccgtcgctgacggtgtcgaatctgttgggtctggtcaccggtatggcggaggacctg

SEQ ID NO: 452370 - DNA, 75 bp, synthetic construct
  source 1..75: mol_type = other DNA
atgcaggatattcacgaagaaagcctgaacgagtcggttaaatcagagcagtcaccgcgggtggtactctgggaa

SEQ ID NO: 452371 - DNA, 75 bp, synthetic construct
  source 1..75: mol_type = other DNA
taaggacagatgcagcaagtgcatgcgcgggtgtgagatgcgcggcatggtggctaattttggcggtttcctttc

SEQ ID NO: 452372 - DNA, 75 bp, synthetic construct
  source 1..75: mol_type = other DNA
ttcccgaccgaccctgacggtttctaacctgcacggtatggtcaccgggatggcggaagagctgcagagtctggt

SEQ ID NO: 452373 - DNA, 75 bp, synthetic construct
  source 1..75: mol_type = other DNA
ttcccggccaaccctgacggtttctaacctgcacggtatggtcaccgggatggcggaagagctgcagagtctggt

SEQ ID NO: 452374 - DNA, 75 bp, synthetic construct
  source 1..75: mol_type = other DNA
acccgattgagggcagcggctttgagatgaacggaaagggcagcagtgcccgcccgtcgctgacagtgtccaatc

SEQ ID NO: 452375 - DNA, 75 bp, synthetic construct
  source 1..75: mol_type = other DNA
gcgcacgggcattttaccggaagccgatttctattgccccatcccctacgaaccgttacgcatcgtcacagaaca

SEQ ID NO: 452376 - DNA, 75 bp, synthetic construct
  source 1..75: mol_type = other DNA
gatgttggcgaagattatacgttacagcaacccgaagatattcgtgggcgcgtagcgttcggcgcgttgccctgg

SEQ ID NO: 452377 - DNA, 75 bp, synthetic construct
  source 1..75: mol_type = other DNA
gtcaccgcgggtggtactctgggaaatcgacctgacggtacagggtggtgagcggtattttttctgtaatgagca

SEQ ID NO: 452378 - DNA, 75 bp, synthetic construct
  source 1..75: mol_type = other DNA
tgaatgaatcggtaaaatcagagcagtcggcgctggtggtactgtgggaaatcgacctgacggaggtcggcgggg

SEQ ID NO: 452379 - DNA, 75 bp, synthetic construct
  source 1..75: mol_type = other DNA
agcggtattttttctgtaatgagctgaatgaaaaaggggagccggtcacctggcaggggcggaagtaccaggcgt

SEQ ID NO: 452380 - DNA, 75 bp, synthetic construct
  source 1..75: mol_type = other DNA
tgcggtggcggatgagttcgacaaccccaccacggatatccgtaaggacagatgcagcaagtgcatgcgcgggtg

SEQ ID NO: 452381 - DNA, 75 bp, synthetic construct
  source 1..75: mol_type = other DNA
ttcggtcttgtcaccgggatggcggaggatttgcagagcctggtgggtgccacggtggtccgccgccgggtgtat

SEQ ID NO: 452382 - DNA, 75 bp, synthetic construct
  source 1..75: mol_type = other DNA
acggagcgctgtttcccggtcgcattatgctggcgaacacctgtatgtgggattaccggggagatgaatgcgggt

SEQ ID NO: 452383 - DNA, 75 bp, synthetic construct
  source 1..75: mol_type = other DNA
ccacgccgacggaaacggatggtgctgtttttccggggcgcatcatgctggccaacacctgtacctggacctatc

SEQ ID NO: 452384 - DNA, 75 bp, synthetic construct
  source 1..75: mol_type = other DNA
tgaatgagtgtacaaaagcggagcaatccgcgctggtcgtgctctgggaagtcgatctgacagaggtcggcggag

SEQ ID NO: 452385 - DNA, 75 bp, synthetic construct
  source 1..75: mol_type = other DNA
tgtcggcaattacgtccgttaccggaaaatgttacctggttatcgccggaaggggagtttcagaagtggaacggc

SEQ ID NO: 452386 - DNA, 75 bp, synthetic construct
  source 1..75: mol_type = other DNA
cttcgtcaacggaaacagtgaagccgacccggagcaggaggtggtcagtcgctggcgcattgagcagtgcagtga

SEQ ID NO: 452387 - DNA, 75 bp, synthetic construct
  source 1..75: mol_type = other DNA
ctgctgtccccgctggaggaggcgcttcaggactatgtcctgactgacggtaaactccatgccgatgataccccg

SEQ ID NO: 452388 - DNA, 75 bp, synthetic construct
  source 1..75: mol_type = other DNA
tccttctgctgaaacagcgccttgccgaacaggaagcgctgaaccgtgccctgctggaaaagctggcagaccggg

SEQ ID NO: 452389 - DNA, 75 bp, synthetic construct
  source 1..75: mol_type = other DNA
ccgccgaacagctggagttgatgcgtagcgccttccgggttatccggacggtacgggaaaaacatgctccatgcc

SEQ ID NO: 452390 - DNA, 75 bp, synthetic construct
  source 1..75: mol_type = other DNA
tgccgaaagccgatggcattggtagcctgctgcccgctgcgcgcggcaatatcggttatatcggtccggtgccgg

SEQ ID NO: 452391 - DNA, 75 bp, synthetic construct
  source 1..75: mol_type = other DNA
ataccgacgtaccttacagcaacattgtggcgcttaacgaacacgctgcggtgctgcattacaccaaactggatc

SEQ ID NO: 452392 - DNA, 75 bp, synthetic construct
  source 1..75: mol_type = other DNA
gagcagttttacctgagccgtctgcatgacggatgctatgtgctgcattacaccgactgcagctattacgtgttt

SEQ ID NO: 452393 - DNA, 75 bp, synthetic construct
  source 1..75: mol_type = other DNA
tctgaaatgtacggccgccagggcgtggagctgagtcgttcactgccgtcgggctgggtggatgcatgctgccgg

SEQ ID NO: 452394 - DNA, 75 bp, synthetic construct
  source 1..75: mol_type = other DNA
aagcgactgttgcctgcggcgccgtgctgcccgaactgcggcggttcactgagctatctgggcgaggataccgcc

SEQ ID NO: 452395 - DNA, 75 bp, synthetic construct
  source 1..75: mol_type = other DNA
aaaccgctgctgaaatccctggaaagctggctgcgtgaaaagatgaaaaccctatcgcgacactcagaactggcg

SEQ ID NO: 452396 - DNA, 75 bp, synthetic construct
  source 1..75: mol_type = other DNA
gatgcgtgttgtcgtctgctggcaccgctggatgaagcccttcagcactatgtcctgaccgacggcaaactccat

SEQ ID NO: 452397 - DNA, 75 bp, synthetic construct
  source 1..75: mol_type = other DNA
ggtcagtctgggtcgtaaaacttcctgttcttcggctctgaccatggtggtgagcggggagcgctactgtacagc

SEQ ID NO: 452398 - DNA, 75 bp, synthetic construct
  source 1..75: mol_type = other DNA
ttgcggggttcagtggtgtactgcaggcggatgcatacgccgggttcaacgagctgtaccgggatggccggataa

SEQ ID NO: 452399 - DNA, 75 bp, synthetic construct
  source 1..75: mol_type = other DNA
atggaatcactggcctcgctctataaaaatcatatagctaccttacaggaacggactcgcgatgcgctggcgcgc

SEQ ID NO: 452400 - DNA, 75 bp, synthetic construct
  source 1..75: mol_type = other DNA
agggcgttcgcgtacgcacttaaccagtggccggcactgacgtactatgcgaacgatggctgggtggaaatcgac

SEQ ID NO: 452401 - DNA, 75 bp, synthetic construct
  source 1..75: mol_type = other DNA
gcggttgtggacgtatgtgcgtgatgaccgcaacgccgggtcagtgctggcaccggcagtatggttcgcgtacag

SEQ ID NO: 452402 - DNA, 75 bp, synthetic construct
  source 1..75: mol_type = other DNA
tgttgtcgtctgctggcaccgctggatgaagcccttcaggcctatgtactgaccgatggcaaactccatgccgac

SEQ ID NO: 452403 - DNA, 75 bp, synthetic construct
  source 1..75: mol_type = other DNA
cggccagctgaggcgttacaccgactgttcagagcgtgccacgggttatgaatacgatgaagacggcaacctgac

SEQ ID NO: 452404 - DNA, 75 bp, synthetic construct
  source 1..75: mol_type = other DNA
ctgacggaagaagccctggagcagagcggtcagttgtacgccatagaggcggatataaggggaatgccggcagag

SEQ ID NO: 452405 - DNA, 75 bp, synthetic construct
  source 1..75: mol_type = other DNA
tatgcagatgatggctgggctgaggcggacaataacatcgctgaaaatgcgttgcggatggtcagtctgggccgc

SEQ ID NO: 452406 - DNA, 75 bp, synthetic construct
  source 1..75: mol_type = other DNA
gcttcagaggtgtcctgcatgcggatgcgtacgccgggttcaacgagctgtatcgcaatggtgggataacggaag

SEQ ID NO: 452407 - DNA, 75 bp, synthetic construct
  source 1..75: mol_type = other DNA
gtttcaggggtgtcctgcaggcggatgcgtacgccgggttcaacgagctgtatcgcaatggtgggataacggaag

SEQ ID NO: 452408 - DNA, 75 bp, synthetic construct
  source 1..75: mol_type = other DNA
cggaacgctatctgcatcatgtacttgatgtcatcgccgactggcctgtgaaccgggtgggtgctctgctcccgt

SEQ ID NO: 452409 - DNA, 75 bp, synthetic construct
  source 1..75: mol_type = other DNA
cgcaccccgtcagccctgacggaggacgcgctgaaacggatcggcgaactgtacgccatcgaggcagagataagg

SEQ ID NO: 452410 - DNA, 75 bp, synthetic construct
  source 1..75: mol_type = other DNA
ggaccggggctgctggcccgcgtgctgatctcaaagtatgcagagcacaccccgctgtattgccagtcagaaata

SEQ ID NO: 452411 - DNA, 75 bp, synthetic construct
  source 1..75: mol_type = other DNA
gcttcagtggtgtcctgcaagcggatgcgtacgccgggttcaacgagctgtatcgcaatggtgggataacggaag

SEQ ID NO: 452412 - DNA, 75 bp, synthetic construct
  source 1..75: mol_type = other DNA
ccggacagaaaaggcatccatccgcagactcatcttgcttgcttcagcggtgtgctgcaagcggatgcgttcgcc

SEQ ID NO: 452413 - DNA, 75 bp, synthetic construct
  source 1..75: mol_type = other DNA
cagcggtgtgctgcaggtggatgcatatgccgggttcaacgagctttaccgcaatggccggataacagaagccgc

SEQ ID NO: 452414 - DNA, 75 bp, synthetic construct
  source 1..75: mol_type = other DNA
taccgctaatgcagtcgttgtatgagtggctccaggggcagatgagcacgctgtcgcgtcactcggatacggcga

SEQ ID NO: 452415 - DNA, 75 bp, synthetic construct
  source 1..75: mol_type = other DNA
aacttcgacagtcgttccgaaaaagtctcccgccgtatcgcacaaatggaagccgatctgaaccggcttcagaaa

SEQ ID NO: 452416 - DNA, 75 bp, synthetic construct
  source 1..75: mol_type = other DNA
acatggacaccggaacgccttatcgagcagggaaaccgtacaggtccgtccacaggccgggtggttgaatccatg

SEQ ID NO: 452417 - DNA, 75 bp, synthetic construct
  source 1..75: mol_type = other DNA
atgtccttgacgtcatagccgactggccgataaaccgggtctgtgaactgctcccctggcgcgtagcactgccga

SEQ ID NO: 452418 - DNA, 75 bp, synthetic construct
  source 1..75: mol_type = other DNA
cggcagaacagcgccttgccggacgtcagcagaaagctaaacctctactgaaatccctggagagctggctgcgtg

SEQ ID NO: 452419 - DNA, 75 bp, synthetic construct
  source 1..75: mol_type = other DNA
ccgcgcatgggtaaccgtaccatgttgctgggtaaaatcttcgctaacccgcatctgccggggatcgacgattat

SEQ ID NO: 452420 - DNA, 75 bp, synthetic construct
  source 1..75: mol_type = other DNA
gtctgaccgaagcccaggcacaggaaatgtatcgttatctggcgattgccaactacgaagatcgctttgtggtac

SEQ ID NO: 452421 - DNA, 75 bp, synthetic construct
  source 1..75: mol_type = other DNA
gttgcgtcagacccgcacccgtaagccgttccctgaatcactacccgtgacgaaaagcgactgttgcctgcggcg

SEQ ID NO: 452422 - DNA, 75 bp, synthetic construct
  source 1..75: mol_type = other DNA
tttcattatcggggtatgatattcattttttgaatgcatcattcaaagatttcgttaatttaatacccaatttaa

SEQ ID NO: 452423 - DNA, 75 bp, synthetic construct
  source 1..75: mol_type = other DNA
tccgctgagcgttattgaagccgcacagcagtcgccggtttataaaatggcgatggaatggaaactggcgctgcc

SEQ ID NO: 452424 - DNA, 75 bp, synthetic construct
  source 1..75: mol_type = other DNA
ccgttatctcggcgtgctgttgtacgatgccgacgctattgaacgtgcagccagcaccgagaacgagaaagatct

SEQ ID NO: 452425 - DNA, 75 bp, synthetic construct
  source 1..75: mol_type = other DNA
ccggaacggctggaaaaggcctgttacgttgccctgcactataacgcccctgacagacgctttatcgacaatctg

SEQ ID NO: 452426 - DNA, 75 bp, synthetic construct
  source 1..75: mol_type = other DNA
aacgcgaaatagaccatctgcaggcacagctggataagctgcgccggatgaacatcggcagccgctctgaaaaag

SEQ ID NO: 452427 - DNA, 75 bp, synthetic construct
  source 1..75: mol_type = other DNA
tggagctgagccgttcactgctgtcgggctgggtggatgcatgctgccggctactgtcaccgctggaagaagcgc

SEQ ID NO: 452428 - DNA, 75 bp, synthetic construct
  source 1..75: mol_type = other DNA
caacgccaccgcaccgattcaggtgatcaccgacggcagtgagccgaataccgctaactttgtgcaggggtatgt

SEQ ID NO: 452429 - DNA, 75 bp, synthetic construct
  source 1..75: mol_type = other DNA
aacgcgaaatagaccatctgcaggcacagctggataagctgcgccggatgaacctcggcagctgctcggaaaaag

SEQ ID NO: 452430 - DNA, 75 bp, synthetic construct
  source 1..75: mol_type = other DNA
aacgcgaaatagaccatctgcaggcacagctggataagctgcgccggatgaacctcggcagcagctctgaaaaag

SEQ ID NO: 452431 - DNA, 75 bp, synthetic construct
  source 1..75: mol_type = other DNA
aacgcgaaatagaccatctgcaggcacagctggataagctgcgccggatgaacttcggcagcggctccgaaaaag

SEQ ID NO: 452432 - DNA, 75 bp, synthetic construct
  source 1..75: mol_type = other DNA
gagatacgtaatcagactattcgtggagaagctcaaataagactgggtgagttgatggtgtcaatacgacctatg

SEQ ID NO: 452433 - DNA, 75 bp, synthetic construct
  source 1..75: mol_type = other DNA
gtcccggtgctgttgccaggcaataagaaaacgaagaccgggcggttatggacctgcgttcgtgacgaccgtaac

SEQ ID NO: 452434 - DNA, 75 bp, synthetic construct
  source 1..75: mol_type = other DNA
tgacactgacggaagaagccctggagcagatcggtcagttgtacgccatagaggcggatataaggggaatgccgg

SEQ ID NO: 452435 - DNA, 75 bp, synthetic construct
  source 1..75: mol_type = other DNA
cgctcaggtcgccctgaacgccgcttttctgccgtcgattatgctttccggctttatttttcagatcgacagtat

SEQ ID NO: 452436 - DNA, 75 bp, synthetic construct
  source 1..75: mol_type = other DNA
tccagcaagctgcgggtcgggattttactggaacagcgtagcgaagcggcgctggatttcacccacaccatgacc

SEQ ID NO: 452437 - DNA, 75 bp, synthetic construct
  source 1..75: mol_type = other DNA
ggccgcctgctgcgcagtgacacgcagcacagtacacggaccttcagctacaaccgtcttgaccagataacggaa

SEQ ID NO: 452438 - DNA, 75 bp, synthetic construct
  source 1..75: mol_type = other DNA
tggcaggggcggcagtatcaggcctatcccattcaggggagtggatttgagatgaacggcaaaggtgccagtgca

SEQ ID NO: 452439 - DNA, 75 bp, synthetic construct
  source 1..75: mol_type = other DNA
tacaacaacccaccaggcaagctacgcaggccgacagcgacctggacgaacaggagaatgccatcagaagcctaa

SEQ ID NO: 452440 - DNA, 75 bp, synthetic construct
  source 1..75: mol_type = other DNA
aaacaccgccgcaggatcaaggatagggatgaacgaatccggccagatttacataatcggcccggcgaatatagt

SEQ ID NO: 452441 - DNA, 75 bp, synthetic construct
  source 1..75: mol_type = other DNA
cacaatggcggcactagcctgtatcgcgcaaaatgacaaccaacagttgctcgacgaaatcgtccaacaagaggg

SEQ ID NO: 452442 - DNA, 75 bp, synthetic construct
  source 1..75: mol_type = other DNA
gataacgattcctgaacgatcctttcttcgcgctcctttcaccctcaaaaagtcggaaattaaccgggcaatcga

SEQ ID NO: 452443 - DNA, 75 bp, synthetic construct
  source 1..75: mol_type = other DNA
taaatttgataggcgcgacggcgcgaaatatcagcgtgaaggcctttgagattgccgggtatggcacgtggtcag

SEQ ID NO: 452444 - DNA, 75 bp, synthetic construct
  source 1..75: mol_type = other DNA
gcccaacttgcgggaaaacggtggtatggggtgaaatcagcccgtttcggccattttgttgcaaacgttgtcagt

SEQ ID NO: 452445 - DNA, 75 bp, synthetic construct
  source 1..75: mol_type = other DNA
agtagcagaaaaattgtcagaaaaagttgagttgaaccgccccaggtttcctggagagtattttatctgtgaact

SEQ ID NO: 452446 - DNA, 75 bp, synthetic construct
  source 1..75: mol_type = other DNA
aaaaattcagttccagaccgcttttttttatttttttcggactctcactttgcgaattttttcaggaacaatcgg

SEQ ID NO: 452447 - DNA, 75 bp, synthetic construct
  source 1..75: mol_type = other DNA
gttcacgagttcggtgctgaaatcgatcaccctggcgggacggggtatatggcaaccggtggaaaagctacgttt

SEQ ID NO: 452448 - DNA, 75 bp, synthetic construct
  source 1..75: mol_type = other DNA
gacgcatcgaatctcgtgcacggactgggtcgccaggtggtcagaccgttgccacgccggagcaagaaacgaagc

SEQ ID NO: 452449 - DNA, 75 bp, synthetic construct
  source 1..75: mol_type = other DNA
ttacgcctgaacaaccctaaagcgatctggtgtttgcggatctgcaccttccaacggtcatcggcggcaccttgc

SEQ ID NO: 452450 - DNA, 75 bp, synthetic construct
  source 1..75: mol_type = other DNA
cggatctgcaccttcgcaacggtcatcggcggcaccttgctaagtcttccgctgatgtggcaactggcagatatc

SEQ ID NO: 452451 - DNA, 75 bp, synthetic construct
  source 1..75: mol_type = other DNA
ggttcgacgccaaacgcggcagcggcagcggcgtcctggcctccgcatccggcagcgcaagggattgtccagatg

SEQ ID NO: 452452 - DNA, 75 bp, synthetic construct
  source 1..75: mol_type = other DNA
tcttttatgtatgataagaacaaaaattatatcttgtcatttttgattgctttttcaatggtttcatttgcccat

SEQ ID NO: 452453 - DNA, 75 bp, synthetic construct
  source 1..75: mol_type = other DNA
gcctgaacgtagcagggatcctcgtcattcagggcgtggaggatgtcaagacacggaaaacgaacatgatgtttg

SEQ ID NO: 452454 - DNA, 75 bp, synthetic construct
  source 1..75: mol_type = other DNA
aacctcatttcagtcattgtgtaccagtcttgcggcgcgcgtgggtagcggcaacctggccggcgttgcgctggc

SEQ ID NO: 452455 - DNA, 75 bp, synthetic construct
  source 1..75: mol_type = other DNA
tcattttgcaggaagtattcactgtaatagaattaccccctgacaaagtttattcactaaggaattattcaacag

SEQ ID NO: 452456 - DNA, 75 bp, synthetic construct
  source 1..75: mol_type = other DNA
ggggcgagcaaacagagtgattttgtccaggcgggttatcagtatggttttaataacttattgacactgtatggt

SEQ ID NO: 452457 - DNA, 75 bp, synthetic construct
  source 1..75: mol_type = other DNA
cacataacggcgcaggtgtccgcgataccgccaggacactgaaaatcggcatcaataccgtcatacggacattaa

SEQ ID NO: 452458 - DNA, 75 bp, synthetic construct
  source 1..75: mol_type = other DNA
agaacgtgacgtcaatggacagtttcgtggcggaccggcatggtatatggcgcgcgggctggggatgcgttggat

SEQ ID NO: 452459 - DNA, 75 bp, synthetic construct
  source 1..75: mol_type = other DNA
tgttcttgcaactgattgtggaagtactggcgaaaaacggtcgcgcggcggtggtattgccggatggcacgctat

SEQ ID NO: 452460 - DNA, 75 bp, synthetic construct
  source 1..75: mol_type = other DNA
aaccatcacccgttctgccgggctgtctgctgagacagcggctgatatcaaacgccagattctggggattgcaga

SEQ ID NO: 452461 - DNA, 75 bp, synthetic construct
  source 1..75: mol_type = other DNA
ctccccgctacaacgttgctggattgaaattgatgggcggcgccatcaactggctctcccggccagtttccaggc

SEQ ID NO: 452462 - DNA, 75 bp, synthetic construct
  source 1..75: mol_type = other DNA
gccagtgcacgcattatgggcgttggcctcaacacggttttacgtcacttaaaaaactcaggccgtagtcggtaa

SEQ ID NO: 452463 - DNA, 75 bp, synthetic construct
  source 1..75: mol_type = other DNA
tgaattcactgcgtgaagagatcaccgcagtgttagcggcatttaagccgcaagatcaggtagtcctgcgtctgg

SEQ ID NO: 452464 - DNA, 75 bp, synthetic construct
  source 1..75: mol_type = other DNA
gaagaaaaagcataagcaagaggcgaaagctgcaaaagcaaaagctaaattgggcgaagtactgactgaaggcaa

SEQ ID NO: 452465 - DNA, 75 bp, synthetic construct
  source 1..75: mol_type = other DNA
gcccaatgaccgataccgctcgccgcatcagagataccatagttagcgtcggagttcgcagcacatggccgctgc

SEQ ID NO: 452466 - DNA, 75 bp, synthetic construct
  source 1..75: mol_type = other DNA
gaaaaggcagagccgcgccactgatgcagtcactgtatgactggatacagcaacagatgaaaacactgtcgcgtc

SEQ ID NO: 452467 - DNA, 75 bp, synthetic construct
  source 1..75: mol_type = other DNA
gagcgcgaaatagaccatctgcaggcgcagctggataaactccgccggatgaacttcggcagtcgttccgaaaaa

SEQ ID NO: 452468 - DNA, 75 bp, synthetic construct
  source 1..75: mol_type = other DNA
tcgttgaagcaccggtgccgtcccgcccgatagagcgtggtatcgcgggccccggattacttgcccgcgtgttaa

SEQ ID NO: 452469 - DNA, 75 bp, synthetic construct
  source 1..75: mol_type = other DNA
ggtacgcaccagaaaatcattgatatggccatgaatggcgttggatgccgggcaacagcgattttacgtcactta

SEQ ID NO: 452470 - DNA, 75 bp, synthetic construct
  source 1..75: mol_type = other DNA
tccgccatgtccttgacatcatagcagactggccggtgacccgggtgagtgagctgctgccgtggcgggtcatac

SEQ ID NO: 452471 - DNA, 75 bp, synthetic construct
  source 1..75: mol_type = other DNA
gaaatatacggccggcaaggtgtggagctgaggcgttcactgctgtcgggctgggtggatgcatgctgccggctg

SEQ ID NO: 452472 - DNA, 75 bp, synthetic construct
  source 1..75: mol_type = other DNA
acaccagacgcagcctctgcccaccgtcgcagcgcctgttttgagtgccccgctgggttcccatgaatggcaaca

SEQ ID NO: 452473 - DNA, 75 bp, synthetic construct
  source 1..75: mol_type = other DNA
acgcgggataaatgcagcaaatgcctgagcggctgtaagtttcgcaataacgtcggcaactttggcggttacctt

SEQ ID NO: 452474 - DNA, 75 bp, synthetic construct
  source 1..75: mol_type = other DNA
cttcgtcaacggaaacagcgaagcagacccggagcaggaggcgatcagtcgctggcgcatcgagcagtgcagcga

SEQ ID NO: 452475 - DNA, 75 bp, synthetic construct
  source 1..75: mol_type = other DNA
gcagcgcctgttttgagtgcaccgctgggttctcacgaatggcaacaatcattaagccagcatatttcgctgttt

SEQ ID NO: 452476 - DNA, 75 bp, synthetic construct
  source 1..75: mol_type = other DNA
agattatcaacggcgggcaaaacgggattaataaccggcgcgcccgcttcctgaaagcaaaatcggtgctggtgg

SEQ ID NO: 452477 - DNA, 75 bp, synthetic construct
  source 1..75: mol_type = other DNA
attacagggactgcggcaacgggctgaaggttgatctggtggcacagccagaattactggagcagtcctcctacg

SEQ ID NO: 452478 - DNA, 75 bp, synthetic construct
  source 1..75: mol_type = other DNA
aaagtttatcttaatgatgagttgatgggagtattaccgattaccaaagaacaactgggaaaaaaacgttggcgg

SEQ ID NO: 452479 - DNA, 75 bp, synthetic construct
  source 1..75: mol_type = other DNA
gcgggacgttagcagacgctacaacaaccgacaaagctgcgatccggttgcaggtggcgacagataagcctgcga

SEQ ID NO: 452480 - DNA, 75 bp, synthetic construct
  source 1..75: mol_type = other DNA
ccgctgacgttgataacgccacattgcctggcggcaaagccagcgatgctgcacaagattttctcgcgttgttga

SEQ ID NO: 452481 - DNA, 75 bp, synthetic construct
  source 1..75: mol_type = other DNA
aagcaacatcagtggcgaaagctttagtggtcagcagcaggccgcttcccaacaacagcaaagccaacgcacagt

SEQ ID NO: 452482 - DNA, 75 bp, synthetic construct
  source 1..75: mol_type = other DNA
tcgcgatgttaccgggttttgacaatacacccaaagtgactaatacgccgtcagccgtgttaccgacagagaggc

SEQ ID NO: 452483 - DNA, 75 bp, synthetic construct
  source 1..75: mol_type = other DNA
ctggtggcaacaaataaccctgccacaaaaggcgaaccgctggtgagtgatattctttccgatgcgcaacaagcg

SEQ ID NO: 452484 - DNA, 75 bp, synthetic construct
  source 1..75: mol_type = other DNA
gcctggcggcaaagccagcgatgctgcacaagattttctcgcgttgttgagcgaagcattagcaggcgaggcaac

SEQ ID NO: 452485 - DNA, 75 bp, synthetic construct
  source 1..75: mol_type = other DNA
ccgaactggctggtttcgtcgtcagaccgtagaagccgtaaaacccttgagctttacgctacgtgaacgccagac

SEQ ID NO: 452486 - DNA, 75 bp, synthetic construct
  source 1..75: mol_type = other DNA
gctgcatgaactcaccaaacggctgattgccggtcattttggcgaggcattgacggcggatgcgtggcgtaagga

SEQ ID NO: 452487 - DNA, 75 bp, synthetic construct
  source 1..75: mol_type = other DNA
cgatgcgttcgcagttgattaatctgatgctggagttacaggaaaaacagggcatttcgtatatttatgttaccc

SEQ ID NO: 452488 - DNA, 75 bp, synthetic construct
  source 1..75: mol_type = other DNA
ttaacggcgaagccatccccctgaaaaatatgcgcgtgacacccacgatgcagtttcaggataaagaccagtctg

SEQ ID NO: 452489 - DNA, 75 bp, synthetic construct
  source 1..75: mol_type = other DNA
ccagggcaaccggcaaaacgacagcgaaaaaacagacggcgggcagcacagggcaatccggtgggcagtctgccg

SEQ ID NO: 452490 - DNA, 75 bp, synthetic construct
  source 1..75: mol_type = other DNA
ttgatggtgaagggatcgccatgcagaacatgctggtttcaccttccatgcagtttcaggagaaggaccagtcgg

SEQ ID NO: 452491 - DNA, 75 bp, synthetic construct
  source 1..75: mol_type = other DNA
cgtcagtgtgtgactcctggtgattatgttcttcatgaaggccggacatatatcgcctcggcaaacaatattaaa

SEQ ID NO: 452492 - DNA, 75 bp, synthetic construct
  source 1..75: mol_type = other DNA
atgaaataccacgtcagtgcgtgactcctggcgattatgttcttcataaaggtcggacatatatcgcctcggcaa

SEQ ID NO: 452493 - DNA, 75 bp, synthetic construct
  source 1..75: mol_type = other DNA
acatgcatttctgactgcatgattaaagtcttcctcggtcgtgatggtttacctgtaaaggcggagtcatggtga

SEQ ID NO: 452494 - DNA, 75 bp, synthetic construct
  source 1..75: mol_type = other DNA
cggcgcaaacagattattgaaacgatgcgtatggtcggactgctgccggatcacgtcagttactatccgcatatg

SEQ ID NO: 452495 - DNA, 75 bp, synthetic construct
  source 1..75: mol_type = other DNA
ccttccgtagtcagcgtattcgcatgatttttcaggatccttcgacctcgttgaatccccgtcaacgtatctcgc

SEQ ID NO: 452496 - DNA, 75 bp, synthetic construct
  source 1..75: mol_type = other DNA
catgtcatgaatcaggtacctgggtgcgaaggatatgttgcaaaaacgcaccttcgggaatctaatcggtataaa

SEQ ID NO: 452497 - DNA, 75 bp, synthetic construct
  source 1..75: mol_type = other DNA
ctgcgaatttccggggaggtagcgtttaaaaacccggaaatcctgcgccgtatctttgagctggccagcgctact

SEQ ID NO: 452498 - DNA, 75 bp, synthetic construct
  source 1..75: mol_type = other DNA
gataaaatcagttgctcgccgaccgctgaaaatgttgctggctgtggcgctggaaccgctgttaagtcgggctgc

SEQ ID NO: 452499 - DNA, 75 bp, synthetic construct
  source 1..75: mol_type = other DNA
ttggcctgaaaccggaaaaagattaccgctttctgggggatgcggcttttgatacccggtatgtcagtaacgtca

SEQ ID NO: 452500 - DNA, 75 bp, synthetic construct
  source 1..75: mol_type = other DNA
cgagtaaaacacagatcgacggtgactggcagatatatgaaaatctgattaaggataatgtcaaaccattccacg

SEQ ID NO: 452501 - DNA, 75 bp, synthetic construct
  source 1..75: mol_type = other DNA
ttcatcgtgctatcagacaacaaataaaatcatatacaggtgatgcccttaaatttaaaatatatgtgaagattt

SEQ ID NO: 452502 - DNA, 75 bp, synthetic construct
  source 1..75: mol_type = other DNA
tggcagcctgagttcacagataaaacactctccaggaaaaccggggcggttcattttgctgctctacttccgggg

SEQ ID NO: 452503 - DNA, 75 bp, synthetic construct
  source 1..75: mol_type = other DNA
accaagctcatctggttcttcaagttcaggaacaagttcctcatcgtcctcttctgtgcgttcgcttcgttctaa

SEQ ID NO: 452504 - DNA, 75 bp, synthetic construct
  source 1..75: mol_type = other DNA
agggcgaggctgatgacggcaagatcaccggattcgatcagccagttggcaagccgaaaaaagggaaaaaaggga

SEQ ID NO: 452505 - DNA, 75 bp, synthetic construct
  source 1..75: mol_type = other DNA
tcgagtaggggaacacggaatacctgagctattccagacgagcaacgggcgtcagtatatgattcctggcgaaaa

SEQ ID NO: 452506 - DNA, 75 bp, synthetic construct
  source 1..75: mol_type = other DNA
gtgatgaagtgcctgtagatgagcagcatgcggtggcctttgaagtggcgcagtttgtcgaaaaaccgaatctgg

SEQ ID NO: 452507 - DNA, 75 bp, synthetic construct
  source 1..75: mol_type = other DNA
acggtgatacatatgttaagataggacagcgttttacattacgagactcttgtgaaaacggggatggtacagtac

SEQ ID NO: 452508 - DNA, 75 bp, synthetic construct
  source 1..75: mol_type = other DNA
gtaacgctaccacaaacacaagcagaagtatctcgtcttgtatcctgggaagataacactaaaatcgtcattgat

SEQ ID NO: 452509 - DNA, 75 bp, synthetic construct
  source 1..75: mol_type = other DNA
ggcggtagctgggcggcggctggctcggcggcgcttactgcgatcatgtcgctggcaacatccattttcggcggc

SEQ ID NO: 452510 - DNA, 75 bp, synthetic construct
  source 1..75: mol_type = other DNA
gccgtcatcatgcaggagggcgataccagcgtgctttccgtggcggttgccgacccggagccaacctggcggact

SEQ ID NO: 452511 - DNA, 75 bp, synthetic construct
  source 1..75: mol_type = other DNA
cggactggcgctggctgtcttgttttatggcgttatgttagctggggttgcggtaatggggcgcgttatctggtg

SEQ ID NO: 452512 - DNA, 75 bp, synthetic construct
  source 1..75: mol_type = other DNA
gctaaccgctttacttcgaacatcaaaggtctgactcaggcttctcgtaacgccaatgacggtatctccatcgca

SEQ ID NO: 452513 - DNA, 75 bp, synthetic construct
  source 1..75: mol_type = other DNA
ttaattacgggaaaaagaaaaaagtcagcgtgaaacgccgcaaaccgccaaaacccaaaaaggagaaaagcagca

SEQ ID NO: 452514 - DNA, 75 bp, synthetic construct
  source 1..75: mol_type = other DNA
atgtgtacgcgctggcgcaaaaaatgatgccggaatatcagggaggcttctggcatttcatccgcctgccggacg

SEQ ID NO: 452515 - DNA, 75 bp, synthetic construct
  source 1..75: mol_type = other DNA
ggtcagcgccgatgccgcaggcatcattctgacttcccttgtgattaaccgccagttgtggctgtaccacgacag

SEQ ID NO: 452516 - DNA, 75 bp, synthetic construct
  source 1..75: mol_type = other DNA
ttcgacactggcgattggcgtactggtgctggaagtgctgctcgccattaccgttattctgtggggttacggtta

SEQ ID NO: 452517 - DNA, 75 bp, synthetic construct
  source 1..75: mol_type = other DNA
gatgcgcgatgcgcagttgtggagccacattgaatttcaccccgaatgtaacgcgatttatgcagcactggactg

SEQ ID NO: 452518 - DNA, 75 bp, synthetic construct
  source 1..75: mol_type = other DNA
atgctgggcgcaatcaccacggtaaaaagcggcaatctgttattcatcatgcccggcggtggcgtgaacgcacag

SEQ ID NO: 452519 - DNA, 75 bp, synthetic construct
  source 1..75: mol_type = other DNA
gatgatgcgcgttattcgccccgcccggcgttcagtattcagattgagggcaagcagctcaccgcgctggatgac

SEQ ID NO: 452520 - DNA, 75 bp, synthetic construct
  source 1..75: mol_type = other DNA
gtgctgatgccgcaggcatcgttctgacttcccttgtgattaaccgtcagttgtggctgtaccacgacagcggcg

SEQ ID NO: 452521 - DNA, 75 bp, synthetic construct
  source 1..75: mol_type = other DNA
gcgctggcgaaaaaaatgatgccggaatatgaaggcggattctggcacttcatccgcctgccggacggtggcggt

SEQ ID NO: 452522 - DNA, 75 bp, synthetic construct
  source 1..75: mol_type = other DNA
accggatgcgcgatgcgcagttgtggagccacatcgaatttcatcccgaatgtaacgcgatttacgcggcactgg

SEQ ID NO: 452523 - DNA, 75 bp, synthetic construct
  source 1..75: mol_type = other DNA
atgcgttcgattgccagacgtaccgcagttggagctgcactattacttatcatgcctgtagcggtatggatttct

SEQ ID NO: 452524 - DNA, 75 bp, synthetic construct
  source 1..75: mol_type = other DNA
ctcagggacgtcaatctgacagaaggctatatagacctgcgccttgaggggagtaaaacgcacagggaatggcgc

SEQ ID NO: 452525 - DNA, 75 bp, synthetic construct
  source 1..75: mol_type = other DNA
aggagtgttgccaccacgatggagtatgttgatctttcactgaaggtggcagcccagacgctggaagctgaactt

SEQ ID NO: 452526 - DNA, 75 bp, synthetic construct
  source 1..75: mol_type = other DNA
agcgccgatgccgcaggcatcattctgacttcccttgtgattaaccgccagttgtggctgtaccacgacagcggt

SEQ ID NO: 452527 - DNA, 75 bp, synthetic construct
  source 1..75: mol_type = other DNA
atgattgctcatcacttcggaactgatgaaataccacgtcagtgcgtgacgcctggcgattatgttcttcatgaa

SEQ ID NO: 452528 - DNA, 75 bp, synthetic construct
  source 1..75: mol_type = other DNA
ggatatcgaactggtcagcggtcagcgtctgctgaaactgctgaatggtacgttactgaccgataagggagaaag

SEQ ID NO: 452529 - DNA, 75 bp, synthetic construct
  source 1..75: mol_type = other DNA
gtgtggttttctggtttctgcccaccgtttcaggcacacgctggcgacgattctgatggagtcaccggagcgaaa

SEQ ID NO: 452530 - DNA, 75 bp, synthetic construct
  source 1..75: mol_type = other DNA
ggatgcgtgatgcgcagtcgtggagccacatcgaagttcatcccgaatgtaacgcgatttgcgcggcactggact

SEQ ID NO: 452531 - DNA, 75 bp, synthetic construct
  source 1..75: mol_type = other DNA
gaaaactggtttgaccgtaccgtgagtgctgatgccgcaggaatcattctcacttcccttgtgattaaccgccag

SEQ ID NO: 452532 - DNA, 75 bp, synthetic construct
  source 1..75: mol_type = other DNA
tggcaaaaagagacggggtttgctttcccttcaggtcacacaatgttcgctgccagttgggcgctaatggccgtt

SEQ ID NO: 452533 - DNA, 75 bp, synthetic construct
  source 1..75: mol_type = other DNA
gggggcgggaaacgcagattatctgtttgatgtgaaccgaattcaacttaagcgtcatgtggaatgggatgcagc

SEQ ID NO: 452534 - DNA, 75 bp, synthetic construct
  source 1..75: mol_type = other DNA
gaatatgtggagctgaagatggatgttgtagggaaaacgctggaagccgaattgtctcttcacactgatattaca

SEQ ID NO: 452535 - DNA, 75 bp, synthetic construct
  source 1..75: mol_type = other DNA
gtccggcatggtactggatgattgtggtaaatacgctgcgttttaccgggatgaggctaaatcagttacttcacc

SEQ ID NO: 452536 - DNA, 75 bp, synthetic construct
  source 1..75: mol_type = other DNA
aaatacaggatgttgatagcgaagcgatgtacaagagttggctagcaacccattccgatggattcgttattaatc

SEQ ID NO: 452537 - DNA, 75 bp, synthetic construct
  source 1..75: mol_type = other DNA
agcggcaggtgtcagggatgctgattattatcctgaaggaatgcacagccagaaacgggagaactggcgcgaata

SEQ ID NO: 452538 - DNA, 75 bp, synthetic construct
  source 1..75: mol_type = other DNA
agcttaaagaacaaagaaataaaagagctaactgagtggttatataaaaaaggtgaggataaaaaaactcgtgtt

SEQ ID NO: 452539 - DNA, 75 bp, synthetic construct
  source 1..75: mol_type = other DNA
aataaattccagaaagagcacggtagtaatacaggaagccagttggaccccgttcagatcccggaaccacttaat

SEQ ID NO: 452540 - DNA, 75 bp, synthetic construct
  source 1..75: mol_type = other DNA
cgttcagattccggaaccactgaatagtgtagaaacctatcatgccatttatgccatgctggatttatggtcagc

SEQ ID NO: 452541 - DNA, 75 bp, synthetic construct
  source 1..75: mol_type = other DNA
gaccttaaggttgcgtatcagttaactgaagacttaaaacaagatttcatgacgttactttataaagctgaatct

SEQ ID NO: 452542 - DNA, 75 bp, synthetic construct
  source 1..75: mol_type = other DNA
gacgcgcagtatggaatacgatgctgccggacgggtcatccgcctgaccagtgaaaacggcagccacaccacctt

SEQ ID NO: 452543 - DNA, 75 bp, synthetic construct
  source 1..75: mol_type = other DNA
gcgtccgcttgcggtacaacagttgattgccctgatctcgcgcctcgatgtgcctgcttatcgggccgaactgat

SEQ ID NO: 452544 - DNA, 75 bp, synthetic construct
  source 1..75: mol_type = other DNA
tttcggtgtgcttgtttttactttcctcatacttaaactaattcccgactatcaagatgtaacaagattggttta

SEQ ID NO: 452545 - DNA, 75 bp, synthetic construct
  source 1..75: mol_type = other DNA
acgatgaattcgttaattgtccgcatgggcccacagcacttttctgttctctggcatcagacaggagaaagtgag

SEQ ID NO: 452546 - DNA, 75 bp, synthetic construct
  source 1..75: mol_type = other DNA
tgctgaaagcctgtgggagtttattgacgaaggccgcagtgtgcagacgcgtctggggcgtgaagacagtgagta

SEQ ID NO: 452547 - DNA, 75 bp, synthetic construct
  source 1..75: mol_type = other DNA
ccagcaggagtaccagcaggcgctgtggtacagcgccagtgcggaaagcctggcgttgagtgcactcagtctgag

SEQ ID NO: 452548 - DNA, 75 bp, synthetic construct
  source 1..75: mol_type = other DNA
tatcaaaaaatatgctcaaccaacttcatcaatgttgaaaatgaagcaaagaaaatgacaggtctgacaagcatc

SEQ ID NO: 452549 - DNA, 75 bp, synthetic construct
  source 1..75: mol_type = other DNA
tgccaaccagccgcacatgggcttgaccagttataaaggtgaagaggtacgtaagggcgacgtgacggtggcaaa

SEQ ID NO: 452550 - DNA, 75 bp, synthetic construct
  source 1..75: mol_type = other DNA
agcggctgaagaatccgcctgtcggttcatcggttgtgcccgactattttgatgagatgcttgaacgcatccgcg

SEQ ID NO: 452551 - DNA, 75 bp, synthetic construct
  source 1..75: mol_type = other DNA
gtacagggcagtttgtaacagcagcattagaaggcgagatcaaacgccgccagcggcgcaaggccaaagagcagg

SEQ ID NO: 452552 - DNA, 75 bp, synthetic construct
  source 1..75: mol_type = other DNA
aatcacaacaaaaaacggctagagttcctctagaagtgttaagcgaaatgaatttggtcaaagaagaaaacgaaa

SEQ ID NO: 452553 - DNA, 75 bp, synthetic construct
  source 1..75: mol_type = other DNA
gcactgggcaatttatcgtttcggcacttgaagtcgagatcaaacgccgccagcgccgcaaggccaaagagcagg

SEQ ID NO: 452554 - DNA, 75 bp, synthetic construct
  source 1..75: mol_type = other DNA
gcagacggcgaaattgagccggaagagcgcaaggtgctggaagagattgccggtgttctgggtcttcgtctggag

SEQ ID NO: 452555 - DNA, 75 bp, synthetic construct
  source 1..75: mol_type = other DNA
accattgatcttcgcgttgattatctgcgcccatttatacccatatttcggatcaatacagcccgttttacacct

SEQ ID NO: 452556 - DNA, 75 bp, synthetic construct
  source 1..75: mol_type = other DNA
aatggacgccggactttatcaaaaactgaaaccgctggtctgtgcgctgccgatgacccgccagcaaatcaacat

SEQ ID NO: 452557 - DNA, 75 bp, synthetic construct
  source 1..75: mol_type = other DNA
agccgaaagcctgtgggagtttattgacgaggaccgcagcgtgcagacgcgtctggggcgtgaagacagcgagta

SEQ ID NO: 452558 - DNA, 75 bp, synthetic construct
  source 1..75: mol_type = other DNA
gtacagggcagtttgtaacagcagcattaaagcgagaagttgagtaccgccagcggcgcaaggccaaagaaccag

SEQ ID NO: 452559 - DNA, 75 bp, synthetic construct
  source 1..75: mol_type = other DNA
ctattggcaattaccgggccggggcaatttctctcgatcggcgttaggaaagatgccggatgcggcgtgaacgcc

SEQ ID NO: 452560 - DNA, 75 bp, synthetic construct
  source 1..75: mol_type = other DNA
ttatcgccattattattgccggaccgtggatgctcaacctgttgctggattacgtccgcaccttgttcactaacc

SEQ ID NO: 452561 - DNA, 75 bp, synthetic construct
  source 1..75: mol_type = other DNA
tatcaactgattcgtaaaatatatagcaataatgctcgtgcaaatagttttgaaatgacgatagaagaacttaaa

SEQ ID NO: 452562 - DNA, 75 bp, synthetic construct
  source 1..75: mol_type = other DNA
ggcaaaaggtaaagcctggtttcaaattagcaggcaagctggtacttcttaccgcactgcgctatggcccggcgg

SEQ ID NO: 452563 - DNA, 75 bp, synthetic construct
  source 1..75: mol_type = other DNA
ttgcggtgcacatgggatcgtgcgatatgccggatggtgaaaggttggagggaacggcaacaactcacccctccc

SEQ ID NO: 452564 - DNA, 75 bp, synthetic construct
  source 1..75: mol_type = other DNA
cgattgtgctggaggtggacagccaggaaatcgagatcaccgactttgatgttcagatcaacaccgggcgaaagc

SEQ ID NO: 452565 - DNA, 75 bp, synthetic construct
  source 1..75: mol_type = other DNA
tatttaaaggcgctacgcgactgccgacatttgccggtgttccgcgaacagtaattattgccaccttcatatttt

SEQ ID NO: 452566 - DNA, 75 bp, synthetic construct
  source 1..75: mol_type = other DNA
accaaattcagtaattggtttgattctccgtttaagcagtggggaggatcgtcttattcctctgttgactacaaa

SEQ ID NO: 452567 - DNA, 75 bp, synthetic construct
  source 1..75: mol_type = other DNA
ggcaaaaggtgaagcctggtttcaaattagcaggcaagctggttcttctcaccgctctgcgctacggcccggcgg

SEQ ID NO: 452568 - DNA, 75 bp, synthetic construct
  source 1..75: mol_type = other DNA
cacattattcgataatggattaaccggggctacaggggttcttcctgccgcatatacagaatggctgattgaaag

SEQ ID NO: 452569 - DNA, 75 bp, synthetic construct
  source 1..75: mol_type = other DNA
ttactctcatcaatatatcaaatcaaggtatccattaatcctttttgtggcacttttgaaaaaacagatcctaac

SEQ ID NO: 452570 - DNA, 75 bp, synthetic construct
  source 1..75: mol_type = other DNA
ggaacttatgccgggaaaagattcccactattttatcagacaacaaataagatcgtatataggtgatgttcttaa

SEQ ID NO: 452571 - DNA, 75 bp, synthetic construct
  source 1..75: mol_type = other DNA
cagatccctaatcggacttgaacagttactctcgtcaatatatcaaatcagggtgtccattaatccttttcgtgg

SEQ ID NO: 452572 - DNA, 75 bp, synthetic construct
  source 1..75: mol_type = other DNA
tcaggaaatgaaaacagaagagataataatgttcttaacaatgttcttctgtctttaggcggaatcactcctcag

SEQ ID NO: 452573 - DNA, 75 bp, synthetic construct
  source 1..75: mol_type = other DNA
ataaaaataatacacttggttttaatatttcaatcggctctggaacagaaaaccataaagaacggtgcttttgca

SEQ ID NO: 452574 - DNA, 75 bp, synthetic construct
  source 1..75: mol_type = other DNA
atggccggtgaggctgacaacgtttttgccctgaccacggtttatgccacgaaagcacaggccatgcgtgccgct

SEQ ID NO: 452575 - DNA, 75 bp, synthetic construct
  source 1..75: mol_type = other DNA
tcatcgcactgcttttacgtctggaagttccaatcaaccgagctgaaaagattgctgaaaacctgcgggagttta

SEQ ID NO: 452576 - DNA, 75 bp, synthetic construct
  source 1..75: mol_type = other DNA
attcagcaagattatcagcaggcaatgagttacagcgccagtgttgaaagcctggcgctgagtatattaagtcgg

SEQ ID NO: 452577 - DNA, 75 bp, synthetic construct
  source 1..75: mol_type = other DNA
atgctgtttggaaagacagtccagagtatgcaggtgtaaaaattcctttggatcctgtaatggatgccgcaacag

SEQ ID NO: 452578 - DNA, 75 bp, synthetic construct
  source 1..75: mol_type = other DNA
cgctttctcgcttgacgaaagtaagacatcggaatgagttaaattccacgctctcaacgttacctatggctgcca

SEQ ID NO: 452579 - DNA, 75 bp, synthetic construct
  source 1..75: mol_type = other DNA
tcctcgctgggctgattgtgaatagcctcaacgaggtatcgcgatctcgacagctttatgcggctggcttcaata

SEQ ID NO: 452580 - DNA, 75 bp, synthetic construct
  source 1..75: mol_type = other DNA
gccgcacggatgggcgataactgtgctcatgggggggtaattgtcagcggatatcctcaggtattagtgggataa

SEQ ID NO: 452581 - DNA, 75 bp, synthetic construct
  source 1..75: mol_type = other DNA
atgaactggaatctttcgccagtgcagtcaccgggcgtttccgtaacccgtacattaaggggttccgtgggcatt

SEQ ID NO: 452582 - DNA, 75 bp, synthetic construct
  source 1..75: mol_type = other DNA
acgatggtttcctcgacaccgctgaacacttttacctgtttgtgattcaggggccgaaatccttagcgaccgagc

SEQ ID NO: 452583 - DNA, 75 bp, synthetic construct
  source 1..75: mol_type = other DNA
atgcgcgccgctcaggcgaagtgggataaactgcaacggggcgttgcggagttctccatcagcctggctaccggt

SEQ ID NO: 452584 - DNA, 75 bp, synthetic construct
  source 1..75: mol_type = other DNA
tgcgtgggaagtaccttaacccgccacgaaaccatcagtgaagatgaactacgccagcggctatcgcggatgggg

SEQ ID NO: 452585 - DNA, 75 bp, synthetic construct
  source 1..75: mol_type = other DNA
ataaatcaactgaactgttctatgaccttgcatgtagatcatttgccacaagctggaatatgttcatggaagtta

SEQ ID NO: 452586 - DNA, 75 bp, synthetic construct
  source 1..75: mol_type = other DNA
actgccagaagcatttattcaatggctggatcaggctaacagcttctgctctacgctggtggatcgtatcgttac

SEQ ID NO: 452587 - DNA, 75 bp, synthetic construct
  source 1..75: mol_type = other DNA
tctactatcctttcagctttgaagaacactgcgatcactatcgggcaattattgattcggcggatggtttgccga

SEQ ID NO: 452588 - DNA, 75 bp, synthetic construct
  source 1..75: mol_type = other DNA
tggaggaatcaacgaagatttctaccttcgccaactggctgcactcggaaaacccgacgccagtatcacgcgcta

SEQ ID NO: 452589 - DNA, 75 bp, synthetic construct
  source 1..75: mol_type = other DNA
cgcacaactacagaacttattgaccgatgggagcggtgctgtggcctgcctgatgaatgcattccatcaggaaca

SEQ ID NO: 452590 - DNA, 75 bp, synthetic construct
  source 1..75: mol_type = other DNA
cggatgtactgcagcaggcggtgaatgatgcggtcgggagaattccggtaccggcggacggcaaaagtatcaccc

SEQ ID NO: 452591 - DNA, 75 bp, synthetic construct
  source 1..75: mol_type = other DNA
aatgcgaaaaataggaatatttggtgcacgatacagtcacagacctacgggagatggtctgattgcagttatgcg

SEQ ID NO: 452592 - DNA, 75 bp, synthetic construct
  source 1..75: mol_type = other DNA
gatccgcgcaccaccaccgaactgataaatcgctgggagcgtctgtgcggcctgccggatgaatgtattcccgca

SEQ ID NO: 452593 - DNA, 75 bp, synthetic construct
  source 1..75: mol_type = other DNA
gctccggtcggcgcgactcgcctgccgtattgagaatgctgattgccgaacatgaactgacgccaacatcaggca

SEQ ID NO: 452594 - DNA, 75 bp, synthetic construct
  source 1..75: mol_type = other DNA
tacaattcaacaatggaaaaaaatgtattcctccgagaggttatatcatgtgttttatggactaaaaaagtagac

SEQ ID NO: 452595 - DNA, 75 bp, synthetic construct
  source 1..75: mol_type = other DNA
agaggaggcttcactccttttcataataatagtgtaaacatcgcccctaatgaaaaaaaatttatttccctaaca

SEQ ID NO: 452596 - DNA, 75 bp, synthetic construct
  source 1..75: mol_type = other DNA
caacacatcatcttcggtgggcggcgctggaaagtgacagagatcgagacagagaaaaaagttatctatgtagag

SEQ ID NO: 452597 - DNA, 75 bp, synthetic construct
  source 1..75: mol_type = other DNA
tctgccggatgaatgtattcccgcagggacacagacccttcgccagcgtcagcaacggctggatgcgaaggttaa

SEQ ID NO: 452598 - DNA, 75 bp, synthetic construct
  source 1..75: mol_type = other DNA
gttccggtcggcgcgactcgcctgccatattgagaatgctgattgccgaacatgaactgacgccaacttcaggca

SEQ ID NO: 452599 - DNA, 75 bp, synthetic construct
  source 1..75: mol_type = other DNA
gtaccgcgtgatggtcgtgattatgatccggatgtactgcagcaggcggtgaatgatgcggttgcgaatattccg

SEQ ID NO: 452600 - DNA, 75 bp, synthetic construct
  source 1..75: mol_type = other DNA
gaatacgtcatggaccgggaatacatctgtgtatcagacccgaaagcacgtgaaacgtggcagcgtatctggcgc

SEQ ID NO: 452601 - DNA, 75 bp, synthetic construct
  source 1..75: mol_type = other DNA
ggagcagtggcagaacatctggcgcgagtaccggcaaatggcgaaaggctggacgcaggggacgtattcttccct

SEQ ID NO: 452602 - DNA, 75 bp, synthetic construct
  source 1..75: mol_type = other DNA
gaatacgtcatggaccgggaatacatctgcgcatcagaccctgaagcccgtgaaatgtggcagcgtatctggcgc

SEQ ID NO: 452603 - DNA, 75 bp, synthetic construct
  source 1..75: mol_type = other DNA
cacccacgttctgaagaggcttcaggcggcagagggatttattgacggttgcttagccatgctggatgtggtgct

SEQ ID NO: 452604 - DNA, 75 bp, synthetic construct
  source 1..75: mol_type = other DNA
atctgtgcgcgttattgcggtgaaagcatttccagcgccattgcgtttggcggtgcgttcaacgtggatttatgg

SEQ ID NO: 452605 - DNA, 75 bp, synthetic construct
  source 1..75: mol_type = other DNA
gggcgcgctgctgttattcctcgcttgccctgaaagccgttcagctatcgctgcggcatattccggcatcaatgc

SEQ ID NO: 452606 - DNA, 75 bp, synthetic construct
  source 1..75: mol_type = other DNA
aaatctgcatacccgaaacttgcagcggcttatccgtcaggcgtgatccctgatatgcgtggctggacgattaag

SEQ ID NO: 452607 - DNA, 75 bp, synthetic construct
  source 1..75: mol_type = other DNA
gccagctgctgcaccgggggcgcaagggcagcaaccacaacagggcgcgatgccggactttgaagatgatattcc

SEQ ID NO: 452608 - DNA, 75 bp, synthetic construct
  source 1..75: mol_type = other DNA
acttaaccctgcctttaaacccatcccgatagatggtaattgccggattgttggtaaagtggttcagattaccca

SEQ ID NO: 452609 - DNA, 75 bp, synthetic construct
  source 1..75: mol_type = other DNA
ctggataccgtaggtgaagcgatgaacgatgctgaaatttgcgcattcgttgaaaaagccatctacgaagaaatt

SEQ ID NO: 452610 - DNA, 75 bp, synthetic construct
  source 1..75: mol_type = other DNA
aaagtgaaccgggttcctgacggcgttgcagaatacagtgtgtgggggctgaagttgccgacgttgcgtcagcgc

SEQ ID NO: 452611 - DNA, 75 bp, synthetic construct
  source 1..75: mol_type = other DNA
taaaaaaaatcccaaataatgatgatagcagttatgttttatgtctagacaaccctaacctctcatcttatacat

SEQ ID NO: 452612 - DNA, 75 bp, synthetic construct
  source 1..75: mol_type = other DNA
ctcaagccaaaggacaagctctacaaagtgaatgaccgtgacggcctctacgtggccatcacgccagcgggttcg

SEQ ID NO: 452613 - DNA, 75 bp, synthetic construct
  source 1..75: mol_type = other DNA
aaactactggtgctgtttctgttaaaactattacctatactgactcttccggtgccgccagttctccaaccgcgg

SEQ ID NO: 452614 - DNA, 75 bp, synthetic construct
  source 1..75: mol_type = other DNA
aaaacatacgattctgccgatttaaatggcggtaatctgcaaacaggtttgactgctggtggtgaggctctgact

SEQ ID NO: 452615 - DNA, 75 bp, synthetic construct
  source 1..75: mol_type = other DNA
gaccgtacgctgcaacctgaagagatcggcgtattcttccgcgctctggataacgtcgggactatggccacgatg

SEQ ID NO: 452616 - DNA, 75 bp, synthetic construct
  source 1..75: mol_type = other DNA
tcgcgcacgaggaaagaagcgtcagagccgtttataacaaagcggaatacgcagaacagcgccgcgacatgttgc

SEQ ID NO: 452617 - DNA, 75 bp, synthetic construct
  source 1..75: mol_type = other DNA
ggccagtcactcgttaaatttggacctcatgatctccgtagaactgcgagcactctgctgcatgaggccgggtac

SEQ ID NO: 452618 - DNA, 75 bp, synthetic construct
  source 1..75: mol_type = other DNA
tcaccgacttcggtggccatcttgtcgacggtctgattaacggtatcaaaaacaaatgggagtcgctcaaatcca

SEQ ID NO: 452619 - DNA, 75 bp, synthetic construct
  source 1..75: mol_type = other DNA
ctggcgccctgaatatgagcctgcatgagctggaaaaaatgctggagcgtctgctggctcagaaacaacgtaagg

SEQ ID NO: 452620 - DNA, 75 bp, synthetic construct
  source 1..75: mol_type = other DNA
gcgtacagccagcacgctgctgcatgaggcaggctataacactgactggatcgagaagtgccttgcgcacgaaca

SEQ ID NO: 452621 - DNA, 75 bp, synthetic construct
  source 1..75: mol_type = other DNA
ggattgacggggagcatacggatctgattccgttctccccgtcgaagtttgagaagtggatggaagacagtaata

SEQ ID NO: 452622 - DNA, 75 bp, synthetic construct
  source 1..75: mol_type = other DNA
gacatctgcgaagcgcttcacgaccacgctgacgagctttaccgcagctgcctcgcacgcttcggagatgacggt

SEQ ID NO: 452623 - DNA, 75 bp, synthetic construct
  source 1..75: mol_type = other DNA
gtcatcggtcagtacggtcgtgacggtatcagcctggcggaagcacgagaagaactcattgctgccaaaaaactg

SEQ ID NO: 452624 - DNA, 75 bp, synthetic construct
  source 1..75: mol_type = other DNA
ttttttttcttgagtcaatgataggtatgcaagataactattttacatattgtatatcaaacggaatatcaaata

SEQ ID NO: 452625 - DNA, 75 bp, synthetic construct
  source 1..75: mol_type = other DNA
ccggtgttggagcccttaaacaaacctccggagatttatatcagatggagcagattcgtcgggctcatccggatc

SEQ ID NO: 452626 - DNA, 75 bp, synthetic construct
  source 1..75: mol_type = other DNA
gtatgttggtggctctacgggagaagcctttgtacagagtgtacaggaacgtgagtcagtgctggagatcgttgc

SEQ ID NO: 452627 - DNA, 75 bp, synthetic construct
  source 1..75: mol_type = other DNA
gaggtgatgtaattttagaaagtgacactttacaaaaaataaatacattttcaaaaaatataacaatacagacag

SEQ ID NO: 452628 - DNA, 75 bp, synthetic construct
  source 1..75: mol_type = other DNA
aaatataaatatttatcattgagtgaaatacataaaactttaacaaataacaattcatttgcaggtatttccata

SEQ ID NO: 452629 - DNA, 75 bp, synthetic construct
  source 1..75: mol_type = other DNA
tttctatatttcagatatctataaaatgtccataggtagaaaaccggttaaattaaatgtagaaaagaaaccgga

SEQ ID NO: 452630 - DNA, 75 bp, synthetic construct
  source 1..75: mol_type = other DNA
tggcacatgagcagaaaggtgtgcgcgccgtatataacaaagcggaatacgccagacagcgcgcctacatgttgc

SEQ ID NO: 452631 - DNA, 75 bp, synthetic construct
  source 1..75: mol_type = other DNA
acggccgtgctttgccgcgaaattgtgatgcaggtcttccgttgggctatagaacgtggccagaaggttgagaac

SEQ ID NO: 452632 - DNA, 75 bp, synthetic construct
  source 1..75: mol_type = other DNA
tacgctgttgcatgaggctggttatccatcagactggattgaaaaggcgctggcgcatgagcaaaagggagtgcg

SEQ ID NO: 452633 - DNA, 75 bp, synthetic construct
  source 1..75: mol_type = other DNA
acgccagccggatgaagggatcacgggatcataatgtttatctgtcccggcaggcacaggacattctgattgccc

SEQ ID NO: 452634 - DNA, 75 bp, synthetic construct
  source 1..75: mol_type = other DNA
attgagcgcggtcagaaggtggagaatcctgctgatctggtacggcctgcaagcatagcgaaatttgagcctcga

SEQ ID NO: 452635 - DNA, 75 bp, synthetic construct
  source 1..75: mol_type = other DNA
ccgatatgattgattcctggattaacggggagcatacggatctgattccgttctccccgtcgaagtttgagaagt

SEQ ID NO: 452636 - DNA, 75 bp, synthetic construct
  source 1..75: mol_type = other DNA
tgggcgcaatcaccacggtaaaaagcggtaatctgttattcatcatgcccggcggtggcgtgaacgcacagggcc

SEQ ID NO: 452637 - DNA, 75 bp, synthetic construct
  source 1..75: mol_type = other DNA
ggaacacaccatcgatggaagcgcgtttaccacgcagcttgagcttgaagcaaaaatcccggaatggatagcaga

SEQ ID NO: 452638 - DNA, 75 bp, synthetic construct
  source 1..75: mol_type = other DNA
tgatgaaattgctcatgaaggaccgcccgacaggctgactgtttcagccagaagcgcagattttcgggatgaatt

SEQ ID NO: 452639 - DNA, 75 bp, synthetic construct
  source 1..75: mol_type = other DNA
ttacagcgcggtgcggctgaattctccatcacgctggcccggggcagagcggagctttacccggaaatgcatggc

SEQ ID NO: 452640 - DNA, 75 bp, synthetic construct
  source 1..75: mol_type = other DNA
ggcatcggctaaacgttatggcttcgatgccgtctccgccgtcacgccgttctactatcctttcagctttgaaga

SEQ ID NO: 452641 - DNA, 75 bp, synthetic construct
  source 1..75: mol_type = other DNA
ctcattggctggaagggagaaccgctgacagaaaaaggcacttacattgttgatgaaatcgctcacgaaggaccg

SEQ ID NO: 452642 - DNA, 75 bp, synthetic construct
  source 1..75: mol_type = other DNA
caggaaaacagtgaaaaactggcggccgatatgatcatcagtcagaaacgcatgggtggcctgcaggccgtgcgt

SEQ ID NO: 452643 - DNA, 75 bp, synthetic construct
  source 1..75: mol_type = other DNA
caggaaaacagtgaaaaactggccgccgatatgatgatcagtcagaaacgcatgggtggcctgcaggccgtgcgt

SEQ ID NO: 452644 - DNA, 75 bp, synthetic construct
  source 1..75: mol_type = other DNA
caggaaaacagtgaaaaactggctgccgatatgataatcagtcagaaacgcatgggaggcctgcaggccgtgcgt

SEQ ID NO: 452645 - DNA, 75 bp, synthetic construct
  source 1..75: mol_type = other DNA
gtgattttgggtattacgtattggcatctacgttggctcaatattttcttcagttacaatatcctttattaaggc

SEQ ID NO: 452646 - DNA, 75 bp, synthetic construct
  source 1..75: mol_type = other DNA
gcaggagaagcacgaggaaagaacgcatcagctaagtgatgtaaatagtggatggttatgcccactgacagaagg

SEQ ID NO: 452647 - DNA, 75 bp, synthetic construct
  source 1..75: mol_type = other DNA
gagccatcataaaggctggcggaaaagcattgtggcaggagaaacacgaggacagaacgcatcagtcctgcgatg

SEQ ID NO: 452648 - DNA, 75 bp, synthetic construct
  source 1..75: mol_type = other DNA
attgataacagcggctttaccacgcagcttgagcttgaagcaaaaatcccggaatggatagcagaaacagagtga

SEQ ID NO: 452649 - DNA, 75 bp, synthetic construct
  source 1..75: mol_type = other DNA
cttaatcgcacctatgccaaccggagcaacgccgaacgggcggcgagaatgcagtgggaacgcctgcaacgcggc

SEQ ID NO: 452650 - DNA, 75 bp, synthetic construct
  source 1..75: mol_type = other DNA
ggccggggccgaaggcaacgtttttgttatccgtaaaaccttcaagacggaaaaggcggcaaagcgtgccgcagc

SEQ ID NO: 452651 - DNA, 75 bp, synthetic construct
  source 1..75: mol_type = other DNA
ttgacggcaccgcgtgggtgattacgcggtgcgtgcatacgttggatggcggtactggttatgtcaccgcattag

SEQ ID NO: 452652 - DNA, 75 bp, synthetic construct
  source 1..75: mol_type = other DNA
attgccagccggtgcgagaggtgggcgttgtcagcagaccgcaacaacagccacgcgttgtctgtacgcgcgcgc

SEQ ID NO: 452653 - DNA, 75 bp, synthetic construct
  source 1..75: mol_type = other DNA
ctgacggacaaccggggttttgacgccgatcagctgacattagagctggatgacactgatggaagcgttgctctt

SEQ ID NO: 452654 - DNA, 75 bp, synthetic construct
  source 1..75: mol_type = other DNA
attttcgggaaacgttgaatacccgccgtgaaaaatcgtggcataagaccaccgtcggggaagtggtgaaggaaa

SEQ ID NO: 452655 - DNA, 75 bp, synthetic construct
  source 1..75: mol_type = other DNA
gtatttcccgctggtcaacaaagagcaggaaaacactgaaaaactggcagccgatatgattatcagtcagaaacg

SEQ ID NO: 452656 - DNA, 75 bp, synthetic construct
  source 1..75: mol_type = other DNA
gtcgaggactaccgttgtgcggcactggtggaaaacatcgaaattggtgatttcagtgtgccagccgcaccggag

SEQ ID NO: 452657 - DNA, 75 bp, synthetic construct
  source 1..75: mol_type = other DNA
tcagtcagggcacagaccccgtgaaaatgccagattttgatattctcgcggagggtaaaacgctgtcaggcgtgg

SEQ ID NO: 452658 - DNA, 75 bp, synthetic construct
  source 1..75: mol_type = other DNA
caggtgaaggggtttaaggcggagattgacggcaccgcgtgggtgattacgcggtgcgtgcatacgttggatggc

SEQ ID NO: 452659 - DNA, 75 bp, synthetic construct
  source 1..75: mol_type = other DNA
caggcagtacgctgacaccggattacatgctgatgctcgacagcagggatattaccggcaatatcagcgaccgtc

SEQ ID NO: 452660 - DNA, 75 bp, synthetic construct
  source 1..75: mol_type = other DNA
attttcgggaaacgttgaatacccgccgtgaaaaatcgtggcacaagaccaccattggggaagtggtgaaggaga

SEQ ID NO: 452661 - DNA, 75 bp, synthetic construct
  source 1..75: mol_type = other DNA
caggaaaacagtgaaaaactggcagccgatatgattatcagtcagaaacgcatgggaggcctgcaggccgtgcgt

SEQ ID NO: 452662 - DNA, 75 bp, synthetic construct
  source 1..75: mol_type = other DNA
gtggaaaagaaccattaacaataatcattcctgctattgaacatggtatgcttggctctaatctacatatgattg

SEQ ID NO: 452663 - DNA, 75 bp, synthetic construct
  source 1..75: mol_type = other DNA
cagatgcaggtgaacccgatattttcggttggggagataaggatgtatgtaattcaatggaactgtctgaatctc

SEQ ID NO: 452664 - DNA, 75 bp, synthetic construct
  source 1..75: mol_type = other DNA
acaaatttttaggcggaattttaacttttactaataatcgcgtatataacccaggtggtatatctggtgcctcgc

SEQ ID NO: 452665 - DNA, 75 bp, synthetic construct
  source 1..75: mol_type = other DNA
aattaaatgtagaaaagaaacctgacattgatgatatcatcaatgtggctattttagaaacttcttatctacaaa

SEQ ID NO: 452666 - DNA, 75 bp, synthetic construct
  source 1..75: mol_type = other DNA
gcgagctaatactgaagttacattgagtagcactggttacttttacgagattgcaagggcatatactgatgatga

SEQ ID NO: 452667 - DNA, 75 bp, synthetic construct
  source 1..75: mol_type = other DNA
ggcttaacttttaaagaggggataaatagtttatccgaagcactcgaacacatgaatatcgatgcgattatgtct

SEQ ID NO: 452668 - DNA, 75 bp, synthetic construct
  source 1..75: mol_type = other DNA
ggaaaaattgccttgtgtagtgcttttattttcttagttctttttgctaaagatgagatgagaacaaaaataaaa

SEQ ID NO: 452669 - DNA, 75 bp, synthetic construct
  source 1..75: mol_type = other DNA
tcgtcaatgcggtgatatgcgctgtaattgttggtgcgttgatgttctaccggcgcgacgggtcaagacaccgcc

SEQ ID NO: 452670 - DNA, 75 bp, synthetic construct
  source 1..75: mol_type = other DNA
atcgttggggagcatgggcggcgagtgatagttctggagtagactattcgcctatagctgctgggtttaaggggc

SEQ ID NO: 452671 - DNA, 75 bp, synthetic construct
  source 1..75: mol_type = other DNA
ttctattcgaaaaaataaactgccatgtacccgaaaaactacctacctccctatactatgaaatcgattcgcggt

SEQ ID NO: 452672 - DNA, 75 bp, synthetic construct
  source 1..75: mol_type = other DNA
tttaactaacgttttaaaactttcaccagaagttcaaaatgactttaaatctacagtagagaaaaacaaaagaga

SEQ ID NO: 452673 - DNA, 75 bp, synthetic construct
  source 1..75: mol_type = other DNA
atgaaaatatgcaaattaaaaatagtcgaaaaggtatagaaatacttgttaagcagggagagctgttatcatcat

SEQ ID NO: 452674 - DNA, 75 bp, synthetic construct
  source 1..75: mol_type = other DNA
tagtgattatattttatgtttagacaaccctaacctctcatcttacacattgaactttaatgacttgtctggata

SEQ ID NO: 452675 - DNA, 75 bp, synthetic construct
  source 1..75: mol_type = other DNA
catgattggctttaacggcgtgagccgcgccaaaacctctgaccgttctgctaaccctctgctgcaggatgtgaa

SEQ ID NO: 452676 - DNA, 75 bp, synthetic construct
  source 1..75: mol_type = other DNA
tgcgtgacgcagcaacggcaacagaaaaagtggcaacaccaaagaaacttctggcatttcgtattaagaccacac

SEQ ID NO: 452677 - DNA, 75 bp, synthetic construct
  source 1..75: mol_type = other DNA
gacagaacgcatcagtcctgcgatgtaaattgtggatggtttagcccactgacgacagataaaaataacacctga

SEQ ID NO: 452678 - DNA, 75 bp, synthetic construct
  source 1..75: mol_type = other DNA
cggtgactgaacagtccggtcaactgctggggctgggtgttggtagtaccattgccggaaccactgataccaccg

SEQ ID NO: 452679 - DNA, 75 bp, synthetic construct
  source 1..75: mol_type = other DNA
cgccgactatgcgaccgaagtgtcaaatatgtctaaagcgcagatcatccagcaggccggtaactccgtgttggc

SEQ ID NO: 452680 - DNA, 75 bp, synthetic construct
  source 1..75: mol_type = other DNA
gttctgtcatcgataacccgaaacgcgatcgcattgaaaactttgaatcggtcaatgaggcgtttgtggtggagg

SEQ ID NO: 452681 - DNA, 75 bp, synthetic construct
  source 1..75: mol_type = other DNA
aggcgtgccgaaacctctgaccgcagcagtaaccagatgctgcaggatgtggcggtcggctggctgcagaaatac

SEQ ID NO: 452682 - DNA, 75 bp, synthetic construct
  source 1..75: mol_type = other DNA
tttagaacttcagcgcatcagagataatataagttataataatttcttttataccacaaatgatctaaaatcttt

SEQ ID NO: 452683 - DNA, 75 bp, synthetic construct
  source 1..75: mol_type = other DNA
acgagcaatggtaacttttcatctttatatggaagtggtattattaaaatttactttagtgagtctcctaataat

SEQ ID NO: 452684 - DNA, 75 bp, synthetic construct
  source 1..75: mol_type = other DNA
tgacgtatttcagcccttgcgatacgagcgggatgttgaaagagccatcataaaggctggcggaaaagcatgtgg

SEQ ID NO: 452685 - DNA, 75 bp, synthetic construct
  source 1..75: mol_type = other DNA
gatagatatgttattgattacacctctaaaaataaagaaagattgcgatatcgtcaatatttacttaatcaggaa

SEQ ID NO: 452686 - DNA, 75 bp, synthetic construct
  source 1..75: mol_type = other DNA
tataattttttcacaaaaaaatccttcgactctgctgggatggaaaatttagaaccagtgtgggaagatgcaaat

SEQ ID NO: 452687 - DNA, 75 bp, synthetic construct
  source 1..75: mol_type = other DNA
tctggcaagggcagcccttgcatcaggtacgcgacagctaccatcaaaacctgttatggataggccatcagccgg

SEQ ID NO: 452688 - DNA, 75 bp, synthetic construct
  source 1..75: mol_type = other DNA
attgtgggttattttttcttttttagaacattaacctattttactatttcaaaaaaatatagaggtgtaaattaa

SEQ ID NO: 452689 - DNA, 75 bp, synthetic construct
  source 1..75: mol_type = other DNA
tagtctgtccgcactcttaacttttgtaggttacatcatatatgcaaaatggttcactcataaccggctgaaagg

SEQ ID NO: 452690 - DNA, 75 bp, synthetic construct
  source 1..75: mol_type = other DNA
tatgggatgacacggtcgttgcgcagaaatacctgagccactgggcatcacgctgggcacagggaacggactgga

SEQ ID NO: 452691 - DNA, 75 bp, synthetic construct
  source 1..75: mol_type = other DNA
gggatgttccagtcgttgctcaacactatctgcggcactggcagtcccgctggaatggcggtactgactggtatt

SEQ ID NO: 452692 - DNA, 75 bp, synthetic construct
  source 1..75: mol_type = other DNA
atgcttgaagccagagaattactctgcgagcgggatgaacgcactttatttagtggtttgtcatttacgctgaat

SEQ ID NO: 452693 - DNA, 75 bp, synthetic construct
  source 1..75: mol_type = other DNA
gttcttttatttcatacccttaaaacttttctttaataaaaaattaaaattacaattacagcaaaaacaaaggaa

SEQ ID NO: 452694 - DNA, 75 bp, synthetic construct
  source 1..75: mol_type = other DNA
atgaccaaaaaaattaacataaaggatttcagggatgcgtggcttgatgatttttttgaattttcaacaccacat

SEQ ID NO: 452695 - DNA, 75 bp, synthetic construct
  source 1..75: mol_type = other DNA
ttcatctattacaccgagcttcatgtatgtggttgttgcggtcacctgagcgatagcgttcctgaactgagccat

SEQ ID NO: 452696 - DNA, 75 bp, synthetic construct
  source 1..75: mol_type = other DNA
tagcctgtcctcactcttaacttttgtggtttacatcacatatgcaaaatggttcactcataaccgactgaaaga

SEQ ID NO: 452697 - DNA, 75 bp, synthetic construct
  source 1..75: mol_type = other DNA
tgtatttcgcgatgtgttttctgcttttcacaggatggatgttcgccttcgcgcagtatgcgccctataacgggc

SEQ ID NO: 452698 - DNA, 75 bp, synthetic construct
  source 1..75: mol_type = other DNA
ttccctatgcaactagaaaatgcacacaggttgaaaaacgagtagcgattttacgtctgaaagaatgctatggcc

SEQ ID NO: 452699 - DNA, 75 bp, synthetic construct
  source 1..75: mol_type = other DNA
tgtgccgatggtttctgcccggtctgctctctctggcactgtgcgcgccagtaccgactacttacgctgctgtca

SEQ ID NO: 452700 - DNA, 75 bp, synthetic construct
  source 1..75: mol_type = other DNA
tttaatcgcgtcactgcggcaaatgaatttgttgctaaccatgcccaacgcattggcactgcggttggttcaact

SEQ ID NO: 452701 - DNA, 75 bp, synthetic construct
  source 1..75: mol_type = other DNA
gggagataattgatcgcgtttccggtgcaaaagatgctcttggtatgagcgacaagtttattgatacggtcaatg

SEQ ID NO: 452702 - DNA, 75 bp, synthetic construct
  source 1..75: mol_type = other DNA
cgcattgctcagatgctgtcttctggtgatcaatccactcaaaaccaatcgcagccaggagaacaatctctggta

SEQ ID NO: 452703 - DNA, 75 bp, synthetic construct
  source 1..75: mol_type = other DNA
tatggaaatgagtacttatatgaagattatgccctttggttgaaatctttagctaatggatgtaatggtgataat

SEQ ID NO: 452704 - DNA, 75 bp, synthetic construct
  source 1..75: mol_type = other DNA
gaactcaattctgttattgatagttggagaagatatttaaatataaaagatttcacacttgaaaaaaatatgggg

SEQ ID NO: 452705 - DNA, 75 bp, synthetic construct
  source 1..75: mol_type = other DNA
ttcagcaacaaacagttaatcaggccaataatgaaccagcacgggaagaaccatcattgatgcaacaagctggcg

SEQ ID NO: 452706 - DNA, 75 bp, synthetic construct
  source 1..75: mol_type = other DNA
aaatatcaaaatcagatcatgttactgtgattttcacacataatcactgtctgtccagaattgcaaaaaaaatga

SEQ ID NO: 452707 - DNA, 75 bp, synthetic construct
  source 1..75: mol_type = other DNA
tatggatacattggttctgcatcgggaaaatcacaatctcatcctcgacggacatttaaaaacaaacgagcttat

SEQ ID NO: 452708 - DNA, 75 bp, synthetic construct
  source 1..75: mol_type = other DNA
ctacagtctctattctacagacacactccgaacaatgcagacagccacttttttttcgggaggtaagacagcaac

SEQ ID NO: 452709 - DNA, 75 bp, synthetic construct
  source 1..75: mol_type = other DNA
atggtcattggttctctcgctgacgcggcgaatcaacggggtgattttgccgaaaatgccgctattaatgccgga

SEQ ID NO: 452710 - DNA, 75 bp, synthetic construct
  source 1..75: mol_type = other DNA
ttctcattacagcatttatctgtttatatcttaagaaggatatattttatccagccgtatgcgttaatatcatct

SEQ ID NO: 452711 - DNA, 75 bp, synthetic construct
  source 1..75: mol_type = other DNA
gctggatctctgcgagatttatcgctgtctgatgtgctgaatctgaaagcggaatccatgtttacgctgctgtca

SEQ ID NO: 452712 - DNA, 75 bp, synthetic construct
  source 1..75: mol_type = other DNA
ccggagaacgccaccatcgattatactgaacagatgcaggcagagcagattgcactaccggtgcatatcgcggag

SEQ ID NO: 452713 - DNA, 75 bp, synthetic construct
  source 1..75: mol_type = other DNA
gaagtattatcacgctacaacggatactaggtcacacgcggattgagcaaactatggtttacgctcattttgcgc

SEQ ID NO: 452714 - DNA, 75 bp, synthetic construct
  source 1..75: mol_type = other DNA
gcgccagagtaccttcaggacgccatttctcttaatccgctaagaggtggtactgaggccgagagtgtccacaca

SEQ ID NO: 452715 - DNA, 75 bp, synthetic construct
  source 1..75: mol_type = other DNA
ttgaaagcagaaaatatcattcataaccgcgtcacgtttgttaaaacgaaaacaaacaaaccacgcaccgtcccg

SEQ ID NO: 452716 - DNA, 75 bp, synthetic construct
  source 1..75: mol_type = other DNA
ggatatcgcgacgaagctgaacgcttggctgatcagcaggctgagcagttcaaggctatagtgtttgagacactt

SEQ ID NO: 452717 - DNA, 75 bp, synthetic construct
  source 1..75: mol_type = other DNA
ttgctgatgagcagtctgaaattgtaaaaaaaatggtattcgatacactgaaaagaatttatggcaagaacaatg

SEQ ID NO: 452718 - DNA, 75 bp, synthetic construct
  source 1..75: mol_type = other DNA
ggctatcgagacgatgcagaacgcatcgctgatgagcagtccgaacttgttaggaagatggtgtttgatacgctg

SEQ ID NO: 452719 - DNA, 75 bp, synthetic construct
  source 1..75: mol_type = other DNA
aaagcgatttgcggcgttaataaagataactggcgcgtcaccgctgatcgcatgcgttttgatgatatcgattta

SEQ ID NO: 452720 - DNA, 75 bp, synthetic construct
  source 1..75: mol_type = other DNA
tgactattgaatttaaaaccggggatgagtgggttaaagccgtcgaccgggtaagtatgaccttaaccgaaggtg

SEQ ID NO: 452721 - DNA, 75 bp, synthetic construct
  source 1..75: mol_type = other DNA
tccgcgcgataccagacttcggcagcgcgatgccgcataaaagtcgcctcaatacgctgcccggcgctatcccac

SEQ ID NO: 452722 - DNA, 75 bp, synthetic construct
  source 1..75: mol_type = other DNA
aacgaatgacccatgcgcatttcaaatcacgaaatccctcatcagccagtactgcgccacccgaagaagtcaggg

SEQ ID NO: 452723 - DNA, 75 bp, synthetic construct
  source 1..75: mol_type = other DNA
gtacagaaagttctggataacctgtcacagcaaaaacttgttcacagagatgtgctgccgttctcgcttccggta

SEQ ID NO: 452724 - DNA, 75 bp, synthetic construct
  source 1..75: mol_type = other DNA
ataactggcgtgttactgctgatcgtatgcgttttgatgatatcgatttgctgcgtctctccgcacgcgaacggc

SEQ ID NO: 452725 - DNA, 75 bp, synthetic construct
  source 1..75: mol_type = other DNA
agcgtatggcagaacaacaatctgatatggttaagaaaatggtttttgaaacgcttaagaccatgtatagcaata

SEQ ID NO: 452726 - DNA, 75 bp, synthetic construct
  source 1..75: mol_type = other DNA
agacggctatctttgcactcagtgtttcatctattacaccgagcttcatgtatgtggttgttgcggtcacctgag

SEQ ID NO: 452727 - DNA, 75 bp, synthetic construct
  source 1..75: mol_type = other DNA
tgattttgaatgcgaacactgcgactacacttcggataggtataaactgctggatgaggagttgttccacagtgt

SEQ ID NO: 452728 - DNA, 75 bp, synthetic construct
  source 1..75: mol_type = other DNA
ttcaaatcacatacactttcagcaacgacaaaacagttgttgaagctaggctagaagagttatgcaatttgatgc

SEQ ID NO: 452729 - DNA, 75 bp, synthetic construct
  source 1..75: mol_type = other DNA
agatatccgcattctggttgtcctgctgcgctgccgtatccagcagaccggagcctggggactggcggaggcgct

SEQ ID NO: 452730 - DNA, 75 bp, synthetic construct
  source 1..75: mol_type = other DNA
cgcgtgaagaagcgcaatatggcgattttgtcagtacgccggaaaccattaactgggcggagcttgagcgggacg

SEQ ID NO: 452731 - DNA, 75 bp, synthetic construct
  source 1..75: mol_type = other DNA
tgatgaaccagagtccgataccgttgataacggaacacagcattccaggctgacaacgtgtgccaactatttaca

SEQ ID NO: 452732 - DNA, 75 bp, synthetic construct
  source 1..75: mol_type = other DNA
ccttgaagatcttcggaaaattgagcgcgagaacgaggctgcattaagagcaaaagataagtttagcaggttacg

SEQ ID NO: 452733 - DNA, 75 bp, synthetic construct
  source 1..75: mol_type = other DNA
tcacaaggtacatcaataatcctgaacgcacggcaaaagctgcatctcttattgaagaaatagccatcctaaagg

SEQ ID NO: 452734 - DNA, 75 bp, synthetic construct
  source 1..75: mol_type = other DNA
gccgggtgctgcacaagctgtacagcaccggttctatccaggaagcagagatcgctcttgaagcaataaaaactc

SEQ ID NO: 452735 - DNA, 75 bp, synthetic construct
  source 1..75: mol_type = other DNA
cttggaagatcttcaaaaaattcaacgcgagaacgcagcagcagaaaaagccaaagataaggtcaacaagctgcg

SEQ ID NO: 452736 - DNA, 75 bp, synthetic construct
  source 1..75: mol_type = other DNA
acgcacggcaaaagctgcatctcttattgaagaaatagccatcctaaaggacacattgcaggcagtggctgggaa

SEQ ID NO: 452737 - DNA, 75 bp, synthetic construct
  source 1..75: mol_type = other DNA
aatcgtctgaattcactaagatcaatctgcgcgataataatttccttgatgaaattttcggaaagaatttcaggg

SEQ ID NO: 452738 - DNA, 75 bp, synthetic construct
  source 1..75: mol_type = other DNA
ttatggtgacagggttgttttccgtaatcaccatgaccgcaatgcgctggcagataaactggatttgattgcacc

SEQ ID NO: 452739 - DNA, 75 bp, synthetic construct
  source 1..75: mol_type = other DNA
gacactggcgttctcgaagcccgtctgcagaaagatggcagtgtgcgttttcgtgatcggaggaatggcgagtta

SEQ ID NO: 452740 - DNA, 75 bp, synthetic construct
  source 1..75: mol_type = other DNA
atgttgcatagagttttatggaaaagcgttattgtcggcgcgatactggctatatctgggtgtgcaatggtgcaa

SEQ ID NO: 452741 - DNA, 75 bp, synthetic construct
  source 1..75: mol_type = other DNA
tgagttctttaactcccgcgtagtgcgcgacctggatgccttcaaacaagaggcggatgtgattatctctaaccg

SEQ ID NO: 452742 - DNA, 75 bp, synthetic construct
  source 1..75: mol_type = other DNA
actattttttaactcccgcctggagcgcgatctcacggaatttaaaaaacaggctgatgtcattatctcaaatcg

SEQ ID NO: 452743 - DNA, 75 bp, synthetic construct
  source 1..75: mol_type = other DNA
attactttcacaaaaacatgatattatcgctctcgatatagatcctaagaaagttcagttgattaataaaaaaat

SEQ ID NO: 452744 - DNA, 75 bp, synthetic construct
  source 1..75: mol_type = other DNA
tggcatcgcgtccgatcattggaataagaataggtaatgatgttttcttctcaactcatgcattggcaaaccgag

SEQ ID NO: 452745 - DNA, 75 bp, synthetic construct
  source 1..75: mol_type = other DNA
aagaataggtaatgatgttttcttctcaactcatgcattggcaaaccgaggtgaaccgccccgggaatcctggag

SEQ ID NO: 452746 - DNA, 75 bp, synthetic construct
  source 1..75: mol_type = other DNA
gttgagggcttcattgttattcggattattaaggggacaggttgcctctgatcacttcccggttggctttattcc

SEQ ID NO: 452747 - DNA, 75 bp, synthetic construct
  source 1..75: mol_type = other DNA
caaacggatccgataagacaggctgctaactggatgattgcaggcgattttaaccgttctcctgccatgttgttt

SEQ ID NO: 452748 - DNA, 75 bp, synthetic construct
  source 1..75: mol_type = other DNA
aacggtgctgtcgatattctgatggtccaggaggctggttcggtaccatcttcggctacactgactgagcgtgaa

SEQ ID NO: 452749 - DNA, 75 bp, synthetic construct
  source 1..75: mol_type = other DNA
gttgagggcctcgttgttattcggattattaagagggcaaattgcctctgatcactttccagttggctttattcc

SEQ ID NO: 452750 - DNA, 75 bp, synthetic construct
  source 1..75: mol_type = other DNA
gctccgataacttccgtgcctcctccgtacagggcatcatgaaacgtctgaaagcgaaggggataacggtgattg

SEQ ID NO: 452751 - DNA, 75 bp, synthetic construct
  source 1..75: mol_type = other DNA
gaacattatctaaaaaacaaagacctaaatttatatgctaccttagataggtataaagcttatcaagacgcagat

SEQ ID NO: 452752 - DNA, 75 bp, synthetic construct
  source 1..75: mol_type = other DNA
attatgacccgaaaacaaattattttaatacctcaagcgtggaagcggtcatccgtgatgtgacagaaattaatc

SEQ ID NO: 452753 - DNA, 75 bp, synthetic construct
  source 1..75: mol_type = other DNA
atgactgtattggaaagtacgctgtcggtcgagaaccgctatcgccagctttttcgccagcgtctggtaatactg

SEQ ID NO: 452754 - DNA, 75 bp, synthetic construct
  source 1..75: mol_type = other DNA
tcgatccgcgcattggtaaccactataaaaacccgtcgtttggctacggtggttactgcctgccaaaagatacca

SEQ ID NO: 452755 - DNA, 75 bp, synthetic construct
  source 1..75: mol_type = other DNA
atagcagcatggcgcgcgcagcagacgtgcacctgtgtgttaaagtcgcgaaagaagcctgcccactggggctgg

SEQ ID NO: 452756 - DNA, 75 bp, synthetic construct
  source 1..75: mol_type = other DNA
ggccgcaacgtttgccagcaccggtacaccttcatttttcgtccatcctggtgaagccgcgcatggtgatttagg

SEQ ID NO: 452757 - DNA, 75 bp, synthetic construct
  source 1..75: mol_type = other DNA
gaaggggcagtgaagaaggatatcccgacgctgttcaccgactcgaccgaagccgaagctatcaagctattcgcg

SEQ ID NO: 452758 - DNA, 75 bp, synthetic construct
  source 1..75: mol_type = other DNA
tgattggtgagcgttctgaacgtgctgagcgctttgctgccctactgcaggaaggagcaattaagaaagatattc

SEQ ID NO: 452759 - DNA, 75 bp, synthetic construct
  source 1..75: mol_type = other DNA
cgccaaatcatcgaaggcgtttgcctcgacccgcgcatcggcgatcactacaacaatccctcctttggatatggc

SEQ ID NO: 452760 - DNA, 75 bp, synthetic construct
  source 1..75: mol_type = other DNA
tggatccgcgtatcggcaaccattataacaacccgtcctttggctacggcggctactgcctgccaaaagatacca

SEQ ID NO: 452761 - DNA, 75 bp, synthetic construct
  source 1..75: mol_type = other DNA
gtataccgtttggtgatgaaggcaggctctgataatttccgtgcctctgcggtgcagggcgtgatgaaacgtatt

SEQ ID NO: 452762 - DNA, 75 bp, synthetic construct
  source 1..75: mol_type = other DNA
cgccagattattgagggcgtatgccttgacccgcgtatcggtaatcactacaacaacccgtcattcggttatggt

SEQ ID NO: 452763 - DNA, 75 bp, synthetic construct
  source 1..75: mol_type = other DNA
cgggcagcacgctgaagagcaatctgctgattaatatcggctatggcgatagcagcaagctttatgcgcgcctgc

SEQ ID NO: 452764 - DNA, 75 bp, synthetic construct
  source 1..75: mol_type = other DNA
ggttgatcgcaaaagcacctttgatgaattgttcgcactttaccgttatgtgttaaccggcttgttgctggtggc

SEQ ID NO: 452765 - DNA, 75 bp, synthetic construct
  source 1..75: mol_type = other DNA
aactacacgctgtttttcagtaatccgcgcggtacaccgttaacttcgctactggcgatcgcgctggcaatgctc

SEQ ID NO: 452766 - DNA, 75 bp, synthetic construct
  source 1..75: mol_type = other DNA
gtagcagcaaagcgttcaccgtgatcaaaaagatgatgtatgccgatccgcaggcgctgcacgcgctgctcgata

SEQ ID NO: 452767 - DNA, 75 bp, synthetic construct
  source 1..75: mol_type = other DNA
acattgttgattttcggtgaattacacctgatgacgctggtgatgagcatgagcgttatcggcatttccgctgac

SEQ ID NO: 452768 - DNA, 75 bp, synthetic construct
  source 1..75: mol_type = other DNA
ctcaggagtggctgacgctgctgcaaaaatccgctgcgctcggcgacattaaagggccaatggatgccgccagcc

SEQ ID NO: 452769 - DNA, 75 bp, synthetic construct
  source 1..75: mol_type = other DNA
gtggcccgcctcggctggcgcaaagggcttatcagcctggtgccttcggtgctttcgctgggctgcggtctggca

SEQ ID NO: 452770 - DNA, 75 bp, synthetic construct
  source 1..75: mol_type = other DNA
gggcctcgactggacaacggatatcgccgatgcgcgccgccgcgtgggcaataaagtcgcgttgcagggcaatat

SEQ ID NO: 452771 - DNA, 75 bp, synthetic construct
  source 1..75: mol_type = other DNA
actggcgatcacgctggcaatgctcaccaccttgctgacgctgggtatgctggtattcagcgccacccaggccat

SEQ ID NO: 452772 - DNA, 75 bp, synthetic construct
  source 1..75: mol_type = other DNA
agtggcggcgttgtgcgggtttaatgacgttggctatttccggcagatttttcgcaaacacaccggtttaacgcc

SEQ ID NO: 452773 - DNA, 75 bp, synthetic construct
  source 1..75: mol_type = other DNA
ggcggcggacagtggctggaagcgatggcagaaaccggttgcgatgcgctgggcctcgactggacaacggacatc

SEQ ID NO: 452774 - DNA, 75 bp, synthetic construct
  source 1..75: mol_type = other DNA
gggcctcgactggacaacggacatcgccgatgcgcgccgccgcgtgggcaataaagtcgcgttgcagggtaatat

SEQ ID NO: 452775 - DNA, 75 bp, synthetic construct
  source 1..75: mol_type = other DNA
cctgcccgcattgaagaagaagtagcgactatacttgcaggtttcggtcacggcgaaggtcatgtctttaacctt

SEQ ID NO: 452776 - DNA, 75 bp, synthetic construct
  source 1..75: mol_type = other DNA
cgcaatgccttgctactggcgctgctcaccaccgtggcggcgtatctgattatgatgctcgcccccttccccggc

SEQ ID NO: 452777 - DNA, 75 bp, synthetic construct
  source 1..75: mol_type = other DNA
cttctcaggccaaagatctggctggcgtaatgaaggcctctcaaagaggtgatgggtttctccatgatggaggaa

SEQ ID NO: 452778 - DNA, 75 bp, synthetic construct
  source 1..75: mol_type = other DNA
catatttacagtgacccaaatactgtaaattgtgctaattctgtcttcagtggaatggttggtggtgccattaaa

SEQ ID NO: 452779 - DNA, 75 bp, synthetic construct
  source 1..75: mol_type = other DNA
ttgccgaaatgaacttagtaagtggcggcgggcattttggtgatattcatgatgctcagggtgtaggtactggaa

SEQ ID NO: 452780 - DNA, 75 bp, synthetic construct
  source 1..75: mol_type = other DNA
gctgattaatatcggctatggcgattccagcaaactttttgcgcgcctgccacgtctgtcctttgaagaagcctg

SEQ ID NO: 452781 - DNA, 75 bp, synthetic construct
  source 1..75: mol_type = other DNA
aaagagtcagcccccctccccttcgatctaacgtcgctgcaacaatacgcgagcaaacgatggggatacacagct

SEQ ID NO: 452782 - DNA, 75 bp, synthetic construct
  source 1..75: mol_type = other DNA
aaaggcgagcaccatctacatctcaacggactacgaccgagaaggtgaggctatcgcccgttcgcttctggatcg

SEQ ID NO: 452783 - DNA, 75 bp, synthetic construct
  source 1..75: mol_type = other DNA
gttcagctaccggcacgccttacgaactgcgtaagctgatgcgcttcgccgcccgcagtaaggttgcaccaacca

SEQ ID NO: 452784 - DNA, 75 bp, synthetic construct
  source 1..75: mol_type = other DNA
gggcagagcgtcgatcaaaaatggttcgtggtttacggtgactccccacagcaaacattgcggcgactggagaaa

SEQ ID NO: 452785 - DNA, 75 bp, synthetic construct
  source 1..75: mol_type = other DNA
gcgcggcaggaggaagatttacaactgctgaaaacggcggccccgacagtaacaaaagcgctgcaaaatgccggg

SEQ ID NO: 452786 - DNA, 75 bp, synthetic construct
  source 1..75: mol_type = other DNA
aaaatcgcttcgaagtttggaatctcattagaggggcacaaaggaaaacagtttacacctttaatgggtagagac

SEQ ID NO: 452787 - DNA, 75 bp, synthetic construct
  source 1..75: mol_type = other DNA
aggtggattactgcgggatttgccattccgatctgtcgatgatcgataacgaatggggattttcacaatacccgt

SEQ ID NO: 452788 - DNA, 75 bp, synthetic construct
  source 1..75: mol_type = other DNA
ctataaaacttctgcacgcaatgggatgcgaggtgacagcctttagttctaaatccggcgaaagagcaggaagtg

SEQ ID NO: 452789 - DNA, 75 bp, synthetic construct
  source 1..75: mol_type = other DNA
gatgggcgggagccatgaatgacgcctttgaccagtttgaaaacgactttgctgccagacgcataacactgcttt

SEQ ID NO: 452790 - DNA, 75 bp, synthetic construct
  source 1..75: mol_type = other DNA
tactccgcctgggagcgacggagcgaagcccggaaaactgggagcagacccagcagaactatctgtttttggagg

SEQ ID NO: 452791 - DNA, 75 bp, synthetic construct
  source 1..75: mol_type = other DNA
atgcgccaaaaaaactcctcaaaaaatatctttgaaagatacattgataattataataaatggcgagatggtggt

SEQ ID NO: 452792 - DNA, 75 bp, synthetic construct
  source 1..75: mol_type = other DNA
gctacatgaaaaagtgcgtgccgaactgaacgataccgtggtggatattgcgaagcaggtcgagcaaatcctcac

SEQ ID NO: 452793 - DNA, 75 bp, synthetic construct
  source 1..75: mol_type = other DNA
aaggtttcggctttatttctcctgttgatggtagtaaagatgtgtttgtgcatttttctgcgattcagaatgata

SEQ ID NO: 452794 - DNA, 75 bp, synthetic construct
  source 1..75: mol_type = other DNA
gtggcggggcagcgtgccggaaacgacgatgatttcggtgaggccaccaccaccgcgctgcgggcccgcacagag

SEQ ID NO: 452795 - DNA, 75 bp, synthetic construct
  source 1..75: mol_type = other DNA
gcagaagaaatggcagacgcggcgcaaagtgccctgcttgccgccaccggctttgacgccgatctgctcctgcag

SEQ ID NO: 452796 - DNA, 75 bp, synthetic construct
  source 1..75: mol_type = other DNA
tctgcataaagcgattggcgcggtcctgagtgaaagcaatccggcgtccgcccttaatcatctcaaccatgcgtt

SEQ ID NO: 452797 - DNA, 75 bp, synthetic construct
  source 1..75: mol_type = other DNA
gcagaggaaatggcagacgccgcgcagagcgcaatgcttgccaccaccggctttgaagccgatctgttgctgcag

SEQ ID NO: 452798 - DNA, 75 bp, synthetic construct
  source 1..75: mol_type = other DNA
atagtgttatatctccaaaacttaaaaatggaatgcagaaatacattgatatttctctttgtttgaatttggctt

SEQ ID NO: 452799 - DNA, 75 bp, synthetic construct
  source 1..75: mol_type = other DNA
gcagaggaaatggcagatgcagcgcagagcgcaatgcttgccgccaccgactttgatgccgatctgttgctgcag

SEQ ID NO: 452800 - DNA, 75 bp, synthetic construct
  source 1..75: mol_type = other DNA
cgacgccggtgattatgccggtgcgctggaaattgggcgtcatgcgctgcgccatggctgggtgatgccgctggg

SEQ ID NO: 452801 - DNA, 75 bp, synthetic construct
  source 1..75: mol_type = other DNA
cgcgaatggtgctggaagcgcaaaaacatggctgcgtgcgtgaggcgatgattatcacgtccgcgctctccattc

SEQ ID NO: 452802 - DNA, 75 bp, synthetic construct
  source 1..75: mol_type = other DNA
gaaaatcagaaagtcgaattttctattgagcaggggcaacgtggtccctcggcagcgaacgttgttacgctctaa

SEQ ID NO: 452803 - DNA, 75 bp, synthetic construct
  source 1..75: mol_type = other DNA
gttgcgtaagctgatgcgctttgccgcccgcagcaaggttgcgccgactaccgaattgttcccgatgtcgaaaat

SEQ ID NO: 452804 - DNA, 75 bp, synthetic construct
  source 1..75: mol_type = other DNA
caaatctctggacgaaggtcagaaagtgtccttcaccatcgaaagcggtgctaaaggcccggcagctggtaacgt

SEQ ID NO: 452805 - DNA, 75 bp, synthetic construct
  source 1..75: mol_type = other DNA
actacagcgtcgttttgcattacctgagcaattagcaagagaagagtcgccagcccagactcaggccgggaataa

SEQ ID NO: 452806 - DNA, 75 bp, synthetic construct
  source 1..75: mol_type = other DNA
tcgccgaaatcggagtacggataaaatcatggtgttgggtgaagaggctatttttaccacgcaaagtcgcgatcc

SEQ ID NO: 452807 - DNA, 75 bp, synthetic construct
  source 1..75: mol_type = other DNA
ggcgattttctcaatgcttagcgtgctggcgtttatgattttttctcaagcttccgagttgcatcaacgttcaca

SEQ ID NO: 452808 - DNA, 75 bp, synthetic construct
  source 1..75: mol_type = other DNA
cggtctgcgccgcgaactggtgattgctctgattaaatcgttgccgaaaccggtacgccgtaattttgtacccgc

SEQ ID NO: 452809 - DNA, 75 bp, synthetic construct
  source 1..75: mol_type = other DNA
cgcagaaacatggctgtgtaagggaagcgatgattatcacttccgcgctatccattcaggatccgcgtgagcgac

SEQ ID NO: 452810 - DNA, 75 bp, synthetic construct
  source 1..75: mol_type = other DNA
gtcagccgcgaaacgcctgatttgctcaactttgaaaagagcatgttgatcaaagaaggggcggaaaaaatcagc

SEQ ID NO: 452811 - DNA, 75 bp, synthetic construct
  source 1..75: mol_type = other DNA
ggtagtaaagatgtgtttgtgcatttttctgcgattcagaatgataattttcgaaccttatttgaaggtcaaaag

SEQ ID NO: 452812 - DNA, 75 bp, synthetic construct
  source 1..75: mol_type = other DNA
cgtctggcgcgtatggtgctggaagcgcagaaacatggctgcgtgcgtgaggcgatgattatcacgtccgcgctc

SEQ ID NO: 452813 - DNA, 75 bp, synthetic construct
  source 1..75: mol_type = other DNA
tctcgaagcgatccgtgaccaccaggtggtgattgtcgccggagaaacaggttccggtaaaacgacgcagttgcc

SEQ ID NO: 452814 - DNA, 75 bp, synthetic construct
  source 1..75: mol_type = other DNA
tggagctgctgccgaagtacgccgcctgggcagagggtgtcctggctgccggaggcactcaacaggatgacgtgc

SEQ ID NO: 452815 - DNA, 75 bp, synthetic construct
  source 1..75: mol_type = other DNA
ttcgctcaacaacttggtacgccttatccgatttcagataagcgtattttgcaggcgatggagcagattagcggt

SEQ ID NO: 452816 - DNA, 75 bp, synthetic construct
  source 1..75: mol_type = other DNA
caaacagcaggcatcggacgagaaacatcgtcgtttccatgataaagaatccgacttcctcgcgtttgtaaatct

SEQ ID NO: 452817 - DNA, 75 bp, synthetic construct
  source 1..75: mol_type = other DNA
ccattgccagagttgtatcctgtatcagtcctgcaaaatttcacgagtgctttattaactggatgcgtgactgcc

SEQ ID NO: 452818 - DNA, 75 bp, synthetic construct
  source 1..75: mol_type = other DNA
ggcgatgattatcacgtccgcgctctccattcaggatccgcgcgaacgtccgatggataaacagcaggcatcgga

SEQ ID NO: 452819 - DNA, 75 bp, synthetic construct
  source 1..75: mol_type = other DNA
gcatatctggagctttggggaactgccggaaagctacgagcagaagcgtggcaactacaaagtgaaggcgtggcc

SEQ ID NO: 452820 - DNA, 75 bp, synthetic construct
  source 1..75: mol_type = other DNA
tgcgcttaagttatcagtttgagccaggtgcggacgcggacggtgtgaccgtacatattccgctgccgttactaa

SEQ ID NO: 452821 - DNA, 75 bp, synthetic construct
  source 1..75: mol_type = other DNA
gaagacgactgcaaaataagaaaaggaaatgcagcagaattattttcagggatacggcacattgctattaatatt

SEQ ID NO: 452822 - DNA, 75 bp, synthetic construct
  source 1..75: mol_type = other DNA
ttgaatggaaagggctgaagaaattatgcgtggcagtctcctttcggtcgataatagcagaacagcagaacagca

SEQ ID NO: 452823 - DNA, 75 bp, synthetic construct
  source 1..75: mol_type = other DNA
tagaaattgaccatcgtttttccggttttctcgcctgttcaattggcatctggtttagtttccaggcgctggtta

SEQ ID NO: 452824 - DNA, 75 bp, synthetic construct
  source 1..75: mol_type = other DNA
cagggatacggcacattgctattaatattttgggtaatgactccaacttattgatagtgttttatgttcagataa

SEQ ID NO: 452825 - DNA, 75 bp, synthetic construct
  source 1..75: mol_type = other DNA
gaaaagcagccatggagagcctgttcaggattctgtgtaaataccttttctcagaagtggccgtccaggcggtca

SEQ ID NO: 452826 - DNA, 75 bp, synthetic construct
  source 1..75: mol_type = other DNA
attcgcggtaaaaggaaaccaggggcggctaaataaagccttcgaggaaaaatttccgctgaaagaattaaataa

SEQ ID NO: 452827 - DNA, 75 bp, synthetic construct
  source 1..75: mol_type = other DNA
gtggaattatcttggcgagcagcaaaaggcgctttcttcaaacgccttccgtcgcctgtgtcgtaccgattatct

SEQ ID NO: 452828 - DNA, 75 bp, synthetic construct
  source 1..75: mol_type = other DNA
cggcttttgtgggcactgttcccgccgcatggtcgttatgcgaaagccgcgattattcatgactggctgtatgac

SEQ ID NO: 452829 - DNA, 75 bp, synthetic construct
  source 1..75: mol_type = other DNA
ctggcggctggttgagccgtttgaattctggctgacggataaccaggatgatgtgatttatgttccggagggata

SEQ ID NO: 452830 - DNA, 75 bp, synthetic construct
  source 1..75: mol_type = other DNA
acggtgaaaaaagcggaaatcaaagtggagctgttgccgaagtacgccgcctgggcggagggtgtcctggctgcc

SEQ ID NO: 452831 - DNA, 75 bp, synthetic construct
  source 1..75: mol_type = other DNA
agacctgcatcgtgcacctgatccgcaacagcctggactatgcgggctggaaggaccgcaaggcgctggcggcgg

SEQ ID NO: 452832 - DNA, 75 bp, synthetic construct
  source 1..75: mol_type = other DNA
gacgggtacgttcgagccgcagctgatccccaagcacgagcgtcgcttcgccgggttcgacgatcggatcgtctc

SEQ ID NO: 452833 - DNA, 75 bp, synthetic construct
  source 1..75: mol_type = other DNA
cgcagggtgctgatgtatgctgccgtcaggctgtttggtcggggtaattatggagaggtacggtataagccactg

SEQ ID NO: 452834 - DNA, 75 bp, synthetic construct
  source 1..75: mol_type = other DNA
aggggagcgattcatgtcattagtgcgttctcaacaatgcatagtctggtcctcggacagatcaagacggatgag

SEQ ID NO: 452835 - DNA, 75 bp, synthetic construct
  source 1..75: mol_type = other DNA
gagaagatacaaaaacagggaggtgattatttattcgctgtaaaaggaaaccaggggcggctaaataaagccttt

SEQ ID NO: 452836 - DNA, 75 bp, synthetic construct
  source 1..75: mol_type = other DNA
tggagctgctgccgaaatatgccgcctgggcggagggcgtcctggctgccggaggcgctcaacaggatgacgtgc

SEQ ID NO: 452837 - DNA, 75 bp, synthetic construct
  source 1..75: mol_type = other DNA
ggatttcggggaaacacatctcgactcaacaatgcacagtctggtcctcggacagatcaagacggatgagaaatc

SEQ ID NO: 452838 - DNA, 75 bp, synthetic construct
  source 1..75: mol_type = other DNA
aaaggaaaccaggggcggctaaataaagcctttgaggaaaaatttccgctgaaagaattaaataatccagagcat

SEQ ID NO: 452839 - DNA, 75 bp, synthetic construct
  source 1..75: mol_type = other DNA
gaaacgcagcagaattattttcagggatacggcacattgctattattcttttgacgaatgagcaggtattcgagg

SEQ ID NO: 452840 - DNA, 75 bp, synthetic construct
  source 1..75: mol_type = other DNA
cgaaatcaaggttccagtcagttggacaactatcaaaactatttgggctaaagggtgtgagtacttttcaatagt

SEQ ID NO: 452841 - DNA, 75 bp, synthetic construct
  source 1..75: mol_type = other DNA
atgcctgaaaagggccagaacgtgcttatttcggtgaatttcgatagctatctggttgaaccgctaatatgctcc

SEQ ID NO: 452842 - DNA, 75 bp, synthetic construct
  source 1..75: mol_type = other DNA
ccagtcgaaaccggagcatggaaagacgctgttgactgggtgctcaaagaggcttgccaggctgtaaacattggc

SEQ ID NO: 452843 - DNA, 75 bp, synthetic construct
  source 1..75: mol_type = other DNA
ctggtttaatgatggcaatccaacttgggatgacggtgatggcgaagacctgtatctcaaagaggtaacccactg

SEQ ID NO: 452844 - DNA, 75 bp, synthetic construct
  source 1..75: mol_type = other DNA
ccagcaatacataaaacaccgcgaccaggagaacgaggagattgcgcttacggttgggaagctgcgcgttgagct

SEQ ID NO: 452845 - DNA, 75 bp, synthetic construct
  source 1..75: mol_type = other DNA
attacaaaaaatatagagctttcacgtatttatcaggaaatatcttggatgacgtaactcactggatgccgctac

SEQ ID NO: 452846 - DNA, 75 bp, synthetic construct
  source 1..75: mol_type = other DNA
tcccgcatcacgtgcacactccacgctacaatcgccaacaattgaaatcgcgtatcgttcattttggctttggcg

SEQ ID NO: 452847 - DNA, 75 bp, synthetic construct
  source 1..75: mol_type = other DNA
taccgcaacgcatgctggcaggtattcgcatacatctggggcgcgaaacggactggtcgttgctggcattaggcg

SEQ ID NO: 452848 - DNA, 75 bp, synthetic construct
  source 1..75: mol_type = other DNA
ccgtgctctcctgcgacaatattcccgacaatggccatgtggtgaaaaacgcggtgctgggaatggcagaaaaac

SEQ ID NO: 452849 - DNA, 75 bp, synthetic construct
  source 1..75: mol_type = other DNA
cacgataaaattcacgatctcgttgcgaacagcaacaatgagcaacgcgttaccgccctgctttctttacgtgaa

SEQ ID NO: 452850 - DNA, 75 bp, synthetic construct
  source 1..75: mol_type = other DNA
acccgcattttgtgcaggccatcgaacaagcctggcaacaaatcgcacaattcggcgcgcatcaggcgctattaa

SEQ ID NO: 452851 - DNA, 75 bp, synthetic construct
  source 1..75: mol_type = other DNA
cgtcagctttccgggcacgatggttgatcgcattgttccggcagcaaccgacgaatcgctggcggaaattagccg

SEQ ID NO: 452852 - DNA, 75 bp, synthetic construct
  source 1..75: mol_type = other DNA
ttaagtcaggtatagccggtctgatacacctcggtattcgatatgcagatgttgagatcatgagaattgctggag

SEQ ID NO: 452853 - DNA, 75 bp, synthetic construct
  source 1..75: mol_type = other DNA
aaggggaactgtatctggtcgacgagagcgggcaagacgtttgcttccgcattgaattaccgtcgtcgaaaaaca

SEQ ID NO: 452854 - DNA, 75 bp, synthetic construct
  source 1..75: mol_type = other DNA
agcctggcaaagcctgaatgcgcttagcgaccaggcggcgctggtcaaccgcactacgcttatcgatgcccggcg

SEQ ID NO: 452855 - DNA, 75 bp, synthetic construct
  source 1..75: mol_type = other DNA
ggtctgggattaagcattgccagggattgtattcgccgtatgcaaggggaactgtatctggtcgacgagagcggg

SEQ ID NO: 452856 - DNA, 75 bp, synthetic construct
  source 1..75: mol_type = other DNA
gcaatttgcaaaaactgatcgaacaactgcttgattacaaccgtaaacaggcggacggtgcggtggaactggaga

SEQ ID NO: 452857 - DNA, 75 bp, synthetic construct
  source 1..75: mol_type = other DNA
ttcagtgtaacaacagtggtcccgatgctgctgccgccgcgcgtctggaagcctttgccagtgccaataccgaaa

SEQ ID NO: 452858 - DNA, 75 bp, synthetic construct
  source 1..75: mol_type = other DNA
actgcttgattacaaccgtaaacaggcggacggcgcggtggagctggagaacgtagagctggcaccgctggtaga

SEQ ID NO: 452859 - DNA, 75 bp, synthetic construct
  source 1..75: mol_type = other DNA
atcttcaggatgctgtttcactcaatccgctacgtggtggcgttgactccatgagtgtccacactgtgtccacag

SEQ ID NO: 452860 - DNA, 75 bp, synthetic construct
  source 1..75: mol_type = other DNA
cactttatgattaacggcgggagtatcatcaccctgcagagaatactgggacattcacgcatagagcagacaatg

SEQ ID NO: 452861 - DNA, 75 bp, synthetic construct
  source 1..75: mol_type = other DNA
cacccgaaatgacgtatctcaccacggaagaaatcgccaaattactggatgcagtaagcggtgatgcccggcgga

SEQ ID NO: 452862 - DNA, 75 bp, synthetic construct
  source 1..75: mol_type = other DNA
tggttcaagccactcgcactgtggtgttctctcgcgggcagcagttacaacgcgaaatcgccgaacgtgggcaat

SEQ ID NO: 452863 - DNA, 75 bp, synthetic construct
  source 1..75: mol_type = other DNA
tgatgcctcatatccgaagttcaggcgaacaatgaaagatgtaaaaccagatctaccgagcctgtacatagattt

SEQ ID NO: 452864 - DNA, 75 bp, synthetic construct
  source 1..75: mol_type = other DNA
cactgatgacccttgcgcgttccagataaccaaagcgcttattagccagtacagcatgactcgcagagggcaagg

SEQ ID NO: 452865 - DNA, 75 bp, synthetic construct
  source 1..75: mol_type = other DNA
tcccgcagcacgtacactcgccctgctacgatcggcaacaattgaaatcccgtatcgttcattttgggtttggag

SEQ ID NO: 452866 - DNA, 75 bp, synthetic construct
  source 1..75: mol_type = other DNA
aactcgattaccagccggaacgcgataatgcttttctgttcgaactgaaagcatctgtcaatgaagattctgaaa

SEQ ID NO: 452867 - DNA, 75 bp, synthetic construct
  source 1..75: mol_type = other DNA
ctatcacctgcgttaaggtagttgagacgtttccctcaagaccaaaaaactatattgagacgccttcatttcgtc

SEQ ID NO: 452868 - DNA, 75 bp, synthetic construct
  source 1..75: mol_type = other DNA
aatggggttttctgaaacgcatctcagatgctacgtcctacatgacgacgaagatggccagcacatccatatcat

SEQ ID NO: 452869 - DNA, 75 bp, synthetic construct
  source 1..75: mol_type = other DNA
cttcaacgttcagatggttagagaccatcccctatctcaataccatcattaccatcttcaaaaacctcaaaatcc

SEQ ID NO: 452870 - DNA, 75 bp, synthetic construct
  source 1..75: mol_type = other DNA
gtcaggtaggttgcatgaaagggatgcaaaaaatcaaaagaggaaaaacctttaatggacttatttcttatttat

SEQ ID NO: 452871 - DNA, 75 bp, synthetic construct
  source 1..75: mol_type = other DNA
gaatttgatagcaccaaacagcttcgccctgacgtgcaaaaggctgtttggcacaactcgcttcgcttacctaaa

SEQ ID NO: 452872 - DNA, 75 bp, synthetic construct
  source 1..75: mol_type = other DNA
cgctgctatatcatgcacgatgatccggatgggcagcatattcatatcattgcaagtcgtattaacatggtcggt

SEQ ID NO: 452873 - DNA, 75 bp, synthetic construct
  source 1..75: mol_type = other DNA
cggcatatcctcgccgtcaaaaagacgacggctgcggtattccacggtcggcctgacccgttaccggccggacgc

SEQ ID NO: 452874 - DNA, 75 bp, synthetic construct
  source 1..75: mol_type = other DNA
atggtgtttttttggtgtgtatttgggtatgttttgggttttaagtgggtttatttgtcaagtttaccccatttt

SEQ ID NO: 452875 - DNA, 75 bp, synthetic construct
  source 1..75: mol_type = other DNA
gcagctcagaagataaaagcaattcccaacagggcttcaaccggaaaaatgaacggtttttcgtttgagtacgcc

SEQ ID NO: 452876 - DNA, 75 bp, synthetic construct
  source 1..75: mol_type = other DNA
aaaaccttataagcacacggatcattagtgaactcgaaatggctcacggtctgacagtgaccaaagtgaccaaga

SEQ ID NO: 452877 - DNA, 75 bp, synthetic construct
  source 1..75: mol_type = other DNA
tgttacatgccactgcacatcctttccaccaaatcctccacctacatattctgacaccctgtcatcccatgacaa

SEQ ID NO: 452878 - DNA, 75 bp, synthetic construct
  source 1..75: mol_type = other DNA
tgagaatggtagagattacgcctctcccccaaaaaaatctcattgaatcagcacctcaatccagaagagcttcgc

SEQ ID NO: 452879 - DNA, 75 bp, synthetic construct
  source 1..75: mol_type = other DNA
aaataagaagaggaaatgcagcagaattattttcagggatacggcacatcgctattaatattttgacgaatgata

SEQ ID NO: 452880 - DNA, 75 bp, synthetic construct
  source 1..75: mol_type = other DNA
atggcatgggatatggcgcttggctggattatctggtgtcaccgcgccgccatgcttcagggaggccaacctgta

SEQ ID NO: 452881 - DNA, 75 bp, synthetic construct
  source 1..75: mol_type = other DNA
aaccttaactggcatatggcatggagtaacccactggatgcctctaccagaaccgccgcaggaggttaaccgtgg

SEQ ID NO: 452882 - DNA, 75 bp, synthetic construct
  source 1..75: mol_type = other DNA
cgaccataaaatccatctgggataaaggtattgcgtattttgcagcagaaccgccgcaggaggttaaccttggct

SEQ ID NO: 452883 - DNA, 75 bp, synthetic construct
  source 1..75: mol_type = other DNA
tgcgtgaggcggcagaacgtgcaattccagcaatggaacgcctgttaatgttgccagctgatgatgatttgttaa

SEQ ID NO: 452884 - DNA, 75 bp, synthetic construct
  source 1..75: mol_type = other DNA
aaatccgtcttcacattgtttgcgatgtccctgatgaacttattgatttcacgtttgaatggaaaggtctgaaga

SEQ ID NO: 452885 - DNA, 75 bp, synthetic construct
  source 1..75: mol_type = other DNA
gtgagctatgcccaaaagcaatcatccaaaacgcccttgatgaactgcttgataccaggcaatcgattaccgact

SEQ ID NO: 452886 - DNA, 75 bp, synthetic construct
  source 1..75: mol_type = other DNA
aatggggttctctgaaacgcatctcagatgctacatcctacatgacgacgaagacggccagcacatccatatcat

SEQ ID NO: 452887 - DNA, 75 bp, synthetic construct
  source 1..75: mol_type = other DNA
gacccgtgccacgttatggatcctcgacgagccttttaccgcgattgacgttaacggcgtcgatcgtctgaccca

SEQ ID NO: 452888 - DNA, 75 bp, synthetic construct
  source 1..75: mol_type = other DNA
taatcgaagggatggaagtttccattgatgtaagcacttgtgatgctgatttaggtaatcgctatttcggcaccg

SEQ ID NO: 452889 - DNA, 75 bp, synthetic construct
  source 1..75: mol_type = other DNA
aaacttacaagttgaaccagctatcgggcaattctccggtaactccggatggttggataagctgtagtgagcgga

SEQ ID NO: 452890 - DNA, 75 bp, synthetic construct
  source 1..75: mol_type = other DNA
tatgggcttctctgagacgcatctacgcgcttatgtcctgcatgatgataaagatggccaacatatccatatagt

SEQ ID NO: 452891 - DNA, 75 bp, synthetic construct
  source 1..75: mol_type = other DNA
ctctgaaactgtccggaaaaatccacaaacagcctgaaagtattgcccgaagtcgtggcgacccccctcccaaaa

SEQ ID NO: 452892 - DNA, 75 bp, synthetic construct
  source 1..75: mol_type = other DNA
cactgaaactgtccggaaaaatccacaaacagcatgaaagtattgcccgaagtcgtggcgaccccccgcccaaaa

SEQ ID NO: 452893 - DNA, 75 bp, synthetic construct
  source 1..75: mol_type = other DNA
tctaccgtgaaattatatggttctgctccggttacctgcggaaatccggaccagaggctacgaggacgatcatca

SEQ ID NO: 452894 - DNA, 75 bp, synthetic construct
  source 1..75: mol_type = other DNA
ttctggctgacggaggagcctggtttgcacaacaaatcagccaacggatacgcgacaaaatcggcgaatcggttg

SEQ ID NO: 452895 - DNA, 75 bp, synthetic construct
  source 1..75: mol_type = other DNA
cgctgaaactgtccggaaaaatccacaaacagcgtgaaagtattgcccgaagtcgtggcgaccccccccccaaaa

SEQ ID NO: 452896 - DNA, 75 bp, synthetic construct
  source 1..75: mol_type = other DNA
ccctgaaactgtccggaaaaatccacaaacagcttgaaagtattgcccgaagtcgtggcgacccccctcccaaaa

SEQ ID NO: 452897 - DNA, 75 bp, synthetic construct
  source 1..75: mol_type = other DNA
ggctcgctggaaagcgatcagcgcccgtctgaatcagttacatgaacgctggcaggaagagaaagcaggtcacta

SEQ ID NO: 452898 - DNA, 75 bp, synthetic construct
  source 1..75: mol_type = other DNA
atccgtgaaaataaactcgacgccattatgcctgcgcatgtgatctacagtgatgtcgatccgcgtccggcgagt

SEQ ID NO: 452899 - DNA, 75 bp, synthetic construct
  source 1..75: mol_type = other DNA
ggatatgtcggtattcagcgcattaatccgtgaaaataaactcgacgccattatgcctgcgcatgtgatctacag

SEQ ID NO: 452900 - DNA, 75 bp, synthetic construct
  source 1..75: mol_type = other DNA
tagcaatggctgagaccgagctcaaatacggaaaagatccgaaaatgagaaagctcgcgcaggacatcattaaag

SEQ ID NO: 452901 - DNA, 75 bp, synthetic construct
  source 1..75: mol_type = other DNA
gcggaagatatgcgtgaagtactgggtgaaatacgtgagatgaatatgcttgcccaggcagatatctttgatttg

SEQ ID NO: 452902 - DNA, 75 bp, synthetic construct
  source 1..75: mol_type = other DNA
gcaccagctgtccgtatatcgatgctgtaaaacggcacaaacaacagctcggtgccatagaggaatatacaaagt

SEQ ID NO: 452903 - DNA, 75 bp, synthetic construct
  source 1..75: mol_type = other DNA
gaccgatggcgcgatctggcgacacaagccacgcaaacgcgccactatgaaccgccccgggtttcctggagagtg

SEQ ID NO: 452904 - DNA, 75 bp, synthetic construct
  source 1..75: mol_type = other DNA
aaccgggaaaccggaatattaaccgcgcgacccggcgcacaactactggcagtgaccagcggcggcacgatacct

SEQ ID NO: 452905 - DNA, 75 bp, synthetic construct
  source 1..75: mol_type = other DNA
ttcgccgctcgtttccgtgaatgtgccgcgcgggcattgctgatgcccggccgcacgccggggcatcgcacgcca

SEQ ID NO: 452906 - DNA, 75 bp, synthetic construct
  source 1..75: mol_type = other DNA
tctctaaagaacaacgagcaatcaccgaacaggcgctgaaatcgggcgaattacgctgcgtggtctccacttcca

SEQ ID NO: 452907 - DNA, 75 bp, synthetic construct
  source 1..75: mol_type = other DNA
agatgtttatgatcttcccgcgctggaacgtttgatgcgtcgcctgaacggtggcgaaattcaaatatccgatgt

SEQ ID NO: 452908 - DNA, 75 bp, synthetic construct
  source 1..75: mol_type = other DNA
cgacctgctgcgcgagctggggccaatgaccgttgatgacctgatgcaacgacatacgggcagccgtgaagaaat

SEQ ID NO: 452909 - DNA, 75 bp, synthetic construct
  source 1..75: mol_type = other DNA
ttcgccgcccgctttcgtgaatgcgccgcccgggcattgctgatgccaggtcgcactccggggcatcgcaccccg

SEQ ID NO: 452910 - DNA, 75 bp, synthetic construct
  source 1..75: mol_type = other DNA
ttactggcaaccggtgcggttatctggtcggggcaaaaaaaactgggtgaagatgacggcctggtggcactgcat

SEQ ID NO: 452911 - DNA, 75 bp, synthetic construct
  source 1..75: mol_type = other DNA
caatctactcggacaggtcgatccgggggaattactcgacccgcaggtcattcgccaggtggaagaagagttgca

SEQ ID NO: 452912 - DNA, 75 bp, synthetic construct
  source 1..75: mol_type = other DNA
agcgaattggcctttctgccactgtgcgctcagccagcgatgtggcagcatttcttggtggcgatcgcccggtta

SEQ ID NO: 452913 - DNA, 75 bp, synthetic construct
  source 1..75: mol_type = other DNA
cccgcgtgcgccgtgccgcaccgtggaaagatctaccgaggcgcgtttttgacaccacgctggatatgctttccg

SEQ ID NO: 452914 - DNA, 75 bp, synthetic construct
  source 1..75: mol_type = other DNA
gaatcggttgatctctctgccctgcaagaggcgttatgggcgctggtctggcaaggcgtcatcaccagcgacatt

SEQ ID NO: 452915 - DNA, 75 bp, synthetic construct
  source 1..75: mol_type = other DNA
catccctgccggaccttttttcatcggcaacccgcaactggtttctccgtgcattcaggcaaccgaccaccgtcc

SEQ ID NO: 452916 - DNA, 75 bp, synthetic construct
  source 1..75: mol_type = other DNA
acacgtttgtatcataaaggttcattttcgcgacaggagctgatggactcggctcgctggaaagagatcagcgcc

SEQ ID NO: 452917 - DNA, 75 bp, synthetic construct
  source 1..75: mol_type = other DNA
gcgcgaaaaaattcgcccactccaatggtcaactgaacgacaccctgaccgaagtcgcggatggcacgctgcgcg

SEQ ID NO: 452918 - DNA, 75 bp, synthetic construct
  source 1..75: mol_type = other DNA
aggttgaaatggtgtcgggggaacgtaataacaatcctcttaagttcgttgtaacaagctacgttcgcgataaag

SEQ ID NO: 452919 - DNA, 75 bp, synthetic construct
  source 1..75: mol_type = other DNA
accaaaacttgtttataacaaagcagaaaaaacggcaatggttcaggataatccatctgtcataatttcaccttc

SEQ ID NO: 452920 - DNA, 75 bp, synthetic construct
  source 1..75: mol_type = other DNA
cgctgttaacacgccagccgcgactgcctgttcgtctgcatcgcccttaccttgccgccaatcttaaccgtaagc

SEQ ID NO: 452921 - DNA, 75 bp, synthetic construct
  source 1..75: mol_type = other DNA
cgagctgaataccgtcggcgctatgagatgctcgacgccattcagccacagatggcaacgatgtttcgcggttaa

SEQ ID NO: 452922 - DNA, 75 bp, synthetic construct
  source 1..75: mol_type = other DNA
cggataccctgctatcaacggagggtacgccacactatccgggaatgactcaccggcaccaacttgcagacaccg

SEQ ID NO: 452923 - DNA, 75 bp, synthetic construct
  source 1..75: mol_type = other DNA
ggctgctattttgcgaacccggagcaattaaaataatgacgacagaaccgcatactgccactccagttgtgacgc

SEQ ID NO: 452924 - DNA, 75 bp, synthetic construct
  source 1..75: mol_type = other DNA
atagcgccatttatctcattgaattttatttcaagcatcttatatataaacttgaatcccttcgggaaatatccc

SEQ ID NO: 452925 - DNA, 75 bp, synthetic construct
  source 1..75: mol_type = other DNA
accatggtcgggattgccgtcgggattcagtttctggctacggtgctgacgcgtggctatgccgggcgactggcc

SEQ ID NO: 452926 - DNA, 75 bp, synthetic construct
  source 1..75: mol_type = other DNA
acactgttttccctgttaacaatttctttgtcgctttaactcttgtgtcttctctgcttaactctgtcggaatat

SEQ ID NO: 452927 - DNA, 75 bp, synthetic construct
  source 1..75: mol_type = other DNA
aaaaactggataaatggctcagagaaaatatcatccgggtaaaaggatacgaatatcaaaaaagccatatactac

SEQ ID NO: 452928 - DNA, 75 bp, synthetic construct
  source 1..75: mol_type = other DNA
tggctttctggcccggttgctattttgcgaacccggagcaattaaaataatgacgacagaaccgcatactgccac

SEQ ID NO: 452929 - DNA, 75 bp, synthetic construct
  source 1..75: mol_type = other DNA
atcgccagcaaaaaacgggctgaatatcgtcgacgctatgagatgctcgacacaattcagccacaaatggcgaca

SEQ ID NO: 452930 - DNA, 75 bp, synthetic construct
  source 1..75: mol_type = other DNA
atgaaactgggatttattggcttaggcattatgggtacaccgatggccattaatctggcacgtgctggtaatcaa

SEQ ID NO: 452931 - DNA, 75 bp, synthetic construct
  source 1..75: mol_type = other DNA
ctgcaaagtggcgaaccagattatcgtggcgctcaatattgaagcggtttctgaagccctgttgtttgcttcgaa

SEQ ID NO: 452932 - DNA, 75 bp, synthetic construct
  source 1..75: mol_type = other DNA
tgaagggcaaaaccattgttgatatgagttctatttcaccgattgaaactaaacgttttgctcgtcaggtaaatg

SEQ ID NO: 452933 - DNA, 75 bp, synthetic construct
  source 1..75: mol_type = other DNA
gcagcttcccgcaatcatctggtggtggcggtggatcaggaaggtggtcgcgtgcaacgctttcgtgaaggtttt

SEQ ID NO: 452934 - DNA, 75 bp, synthetic construct
  source 1..75: mol_type = other DNA
ttctttcctgcacaaatttccgagcagctatcccacgctcgcggggtgatcgagcgccatctggctgcaacgctg

SEQ ID NO: 452935 - DNA, 75 bp, synthetic construct
  source 1..75: mol_type = other DNA
tgaacgtgtaaaaccgctgtttgaactgctcggtaaaaatatcaccctcgtgggcggtaacggcgacggtcaaac

SEQ ID NO: 452936 - DNA, 75 bp, synthetic construct
  source 1..75: mol_type = other DNA
gagctccatttccccgattgaaactaagcgtttcgctcgtcaggtgaatgaactgggcggcgattatctcgatgc

SEQ ID NO: 452937 - DNA, 75 bp, synthetic construct
  source 1..75: mol_type = other DNA
ccatgcggactataacgcgttctgggagtcggttggcggcgaatgcgatgccgaacggcattaccgacttcctgg

SEQ ID NO: 452938 - DNA, 75 bp, synthetic construct
  source 1..75: mol_type = other DNA
tgatctcaatggataaagaaggtgacagcacaatcctgttccgcaacagcgaaggtattcctctggcagagatca

SEQ ID NO: 452939 - DNA, 75 bp, synthetic construct
  source 1..75: mol_type = other DNA
gtatgattaaacgcacctttaatccaggtttcaaaattgcgctgcaccagaaagatctcaacctggcactgcaaa

SEQ ID NO: 452940 - DNA, 75 bp, synthetic construct
  source 1..75: mol_type = other DNA
ggcaaacggtggcagccagttggatcactctgcgttagtgcaggcgctggaattaatggctaaccataaactggc

SEQ ID NO: 452941 - DNA, 75 bp, synthetic construct
  source 1..75: mol_type = other DNA
tggttggcggtgatgaagcggtatttgaacgtgttaaaccgctgtttgaactgctcggtaaaaatatcaccctcg

SEQ ID NO: 452942 - DNA, 75 bp, synthetic construct
  source 1..75: mol_type = other DNA
atgatcacggctcgtctggctaacagcaatgtcagcgatgctcagccaatggcgtttgtggcggataaagacaga

SEQ ID NO: 452943 - DNA, 75 bp, synthetic construct
  source 1..75: mol_type = other DNA
ggtatggctgcgtggctgctatggtaacggctatcctgtcgatgccttccgccacaaatctctggtggtcattgc

SEQ ID NO: 452944 - DNA, 75 bp, synthetic construct
  source 1..75: mol_type = other DNA
ccgttgctgaactgggcatttttgcaggctaattgggttggctcaacgcgtgccgactgcacaaaagccggtgcc

SEQ ID NO: 452945 - DNA, 75 bp, synthetic construct
  source 1..75: mol_type = other DNA
acgtcgcgaatgccgaaatcacgctggcagcctcgaaggatccggtgattgccgacaataacgatctcacgacac

SEQ ID NO: 452946 - DNA, 75 bp, synthetic construct
  source 1..75: mol_type = other DNA
agcgtgatcaattatggtgtcagtgatacgaaacaggtgacgttgattggcgatccgggtaccgctcaactgacc

SEQ ID NO: 452947 - DNA, 75 bp, synthetic construct
  source 1..75: mol_type = other DNA
agcaaaagcaatactaacgacagtggtgtggccgaagttacctttaagggcacggttttgggtgttcatacagcc

SEQ ID NO: 452948 - DNA, 75 bp, synthetic construct
  source 1..75: mol_type = other DNA
aacagcagcagctacagcctgtccacggactgaccagtagaaatgagcattcgcaggcgtgttgtgagttatgtc

SEQ ID NO: 452949 - DNA, 75 bp, synthetic construct
  source 1..75: mol_type = other DNA
ttacgcccggacattttgcaggcgctgaaccgcctttccagcacggtctacgtgatgatgatcctgagcgtaacg

SEQ ID NO: 452950 - DNA, 75 bp, synthetic construct
  source 1..75: mol_type = other DNA
ggcagccgtggctggcggatatccgttcgcgtcttggcaatattatgcgcgccgatgcgctgggggaaccgctgg

SEQ ID NO: 452951 - DNA, 75 bp, synthetic construct
  source 1..75: mol_type = other DNA
aaaatggtcgccaaaagcgatccgcgcctgggttttcgcgcggttctcgacagcaccattgcgctggcagtgtgg

SEQ ID NO: 452952 - DNA, 75 bp, synthetic construct
  source 1..75: mol_type = other DNA
ggtgtttatcacccgcagttttgaagtattacgcccggacatcttgcaggcgctgaaccgcctttccagcacggt

SEQ ID NO: 452953 - DNA, 75 bp, synthetic construct
  source 1..75: mol_type = other DNA
acgatcatctggtgccggaagccagccacgggcgcgatgcggcgttgctgaatctgctacgcaccaaagtgcggg

SEQ ID NO: 452954 - DNA, 75 bp, synthetic construct
  source 1..75: mol_type = other DNA
gtggtgacgaataacagtgacagcgtgcagcttacggcgatggtgaaagatccgtcgaatcatccggtggcgggg

SEQ ID NO: 452955 - DNA, 75 bp, synthetic construct
  source 1..75: mol_type = other DNA
ctgatgctgccggggaaaggcgtaacgaaaaaacagcctccgttaccggacagcaagtaggctgaatggagttta

SEQ ID NO: 452956 - DNA, 75 bp, synthetic construct
  source 1..75: mol_type = other DNA
tgccgtggcgcagacgggcggcggctctggtggtgatggtggcgacgtttgtctcgctgattgctgccgggtgga

SEQ ID NO: 452957 - DNA, 75 bp, synthetic construct
  source 1..75: mol_type = other DNA
gagcgtggccgtcagttttgtcgccacctgggcgattctggcgacggttatctgtgtggttgccggtggtgtcgg

SEQ ID NO: 452958 - DNA, 75 bp, synthetic construct
  source 1..75: mol_type = other DNA
tgggcaagacgccgatcgtagttaacgactgcccgggcttcttcgttaaccgcgtgctgttcccgtacttcgctg

SEQ ID NO: 452959 - DNA, 75 bp, synthetic construct
  source 1..75: mol_type = other DNA
gccgaagcgcgatttcagcgaagaagagattatcgcacgcatgatgatcccgatggtcaacgaagtggtgcgctg

SEQ ID NO: 452960 - DNA, 75 bp, synthetic construct
  source 1..75: mol_type = other DNA
ggcgtgtatgccactgagtatgtactggagcgctacgggcgggagctgccgccggaatcgatggtcgtgaagatt

SEQ ID NO: 452961 - DNA, 75 bp, synthetic construct
  source 1..75: mol_type = other DNA
taaagctcacgttaacgaccagtttggcaacccggttgcgcatcaacccgtgacattcagtgcagagccatcctc

SEQ ID NO: 452962 - DNA, 75 bp, synthetic construct
  source 1..75: mol_type = other DNA
tcacgacactaacagcaacagtcgctgatacagagggcaatgcgatagccaacactgaggtaacatttactctgc

SEQ ID NO: 452963 - DNA, 75 bp, synthetic construct
  source 1..75: mol_type = other DNA
aggctgaagttacactgagcggtacaaaatccggcacctaccccgtgacagttagcgtgaacaattatggtgtca

SEQ ID NO: 452964 - DNA, 75 bp, synthetic construct
  source 1..75: mol_type = other DNA
tgatttacctcgtggcgtcggtgtttttccggctgatacgcacggcctgtcgtcagcgtcttgaggggcgggaat

SEQ ID NO: 452965 - DNA, 75 bp, synthetic construct
  source 1..75: mol_type = other DNA
ggcgtcgctgtttttccggttgatgcatacggcctgccgccagcgtcttgaggggcggaaaccatgtcaaggctg

SEQ ID NO: 452966 - DNA, 75 bp, synthetic construct
  source 1..75: mol_type = other DNA
aagacaaaaaagaatacagcgccccactgaagcccggctaccgcagcctgattcattctccgtctggtgttctcg

SEQ ID NO: 452967 - DNA, 75 bp, synthetic construct
  source 1..75: mol_type = other DNA
cccggatttcgaaatgggggaatacaagcgccaggatctggtttacgagaaagaggatctgctaatctccggtcc

SEQ ID NO: 452968 - DNA, 75 bp, synthetic construct
  source 1..75: mol_type = other DNA
tgaagcctttgacctgatgaaacagcgtggctatcggtctgaatttgaccgtgaggattggtcaatccctgcggg

SEQ ID NO: 452969 - DNA, 75 bp, synthetic construct
  source 1..75: mol_type = other DNA
gtggttaaaaaaagaaccacgggcatcttattttttctgttccggctgtatacccgcattcacaatacatttttc

SEQ ID NO: 452970 - DNA, 75 bp, synthetic construct
  source 1..75: mol_type = other DNA
caaacagcttgaaagtattgcccgaagtcgtggtgtcctcccaaaaaaactgctgaatgaaagtaaccggctcat

SEQ ID NO: 452971 - DNA, 75 bp, synthetic construct
  source 1..75: mol_type = other DNA
gtgatctcgttgttttgcccgcatatcgtagtgaccccggtctggtcgtgctgaataaaacatgtagcgactttg

SEQ ID NO: 452972 - DNA, 75 bp, synthetic construct
  source 1..75: mol_type = other DNA
ttcttcgacaagattgaactgaaggcccgcaatgttcgcgttaagccgttccgggcttatgttgaaaaccactgg

SEQ ID NO: 452973 - DNA, 75 bp, synthetic construct
  source 1..75: mol_type = other DNA
gtggagttagtggtgcggaaaaataccggtgtaacattaacacctgccggtcaattgttactctcccgttccgaa

SEQ ID NO: 452974 - DNA, 75 bp, synthetic construct
  source 1..75: mol_type = other DNA
gatgcgcaccgtgcatccggataaaatctaccgtgaaattatatggttctgctccggttacctgctgaaatccgg

SEQ ID NO: 452975 - DNA, 75 bp, synthetic construct
  source 1..75: mol_type = other DNA
aatcgggaaagtggaatattaactgcgcgtcctggcgcccaacttttggcggtgaccagcggtggcaccattccg

SEQ ID NO: 452976 - DNA, 75 bp, synthetic construct
  source 1..75: mol_type = other DNA
tgtggagtgtatgttcgctggcaagctggaaagcctgacaccaccgcataatccactcgacgttctggcgcagca

SEQ ID NO: 452977 - DNA, 75 bp, synthetic construct
  source 1..75: mol_type = other DNA
gccacgggttttccatcgcaaccgaagattgccggtcccagagaaaagccgatgcgcaccgtgcatccggataaa

SEQ ID NO: 452978 - DNA, 75 bp, synthetic construct
  source 1..75: mol_type = other DNA
ttcttcttgatgagctgaaaagtgcccgggagcaacaaaaaaggcgtgatgaacgtgctgatggttccgtccctc

SEQ ID NO: 452979 - DNA, 75 bp, synthetic construct
  source 1..75: mol_type = other DNA
aagctgttcttcttgatgagctgaaaagtgcccgggagcaacaaaaaagcgtgatgagcgtgctgatggttccgt

SEQ ID NO: 452980 - DNA, 75 bp, synthetic construct
  source 1..75: mol_type = other DNA
tcggcggtgtggctgatgcacgacccggcatacccggagagcctgcccgctgcgccactggtgcggtacacgtat

SEQ ID NO: 452981 - DNA, 75 bp, synthetic construct
  source 1..75: mol_type = other DNA
ggcatactcctcacagccggactggtgtggatgatatcgggccggggcggttcattcaccgccggtgagcatatc

SEQ ID NO: 452982 - DNA, 75 bp, synthetic construct
  source 1..75: mol_type = other DNA
gcatatccgtgaccgtttgccggcgacacctgatgccttgactcagccacagccgtctgcagaaagggctgcccc

SEQ ID NO: 452983 - DNA, 75 bp, synthetic construct
  source 1..75: mol_type = other DNA
aaaacctgaaacgcgcagatgaacgcaacattttcacggttccgctctctgaaggacatgagcggacgctttatg

SEQ ID NO: 452984 - DNA, 75 bp, synthetic construct
  source 1..75: mol_type = other DNA
gtttcggcacccaggttcgtagtatctggatgatcggcctgcacgcgttcgccaaacgcgaaacgcgaatgtacc

SEQ ID NO: 452985 - DNA, 75 bp, synthetic construct
  source 1..75: mol_type = other DNA
gatggcaaaatggcgatttgaggagggcaagccgcgtaaaggcgtgaagaaaacatttatctttagtccttctgc

SEQ ID NO: 452986 - DNA, 75 bp, synthetic construct
  source 1..75: mol_type = other DNA
ctttaccaaaaccacggtatgggctgagtggcttgccgcacagcaagacgtttatttgaagattatcgatattgt

SEQ ID NO: 452987 - DNA, 75 bp, synthetic construct
  source 1..75: mol_type = other DNA
aacaacagactgataaccgcgaacgcgatccacaagttgccgggctgaaagtgcctccgcactcgatcgaagcgg

SEQ ID NO: 452988 - DNA, 75 bp, synthetic construct
  source 1..75: mol_type = other DNA
tgtcaaaaaatacgccaagtgcggcgaacatcagtgcctatgcggacatcgtgcgtgaacgtgccgttgtccgtg

SEQ ID NO: 452989 - DNA, 75 bp, synthetic construct
  source 1..75: mol_type = other DNA
ggactctatggctggcaatactggcagcagtcgcaacggctttggcaaaccgccagccaggcgcgggactatttg

SEQ ID NO: 452990 - DNA, 75 bp, synthetic construct
  source 1..75: mol_type = other DNA
ggcatactcatcgcagccggacttatgtggatgatatcgggctggagcggcccattcaccgccgctgagcatatc

SEQ ID NO: 452991 - DNA, 75 bp, synthetic construct
  source 1..75: mol_type = other DNA
tttacgttatgaggatgcggcaaaagtgggcgttattgtcgaagccgtacgtgagatgctgaaaaatcacccggc

SEQ ID NO: 452992 - DNA, 75 bp, synthetic construct
  source 1..75: mol_type = other DNA
ttgcaggataaaccggtattgatcttctcgctggagatgccatcagaacagattatgatgcgttctctggcgtca

SEQ ID NO: 452993 - DNA, 75 bp, synthetic construct
  source 1..75: mol_type = other DNA
tgcctggcgatatgatttttttcgatcagggcgatgcccagcacttaatggtctggatggggcgttacgtcatct

SEQ ID NO: 452994 - DNA, 75 bp, synthetic construct
  source 1..75: mol_type = other DNA
tgacaacggaatgcgcgcagtcagtctgcaacaacttatgacatggaagttgtatattaaaaatttcattaatta

SEQ ID NO: 452995 - DNA, 75 bp, synthetic construct
  source 1..75: mol_type = other DNA
gcaggcctttcgtgaccatttcggcggcccttacgcggtgatccaccgcgttgatattcatgcctcggtgtggga

SEQ ID NO: 452996 - DNA, 75 bp, synthetic construct
  source 1..75: mol_type = other DNA
ttccaggagcgccagatcaacgtgccatcctgacggacaaccaggcgaaaatgcgttccctgatcatcctcgata

SEQ ID NO: 452997 - DNA, 75 bp, synthetic construct
  source 1..75: mol_type = other DNA
aatattttaatgttcctaacgccaacggcgttttattttttatcaatgatggttttactgggatttcgccttttc

SEQ ID NO: 452998 - DNA, 75 bp, synthetic construct
  source 1..75: mol_type = other DNA
atggtccagaatttatctctctggcgctggctgaatgggcagagatacacgcagtaaatggagttcatccagccg

SEQ ID NO: 452999 - DNA, 75 bp, synthetic construct
  source 1..75: mol_type = other DNA
gctgttgaacaaaatcagtgaagccatcgactatgaacccgtgattggtgtcatgggaaaaacaggcgcggggaa

SEQ ID NO: 453000 - DNA, 75 bp, synthetic construct
  source 1..75: mol_type = other DNA
aaaggggaggtttgtgcagttagcgacgttgaggcatgtactcgtgaagttcaggaattgcgtatacgcttcggc

SEQ ID NO: 453001 - DNA, 75 bp, synthetic construct
  source 1..75: mol_type = other DNA
ccagcgcagataaaaaacattctcgataaaaaaacctacattactcaccgacttggtttcactgaccatccggtt

SEQ ID NO: 453002 - DNA, 75 bp, synthetic construct
  source 1..75: mol_type = other DNA
ttgatattcatgcctcggtgtgggaagcggtactgacccacccggacgtcgaatatcacacctctactaacgtcg

SEQ ID NO: 453003 - DNA, 75 bp, synthetic construct
  source 1..75: mol_type = other DNA
tatatggcacaaggtgcctgtatggcgctggaagatgcagtaacgctgggtaaggcgctggcgcagtgtgagggt

SEQ ID NO: 453004 - DNA, 75 bp, synthetic construct
  source 1..75: mol_type = other DNA
gccggatgattactgatgccagtggcgtcaccagaagggaaggcgggattttgggaatgtggggcaatatatttc

SEQ ID NO: 453005 - DNA, 75 bp, synthetic construct
  source 1..75: mol_type = other DNA
tgtttcgcgcagagatgcgcctgacacctttctttcagcgactcagacaacgtctgtgttatccggtgagtcgtg

SEQ ID NO: 453006 - DNA, 75 bp, synthetic construct
  source 1..75: mol_type = other DNA
atgagtaatcgtaaatatttcgggaccgatgggatccgtggtcgtgttggggatgcgccgatcacccctgatttt

SEQ ID NO: 453007 - DNA, 75 bp, synthetic construct
  source 1..75: mol_type = other DNA
gcgatggcgcgtaaccatatgagcctgcacgacctttgcagcggcatgaaaatgttcccgcagattctggttaat

SEQ ID NO: 453008 - DNA, 75 bp, synthetic construct
  source 1..75: mol_type = other DNA
gtgctttattttccgttttctgagacgaccccttcctatacgtgccgcgttccaggcggcgactatgagggctat

SEQ ID NO: 453009 - DNA, 75 bp, synthetic construct
  source 1..75: mol_type = other DNA
ggctgcagaacacgtcggacgatatcatcatgaacctggtgatggggacgatgtttattgtgttgccagcagtgt

SEQ ID NO: 453010 - DNA, 75 bp, synthetic construct
  source 1..75: mol_type = other DNA
gctgacgtttgttgtgtttgcgctgaactttctgacgttctggtgggaactggcgcggtggctggacagctggat

SEQ ID NO: 453011 - DNA, 75 bp, synthetic construct
  source 1..75: mol_type = other DNA
acagctacaaaatgagatagcccagctcaggcaggcactggaactggaaaagaaacggggattctggtccaggtt

SEQ ID NO: 453012 - DNA, 75 bp, synthetic construct
  source 1..75: mol_type = other DNA
tgctggttttagctgcggatcattcaattgatgatgaagatatttttataaattctattcttcatgcttttcctc

SEQ ID NO: 453013 - DNA, 75 bp, synthetic construct
  source 1..75: mol_type = other DNA
agaattaattgaagttagaaccggtagttatttagccgaagacgatatcgaacgtattggtacggaaggagaagg

SEQ ID NO: 453014 - DNA, 75 bp, synthetic construct
  source 1..75: mol_type = other DNA
ccttgcagcgcttcaggcaacggcaagtggagaggatcctatacttttggttcttgcggctgaccatgaaattca

SEQ ID NO: 453015 - DNA, 75 bp, synthetic construct
  source 1..75: mol_type = other DNA
gaatctatatacattcctcagggatgtattcatagtttagaaaatccaggagaaactcctctcgatataatagag

SEQ ID NO: 453016 - DNA, 75 bp, synthetic construct
  source 1..75: mol_type = other DNA
agaaaaacttaaggttaataaccgtacggaatatctgcagcatcgtgaaatatttaggccatggggcagtcatga

SEQ ID NO: 453017 - DNA, 75 bp, synthetic construct
  source 1..75: mol_type = other DNA
gtcgaaaaaccgactcatgatgtagctgtatcttatttagcatctgagaagtatttttggaatagtggtatattt

SEQ ID NO: 453018 - DNA, 75 bp, synthetic construct
  source 1..75: mol_type = other DNA
agactggattccgccctgttaacggatgcagaaatggcagaagggcctcaaaagtggcggcattattccgatcct

SEQ ID NO: 453019 - DNA, 75 bp, synthetic construct
  source 1..75: mol_type = other DNA
agcagaagaaagagccggaagcgaagcagggcgattacctggtgggtacggatgaaaacgtgctggtacttaatc

SEQ ID NO: 453020 - DNA, 75 bp, synthetic construct
  source 1..75: mol_type = other DNA
gaaggcgccattaagcaagacataccaacattgtttactgactcaaccgaagctgaggcgattaaactttttgcc

SEQ ID NO: 453021 - DNA, 75 bp, synthetic construct
  source 1..75: mol_type = other DNA
gttcagacaatttccgtgcttcctcgattcagggtattatgaagcgaatcaaggcgaaaggtgtgccagtaatcg

SEQ ID NO: 453022 - DNA, 75 bp, synthetic construct
  source 1..75: mol_type = other DNA
tgaaagaactggaagaccgtggcatccccgttcgtgagcgtctgctgctgtccgaagcatgtccgctgatccttg

SEQ ID NO: 453023 - DNA, 75 bp, synthetic construct
  source 1..75: mol_type = other DNA
gcaggaatcctggtcgttgatggtaaggtctggcgaacggtgtattaccggttcgctaccagagaagaacgggaa

SEQ ID NO: 453024 - DNA, 75 bp, synthetic construct
  source 1..75: mol_type = other DNA
agccgatagatgatgcggaatggactattaccaccctgacgcatactgtcagcccggataacggttttacgacca

SEQ ID NO: 453025 - DNA, 75 bp, synthetic construct
  source 1..75: mol_type = other DNA
gaagattacttagccaataaacctcttaagctacgggccacgctggataaattcgaagcctatgaaagtgcagaa

SEQ ID NO: 453026 - DNA, 75 bp, synthetic construct
  source 1..75: mol_type = other DNA
atccaccgtctggtgatgaaggccggttccgataacttccgctcctccgctatccaggggatcatgaagcggatt

SEQ ID NO: 453027 - DNA, 75 bp, synthetic construct
  source 1..75: mol_type = other DNA
tgattggtgagcgttcagagcgcgcagaacgttttgcccgaatgctccagcagggcgctattaagcaagacatac

SEQ ID NO: 453028 - DNA, 75 bp, synthetic construct
  source 1..75: mol_type = other DNA
aacggttcccgttggttttaccgcagcgatgcataagaaatatcgcactgaaaatattattttctctccggaatt

SEQ ID NO: 453029 - DNA, 75 bp, synthetic construct
  source 1..75: mol_type = other DNA
agaatctgatcttctctcccgagttcttgcgtgagggcaaagcgctgtatgacaacctatacccttcccgtattg

SEQ ID NO: 453030 - DNA, 75 bp, synthetic construct
  source 1..75: mol_type = other DNA
gaaggggcgatcaagcagaacattccggtactgctaactggcagcaccgaggcagaagccatcaagttgtttgct

SEQ ID NO: 453031 - DNA, 75 bp, synthetic construct
  source 1..75: mol_type = other DNA
caaagcttactccactcgtgtgggtgcaggtccgttcccgaccgaactgtttgatgaaactggcgagttcctctg

SEQ ID NO: 453032 - DNA, 75 bp, synthetic construct
  source 1..75: mol_type = other DNA
gtcgatgagggtattgattatcttcatgtatcactcggtaatgcacttgaagccagacccgttgatgcaccgaat

SEQ ID NO: 453033 - DNA, 75 bp, synthetic construct
  source 1..75: mol_type = other DNA
ggtgatgcagggcctttcgcaccttccgtgacccctcgcgaacttacatgcactgaagtcgaaacggttattcag

SEQ ID NO: 453034 - DNA, 75 bp, synthetic construct
  source 1..75: mol_type = other DNA
caatattgctgcatctgacgcagatcaactagctataccccagaaactctggcgcgtaattgaagaaacgactgg

SEQ ID NO: 453035 - DNA, 75 bp, synthetic construct
  source 1..75: mol_type = other DNA
tcggcgtcggcgaagttgcccgccagcgcgcggtgtttaccgatcacattactatgatggatgcggtgaacgccg

SEQ ID NO: 453036 - DNA, 75 bp, synthetic construct
  source 1..75: mol_type = other DNA
aagaaagcagcggcagaaaaagccgccgcagacaaaaaagcggcagcggcaaaagcagcagctgaaaaagccgct

SEQ ID NO: 453037 - DNA, 75 bp, synthetic construct
  source 1..75: mol_type = other DNA
aaagcggctgctgaaaaggctgcagctgataagaaagcggcagcagagaaagctgcagccgacaaaaaagcagcg

SEQ ID NO: 453038 - DNA, 75 bp, synthetic construct
  source 1..75: mol_type = other DNA
cacatcaccttccctttgattattctctttttcctcctgctctgactctgattactgctctgactctgattactg

SEQ ID NO: 453039 - DNA, 75 bp, synthetic construct
  source 1..75: mol_type = other DNA
tgtttatttccctggaataatgtatttgcggatcggaaagtaccgaagataaccattaatggcaatacggtgacg

SEQ ID NO: 453040 - DNA, 75 bp, synthetic construct
  source 1..75: mol_type = other DNA
ccggatggtcgtgaagtgactaccactccgctggcagctgacgactggaaaggtgtagagccgatttacgaaacc

SEQ ID NO: 453041 - DNA, 75 bp, synthetic construct
  source 1..75: mol_type = other DNA
cttatgccttttccgggcgtccccctggcggggcgggctgtcgtgaacggagccagcggagctgtctccgccctg

SEQ ID NO: 453042 - DNA, 75 bp, synthetic construct
  source 1..75: mol_type = other DNA
cgccagattatcgaaggcgtttgtctcgatccgcgtattggcaaccattacaacaacccgtcatttggttatggt

SEQ ID NO: 453043 - DNA, 75 bp, synthetic construct
  source 1..75: mol_type = other DNA
gcgatgcataagaaatatcgtactgaaaatattattttctcccccgaattcctccgcgaaggtaaagctctttac

SEQ ID NO: 453044 - DNA, 75 bp, synthetic construct
  source 1..75: mol_type = other DNA
tttgctggctgttttgttttttcgcccatagcgaaatgctggatgtcgaacaatcgggactatttcgtgcctggt

SEQ ID NO: 453045 - DNA, 75 bp, synthetic construct
  source 1..75: mol_type = other DNA
acacctgagcaacgacaactggcgcaaaactggaaccaggggaacgggaaaacaggcccctatgtgaccgcaatt

SEQ ID NO: 453046 - DNA, 75 bp, synthetic construct
  source 1..75: mol_type = other DNA
ttatgaggcgtggactgctggcactgatttgctggctgcgttgtttttgcgttcagagtgaaatgctgaatgtcg

SEQ ID NO: 453047 - DNA, 75 bp, synthetic construct
  source 1..75: mol_type = other DNA
cggacaaacgaccggtaaattcagatttacgtgaatcaggagcaattgagcaggacgcagacctgatcatgtttc

SEQ ID NO: 453048 - DNA, 75 bp, synthetic construct
  source 1..75: mol_type = other DNA
gtcggacaaagttcatgcgagatgacggttaacttcaactacaccagtgacaaaggatttgagtatctgcatctt

SEQ ID NO: 453049 - DNA, 75 bp, synthetic construct
  source 1..75: mol_type = other DNA
agtcgccgacgcaagcagcaatgccctggcaccggaaaaccgctctgaatataaagtggggatctacctttatga

SEQ ID NO: 453050 - DNA, 75 bp, synthetic construct
  source 1..75: mol_type = other DNA
atgaaaatcaccatttctggtaccggttatgtaggcttgtcaaacggggttcttatcgcacaaaatcacgaggtt

SEQ ID NO: 453051 - DNA, 75 bp, synthetic construct
  source 1..75: mol_type = other DNA
tgcagaaagtttaggtctcaatacgcgtcagattatcgaaggtgtttgccttgacccgcgtattggcaaccatta

SEQ ID NO: 453052 - DNA, 75 bp, synthetic construct
  source 1..75: mol_type = other DNA
ggggaggatgaaggcaacaaggggatgctgtcgctgccccgtatcgagaacgcgctgtatgccggcttcctggtg

SEQ ID NO: 453053 - DNA, 75 bp, synthetic construct
  source 1..75: mol_type = other DNA
gtctggatggggcgttacgtcatctaccacaccggaagcgccacgaaaactgacaacggaatgcgcgcagtcagt

SEQ ID NO: 453054 - DNA, 75 bp, synthetic construct
  source 1..75: mol_type = other DNA
cttgtgcagtaatggttatcaagtccacggttccggtaggttttacggtcacgatgcaaaaaaaattcaatactg

SEQ ID NO: 453055 - DNA, 75 bp, synthetic construct
  source 1..75: mol_type = other DNA
gcgatgcataagaaatatcgtactgaaaatattattttctctccggaatttctccgtgagggtaaagccctttac

SEQ ID NO: 453056 - DNA, 75 bp, synthetic construct
  source 1..75: mol_type = other DNA
gctaatggaacgcccgattgtggtcgcgaatggcaaagcgcggattggtcgtccaccggagcaggtactggaaat

SEQ ID NO: 453057 - DNA, 75 bp, synthetic construct
  source 1..75: mol_type = other DNA
tctggcttctgcctgactaaactggacgttctggatggcctgaaagaggtgaaactctgtgtggcttaccgtatg

SEQ ID NO: 453058 - DNA, 75 bp, synthetic construct
  source 1..75: mol_type = other DNA
ccccgttcgtgagcgtctgctgttgtctgaagcatgtccgctgatccttgattatcacgtggcgctggataacgc

SEQ ID NO: 453059 - DNA, 75 bp, synthetic construct
  source 1..75: mol_type = other DNA
agacagccatgcgccgtagcgaaattgcagaacttcgatggcgctttatcgatcttgataggcgagttgcacatc

SEQ ID NO: 453060 - DNA, 75 bp, synthetic construct
  source 1..75: mol_type = other DNA
gaaaaaccccggtccagcgcagaactgaaaccacaaagcccctccctcataactgaaaagcggccccgccccggc

SEQ ID NO: 453061 - DNA, 75 bp, synthetic construct
  source 1..75: mol_type = other DNA
ggctgttgcagacatcctgacttctatggttgttggcgtttctgatctgctcgacccggcgcgtcagcgtggcga

SEQ ID NO: 453062 - DNA, 75 bp, synthetic construct
  source 1..75: mol_type = other DNA
gaaactctgtgtggcttaccgtatgccggatggtcgtgaagtgacgaccactccgctggcagctgacgactggaa

SEQ ID NO: 453063 - DNA, 75 bp, synthetic construct
  source 1..75: mol_type = other DNA
ggcgctggatatgccgtttatgaagcgttattcccgcgcttatttattacgtcatccggagcgacgtggtaaaga

SEQ ID NO: 453064 - DNA, 75 bp, synthetic construct
  source 1..75: mol_type = other DNA
ttgtctggagattcagggggccagtctagtttccttgagaaacctcgacgtattcctggtgagcatatccccctc

SEQ ID NO: 453065 - DNA, 75 bp, synthetic construct
  source 1..75: mol_type = other DNA
gctgatggagcgcccgattgtggtcacgaatggcaaagcacggattggtcgtccaccggagcaggtactggaaat

SEQ ID NO: 453066 - DNA, 75 bp, synthetic construct
  source 1..75: mol_type = other DNA
tcaacgtttcgcgtaaagaatggggcatggaaagcctgcttaaccctgtagaagccattcgcaaaccccaaccca

SEQ ID NO: 453067 - DNA, 75 bp, synthetic construct
  source 1..75: mol_type = other DNA
cagtaaaacgggccagaaaaaggtatgaacaagctaactcccaatgtgatgacacctttctcagagatttgagat

SEQ ID NO: 453068 - DNA, 75 bp, synthetic construct
  source 1..75: mol_type = other DNA
ttcagcaatggctgaactcattgtggcaggaaaaagaccggcttctgacgtctctcatgtcatcacagcgtcaga

SEQ ID NO: 453069 - DNA, 75 bp, synthetic construct
  source 1..75: mol_type = other DNA
tggtgcataagttgtcgaaaggggtgacacaggctgcggtagccagcattccgtgccggccggatttgcgtcagg

SEQ ID NO: 453070 - DNA, 75 bp, synthetic construct
  source 1..75: mol_type = other DNA
cgcagcaaaatacacacaccgtctcaggctcaagaagcaattacccgctggtctgccacttgttgcgatccgcca

SEQ ID NO: 453071 - DNA, 75 bp, synthetic construct
  source 1..75: mol_type = other DNA
cgcagtaaaatacacacaccgtctcaggctcaagaagcaattacccgctggtctgccacttgttgcgatccgtca

SEQ ID NO: 453072 - DNA, 75 bp, synthetic construct
  source 1..75: mol_type = other DNA
cgcagaaaaatacacacaccgtctcaggctcaagaagcaattacccgctggtctgccacttgttgcgatccgaca

SEQ ID NO: 453073 - DNA, 75 bp, synthetic construct
  source 1..75: mol_type = other DNA
acgggtaatcgccgcagcaaaatacacacaccggctcaggctcaagaagcaattccccgctggactgccacttgt

SEQ ID NO: 453074 - DNA, 75 bp, synthetic construct
  source 1..75: mol_type = other DNA
acgggtaatcgccgcagcaaaatacacacaccgcctcaggctcaagaagcaattgcccgctggactgccacttgt

SEQ ID NO: 453075 - DNA, 75 bp, synthetic construct
  source 1..75: mol_type = other DNA
cgcaggaaaatacacacaccgtctcaggctcaagaagcaattacccgctggtctgccacttgttgcgatccggca

SEQ ID NO: 453076 - DNA, 75 bp, synthetic construct
  source 1..75: mol_type = other DNA
atgggacactgtcactttatggcatggcacacactccgggacgcactaaaaatgacaggcagatcgcgttcacag

SEQ ID NO: 453077 - DNA, 75 bp, synthetic construct
  source 1..75: mol_type = other DNA
ttttaccgtgatatgcgcgcaggccttgtcagttaccgtaccggtcagaacggacgacgggagtttgaaaccagt

SEQ ID NO: 453078 - DNA, 75 bp, synthetic construct
  source 1..75: mol_type = other DNA
acaatgcctgacgctgatgcttgaggataaacaagcccaggatacggagcgccggcgccaggaagcagaacggga

SEQ ID NO: 453079 - DNA, 75 bp, synthetic construct
  source 1..75: mol_type = other DNA
gtatttcgtatatacatacctcgctggtcagtattaacatagctaccctgttgagtctgccaaatggcccccgaa

SEQ ID NO: 453080 - DNA, 75 bp, synthetic construct
  source 1..75: mol_type = other DNA
cacactgtgggacaggcagaaaagccacatgatgagcaggcagaacgcattctccgggagctgaatgagctgaaa

SEQ ID NO: 453081 - DNA, 75 bp, synthetic construct
  source 1..75: mol_type = other DNA
tttaccgtgatatgcgcgcaggccttgtcagttaccgtactggtcagaacggacgacgggagtttgaaaccagtg

SEQ ID NO: 453082 - DNA, 75 bp, synthetic construct
  source 1..75: mol_type = other DNA
acgggtaatcgccgcaggaaaatacacacaccgcctcaggctcaagaagcaattccccgctggactgccacttgt

SEQ ID NO: 453083 - DNA, 75 bp, synthetic construct
  source 1..75: mol_type = other DNA
cgggcgcccgaatacgggacgtggaggatacccgacatgtaatgaatggtggctggcagcagataaaggtctgag

SEQ ID NO: 453084 - DNA, 75 bp, synthetic construct
  source 1..75: mol_type = other DNA
ttgcacgatggcttgacagctggatgctgacggcactgtacagttcggacacgcatacccggttcaatatgatgg

SEQ ID NO: 453085 - DNA, 75 bp, synthetic construct
  source 1..75: mol_type = other DNA
aagctacacaatcaagtgaaaaaggtggaaaagtcgcagaacaagctgtttcgtctttcgcaggtggcgtgatga

SEQ ID NO: 453086 - DNA, 75 bp, synthetic construct
  source 1..75: mol_type = other DNA
acgcacagccgtttcaatatggcagggtttcagaatacctcagatgacctgattatgaatctggtgatgggcagt

SEQ ID NO: 453087 - DNA, 75 bp, synthetic construct
  source 1..75: mol_type = other DNA
cgtacgagataaagacggtgattacactgacgtttgtgatttttgcgactaatttcctgacgttctggtgggaac

SEQ ID NO: 453088 - DNA, 75 bp, synthetic construct
  source 1..75: mol_type = other DNA
tgccactggcattcaggatcatcgggatctggctgaaagtcagggaagaaggtgcggatgagggaaacaaaggga

SEQ ID NO: 453089 - DNA, 75 bp, synthetic construct
  source 1..75: mol_type = other DNA
actttatgaagaaagaagtccaaagcagggaaatgactgaaaacgagattctggaaactatcagggcattcggag

SEQ ID NO: 453090 - DNA, 75 bp, synthetic construct
  source 1..75: mol_type = other DNA
atcggctcatttcatccggtatttcgtatatacatacctcgctggtcagtattaacgatagctaccctgttgagt

SEQ ID NO: 453091 - DNA, 75 bp, synthetic construct
  source 1..75: mol_type = other DNA
atagaggatacttataaactccttgatcggctcatttcatccggtatttcgtatatacatacctcgctggtcagt

SEQ ID NO: 453092 - DNA, 75 bp, synthetic construct
  source 1..75: mol_type = other DNA
ggatgggggcattgagttgggcgggagttcatttaggcgcggctattagcaacggtgtgaaagccggtacggaca

SEQ ID NO: 453093 - DNA, 75 bp, synthetic construct
  source 1..75: mol_type = other DNA
ccagactgattatcaggaggaagttatacgtcggctcgtcagtccggcgaacctgacggtatcgcatggcggtga

SEQ ID NO: 453094 - DNA, 75 bp, synthetic construct
  source 1..75: mol_type = other DNA
ccaaagcaggttcctgaattaacaatcccggataaattatgggatgaaattcaggcctccaggggaactggctgg

SEQ ID NO: 453095 - DNA, 75 bp, synthetic construct
  source 1..75: mol_type = other DNA
acaactcgacgatgacacttaccgcgcctttctggtgcagtgcacaggcaagaccagttgccgcgagctgaccgt

SEQ ID NO: 453096 - DNA, 75 bp, synthetic construct
  source 1..75: mol_type = other DNA
atgaaagaacgcggttttaagaagcagaataaacacccacgccgtcgctttaaggggcatgtcacgccccgcgaa

SEQ ID NO: 453097 - DNA, 75 bp, synthetic construct
  source 1..75: mol_type = other DNA
agatggcagaagacggttttattaccgatggcggtgatgtggcgctggataaatatgttcagcgcctgacggcga

SEQ ID NO: 453098 - DNA, 75 bp, synthetic construct
  source 1..75: mol_type = other DNA
tggtaactactttagtaattttgaggtctaatggagagtcaaagtcgttaggtactgggttcttttatcaacata

SEQ ID NO: 453099 - DNA, 75 bp, synthetic construct
  source 1..75: mol_type = other DNA
agatgtttcaggatggctttgtcgctgatagcagcgacgccgcgctggacaaatacgttgaacgcctgacggcca

SEQ ID NO: 453100 - DNA, 75 bp, synthetic construct
  source 1..75: mol_type = other DNA
gccatgaaaaagcgcggttttaagaagcagaaaaaacatccccgccgtcgctttaaggggcatgtcacaccacgc

SEQ ID NO: 453101 - DNA, 75 bp, synthetic construct
  source 1..75: mol_type = other DNA
gaagcttctttagccaggggtagaatatctggtgcagaaaatatagtaaaaatgatgcagcccatttctgtgtta

SEQ ID NO: 453102 - DNA, 75 bp, synthetic construct
  source 1..75: mol_type = other DNA
gtttttactgcaatgaaacttttgtagaaaagaataacaactatgttgtttgcgaaatttttatccccgttcgcc

SEQ ID NO: 453103 - DNA, 75 bp, synthetic construct
  source 1..75: mol_type = other DNA
ttatccttgcctgatactatttaatcagtatcaggcaaggtattcagtgaataatggcgttgaatatttcaacac

SEQ ID NO: 453104 - DNA, 75 bp, synthetic construct
  source 1..75: mol_type = other DNA
tcagtgctttatcgcgtaacgggaaagcaaagttgtcgtgatctgaaggtcggccaactggaggatgtactgaag

SEQ ID NO: 453105 - DNA, 75 bp, synthetic construct
  source 1..75: mol_type = other DNA
cgatatcagcgacgctgcgctggacaaatacgttgagcgcctgacggccagacgtaatggtggtcagggtgtttc

SEQ ID NO: 453106 - DNA, 75 bp, synthetic construct
  source 1..75: mol_type = other DNA
cgatatcagcgacgccgcgctggacaaatacgttgaacgcctgacggccagacgtaatggcggtcagggtgtttc

SEQ ID NO: 453107 - DNA, 75 bp, synthetic construct
  source 1..75: mol_type = other DNA
gcagggctatccggtaccgcttctttatggtcgtcggcaaatcggcggtgcgattatttctgccgggatttatgt

SEQ ID NO: 453108 - DNA, 75 bp, synthetic construct
  source 1..75: mol_type = other DNA
ggttactaatgcagtggttctgtggaacacgctctatatgcaggaagtgttgagctggatgcgccgtaatggaga

SEQ ID NO: 453109 - DNA, 75 bp, synthetic construct
  source 1..75: mol_type = other DNA
acgctctatatgcaggaagtgttgaactggatgcgccgtaatggagaagaaattatagatgaagatatcgctcgg

SEQ ID NO: 453110 - DNA, 75 bp, synthetic construct
  source 1..75: mol_type = other DNA
gtcgcgggctgatcacccattttctcgctgagttcggctacgactggaaccacgcgcaaaacagcggtcaggcga

SEQ ID NO: 453111 - DNA, 75 bp, synthetic construct
  source 1..75: mol_type = other DNA
gttaaacactgcgcttatttttctttttatatttacaaaagcatatttcttttcgcaacacgtaaataagatgcg

SEQ ID NO: 453112 - DNA, 75 bp, synthetic construct
  source 1..75: mol_type = other DNA
atggtagtcatccaccactggggattagcgtaaaagatgaaaccagccacaaagaattaggactggttgctgatg

SEQ ID NO: 453113 - DNA, 75 bp, synthetic construct
  source 1..75: mol_type = other DNA
ccactggggattagcgtaaaagataaaaccagccataaagaattaggactggttgctgatggcggctttgtatac

SEQ ID NO: 453114 - DNA, 75 bp, synthetic construct
  source 1..75: mol_type = other DNA
aaagcacgagggctgacgtatgccgtttatagagataaaaagaatattggcgttgatgatctcggctttcccgtc

SEQ ID NO: 453115 - DNA, 75 bp, synthetic construct
  source 1..75: mol_type = other DNA
tggtcttttgcagacgatcttgggggccgtgcttattactgctgctgtgttgactggccccggcggtattggcgc

SEQ ID NO: 453116 - DNA, 75 bp, synthetic construct
  source 1..75: mol_type = other DNA
atcagtaaagtttctgaagcaggtgtagcactcgcaaaaacaatcaccgggtttgaaagttatatggtaaacagc

SEQ ID NO: 453117 - DNA, 75 bp, synthetic construct
  source 1..75: mol_type = other DNA
ttttcctcattatgccgcatggaaaatcgccgatcagatggcaaaaacacctgaagcagcgctcaactttatgcg

SEQ ID NO: 453118 - DNA, 75 bp, synthetic construct
  source 1..75: mol_type = other DNA
cggcaggttattacgcttatttgtggacgcaaatgttggcagacgatggttatcaatggtttgtcgagcagggcg

SEQ ID NO: 453119 - DNA, 75 bp, synthetic construct
  source 1..75: mol_type = other DNA
atttcgaattaaacacggtgttgaatgaaggtgtattctggaccgctaatcagctttttggcatcaagtttgtcg

SEQ ID NO: 453120 - DNA, 75 bp, synthetic construct
  source 1..75: mol_type = other DNA
tatctggtgcagaaaatatagtaaaaaatgatggtaatgactccaacttattgatagtgttttatgttcagataa

SEQ ID NO: 453121 - DNA, 75 bp, synthetic construct
  source 1..75: mol_type = other DNA
agataacgcggttgctaacgttgttcccactcgtggggcgatcgtgcgagcagagtttaaagcgcgcgttgggat

SEQ ID NO: 453122 - DNA, 75 bp, synthetic construct
  source 1..75: mol_type = other DNA
gggcatcaatggggcatgtatgggacactttttatcggcgaaattcgtcgaagttcgtcgacatggtaaacgaat

SEQ ID NO: 453123 - DNA, 75 bp, synthetic construct
  source 1..75: mol_type = other DNA
ggtaatagtggtgacttgcaggtaacgattaaagaggctgacggcagcacgcagatctttaccgtaccctattcg

SEQ ID NO: 453124 - DNA, 75 bp, synthetic construct
  source 1..75: mol_type = other DNA
gcaagagccagcctaacgcctgtgacaagttatttagcgtctggcgtgcgtcaggtaaacaagatccgctggcgt

SEQ ID NO: 453125 - DNA, 75 bp, synthetic construct
  source 1..75: mol_type = other DNA
gcccacggaggcaattgctcaggctgaaaacgtggtgtaccggctgtccggaatgtctgagtttgtggtgaataa

SEQ ID NO: 453126 - DNA, 75 bp, synthetic construct
  source 1..75: mol_type = other DNA
acgagtaatgtcgatgagcaattccaggctggattaaatactgcgttcgaagatattaactggacgctcagctat

SEQ ID NO: 453127 - DNA, 75 bp, synthetic construct
  source 1..75: mol_type = other DNA
aacataacggcgtgaccgtcacgctttctgaactttcagccctgcagcgtattgagcatctcgccctgatgaaac

SEQ ID NO: 453128 - DNA, 75 bp, synthetic construct
  source 1..75: mol_type = other DNA
cagcaaccggcaggttactgtggaagacgtcatcagaaccggtgcttttgtggtggcgatgtccctgtggcataa

SEQ ID NO: 453129 - DNA, 75 bp, synthetic construct
  source 1..75: mol_type = other DNA
tattcgtaagcatcgtttggctggtttttttgtccgactctttgttgcctgtgcttttgccgcacaggcaccttt

SEQ ID NO: 453130 - DNA, 75 bp, synthetic construct
  source 1..75: mol_type = other DNA
cgctggataccaatagtctggctgataacgtcgatctggataatgccgttgcgaatgttgtcccgacgcgcgggg

SEQ ID NO: 453131 - DNA, 75 bp, synthetic construct
  source 1..75: mol_type = other DNA
ttggggcgatggtgacatcagagagtagccagagtagcggcattgttgcggataatggtcaggtttacctcagcg

SEQ ID NO: 453132 - DNA, 75 bp, synthetic construct
  source 1..75: mol_type = other DNA
gcgaaagagaaagatgaatggcgttactggcaggcggatttactgctggaacgcggacgtgaagctgaagcgaaa

SEQ ID NO: 453133 - DNA, 75 bp, synthetic construct
  source 1..75: mol_type = other DNA
aataagtttgttattaatttctatgatcccaatcagaccgcgacgcataaacgagtatttttttgcactaataac

SEQ ID NO: 453134 - DNA, 75 bp, synthetic construct
  source 1..75: mol_type = other DNA
ttgtggcgctaccttttttaatcggatattattataataatagcatttcattaagtggatatgacgctgtaatag

SEQ ID NO: 453135 - DNA, 75 bp, synthetic construct
  source 1..75: mol_type = other DNA
tttcacgataacgatggtcatgagtggatacttgagtgcgcacctcaatcagaaattttgttttttattgttacc

SEQ ID NO: 453136 - DNA, 75 bp, synthetic construct
  source 1..75: mol_type = other DNA
atagacatgatcatgttgtcaaattatacggaaagttatttaaaaacttgataccagtccatataaaatgtcaat

SEQ ID NO: 453137 - DNA, 75 bp, synthetic construct
  source 1..75: mol_type = other DNA
tggatggaaccatacctggtttatatcaggcccttcaaaatggacatgctcaagctattaagagttatggtaact

SEQ ID NO: 453138 - DNA, 75 bp, synthetic construct
  source 1..75: mol_type = other DNA
aaatcgccgcaacgcttgccagtaccggcactccggcttttttgtccatccggcagaagcgctgcacggcgatct

SEQ ID NO: 453139 - DNA, 75 bp, synthetic construct
  source 1..75: mol_type = other DNA
cagcgccggacgtatcgacgcggtggcgtttgtcgagagtatcccgttctccgagacgcgcggttatgtgaagaa

SEQ ID NO: 453140 - DNA, 75 bp, synthetic construct
  source 1..75: mol_type = other DNA
cgcgcgtgcgcgagttgatgtactggaatctcgataacaccgcgcgtagcgagtgggccaatctggtgaagagca

SEQ ID NO: 453141 - DNA, 75 bp, synthetic construct
  source 1..75: mol_type = other DNA
ggcgaccgttcggggctgaatacatggctggcgcgcttgccgatggaagcgaaagagaaagatgaatggcgctac

SEQ ID NO: 453142 - DNA, 75 bp, synthetic construct
  source 1..75: mol_type = other DNA
tcgccacaatgtgcaaccgctggcaacgtcaaaggcgttgtttattcatcgtaataccctggagtatcggcttaa

SEQ ID NO: 453143 - DNA, 75 bp, synthetic construct
  source 1..75: mol_type = other DNA
aatacggtgctgacctttgcgcgtacaactggagcgaccgattttacccgtcagatggcggcagtagcctttgcc

SEQ ID NO: 453144 - DNA, 75 bp, synthetic construct
  source 1..75: mol_type = other DNA
gtagccgctacgcgcaaatcaagcaggcctgggataaacggcagatggatgtcgttgaaatgatgatgccgtccc

SEQ ID NO: 453145 - DNA, 75 bp, synthetic construct
  source 1..75: mol_type = other DNA
gtagagcgcaagctgccgcaagacgttctttcaatggaagcgtagagtgcgtaaaagttactatgacaaaagatc

SEQ ID NO: 453146 - DNA, 75 bp, synthetic construct
  source 1..75: mol_type = other DNA
ttagtgagttttcaataatgaccgaagtcgctggtagtttatgggtataccatgacgataaaaacaggatgcgta

SEQ ID NO: 453147 - DNA, 75 bp, synthetic construct
  source 1..75: mol_type = other DNA
aaaacgagtacgacaggctgacctctgatgccgctgttggtgaggcccttctcatcaacgaatacaccttcaccg

SEQ ID NO: 453148 - DNA, 75 bp, synthetic construct
  source 1..75: mol_type = other DNA
agaaatcgattgtatggatttactaatgaatttggcctcgatggtcatattatgacgcatgtagatcagtatcta

SEQ ID NO: 453149 - DNA, 75 bp, synthetic construct
  source 1..75: mol_type = other DNA
ttttcagctttcaattgggctggaacgattttttaagattatttatgttgtgcagtatatgattgaaaatgattt

SEQ ID NO: 453150 - DNA, 75 bp, synthetic construct
  source 1..75: mol_type = other DNA
acgcaagtcgcgtatcccgcgctttctttgattctcgtaacaataaggaaaattatgagttcgtctgcgtcgcag

SEQ ID NO: 453151 - DNA, 75 bp, synthetic construct
  source 1..75: mol_type = other DNA
gaaagccattcaccgtacggataacggcatacagacgctggcgacctacgaacaggatgcgcgggggcagctgac

SEQ ID NO: 453152 - DNA, 75 bp, synthetic construct
  source 1..75: mol_type = other DNA
tgacagccgatgcggaagccgctgtcagcgaagccctgcgcgacctggccttctggttgtaccgtcaactggaaa

SEQ ID NO: 453153 - DNA, 75 bp, synthetic construct
  source 1..75: mol_type = other DNA
gtacagcatggatatcactgttacccggaacagtccgactggtcaggcaatgacaaccgatgcggaagccgctgt

SEQ ID NO: 453154 - DNA, 75 bp, synthetic construct
  source 1..75: mol_type = other DNA
acgagtacgactggctgacctcagacgccgctgtggatgaggcccttctcatcaacgaatacaccttcaccgaag

SEQ ID NO: 453155 - DNA, 75 bp, synthetic construct
  source 1..75: mol_type = other DNA
cctgttttgaaggacgctggcactggcagtcagcaacagccaggagagtccgggagtatgccccgcaggaccgtg

SEQ ID NO: 453156 - DNA, 75 bp, synthetic construct
  source 1..75: mol_type = other DNA
gcaactggtatgaaaacgtgtatgaagacttcagggaggtctgtgacattttcgggattaacctccgccagcgcg

SEQ ID NO: 453157 - DNA, 75 bp, synthetic construct
  source 1..75: mol_type = other DNA
gtgaacttcatcgtatcgcggatgccctgcaggcggttcagaaacgtaacttctggcagttacaggctgaaatca

SEQ ID NO: 453158 - DNA, 75 bp, synthetic construct
  source 1..75: mol_type = other DNA
atatgctgaaaaacggtatcaactcgatggcaatgtcgctggcggcttatcacgaagagatgcagcacaatatcg

SEQ ID NO: 453159 - DNA, 75 bp, synthetic construct
  source 1..75: mol_type = other DNA
gaccgtccttattggtttattgctgagtatctttttcgtcgtacaccgctataacgacttgcagcgtcaactgga

SEQ ID NO: 453160 - DNA, 75 bp, synthetic construct
  source 1..75: mol_type = other DNA
tttcatcttgatccttcatcaatgcagctcggcagcaacgtgccgtttcctcgccagctcactgtcactcgtgac

SEQ ID NO: 453161 - DNA, 75 bp, synthetic construct
  source 1..75: mol_type = other DNA
tcgttccatagccagccgaatcgcggttctaccttctggttccacattaatctcgatctgaacccgaatattatt

SEQ ID NO: 453162 - DNA, 75 bp, synthetic construct
  source 1..75: mol_type = other DNA
gggctggggctggtgattacacaaaaactggttaatgaaatgggcggcgatatttcgttccatagccagccgaat

SEQ ID NO: 453163 - DNA, 75 bp, synthetic construct
  source 1..75: mol_type = other DNA
aacgaaattgtggtgaacccgaatgcgaccctcgactggcaactggcactacgccaggcagcaggaaaaaccgat

SEQ ID NO: 453164 - DNA, 75 bp, synthetic construct
  source 1..75: mol_type = other DNA
gtgagctccatcgtatcgcggatgccctgcaggcggtacagaaacgtaacttctggcagttacaggctgaaatca

SEQ ID NO: 453165 - DNA, 75 bp, synthetic construct
  source 1..75: mol_type = other DNA
gtgacctgcatcgtatcgcggatgccctgcaggcggtacagaaacgtaacttctggcagttacaggctgaaatca

SEQ ID NO: 453166 - DNA, 75 bp, synthetic construct
  source 1..75: mol_type = other DNA
gtgatcttcatcgtatcgcggatgccctgcaggcggtgcagaaacgtaacttctggcagttacaggctgaaatca

SEQ ID NO: 453167 - DNA, 75 bp, synthetic construct
  source 1..75: mol_type = other DNA
catcaggcggttgaacgggcgaaacagatgccgttcgatttgatcttaatggatattcaaatgccggacatggac

SEQ ID NO: 453168 - DNA, 75 bp, synthetic construct
  source 1..75: mol_type = other DNA
gaagcttatttttaaccatgtcattatcaagcattaattcttatgctgaagagactatgtctcctcaacctgaga

SEQ ID NO: 453169 - DNA, 75 bp, synthetic construct
  source 1..75: mol_type = other DNA
agagccgaagtttagtgatattattagaattgcgagagtgacaggtgttgatttaaatgagttggcgcatgggga

SEQ ID NO: 453170 - DNA, 75 bp, synthetic construct
  source 1..75: mol_type = other DNA
gtaaagacagtgtatacccatcggcgtaatgcagaggccaagctgtactcaaaaatatataagttggttcagtaa

SEQ ID NO: 453171 - DNA, 75 bp, synthetic construct
  source 1..75: mol_type = other DNA
ggtgacggcgtttaacggccccgtggagatggtggcgcagtgcgaatatgttcccgcgtcgcaggtgaaatcatg

SEQ ID NO: 453172 - DNA, 75 bp, synthetic construct
  source 1..75: mol_type = other DNA
atttctatgcgcctggcgtggtgcggatccacgaaggtgcctggtatgatccagataaaggcggtgagctcaatg

SEQ ID NO: 453173 - DNA, 75 bp, synthetic construct
  source 1..75: mol_type = other DNA
tttccattgatagccagtggacctccagctgccgcttttctgacattgtattacccgcaaccacccagtttgagc

SEQ ID NO: 453174 - DNA, 75 bp, synthetic construct
  source 1..75: mol_type = other DNA
gtgacggcgtttaacggccctgttgagatggtggcgcagtgcgaatatgttcccgcgtcgcaggtgaaatcatga

SEQ ID NO: 453175 - DNA, 75 bp, synthetic construct
  source 1..75: mol_type = other DNA
gattgagatctactcgaaaaccatcgccgatatgaactacgacgattgtcaggggcatccgatgtggtttgagaa

SEQ ID NO: 453176 - DNA, 75 bp, synthetic construct
  source 1..75: mol_type = other DNA
aactgacgtgccgctgcaactggcgctggcgcatacgctgtacagtgaaaacctgtacgacaaaaacttcctcgc

SEQ ID NO: 453177 - DNA, 75 bp, synthetic construct
  source 1..75: mol_type = other DNA
atcactgtgacgaggcgcaagggtatttcatcgggaagcctgtcgcgcttgatgcgttaaatttagacgtggcat

SEQ ID NO: 453178 - DNA, 75 bp, synthetic construct
  source 1..75: mol_type = other DNA
acaatagaaataggctataatataatgaatgaaaatctggtcattggaaaaggaatacatttcaggacactaagc

SEQ ID NO: 453179 - DNA, 75 bp, synthetic construct
  source 1..75: mol_type = other DNA
aatcgtcatatccggttcacagtaaaaaacataatcctgctacctgcattaaatgatgattttatatgcacactt

SEQ ID NO: 453180 - DNA, 75 bp, synthetic construct
  source 1..75: mol_type = other DNA
aaagagggtatcctgaccggttcgcggtttggcgcaattcgcgccacggtgaaagacgggcgctttgtggcagtg

SEQ ID NO: 453181 - DNA, 75 bp, synthetic construct
  source 1..75: mol_type = other DNA
ccagcaactacacagtttgagcgtaacgatctcgaccagtacggcaaccactccaaccgagggatcatcgccatg

SEQ ID NO: 453182 - DNA, 75 bp, synthetic construct
  source 1..75: mol_type = other DNA
gagggcattctgaccggatcgcactggggggctatccgcgcaacggtgaaggatggtcgctttgtggcagcgaaa

SEQ ID NO: 453183 - DNA, 75 bp, synthetic construct
  source 1..75: mol_type = other DNA
gtggcatggtgcgaagcgtcgctggagatcctccatgttcatccgttgtcgctctctgttttgcaggagctgcag

SEQ ID NO: 453184 - DNA, 75 bp, synthetic construct
  source 1..75: mol_type = other DNA
atgagcagaattatcaccaccaccgtgtgtgtatacgcttatacgctggatgaactttcctgcccggcacgggaa

SEQ ID NO: 453185 - DNA, 75 bp, synthetic construct
  source 1..75: mol_type = other DNA
tggctgacgtcggtatgctggggatgccaaatgctggtaaatcgacattcattcgcgctgtttcggcggctaaac

SEQ ID NO: 453186 - DNA, 75 bp, synthetic construct
  source 1..75: mol_type = other DNA
taatggttgcgtgagcttccgccgcgaaaaatatattccgaaaggcggcccggatggcggcgacggtggtgacgg

SEQ ID NO: 453187 - DNA, 75 bp, synthetic construct
  source 1..75: mol_type = other DNA
tagcaatattgaaagaagagttaatcggctgtaggttcacgcaggtgatgatccgtgccgtagttgaagtgtcga

SEQ ID NO: 453188 - DNA, 75 bp, synthetic construct
  source 1..75: mol_type = other DNA
tcaggacatgtatgctgccattgatggcttaattgataagctggcacgccagttgaccaagcataaagataaatt

SEQ ID NO: 453189 - DNA, 75 bp, synthetic construct
  source 1..75: mol_type = other DNA
tctggctgtaccgtcaactggaaaacgagtacgactggctgacctcagatgccgctgtggatgaggccctgctca

SEQ ID NO: 453190 - DNA, 75 bp, synthetic construct
  source 1..75: mol_type = other DNA
gggcgtcgagcctttcctgctctcttccagcctgacgggcgtgatggcgcagcggctggtccgcacgctgtgcac

SEQ ID NO: 453191 - DNA, 75 bp, synthetic construct
  source 1..75: mol_type = other DNA
gcgtgatggcgcagcgactggtccgcacgctgtgctccgactgccgtcaggccgcgcctgccaccgacgaagaaa

SEQ ID NO: 453192 - DNA, 75 bp, synthetic construct
  source 1..75: mol_type = other DNA
cacggcatctttctggtgacggggccgacgggttccggcaaaagcaccacgctgtacgctggattgcaggagctg

SEQ ID NO: 453193 - DNA, 75 bp, synthetic construct
  source 1..75: mol_type = other DNA
ccaaacacggtcagcgtctgctggttgctaagggcggctggcacggtctgggcaatacccgtttcaaatcgtcag

SEQ ID NO: 453194 - DNA, 75 bp, synthetic construct
  source 1..75: mol_type = other DNA
agcagcttgaagagattgctgaagaggatgatgaagactgggatgacgactgggacgaagaaggcgttgagttca

SEQ ID NO: 453195 - DNA, 75 bp, synthetic construct
  source 1..75: mol_type = other DNA
ttccggaaactattcagtataaatatatcaaatcccatgggcccctaaataaatatcagctaaaacggatagagc

SEQ ID NO: 453196 - DNA, 75 bp, synthetic construct
  source 1..75: mol_type = other DNA
agcgtattgtgtcagcatccggcagaggttattgccgggttaacaggatatgaggcatttatggagttacttcac

SEQ ID NO: 453197 - DNA, 75 bp, synthetic construct
  source 1..75: mol_type = other DNA
caaaacgaacgccagccgatcattttgctctcggaccagaacgcgattgccactattaatcagctcgccattgag

SEQ ID NO: 453198 - DNA, 75 bp, synthetic construct
  source 1..75: mol_type = other DNA
tctggcgatttacgccctgcgtaatcaactgaccgatgagtggccgcaatatcccggtaacgagataaaacaaat

SEQ ID NO: 453199 - DNA, 75 bp, synthetic construct
  source 1..75: mol_type = other DNA
tcggtttgctgatcttcgactacaaatcagactatgtggatgaagcttttcttgatgcaacgggtgctaaaaagt

SEQ ID NO: 453200 - DNA, 75 bp, synthetic construct
  source 1..75: mol_type = other DNA
gaactgcgccgcagtaacgatatccttcgccaggcttccgcttattttgcgaaggcggagttcgaccgcctctag

SEQ ID NO: 453201 - DNA, 75 bp, synthetic construct
  source 1..75: mol_type = other DNA
gagctggaacgtgaaaatcgtgaactgcgccgcagtaacgatatccttcgccaggcttccgcttattttgcgaag

SEQ ID NO: 453202 - DNA, 75 bp, synthetic construct
  source 1..75: mol_type = other DNA
gttccattgctccaaagactggctgtacgcctgagactctgcgtgtctgggttcgccaggatgagcgggataccg

SEQ ID NO: 453203 - DNA, 75 bp, synthetic construct
  source 1..75: mol_type = other DNA
atgactcacaatgggcggtaatttgttccattgctccaaagactggctgtacgccggagactctgcgtgtctggg

SEQ ID NO: 453204 - DNA, 75 bp, synthetic construct
  source 1..75: mol_type = other DNA
gcagtacggggtcggaccggtatgcaggaactgcatattgccccgtcaacgtattaccatgtcagcaacagcgac

SEQ ID NO: 453205 - DNA, 75 bp, synthetic construct
  source 1..75: mol_type = other DNA
gccgcagtaacgatattcttcgccaggcttccgcttatttgcgaaggcggagttcgaccgcctctggaaaaaatg

SEQ ID NO: 453206 - DNA, 75 bp, synthetic construct
  source 1..75: mol_type = other DNA
gtgaaaatcgaatatgactcacaatgggcggcaatttgttccatagctccaaagattggctgtacgccagagact

SEQ ID NO: 453207 - DNA, 75 bp, synthetic construct
  source 1..75: mol_type = other DNA
gagccggaacgtgaaaatcgtgaactgcgccgtagtaacgatatccttcgccaggcttccgcttattttgcgaag

SEQ ID NO: 453208 - DNA, 75 bp, synthetic construct
  source 1..75: mol_type = other DNA
tcacggactgcgccgacgattgaagatgtatggcagcgtttcctcgatcaggagaaggttgaagaagattcgctt

SEQ ID NO: 453209 - DNA, 75 bp, synthetic construct
  source 1..75: mol_type = other DNA
cgttattttacggtgatttcttcgcccgtgattcaaaaagcggcggcgcatggatgggcaattttgttgagcaat

SEQ ID NO: 453210 - DNA, 75 bp, synthetic construct
  source 1..75: mol_type = other DNA
gaacagagccagccttatgtcgaaaccatccggtcggtattccgcaagattgctcttggtgaagtccctcaaggt

SEQ ID NO: 453211 - DNA, 75 bp, synthetic construct
  source 1..75: mol_type = other DNA
aacttgagaagcattttagcctgtatatagatggaaataaaaaagttaggaaaatgcgtgataaagcattctggg

SEQ ID NO: 453212 - DNA, 75 bp, synthetic construct
  source 1..75: mol_type = other DNA
ctgtacccttacaagtattatttggtcatgacgctacacggcaaaccccattgttctgggaaccgaccaacacca

SEQ ID NO: 453213 - DNA, 75 bp, synthetic construct
  source 1..75: mol_type = other DNA
gatgtgctctttgttggttttaaagaaaaccgtctctatttactgccgctggaagtcaaaaccggcgctcgacca

SEQ ID NO: 453214 - DNA, 75 bp, synthetic construct
  source 1..75: mol_type = other DNA
ccttacagttcaggcgcgacacacaaggccggacgcaccaaccagggcagccatgcaaaatatctgaacggcgag

SEQ ID NO: 453215 - DNA, 75 bp, synthetic construct
  source 1..75: mol_type = other DNA
gtgcttatccactattctgaccagtacaccagttgcgcaggctacgatgccgtcaccgtcacgaagcaggttgat

SEQ ID NO: 453216 - DNA, 75 bp, synthetic construct
  source 1..75: mol_type = other DNA
ccggtttaatgccgtttgtttaccacagtgaacatgaatacgcgcaactacagccggtggaagaaaaccgcttct

SEQ ID NO: 453217 - DNA, 75 bp, synthetic construct
  source 1..75: mol_type = other DNA
atgattctggtggacgaagccgataactttatgcgtcaggatttttccagtctgcgtaagatccttaaagaaggc

SEQ ID NO: 453218 - DNA, 75 bp, synthetic construct
  source 1..75: mol_type = other DNA
tggcacaagagaaggtcgacgaagattcattatatgctgcactttataatctggctggtttccagatttttgaaa

SEQ ID NO: 453219 - DNA, 75 bp, synthetic construct
  source 1..75: mol_type = other DNA
cagttaggtgagcttgctgattatgcagaaggctttgtggtagctcatgtagacagcggaacctgttttgatctc

SEQ ID NO: 453220 - DNA, 75 bp, synthetic construct
  source 1..75: mol_type = other DNA
aatctatgttgcagcagtccgatatttgctggattccgttatcggtggccgaaatgatccgcgtgtccgggaatg

SEQ ID NO: 453221 - DNA, 75 bp, synthetic construct
  source 1..75: mol_type = other DNA
ggtcgccagcatgagcgggataccggaggcggtgacaatggtgggcttaccaccgctgaacgtcagcgtctgaaa

SEQ ID NO: 453222 - DNA, 75 bp, synthetic construct
  source 1..75: mol_type = other DNA
cgtggtattacaaccactgctgcatgactctccggcagagctctcacagccgtgtgaagtgctcgactggcgcaa

SEQ ID NO: 453223 - DNA, 75 bp, synthetic construct
  source 1..75: mol_type = other DNA
tttattcatccgctttctgcggcggtcgatccggcctgggaatcacgcagcgactgggaaatctacaaaggtatt

SEQ ID NO: 453224 - DNA, 75 bp, synthetic construct
  source 1..75: mol_type = other DNA
tggttcctccggcaaaggccatgaatatatgcagaagtatttgctgggtacggaaagcgggattcagggggaaga

SEQ ID NO: 453225 - DNA, 75 bp, synthetic construct
  source 1..75: mol_type = other DNA
tggcttatcgtccgcctatcgacacccgtagcgtcagtgaaatgcgccagataccgccaaacggcttcccggaaa

SEQ ID NO: 453226 - DNA, 75 bp, synthetic construct
  source 1..75: mol_type = other DNA
agaacgcaacggctgcggcttcagctttggcgacggttgccacggctcagacagcaaattcaacctgttcaacag

SEQ ID NO: 453227 - DNA, 75 bp, synthetic construct
  source 1..75: mol_type = other DNA
cagccgtgtgaagtgctcgactggcgcaaaggcgaatgcgatctgatcccgggtaaaaccgcgccgaatattgtg

SEQ ID NO: 453228 - DNA, 75 bp, synthetic construct
  source 1..75: mol_type = other DNA
tggaccatcaaaacttacggcccggatcgcgttgccggtttctcgccgatcccggcgatgtcgatggtttcttac

SEQ ID NO: 453229 - DNA, 75 bp, synthetic construct
  source 1..75: mol_type = other DNA
ccagaaatggggcattcactctacctacagtgaaaacctgctaatgctgacgctctcgcgcggcgggccgattgt

SEQ ID NO: 453230 - DNA, 75 bp, synthetic construct
  source 1..75: mol_type = other DNA
ccgtagcgtcagtgagatgcgccagataccgccaaacggcttcccggaaaaagcacttaacttcctgacgccgca

SEQ ID NO: 453231 - DNA, 75 bp, synthetic construct
  source 1..75: mol_type = other DNA
ttggcggcattgaaaatccgcattttcgcagcgtaaaacacaatccggtcctggtgcgccaattgcccgttaaaa

SEQ ID NO: 453232 - DNA, 75 bp, synthetic construct
  source 1..75: mol_type = other DNA
cgatcacgtctcctacaacgccggatataccaacgttcatgagttaattccgtggcgcacgctgtcgggacgcca

SEQ ID NO: 453233 - DNA, 75 bp, synthetic construct
  source 1..75: mol_type = other DNA
accaaaactatcgccattactcctgactactcggaggtggcgaaactgtgcgaccagtggctggctccgaagcaa

SEQ ID NO: 453234 - DNA, 75 bp, synthetic construct
  source 1..75: mol_type = other DNA
ctggagcagaaaccgaattgtctttaaccctcctgaatcaacacgatactgttgttggcgtggcttttccctatt

SEQ ID NO: 453235 - DNA, 75 bp, synthetic construct
  source 1..75: mol_type = other DNA
tggagcgtgaaaatcgtgaactgcgccgcagtaacgatatccttcgccaggcttccgcttattttgcgaaggcgg

SEQ ID NO: 453236 - DNA, 75 bp, synthetic construct
  source 1..75: mol_type = other DNA
gacgccagcatgagcgggataccggaggcggtgatggtggactcaccaccactgaacatcagcgtctgaaagagc

SEQ ID NO: 453237 - DNA, 75 bp, synthetic construct
  source 1..75: mol_type = other DNA
cagaatgaccagaccgtaacgcttcagacagtggacgttgctgattttggcgctgctgtaggtaatgaagcagca

SEQ ID NO: 453238 - DNA, 75 bp, synthetic construct
  source 1..75: mol_type = other DNA
aaagagccggaacgtgaaaatcgtgaactgcaccgtagtaacgatatccttcgccagacttccgcttattttgcg

SEQ ID NO: 453239 - DNA, 75 bp, synthetic construct
  source 1..75: mol_type = other DNA
gcatgtgctggcaacagcgatcctggaccggctgctacatcactcaaccacgctgaatatcaaaggagagagtta

SEQ ID NO: 453240 - DNA, 75 bp, synthetic construct
  source 1..75: mol_type = other DNA
tacgccagagactctgcgtgtctgggttcaccagcatgagcgggataccgagggcggtgatggtgggctcaccac

SEQ ID NO: 453241 - DNA, 75 bp, synthetic construct
  source 1..75: mol_type = other DNA
tatgctgccgggtaaatcgaccccgcaggaaattattgaatccgttgagtacggtatctatgcaccgaactttgg

SEQ ID NO: 453242 - DNA, 75 bp, synthetic construct
  source 1..75: mol_type = other DNA
acgatggtcgatcgccgtggttcggtggcgattgatgacgaaggtacgccaggccagtacaacgtgctgattgag

SEQ ID NO: 453243 - DNA, 75 bp, synthetic construct
  source 1..75: mol_type = other DNA
tggctgtacaccggagactctgcgtgtctgggtacgccagcatgagcgggataccggaggcggtgatggcgggct

SEQ ID NO: 453244 - DNA, 75 bp, synthetic construct
  source 1..75: mol_type = other DNA
aaagagctggaacgtgaaaatcgtgaactgcgccgcagtaacgatatccttcgccaggcttccgcttattttgcg

SEQ ID NO: 453245 - DNA, 75 bp, synthetic construct
  source 1..75: mol_type = other DNA
ctgcaaagcatgagccgggaagagaagctggatattctgcgccgtgtcgataaagttgcccgcgaagcagacaaa

SEQ ID NO: 453246 - DNA, 75 bp, synthetic construct
  source 1..75: mol_type = other DNA
gttctcggcgctggctggcccggcgtgctgttgcatgaagcggtcggtcatggcctggaaggcgacttcaaccgc

SEQ ID NO: 453247 - DNA, 75 bp, synthetic construct
  source 1..75: mol_type = other DNA
ggacgggtcagggccgtactcctaaagcaatcgctgctgctatagaagctggtaagacactggaagattttgcaa

SEQ ID NO: 453248 - DNA, 75 bp, synthetic construct
  source 1..75: mol_type = other DNA
ggacgggtcagggtcgcactcctaaagcgatcgctgctgctatcgaagctggtaagacacttgaagattttacta

SEQ ID NO: 453249 - DNA, 75 bp, synthetic construct
  source 1..75: mol_type = other DNA
gcccgtaagttggatccagatgctggcaggtctggcgctgttgagtaccattggcggcagtttgtatcaggcgct

SEQ ID NO: 453250 - DNA, 75 bp, synthetic construct
  source 1..75: mol_type = other DNA
caaacgtaggtttaatggcgctacaggggctaagaggcgttgctgagattaatcagcaggcgcaaatttcccagc

SEQ ID NO: 453251 - DNA, 75 bp, synthetic construct
  source 1..75: mol_type = other DNA
aaatgccagaatggtgcgttttgcgagcacttcacgctgaccggaaggatagatgagtttctcaatatagaggcc

SEQ ID NO: 453252 - DNA, 75 bp, synthetic construct
  source 1..75: mol_type = other DNA
aatctggccattctttttgatgaagagctggctgaaaaggcatggcgtgcccgtcttgaggcacatgatgaacgt

SEQ ID NO: 453253 - DNA, 75 bp, synthetic construct
  source 1..75: mol_type = other DNA
ggacgggtcagggccgtactcctaaagcaatcgctgctgctatcgaagctggaaaaacactggaagactttgcaa

SEQ ID NO: 453254 - DNA, 75 bp, synthetic construct
  source 1..75: mol_type = other DNA
gaggccgctttcagtcgcgcgcagcaagcggcggaacgctgcaactggcgatgggtaagtgaatcgctacggtaa

SEQ ID NO: 453255 - DNA, 75 bp, synthetic construct
  source 1..75: mol_type = other DNA
gatgccttccacgcccgtgccagccactaccatgccggagaatgcttacgtcagcttgcggcattaacagtcgat

SEQ ID NO: 453256 - DNA, 75 bp, synthetic construct
  source 1..75: mol_type = other DNA
ggacgggtcagggccgtactcctaaagcaatcgctgctgctatcgaagctggtaaaacgctggaagacttcgcga

SEQ ID NO: 453257 - DNA, 75 bp, synthetic construct
  source 1..75: mol_type = other DNA
acaatattcgtacacttcgcgcacaggctcgtgaaacagatctggcaactctggaagagatgctggaaaaactct

SEQ ID NO: 453258 - DNA, 75 bp, synthetic construct
  source 1..75: mol_type = other DNA
ggaagaaaattcagcccgtaaagaacaagaagaacgtcaggctaaacttgaagccttccgccagaaactgttaga

SEQ ID NO: 453259 - DNA, 75 bp, synthetic construct
  source 1..75: mol_type = other DNA
ccaatttgacccagaaagcccgggaaacaatagcccttaaacacaaggacaggctcgatgatacagtcactgatg

SEQ ID NO: 453260 - DNA, 75 bp, synthetic construct
  source 1..75: mol_type = other DNA
gaactggctaatgatatctatctgaacggtgaattattcgcgcgggtagatgctgtctggcaacgccgtgaatcc

SEQ ID NO: 453261 - DNA, 75 bp, synthetic construct
  source 1..75: mol_type = other DNA
ttattagccgcgaacaaatccggagggctggtggttgacgatgtttcgcaactggcaggcatgagtgagcaagaa

SEQ ID NO: 453262 - DNA, 75 bp, synthetic construct
  source 1..75: mol_type = other DNA
ctccatacaggcggttatcgataagcagcaaggcgggtttagcgcgcagccgtgggactgggcattttatgccga

SEQ ID NO: 453263 - DNA, 75 bp, synthetic construct
  source 1..75: mol_type = other DNA
gacaggcagaacaggcggagtcagatcgcaaccggaagtttactgtggaagacgtcatcagaaccggtgcttttc

SEQ ID NO: 453264 - DNA, 75 bp, synthetic construct
  source 1..75: mol_type = other DNA
aaaatatggatcttcctgctataccgccacgctatcgcagcagttatttcgcccatatttttggtggcggatatg

SEQ ID NO: 453265 - DNA, 75 bp, synthetic construct
  source 1..75: mol_type = other DNA
ggcaacagcgaagatttagaacgtttgtatcgtcaatggcgcggtaaggcaccacagattgcgccgatgttgcaa

SEQ ID NO: 453266 - DNA, 75 bp, synthetic construct
  source 1..75: mol_type = other DNA
atttggcctgacgaatgccaacgaaccctgtacgcacgcctggatggaaaatggcaaacgctacgaagttaacta

SEQ ID NO: 453267 - DNA, 75 bp, synthetic construct
  source 1..75: mol_type = other DNA
ctggccgatatcgaacaacggttacaacagctcgaggcaatacaagcacaatggctgcgtcgtgccaagactcaa

SEQ ID NO: 453268 - DNA, 75 bp, synthetic construct
  source 1..75: mol_type = other DNA
ctttagttgaaaacatattcaaatcggttaagtcactaacatgtgagttacgaaagcatctcataaacttacgtt

SEQ ID NO: 453269 - DNA, 75 bp, synthetic construct
  source 1..75: mol_type = other DNA
tgtcgaaagagtggacaattaaccgaggactgtatgcctctttccgctatgaaggtgagtgggagcactaccctg

SEQ ID NO: 453270 - DNA, 75 bp, synthetic construct
  source 1..75: mol_type = other DNA
cgaatacgcctgggtgcgtgaacagggaaatcgggtagatattatcagccagggagccacgctgaacttcgcctt

SEQ ID NO: 453271 - DNA, 75 bp, synthetic construct
  source 1..75: mol_type = other DNA
acatcacgcagaatcagcactatcaacatctggcgcttgcagaacggcgaaaagcagcctcgttggtgcccttgc

SEQ ID NO: 453272 - DNA, 75 bp, synthetic construct
  source 1..75: mol_type = other DNA
tgatcgccgacgcattgaatacgacatatttctgttggtagaggaattacatgttctggatatcatccggaaagg

SEQ ID NO: 453273 - DNA, 75 bp, synthetic construct
  source 1..75: mol_type = other DNA
gataatcagcgacaacggtatgttcagcagcgcaacggaaacggagaagcggctggcacgcaaggttttacgtgg

SEQ ID NO: 453274 - DNA, 75 bp, synthetic construct
  source 1..75: mol_type = other DNA
ccggagaggataatccggtgcttacggctgtctggcagggacctgcgcacggactgtgtgtgttccagagaagat

SEQ ID NO: 453275 - DNA, 75 bp, synthetic construct
  source 1..75: mol_type = other DNA
gggcgtagcggtgatgtctggcacggctatctggccaacgcccggcccggtctgcgctatggctatcgtgttcat

SEQ ID NO: 453276 - DNA, 75 bp, synthetic construct
  source 1..75: mol_type = other DNA
caggttccggcaaaagcactacgctctatgcaggtttacaggagttgaacaaccacacgcgcaacatccttacag

SEQ ID NO: 453277 - DNA, 75 bp, synthetic construct
  source 1..75: mol_type = other DNA
tccagcctgacgggcgtgatggcgcagcgacttgttcgcacactgtgcaccgactgccgccagcccgcgcctgcc

SEQ ID NO: 453278 - DNA, 75 bp, synthetic construct
  source 1..75: mol_type = other DNA
tcactgttttgatggttatcggtgccatgggggtttctggctgcgaccgcaaggaagatgcgggtgtgaaaacga

SEQ ID NO: 453279 - DNA, 75 bp, synthetic construct
  source 1..75: mol_type = other DNA
tattacaagccgattcagtgccctgccgggtacgtcatgacaggtacaagaatgtacggcatcggagatggtgtt

SEQ ID NO: 453280 - DNA, 75 bp, synthetic construct
  source 1..75: mol_type = other DNA
gctcttctgcaaccggatacggtgctcgccatcagcaaacatattgaggcgatggatgaactttcgcgtgatgag

SEQ ID NO: 453281 - DNA, 75 bp, synthetic construct
  source 1..75: mol_type = other DNA
tgacgttcccggttatcccgtcaaagaaaatgcacccgaccggaaaaccagaagaactaatggcagagctggtca

SEQ ID NO: 453282 - DNA, 75 bp, synthetic construct
  source 1..75: mol_type = other DNA
agcagtagatgagctggtggactgtgtggcagagctggaaaccagagtcggaaagtttgaaaagctggtgcagga

SEQ ID NO: 453283 - DNA, 75 bp, synthetic construct
  source 1..75: mol_type = other DNA
ttttgaagataggttcaatgaaattaaaacgactcttggtgatattcaggaggtcactgaatatcttattggtcg

SEQ ID NO: 453284 - DNA, 75 bp, synthetic construct
  source 1..75: mol_type = other DNA
gctttacccggccatgcggggcatggccttgtgggttttcagttatgtggcctcagcgtcgtgtgcgggctgtgc

SEQ ID NO: 453285 - DNA, 75 bp, synthetic construct
  source 1..75: mol_type = other DNA
tagcgctgcgccgcattcagatccgtgagacgatcaaggcgcactttgataaggagatggagctcttcgataaag

SEQ ID NO: 453286 - DNA, 75 bp, synthetic construct
  source 1..75: mol_type = other DNA
gcctttcctgaggaaatcaggggtgagttaatgtcactatctgcgtttattgatgaaatcaaaaaactctattgg

SEQ ID NO: 453287 - DNA, 75 bp, synthetic construct
  source 1..75: mol_type = other DNA
ccagtgaatcataaatacaatatacctgacgcttggaagcagcagttcccatcaggaagtgaaattatccagtat

SEQ ID NO: 453288 - DNA, 75 bp, synthetic construct
  source 1..75: mol_type = other DNA
acaccttttcactctacaggagggagtttctcaggctcagcatagtgaaatgcgggatgcaggagtcaagctggt

SEQ ID NO: 453289 - DNA, 75 bp, synthetic construct
  source 1..75: mol_type = other DNA
tttgggtatgcacctgcacagatgaagaggacatcattgaaaccgcaattggtgaaattctgccaggggcgctta

SEQ ID NO: 453290 - DNA, 75 bp, synthetic construct
  source 1..75: mol_type = other DNA
gaagtcgctggaactgcacctggagcatctattcattgagcacggcctgcgacacttttcgacgcaggccatcac

SEQ ID NO: 453291 - DNA, 75 bp, synthetic construct
  source 1..75: mol_type = other DNA
tccctcttccctgcacaaaaaataccctgaagctgttcgtccagaattgatgactctgggacattttattgccag

SEQ ID NO: 453292 - DNA, 75 bp, synthetic construct
  source 1..75: mol_type = other DNA
ctgacaggcacactgatgaaagcatcggctgttgtggctgcggttaccgtcggcctcggcaccttagcggtggcg

SEQ ID NO: 453293 - DNA, 75 bp, synthetic construct
  source 1..75: mol_type = other DNA
attgcgccagctactgcacaaaccgcacggtatttttctggtgacggggccgacaggttccggcaaaagcaccac

SEQ ID NO: 453294 - DNA, 75 bp, synthetic construct
  source 1..75: mol_type = other DNA
atggtcgcaagcccaaaagattgcagaccaacgccaactttgaaaagcaggaattcaaggcgctttgggggcgaa

SEQ ID NO: 453295 - DNA, 75 bp, synthetic construct
  source 1..75: mol_type = other DNA
ccatctgctgaggcttaccacgatatcggatatcccgaagaaaatctccgtatgttagctgtgaagacaacatgc

SEQ ID NO: 453296 - DNA, 75 bp, synthetic construct
  source 1..75: mol_type = other DNA
aagcaaataaaatcaacaaaatatatttgtttaccttgcaagagggtgtctcagttgctcaatttaacgaaatga

SEQ ID NO: 453297 - DNA, 75 bp, synthetic construct
  source 1..75: mol_type = other DNA
tcagttgctcaatttaacgaaatgagagctgaaggtgtcaccttggttgtaccttcccctcttcataaaaaatat

SEQ ID NO: 453298 - DNA, 75 bp, synthetic construct
  source 1..75: mol_type = other DNA
gagcttaaagagagagccgatatccgcgggccggttctgcaatataaccattatcttaagcctgaagtgtttaat

SEQ ID NO: 453299 - DNA, 75 bp, synthetic construct
  source 1..75: mol_type = other DNA
cgcgcatgcctgagccggaagaagagttgatattcactgaggaggtgaacagcgctttttccggactgccacgtt

SEQ ID NO: 453300 - DNA, 75 bp, synthetic construct
  source 1..75: mol_type = other DNA
tgacaagagtcgccgcaagggagcgattcatgtcattagtgcgttctcaacaatgcacagtctggttatcggaca

SEQ ID NO: 453301 - DNA, 75 bp, synthetic construct
  source 1..75: mol_type = other DNA
ccacgatcacgatttgctggatcgcaaagcggcgctggcctggcttggcgatgacttcacgtattacatcggttt

SEQ ID NO: 453302 - DNA, 75 bp, synthetic construct
  source 1..75: mol_type = other DNA
cgtctggattgcgcctggcgctgtcacaaatgcgggaccattggctatgaagaggggatgagcagttccgggatg

SEQ ID NO: 453303 - DNA, 75 bp, synthetic construct
  source 1..75: mol_type = other DNA
gggtcgcaggccgctgaactggcgctccagctgcgtcgtgtgatgacagcgtttggcgtgacgccagatgatgtg

SEQ ID NO: 453304 - DNA, 75 bp, synthetic construct
  source 1..75: mol_type = other DNA
gaaacgggttccggtaaaacgactcagctaccgaaaatctgtatggagctggggcgcgggattaaagggctgatc

SEQ ID NO: 453305 - DNA, 75 bp, synthetic construct
  source 1..75: mol_type = other DNA
ctggtcatcggacagatcaagacggatgagaaatctaatgagattacagctatccctgaacttcttaacatgtta

SEQ ID NO: 453306 - DNA, 75 bp, synthetic construct
  source 1..75: mol_type = other DNA
ctatttgaaagagttgctgccgcggcgtcctgacctaaaaatcattatcacttccgcgactatcgacccggaacg

SEQ ID NO: 453307 - DNA, 75 bp, synthetic construct
  source 1..75: mol_type = other DNA
cagccgcgcaccgctgcacagttggcagagattgcgcgtggtggttatgtactgagtgattgtgacggtcagcct

SEQ ID NO: 453308 - DNA, 75 bp, synthetic construct
  source 1..75: mol_type = other DNA
ttgccaaaagctgtacgcaaacgtctggcggtagaagccagcatcgccggattctgggaacgctacgtcggcctg

SEQ ID NO: 453309 - DNA, 75 bp, synthetic construct
  source 1..75: mol_type = other DNA
gaagcgtttttaggccgcgtcaaaccgctggagttaccgttgctcgacagtcttgagcgcgagttacggcggatg

SEQ ID NO: 453310 - DNA, 75 bp, synthetic construct
  source 1..75: mol_type = other DNA
tttgtcaccgatgcacatgcaccggtaacgaataatattgaaaccatgaaattcgtcccgattgtccccgcttgg

SEQ ID NO: 453311 - DNA, 75 bp, synthetic construct
  source 1..75: mol_type = other DNA
ccactggctgatcattcaggggcaacgcagtatgcgcggcctgcgcatgaataaccctcggctggttcgatttta

SEQ ID NO: 453312 - DNA, 75 bp, synthetic construct
  source 1..75: mol_type = other DNA
gatatctggctaaacagcgccaactttaccctgccgctggacttctctgttttcgcacatttatgcgaagtgcca

SEQ ID NO: 453313 - DNA, 75 bp, synthetic construct
  source 1..75: mol_type = other DNA
atggcacaaaggtgagatcgaaagcgacatatggcttaacagcgccaactttacgctgccgctggatttttcgct

SEQ ID NO: 453314 - DNA, 75 bp, synthetic construct
  source 1..75: mol_type = other DNA
tgcccaacttccgtgcgttggaacaagcgccggagcaagaggcgggcaagagttttgctgcctgcgcattgataa

SEQ ID NO: 453315 - DNA, 75 bp, synthetic construct
  source 1..75: mol_type = other DNA
ctggaaagcctcaccctgaccttttatcaggatcatattgagcatcgagtgattgccgggatcatgcagcagatt

SEQ ID NO: 453316 - DNA, 75 bp, synthetic construct
  source 1..75: mol_type = other DNA
gtctgggttctgccggaaattgccgacgagccagccggagggctgatgctgaaagggccgcagggcgaggaaaaa

SEQ ID NO: 453317 - DNA, 75 bp, synthetic construct
  source 1..75: mol_type = other DNA
aactaaatgttctcaactgttccaccaccatggaaatgggggttgatatcgggggcattactgcggtggtaatga

SEQ ID NO: 453318 - DNA, 75 bp, synthetic construct
  source 1..75: mol_type = other DNA
gcgatatccctcaccatcgtaaactgacggtgacttttgaggatggtcaggtattgaagatccgcttcgatcagg

SEQ ID NO: 453319 - DNA, 75 bp, synthetic construct
  source 1..75: mol_type = other DNA
atcctgaagataatcagaacagacgctggcctcaaattcgtaatggcaatataacccatcgtttagcgaagttgc

SEQ ID NO: 453320 - DNA, 75 bp, synthetic construct
  source 1..75: mol_type = other DNA
tccccgcttcactggcgtttctttttacgtccgggagttcattttcatcatgggcgtgaactggaaatggacgac

SEQ ID NO: 453321 - DNA, 75 bp, synthetic construct
  source 1..75: mol_type = other DNA
atcaggatcatattgaacatcgggtaattgccaggatcatgcagcaaattctggcgagccatcaggtaacgctta

SEQ ID NO: 453322 - DNA, 75 bp, synthetic construct
  source 1..75: mol_type = other DNA
aagacgtaagatgcgaaaagcagccatggacagaaactatctggcgtcagtccttgcggggagcgggctttcgta

SEQ ID NO: 453323 - DNA, 75 bp, synthetic construct
  source 1..75: mol_type = other DNA
ttcgctgatgctgcgcgacagactgcgtttttctcgccgtctgcacggtgttaagaaggttaaaaatcctgatgc

SEQ ID NO: 453324 - DNA, 75 bp, synthetic construct
  source 1..75: mol_type = other DNA
tcattgcctcttcacgtgccctggccgtcaccggcactcatctttctcacatcaatacccgcgccgcagtgctta

SEQ ID NO: 453325 - DNA, 75 bp, synthetic construct
  source 1..75: mol_type = other DNA
tggaagtcatcttgccgcgcgatacggcagaccaaaatgagcaatactatcctcagattgtggaacgtttttatc

SEQ ID NO: 453326 - DNA, 75 bp, synthetic construct
  source 1..75: mol_type = other DNA
tggaggtcatcttgccacgcgacgcagcagatcaaagcgagcattactatacacagattgtggaacgtttttacc

SEQ ID NO: 453327 - DNA, 75 bp, synthetic construct
  source 1..75: mol_type = other DNA
atgcgaacgatcaccacacgtgaacagttattagtgaacggaaaagtcagggaacggattgccacacatatcgtg

SEQ ID NO: 453328 - DNA, 75 bp, synthetic construct
  source 1..75: mol_type = other DNA
gccatttaccaggagatggcgaaagagattgaacaggcagcaggtaaagtcgtgctacgtgaggcggcacgtccg

SEQ ID NO: 453329 - DNA, 75 bp, synthetic construct
  source 1..75: mol_type = other DNA
cgaagaggaatttcatatcgccggcggcagtactgatacgttgaccgccctgcgccgtgtgcgtcagctaacctc

SEQ ID NO: 453330 - DNA, 75 bp, synthetic construct
  source 1..75: mol_type = other DNA
ggaaaaccccgtcagtgcttctccctcgccctgctgatcctgccactgcttgaacagggcggctatgccatcacg

SEQ ID NO: 453331 - DNA, 75 bp, synthetic construct
  source 1..75: mol_type = other DNA
ggtaaacatccggctgccgcgcgcctgaatccggtatcccggggagcgcagttcatcactgtctcgctgatcatc

SEQ ID NO: 453332 - DNA, 75 bp, synthetic construct
  source 1..75: mol_type = other DNA
cgctggactggcaggaggtcagtaacagtgtcaccgatgaaaacggaaatattatccagcctccgtggaaagagt

SEQ ID NO: 453333 - DNA, 75 bp, synthetic construct
  source 1..75: mol_type = other DNA
accagccgcctgtggggacgcattgctgcgcggatcgacccggaatgggtggagccagttgctcagcatttgatt

SEQ ID NO: 453334 - DNA, 75 bp, synthetic construct
  source 1..75: mol_type = other DNA
aacatgctggatattaaaggaaaaatcatcacaactgatgcgatgggttgccagaaagatatagcagagaagata

SEQ ID NO: 453335 - DNA, 75 bp, synthetic construct
  source 1..75: mol_type = other DNA
gagaactgcctgtcacctgccacacctgtttctctgtatggcaggatgtacatcggttcaaacctggtgactttg

SEQ ID NO: 453336 - DNA, 75 bp, synthetic construct
  source 1..75: mol_type = other DNA
gcagagaagatacaaaaacagggaggtgattatttattcgctgtaaaaggaaatcagcgtcggcttaataaagcc

SEQ ID NO: 453337 - DNA, 75 bp, synthetic construct
  source 1..75: mol_type = other DNA
ggctggaataccttaatctggtacggcggtattatcggcttaagctccttattatcgaaagttaaattcttcgaa

SEQ ID NO: 453338 - DNA, 75 bp, synthetic construct
  source 1..75: mol_type = other DNA
gtttgaacgcgaatggacgcacttcaccagcatgacttacattgatgagttttcagaactgcatggcaaagatgt

SEQ ID NO: 453339 - DNA, 75 bp, synthetic construct
  source 1..75: mol_type = other DNA
gctgcatgaaaaagtccgcgctgaactgaacgacacggtggtggatattgcgaagcaggtcgagcaaatccttac

SEQ ID NO: 453340 - DNA, 75 bp, synthetic construct
  source 1..75: mol_type = other DNA
agccaagttagggctgtactttaacccgtatggcaaagtgctggatcttatcgacgactgtatctcctgcggtgt

SEQ ID NO: 453341 - DNA, 75 bp, synthetic construct
  source 1..75: mol_type = other DNA
aaggaaaaatcatcacaactgatgcgatgggttgccagaaagatattgcagagaagatacaaaaacagggcggtg

SEQ ID NO: 453342 - DNA, 75 bp, synthetic construct
  source 1..75: mol_type = other DNA
ttcttccgtccgaccgctccggcgctctctgcgtttgtcggcgcttcgttgctgtttatcagtaactttgtctgg

SEQ ID NO: 453343 - DNA, 75 bp, synthetic construct
  source 1..75: mol_type = other DNA
tccgtgcggacaacgctattgctgcggcctgctactttgccggtcatttcctcatcgctcgctgtatctctgata

SEQ ID NO: 453344 - DNA, 75 bp, synthetic construct
  source 1..75: mol_type = other DNA
actgtttatcagtaacgttgtctggctgggtagccattatcgccgccgcttccgtgcggataatgcgattaccgc

SEQ ID NO: 453345 - DNA, 75 bp, synthetic construct
  source 1..75: mol_type = other DNA
cgcggagtttggcagtgcgataccgtttctctggcagcatgaccattcccgcccggtggggcagtgtacggtgcg

SEQ ID NO: 453346 - DNA, 75 bp, synthetic construct
  source 1..75: mol_type = other DNA
ggggaatcacatctcgattttttgaagcaatatggtgattttgaaaatggtattcctgttcacgataccattgcc

SEQ ID NO: 453347 - DNA, 75 bp, synthetic construct
  source 1..75: mol_type = other DNA
tggacccaaaagcgagaggaactttacgcctcattagttcgcaaaggcgtcaatatcgaaaccgcacaaagcggc

SEQ ID NO: 453348 - DNA, 75 bp, synthetic construct
  source 1..75: mol_type = other DNA
gacaaagacgtcatcgcgattgatggaaaaacactccggcattcttatgacaagagtcgccgcaagggagcgatt

SEQ ID NO: 453349 - DNA, 75 bp, synthetic construct
  source 1..75: mol_type = other DNA
ttaacatgctggatattaaaggaaaatcatcacaactgatgcgatgggttgccagaaagatattgcagagaagat

SEQ ID NO: 453350 - DNA, 75 bp, synthetic construct
  source 1..75: mol_type = other DNA
ttcagggatacggcacattgctattaatattttgacgaatgataaggtattcaaggcagggttaagacgtaagat

SEQ ID NO: 453351 - DNA, 75 bp, synthetic construct
  source 1..75: mol_type = other DNA
aatgagatcacagctatcccagaacttcttaacatgctggatattaaaggaaaaatcatcacaactgatgcgatg

SEQ ID NO: 453352 - DNA, 75 bp, synthetic construct
  source 1..75: mol_type = other DNA
aggcggcctaagacttcatccatcataagatacgtcagtcacattcttactgaagccaatgaattttgtcataat

SEQ ID NO: 453353 - DNA, 75 bp, synthetic construct
  source 1..75: mol_type = other DNA
ggatacggcacattgctattaatattttgacgaatgataaggtattcaaggcagggttaagacgtaagatgcgaa

SEQ ID NO: 453354 - DNA, 75 bp, synthetic construct
  source 1..75: mol_type = other DNA
gatgataaagacgttattgcaattgatggaaaaacgctccggcattcttatgacaagagtcgccgcaggggagcg

SEQ ID NO: 453355 - DNA, 75 bp, synthetic construct
  source 1..75: mol_type = other DNA
tcacaactgatacgatgggttgccagaaagatattgcagagaagatacaaaaacagggcggtgattatttattcg

SEQ ID NO: 453356 - DNA, 75 bp, synthetic construct
  source 1..75: mol_type = other DNA
tgatttcacgtttgaatggaaaggattgaagaaattatgcgtggtagtctcctttcgctcaataatagcagagta

SEQ ID NO: 453357 - DNA, 75 bp, synthetic construct
  source 1..75: mol_type = other DNA
aagatattgcagagaagatacaaaaacagggaggtgattatttattcgctgtaaaaggaaaccaggggcggctta

SEQ ID NO: 453358 - DNA, 75 bp, synthetic construct
  source 1..75: mol_type = other DNA
taggaatggcgctgggtttggccggggcagagatgcaaactattctgaataactccctcgccagcccgtttacgc

SEQ ID NO: 453359 - DNA, 75 bp, synthetic construct
  source 1..75: mol_type = other DNA
tgacaagagtcgccgcaggggagcgattcatgtcattagttcgttctcaacaatgcacagtctggtcatcggaca

SEQ ID NO: 453360 - DNA, 75 bp, synthetic construct
  source 1..75: mol_type = other DNA
gatattaaaggaaaaatcatcacaactgatgcgatgggttgccagaaagatattgcagagaagatacaaaaacag

SEQ ID NO: 453361 - DNA, 75 bp, synthetic construct
  source 1..75: mol_type = other DNA
tgccagaaagatattgcagagaagatacaaaaacagggaggtgattatttattcgctgtaaaaggaaatcagggg

SEQ ID NO: 453362 - DNA, 75 bp, synthetic construct
  source 1..75: mol_type = other DNA
tcatcacaactgatgcgatgggttgccagaaagatattgcagagaagatacaaaaacagggaggtgattatttat

SEQ ID NO: 453363 - DNA, 75 bp, synthetic construct
  source 1..75: mol_type = other DNA
ggtattcctgttcacgataccatcgccagagttgtatcctgtatcagtcctgcaaaatttcacgagtgctttatt

SEQ ID NO: 453364 - DNA, 75 bp, synthetic construct
  source 1..75: mol_type = other DNA
gtttgaatggaaagggctgaagaaattatgcgtggcagtctcctttcggtctataatagcagaacaaaagaaaga

SEQ ID NO: 453365 - DNA, 75 bp, synthetic construct
  source 1..75: mol_type = other DNA
tcagttctgctgatttaaccgcagagaagttcgccacagcaatccgaaaccactggcatgtggagaataagctgc

SEQ ID NO: 453366 - DNA, 75 bp, synthetic construct
  source 1..75: mol_type = other DNA
gaaaaacgctccggcattcttatgataagagtcgccgcaggggagcgattcatgtcattagtgcgttctcaacaa

SEQ ID NO: 453367 - DNA, 75 bp, synthetic construct
  source 1..75: mol_type = other DNA
attacagacaagcctggaaaatggaacataaattatcggatattctactgttgactatttgtgccgttatttctg

SEQ ID NO: 453368 - DNA, 75 bp, synthetic construct
  source 1..75: mol_type = other DNA
tgccagaaagatattgcagagaagatacaaaaacagggcggtgattatttattcgcggtaaaaggaaaccagggg

SEQ ID NO: 453369 - DNA, 75 bp, synthetic construct
  source 1..75: mol_type = other DNA
attcatgtcattagtgcgttctcaacaatgcacagtctggttttcgggcagattaagacggatgagaaatccaat

SEQ ID NO: 453370 - DNA, 75 bp, synthetic construct
  source 1..75: mol_type = other DNA
atcgccttatcgaggagatcgaaacggaggatttgttattcacgttgcgcaaggtagagagtaaaggctttctgg

SEQ ID NO: 453371 - DNA, 75 bp, synthetic construct
  source 1..75: mol_type = other DNA
tcggacagatcaagacggatgagaaatctaatgagattacagctatcccggaaattcttaacatgctggacatta

SEQ ID NO: 453372 - DNA, 75 bp, synthetic construct
  source 1..75: mol_type = other DNA
ttcttcagatgataaagacgtcattgcaattgatggaaaaacgctccagcactcttatgacaagagtcgccgcag

SEQ ID NO: 453373 - DNA, 75 bp, synthetic construct
  source 1..75: mol_type = other DNA
aggattttggggaaacacatctcgattttttgaagcaatatggtgattttgaaaatggtattcctgtccacgata

SEQ ID NO: 453374 - DNA, 75 bp, synthetic construct
  source 1..75: mol_type = other DNA
ttttctcacggctaaagtctctacctctatcccggcttcgtttttgtggctgcacagtaactttatttgtttaat

SEQ ID NO: 453375 - DNA, 75 bp, synthetic construct
  source 1..75: mol_type = other DNA
acgatgcctggtacctgcgaaactttccttcaacagcatatcgtgcagccgctggggctacgtgaagaccagctc

SEQ ID NO: 453376 - DNA, 75 bp, synthetic construct
  source 1..75: mol_type = other DNA
gtgcaaacccttcagcaagttgaaaactatatggcgttaagtgaacgtgccagcgaatatttattggccgtgatc

SEQ ID NO: 453377 - DNA, 75 bp, synthetic construct
  source 1..75: mol_type = other DNA
aaaacagggaggtgattatttattcgctgtaaagggaaatcaggggcgactaaataaagcctttgaggaaaaatt

SEQ ID NO: 453378 - DNA, 75 bp, synthetic construct
  source 1..75: mol_type = other DNA
actatacggcattaagtgaacgtgccagcgaatatttattggccgtgatccgtcgcaaaccggatgccgtgattt

SEQ ID NO: 453379 - DNA, 75 bp, synthetic construct
  source 1..75: mol_type = other DNA
aaaatccaccagcagcaggttgatgtcagccagctcaccttcgtgaagctcgacgaatgggtggatctgccatta

SEQ ID NO: 453380 - DNA, 75 bp, synthetic construct
  source 1..75: mol_type = other DNA
cttgactaccattcttcagatgataaagacgtcatcgcaattgatggaaaaatacaccggcattcttatgacaag

SEQ ID NO: 453381 - DNA, 75 bp, synthetic construct
  source 1..75: mol_type = other DNA
atatcagttctgctgacttaaccgcagagaagttcgccacagcaatccgaaaccactggcacgtggagaataagc

SEQ ID NO: 453382 - DNA, 75 bp, synthetic construct
  source 1..75: mol_type = other DNA
agtgaaaagagtcacggcagagaagaaatccgtcttcatattgtttgtgatgtccctgatgagcttattgatttc

SEQ ID NO: 453383 - DNA, 75 bp, synthetic construct
  source 1..75: mol_type = other DNA
gaacttcttaacatgctggatattaaaggaaaaatcatcacaactgatgcgatgggatgccagaaagatattgca

SEQ ID NO: 453384 - DNA, 75 bp, synthetic construct
  source 1..75: mol_type = other DNA
taagctgcactggcgtctggatgtggtattgaatgaagacgactgcaaaataagaagaggaaatgcagcagaatt

SEQ ID NO: 453385 - DNA, 75 bp, synthetic construct
  source 1..75: mol_type = other DNA
cattgccagcgttgtatcctgtatctgtcctgcgaaatttcatgagagctttattaactggatgcttgactacca

SEQ ID NO: 453386 - DNA, 75 bp, synthetic construct
  source 1..75: mol_type = other DNA
atggaacttaaaaaattgatggaacatatttctattacttccgattacagacatgccaggaaagtggaacataaa

SEQ ID NO: 453387 - DNA, 75 bp, synthetic construct
  source 1..75: mol_type = other DNA
tttgccgttaccggagacactgaccagccgattcacattgagtcggatcagcaatctcttgatatgcaaggcaac

SEQ ID NO: 453388 - DNA, 75 bp, synthetic construct
  source 1..75: mol_type = other DNA
gcgtaaccaccgttctggtaccgtcgcagttgcaggacaaaaacaacaaaggccaaaccccggcgcagaagaagg

SEQ ID NO: 453389 - DNA, 75 bp, synthetic construct
  source 1..75: mol_type = other DNA
aatttccgctgaaagaattaaataatccagagcatgacagttacgcaatcagtgaaaagagtcacggcagagaag

SEQ ID NO: 453390 - DNA, 75 bp, synthetic construct
  source 1..75: mol_type = other DNA
ttgactatttttgccgttatttctggtgcagaaagttgggaagatatagaggattttggggaaacacatctcgat

SEQ ID NO: 453391 - DNA, 75 bp, synthetic construct
  source 1..75: mol_type = other DNA
ttatatcagttctgctgatttaaccgcagagaagttcgccacagcaatccgaaaccactggcatgtggagaataa

SEQ ID NO: 453392 - DNA, 75 bp, synthetic construct
  source 1..75: mol_type = other DNA
accggtggtctgacggaagcgctggcgctggcggtagatgtggaaccggcgcttcagttcacgacgggcgaattg

SEQ ID NO: 453393 - DNA, 75 bp, synthetic construct
  source 1..75: mol_type = other DNA
tgttaacttacgttgagcgttttgagccggaagcggtgattgacgtggcgacgctgaccggtgcctgcgtgatcg

SEQ ID NO: 453394 - DNA, 75 bp, synthetic construct
  source 1..75: mol_type = other DNA
accgacgccgaaggccgtctggtactgtgcgatgtgttaacttacgttgagcgttttgagccggaagcggtgatt

SEQ ID NO: 453395 - DNA, 75 bp, synthetic construct
  source 1..75: mol_type = other DNA
ttaacatgctggatattaaaggaaaaatcatcacaactgatgcgatggggtgccagaaagatattgcagagaaga

SEQ ID NO: 453396 - DNA, 75 bp, synthetic construct
  source 1..75: mol_type = other DNA
ttaaaggaaaaatcatcacaaccgatgcgatgggttgcgagaaagatattgcagagaagatacagagacagggag

SEQ ID NO: 453397 - DNA, 75 bp, synthetic construct
  source 1..75: mol_type = other DNA
ccgctggctcatgagctgattgccgcgtctgaacagtctggcgaccgcgcatggcgtttaccgctgggtgacgag

SEQ ID NO: 453398 - DNA, 75 bp, synthetic construct
  source 1..75: mol_type = other DNA
tgtgcgacgtgttaacctatgttgagcgttttgagccggaagcggtgattgacgtcgccacattgactggcgctt

SEQ ID NO: 453399 - DNA, 75 bp, synthetic construct
  source 1..75: mol_type = other DNA
ggtcagttttgctgatcttgatggcccgacctggttggcggtggatgtggagccgccgctacagtttacgaccgg

SEQ ID NO: 453400 - DNA, 75 bp, synthetic construct
  source 1..75: mol_type = other DNA
gatgctaatgaatcctggcgcgcggaagggttggcggcgcgatgtcagttgttggctgatttaggcgtcgctatg

SEQ ID NO: 453401 - DNA, 75 bp, synthetic construct
  source 1..75: mol_type = other DNA
tacggtgaaagcgatgcttcggtaatggcgcaaattatgagtgttgtgccgcaactggaaaaaggactgacacga

SEQ ID NO: 453402 - DNA, 75 bp, synthetic construct
  source 1..75: mol_type = other DNA
tccttaagccctctccagccgactttcccggtttggccgaaaatgaacacgcaacaatgacattgatgtctcgtt

SEQ ID NO: 453403 - DNA, 75 bp, synthetic construct
  source 1..75: mol_type = other DNA
aaacgtatgagcagtcctttatgactcaggatcatatccaggctgtgctgcaatgctatcgacatcgtctggggc

SEQ ID NO: 453404 - DNA, 75 bp, synthetic construct
  source 1..75: mol_type = other DNA
ttgactgggactctgtttcagaagatgacatttttgttgattatcctgaagatgttgatcaagaagaaagaatat

SEQ ID NO: 453405 - DNA, 75 bp, synthetic construct
  source 1..75: mol_type = other DNA
gtgatttgcttactgaaccggttaaaggggaatttagtagttacggattaagcgcaacagccactattccctggt

SEQ ID NO: 453406 - DNA, 75 bp, synthetic construct
  source 1..75: mol_type = other DNA
ttctgccagatcctgaattttcgagcgaaatgttgatggcggcgttatttgcaaaactgcatcgggtattaggtg

SEQ ID NO: 453407 - DNA, 75 bp, synthetic construct
  source 1..75: mol_type = other DNA
ctcacggcaatgccggaaatatgtccgcccactggccgctggtcagttggttacccgagcgtaatttcaatgttt

SEQ ID NO: 453408 - DNA, 75 bp, synthetic construct
  source 1..75: mol_type = other DNA
tcatccgttaccgatttgcgctgatgaaagttgccatacccgcagtaacctgaaggcgctgaaagggcgttatga

SEQ ID NO: 453409 - DNA, 75 bp, synthetic construct
  source 1..75: mol_type = other DNA
tggaagaagatggtgttaaaggtgctggggaatgcactccctatccgcgctatggtgaaagtgacgcttcagtaa

SEQ ID NO: 453410 - DNA, 75 bp, synthetic construct
  source 1..75: mol_type = other DNA
tgaagcctcaacgtggcgtaaaggacttacggactattgccaatgttcacctgtcactcctattcctgaaataaa

SEQ ID NO: 453411 - DNA, 75 bp, synthetic construct
  source 1..75: mol_type = other DNA
ccaacgttagcgccggtgtatgactttgtttctgtcgctccctatccggaatatttttactcaaactatctggcg

SEQ ID NO: 453412 - DNA, 75 bp, synthetic construct
  source 1..75: mol_type = other DNA
tgtggctaagtggacaagtaagaaccttacagagcttggctttgaagagtatgttaaacaaacacatacttctga

SEQ ID NO: 453413 - DNA, 75 bp, synthetic construct
  source 1..75: mol_type = other DNA
tccttatcgaaacaagaaattagtgtcatgcggtatattcttgatggcaaggataataatgacattgctgaaaaa

SEQ ID NO: 453414 - DNA, 75 bp, synthetic construct
  source 1..75: mol_type = other DNA
acggtatccaggtgttagaaacgctgaggaagcgccaatatagcggaattattattattgtctccgctaaaaatg

SEQ ID NO: 453415 - DNA, 75 bp, synthetic construct
  source 1..75: mol_type = other DNA
atgagcgccgcgcttcaatacttcgacgaaaatttacctcaccgcccctatcacacggatgatctcgctttcggc

SEQ ID NO: 453416 - DNA, 75 bp, synthetic construct
  source 1..75: mol_type = other DNA
cacacctgctctacgcactcaatatcgccgtgagaaccgcgccggacagctcggttaaggcgctgaaatacgccg

SEQ ID NO: 453417 - DNA, 75 bp, synthetic construct
  source 1..75: mol_type = other DNA
tgccgtgagaaccgcgcctgatgcgtcggttaaggcactgaaatacgccgctgcaattgaacgtgcgctgtgtga

SEQ ID NO: 453418 - DNA, 75 bp, synthetic construct
  source 1..75: mol_type = other DNA
tggcttgatgccgtgattcagcgtgtcgaaatgtacaacgcatcgcttcctgttccgctttcaccagctgaatgc

SEQ ID NO: 453419 - DNA, 75 bp, synthetic construct
  source 1..75: mol_type = other DNA
attttgtctggagatgcacagcaaagcattgcgcaaatccggtgtgccacaacacaaactggacgccctggcagg

SEQ ID NO: 453420 - DNA, 75 bp, synthetic construct
  source 1..75: mol_type = other DNA
aggatattaaagaagaattaccagcgtgcatcgatacagacaagaagctgaaagaagtaatcaactttatcgcta

SEQ ID NO: 453421 - DNA, 75 bp, synthetic construct
  source 1..75: mol_type = other DNA
cggcgtgctggcaggttgtgaaaacatgccaggcggtcgcgcctatcgtccgggcgatgtgttaaccaccatgtc

SEQ ID NO: 453422 - DNA, 75 bp, synthetic construct
  source 1..75: mol_type = other DNA
cttgcctttgacgtggaccggatgggagctgcgattgactggagcgaccggaactgtccgcccccaaacatcacc

SEQ ID NO: 453423 - DNA, 75 bp, synthetic construct
  source 1..75: mol_type = other DNA
cgcacagtatgtggctgatacgcacacgccagaaattcaggctgcacgcggtcgcaagggcggttctaagtctaa

SEQ ID NO: 453424 - DNA, 75 bp, synthetic construct
  source 1..75: mol_type = other DNA
cggtcccgaaccctggtcggcggaatccgtcgaatttacggctaaggacggtactcatctgcaaggctggtttat

SEQ ID NO: 453425 - DNA, 75 bp, synthetic construct
  source 1..75: mol_type = other DNA
gcgcgatgtggtgtcgattccagtcacggtgaaaacgcgtattggtattgacgaccaggacagctatgaatttct

SEQ ID NO: 453426 - DNA, 75 bp, synthetic construct
  source 1..75: mol_type = other DNA
tattcaccctgctcacgctgaccactgtaccggcccaggccgatattattgacgacaccattggcaatattcagc

SEQ ID NO: 453427 - DNA, 75 bp, synthetic construct
  source 1..75: mol_type = other DNA
caaaaacagggaggtgattatttattcgcggtgaaaggaaaccaggggtggctaaataaagcctttgaggaaaaa

SEQ ID NO: 453428 - DNA, 75 bp, synthetic construct
  source 1..75: mol_type = other DNA
aaactaatcaaaccagcgtgacgcctgaaaaaactggctcttactggagttctcggtttagcattgctcctatgc

SEQ ID NO: 453429 - DNA, 75 bp, synthetic construct
  source 1..75: mol_type = other DNA
gttccaggggatccctggcgcgcggcagtggcggcgttatttaagtgaaaatgcccataaagcaggtgccgatat

SEQ ID NO: 453430 - DNA, 75 bp, synthetic construct
  source 1..75: mol_type = other DNA
tgtttggcgcgtgcctgatgggcaatgcgcaattggtagccgactgcgtgaaagcgatgcgcgatgtggtgtcga

SEQ ID NO: 453431 - DNA, 75 bp, synthetic construct
  source 1..75: mol_type = other DNA
cttcagacaggctgatgccagtatttcccgccgtcatggcggcaccgggctggggctggtgattacgcaaaaact

SEQ ID NO: 453432 - DNA, 75 bp, synthetic construct
  source 1..75: mol_type = other DNA
aagaatctctgccagctcatcgaacaacagctacgcagcggtactaaagaagaagatctggagccggagctactg

SEQ ID NO: 453433 - DNA, 75 bp, synthetic construct
  source 1..75: mol_type = other DNA
attatctggcgaaaccgattgaagaagagcgattgcataatttgttgttgcgctacaagcctggcagcggtattt

SEQ ID NO: 453434 - DNA, 75 bp, synthetic construct
  source 1..75: mol_type = other DNA
aggtgggtaacaatcaactggatagctacctgccagtacgcaataaaaataatgatgttaactggcaatttgtta

SEQ ID NO: 453435 - DNA, 75 bp, synthetic construct
  source 1..75: mol_type = other DNA
acttattattatcttaagaaaactctttgtgcgggaaatgtttgagttttggttatatgtatgctcgttcgttat

SEQ ID NO: 453436 - DNA, 75 bp, synthetic construct
  source 1..75: mol_type = other DNA
accaggcgacgtccgatctgcgtgaaacgctggagcagatggagattcagaacgttgagttggatctggcgaaaa

SEQ ID NO: 453437 - DNA, 75 bp, synthetic construct
  source 1..75: mol_type = other DNA
ggcttcgcggcggattattactaccgctgtgcggtgatggcggcaacgctggtccgtctgggggatattccgcag

SEQ ID NO: 453438 - DNA, 75 bp, synthetic construct
  source 1..75: mol_type = other DNA
gagactgggagaaccattcatctttacgctgccagaatcagttagagtcgatgttgacatatatcctctcaaaaa

SEQ ID NO: 453439 - DNA, 75 bp, synthetic construct
  source 1..75: mol_type = other DNA
cgcggcagctaacgccagcctggcgattctcgaatctggcgactggcagcaacaggtagcggctattgaagcgca

SEQ ID NO: 453440 - DNA, 75 bp, synthetic construct
  source 1..75: mol_type = other DNA
cgcagcagcaaacgccagcctggcgattctcgaatctggcgactggcagcagcaggtggcggctattgaagtaca

SEQ ID NO: 453441 - DNA, 75 bp, synthetic construct
  source 1..75: mol_type = other DNA
gaaagagccaaaacgcctgattctgatccctgacggcgaacacattgatgccttttcggaacgtcatggtgatgt

SEQ ID NO: 453442 - DNA, 75 bp, synthetic construct
  source 1..75: mol_type = other DNA
gtgaaaagtgcgcgccttgtgctggctgccatcctgctgtttctggtggtggtggatttcaccggacggctgatg

SEQ ID NO: 453443 - DNA, 75 bp, synthetic construct
  source 1..75: mol_type = other DNA
atgtcggtactggcagatggtgtgctggtggtgatggtgctggtcgtgctccggcctttactgcgcaaatctgaa

SEQ ID NO: 453444 - DNA, 75 bp, synthetic construct
  source 1..75: mol_type = other DNA
aggctataatacaatactgtcaatcaatatttcatttatatgagaaaaaggtatttataatgtcaattataaaaa

SEQ ID NO: 453445 - DNA, 75 bp, synthetic construct
  source 1..75: mol_type = other DNA
ggtttatcccttcgtctggctggacgccattcactataaaatccgcgaagatgggtgttatcagagcaaggcagt

SEQ ID NO: 453446 - DNA, 75 bp, synthetic construct
  source 1..75: mol_type = other DNA
taatgttctgatggcagcacgcgacatcctgaaggtaaagcggaacggcgggaatcccggctcgccggactccga

SEQ ID NO: 453447 - DNA, 75 bp, synthetic construct
  source 1..75: mol_type = other DNA
gttgctgtaagaatccaaagtaatcagtttactgatttaaaaaacaagacaattcagggtcataaagacactgtc

SEQ ID NO: 453448 - DNA, 75 bp, synthetic construct
  source 1..75: mol_type = other DNA
cgaaaaaacatcatattctctaataaaaacagagcaaacaggaaaactgttaaacagaaaaataaccaccactcc

SEQ ID NO: 453449 - DNA, 75 bp, synthetic construct
  source 1..75: mol_type = other DNA
aaagcaatcagtttactgatttgaaaaacaaaaaaattcaaggccatcaaaacacagttgccagtgtcatggatt

SEQ ID NO: 453450 - DNA, 75 bp, synthetic construct
  source 1..75: mol_type = other DNA
ttgccggagcctcggcactggttctcacctcttatctggtgcgttgtaagccgggtgaacccatgccggaagcaa

SEQ ID NO: 453451 - DNA, 75 bp, synthetic construct
  source 1..75: mol_type = other DNA
acctgattacccatcagtttgcgggtggcaccattggtaacaccatgcacaactactcggtgctcgcggacgacc

SEQ ID NO: 453452 - DNA, 75 bp, synthetic construct
  source 1..75: mol_type = other DNA
caagtatttatgtgccgactgggagatgaacaggaggatcatactatgaatgcatttttgcgttttctggataca

SEQ ID NO: 453453 - DNA, 75 bp, synthetic construct
  source 1..75: mol_type = other DNA
aaacgtaaaactcaacatccattgttgccaggtgctatcccggaatttaatcagtatgagtttagccgcgccatg

SEQ ID NO: 453454 - DNA, 75 bp, synthetic construct
  source 1..75: mol_type = other DNA
cgttgctttacgctgattggcgagtccggggaacgtacctttgctatcagccctggccacatgaaccagctgcgg

SEQ ID NO: 453455 - DNA, 75 bp, synthetic construct
  source 1..75: mol_type = other DNA
aactattctgtactggcagacgaccgttcggtgctgctgggcgtgatgtgcagcaatattgaaattggcagctac

SEQ ID NO: 453456 - DNA, 75 bp, synthetic construct
  source 1..75: mol_type = other DNA
gtacatccacagcgcagccgggatcgcatcgctaccgtctggatcgccccctgggtggacggcgataacgctttc

SEQ ID NO: 453457 - DNA, 75 bp, synthetic construct
  source 1..75: mol_type = other DNA
tgccccctgggtggacagcgataacgctttccatcagcccggtcgggtctcctttgtggttacctctgccgaatg

SEQ ID NO: 453458 - DNA, 75 bp, synthetic construct
  source 1..75: mol_type = other DNA
acggttacaatcacccgcagcttaatgcggcgatgaagtcgcaaattgatgctatgtcgcatgtgatgtttggcg

SEQ ID NO: 453459 - DNA, 75 bp, synthetic construct
  source 1..75: mol_type = other DNA
caggtattcgccttggcggtctgtcatctgttcagacatggaatggtcccggctggtctgacaggtcaggttatg

SEQ ID NO: 453460 - DNA, 75 bp, synthetic construct
  source 1..75: mol_type = other DNA
gtagacagcgataacgcctttcatcagcccggtcgggtgtcctttgtggtcagccctgccgactgggttcttccg

SEQ ID NO: 453461 - DNA, 75 bp, synthetic construct
  source 1..75: mol_type = other DNA
accgtccgatcggctccgtggttacaccggcaccgtcatgtcagagcgtgcgctgtgaccatcctggatcggtgc

SEQ ID NO: 453462 - DNA, 75 bp, synthetic construct
  source 1..75: mol_type = other DNA
agcctggatgtattgattcacttgaagtacgaaaaaaaccgggaggacattggattattcgggatttggcgggat

SEQ ID NO: 453463 - DNA, 75 bp, synthetic construct
  source 1..75: mol_type = other DNA
tgcttcagcgctatctcgatcctgacgatccagatatgcatagccttatcatgcaccgcctgctgctgggctggc

SEQ ID NO: 453464 - DNA, 75 bp, synthetic construct
  source 1..75: mol_type = other DNA
catgcgtttggcattccgctgtatacctcgccggaacagataaccaggatgccggatatcgcctgtattgtcgtg

SEQ ID NO: 453465 - DNA, 75 bp, synthetic construct
  source 1..75: mol_type = other DNA
cgcgcaatgtttgatgatgcggattactgcgcccgcaaactgcttgatgcgctggctggcacagggcggctactt

SEQ ID NO: 453466 - DNA, 75 bp, synthetic construct
  source 1..75: mol_type = other DNA
cgcctgaaggcagaaaaagcagcacttgctgaagcggcacaaaaagccgcagaggaacggatcacaccaccgtgg

SEQ ID NO: 453467 - DNA, 75 bp, synthetic construct
  source 1..75: mol_type = other DNA
gcagctgaaaatggactggcaggaagtcagcaacagcttcaccgatgaagacggaaataccatccagcccccctg

SEQ ID NO: 453468 - DNA, 75 bp, synthetic construct
  source 1..75: mol_type = other DNA
gaacttgtggccggattcagtgaggttgtggaggtgtacaactggcgttgccgtaacggagatatcagtactgat

SEQ ID NO: 453469 - DNA, 75 bp, synthetic construct
  source 1..75: mol_type = other DNA
gcaatgttgctgatcagtcacgacctgccattagttgcccaattttgccatcgggtgctggtgatgtatcaggga

SEQ ID NO: 453470 - DNA, 75 bp, synthetic construct
  source 1..75: mol_type = other DNA
ccgagaatccgcagtggtggcagcaattcctcaaagaccacgtctctatccttgcgatgaacgaagatgaagccg

SEQ ID NO: 453471 - DNA, 75 bp, synthetic construct
  source 1..75: mol_type = other DNA
attcctcaaagaccacgtctctatccttgcgatgaacgaagatgaagccgaagcgttgaccggagaaagcgatcc

SEQ ID NO: 453472 - DNA, 75 bp, synthetic construct
  source 1..75: mol_type = other DNA
cactatttgcgtatttatatggggcatctgcgacaaaaactggagcaagatcccgcccgcccccgccattttatt

SEQ ID NO: 453473 - DNA, 75 bp, synthetic construct
  source 1..75: mol_type = other DNA
gcaagatccgcgttatgcacttaatccagtgaagacggtaaaagcgcaactggaagaggcaattacgctccatca

SEQ ID NO: 453474 - DNA, 75 bp, synthetic construct
  source 1..75: mol_type = other DNA
atggggctgattcgcaaacccggcagggtaaccgcagacacacttaacattctggggcgcaatgcgctcactctc

SEQ ID NO: 453475 - DNA, 75 bp, synthetic construct
  source 1..75: mol_type = other DNA
gatgaaatcgcaaattgatgccatgtcacacgtgatgtttggcggtattacccatgcgccagccattgagctgtg

SEQ ID NO: 453476 - DNA, 75 bp, synthetic construct
  source 1..75: mol_type = other DNA
ctgattttatccgtcctggcagcggtagcttgcttaaacagattgaagcgaaaaccgccgccagattaaagcaat

SEQ ID NO: 453477 - DNA, 75 bp, synthetic construct
  source 1..75: mol_type = other DNA
ggtgaactggctgattatctcgatttgagcgcttcagcgcgccgtagcatcgataaacattacgggatggggcga

SEQ ID NO: 453478 - DNA, 75 bp, synthetic construct
  source 1..75: mol_type = other DNA
aaggcgctgaaatatgccgcagcggttgaacgttcgctgtgtgagaaactttgtgctgatgtgaactacagcgga

SEQ ID NO: 453479 - DNA, 75 bp, synthetic construct
  source 1..75: mol_type = other DNA
tcagggctggccagcattctcacagtggcttgatgctgtgattcagcgtgtcgaaatgtacaacgcatcgcttcc

SEQ ID NO: 453480 - DNA, 75 bp, synthetic construct
  source 1..75: mol_type = other DNA
gaacagacagttcgccagatttatcaaaactataaatctgatgccagcgcgccttattttggtgagacaggagag

SEQ ID NO: 453481 - DNA, 75 bp, synthetic construct
  source 1..75: mol_type = other DNA
gagcaggcaataacatctgaacgcatacaaaaggtgctaaccctgaatgataatctcactctaccgggcaatatt

SEQ ID NO: 453482 - DNA, 75 bp, synthetic construct
  source 1..75: mol_type = other DNA
cgggctattggcaagagcatagcgaaatacacgcacaggaactttacgccggaaactttcgcacagtatgtggcg

SEQ ID NO: 453483 - DNA, 75 bp, synthetic construct
  source 1..75: mol_type = other DNA
gaaccagcctcatgcacagttctggctggtttttgacgttgaccgcgagggggctgctattgactggagcgaccg

SEQ ID NO: 453484 - DNA, 75 bp, synthetic construct
  source 1..75: mol_type = other DNA
cttcgtatctccggtaaagggcgcgcacttcttgcacggtatatccagcagaaccagcctcatgcacagttctgg

SEQ ID NO: 453485 - DNA, 75 bp, synthetic construct
  source 1..75: mol_type = other DNA
aatacacctaccgaaaattctctcctgaaggtttttctgcggtacaggctgcgcgtggtcgcaaaggtggaaaaa

SEQ ID NO: 453486 - DNA, 75 bp, synthetic construct
  source 1..75: mol_type = other DNA
aatacacctaccgcaaattctctcctgaaggcttttccgcggtacaggctgctcgaggtcgtaagggcggtaatg

SEQ ID NO: 453487 - DNA, 75 bp, synthetic construct
  source 1..75: mol_type = other DNA
agggcgattcgtcagggatggccagcattctcacagtggcttgatgcggtgattcagcgtgtcgaaatgtacaac

SEQ ID NO: 453488 - DNA, 75 bp, synthetic construct
  source 1..75: mol_type = other DNA
ccgctcccctcggcgcgcattacgacggtcagggcgtcaacttcacacttttctccgctcatgccgagcgggtag

SEQ ID NO: 453489 - DNA, 75 bp, synthetic construct
  source 1..75: mol_type = other DNA
aggcgggatgcgcatgtaccatccggaatggttaaaacgaatccgcaaaatgtgcgatcgcgaaggtatcttgct

SEQ ID NO: 453490 - DNA, 75 bp, synthetic construct
  source 1..75: mol_type = other DNA
cgcgccggatattttgtgtctcggtaaagccttaaccggcggcacaatgaccctttccgccacgctcaccacgcg

SEQ ID NO: 453491 - DNA, 75 bp, synthetic construct
  source 1..75: mol_type = other DNA
atgagcgccgcgcttcaatacttcgaagaaaatttacccctccgcccctatcacacggatgatctcgctttcgga

SEQ ID NO: 453492 - DNA, 75 bp, synthetic construct
  source 1..75: mol_type = other DNA
actcaatgcacagcctgtggaaaggctatctgccagaaaacctgtttgctcccgccccgcaaagccgcatggatg

SEQ ID NO: 453493 - DNA, 75 bp, synthetic construct
  source 1..75: mol_type = other DNA
gctacgcgagcaacttgcccccgcctgtgacgccgaaatggttgccgatgtgcgcgtactgggggcaatcggcgt

SEQ ID NO: 453494 - DNA, 75 bp, synthetic construct
  source 1..75: mol_type = other DNA
gccggctgctttatgcacgggccaacttttatgggcaatccgctggcctgcgcggcagcaaacgccagcctggcg

SEQ ID NO: 453495 - DNA, 75 bp, synthetic construct
  source 1..75: mol_type = other DNA
atcactatgactgggaagatgatgccccgccgcgcacgtcgtggggcagtaccatcatttatgaagcccatgtca

SEQ ID NO: 453496 - DNA, 75 bp, synthetic construct
  source 1..75: mol_type = other DNA
cagcgcctgcctgcgttattgggtagaaacctgccacgtcgatggtttccgctttgatctggcggcagtcatggg

SEQ ID NO: 453497 - DNA, 75 bp, synthetic construct
  source 1..75: mol_type = other DNA
gattgatccttgcgcgcggcaaattgacggggagtttaaagataacccgctgctgcacgccggtcataatgaacc

SEQ ID NO: 453498 - DNA, 75 bp, synthetic construct
  source 1..75: mol_type = other DNA
acatctgcacgcacgctgaaaccttgggagaaattagggatcagtcgcgcctggtattaccaactgaaaaaacga

SEQ ID NO: 453499 - DNA, 75 bp, synthetic construct
  source 1..75: mol_type = other DNA
ctggtttttgacgttgaccgtgtaggagctgcgattgactggagcgacctgaacgcccccgcaccgaacatcacc

SEQ ID NO: 453500 - DNA, 75 bp, synthetic construct
  source 1..75: mol_type = other DNA
aaggattaacgtatctgcacccggagatcccggtcgagatccgcggcacttataaagccctggggcatccggtga

SEQ ID NO: 453501 - DNA, 75 bp, synthetic construct
  source 1..75: mol_type = other DNA
aacacacaaccaatccgcttcacatgccagagcgccaccggcagcacgggacatggacaccggaacgccttatcg

SEQ ID NO: 453502 - DNA, 75 bp, synthetic construct
  source 1..75: mol_type = other DNA
tttaaactcggtagtttaacactgccacagcaacacggtcgtagtgctaagatccgcttagttggtggcaacggt

SEQ ID NO: 453503 - DNA, 75 bp, synthetic construct
  source 1..75: mol_type = other DNA
cgctgttatggacgttcattgtcccggtgatagtaataatactgcggcagcggttcttcatgttcagggtgctga

SEQ ID NO: 453504 - DNA, 75 bp, synthetic construct
  source 1..75: mol_type = other DNA
atattactggcggtaaaggccagaaaattgtaatgaatagcgaagttgcattatctgaaaatgctcgtttggctg

SEQ ID NO: 453505 - DNA, 75 bp, synthetic construct
  source 1..75: mol_type = other DNA
gcttatgttatggttcacggcgcgctgaaacgcctggctgtgaagatgtccaaaatctgtaacgacctgcgcttg

SEQ ID NO: 453506 - DNA, 75 bp, synthetic construct
  source 1..75: mol_type = other DNA
aggtggtttactgaatccgcagggatggggagctgaaggagggcgtgcattggtagttgatgatgcaggtgctgc

SEQ ID NO: 453507 - DNA, 75 bp, synthetic construct
  source 1..75: mol_type = other DNA
cattaacccgctgcgctttaatctaatctgtggtgctgatactcagagtcgaactggggacctcacccttaccaa

SEQ ID NO: 453508 - DNA, 75 bp, synthetic construct
  source 1..75: mol_type = other DNA
gcaaccgtgggacgttaaattttgctggcaatcatcaaggccaatatgatattgagcatttaaacgaacaaccga

SEQ ID NO: 453509 - DNA, 75 bp, synthetic construct
  source 1..75: mol_type = other DNA
gttcctcaaaattgggggcaagctattattcgtgttggatctgcggaggcatcgccagcggctggtcatcctcaa

SEQ ID NO: 453510 - DNA, 75 bp, synthetic construct
  source 1..75: mol_type = other DNA
gtcaatctatggactatatggaactcgtccattggggtgcaagcaatacaggtcgaaataacgttttaagtcttc

SEQ ID NO: 453511 - DNA, 75 bp, synthetic construct
  source 1..75: mol_type = other DNA
ttcgtagattgaccatcgatggtggcttaggttccggttctaatgctggtattgatattcgtcgaggaccaaacg

SEQ ID NO: 453512 - DNA, 75 bp, synthetic construct
  source 1..75: mol_type = other DNA
cttccgtagttctgctcctgccactatctggcatgaaactgttgatgatcaaaattatcgtcttgctactggata

SEQ ID NO: 453513 - DNA, 75 bp, synthetic construct
  source 1..75: mol_type = other DNA
ctggcggtaaaggccagaaaattgtaatgaatagcgaagttgcattatctgaaaatgctcgtttggctgtcaaag

SEQ ID NO: 453514 - DNA, 75 bp, synthetic construct
  source 1..75: mol_type = other DNA
accggaagtgatgacggtcgccacagcaacacgtctctggcgtggggggctggcgtgcagtttaacccgaccgaa

SEQ ID NO: 453515 - DNA, 75 bp, synthetic construct
  source 1..75: mol_type = other DNA
taccgtcaccgtttcaaatggcagtgccacctgcgggagtgtgagtctctccgtgaaagggaatggcagcaacaa

SEQ ID NO: 453516 - DNA, 75 bp, synthetic construct
  source 1..75: mol_type = other DNA
taacccgaccgaatccgtggccattgatattgcttatgaaggttccggcagtggcgactggcgcactgacggctt

SEQ ID NO: 453517 - DNA, 75 bp, synthetic construct
  source 1..75: mol_type = other DNA
attatctcaatcaaatgcgcctcggacgattgccgaataatttctgggtaccacgatgcttgttttcaccacaag

SEQ ID NO: 453518 - DNA, 75 bp, synthetic construct
  source 1..75: mol_type = other DNA
caggggatgctatggaaaccttcctttcccttcgtcatatcaacaaaacgtttcatgccacgcgagcgctgcgcg

SEQ ID NO: 453519 - DNA, 75 bp, synthetic construct
  source 1..75: mol_type = other DNA
gtgtcgacttttgcgtattttcatgaaaggagatcactcaataacttccatcgagatcgggtaataacatttgaa

SEQ ID NO: 453520 - DNA, 75 bp, synthetic construct
  source 1..75: mol_type = other DNA
gcacgaacgctatgtcggtatctccaacctgatgctgaaacctgaactgtacctggcggtggggatctccgggca

SEQ ID NO: 453521 - DNA, 75 bp, synthetic construct
  source 1..75: mol_type = other DNA
gtgcagtttaacccgaccgaatccgtggccattgatgtcgcttatgaaggctccggcagtggtgactggcgcact

SEQ ID NO: 453522 - DNA, 75 bp, synthetic construct
  source 1..75: mol_type = other DNA
ttacggacacgctggggctgattacgtccttcagttatgccaatgctgaggatgagcaaaaaacgcactacagcg

SEQ ID NO: 453523 - DNA, 75 bp, synthetic construct
  source 1..75: mol_type = other DNA
gtcattcagttatgccaacgctgaagatgagcaaaaacgcattacagcgatacccgctggcatgaagattccgtg

SEQ ID NO: 453524 - DNA, 75 bp, synthetic construct
  source 1..75: mol_type = other DNA
acgttctccggggattatctccgcgtaactgacaacaaggggaaaacgcacgatgtgctgaccggaagtgatgac

SEQ ID NO: 453525 - DNA, 75 bp, synthetic construct
  source 1..75: mol_type = other DNA
atgcaagatgttattcttaaattgattgccagaggattgattgatatcagaattgcagctaactctggaaattca

SEQ ID NO: 453526 - DNA, 75 bp, synthetic construct
  source 1..75: mol_type = other DNA
accgaatccgtggccgttgatgtcgcttatgaaggctccggcagcggtgactggcgtaccaacagtttcatcgtg

SEQ ID NO: 453527 - DNA, 75 bp, synthetic construct
  source 1..75: mol_type = other DNA
acgcatatcgtcttgctactggatacgaagatacaaatcaggaattattgctgacagtaacatccgggttacatg

SEQ ID NO: 453528 - DNA, 75 bp, synthetic construct
  source 1..75: mol_type = other DNA
gctggtggtcaagcgcgaagcgctgggcaccgtactacgctcacgtagcgaagacatcgggcagtccagtgttaa

SEQ ID NO: 453529 - DNA, 75 bp, synthetic construct
  source 1..75: mol_type = other DNA
tgataaccaaaatctttgccaatccggtgataccgcagatcgacgactactacgaaccttttaccttcgactatg

SEQ ID NO: 453530 - DNA, 75 bp, synthetic construct
  source 1..75: mol_type = other DNA
aactacgaagaccgtttcgttattccaaccagtcatcgtgaaatggcaggcgatgcgtttgcagaacgcaacggc

SEQ ID NO: 453531 - DNA, 75 bp, synthetic construct
  source 1..75: mol_type = other DNA
atgccttattaccgcaggaggccgggaaattagccgggcagtatatcagcgcacataacacccttgtggaaattc

SEQ ID NO: 453532 - DNA, 75 bp, synthetic construct
  source 1..75: mol_type = other DNA
accggctctggctaacgatgcgatgcctgagcaggacccggtgtttaaactggcgggagttgccccggattatgc

SEQ ID NO: 453533 - DNA, 75 bp, synthetic construct
  source 1..75: mol_type = other DNA
atgcgtaaattatgtgctgttattctgtccgcagtagtctggcaggtcgccgttggtacgtcagcgagtgcagca

SEQ ID NO: 453534 - DNA, 75 bp, synthetic construct
  source 1..75: mol_type = other DNA
gggcggactgcccaaaagcgaaggcgtgcttcccgccatcgaaagcctgcgtattccggtgcaatacctcgccaa

SEQ ID NO: 453535 - DNA, 75 bp, synthetic construct
  source 1..75: mol_type = other DNA
ggcgacctgccccagcggcgctatctataaacgcgaagaagacggcattgtgctgatcgaccaggacaaatgtcg

SEQ ID NO: 453536 - DNA, 75 bp, synthetic construct
  source 1..75: mol_type = other DNA
gatgaagtccaccgcagctacaaccccaaagggagcttcctggcgaacttaagccagtcggacaccaacgccatc

SEQ ID NO: 453537 - DNA, 75 bp, synthetic construct
  source 1..75: mol_type = other DNA
tgatggcgatgcgccactacatgcgttcacaaactgtggaaggtgtcacagatacccgcgccatcgacgaagtgg

SEQ ID NO: 453538 - DNA, 75 bp, synthetic construct
  source 1..75: mol_type = other DNA
gagtcgggtcagccgactgtttgttcggaaacctgcgtcggtcgcatccgctatcttggcgtgctgctctacgac

SEQ ID NO: 453539 - DNA, 75 bp, synthetic construct
  source 1..75: mol_type = other DNA
gacaaagcggagggcgaataatgcagatcctcaaagtgatcggcctgttgatggagtatccggacgagctgttgt

SEQ ID NO: 453540 - DNA, 75 bp, synthetic construct
  source 1..75: mol_type = other DNA
ccggaacaggacccggtatttaaactggcaggtgttgcgccggattatgctgcccttgctgatttccgcaaactt

SEQ ID NO: 453541 - DNA, 75 bp, synthetic construct
  source 1..75: mol_type = other DNA
aagatgttcgtaatggctggtttggttttggtgatttgacgaccaaagattttatttggtggaacgataacggcc

SEQ ID NO: 453542 - DNA, 75 bp, synthetic construct
  source 1..75: mol_type = other DNA
aaagcaatcaatgacaaagttgatttgattaagacagaaactgaccgcactatcgcagcaaataaagtctatgcg

SEQ ID NO: 453543 - DNA, 75 bp, synthetic construct
  source 1..75: mol_type = other DNA
tcgccaacaaaatcgttaacgacggcattaaatacgttattggtcatctgtgttcttcttctacccaacctgcgt

SEQ ID NO: 453544 - DNA, 75 bp, synthetic construct
  source 1..75: mol_type = other DNA
aacatttcatcgttcaataactttagcaaccgtggaacgttaaattttgctggaaaccatcaaggccaatacgac

SEQ ID NO: 453545 - DNA, 75 bp, synthetic construct
  source 1..75: mol_type = other DNA
tacgatctttacgcttactacggtgcacatacaggatttgttttagcagaatatcaagtttcttccggtggtgtt

SEQ ID NO: 453546 - DNA, 75 bp, synthetic construct
  source 1..75: mol_type = other DNA
ttgaccgactgttccagaagacgcttaattttggtatcgagggtggttggtttaaactaggcactttgacaatgc

SEQ ID NO: 453547 - DNA, 75 bp, synthetic construct
  source 1..75: mol_type = other DNA
tctggcgtactgacccgtaaattcggttttgaacacatccccgcgcggatatcgcgcgacggccacgtgatgaaa

SEQ ID NO: 453548 - DNA, 75 bp, synthetic construct
  source 1..75: mol_type = other DNA
ccttctccggcagcccttcataaaatgaagatccggcaggaacgtgaggaactacaaaaacgtaaccgagctgcg

SEQ ID NO: 453549 - DNA, 75 bp, synthetic construct
  source 1..75: mol_type = other DNA
tatcaccagaccggctctgactaacgatgcgatgcccgaacaggaccccgtgtttaaactggcgggagttgcccc

SEQ ID NO: 453550 - DNA, 75 bp, synthetic construct
  source 1..75: mol_type = other DNA
aacccggagctgacccaacgcggttatcaacacatcatgcgtactgccgggctggactcttcccaggggccaacg

SEQ ID NO: 453551 - DNA, 75 bp, synthetic construct
  source 1..75: mol_type = other DNA
atttgttaacacataagaacaaagcaacacaacatcacgaatggggatttttgactatgaaacggaatgcgaaaa

SEQ ID NO: 453552 - DNA, 75 bp, synthetic construct
  source 1..75: mol_type = other DNA
tcacgacaaacaacagtatggcgaagggctggcgcgttcggtgcaggacgggctgaaagcggctaacgccaacgt

SEQ ID NO: 453553 - DNA, 75 bp, synthetic construct
  source 1..75: mol_type = other DNA
gccaccatgtttgaccaactggtgtgccgcgtgatgttccaccagatgcgctatgaaggcattttcaccccgcca

SEQ ID NO: 453554 - DNA, 75 bp, synthetic construct
  source 1..75: mol_type = other DNA
tgtccgcagccatttgtctgaccgtatccggagcgcctgcatgggcgtctgagcagcaggccacgctgagcgcgg

SEQ ID NO: 453555 - DNA, 75 bp, synthetic construct
  source 1..75: mol_type = other DNA
gcgataatctgaacgggattaacgtgaaataccgttatgagtttacggacacgctggggctgattacgtcattca

SEQ ID NO: 453556 - DNA, 75 bp, synthetic construct
  source 1..75: mol_type = other DNA
atggcggattgcccgcgtcgtatcattcttccggtcaatgatggtcgcctgattgcgattaacgctgaaaacggc

SEQ ID NO: 453557 - DNA, 75 bp, synthetic construct
  source 1..75: mol_type = other DNA
ctgctcggcaccatgatttggggcgtctgggaagttggtttcgacttctgggcgctgactccgcgcagcgacatt

SEQ ID NO: 453558 - DNA, 75 bp, synthetic construct
  source 1..75: mol_type = other DNA
gccgctacggcagataactacctgcgcgcttacaacatgagcaacggtgaaaaactgtggcagggtcgtttacca

SEQ ID NO: 453559 - DNA, 75 bp, synthetic construct
  source 1..75: mol_type = other DNA
gcttatgttatggttcacggcgcactgaaacgcctggctgtgaagatgtctaaaatctgtaacgacctgcgcctg

SEQ ID NO: 453560 - DNA, 75 bp, synthetic construct
  source 1..75: mol_type = other DNA
tcccggcagcgatgatctgaacgggattaacgtgaaataccgttatgagtttacggatacgctggggatggtgac

SEQ ID NO: 453561 - DNA, 75 bp, synthetic construct
  source 1..75: mol_type = other DNA
aatggttcagagagtatgcgatggcgggagtggcttacagccgtgtgtcgactttatccggggattatctacgcg

SEQ ID NO: 453562 - DNA, 75 bp, synthetic construct
  source 1..75: mol_type = other DNA
catccaacgtaccgctgaactgctgctggaagttaacctcggcgcaacggcaatcggtacaggcctgaacacgcc

SEQ ID NO: 453563 - DNA, 75 bp, synthetic construct
  source 1..75: mol_type = other DNA
cattggccaggccatgtttgaatccgttcacattctgaccaacgcttgctacaacctgctggaaaaatgcattaa

SEQ ID NO: 453564 - DNA, 75 bp, synthetic construct
  source 1..75: mol_type = other DNA
tatccaacgtaccgctgaactgctgctggaagttaaccttggcgcaacagcaatcggtactggtctgaacacgcc

SEQ ID NO: 453565 - DNA, 75 bp, synthetic construct
  source 1..75: mol_type = other DNA
gaaaaccggcaacatttttgtgctcgatcgtcgcaatggcgaactggtggttccggcaccggaaaaaccggttcc

SEQ ID NO: 453566 - DNA, 75 bp, synthetic construct
  source 1..75: mol_type = other DNA
gtgaatgaatggttcagcgcgtatgcgatggcgggtgtggcttacagccgtgtgtcgactttctccggggattat

SEQ ID NO: 453567 - DNA, 75 bp, synthetic construct
  source 1..75: mol_type = other DNA
taatctgaacgggattaacgtgaaataccgttatgagtttacggacgcgctggggctgattacgtccttcagtta

SEQ ID NO: 453568 - DNA, 75 bp, synthetic construct
  source 1..75: mol_type = other DNA
aatatccccataggtattgcgggccttctttacgcgcgcaaacatatgcccaatttcaccaccgcacgacgcaga

SEQ ID NO: 453569 - DNA, 75 bp, synthetic construct
  source 1..75: mol_type = other DNA
gtcattcagttatgccaatgcaaagatgagcaaaaaacgcattacagcgatacccgctggcatgaagattcagtg

SEQ ID NO: 453570 - DNA, 75 bp, synthetic construct
  source 1..75: mol_type = other DNA
ccgtctgtgcgcgtgaatgaatggttcagcgcgtatgcgatggcgggagtggcttacagccgtgtgtcgactttc

SEQ ID NO: 453571 - DNA, 75 bp, synthetic construct
  source 1..75: mol_type = other DNA
aacgggattaacgtgaaataccgttatgagtttacggatacgctggggctggtgatgtcattcagctatgcagga

SEQ ID NO: 453572 - DNA, 75 bp, synthetic construct
  source 1..75: mol_type = other DNA
ctggcctgcctatggtcgcaatcaggaaggtcaacgcttttcgccgctgaaacaaattaacgccgataacgtcca

SEQ ID NO: 453573 - DNA, 75 bp, synthetic construct
  source 1..75: mol_type = other DNA
ccaatctccacggcgggtaacgtgctgtttatcgccgctacggcagataactacctgcgcgcttacaacatgagc

SEQ ID NO: 453574 - DNA, 75 bp, synthetic construct
  source 1..75: mol_type = other DNA
tgtggtgatctccgcaggcggtcacggttcatttggtacgaagatgggcgactatattgtggcttatgccctgcc

SEQ ID NO: 453575 - DNA, 75 bp, synthetic construct
  source 1..75: mol_type = other DNA
cagtgttctggcggtcacgcagcaactgtcgatcagtttaggcgttgctgtaagtgcggccgtccttcgcgttta

SEQ ID NO: 453576 - DNA, 75 bp, synthetic construct
  source 1..75: mol_type = other DNA
tggcggggttgccgtggatcgcggcgatggccttcttcatgcaggcacttgatgccactattctgaataccgcct

SEQ ID NO: 453577 - DNA, 75 bp, synthetic construct
  source 1..75: mol_type = other DNA
ctggcctgcctatggtcgtaatcaggaaggtcaacgcttttcacctctgaaacaaattaacgccgataacgtcca

SEQ ID NO: 453578 - DNA, 75 bp, synthetic construct
  source 1..75: mol_type = other DNA
tggtgtggcttacagccgtgtgtcgactttctccggggattatctccgcgtaactgacaacaaggggaaaacgca

SEQ ID NO: 453579 - DNA, 75 bp, synthetic construct
  source 1..75: mol_type = other DNA
tccgattgaaatggcgtccaaatcctgggacgaaatcattgcgaagttggaaaaagatcctgtgctgaaagcgca

SEQ ID NO: 453580 - DNA, 75 bp, synthetic construct
  source 1..75: mol_type = other DNA
aaaaaggctatcaattatttaaagataataaatgtgcaacttgtcatggtggtattattctcggtggacgttcct

SEQ ID NO: 453581 - DNA, 75 bp, synthetic construct
  source 1..75: mol_type = other DNA
taggcaaagagctgccgcaggaggatgtggatgatatcgtagctttcctgcacagtctgaacggggtgtacacgc

SEQ ID NO: 453582 - DNA, 75 bp, synthetic construct
  source 1..75: mol_type = other DNA
cccgaccgaatccgtggccgttgatattgcttatgaaggctccggcagtggcgactggcgcactgacggtttcat

SEQ ID NO: 453583 - DNA, 75 bp, synthetic construct
  source 1..75: mol_type = other DNA
atgcgtaaagtttgtgccgccattttgtccgctgccatctgtctggtcgtatccggtgcgcctgcatgggcgtct

SEQ ID NO: 453584 - DNA, 75 bp, synthetic construct
  source 1..75: mol_type = other DNA
gctatgcaggagacaagaatcgccagctgacccgttacagcgatacccgctggtatgaagattccgtgcgtaacc

SEQ ID NO: 453585 - DNA, 75 bp, synthetic construct
  source 1..75: mol_type = other DNA
acccggcagcgataatctgaacgggattaacgtgaaataccgttatgaatttacggacacgctggggctggtgac

SEQ ID NO: 453586 - DNA, 75 bp, synthetic construct
  source 1..75: mol_type = other DNA
caggcagcggaaaaagtcgtggtgaatatctctaaagtcgatggtatgccgtggtttaatcgcatgggcgaaggt

SEQ ID NO: 453587 - DNA, 75 bp, synthetic construct
  source 1..75: mol_type = other DNA
gaaccggtattcaaaaaagcgcgagatgccggaattgtggttctgaccaacgaatcccccggtcagccaagtgct

SEQ ID NO: 453588 - DNA, 75 bp, synthetic construct
  source 1..75: mol_type = other DNA
cccgtttcgcaaagcgatctgaataagattgaatgggtgatgcagtatgaaactatgccaccaacgcgttatacc

SEQ ID NO: 453589 - DNA, 75 bp, synthetic construct
  source 1..75: mol_type = other DNA
accattgaccttgcttatgaaggttccggtagtggcgactggcgatcggatgcatttattgttggtatcggatac

SEQ ID NO: 453590 - DNA, 75 bp, synthetic construct
  source 1..75: mol_type = other DNA
ttactcgaatgtgcctggagttaacagaagaaaacgatatacaactgattctggaattgacagagcagcagccat

SEQ ID NO: 453591 - DNA, 75 bp, synthetic construct
  source 1..75: mol_type = other DNA
cccgaccgaatccgtggccattgacgtcgcttatgaaggctccggcagtggtgactggcgcactgacgggttcat

SEQ ID NO: 453592 - DNA, 75 bp, synthetic construct
  source 1..75: mol_type = other DNA
ggtcgccacagcaatacgtctctggcgtggggggctggcgtgcagtttaacccgaccgaatccgtggccattgat

SEQ ID NO: 453593 - DNA, 75 bp, synthetic construct
  source 1..75: mol_type = other DNA
tgtccgcagcaatctgtctgtctgcctccggtacgccagcgtgcgcggcagaacatcagtccacactgagcgcgg

SEQ ID NO: 453594 - DNA, 75 bp, synthetic construct
  source 1..75: mol_type = other DNA
gatgagcaaaaaacgcactacagcgatacccgctggcatgaagattccgtgcgtaaccgctggttcagcatgatg

SEQ ID NO: 453595 - DNA, 75 bp, synthetic construct
  source 1..75: mol_type = other DNA
cgatggcgggtgtggcttacagccgtgtgtcgactttctccggggattatctccgcgtaactgacaacaagggga

SEQ ID NO: 453596 - DNA, 75 bp, synthetic construct
  source 1..75: mol_type = other DNA
cgtctctggcgtggggggctggcgtgcagtttaacccgaccgaatccgtggccattgatattgcttatgaaggct

SEQ ID NO: 453597 - DNA, 75 bp, synthetic construct
  source 1..75: mol_type = other DNA
cgaccgaatccgtggccattgatattgcttatgaaggttctggcagtggtgactggcgcactgacgggttcatcg

SEQ ID NO: 453598 - DNA, 75 bp, synthetic construct
  source 1..75: mol_type = other DNA
tgtccgcagccatctgtctggccgtatccggtgcgccagcgagcgcagcagagcatcagtccacactaagcgccg

SEQ ID NO: 453599 - DNA, 75 bp, synthetic construct
  source 1..75: mol_type = other DNA
ttacggacacactggggatggtgacgtcgttcagctatgcaggagacaggaatcgccagctgacccattacagcg

SEQ ID NO: 453600 - DNA, 75 bp, synthetic construct
  source 1..75: mol_type = other DNA
ccgtctgtgcgcgtgaatgaatggttcagcgcgtatgcgatggcgggtgtgtcttacagccgtgtgtcgactttc

SEQ ID NO: 453601 - DNA, 75 bp, synthetic construct
  source 1..75: mol_type = other DNA
tctctggcgtggggggctggcgtgcagtttaacccgaccgaatccgtggccattgatattgcttatgaaggctcc

SEQ ID NO: 453602 - DNA, 75 bp, synthetic construct
  source 1..75: mol_type = other DNA
cgatggcaggtgtggcttacagccgtgtttcgactttttccggggattatctccgcgtaactgacagcaagggga

SEQ ID NO: 453603 - DNA, 75 bp, synthetic construct
  source 1..75: mol_type = other DNA
gtctctggcgtggggggctggcgtgcagtttaacccgaccgaatccgtggccattgatattgcttatgaaggctc

SEQ ID NO: 453604 - DNA, 75 bp, synthetic construct
  source 1..75: mol_type = other DNA
cgcgcatttctaacttgtcacgggaccttgcccgttcactttcgacggtggcggtgcgtgtcgttgaagttattc

SEQ ID NO: 453605 - DNA, 75 bp, synthetic construct
  source 1..75: mol_type = other DNA
gcgctgaagaactggatccgttgttcgatcaggcggtgcagtttgtcactgaaaaacgcaaagcgtcaatttcag

SEQ ID NO: 453606 - DNA, 75 bp, synthetic construct
  source 1..75: mol_type = other DNA
ccgcagtatcagcagccgcaacagccggttgcgccgcagccgcagtatcaacagccgcaacaaccggttgcaccg

SEQ ID NO: 453607 - DNA, 75 bp, synthetic construct
  source 1..75: mol_type = other DNA
atgtttgtagaagcattgaaacgccagaacccggcgctgatttccgccgcactaaacctgtggcaaaagggcaag

SEQ ID NO: 453608 - DNA, 75 bp, synthetic construct
  source 1..75: mol_type = other DNA
gtgtttacccttgccaaagcgcgggaagtgtctgcggcagcggtgaaagcggggcgggtccagtctgtgctgctc

SEQ ID NO: 453609 - DNA, 75 bp, synthetic construct
  source 1..75: mol_type = other DNA
aatccgttctcgctggatgattttgaattttcgccaatgaaagcgttgctggatgatggtccacacgaaccgctg

SEQ ID NO: 453610 - DNA, 75 bp, synthetic construct
  source 1..75: mol_type = other DNA
gcaacaaccggttgcgccacagccgcaatatcagcagccgcaacaaccagttgcgccgcagccgcagtatcaaca

SEQ ID NO: 453611 - DNA, 75 bp, synthetic construct
  source 1..75: mol_type = other DNA
cagcgcgtattatcgaacagatggaagcgcaggggattgtcagcgaacaggggcacaacggtaatcgtgaagtgc

SEQ ID NO: 453612 - DNA, 75 bp, synthetic construct
  source 1..75: mol_type = other DNA
tatgcttaagcacaggcgcacgctggcgagaagcaataaatcttacccgttcacaggtgactaaataccgaatta

SEQ ID NO: 453613 - DNA, 75 bp, synthetic construct
  source 1..75: mol_type = other DNA
ccttctctggatttgctgacaccgccgccgagcgaagtggagccggtagatacctttgcgcttgaacaaatggct

SEQ ID NO: 453614 - DNA, 75 bp, synthetic construct
  source 1..75: mol_type = other DNA
cagcagccacaacagccggttgcgccgcagccacaatatcagcagccgcaacaaccggttgcgccacagcagcaa

SEQ ID NO: 453615 - DNA, 75 bp, synthetic construct
  source 1..75: mol_type = other DNA
ctgatttccgtattaaagccgatgtcgtcaattactctccggggccggttatcactcgctttgaacttaacctgg

SEQ ID NO: 453616 - DNA, 75 bp, synthetic construct
  source 1..75: mol_type = other DNA
tactgaaaccaatctcaaaactgtggatgacagcagtatcgactacaccctgcgctggcaggcgagtttccggta

SEQ ID NO: 453617 - DNA, 75 bp, synthetic construct
  source 1..75: mol_type = other DNA
caatatcagcagccgcaacaaccggttgcgccacagccgcagtatcagcagccgcaacaaccggttgcgccgcag

SEQ ID NO: 453618 - DNA, 75 bp, synthetic construct
  source 1..75: mol_type = other DNA
ccgcaacaaccggttgcgccacagccgcagtatcacgcagccgccaacgaaccggttgcgccgcagccgcagtat

SEQ ID NO: 453619 - DNA, 75 bp, synthetic construct
  source 1..75: mol_type = other DNA
agtttattaattattggcggtgaaactgcaggcggcaaagcggtgacggattcagttttaatttctgtgaaggat

SEQ ID NO: 453620 - DNA, 75 bp, synthetic construct
  source 1..75: mol_type = other DNA
gtcgttcagctatgcaggagacaagaatcgccagcttacccgttacagcgatacccgctggcatgaagattccgt

SEQ ID NO: 453621 - DNA, 75 bp, synthetic construct
  source 1..75: mol_type = other DNA
tttctggcatcggcgtcgatctgatttatggcgatgtgattgccgatgcccaaccgctggatttgctggtgaata

SEQ ID NO: 453622 - DNA, 75 bp, synthetic construct
  source 1..75: mol_type = other DNA
catcatgccacataccaagtttcgttttatcgcaaccggcaacagtgcgggcagcggtgaccaaacgggcttgta

SEQ ID NO: 453623 - DNA, 75 bp, synthetic construct
  source 1..75: mol_type = other DNA
agctttcggtgtatgaaggcattccgcacctgttaacggaagtcgttactgatatgaaagatgccgccaacgcgc

SEQ ID NO: 453624 - DNA, 75 bp, synthetic construct
  source 1..75: mol_type = other DNA
tgttcatggtgcttttgttcgcgatcaggaagttcatgccgtggtgcaggactggaaagcgcgtggtcgcccaca

SEQ ID NO: 453625 - DNA, 75 bp, synthetic construct
  source 1..75: mol_type = other DNA
gacttacccatttcccttgcctgctttgggatgaggctgccgggaaagttttgccgacaccgaatcttcacacgc

SEQ ID NO: 453626 - DNA, 75 bp, synthetic construct
  source 1..75: mol_type = other DNA
gatcaagcaacctccgcctttattgatggtaatttgtatgtatttggcggtgttggtaaaaacagcgaggggtta

SEQ ID NO: 453627 - DNA, 75 bp, synthetic construct
  source 1..75: mol_type = other DNA
gcatggtacaaactggatactcaggctaaagataaaaaatggacaaccttggctgagttcccgggggggtcgcga

SEQ ID NO: 453628 - DNA, 75 bp, synthetic construct
  source 1..75: mol_type = other DNA
cggtgaaactgcaggcggcaaagcggtgactgattcagttttgatctctgtgaaggataataaagtcacagtaca

SEQ ID NO: 453629 - DNA, 75 bp, synthetic construct
  source 1..75: mol_type = other DNA
tggctgggcgaatcagtggatcgtcgaaccctgaaagacgtggttgagctatggttcaaattacatggtaaatct

SEQ ID NO: 453630 - DNA, 75 bp, synthetic construct
  source 1..75: mol_type = other DNA
aactgttgctgaaagccggcggacgtttgctgatcgttgaagcgacggagcgaaactgcgtattccagctggcga

SEQ ID NO: 453631 - DNA, 75 bp, synthetic construct
  source 1..75: mol_type = other DNA
tgctcttccttgaactcagtagcgatattcagcactacctgggtgtacgcatcaatgcggaacgggcgtggcagg

SEQ ID NO: 453632 - DNA, 75 bp, synthetic construct
  source 1..75: mol_type = other DNA
cgcgaagcgatgtttaaccccgattcggcgcagctggacaatatggcctgggcgcagccggcgattgtcgcgttt

SEQ ID NO: 453633 - DNA, 75 bp, synthetic construct
  source 1..75: mol_type = other DNA
atgtcaccagttaagcctcgcacggtaaaccttgaacaacgcaacctatcatccgtgtttggcacactgaaaaag

SEQ ID NO: 453634 - DNA, 75 bp, synthetic construct
  source 1..75: mol_type = other DNA
ccagagggacaatgcacccacgttctacgccatacattcgccagccatttcatgatgaacggcggaaacatactg

SEQ ID NO: 453635 - DNA, 75 bp, synthetic construct
  source 1..75: mol_type = other DNA
atcacttataccaagacgaagggtaagaaaaaccgcaccgtgccgatatctcaagatctgtatgacgaactcccc

SEQ ID NO: 453636 - DNA, 75 bp, synthetic construct
  source 1..75: mol_type = other DNA
gtttttaccgacaaaatgcccccgttacaacaggctctgtttaacatcagcgccacagaaaaagccgcaacgccg

SEQ ID NO: 453637 - DNA, 75 bp, synthetic construct
  source 1..75: mol_type = other DNA
gccacccgccatattggccgcacgctcgataatctgcgccccctgctcaagccgggcgggcgcctgctgatgcgc

SEQ ID NO: 453638 - DNA, 75 bp, synthetic construct
  source 1..75: mol_type = other DNA
tgagcgaacatatcattctcgccacgctgcccggtcaggcggttagcgccgtaacattcaccgcgccatcagaac

SEQ ID NO: 453639 - DNA, 75 bp, synthetic construct
  source 1..75: mol_type = other DNA
cccgacgcgctcaacgcgcgcctccccaatacggatggcggcagaaaaagtaccgcgctgctgctcagcgccgcc

SEQ ID NO: 453640 - DNA, 75 bp, synthetic construct
  source 1..75: mol_type = other DNA
ggccgtgaaacagcgctggcagcagcaaggcgtcacaccgtctgccgcgctgctcacgctgtttgccgccaccct

SEQ ID NO: 453641 - DNA, 75 bp, synthetic construct
  source 1..75: mol_type = other DNA
cgtctgatgcgccgactgagccagccaaacccacgccagttgccgggggaattcggcgctggaaaaacaggtggc

SEQ ID NO: 453642 - DNA, 75 bp, synthetic construct
  source 1..75: mol_type = other DNA
agaaaaaccgtaccgtgccgatatctcaggatctgtatgatgaacttcccaagaacagagggaagttattcaccc

SEQ ID NO: 453643 - DNA, 75 bp, synthetic construct
  source 1..75: mol_type = other DNA
gatactcgtgccatcgacgaagtaggcctgagcgtcgcccaggtcgaagagatgtatcgttacctcgccattgcc

SEQ ID NO: 453644 - DNA, 75 bp, synthetic construct
  source 1..75: mol_type = other DNA
gacaactgtcagaagtgattgagcaatggtattccctgtacggtcagacactcgctgaccctaagcgattaatgg

SEQ ID NO: 453645 - DNA, 75 bp, synthetic construct
  source 1..75: mol_type = other DNA
tatggaagaaaccgaatcaaagccatggctgggcgaatcagtggatcgtcgaaccctgaaagacgtggttgagct

SEQ ID NO: 453646 - DNA, 75 bp, synthetic construct
  source 1..75: mol_type = other DNA
cgttcactgattgacggcaaacggatggacaaagtgatctgggggccaaactgggaagaactgctgggcggcgaa

SEQ ID NO: 453647 - DNA, 75 bp, synthetic construct
  source 1..75: mol_type = other DNA
tgaaaaacgagcccgcgaccgcaacttcgaggccatgcaaaaggagatgtacgggcagtttgaaaacaccttcat

SEQ ID NO: 453648 - DNA, 75 bp, synthetic construct
  source 1..75: mol_type = other DNA
atgatgtatctgccgcgcttgtgcgaacactgccttaaccccagttgtgtagcgacctgccccagcggcgctatc

SEQ ID NO: 453649 - DNA, 75 bp, synthetic construct
  source 1..75: mol_type = other DNA
atggttcaaactacatggtaaatcactgacagctgggcagcatgtatatgacaaattgctgctgatggttgacgc

SEQ ID NO: 453650 - DNA, 75 bp, synthetic construct
  source 1..75: mol_type = other DNA
gcgctcgatggggggaagcggagagattgacccgacctcaactttctccatataaactaacgttcaccaaaacca

SEQ ID NO: 453651 - DNA, 75 bp, synthetic construct
  source 1..75: mol_type = other DNA
aggccgaggcatttgaagcatttaccaaaagcgagagtgaagataagccgtggctcggcaagaaagaagaccgcc

SEQ ID NO: 453652 - DNA, 75 bp, synthetic construct
  source 1..75: mol_type = other DNA
tctcggaaatcccctcgccaccgatttaacatctaaaatgtttgcccactatcgagataaacgcctgacaggtga

SEQ ID NO: 453653 - DNA, 75 bp, synthetic construct
  source 1..75: mol_type = other DNA
atataaaaatgactatgcgttacgcacatctggaaacggcgctccgtttcaatcctctggcaacgctgccaagtg

SEQ ID NO: 453654 - DNA, 75 bp, synthetic construct
  source 1..75: mol_type = other DNA
ctgacagctggccagcatgtctatgacaaactgctgttgatggttgacgctctgggcaacccccttgcaaccgat

SEQ ID NO: 453655 - DNA, 75 bp, synthetic construct
  source 1..75: mol_type = other DNA
agtttaacccgaccgaatccgtggccattgatattgcttatgaaggctccggcagtggtgactggcgcactgacg

SEQ ID NO: 453656 - DNA, 75 bp, synthetic construct
  source 1..75: mol_type = other DNA
cccgaccgaatccgtgaccgttgatgtcgcttatgaaggctccggcagcggtgactggcgcactgacgggttcat

SEQ ID NO: 453657 - DNA, 75 bp, synthetic construct
  source 1..75: mol_type = other DNA
gcgatattgtcatcaagacttttgacgataaagcacctgaaacagttaaaaacttcctgaactactgccgcgaag

SEQ ID NO: 453658 - DNA, 75 bp, synthetic construct
  source 1..75: mol_type = other DNA
tgtggatgaggcagcacagacacagacgggcgataacactgcggcaccgacgccggatgccagtgctgagcagac

SEQ ID NO: 453659 - DNA, 75 bp, synthetic construct
  source 1..75: mol_type = other DNA
acccgaccgaatccgtgaccattgaccttgcttatgaaggttccggtagtggcgactggcgaacggatgcattta

SEQ ID NO: 453660 - DNA, 75 bp, synthetic construct
  source 1..75: mol_type = other DNA
aacacgtctctggcgtggggggctggcgtgcagtttaacccgaccgaatccgtgaccattgaccttgcttatgaa

SEQ ID NO: 453661 - DNA, 75 bp, synthetic construct
  source 1..75: mol_type = other DNA
ggtgcgttgctgttggtggttgccgatctgctggcgagaattattcatcccccactggagctcccggttggcgtg

SEQ ID NO: 453662 - DNA, 75 bp, synthetic construct
  source 1..75: mol_type = other DNA
ccatgacatctaccggcgtggccgcctgcggcccgattagctttattggtctcgtggtgccgcatatgatgcgta

SEQ ID NO: 453663 - DNA, 75 bp, synthetic construct
  source 1..75: mol_type = other DNA
cttgatgagcgtgaatataatttctccatgaacgccttaaatcgcagtgataatatatcactattattctttgat

SEQ ID NO: 453664 - DNA, 75 bp, synthetic construct
  source 1..75: mol_type = other DNA
ctctgcaactgcacagttcttcatcaacgtggttgataacgacttcctgaacttctctggcgaaagcctgcaagg

SEQ ID NO: 453665 - DNA, 75 bp, synthetic construct
  source 1..75: mol_type = other DNA
aaaaagatcgatgcagctctttctgttcaagaggcaaagttagaaggtaagcttagtgatgttaagcttgatata

SEQ ID NO: 453666 - DNA, 75 bp, synthetic construct
  source 1..75: mol_type = other DNA
cccggccgaatccgtggccattgatgttgcttatgaagactccggcagtggcgactggcgcactgacggtttcat

SEQ ID NO: 453667 - DNA, 75 bp, synthetic construct
  source 1..75: mol_type = other DNA
aatttctgatgagcagattgcccgtatcagggagatgtatccggaaattggtgacgcggtggcttcgctcatccg

SEQ ID NO: 453668 - DNA, 75 bp, synthetic construct
  source 1..75: mol_type = other DNA
acgaaatgcctgtattacaggccgcagaacccgctgccgtttatcagatccacgccaaagaaacacggaaaatca

SEQ ID NO: 453669 - DNA, 75 bp, synthetic construct
  source 1..75: mol_type = other DNA
aaccccggacttgcgccagacgacatcggacgcctgttaaaagacctcacgctgcttctcgacaacgatgatctg

SEQ ID NO: 453670 - DNA, 75 bp, synthetic construct
  source 1..75: mol_type = other DNA
gcagctcctgatttgcttgaagcactgcaagagcttgtcttcctttacgagcatgacgaagggtgcagagagtta

SEQ ID NO: 453671 - DNA, 75 bp, synthetic construct
  source 1..75: mol_type = other DNA
aaccccggaattgcgcccgacgacatcgggcgcctgttaaaagacctcacgctgcttctcgacaacgacgacctg

SEQ ID NO: 453672 - DNA, 75 bp, synthetic construct
  source 1..75: mol_type = other DNA
aagcacaacctgctccaggcgctgacccgcgtcaaccgaacctacaaccacttccgctacggctatgtggtggac

SEQ ID NO: 453673 - DNA, 75 bp, synthetic construct
  source 1..75: mol_type = other DNA
tacgccgaatcgcccaccgccgccgatgaagtctccgaagaaatgccggtattacaggccgcagaacctgccgcc

SEQ ID NO: 453674 - DNA, 75 bp, synthetic construct
  source 1..75: mol_type = other DNA
gcgcttctcattcagaggcagaggcgattatgcgcggtatgacgaatgctgaaatagacgcgcttctggagaagc

SEQ ID NO: 453675 - DNA, 75 bp, synthetic construct
  source 1..75: mol_type = other DNA
tgaggctgaacgttccggtaagcaacgggccgaacaggaagccgcacttcttcgtgggcagatagctgaagaaaa

SEQ ID NO: 453676 - DNA, 75 bp, synthetic construct
  source 1..75: mol_type = other DNA
aatccgtccgtcgcctgctgaccggtcaggatttggggctggagattgattatttcgaacccgggcgggtcagga

SEQ ID NO: 453677 - DNA, 75 bp, synthetic construct
  source 1..75: mol_type = other DNA
atacccgctggcatgaagattccgttcgtaaccgctggttcagcgtgatggcggggccgtctgtgcgcgtgaatg

SEQ ID NO: 453678 - DNA, 75 bp, synthetic construct
  source 1..75: mol_type = other DNA
tgatgattgggataagttagagtattttattaattcatctgttaaaccaatggattatgatagtttatataaatt

SEQ ID NO: 453679 - DNA, 75 bp, synthetic construct
  source 1..75: mol_type = other DNA
gggagatgaacgcacattattaatctgctgcaaagcctttatgaccgaagggacagagtttcctaatctgacatt

SEQ ID NO: 453680 - DNA, 75 bp, synthetic construct
  source 1..75: mol_type = other DNA
gctgcggatcggtacggactgaaatcgcagaatgcagcgctctatatgacgagctggattaatgggcgaatgttt

SEQ ID NO: 453681 - DNA, 75 bp, synthetic construct
  source 1..75: mol_type = other DNA
gctatcttcatgcctcgacgaacgtttccggcagcgatgatctgaacgggattaacgtgaaataccgttatgagt

SEQ ID NO: 453682 - DNA, 75 bp, synthetic construct
  source 1..75: mol_type = other DNA
tttgatattagcaacaagcttcatataatgaagaaaaaagattcaatgttgaaaaaagacttatatataaagcgg

SEQ ID NO: 453683 - DNA, 75 bp, synthetic construct
  source 1..75: mol_type = other DNA
ttacggacacgctgggaatggttacgtcattcagctatgcaggagacaagaatcgccagcttacccgttacagcg

SEQ ID NO: 453684 - DNA, 75 bp, synthetic construct
  source 1..75: mol_type = other DNA
ctcccgtgactccggtttatgggatggggagaaaggcatacgtaatacgctcataaacgaaattattcgcctggc

SEQ ID NO: 453685 - DNA, 75 bp, synthetic construct
  source 1..75: mol_type = other DNA
aatacaatgataaaattttctggactcgaggtggtgggcttaagggggggcaatcgttcgattttgaaagtctca

SEQ ID NO: 453686 - DNA, 75 bp, synthetic construct
  source 1..75: mol_type = other DNA
agtgaatggcaccgatatcctcaatgaccagcggtggagtatatcgatccagtttgtggatggcgggatcgtgat

SEQ ID NO: 453687 - DNA, 75 bp, synthetic construct
  source 1..75: mol_type = other DNA
aacttcgtcactctgtatttttctcacttcctctctttactcgtgttaccgacgccgcaaacggtgtgcgtagcc

SEQ ID NO: 453688 - DNA, 75 bp, synthetic construct
  source 1..75: mol_type = other DNA
tgctttataaagcacagccagaagatgtgcgtttcatcatgatcgacccgaaaatgctggagctttcggtttatg

SEQ ID NO: 453689 - DNA, 75 bp, synthetic construct
  source 1..75: mol_type = other DNA
ggtgctgggtaaagatatcgccggtgagccggtggttgccgatctggcgaaaatgccgcacttgttggttgcggg

SEQ ID NO: 453690 - DNA, 75 bp, synthetic construct
  source 1..75: mol_type = other DNA
gattgataataaaatcagcgagtcatcacttttaccatcattatatttttctgttggtttgactcctaaaaatgg

SEQ ID NO: 453691 - DNA, 75 bp, synthetic construct
  source 1..75: mol_type = other DNA
atccggtgcgcctgcatgggcatctgaacatcagtccacgctgagcgcgggctatcttcatgcctcgacgaacgt

SEQ ID NO: 453692 - DNA, 75 bp, synthetic construct
  source 1..75: mol_type = other DNA
gttttgttaagcaacgctccaccactcgcggagatttctcctccggtagcaacttcgtcactctgtatttttctc

SEQ ID NO: 453693 - DNA, 75 bp, synthetic construct
  source 1..75: mol_type = other DNA
ctcgttttttttacatgcgtctcgtcgataaacacaccggagcagacggaacagatgatgctggtagtcagtgga

SEQ ID NO: 453694 - DNA, 75 bp, synthetic construct
  source 1..75: mol_type = other DNA
agtgcgtgaaaaagtggtggcgatattcgcggaagccgaaccgtttacgccttcagataacgtggatgcacagct

SEQ ID NO: 453695 - DNA, 75 bp, synthetic construct
  source 1..75: mol_type = other DNA
catcggcgaacccgaagtcttttactgcaagcccgcggatgactatttaccccagcctggagcagtattaattac

SEQ ID NO: 453696 - DNA, 75 bp, synthetic construct
  source 1..75: mol_type = other DNA
catggcaaaacctctagagaagaacgatatgacatatatacaaaataaaaatacacatttacaacaccttgaaat

SEQ ID NO: 453697 - DNA, 75 bp, synthetic construct
  source 1..75: mol_type = other DNA
aatcgccagcattgcctcgataacctgaaaattttgcgtgaaaatccgcaagtgcgcgaaaaagtagtggcgata

SEQ ID NO: 453698 - DNA, 75 bp, synthetic construct
  source 1..75: mol_type = other DNA
tgcaaaccggcagatgactacttaccccagccaggcgcggtattgattacaggaattacaccacaagaagcgcgg

SEQ ID NO: 453699 - DNA, 75 bp, synthetic construct
  source 1..75: mol_type = other DNA
tttaaccaaagcgaatggtattgaacatagcaacgcccacgatgcgatggctgatgtgtacgccactattgcgat

SEQ ID NO: 453700 - DNA, 75 bp, synthetic construct
  source 1..75: mol_type = other DNA
tttcaggatgaatcagacaccaacggtacgagtgtttcattagccaatcaaggcaatgaaaaatcatcccttagc

SEQ ID NO: 453701 - DNA, 75 bp, synthetic construct
  source 1..75: mol_type = other DNA
atatggcactggaacgtgaaatcattgatttggacgaagtggcgggtgaactcgtttttttacatgcgtctcgtc

SEQ ID NO: 453702 - DNA, 75 bp, synthetic construct
  source 1..75: mol_type = other DNA
aaaggctacgacacaatccctctcgatatggcactggaacgtgaaatcattgatttggacgaagtggcgggtgaa

SEQ ID NO: 453703 - DNA, 75 bp, synthetic construct
  source 1..75: mol_type = other DNA
atacacatttacaacaccttgaaatactccaggcaataatggaacatgatgccgataaagcagaattattgatgg

SEQ ID NO: 453704 - DNA, 75 bp, synthetic construct
  source 1..75: mol_type = other DNA
acaaaatcaaaggtgttgcaaccggtcgtagcggtatgcaccaggacgtgccaaaagaagacgttatcattgaaa

SEQ ID NO: 453705 - DNA, 75 bp, synthetic construct
  source 1..75: mol_type = other DNA
caatggcccgtactcaggcaccgcactctgcaactgcacagttcttcatcaacgtggttgataacgacttcctga

SEQ ID NO: 453706 - DNA, 75 bp, synthetic construct
  source 1..75: mol_type = other DNA
cagcaaacaaaacaatcgttacttcagttcatgggccaacatcttcccggatgaaattggcagtttctacaactt

SEQ ID NO: 453707 - DNA, 75 bp, synthetic construct
  source 1..75: mol_type = other DNA
gcattgacgcaactggatggctatgagctgcgtccacaagacatcttgctgccagattatgacgccacaacggtg

SEQ ID NO: 453708 - DNA, 75 bp, synthetic construct
  source 1..75: mol_type = other DNA
ttgttgcgcgttttgccgatgagcaaggattgccgcgtcccaaattggctgccgatctgaataccgtgctgacgc

SEQ ID NO: 453709 - DNA, 75 bp, synthetic construct
  source 1..75: mol_type = other DNA
aatgggtattaaaaaccacaaaaacacccagcaacttaaactgaaaactgtcgctaaaatcgacctgaccaccgc

SEQ ID NO: 453710 - DNA, 75 bp, synthetic construct
  source 1..75: mol_type = other DNA
tatcggtaaaacgctgaaaatgtacagcgtatccggcgacattagcgatgaggtcgtgatgtctatggatggcca

SEQ ID NO: 453711 - DNA, 75 bp, synthetic construct
  source 1..75: mol_type = other DNA
ctggggtggtttaccgcgctggaatactgatggcagcagcaacagttacgatcgcgcacgcagtaccgcacctga

SEQ ID NO: 453712 - DNA, 75 bp, synthetic construct
  source 1..75: mol_type = other DNA
cgggagacgaaaaacgagcaggtggtattacaccagataattgatcgccggacagcatcactgtgcagtgcagcg

SEQ ID NO: 453713 - DNA, 75 bp, synthetic construct
  source 1..75: mol_type = other DNA
tgcgtgtgctgcaaactcgaaatgacgcccgtaaaaacaaaactaaaaaatataacgttgatattcaaattaagt

SEQ ID NO: 453714 - DNA, 75 bp, synthetic construct
  source 1..75: mol_type = other DNA
cgcttcttggcgagcgtgtgatggaccgcatggtcatgaacggtggtcgctgggtgaattttaactgggagagct

SEQ ID NO: 453715 - DNA, 75 bp, synthetic construct
  source 1..75: mol_type = other DNA
cgagcaggcgcaaaagctggcgatgttaagcgcgccgttgttgatctcaggtgataccggcacaggcaaagatct

SEQ ID NO: 453716 - DNA, 75 bp, synthetic construct
  source 1..75: mol_type = other DNA
ttttgccgaactggattttgacagtttcagcagcctgatggcggaaattcgccgtattgcaggtgttaccgatgt

SEQ ID NO: 453717 - DNA, 75 bp, synthetic construct
  source 1..75: mol_type = other DNA
gctgaaggaactggactggcttcgcatcagcggtgagccgctgtatgcagtgatgtacgaaattccgttaattgt

SEQ ID NO: 453718 - DNA, 75 bp, synthetic construct
  source 1..75: mol_type = other DNA
cgatgattgcagctaaccgcgcgaatatgaccgctgaaatgctggcctgtaacgctgttggcggcttcgaaaaag

SEQ ID NO: 453719 - DNA, 75 bp, synthetic construct
  source 1..75: mol_type = other DNA
tgtttgaaattagagaagaacttttgttattgaaagaaaaggataaaagtttaataggtaagggggctgcaaaat

SEQ ID NO: 453720 - DNA, 75 bp, synthetic construct
  source 1..75: mol_type = other DNA
agctgcgtccacaggatattttgttaccggattatgacgccgcaacggtagccgtgggcgaagatgcgatggaag

SEQ ID NO: 453721 - DNA, 75 bp, synthetic construct
  source 1..75: mol_type = other DNA
ctaagcgcgccgctgctgataaccggtgataccggcaccggaaaagatctctttgcgtatgcctgtcatcaggca

SEQ ID NO: 453722 - DNA, 75 bp, synthetic construct
  source 1..75: mol_type = other DNA
taaatctttcggaaaagtattaaccgaccagaggaatacatcttctcctgcggtagaacgtgttgaggtgaataa

SEQ ID NO: 453723 - DNA, 75 bp, synthetic construct
  source 1..75: mol_type = other DNA
ggtgaggctgttatcagtgcaaaggctggttttcctgccggatgggaaatcacaaccgatgataatgttgtttac

SEQ ID NO: 453724 - DNA, 75 bp, synthetic construct
  source 1..75: mol_type = other DNA
gttatcacaattccagtaagaagaactttaagtccagcctccagtcctgtcagtccgaagtaaactatggtcgct

SEQ ID NO: 453725 - DNA, 75 bp, synthetic construct
  source 1..75: mol_type = other DNA
actgatcgacttcttcaccattggtgaattcggcgttctggcccgcaataacttcgttgcaaaatacgatattat

SEQ ID NO: 453726 - DNA, 75 bp, synthetic construct
  source 1..75: mol_type = other DNA
acgctggtctggtgtttgacatcaatgacaactggtcgacctacgccagctatacctctattttccagccgcaaa

SEQ ID NO: 453727 - DNA, 75 bp, synthetic construct
  source 1..75: mol_type = other DNA
ctaccaacgcccgtatgcagggccattggaatgaactgtgggcgcaacgtaatatctttaacgctcaacatgacg

SEQ ID NO: 453728 - DNA, 75 bp, synthetic construct
  source 1..75: mol_type = other DNA
ttcagcagtctgatggccgaaatacgccgtattgcaggtgttaccgatgtgcgtactgtcccgtggatgccttct

SEQ ID NO: 453729 - DNA, 75 bp, synthetic construct
  source 1..75: mol_type = other DNA
aacgctgttggcggtttctcccgtgacttctgggctgagattgacaaccaggtgctgcagctgcgggatcaggaa

SEQ ID NO: 453730 - DNA, 75 bp, synthetic construct
  source 1..75: mol_type = other DNA
accccgctgatcggtatgactactggtgtagtaccgctgccgcgctttatgccgaccgataactacaacttccgc

SEQ ID NO: 453731 - DNA, 75 bp, synthetic construct
  source 1..75: mol_type = other DNA
ggtcgcagcgtgattgtgataacggtggctgatgtgatgctggcgttacacaacagctacgacaacaaaaactca

SEQ ID NO: 453732 - DNA, 75 bp, synthetic construct
  source 1..75: mol_type = other DNA
aacctggtaccgggaagaaccatttagcggcagctatcgggaatcgcctgctgaaagacggtcagacagtgattg

SEQ ID NO: 453733 - DNA, 75 bp, synthetic construct
  source 1..75: mol_type = other DNA
gattatggatcgcatgaccatgaacggcgggcgatgggtgaattttaactgggagagctggcgtccaaatgtcgt

SEQ ID NO: 453734 - DNA, 75 bp, synthetic construct
  source 1..75: mol_type = other DNA
attaccaggtgcagaacgacggtcagcgatacgcgttgagccaggcgaaatctatcgctgatgaactgatgaccg

SEQ ID NO: 453735 - DNA, 75 bp, synthetic construct
  source 1..75: mol_type = other DNA
atcgatcaagtgcaggtggagctgccgatgccaaatcgtcagcaagtctggctgccggttgaaagccgtgatgtc

SEQ ID NO: 453736 - DNA, 75 bp, synthetic construct
  source 1..75: mol_type = other DNA
tatccagatcccttccattcgtcaaaacctggtgtaccgccagaatgacgtggtgttggtagaagaaggtgccac

SEQ ID NO: 453737 - DNA, 75 bp, synthetic construct
  source 1..75: mol_type = other DNA
gattatggatcgcatgaccatgaacggcgggtgttgggtgaattttaactgggagagctggcgtccgaatgtcgt

SEQ ID NO: 453738 - DNA, 75 bp, synthetic construct
  source 1..75: mol_type = other DNA
cgacgttttttggaccggaccggaattttgaaaacccctggttgctcccggtaagcggtacgaacaaccagcgtt

SEQ ID NO: 453739 - DNA, 75 bp, synthetic construct
  source 1..75: mol_type = other DNA
tgccctacacgccagctatgacgacgggcaatcaggcgaaaaatttttgcgggaactgtgccaagtggatctgct

SEQ ID NO: 453740 - DNA, 75 bp, synthetic construct
  source 1..75: mol_type = other DNA
ttggacattttgagttgaatgagccagcggcacaaattagctggtttgatacgcccttaacgctgacacggtacg

SEQ ID NO: 453741 - DNA, 75 bp, synthetic construct
  source 1..75: mol_type = other DNA
cgcgagacgaaaaacgagcaggtagtactgcaccagattattgatcgacggacagcgtcgatgcgtagcgtggga

SEQ ID NO: 453742 - DNA, 75 bp, synthetic construct
  source 1..75: mol_type = other DNA
aggaactttgcggggtagaccttctggtccttgatgaaattggcatgcagcgggatacgcgcaatgagctggtca

SEQ ID NO: 453743 - DNA, 75 bp, synthetic construct
  source 1..75: mol_type = other DNA
ctggcgataccgcgtgtgggtcaggaggtgattgtggacttcctcaacggcgacccggaccagccgattattatg

SEQ ID NO: 453744 - DNA, 75 bp, synthetic construct
  source 1..75: mol_type = other DNA
gagccaagcgtgtttttactcgatgaaccactttccaaccttgatgccgcgctacgtgtacagatgcgtatcgaa

SEQ ID NO: 453745 - DNA, 75 bp, synthetic construct
  source 1..75: mol_type = other DNA
catagctgacgaactgatgaccgagtgcacgaattttgtgttcagcggtaaaactggcaccgggaaaaatcacct

SEQ ID NO: 453746 - DNA, 75 bp, synthetic construct
  source 1..75: mol_type = other DNA
catcgcggaagaaatgatgaccggatgcacaaatttcgtgttcagcggtaagccgggtaccggaaagaatcacct

SEQ ID NO: 453747 - DNA, 75 bp, synthetic construct
  source 1..75: mol_type = other DNA
ctggcgtacgctggagttacatgctgatggcacgctgactaccgaagtgcaccgccttgcggacacgcgtttcca

SEQ ID NO: 453748 - DNA, 75 bp, synthetic construct
  source 1..75: mol_type = other DNA
atcgcggcaggtggtgttcttgagcgtatccgtaagctgaccccgcagcatgtaatcgcgccgtaccggacagtg

SEQ ID NO: 453749 - DNA, 75 bp, synthetic construct
  source 1..75: mol_type = other DNA
atgaaaaacattacgtcaggtggtgttctggcaagagtcagcagatttgtgccgcaggatgcaatccctccgtac

SEQ ID NO: 453750 - DNA, 75 bp, synthetic construct
  source 1..75: mol_type = other DNA
aacggcgggcgctgggtgaattttaactgggagagctggcgcccgaatgttggtcagccaggtattgagaagtaa

SEQ ID NO: 453751 - DNA, 75 bp, synthetic construct
  source 1..75: mol_type = other DNA
ttcttgaacgtatccgtaagctggccccgcagcatgtaaccgcgcggtaccggacagtggacgagtggagagagt

SEQ ID NO: 453752 - DNA, 75 bp, synthetic construct
  source 1..75: mol_type = other DNA
caatgagtacgcttcttggtgagaggattatggaccgcatgaccatgaacggtggtagatgggtgacgtttaact

SEQ ID NO: 453753 - DNA, 75 bp, synthetic construct
  source 1..75: mol_type = other DNA
caggtcggcgccaacatgtcgctgggcattcgcccggaacatttactgccaagcgatatcgccgacgtcatcctt

SEQ ID NO: 453754 - DNA, 75 bp, synthetic construct
  source 1..75: mol_type = other DNA
ttgctggatagccaggtgtttggcgtgccgcacggtgagttgagcgagtttcagcttgagtggctggaacgtaaa

SEQ ID NO: 453755 - DNA, 75 bp, synthetic construct
  source 1..75: mol_type = other DNA
cagtttaagccgcattgttccaactttacgctggacaccatcgcgcctggctggcgtacgctcgagttacatgct

SEQ ID NO: 453756 - DNA, 75 bp, synthetic construct
  source 1..75: mol_type = other DNA
gctgcctgcgggttgttgctggcttgaccaacacagtttgcgtaacgcaggcgaactggacaacgtactggcgaa

SEQ ID NO: 453757 - DNA, 75 bp, synthetic construct
  source 1..75: mol_type = other DNA
ctgccgtggcaggaattagtggcaaagtgacagaggttaaccagcaaaatacctaccacatttacggtggcggag

SEQ ID NO: 453758 - DNA, 75 bp, synthetic construct
  source 1..75: mol_type = other DNA
tcctcgtctcgcttggtttcagtgtggatgatgcaggagcgaaaaaattcggttctgtcctcgccggtacaactg

SEQ ID NO: 453759 - DNA, 75 bp, synthetic construct
  source 1..75: mol_type = other DNA
tcgtctgggggtacagacacgggatgccagcggtaacatgcgtgacatggctgctatttttacaggtgtaggcca

SEQ ID NO: 453760 - DNA, 75 bp, synthetic construct
  source 1..75: mol_type = other DNA
gtgaccactaaagactatctgtacagcaataatattgatactgaccttttagtggttatcggagggcttattgtt

SEQ ID NO: 453761 - DNA, 75 bp, synthetic construct
  source 1..75: mol_type = other DNA
cgaggcggccagaagctccaataagttcatgacttctctgcgcgagttcggcgcgatggcaggcatggcccgtga

SEQ ID NO: 453762 - DNA, 75 bp, synthetic construct
  source 1..75: mol_type = other DNA
cgaaagctatcggcttcaatactgacgaggcggccagaagctccaacaaattcatgacctccctgcgcgagttcg

SEQ ID NO: 453763 - DNA, 75 bp, synthetic construct
  source 1..75: mol_type = other DNA
tttagtggcgaatacaccgcgatggcgaaggcgatcggctataacgccgatgtggccgccgtcagctccaataaa

SEQ ID NO: 453764 - DNA, 75 bp, synthetic construct
  source 1..75: mol_type = other DNA
aatcttgctaggttcatgcgtaacaatcccggcgctgagggttttctgaaccggctgggggttcaaacgcgtgat

SEQ ID NO: 453765 - DNA, 75 bp, synthetic construct
  source 1..75: mol_type = other DNA
tgactggggtaaatggaagcctgaagtagacgcagcactgaagatggtcggtgacctgaaacagactgtcctcga

SEQ ID NO: 453766 - DNA, 75 bp, synthetic construct
  source 1..75: mol_type = other DNA
aatatcacctgggcgatttcatcgcagtctcctgccgataagtatgatctcatcaataaaacgtcctgtgtttct

SEQ ID NO: 453767 - DNA, 75 bp, synthetic construct
  source 1..75: mol_type = other DNA
cctgattgactggtccaaatggcagccagaaattgagcaggcaaagaaggtgttcaagtggctgcgcgataagtt

SEQ ID NO: 453768 - DNA, 75 bp, synthetic construct
  source 1..75: mol_type = other DNA
ggtggtaaccagttcgctgtgtccggcgcaggcgcgaaaggactgtttcagtttatggatggcacggcgcgcgac

SEQ ID NO: 453769 - DNA, 75 bp, synthetic construct
  source 1..75: mol_type = other DNA
tggcgaacatagccgtttgcaggtggcattccagggccaagggattaaatggctggtggcggcttacgctcgtct

SEQ ID NO: 453770 - DNA, 75 bp, synthetic construct
  source 1..75: mol_type = other DNA
catctgatattagcccctgtttctgcccctgctcatattattaaaagctctaccgctctttggaatgaggttgaa

SEQ ID NO: 453771 - DNA, 75 bp, synthetic construct
  source 1..75: mol_type = other DNA
ctcctcaatatattgtaaaaaactccacagcattgtggaatgaagttgaaagagtcgagcgtcaacaaaatggtc

SEQ ID NO: 453772 - DNA, 75 bp, synthetic construct
  source 1..75: mol_type = other DNA
tagcaccacctcctcatactcgtatgcgaggtgttaaatcctatcgtgataaatccaaagtcagtaaggttgttg

SEQ ID NO: 453773 - DNA, 75 bp, synthetic construct
  source 1..75: mol_type = other DNA
gttttccaagtcgccagaaaaacgaaaagaataacgttaatagtgatatgccttttactccccccacaaatggga

SEQ ID NO: 453774 - DNA, 75 bp, synthetic construct
  source 1..75: mol_type = other DNA
gatctcacccgatccatcccacaagaacaaaggcaattgaatctaagacctaaactgaagctaccgggatacaag

SEQ ID NO: 453775 - DNA, 75 bp, synthetic construct
  source 1..75: mol_type = other DNA
tgctcatcttcggtatctgtgcatcatcactggccgctgaaaaaaacagaaccgtcagttttccacgatgtgaag

SEQ ID NO: 453776 - DNA, 75 bp, synthetic construct
  source 1..75: mol_type = other DNA
cacgagttgtggcttaacaagccgcatatccttcagcactatcgcgaacggtttaccaatatcctggtggacgaa

SEQ ID NO: 453777 - DNA, 75 bp, synthetic construct
  source 1..75: mol_type = other DNA
gtgagttgccggaagagtgtgtggaagaggtgcgcctgcgcgccacggtaagccgcccggtcagccatcagcgta

SEQ ID NO: 453778 - DNA, 75 bp, synthetic construct
  source 1..75: mol_type = other DNA
cagtcaatctacggctggcgcggggcgcaggtagagaatattcagcgtttccttaatgatttccccggtgccgaa

SEQ ID NO: 453779 - DNA, 75 bp, synthetic construct
  source 1..75: mol_type = other DNA
cagtcaatctacggctggcgcggggcgcaggtggagaatattcagcgtttcctcaatgatttccccggtgctgaa

SEQ ID NO: 453780 - DNA, 75 bp, synthetic construct
  source 1..75: mol_type = other DNA
gcaccatcgtcaatatggaaggcagcggtgaacatagccgtttgcaggtggcgttccagggccagggaatcaaat

SEQ ID NO: 453781 - DNA, 75 bp, synthetic construct
  source 1..75: mol_type = other DNA
gcactatcgtcaatatggaaggcagcggcgagcatagccgtttgcaggtggcattccagggccagggaatcaaat

SEQ ID NO: 453782 - DNA, 75 bp, synthetic construct
  source 1..75: mol_type = other DNA
cacggaatggccctgatgccgcaggaaacccgcaactacattcctaaggtgttgagtaacatgcccgggaaggga

SEQ ID NO: 453783 - DNA, 75 bp, synthetic construct
  source 1..75: mol_type = other DNA
acctctcaccgcccttcaccgctggcaaagggaaacccgtcgcacagcaatcttgtccagatcgaaaaggtttaa

SEQ ID NO: 453784 - DNA, 75 bp, synthetic construct
  source 1..75: mol_type = other DNA
taaaacgcagatttccgtctttacatggacagatgccatcgaccatggtacggaaatgaccgcgacccgtgatgg

SEQ ID NO: 453785 - DNA, 75 bp, synthetic construct
  source 1..75: mol_type = other DNA
tgaaggtaaatttgaacggataagttgggacgaagccctggataccatcagtgataatcttcggcggatcctgaa

SEQ ID NO: 453786 - DNA, 75 bp, synthetic construct
  source 1..75: mol_type = other DNA
tccgcgctggcttcgaccattgaaacactggccgccgccgagcgcctgaccgcccacaaaaatgccgttactttg

SEQ ID NO: 453787 - DNA, 75 bp, synthetic construct
  source 1..75: mol_type = other DNA
aaaacgccaggtaagccagcgtctggacggtgcggcgatcgatatgcccgcaggcccgtcggaagtgctggtgat

SEQ ID NO: 453788 - DNA, 75 bp, synthetic construct
  source 1..75: mol_type = other DNA
ttgatttaagtaatagtatattattaacagctgccgtattggtgttttataagcctttagtaggtattcaactat

SEQ ID NO: 453789 - DNA, 75 bp, synthetic construct
  source 1..75: mol_type = other DNA
cggtcgcggccaggattactgccagcttaaccctcaaccgatggcgtactacgatggctgcatcagcgttgattt

SEQ ID NO: 453790 - DNA, 75 bp, synthetic construct
  source 1..75: mol_type = other DNA
accaccgacgaactgattccttccggtgaaacctcttcttatcgttcaaatccgattggtctggcggagtttacc

SEQ ID NO: 453791 - DNA, 75 bp, synthetic construct
  source 1..75: mol_type = other DNA
tagttcgcgtatttcgtttgatgaaatgcaaattatcgctttgaatgctgcaacaggagaatataactggaagat

SEQ ID NO: 453792 - DNA, 75 bp, synthetic construct
  source 1..75: mol_type = other DNA
ggcattaccaccaagcaaattggagtttgggtacacttttgttgcacttgatcctgatggacatcgtattcgcct

SEQ ID NO: 453793 - DNA, 75 bp, synthetic construct
  source 1..75: mol_type = other DNA
ggatcgcctgcgcaaccataccgtcgcacaattgattaacggctttaattttttacgttggctggaaagcgaacc

SEQ ID NO: 453794 - DNA, 75 bp, synthetic construct
  source 1..75: mol_type = other DNA
actgaaattggcagcatggtttatgcggtgaaaccaggcgatgggtctgcgcgtgaacaggcggcgagttgtcag

SEQ ID NO: 453795 - DNA, 75 bp, synthetic construct
  source 1..75: mol_type = other DNA
acgcccgcgaactggtcgatggcatcaccagcgccggttcggtatttcttggtgactggtcaccggaatcggcag

SEQ ID NO: 453796 - DNA, 75 bp, synthetic construct
  source 1..75: mol_type = other DNA
taatgcgctactttgaaggtaagacgacaggcaagccgctgcaaacccttaacgatataatctctacgtgggcac

SEQ ID NO: 453797 - DNA, 75 bp, synthetic construct
  source 1..75: mol_type = other DNA
gctatgccgcatcgcaaaccggtgccagcgccgagtcggccatgtcctctcttgaagggttggctggtttcatgc

SEQ ID NO: 453798 - DNA, 75 bp, synthetic construct
  source 1..75: mol_type = other DNA
gggctatattgttagtgacagagaaaatattgccgatagcgcaaaatcttcactgaggtatacgaagcgaattat

SEQ ID NO: 453799 - DNA, 75 bp, synthetic construct
  source 1..75: mol_type = other DNA
ggaaggagggcggcgacagccttatcgactggggcaagtggaaaccggaagtcgacgccgcgctgaagatggttc

SEQ ID NO: 453800 - DNA, 75 bp, synthetic construct
  source 1..75: mol_type = other DNA
ggaaggaaggcggggacagcctgattgactggggcaagtggaagccggaagtcgacgccgcgctgaagatggttc

SEQ ID NO: 453801 - DNA, 75 bp, synthetic construct
  source 1..75: mol_type = other DNA
aggagggcgggaaaagtcttatcgcttgggataaatgggagccggagattaacgctgccctgaagtcactggggg

SEQ ID NO: 453802 - DNA, 75 bp, synthetic construct
  source 1..75: mol_type = other DNA
gacggtgcggcgatcgatatgcccgcaggcccgtcggaagtgctggtgattgccgacagcggcgctacgccggat

SEQ ID NO: 453803 - DNA, 75 bp, synthetic construct
  source 1..75: mol_type = other DNA
tcggcggcgcacaggccattgccgcactggcgtttggtactgaatctgtgccgaaagtggacaaaatcttcgggc

SEQ ID NO: 453804 - DNA, 75 bp, synthetic construct
  source 1..75: mol_type = other DNA
tctgcgttggcttcgaccattgaaacgctggctaccgccgaacgcctgacagcccacaaaaatgccgtgacttta

SEQ ID NO: 453805 - DNA, 75 bp, synthetic construct
  source 1..75: mol_type = other DNA
atagataaagcgaaggatgcgatcacctggcttcgtgatcaccttctggaactaaaagatggtgttggcggctgg

SEQ ID NO: 453806 - DNA, 75 bp, synthetic construct
  source 1..75: mol_type = other DNA
atatctggtttgccggtaccgccatggttaaaaggctggatggcttatgctgcttatttgtactccgatcgcgaa

SEQ ID NO: 453807 - DNA, 75 bp, synthetic construct
  source 1..75: mol_type = other DNA
tggcgctgggcgaaaaatccgtggcactgggtgtggatgcccgggcgctggcgaaaaacagtgtggcactggggg

SEQ ID NO: 453808 - DNA, 75 bp, synthetic construct
  source 1..75: mol_type = other DNA
tgatggctgcgcagggtatgacacaaaaccgggctgagatgggattttctgcgttcctggggaaaatgggcatta

SEQ ID NO: 453809 - DNA, 75 bp, synthetic construct
  source 1..75: mol_type = other DNA
gtatgaatgacagggcgcgggcaacagaattactggcagattatgcattaagtcagtgcgatcgcgtcgcggcgt

SEQ ID NO: 453810 - DNA, 75 bp, synthetic construct
  source 1..75: mol_type = other DNA
ggtgtgtatccgtcttactgggaagaatggaaaaaagtccgggaagtggtaaaagttgcctgtcctgaatgcggg

SEQ ID NO: 453811 - DNA, 75 bp, synthetic construct
  source 1..75: mol_type = other DNA
ccatcaacggaggcatttaatgccatacgcaaagtgacgagtgctatcacgcttgatacgtggaaaaaatcagtg

SEQ ID NO: 453812 - DNA, 75 bp, synthetic construct
  source 1..75: mol_type = other DNA
aaacggggtatgcctgtaatcaggaactgccagcgttgtggcggtcggggctatgaaagactaccatcaacggag

SEQ ID NO: 453813 - DNA, 75 bp, synthetic construct
  source 1..75: mol_type = other DNA
agtcggtgtgatcgcgtggcggcgttaagaaaactcccggcagaaataaaaccggtagtgatgcgcattatggct

SEQ ID NO: 453814 - DNA, 75 bp, synthetic construct
  source 1..75: mol_type = other DNA
gccacagcgacacctctctggcgtggggagctggcgtgcagtttaacccgaccgaatccgtggccattgatattg

SEQ ID NO: 453815 - DNA, 75 bp, synthetic construct
  source 1..75: mol_type = other DNA
ggccattgatattgcttatgaaggctccggcagcggtgactggcgtaccaacagtttcatcgttggtgtcggtta

SEQ ID NO: 453816 - DNA, 75 bp, synthetic construct
  source 1..75: mol_type = other DNA
gtgcttatgcgatggcaggtgtggcttacagccgtgtttcgactttttccggggattatctccgcgtaactgaca

SEQ ID NO: 453817 - DNA, 75 bp, synthetic construct
  source 1..75: mol_type = other DNA
gaactgggctgagatgggattttctgcgttcctggggaaaatgggcattagtatgaacgacagggcgcgggcaac

SEQ ID NO: 453818 - DNA, 75 bp, synthetic construct
  source 1..75: mol_type = other DNA
ggatgaagcgatatacattactgcactaattaatagtcctgcggtaatgaatgtgattgtatcccatcaacctag

SEQ ID NO: 453819 - DNA, 75 bp, synthetic construct
  source 1..75: mol_type = other DNA
ggaaccgctgtagccccgaagaacagcaggcgctgttaatgcgcccggccatttccgcttccgacagcatcaccc

SEQ ID NO: 453820 - DNA, 75 bp, synthetic construct
  source 1..75: mol_type = other DNA
tgaagctttttacaaaaccggtcaacttgagcaagccattcaactcttccaacaggcaacagaattagacggcaa

SEQ ID NO: 453821 - DNA, 75 bp, synthetic construct
  source 1..75: mol_type = other DNA
ccccgtcaccgaatcgctgttaaaagcgatttttaacgatgaagaaaaattcaccgtccattcggcgttgccgca

SEQ ID NO: 453822 - DNA, 75 bp, synthetic construct
  source 1..75: mol_type = other DNA
tttaccgatctgccactaattgaaaaagaaagctgggagacatctttcattccttttacaccagaacaacaaatc

SEQ ID NO: 453823 - DNA, 75 bp, synthetic construct
  source 1..75: mol_type = other DNA
gcaaggtcggtaccgtgcaccttgcgcccgaggaacgcacaccgctggagcagcgggccgccatgacctgggcca

SEQ ID NO: 453824 - DNA, 75 bp, synthetic construct
  source 1..75: mol_type = other DNA
catctgaccgtcgccaacctgaacaataaatttcaccgttcgctggaagcgcccgtcaccgagtcgctgttaaaa

SEQ ID NO: 453825 - DNA, 75 bp, synthetic construct
  source 1..75: mol_type = other DNA
gcgttcgctcgccagtcacagttactggcaaacctgcgtgcgcgggtgaacggttttatggcgatagaagttccg

SEQ ID NO: 453826 - DNA, 75 bp, synthetic construct
  source 1..75: mol_type = other DNA
tgattttcgcccagcaaaacccggacgttatcgaccagggcgtttttcataatgacgtgattgccgtgagtaacc

SEQ ID NO: 453827 - DNA, 75 bp, synthetic construct
  source 1..75: mol_type = other DNA
tcttatccagaaaactggcagcaggcttttgctgagttacaaatgcgagttcagggtaatcaaccgacagggagt

SEQ ID NO: 453828 - DNA, 75 bp, synthetic construct
  source 1..75: mol_type = other DNA
aggaaggacatcaaattggctggcaagaaggtaaaattgaaggctggcaagaaggtaaattagaaggtttgcagc

SEQ ID NO: 453829 - DNA, 75 bp, synthetic construct
  source 1..75: mol_type = other DNA
tcatatgcgtttgaagattatgcccggagcgcggcgagcaaaaaacagtgcccctgctgccatggaaaaaaattt

SEQ ID NO: 453830 - DNA, 75 bp, synthetic construct
  source 1..75: mol_type = other DNA
caaactgattaccgccacgccagagttagtatgcgaggtcattccctgggttaatgctaaggcggcaggcatctt

SEQ ID NO: 453831 - DNA, 75 bp, synthetic construct
  source 1..75: mol_type = other DNA
aagagtggcgtaaagcgcttgtcaaactgattaccgtcacgccagagttagtcactgacgtcattcccagggtta

SEQ ID NO: 453832 - DNA, 75 bp, synthetic construct
  source 1..75: mol_type = other DNA
attcgctgtggtctggaaagtgccgttgaaatcgcccttctcgctcttcaactcaaatataaaccagtaaaaggc

SEQ ID NO: 453833 - DNA, 75 bp, synthetic construct
  source 1..75: mol_type = other DNA
ttacggacgcgctggggctgattacgtccttcagttatgccaatgctgaggatgagcaaaaaacgcgctacagcg

SEQ ID NO: 453834 - DNA, 75 bp, synthetic construct
  source 1..75: mol_type = other DNA
ccgaccgaatccgtggccattgatattgcttatgaaggctccggcagtggcgactggcgatcggatgcatttatt

SEQ ID NO: 453835 - DNA, 75 bp, synthetic construct
  source 1..75: mol_type = other DNA
aatggttcagcgcgtatgcgatggcaggcgtggcttacagccgtgtgtcgactttttccggggatttatctccgc

SEQ ID NO: 453836 - DNA, 75 bp, synthetic construct
  source 1..75: mol_type = other DNA
atgcgtaaactttatgccgccattttgtccgtagccatttgtctggccgtatccggtgcgcctgcatgggcgtct

SEQ ID NO: 453837 - DNA, 75 bp, synthetic construct
  source 1..75: mol_type = other DNA
tgtccgcagtagtctggctggccgtatccggtacgcctgcgtgggcgtctgaacatcagtccacgctgagcgcgg

SEQ ID NO: 453838 - DNA, 75 bp, synthetic construct
  source 1..75: mol_type = other DNA
agctatgcaggagacaagaatcgccagcttacccgttacagcgatacccgctggcatgaagattccgtgcgtaac

SEQ ID NO: 453839 - DNA, 75 bp, synthetic construct
  source 1..75: mol_type = other DNA
gcgtaaccgctggttcagcgtgatggcggggccgtctgtgcgcgtgaatgaatgtcagcgcgtatgcgatggcgg

SEQ ID NO: 453840 - DNA, 75 bp, synthetic construct
  source 1..75: mol_type = other DNA
gctgaccggaagtgatgacgctcgccacagtaacacctctctggcgtggggagctggcgtgcagtttaacccgac

SEQ ID NO: 453841 - DNA, 75 bp, synthetic construct
  source 1..75: mol_type = other DNA
tgatgacggtcgccacagcaacacgtctctggcgtggggggctggcgtgcagtttaacccgaccgaatccgtggc

SEQ ID NO: 453842 - DNA, 75 bp, synthetic construct
  source 1..75: mol_type = other DNA
taactgacaacaaggggaaaacgcacgatgtgctgaccgggagtgatgacaaccgccacagcaacacgtctctgg

SEQ ID NO: 453843 - DNA, 75 bp, synthetic construct
  source 1..75: mol_type = other DNA
ttcagctatgcaggagacaagaatcgccagcttacccgttacagcgatacccgctggcatgaagattccgtgcgt

SEQ ID NO: 453844 - DNA, 75 bp, synthetic construct
  source 1..75: mol_type = other DNA
cgaatccgtggccattgatatagcttatgaaggctccggcagtggcgactggcgcactgacggtttcatcgtggg

SEQ ID NO: 453845 - DNA, 75 bp, synthetic construct
  source 1..75: mol_type = other DNA
gctggttcagcgtaatggcggggccgtctgtgcgcgtgaatgaatggttcagcgcgtatgcgatggcgggtgtag

SEQ ID NO: 453846 - DNA, 75 bp, synthetic construct
  source 1..75: mol_type = other DNA
ccgaatacgtggccattgatattgcttatgaagggtccggtagtggggactggcgcactgacggtttcatcgtgg

SEQ ID NO: 453847 - DNA, 75 bp, synthetic construct
  source 1..75: mol_type = other DNA
tgtccgcagccatctgtctggccgtatccggtacgcctgcatgggcgtctgaacatcagtccacgctgagcgcgg

SEQ ID NO: 453848 - DNA, 75 bp, synthetic construct
  source 1..75: mol_type = other DNA
tgtccgcagccatctgtctggtcgtatccggtgcgccttcatgggcgtctgaacatcagtccacgctgagcgcgg

SEQ ID NO: 453849 - DNA, 75 bp, synthetic construct
  source 1..75: mol_type = other DNA
tcgtaaccgctggttcagcgtaatggcgggccggtctgtgcgcgtgaatgaatggttcagcgcgtatgcgatggc

SEQ ID NO: 453850 - DNA, 75 bp, synthetic construct
  source 1..75: mol_type = other DNA
ccgaatgcgtggccattgatattgcttatgaagggtccggtagtggagactggcgcactgacggtttcatcgtgg

SEQ ID NO: 453851 - DNA, 75 bp, synthetic construct
  source 1..75: mol_type = other DNA
ccgaattcgtggccattgatattgcttatgaagggtccggtagtggtgactggcgcactgacggtttcatcgtgg

SEQ ID NO: 453852 - DNA, 75 bp, synthetic construct
  source 1..75: mol_type = other DNA
aatggttcagcgcgtatgcgatggaggtgtggcttacagccgtgtgtcgactttctccggggattatctccgcgt

SEQ ID NO: 453853 - DNA, 75 bp, synthetic construct
  source 1..75: mol_type = other DNA
aatggttcagcgcgtatgcgatggcgggtgtggcttacagccgtgtgtcgactttctccggagattatcttcgcg

SEQ ID NO: 453854 - DNA, 75 bp, synthetic construct
  source 1..75: mol_type = other DNA
gatgagcaaaaaacgcactacaacgatacccgctggcatgaagattccgtgcgtaaccgctggttcagcgtgatg

SEQ ID NO: 453855 - DNA, 75 bp, synthetic construct
  source 1..75: mol_type = other DNA
tcccggcagcgatgaactgaacgggattaacgtgaaataccgttatgagtttacggacacactggggatggtgac

SEQ ID NO: 453856 - DNA, 75 bp, synthetic construct
  source 1..75: mol_type = other DNA
aatggttcagcgcgtatgcgatggcgggtatggcttacagccgtgtgtcgactttctccggggtattatctccgc

SEQ ID NO: 453857 - DNA, 75 bp, synthetic construct
  source 1..75: mol_type = other DNA
acaacaaggggaaaacgcacgacgtgctgaccggaagtgatgacgctcgccacagtaacacctctatggcgtggg

SEQ ID NO: 453858 - DNA, 75 bp, synthetic construct
  source 1..75: mol_type = other DNA
gaaagactatattggcgtatttaataacacaatcgccagcctccagttcgtcctcgacgattatctagaaaatgc

SEQ ID NO: 453859 - DNA, 75 bp, synthetic construct
  source 1..75: mol_type = other DNA
cccgaattctttttaaagaaatagtggatggagatgtaagaaaaatacatgctgattcaaatgacagtgacactg

SEQ ID NO: 453860 - DNA, 75 bp, synthetic construct
  source 1..75: mol_type = other DNA
aaactgccaaataacatcaaatacgttagggaaggtgcgaataagcggggaaattcttctcggctgactcagtca

SEQ ID NO: 453861 - DNA, 75 bp, synthetic construct
  source 1..75: mol_type = other DNA
aacccgatttaccgagggggcaggctgcgcatgtattgcggcatacattcgccagtcactttgtgatgaacggtg

SEQ ID NO: 453862 - DNA, 75 bp, synthetic construct
  source 1..75: mol_type = other DNA
aaaaaacgaggtcacattgttgcttgacagactgaatggagatcaacgaagggttgcgctcttatgtctttgcac

SEQ ID NO: 453863 - DNA, 75 bp, synthetic construct
  source 1..75: mol_type = other DNA
ccatcaccctgaatgagtggctgcaaaagaattcaacaggaaaagccatcgtcttttgcgatcgtccggatcttg

SEQ ID NO: 453864 - DNA, 75 bp, synthetic construct
  source 1..75: mol_type = other DNA
catccagtgataacccaacgccatgtccggaggtatttttctcatcgatatatgatacaataaaaaattgcttcg

SEQ ID NO: 453865 - DNA, 75 bp, synthetic construct
  source 1..75: mol_type = other DNA
atgagaaataaaattcttttcgctttattaattattgtggtggctgctttgtcatttgatttcggtcgaagctgg

SEQ ID NO: 453866 - DNA, 75 bp, synthetic construct
  source 1..75: mol_type = other DNA
tgagataattgatataaatggaatgaaattcacaaacaaaggaagcataggggcagccaaattattagaaaataa

SEQ ID NO: 453867 - DNA, 75 bp, synthetic construct
  source 1..75: mol_type = other DNA
tgaagagaagttccgtgtgaagctgattaactgccatgccagtaccatgggaaaagccgtgaaactgaccttcag

SEQ ID NO: 453868 - DNA, 75 bp, synthetic construct
  source 1..75: mol_type = other DNA
cagaagccattacaaacaaggccgttcagccgggaaattacagcgctacggcaacattcgaacttttgtataaat

SEQ ID NO: 453869 - DNA, 75 bp, synthetic construct
  source 1..75: mol_type = other DNA
agatgcagcccttcctggccacctgagggtaaccggagtgaatgccggccggttaggcattgcactgctggacac

SEQ ID NO: 453870 - DNA, 75 bp, synthetic construct
  source 1..75: mol_type = other DNA
ctatttcataatgcttcgacagcatctttcttcagagtaatgccagttccgaagtggttttatattctcttcact

SEQ ID NO: 453871 - DNA, 75 bp, synthetic construct
  source 1..75: mol_type = other DNA
cagcggctacaagctcggccagcgcgtacgccacgctaagtttggtgaaggcaccatcgtcaatatggaaggcag

SEQ ID NO: 453872 - DNA, 75 bp, synthetic construct
  source 1..75: mol_type = other DNA
catactcgattatggcggtgacgtttaccaacaaagcggcggcggaaatgcgtcatcgtatcgggcaactgatgg

SEQ ID NO: 453873 - DNA, 75 bp, synthetic construct
  source 1..75: mol_type = other DNA
gaagatttaatgccgctgcaggcgttcctctcccatgcggcactggaagcaggtgaagggcaggcggatacctgg

SEQ ID NO: 453874 - DNA, 75 bp, synthetic construct
  source 1..75: mol_type = other DNA
acgccattaacgctgacgcggtatgagtttttattgctgaagattactcaagtcgccaggccgcgtctggtcccg

SEQ ID NO: 453875 - DNA, 75 bp, synthetic construct
  source 1..75: mol_type = other DNA
tacaacgaagaagacgaagatttaatgccgctgcaggcattcctctcccatgcggcgctggaagcgggcgagggg

SEQ ID NO: 453876 - DNA, 75 bp, synthetic construct
  source 1..75: mol_type = other DNA
tacaccaacgcggggtattggtgaccggacgctggacgtggtacgtcagacatcgcgcgatcgccagttaacact

SEQ ID NO: 453877 - DNA, 75 bp, synthetic construct
  source 1..75: mol_type = other DNA
cgtgatacgcgcaacgaacaggtcacactgaaccagatcgtcgatcgcagaacagccgcgatgcgcagtgtcggg

SEQ ID NO: 453878 - DNA, 75 bp, synthetic construct
  source 1..75: mol_type = other DNA
cgtgttgcatgacggctacgacaacggccagtccggggaaaaatttttacaggagctttgtggagttgaccttct

SEQ ID NO: 453879 - DNA, 75 bp, synthetic construct
  source 1..75: mol_type = other DNA
cagcagcgtgtctcggcggggctcactgaccctgttgtcacagggatatggtgtatcagcaaaacacggaggcct

SEQ ID NO: 453880 - DNA, 75 bp, synthetic construct
  source 1..75: mol_type = other DNA
gtatgtgggtcggcactttccacgggctggcacaccgtctgctgcgtgcgcaccatatggacgccaatctgccgc

SEQ ID NO: 453881 - DNA, 75 bp, synthetic construct
  source 1..75: mol_type = other DNA
caggatgcggtacaactgatgaccatgcactcggcgaaaggtctggagttcccgcaggtgtttatcgtcggtatg

SEQ ID NO: 453882 - DNA, 75 bp, synthetic construct
  source 1..75: mol_type = other DNA
cgacccggaccagccgattattatggggcgtacctaccaccatgaaaaccgcacacccggcagcctgccggggac

SEQ ID NO: 453883 - DNA, 75 bp, synthetic construct
  source 1..75: mol_type = other DNA
gacgttgattttctctatacggatgtttgggtttcgatgggagagccaaaagaagcctgggcagaacgagtgagt

SEQ ID NO: 453884 - DNA, 75 bp, synthetic construct
  source 1..75: mol_type = other DNA
gatatggcgcgtcgcgttgccgaggccgtcgaacgccagttggcagaactgccgcgtgccgaaaccgcccgccag

SEQ ID NO: 453885 - DNA, 75 bp, synthetic construct
  source 1..75: mol_type = other DNA
gccgcgagctgaaaccgcacgtcaggctctgagcgccagccgcctgatcgtgaccaacgatttagcgcagtgcgt

SEQ ID NO: 453886 - DNA, 75 bp, synthetic construct
  source 1..75: mol_type = other DNA
gcactgagcgccagccgcctgattgtgaccaacgatttagcgcagtgcgtggagatatctaaccagtacggcccg

SEQ ID NO: 453887 - DNA, 75 bp, synthetic construct
  source 1..75: mol_type = other DNA
tgaataccggcatgcaattatcgcttccgcagcaacatctttcgccgctgagcttcgcaaaggaggcaaccagtg

SEQ ID NO: 453888 - DNA, 75 bp, synthetic construct
  source 1..75: mol_type = other DNA
gtggacacctgaaggaaacgcaccaaattattgctggtgggaggttgatccggttgatgttgcaaatgaagccat

SEQ ID NO: 453889 - DNA, 75 bp, synthetic construct
  source 1..75: mol_type = other DNA
gctgatgcattgccgcattatcaactcgcatcttcacgatgccattttataaaaatgaaagtggaatcatattgt

SEQ ID NO: 453890 - DNA, 75 bp, synthetic construct
  source 1..75: mol_type = other DNA
aacaggcgttcgctcgccagtcacagttactggcaaacctgcgttcgcgggtcaatggttttatggcgatagaag

SEQ ID NO: 453891 - DNA, 75 bp, synthetic construct
  source 1..75: mol_type = other DNA
tgatgatgaacgataccttgtttaatacgctcaatgactgggtggatcgctactatcgcgatcgtcttacagccg

SEQ ID NO: 453892 - DNA, 75 bp, synthetic construct
  source 1..75: mol_type = other DNA
ggcaatggcacgcgaccttcccgttatccggcgcggcaaacccgcgaagccagtgaggcggtcgctaggttgaat

SEQ ID NO: 453893 - DNA, 75 bp, synthetic construct
  source 1..75: mol_type = other DNA
atgactattgctgaacggctacggcaggaaggacatcaaattggctggcaggaaggtaaattagaaggtttgcag

SEQ ID NO: 453894 - DNA, 75 bp, synthetic construct
  source 1..75: mol_type = other DNA
atgcgcattatggcttcgtacgcttttgaggattatgcccgcagcgcagcgagtaaaaagcagtgcccttgttgc

SEQ ID NO: 453895 - DNA, 75 bp, synthetic construct
  source 1..75: mol_type = other DNA
tgctcgccaggcgcaattactggtaagcctgcgttcgcgggttaatggttttatggcaattgaagttcctgcggc

SEQ ID NO: 453896 - DNA, 75 bp, synthetic construct
  source 1..75: mol_type = other DNA
agaatatggtgttggtttattagcgctgatttatggggatccctcagcgctcgcggcggattttgttaaagttcg

SEQ ID NO: 453897 - DNA, 75 bp, synthetic construct
  source 1..75: mol_type = other DNA
ctgtgaatttaacagtcagggtgggaaccttttctctgattcccggataagagtgactttcgatggcgtccgggg

SEQ ID NO: 453898 - DNA, 75 bp, synthetic construct
  source 1..75: mol_type = other DNA
cagaatggtttttccggacctgaaagaaaattcagcctccggctcaggaactgtgaatttaacagtcagggtggg

SEQ ID NO: 453899 - DNA, 75 bp, synthetic construct
  source 1..75: mol_type = other DNA
aagaagcgctggattacaccctcagaattgtgagaaacggaaaaaaacttgaagccggaaattattttgccgtgc

SEQ ID NO: 453900 - DNA, 75 bp, synthetic construct
  source 1..75: mol_type = other DNA
atatccgtctggtggcaccaaaatctttctggccagatgaaacgctggtaacacaatgccgtgagatcgccagcg

SEQ ID NO: 453901 - DNA, 75 bp, synthetic construct
  source 1..75: mol_type = other DNA
cctccgcccggcatgacccttcctgaatactggggagaagaacacgtatggtgggacggcagggctgcttttcat

SEQ ID NO: 453902 - DNA, 75 bp, synthetic construct
  source 1..75: mol_type = other DNA
ttttctttgtttgctgtgcattttttcgtggtgtttttgccggtccgtttcctccgcccggcatgacccttcctg

SEQ ID NO: 453903 - DNA, 75 bp, synthetic construct
  source 1..75: mol_type = other DNA
cgttcacggaacaggatgtggcacagcgggcttacaataacggtatggcggcctccggttttggaacgggaggca

SEQ ID NO: 453904 - DNA, 75 bp, synthetic construct
  source 1..75: mol_type = other DNA
tggtgagattggtaatcaggtggcagatattgccagaacggaaggacagatagccggtgagaaagcgaagcggga

SEQ ID NO: 453905 - DNA, 75 bp, synthetic construct
  source 1..75: mol_type = other DNA
cggacagtaccacgcagtcggcagtgtctgccgggaatatcaccatccgggatacgcagagccagaaacaggatg

SEQ ID NO: 453906 - DNA, 75 bp, synthetic construct
  source 1..75: mol_type = other DNA
cgctgtccatggaggatgcctggcaggaaattgatatgggaaccacgccactcagggacttacagaacagtcctg

SEQ ID NO: 453907 - DNA, 75 bp, synthetic construct
  source 1..75: mol_type = other DNA
gtcccaagaacaaacaggtgccagatggactattgatattaaggggaataaacaactttctgacattgcatataa

SEQ ID NO: 453908 - DNA, 75 bp, synthetic construct
  source 1..75: mol_type = other DNA
cggaacatcgatcacgttgcggaatttatcgtcgtcccaagaacaaacaggtgccagatggactattgatattaa

SEQ ID NO: 453909 - DNA, 75 bp, synthetic construct
  source 1..75: mol_type = other DNA
caggtcattgtggcgctgaatattgccgcgatgtcagaagcgttaacgctggcaactaaagcgggcgttaacccg

SEQ ID NO: 453910 - DNA, 75 bp, synthetic construct
  source 1..75: mol_type = other DNA
gatcgatatgagttcaatcgctccgctggcaagccgtgaaatcagcgaagcactgaaagcgaaaggtattgatat

SEQ ID NO: 453911 - DNA, 75 bp, synthetic construct
  source 1..75: mol_type = other DNA
ggtgctggaattttgaacctgatgccggaaaacagctaaatccatatctcgccagtgagggaattctcaggcaat

SEQ ID NO: 453912 - DNA, 75 bp, synthetic construct
  source 1..75: mol_type = other DNA
tgcccgaaggccctttctcacgcgaacaggctcttgccgtcacaacggcttaccttaatgtgcttattgaagatg

SEQ ID NO: 453913 - DNA, 75 bp, synthetic construct
  source 1..75: mol_type = other DNA
cgccggcggtgctggaattttgaatccgatgccggcaaacaacttaatacgcggctcgccagtgaagggcttctc

SEQ ID NO: 453914 - DNA, 75 bp, synthetic construct
  source 1..75: mol_type = other DNA
cggcgatgtcagaagcgttaacgctggcaaccaaagcgggcgttaatcctgatctggtttatcaggcgattcgtg

SEQ ID NO: 453915 - DNA, 75 bp, synthetic construct
  source 1..75: mol_type = other DNA
tcaggcgaaagataagatggacgcctggctgtctggcccgaacgccaacaaaatcgaagtggttatcgccaacaa

SEQ ID NO: 453916 - DNA, 75 bp, synthetic construct
  source 1..75: mol_type = other DNA
gcggctgatggcaccaactggaaaatcgacaataaagttgtccgcgttccttatgttggcgtagataaagacaat

SEQ ID NO: 453917 - DNA, 75 bp, synthetic construct
  source 1..75: mol_type = other DNA
cccggcagctgcgggtacggtgattgagaaagcgcgtgggcaaaacgtgccggtggttttcttcaacaaagaacc

SEQ ID NO: 453918 - DNA, 75 bp, synthetic construct
  source 1..75: mol_type = other DNA
accagggaacgcatttccggctggtgatccgcaacgctgaaggccagttgcgctggcggtgctggaattttgaac

SEQ ID NO: 453919 - DNA, 75 bp, synthetic construct
  source 1..75: mol_type = other DNA
taccgcaatgtgtttatccaggatgacccgggaatgcatttccgttggttatccgcaacgcggaaggtcagcgac

SEQ ID NO: 453920 - DNA, 75 bp, synthetic construct
  source 1..75: mol_type = other DNA
gagaaagcgcgcggacaaaacgtgccaatcgttttcttcaataaagaaccttcccgtaaggcgctggatagttac

SEQ ID NO: 453921 - DNA, 75 bp, synthetic construct
  source 1..75: mol_type = other DNA
attaataaaaaaacgaaagaggttgtattaggtgctataaatacaactgtaggtagtgtcatgacttggaacgtt

SEQ ID NO: 453922 - DNA, 75 bp, synthetic construct
  source 1..75: mol_type = other DNA
gagcagatcctgcaaaccgcgaaagacattggtgagccttctgtcctgaaccgtgcaggtggtgcgccgacgctg

SEQ ID NO: 453923 - DNA, 75 bp, synthetic construct
  source 1..75: mol_type = other DNA
actggaaaatcccaaaacgatggaaatggaaatgtacttctggttaatacagaaaaaggtagtgtttccgttgta

SEQ ID NO: 453924 - DNA, 75 bp, synthetic construct
  source 1..75: mol_type = other DNA
ttctttcttctgctgttgccggactgatgctggtgagttctggggcgctggctttagatatcccagttaaagaca

SEQ ID NO: 453925 - DNA, 75 bp, synthetic construct
  source 1..75: mol_type = other DNA
ggctttcctggttaagcctgtacttctggccgttactgcgcgtgctggcgctcatttctaccgcgccaattctga

SEQ ID NO: 453926 - DNA, 75 bp, synthetic construct
  source 1..75: mol_type = other DNA
ttggtggcgagccgctgaatagcaatgcgtttctggcactcaccaaagcagggagtttgattttcctcaatggac

SEQ ID NO: 453927 - DNA, 75 bp, synthetic construct
  source 1..75: mol_type = other DNA
cagcagatcctgatcggcattgcgcttggttttaccatgcaatttgcctttgccgctgtgcgaaccgctggtgaa

SEQ ID NO: 453928 - DNA, 75 bp, synthetic construct
  source 1..75: mol_type = other DNA
aaagatggtaatggagcgctgttacaggaattcaaccgtctcggcacaaatgtaaatgacctgaaaaatgccact

SEQ ID NO: 453929 - DNA, 75 bp, synthetic construct
  source 1..75: mol_type = other DNA
gcagaccgcagccaaagcaggtattgcagccagcgacggtgatgtttcctacaacgtaggtgtgaacttcgagtt

SEQ ID NO: 453930 - DNA, 75 bp, synthetic construct
  source 1..75: mol_type = other DNA
gaccgtattgatgcagcagttggtgccattgatggccgtgtcacccgtaacacgcaatccattgagaaaaacagc

SEQ ID NO: 453931 - DNA, 75 bp, synthetic construct
  source 1..75: mol_type = other DNA
gtgggttaccgcttcaacgagcagaccgcagccaaagcaggtattgcagccagcgacggtgatgtttcctacaac

SEQ ID NO: 453932 - DNA, 75 bp, synthetic construct
  source 1..75: mol_type = other DNA
ttgataaatctgtaagaactaacagccaggacattgcaaccaacagaaaagcgattcagtcaaacagccgccagc

SEQ ID NO: 453933 - DNA, 75 bp, synthetic construct
  source 1..75: mol_type = other DNA
aagcattcctgttaaggatgtggttgcagaggtaaaagccgatacaacaattcgtaagaacaaagatggcagcta

SEQ ID NO: 453934 - DNA, 75 bp, synthetic construct
  source 1..75: mol_type = other DNA
tgctgatgaatgattctcagaatgaccagtccaagcagaacgatcagatcgacgtattgctggcgaaaggggtga

SEQ ID NO: 453935 - DNA, 75 bp, synthetic construct
  source 1..75: mol_type = other DNA
atgtaggactggcgccctgttttattgcccgaaggccctttctcacgcgaacaggcggttggcgtcacaacagct

SEQ ID NO: 453936 - DNA, 75 bp, synthetic construct
  source 1..75: mol_type = other DNA
atgtaggactgcccccctgttttattgcccgaaggccctttctcacgcgaacaggcggttggcgtcacaacagct

SEQ ID NO: 453937 - DNA, 75 bp, synthetic construct
  source 1..75: mol_type = other DNA
atgtaggactgacaccctgttttattgcccgaaggccctttctcacgcgaacaggcggttggcgtcacaacagct

SEQ ID NO: 453938 - DNA, 75 bp, synthetic construct
  source 1..75: mol_type = other DNA
atgtgggactgacgccctgttttattgcccgaaggccctttctcacgcgaacaggcggttggcgtcacaacagct

SEQ ID NO: 453939 - DNA, 75 bp, synthetic construct
  source 1..75: mol_type = other DNA
atgtcggactgaccccctgttttattgcccgaaggccctttctcacgcgaacaggcggttggcgtcacaacagct

SEQ ID NO: 453940 - DNA, 75 bp, synthetic construct
  source 1..75: mol_type = other DNA
atgttggactgactccctgttttattgcccgaaggccctttctcacgcgaacaggcggttggcgtcacaacagct

SEQ ID NO: 453941 - DNA, 75 bp, synthetic construct
  source 1..75: mol_type = other DNA
aatacctcaccgataaccttggccttcagccttatgaatgggcacgtttggcggttaagaagaataacaataagg

SEQ ID NO: 453942 - DNA, 75 bp, synthetic construct
  source 1..75: mol_type = other DNA
atccaaacgaacaatatgcttattgtgtcaatgaattaaacagctcagttgatgtctgggaactgaaagatccgc

SEQ ID NO: 453943 - DNA, 75 bp, synthetic construct
  source 1..75: mol_type = other DNA
agagggcttccagccaactgaaacccagccgcgcggctttaatatcgatcaccgtggtaagtatctgattgccgc

SEQ ID NO: 453944 - DNA, 75 bp, synthetic construct
  source 1..75: mol_type = other DNA
aggattacataggacaccacctgaacaaccttcagctggacctgcgtacattctcgctggtggatccacataacc

SEQ ID NO: 453945 - DNA, 75 bp, synthetic construct
  source 1..75: mol_type = other DNA
ttttgttgctgatgctaaagtttttcggttaagtcgaacagctaaaaatcagaaggattttaaagttcaagcaat

SEQ ID NO: 453946 - DNA, 75 bp, synthetic construct
  source 1..75: mol_type = other DNA
ttagctggcttgtactttttgttattaatactgcaatggcatcattatcttatcactttctggagaagaacgata

SEQ ID NO: 453947 - DNA, 75 bp, synthetic construct
  source 1..75: mol_type = other DNA
gcatttgttaggttacgatcacatcgaagatgacgaagcagaagaaatggaagccctcgaaacagagattatgct

SEQ ID NO: 453948 - DNA, 75 bp, synthetic construct
  source 1..75: mol_type = other DNA
gaactgaaactggtggcgctggaagatggcgtttcgcttctcaaccgtctacggatggaaggcaaaaaaaatagt

SEQ ID NO: 453949 - DNA, 75 bp, synthetic construct
  source 1..75: mol_type = other DNA
accacgctggagttcacgccagccgaagtggcggcacaacgtcaggcatggattagcgaatggcaacgcgccgtc

SEQ ID NO: 453950 - DNA, 75 bp, synthetic construct
  source 1..75: mol_type = other DNA
tgacaactgtgtggctgccgctcagtctggtaactatcgcaaaccgttcagcgagtcggacatcaagagcgcggt

SEQ ID NO: 453951 - DNA, 75 bp, synthetic construct
  source 1..75: mol_type = other DNA
cgctggagctaccggaattctgaacccgatgccggaaaggtgcttaatacgcagctcgccagtgacggtcttctc

SEQ ID NO: 453952 - DNA, 75 bp, synthetic construct
  source 1..75: mol_type = other DNA
cgtaccgtttgattacggctacttcgccttcgtctatgacaaaaacaaactaaaaaacccgccacaaagcctgaa

SEQ ID NO: 453953 - DNA, 75 bp, synthetic construct
  source 1..75: mol_type = other DNA
gccttcgtctatgacaagaacaaactgaaaaatccgccgcaaagcctgaaagagctggttgaaagcgatcaaaac

SEQ ID NO: 453954 - DNA, 75 bp, synthetic construct
  source 1..75: mol_type = other DNA
gtctccattcttcgtgaacgcagtcagtatgccgatgtgctgattgtaaatggcggattggggccgaccagcgat

SEQ ID NO: 453955 - DNA, 75 bp, synthetic construct
  source 1..75: mol_type = other DNA
cgttggttaaacggccaggatatcgccagtgagcatggctggattgaggttattgagtccatgaccttatctgtc

SEQ ID NO: 453956 - DNA, 75 bp, synthetic construct
  source 1..75: mol_type = other DNA
tatcgaattgaaactcaccggaccggcaagcgagctacaggcgatggaaaaactatggcaggacgttaaacgcgt

SEQ ID NO: 453957 - DNA, 75 bp, synthetic construct
  source 1..75: mol_type = other DNA
gcaggcggttgctgtcataaccgcttaccgcaatgtgtttatccaggatgacccgggaatgcatttccgtcgggt

SEQ ID NO: 453958 - DNA, 75 bp, synthetic construct
  source 1..75: mol_type = other DNA
cgctggttgaacggtcaggatgttgccagcgagcatggctggattgacattattgagtcgctgactttaaccgcc

SEQ ID NO: 453959 - DNA, 75 bp, synthetic construct
  source 1..75: mol_type = other DNA
ctgcaactgccgccgggcgtaacaatgggctatcgctcttctatgccgattatcgaactgaaactcaccggaccg

SEQ ID NO: 453960 - DNA, 75 bp, synthetic construct
  source 1..75: mol_type = other DNA
gtgtgagcgtgcggtttaaggtgccgggcgcactggtgccgaatcagtttgccctgggtatttactggcagttgt

SEQ ID NO: 453961 - DNA, 75 bp, synthetic construct
  source 1..75: mol_type = other DNA
ctgcgtttgttaatggtactgccggggtggttgttccagacaggccggttaccacctcagagtctgtaatttttt

SEQ ID NO: 453962 - DNA, 75 bp, synthetic construct
  source 1..75: mol_type = other DNA
agacccggacattccgggtatcgggtattacggttcgaaatggcgtgacagctcagccacctggacgtcacagga

SEQ ID NO: 453963 - DNA, 75 bp, synthetic construct
  source 1..75: mol_type = other DNA
atttaacttggggtaataactcctgtgaaattacccccccgaaccaaagtaacatcaacgaaagtgccattattt

SEQ ID NO: 453964 - DNA, 75 bp, synthetic construct
  source 1..75: mol_type = other DNA
agctatggcgataacgcccgcatgatggtcgataccgatggtatttccggcgttgaaatcaactctaaccgtacc

SEQ ID NO: 453965 - DNA, 75 bp, synthetic construct
  source 1..75: mol_type = other DNA
aaacgctggaattaaactcttatctcaacgttacacgcaatacttattgggacagcgccagcaataccaactact

SEQ ID NO: 453966 - DNA, 75 bp, synthetic construct
  source 1..75: mol_type = other DNA
ggggacgtcagcacagcggtagtgagcccgggggatgataatgcagggggggttactgctgaaccggagttttac

SEQ ID NO: 453967 - DNA, 75 bp, synthetic construct
  source 1..75: mol_type = other DNA
accgtctggcaacggcgattctggtgcatgccgggagagccgctgaattcattaccggaaaacagcctgatacgg

SEQ ID NO: 453968 - DNA, 75 bp, synthetic construct
  source 1..75: mol_type = other DNA
atgatgccggagccagtggaggtaaggcgatgaagcttaccaaagcgacgggaaaatcctcctggtacctggaac

SEQ ID NO: 453969 - DNA, 75 bp, synthetic construct
  source 1..75: mol_type = other DNA
ccgaatcagtttgccctgggtatttactggcagttgtcgtccctgccggagggagtgacgctgtcagaggaaggc

SEQ ID NO: 453970 - DNA, 75 bp, synthetic construct
  source 1..75: mol_type = other DNA
tcatgggctcgccgtgggattatttccgaccgtctggcaacggcgattctgagctgcgcgggtaagtcttctgcg

SEQ ID NO: 453971 - DNA, 75 bp, synthetic construct
  source 1..75: mol_type = other DNA
ctggcgctgtactggccggtttcttcgcttcctcagggcgtcacactggaaggtaatgccggtcataacctgctg

SEQ ID NO: 453972 - DNA, 75 bp, synthetic construct
  source 1..75: mol_type = other DNA
agctatggcgataacgctcgcatgatggttgataccaacggcatcgctggcgttgaaataaattcgaaccgtact

SEQ ID NO: 453973 - DNA, 75 bp, synthetic construct
  source 1..75: mol_type = other DNA
caagacgaaatccgcaaaaaaaatcttctttgtgccgtttatgacggatgaaaacgggcgaaatgtgggtaccaa

SEQ ID NO: 453974 - DNA, 75 bp, synthetic construct
  source 1..75: mol_type = other DNA
ggttcggcattcaccaagggcgcggaggggacattcagtgcggacgcgggggccagccaggattcggcacgctgg

SEQ ID NO: 453975 - DNA, 75 bp, synthetic construct
  source 1..75: mol_type = other DNA
catacggaacaactggaaggttttacattacagcagagcgatgaattgtgttatccgatgcgcctgcgcggagat

SEQ ID NO: 453976 - DNA, 75 bp, synthetic construct
  source 1..75: mol_type = other DNA
ggataatgctgaaacacacacccgtccgtcaggaaatgaaactgctgccagctccccttcccggtattacgtggt

SEQ ID NO: 453977 - DNA, 75 bp, synthetic construct
  source 1..75: mol_type = other DNA
aaataacagccttcaggtaactccggttattgatggtcaggatggagccgcgtttaccctgacgcagtcaccggt

SEQ ID NO: 453978 - DNA, 75 bp, synthetic construct
  source 1..75: mol_type = other DNA
tgcatttttggcgggcgatgaaggaaccttcagcgaatccaccggcgcaagcgagacctcggcacgctggggtgt

SEQ ID NO: 453979 - DNA, 75 bp, synthetic construct
  source 1..75: mol_type = other DNA
atgcacttttcctgaaaatggttgaaggtttccgcactgagttagagaaatatgatgctcaatgcgtatatggta

SEQ ID NO: 453980 - DNA, 75 bp, synthetic construct
  source 1..75: mol_type = other DNA
atcgactggcaacagcaattgtaacctatgcaggtaaatcatctgcctttgtgaatggtattacagaagtaacag

SEQ ID NO: 453981 - DNA, 75 bp, synthetic construct
  source 1..75: mol_type = other DNA
tggtgaaggccttccgctgccggagacatatgaccgtccggacccgcgtattaagcagctggcgcgtcgcagtac

SEQ ID NO: 453982 - DNA, 75 bp, synthetic construct
  source 1..75: mol_type = other DNA
gcattattgcagatgacgccgtttgcctggcgtgcgaagccagaagtctggcaaacactggcagcaaaagaagtg

SEQ ID NO: 453983 - DNA, 75 bp, synthetic construct
  source 1..75: mol_type = other DNA
agtagagtcatattttgtcgacaaatcaatatggaatgtccatattacatttcatgatgataagcgttttgtgtt

SEQ ID NO: 453984 - DNA, 75 bp, synthetic construct
  source 1..75: mol_type = other DNA
agggagaggcagaccttgcatcgggaagtcagcagcataatggtttattcacgaccatggttcagcagttcagaa

SEQ ID NO: 453985 - DNA, 75 bp, synthetic construct
  source 1..75: mol_type = other DNA
atggaaacaacagaaaacaaaccgattgtaattggtgctgatgctgcaccgtttaagtttgaactgtcacaactg

SEQ ID NO: 453986 - DNA, 75 bp, synthetic construct
  source 1..75: mol_type = other DNA
tcggctgccgatgtcaaaaaactctacagtatgtataactcggcgttcctggacgacctgaccaaagcaatgggc

SEQ ID NO: 453987 - DNA, 75 bp, synthetic construct
  source 1..75: mol_type = other DNA
gtgattaatcgtggtattgtggagaaagaagccatcattaataaccattttgaacgcgtactggatggcgggctt

SEQ ID NO: 453988 - DNA, 75 bp, synthetic construct
  source 1..75: mol_type = other DNA
taaaagaaatcgttcatttccaggtgggaagcattaatttaagtaccagtatcggtgtagcacattcaaatgaat

SEQ ID NO: 453989 - DNA, 75 bp, synthetic construct
  source 1..75: mol_type = other DNA
tctggagcatgatgccgccgggaagggggcagagttgctgaagaaaggcggacgtgtgagcgtgcggtttaaggt

SEQ ID NO: 453990 - DNA, 75 bp, synthetic construct
  source 1..75: mol_type = other DNA
tgatgagtctgctggcgtccggtgaagacctggcatcacagggctggcgctattatcacaaaccggcgagcggag

SEQ ID NO: 453991 - DNA, 75 bp, synthetic construct
  source 1..75: mol_type = other DNA
agttcatgggctcgccgtgggattatttccgaccgtctggcaacggcgattctggtgcatgccgggagaaccgct

SEQ ID NO: 453992 - DNA, 75 bp, synthetic construct
  source 1..75: mol_type = other DNA
ggtttacgttaacgccggaaataatggcgttgaagatccagaacaaggcggacagattgtgaataccacggttgg

SEQ ID NO: 453993 - DNA, 75 bp, synthetic construct
  source 1..75: mol_type = other DNA
ggtgctgtggtgggcgttctatcacaacccggataagcatccgaacctcagcaaagccgagctggactttatccg

SEQ ID NO: 453994 - DNA, 75 bp, synthetic construct
  source 1..75: mol_type = other DNA
tgatgctggcgttaccgctcattaccctcctgttaacgctgaatctggcattaggtttactgaatcgtatgaccc

SEQ ID NO: 453995 - DNA, 75 bp, synthetic construct
  source 1..75: mol_type = other DNA
gtttattaatggcacggtctgtacctgtacggtttatggcgatacccggaaataccactggcgggtggattacgg

SEQ ID NO: 453996 - DNA, 75 bp, synthetic construct
  source 1..75: mol_type = other DNA
gacatactgatgtccttcttcctgcagacggatgcgacgaacctgaacgcgatgtaccacaagaagcagaatgcg

SEQ ID NO: 453997 - DNA, 75 bp, synthetic construct
  source 1..75: mol_type = other DNA
aaccggaaaaccacatctggtttctggagcatgatgcagccggacagggtgcggagttactgaagaagggcggac

SEQ ID NO: 453998 - DNA, 75 bp, synthetic construct
  source 1..75: mol_type = other DNA
caagccgctgtacaacgatctgcttacccgtacaaaagccgcgctggataaaaaccccaaaaacgtcctgttatc

SEQ ID NO: 453999 - DNA, 75 bp, synthetic construct
  source 1..75: mol_type = other DNA
aacgacatgctgatgtccttcttcctgcagacggatgcgacgaacctgaacgcgatgtaccacaagaagcagaat

SEQ ID NO: 454000 - DNA, 75 bp, synthetic construct
  source 1..75: mol_type = other DNA
caccaccggagctgatggcacatacagtgacgcgagtggtgcctcggagaattcaacccgctggggtgtggacaa

SEQ ID NO: 454001 - DNA, 75 bp, synthetic construct
  source 1..75: mol_type = other DNA
cagacttattcttcgcaatacgatgcggtgtatggtgcatataagacgaaatccgcaaaaaaaatcttctttgtg

SEQ ID NO: 454002 - DNA, 75 bp, synthetic construct
  source 1..75: mol_type = other DNA
caaccagttcggtctgggaatttatctgtataccgatgtagcgttacctgacgtcgtggcgatgaccgggactgg

SEQ ID NO: 454003 - DNA, 75 bp, synthetic construct
  source 1..75: mol_type = other DNA
cagctcatgggcgcgtcgtggcattattcccgatcgtatggcaactgctattctgaacgtagccggtcgcacctt

SEQ ID NO: 454004 - DNA, 75 bp, synthetic construct
  source 1..75: mol_type = other DNA
acatatgaccgtccggacccgcgtattaagcagctggcgcgccgcagtacggtgacaccgggcggtgccgcctgt

SEQ ID NO: 454005 - DNA, 75 bp, synthetic construct
  source 1..75: mol_type = other DNA
atcgggtattacggttcaaaatggcgaacggacagaagcacctggacatctcaggacagggccagccatttcagt

SEQ ID NO: 454006 - DNA, 75 bp, synthetic construct
  source 1..75: mol_type = other DNA
ttgtggagacacaacatatttctggaagcagaagaacgaaacggcgtaccagacggtgtacggtagttacaaaaa

SEQ ID NO: 454007 - DNA, 75 bp, synthetic construct
  source 1..75: mol_type = other DNA
taaaacggaaaagaatatccatttcgtaccgttcatgaccgatgagaacggggtgaatgtgccgacgaacaaacc

SEQ ID NO: 454008 - DNA, 75 bp, synthetic construct
  source 1..75: mol_type = other DNA
gaggtgttcgtaatgacagacatcattgatggtaatccgcagtattctcgtattgaaatgaatagtaagagtgct

SEQ ID NO: 454009 - DNA, 75 bp, synthetic construct
  source 1..75: mol_type = other DNA
cattcgaccatgactggcatacgcttgcatttaaatttaagggcagtaacagcattaatgaaccgccccgggttt

SEQ ID NO: 454010 - DNA, 75 bp, synthetic construct
  source 1..75: mol_type = other DNA
agacagataaagccagtattaatgttgcataccatcatacagttaatcaacaaaaagaacttggcacgtttggcg

SEQ ID NO: 454011 - DNA, 75 bp, synthetic construct
  source 1..75: mol_type = other DNA
cagacaatccggaattgatcctgcgtgtgctacagctgagatttgacgagtcactgtccgtacccgcgcatttct

SEQ ID NO: 454012 - DNA, 75 bp, synthetic construct
  source 1..75: mol_type = other DNA
tttatcactggaatctgcaaaacttcgccccggaagatctgctttatgctcgtttcgatagtccggcactcaaga

SEQ ID NO: 454013 - DNA, 75 bp, synthetic construct
  source 1..75: mol_type = other DNA
acaggtgattgattaccaacataaaccacagttcacgccgaatctacaaacccgacttgatgccgcgctcgacac

SEQ ID NO: 454014 - DNA, 75 bp, synthetic construct
  source 1..75: mol_type = other DNA
tgattctggaactcaccgttcgcaaccatcctggtgtaatgacccacgtttgtgggctttttgcccgccgcgcct

SEQ ID NO: 454015 - DNA, 75 bp, synthetic construct
  source 1..75: mol_type = other DNA
ccaaatcgacaaactggaagatgtggtcaaagtgcagcgtaatcagtctgacccgaccatgtttaacaagattgc

SEQ ID NO: 454016 - DNA, 75 bp, synthetic construct
  source 1..75: mol_type = other DNA
tgattctcgaactcaccgttcgcaaccatccaggtgtaatgacccacgtttgtgggctttttgcccgccgcgctt

SEQ ID NO: 454017 - DNA, 75 bp, synthetic construct
  source 1..75: mol_type = other DNA
gcaggtggaagtcgccgcccgcaccgctgccagcaagcagccggagctggcgcaaaaattcctccagtttatggt

SEQ ID NO: 454018 - DNA, 75 bp, synthetic construct
  source 1..75: mol_type = other DNA
tgaaaatcagtttcttatgaataaaaatccggattacgtatcacctccatctattgaagagttggccagaaaact

SEQ ID NO: 454019 - DNA, 75 bp, synthetic construct
  source 1..75: mol_type = other DNA
gtggtgtacatcaccggccaatccggttcaggtaaatctgttgttctgcgcgagctacaacgccagatgaaagat

SEQ ID NO: 454020 - DNA, 75 bp, synthetic construct
  source 1..75: mol_type = other DNA
cccgtcttgataccgcgctggaaactttctggcaggcgctgcaccgccgcgatgttcaggttcccgatcttctgt

SEQ ID NO: 454021 - DNA, 75 bp, synthetic construct
  source 1..75: mol_type = other DNA
gccttcgtctatgacaagaacaaactgaaaaatccgccgcaaagcctgaaagaactggttgagagcgatcaaaac

SEQ ID NO: 454022 - DNA, 75 bp, synthetic construct
  source 1..75: mol_type = other DNA
gccgatgtggtgctggggctggataacaatctgttagacgccgccagcaaaacagggctgtttgctaaaagcggt

SEQ ID NO: 454023 - DNA, 75 bp, synthetic construct
  source 1..75: mol_type = other DNA
gcagcaccctcggcggtgccgaatatgtagcagaacacctggctgaaaagctggaagaggcgggttttaccaccg

SEQ ID NO: 454024 - DNA, 75 bp, synthetic construct
  source 1..75: mol_type = other DNA
gtggccgacctcgccaatcaatggaaggacgacgccgctattacgctggaggaatacaacgtcatccgtaagcgc

SEQ ID NO: 454025 - DNA, 75 bp, synthetic construct
  source 1..75: mol_type = other DNA
tgactctgcgcgatattcagcgcatcaataccctcgttaagcgtgatcttctcaatgtggaagaggttgtcgctg

SEQ ID NO: 454026 - DNA, 75 bp, synthetic construct
  source 1..75: mol_type = other DNA
atatacattgagtttactgaacgaaaaaataaaggaaatattcaaacggatgcctttaaaaggatttgaggatgc

SEQ ID NO: 454027 - DNA, 75 bp, synthetic construct
  source 1..75: mol_type = other DNA
gttgtcgacacaagccgtatggtttctgacatggcacgactgatgactaaggccagacaggcatggggaattatt

SEQ ID NO: 454028 - DNA, 75 bp, synthetic construct
  source 1..75: mol_type = other DNA
ccaggagaagctttggcaactgttaacattttctataataacggagggacgtctacagtccagtatcaaacagga

SEQ ID NO: 454029 - DNA, 75 bp, synthetic construct
  source 1..75: mol_type = other DNA
tgtgcaacgctgcctgagaaatcgatggagctatcccgacattctggaatctgttaattccaaattcagtgaggc

SEQ ID NO: 454030 - DNA, 75 bp, synthetic construct
  source 1..75: mol_type = other DNA
acgatggcggctggtatgaatggagcagcgatccgaaaaatccggtagcaaccggtgaacgcgccccggacagta

SEQ ID NO: 454031 - DNA, 75 bp, synthetic construct
  source 1..75: mol_type = other DNA
attgcggcaccggctggcgcgcctcagaaacctttatgtatgcgcgcgcgatgggctggaagaatgtctccgttt

SEQ ID NO: 454032 - DNA, 75 bp, synthetic construct
  source 1..75: mol_type = other DNA
cctgaaaaccgatacgccagtggcgttatacggtaatactaaagacgtcgaagccgtcaaaacgcgactgcaaaa

SEQ ID NO: 454033 - DNA, 75 bp, synthetic construct
  source 1..75: mol_type = other DNA
tttccaaataatactgttagagcatattgaagagtcttattggcttgacagagaaatgacgaactttactcttgt

SEQ ID NO: 454034 - DNA, 75 bp, synthetic construct
  source 1..75: mol_type = other DNA
tggatcaagcaacataacctgaaaaccgatgctccggtggcgctgtacggtaatgacaaagatgtcgacgccgtc

SEQ ID NO: 454035 - DNA, 75 bp, synthetic construct
  source 1..75: mol_type = other DNA
atgtgcgcctgctggatggcggctggcaaacctggtccgacgcgggactgcctgttgagcgcggaacgccaccga

SEQ ID NO: 454036 - DNA, 75 bp, synthetic construct
  source 1..75: mol_type = other DNA
acgtgatcgcttcctgtccagcttcaagcagcctggtcgattccgggctgagttggaaaaggtgaagctgatgca

SEQ ID NO: 454037 - DNA, 75 bp, synthetic construct
  source 1..75: mol_type = other DNA
gaaatctacgagctcctgttggatctcctggaacgttatggaccgcagcgccgtgaccagcgcccggacatgccg

SEQ ID NO: 454038 - DNA, 75 bp, synthetic construct
  source 1..75: mol_type = other DNA
atcactaaatcactgtgcgccgggcgggtgtctttcgattgtgactgtggtcgtcatcaatactggtatcgttac

SEQ ID NO: 454039 - DNA, 75 bp, synthetic construct
  source 1..75: mol_type = other DNA
acgggcgctatatcactgatggcctgtcctctaaggacttcacgcgtttattcgaccttatcagtaaagaacaaa

SEQ ID NO: 454040 - DNA, 75 bp, synthetic construct
  source 1..75: mol_type = other DNA
ctgatgatatggtatttacctttgagttctttagcgaggcaaaacgcttctgtagggtgctaccgaaaaggttga

SEQ ID NO: 454041 - DNA, 75 bp, synthetic construct
  source 1..75: mol_type = other DNA
ctgcatcatgtaatagacgaatggtttgctcaaatcacgcgttcacacatccatgggcgggctgagatggtgagg

SEQ ID NO: 454042 - DNA, 75 bp, synthetic construct
  source 1..75: mol_type = other DNA
tggagaaatctgaatgcccccaataaaaggcttgttctgaataccatcatcagagtaatcagaggctggataaat

SEQ ID NO: 454043 - DNA, 75 bp, synthetic construct
  source 1..75: mol_type = other DNA
ctaccgaagtttgcgtaaccaccaccgtgcgtgaagcaaatgaccgtggctatgaatgcatcataccggaagatt

SEQ ID NO: 454044 - DNA, 75 bp, synthetic construct
  source 1..75: mol_type = other DNA
cccggcgagtgctggacacgttctggtgcgggcgtggtttccctgttgatccagcgaaaattgctcacgacatgg

SEQ ID NO: 454045 - DNA, 75 bp, synthetic construct
  source 1..75: mol_type = other DNA
tcgatacatcagaaatgtccgttcacgagctggcggaaatgctgcgtacccgtttgctgggtaaacgtgagcgtg

SEQ ID NO: 454046 - DNA, 75 bp, synthetic construct
  source 1..75: mol_type = other DNA
agaaatggcgaaagaataaaacgttgggacagggaaatcatagcaggctctaacaaatggattaactgtccacct

SEQ ID NO: 454047 - DNA, 75 bp, synthetic construct
  source 1..75: mol_type = other DNA
ttagatttattgttgcatgacgaagcattgaaaaagttaatagaagtcatatcatctcatgccaaagataaaaac

SEQ ID NO: 454048 - DNA, 75 bp, synthetic construct
  source 1..75: mol_type = other DNA
atgaatattcgccgtaaaaaccgcttgtggattgcctgtgccgttctggcagggttggcactgactatcggtctg

SEQ ID NO: 454049 - DNA, 75 bp, synthetic construct
  source 1..75: mol_type = other DNA
ttatgcaagtcgaggaaagtcgccgtgaggaatggatacgagaacggctttccagcccagatcttgaggaggatt

SEQ ID NO: 454050 - DNA, 75 bp, synthetic construct
  source 1..75: mol_type = other DNA
gcgtgaaggtggattgcccgtcgcatttttatggctcggcatcgcactgatcattatgccagtggccacgcggat

SEQ ID NO: 454051 - DNA, 75 bp, synthetic construct
  source 1..75: mol_type = other DNA
tgttggtcagcgtggtggccggttccgtactctatgacggacaacttagtcgcagcgatggtatctttctcctct

SEQ ID NO: 454052 - DNA, 75 bp, synthetic construct
  source 1..75: mol_type = other DNA
tcggggaatctctctttgccgagctgcgaaacaatgagatattttcgcgctgggaccggggcgagaaaattgaat

SEQ ID NO: 454053 - DNA, 75 bp, synthetic construct
  source 1..75: mol_type = other DNA
aatcctggacgcgggtgatggatgcgctgagtaatccaccgtcacttggtgaaaagctaaaacgtgcggcaaaac

SEQ ID NO: 454054 - DNA, 75 bp, synthetic construct
  source 1..75: mol_type = other DNA
agtcatggaacctggttatggatgccatcactaatccgccagtaccaaatgaacgactgaaacgagccgctaaac

SEQ ID NO: 454055 - DNA, 75 bp, synthetic construct
  source 1..75: mol_type = other DNA
tcaaacattatcaatatcttgctgatcctcggtctgaccgcgctggtacgcccttttaccgtccattctgatgtt

SEQ ID NO: 454056 - DNA, 75 bp, synthetic construct
  source 1..75: mol_type = other DNA
atgcttattggctatgtacgtgtatcaacaaatgaccagaacaccgatttacaacgcaatacgttgaactgtgca

SEQ ID NO: 454057 - DNA, 75 bp, synthetic construct
  source 1..75: mol_type = other DNA
ggctggactgcgtacgggcgatctctattcaccctggccggaagaggctaaccgcacgctgaccggtcatctggc

SEQ ID NO: 454058 - DNA, 75 bp, synthetic construct
  source 1..75: mol_type = other DNA
acctcacggcaaaacctgctacgtgaaaacgtcgctgatagccgaatcttcattaccggcaatacagttatcgac

SEQ ID NO: 454059 - DNA, 75 bp, synthetic construct
  source 1..75: mol_type = other DNA
atgaagctaaccgatgcggataatgccgccgatggcatttttttccccgcccttgagcaaaatatgatgggtgcg

SEQ ID NO: 454060 - DNA, 75 bp, synthetic construct
  source 1..75: mol_type = other DNA
gcctggaaaacgacgtcagtaacattacccaaatcgccgatgagctacggaatgtggtcagcaagccgataatga

SEQ ID NO: 454061 - DNA, 75 bp, synthetic construct
  source 1..75: mol_type = other DNA
acaacgtaatgcgtttatttgtgccggaagtgagttgattgttgcgcgaatgggaagttggccagaagttgttat

SEQ ID NO: 454062 - DNA, 75 bp, synthetic construct
  source 1..75: mol_type = other DNA
ggtaactccatctctgaaaacgttggtccgaaacacctgatcaacaagaaaaccgttgctaagcgagctgaaaac

SEQ ID NO: 454063 - DNA, 75 bp, synthetic construct
  source 1..75: mol_type = other DNA
ttcactcaagagcaagtagacaaaatcttccgcgccgccgccctggctgctgcagatgctcgaatcccactcgcg

SEQ ID NO: 454064 - DNA, 75 bp, synthetic construct
  source 1..75: mol_type = other DNA
gatatcaaacgtgcagttgcatctgtactgatgtccaaaaccttcgacaacggcgtaatctgtgcttctgaacag

SEQ ID NO: 454065 - DNA, 75 bp, synthetic construct
  source 1..75: mol_type = other DNA
tctcagggtggtatcggtgatctgtataacttcaaactcgcgccttccctgacactgggttgtggttcctggggt

SEQ ID NO: 454066 - DNA, 75 bp, synthetic construct
  source 1..75: mol_type = other DNA
taaacgcgctggttgcgcgcgtgaaagtagcccagcgtgaatatgccagtttcactcagaagcaagtagacaaaa

SEQ ID NO: 454067 - DNA, 75 bp, synthetic construct
  source 1..75: mol_type = other DNA
gctgggtggtggttccccgatggatgccgcgaagattatgtgggttatgtacgagcatcctgaaactcacttcga

SEQ ID NO: 454068 - DNA, 75 bp, synthetic construct
  source 1..75: mol_type = other DNA
tgatggtttgttacaactgcgtattttcaccggcgatgaaattcttccagctctcttctcaaccttaaaacctga

SEQ ID NO: 454069 - DNA, 75 bp, synthetic construct
  source 1..75: mol_type = other DNA
cgatgggttattgcaactgcgtattttcaccggtgacgaaattcttcccgctctcttctcaaccttaaaacctga

SEQ ID NO: 454070 - DNA, 75 bp, synthetic construct
  source 1..75: mol_type = other DNA
tgattcttaatggcaaaagtactgacaatctacccttgcgcgaagcaattatgctgttgcgtgaggaaggaatga

SEQ ID NO: 454071 - DNA, 75 bp, synthetic construct
  source 1..75: mol_type = other DNA
ctgccggcgcgccgaaagatctgatcggctggatcgatcaaccttccgttgaactgtccaatgcgctgatgcacc

SEQ ID NO: 454072 - DNA, 75 bp, synthetic construct
  source 1..75: mol_type = other DNA
gagaactgcagttcggtatataccctgagtcaattcatgtgcttgactggtttcatataacgatgaggctgacgg

SEQ ID NO: 454073 - DNA, 75 bp, synthetic construct
  source 1..75: mol_type = other DNA
tcttgatggcgaaccgttgagtgggcaaaacttccatattgaaatacttccggcggcgttgcgttgtcgattacc

SEQ ID NO: 454074 - DNA, 75 bp, synthetic construct
  source 1..75: mol_type = other DNA
tggaagcttatgtttctgtactggcttctgagttctctgatggtcaggctctgcaagcgctgaaactgctgaaag

SEQ ID NO: 454075 - DNA, 75 bp, synthetic construct
  source 1..75: mol_type = other DNA
cggcgcgtggtgaccttcagaccagggcagaagttaaaaagccgggtcgaaaacgcttcgcccaaagacgagtaa

SEQ ID NO: 454076 - DNA, 75 bp, synthetic construct
  source 1..75: mol_type = other DNA
aagatgacctgattgaagccattgtagctctgccaacggatctgttcttccgcaccaatatcgccacctacctgt

SEQ ID NO: 454077 - DNA, 75 bp, synthetic construct
  source 1..75: mol_type = other DNA
ggaaacgctctgcctgcgtctgtatgaacacaatggcgtggaattacagacggcatcctggtacaccattgcccg

SEQ ID NO: 454078 - DNA, 75 bp, synthetic construct
  source 1..75: mol_type = other DNA
gccctgagagccagcaaattcacgtctggaacctgaatcatgaaggcgcactgacgctgacacaggttgtcgatg

SEQ ID NO: 454079 - DNA, 75 bp, synthetic construct
  source 1..75: mol_type = other DNA
atgaagcaaacagtttatatcgccagccctgagagccagcaaattcacgtctggaacctgaatcatgaaggcgca

SEQ ID NO: 454080 - DNA, 75 bp, synthetic construct
  source 1..75: mol_type = other DNA
gcttagcaagcggaatgccaaagaactggttgaactgtttttcgaagagatccgtcgcgctctggaaaacggcga

SEQ ID NO: 454081 - DNA, 75 bp, synthetic construct
  source 1..75: mol_type = other DNA
gataaccaaccggcacgcgttgcctacttcggtcagaaaatgaaaactgcccgtatcctgatcaacaccccggct

SEQ ID NO: 454082 - DNA, 75 bp, synthetic construct
  source 1..75: mol_type = other DNA
aacgtttcgccagccacggcggctacatgctacagggtaaagagctgaaagccgttcaggatatcatcctgaaaa

SEQ ID NO: 454083 - DNA, 75 bp, synthetic construct
  source 1..75: mol_type = other DNA
tctcagggtggtatcggtgacctgtataacttcaaactcgcaccttccctgacgctgggttgtggttcttggggt

SEQ ID NO: 454084 - DNA, 75 bp, synthetic construct
  source 1..75: mol_type = other DNA
cagggcgaagcgtcgtctccggtaacccatcctgctcaggccctgccgcactcccgtctggtgtatgttgtttct

SEQ ID NO: 454085 - DNA, 75 bp, synthetic construct
  source 1..75: mol_type = other DNA
aaatgaccattctgatgatgctctccagttcccgaaaatatgttgaaatcgagagtcaggcaagaaatggtaagg

SEQ ID NO: 454086 - DNA, 75 bp, synthetic construct
  source 1..75: mol_type = other DNA
gctgggtggtggttccccgatggacgctgcgaagatcatgtgggttatgtacgaacatccggaaactcacttcga

SEQ ID NO: 454087 - DNA, 75 bp, synthetic construct
  source 1..75: mol_type = other DNA
cagtgaattactttgatggtgatggcatttatgctttttgctttgatggtgaatgctacgtcaaaagattacaaa

SEQ ID NO: 454088 - DNA, 75 bp, synthetic construct
  source 1..75: mol_type = other DNA
gcgtgggaatcggcccaccttgccgcgcgccggtgctgtgtgggaatcagcccaccttaccgggcgccggtgctg

SEQ ID NO: 454089 - DNA, 75 bp, synthetic construct
  source 1..75: mol_type = other DNA
gatctggtgtatcaggcaattcgcggtggactggcgggcagtaccgtgctggatgccaaagcgccgatggtgatg

SEQ ID NO: 454090 - DNA, 75 bp, synthetic construct
  source 1..75: mol_type = other DNA
gaaccgaaagccatcgacggtacgctgtcagtgatggtgggcggcgacaaggctattttcgacaaatactatgat

SEQ ID NO: 454091 - DNA, 75 bp, synthetic construct
  source 1..75: mol_type = other DNA
cccaaaggggataccggagccacaggacctgagggtaaagccggtcctgtgggaccaaaaggtgacaggggggac

SEQ ID NO: 454092 - DNA, 75 bp, synthetic construct
  source 1..75: mol_type = other DNA
gaggcagatggttgccctgacgagaatggtactgggttctccccgggtggtactgcttgatgagcccacgacagg

SEQ ID NO: 454093 - DNA, 75 bp, synthetic construct
  source 1..75: mol_type = other DNA
ccaatcgctcctgggaaacgttatggatgctgagtatcggggtgattgcagccattctgtttgagtgtgctgcaa

SEQ ID NO: 454094 - DNA, 75 bp, synthetic construct
  source 1..75: mol_type = other DNA
atgccgtaccggagccgctgcgcagctacttcgattttgaggcttatgcgcgtgatctgttcagcagcggctatg

SEQ ID NO: 454095 - DNA, 75 bp, synthetic construct
  source 1..75: mol_type = other DNA
ctatttcgattttgaagcttatgcgcgagatctgttcagcagcggctatgtgttccatgacggctatgtcttcag

SEQ ID NO: 454096 - DNA, 75 bp, synthetic construct
  source 1..75: mol_type = other DNA
ccaggggttaacttggcaactgtggacattttttataacggggacggttcgactacaattcaatatctcactgga

SEQ ID NO: 454097 - DNA, 75 bp, synthetic construct
  source 1..75: mol_type = other DNA
ccgattatctggccggcgtcgccacggtggagaaaacaaaacgacctcgccctgttcgccgtcgtcagcggcgga

SEQ ID NO: 454098 - DNA, 75 bp, synthetic construct
  source 1..75: mol_type = other DNA
ccttcaccgaacagttgcaacaggctgacgggctgattgtcgccacgcctgtgtataaagccgcttattccggtg

SEQ ID NO: 454099 - DNA, 75 bp, synthetic construct
  source 1..75: mol_type = other DNA
gtggtgctaccgctggcgacgggcggtacggtggctcatctgctggcggtcgattatgcccttaagccagtttta

SEQ ID NO: 454100 - DNA, 75 bp, synthetic construct
  source 1..75: mol_type = other DNA
ttccttcttgagcagaatccccggctttttctgggaagtctgcgtgagaatttacagctgtcacgtttaccggga

SEQ ID NO: 454101 - DNA, 75 bp, synthetic construct
  source 1..75: mol_type = other DNA
gttcagcgacgctgggatggatatacagccagtgtcgcccgctcgtccattcgggtaaaaaataccagtaatggc

SEQ ID NO: 454102 - DNA, 75 bp, synthetic construct
  source 1..75: mol_type = other DNA
tattgccggtaagaaggctgacctgatcatcagctccgctctgctgcgacgggtgatggcggtgaaaatgtctga

SEQ ID NO: 454103 - DNA, 75 bp, synthetic construct
  source 1..75: mol_type = other DNA
gaaaatgatggtagggctataccgtcaaaataaaggacaaattacccttgacggggttgctatgcagcaactgga

SEQ ID NO: 454104 - DNA, 75 bp, synthetic construct
  source 1..75: mol_type = other DNA
agtccgtacagtactggacaacaggaaaaacatttccaaggggaaaccggcttgcccagttatccgaaataagtg

SEQ ID NO: 454105 - DNA, 75 bp, synthetic construct
  source 1..75: mol_type = other DNA
catatccacttcgtgatgaagtactccactcgaatccagatgcaaacgtaaaggttatacacaatggcctttctc

SEQ ID NO: 454106 - DNA, 75 bp, synthetic construct
  source 1..75: mol_type = other DNA
ttcaatggcggtactcctactatggctgtatatctccagaacggtagagcggggaatataaccgttaatttgggt

SEQ ID NO: 454107 - DNA, 75 bp, synthetic construct
  source 1..75: mol_type = other DNA
tctgcagctttcgcgtctaccgggaagcctgtcggatgtggatatgattaatgcagccggacgtttcgggtttga

SEQ ID NO: 454108 - DNA, 75 bp, synthetic construct
  source 1..75: mol_type = other DNA
gatgctgagtatcggggtgattgcagccattctgtttgagtgtgctgcaaagttaatccggagctatctgacgga

SEQ ID NO: 454109 - DNA, 75 bp, synthetic construct
  source 1..75: mol_type = other DNA
atgaagggcgggtaatgatggacggtccccgtgatgaaatactgaaaagactgtcagggaaacagcagagtgaag

SEQ ID NO: 454110 - DNA, 75 bp, synthetic construct
  source 1..75: mol_type = other DNA
gttctggcgggtactgtggcgattcagggcatattacggacaggttattgttgcgagttttatcattaactttct

SEQ ID NO: 454111 - DNA, 75 bp, synthetic construct
  source 1..75: mol_type = other DNA
atgctgttaactgggttcagcgacgctgggatggatatactgcaagtgtcgcccgttcgtccattcgggtaaaaa

SEQ ID NO: 454112 - DNA, 75 bp, synthetic construct
  source 1..75: mol_type = other DNA
gttctgaaaggtctgagccactggagtcggggacgcacaatggtggtggtgacacatcgtctgcaggttctgaat

SEQ ID NO: 454113 - DNA, 75 bp, synthetic construct
  source 1..75: mol_type = other DNA
atggacgttggcggatgttcctgcatgggtggacaaaaaagcgttctcctgcaaaatggcatctgaatcgatcgc

SEQ ID NO: 454114 - DNA, 75 bp, synthetic construct
  source 1..75: mol_type = other DNA
aatcaggggctgcttgatgtttctcaacaagctaatggtttcagtagtgtcgatgttctggaagtaacagacaaa

SEQ ID NO: 454115 - DNA, 75 bp, synthetic construct
  source 1..75: mol_type = other DNA
aatagatgaagacaacaaacaaagagggggcgtaaaaggatttttttcaacaatcagcgagaacaaaaacgaaat

SEQ ID NO: 454116 - DNA, 75 bp, synthetic construct
  source 1..75: mol_type = other DNA
gcgatcaacgcgaaaatttcacaatcaaagctgtgctactcactgcagaacaatgactttgcattcaataaaggt

SEQ ID NO: 454117 - DNA, 75 bp, synthetic construct
  source 1..75: mol_type = other DNA
accgttctgccggatacagtgccagtgatgaaatccttaaaggacttgttgaacaagggctgctcactgtttcac

SEQ ID NO: 454118 - DNA, 75 bp, synthetic construct
  source 1..75: mol_type = other DNA
caaagctgtgctactccctgcaggacaacgatattgtattcaataaaggttttccaattaaggttaaccgtggct

SEQ ID NO: 454119 - DNA, 75 bp, synthetic construct
  source 1..75: mol_type = other DNA
tgactggctggaaaataccggtgactggcagcctgaaagtgaagcaattgccgaacaagtccgtttgttagcgca

SEQ ID NO: 454120 - DNA, 75 bp, synthetic construct
  source 1..75: mol_type = other DNA
gaaccgacacccgttttgcggcagaaatcgtcgatatcagccgtggcggtatgcgtgtgcggctggtcgataacg

SEQ ID NO: 454121 - DNA, 75 bp, synthetic construct
  source 1..75: mol_type = other DNA
tgctcgaccgcattcaggaaaaacgggtattagcgggcgcgtttaataccaccaatctggagacgacgatttcaa

SEQ ID NO: 454122 - DNA, 75 bp, synthetic construct
  source 1..75: mol_type = other DNA
acttgcacataatcagagaacgtatgaggaactggcttatatcaatcccttactgattgaaaatgatctcgtaat

SEQ ID NO: 454123 - DNA, 75 bp, synthetic construct
  source 1..75: mol_type = other DNA
gactgggcagttgccgaaatgcgccgtcatccgctgaaaggcgatcgttctttctatgctgaactgacacaatac

SEQ ID NO: 454124 - DNA, 75 bp, synthetic construct
  source 1..75: mol_type = other DNA
cgcagcttaaacagcaactgcattcccagacgccacgcgctgaaggggtggtaaaagccacagaaaaaggttttg

SEQ ID NO: 454125 - DNA, 75 bp, synthetic construct
  source 1..75: mol_type = other DNA
tgggtggataaaaaagcattcgcaaacgtcaagggtatgaatgaacctgaagatggcgcaattaatttagttaaa

SEQ ID NO: 454126 - DNA, 75 bp, synthetic construct
  source 1..75: mol_type = other DNA
ctgccgtgggccaatattgacgggaaagaattccagaccgagccgctgctccgctttggcgtcaaaggcgatacc

SEQ ID NO: 454127 - DNA, 75 bp, synthetic construct
  source 1..75: mol_type = other DNA
ttataggcttaattccagccttaattgctcaaagcaaaggaagatctttctttgcatggtgggtgtatggtgctc

SEQ ID NO: 454128 - DNA, 75 bp, synthetic construct
  source 1..75: mol_type = other DNA
cttatcgccggaacggtgcgcgatttgcgccagttagttaccgaaggcaaatttcgcgaagacctgtacgcgcgg

SEQ ID NO: 454129 - DNA, 75 bp, synthetic construct
  source 1..75: mol_type = other DNA
tcattcatgcaaatgctttccaaccaaaggcaacttacacttccccattcattcaaatgctttccgaccaaaggc

SEQ ID NO: 454130 - DNA, 75 bp, synthetic construct
  source 1..75: mol_type = other DNA
gtgagtagttcaggagatcgtctggatgatgttgaaaaaatggagcgctgtcggcgggaactggaggcgctgaag

SEQ ID NO: 454131 - DNA, 75 bp, synthetic construct
  source 1..75: mol_type = other DNA
tgcacttgttctgacagtttttcttgtttccggagagccagttgatattgcagtcagtgttcacaggacaatgca

SEQ ID NO: 454132 - DNA, 75 bp, synthetic construct
  source 1..75: mol_type = other DNA
gagatagaactgcataacccttgggatttcgaagaggtttacgcctgcctgcatgatttcgcccgtggttacgcg

SEQ ID NO: 454133 - DNA, 75 bp, synthetic construct
  source 1..75: mol_type = other DNA
cagcgtcacgcggatggccacctttgccactagcggacgcatcactctggacgtggttgaagatgagataaaccg

SEQ ID NO: 454134 - DNA, 75 bp, synthetic construct
  source 1..75: mol_type = other DNA
atatgaagatatccgggctgccggaagtgatgaacgtcgtgagctgacacacgccgtgatgcgggagctggatgc

SEQ ID NO: 454135 - DNA, 75 bp, synthetic construct
  source 1..75: mol_type = other DNA
aaatggcgcccgacgctctgtttatgtcagcaagaatcgttggtcatcgaccggctggaattgttgcacgacgcc

SEQ ID NO: 454136 - DNA, 75 bp, synthetic construct
  source 1..75: mol_type = other DNA
cgctcacgctcgctgtttgaaacgcttaaacgcgatatcgccagcatttcaccagaaacgcaggttgtaggtgta

SEQ ID NO: 454137 - DNA, 75 bp, synthetic construct
  source 1..75: mol_type = other DNA
gaaaaagtggcgataaaatcccgcgcaccgatcctgcttaacggcccgaccggtgcaggtaagtcatttctggca

SEQ ID NO: 454138 - DNA, 75 bp, synthetic construct
  source 1..75: mol_type = other DNA
atggctacttcaaaactggactaatgatgttggtaggtagtatcaaccgcgttatccgtccgcgtttgaaactgc

SEQ ID NO: 454139 - DNA, 75 bp, synthetic construct
  source 1..75: mol_type = other DNA
ggtcacagggatccacgttcgatggaggtttataccagagtttttgcgctggatatggctgccacgctggcagtg

SEQ ID NO: 454140 - DNA, 75 bp, synthetic construct
  source 1..75: mol_type = other DNA
tgaagcgggctgaagctgacggcgtgcatttttcgattccggtcacaccacataccttccggcacagctatatca

SEQ ID NO: 454141 - DNA, 75 bp, synthetic construct
  source 1..75: mol_type = other DNA
tggctgccacgctggtagtgcctttcacaggtgacgggcgcgatgctgcagagatcctgcgtacactgcctcccc

SEQ ID NO: 454142 - DNA, 75 bp, synthetic construct
  source 1..75: mol_type = other DNA
cgcggcatcagtttagcggcgcgtttgtggaagtgaactgcgccaccctgcgcggcgataccgccatgtcgacgc

SEQ ID NO: 454143 - DNA, 75 bp, synthetic construct
  source 1..75: mol_type = other DNA
tgggcgctgaggcagaaaacatcgacctctttgatcgactgcaactggaacacgtaatagccatctgccgccagg

SEQ ID NO: 454144 - DNA, 75 bp, synthetic construct
  source 1..75: mol_type = other DNA
tatatcatgcatatgctctatcaccgccagccccggaaagtgattcaggcgctggccggccacaaggatccgcgc

SEQ ID NO: 454145 - DNA, 75 bp, synthetic construct
  source 1..75: mol_type = other DNA
aacctggcacgtaacatggtgactcagtggggcttctctgagaaattgggtccactgctgtacgcggaagaagaa

SEQ ID NO: 454146 - DNA, 75 bp, synthetic construct
  source 1..75: mol_type = other DNA
ttgccgacgccgcgcctgccactggatgataacggtattctgtttatcgaaaacgtcggtaacctcgtttgcccg

SEQ ID NO: 454147 - DNA, 75 bp, synthetic construct
  source 1..75: mol_type = other DNA
acgaaattccaccgtataacatctgggaaggcgcttaccgcctgtatcagaccgccagttactggccgcaaggtt

SEQ ID NO: 454148 - DNA, 75 bp, synthetic construct
  source 1..75: mol_type = other DNA
tctacggaccggaacatgtttctaccggggcgtccaacgatattaaagttgcgaccaacctggcacgtaacatgg

SEQ ID NO: 454149 - DNA, 75 bp, synthetic construct
  source 1..75: mol_type = other DNA
caataatggcactccaaaggcaccgcgtccggttgatgaaccacgcacgccaaatccgggtaataccatgtcaga

SEQ ID NO: 454150 - DNA, 75 bp, synthetic construct
  source 1..75: mol_type = other DNA
atctttattgatgaaatcgatgccgtaggccgccagcgtggcgcgggtctgggtggtggtcacgatgaacgtgaa

SEQ ID NO: 454151 - DNA, 75 bp, synthetic construct
  source 1..75: mol_type = other DNA
tcgatttaagccgttataacgctatcgccagccgctttgccgaggaacgccaacaaacgctcgatttcctcaaat

SEQ ID NO: 454152 - DNA, 75 bp, synthetic construct
  source 1..75: mol_type = other DNA
ccacagccacctgtggaaaccgctgctgcacgaagtagcgactggctcgctcgatgaaggcgtcgatgcactgag

SEQ ID NO: 454153 - DNA, 75 bp, synthetic construct
  source 1..75: mol_type = other DNA
gctggtaatggcgctgggcagcacctctaacgatttcaatacgccgggtgtaaaagagaactgtattttccttga

SEQ ID NO: 454154 - DNA, 75 bp, synthetic construct
  source 1..75: mol_type = other DNA
atcatggtttccagttccagctgggttccgtaattgatattgatcgtgaagcgaaaacaatcactattgcagaac

SEQ ID NO: 454155 - DNA, 75 bp, synthetic construct
  source 1..75: mol_type = other DNA
tttgttccgccgcgtgctcaggctgcacaccagatggcgacttgcgcaatgaacaacattctggcgcagatgaac

SEQ ID NO: 454156 - DNA, 75 bp, synthetic construct
  source 1..75: mol_type = other DNA
ccaaaattacgctggtcgatcgtaaccacagccatctgtggaaaccgctgctgcacgaagtggcgactggctcgc

SEQ ID NO: 454157 - DNA, 75 bp, synthetic construct
  source 1..75: mol_type = other DNA
atattggcggcctggaaaccaaccgtattaaccaactggtggtggaaccaacgctacagactacgcgcgatcctg

SEQ ID NO: 454158 - DNA, 75 bp, synthetic construct
  source 1..75: mol_type = other DNA
cgaagatctgtacgcgcggatcaatctctggaccttcaccctgccggggctacgccagcgccaggaagatattga

SEQ ID NO: 454159 - DNA, 75 bp, synthetic construct
  source 1..75: mol_type = other DNA
cgacgcatcttcgaattaaaacaggcgcggcatcagtttagcggcgcgtttgtggaagtgaactgcgccaccctg

SEQ ID NO: 454160 - DNA, 75 bp, synthetic construct
  source 1..75: mol_type = other DNA
gcgacatctccccaggcaacatggcgcggtaactttcgcgaactttctgccagcgtcacgcggatggcaaccttt

SEQ ID NO: 454161 - DNA, 75 bp, synthetic construct
  source 1..75: mol_type = other DNA
cgaacgtattttgcctgcgctgccgccacgtatctctgctgccgcccacaatgagttaacgaaactgggcgttcg

SEQ ID NO: 454162 - DNA, 75 bp, synthetic construct
  source 1..75: mol_type = other DNA
tttgtaccgccgcgcgcccaggccgcacatcagatggctacctgcgcaatgaacaatattctggcgcagatgaac

SEQ ID NO: 454163 - DNA, 75 bp, synthetic construct
  source 1..75: mol_type = other DNA
ccacagccacctgtggaaaccgctgctgcacgaagtggcgactggctcgcttgatgaaggcgtcgatgcgttgag

SEQ ID NO: 454164 - DNA, 75 bp, synthetic construct
  source 1..75: mol_type = other DNA
cgcgaaacagggaatggtggcgtctgtagatgctactgccactcaggtgggggtggatatcctcaaggagggcgg

SEQ ID NO: 454165 - DNA, 75 bp, synthetic construct
  source 1..75: mol_type = other DNA
cattgtggtgaaagacggtaaaacctggctggttaccggtagccctggcgggagtcggattattaccaccgtgct

SEQ ID NO: 454166 - DNA, 75 bp, synthetic construct
  source 1..75: mol_type = other DNA
acagcaaaaaatcactcacttcgcatctggcctccggtacgccaggtacggtcgcaggtttctcgctggcgctgg

SEQ ID NO: 454167 - DNA, 75 bp, synthetic construct
  source 1..75: mol_type = other DNA
atcacttataccaagacgaagggcaagaaaaaccgtaccgtgccgatatctcaggagctgtacaacgaacttcct

SEQ ID NO: 454168 - DNA, 75 bp, synthetic construct
  source 1..75: mol_type = other DNA
atggcagtacgaaaactaaccacagggaaatggctttgcgaatgttaccccgccggacgcagcgggcgtcgcgtg

SEQ ID NO: 454169 - DNA, 75 bp, synthetic construct
  source 1..75: mol_type = other DNA
catctggaactacgcgggaaataccctcgttaatcagcattctgacatcaacaaaacgcatgaaattctgcaaga

SEQ ID NO: 454170 - DNA, 75 bp, synthetic construct
  source 1..75: mol_type = other DNA
aaagggcgacacgctggtgcaggcgaacctggcaaagagcctggagatgattgctgaaaacggcccggacgaatt

SEQ ID NO: 454171 - DNA, 75 bp, synthetic construct
  source 1..75: mol_type = other DNA
gtcacggctctgatactaaattcaatctgttcaacagtagccgaatcgatgccatcgacattaccgaagtacgca

SEQ ID NO: 454172 - DNA, 75 bp, synthetic construct
  source 1..75: mol_type = other DNA
caccgattcagtcctacgcagatgcgggcggtttgccgaaaagcgaaggcgtgctgcccgccatcgaaagcctgc

SEQ ID NO: 454173 - DNA, 75 bp, synthetic construct
  source 1..75: mol_type = other DNA
gaacgtttacgggctggtgggcggtgatgccaacgccgtcgggccgaataaacgcccgctgtcgtcgatgtcacc

SEQ ID NO: 454174 - DNA, 75 bp, synthetic construct
  source 1..75: mol_type = other DNA
gaacgtttacgggctggtaggcggcgatgccaacgccgtcgggccaaacaaacgcccactgtcgtcgatgtcacc

SEQ ID NO: 454175 - DNA, 75 bp, synthetic construct
  source 1..75: mol_type = other DNA
atgggcagtacgcaaagtattatggttgggccggacggtgagttatacggcgcttccgacccacgttcggtagat

SEQ ID NO: 454176 - DNA, 75 bp, synthetic construct
  source 1..75: mol_type = other DNA
taaaccttgaacagcgcaatctatcatctgtttttggtacactgaaaaagctgggccactggtcagcccccaacc

SEQ ID NO: 454177 - DNA, 75 bp, synthetic construct
  source 1..75: mol_type = other DNA
tccactttattctcgacgtcgccagcgggaagaagaaaaccttctcggatcaatggggactgcataaccagctgg

SEQ ID NO: 454178 - DNA, 75 bp, synthetic construct
  source 1..75: mol_type = other DNA
cacgcaacaggtggcttcgggtatcaccgtgcaagtgtttacgaccggtcgtggtacgccgtacggcctgatggc

SEQ ID NO: 454179 - DNA, 75 bp, synthetic construct
  source 1..75: mol_type = other DNA
gttggatcgacgaatcaatggtagtactgccggaagcgccgccattacacacgctgccactggcaactaaagtgc

SEQ ID NO: 454180 - DNA, 75 bp, synthetic construct
  source 1..75: mol_type = other DNA
actcgcacgcgatttcgatgcgcagatgttttcccgctaccgagaaaaacggttaaaaggtgagtatgcccgttc

SEQ ID NO: 454181 - DNA, 75 bp, synthetic construct
  source 1..75: mol_type = other DNA
gccatatggcctgatggtagtacccgtcattaaaatggcgacccgcaccgaactggcaaaccgttggtttgactt

SEQ ID NO: 454182 - DNA, 75 bp, synthetic construct
  source 1..75: mol_type = other DNA
cttgcaggatgaaaagcatgtcggttttcagtcaatggttgaggatattttgcaggttgccgaacgccatctgca

SEQ ID NO: 454183 - DNA, 75 bp, synthetic construct
  source 1..75: mol_type = other DNA
ttgtacggttgtggcgtggcgattaacgcaccggcggcagttgtacctatccgtaccattcacaatatttcgctg

SEQ ID NO: 454184 - DNA, 75 bp, synthetic construct
  source 1..75: mol_type = other DNA
gttaatactgggaagtatgctgtcgatgttgcggttctgcctgcagttatatcagtatgcaggaggagatgatga

SEQ ID NO: 454185 - DNA, 75 bp, synthetic construct
  source 1..75: mol_type = other DNA
cgcacgctcgctatgctatcagcaggatatgttgtcggtttatattaaaaagaaaaaagattcgccaccaataac

SEQ ID NO: 454186 - DNA, 75 bp, synthetic construct
  source 1..75: mol_type = other DNA
aaacgccgactgcgttttatataaaagttcacaacacagataatgtggcaattattgttaatgataatggcctga

SEQ ID NO: 454187 - DNA, 75 bp, synthetic construct
  source 1..75: mol_type = other DNA
gttgcaacctgagcgcctgctggctggaacggaagatgtaccagccatttcacaggaaaatgccagtattatcag

SEQ ID NO: 454188 - DNA, 75 bp, synthetic construct
  source 1..75: mol_type = other DNA
gccgtacggcctgatggcgtacccgtcattaaaatggcgacccgcaccgagctggcgaaccgctggtttgattta

SEQ ID NO: 454189 - DNA, 75 bp, synthetic construct
  source 1..75: mol_type = other DNA
atgatgtacctgccgcgcttgtgcgaacactgcctcaatcccagttgcgtggcgacctgcccaagcggcgctatc

SEQ ID NO: 454190 - DNA, 75 bp, synthetic construct
  source 1..75: mol_type = other DNA
tgtgttgggtgggattatggcaggattattagtcgccagtatgtataaaaagatcgttaacttacgtattcctga

SEQ ID NO: 454191 - DNA, 75 bp, synthetic construct
  source 1..75: mol_type = other DNA
gaggcggtgctctctttggggatcgattatatgcagggttatcttattggtaagccgcaaccgttaattgatacg

SEQ ID NO: 454192 - DNA, 75 bp, synthetic construct
  source 1..75: mol_type = other DNA
gtcaaatagtctggattatcagatagtggcgtcgatttgccacctggcgcgaatgaagaaaatgcgggtagtggc

SEQ ID NO: 454193 - DNA, 75 bp, synthetic construct
  source 1..75: mol_type = other DNA
ttggtctgtcgttgagcggcgtggctgccgttgggatgacctatctaagtgaagaaatccaccccagttttgtgg

SEQ ID NO: 454194 - DNA, 75 bp, synthetic construct
  source 1..75: mol_type = other DNA
attctgttactacctgggttcaagcattgccggaacattaggtggcgtcttctggcataactatggctggaacgg

SEQ ID NO: 454195 - DNA, 75 bp, synthetic construct
  source 1..75: mol_type = other DNA
gtgtgtcgaagtggcctatttcttcatttattactttgtgttccgttggaccattcttaaatttaacctgatgac

SEQ ID NO: 454196 - DNA, 75 bp, synthetic construct
  source 1..75: mol_type = other DNA
ggcaaagttaattccatttctggctattccaataattaaaaccatacttgatttcattgttagtcttggtttgtt

SEQ ID NO: 454197 - DNA, 75 bp, synthetic construct
  source 1..75: mol_type = other DNA
cgaacttttatcttaaacagcacgacttattggtcgctgctgaccaaatgtcgacacatgggcaaaccatcattc

SEQ ID NO: 454198 - DNA, 75 bp, synthetic construct
  source 1..75: mol_type = other DNA
ccttaatgataatattcaacttagtgtgtatgataaaaacttaaatattaaatcactaggtttttttgatttgtc

SEQ ID NO: 454199 - DNA, 75 bp, synthetic construct
  source 1..75: mol_type = other DNA
aggaattgcggttgtgaaacttgatcaaaataccttacaagtcattatcggtacaaaagtcatcgccctacgtcg

SEQ ID NO: 454200 - DNA, 75 bp, synthetic construct
  source 1..75: mol_type = other DNA
gtaaagagaatattaagtcactggataattgcgtaactcgtttacgtttaacaatcgcagatatgggattgattg

SEQ ID NO: 454201 - DNA, 75 bp, synthetic construct
  source 1..75: mol_type = other DNA
atgtatcgcactgctcatgctcaaaacagaaaggctatcaaagcattgcttatttccggggtgcttacggtgatt

SEQ ID NO: 454202 - DNA, 75 bp, synthetic construct
  source 1..75: mol_type = other DNA
tggcctgaagaaaaaggtgttgatatagacgaagtaattttcagggaatatttctatgacacaccaccagaagga

SEQ ID NO: 454203 - DNA, 75 bp, synthetic construct
  source 1..75: mol_type = other DNA
attgaagcgggtcagccgaccgtgtgctcagaaacctgtgtcggtcgtatccgttatctcggcgtgctgtttata

SEQ ID NO: 454204 - DNA, 75 bp, synthetic construct
  source 1..75: mol_type = other DNA
ccatctcccccgttgccgatcaggactggcctgcctatggtcgcaatcaggaaggtcaacgcttttcacctctga

SEQ ID NO: 454205 - DNA, 75 bp, synthetic construct
  source 1..75: mol_type = other DNA
gcagcaaacgcgccgcactttggctttacgcggcattgctgcttggcaccatgatttggggcgtctgggaagtgg

SEQ ID NO: 454206 - DNA, 75 bp, synthetic construct
  source 1..75: mol_type = other DNA
tggactggaaactggcgctaccgctgcaccctgaatatcgcaccctgccgatggtctggtacgttcctccgctgt

SEQ ID NO: 454207 - DNA, 75 bp, synthetic construct
  source 1..75: mol_type = other DNA
aagtcaaaaacctattcatcattcatatcgcaaatataatttttggaaacttaagacctaattatttacttatta

SEQ ID NO: 454208 - DNA, 75 bp, synthetic construct
  source 1..75: mol_type = other DNA
attccgctgagcgttattgaggctgcgcagcagtcgccagtttataaaatggcgatggaatggaaactggcgctg

SEQ ID NO: 454209 - DNA, 75 bp, synthetic construct
  source 1..75: mol_type = other DNA
ggaagaggtcggtctgaccgaagcccaggcacaggagatgtaccgttatctggcgattgctaactacgaagatcg

SEQ ID NO: 454210 - DNA, 75 bp, synthetic construct
  source 1..75: mol_type = other DNA
tggtgatggctgccacggttcagataccaaattcaatctgttcaacagccgccgtatcgatgccatcgacgtaac

SEQ ID NO: 454211 - DNA, 75 bp, synthetic construct
  source 1..75: mol_type = other DNA
catgaacagtaagcaatggcccggtaaagccgctattggtcgtctgaaaggggaagaactggcgcaatataattt

SEQ ID NO: 454212 - DNA, 75 bp, synthetic construct
  source 1..75: mol_type = other DNA
tctggcgtcgcctggtcattcctgccagcggcgcagttgccgctctggtggtggcgttgctgattagtggcggaa

SEQ ID NO: 454213 - DNA, 75 bp, synthetic construct
  source 1..75: mol_type = other DNA
gaccgggctgggcgtggcgctgggcgatgcattttattccgggttgggtttgtttggtcttgcggtaatgactcc

SEQ ID NO: 454214 - DNA, 75 bp, synthetic construct
  source 1..75: mol_type = other DNA
gcgttttctttgcccgctgtgcgtcgtgcttatgggcgtatgcaacgcgttgccagtcgggttattggtgcaatt

SEQ ID NO: 454215 - DNA, 75 bp, synthetic construct
  source 1..75: mol_type = other DNA
cgtggtgtggatgcagggggaatttgattttgacggaacgccagcgaatcacacagcccgttttacagaagtggt

SEQ ID NO: 454216 - DNA, 75 bp, synthetic construct
  source 1..75: mol_type = other DNA
ctgggtatccgtcacttcttgtatcaatactattcctcggtggcattcaattgattggaatcggcgttcttggtg

SEQ ID NO: 454217 - DNA, 75 bp, synthetic construct
  source 1..75: mol_type = other DNA
tgctaaacgatctgaccgatcaacggatggcagactgaagaggaaaaccgccgagtggttctataagctgcataa

SEQ ID NO: 454218 - DNA, 75 bp, synthetic construct
  source 1..75: mol_type = other DNA
tgtgacagacattaccagaggtgcgacttacccggtactgatagacagcattgcggtggaagtgaacaacgcgga

SEQ ID NO: 454219 - DNA, 75 bp, synthetic construct
  source 1..75: mol_type = other DNA
cgttagtgtggccagttccacttctgcacggtttttccagctcttacggtgtattacctccgctttgtaaagacc

SEQ ID NO: 454220 - DNA, 75 bp, synthetic construct
  source 1..75: mol_type = other DNA
accagacggtgtacggcagctataaaaacaaaacggaaaagaatatccatttcgtaccgttcatgacggatgaga

SEQ ID NO: 454221 - DNA, 75 bp, synthetic construct
  source 1..75: mol_type = other DNA
attaacgctctgtccgtttcagatcctctagttgttccgctgtcatttacacgaaactttggtaaagaaccagcc

SEQ ID NO: 454222 - DNA, 75 bp, synthetic construct
  source 1..75: mol_type = other DNA
attaatgctctgggtgtttcagaccctctagttgttccgctgtcatttacgcgcaactttggtaaggaaccagca

SEQ ID NO: 454223 - DNA, 75 bp, synthetic construct
  source 1..75: mol_type = other DNA
tgtctcgcggagttgtggaaaacattaaattattaccagaacgcaacctgttcatgaaaggagtattgagctggg

SEQ ID NO: 454224 - DNA, 75 bp, synthetic construct
  source 1..75: mol_type = other DNA
attaacgctctggctgtttatgatccgctagttgttccgctgtcatttacacgcaactttggtaaagaaccagca

SEQ ID NO: 454225 - DNA, 75 bp, synthetic construct
  source 1..75: mol_type = other DNA
tgtttgtggcaaccttatcattcctttatggagcatggatgattgctgataaattgatgtttggaaatagtgttc

SEQ ID NO: 454226 - DNA, 75 bp, synthetic construct
  source 1..75: mol_type = other DNA
tgttgatctgcaagaccctatcaatgtcatccctcacctcattcaaaaatggcaggatggcgctgatatggttct

SEQ ID NO: 454227 - DNA, 75 bp, synthetic construct
  source 1..75: mol_type = other DNA
gccgcgggattatttccgaccgtctggcaacggcgattttgcgccatgcgggaagagtggcgctaaacgcggggg

SEQ ID NO: 454228 - DNA, 75 bp, synthetic construct
  source 1..75: mol_type = other DNA
aactcgagcgcagcgatgtgcttccccatgacatggtcgaatcttctgctgctgcatggcgggatgaaattagca

SEQ ID NO: 454229 - DNA, 75 bp, synthetic construct
  source 1..75: mol_type = other DNA
aactcgaacgcggtgatgtgcttccccataacatggtcgaatcctccgctgctgcatggcgggatgagatgagca

SEQ ID NO: 454230 - DNA, 75 bp, synthetic construct
  source 1..75: mol_type = other DNA
atgtcgtggttgttcccacatcgcaggaacaaccaccgtttgatttaaatcacatgggtactggcagtgataagt

SEQ ID NO: 454231 - DNA, 75 bp, synthetic construct
  source 1..75: mol_type = other DNA
gacggcgtcgctaccgaaatgctcgatgaaggtctggttcgtgaagatctgactgcgctggattttgtcaccatc

SEQ ID NO: 454232 - DNA, 75 bp, synthetic construct
  source 1..75: mol_type = other DNA
cttccccatgacatggtcgaatcttctgctgctgcatggcgagatgaaatgagcaggaaggttgccggtaaatga

SEQ ID NO: 454233 - DNA, 75 bp, synthetic construct
  source 1..75: mol_type = other DNA
gaccaggttgcggcaggacgtcagcaactcgagcgcggcgatgtgcttccccatgacatggtcgaatcctccgct

SEQ ID NO: 454234 - DNA, 75 bp, synthetic construct
  source 1..75: mol_type = other DNA
tgggttttaaaggcgaaacccaaattaacgatcaacttactggctacggtcaatgggaatacaatattcaggcaa

SEQ ID NO: 454235 - DNA, 75 bp, synthetic construct
  source 1..75: mol_type = other DNA
gcgctggttgataaattccgtgcagacctggcggatatggcaggtcagtgcgtcggtggctctgctggcggtgtt

SEQ ID NO: 454236 - DNA, 75 bp, synthetic construct
  source 1..75: mol_type = other DNA
atgccggtactggcgctgaactgctgaaaaatggcggtttaatcagctgccgctttaaggcatccggtgaactgg

SEQ ID NO: 454237 - DNA, 75 bp, synthetic construct
  source 1..75: mol_type = other DNA
ggtgtgttttccggccaacttccggtttcaacggggtctcatattctgacagctaacagcgatcgcctttccttt

SEQ ID NO: 454238 - DNA, 75 bp, synthetic construct
  source 1..75: mol_type = other DNA
tgtgcttccccatgacatggtcgaatcttctgctgctgcatggcgggatgaaattagcaggaaggttgccggtaa

SEQ ID NO: 454239 - DNA, 75 bp, synthetic construct
  source 1..75: mol_type = other DNA
caatcagcctgacattcacaaaagtcagtatcaggtagccacaggcaacatcgctattaatactactgtgccatt

SEQ ID NO: 454240 - DNA, 75 bp, synthetic construct
  source 1..75: mol_type = other DNA
gataacgagtttttctaccttcccgctgagaatgtggacgtatatcggtctcttcgtagccggttgctcattttt

SEQ ID NO: 454241 - DNA, 75 bp, synthetic construct
  source 1..75: mol_type = other DNA
gtgccgttcatgaccgatgagaacggagcaaatgtcccgacgaacaaaccggaagaagacccggatattccggca

SEQ ID NO: 454242 - DNA, 75 bp, synthetic construct
  source 1..75: mol_type = other DNA
gttctgctgacggtgttccctggatatgtggagacacaacttatttctggaagcagaagagcgaatccacttacc

SEQ ID NO: 454243 - DNA, 75 bp, synthetic construct
  source 1..75: mol_type = other DNA
ccattctgacccatactgtccgggctgctgcagtacagcctggtgcatcatcttcagaacctgatgtaccggaaa

SEQ ID NO: 454244 - DNA, 75 bp, synthetic construct
  source 1..75: mol_type = other DNA
cggctgaactgatgggcgggcagaccgtgacaccaccggatgagaagccatcacctgactccccatcaacaccat

SEQ ID NO: 454245 - DNA, 75 bp, synthetic construct
  source 1..75: mol_type = other DNA
ggcggcagggcagaagtggtcagcgatgcggagggaaccggaggtaaggctgtgaagctgaccaaggaagccggt

SEQ ID NO: 454246 - DNA, 75 bp, synthetic construct
  source 1..75: mol_type = other DNA
gcgttggtggctctgctggcggtgttccctggatatgcggggacacgacgtatttctggaagcagaagaacgaat

SEQ ID NO: 454247 - DNA, 75 bp, synthetic construct
  source 1..75: mol_type = other DNA
aagcagaagaacgaatccacgtaccagacggtgtacggcagctataaaaataaaacggaaaagaatatccatttc

SEQ ID NO: 454248 - DNA, 75 bp, synthetic construct
  source 1..75: mol_type = other DNA
catgagccgtcttaaccatccgaaagctgacctgtcgaaaggtcagtacggaaccgtggggcaggggctgcatat

SEQ ID NO: 454249 - DNA, 75 bp, synthetic construct
  source 1..75: mol_type = other DNA
acatatgaccgtcctgacccgcgtataaagcaactggctcgtcgcagcacagtgacgccggatggcgctccctgt

SEQ ID NO: 454250 - DNA, 75 bp, synthetic construct
  source 1..75: mol_type = other DNA
atgccgcacagtttggtgcgctggttgataaattccgtgcagacctggcggatatggcaggccagtgcgtcggtg

SEQ ID NO: 454251 - DNA, 75 bp, synthetic construct
  source 1..75: mol_type = other DNA
caagccgctgtataaggaccttatcggtcgaacaaaagcggcactggagaagaacccgaaaaatgtgctgtttgc

SEQ ID NO: 454252 - DNA, 75 bp, synthetic construct
  source 1..75: mol_type = other DNA
ccgaccgtctggcaacggcgattctgagctgcgcgggtaagtcttctgcgtttgttaatggtactgccggggtgg

SEQ ID NO: 454253 - DNA, 75 bp, synthetic construct
  source 1..75: mol_type = other DNA
cgccggatacaccgtccactccaccggctgacaccacgacgatgagcacgctgtttgcttaccggacatctgaat

SEQ ID NO: 454254 - DNA, 75 bp, synthetic construct
  source 1..75: mol_type = other DNA
agtcgcacttgcaggcgctgcgcctggcgcaacagcacggctggcaaaactatctgctgctggaagatgacgcgg

SEQ ID NO: 454255 - DNA, 75 bp, synthetic construct
  source 1..75: mol_type = other DNA
agtacattggtagaatttatgttgaggttaaacaacgacctaaatatatattgaaaggaattaaaaatgataaac

SEQ ID NO: 454256 - DNA, 75 bp, synthetic construct
  source 1..75: mol_type = other DNA
caaaatcagcaacccaaaaattgaagagaatgtcggtgattttcgattaatgtctcgtgatgtagtcgagaacat

SEQ ID NO: 454257 - DNA, 75 bp, synthetic construct
  source 1..75: mol_type = other DNA
gatcactagcttttctactttccctttgcgcatgtggacttatataggcctgtttgtggcaaccttatcattcct

SEQ ID NO: 454258 - DNA, 75 bp, synthetic construct
  source 1..75: mol_type = other DNA
gaacagccgctactacccgcagctggcgcagcagatgaacaacgatgagcactcgctggaagacggctggcagcc

SEQ ID NO: 454259 - DNA, 75 bp, synthetic construct
  source 1..75: mol_type = other DNA
ccgataacagcggctttattttcgatgctatccacgttgataagcgggtgatcctgctcgactttccgggcatga

SEQ ID NO: 454260 - DNA, 75 bp, synthetic construct
  source 1..75: mol_type = other DNA
ggcatcattccgattacagctgacgtggccggaacactcacgccctccgactggaatgcaccggataacgccggg

SEQ ID NO: 454261 - DNA, 75 bp, synthetic construct
  source 1..75: mol_type = other DNA
gtgcggacctgctgggtaaaggtggccttgtcagttgccggtttaaggttgatggtacgcttacggctaatcagt

SEQ ID NO: 454262 - DNA, 75 bp, synthetic construct
  source 1..75: mol_type = other DNA
tggggggccggtaaacctctgtatcaggacctggtaagccgcaccaaagtcgcgctggcgaaaaacccgaaaaac

SEQ ID NO: 454263 - DNA, 75 bp, synthetic construct
  source 1..75: mol_type = other DNA
cgctagttgttccgctgtcatttacacgaaactttggtaaagaaccagcattgtttgcagggttagaccatgcaa

SEQ ID NO: 454264 - DNA, 75 bp, synthetic construct
  source 1..75: mol_type = other DNA
tttatgaaaggtattcttagttgggttgggggggagaccgctgttgttgaatatgttcgtgccgagcgagtggcg

SEQ ID NO: 454265 - DNA, 75 bp, synthetic construct
  source 1..75: mol_type = other DNA
tgagcttgataaaatctcctgcaaatggtgttgtgattaaaagaaaaatttctgatggattgaaagaaatagttt

SEQ ID NO: 454266 - DNA, 75 bp, synthetic construct
  source 1..75: mol_type = other DNA
aagaccgcccctcaagctggtcaaatcgcaccggccctcgcacacattgggccagagtcaactggatcagaccgc

SEQ ID NO: 454267 - DNA, 75 bp, synthetic construct
  source 1..75: mol_type = other DNA
tactgacaatgtttattatgtctccgataatattacagataaatgataatatttctcaggaaccaatcaattaca

SEQ ID NO: 454268 - DNA, 75 bp, synthetic construct
  source 1..75: mol_type = other DNA
gcaattgttgaagtgctgtcgcccggtcaacccccgactaaacgcggattaatttacgccgcgacgccagccaga

SEQ ID NO: 454269 - DNA, 75 bp, synthetic construct
  source 1..75: mol_type = other DNA
cgcgatatgccggatgcagcacaaccgtatgcccgggaattcgaacgcctgtggaatgaatccgaaccgctgaac

SEQ ID NO: 454270 - DNA, 75 bp, synthetic construct
  source 1..75: mol_type = other DNA
aaagttctggcttcaacgacattagttttaaatagagatgatttaaaaaccctatctaatgaattgggaatatca

SEQ ID NO: 454271 - DNA, 75 bp, synthetic construct
  source 1..75: mol_type = other DNA
attgttgaaaaggtcattcttgtttcccgattcgagaaatacacaatgtggctcctgcacggaaaaaccttccct

SEQ ID NO: 454272 - DNA, 75 bp, synthetic construct
  source 1..75: mol_type = other DNA
tctcaatatgggaaaaaccgaccgcagcgccaacccttcgccgggcaacgagaaaggcggtctcgcaaacgtggt

SEQ ID NO: 454273 - DNA, 75 bp, synthetic construct
  source 1..75: mol_type = other DNA
tctcaatatgggaaaaaccgaccgcagcgccaacccttcgccgggcaacgacaatggcggcctcgcaaacgtggt

SEQ ID NO: 454274 - DNA, 75 bp, synthetic construct
  source 1..75: mol_type = other DNA
tctcaatatgggaaaaaccgaccgcagcgccaacccttcgccgggcaacgataacggcggactcgcaaacgtggt

SEQ ID NO: 454275 - DNA, 75 bp, synthetic construct
  source 1..75: mol_type = other DNA
gcaattgttgaagtgctgtcgcccggtcaacccccgactaaacgcgtattaatttacgccgcgacgccagccagt

SEQ ID NO: 454276 - DNA, 75 bp, synthetic construct
  source 1..75: mol_type = other DNA
gcaattgttgaagtgctgtcgcccggtcaacccccgactaaacgcgaattaatttacgccgcgacgccagccagg

SEQ ID NO: 454277 - DNA, 75 bp, synthetic construct
  source 1..75: mol_type = other DNA
gcaattgttgaagtgctgtcgcccggtcaacacccgactaaacgcgcattaatttacgccgcgacgccagccagc

SEQ ID NO: 454278 - DNA, 75 bp, synthetic construct
  source 1..75: mol_type = other DNA
cggtgaaactgcaggcggcaaagcggtgacggattcagtattgatctctgtgaaggataataaagtcacagtgca

SEQ ID NO: 454279 - DNA, 75 bp, synthetic construct
  source 1..75: mol_type = other DNA
tgcacagggacatcctggggatccgcaggcaccgtcggtgttgcgtttatgggtgtggctatcggaatggaggct

SEQ ID NO: 454280 - DNA, 75 bp, synthetic construct
  source 1..75: mol_type = other DNA
ccgccaggttgctggcgatatttgctcgcgcttttttgatattcacggcgcaatggttgaaacgaatatgagcga

SEQ ID NO: 454281 - DNA, 75 bp, synthetic construct
  source 1..75: mol_type = other DNA
accgcaccaccatcagccgcttgcttaaacgaggccgcgatcagggaattgtcaccatcgccatcaactatgact

SEQ ID NO: 454282 - DNA, 75 bp, synthetic construct
  source 1..75: mol_type = other DNA
tggggctgaaaatcctgccaccagatataaactccggtctttaccatttccacgtcaacgacgacggcgaaatcg

SEQ ID NO: 454283 - DNA, 75 bp, synthetic construct
  source 1..75: mol_type = other DNA
ggtcataaggttcagcaggaaaacagtcaaagccgcattcaggccgtgccgtcgatgcacgaaggggcgtggatc

SEQ ID NO: 454284 - DNA, 75 bp, synthetic construct
  source 1..75: mol_type = other DNA
ctcaggacctggtacgggtcagtggaccggtaagccatgaaaatgatggttcaattttatatgttgcagttatca

SEQ ID NO: 454285 - DNA, 75 bp, synthetic construct
  source 1..75: mol_type = other DNA
ctttaagccagatagtgcgccgtatagaagaacgattgggattgcggcttctgacgcgaaccacgcgcagcgttg

SEQ ID NO: 454286 - DNA, 75 bp, synthetic construct
  source 1..75: mol_type = other DNA
acgtagtttagtatcctctagtgagacgtatcacggtactatcagatataaccaagttaatatatgtaatattca

SEQ ID NO: 454287 - DNA, 75 bp, synthetic construct
  source 1..75: mol_type = other DNA
atggcaatctgtatgtgtttggcggcattggcaaaaacagcgagggcttgactcaggtatttaatgacgtacaca

SEQ ID NO: 454288 - DNA, 75 bp, synthetic construct
  source 1..75: mol_type = other DNA
gcaggcgaaccgattggaatactgacccgcgtagatgcaacgctctcttccggctgtcagctaatgattaacgca

SEQ ID NO: 454289 - DNA, 75 bp, synthetic construct
  source 1..75: mol_type = other DNA
ggaactttggggcgcgcggctgaaacccttaatttgagtcaacctgcgctctctaagacattgaatgaactggag

SEQ ID NO: 454290 - DNA, 75 bp, synthetic construct
  source 1..75: mol_type = other DNA
cgtgaagttcgtgttcgcatggaaggtcagcttttactgaatacgatagacctgatcattgatgctgcaattgat

SEQ ID NO: 454291 - DNA, 75 bp, synthetic construct
  source 1..75: mol_type = other DNA
atggggggaatcagctctgactttttgctgagtggctatggggggaattactggcagacagacatcacgttccta

SEQ ID NO: 454292 - DNA, 75 bp, synthetic construct
  source 1..75: mol_type = other DNA
acgccagtagacgcggcgcttacggatatcgtcagcgatccgttgttacgtaatgcttatctgagtctgcataac

SEQ ID NO: 454293 - DNA, 75 bp, synthetic construct
  source 1..75: mol_type = other DNA
gaaaagttattccacggcagagagcgccgaccagcggattcgcgaaatattgccggtggctcatgaggttgcgga

SEQ ID NO: 454294 - DNA, 75 bp, synthetic construct
  source 1..75: mol_type = other DNA
ctacggtgctctacgccccaacgtttggcgcattaagctccctgccccactgggcagaaaaattggggcgcttaa

SEQ ID NO: 454295 - DNA, 75 bp, synthetic construct
  source 1..75: mol_type = other DNA
ccgatccgctgctccgcaatgcttatctgagtctgcataacgccacgcatcaccaggggatcaaccatcaggcga

SEQ ID NO: 454296 - DNA, 75 bp, synthetic construct
  source 1..75: mol_type = other DNA
ctgctatcacaaagccatccgcgttacccatcgccgacaccatcggcttttttatggaaacttctttccattacg

SEQ ID NO: 454297 - DNA, 75 bp, synthetic construct
  source 1..75: mol_type = other DNA
ctgaaatgcaggcacacggtcagcgagtaaaatgcctggtcagcccctatcacacgcctgtgctcagtggccttt

SEQ ID NO: 454298 - DNA, 75 bp, synthetic construct
  source 1..75: mol_type = other DNA
acggcagcataatacctggttccgtgaccaggttgcggcaggacgtcagcaactcgagcgcggcgatgtgcttcc

SEQ ID NO: 454299 - DNA, 75 bp, synthetic construct
  source 1..75: mol_type = other DNA
cttccccatgacatggtcgaatcctccgctactgcatggcgggatgaaatgagcaggaaggttgccggtaaatga

SEQ ID NO: 454300 - DNA, 75 bp, synthetic construct
  source 1..75: mol_type = other DNA
accgagaacggtcgtctctatctctccggtacatcacagcgggacagctactattctctgaatgccagttggaac

SEQ ID NO: 454301 - DNA, 75 bp, synthetic construct
  source 1..75: mol_type = other DNA
gacggtggcgcagtggcagaataccgtccggggcaatatctcggcatctggctgaagccggaaggtttcccgcat

SEQ ID NO: 454302 - DNA, 75 bp, synthetic construct
  source 1..75: mol_type = other DNA
cagtaaaagccaccatccctttactggtggaaacggggccaaagttaaccgcccatttctacgaccgtatgttta

SEQ ID NO: 454303 - DNA, 75 bp, synthetic construct
  source 1..75: mol_type = other DNA
ttttttgggtaaaaagataattatattacgttcatatcccaagagtttagatgccttggtaatctataatttaat

SEQ ID NO: 454304 - DNA, 75 bp, synthetic construct
  source 1..75: mol_type = other DNA
taccggtggctcatgatatggctgagctgcgttacttattgtcagaggcgtttgactggggggcggtacaggcgc

SEQ ID NO: 454305 - DNA, 75 bp, synthetic construct
  source 1..75: mol_type = other DNA
accgcgttggagtaacagtattaatggcaacgcacgatattaacctgatttcgcggcgttcctatcgcatgctca

SEQ ID NO: 454306 - DNA, 75 bp, synthetic construct
  source 1..75: mol_type = other DNA
ctgagtcactttgcggaacacgatgcgatcacctgtcagaaatgccagaaggtgagcatcaaaaaacaggacgca

SEQ ID NO: 454307 - DNA, 75 bp, synthetic construct
  source 1..75: mol_type = other DNA
aaaacgcaccgcaagaatggcacgaatgggaaaaccgactttttttatttaagccagcagctggttcacggaata

SEQ ID NO: 454308 - DNA, 75 bp, synthetic construct
  source 1..75: mol_type = other DNA
gatcaacataatctgacctatgcggatttgaagaacgaaatcggctctaaatccctggtcagtcagattttgtct

SEQ ID NO: 454309 - DNA, 75 bp, synthetic construct
  source 1..75: mol_type = other DNA
aaggcaattgcagatatctttccacctgaacggcgttatataaccgttgaagatgtaccggaaatgtctctgccg

SEQ ID NO: 454310 - DNA, 75 bp, synthetic construct
  source 1..75: mol_type = other DNA
ccattcatgctaataatacttatgcctcattttcacgactggcaagtattgtaaaacaatctgatgttggtatga

SEQ ID NO: 454311 - DNA, 75 bp, synthetic construct
  source 1..75: mol_type = other DNA
cagccagcgggcgctggaacatttcggcaatgcaaaagtggttggcaacccgcgcttcgacgcctggcataacgg

SEQ ID NO: 454312 - DNA, 75 bp, synthetic construct
  source 1..75: mol_type = other DNA
atgtgccgcagagccgctgctgtcagcgttttcgctgctgacgtgaagggcatcagcgcgcacattcatcaaatt

SEQ ID NO: 454313 - DNA, 75 bp, synthetic construct
  source 1..75: mol_type = other DNA
ttgcgatgcgtttatggatggcaaggcgggagaacgggcggcgatggtgattgtggaggcgctggcgggcaagga

SEQ ID NO: 454314 - DNA, 75 bp, synthetic construct
  source 1..75: mol_type = other DNA
gatcgccctgcacagttcgcagccattcgcactgataacgaattcaatgtcatcggcgaacccgaagtcttttac

SEQ ID NO: 454315 - DNA, 75 bp, synthetic construct
  source 1..75: mol_type = other DNA
cccctcaccctaaccctctccccaaaggggcgaggggaccgatcgagcacggtgttaaaatcggcgctgattttc

SEQ ID NO: 454316 - DNA, 75 bp, synthetic construct
  source 1..75: mol_type = other DNA
gcgctactggcaaaggccgattacgtgctcaccgataacagtgggtttattttcgatgcgatccacgttgataaa

SEQ ID NO: 454317 - DNA, 75 bp, synthetic construct
  source 1..75: mol_type = other DNA
gtggccgcacctacaatccgatttaccaggtggacaatggcagtactacatgccatatacgagaggaaagaatta

SEQ ID NO: 454318 - DNA, 75 bp, synthetic construct
  source 1..75: mol_type = other DNA
atcgggtaggtgccagtgccgggattaccttgattgatgacaacaatcatcaggcggcagaagtgatgtcgcagg

SEQ ID NO: 454319 - DNA, 75 bp, synthetic construct
  source 1..75: mol_type = other DNA
cgtttaaaagagggactgaccggcgaaggcgctgcacggcagaatgccatcaatgcttcgcttgcacagggcgtt

SEQ ID NO: 454320 - DNA, 75 bp, synthetic construct
  source 1..75: mol_type = other DNA
caatgcgtcgcttgcacagggcgttgaggcgtccctgcgctggctgacggagctgacaacgtcgcttgccaccac

SEQ ID NO: 454321 - DNA, 75 bp, synthetic construct
  source 1..75: mol_type = other DNA
aacactctggactggcttggtggtcagggccgggagcaggcagataacgagtggcatgacgcgattaactggctg

SEQ ID NO: 454322 - DNA, 75 bp, synthetic construct
  source 1..75: mol_type = other DNA
gatcggcgtatgggtttcaggcttcttcggttcaggtaaatcgcactttattaagattctttcttatcttttatc

SEQ ID NO: 454323 - DNA, 75 bp, synthetic construct
  source 1..75: mol_type = other DNA
gcagaacacttaccggttcgcatgccccgtctctgctctgcagagcgcctctctgaaagtatggtcgatgaaata

SEQ ID NO: 454324 - DNA, 75 bp, synthetic construct
  source 1..75: mol_type = other DNA
cgtttaaaagagggactgaccggcgaaggcgctgcacggcagaatgccatcaatgcttcggttgcacagggcctt

SEQ ID NO: 454325 - DNA, 75 bp, synthetic construct
  source 1..75: mol_type = other DNA
atgttgcacaggagcatatccgcatggccggagagcgcacgttcttccggcgtttaaaagaggggctgaccggcg

SEQ ID NO: 454326 - DNA, 75 bp, synthetic construct
  source 1..75: mol_type = other DNA
gtgagttatgcgccaacgtgcagggaaatttgatggatgagatgctgattacgatcattcaggggcacgctcagc

SEQ ID NO: 454327 - DNA, 75 bp, synthetic construct
  source 1..75: mol_type = other DNA
cggtatctacgagcttatcgcgcagaacgaactggatccagccatcatcatctcacacacttccattcctggact

SEQ ID NO: 454328 - DNA, 75 bp, synthetic construct
  source 1..75: mol_type = other DNA
cgaaaggccgcacaacaccttgcgccgccgaaaccatgcagatgctggcaaaagaactgttcccgcagtttctcg

SEQ ID NO: 454329 - DNA, 75 bp, synthetic construct
  source 1..75: mol_type = other DNA
cacgcactatcgcgctggaaatggtgctgttagccagcgatctcattatctccccggttctaccggaaatgctct

SEQ ID NO: 454330 - DNA, 75 bp, synthetic construct
  source 1..75: mol_type = other DNA
ccgtatgatcctgaactggattttcactatcgcattttcaatgctgatggcagtgaagtggcgcagtgcggcaat

SEQ ID NO: 454331 - DNA, 75 bp, synthetic construct
  source 1..75: mol_type = other DNA
tgtacaggaagggctggtacgtacacaggaaatggccacagaaaaccgtgctgcggtcagccgtaaccgtcaggt

SEQ ID NO: 454332 - DNA, 75 bp, synthetic construct
  source 1..75: mol_type = other DNA
gggtgaacgcaacagtcgcgccattgcttctcaggcacgtaccctgcaggcgcatgagcgtcgtatgaacagtca

SEQ ID NO: 454333 - DNA, 75 bp, synthetic construct
  source 1..75: mol_type = other DNA
agcttctgcgcgaggaaccgctggaaaaactggcagttcgcggcgataaaaactggccttccactgcccgtgtac

SEQ ID NO: 454334 - DNA, 75 bp, synthetic construct
  source 1..75: mol_type = other DNA
tgatttctggctttgcactgacgtttctaaccccgccatgtatttataccatttataaggggctttctttcacta

SEQ ID NO: 454335 - DNA, 75 bp, synthetic construct
  source 1..75: mol_type = other DNA
gtatgctgcgttccagcgacgtgctggcgcgactcggtggggatgaatttggtctgctgctaccagactgtaatg

SEQ ID NO: 454336 - DNA, 75 bp, synthetic construct
  source 1..75: mol_type = other DNA
aggctgcgcccagcctacgctttcgcccaacaccaacgcggcaactgcgcgagtgctggatcgtctggggatcag

SEQ ID NO: 454337 - DNA, 75 bp, synthetic construct
  source 1..75: mol_type = other DNA
aagcggcaaaccggaaatgatcgtcaccgccaacattggttgccagacgcatctggcgagcgccggtcgtacctc

SEQ ID NO: 454338 - DNA, 75 bp, synthetic construct
  source 1..75: mol_type = other DNA
gcgggcgcgcaataatattgatgcctggtggcccgcgattgaagcaggtgccgaggcaattttgcaaaccgccag

SEQ ID NO: 454339 - DNA, 75 bp, synthetic construct
  source 1..75: mol_type = other DNA
tgacacttgatgttgcaaaaaaaaaaaaaaaaaaaaaaaaaaaaaaaaaaaatactcagcccaataacatcattt

SEQ ID NO: 454340 - DNA, 75 bp, synthetic construct
  source 1..75: mol_type = other DNA
ggtaagtaacaccggcaacacgtggtttaagctactgattaagccaggatgtgattcgaccgaagaggaaggcga

SEQ ID NO: 454341 - DNA, 75 bp, synthetic construct
  source 1..75: mol_type = other DNA
gccaatgcacgcagtggttaacaatcacaatagaaatattgattattggacggtaaaaagaaagtttgcagaaat

SEQ ID NO: 454342 - DNA, 75 bp, synthetic construct
  source 1..75: mol_type = other DNA
gatgacggacagtaaagactgcatcttaatttgcctgcctgatgaggctcgtacctggcaagacctgaccatgta

SEQ ID NO: 454343 - DNA, 75 bp, synthetic construct
  source 1..75: mol_type = other DNA
cgctggatcggggcgtaccgggcatcttcacccgcgaaggctaccgggagttattcgacaaacgactgcctgaat

SEQ ID NO: 454344 - DNA, 75 bp, synthetic construct
  source 1..75: mol_type = other DNA
cagcactgagcgtatctatgcccgtgcactggcttctatggagagtgaagcaccgcaggagttttcgctggtgcg

SEQ ID NO: 454345 - DNA, 75 bp, synthetic construct
  source 1..75: mol_type = other DNA
acgcctgggtgctgaacgatctggacaaccgcgacagcgtggcggagtttggcggtcgcgcagccgtgctggaac

SEQ ID NO: 454346 - DNA, 75 bp, synthetic construct
  source 1..75: mol_type = other DNA
gaagtatatgcccctgctactggccctggcagattacagcttgctgacaaaataggcgtctgggtttcaggcttc

SEQ ID NO: 454347 - DNA, 75 bp, synthetic construct
  source 1..75: mol_type = other DNA
aacaatgtgtaaaattgtcaggtgcacagtatacatataatagctcttctaataaatgtatgcaaggtatcaacg

SEQ ID NO: 454348 - DNA, 75 bp, synthetic construct
  source 1..75: mol_type = other DNA
tttaccgacactgacggggagttaatcacgtcgctggtggttgtggataagccgcgcccacctgttgaactggaa

SEQ ID NO: 454349 - DNA, 75 bp, synthetic construct
  source 1..75: mol_type = other DNA
ggaattcaccaccatcaataagcaactctcaaccatcattttcgaagagatcctgaaaaacaaaagatatcgcta

SEQ ID NO: 454350 - DNA, 75 bp, synthetic construct
  source 1..75: mol_type = other DNA
tacggagagctgcaccggattattccgctgattgaaaccgttgaaaccatcaaccagcgtctggtggaagaatac

SEQ ID NO: 454351 - DNA, 75 bp, synthetic construct
  source 1..75: mol_type = other DNA
taaacacgcgtaaaacgatggaacgagcggcgggtgtgacaacgctggataacgccgaacaggtagacaaagcgc

SEQ ID NO: 454352 - DNA, 75 bp, synthetic construct
  source 1..75: mol_type = other DNA
cgcgaaggctaccgggaactgttcgacaaacggctgtcggagtttgtcgccgccgcatcagcggacgacgcctgg

SEQ ID NO: 454353 - DNA, 75 bp, synthetic construct
  source 1..75: mol_type = other DNA
gttatggcctttacagcgttccgccggtgacggagagcgtggcgtccctgtatgaccgcctgctggaacggttgc

SEQ ID NO: 454354 - DNA, 75 bp, synthetic construct
  source 1..75: mol_type = other DNA
ctggctttctggttgtggcagggaatgcagggcagccagcagggtaacagcggttatctgaatgaaatcgccagc

SEQ ID NO: 454355 - DNA, 75 bp, synthetic construct
  source 1..75: mol_type = other DNA
aacggggaaggcgggaaaaagttctcctgggcgatgcaggtccgcgtcgtggatatggaccctgccatcaccgaa

SEQ ID NO: 454356 - DNA, 75 bp, synthetic construct
  source 1..75: mol_type = other DNA
gctggggcgcgtttggtgatgtgattcgtcagggtgaaacaggccaggttaatcagttactggatattctcagat

SEQ ID NO: 454357 - DNA, 75 bp, synthetic construct
  source 1..75: mol_type = other DNA
ttgctgataaccgggtatgtcaggtactcagctgccttcctgaaaaatttgtggttgattttgcaaacggtattg

SEQ ID NO: 454358 - DNA, 75 bp, synthetic construct
  source 1..75: mol_type = other DNA
atgaaaaaagaaaccgatatccgacgcggaaggcattgtgttttcctgaagcatgttcacctagtcttcgttact

SEQ ID NO: 454359 - DNA, 75 bp, synthetic construct
  source 1..75: mol_type = other DNA
ctgctgcgtaccggcgggcatctgctggtactggcgctggctttctggttgtggcagggaatgcagggtagccag

SEQ ID NO: 454360 - DNA, 75 bp, synthetic construct
  source 1..75: mol_type = other DNA
gccgctggcctggcgttatggtctttacagcgtcccgccggtgatggagagcgtcgcatccctgtatgaccgcct

SEQ ID NO: 454361 - DNA, 75 bp, synthetic construct
  source 1..75: mol_type = other DNA
tttcccgccgcgcgctggccattgttggcgtggtgatgctggcgttgctggtctggtttgttgggccgctggtgg

SEQ ID NO: 454362 - DNA, 75 bp, synthetic construct
  source 1..75: mol_type = other DNA
gcgcgtcaggacagcaaagccgcctatgacgccctgcatgtttatctgctgctgaacctcgataaggaccacgag

SEQ ID NO: 454363 - DNA, 75 bp, synthetic construct
  source 1..75: mol_type = other DNA
tattgccgccactggtgaagcgcatggaatatgtgctttcagatgccattgctcgtcaggacagcaaagccgcgt

SEQ ID NO: 454364 - DNA, 75 bp, synthetic construct
  source 1..75: mol_type = other DNA
gctctctgcctggccggggctggacccggactcgccgccgctggcctggcgttatggtctttacagcgtcccgcc

SEQ ID NO: 454365 - DNA, 75 bp, synthetic construct
  source 1..75: mol_type = other DNA
gccgcgtttaaagcaggttctgctgacggcgatttctgaggttaacgctgagctgtacgaattccgcaaccgcca

SEQ ID NO: 454366 - DNA, 75 bp, synthetic construct
  source 1..75: mol_type = other DNA
gacctgtcggaatttcgcagtgtgatgcgaactgacggcacggtgacgcagtcgcgtttaaagcaggttgtgctg

SEQ ID NO: 454367 - DNA, 75 bp, synthetic construct
  source 1..75: mol_type = other DNA
cgaccatagccgggtggaaaggatcgccacggaaaaactgcaaatgcagcatgttgatccgtcacaagaaaatat

SEQ ID NO: 454368 - DNA, 75 bp, synthetic construct
  source 1..75: mol_type = other DNA
gcggaagcaagcggtgatttgtggcgtgatgcccgctgggccatcagccgggtacaggatgcgccgcactgcaca

SEQ ID NO: 454369 - DNA, 75 bp, synthetic construct
  source 1..75: mol_type = other DNA
gcagatgctgggatatgcctcgctggcagaggttccggctgaacagctggacggcaaaagtgagcgcattcatca

SEQ ID NO: 454370 - DNA, 75 bp, synthetic construct
  source 1..75: mol_type = other DNA
gcggaggccagcggtgatctgtggcgtgatgcccgttgggctatcagccgggtgcaggatgcaccgcactgtacg

SEQ ID NO: 454371 - DNA, 75 bp, synthetic construct
  source 1..75: mol_type = other DNA
ataagctttttctgcttctgccggtgggatatggcccagcctttccagcaatcgtcgattgttataccagtccac

SEQ ID NO: 454372 - DNA, 75 bp, synthetic construct
  source 1..75: mol_type = other DNA
atgacgatttttgataattatgaagtgtggtttgtcattggcagccaacacctttacggcccagagactctgcgt

SEQ ID NO: 454373 - DNA, 75 bp, synthetic construct
  source 1..75: mol_type = other DNA
aaacacgccgttctggcctgatgtggacccgtcggagtttcgcagcgtgatgcgcactgacggcacggtgacgca

SEQ ID NO: 454374 - DNA, 75 bp, synthetic construct
  source 1..75: mol_type = other DNA
agctgtatgagtttcgcagacgtcagcagatgctggggtatgtgtcgctggctgaggttccggcggaacagctgg

SEQ ID NO: 454375 - DNA, 75 bp, synthetic construct
  source 1..75: mol_type = other DNA
gcgctattaacagacgttagcgatcaggttaattggtacggaaaaaagctgtcgccggaagattggaaagcggta

SEQ ID NO: 454376 - DNA, 75 bp, synthetic construct
  source 1..75: mol_type = other DNA
gcacgcgccatgctcaacgaacgttaccaggactatgacgccacggcatcgggtgtgaagcgaggcgaggaactg

SEQ ID NO: 454377 - DNA, 75 bp, synthetic construct
  source 1..75: mol_type = other DNA
atttggggttggaaccgttattaactgcgttcctcacgctaccggcggtgggtggtaatacgctgtcaacttccg

SEQ ID NO: 454378 - DNA, 75 bp, synthetic construct
  source 1..75: mol_type = other DNA
ctgttatggcagggcttttatacctttgacgatttcaccatgtcggtaacgccggaactgacgctggcgaatatc

SEQ ID NO: 454379 - DNA, 75 bp, synthetic construct
  source 1..75: mol_type = other DNA
ggcgtggcgcagtggtttttacaacatctggggttggagccgctactcacggcgttccttacgttacccgcggtg

SEQ ID NO: 454380 - DNA, 75 bp, synthetic construct
  source 1..75: mol_type = other DNA
aggggtaaaagatttccacttctatactctgaaccgtgctgaaatgagttacgcgatttgccatacgctgggtgt

SEQ ID NO: 454381 - DNA, 75 bp, synthetic construct
  source 1..75: mol_type = other DNA
accatcgctcgcgactactggaataacggcattcgccatattgtggcgctgcgtggcgacctgccgccgggaagc

SEQ ID NO: 454382 - DNA, 75 bp, synthetic construct
  source 1..75: mol_type = other DNA
accggaactgactctggcgaatatccgcgcgctgtttaatccggccaattacgacatcattctgcgcacgttaac

SEQ ID NO: 454383 - DNA, 75 bp, synthetic construct
  source 1..75: mol_type = other DNA
gacctgtcggagtttcgcagtgtgatgcgcactgacggcacggtaacgcagccgcgtttaaaacaggttgccctg

SEQ ID NO: 454384 - DNA, 75 bp, synthetic construct
  source 1..75: mol_type = other DNA
acggcaaaagtgagcgcattcatcactatttcaacgcggtttactgctgggctcgcgccatgctcaacgagcgtt

SEQ ID NO: 454385 - DNA, 75 bp, synthetic construct
  source 1..75: mol_type = other DNA
atgaagtttgttgcgccagaacaggctccggaacaggcggaaatcatcaggaatacgccgttctggcctgatgtg

SEQ ID NO: 454386 - DNA, 75 bp, synthetic construct
  source 1..75: mol_type = other DNA
cgatggcagccgctttcaccctggtgccgattgttcttatctcactctatctggcgtttgtgaaatgcctgggag

SEQ ID NO: 454387 - DNA, 75 bp, synthetic construct
  source 1..75: mol_type = other DNA
ctatttcaacgcggtttactgctgggctcgcgccatgctcaacgaacgtttccaggactatgacgccacggcatc

SEQ ID NO: 454388 - DNA, 75 bp, synthetic construct
  source 1..75: mol_type = other DNA
gaatacgccgttctggcctgatgtgaacttgtcggagtttcgcagtgtcatgcgtactgacggtacggtgacgca

SEQ ID NO: 454389 - DNA, 75 bp, synthetic construct
  source 1..75: mol_type = other DNA
ggtgaaaacaccgcactccctgccgaaactgccggtggcgaatgcgctgtggaaagcgcaaccggatctgccaac

SEQ ID NO: 454390 - DNA, 75 bp, synthetic construct
  source 1..75: mol_type = other DNA
cgttaattttcgtgccaattggagcgcttcaggctggtgaagcactctggcactggtcggttattccattgggtc

SEQ ID NO: 454391 - DNA, 75 bp, synthetic construct
  source 1..75: mol_type = other DNA
ctctatgacaagtatcaaaatcagagcattgccgcacacgtgatgcgcgcgcttgctgcgaaacagtctgaggtg

SEQ ID NO: 454392 - DNA, 75 bp, synthetic construct
  source 1..75: mol_type = other DNA
tgtgctgacatcttccttccttatttttgaacttgtcgccagcgacagagcaatgagtgcctatctgcgctatat

SEQ ID NO: 454393 - DNA, 75 bp, synthetic construct
  source 1..75: mol_type = other DNA
ttgtagtaagcatgccttcgcaactcttcactatggctcgttcttttaaagccgtagccaatggtaaaatttata

SEQ ID NO: 454394 - DNA, 75 bp, synthetic construct
  source 1..75: mol_type = other DNA
acgcgtctgcaaccggacgtcggcgagcagtattatcttgaaatccatccgtacggcatgtttgttctggcggat

SEQ ID NO: 454395 - DNA, 75 bp, synthetic construct
  source 1..75: mol_type = other DNA
tggcaggtgcggtgatcccttcgctgctggtgctggcaacgctggatatcggccatatgatgctgcacgtcgcgg

SEQ ID NO: 454396 - DNA, 75 bp, synthetic construct
  source 1..75: mol_type = other DNA
gcgtgatatccgcgtcagtactgccaatggacggatggtgctgaccgtcaccgatgacgatctggtgagggtcaa

SEQ ID NO: 454397 - DNA, 75 bp, synthetic construct
  source 1..75: mol_type = other DNA
ttttatgcaagtggttaagcgcgagcatattcgtttacgcgtttatgagcgtggggcaggagaaacccaggcctg

SEQ ID NO: 454398 - DNA, 75 bp, synthetic construct
  source 1..75: mol_type = other DNA
ggcgcacgctgctttgcccgctttgtacgcctgaaagggctgaccaataagcgcgatattcgcgtcagcactgcc

SEQ ID NO: 454399 - DNA, 75 bp, synthetic construct
  source 1..75: mol_type = other DNA
ctttatgataagggaaggtgcgaacaagtccctgatatgagatcatgtttgtcatctggagccatggaacagggt

SEQ ID NO: 454400 - DNA, 75 bp, synthetic construct
  source 1..75: mol_type = other DNA
cctgcgcactttaataaaaccagcattacttcagattgttggcaaattctcttttttcacccgatcattttaata

SEQ ID NO: 454401 - DNA, 75 bp, synthetic construct
  source 1..75: mol_type = other DNA
atcatacaaacattagatgtaggcacttttgcaccttttggtgaacaatgtacttgctcagccgtcaataaaaaa

SEQ ID NO: 454402 - DNA, 75 bp, synthetic construct
  source 1..75: mol_type = other DNA
cagagacaggatgtgttcgccttgagaactttcgtattgttccatatttcaatgggctggatggttataaagaca

SEQ ID NO: 454403 - DNA, 75 bp, synthetic construct
  source 1..75: mol_type = other DNA
ccgatgactttgctggtgccagaagtggcggctgaagtgataaaagatctggtgaataccgtgcgttcttatccg

SEQ ID NO: 454404 - DNA, 75 bp, synthetic construct
  source 1..75: mol_type = other DNA
gcgatgctatctgaaataagtaagaaggctacatatcacggaaaagcaagaaatattgagttttggaaggggtta

SEQ ID NO: 454405 - DNA, 75 bp, synthetic construct
  source 1..75: mol_type = other DNA
gaagccccatccatcagcagaacgccattcaagctatccagcaaattcttccagacccaaccaaaccaatcgtag

SEQ ID NO: 454406 - DNA, 75 bp, synthetic construct
  source 1..75: mol_type = other DNA
gatgcacgacattgaaatcacggtgattgataacgacacccgcctgccagcgtttaaagacgcactgcgctggaa

SEQ ID NO: 454407 - DNA, 75 bp, synthetic construct
  source 1..75: mol_type = other DNA
acaaatccacggcgaaaaacgacagaacgtgctggaagcggcgcgtattgagctggggatgaagcgtttcctgga

SEQ ID NO: 454408 - DNA, 75 bp, synthetic construct
  source 1..75: mol_type = other DNA
ggtacgatagatatatttaaggttaaccttgaacctgatgctgaaaaagatctgaccacttcattttctaaaagc

SEQ ID NO: 454409 - DNA, 75 bp, synthetic construct
  source 1..75: mol_type = other DNA
aatgactcaattaatcacaaaggaattgagtcgtccaggtatcattttggcgttggcgctcaaaccgtaggggat

SEQ ID NO: 454410 - DNA, 75 bp, synthetic construct
  source 1..75: mol_type = other DNA
gtgtatggaggtttcaggggaaccagttcgcggtgtacaggtacatgcaggaaccattcagggatgggatgatgt

SEQ ID NO: 454411 - DNA, 75 bp, synthetic construct
  source 1..75: mol_type = other DNA
ggcatttggtacagagcatggcgttaagtggtcagacgaagcgcgactggctctggagtggaaagcgcgatgggg

SEQ ID NO: 454412 - DNA, 75 bp, synthetic construct
  source 1..75: mol_type = other DNA
tgagattacgccagtgcgttgatggatatagccgaacgcaacagaagctgggagagtttgtacttagcgaaccgg

SEQ ID NO: 454413 - DNA, 75 bp, synthetic construct
  source 1..75: mol_type = other DNA
tagagcacggcggtgatgagattggcaatgtggtcaatgaatccgtgcaagcactacaggacacagcaaaattac

SEQ ID NO: 454414 - DNA, 75 bp, synthetic construct
  source 1..75: mol_type = other DNA
ctgttgccgccttgtttgctgacggtaatgcaccacagcgggtgatggatgtcgctgccgcgcctggctccaaaa

SEQ ID NO: 454415 - DNA, 75 bp, synthetic construct
  source 1..75: mol_type = other DNA
acctgattgcggtagcgcactacctgcaggcgctggagtgccagcgtgacgctaaccgcgtcgtggcgctgctgg

SEQ ID NO: 454416 - DNA, 75 bp, synthetic construct
  source 1..75: mol_type = other DNA
gcggtaaaacgccgcacattcagaacctggcggtaggtggggtcgctaacccgatcaacctcgacggtctgggcg

SEQ ID NO: 454417 - DNA, 75 bp, synthetic construct
  source 1..75: mol_type = other DNA
tcggtacaaatttatggcgtagcggccagcgctattctgggagagtatttacattacaaactcctgcgcctcggc

SEQ ID NO: 454418 - DNA, 75 bp, synthetic construct
  source 1..75: mol_type = other DNA
cggagcgcattagcttccgtggctggccggacgcgcaaatacgttgcgcagagtgttggttctgggggcaaaaat

SEQ ID NO: 454419 - DNA, 75 bp, synthetic construct
  source 1..75: mol_type = other DNA
gcgatgtgaatgctcgcttacatctcgatatcccgctgaacggcgaactggttacagcgaaaggtgaagtgacgc

SEQ ID NO: 454420 - DNA, 75 bp, synthetic construct
  source 1..75: mol_type = other DNA
tgggcgtaatattgacgttaaagccaaagccgtccatgcgcgcggcggttttcgttacctgcaacctgctaacga

SEQ ID NO: 454421 - DNA, 75 bp, synthetic construct
  source 1..75: mol_type = other DNA
gatacccgtatcaccatggacggtaaaccctggccaggcggggcattaacgctggcctggataccggaacaggat

SEQ ID NO: 454422 - DNA, 75 bp, synthetic construct
  source 1..75: mol_type = other DNA
attaactaaccttgatattgaactggactttattaacgacggtttatggatgaaaaccgatggcgttaatctggg

SEQ ID NO: 454423 - DNA, 75 bp, synthetic construct
  source 1..75: mol_type = other DNA
acaggctgataacattgacctgaagccctggctgggtaaatggatacaggacaatattgcgctggaaacagcgca

SEQ ID NO: 454424 - DNA, 75 bp, synthetic construct
  source 1..75: mol_type = other DNA
gcgtgccggaattcccgactgacagcaaaaacggcagcttcctgttccctggcggctacatccagaatgccgatc

SEQ ID NO: 454425 - DNA, 75 bp, synthetic construct
  source 1..75: mol_type = other DNA
gatgatatcggggtggctgaactattacgcgaaatactataaatcagcgatgaagaaggtgtgcagatatatcaa

SEQ ID NO: 454426 - DNA, 75 bp, synthetic construct
  source 1..75: mol_type = other DNA
gaaagacgaaggcgtgtcagctaatggaaaggctgtcaaaagagaagccggagttgtttgcccactggaaagcag

SEQ ID NO: 454427 - DNA, 75 bp, synthetic construct
  source 1..75: mol_type = other DNA
gcgtgacgggtatcagttaccggccagtcagttaccgcctgtccaggttccccggaaggtacccaccccggctac

SEQ ID NO: 454428 - DNA, 75 bp, synthetic construct
  source 1..75: mol_type = other DNA
cagatgaccatcatcgccaggaaggtggtgacctcattgcgcttgcaccgggggaatcgacaacctcagcgatgt

SEQ ID NO: 454429 - DNA, 75 bp, synthetic construct
  source 1..75: mol_type = other DNA
atgaccatctataccttatctcacggggggctcacgctggacgtttctgaccagggcggcgtaatcgaaggcttc

SEQ ID NO: 454430 - DNA, 75 bp, synthetic construct
  source 1..75: mol_type = other DNA
gccgttgccgcgtcagtgggtgaacaatggtttttccggatggaatggtcaggcacgcattgagcagccacagca

SEQ ID NO: 454431 - DNA, 75 bp, synthetic construct
  source 1..75: mol_type = other DNA
acattggtatcatttacacgagtcatgttgatgcctaaaaagcaacgcgcccgttgggtaagtcccgatcgcggg

SEQ ID NO: 454432 - DNA, 75 bp, synthetic construct
  source 1..75: mol_type = other DNA
ccggttgccgatccgaataaaccgctggaagtggtgcgaaccattcactccttcgacccgtgcatggcctgtgcg

SEQ ID NO: 454433 - DNA, 75 bp, synthetic construct
  source 1..75: mol_type = other DNA
ggtaaaggtgcggtgaactacctgagtgtgccggaattcccgaccgacagcaaaaacggtagcttcctgttccct

SEQ ID NO: 454434 - DNA, 75 bp, synthetic construct
  source 1..75: mol_type = other DNA
ttagtcgtgaatgcgtggcgattgaagtaggtcagggacttcgcggtgacgatgtggtcgccgtgatggaacgga

SEQ ID NO: 454435 - DNA, 75 bp, synthetic construct
  source 1..75: mol_type = other DNA
cagttcgtatggttctggaaagtcagggcgaatatcactcacaatgggcggcaatttgttccattgctccaaaga

SEQ ID NO: 454436 - DNA, 75 bp, synthetic construct
  source 1..75: mol_type = other DNA
atgagcaatcttttaacgctagcgaaggacttagagcagcaatcgaaagcgcagcagaagagtaccggcgagatg

SEQ ID NO: 454437 - DNA, 75 bp, synthetic construct
  source 1..75: mol_type = other DNA
ttatggcggcaatccacatcttttcccttacaaacacaacgaaggtcagtttgaagtgctggtgccgctgcgtaa

SEQ ID NO: 454438 - DNA, 75 bp, synthetic construct
  source 1..75: mol_type = other DNA
ggtccggcgtcgaattactgcgtgaactcaaacgccagcagcgctatccccacggcgccccggtggtatttacca

SEQ ID NO: 454439 - DNA, 75 bp, synthetic construct
  source 1..75: mol_type = other DNA
tacgactgggcggaaaatgcgcgtaaggatgaagtgaaattccagttgagcctggcatttccgctgtggcgcgga

SEQ ID NO: 454440 - DNA, 75 bp, synthetic construct
  source 1..75: mol_type = other DNA
tggcgcgggcggtgttatggcggcaattggctggtttggcgcggcattggtggggctgcaatctcgactgcgatt

SEQ ID NO: 454441 - DNA, 75 bp, synthetic construct
  source 1..75: mol_type = other DNA
gtcagccgggctttgccctgggcggcgtcggctcacatttctttgttgaatttgaaattgccgatctggatctca

SEQ ID NO: 454442 - DNA, 75 bp, synthetic construct
  source 1..75: mol_type = other DNA
gggcagccggaggccttgctgcataacagcgccgactgggcggcattatttagcgcggccgccttcaactgtcag

SEQ ID NO: 454443 - DNA, 75 bp, synthetic construct
  source 1..75: mol_type = other DNA
ccgccgctacccgtcacctacagggattacctgcaacaacccgcgatccagtcgcttaacgcagattctctggca

SEQ ID NO: 454444 - DNA, 75 bp, synthetic construct
  source 1..75: mol_type = other DNA
ccgaaagcgatcccgcaaatgcgtgatgctcgtgaggttattcagcatgttctgaacacgcatccgcatattatt

SEQ ID NO: 454445 - DNA, 75 bp, synthetic construct
  source 1..75: mol_type = other DNA
aagtcgggccaagagacggttttcagaacatcaaagcgtttattcctaccgatttaaaaataaaaattatcgatc

SEQ ID NO: 454446 - DNA, 75 bp, synthetic construct
  source 1..75: mol_type = other DNA
tcactttgaaagcctcaaagagcatatcgacacacaagcccctatgggcgaaatgtactattccctcattgccat

SEQ ID NO: 454447 - DNA, 75 bp, synthetic construct
  source 1..75: mol_type = other DNA
gtcaaaatggtttcggcatttaccgtaaccgcttccacgatgctcgcaccgcgcctgtttaaagagtttgaaatt

SEQ ID NO: 454448 - DNA, 75 bp, synthetic construct
  source 1..75: mol_type = other DNA
aatatctggaaaaagccggacgcaaactcggcgtaaatgtttacgttgaaaaacaaggcgctaacggcattgaag

SEQ ID NO: 454449 - DNA, 75 bp, synthetic construct
  source 1..75: mol_type = other DNA
atggacgaaaaacagttacagcctctgactaacgaactggtcaaaaacctcaaagcctcaaaacctcaaaacctc

SEQ ID NO: 454450 - DNA, 75 bp, synthetic construct
  source 1..75: mol_type = other DNA
ttcgatctccaggtcggttacgttgacgggatgcccgcccgcatgtggctgtgtctggataacctgttacttgac

SEQ ID NO: 454451 - DNA, 75 bp, synthetic construct
  source 1..75: mol_type = other DNA
tagctcgcagaagcaacactcataaggcttttcatgcggttatccaggcccggttaaaagacaggctgagtgaac

SEQ ID NO: 454452 - DNA, 75 bp, synthetic construct
  source 1..75: mol_type = other DNA
agcgattatcgcaggcaatttaaaaactgttttgcggaacaagaaatcttgtctgaattttctgaacctgtaagt

SEQ ID NO: 454453 - DNA, 75 bp, synthetic construct
  source 1..75: mol_type = other DNA
atgttgaccattttgccaaactgtttttgcgccacgtaggctgctcgcccagtgattaccgcagacaatttaaaa

SEQ ID NO: 454454 - DNA, 75 bp, synthetic construct
  source 1..75: mol_type = other DNA
tgcttactggagccgcgctcgttgtgatcgctgccctgctggttagcggcctgcgtattgctttaccgcatcttg

SEQ ID NO: 454455 - DNA, 75 bp, synthetic construct
  source 1..75: mol_type = other DNA
atgtctattgtgatgcagttacaggatgttgcggaatctacccgcctggggccgctttctggcgaggttcgggct

SEQ ID NO: 454456 - DNA, 75 bp, synthetic construct
  source 1..75: mol_type = other DNA
ctggcgcaggcctatgggatgaattttcgccgtctggatatcgaaggtcacagaatgctgatttcgaccatctga

SEQ ID NO: 454457 - DNA, 75 bp, synthetic construct
  source 1..75: mol_type = other DNA
gatgcatttgcctatacgttagccattctttactacgaaaattttaaaaatgcttatcgttcggagcaggggtat

SEQ ID NO: 454458 - DNA, 75 bp, synthetic construct
  source 1..75: mol_type = other DNA
gcggagcaaggtacagagcgcacatcgcgcgtatgccctgagcactctcagtcacacattgcggcggacgagagc

SEQ ID NO: 454459 - DNA, 75 bp, synthetic construct
  source 1..75: mol_type = other DNA
cgctgtttcctgccgggcaggtggaacgtcagtttgagcagtattgcaccttgctaaaccgaatgaccgaggatg

SEQ ID NO: 454460 - DNA, 75 bp, synthetic construct
  source 1..75: mol_type = other DNA
taccaaagagtatcgtatttctcccattaactatgtaattcaacgacgcatgacggaagcgaaatggtcgttgac

SEQ ID NO: 454461 - DNA, 75 bp, synthetic construct
  source 1..75: mol_type = other DNA
gacgcctttgcctatacgttagcaattctttactacgaaaactttaaaaatgcttatcgttcggagcagggatat

SEQ ID NO: 454462 - DNA, 75 bp, synthetic construct
  source 1..75: mol_type = other DNA
attaaaaaagatgttctgataaaagatattcttttctatctgaataataattatcgcgaaaaaatcactttagaa

SEQ ID NO: 454463 - DNA, 75 bp, synthetic construct
  source 1..75: mol_type = other DNA
ctgaaacggcgtacaggcgctacagtgctggtaattcaccattccggcaaggacgaaacaaagggtgcgcgcggt

SEQ ID NO: 454464 - DNA, 75 bp, synthetic construct
  source 1..75: mol_type = other DNA
gctggctggcgtacaggaggcgaaattatacaaaggcatcaccgaccgggagccggagaactggcgcgactacct

SEQ ID NO: 454465 - DNA, 75 bp, synthetic construct
  source 1..75: mol_type = other DNA
acgccgctttgcgcgtgtctatctcgcgggggagatcgaaccaatccagatcaatgctatcgctgaaaagctggc

SEQ ID NO: 454466 - DNA, 75 bp, synthetic construct
  source 1..75: mol_type = other DNA
gcgcatggtgccgttctctatgtggttggtgaaggcggtattggtgtaccacgtcgtgtaaaagcctgggaggtt

SEQ ID NO: 454467 - DNA, 75 bp, synthetic construct
  source 1..75: mol_type = other DNA
tccggctgccccgcttgatgttgatgaaatggttatcgctgcccgtcaggtggagcgggaaacgggtaaacctgt

SEQ ID NO: 454468 - DNA, 75 bp, synthetic construct
  source 1..75: mol_type = other DNA
gttatctcctgtaccaaaatgaaggacgcggaggaactgaaagaggctgcatatgatttacgcgtggtagagctt

SEQ ID NO: 454469 - DNA, 75 bp, synthetic construct
  source 1..75: mol_type = other DNA
ccgccaccgttgaacacgcaaaagagattgtgggattactgcctgccgaagatgcagcactgattactggcgaca

SEQ ID NO: 454470 - DNA, 75 bp, synthetic construct
  source 1..75: mol_type = other DNA
acgcgcaaaggggtgatgattttcgccgcgacggtcgaacacgcaaaagagattgtgggattactgcctgccgaa

SEQ ID NO: 454471 - DNA, 75 bp, synthetic construct
  source 1..75: mol_type = other DNA
taattcttgattatgcgggtaatcctcacgatctctacgcgccggaagttggtacaccgaaaggcaaaagtgaca

SEQ ID NO: 454472 - DNA, 75 bp, synthetic construct
  source 1..75: mol_type = other DNA
caaaggttttaaacgctggcttgataaactcgttagggagaatattatctttatcgatgattcaggagatatcac

SEQ ID NO: 454473 - DNA, 75 bp, synthetic construct
  source 1..75: mol_type = other DNA
tgtacgaagatgaaggacgcggaggagccaaaagaaagcgcctacgaccttaagagcgtggaggtatttacggat

SEQ ID NO: 454474 - DNA, 75 bp, synthetic construct
  source 1..75: mol_type = other DNA
acatgaaaaagctgggatatgacacaaaacaccttaaacgatggttagccaaactggaaaaagacggcgtgattt

SEQ ID NO: 454475 - DNA, 75 bp, synthetic construct
  source 1..75: mol_type = other DNA
gaaacggcgcacaggggccacggtgctggtggttcaccattccggcaaggatgagacgaaaggcgcgcgcggttc

SEQ ID NO: 454476 - DNA, 75 bp, synthetic construct
  source 1..75: mol_type = other DNA
actcccacgatcaagcgtgcctcaatcatacgcttgaggctgatgggtgcgtgctcgtcaagctgggcgaacata

SEQ ID NO: 454477 - DNA, 75 bp, synthetic construct
  source 1..75: mol_type = other DNA
ctctaaagggctacaccgacgctccgtctttcgtggacaactatccgtttgtgccttaccattacacgctggttc

SEQ ID NO: 454478 - DNA, 75 bp, synthetic construct
  source 1..75: mol_type = other DNA
ggagctttttaccgacgctgacggggagttaataacgtcgctggtggtggtggataagccgcggcatcccgttga

SEQ ID NO: 454479 - DNA, 75 bp, synthetic construct
  source 1..75: mol_type = other DNA
aaaatgaaggacgcggaggaactcaaagaagccgcatatgacttacgcgtggtggagctttttaccgacgctgac

SEQ ID NO: 454480 - DNA, 75 bp, synthetic construct
  source 1..75: mol_type = other DNA
aggcgcgcgcggttccagtgcatttcgtgcttcgctggatgctgaataccggatacgcagggaggacgcaggaag

SEQ ID NO: 454481 - DNA, 75 bp, synthetic construct
  source 1..75: mol_type = other DNA
cagttaatgaaggataccacgaataaaaaaatgtatggttatatggaaatcgctaagcatggtttagacgattca

SEQ ID NO: 454482 - DNA, 75 bp, synthetic construct
  source 1..75: mol_type = other DNA
gtcctctatgtggttggtgaaggcggtattggtgtaccgcgtcgcgtgagagcgtgggaagttgtgcacggtgag

SEQ ID NO: 454483 - DNA, 75 bp, synthetic construct
  source 1..75: mol_type = other DNA
tcatgcaccaaaatgaaggacgcggaggaactcaaagaggctgcctatgatttgcgggttgtggagctttttacc

SEQ ID NO: 454484 - DNA, 75 bp, synthetic construct
  source 1..75: mol_type = other DNA
tgaattgggttcgggagcactacggcaaggtctacgcacccaatactcgtgagacattccgccgccagtctatgc

SEQ ID NO: 454485 - DNA, 75 bp, synthetic construct
  source 1..75: mol_type = other DNA
ctgaagtggataacttttatcgaattatcccgaaaatatccaataatacatctaaccaaagacaaccaaatgaaa

SEQ ID NO: 454486 - DNA, 75 bp, synthetic construct
  source 1..75: mol_type = other DNA
gcgtaggccgcacattgttcctttatcgactcaggtagttgacctttttaaacagctcaaacctattaccggaaa

SEQ ID NO: 454487 - DNA, 75 bp, synthetic construct
  source 1..75: mol_type = other DNA
agtatcgcacgcaattgatgccggtaaggggaaggagctgttcgataacggcggtgaaatcacgctgcgctttaa

SEQ ID NO: 454488 - DNA, 75 bp, synthetic construct
  source 1..75: mol_type = other DNA
ctccttctctggtgccctggatttgtggtgacacgacgtactactggaaggagacgtattcagcgcaatacgatg

SEQ ID NO: 454489 - DNA, 75 bp, synthetic construct
  source 1..75: mol_type = other DNA
cacctcagagtctgtaattttttacgatgccaaaaaagcttcagacaatcagctgaaaccttatggctgggatgg

SEQ ID NO: 454490 - DNA, 75 bp, synthetic construct
  source 1..75: mol_type = other DNA
cctggcgcactggttttaactgggttccatctttttctttaaaagatacgctttatggcaaagtaaaaaatctca

SEQ ID NO: 454491 - DNA, 75 bp, synthetic construct
  source 1..75: mol_type = other DNA
gcggcaaggattttacgccgaaacatgcacaatggcttcataaacaatttggttcaatgccctcaatctgcttga

SEQ ID NO: 454492 - DNA, 75 bp, synthetic construct
  source 1..75: mol_type = other DNA
aagtgaagaggcaaatgatgagttttctgatatcaataatatgctcaaaaaaactataatggatacgttagttaa

SEQ ID NO: 454493 - DNA, 75 bp, synthetic construct
  source 1..75: mol_type = other DNA
ggtggtgacctcattgcgcttgcaccaggggaatcaacaacttcagagatgtcgttgcgggttgcgttgctgtaa

SEQ ID NO: 454494 - DNA, 75 bp, synthetic construct
  source 1..75: mol_type = other DNA
ttcaggcacaggcgagcggttactgggtggaacgggagcagtgggctggctggcgagttttgcgagcagctaccg

SEQ ID NO: 454495 - DNA, 75 bp, synthetic construct
  source 1..75: mol_type = other DNA
tatttcatctttgtttccgaccctgcgtttgataaaggatatgcgtttgatttcttctgtctggaaccgatgagc

SEQ ID NO: 454496 - DNA, 75 bp, synthetic construct
  source 1..75: mol_type = other DNA
acggctgtgtgggacaggggctgcatatcgccaaaaagcttctgccatttataccggcgaatgcgggcattcttc

SEQ ID NO: 454497 - DNA, 75 bp, synthetic construct
  source 1..75: mol_type = other DNA
tacggtgacaccgggaggtgctgcttgtacctataacgatattatcccggcagatcactgtctccatgatgtgga

SEQ ID NO: 454498 - DNA, 75 bp, synthetic construct
  source 1..75: mol_type = other DNA
atgaccatctataccttatttcatggggcgctaaagctggatatctctgaccagggcggagtcatagaaggcttc

SEQ ID NO: 454499 - DNA, 75 bp, synthetic construct
  source 1..75: mol_type = other DNA
acgtagatagcacaccgattcttgacagggtgatcgaggcttacggatttacgcagaagttacagctcgcggaac

SEQ ID NO: 454500 - DNA, 75 bp, synthetic construct
  source 1..75: mol_type = other DNA
aaaagtaatatcccaacctgcaatcattcattctgcactaaatccaacccattattatcaacctgtgaacgatga

SEQ ID NO: 454501 - DNA, 75 bp, synthetic construct
  source 1..75: mol_type = other DNA
actggaggcgttacgtaatgtcgcaagaagcaatcagagtgatgtgcttttggttggaggccgtagttttcaact

SEQ ID NO: 454502 - DNA, 75 bp, synthetic construct
  source 1..75: mol_type = other DNA
tgttgccagaaagtgaactggaggcgttatgtaatgtagcaagcagcaatcagagtgatatacttttggctggag

SEQ ID NO: 454503 - DNA, 75 bp, synthetic construct
  source 1..75: mol_type = other DNA
tcatgcgcaatatattaaagatcgacaagtaatgatggaatggtacgctagcttattaaatacgacctgctatta

SEQ ID NO: 454504 - DNA, 75 bp, synthetic construct
  source 1..75: mol_type = other DNA
atgctgctatctgacatccaaataaaaagagcaaaaccgaaggacaaaccctatacgcttaacgatggtatgggg

SEQ ID NO: 454505 - DNA, 75 bp, synthetic construct
  source 1..75: mol_type = other DNA
tgtgggagatcccggcagaagtaatgaagatgaagcgacctcatattgtgccgctctctgagcaggtcattatgc

SEQ ID NO: 454506 - DNA, 75 bp, synthetic construct
  source 1..75: mol_type = other DNA
gcgaccgcgctacgctctctatcgccggttcggaaatggccaaagatatcggccttgatcccgtgggaatgggct

SEQ ID NO: 454507 - DNA, 75 bp, synthetic construct
  source 1..75: mol_type = other DNA
tcgatatctttagtggattcggcattatcgttgccctgtttacgctgcgcttcctggtcgggcttgctgaagcgc

SEQ ID NO: 454508 - DNA, 75 bp, synthetic construct
  source 1..75: mol_type = other DNA
tttccggtggcctgttcaacatgttcggtaacatttctggcatcgtcacgccaatcgcaattggttatatcgttg

SEQ ID NO: 454509 - DNA, 75 bp, synthetic construct
  source 1..75: mol_type = other DNA
catggaatgctatgcgatcaaacaaaataaaggattattatctcaccactccagtggatcttcttatagctgaat

SEQ ID NO: 454510 - DNA, 75 bp, synthetic construct
  source 1..75: mol_type = other DNA
gttttgtaatgagtgaaagctttattaaggaaagtatttcaaatacaattgaacaaactgggtgtgttaatgtgg

SEQ ID NO: 454511 - DNA, 75 bp, synthetic construct
  source 1..75: mol_type = other DNA
gggacagatcaaagatggcggaactggatggattatttgacataataatctgccaaacaatatttttcagaatgg

SEQ ID NO: 454512 - DNA, 75 bp, synthetic construct
  source 1..75: mol_type = other DNA
tggatggtggagaagaatggtacgctgtcgaaaaaatccagactgggcgaagcgttcagctatgtactgaatcag

SEQ ID NO: 454513 - DNA, 75 bp, synthetic construct
  source 1..75: mol_type = other DNA
aagctacctacgcaatgtacttgacgtcatagcggactggccgatgaaccgggtcagcgaactgctcccctggcg

SEQ ID NO: 454514 - DNA, 75 bp, synthetic construct
  source 1..75: mol_type = other DNA
aagctacctacgcaatgtacttgacgtcatagccgactggccgatgaaccgggtcagcgaactgctcccgtggcg

SEQ ID NO: 454515 - DNA, 75 bp, synthetic construct
  source 1..75: mol_type = other DNA
catatgttcgtgacgaccgtaacgccgggtcaacgctggcgccggcggtgtggttcgcttacagcccggacagaa

SEQ ID NO: 454516 - DNA, 75 bp, synthetic construct
  source 1..75: mol_type = other DNA
ctgactgacggtaagctccatgctgatgacacgcctgtcccggtgctgttgccaggcaataagaaaacgaagacc

SEQ ID NO: 454517 - DNA, 75 bp, synthetic construct
  source 1..75: mol_type = other DNA
tcggtggcggttggaagaaaaaattatctcttcttaggttctgacaacggtggagaaagcgcggcgattatctac

SEQ ID NO: 454518 - DNA, 75 bp, synthetic construct
  source 1..75: mol_type = other DNA
catatattgatgccgtaaatcgtctggatgccggggattatgacgataaaccagatgaaggcatgtcaatacatc

SEQ ID NO: 454519 - DNA, 75 bp, synthetic construct
  source 1..75: mol_type = other DNA
cagaaagttgatgagcagtgtggtaaaggagtggatcccattacacgttttaacactcaaaccaaattgatagaa

SEQ ID NO: 454520 - DNA, 75 bp, synthetic construct
  source 1..75: mol_type = other DNA
agcaggagcagacgacttatatatccagaacagtaaacagagctctggatgactattgcaggagtaataattcag

SEQ ID NO: 454521 - DNA, 75 bp, synthetic construct
  source 1..75: mol_type = other DNA
aagctacctacgcaatgtacttgacgtcatagctgactggccgttgaaccgggtcagcgaactgctcccatggcg

SEQ ID NO: 454522 - DNA, 75 bp, synthetic construct
  source 1..75: mol_type = other DNA
aagctacctacgcaatgtacttgacgtcatagcagactggccgttgaaccgggtcagcgaactgctcccttggcg

SEQ ID NO: 454523 - DNA, 75 bp, synthetic construct
  source 1..75: mol_type = other DNA
gcatcccgtcagcactgacggaagaagccctagagcagatcggtcagttgtacgccatagaggcggatataaggg

SEQ ID NO: 454524 - DNA, 75 bp, synthetic construct
  source 1..75: mol_type = other DNA
ctgacggaagaagccctggagcagatcggtcagttgtacgccatagaggcggatataaggggaatgccggcatag

SEQ ID NO: 454525 - DNA, 75 bp, synthetic construct
  source 1..75: mol_type = other DNA
cgaagcgacgccttgcagaacgtcagcaaaaagctaaaccgcgactgaaatccctggaaagctggctgcgtgaaa

SEQ ID NO: 454526 - DNA, 75 bp, synthetic construct
  source 1..75: mol_type = other DNA
gtatacatcagcagcaaaagtacgacggcagaagaagctctgaagcgaatcagtgaactgtacgccatcgaggat

SEQ ID NO: 454527 - DNA, 75 bp, synthetic construct
  source 1..75: mol_type = other DNA
agtatactcttagttgcgtggacacttagttatgagttgttcttttatttttgctttcttgtatcaatgtcatta

SEQ ID NO: 454528 - DNA, 75 bp, synthetic construct
  source 1..75: mol_type = other DNA
gggcggttgtgggcgtatgttcgtgatgaccgcaatgccgggtcagcgttggcacctgcagtgtggttcgcttag

SEQ ID NO: 454529 - DNA, 75 bp, synthetic construct
  source 1..75: mol_type = other DNA
gtgataagcggattcattatatcactatcaacaagaaggaaagagtcgcctttagaatttagcattaaaagatta

SEQ ID NO: 454530 - DNA, 75 bp, synthetic construct
  source 1..75: mol_type = other DNA
caaactccatgccgatgataccccggtccaggtgcgtattttcatgaaaggagatcactcaataacttccatcga

SEQ ID NO: 454531 - DNA, 75 bp, synthetic construct
  source 1..75: mol_type = other DNA
acaaacccgctactggtttaacccggcggcgataagccagcactttattatccccggtgcggtgaccattatcat

SEQ ID NO: 454532 - DNA, 75 bp, synthetic construct
  source 1..75: mol_type = other DNA
gcaggcggatgcattcagcggttacgatcggctgttcagtgccgaacgtgaaggtggtgcactgacagaagttgc

SEQ ID NO: 454533 - DNA, 75 bp, synthetic construct
  source 1..75: mol_type = other DNA
tcgctcaccgagcgtatggagcttattagcgccattcagcaaacggggatccgtattccgacaatgtgcctgtct

SEQ ID NO: 454534 - DNA, 75 bp, synthetic construct
  source 1..75: mol_type = other DNA
ctgttgcctgcggcgccgtgctgcccgaactgcggcggttcactgagctatctgggcgaggataccgccgaacag

SEQ ID NO: 454535 - DNA, 75 bp, synthetic construct
  source 1..75: mol_type = other DNA
atgagcaacgcaccgaccattaaatcgggaaatgccgacttattacacgccgaagccacaccgcacggcgtcaat

SEQ ID NO: 454536 - DNA, 75 bp, synthetic construct
  source 1..75: mol_type = other DNA
gttcgggcgtgaaacgctggcagagctacacgatcacttcattgctgatctgaatgaaaacggctggcctgaaat

SEQ ID NO: 454537 - DNA, 75 bp, synthetic construct
  source 1..75: mol_type = other DNA
caacaggaacagattacttttatgtccagaatagtaaataaaacactggatgactattgtatgagtaatcgttca

SEQ ID NO: 454538 - DNA, 75 bp, synthetic construct
  source 1..75: mol_type = other DNA
atgccgttaacatcagctattgcatcctattcattttccaccggaatgcaggttcttcgtgctcaaatggtcgcc

SEQ ID NO: 454539 - DNA, 75 bp, synthetic construct
  source 1..75: mol_type = other DNA
tccagtggcggtaatgacggattgctttctgagttattgattttgggatttaataatggtcctcgagcccttagt

SEQ ID NO: 454540 - DNA, 75 bp, synthetic construct
  source 1..75: mol_type = other DNA
aatatctcaatgtaagttttctgttaatccagatgaccttcagtgcccgccagagtctgctcaatgtcccattac

SEQ ID NO: 454541 - DNA, 75 bp, synthetic construct
  source 1..75: mol_type = other DNA
tcacgcatcggcagtgatgtgttgctctgcccgctgtatggcgcgttgtcgctgaacgatcagcgaaaagcgatc

SEQ ID NO: 454542 - DNA, 75 bp, synthetic construct
  source 1..75: mol_type = other DNA
gtggtgaaactgtcagtattgtgtatgatgctactaatgggcgcttttcatccagtggcggtaatgacggattgc

SEQ ID NO: 454543 - DNA, 75 bp, synthetic construct
  source 1..75: mol_type = other DNA
catcttcgttcagtcctgacgtggaggctcttcgtgcgcaaattgtagccaatgggcgcggagatattacatttg

SEQ ID NO: 454544 - DNA, 75 bp, synthetic construct
  source 1..75: mol_type = other DNA
acccactgacccgggaaccaataacggcatcaataattgtaaaacatgaagaatgcatttatgacgataccagag

SEQ ID NO: 454545 - DNA, 75 bp, synthetic construct
  source 1..75: mol_type = other DNA
atccactgacccgagaaccaataacggcatcaatgattataagtcctgataaatgtgtttatgatcctatcaagg

SEQ ID NO: 454546 - DNA, 75 bp, synthetic construct
  source 1..75: mol_type = other DNA
tccagtggcggtaatggcggattgctttctgagttattgcttttgggatttaatactggtcctcgagcccttggt

SEQ ID NO: 454547 - DNA, 75 bp, synthetic construct
  source 1..75: mol_type = other DNA
ccgaagaaggagtgtttgtcaaaaattcagatagttcagcagtatgcactttatttgatgttgatgcactttctc

SEQ ID NO: 454548 - DNA, 75 bp, synthetic construct
  source 1..75: mol_type = other DNA
tcagtgtccaattacactagagagacccgaagaaggagtgtttgtcaaaaattcagatagttcagcagtatgcac

SEQ ID NO: 454549 - DNA, 75 bp, synthetic construct
  source 1..75: mol_type = other DNA
tgtccagatagccttcagtgtccgcctgaggctgctcaatgtccaattacactggagcaaccagaagaaggcata

SEQ ID NO: 454550 - DNA, 75 bp, synthetic construct
  source 1..75: mol_type = other DNA
caaaaaatggcagcgctgggtaacgatccgcgtttagcggcaatgctggttagcgcgaagaacgacgacgaagct

SEQ ID NO: 454551 - DNA, 75 bp, synthetic construct
  source 1..75: mol_type = other DNA
cggcggcaaatgcaggcccgacgggtgttacagcagatgagtgatgaacggttgagggacattgggttaggctgg

SEQ ID NO: 454552 - DNA, 75 bp, synthetic construct
  source 1..75: mol_type = other DNA
cggcggcaaatgcaggcccgacgggtgttacagcagatgagtgatgaacggttgagggatactgggttaagctgg

SEQ ID NO: 454553 - DNA, 75 bp, synthetic construct
  source 1..75: mol_type = other DNA
cggcggcaaatgcaggcccgacgggtgttacagcagatgagtgatgaacggttgagggataatgggttacgctgg

SEQ ID NO: 454554 - DNA, 75 bp, synthetic construct
  source 1..75: mol_type = other DNA
gcagatcgttagttcaggcgactgcacagacgcttaaacctgcggttaccagagctgcaatgcaagcgggtacgg

SEQ ID NO: 454555 - DNA, 75 bp, synthetic construct
  source 1..75: mol_type = other DNA
gttgagggatattgggttacgcagggaggatgtggcgcagggaggatgtggagtgaggggggatgttgagaataa

SEQ ID NO: 454556 - DNA, 75 bp, synthetic construct
  source 1..75: mol_type = other DNA
cggcggcaaatgcaggcccgacgggtgttacagcagatgagtgatgaacggttgagggacagtgggttatgctgg

SEQ ID NO: 454557 - DNA, 75 bp, synthetic construct
  source 1..75: mol_type = other DNA
cccccggtgctgagccagttaagtggtataaaaacacttatggtggcaggttcgctgtataccgaattgcagatt

SEQ ID NO: 454558 - DNA, 75 bp, synthetic construct
  source 1..75: mol_type = other DNA
tgatgatcgttaaattccatccccgggggcgtggtggtggtgccggtccggtggattacctgctgggaaaagacc

SEQ ID NO: 454559 - DNA, 75 bp, synthetic construct
  source 1..75: mol_type = other DNA
gaaacaagtttaaccatcgaaggtattcgtctggtggtggattgtgcccaggaaagggtggcgcgttttgatccg

SEQ ID NO: 454560 - DNA, 75 bp, synthetic construct
  source 1..75: mol_type = other DNA
tggctgaaaaagcagacccggcgcgtgttacagcagatgagtgatgagcggttgaaggatattgggttgcgtagg

SEQ ID NO: 454561 - DNA, 75 bp, synthetic construct
  source 1..75: mol_type = other DNA
atggaatttcacgaaaacaaagccaaaacgccgtttatcggcttcgtacaactctggcaggcggtgaggcgttgg

SEQ ID NO: 454562 - DNA, 75 bp, synthetic construct
  source 1..75: mol_type = other DNA
atatagcgctgtatgactatgttctggaggcaggaaaggtgcatgccgatgacacgccggtaattgtactggagc

SEQ ID NO: 454563 - DNA, 75 bp, synthetic construct
  source 1..75: mol_type = other DNA
cgaagagtacccgaacaaagttgagatgaagcgcctgcaggagctggctaaacgcatcagtacggtgccggaagc

SEQ ID NO: 454564 - DNA, 75 bp, synthetic construct
  source 1..75: mol_type = other DNA
accgcgatgcgctggatgctggcgattgcgtggtagcagagtggcgtccgatgaacatgcactctttcacctggt

SEQ ID NO: 454565 - DNA, 75 bp, synthetic construct
  source 1..75: mol_type = other DNA
gcaggaaaaagtggcgacgctggaagatgccaccgagatggttaacctgtaccgcgatgcgctggatgctggcga

SEQ ID NO: 454566 - DNA, 75 bp, synthetic construct
  source 1..75: mol_type = other DNA
tccgttatgtccttgacgtcattgctgactggccgataaaccgggtcagcgaactactcccctggcgcatcacac

SEQ ID NO: 454567 - DNA, 75 bp, synthetic construct
  source 1..75: mol_type = other DNA
gaggaagccctgaaacggatcggtgagttatatgccatcgaggcggaaataagggggatgccggcgaagcgacgc

SEQ ID NO: 454568 - DNA, 75 bp, synthetic construct
  source 1..75: mol_type = other DNA
aacggagtggagccagaaagctaccttcgccatgtgcttgatgttatagctgactggccgataaaccgggtcagc

SEQ ID NO: 454569 - DNA, 75 bp, synthetic construct
  source 1..75: mol_type = other DNA
tgtggttcgcgtacagcccggacagaaaaggcatccacccgcagacccatcttgccggcttcagcggtgtgctgc

SEQ ID NO: 454570 - DNA, 75 bp, synthetic construct
  source 1..75: mol_type = other DNA
caagctccacgccgatgacacgccagtcccggtgctgttgccaggtaataagaagacgaagaccgggcggttgtg

SEQ ID NO: 454571 - DNA, 75 bp, synthetic construct
  source 1..75: mol_type = other DNA
agggggaaaagagaagggtgaggcgggcggagagagctgccggtggcgggaaaaaagggaaaagcgctgcgggtt

SEQ ID NO: 454572 - DNA, 75 bp, synthetic construct
  source 1..75: mol_type = other DNA
ccgttccctgaatcactaccccgtgacgaaaagcgactgttgcctgcagcgccgtgctgcccgaactgcggcggt

SEQ ID NO: 454573 - DNA, 75 bp, synthetic construct
  source 1..75: mol_type = other DNA
gacatcttcctgctgaaacagcgcctggccgaacaggaagcgctgatccacgccctgcaggaaaagctgagcaac

SEQ ID NO: 454574 - DNA, 75 bp, synthetic construct
  source 1..75: mol_type = other DNA
cggcttgctgaacgtcagcgaaaaacgaaaccgctgttgaaatccctggaaagctggttgcgtaaaaagatgaag

SEQ ID NO: 454575 - DNA, 75 bp, synthetic construct
  source 1..75: mol_type = other DNA
tctggagttgcagggaaaaccaagaacaaaaatatatatgtggtacaaatcactcggcgatgagtattctttttc

SEQ ID NO: 454576 - DNA, 75 bp, synthetic construct
  source 1..75: mol_type = other DNA
cttctgcggtcctacggttcctgttattaatccggacaccggagagatacgccgcgtggcaatcttcgtggccgt

SEQ ID NO: 454577 - DNA, 75 bp, synthetic construct
  source 1..75: mol_type = other DNA
cgtccacaggccgggtggttgaattcatgctgaaggcaaaaccccatccggaactggcttaccgtgcagtccagg

SEQ ID NO: 454578 - DNA, 75 bp, synthetic construct
  source 1..75: mol_type = other DNA
aaaagcggaaaacagcgtcctcatcgtcgaacgatggcttcttgctcgcatccataatgaaaccttccgcacgct

SEQ ID NO: 454579 - DNA, 75 bp, synthetic construct
  source 1..75: mol_type = other DNA
gagaaaagctttttatcgacttctgtggtcctacggttcctgttattaatccggacaccggtgagatacgccgcg

SEQ ID NO: 454580 - DNA, 75 bp, synthetic construct
  source 1..75: mol_type = other DNA
tccttgacgtcatagccgactggccgataaaccgggtctgtgaactgctcccctggcgcgtagcactgccgactg

SEQ ID NO: 454581 - DNA, 75 bp, synthetic construct
  source 1..75: mol_type = other DNA
tgatgtcatggttaaatgcccacagccgttgcctgaccttcctgggcggcgtgccgaagctgctcatccccgata

SEQ ID NO: 454582 - DNA, 75 bp, synthetic construct
  source 1..75: mol_type = other DNA
gacagtttggtaaacgctacttctggccgcatctcttgttagggatggtcgcggcgagtttaggtctgcctgcgc

SEQ ID NO: 454583 - DNA, 75 bp, synthetic construct
  source 1..75: mol_type = other DNA
attcttcattgtttgttgcgtatatgggatgtctgggatggggaggtgcttatttctatggttggggaggtgctt

SEQ ID NO: 454584 - DNA, 75 bp, synthetic construct
  source 1..75: mol_type = other DNA
gcgaaaacagggcgtatctggacgtatgtccgggatgatcgcaatgtgggttcgtcatctcctccagcggtctgg

SEQ ID NO: 454585 - DNA, 75 bp, synthetic construct
  source 1..75: mol_type = other DNA
tgctgaacgtcagcgaaaaacgaaaccgctgttgaaatccctggaaagctggttgcgtgaaaagatgaagaccct

SEQ ID NO: 454586 - DNA, 75 bp, synthetic construct
  source 1..75: mol_type = other DNA
gaagaccgggcggttgtgggcgtatgttcgtgatgaccgcaatgccgggtcagcgttggcacctgcagtgtggtt

SEQ ID NO: 454587 - DNA, 75 bp, synthetic construct
  source 1..75: mol_type = other DNA
atcccgtcagcactgacggaagaagccctagagcagatcagtcagttgtacgccatagaggcggatataagggga

SEQ ID NO: 454588 - DNA, 75 bp, synthetic construct
  source 1..75: mol_type = other DNA
gcgatctttccgatccgccgaaactggaactgcaaaagaaacacaccattgaagtggttatcgatcgcttcaagg

SEQ ID NO: 454589 - DNA, 75 bp, synthetic construct
  source 1..75: mol_type = other DNA
atgaaaatcaaacccgacgatatccatttcgcccgcaccaaattactcagtctggaaaacacccacaacggcaaa

SEQ ID NO: 454590 - DNA, 75 bp, synthetic construct
  source 1..75: mol_type = other DNA
ggggacgacgtttacggagacgaccctaccgttaatgctctgcaggactacgccgcagagctttccggtaaagaa

SEQ ID NO: 454591 - DNA, 75 bp, synthetic construct
  source 1..75: mol_type = other DNA
gaaaagatgaaaaccctgtcgcgacactcagagctgacgaaagcgttcgcgtacgccctgaaccagtggccggca

SEQ ID NO: 454592 - DNA, 75 bp, synthetic construct
  source 1..75: mol_type = other DNA
gccgcgctgcccggaccacgatgtaccgctggcggcgcaaaccgtcagtcagatggtggataacgtgctgtccca

SEQ ID NO: 454593 - DNA, 75 bp, synthetic construct
  source 1..75: mol_type = other DNA
aattcgctggcggaaaatgacaggtggcgggatgcgccagtccggcattctggcagccgccgggatgtatgccct

SEQ ID NO: 454594 - DNA, 75 bp, synthetic construct
  source 1..75: mol_type = other DNA
tggcggagcaactgcgtgaagcaggcgcggatgtgatgcgtcaggacaccaatatgctgtttgttcgcgtcgggg

SEQ ID NO: 454595 - DNA, 75 bp, synthetic construct
  source 1..75: mol_type = other DNA
ctgatgaatgatttgcgtccactctctgaatgggtggtgcaggaacaactgccggtgttgatggttgtcggtatt

SEQ ID NO: 454596 - DNA, 75 bp, synthetic construct
  source 1..75: mol_type = other DNA
attaattgttgttgcatttcacataagatacaacttatctgtttatgagcaaaaaaatcttggagacttaatgtt

SEQ ID NO: 454597 - DNA, 75 bp, synthetic construct
  source 1..75: mol_type = other DNA
cccgagtgctgacctcaaagtatgcagagcacataccgctgtatcgccagtcggagatctgtgcccgccagggtg

SEQ ID NO: 454598 - DNA, 75 bp, synthetic construct
  source 1..75: mol_type = other DNA
tgttcgtgatgaccgcaatgcagggtcagcgttggcacctgcagtgtggttcgcttacagcccggacagaaaagg

SEQ ID NO: 454599 - DNA, 75 bp, synthetic construct
  source 1..75: mol_type = other DNA
ataagaaaacgaagaccgggcggttgtgggcgtatgttcgtgacgaccgtaacgccgggtcaacgctggcgccgg

SEQ ID NO: 454600 - DNA, 75 bp, synthetic construct
  source 1..75: mol_type = other DNA
cttacggggagtggccgtaggccggaaaaactggatgttcgcgggttccgacagcggtggtgaacatgcggcggt

SEQ ID NO: 454601 - DNA, 75 bp, synthetic construct
  source 1..75: mol_type = other DNA
aattacctgacgctttcccgctcggcagagacgctttctggcggtgaagcccagcgtatccgtctggcgagccag

SEQ ID NO: 454602 - DNA, 75 bp, synthetic construct
  source 1..75: mol_type = other DNA
atcagcaaccgtccgtgcgccagctgtgaagggacacgtctgcgccgggaagcgcgccatgtgttcgttgagaat

SEQ ID NO: 454603 - DNA, 75 bp, synthetic construct
  source 1..75: mol_type = other DNA
attcgcgccgctgaccatgtgatcgacattggcccgggcgcaggtgtacacggcggtgaagtggtcgcagaaggt

SEQ ID NO: 454604 - DNA, 75 bp, synthetic construct
  source 1..75: mol_type = other DNA
cgcccgtgcgtgaactgttcgctggcgtaccggaatcccgtgcgcgcggttatacgcccggacgtttcagcttta

SEQ ID NO: 454605 - DNA, 75 bp, synthetic construct
  source 1..75: mol_type = other DNA
cccgaaagcggaagagctgctgttctccgccaacttcgcctgcccaatttgcggctacagtatgcgtgaactgga

SEQ ID NO: 454606 - DNA, 75 bp, synthetic construct
  source 1..75: mol_type = other DNA
cttcaacaatctcaaactcgctggtcaacgggcgaagattgcagaaaaaatccttaaagagatcggcgatcgtct

SEQ ID NO: 454607 - DNA, 75 bp, synthetic construct
  source 1..75: mol_type = other DNA
ggaagagctgctattttccgccaacttcgcctgcccaatttgcggctacagtatgcgtgaactggaaccacgcct

SEQ ID NO: 454608 - DNA, 75 bp, synthetic construct
  source 1..75: mol_type = other DNA
cgacaccttatatgccgaagggcagcgtcgttacgttgaatccctttctgcctatgcgcggcagtttctgtcact

SEQ ID NO: 454609 - DNA, 75 bp, synthetic construct
  source 1..75: mol_type = other DNA
aaaagtgctgaaactgacgggcgcacgcggcaacaacctgaaagacgtgacgctgacgctgccggtgggtctgtt

SEQ ID NO: 454610 - DNA, 75 bp, synthetic construct
  source 1..75: mol_type = other DNA
catgaacgatcgtggcgatacctccattcgtcgtcatccgttcgaaggcgtgctgcacaatatggagcgccgtta

SEQ ID NO: 454611 - DNA, 75 bp, synthetic construct
  source 1..75: mol_type = other DNA
aattacctgacactttcccgctcggcagaaacgctttctggcggtgaagcccagcgtatccgtctggcgagccag

SEQ ID NO: 454612 - DNA, 75 bp, synthetic construct
  source 1..75: mol_type = other DNA
gcgaagggacgcgtctgcgtcgtgaagcgcgccacgtctatgtcgagaatacgccgctgcccgctatctccgata

SEQ ID NO: 454613 - DNA, 75 bp, synthetic construct
  source 1..75: mol_type = other DNA
aattggtcgtactccacgttctaacccggcgacctataccggcgtgtttacacctgtgcgcgaactgtttgcggg

SEQ ID NO: 454614 - DNA, 75 bp, synthetic construct
  source 1..75: mol_type = other DNA
acaaaattcctatgcacggctgaaataaaatccaacttcccagggatcgatgctctagatgaaaataaaaggctg

SEQ ID NO: 454615 - DNA, 75 bp, synthetic construct
  source 1..75: mol_type = other DNA
gcattctctgcatgtttactcctttgccaagtgtgtcacaacatgctttggcatcctccacgcataaaggacgcg

SEQ ID NO: 454616 - DNA, 75 bp, synthetic construct
  source 1..75: mol_type = other DNA
gaatcagggaacttgaagaacagcttgagcaggcgagccagaaaactgagttttttaattatttatcaataacct

SEQ ID NO: 454617 - DNA, 75 bp, synthetic construct
  source 1..75: mol_type = other DNA
tttaaggccattgaaacatcgccttccgataccactgccgaaaaagtcgcgttgttgcgccagcttgcggtaaac

SEQ ID NO: 454618 - DNA, 75 bp, synthetic construct
  source 1..75: mol_type = other DNA
gtgatctgttgatcgacggcaaacgaatgaatgacgttccagccaaagcacgcaatatcgcgatggtgttccaga

SEQ ID NO: 454619 - DNA, 75 bp, synthetic construct
  source 1..75: mol_type = other DNA
gaaaggaggcgtcatgaataaggctgatgtcattgtttctgaagccttcatggaaataataaaactgatcatggc

SEQ ID NO: 454620 - DNA, 75 bp, synthetic construct
  source 1..75: mol_type = other DNA
atgatgaaagatacattgtctatggctttgatcctgacaagaaagaatggcaagagcttacgatgagtttacttc

SEQ ID NO: 454621 - DNA, 75 bp, synthetic construct
  source 1..75: mol_type = other DNA
cacgccagaccaggtaagtctctacatgctcgaacagagcggtcgctatggacgtgcggcgcttgagtcgctgaa

SEQ ID NO: 454622 - DNA, 75 bp, synthetic construct
  source 1..75: mol_type = other DNA
cggattacttcaggggctggtttgctacctgctgatcgcctggctttccggaaaaaatcacagttggattgttta

SEQ ID NO: 454623 - DNA, 75 bp, synthetic construct
  source 1..75: mol_type = other DNA
ctctataacgcgatgatatgtattgaaaaagacgcctgtgtactggttgagcaagatctgaatagtgatggcagg

SEQ ID NO: 454624 - DNA, 75 bp, synthetic construct
  source 1..75: mol_type = other DNA
acctgattaaaaccgctctgctggttacgccactgtatgtgctgatcgccgcctgggcgttatggttgcgggttg

SEQ ID NO: 454625 - DNA, 75 bp, synthetic construct
  source 1..75: mol_type = other DNA
attccctgggctggcccgttgcgttacctgattaaaaccgctctgctggttacgccactgtatgtgctgatcgcc

SEQ ID NO: 454626 - DNA, 75 bp, synthetic construct
  source 1..75: mol_type = other DNA
atgccttacccgtatggagcgtaaaattaaatgttttacaaaataatgctatgggtgcagtagcgatacatggat

SEQ ID NO: 454627 - DNA, 75 bp, synthetic construct
  source 1..75: mol_type = other DNA
acatggcagacattggacatttataataatgtattgcctgcatggaaagtaaatatgaatccgttgcagatggat

SEQ ID NO: 454628 - DNA, 75 bp, synthetic construct
  source 1..75: mol_type = other DNA
caggccccaggtatgtgacactctataaccttcatgttgatggtaaagttatggatggtggtatgatcgcaccat

SEQ ID NO: 454629 - DNA, 75 bp, synthetic construct
  source 1..75: mol_type = other DNA
gtggtagtttacctgccgaccgggaaagtttatttatacttaatgttgctgcattaccatcgttggaaaatagtc

SEQ ID NO: 454630 - DNA, 75 bp, synthetic construct
  source 1..75: mol_type = other DNA
gctgcatagggttggctattttgttggcaaaaaacatcagtgagcaatgcccacttttgatatttgatgatccgg

SEQ ID NO: 454631 - DNA, 75 bp, synthetic construct
  source 1..75: mol_type = other DNA
atttgccagacaggaggaatttgatctggattcgcgtctggtgctgatttatgggcctaatggtaccgggaagtc

SEQ ID NO: 454632 - DNA, 75 bp, synthetic construct
  source 1..75: mol_type = other DNA
agatgcactggctgccgatcgccagttgttttcatctccagcggatatcacgtttgtcattgtcggtaatgtcgc

SEQ ID NO: 454633 - DNA, 75 bp, synthetic construct
  source 1..75: mol_type = other DNA
tgatgataatcgtgctgtcgaatgtaaagccgaaggcagtcaacatattagctaccagttcagcggtgagtggag

SEQ ID NO: 454634 - DNA, 75 bp, synthetic construct
  source 1..75: mol_type = other DNA
ccattgccgatgcgcttgatggcgattatcgcctgcgcagcggaatgaaaaccgcgaacggcaacgtggtgcgct

SEQ ID NO: 454635 - DNA, 75 bp, synthetic construct
  source 1..75: mol_type = other DNA
gttgaaaatgagtatttcgctagattgctaaagtacaaatcagcggaagaacctttagaagtatcaacccatgat

SEQ ID NO: 454636 - DNA, 75 bp, synthetic construct
  source 1..75: mol_type = other DNA
atctgtaaagagtttggtctgccggatgcggcagtactgttggggggcggtggaacgccaccggaaccagcaccg

SEQ ID NO: 454637 - DNA, 75 bp, synthetic construct
  source 1..75: mol_type = other DNA
ttgggtggaactgtggcgtgattgtctgcgggtggcgtatgacccgaatgtggatatcagagtggtgaagtcacg

SEQ ID NO: 454638 - DNA, 75 bp, synthetic construct
  source 1..75: mol_type = other DNA
ccaaagattgtgacggaacatcccggcgcgcgctggttgtttctcacgctgacggtgcgcaactgttccattgac

SEQ ID NO: 454639 - DNA, 75 bp, synthetic construct
  source 1..75: mol_type = other DNA
cgcacacagtcacgtttaatcgactctattcaaaagttgttcacgttaatcgccacggggttgctgccgttagta

SEQ ID NO: 454640 - DNA, 75 bp, synthetic construct
  source 1..75: mol_type = other DNA
tgtttttaatattgcggtgatggcatcggtctatttttgggtgccggatattcgcgacgaggcgaaaggaaagct

SEQ ID NO: 454641 - DNA, 75 bp, synthetic construct
  source 1..75: mol_type = other DNA
gaaaaaaacgcattgctgacgatatgatggagctaattgaaaaatcttttaatctcccacgcggatggatggaca

SEQ ID NO: 454642 - DNA, 75 bp, synthetic construct
  source 1..75: mol_type = other DNA
tcagtgactggatcaccttctgggcgtcagtgacggcaacaaccattggtgttatgaccatcagcgaaaaaattg

SEQ ID NO: 454643 - DNA, 75 bp, synthetic construct
  source 1..75: mol_type = other DNA
acgttgccttatcatcaagtagcaaaggtggagtatgtagctggtattctgaagcaatctcgccacctagatgac

SEQ ID NO: 454644 - DNA, 75 bp, synthetic construct
  source 1..75: mol_type = other DNA
tgaatgcgcttgcgaaatttctaaacgttgatgttgtttggcttcagcacggcacttcgttaaatggagcgaatg

SEQ ID NO: 454645 - DNA, 75 bp, synthetic construct
  source 1..75: mol_type = other DNA
gcaacgccatgttcacgctctcttcgtcttacctgatgctcgccattggtcggctggtttccggctttccgcatg

SEQ ID NO: 454646 - DNA, 75 bp, synthetic construct
  source 1..75: mol_type = other DNA
gcctaaccttggtaaaaaatctcttactgagattaaagacgtgcttgcttcccgtggactgtctctgggcatgcg

SEQ ID NO: 454647 - DNA, 75 bp, synthetic construct
  source 1..75: mol_type = other DNA
tcagggcaaagatgaagttattcttaccttgaataaatctggcattggccctgtgactgcagccgatatcaccca

SEQ ID NO: 454648 - DNA, 75 bp, synthetic construct
  source 1..75: mol_type = other DNA
cctatggcgcgaactctggcgagcgcgaccgtacacacagcattattaaaggcattaaagatcgcaccggtctcg

SEQ ID NO: 454649 - DNA, 75 bp, synthetic construct
  source 1..75: mol_type = other DNA
taaacaggcgaagaaatttgccgacatgaccaacgtgcgtattccggcgtggatggcgcaaatgtttgacgggct

SEQ ID NO: 454650 - DNA, 75 bp, synthetic construct
  source 1..75: mol_type = other DNA
ccgtggactgtctctgggcatgcgcctggaaaactggccaccggcaagcatcgctgacgagtaaccggatcacag

SEQ ID NO: 454651 - DNA, 75 bp, synthetic construct
  source 1..75: mol_type = other DNA
atgccgggttgcgcggtgagcgaggttgagattgatggtgtactacatgagtacagcaccaaagaaggcgttcag

SEQ ID NO: 454652 - DNA, 75 bp, synthetic construct
  source 1..75: mol_type = other DNA
ccatggttcatatcgtggcgcttatgagccccggtcccgatttcttttttgtctcccagactgccgttagccgtt

SEQ ID NO: 454653 - DNA, 75 bp, synthetic construct
  source 1..75: mol_type = other DNA
gttaacggcgggctgggaaaagcggcggggggggctgcgcggtttgggggtgggggggtacctgattgccgaagc

SEQ ID NO: 454654 - DNA, 75 bp, synthetic construct
  source 1..75: mol_type = other DNA
cagagcggctccactgatgcagtcactgtatgactggatacagcaacagatgaaaacactgtcgcgtcactcgga

SEQ ID NO: 454655 - DNA, 75 bp, synthetic construct
  source 1..75: mol_type = other DNA
atgagccaccggccaggatacggtggtgcggctgaaagccgcagccgtcaggctgcctgctcgataaaacattct

SEQ ID NO: 454656 - DNA, 75 bp, synthetic construct
  source 1..75: mol_type = other DNA
tacgcgcagctaaaagcgaaagtcgccgccggtgaaattgaggtcatcagcatcgatccggttgtcacatccacc

SEQ ID NO: 454657 - DNA, 75 bp, synthetic construct
  source 1..75: mol_type = other DNA
aactgatgtgccgctgcaactggcgctggcgtatacgctgtacagtgaaaacctgtacgacaaaaacttcctcgc

SEQ ID NO: 454658 - DNA, 75 bp, synthetic construct
  source 1..75: mol_type = other DNA
gttaacggcgggctgggaaaagaggcggggggtcatgcgcggtttggggcatggtcggtacctgattgccgaagc

SEQ ID NO: 454659 - DNA, 75 bp, synthetic construct
  source 1..75: mol_type = other DNA
atgcgcaggggttatcaacgtctggcgaagtggatcgacggttttgccggagcgttatttgccggatttggcatt

SEQ ID NO: 454660 - DNA, 75 bp, synthetic construct
  source 1..75: mol_type = other DNA
caaaaagcgggcgcagtttcctgaaaggcttactgaccaatctcgccaatccgaaagcgattatctattttggtt

SEQ ID NO: 454661 - DNA, 75 bp, synthetic construct
  source 1..75: mol_type = other DNA
cctaaagcgattatctactttggttcggtgttctcgctgtttgtcggtgataatgtcggcaccaccgaacgctgg

SEQ ID NO: 454662 - DNA, 75 bp, synthetic construct
  source 1..75: mol_type = other DNA
agcaggaaattgaacggctgaaagcgcaactcgacaggttgcgtcgcatgttgttcggccagagttcagagaaaa

SEQ ID NO: 454663 - DNA, 75 bp, synthetic construct
  source 1..75: mol_type = other DNA
ggttaccgggcgttatacgaatccggcagaataacggaagccgcgtgtatggcccatgcccggagaaaaatccac

SEQ ID NO: 454664 - DNA, 75 bp, synthetic construct
  source 1..75: mol_type = other DNA
aactggatatcattaataccgcctttaaagttatcgaaaccatacgtcccaaactggcctgtagccggtgtgatg

SEQ ID NO: 454665 - DNA, 75 bp, synthetic construct
  source 1..75: mol_type = other DNA
gactttaaagggctttacctcaaggcgctggcgcgttctgttgctgacgagatatacggtttctccatgacccgt

SEQ ID NO: 454666 - DNA, 75 bp, synthetic construct
  source 1..75: mol_type = other DNA
gtaatgcgaacagtgctgaaataaaagtttcccccagcgcgccgtctggtcagtcacaacgcctgtcctctcctt

SEQ ID NO: 454667 - DNA, 75 bp, synthetic construct
  source 1..75: mol_type = other DNA
ttaaaaagttactgaaggataaagatcgggataaaaaagacgaacatggcggtattggtacgccagctacgcggg

SEQ ID NO: 454668 - DNA, 75 bp, synthetic construct
  source 1..75: mol_type = other DNA
gctgatttcgtcactgatccagtgataaaaaaattactgaaggataaagataaagacaaaaaagatgaacatggc

SEQ ID NO: 454669 - DNA, 75 bp, synthetic construct
  source 1..75: mol_type = other DNA
ggggaaaatcagataccggacatggcttcatttagtggggtgagggatttttacggaaaacaacttttgccagga

SEQ ID NO: 454670 - DNA, 75 bp, synthetic construct
  source 1..75: mol_type = other DNA
gtgtgaagcttgcgggtattcattacataacggtacagggcatcattcagcgtcgtcattaactggcagcacgcg

SEQ ID NO: 454671 - DNA, 75 bp, synthetic construct
  source 1..75: mol_type = other DNA
agtcagcctctgatagattacgttgatcattttaatgatattgataggcaagataaccaagtagcctctgtgtcc

SEQ ID NO: 454672 - DNA, 75 bp, synthetic construct
  source 1..75: mol_type = other DNA
tgctctggctagtgagccgctaagcattgaccagtatcgttacatcaatgaggccctgaaggtgctaaaagcctg

SEQ ID NO: 454673 - DNA, 75 bp, synthetic construct
  source 1..75: mol_type = other DNA
agcgtatgctcaggcgattatgggtcatagctcagggtcgattacctatgacaggtatgcgaaagaagtcgaggt

SEQ ID NO: 454674 - DNA, 75 bp, synthetic construct
  source 1..75: mol_type = other DNA
tgagcaccgacgaacgcaatgtttacctggcaattgcacaacactatcttgtccagttcatgcctgaaaaggcat

SEQ ID NO: 454675 - DNA, 75 bp, synthetic construct
  source 1..75: mol_type = other DNA
acgtagaaaagcagtttagctctcaagcctgcgaatatctgaccagtaccgtacatgcatccggacgagatttac

SEQ ID NO: 454676 - DNA, 75 bp, synthetic construct
  source 1..75: mol_type = other DNA
ccggtaacgacagataacgctccgataaaaggcgaatcgctggtcagcgatatactcgccgaaggcaaacaaccg

SEQ ID NO: 454677 - DNA, 75 bp, synthetic construct
  source 1..75: mol_type = other DNA
tccgctgacagatcgtaaattgcttgataaggcatgggcaaacggaacggcggcatctcttgcgggaaaaccagc

SEQ ID NO: 454678 - DNA, 75 bp, synthetic construct
  source 1..75: mol_type = other DNA
aaaagtatttaataagcaaaatccggtgttggattcgcagcaatccaaaactaactttgaaaattattttaaggc

SEQ ID NO: 454679 - DNA, 75 bp, synthetic construct
  source 1..75: mol_type = other DNA
gcgtgctgatgtgaccgaaattattcatgctggcgatcctgatgacgaaggacagctacttgtcgatgaggtcct

SEQ ID NO: 454680 - DNA, 75 bp, synthetic construct
  source 1..75: mol_type = other DNA
aaagggaaacttattccgacggataccggatgtgcgcttattgatgccctaccaggtatagcggttaatcctgat

SEQ ID NO: 454681 - DNA, 75 bp, synthetic construct
  source 1..75: mol_type = other DNA
gcggattttgtcaccgatccaacgattaaaaagttactgaaagataaagataaggataaaaaagatgagcatggc

SEQ ID NO: 454682 - DNA, 75 bp, synthetic construct
  source 1..75: mol_type = other DNA
gcatctttatcccgtaaagtatcagccagtggaaagtgccgcaaaacaggttaagacgattattgagcttatctc

SEQ ID NO: 454683 - DNA, 75 bp, synthetic construct
  source 1..75: mol_type = other DNA
attaaccgataaacaaattgaaacgttaataacaaaaggagttacaagtgaattgaaaggcttcattagtcaaaa

SEQ ID NO: 454684 - DNA, 75 bp, synthetic construct
  source 1..75: mol_type = other DNA
tctggaatgagttttctggcaagaaaatcacccaggcacaggccgaaaaacttattaaatcaggaaaaaccgatt

SEQ ID NO: 454685 - DNA, 75 bp, synthetic construct
  source 1..75: mol_type = other DNA
acgcactgagcaccgacgaacgcaacgtttacctggcaattgcacaacactatcttgtccagttcatgcctgaaa

SEQ ID NO: 454686 - DNA, 75 bp, synthetic construct
  source 1..75: mol_type = other DNA
tcagataatgatgattccgcttttgaacagctttgtaaaattcgcactggtgaaacactgacgacaaaagaagtg

SEQ ID NO: 454687 - DNA, 75 bp, synthetic construct
  source 1..75: mol_type = other DNA
atacatgaacaaaaagttcaaaatgacggcacaaaaaacactggatattacgcaacaattacgtgaaaaatataa

SEQ ID NO: 454688 - DNA, 75 bp, synthetic construct
  source 1..75: mol_type = other DNA
aagggtttgttagttccaggacgaataaagaattttcggctaaggttaaactgattgataaagcaaccggaaagt

SEQ ID NO: 454689 - DNA, 75 bp, synthetic construct
  source 1..75: mol_type = other DNA
gacggttgaagagtttattaatgagctttacagcgaactgagcagcatgattacagatgttgacctgggcgagat

SEQ ID NO: 454690 - DNA, 75 bp, synthetic construct
  source 1..75: mol_type = other DNA
gacctcaggtaagccctaccactattacgtcactgctctggcggcaatcactggagcaagacttaatgaggtggc

SEQ ID NO: 454691 - DNA, 75 bp, synthetic construct
  source 1..75: mol_type = other DNA
tacgttcctccgctgtcaccgattcagtcctacgctgatgcgggcggcttgccgaaaagcgaaggcgtgctgccc

SEQ ID NO: 454692 - DNA, 75 bp, synthetic construct
  source 1..75: mol_type = other DNA
aacccgcgattaccaggccgaattaacccaaaaacctggtgaaccactcgtctatggcccatttcagaaagacct

SEQ ID NO: 454693 - DNA, 75 bp, synthetic construct
  source 1..75: mol_type = other DNA
aatttgatgtatcgaccagtttctataccacagatacattatatgatgaaaaacacctggaaatgggtaatggtc

SEQ ID NO: 454694 - DNA, 75 bp, synthetic construct
  source 1..75: mol_type = other DNA
gtgtggactatgaagatagcgatgtaggaattgatactttcgcctgtctggataagtatgaacagtattatggtg

SEQ ID NO: 454695 - DNA, 75 bp, synthetic construct
  source 1..75: mol_type = other DNA
caatgcaccaggatggacaacagacaatccatcagaaaatatctatgcctggatcaaattaccccaaataaatag

SEQ ID NO: 454696 - DNA, 75 bp, synthetic construct
  source 1..75: mol_type = other DNA
gtgaaatttaaatctcgtcctgtagtagatcagacatggaattttggcgtggtaaatgtcctgcaatttgatggt

SEQ ID NO: 454697 - DNA, 75 bp, synthetic construct
  source 1..75: mol_type = other DNA
ggaaagagaacgtcaaagcggtcaagttaacgtgtcagggtaacccggcgtatttgactgaaatccagatttcga

SEQ ID NO: 454698 - DNA, 75 bp, synthetic construct
  source 1..75: mol_type = other DNA
aactaagtgaagtgatgcccggcgcgggtgggcgttcctgcctggaacgttacgaatatgcgaaacacggcgcct

SEQ ID NO: 454699 - DNA, 75 bp, synthetic construct
  source 1..75: mol_type = other DNA
cagcacgatcgaaatcgtaacgaacgggatgaatgtcgcctgcaaaccgaaacgaccaacaaagccgattttctg

SEQ ID NO: 454700 - DNA, 75 bp, synthetic construct
  source 1..75: mol_type = other DNA
gtatctaccacgaccctgtttgtaacggcactacattacaaaaaaatgtcacgtttaacgctcgctttcgcgtat

SEQ ID NO: 454701 - DNA, 75 bp, synthetic construct
  source 1..75: mol_type = other DNA
acagtgaaagactttgctgccactcgcggcgttagcgagcgtctggtctggcaatggcttgatgagggcattctt

SEQ ID NO: 454702 - DNA, 75 bp, synthetic construct
  source 1..75: mol_type = other DNA
gctctcagcaaactcattcttaccacaaccacaccctggcaactgtggcaaagcctttgtgattgataaagtggg

SEQ ID NO: 454703 - DNA, 75 bp, synthetic construct
  source 1..75: mol_type = other DNA
accgatggtataggcttgttaagcgatctggaacgtctgtcttttatccgtcctggtttacgtattctgctcatc

SEQ ID NO: 454704 - DNA, 75 bp, synthetic construct
  source 1..75: mol_type = other DNA
atgggctgcggagcagggcatgccagctttgtcgctgcgcagaacgtgagcgcggtggtggcgtatgacttatct

SEQ ID NO: 454705 - DNA, 75 bp, synthetic construct
  source 1..75: mol_type = other DNA
cgattatctgttcagtgcactgcgtcggctggaaatccgggccgtgacggagaacggtgcagatgctgacagggt

SEQ ID NO: 454706 - DNA, 75 bp, synthetic construct
  source 1..75: mol_type = other DNA
gatttctccttcaccgttgacgaccgttaccgcgtggacgtgaaaggtgatggtgatggttttggtttatttcac

SEQ ID NO: 454707 - DNA, 75 bp, synthetic construct
  source 1..75: mol_type = other DNA
tggcgtttttatctctgcgagccgggggtgattaccgtggccgatttaccggcgggctgggggttgctgtatgcg

SEQ ID NO: 454708 - DNA, 75 bp, synthetic construct
  source 1..75: mol_type = other DNA
aagccgaccgctgctggtgagccatggtattgcactgggatgcctggtgagtacgattctcggattaccagcatg

SEQ ID NO: 454709 - DNA, 75 bp, synthetic construct
  source 1..75: mol_type = other DNA
ttatcaggaaagcctgtggctggcgtctggctgggtcgttgaaaccgcaggggacatctcgcatctggacgcccc

SEQ ID NO: 454710 - DNA, 75 bp, synthetic construct
  source 1..75: mol_type = other DNA
ggatatgcgcacagctaaagcgtgtcggggtgcagagtttgccgctactgcgggttttatcgccaggaaaaacgc

SEQ ID NO: 454711 - DNA, 75 bp, synthetic construct
  source 1..75: mol_type = other DNA
gttcatttaccctggacagtcagtgcggcaggttgtggctgtctatgcccccggcgacagggactcatacgggtg

SEQ ID NO: 454712 - DNA, 75 bp, synthetic construct
  source 1..75: mol_type = other DNA
agaggaagaagaagaacagtaaccacagaaacataacatcaggaaaaaacattccggacacatcacaaacgggaa

SEQ ID NO: 454713 - DNA, 75 bp, synthetic construct
  source 1..75: mol_type = other DNA
aatggcgctcgtactggacatgacaacccacagcgtggcagtgaaaggaattaaaacggcagaaggctttattga

SEQ ID NO: 454714 - DNA, 75 bp, synthetic construct
  source 1..75: mol_type = other DNA
cgccgagtgatgccagtacgccgccgcgttatatgcacgttctgtgtggtctggtctgcaatgccttcggtgtta

SEQ ID NO: 454715 - DNA, 75 bp, synthetic construct
  source 1..75: mol_type = other DNA
gtgtcgagtgttacatctccggcgaataccgggcttctggttcactcaaacgttacgttcgtttttatggtcctg

SEQ ID NO: 454716 - DNA, 75 bp, synthetic construct
  source 1..75: mol_type = other DNA
attcgccagcatgagcgggataccgggggcggtgatggtgggctcaccaccgctgaacgtcagcgtctgaaagag

SEQ ID NO: 454717 - DNA, 75 bp, synthetic construct
  source 1..75: mol_type = other DNA
gctatgaagcgggtgtctatagccagaaactcactcttgaacgtgatgccgaaatgttgaaaaccatgcaggcag

SEQ ID NO: 454718 - DNA, 75 bp, synthetic construct
  source 1..75: mol_type = other DNA
agctggacgacctcacgctgccgctactggcgtggttatcagaaaatcagccacagttgttgctcaatccggagc

SEQ ID NO: 454719 - DNA, 75 bp, synthetic construct
  source 1..75: mol_type = other DNA
atgaccgtcaagcaaactgtcgaaatcactaacaagctgggcatgcatgcccggcctgctatgaaactctttgaa

SEQ ID NO: 454720 - DNA, 75 bp, synthetic construct
  source 1..75: mol_type = other DNA
tatggttctggaaagtcaggacgaatatgactcacaatgggcggcaatttgttccattgctccaaagactggctg

SEQ ID NO: 454721 - DNA, 75 bp, synthetic construct
  source 1..75: mol_type = other DNA
tatggttctggaaagtcaggacgaatatgactcacaatgggcgccaatttgttccattgctccaaagagtggctg

SEQ ID NO: 454722 - DNA, 75 bp, synthetic construct
  source 1..75: mol_type = other DNA
attcccggagcagtttgagccgttattcggcttgcgagaagttgatggcagcgagctgacgattgttgaggagtg

SEQ ID NO: 454723 - DNA, 75 bp, synthetic construct
  source 1..75: mol_type = other DNA
tgaccaaatacaacactgaccacgccattcttgatgtggcggagctggacggtttattgacggcggtgttgagtt

SEQ ID NO: 454724 - DNA, 75 bp, synthetic construct
  source 1..75: mol_type = other DNA
agccttgtgccattgtcgcccgatgcctggcaaatgttgagtgcgccgttgcgccagccaggtatttcagcgttg

SEQ ID NO: 454725 - DNA, 75 bp, synthetic construct
  source 1..75: mol_type = other DNA
actggcgtggttatccgaaaatcagccacagttgttgctcaaccctgagcgtaatcaggacatcaaattctccgc

SEQ ID NO: 454726 - DNA, 75 bp, synthetic construct
  source 1..75: mol_type = other DNA
gggaacgcgttcgcattacgcgcagcagtcaggggacaccgcaggcagaacacctgccggagccaaaaccccgcc

SEQ ID NO: 454727 - DNA, 75 bp, synthetic construct
  source 1..75: mol_type = other DNA
gctgtatcctctgtaatttcatcttgttacggtttatgctcatggcgtaaaaaatgtaaaaaagattctttaaga

SEQ ID NO: 454728 - DNA, 75 bp, synthetic construct
  source 1..75: mol_type = other DNA
actggaccattccagaagaaagcacgcgaagtttactctcaattcccggaatggacaccaggtctgtacgaaacc

SEQ ID NO: 454729 - DNA, 75 bp, synthetic construct
  source 1..75: mol_type = other DNA
tagatcaaaccactcaacgttttaacgtgggcctggtggcgatcaccgacgtgcagaacgcccgtgcacagtacg

SEQ ID NO: 454730 - DNA, 75 bp, synthetic construct
  source 1..75: mol_type = other DNA
ttcgccaggcgcaggatggtcacttaccgactctggatttaacggcttctaccgggatttctgacacctcttata

SEQ ID NO: 454731 - DNA, 75 bp, synthetic construct
  source 1..75: mol_type = other DNA
gccgacgctgaatttaaccgcctctaccgggatttctgacacctcttacagtggttcaaaaacccgcggcgcaaa

SEQ ID NO: 454732 - DNA, 75 bp, synthetic construct
  source 1..75: mol_type = other DNA
accagaaccgtcagcagaaccgtgtgcgcattttcgaaagcggtctgcgtttcgtgccagatactcaggcaccgt

SEQ ID NO: 454733 - DNA, 75 bp, synthetic construct
  source 1..75: mol_type = other DNA
gtgagcaagattgactatcaggcactgcgcgaggcggcagagaaagcaacgtggggtgactgggactcatataaa

SEQ ID NO: 454734 - DNA, 75 bp, synthetic construct
  source 1..75: mol_type = other DNA
ttgccagttgatgatgatctgataagcgagcaggaacttaaagatagcggtgttgatattgatgcgctcaacgcc

SEQ ID NO: 454735 - DNA, 75 bp, synthetic construct
  source 1..75: mol_type = other DNA
aacgtattaccattgtcagcaacagcgacatcatcctgataaacgcagtgcccgtgctcagcttgatgactggct

SEQ ID NO: 454736 - DNA, 75 bp, synthetic construct
  source 1..75: mol_type = other DNA
cgaaatacatcagccagcaggagtacgaccaggccattgctgatgctcgccaggccgatgccgccgtgattgccg

SEQ ID NO: 454737 - DNA, 75 bp, synthetic construct
  source 1..75: mol_type = other DNA
tcctgccctcctttattctgatctccgcggctttaatcgccggttgtaacgataagggagaagagaaagctcacg

SEQ ID NO: 454738 - DNA, 75 bp, synthetic construct
  source 1..75: mol_type = other DNA
ccgtgatgattgatcatgaaatccttaacgagcttaaaaagttgcagttcgatattgtgcgccggatgaatgaat

SEQ ID NO: 454739 - DNA, 75 bp, synthetic construct
  source 1..75: mol_type = other DNA
atgatactttggtctctgaaaaaagaaaccgatatccgacgcggaaggcattgtgttttcctgaggcatgttcac

SEQ ID NO: 454740 - DNA, 75 bp, synthetic construct
  source 1..75: mol_type = other DNA
ggggcggtgatggagggctcatcaccgctgaacgtcagcgtctgaaagagccggaacgtgaaaatcgtgaactgc

SEQ ID NO: 454741 - DNA, 75 bp, synthetic construct
  source 1..75: mol_type = other DNA
ccattgagttgctctgtgcgccaggggaaattccctctgcccggttgccgatgagtgacgtgcgcttttattccc

SEQ ID NO: 454742 - DNA, 75 bp, synthetic construct
  source 1..75: mol_type = other DNA
tttcaatctcgataaagaaccctataaaaatagccctgaattacaggggttgatttggaataagttggttgtata

SEQ ID NO: 454743 - DNA, 75 bp, synthetic construct
  source 1..75: mol_type = other DNA
cgtttaaatacactaaatcctccggaaaatttacgtatagcaatagaaaaatttggctggaataaaaaaactatc

SEQ ID NO: 454744 - DNA, 75 bp, synthetic construct
  source 1..75: mol_type = other DNA
taaataattcgcaggagttaaatgattcgcaggatttaaatgattctcaggatttaaatgattctcaggatttaa

SEQ ID NO: 454745 - DNA, 75 bp, synthetic construct
  source 1..75: mol_type = other DNA
cgtgcggttgatatatcaaaaacagagctgtgggggagagttgttgagaaagagtgcggaagatgcaaaggtgtc

SEQ ID NO: 454746 - DNA, 75 bp, synthetic construct
  source 1..75: mol_type = other DNA
agttaaataatcatcataagttaaataatctacagaagttaaataatctacagaagttaaataatatacaggggt

SEQ ID NO: 454747 - DNA, 75 bp, synthetic construct
  source 1..75: mol_type = other DNA
atgagcaaaatatcagatttgaattattctcaacacattacattagccgacaattttaaacaaaaaagtgaagtt

SEQ ID NO: 454748 - DNA, 75 bp, synthetic construct
  source 1..75: mol_type = other DNA
cttactaggcgaaggtggtatacttgaagaaataaatgatctgaaaacgttacatgataccagaattgctagtgg

SEQ ID NO: 454749 - DNA, 75 bp, synthetic construct
  source 1..75: mol_type = other DNA
gatttgggagaagttggttgtatatgtcaatgattttaacttaagcaatcaagaaaaatcacgcttaatactaag

SEQ ID NO: 454750 - DNA, 75 bp, synthetic construct
  source 1..75: mol_type = other DNA
actcgtcaaggacatacagccattatatttccacaatctgattttttgagttttcgttatgaaggtaagtctttt

SEQ ID NO: 454751 - DNA, 75 bp, synthetic construct
  source 1..75: mol_type = other DNA
aaaagcatgcaatattttgatgatactaaaaagataaagcatgcatgctccgtaataaatcatattaatcttcgc

SEQ ID NO: 454752 - DNA, 75 bp, synthetic construct
  source 1..75: mol_type = other DNA
tggtcacgcactgttaagccactgtatgacgctctggtggcgcaatgccacaaggaagagtcaatcgcagacaac

SEQ ID NO: 454753 - DNA, 75 bp, synthetic construct
  source 1..75: mol_type = other DNA
tatggtaatgaagaaaaaacaaatgaaattgtaaaaaaacttccgggttatgtcattaagatttttggtgatgct

SEQ ID NO: 454754 - DNA, 75 bp, synthetic construct
  source 1..75: mol_type = other DNA
ggcgttgcttattcaactgctccataacggctggcgctatcagcaacagagcgccattagtcaggctgatttgct

SEQ ID NO: 454755 - DNA, 75 bp, synthetic construct
  source 1..75: mol_type = other DNA
actggcgatgggtgagtgaatcactacgacagctacgggcaagcgttgatgccttccacactcgcgccagccact

SEQ ID NO: 454756 - DNA, 75 bp, synthetic construct
  source 1..75: mol_type = other DNA
caacagtatggtttacggatctggttcaccgaccccgacaccggtagtattttgcacctttcacgcagttggccg

SEQ ID NO: 454757 - DNA, 75 bp, synthetic construct
  source 1..75: mol_type = other DNA
aggccaaacgtgtcgtcaatatattcaacaattaagtcaggcattatggctgggcggcatcagccagccgccaat

SEQ ID NO: 454758 - DNA, 75 bp, synthetic construct
  source 1..75: mol_type = other DNA
gccttccacgcccgcgcaagccattatcatgccggagaatgcttgtgtcagcttgccgcattaaacagtcgatta

SEQ ID NO: 454759 - DNA, 75 bp, synthetic construct
  source 1..75: mol_type = other DNA
aattccctctgcccgcttaccgatgagcgatgtgcgtttttattcccgcagcagcattcgtttcgcccgttgtga

SEQ ID NO: 454760 - DNA, 75 bp, synthetic construct
  source 1..75: mol_type = other DNA
tgtatttttctggtgaaccggcaaagattgctgagattaaacgactggtcagcggtgcagtcacaccgctttatc

SEQ ID NO: 454761 - DNA, 75 bp, synthetic construct
  source 1..75: mol_type = other DNA
aaataatctacagaagttaaataatatacaggagttaaataatatacaggagttaaataattcgcaggagttaaa

SEQ ID NO: 454762 - DNA, 75 bp, synthetic construct
  source 1..75: mol_type = other DNA
aaaaaatatatttaatccaaaggctatttagtaatgttgagtctatatttaataaagtacctgtcagcattttag

SEQ ID NO: 454763 - DNA, 75 bp, synthetic construct
  source 1..75: mol_type = other DNA
ggcgaatgacctctccgcggtcggtttttatcggctggcacatgtgttgggacaatttcgtaatacagaaagcga

SEQ ID NO: 454764 - DNA, 75 bp, synthetic construct
  source 1..75: mol_type = other DNA
cgatgccacccgcaaacgcgcacaggcgttggtcgctaaaggcatcaccattgagttgttctgtacgccgggcga

SEQ ID NO: 454765 - DNA, 75 bp, synthetic construct
  source 1..75: mol_type = other DNA
acggctgtatgctgcgcgcttatcgccggcatattgtcgatgcgatgttgcactgccatgaacgcagcaccttta

SEQ ID NO: 454766 - DNA, 75 bp, synthetic construct
  source 1..75: mol_type = other DNA
caccatgccgagcgtgagtttggtgaatccaaatacagctttatgcgcctgattaatttgatgtacgacctggtg

SEQ ID NO: 454767 - DNA, 75 bp, synthetic construct
  source 1..75: mol_type = other DNA
gccgacgccgttaagcattgatgaaaaagcgtattaccgcgagaagataaaacgtctgctaaaagaacgtaatgc

SEQ ID NO: 454768 - DNA, 75 bp, synthetic construct
  source 1..75: mol_type = other DNA
ccgttcgccgcattgcggcattgtcactggtttcgctctggctggcaggttgtacagatacgtcgaatccaccag

SEQ ID NO: 454769 - DNA, 75 bp, synthetic construct
  source 1..75: mol_type = other DNA
cagtagaggaaatcgaatcaaaccataaccgctatcgctggactgtcgaagagtgcagggccatcaaggcggagt

SEQ ID NO: 454770 - DNA, 75 bp, synthetic construct
  source 1..75: mol_type = other DNA
atgatactttggtctttgaaaaaagaaaccgatatccgtcgaggaaggcattgtgttttcctgaggcatgttcac

SEQ ID NO: 454771 - DNA, 75 bp, synthetic construct
  source 1..75: mol_type = other DNA
gtatgctgagtctgctcggcagcattattgcgattggaggttttagcattgcggtgctgctggtgattttacgcc

SEQ ID NO: 454772 - DNA, 75 bp, synthetic construct
  source 1..75: mol_type = other DNA
cgatgaaggttacgacgtggtagggactgtacgccagaaccgccaggacagctggtttcgtaaaacagcttcgaa

SEQ ID NO: 454773 - DNA, 75 bp, synthetic construct
  source 1..75: mol_type = other DNA
taccgatttgcatttcatttgatactgctgaaaaacgccgatacgcaacttatttgatactaaatcggcgctttt

SEQ ID NO: 454774 - DNA, 75 bp, synthetic construct
  source 1..75: mol_type = other DNA
ctcaaaaattaaaagaacgcaatgaaactcttgaagagtacaattcccacagagcaactcacgctaacgacaacg

SEQ ID NO: 454775 - DNA, 75 bp, synthetic construct
  source 1..75: mol_type = other DNA
ccttttcttttattagcacttcctagttgtgctatgtttttggctcactggataaaatcgatagggtttaaatgg

SEQ ID NO: 454776 - DNA, 75 bp, synthetic construct
  source 1..75: mol_type = other DNA
tcttattcacttatccctgctgaaaaactggaatattggagacagaaagttggtgataagttttttctttttata

SEQ ID NO: 454777 - DNA, 75 bp, synthetic construct
  source 1..75: mol_type = other DNA
aaacatactatcctgatacgtttggtggcatagaacaggttatataccagttaagtgaatccggacttaacttcg

SEQ ID NO: 454778 - DNA, 75 bp, synthetic construct
  source 1..75: mol_type = other DNA
tggtatttgtgggatgttcggcgctgatggcaatggtctgctacctcttcgtggttggtgacattaaacgtatgg

SEQ ID NO: 454779 - DNA, 75 bp, synthetic construct
  source 1..75: mol_type = other DNA
cgtgaactgccggactggcgcattgacgacctgatgatctcattttccgtacccggcggcggcgtcggcccgcat

SEQ ID NO: 454780 - DNA, 75 bp, synthetic construct
  source 1..75: mol_type = other DNA
aatctacgatgcgctgaaacaaggtgatgtgctggtgcgcctgggtggtctgcgcgtattgcgcattggcgacga

SEQ ID NO: 454781 - DNA, 75 bp, synthetic construct
  source 1..75: mol_type = other DNA
atgatctgatgatctctttttctgtacctggcggcggcgtcggcccgcatctcgatcagtacgacgtgtttatca

SEQ ID NO: 454782 - DNA, 75 bp, synthetic construct
  source 1..75: mol_type = other DNA
ctcgatcagtacgacgtgtttatcattcagggtaccggtcgtcgtcgctggcgagtgggcgaaaagctgcaaatg

SEQ ID NO: 454783 - DNA, 75 bp, synthetic construct
  source 1..75: mol_type = other DNA
ttcagggcaccggtcgtcgtcgttggcgggtgggtgaaaagctgcagatgaagcaacactgcccgcatccggatc

SEQ ID NO: 454784 - DNA, 75 bp, synthetic construct
  source 1..75: mol_type = other DNA
tgtgtatgccaatggcgagaagatagattccccgcatcgtccggcgctgaatgcactcgccagcaatattgtgct

SEQ ID NO: 454785 - DNA, 75 bp, synthetic construct
  source 1..75: mol_type = other DNA
gatgcgtaatggaaaaatactggctacgggagaaaacgtctccctggggacagtaaataaaagcaaagtacctct

SEQ ID NO: 454786 - DNA, 75 bp, synthetic construct
  source 1..75: mol_type = other DNA
ggacatatacattacctccggtatgactgaagctactgctgataacaaatacgttagcaacgttcagcttggtgc

SEQ ID NO: 454787 - DNA, 75 bp, synthetic construct
  source 1..75: mol_type = other DNA
cgtctggcccgtggttatcttggtctggggacgcttgccacaaaaaacagtcttggtcccggtgacgttaatgcc

SEQ ID NO: 454788 - DNA, 75 bp, synthetic construct
  source 1..75: mol_type = other DNA
atgaggagacggagtaatgtattttgtcgacaacaattcaggtgtgaccgatatgccaccaactgggccccctct

SEQ ID NO: 454789 - DNA, 75 bp, synthetic construct
  source 1..75: mol_type = other DNA
ctgctgaatattctggctgaagccaatatccagccggataaggcgcagttaaaccagcttacgctgtccattaaa

SEQ ID NO: 454790 - DNA, 75 bp, synthetic construct
  source 1..75: mol_type = other DNA
aacgtcggtttacgggaaacggtaaacagggcggcgaatgccctgccatcggacggcaccgccgttgccgcgaac

SEQ ID NO: 454791 - DNA, 75 bp, synthetic construct
  source 1..75: mol_type = other DNA
atgttcgtaatgtgcaacttggtgctcagagccgccactctcctgcgggtaatgaagtcacctgggattataaaa

SEQ ID NO: 454792 - DNA, 75 bp, synthetic construct
  source 1..75: mol_type = other DNA
accctggtcatcgccgaccacaacaaggcgctggcgatgggcggcatctttggtggcgaacactctggcgtgaat

SEQ ID NO: 454793 - DNA, 75 bp, synthetic construct
  source 1..75: mol_type = other DNA
gcgaatgggtgaacccggcgattaacagcgatgcgttggcgaatcaaatcactatggcgggcctggaagttgacg

SEQ ID NO: 454794 - DNA, 75 bp, synthetic construct
  source 1..75: mol_type = other DNA
gtctcaccgttatgagcgtggcgttgatccggcactgcagcacaaagcgatggaacgtgcgacccgtctgctgat

SEQ ID NO: 454795 - DNA, 75 bp, synthetic construct
  source 1..75: mol_type = other DNA
tgaccgcacatatgcccggaacatgggaaagctgggatctgaatctggggggcggcaatgttcttaccggaatta

SEQ ID NO: 454796 - DNA, 75 bp, synthetic construct
  source 1..75: mol_type = other DNA
tacgatggcagggcaaccggtcatggttttcgtcacaccatgagtaccattctgcacgaacagggctttaattct

SEQ ID NO: 454797 - DNA, 75 bp, synthetic construct
  source 1..75: mol_type = other DNA
agcgaccattggtgctgttctgccgggtgatttcaaaattaaagcggcgaaactgcgtggtgaaccgtctgaagg

SEQ ID NO: 454798 - DNA, 75 bp, synthetic construct
  source 1..75: mol_type = other DNA
ggaaaagtggcgtttgggctttccgttgagcatgtcgaacacgcgattccgatgctgattaaccatctgaaataa

SEQ ID NO: 454799 - DNA, 75 bp, synthetic construct
  source 1..75: mol_type = other DNA
gttatcaacacatagcatcagccgacaatgttaaaccaaaaaatgaagtcttaaatacctggtgtgtgggaatga

SEQ ID NO: 454800 - DNA, 75 bp, synthetic construct
  source 1..75: mol_type = other DNA
caataaggcactgcgggtgatgggttacgacacgaaaaaggatatctgcggtcacggcttccgggcaatggcatg

SEQ ID NO: 454801 - DNA, 75 bp, synthetic construct
  source 1..75: mol_type = other DNA
atgggcgcgattgttgccagacaggacaattttcacaagacgtcacagacggagcgcttactcacatggagaggg

SEQ ID NO: 454802 - DNA, 75 bp, synthetic construct
  source 1..75: mol_type = other DNA
gttcgttcaagcagggcaatctgtgagcttgatgatcgcgtttacccacgaaaatactggttgcatggcctgaac

SEQ ID NO: 454803 - DNA, 75 bp, synthetic construct
  source 1..75: mol_type = other DNA
tgattttgctaagtggtatttctatcaattacttaaagattatgagggcgaacagctgtatcttaatgagttagg

SEQ ID NO: 454804 - DNA, 75 bp, synthetic construct
  source 1..75: mol_type = other DNA
tgacaatgaaattaatgacatcaaagttaacctgtctcatattcttattgattccttagatgatgcaaaagttaa

SEQ ID NO: 454805 - DNA, 75 bp, synthetic construct
  source 1..75: mol_type = other DNA
tgcagacggccaccggagagggacttttcctgcggcaggatatgaatctggcagatgtggtggataaggacgagg

SEQ ID NO: 454806 - DNA, 75 bp, synthetic construct
  source 1..75: mol_type = other DNA
aggctggcaaatgcccatacaattaatggggttccttttgacggaacacaggacatcaacatcacatccgggatg

SEQ ID NO: 454807 - DNA, 75 bp, synthetic construct
  source 1..75: mol_type = other DNA
gcagcaaacagactcgccaccccaagaaatattaatggtgttccttttgacggaacgctggatatcaacatcacg

SEQ ID NO: 454808 - DNA, 75 bp, synthetic construct
  source 1..75: mol_type = other DNA
aagtacaggatgtaggtaagaatacggcagataacgtcggcggcgtgtattaccggccgttgcagtatctgttaa

SEQ ID NO: 454809 - DNA, 75 bp, synthetic construct
  source 1..75: mol_type = other DNA
agatatcactatctcatcaggaacagtaaccgccataacactggggtcggtgaccgcacatatgcccggaacatg

SEQ ID NO: 454810 - DNA, 75 bp, synthetic construct
  source 1..75: mol_type = other DNA
gcgtggcgaatatgcctgcgctggcaccggcgcagagtaataccaccacctggtttaccgaaggtgacggacaaa

SEQ ID NO: 454811 - DNA, 75 bp, synthetic construct
  source 1..75: mol_type = other DNA
acattcctgatggctatgaagtcactggtgattttgaatttaacggcgggtttgacgccatgcgccaactgttat

SEQ ID NO: 454812 - DNA, 75 bp, synthetic construct
  source 1..75: mol_type = other DNA
ctcgaaccattggcatgttgattactgccagtaccaatcctttttattctgaactggtgcgtggcgttgaacgca

SEQ ID NO: 454813 - DNA, 75 bp, synthetic construct
  source 1..75: mol_type = other DNA
cacacagacatttattgatgtgcagtcagccgatcatagcaggaagattaagaatccggcagcttctgccagaac

SEQ ID NO: 454814 - DNA, 75 bp, synthetic construct
  source 1..75: mol_type = other DNA
gcgcgtagcctcaaacttaatcagacacgaactattggcatgttgattactgccagtaccaatcctttctactct

SEQ ID NO: 454815 - DNA, 75 bp, synthetic construct
  source 1..75: mol_type = other DNA
ccactatccatcaaccaaaagatgaactgggggagctggcgattgatgtactcatccatcggataacccagccga

SEQ ID NO: 454816 - DNA, 75 bp, synthetic construct
  source 1..75: mol_type = other DNA
cacataccattggcatgttgatcactgccagtaccaatcctttctattctgaactggtgcgtggcgttgaacgca

SEQ ID NO: 454817 - DNA, 75 bp, synthetic construct
  source 1..75: mol_type = other DNA
gaattgtataacgacgtggtatgggctccgttcaacacactgcacaataaaattaatccgtataaggaaaactga

SEQ ID NO: 454818 - DNA, 75 bp, synthetic construct
  source 1..75: mol_type = other DNA
ctgaatgaggttaagagtattcttgaaaaaggctatgaggatgcgcaaaaagcattcgcagataacgcgaataaa

SEQ ID NO: 454819 - DNA, 75 bp, synthetic construct
  source 1..75: mol_type = other DNA
atgaaaactaaagtcattcttagccagcaaatggcgagtgcaattattgccgcaggtcaggaagaggcgcagaaa

SEQ ID NO: 454820 - DNA, 75 bp, synthetic construct
  source 1..75: mol_type = other DNA
aatgaaagtgttactatggacgtcacttatgaaagctcaggctctggcgactggaaaactgatggtttatttgca

SEQ ID NO: 454821 - DNA, 75 bp, synthetic construct
  source 1..75: mol_type = other DNA
agattatggctggcgaagagttcggtgatgtcgaagcgattttccacgaaggcgcgtgctcttccaccaccgagt

SEQ ID NO: 454822 - DNA, 75 bp, synthetic construct
  source 1..75: mol_type = other DNA
gggacggcaagtatatgatggataacaactatcaatactccaaggagctgctgcactactgcctagagcgcgaaa

SEQ ID NO: 454823 - DNA, 75 bp, synthetic construct
  source 1..75: mol_type = other DNA
ttcgcctctgcagcacatcttgctgcttatgctggccttgcaccgataacccggcgttccggctcgtcaattcgt

SEQ ID NO: 454824 - DNA, 75 bp, synthetic construct
  source 1..75: mol_type = other DNA
gtacgccagcatgagcgggataccggaggcggtgatggcgggctcaccaccactgaacgtcagcgtctgaaagaa

SEQ ID NO: 454825 - DNA, 75 bp, synthetic construct
  source 1..75: mol_type = other DNA
ggcggtgaagggatcaaccagtggtataacgtcactcttaccgagggccgtaaccgtgaggttcgtcgtctttgg

SEQ ID NO: 454826 - DNA, 75 bp, synthetic construct
  source 1..75: mol_type = other DNA
ggcggcgtggtcttcggctgcttcgcagggatgacctactggtggcctaaagcgttcggtttcaaactgaacgaa

SEQ ID NO: 454827 - DNA, 75 bp, synthetic construct
  source 1..75: mol_type = other DNA
ctggaacgtgaaaatcgtgaactgagccgcagtaacgatatccttcgccaggcttccacttattttgcgaaggcg

SEQ ID NO: 454828 - DNA, 75 bp, synthetic construct
  source 1..75: mol_type = other DNA
atgatactttggtctgtgaaaaaagaaaccgatatccggcgaggaaggcattgtgttttcctgaggcatgttcac

SEQ ID NO: 454829 - DNA, 75 bp, synthetic construct
  source 1..75: mol_type = other DNA
ttgttgaagcaccggcgccgtcccgcccgatagagcgtggtatcgcgggggccccggattacttgcccgcgtgtt

SEQ ID NO: 454830 - DNA, 75 bp, synthetic construct
  source 1..75: mol_type = other DNA
gcgttgttcctgtcagccttcgctgcgctcagggatccgatctctaaagcttactacacacgcaaaataaaccaa

SEQ ID NO: 454831 - DNA, 75 bp, synthetic construct
  source 1..75: mol_type = other DNA
tcgcctctgccgcacatctcgctgcttatgctggccttgcgccggtaactcggcgatccggctcgtcaatacgcg

SEQ ID NO: 454832 - DNA, 75 bp, synthetic construct
  source 1..75: mol_type = other DNA
tcgatcttctccagcgatatccctcaccagaaaaactcgcttcgctgggtgagaagaagctggcagcccagctct

SEQ ID NO: 454833 - DNA, 75 bp, synthetic construct
  source 1..75: mol_type = other DNA
tcgttaccattctgaagatgcgcgcaccgggcatgaccatgttcaagatgccggtatttacctgggcatcactgt

SEQ ID NO: 454834 - DNA, 75 bp, synthetic construct
  source 1..75: mol_type = other DNA
ggcagcggtggcggtcatcggttcgctgattattttcactctgcgtgtaaatcgtactgttgcgcagaccgacgt

SEQ ID NO: 454835 - DNA, 75 bp, synthetic construct
  source 1..75: mol_type = other DNA
ttcccggcacgaatgccgctgccgtagtactgccacgtctggcactccagctcatcacgctgcgtaagcaaagag

SEQ ID NO: 454836 - DNA, 75 bp, synthetic construct
  source 1..75: mol_type = other DNA
tgaggaaaatagcgcaaaaatggtgttatcccgtgcgatagataatgccataggcacatggagaaaagacaatcc

SEQ ID NO: 454837 - DNA, 75 bp, synthetic construct
  source 1..75: mol_type = other DNA
tagaggttttgattatttcgttttgttgcaacctacttcaccatttcgaaataccaagcatatacaagaatctat

SEQ ID NO: 454838 - DNA, 75 bp, synthetic construct
  source 1..75: mol_type = other DNA
acagattctatagaatataaatatattgccgagcagtacggtgctgaagttttgatacgtaatgagcggcttgca

SEQ ID NO: 454839 - DNA, 75 bp, synthetic construct
  source 1..75: mol_type = other DNA
gaaggtgagttgtgtacccgtaacgatccggaagggcgtccaacggtgtttgaccgtctgccaaagctgcgtggc

SEQ ID NO: 454840 - DNA, 75 bp, synthetic construct
  source 1..75: mol_type = other DNA
cagctcgttctgggtcaaaaggattacccaataaaaatattttaatgctttttgataagccgttaattgcatata

SEQ ID NO: 454841 - DNA, 75 bp, synthetic construct
  source 1..75: mol_type = other DNA
atgtccaggatatgattattttgtgcttctacaaccaacatcaccatttcgtaattataagcatattaagaatgc

SEQ ID NO: 454842 - DNA, 75 bp, synthetic construct
  source 1..75: mol_type = other DNA
cgcgttagcaacaaaaaaactgaaacaggaactgctaataaaaaaaattaagcatcgtattgctgaaaaatttag

SEQ ID NO: 454843 - DNA, 75 bp, synthetic construct
  source 1..75: mol_type = other DNA
aaaagcatccactaaattgaaaaccccatctcttcaaaacaccagagcggtgaaccgtgctcccctacatatcag

SEQ ID NO: 454844 - DNA, 75 bp, synthetic construct
  source 1..75: mol_type = other DNA
catgcccgtacacgtattacagatgatcgcattggagaaacatttgatttcagccacagaacagatcttcatggt

SEQ ID NO: 454845 - DNA, 75 bp, synthetic construct
  source 1..75: mol_type = other DNA
agaagctttacgataacacatcttgctgaacccgaagagagcgttatccctgactacccggcaacagtagaacag

SEQ ID NO: 454846 - DNA, 75 bp, synthetic construct
  source 1..75: mol_type = other DNA
ataacgctgattggacattcaatctttgattactgggatattgaatgtttaaatggccaaagagtcaataattta

SEQ ID NO: 454847 - DNA, 75 bp, synthetic construct
  source 1..75: mol_type = other DNA
agaaaagttcgaattatgttatccaataacgctgattggacattcaatctttgattactgggatattgaatgttt

SEQ ID NO: 454848 - DNA, 75 bp, synthetic construct
  source 1..75: mol_type = other DNA
ataataaccccaatgcacatatttattttttagcaactccaccagttagagacagaatagatagatccaatagtt

SEQ ID NO: 454849 - DNA, 75 bp, synthetic construct
  source 1..75: mol_type = other DNA
atagtaaatataatcgaaactcaatagtagaatatcatccgaatggagctatatttatagctaataagcagcatt

SEQ ID NO: 454850 - DNA, 75 bp, synthetic construct
  source 1..75: mol_type = other DNA
gggcagacgatcaaaaaatcgttggtcaggcagatccggtagcgtgggtcagtttgcaggatattcagggtaaag

SEQ ID NO: 454851 - DNA, 75 bp, synthetic construct
  source 1..75: mol_type = other DNA
gaggggcgtttttagggctgttgttggtttctgcctgcgcatcagttttcgctgccaataatgaaaccagcaagt

SEQ ID NO: 454852 - DNA, 75 bp, synthetic construct
  source 1..75: mol_type = other DNA
atcttttatccgttctgctcatccgctggcgaaggatgtcattctttcccttatttctctcgactacgacgatac

SEQ ID NO: 454853 - DNA, 75 bp, synthetic construct
  source 1..75: mol_type = other DNA
gatgatattattgaaaaaacgaagaagagtattgatcaaagtcagcatagatacatagattttgaagaggttaga

SEQ ID NO: 454854 - DNA, 75 bp, synthetic construct
  source 1..75: mol_type = other DNA
agtgtttcaaaatcactagcaaaaggctttgcaaggaaaaagataaaagatattacaggaatagatattgaataa

SEQ ID NO: 454855 - DNA, 75 bp, synthetic construct
  source 1..75: mol_type = other DNA
tggttcggtgctgttggatgaaataggtgagatgtcaccacggatgcaggcgaaattactgcgtttccttaatga

SEQ ID NO: 454856 - DNA, 75 bp, synthetic construct
  source 1..75: mol_type = other DNA
ccggcgaagttttcttaaatattgcagtctggctgccacgtcgctgggattaggcgcggggatggcaccgaagat

SEQ ID NO: 454857 - DNA, 75 bp, synthetic construct
  source 1..75: mol_type = other DNA
gagctgaatgcggccggcgaactgggtgaccgggcatacgatctcgatacctacagtcactgtattacggtgctg

SEQ ID NO: 454858 - DNA, 75 bp, synthetic construct
  source 1..75: mol_type = other DNA
aaatgaatttgatagtgtaagtgatataactttaattggacactcgctgtttgattattgggacgtaaaaaaaat

SEQ ID NO: 454859 - DNA, 75 bp, synthetic construct
  source 1..75: mol_type = other DNA
tgccgccggaacccaggcggaagaagtctttgaagacatcatcacgcaatacaatggcaaatatatcctcgcagt

SEQ ID NO: 454860 - DNA, 75 bp, synthetic construct
  source 1..75: mol_type = other DNA
tgcctgggcgctggagaataaaccgcgcattccggtggtgtggatccacggtctggaatgcacctgctgtaccga

SEQ ID NO: 454861 - DNA, 75 bp, synthetic construct
  source 1..75: mol_type = other DNA
tggctgcctgggctgttctgaaaatggtttctgggatcgcggttcgttctatagccgcgtggtcgatattccgca

SEQ ID NO: 454862 - DNA, 75 bp, synthetic construct
  source 1..75: mol_type = other DNA
gctacggcacaaaagggtactcactgttaagtgagcaggctgataagccgttaatggagacgcagaattacggaa

SEQ ID NO: 454863 - DNA, 75 bp, synthetic construct
  source 1..75: mol_type = other DNA
cagccttattccggcatgacgggttacaacgggatcattgctcgcctgcagcaggcaatcagtgaccccggcgtt

SEQ ID NO: 454864 - DNA, 75 bp, synthetic construct
  source 1..75: mol_type = other DNA
cagccttattccgggatgacgggttacaacgggatcatcgctcgcctgcagcaggccatcagtgaccccggcgtc

SEQ ID NO: 454865 - DNA, 75 bp, synthetic construct
  source 1..75: mol_type = other DNA
atgaattcactacgtccggaattattagaactcacgccgcaggccctgacggcgttaagcaatgccggttttgtt

SEQ ID NO: 454866 - DNA, 75 bp, synthetic construct
  source 1..75: mol_type = other DNA
atgaatattattgtgtttgtaacctgctgttatcgcgatgaaattaccgttcagttttttcggttgacgcggact

SEQ ID NO: 454867 - DNA, 75 bp, synthetic construct
  source 1..75: mol_type = other DNA
ctggtaacaaaatctattccttccaactcaatatatataaacgaaataactcccgttataagacaaaaaaaggcg

SEQ ID NO: 454868 - DNA, 75 bp, synthetic construct
  source 1..75: mol_type = other DNA
cattcaaagtggaagaagggaagatcgttgcttatgacgcttccggcaacaaaatttattcccgcgcgaagccag

SEQ ID NO: 454869 - DNA, 75 bp, synthetic construct
  source 1..75: mol_type = other DNA
gatgacgaatcgataacacagatatttggtgggcatgatgaaaagtttatgcatctttatcatatcgatgaatat

SEQ ID NO: 454870 - DNA, 75 bp, synthetic construct
  source 1..75: mol_type = other DNA
atggataccctctctgccgcatatcagttcaccgctgatgcattccggcactttattatccggacactgacggac

SEQ ID NO: 454871 - DNA, 75 bp, synthetic construct
  source 1..75: mol_type = other DNA
catcaccgtcacagtgagcgtcgataactatctctcatggatggatattgccgtatccggtctcccggaattacc

SEQ ID NO: 454872 - DNA, 75 bp, synthetic construct
  source 1..75: mol_type = other DNA
atgctgaataatagagatatgaatattaatgaacttaaagactgtattcactatgaagtaatcggtagcgagcgt

SEQ ID NO: 454873 - DNA, 75 bp, synthetic construct
  source 1..75: mol_type = other DNA
cagagttgctggcgaatgacctcaccgcggtgggtttttatcggctggcacatgtgttgggacaatttcgtaata

SEQ ID NO: 454874 - DNA, 75 bp, synthetic construct
  source 1..75: mol_type = other DNA
tcagaatacttgagcgtcaccagtggaaaggcatggactttgccactcaggcggaatccatccgcaaactcaccg

SEQ ID NO: 454875 - DNA, 75 bp, synthetic construct
  source 1..75: mol_type = other DNA
aataattctcaggacttaaataactcgcaggtgagttgtaaaggttcagttgattctacgattacggatttatta

SEQ ID NO: 454876 - DNA, 75 bp, synthetic construct
  source 1..75: mol_type = other DNA
gagttaaataattcgcaggagctaaataattcgcaggagctaaataattcgcaggggttaaatgattcgcaggag

SEQ ID NO: 454877 - DNA, 75 bp, synthetic construct
  source 1..75: mol_type = other DNA
tggttggcggcggagcggtagcgggtacggtgctgtggaataaatacaaagataaaattcgcgcggcgcatcagg

SEQ ID NO: 454878 - DNA, 75 bp, synthetic construct
  source 1..75: mol_type = other DNA
actcattgagcaggcaattgaacaaccgctggatccgcagcgcctggcgaacggggttcgtaatgaagaagaggc

SEQ ID NO: 454879 - DNA, 75 bp, synthetic construct
  source 1..75: mol_type = other DNA
atgatactttggtctctgaaaaaagaaaccgatatccgccgaggaaggcattgtgttttcctgaggcatgttcac

SEQ ID NO: 454880 - DNA, 75 bp, synthetic construct
  source 1..75: mol_type = other DNA
ggcaaatgttgagtgcgccgttgcgccagccgggcattgtggctttgcgtgaatatttacgccagcgtccccccg

SEQ ID NO: 454881 - DNA, 75 bp, synthetic construct
  source 1..75: mol_type = other DNA
catgtgttgggacaatttcgtaatacagaaagcgaggcacgggtagaagcaatgaataacggtgttttgctttgc

SEQ ID NO: 454882 - DNA, 75 bp, synthetic construct
  source 1..75: mol_type = other DNA
tgatgacagcaaagaaagagagtgttggcttgttattaataaccctttagcaaccgtaaaactttgtgataataa

SEQ ID NO: 454883 - DNA, 75 bp, synthetic construct
  source 1..75: mol_type = other DNA
atatgaaaattaatgatttttacttgccattgttgtcagtcataggaaccggtcgcctctatattacgcctgaag

SEQ ID NO: 454884 - DNA, 75 bp, synthetic construct
  source 1..75: mol_type = other DNA
gcagcattcgtttcgcccgttgtgattgtattgaaggcacactttgcgaacatgtcgtactggcagtacaggcct

SEQ ID NO: 454885 - DNA, 75 bp, synthetic construct
  source 1..75: mol_type = other DNA
cagcactgaaggaaaaactgcgcacgcaggacggcgatccgcagaaccggttcaccgcaacgggcgcagcctccg

SEQ ID NO: 454886 - DNA, 75 bp, synthetic construct
  source 1..75: mol_type = other DNA
gtaaaacattccgcgtggccgtttccggtcccaccgcagacggtcgcgaaatcagtgccgcagatttgcgcgcgg

SEQ ID NO: 454887 - DNA, 75 bp, synthetic construct
  source 1..75: mol_type = other DNA
aaagcggatgacgccagtttctcccgtattcaggaagcggtggaaggcgtcgcaacgtcacaggccgacattatc

SEQ ID NO: 454888 - DNA, 75 bp, synthetic construct
  source 1..75: mol_type = other DNA
aggaagcggtggaaggtgtcgcaacgtcacaggccgacattatcgaccgttttaatgcgctggaaacccgccatc

SEQ ID NO: 454889 - DNA, 75 bp, synthetic construct
  source 1..75: mol_type = other DNA
ctcttataaatttctacttgttatacatccaacctatattgggggtgttccttataagtacaggtttgtgggggt

SEQ ID NO: 454890 - DNA, 75 bp, synthetic construct
  source 1..75: mol_type = other DNA
atgggttaggcgcggtggggttatatctggcggcgatggccggactgacgttaattgccctgctgttaacgcatg

SEQ ID NO: 454891 - DNA, 75 bp, synthetic construct
  source 1..75: mol_type = other DNA
acgtaaaaccacgctggttgcctcattgctcacgatggggatttcgacagtagtgattggtctgctgccaggcta

SEQ ID NO: 454892 - DNA, 75 bp, synthetic construct
  source 1..75: mol_type = other DNA
accgcatttaacgcgagatgtcgtcgatgccgctgtggcgttgcgttccaatgaagaaattgaggccatgtttaa

SEQ ID NO: 454893 - DNA, 75 bp, synthetic construct
  source 1..75: mol_type = other DNA
tctgaaccaattgggcaacgctataaagcgacagaagcattatttaagtatgtcgcggttgatcctgaaggaaaa

SEQ ID NO: 454894 - DNA, 75 bp, synthetic construct
  source 1..75: mol_type = other DNA
aacgtcagcgtctgaaagagctggaacgtgaaaatcgtgaactgcgccgcagcaacaatatccttcgccaggctt

SEQ ID NO: 454895 - DNA, 75 bp, synthetic construct
  source 1..75: mol_type = other DNA
caccgaccgcatgaaaaacatgattgctgacgggaaaaaagtgtattcgagcattgaggtgttgcctgagctgga

SEQ ID NO: 454896 - DNA, 75 bp, synthetic construct
  source 1..75: mol_type = other DNA
atgatactttggtctgtgaaaaaagaaaccgatatccgacggggaaggcattgtgttttcctgaggcatgttcac

SEQ ID NO: 454897 - DNA, 75 bp, synthetic construct
  source 1..75: mol_type = other DNA
cgaagcggcaagcacctgacgcaggtaacgccagcaggacaagaaataattcgtatcgctcgtgaagtcctgtcg

SEQ ID NO: 454898 - DNA, 75 bp, synthetic construct
  source 1..75: mol_type = other DNA
gatcaggtacgcattcctgaggcacaaaccattctttcacgttatccgcatcaactctctggcgggatgcgccag

SEQ ID NO: 454899 - DNA, 75 bp, synthetic construct
  source 1..75: mol_type = other DNA
tgaagtgtgggtgaaaaaagtggcgtccgaaccgattgggcaacgctataaagcgacagaagcgttatttaagta

SEQ ID NO: 454900 - DNA, 75 bp, synthetic construct
  source 1..75: mol_type = other DNA
atgatcggcggccgcttcggtggttcgaaattcatctccgagaagatggcgatcccggctgagttcgtgcgctcc

SEQ ID NO: 454901 - DNA, 75 bp, synthetic construct
  source 1..75: mol_type = other DNA
cgcctgagctggcagagtttcggcgcagtggcagcccgttcgctgttactggtactgatcagcttctggctggta

SEQ ID NO: 454902 - DNA, 75 bp, synthetic construct
  source 1..75: mol_type = other DNA
tctccttaaccccctgttctggccgttttcttacaacaaaagccctttgtatcagcctgttacgctttgccatca

SEQ ID NO: 454903 - DNA, 75 bp, synthetic construct
  source 1..75: mol_type = other DNA
attcacggcacagcaacgtcaggcggtgatgacgttcaacagtgtccagggtgaagcaccgcttatctccgaagc

SEQ ID NO: 454904 - DNA, 75 bp, synthetic construct
  source 1..75: mol_type = other DNA
tccgaaccgattgggcaacgctataaagcgacagaagcgttatttaagtatgtcgctgttgatcctgaaggaaag

SEQ ID NO: 454905 - DNA, 75 bp, synthetic construct
  source 1..75: mol_type = other DNA
gcggcgatgaccgggctggtgccggaagatttagctgaaatggatctggcggattaccaggcattgcagaaacga

SEQ ID NO: 454906 - DNA, 75 bp, synthetic construct
  source 1..75: mol_type = other DNA
gccgtgaagtgattgaacttagtgagcagacttccacgcaaatgcaacgcgtacgcggcgcggatatggcgatga

SEQ ID NO: 454907 - DNA, 75 bp, synthetic construct
  source 1..75: mol_type = other DNA
tgtcgaaataggcccccgacgcgcgatctttgaaaatccgcagcacccttatacgcgtaaattactggcggcagt

SEQ ID NO: 454908 - DNA, 75 bp, synthetic construct
  source 1..75: mol_type = other DNA
tgtggtgcgcctggacactactggtcgcctggcagggcgtctgccgccagcgcctgagctggcagagttttggcg

SEQ ID NO: 454909 - DNA, 75 bp, synthetic construct
  source 1..75: mol_type = other DNA
ctgaccgacagcggcaccggggcggtgacgcagagtatgcaggccgcgatgatgcgtggcgacgaagcctacagc

SEQ ID NO: 454910 - DNA, 75 bp, synthetic construct
  source 1..75: mol_type = other DNA
atcagtctgattcaactgaaattacaggccggacgtaaattgacgcaggcagaaaccgctcggcttaacgctgtg

SEQ ID NO: 454911 - DNA, 75 bp, synthetic construct
  source 1..75: mol_type = other DNA
caaaacgcgtctacttctggtcgatctttatctggtcgatgtttaccttgctgcaaggcttcgtcgatatcttta

SEQ ID NO: 454912 - DNA, 75 bp, synthetic construct
  source 1..75: mol_type = other DNA
tgtgctgcgtgtattaccccggtagaactgaaaaaagtgctttcggtggaccttggcgcgctgacacgcatgttg

SEQ ID NO: 454913 - DNA, 75 bp, synthetic construct
  source 1..75: mol_type = other DNA
tatacactctccctctcagctcctcaggaataccccggaaccgtcagtcatgccaccggggagaaaagcaggcag

SEQ ID NO: 454914 - DNA, 75 bp, synthetic construct
  source 1..75: mol_type = other DNA
gaaagcatccgccagaatgcagcccagcgcgtgatgtctgatgtcaccattacggcacgcgatatggacaacgcc

SEQ ID NO: 454915 - DNA, 75 bp, synthetic construct
  source 1..75: mol_type = other DNA
tcgcactgctgtttccgggtataagtcaggccgaactaaccgttgtcgccgatctgggtgggcagtcaacggctg

SEQ ID NO: 454916 - DNA, 75 bp, synthetic construct
  source 1..75: mol_type = other DNA
ggagaacctgtctgtatccggaataacggttattttgtcaacattcgcattcttgatgacttgtttgatgtttct

SEQ ID NO: 454917 - DNA, 75 bp, synthetic construct
  source 1..75: mol_type = other DNA
gtttctatctgaagcccaccgccgtcaagaacgaaggagaagcatgcgcctggctggacagccttacaccagaag

SEQ ID NO: 454918 - DNA, 75 bp, synthetic construct
  source 1..75: mol_type = other DNA
atgatactttggtctatgaaaaaagaaaccgatatccgacgaggaaggcattgtgttttcctgaggcatgttcac

SEQ ID NO: 454919 - DNA, 75 bp, synthetic construct
  source 1..75: mol_type = other DNA
gacgttatcagtgacacaaaccaagacagaacgccccgagtcacagccagtaccaaccgcacagataaccagtca

SEQ ID NO: 454920 - DNA, 75 bp, synthetic construct
  source 1..75: mol_type = other DNA
gagtacggtccgtttaaaacggtggaggatctaaagcaggtgccggggatgggcaattcgctggtggaacgtaat

SEQ ID NO: 454921 - DNA, 75 bp, synthetic construct
  source 1..75: mol_type = other DNA
aaggtaccagggtcagtattaacaacgccacggcagaagagttagcccgtgcgatgaatggcattggtctgaaga

SEQ ID NO: 454922 - DNA, 75 bp, synthetic construct
  source 1..75: mol_type = other DNA
acagaacgccccgtgtcacagccagtaccaaccgcacagataaccagtcagatggcagggaatatccgggcatta

SEQ ID NO: 454923 - DNA, 75 bp, synthetic construct
  source 1..75: mol_type = other DNA
tcaagctcatcagagagtctgaaagactaaatagaagagaattcagtgagttaacagggatcgtttacggttctt

SEQ ID NO: 454924 - DNA, 75 bp, synthetic construct
  source 1..75: mol_type = other DNA
attacctatacaaagaccaagggtaaaaaaaaccgtaccgtaccgatatctcaggatctgtacaacgagctaccc

SEQ ID NO: 454925 - DNA, 75 bp, synthetic construct
  source 1..75: mol_type = other DNA
caaaagcgagagtgaagataagccgtggctcggcaagaaagaagaccgccgacgcttaagtgagattattcagct

SEQ ID NO: 454926 - DNA, 75 bp, synthetic construct
  source 1..75: mol_type = other DNA
attgttaagatttgtcttgcaacaggtgctagatggggtgaggctgagaggttgacacgtccccagctctcgcca

SEQ ID NO: 454927 - DNA, 75 bp, synthetic construct
  source 1..75: mol_type = other DNA
gagtaaagaagtctgggccaacggtggcgaagtgttggtgctcaactttgaagacggttgctcgacgaccaacat

SEQ ID NO: 454928 - DNA, 75 bp, synthetic construct
  source 1..75: mol_type = other DNA
tggcgtcctggcggcaacgctggcagcgggtaattcgctggaagaagcctgcttctttgccaatgcggcggctgg

SEQ ID NO: 454929 - DNA, 75 bp, synthetic construct
  source 1..75: mol_type = other DNA
tccggtctgcgctggaaagaacaggcatcgaattaccggcagggcaacttacccatgttttacgccacaccttcg

SEQ ID NO: 454930 - DNA, 75 bp, synthetic construct
  source 1..75: mol_type = other DNA
catggatgaagtaaacaaaaagccatggcttggtgagaaggaagatcggcggcgcttatcagaagtgattgagca

SEQ ID NO: 454931 - DNA, 75 bp, synthetic construct
  source 1..75: mol_type = other DNA
ccgtaaacaagttagaatatcttgttcaatatttttatggttcatatcatttgtttttttattttttggattaaa

SEQ ID NO: 454932 - DNA, 75 bp, synthetic construct
  source 1..75: mol_type = other DNA
atgctgctggcgcaggaacgttcgctctcactgaccgtggtctggaatctgatccggcagtgggaaaaaagctga

SEQ ID NO: 454933 - DNA, 75 bp, synthetic construct
  source 1..75: mol_type = other DNA
catgcagaaaagcttttgaacgagcagtgaagcgggccaatatagacttaccagcgggacaatgcactcatgtgc

SEQ ID NO: 454934 - DNA, 75 bp, synthetic construct
  source 1..75: mol_type = other DNA
tgctagatgcctgtgctgattctcaaagccccagtctgctgatgattgcaaaaatatgcctagcaactggtgcac

SEQ ID NO: 454935 - DNA, 75 bp, synthetic construct
  source 1..75: mol_type = other DNA
cttgtagaaaatcctttgaacgagcagtaaaacgggctggtatcgagctgcctgatggacaatgcacccacgtgc

SEQ ID NO: 454936 - DNA, 75 bp, synthetic construct
  source 1..75: mol_type = other DNA
tcgtccgaatccagatttgccgccagataaaccagccgataatgagagtcgctatctacgtcaactccttgatgc

SEQ ID NO: 454937 - DNA, 75 bp, synthetic construct
  source 1..75: mol_type = other DNA
cggccggaacaccaccaggcacatatcagggacgagggcaacgttttataaactttcttaccggggtaaatccgg

SEQ ID NO: 454938 - DNA, 75 bp, synthetic construct
  source 1..75: mol_type = other DNA
tgattgtcgatttactcggcaatatttctgccaaatcccgccagtggtcacaggagctgggggcattctcccgtt

SEQ ID NO: 454939 - DNA, 75 bp, synthetic construct
  source 1..75: mol_type = other DNA
aaactggcccacaggaggactgtccggcaccggcgcgaccgatacatcctcaggcggacgtcaggggcggggtcg

SEQ ID NO: 454940 - DNA, 75 bp, synthetic construct
  source 1..75: mol_type = other DNA
aaatgcagcaataattgaattaaataatcttaaaactagcctcgaccgcatcctacttagcactgagagatcccc

SEQ ID NO: 454941 - DNA, 75 bp, synthetic construct
  source 1..75: mol_type = other DNA
tgcgaacacttgagcagggcgttcccgcagagggcggacgtcagcaggaaagcatttccgcagttacaacaaatg

SEQ ID NO: 454942 - DNA, 75 bp, synthetic construct
  source 1..75: mol_type = other DNA
cagccgggaactgaatattccggtggaatggggcggcgactggaagaccctgaaagacggaccgcattttcagtt

SEQ ID NO: 454943 - DNA, 75 bp, synthetic construct
  source 1..75: mol_type = other DNA
gccagagtatccaggcagcggacgccaatattctgaccggatacgggattaacgtttaccagttactggccgata

SEQ ID NO: 454944 - DNA, 75 bp, synthetic construct
  source 1..75: mol_type = other DNA
caggaaacagaacttgtcggctcccgtatgcagcgaacgcttgccggtgttcgtggcagcatccgcacggtaacg

SEQ ID NO: 454945 - DNA, 75 bp, synthetic construct
  source 1..75: mol_type = other DNA
cggtggcgcgctgggggcggctgccggtccggtcggggttgccattggttccacagtgggcagctatctcggtga

SEQ ID NO: 454946 - DNA, 75 bp, synthetic construct
  source 1..75: mol_type = other DNA
cgccacccgtgccctgaaaatggcgcgggctgtcggaatggggattatacgtccgggtgctgcattgctgggata

SEQ ID NO: 454947 - DNA, 75 bp, synthetic construct
  source 1..75: mol_type = other DNA
aaatattcttgccacctacggcattaatgcctaccgcgtgctggctgatcgtctgggtgtggaccagaaagtggt

SEQ ID NO: 454948 - DNA, 75 bp, synthetic construct
  source 1..75: mol_type = other DNA
ttctggtggggcagggttctgggggcgcatgatggggcgcgccggtgggttactttcgtctgtcggtagccgcat

SEQ ID NO: 454949 - DNA, 75 bp, synthetic construct
  source 1..75: mol_type = other DNA
ggcggtggtgaaaagcatcagtgccgccacgaaatgtcagaccgtggatgtgtccctgattgccggtgaacccaa

SEQ ID NO: 454950 - DNA, 75 bp, synthetic construct
  source 1..75: mol_type = other DNA
tattataaacagagtcgttgagtggtttactaaaaacctgggagcgcctataaaaacagctccccaacaacaaaa

SEQ ID NO: 454951 - DNA, 75 bp, synthetic construct
  source 1..75: mol_type = other DNA
gggaggggatcgtggtggacggtgcaggtaaaacgatcacgtttcgcaatgcgcctatatgcgctgggaaggtgt

SEQ ID NO: 454952 - DNA, 75 bp, synthetic construct
  source 1..75: mol_type = other DNA
tggtctgatcatgctgcagcaaggtaaaggcgcagatatgggagcctccttcggagcaggcgcttccgctacgct

SEQ ID NO: 454953 - DNA, 75 bp, synthetic construct
  source 1..75: mol_type = other DNA
tttcatggagttattgatgtatgtgaagatttccatgacagtggatttgaaaggatgaaagcaacaatcaagcaa

SEQ ID NO: 454954 - DNA, 75 bp, synthetic construct
  source 1..75: mol_type = other DNA
aaattcgttggcaaaatcgaagatgtaggtatggctatttttgggattgaaaaatctcgcacagcaagatcggga

SEQ ID NO: 454955 - DNA, 75 bp, synthetic construct
  source 1..75: mol_type = other DNA
tattataaacagggttgttgagtggtttactaaaaatctgggagtccctatgaaaaccaccacccaacaacaaaa

SEQ ID NO: 454956 - DNA, 75 bp, synthetic construct
  source 1..75: mol_type = other DNA
tatggcttcacttctcgtgcaaaagcgggtgcagaggctgttgttctgtttcctgacggcgaccgttctcacgcc

SEQ ID NO: 454957 - DNA, 75 bp, synthetic construct
  source 1..75: mol_type = other DNA
gacaacttctcggcctgattgggcgggcagtggtgaaaagcatcagtgccgccacgaaatgtcagaccgtggatg

SEQ ID NO: 454958 - DNA, 75 bp, synthetic construct
  source 1..75: mol_type = other DNA
caggggcagtccgtgacgctgacccgggaggggatcgtggtggacggtgcaggtaaaacgatcatgtttcgcaat

SEQ ID NO: 454959 - DNA, 75 bp, synthetic construct
  source 1..75: mol_type = other DNA
ctgttatggcagggattttttactttttacgattttaccaatgtcggtaacgccggaactgacgctggcgaatat

SEQ ID NO: 454960 - DNA, 75 bp, synthetic construct
  source 1..75: mol_type = other DNA
acagctataaaccgcgccctgcctttcaggactggatcgaacggctgaagactggcgaacgtctgccgcgaggcc

SEQ ID NO: 454961 - DNA, 75 bp, synthetic construct
  source 1..75: mol_type = other DNA
atgaatacgttatcaatgctggaaaatacgtttcgtgatattaggaagcatggcggccaaacaatcacagtcacg

SEQ ID NO: 454962 - DNA, 75 bp, synthetic construct
  source 1..75: mol_type = other DNA
gtcacgacgagaaaggcgaatggctgaaaatcacctattacgatgaagacggcgcggatgtgagtgagcgtttcc

SEQ ID NO: 454963 - DNA, 75 bp, synthetic construct
  source 1..75: mol_type = other DNA
agtgttcggcagcgtgcaatcggtcgcgcgcaatcttgacgcctttcagggggaattttcgctgttgattgtcga

SEQ ID NO: 454964 - DNA, 75 bp, synthetic construct
  source 1..75: mol_type = other DNA
gccgttgtcagggatggttcgaagatgacgacgggcatcgcgaacagtgtgattttcgcttccgctttaaaaact

SEQ ID NO: 454965 - DNA, 75 bp, synthetic construct
  source 1..75: mol_type = other DNA
gttttgggcgttaacccggaatggctcgcatcgggtgttggcccaatggaaatcgtgacctctgcagactcacac

SEQ ID NO: 454966 - DNA, 75 bp, synthetic construct
  source 1..75: mol_type = other DNA
cgccctaccgaatcggtaagtctttaccaacaaattgtcgggcgtggtctgcgtctggctccgggtaagacagat

SEQ ID NO: 454967 - DNA, 75 bp, synthetic construct
  source 1..75: mol_type = other DNA
ctgcgacagtcgaacacgcaaaagagattgtcggcttgctgcccgctgaggatgcagcacttattaccggcgaca

SEQ ID NO: 454968 - DNA, 75 bp, synthetic construct
  source 1..75: mol_type = other DNA
ggcggcggtctgggcggcggctcgtctaatgcagccaccgttctggtggcgctgaatcagctctggcaatgtggg

SEQ ID NO: 454969 - DNA, 75 bp, synthetic construct
  source 1..75: mol_type = other DNA
ggtcttaaacgcggagaacgcatccggttacgctctcacctcattcagggcacatctggtgcggaggagaaagca

SEQ ID NO: 454970 - DNA, 75 bp, synthetic construct
  source 1..75: mol_type = other DNA
cggcgacatgaacggccgttacggcctgcagcgcggggagcgggtccgtttccgctgcaattttattctcggcac

SEQ ID NO: 454971 - DNA, 75 bp, synthetic construct
  source 1..75: mol_type = other DNA
gccgctgtcagggatggtttgaagatgacgacggtcatcgcgaacagtgtgacttccgtttccgttttaaaaatt

SEQ ID NO: 454972 - DNA, 75 bp, synthetic construct
  source 1..75: mol_type = other DNA
ctaagtattgatgaactggcggaactgggtctgacgttgggcgcagatgttcctgtctttgtacgcggtcatgcc

SEQ ID NO: 454973 - DNA, 75 bp, synthetic construct
  source 1..75: mol_type = other DNA
cagcattgacaagcgtttgccgatgggcggcggcctgggcggtggttcatcgaatgccgcgactgtgctggtggc

SEQ ID NO: 454974 - DNA, 75 bp, synthetic construct
  source 1..75: mol_type = other DNA
tgttttagacatcagatatagttgcggacctggtagttataactctgattttcctgacattgtcagatctatagc

SEQ ID NO: 454975 - DNA, 75 bp, synthetic construct
  source 1..75: mol_type = other DNA
accgataaagcgggtctggcggatgagaaaggtaaattcccgcgcatgaagcaggcgctgtatgtcgacagtatc

SEQ ID NO: 454976 - DNA, 75 bp, synthetic construct
  source 1..75: mol_type = other DNA
agaaaggtaaattcccgcgcatgaagcaggcgctgtatgtcgacagtatctcttccgtgaccggttcgtttatcg

SEQ ID NO: 454977 - DNA, 75 bp, synthetic construct
  source 1..75: mol_type = other DNA
gtgaactggcaggatcttactgaatctgttccggcgtttattaccgccgtgatgatgccgttcagcttttcgatt

SEQ ID NO: 454978 - DNA, 75 bp, synthetic construct
  source 1..75: mol_type = other DNA
tttgccagtagctgcggaggtgcgccaatatccgccatccgccaatacattgaacaacagcaaacacctggttag

SEQ ID NO: 454979 - DNA, 75 bp, synthetic construct
  source 1..75: mol_type = other DNA
cccgtaaaccgttaccggcctcacttccccgtgaaacccagggttatccggccggaagaggaatgctgtcctgcc

SEQ ID NO: 454980 - DNA, 75 bp, synthetic construct
  source 1..75: mol_type = other DNA
gctgatgacctcaagtcttgctcgcgtgaattggcaggatcttaccgaatccgttccagcgtttattaccgccgt

SEQ ID NO: 454981 - DNA, 75 bp, synthetic construct
  source 1..75: mol_type = other DNA
cgaccgttgctcggatactcttcatcagacttacaaaaagttgagagtttaattatggatgctttatgtcaacgc

SEQ ID NO: 454982 - DNA, 75 bp, synthetic construct
  source 1..75: mol_type = other DNA
agccggtgcggagcaagagaggccgtatcaggcgcgaaatgttcgccaaactgcgcagcactaaccgctttatga

SEQ ID NO: 454983 - DNA, 75 bp, synthetic construct
  source 1..75: mol_type = other DNA
ggaacatcgcacatcaaaagacttcaaaaaatcaaagatactctaacggtgatatctgacaacccagcttacaag

SEQ ID NO: 454984 - DNA, 75 bp, synthetic construct
  source 1..75: mol_type = other DNA
gggctggatgctgggtgatgtccactacaatggcatcgtttctgcgccgccgagcgtaatgactgtcgtgggcca

SEQ ID NO: 454985 - DNA, 75 bp, synthetic construct
  source 1..75: mol_type = other DNA
acgacggcacggaccgaagtgatcgctggttttaccaccttcctgacgatggtttacatcgtttttgttaacccg

SEQ ID NO: 454986 - DNA, 75 bp, synthetic construct
  source 1..75: mol_type = other DNA
caatacggaatttgactggttggcctttcctgctggctataatagcttatttattccacctaaaaacccacctgc

SEQ ID NO: 454987 - DNA, 75 bp, synthetic construct
  source 1..75: mol_type = other DNA
agtatctggcgggcaaaggcgtggtggacaccgggccgacccgcgagccgtttgtggcgctgacggcaacccagc

SEQ ID NO: 454988 - DNA, 75 bp, synthetic construct
  source 1..75: mol_type = other DNA
tgcgcaatgccccgccgatcaataaagtgatgtatgacaataagatccatgtgctgaaaaacgcgctcgggttac

SEQ ID NO: 454989 - DNA, 75 bp, synthetic construct
  source 1..75: mol_type = other DNA
gccggaaccgtttttgcgcatgatcgtggtgcacgagctggcgcacctgaaggagaaagagcataacaaagcgtt

SEQ ID NO: 454990 - DNA, 75 bp, synthetic construct
  source 1..75: mol_type = other DNA
caccgataaagccctctggcaatatactcaggatctaaaaaatcagtttctgcgcaatgccccgccgatcaataa

SEQ ID NO: 454991 - DNA, 75 bp, synthetic construct
  source 1..75: mol_type = other DNA
gtgctaaaaaacgcgctcgggttacataccgctgtttctcgtgtgcagggcggcaagctgaaagcaaaagcggag

SEQ ID NO: 454992 - DNA, 75 bp, synthetic construct
  source 1..75: mol_type = other DNA
atgccctttttctctttttcgtgggcggttatgagcaatcttacttatcttcagggttatcccgagcagctactt

SEQ ID NO: 454993 - DNA, 75 bp, synthetic construct
  source 1..75: mol_type = other DNA
ggaaccccagtaccaccagcttgagttcgacacccgactgtggctaacccagttgtcgcttgggcaggacaaaat

SEQ ID NO: 454994 - DNA, 75 bp, synthetic construct
  source 1..75: mol_type = other DNA
cgtagtggtcggcaaactgggaacctccacggtttcgccgattgagctggaaaacgcggtgcgtggacgtgcgga

SEQ ID NO: 454995 - DNA, 75 bp, synthetic construct
  source 1..75: mol_type = other DNA
gatgatgcggcgcgcgcgctgagtaaatcactggcggacgtcaacgtaaaatgcgacttcgtttctgtaccgacg

SEQ ID NO: 454996 - DNA, 75 bp, synthetic construct
  source 1..75: mol_type = other DNA
atctggcaaatgcccgtaaactgggtgaccgtttgattgtcgccgtcaacagcgatgcctccaccaaacggctga

SEQ ID NO: 454997 - DNA, 75 bp, synthetic construct
  source 1..75: mol_type = other DNA
gccaaggccaggttcttaggcatgaggatgcagtttctttgggtattcttaccgaagaggaaataggcgttaaag

SEQ ID NO: 454998 - DNA, 75 bp, synthetic construct
  source 1..75: mol_type = other DNA
taccggctttggcgtgatgaccgaagaggaactgaagctggccgtagcggcagcgcgtaaacgcggtgaaaaagt

SEQ ID NO: 454999 - DNA, 75 bp, synthetic construct
  source 1..75: mol_type = other DNA
taccggctttggcgtgatgaccgaagaggaactgaagctggctgtagcggcagcgcgtaaacgtggtgaaaaagt

SEQ ID NO: 455000 - DNA, 75 bp, synthetic construct
  source 1..75: mol_type = other DNA
gaatgaaaaaagtgctaaactgcctcttgcgcataagttgcgtaatggtggaaaagattacgttaagaaggtgca

SEQ ID NO: 455001 - DNA, 75 bp, synthetic construct
  source 1..75: mol_type = other DNA
cgtaagtctgaagacgtagagaaatgtaaagatttgcttagtacgtgtgtcgcaattggcgttcaacgaaataag

SEQ ID NO: 455002 - DNA, 75 bp, synthetic construct
  source 1..75: mol_type = other DNA
gtggaaaaaacagttaatagcgatttgcatttaggtcagtactggagaatagatattgtatgcgatccagaactt

SEQ ID NO: 455003 - DNA, 75 bp, synthetic construct
  source 1..75: mol_type = other DNA
cggaagcgtaaaccgtcgcgcgacgagcgccacgctatccgggactttttaatcagcattgaacgatgggataca

SEQ ID NO: 455004 - DNA, 75 bp, synthetic construct
  source 1..75: mol_type = other DNA
aacgcgtctggcaaatcgtcgccgctattcccaaaggctacgtcaccacttacggcgatgtcgcgaaactggcgg

SEQ ID NO: 455005 - DNA, 75 bp, synthetic construct
  source 1..75: mol_type = other DNA
ccaccggcgcgcggtctttttccggcgcgggcagatgggcatttatcctcccgcctgcccggcgtcttcaggccc

SEQ ID NO: 455006 - DNA, 75 bp, synthetic construct
  source 1..75: mol_type = other DNA
gcgaccactattgccgacaacatgatgccagtaatgcagcatccggcgcaggataaagaaacccagcagaagctg

SEQ ID NO: 455007 - DNA, 75 bp, synthetic construct
  source 1..75: mol_type = other DNA
agaacagatataaacagacttgatataaataatgatgccaggagtctgggattcgaaactcgtgaaccgtttatt

SEQ ID NO: 455008 - DNA, 75 bp, synthetic construct
  source 1..75: mol_type = other DNA
atacaaagcattagaaatcgtaagcgatatcacttggcaaatagaaagtgaagtttttaatacattgcaacgtcc

SEQ ID NO: 455009 - DNA, 75 bp, synthetic construct
  source 1..75: mol_type = other DNA
acgaagaagaactggaagcaatacctgaactggcggatgaattgtcagaggatgacgatctggatgacgacgaaa

SEQ ID NO: 455010 - DNA, 75 bp, synthetic construct
  source 1..75: mol_type = other DNA
atgaaaagctggttgatagttacacaactgcatagtggggcaaatatgtgtatctatgaacacaagcgggataaa

SEQ ID NO: 455011 - DNA, 75 bp, synthetic construct
  source 1..75: mol_type = other DNA
atcccatcttaaatttgaaaatttagaaaataaaaatataattgtattaagtgttggggggtcatttgcactcaa

SEQ ID NO: 455012 - DNA, 75 bp, synthetic construct
  source 1..75: mol_type = other DNA
catctaaagattactttttaattcctttaggagtcataaaagaaaaagcgaatgaagcacctagatcttatatgt

SEQ ID NO: 455013 - DNA, 75 bp, synthetic construct
  source 1..75: mol_type = other DNA
caaccggacccgcagacggctgaacaggattttttaatccggcaccctggcgcagttgtgtttagtgcgaaaaaa

SEQ ID NO: 455014 - DNA, 75 bp, synthetic construct
  source 1..75: mol_type = other DNA
acgacccaatgtcatcgggtcaaaatggcctgatgatcttacagagaatacaacagagactactacagagaataa

SEQ ID NO: 455015 - DNA, 75 bp, synthetic construct
  source 1..75: mol_type = other DNA
tggcccgatgatcctacagagaatacaacagagattactacagagaataaaaacacttttcgtccggaagcttcg

SEQ ID NO: 455016 - DNA, 75 bp, synthetic construct
  source 1..75: mol_type = other DNA
atcggtcgtgatggcgtggtcagcgtaacccaacaaggccaggcagctccggttcaggttgggcagcttaatctc

SEQ ID NO: 455017 - DNA, 75 bp, synthetic construct
  source 1..75: mol_type = other DNA
gtatgttgaaacgtctaacgtcaacgtggcggaagaactggtcaatatgattcaggtgcaacgcgcttacgaaat

SEQ ID NO: 455018 - DNA, 75 bp, synthetic construct
  source 1..75: mol_type = other DNA
taacccaacaaggccaggcagctccggttcaggttgggcagctcaatctcaccacctttatgaatgacaccgggc

SEQ ID NO: 455019 - DNA, 75 bp, synthetic construct
  source 1..75: mol_type = other DNA
ccgcatgaccatgaacggtggtcggtgggtgacgtttaactgggatagctggcgtccaaatgtcagcaatcagag

SEQ ID NO: 455020 - DNA, 75 bp, synthetic construct
  source 1..75: mol_type = other DNA
acgaatcgtgagtctttacgagcaggctgccagcgatgatggcgagatcatgcgaccgaaagaaccaaactggac

SEQ ID NO: 455021 - DNA, 75 bp, synthetic construct
  source 1..75: mol_type = other DNA
cgatatgactaatttctacacgatcaattacgagagcaagcttttagatgatggcaaattgagcgaatccatcag

SEQ ID NO: 455022 - DNA, 75 bp, synthetic construct
  source 1..75: mol_type = other DNA
gatggtttttccgcttcctggcggactccatgtctgacaatttcagccagcctgccagcggtctgatgacgcctt

SEQ ID NO: 455023 - DNA, 75 bp, synthetic construct
  source 1..75: mol_type = other DNA
tgtcgcctgcgttgtgatcgccattatttttaccgcgatagcctatggtcgtatcacgcaggaggcggataaatc

SEQ ID NO: 455024 - DNA, 75 bp, synthetic construct
  source 1..75: mol_type = other DNA
cgctgggttctatgggcgaagccggtcgcagttttatacctgatattcagcaggcgagcagcagtagtctgatgt

SEQ ID NO: 455025 - DNA, 75 bp, synthetic construct
  source 1..75: mol_type = other DNA
tggcggaagaactggtcaatatgattcaggtgcaacgcgcttacgaaatcaacagtaaagcggtgtccaccaccg

SEQ ID NO: 455026 - DNA, 75 bp, synthetic construct
  source 1..75: mol_type = other DNA
cgatagtcatcaatcctgaccttgcgtacagcataggcctgaatgaagccattgcgctgcagcagcttaactact

SEQ ID NO: 455027 - DNA, 75 bp, synthetic construct
  source 1..75: mol_type = other DNA
aggcagtgtgcaaaccgatgtgctgcacaatgtcagtttcagcgtgggcgaaggtgaaatgatggcgatcgtcgg

SEQ ID NO: 455028 - DNA, 75 bp, synthetic construct
  source 1..75: mol_type = other DNA
ctcgatgcgcgtaacgctgacagcatcttccagttgctcggagaattgaatcgcttgcagggcactgcctttctg

SEQ ID NO: 455029 - DNA, 75 bp, synthetic construct
  source 1..75: mol_type = other DNA
caacagagattactacagagaataaaaacacttttcgtccggaagcttcgcaaccggacccgcagaccgctgaac

SEQ ID NO: 455030 - DNA, 75 bp, synthetic construct
  source 1..75: mol_type = other DNA
aattacgagagcgagcttttagatggtggcaaagtgagcgaatccatcaggtcaaaatgcgccgctccatcaggt

SEQ ID NO: 455031 - DNA, 75 bp, synthetic construct
  source 1..75: mol_type = other DNA
taaaattaatgcgcttaaattaataagtgagtataaagaaactgatgaagaatataatgttttaatgaaagagtt

SEQ ID NO: 455032 - DNA, 75 bp, synthetic construct
  source 1..75: mol_type = other DNA
tagctctggttctggcaaaagcaccttgctgcacttgctgggtgggctggatacgccaacttccggcgatgtgat

SEQ ID NO: 455033 - DNA, 75 bp, synthetic construct
  source 1..75: mol_type = other DNA
cgccagtggggtagccatgaggatttggcgtgtgcgcagtggatctggggacggatcgtgggtctctacgaacag

SEQ ID NO: 455034 - DNA, 75 bp, synthetic construct
  source 1..75: mol_type = other DNA
ctggcaaacgtcagcaccaacggttttaagcgccagcgggcggtgtttgaagatctgctttatcaaaccattcgc

SEQ ID NO: 455035 - DNA, 75 bp, synthetic construct
  source 1..75: mol_type = other DNA
atacgccaacctccggcgatgtcatttttaatggtcagccaataagcaaattgtcgtcggcggcgaaagcggaac

SEQ ID NO: 455036 - DNA, 75 bp, synthetic construct
  source 1..75: mol_type = other DNA
ctatgccgctgctgattggcaagaaaaagcccgctgaaatcaacagccgtgcactggagatgttaaaagcggtgg

SEQ ID NO: 455037 - DNA, 75 bp, synthetic construct
  source 1..75: mol_type = other DNA
cgaaacgtatgagccgccagttagaaatgcgtgatggtcgtctgacggcggaactgagcctgatgggggcggagt

SEQ ID NO: 455038 - DNA, 75 bp, synthetic construct
  source 1..75: mol_type = other DNA
gctcggcgagacgcagaacaccatgtcgatgctgagcgatgcgcagaccgatatctctacctctaatgatgagtt

SEQ ID NO: 455039 - DNA, 75 bp, synthetic construct
  source 1..75: mol_type = other DNA
atgaatacggttgatttatttcgtgccatgttaccaccggtcagctatgacccgaacgggaaatatatttcagca

SEQ ID NO: 455040 - DNA, 75 bp, synthetic construct
  source 1..75: mol_type = other DNA
gaactggttaaggcaatcagtaacgtcgatcacagctggaaagagttcatgctgatcgacatgggcggcgcaacc

SEQ ID NO: 455041 - DNA, 75 bp, synthetic construct
  source 1..75: mol_type = other DNA
taatgtcgatcacagctggaaagagttcatgctgatcgacatgggtggcgcaaccaccgatgtctattccgcctg

SEQ ID NO: 455042 - DNA, 75 bp, synthetic construct
  source 1..75: mol_type = other DNA
ggtttcagcaaagaaaacggtgccatgacgacaagccaggtgaaggcagactgtaaatggatggcggcaaaccgg

SEQ ID NO: 455043 - DNA, 75 bp, synthetic construct
  source 1..75: mol_type = other DNA
acgaacttatccgggtaattctctgcccgggggaaattgcgagggaaagtttatcggcctacagcagtgaaacac

SEQ ID NO: 455044 - DNA, 75 bp, synthetic construct
  source 1..75: mol_type = other DNA
atgaatacggttgatttatttcgtgccatgttaccgctggtcagctatgacccgaacgggaaatatatttctgca

SEQ ID NO: 455045 - DNA, 75 bp, synthetic construct
  source 1..75: mol_type = other DNA
tctttcattaaccaggacaaagtgagtggttgcgtgattccgccgaatgatagccaggcgctggtggaggcgatg

SEQ ID NO: 455046 - DNA, 75 bp, synthetic construct
  source 1..75: mol_type = other DNA
cccaaagaaccagagaaaaaacccgaaaagcccaaaccaaagcctgtggcagaagcgaagcctacacagcctaag

SEQ ID NO: 455047 - DNA, 75 bp, synthetic construct
  source 1..75: mol_type = other DNA
actctccaggaaaaccggggcggttcagcctaagcctgctgctccgcttccgagcggcccagaaatgttctcagc

SEQ ID NO: 455048 - DNA, 75 bp, synthetic construct
  source 1..75: mol_type = other DNA
taaacctcagcgcttatgaatatgccttctattctgctgttgcagataacgacagtgctcgcgagttaatggaaa

SEQ ID NO: 455049 - DNA, 75 bp, synthetic construct
  source 1..75: mol_type = other DNA
ttctgatggatgccgctgagcgtagccgactgccagtggtggttgtagggggcgggccgctggaatcggaagtgc

SEQ ID NO: 455050 - DNA, 75 bp, synthetic construct
  source 1..75: mol_type = other DNA
aaaccagcgttttccttcttcgacctgttgcgaatcgagcaccagcgtaaagccggagtagctggcttttcctga

SEQ ID NO: 455051 - DNA, 75 bp, synthetic construct
  source 1..75: mol_type = other DNA
ctaacgttgacccggcagatccgcaggtacaaagcgatattcaaaacgccgttaatgtggtggacaccgcctcgg

SEQ ID NO: 455052 - DNA, 75 bp, synthetic construct
  source 1..75: mol_type = other DNA
acgtgtttggcggtaccatcaacgatcagccgccgattgtggcggtggacgatgacggcgatggcgtgaccgaca

SEQ ID NO: 455053 - DNA, 75 bp, synthetic construct
  source 1..75: mol_type = other DNA
caccgaatcgatggtcgcggcgctgaactatcaggacgaagacggacactacgtgtttggcggcaccatcaacga

SEQ ID NO: 455054 - DNA, 75 bp, synthetic construct
  source 1..75: mol_type = other DNA
ccgccacgcgcatcacccagttaaaccgccagcagtcggcgattgaacagtatcagagcaatatcgactccgcgt

SEQ ID NO: 455055 - DNA, 75 bp, synthetic construct
  source 1..75: mol_type = other DNA
gcttggcgagacgcagaacaccatgtcgatgctgagcgatgcgcagaccgatatttctacctctaatgatgagtt

SEQ ID NO: 455056 - DNA, 75 bp, synthetic construct
  source 1..75: mol_type = other DNA
ccaccgccagaccaccgtgtcgaacggcgtcgaagtggataccaacgtggcggcgagcgatttcttcggtagcaa

SEQ ID NO: 455057 - DNA, 75 bp, synthetic construct
  source 1..75: mol_type = other DNA
agtattacaaattacgcgtagtgaactggcagagtccagcaaactggcggcgcttggacagatggcaaccgaaat

SEQ ID NO: 455058 - DNA, 75 bp, synthetic construct
  source 1..75: mol_type = other DNA
aatatagtctcgacaatcttttaccggcggattattatccttgttataccgtgagcaattttactttcctgaaag

SEQ ID NO: 455059 - DNA, 75 bp, synthetic construct
  source 1..75: mol_type = other DNA
atgtataagtccacattatattccaccatcgagcaattttatgttttaccctatatgctctcaacagaccatatc

SEQ ID NO: 455060 - DNA, 75 bp, synthetic construct
  source 1..75: mol_type = other DNA
acgccttagattctatggaaggtagctcttacaaacgactggatatcgccattcgccaggcaaataacaaagtta

SEQ ID NO: 455061 - DNA, 75 bp, synthetic construct
  source 1..75: mol_type = other DNA
ttaatgaaattgaaaaggcctggtctgaaggacctgaaaacattatcgtcaatgatgaacacgggattatatttt

SEQ ID NO: 455062 - DNA, 75 bp, synthetic construct
  source 1..75: mol_type = other DNA
acagcgggccgggtaagtgcgattaacgtcagagcggaacagttacatcagggctggttatacctctacattgca

SEQ ID NO: 455063 - DNA, 75 bp, synthetic construct
  source 1..75: mol_type = other DNA
ggggggacagttaccgcgaccgccccatcggttcgcggttgtggctgttatcacgtgaaaaagccacaccggata

SEQ ID NO: 455064 - DNA, 75 bp, synthetic construct
  source 1..75: mol_type = other DNA
ggcacacgtgaccgccggggatggtggggagacagttttcgcccgcgccccattggctcccgtctgtggcttctc

SEQ ID NO: 455065 - DNA, 75 bp, synthetic construct
  source 1..75: mol_type = other DNA
agtatctggaaaaagccggacgcaaactcggcgtgaatgtctacgttgaaaagcaaggtgctaacggcattgaag

SEQ ID NO: 455066 - DNA, 75 bp, synthetic construct
  source 1..75: mol_type = other DNA
agtacccatttgggtgtatcaatcgattggctacttaccggtaaagaacatattccatctaaagaaattgttgct

SEQ ID NO: 455067 - DNA, 75 bp, synthetic construct
  source 1..75: mol_type = other DNA
aagcgcttaacctcaagcgtagcgatgagacgcgtaccgtacagcaagatacgcaaccggtgaaaagcctcaaaa

SEQ ID NO: 455068 - DNA, 75 bp, synthetic construct
  source 1..75: mol_type = other DNA
tattgtgaaaacggccccgttagaagttaagactgaattaggtaatgactccaacttattgatagtgttttatgt

SEQ ID NO: 455069 - DNA, 75 bp, synthetic construct
  source 1..75: mol_type = other DNA
agaatgacaaagaaaatttcggtaatgactccaacttattgatagtgttttatgttcagataatgcccgatgact

SEQ ID NO: 455070 - DNA, 75 bp, synthetic construct
  source 1..75: mol_type = other DNA
tctccctgtttaccgaccggcgctcgctggattctgacacgctgccggatggttcagatgatcgccgtggatggt

SEQ ID NO: 455071 - DNA, 75 bp, synthetic construct
  source 1..75: mol_type = other DNA
tccgtttgttccaggaaggtcatctgctacgtaatagcatcgctatttttgcgctaaccacgctgggtaatgact

SEQ ID NO: 455072 - DNA, 75 bp, synthetic construct
  source 1..75: mol_type = other DNA
gcctgactatatggtgccgagtgatctgatgttagcgaccgattttccgttaaccgctaacggcaagctagatcg

SEQ ID NO: 455073 - DNA, 75 bp, synthetic construct
  source 1..75: mol_type = other DNA
gggtgatcgcgtttggcggcggctcggtgctggatgcggcgaaagccgttgcgttgctggtgacgaaccccgata

SEQ ID NO: 455074 - DNA, 75 bp, synthetic construct
  source 1..75: mol_type = other DNA
atgttgctgccaacggtgatggaatttaaccggatggtttgtcgtgatcggtttagtcagattggtcgggcgctg

SEQ ID NO: 455075 - DNA, 75 bp, synthetic construct
  source 1..75: mol_type = other DNA
agagcatgttgctggcttcatgtatggcgggaatggcgttttccagtgcgggtcttgggttgtgccacgcgatgg

SEQ ID NO: 455076 - DNA, 75 bp, synthetic construct
  source 1..75: mol_type = other DNA
tgggcgcaggccgcgcaggaagatatttgtctgcgcagcaacccgcgtaccgccagcctggagcagattgtcggc

SEQ ID NO: 455077 - DNA, 75 bp, synthetic construct
  source 1..75: mol_type = other DNA
gtgggcgaaccgtgcatcaccgacgtgtgtgcagccgtggcgcagttgcgtgaatcaggttgtgacggggtgatc

SEQ ID NO: 455078 - DNA, 75 bp, synthetic construct
  source 1..75: mol_type = other DNA
aacatctgttcgtgatggcagacagctttttgcatcaggcggggatgaccgccgggctgacgcgcagcctggctg

SEQ ID NO: 455079 - DNA, 75 bp, synthetic construct
  source 1..75: mol_type = other DNA
tatacatgcaattttttctgaagatataccatcagaaaaaataaataaggtgttatcaagaataaaacttcaaaa

SEQ ID NO: 455080 - DNA, 75 bp, synthetic construct
  source 1..75: mol_type = other DNA
caggctgaggtttcgcaggtcagcgctgcgcgcgagaatctggcgttgcggcgtaaacgtgcccaacagggagaa

SEQ ID NO: 455081 - DNA, 75 bp, synthetic construct
  source 1..75: mol_type = other DNA
cgtagctattgtctatctcgtgctatctggcagcgcttgaaaacgcaggcgggtcagatgagtatcacgcctact

SEQ ID NO: 455082 - DNA, 75 bp, synthetic construct
  source 1..75: mol_type = other DNA
catctgtttgtaatggcagacagctttttacatcaggcggggatgaccgctggccttatgcgtagtctggccgtc

SEQ ID NO: 455083 - DNA, 75 bp, synthetic construct
  source 1..75: mol_type = other DNA
caatccgcgcaatatctacgcgcatatcgcggcgcaactggggggcgaagacaacctcgaaatagcctgtcagta

SEQ ID NO: 455084 - DNA, 75 bp, synthetic construct
  source 1..75: mol_type = other DNA
gagctgggaactgccatcgaatggggcggggactggaaaacactgaaagacgggcctcactttcagttgaagcgc

SEQ ID NO: 455085 - DNA, 75 bp, synthetic construct
  source 1..75: mol_type = other DNA
aactcactccggcttttacgcctttactggcgattaaagaagcctctcgcggtaatgactccaacttattgatag

SEQ ID NO: 455086 - DNA, 75 bp, synthetic construct
  source 1..75: mol_type = other DNA
atgcaagacaacgcactaaccattttattatcgggtaaaaaatatctgctattgcaggggccaatgggacccttt

SEQ ID NO: 455087 - DNA, 75 bp, synthetic construct
  source 1..75: mol_type = other DNA
cattttcaccctgaacaagggagagcatgccggtgagcaacgcgtcagcctgaaggcccgcctgatcaaggtgga

SEQ ID NO: 455088 - DNA, 75 bp, synthetic construct
  source 1..75: mol_type = other DNA
gtttacagggctgaaaaatcagactcccagccgccgcaaaacggcaccatgcaacagcaatacgcagaaaactct

SEQ ID NO: 455089 - DNA, 75 bp, synthetic construct
  source 1..75: mol_type = other DNA
tatgaaactgtttaagaagtttcgtgggtatttattggttaagacgcaggttaattgggtttattatggaggaag

SEQ ID NO: 455090 - DNA, 75 bp, synthetic construct
  source 1..75: mol_type = other DNA
ttaatggggtttattatggggatagattttttattacaaagaaggattttataaaagaaaaacattatatgtatt

SEQ ID NO: 455091 - DNA, 75 bp, synthetic construct
  source 1..75: mol_type = other DNA
cgtgggtatttattggtgaagacgcaggttaatgcggtttattatggggggaacacaaaaaaaacgccaacataa

SEQ ID NO: 455092 - DNA, 75 bp, synthetic construct
  source 1..75: mol_type = other DNA
ttctgcttgcatctctgggcgcattgtacgtgggcgcgaaggcatttgcttattccttcatcgttctcgctaaag

SEQ ID NO: 455093 - DNA, 75 bp, synthetic construct
  source 1..75: mol_type = other DNA
caggcacagtacaactttgtcggtgccagcgagcaactggaaagtgcccatcgtagcgtcgtgcagaccgtgcgt

SEQ ID NO: 455094 - DNA, 75 bp, synthetic construct
  source 1..75: mol_type = other DNA
tgacgttctttcctatacacaggcgcaaaaagaagcgatctaccgtcaattagatcaaaccacccaacgttttaa

SEQ ID NO: 455095 - DNA, 75 bp, synthetic construct
  source 1..75: mol_type = other DNA
ccatcagaatggctcgttcctttgctgcgtgattaacgcactgagtggaccaacggacaatccgtcctatacgcg

SEQ ID NO: 455096 - DNA, 75 bp, synthetic construct
  source 1..75: mol_type = other DNA
gtaactcaagctcaagaagtcgctaaacaagaacctgattgggattatctcgaaattccgacttacctgcgtaaa

SEQ ID NO: 455097 - DNA, 75 bp, synthetic construct
  source 1..75: mol_type = other DNA
atgcggtctgtgcaggccgtcatcaaagaacgcgctgctaaggctaaacaagccaaagcagttgttgggcctgag

SEQ ID NO: 455098 - DNA, 75 bp, synthetic construct
  source 1..75: mol_type = other DNA
ttaatgcggtttattatgggggctttaaaaaaaatgataaccctgtccatagtatcacaaccgaagccaatcaac

SEQ ID NO: 455099 - DNA, 75 bp, synthetic construct
  source 1..75: mol_type = other DNA
aggcgggataccctgaagatcatctcgatacgttgtacagtcatcaaaactgtgaagtgactggctgggcgcaaa

SEQ ID NO: 455100 - DNA, 75 bp, synthetic construct
  source 1..75: mol_type = other DNA
cgatacgctatacagtcatcaaaattgcgaagtaactggctgggcgcaaacgtcggtgatgtcgcatcagtgcga

SEQ ID NO: 455101 - DNA, 75 bp, synthetic construct
  source 1..75: mol_type = other DNA
aggccgcgttgatccgacactgggaaagcggttaaaagcagatggggatggttggattgttcctcccgcagctgc

SEQ ID NO: 455102 - DNA, 75 bp, synthetic construct
  source 1..75: mol_type = other DNA
tatgaggggatctctcaggactgtgttgcaatggccattgaaagtcgcttcaaatatatgatgctacttttttaa

SEQ ID NO: 455103 - DNA, 75 bp, synthetic construct
  source 1..75: mol_type = other DNA
atggaacatcagagaaaactattccagcaacgcggcggtaatgactccaacttactgatagtgttttatgttcag

SEQ ID NO: 455104 - DNA, 75 bp, synthetic construct
  source 1..75: mol_type = other DNA
gttctgacgagtcgcttaccaccagagtgtgatatgcgtacaaccattgctgtagtgttgggtgcaattagtttg

SEQ ID NO: 455105 - DNA, 75 bp, synthetic construct
  source 1..75: mol_type = other DNA
ggattggttattcagccagcagcctggcagggcagccgtataaaggccgcaacggtcgtgtggaaggaacatctg

SEQ ID NO: 455106 - DNA, 75 bp, synthetic construct
  source 1..75: mol_type = other DNA
ttaatgcggtttattatgggggcaatcataatcagcacatagataatgtaaatatcgattatatagtttttccat

SEQ ID NO: 455107 - DNA, 75 bp, synthetic construct
  source 1..75: mol_type = other DNA
gggtatttattggtgaagacgcaggttaatggggtttattatggggagatgatttttaacaagataaaaaagata

SEQ ID NO: 455108 - DNA, 75 bp, synthetic construct
  source 1..75: mol_type = other DNA
gcaaaatcggtgacggtaaaatcttcgtcttcgacgtggcacgggtcattcgcatccgtaccggtgaagaggacg

SEQ ID NO: 455109 - DNA, 75 bp, synthetic construct
  source 1..75: mol_type = other DNA
tgacattgtggatatctgcgtagacactattactcgtacggcgcaaaccggtaaaatcggtgacggtaaaatctt

SEQ ID NO: 455110 - DNA, 75 bp, synthetic construct
  source 1..75: mol_type = other DNA
tctctatcagattgatcctgcgacctatcaggcggcatacgacagtgcgaaaggcgatctggcgaaagcccaggc

SEQ ID NO: 455111 - DNA, 75 bp, synthetic construct
  source 1..75: mol_type = other DNA
gataacaagaagccaccgcacgaagaaacagaagattttgtaaaacgagcattagattcaaagaatatctatctt

SEQ ID NO: 455112 - DNA, 75 bp, synthetic construct
  source 1..75: mol_type = other DNA
tcataccggacagcctgccgccggtggagtggctgacgtatggcagcggctacctggcgggaatgaagctgggcg

SEQ ID NO: 455113 - DNA, 75 bp, synthetic construct
  source 1..75: mol_type = other DNA
acgcgctgaaccgcctggtacagcagagtggttttgacgggcggacacagcgttaccattatgacctgaccggaa

SEQ ID NO: 455114 - DNA, 75 bp, synthetic construct
  source 1..75: mol_type = other DNA
cggtatgatggccacggctggctgagagaaatcagccacctgagcgaaggccaccgtgtggcggtccactatggc

SEQ ID NO: 455115 - DNA, 75 bp, synthetic construct
  source 1..75: mol_type = other DNA
gcatcacactttctaagcttgttacaccgagcgttgaaagaagcatggttctctgagaagaaaaccacaaagctt

SEQ ID NO: 455116 - DNA, 75 bp, synthetic construct
  source 1..75: mol_type = other DNA
atgaactcgttttcacttctgacaaccccgtggttgcctgttcgttttaaagacggaacgacaggcaagctggca

SEQ ID NO: 455117 - DNA, 75 bp, synthetic construct
  source 1..75: mol_type = other DNA
tacgcatagctccaggcctagcaatcaatatcagcaagagtggcgttagtacgtcgattggcccaaaaggcgcca

SEQ ID NO: 455118 - DNA, 75 bp, synthetic construct
  source 1..75: mol_type = other DNA
cccggacagtaccctcacggcgtggccggataaccgcatcgcagaggatgcgcactatgtttaccactatgatga

SEQ ID NO: 455119 - DNA, 75 bp, synthetic construct
  source 1..75: mol_type = other DNA
agatgacgtggagccgctacgggcagttgctggcgttcaccgactgctcgggctaccagacccgctatgaatacg

SEQ ID NO: 455120 - DNA, 75 bp, synthetic construct
  source 1..75: mol_type = other DNA
gacagagaacggcgaacgggagaaaatgcagcgccgcagcctagcggagaagttacagtcggaagggagtgagga

SEQ ID NO: 455121 - DNA, 75 bp, synthetic construct
  source 1..75: mol_type = other DNA
tccgttgcaggggagatatatcacccaggacccgatagggctgagaggtgaatggaatctgtataaatatccatt

SEQ ID NO: 455122 - DNA, 75 bp, synthetic construct
  source 1..75: mol_type = other DNA
tgaagctgggcgacacgcccctggtggagtacacccgcgaccgcctgcaccgggaaacagcgcgcagctttggta

SEQ ID NO: 455123 - DNA, 75 bp, synthetic construct
  source 1..75: mol_type = other DNA
cccggcagagcagtggcagtatgatgagcacgggtggttaaccaccctcagccataccagtgaaggccaccgtgt

SEQ ID NO: 455124 - DNA, 75 bp, synthetic construct
  source 1..75: mol_type = other DNA
ctctgagaagaaaaccacaaagcttgatttcggttttgtggatattgacttctggaacaaaactcagcatcgatt

SEQ ID NO: 455125 - DNA, 75 bp, synthetic construct
  source 1..75: mol_type = other DNA
gaaggcgtaacgccaccggatacacccgatcccatcaataatccccctgttgtggatccggaaggcccatcagtt

SEQ ID NO: 455126 - DNA, 75 bp, synthetic construct
  source 1..75: mol_type = other DNA
cggtctgttaacgctaaaaaacgtgactggcgaactgcgtaatagcataagcgggaagggtatcgtgagcgcaac

SEQ ID NO: 455127 - DNA, 75 bp, synthetic construct
  source 1..75: mol_type = other DNA
gtgaccgataaagggcattggaatttcctcggaacgggcgaagctttccgctatatctatatcggtgatgctggc

SEQ ID NO: 455128 - DNA, 75 bp, synthetic construct
  source 1..75: mol_type = other DNA
cagtcgcgttagccgctgcgctaattgctccttccgcgtttgcggcttccgccgcgatcccaacgatcgatttcc

SEQ ID NO: 455129 - DNA, 75 bp, synthetic construct
  source 1..75: mol_type = other DNA
cgccaatcagcacagtaatactcagagtaatcgtgtgggttataaatcggatgggcgcatcagcggttacagcgc

SEQ ID NO: 455130 - DNA, 75 bp, synthetic construct
  source 1..75: mol_type = other DNA
acgctcgacattctcgcatcaacgaacagtgcaggagattacacgctgaccaatgcgctcaaaggcgatggcttg

SEQ ID NO: 455131 - DNA, 75 bp, synthetic construct
  source 1..75: mol_type = other DNA
cgggcaaatggcggatcgagcattggaactggctaacgatggaaagctaaaagacgcggcaaacctgatcgtact

SEQ ID NO: 455132 - DNA, 75 bp, synthetic construct
  source 1..75: mol_type = other DNA
actcccgcggtctggcggtgcttgaggtgttcaaagtagggcaagtgagcacgatttacttcactaacaacctgc

SEQ ID NO: 455133 - DNA, 75 bp, synthetic construct
  source 1..75: mol_type = other DNA
ggattccacggtactcttccatcttgtagccagtgtggcccgcaggaaaaaatgtcgtttctctgtactgttcat

SEQ ID NO: 455134 - DNA, 75 bp, synthetic construct
  source 1..75: mol_type = other DNA
caatcaatacggtgcgacaggtttcgctttccaacggtcagaacgactatcagggggcaacctacgttcagatgg

SEQ ID NO: 455135 - DNA, 75 bp, synthetic construct
  source 1..75: mol_type = other DNA
gatgtcgggaaatgtcaccactgcaggtgatgtgaacgttatgcctggggggacactgcgtgtcgctaaaaccac

SEQ ID NO: 455136 - DNA, 75 bp, synthetic construct
  source 1..75: mol_type = other DNA
tacgacagccagcaccgtctggtgttctacacgcggatacagcatggcgagccgcaggtggagagccgctacctc

SEQ ID NO: 455137 - DNA, 75 bp, synthetic construct
  source 1..75: mol_type = other DNA
acctgaccggaaaactcacacagagtgaggatgaggggcttgtcaccctctggtactacgatgaatcggaccgta

SEQ ID NO: 455138 - DNA, 75 bp, synthetic construct
  source 1..75: mol_type = other DNA
gcaatggattgatccattgggattagctcatacttcaggaaaatggaaggactgtggtaaaggttgtcgaatccg

SEQ ID NO: 455139 - DNA, 75 bp, synthetic construct
  source 1..75: mol_type = other DNA
cgatttgcttaacactatttctgacaacccaataataatcctgcttattatcaatattatcctgttgattattgg

SEQ ID NO: 455140 - DNA, 75 bp, synthetic construct
  source 1..75: mol_type = other DNA
atcttttgaaatcccctggaatccgaacacccgtaccgaggtgagcaccctctgcatcagccagttccgctacag

SEQ ID NO: 455141 - DNA, 75 bp, synthetic construct
  source 1..75: mol_type = other DNA
tggtactcaacgacaacggcgggcggagcattcactttgagccgctgctgccgggggaggcggtgtacagccgca

SEQ ID NO: 455142 - DNA, 75 bp, synthetic construct
  source 1..75: mol_type = other DNA
cgtggccggataaccgcatcgcagaggatgcgcactatgtttaccactatgatgaatacggcagactgacggaga

SEQ ID NO: 455143 - DNA, 75 bp, synthetic construct
  source 1..75: mol_type = other DNA
attcgagcgtgcaattcaaaataatgagatagttttttgtattgtggataatgacaaaaaacatcctggagcccc

SEQ ID NO: 455144 - DNA, 75 bp, synthetic construct
  source 1..75: mol_type = other DNA
tatggcgattcctatttgctcttgacggttcttgcaattgtattgggaggcacagatccattcggtggggcgggg

SEQ ID NO: 455145 - DNA, 75 bp, synthetic construct
  source 1..75: mol_type = other DNA
cggctaagtataaatctggtgttaataccgtgaaagactcggtacgactggatccgtgggtgtttatgttctctg

SEQ ID NO: 455146 - DNA, 75 bp, synthetic construct
  source 1..75: mol_type = other DNA
atgaaggctgaagggcagaaaaaaggttatccggacatgagtctcgataaagcatgcggtatttatcacggcatg

SEQ ID NO: 455147 - DNA, 75 bp, synthetic construct
  source 1..75: mol_type = other DNA
gcgatgaaatttatgaagatatccttgaatttataggtgcatttgaagatgctgatataagtggtatggagagcc

SEQ ID NO: 455148 - DNA, 75 bp, synthetic construct
  source 1..75: mol_type = other DNA
aatctgatggtcgtaaactggctaaaggcagttatagcgacaatgtacgccttgatccgtgggtgtttatgttct

SEQ ID NO: 455149 - DNA, 75 bp, synthetic construct
  source 1..75: mol_type = other DNA
gtccccgccctctctcagctccttccttccccgacacactgcccggtacggaatacggcgctgacagcggtatct

SEQ ID NO: 455150 - DNA, 75 bp, synthetic construct
  source 1..75: mol_type = other DNA
ttgggctggaggggggatggagtctgtatgcgtatccgctgaatccggtgaatggtattgatccattagggttaa

SEQ ID NO: 455151 - DNA, 75 bp, synthetic construct
  source 1..75: mol_type = other DNA
ggcgggagttccgtctggtgctgaccacgcaggcgcagcgggcggaagaggcccgtaaacagcacaccgcttcct

SEQ ID NO: 455152 - DNA, 75 bp, synthetic construct
  source 1..75: mol_type = other DNA
ctgacggagaagacggaccgcatcccggcgggtgttatccggacggacgacgagcggacccaccactaccactac

SEQ ID NO: 455153 - DNA, 75 bp, synthetic construct
  source 1..75: mol_type = other DNA
aagggccgcctgaccggcgaacgccagacggtggagaacccggagacgggggaactgctgtggcagcatgagacg

SEQ ID NO: 455154 - DNA, 75 bp, synthetic construct
  source 1..75: mol_type = other DNA
gacagccagcaccgcctagagttctacacgcggatacagcatggcgagccgcaggtggagagccgctacctctac

SEQ ID NO: 455155 - DNA, 75 bp, synthetic construct
  source 1..75: mol_type = other DNA
agagcatgggatatattatctgatacttatgaagatatgaagagattaaatttaggtgggactgatcaatttttc

SEQ ID NO: 455156 - DNA, 75 bp, synthetic construct
  source 1..75: mol_type = other DNA
actaccactacgacagccagcaccgcctggtgttcaacacgcggatacagcaaggggagccacgggtcgagagcc

SEQ ID NO: 455157 - DNA, 75 bp, synthetic construct
  source 1..75: mol_type = other DNA
actaccactacgacagccagcaccgactggtgttccacacgcggatacagcaaggggagccaccggtcgagagcc

SEQ ID NO: 455158 - DNA, 75 bp, synthetic construct
  source 1..75: mol_type = other DNA
gctcatcagcgaagacggcaatactgtgtggagtgcagaatacgatgaatggggcaaccagctgaatgaagagaa

SEQ ID NO: 455159 - DNA, 75 bp, synthetic construct
  source 1..75: mol_type = other DNA
aaggatgcgcactatgtttaccactacgatgaatacggcagactgacggagaagacggaccttatcccggcgggt

SEQ ID NO: 455160 - DNA, 75 bp, synthetic construct
  source 1..75: mol_type = other DNA
actaccactacgacagccagcaccgcctggtgttcgacacgcggatacagcaaggggagccacaggtcgagagcc

SEQ ID NO: 455161 - DNA, 75 bp, synthetic construct
  source 1..75: mol_type = other DNA
actaccactacgacagccagcaccgcctggtgttctacacgcggatacagcaaggggagccactggtcgagagcc

SEQ ID NO: 455162 - DNA, 75 bp, synthetic construct
  source 1..75: mol_type = other DNA
tcactcgcgacctgaaagcgatttatcaggctcccacggaagaggcaggccagcaggcactggaagcgttcgctg

SEQ ID NO: 455163 - DNA, 75 bp, synthetic construct
  source 1..75: mol_type = other DNA
atgtcatggaaggactacaaagccgtcactcgcgacctgaaagcgatttatcaggctcccacggaagaggcaggc

SEQ ID NO: 455164 - DNA, 75 bp, synthetic construct
  source 1..75: mol_type = other DNA
gactggtccctaatcagtacctgattgaagccaacaggctggggcaaaaactcttcacatcagccgaattaatac

SEQ ID NO: 455165 - DNA, 75 bp, synthetic construct
  source 1..75: mol_type = other DNA
gtcttaacgcccgtgacagtaaacatgctggaagaatgttcagcatgcataattgccaaattaaccctggtgcag

SEQ ID NO: 455166 - DNA, 75 bp, synthetic construct
  source 1..75: mol_type = other DNA
acggggacagttttaggtcttaacgcccgtgacagtaaacatgctggaagaatgttcagcatgcataattgccaa

SEQ ID NO: 455167 - DNA, 75 bp, synthetic construct
  source 1..75: mol_type = other DNA
atttcgaggatggggtcatatttggttataacgacgcaattagtgaatgcgaaggacggattcgcgctgctggag

SEQ ID NO: 455168 - DNA, 75 bp, synthetic construct
  source 1..75: mol_type = other DNA
aagttggcatcatcacccaaaatcaggtcttcttttgtccatgagcttaagccacttgatgcaatgatctcgaaa

SEQ ID NO: 455169 - DNA, 75 bp, synthetic construct
  source 1..75: mol_type = other DNA
cttcagtaaaagatgtattttattatataaaagaacgattaagtaattcacaacttattgaattggacgagtgct

SEQ ID NO: 455170 - DNA, 75 bp, synthetic construct
  source 1..75: mol_type = other DNA
tcctggagcacgcgccccggcgtatcgacaaatcatcaacgcgatagataatatgacagacattgagcaggaaaa

SEQ ID NO: 455171 - DNA, 75 bp, synthetic construct
  source 1..75: mol_type = other DNA
agccatccttgatagcgaaggtataactagaaataatacaaacaataacttaagaaagataatatctttagcatc

SEQ ID NO: 455172 - DNA, 75 bp, synthetic construct
  source 1..75: mol_type = other DNA
tcacacatccagtcaagaatcccattaataaatggagagcatttattgcctatgaaaaaattcagagtgtggagc

SEQ ID NO: 455173 - DNA, 75 bp, synthetic construct
  source 1..75: mol_type = other DNA
atgaatcataaaaccattttattcaccactcttttgataacaggttgcaacaataatatttcaacacatacacct

SEQ ID NO: 455174 - DNA, 75 bp, synthetic construct
  source 1..75: mol_type = other DNA
caacgttttattaagggaaaacattaatgaggaactagacattaatgttaatacaataatcagtattctgaacag

SEQ ID NO: 455175 - DNA, 75 bp, synthetic construct
  source 1..75: mol_type = other DNA
cgactggcggtaaatcctgtcggggaagcagataatgaagataaagatgccgccgctgaacatgaaatactacgt

SEQ ID NO: 455176 - DNA, 75 bp, synthetic construct
  source 1..75: mol_type = other DNA
ctgaaggaccttttgggctttttgcacaaggagggccagatgaagctggagaagctggagaagctggaggatctg

SEQ ID NO: 455177 - DNA, 75 bp, synthetic construct
  source 1..75: mol_type = other DNA
catgaacccgaacctgcatcaagggtgaagcgtgatttatctgaagtcgagttcgagtcaacaatgaaacgtaag

SEQ ID NO: 455178 - DNA, 75 bp, synthetic construct
  source 1..75: mol_type = other DNA
tgtcggtacactgaataaagccgccatgccggatttcagttccgttaacgtgaagtctaatcccggcgtggcaac

SEQ ID NO: 455179 - DNA, 75 bp, synthetic construct
  source 1..75: mol_type = other DNA
ttcagttaatatttgcaatgataataaaaatataaattggagagttaatagtactattgtagccattgatgattc

SEQ ID NO: 455180 - DNA, 75 bp, synthetic construct
  source 1..75: mol_type = other DNA
gaccatatctgaagaatctaaatccacaccaacttgtcgctgattgcattgaaactgtaaacaaaataaaagata

SEQ ID NO: 455181 - DNA, 75 bp, synthetic construct
  source 1..75: mol_type = other DNA
cattcgcccccgctattcccccatcttccgttaacacaggcgtacgacgcccgccagggcggctcttcctgtcgg

SEQ ID NO: 455182 - DNA, 75 bp, synthetic construct
  source 1..75: mol_type = other DNA
gggcgaccaaaccggcgatcgatttagtaatatctgtggcgatcaatttatcatcgatttgttaaaacgcataat

SEQ ID NO: 455183 - DNA, 75 bp, synthetic construct
  source 1..75: mol_type = other DNA
ctatctcttgtcgatcctttaatcgttatttttctgtttcgacagattacagacctaaacttgaagcactattag

SEQ ID NO: 455184 - DNA, 75 bp, synthetic construct
  source 1..75: mol_type = other DNA
tgcaagaaaacctgcaaaaaaacctgtacaaaatcctggaagaaaaccagcaaaacaaacagtcagaaatccccc

SEQ ID NO: 455185 - DNA, 75 bp, synthetic construct
  source 1..75: mol_type = other DNA
cattcgcccccggcattcccccatcttccgttaacccaggcgtacgcccaccagggcagttcttcctgccggtgg

SEQ ID NO: 455186 - DNA, 75 bp, synthetic construct
  source 1..75: mol_type = other DNA
atggctagctttaaagacatctgcccattcgcccccgctattcccccatcttccgttaacacaggcgtacgacgc

SEQ ID NO: 455187 - DNA, 75 bp, synthetic construct
  source 1..75: mol_type = other DNA
ctgatacaattggtattagctaatgcatacagaaactattatttgcagaaaatcagggaagacaattctcacgaa

SEQ ID NO: 455188 - DNA, 75 bp, synthetic construct
  source 1..75: mol_type = other DNA
aagcaatattatgaaacccacacctgtatatgctgattattttaataacactactgatttcagaccagcacgtaa

SEQ ID NO: 455189 - DNA, 75 bp, synthetic construct
  source 1..75: mol_type = other DNA
aatcaccagcaatgggctaatttacatcgactggtggacatcactcctgtcgacgacgaaaaagcgctgcctttt

SEQ ID NO: 455190 - DNA, 75 bp, synthetic construct
  source 1..75: mol_type = other DNA
acctggccgccttcgcgtgcaacaataacgtcattgaactctcaacgttaaatcacgtattaatcacccacatca

SEQ ID NO: 455191 - DNA, 75 bp, synthetic construct
  source 1..75: mol_type = other DNA
aatgacttcaaaaaacataataaaaacatcacagatataaaatatttttatcaagagaataaaggtaaaaattct

SEQ ID NO: 455192 - DNA, 75 bp, synthetic construct
  source 1..75: mol_type = other DNA
ctcctacctataatagggcagatgagttaagctcattgttcaaaagtcttaataatcaagagggtatcgaattcg

SEQ ID NO: 455193 - DNA, 75 bp, synthetic construct
  source 1..75: mol_type = other DNA
gcttgatgacgatcagaaggcagtgttcagttatgactggtttagtgtaagagtacctacaacaggaatgctgcg

SEQ ID NO: 455194 - DNA, 75 bp, synthetic construct
  source 1..75: mol_type = other DNA
gtgtatgaccgtgactacgggtggaatgacaacggcgacctggtgcgcatcagcggcccgcgacagacgcgggaa

SEQ ID NO: 455195 - DNA, 75 bp, synthetic construct
  source 1..75: mol_type = other DNA
gaccggctgacgacggtacagaccgacaccacgcgtatccagacggtatatcagccggggagcttcgcgccgctc

SEQ ID NO: 455196 - DNA, 75 bp, synthetic construct
  source 1..75: mol_type = other DNA
gtgaatatcgacgcaacaatgacgattggtacggccctcaatacggggttggcgcttcttggttggtgctacatc

SEQ ID NO: 455197 - DNA, 75 bp, synthetic construct
  source 1..75: mol_type = other DNA
tggatattagctgtgataacacgccgcgccagcaggttattgggggaacgcaggctgcgttgaatgaatttacca

SEQ ID NO: 455198 - DNA, 75 bp, synthetic construct
  source 1..75: mol_type = other DNA
ggagcgactggtgagagacgctgatgattttgtcgcagtggcaatcgccggtttcaatcagatgaaccgtggtgg

SEQ ID NO: 455199 - DNA, 75 bp, synthetic construct
  source 1..75: mol_type = other DNA
tacatctttatcactgtgaccaccggggcctgccgctggcgcttatcagtgaagacggcaatacggcgtggagcg

SEQ ID NO: 455200 - DNA, 75 bp, synthetic construct
  source 1..75: mol_type = other DNA
tcgccactggattttcagttgcccggcgcgcaactgctttactggcatccatccgctcagggaggcgagttggcg

SEQ ID NO: 455201 - DNA, 75 bp, synthetic construct
  source 1..75: mol_type = other DNA
atgcgacgatgttattaaatatggtgcagggttctgacccggttaatttactggaattacatggtttccttgaac

SEQ ID NO: 455202 - DNA, 75 bp, synthetic construct
  source 1..75: mol_type = other DNA
tttattgatttcaatatgacaggacagaacctgtccgggttcgttctaaccttgtcaaggttttatttcgaagat

SEQ ID NO: 455203 - DNA, 75 bp, synthetic construct
  source 1..75: mol_type = other DNA
ttaagtgtcaccgagttcaaaaagtttatcgtaattctactacttttattattgtttggtgctactggatgtatg

SEQ ID NO: 455204 - DNA, 75 bp, synthetic construct
  source 1..75: mol_type = other DNA
atgagagattcaagattattataaaggattttaccatatcaattgtgtcgctaattgctgtgattatatcagtga

SEQ ID NO: 455205 - DNA, 75 bp, synthetic construct
  source 1..75: mol_type = other DNA
attgtcgggatctgcacagccattttcgttgccagcgtattgtggttaagttcgttagccgccagtcgtattatc

SEQ ID NO: 455206 - DNA, 75 bp, synthetic construct
  source 1..75: mol_type = other DNA
cattaattctgactgctttcgagaacgggcaaaaagcggatgcgctgggctggatttcctgggtattccggtcac

SEQ ID NO: 455207 - DNA, 75 bp, synthetic construct
  source 1..75: mol_type = other DNA
cgcttcctgccgacgccgcccgcctggtcggggcgaagctggatctcgacgaagacgccattctactgttgcaga

SEQ ID NO: 455208 - DNA, 75 bp, synthetic construct
  source 1..75: mol_type = other DNA
ttgctcagcaaagctaaaaaagatctctcatttgccgagattgccgacggtaccggtctggcagaagccttcgta

SEQ ID NO: 455209 - DNA, 75 bp, synthetic construct
  source 1..75: mol_type = other DNA
gcgcaacgtcagcgtgagccgttttttgttaagcgtggaaggtggcgatcttttgttcacgctacaactggagat

SEQ ID NO: 455210 - DNA, 75 bp, synthetic construct
  source 1..75: mol_type = other DNA
taattcggggaatcaactattttgttggatgagccaagagcgaacctcttatgtctcttcaatgataaacagaag

SEQ ID NO: 455211 - DNA, 75 bp, synthetic construct
  source 1..75: mol_type = other DNA
ccatgctgtatgtgccgcagttgctgctgcacgtcagccgtccggttcgctgggacagcgatcacgtagtgctgc

SEQ ID NO: 455212 - DNA, 75 bp, synthetic construct
  source 1..75: mol_type = other DNA
ggtaagtggtatcctatagtatttcgccgatctagaggcagtaccgatgaattagcctcacgagttgtgataact

SEQ ID NO: 455213 - DNA, 75 bp, synthetic construct
  source 1..75: mol_type = other DNA
ccgttccgtctggttatgccctgatgcaggggcagacttttgacaaatctgcatacccgaaacttgcagcggctt

SEQ ID NO: 455214 - DNA, 75 bp, synthetic construct
  source 1..75: mol_type = other DNA
atcccgcctcattttcatgaatttcagcatcaatgggaacatttccatgtgtttcaaggtgaggttgaattaatg

SEQ ID NO: 455215 - DNA, 75 bp, synthetic construct
  source 1..75: mol_type = other DNA
aactatcaacaatgctctggcccttaaagcgcctttagcaagtcctgcattaacgggaatacctactgcgcctac

SEQ ID NO: 455216 - DNA, 75 bp, synthetic construct
  source 1..75: mol_type = other DNA
tagtatgcgagatcaaaatgttatttttggtcttaataaggtatcaaccagttccgcccaggcattattaagaca

SEQ ID NO: 455217 - DNA, 75 bp, synthetic construct
  source 1..75: mol_type = other DNA
ctggaagcacgcaaactggcaggcgataacgtcaaagtgacgctggtttccagcggctacgatctgggtcagcag

SEQ ID NO: 455218 - DNA, 75 bp, synthetic construct
  source 1..75: mol_type = other DNA
tatattcaacaataaataataaaaacggcaatataagctggtccattattgatgacttaggtgcgattagctcag

SEQ ID NO: 455219 - DNA, 75 bp, synthetic construct
  source 1..75: mol_type = other DNA
cataaatttggttatgcgccgtcagccgtgctaaagaatacggaccagcacccaacggatgccagtccacacaat

SEQ ID NO: 455220 - DNA, 75 bp, synthetic construct
  source 1..75: mol_type = other DNA
ctttcatttcagcaaagcctttaaacataaatttggttatgcgccgtcagccgtgctaaagaatacggaccagca

SEQ ID NO: 455221 - DNA, 75 bp, synthetic construct
  source 1..75: mol_type = other DNA
gagagaagcataagaagtatccaaatgtcactctggataaccttgacgattacattcagaccattcgtggatccg

SEQ ID NO: 455222 - DNA, 75 bp, synthetic construct
  source 1..75: mol_type = other DNA
ttcatctttttcaataacctgagttcaccggagggggctttaaaactgacggcagggacgcagcaatcaagcgta

SEQ ID NO: 455223 - DNA, 75 bp, synthetic construct
  source 1..75: mol_type = other DNA
cttggctgtctgtcccaactagtggcacaagcccaaaaccgctatcacgacgcaccgaaagccaatgtattcacg

SEQ ID NO: 455224 - DNA, 75 bp, synthetic construct
  source 1..75: mol_type = other DNA
aaacaaactgccttatttcactggtaaggatacggtagctcagactgatttaacgtcagtcggtcgcgatattct

SEQ ID NO: 455225 - DNA, 75 bp, synthetic construct
  source 1..75: mol_type = other DNA
ttacccgagtaggtttcaacgctaaccagttcgtactgatgagtggcagtggtgatactcagtattcgccgttcg

SEQ ID NO: 455226 - DNA, 75 bp, synthetic construct
  source 1..75: mol_type = other DNA
atttcctaacctctgccgacggcgaccgtctgaccagcgatattgataccaatcttgaagccgcaatgcagaacg

SEQ ID NO: 455227 - DNA, 75 bp, synthetic construct
  source 1..75: mol_type = other DNA
ccgcgccacggcagtgatgtttccggaactggtgaagcagtttaagtttaagcagacacaaatcactgcgatcgg

SEQ ID NO: 455228 - DNA, 75 bp, synthetic construct
  source 1..75: mol_type = other DNA
ggctatacccagcaaaaagcaaccatcaaaaacggcaaagatgttgcccaggatggttcctcatcgctgccgtat

SEQ ID NO: 455229 - DNA, 75 bp, synthetic construct
  source 1..75: mol_type = other DNA
acaccgacggagacggacggggcgctgtttcccggtcgcatcatgctggcgaacacctgtatgtgggattaccgg

SEQ ID NO: 455230 - DNA, 75 bp, synthetic construct
  source 1..75: mol_type = other DNA
ggcagggcaggaattctggtaccgggcacggctggttgaccgcatcgggaatcagagcgactggacagactgggt

SEQ ID NO: 455231 - DNA, 75 bp, synthetic construct
  source 1..75: mol_type = other DNA
tatttctcttgcacttagcgcaggtaagaaatatgcaattgtgctgaagggaagatatctccttggaggggatac

SEQ ID NO: 455232 - DNA, 75 bp, synthetic construct
  source 1..75: mol_type = other DNA
cattaatcctccacttcaatatgaatacggggagctgtcctgctgtacagttccgcgtgaattacagaaatggcg

SEQ ID NO: 455233 - DNA, 75 bp, synthetic construct
  source 1..75: mol_type = other DNA
aataaaggtgccatgactatccgtgtaaccaccccgagcacttccagcggtggcggaactactaatgcacaattt

SEQ ID NO: 455234 - DNA, 75 bp, synthetic construct
  source 1..75: mol_type = other DNA
ggcgtgacaaacatagagagtgatacggctacgcatccccataacgaactgctgttcgtaacggctgaaggtggc

SEQ ID NO: 455235 - DNA, 75 bp, synthetic construct
  source 1..75: mol_type = other DNA
tgatgcttatgctcctggctggcgaagagactacaacacgaaaaaccagcagcctgcatttgctttagggcaaac

SEQ ID NO: 455236 - DNA, 75 bp, synthetic construct
  source 1..75: mol_type = other DNA
tacccgatatggatattgttatccggtggacaaacaaaattcagcagacagcgcgggaggtccgtaatatgccag

SEQ ID NO: 455237 - DNA, 75 bp, synthetic construct
  source 1..75: mol_type = other DNA
ccgcagacgataaagtcgtttttgacgaagtagatccgtctctggttgaagtaatgaaagaaccggaagacctag

SEQ ID NO: 455238 - DNA, 75 bp, synthetic construct
  source 1..75: mol_type = other DNA
agcgtagggttgtaatgcctgatggctcaacgaagggttataagcttgttgttccgggtaattttataattagct

SEQ ID NO: 455239 - DNA, 75 bp, synthetic construct
  source 1..75: mol_type = other DNA
cagcagaaaaaagccctgattcagcaattgcttaccgggaagaaacggttgctggatgagaatggggtgaggttt

SEQ ID NO: 455240 - DNA, 75 bp, synthetic construct
  source 1..75: mol_type = other DNA
gcaagcccgcgccgaaagagccggtgctaatcccggtgacgatgatcgacaaagacaacgtcggcaattacaaag

SEQ ID NO: 455241 - DNA, 75 bp, synthetic construct
  source 1..75: mol_type = other DNA
cctgaaagacgagaaaaaagccctgatgcagcagttactgaccggaaaacgtcgggtgaaaatcgatgaggctgt

SEQ ID NO: 455242 - DNA, 75 bp, synthetic construct
  source 1..75: mol_type = other DNA
gagagggggggcaggtatggtggtgagtggcatcgtgctgagcttggcgcagttttagattatatgcagccaacc

SEQ ID NO: 455243 - DNA, 75 bp, synthetic construct
  source 1..75: mol_type = other DNA
actttaaagcatttgattcaagaaataaaaataacaatttatccaatgcaggttttattcggcaagtaattcgag

SEQ ID NO: 455244 - DNA, 75 bp, synthetic construct
  source 1..75: mol_type = other DNA
gctcgaatgttaacaaccaaatagggctagctatttcatttacgatgaatatacaaccctcggaccttcccgtag

SEQ ID NO: 455245 - DNA, 75 bp, synthetic construct
  source 1..75: mol_type = other DNA
tactgaaattgattttcaggcccaaggatatactcactcgtattggattcggtctgtttagtggagggatagcag

SEQ ID NO: 455246 - DNA, 75 bp, synthetic construct
  source 1..75: mol_type = other DNA
gcctgcctgagagatgagaaaaaagccctgatgcaacagctactgactggcaaacgtcgtgttaaggtcgatgag

SEQ ID NO: 455247 - DNA, 75 bp, synthetic construct
  source 1..75: mol_type = other DNA
gcaaacaaaagtccctgttccatgttttgaagagcaggaaagcatcgctgatatgttatataactccagcaggac

SEQ ID NO: 455248 - DNA, 75 bp, synthetic construct
  source 1..75: mol_type = other DNA
aacgaaaaatttcttgaacgattctttgataaaaataaaattcttaaactacttacagaaatggatgacgctgtc

SEQ ID NO: 455249 - DNA, 75 bp, synthetic construct
  source 1..75: mol_type = other DNA
ctgaaagacgagaaaaaagccctgatgcaacagctactgactggcaaacgtcgtgttaaggtcgatgaggcggtt

SEQ ID NO: 455250 - DNA, 75 bp, synthetic construct
  source 1..75: mol_type = other DNA
cgtcgctatctataggttctggtcatattattcgatgtataaatattgcaacaatgttaagaaagatgggggcgg

SEQ ID NO: 455251 - DNA, 75 bp, synthetic construct
  source 1..75: mol_type = other DNA
gttgcattgtgttagcggatatccagcaccagcggaagattataatttagtaacaatacttgatatggctgagag

SEQ ID NO: 455252 - DNA, 75 bp, synthetic construct
  source 1..75: mol_type = other DNA
aatgagtatatgtgatggtcaaggactcatcagagatatacaggaaattattccttgcttttctacagatggcat

SEQ ID NO: 455253 - DNA, 75 bp, synthetic construct
  source 1..75: mol_type = other DNA
tacgggccggagaaggaataccatattgtttctgccgacaagggatatgacggtattgtccggacactgcaggcg

SEQ ID NO: 455254 - DNA, 75 bp, synthetic construct
  source 1..75: mol_type = other DNA
agagaaggaatatcatattgtttccgctgataagggatatgacggtatcgtccggacgctgcagatgcgcggaat

SEQ ID NO: 455255 - DNA, 75 bp, synthetic construct
  source 1..75: mol_type = other DNA
attaatgaagatatgtcgccattttttgatggtgaagagattaaaaacttaatgagcctagaaatacaaaaaaat

SEQ ID NO: 455256 - DNA, 75 bp, synthetic construct
  source 1..75: mol_type = other DNA
ttatcttctgcttgctggtgttatctgctgcattattttctgtacgttaacgcactttggcgcgatcgccatgga

SEQ ID NO: 455257 - DNA, 75 bp, synthetic construct
  source 1..75: mol_type = other DNA
gtccccagttttgccgtgggttccgcagtcggtttgcgtggttttatgagctatattcttggcgcaacgcttgga

SEQ ID NO: 455258 - DNA, 75 bp, synthetic construct
  source 1..75: mol_type = other DNA
cgcactttggcgcgatcgccatggaacgacagcgtcaaaatgacgttgctgcgttttcgcaagagcttcagaccg

SEQ ID NO: 455259 - DNA, 75 bp, synthetic construct
  source 1..75: mol_type = other DNA
ggaagatgccaccggcagccggaaaaccatgacgtggagccgttacggtcagttgctgagcttcaccgactgttc

SEQ ID NO: 455260 - DNA, 75 bp, synthetic construct
  source 1..75: mol_type = other DNA
acaaatatacatagaaaaaggcatttagaaataataagatttttaaaaaaatcacaaatagatttccctctgtat

SEQ ID NO: 455261 - DNA, 75 bp, synthetic construct
  source 1..75: mol_type = other DNA
ggccggatggtggcgcaccgttacgcgggaaggccggagatgcgctaccgctacgacgatacgggcgggtggtgg

SEQ ID NO: 455262 - DNA, 75 bp, synthetic construct
  source 1..75: mol_type = other DNA
ttgcgcgattggttgcgttcacctggtctcgctgtctattcggcacaaccaaactggccaacggccgaagctcgg

SEQ ID NO: 455263 - DNA, 75 bp, synthetic construct
  source 1..75: mol_type = other DNA
caaatcaactacattacgcatgattgcaggtcttgaagacgtatcaggtggtgaaatttacattagcgaccgcct

SEQ ID NO: 455264 - DNA, 75 bp, synthetic construct
  source 1..75: mol_type = other DNA
cgcgcgagaaatcgaacgccaaaatgattgttatcgatccgcgatataccgatacggctgccggtcgtgaagagg

SEQ ID NO: 455265 - DNA, 75 bp, synthetic construct
  source 1..75: mol_type = other DNA
ggcaatatgacccgctcttcgccatcagcctcggcggtcaaacgcctgatgaactgctacggcggttcactcaat

SEQ ID NO: 455266 - DNA, 75 bp, synthetic construct
  source 1..75: mol_type = other DNA
tgtatcagccgtaccgtctgccagggcagcagcatgatgaggaatcagggctgtactataaccgtcaccggtact

SEQ ID NO: 455267 - DNA, 75 bp, synthetic construct
  source 1..75: mol_type = other DNA
gcatcagcgcggactactgccatctttatttgatgctgccccggacattctggatacggctatctcgctgggaga

SEQ ID NO: 455268 - DNA, 75 bp, synthetic construct
  source 1..75: mol_type = other DNA
atcctccaggctcgcctaaacttgccgcaagacgagaacggtgacagtgagtcagaggaggacatcctttttgat

SEQ ID NO: 455269 - DNA, 75 bp, synthetic construct
  source 1..75: mol_type = other DNA
aggaaattaatattcttactcctgatatatgtgttttcttcacaaatcataaatatgattatcgactaacgtctt

SEQ ID NO: 455270 - DNA, 75 bp, synthetic construct
  source 1..75: mol_type = other DNA
gtggaaaccatcacgccggagggaaagactcgcagtatcacactggctgatttttatcaccctccgggaaaaacg

SEQ ID NO: 455271 - DNA, 75 bp, synthetic construct
  source 1..75: mol_type = other DNA
gagcttagaaggtggctgaactctgaagaagtgataagccacacggataatcatgactggcctacacctgaaacc

SEQ ID NO: 455272 - DNA, 75 bp, synthetic construct
  source 1..75: mol_type = other DNA
tctttttatcatttcttgcacttttagatttaagtcataaaaaaaatttgttattttttttatttccttgtttta

SEQ ID NO: 455273 - DNA, 75 bp, synthetic construct
  source 1..75: mol_type = other DNA
gcgggtgaagttcaactgggaccgttataacccggcagaccaagacagttcgtgctggatccgtgtggcacaggc

SEQ ID NO: 455274 - DNA, 75 bp, synthetic construct
  source 1..75: mol_type = other DNA
gacggcgctggagaaccattttgcggtgatcccggcagacagaacatggcgaccacagccgttgctgaaaccgct

SEQ ID NO: 455275 - DNA, 75 bp, synthetic construct
  source 1..75: mol_type = other DNA
acttgtccccgctacaccacgaacgcaaagaaacgctattttccagactgtcgatgaagcggtctgcgcagcaca

SEQ ID NO: 455276 - DNA, 75 bp, synthetic construct
  source 1..75: mol_type = other DNA
atgcactggtactcaacgacaacggcgggcggagcattcactttgagccgctgctgccgggtgaggcggtgtaca

SEQ ID NO: 455277 - DNA, 75 bp, synthetic construct
  source 1..75: mol_type = other DNA
ctacgggcagttgctggcgttcaccgactgctcgggctaccagacccgttatgaatacgaccgcttcggccagat

SEQ ID NO: 455278 - DNA, 75 bp, synthetic construct
  source 1..75: mol_type = other DNA
gcataaatcactgatggtgggaatgggctacagcgtcaatgtggggaataacgtcaccttctcggtgggcaagac

SEQ ID NO: 455279 - DNA, 75 bp, synthetic construct
  source 1..75: mol_type = other DNA
gttttaattcaatacaccggcggtacggattttgcgaaagttatggggaaggcgtttattactcgtgatggtgag

SEQ ID NO: 455280 - DNA, 75 bp, synthetic construct
  source 1..75: mol_type = other DNA
gctacccgccagccagaatggctttgctcctgtggttcgtgggattgcaaagtccaacgccactagactggcccc

SEQ ID NO: 455281 - DNA, 75 bp, synthetic construct
  source 1..75: mol_type = other DNA
gccaccattcagcagatacagcgcgtgcagaaggacacaaatgatgacctggctgcgctgtacatgctgaaggtt

SEQ ID NO: 455282 - DNA, 75 bp, synthetic construct
  source 1..75: mol_type = other DNA
cccgaacggagggctataaagtgggatttccgtcgccagcagcagactatgtagaagtacgactgaccgtcgata

SEQ ID NO: 455283 - DNA, 75 bp, synthetic construct
  source 1..75: mol_type = other DNA
cctgaagccaaagcagggaagccaggttcttatccagcacggcggcgggaccgaacttgccacgttgagagggcg

SEQ ID NO: 455284 - DNA, 75 bp, synthetic construct
  source 1..75: mol_type = other DNA
actacgtagaacagcgcctgtccgttaactcgatatgcaatgtcgggccgaacacccgcgttttcgaaagggatg

SEQ ID NO: 455285 - DNA, 75 bp, synthetic construct
  source 1..75: mol_type = other DNA
aagcaatggtcgtgcagatgattcaacccctgcatgtctaacatatgacgatctctacaatcgcatctatgtcgg

SEQ ID NO: 455286 - DNA, 75 bp, synthetic construct
  source 1..75: mol_type = other DNA
tgcgggcggtgtatgaccgcagcgggatgcaggtgcgcgggtttacttatgatgcggagcacgccgggcggatgg

SEQ ID NO: 455287 - DNA, 75 bp, synthetic construct
  source 1..75: mol_type = other DNA
tacacgtacacggccggtggtgaactgcgggcggtgtatgaccgcagcgggatgcaggtgcgcgggtttacttat

SEQ ID NO: 455288 - DNA, 75 bp, synthetic construct
  source 1..75: mol_type = other DNA
gggcaggcgtagccatgacactgttgctgatgatagtgacattgccaggcatcgtctttggtttacgaagcgctg

SEQ ID NO: 455289 - DNA, 75 bp, synthetic construct
  source 1..75: mol_type = other DNA
tcttttgtacgtggctgacaaatacattcctcgaaatggttatatgtaccggctctaatatggctaatgttaatt

SEQ ID NO: 455290 - DNA, 75 bp, synthetic construct
  source 1..75: mol_type = other DNA
aaagcctgtatgtttaatacccgtctctatcgggttaattttgatgaggctagcgtccagggaatgggcatttcc

SEQ ID NO: 455291 - DNA, 75 bp, synthetic construct
  source 1..75: mol_type = other DNA
atggaaaaaatactttttgataattgtattctcgatgactcatatttcgctcatgtaaaaatgactgacgggact

SEQ ID NO: 455292 - DNA, 75 bp, synthetic construct
  source 1..75: mol_type = other DNA
acaaatcctcgaattcttatttttgatgaagcaaccagtgctcttgattatgagtcggaaaatataataatgaaa

SEQ ID NO: 455293 - DNA, 75 bp, synthetic construct
  source 1..75: mol_type = other DNA
attatggaaggcagcgcatagaaagattggtaacgataatactccataccatatgactcaaaatgtaaatccact

SEQ ID NO: 455294 - DNA, 75 bp, synthetic construct
  source 1..75: mol_type = other DNA
agccggacggccttacgtgaagccgtaaaactgctgacgtcaaaagggttactggaatcccgaccaaaagtcggc

SEQ ID NO: 455295 - DNA, 75 bp, synthetic construct
  source 1..75: mol_type = other DNA
gcaagttttatttaaagtgattgttcctcaagcattatatcaaaaaacaaaatcaattaagcgcaaattattcgg

SEQ ID NO: 455296 - DNA, 75 bp, synthetic construct
  source 1..75: mol_type = other DNA
aaaaatgcttatagattgaagatgtattacgaggttgaattgtcatttattaatgctctcatagagattgcaaag

SEQ ID NO: 455297 - DNA, 75 bp, synthetic construct
  source 1..75: mol_type = other DNA
aaatgactatcaatatgaaatagatagtaatattgatattatagagttgttatattttcttccagagaataaata

SEQ ID NO: 455298 - DNA, 75 bp, synthetic construct
  source 1..75: mol_type = other DNA
tttataaagtaatagcgccatatattaatttatttagagccgaccttagcttctctaaacttgatttaattaact

SEQ ID NO: 455299 - DNA, 75 bp, synthetic construct
  source 1..75: mol_type = other DNA
attggtaacgggccgatgctggtgttaagcgacaagtcgctgattgcgccgccaaaacttaccgcctgggtcgaa

SEQ ID NO: 455300 - DNA, 75 bp, synthetic construct
  source 1..75: mol_type = other DNA
gtatctcccgcgaaggcgcaattgatgtgctgccggttggcaacgtgcgcatggctgcccgccagctgcagccgg

SEQ ID NO: 455301 - DNA, 75 bp, synthetic construct
  source 1..75: mol_type = other DNA
atgacattactcgcttcgctgcgcgactggcttaaggcgcaacaactggatgcagtgcttctctcctcacggcag

SEQ ID NO: 455302 - DNA, 75 bp, synthetic construct
  source 1..75: mol_type = other DNA
gatccgcgtttttcaccacgtgataccacgatgctccagcctggcatgttactgaccgtagagccggggatttat

SEQ ID NO: 455303 - DNA, 75 bp, synthetic construct
  source 1..75: mol_type = other DNA
cgccgctttattcaggcggggatgagcgaatgcgagatagctgctgaactggagtggtttatgcgccagcaggga

SEQ ID NO: 455304 - DNA, 75 bp, synthetic construct
  source 1..75: mol_type = other DNA
actggcttaaggcgcaacagctggatgcggtgcttctctcctcacggcagaacaaacagccccatctggggattt

SEQ ID NO: 455305 - DNA, 75 bp, synthetic construct
  source 1..75: mol_type = other DNA
cattcaactttgggactcttatatctcagagcttgatgctttgaaagcaacagtggttgataatgacccgacgaa

SEQ ID NO: 455306 - DNA, 75 bp, synthetic construct
  source 1..75: mol_type = other DNA
aataaaaaaaataataacaatcaggattatggatatttggctctctcccctggatttaactttgggccatggaga

SEQ ID NO: 455307 - DNA, 75 bp, synthetic construct
  source 1..75: mol_type = other DNA
atgcgctataatggttctaataatatgttttcccctctttaccagattaacgataaccactctctcacaagttca

SEQ ID NO: 455308 - DNA, 75 bp, synthetic construct
  source 1..75: mol_type = other DNA
ctaccggcacgacaacagtgctttttggctttggcggcggctttgtagtggtaccgtttgtttaccagctgctgg

SEQ ID NO: 455309 - DNA, 75 bp, synthetic construct
  source 1..75: mol_type = other DNA
atgcaattgcggaaatgcaaaaagacggcactttgcaagccctttccgaaaaatggtttggtgctgatgtgacca

SEQ ID NO: 455310 - DNA, 72 bp, synthetic construct
  source 1..72: mol_type = other DNA
cagcatttaaatggagagccggatgcgctgaaaggtgcacgtccggttcggggaggagaggcagggaaatag

SEQ ID NO: 455311 - DNA, 75 bp, synthetic construct
  source 1..75: mol_type = other DNA
aaatctatttcctgatggtgagcataaagtacattttgaaataaacaatcctgaatacaaattcctctgtgtaga

SEQ ID NO: 455312 - DNA, 75 bp, synthetic construct
  source 1..75: mol_type = other DNA
gtgtacagcgttcgcctgacacaaagcacacggcgcctttcagaaatcggtgtcatccgcgtttatgaagattca

SEQ ID NO: 455313 - DNA, 75 bp, synthetic construct
  source 1..75: mol_type = other DNA
aggaactgcaaagcggcaaatggggtgagatagccccattcactgtgacaccagaaatgctggaagcggccagag

SEQ ID NO: 455314 - DNA, 75 bp, synthetic construct
  source 1..75: mol_type = other DNA
gaaaggtctgtgtggagtgcaatataccagacacatgcttactggatataattactgatttccccaacaataaag

SEQ ID NO: 455315 - DNA, 75 bp, synthetic construct
  source 1..75: mol_type = other DNA
atatcgcgtcctgtccggggtgccggatacatatgtctctggcgcaatgcttgggctttttattcgcacatcgtg

SEQ ID NO: 455316 - DNA, 75 bp, synthetic construct
  source 1..75: mol_type = other DNA
gatgtcgtcaaacgctttgaggaaatggtggcgcaggcgcagcagagcgccggggccgcagccggaaacgcacag

SEQ ID NO: 455317 - DNA, 75 bp, synthetic construct
  source 1..75: mol_type = other DNA
acatcgctgtggtgaattatggtggtgggggaaggattcgaaccttcgaagtcgatgacggcagatttacagtct

SEQ ID NO: 455318 - DNA, 75 bp, synthetic construct
  source 1..75: mol_type = other DNA
ataagaagataaaaatagctctcatcataacgagtgcgttattatatacttctacagcacaatcatatccacaag

SEQ ID NO: 455319 - DNA, 75 bp, synthetic construct
  source 1..75: mol_type = other DNA
gctgccatgcaaattagcgccgaccaggcgctggaaacagccagcaaaatgctcatggctgatgtgcaggaggta

SEQ ID NO: 455320 - DNA, 75 bp, synthetic construct
  source 1..75: mol_type = other DNA
cgcggctaacactcctgtggctgcgactgtcagggggaaccccgtttacgccctgcagcatgtcgggccagccct

SEQ ID NO: 455321 - DNA, 75 bp, synthetic construct
  source 1..75: mol_type = other DNA
agatgtgatgcgctggaacagcgacactgcgaatctgcaaccaggcgacaagctgacgttgtttgtgaaaaacaa

SEQ ID NO: 455322 - DNA, 75 bp, synthetic construct
  source 1..75: mol_type = other DNA
gcgctgcgcgcttcgcccttcgggtcgttgcctgcggcaacgctctctcgctggcgctcgagtcgaaccttggtc

SEQ ID NO: 455323 - DNA, 75 bp, synthetic construct
  source 1..75: mol_type = other DNA
gatataaaagagaggagcatcaaagaacgcagagatgaacggataaagtctcgcttagcgatggaagacacaaaa

SEQ ID NO: 455324 - DNA, 75 bp, synthetic construct
  source 1..75: mol_type = other DNA
tggctcaggcgaatgcagacctgcaacaggagctaacgacgctccaacagcaagccactcagcagcaagctcagc

SEQ ID NO: 455325 - DNA, 75 bp, synthetic construct
  source 1..75: mol_type = other DNA
aagcgaacaggttagtgagatcgcaacactgacccgcaacctggaagagcgtgaccaggcggccatcaaggcggc

SEQ ID NO: 455326 - DNA, 75 bp, synthetic construct
  source 1..75: mol_type = other DNA
caacggaaggttggaagctaatattgcagagcgtttccaggagttggcagtcatgacgcggcatatggagcagct

SEQ ID NO: 455327 - DNA, 75 bp, synthetic construct
  source 1..75: mol_type = other DNA
aaaaatattagcagcgttgtgccgacgcaaggcgcgttggttcgtgccaattttgatacccgcataggcgtgcgg

SEQ ID NO: 455328 - DNA, 75 bp, synthetic construct
  source 1..75: mol_type = other DNA
gcattcatacagcatatgttgatgcaagacgacatgacgttgaagaaagtgatgcagaaacaagtggtaaagtcc

SEQ ID NO: 455329 - DNA, 75 bp, synthetic construct
  source 1..75: mol_type = other DNA
tgttaaagcagattttcaggggtcaagtgcaagctattgttatataggatggaatgtaagagatggttcaaatgt

SEQ ID NO: 455330 - DNA, 75 bp, synthetic construct
  source 1..75: mol_type = other DNA
aattcgctgacatctgaagtggcattactgcaagaacagcttaatgaggcacaagcaaacttgagtgtatggtca

SEQ ID NO: 455331 - DNA, 75 bp, synthetic construct
  source 1..75: mol_type = other DNA
catcactgatattggcagggaattgaatttcattttcaaaccatctcttttttggtgtcctacataccttgcaca

SEQ ID NO: 455332 - DNA, 75 bp, synthetic construct
  source 1..75: mol_type = other DNA
ctaagctggagcagtatgaatcggctcagcaaacctggcagacgcgtgagcaggaattgatcagtatcttagatg

SEQ ID NO: 455333 - DNA, 75 bp, synthetic construct
  source 1..75: mol_type = other DNA
aatgtgatgaactgactcaactaatagcagtgcacgagtctaatattgcgtcacaaagcgacgtaatggctgctc

SEQ ID NO: 455334 - DNA, 75 bp, synthetic construct
  source 1..75: mol_type = other DNA
ttatgattcacttaaacaggtaagtgtagatctagagcaacagctggaagaagagcaacttgtgcaacaaacatt

SEQ ID NO: 455335 - DNA, 75 bp, synthetic construct
  source 1..75: mol_type = other DNA
gctatcttttgcccagcaacatatcaattcgctgacatctgaggtggcattattgcaagaacagctcaatgaggc

SEQ ID NO: 455336 - DNA, 75 bp, synthetic construct
  source 1..75: mol_type = other DNA
gttgtgccgcgaacaattctgactattgcgatggattttaaatctcaggcaaaagtatctgttttgtcggtagtg

SEQ ID NO: 455337 - DNA, 75 bp, synthetic construct
  source 1..75: mol_type = other DNA
ttgtgcctgttatataccctcttcgccccggcgatgtgtttggtgtcgctggtgtggaaatgctggtggtgtggg

SEQ ID NO: 455338 - DNA, 75 bp, synthetic construct
  source 1..75: mol_type = other DNA
cgcattcactaaggccgatattatcgaactgaaacgcatgtacccgaaacgcaccatcgccgctaaggttgacca

SEQ ID NO: 455339 - DNA, 75 bp, synthetic construct
  source 1..75: mol_type = other DNA
atcggtttagaagttatataagagcgggtatctatcaaaaaaagagcagtgatccagctcagttgttggcagtcc

SEQ ID NO: 455340 - DNA, 75 bp, synthetic construct
  source 1..75: mol_type = other DNA
aaaccggataatccagaccgcaacagtgcaaccggcacacctgctacagttttcaggacattccccgtcagtgat

SEQ ID NO: 455341 - DNA, 75 bp, synthetic construct
  source 1..75: mol_type = other DNA
atgggttgccagtatttccagacaaccagcgccacgcccgccagtgcagtaaccacaagacctatcggactgagc

SEQ ID NO: 455342 - DNA, 75 bp, synthetic construct
  source 1..75: mol_type = other DNA
tgctattcagatggcagtggtggaagcgatacggttgagttctacaagactattgaagaagccaggcagtgtgtt

SEQ ID NO: 455343 - DNA, 75 bp, synthetic construct
  source 1..75: mol_type = other DNA
gctgtaacacttaacgtcttcgccgctttccttggtgtaataagaggactgtttccttcaggtaagtcctccggg

SEQ ID NO: 455344 - DNA, 75 bp, synthetic construct
  source 1..75: mol_type = other DNA
acattgatcggtgtggcaatgggggcgatagcgactttcaataaaggcaaagaattaaaagacgacccggagtac

SEQ ID NO: 455345 - DNA, 75 bp, synthetic construct
  source 1..75: mol_type = other DNA
tatcttaaacgacgtaatgttagaaaactcactcctcaatctaaagaataattcacgtgtacaattaacgggaga

SEQ ID NO: 455346 - DNA, 75 bp, synthetic construct
  source 1..75: mol_type = other DNA
aatatatacttcgaaaatttacgtaacgatattaataacattactgaagcaattaactcattacccgacgctatt

SEQ ID NO: 455347 - DNA, 75 bp, synthetic construct
  source 1..75: mol_type = other DNA
aaacaacagaaacaatagagtcagcaaataaaataatatctgccatagatacaaacctggctgaaattaataaaa

SEQ ID NO: 455348 - DNA, 75 bp, synthetic construct
  source 1..75: mol_type = other DNA
cgtaagttgcgggaaattttcgccgaaaaggcttataaggtagcaaaaaaatcactttatggatgggcgattcta

SEQ ID NO: 455349 - DNA, 75 bp, synthetic construct
  source 1..75: mol_type = other DNA
cctctgctgatatacgagcgaagatcagtaaagatatagaaagtggtatccctggctattggcaaggtcaggttt

SEQ ID NO: 455350 - DNA, 75 bp, synthetic construct
  source 1..75: mol_type = other DNA
cggataccaggtatcaccagacggtgtggccctggctggttatgacccggagacaaaaagagtggccccattttt

SEQ ID NO: 455351 - DNA, 75 bp, synthetic construct
  source 1..75: mol_type = other DNA
ttgtacacctacgctgatgaagtagtcaattcggttcttcgagaacgcgcctgttttgaaaacttcacgcttcat

SEQ ID NO: 455352 - DNA, 75 bp, synthetic construct
  source 1..75: mol_type = other DNA
cggagatcatcactattgcaggcggtgcctatcatgaaattatcctttatccaggaaatcaccaggtttacggtt

SEQ ID NO: 455353 - DNA, 75 bp, synthetic construct
  source 1..75: mol_type = other DNA
aagtaatgatggaaaaatagttgagttttacaattatggcgataataaatactgtttactatcaaaaataaatga

SEQ ID NO: 455354 - DNA, 75 bp, synthetic construct
  source 1..75: mol_type = other DNA
ttattgaaagtgaattctacaatgatttggaccattttaatgaaaagcaaattgaatcaatctcaaacgtattta

SEQ ID NO: 455355 - DNA, 75 bp, synthetic construct
  source 1..75: mol_type = other DNA
atgattaaagtcgttgccgaataccgtaatacaaacaacgcaataggttacaccttccgttattacgcaacacaa

SEQ ID NO: 455356 - DNA, 75 bp, synthetic construct
  source 1..75: mol_type = other DNA
tcctctggtgacaagctatatggcgaggtatttttacattggccgtgcttcgtacgttaccgggcagaatcaaaa

SEQ ID NO: 455357 - DNA, 75 bp, synthetic construct
  source 1..75: mol_type = other DNA
atgtcagtcgtcactatcagctgtgcggtggcctttatcgcctacaagatgcttgttgacggcaaggcctggcac

SEQ ID NO: 455358 - DNA, 75 bp, synthetic construct
  source 1..75: mol_type = other DNA
ttctgacttggattgagggaaacttatcggcacaaatgaaagttgacgatatagcaaagaaaagtggttatagta

SEQ ID NO: 455359 - DNA, 75 bp, synthetic construct
  source 1..75: mol_type = other DNA
tgtgataatgggaaaatatccacggttccagcctatgagaccagtcatgtattcaaaatagggtcaggagatgcg

SEQ ID NO: 455360 - DNA, 75 bp, synthetic construct
  source 1..75: mol_type = other DNA
ttatgatgcgtatggtgcgcagcagttctattttcctaatgtgctgaagtatgatccagatcaactacgtgcaca

SEQ ID NO: 455361 - DNA, 75 bp, synthetic construct
  source 1..75: mol_type = other DNA
accacgacgactactttaatgaagcaaggcttctctataaacatgcacatccaaatattgtgcaagttcagtatg

SEQ ID NO: 455362 - DNA, 75 bp, synthetic construct
  source 1..75: mol_type = other DNA
gaagaactggaatcctttttatatgccattgcgaaggggaatgtttttaacttccagaccattctgcatctgccc

SEQ ID NO: 455363 - DNA, 75 bp, synthetic construct
  source 1..75: mol_type = other DNA
agttgcagaacatgaaattctgctcgcctttcgtgcgttactcgcctctgatagcgaacgttttctgccctctgc

SEQ ID NO: 455364 - DNA, 75 bp, synthetic construct
  source 1..75: mol_type = other DNA
ggctttgagctgataagccagcagttcagccgggtacggcagccgcatccgtccgtcgccccgctgtgggtgacg

SEQ ID NO: 455365 - DNA, 75 bp, synthetic construct
  source 1..75: mol_type = other DNA
ccggtttttgataaatggaatgaattggtagataagttaaaccacgaaagaaatacagtaccgtttgcgtgtttg

SEQ ID NO: 455366 - DNA, 75 bp, synthetic construct
  source 1..75: mol_type = other DNA
aattaaaaattgtcagttttatcttctgggaaagtgcgaaaatgtgaattacgcgagagatcgttttgtgttcag

SEQ ID NO: 455367 - DNA, 75 bp, synthetic construct
  source 1..75: mol_type = other DNA
ttggtcatcgcatccagaatggctgacattgtatttagcgcaacatcgcgcagtgattatccccgatgatgcaaa

SEQ ID NO: 455368 - DNA, 75 bp, synthetic construct
  source 1..75: mol_type = other DNA
tgataagccagcagttcagccgggtacggcagccgcacccgtccgtggccccgcagtgggtgacgcggacgaatc

SEQ ID NO: 455369 - DNA, 75 bp, synthetic construct
  source 1..75: mol_type = other DNA
aatggtatttattcttgacacgaaccctcgtgtttgtaatgaattagccaggaaaataatatctttagcgcaaaa

SEQ ID NO: 455370 - DNA, 75 bp, synthetic construct
  source 1..75: mol_type = other DNA
tgcgctggcagataaactggatttgattgcacctgtattgtttgagcgtgatcccagaatgggctttgaaccaga

SEQ ID NO: 455371 - DNA, 75 bp, synthetic construct
  source 1..75: mol_type = other DNA
gctgatgctctttaacagtgaaggtaaaaccgtctggcgaccgggacagaccagcctgtgggggctggcactcag

SEQ ID NO: 455372 - DNA, 75 bp, synthetic construct
  source 1..75: mol_type = other DNA
tgataaactgtacagcgtacggcacctggtgtttaacggctttgagctgataagccagcagttcagccgggtacg

SEQ ID NO: 455373 - DNA, 75 bp, synthetic construct
  source 1..75: mol_type = other DNA
tacgagccggaaaccggaatgtacctggtgagtgatccgctggggttgctggggggtgagcagacttaccggtat

SEQ ID NO: 455374 - DNA, 75 bp, synthetic construct
  source 1..75: mol_type = other DNA
tatcgccccaggatattatgtgagtgaaatgaccgctattatttataataaccctaaaataaaagagttaataaa

SEQ ID NO: 455375 - DNA, 75 bp, synthetic construct
  source 1..75: mol_type = other DNA
aaaattggtctgaagattatgccaatgagtcatgaacaaaatgttaattatgtaagagcaacgttttctcgtgat

SEQ ID NO: 455376 - DNA, 75 bp, synthetic construct
  source 1..75: mol_type = other DNA
tgggccaggggcatgatccaaatcttacgtattgataatccattattgggcaaagggctgacgttatcacagcgt

SEQ ID NO: 455377 - DNA, 75 bp, synthetic construct
  source 1..75: mol_type = other DNA
cttatttttgctattttaaatgtaatcgggctgataataggtgttattaatgtttatagtttgcaagggcatatt

SEQ ID NO: 455378 - DNA, 75 bp, synthetic construct
  source 1..75: mol_type = other DNA
tcttgttatattaaatttattttgtttgatttggttgatttataatacaattattattggcgcaaccctggcagt

SEQ ID NO: 455379 - DNA, 75 bp, synthetic construct
  source 1..75: mol_type = other DNA
aagggcgggttaataaaaaataaatttgttgactggcgaatctcatatccttatcttatttttgctattttaaat

SEQ ID NO: 455380 - DNA, 75 bp, synthetic construct
  source 1..75: mol_type = other DNA
ttttttgaaatatgtttcatctctctgaaaggttattgcaatatggttttttatattctgcggacgctgaaaagc

SEQ ID NO: 455381 - DNA, 75 bp, synthetic construct
  source 1..75: mol_type = other DNA
taaggtatatcttattgacgagcaaggtaatgaaaggaaaggaaagcctctttcacttttaaatggcccctttaa

SEQ ID NO: 455382 - DNA, 75 bp, synthetic construct
  source 1..75: mol_type = other DNA
gggcgcctagcacttttctatataaagacagacgagctgcatcgaagagtttgtctgcactaatgggtggtgaat

SEQ ID NO: 455383 - DNA, 75 bp, synthetic construct
  source 1..75: mol_type = other DNA
caatggtgtttctcgccagtgccgcttcagattatgtcaatggacaactattagtcattgatggcggatattcaa

SEQ ID NO: 455384 - DNA, 75 bp, synthetic construct
  source 1..75: mol_type = other DNA
aaaacgatgggctggtttattgccgataaaaaattatcgatgttgcaaacaccacatcattttttttcccccgat

SEQ ID NO: 455385 - DNA, 75 bp, synthetic construct
  source 1..75: mol_type = other DNA
tacttggttactttcaggtttgcttcccgctgaaccgagaaagtatacccttaccagagaataaagaagaatggc

SEQ ID NO: 455386 - DNA, 75 bp, synthetic construct
  source 1..75: mol_type = other DNA
ctgaggatcaaaggggaacttataataagaaggacgaaaaatataacacaagaggtggctattttactcagcctc

SEQ ID NO: 455387 - DNA, 75 bp, synthetic construct
  source 1..75: mol_type = other DNA
cactatggctcgttcttttaaagccgtagccaatggcaaaatttatatcggtaaaattgacacggacccggtaaa

SEQ ID NO: 455388 - DNA, 75 bp, synthetic construct
  source 1..75: mol_type = other DNA
tggtctacgatctgacggcgacttttgcgcagcaaatgcaggctgaaggggttgtcgcgaccaacaaagtctcgg

SEQ ID NO: 455389 - DNA, 75 bp, synthetic construct
  source 1..75: mol_type = other DNA
gggcgcggcgctggcaatgatgaccgacgccggacgtagcgccatgctcaaccctggcccgcatggttttagcga

SEQ ID NO: 455390 - DNA, 75 bp, synthetic construct
  source 1..75: mol_type = other DNA
gtgccgcaggcgcagccaccggcgaggtggtgggaatgatagccacacagatgtacggtaagccggtgagtgaac

SEQ ID NO: 455391 - DNA, 75 bp, synthetic construct
  source 1..75: mol_type = other DNA
tcaatatcaagactgtggagacgctttcacgagtcaacccggcccgctaccttgtggatcagatgcttccatacg

SEQ ID NO: 455392 - DNA, 75 bp, synthetic construct
  source 1..75: mol_type = other DNA
gtacgctggcaaccgtgtcagcagggctggccggaggtcttaccggaaacagcaccgcatcagcagcagtgggag

SEQ ID NO: 455393 - DNA, 75 bp, synthetic construct
  source 1..75: mol_type = other DNA
gcgagcgctgcggcgtcagcatttgggggaattagtaaggttaaagggaattcccagcctaaaattgaacaaatc

SEQ ID NO: 455394 - DNA, 75 bp, synthetic construct
  source 1..75: mol_type = other DNA
aggtgtagatgatttagtgctaataagtggagccaccaaattaggggttctgcataagaaagctggaaaatcatt

SEQ ID NO: 455395 - DNA, 75 bp, synthetic construct
  source 1..75: mol_type = other DNA
tccattcataatcttaggcggcgaattgaggcttatggtttagacttattcctttccgcaataaaggatgatagt

SEQ ID NO: 455396 - DNA, 75 bp, synthetic construct
  source 1..75: mol_type = other DNA
gtgtcgctggatgtgacccatgcgcgcagtcagttagccgacgacagtcgtcatgagggggattccattcgcttc

SEQ ID NO: 455397 - DNA, 75 bp, synthetic construct
  source 1..75: mol_type = other DNA
tggtgcagtaccgtatattgctgaaattatcaaacagaccaccccggacggtgcgggacgtgtggcaactcatgc

SEQ ID NO: 455398 - DNA, 75 bp, synthetic construct
  source 1..75: mol_type = other DNA
gtatcagcactggcggcagcatcggtggccagttcgcgggaaatatggccaacaatctgctggttggtgcaaatc

SEQ ID NO: 455399 - DNA, 75 bp, synthetic construct
  source 1..75: mol_type = other DNA
atgagccgcctggaacattatgccggtcaggatgaaattggcctgcgttacaacagccaccggacaaaacgagaa

SEQ ID NO: 455400 - DNA, 75 bp, synthetic construct
  source 1..75: mol_type = other DNA
aagcattaaccccagaagaggaagcagcgatcgccgccctctctctgaagctggcaaccaacaagccacggcccc

SEQ ID NO: 455401 - DNA, 75 bp, synthetic construct
  source 1..75: mol_type = other DNA
atacctgggccacgccggcgggaatgaaatatatccatgacgagtggaaagagggtaatgcgcgtgaaaatcagg

SEQ ID NO: 455402 - DNA, 75 bp, synthetic construct
  source 1..75: mol_type = other DNA
cagcaagaggagcaggtagaaatcttggagaccaaattgattatgccttacgacagatgcgatgggggcagacta

SEQ ID NO: 455403 - DNA, 75 bp, synthetic construct
  source 1..75: mol_type = other DNA
tgagggatggtcggtggtgacactgacggcatcgccggaatggcctgtcacagggagcgtgggcatcgacaacag

SEQ ID NO: 455404 - DNA, 75 bp, synthetic construct
  source 1..75: mol_type = other DNA
ctaccccggcgttaaggggaaacagagggtttctcagtgggcgaagtcaaacatcagaatggaaggcatcccgga

SEQ ID NO: 455405 - DNA, 75 bp, synthetic construct
  source 1..75: mol_type = other DNA
tcagaaagtctctggtgagtgcaccgaagatattgtcaacgatttcgtcatcgaactgcgaggactcatcttcag

SEQ ID NO: 455406 - DNA, 75 bp, synthetic construct
  source 1..75: mol_type = other DNA
gagggaaatgcccgcgaaaaccaggcgttatttgattgtcatggcaaagtgctgccgtcgataacggtatttaaa

SEQ ID NO: 455407 - DNA, 75 bp, synthetic construct
  source 1..75: mol_type = other DNA
acaagagttaaatattttaaagattattgggaaaaggtaaacgatgatattcccctgactcacccactaagacat

SEQ ID NO: 455408 - DNA, 75 bp, synthetic construct
  source 1..75: mol_type = other DNA
ggcatgatgattcatatggaacatcatcaattgatattactggcagtggagatctaatatcattaggtggtcatg

SEQ ID NO: 455409 - DNA, 75 bp, synthetic construct
  source 1..75: mol_type = other DNA
tccggctgaactggtgcggctgctggacaggctggaggaagaaatccgggcagaccgcgtgagcagtgaaagccg

SEQ ID NO: 455410 - DNA, 75 bp, synthetic construct
  source 1..75: mol_type = other DNA
atttatggctaaagctaagacagacgtcttaatgcgtttaggttttcttggtacttttttacaagtaagttcttt

SEQ ID NO: 455411 - DNA, 75 bp, synthetic construct
  source 1..75: mol_type = other DNA
agcctaatgtcggccttacaattttggattgtctctacctggcgaccttcattcaaattgtttatcaacaaacat

SEQ ID NO: 455412 - DNA, 75 bp, synthetic construct
  source 1..75: mol_type = other DNA
aatctaagtttaagacaatatcaaaaattgagatcacctcttcgttagtttctgtgctggttgccataatcatgg

SEQ ID NO: 455413 - DNA, 75 bp, synthetic construct
  source 1..75: mol_type = other DNA
ttttaccatcaagtttagatcttaatgtaaaaacaacagctggcaatacagcagtatcgtctggaacatataatg

SEQ ID NO: 455414 - DNA, 75 bp, synthetic construct
  source 1..75: mol_type = other DNA
tgtttaatcacactacaaaaacagctggtaatatagagcataatttgcagctaagttttctcgtggattcacgac

SEQ ID NO: 455415 - DNA, 75 bp, synthetic construct
  source 1..75: mol_type = other DNA
ttcagtagaaatgtcatgatcaaaaatggaccgttatcaaccagatgctctgcgcgcttgatgccagcattggct

SEQ ID NO: 455416 - DNA, 75 bp, synthetic construct
  source 1..75: mol_type = other DNA
tctcttgagggttgggataagggggggaaggaaaaagagataagcgagttttataaaatatttggcaccaaaggt

SEQ ID NO: 455417 - DNA, 75 bp, synthetic construct
  source 1..75: mol_type = other DNA
ccattcgtaagcttatgcgcgaagtgcgtaaactcacgctaaaaaaatatcctcaggcaagcaaatatatttttc

SEQ ID NO: 455418 - DNA, 75 bp, synthetic construct
  source 1..75: mol_type = other DNA
tgttattacttttgagaatggtagcggtgacacatttggcactaccatatcaacaaataactccaatgtatccat

SEQ ID NO: 455419 - DNA, 75 bp, synthetic construct
  source 1..75: mol_type = other DNA
ccactgagcggcagagcgcctacccggttatgcgtctggtggcgttgatgaatctgggaagccacattttgctga

SEQ ID NO: 455420 - DNA, 75 bp, synthetic construct
  source 1..75: mol_type = other DNA
ggctcttccaccagaccgcacagacatggggctcggaacgttacctgaaggatgactggcacggcctgcagcttt

SEQ ID NO: 455421 - DNA, 75 bp, synthetic construct
  source 1..75: mol_type = other DNA
aacagcctgctgaacaatgccctggtgctgagaagccgtaaggttgagctgctggaacaggaggtgtggggcatg

SEQ ID NO: 455422 - DNA, 75 bp, synthetic construct
  source 1..75: mol_type = other DNA
cctgtggaactggcagagaaaactaacacgcccgtataccagtctggatcactggcaatgagcaagctgactaat

SEQ ID NO: 455423 - DNA, 75 bp, synthetic construct
  source 1..75: mol_type = other DNA
tactgttgactatttgtgccgttatttctggtgcagaaggctgggaagatatagaggattttggggaaacacatc

SEQ ID NO: 455424 - DNA, 75 bp, synthetic construct
  source 1..75: mol_type = other DNA
aactgtcgaatatgttcaaaacaaaacaattactaataaagggaaagaaaaaattgaaaaatatgtctctcttat

SEQ ID NO: 455425 - DNA, 75 bp, synthetic construct
  source 1..75: mol_type = other DNA
atagcgcgctggatcacagcgaaaaccgactgtggataatggcagagatggaacgagagctgattgtcgagcgaa

SEQ ID NO: 455426 - DNA, 75 bp, synthetic construct
  source 1..75: mol_type = other DNA
taggcccatggagattgcgcaacaattcaacatggagtcgtagtagtggccaaaccgcagaatggaagaatctca

SEQ ID NO: 455427 - DNA, 75 bp, synthetic construct
  source 1..75: mol_type = other DNA
tcccgttcgtgttgctgttatgaatgctgatcaggtttgtgcaattctggcacggagaaacgcggaacgggagaa

SEQ ID NO: 455428 - DNA, 75 bp, synthetic construct
  source 1..75: mol_type = other DNA
ggattaatgatggtattgaacgcgatccgcagcagttttttaaacgtgccaacagcaaatcaccagagcggggag

SEQ ID NO: 455429 - DNA, 75 bp, synthetic construct
  source 1..75: mol_type = other DNA
atgagtacgcaacccatcattattgagttcggcagctatcgctggcccagacatcttgcaatacatgaagcaggt

SEQ ID NO: 455430 - DNA, 75 bp, synthetic construct
  source 1..75: mol_type = other DNA
gtcagtgatgccatgaaggacatacaggaagaaatcgatcttcagacccttgttaacgatgcgatggcggagttt

SEQ ID NO: 455431 - DNA, 75 bp, synthetic construct
  source 1..75: mol_type = other DNA
ggtgatgattatactgcaggcgattttttcgatagtgtcagctttcgtggtgtgcagctggcgtcagatgacaac

SEQ ID NO: 455432 - DNA, 75 bp, synthetic construct
  source 1..75: mol_type = other DNA
ccacaaaaatttcctccagcggtattaaatcctggagtgcagatgaaggatatggtgtagaaggggtttcatcct

SEQ ID NO: 455433 - DNA, 75 bp, synthetic construct
  source 1..75: mol_type = other DNA
agaatgaccgacgtattcgactcctagaagaacgtatgaaggtgtggaatgcttttatagtgctacgtaacgttt

SEQ ID NO: 455434 - DNA, 75 bp, synthetic construct
  source 1..75: mol_type = other DNA
tcccattgtccagggttcggcaggtgtaagaattggcgcgccaccggcgtggcgtgctcggtgtgtccgggcggg

SEQ ID NO: 455435 - DNA, 75 bp, synthetic construct
  source 1..75: mol_type = other DNA
tcccggtggcacgccgccaggagcttgcagaatgggctgactctcttacgccgaaacaggagtttcctgcggaac

SEQ ID NO: 455436 - DNA, 75 bp, synthetic construct
  source 1..75: mol_type = other DNA
gtggggattaaggatgtacgggcgttacgtatacttggggcaaaaatgtgttggttgcgactgcggcagcaaaac

SEQ ID NO: 455437 - DNA, 75 bp, synthetic construct
  source 1..75: mol_type = other DNA
ctggtcaatctattaatattaagcttagcaacgcactgtctaatgctacaacttggacagcttctctgccgatta

SEQ ID NO: 455438 - DNA, 75 bp, synthetic construct
  source 1..75: mol_type = other DNA
ccgaactcgccaggctgttcgatctcgatgaagacatcataatccagtgggagagcggagagtatgaaccaacta

SEQ ID NO: 455439 - DNA, 75 bp, synthetic construct
  source 1..75: mol_type = other DNA
aatggtgatagagcagctagcagccttgataacctgtcgtcggcagcagtcaaaacagcaggtgcatttatcagc

SEQ ID NO: 455440 - DNA, 75 bp, synthetic construct
  source 1..75: mol_type = other DNA
gccaatgaataactttgtgaataacactgagtcaagtacaccagctattacgggtgatattgtgaatagcaatgc

SEQ ID NO: 455441 - DNA, 75 bp, synthetic construct
  source 1..75: mol_type = other DNA
accaaagtacacaggttaaaaagttcattcaggatttaactcaaattactggtatggacacaaccgaaacacaag

SEQ ID NO: 455442 - DNA, 75 bp, synthetic construct
  source 1..75: mol_type = other DNA
caattgtcgagaaatacattaagagtcagttttacgcattaagtagtaaagctggtcagatggataacaccaagt

SEQ ID NO: 455443 - DNA, 75 bp, synthetic construct
  source 1..75: mol_type = other DNA
acgtgcatcatcggaaagaagtattgatttcgtattcggtgaccaaagtacacaggttaaaaagttcattcagga

SEQ ID NO: 455444 - DNA, 75 bp, synthetic construct
  source 1..75: mol_type = other DNA
gacgtccagcgcgaagtcaatcctctcggttttaccgtcacaagttaccagcgcgataaagagctgaggaaagaa

SEQ ID NO: 455445 - DNA, 75 bp, synthetic construct
  source 1..75: mol_type = other DNA
ctccagcacacagaaattgagctgtatacgctcgattcgcaaacggggcgtgtcgaatacatcacgcgagtaaaa

SEQ ID NO: 455446 - DNA, 75 bp, synthetic construct
  source 1..75: mol_type = other DNA
tgggcgcaacgctgagttacaacatgcgtctggggaacggtatggaagttgagccgtggctgaaggcggctgtgc

SEQ ID NO: 455447 - DNA, 75 bp, synthetic construct
  source 1..75: mol_type = other DNA
atctatgcaggttatgaaagattagcttctacacctgaacgaatggaagcacaagctaaattaccagagctggct

SEQ ID NO: 455448 - DNA, 75 bp, synthetic construct
  source 1..75: mol_type = other DNA
aaccaatcttttaaatagtttaggtgggagtggtaaaacattaggtgaaagttttggtagcttgatgagtgatat

SEQ ID NO: 455449 - DNA, 75 bp, synthetic construct
  source 1..75: mol_type = other DNA
aaatcaaaaatggtgtaccgacggtaggagttatcgacacatccggaaaacctgtcgttgtagcccaggacaaac

SEQ ID NO: 455450 - DNA, 75 bp, synthetic construct
  source 1..75: mol_type = other DNA
ctcttttatcgcctgaatgtcttcccactggaattgccgccgctacgcgatcgtccggaagatatccctctttta

SEQ ID NO: 455451 - DNA, 75 bp, synthetic construct
  source 1..75: mol_type = other DNA
ggctcaaactctgccgataacattggtggcgtatattacagaccggttcagaaatacattaacgggacatggtac

SEQ ID NO: 455452 - DNA, 75 bp, synthetic construct
  source 1..75: mol_type = other DNA
cgcgaagcctgcggcttaacaaccgccgaactcgccaggctgctcgatctcgatgaagaaattatcatccagtgg

SEQ ID NO: 455453 - DNA, 75 bp, synthetic construct
  source 1..75: mol_type = other DNA
atcaggatgtgccggttacaaacgatggtttctggcctgatttgaacgtaaaggattttcaggaaagccgaagta

SEQ ID NO: 455454 - DNA, 75 bp, synthetic construct
  source 1..75: mol_type = other DNA
tgtcttcacctgctgcatttcgtcagcagtattagtgagtataaaatatcggtacaagacgagccttttttaata

SEQ ID NO: 455455 - DNA, 75 bp, synthetic construct
  source 1..75: mol_type = other DNA
atgaacctcaaagcgttgacaccaccgataagagtaaagaagccatcgcctcgcttaaccccatgtgtacactgc

SEQ ID NO: 455456 - DNA, 75 bp, synthetic construct
  source 1..75: mol_type = other DNA
aatgtctcctgaaaaattagatgaattagatagaaaaggagaaatccattggtctaaaacaggaaatccccgacg

SEQ ID NO: 455457 - DNA, 75 bp, synthetic construct
  source 1..75: mol_type = other DNA
acagaacatggattcaacaacaagaagaataaatgaaagttattataaagttataaataatgctgtttatttaag

SEQ ID NO: 455458 - DNA, 75 bp, synthetic construct
  source 1..75: mol_type = other DNA
gtgggactattcatcttgcaggttgcgtgattgaggttatgggcgttaaagcagcaatgaccattcgtgtgacca

SEQ ID NO: 455459 - DNA, 75 bp, synthetic construct
  source 1..75: mol_type = other DNA
ggtggggccgtaagcacaacgacaggagactggacgaccgcacagtttatcgggtggctggattctcagggcgca

SEQ ID NO: 455460 - DNA, 75 bp, synthetic construct
  source 1..75: mol_type = other DNA
ccggaggaaaataccaaaatcaaatgtggttatgcacactttgaagcattgggtgatgaggtgaattttacggta

SEQ ID NO: 455461 - DNA, 75 bp, synthetic construct
  source 1..75: mol_type = other DNA
ccagtggcagttatcgacaggaacggaaacgtcaccctcagtccggttgtatgtaaagtatgtgaatactggtga

SEQ ID NO: 455462 - DNA, 75 bp, synthetic construct
  source 1..75: mol_type = other DNA
ctgtttattcaatcagtaagcaaaatattcgacagacattggaagtcgtcaaaaacctcccacgtagaaataaaa

SEQ ID NO: 455463 - DNA, 75 bp, synthetic construct
  source 1..75: mol_type = other DNA
atacgctcacaggccgctgcttaaggatcttctccctgttgtggactgcattcaatggtacacagcaactaggat

SEQ ID NO: 455464 - DNA, 75 bp, synthetic construct
  source 1..75: mol_type = other DNA
tgaagttaatgggaactggcgggtagttttcaaggttgaggaaccaaacgtcttagacgttgatcttgaagatta

SEQ ID NO: 455465 - DNA, 75 bp, synthetic construct
  source 1..75: mol_type = other DNA
atgagtggtcggggttttgtcttgccaatgtttagcggtctgattgaaaacatgatcaacaaggcgctgcgtaag

SEQ ID NO: 455466 - DNA, 75 bp, synthetic construct
  source 1..75: mol_type = other DNA
atggccgccattgaactggacgaacgggttattcacccgcattttgttctggtttatgaggtcgatagccagtgg

SEQ ID NO: 455467 - DNA, 75 bp, synthetic construct
  source 1..75: mol_type = other DNA
aaatggacaaaagaattaataaatgattatttgtatggctgtttactttcactgtattctatctgcgtaagagat

SEQ ID NO: 455468 - DNA, 75 bp, synthetic construct
  source 1..75: mol_type = other DNA
cctgttccagttgccacgatggtacgtgaagatgcaactaatttagtcaatcttaaaacactactcaatgatggt

SEQ ID NO: 455469 - DNA, 75 bp, synthetic construct
  source 1..75: mol_type = other DNA
gatcgcgtgctggtggaaggtcaagacgtgggctatgtcgtgaaggcactcttttccccagcgttgcagcgtttc

SEQ ID NO: 455470 - DNA, 75 bp, synthetic construct
  source 1..75: mol_type = other DNA
aataacaattgaagatgcttctttttcttcatcaaactcacgatattaccagagaacccaacctcttgacgtcca

SEQ ID NO: 455471 - DNA, 75 bp, synthetic construct
  source 1..75: mol_type = other DNA
ttatcacattctcttgtaaatgaaagtatattgaagggatgttgttttgagaacggcagtttaggtgatgttaag

SEQ ID NO: 455472 - DNA, 75 bp, synthetic construct
  source 1..75: mol_type = other DNA
accaaaaagcaatccagaggtatatacctcaggcgcaagatggggaagactttaggaatcatttacaatataagt

SEQ ID NO: 455473 - DNA, 75 bp, synthetic construct
  source 1..75: mol_type = other DNA
aaacaatggaatgggatcacactattacatcttgcgacctacaccgctggcggcctgccattgcaggtgccggat

SEQ ID NO: 455474 - DNA, 75 bp, synthetic construct
  source 1..75: mol_type = other DNA
ggtgaaatctacaaccaccaggcactgcgcgccgaatatggcgatcgttatcagttccagaccggatctgactgt

SEQ ID NO: 455475 - DNA, 75 bp, synthetic construct
  source 1..75: mol_type = other DNA
gctctgttcgctgttacgttttgcgtatcagtcgggatttatatcaaccaaaccatttgaaggagaaaaaattac

SEQ ID NO: 455476 - DNA, 75 bp, synthetic construct
  source 1..75: mol_type = other DNA
aaggggggatggaatttttatcagtatccgttgaatccgatctcaaatatagatccattaggattagaaacacta

SEQ ID NO: 455477 - DNA, 75 bp, synthetic construct
  source 1..75: mol_type = other DNA
taatgattcaattattagccaagatgtaactatttgtgcgagcacgcatgattacaacaaacgtgatcatcccct

SEQ ID NO: 455478 - DNA, 75 bp, synthetic construct
  source 1..75: mol_type = other DNA
attcaatgttgggttgcaaggtaatatcaacacggatgttttacaagattcgttttttaaaaatgtcgatttcat

SEQ ID NO: 455479 - DNA, 75 bp, synthetic construct
  source 1..75: mol_type = other DNA
gtcctgcaggcacagctcgcggcaatctctgcaattcgccccggcgtgcgctgccagcagattgacgacgccgcg

SEQ ID NO: 455480 - DNA, 75 bp, synthetic construct
  source 1..75: mol_type = other DNA
gcccaagactggcccgcgttatctcgccaacagaatccacgacgcttggcgatgtggcagacagttttcgcccac

SEQ ID NO: 455481 - DNA, 75 bp, synthetic construct
  source 1..75: mol_type = other DNA
taaacggtaaacagacagaaataacagacatcagtctggtcctgtcactgaacgcatcaggaagaggttttgtca

SEQ ID NO: 455482 - DNA, 75 bp, synthetic construct
  source 1..75: mol_type = other DNA
tattttataaagcaaaacatagaagtaaaaaatacaaagtcggtattattccacactataaagataagcaacgag

SEQ ID NO: 455483 - DNA, 75 bp, synthetic construct
  source 1..75: mol_type = other DNA
gggatggaatttttatcagtatccgttgaatccagttacgaatacagatcctctggggttagaagtttttcctag

SEQ ID NO: 455484 - DNA, 75 bp, synthetic construct
  source 1..75: mol_type = other DNA
aacaacagcgaacttgccgcagacgccaaacaggctacgagcctgcgcgaaaaatacggtgaccttatcgcctga

SEQ ID NO: 455485 - DNA, 75 bp, synthetic construct
  source 1..75: mol_type = other DNA
tagttatcagaactatgatgtctctacacagcaacaactgggggataagacacgggtaacgctgttgggcgatta

SEQ ID NO: 455486 - DNA, 75 bp, synthetic construct
  source 1..75: mol_type = other DNA
atgaatacacttatgttgatgatcaatatgttgtgaatattggtaacgatgtttggatcggtcagggagtcatga

SEQ ID NO: 455487 - DNA, 75 bp, synthetic construct
  source 1..75: mol_type = other DNA
ttatcaccgacgccacttctaagttcagaaaaattaaggcatccaattatcttactagtggcagatacaaaatca

SEQ ID NO: 455488 - DNA, 75 bp, synthetic construct
  source 1..75: mol_type = other DNA
aggaaaaacattgatgaccttactgaaggcaaatttaatcgaagggcgctatatctttctcatctatgtaaagta

SEQ ID NO: 455489 - DNA, 75 bp, synthetic construct
  source 1..75: mol_type = other DNA
atggctaaagaatatccatacgaccccacaggacctgtaaaaacccgggatttgcgggtgtgtaaattttatgca

SEQ ID NO: 455490 - DNA, 75 bp, synthetic construct
  source 1..75: mol_type = other DNA
tcagtaagccaggtgcgcagtccgctgatgcggggaaatatacctgtgtggtgaccgattcggcagagaaagcac

SEQ ID NO: 455491 - DNA, 75 bp, synthetic construct
  source 1..75: mol_type = other DNA
gaagtgcgccagcacacctggtcatccggtaccaacggcgtggtggctgcaacgttctcactgcgtctgaaaggc

SEQ ID NO: 455492 - DNA, 75 bp, synthetic construct
  source 1..75: mol_type = other DNA
cgaaaagattgaaatcctcaaatctgattaccagcggagcctcgttgaattggagactctctacggcgcattggg

SEQ ID NO: 455493 - DNA, 75 bp, synthetic construct
  source 1..75: mol_type = other DNA
cagacagcataatcgccggtaccccgcagaacagctccggcagcgtcatcaccgccacagtcgttgataataatg

SEQ ID NO: 455494 - DNA, 75 bp, synthetic construct
  source 1..75: mol_type = other DNA
agatagtcaatattgcgcccgatgccagcaacgcgcaggttacgctgaacatccctgctcaacaggtggtgacga

SEQ ID NO: 455495 - DNA, 75 bp, synthetic construct
  source 1..75: mol_type = other DNA
gagttggagttagcgcatgagcctataaacgtaattaacactgaaagtggtgaagctgccgaaaacgagccagaa

SEQ ID NO: 455496 - DNA, 75 bp, synthetic construct
  source 1..75: mol_type = other DNA
gtactatcaggaacatttttgcaggcaacacaaccacacagaaacagaaacccggctgacgacaaattctgaagc

SEQ ID NO: 455497 - DNA, 75 bp, synthetic construct
  source 1..75: mol_type = other DNA
aaaaacattgatggagaatctgaaacaaaaatggaaaacggtcttcgccagaccattgccattaaaatggttgcc

SEQ ID NO: 455498 - DNA, 75 bp, synthetic construct
  source 1..75: mol_type = other DNA
accagtccggaacattcgattctttcgggaatacaggccctctactgactcaatggttctctcctgtcagccatt

SEQ ID NO: 455499 - DNA, 75 bp, synthetic construct
  source 1..75: mol_type = other DNA
gaggagattaacaacagctaccagacgatggaaggcaagctgatgccgctgccgcacccgatggtagatggcaag

SEQ ID NO: 455500 - DNA, 75 bp, synthetic construct
  source 1..75: mol_type = other DNA
caatggaatagacgcggctgtttcatttagccaggcacagattcctgatgtcatccatcagcttttgatgtggca

SEQ ID NO: 455501 - DNA, 75 bp, synthetic construct
  source 1..75: mol_type = other DNA
atattatcgtgacaaaattagccaggtaagtggtgttgtgccacaaacgcaaacggggattaatttattcaaggg

SEQ ID NO: 455502 - DNA, 75 bp, synthetic construct
  source 1..75: mol_type = other DNA
ggctggtgagttcggtcattggtggcgtgattggatcacttattttgatgttggctgcgcctgtactggcgaaat

SEQ ID NO: 455503 - DNA, 75 bp, synthetic construct
  source 1..75: mol_type = other DNA
ttgatcaacagggatattttagttgcgagtcattaacagctgaagaattaatgatgttaaaagacctgtttgata

SEQ ID NO: 455504 - DNA, 75 bp, synthetic construct
  source 1..75: mol_type = other DNA
gcatttaagaaattatcacatgaatataaatcagaatattttttcaaaaatatcatagcaaacgaagtatttttg

SEQ ID NO: 455505 - DNA, 75 bp, synthetic construct
  source 1..75: mol_type = other DNA
cgccgtatcatcagctggaattcaggctatctgtgtattggtgattatagcgtgtgtttatctgatgatttttgc

SEQ ID NO: 455506 - DNA, 75 bp, synthetic construct
  source 1..75: mol_type = other DNA
atgtattcacagtgccagaccagcactccgctgaatccatcattccagttggtcaattctgaaaacgaccagtgg

SEQ ID NO: 455507 - DNA, 75 bp, synthetic construct
  source 1..75: mol_type = other DNA
tggaaacccaactgcaggcgaacgctgagagcgacctgaaaaccaaacgtgacgctgttaaagcgaaattctcgt

SEQ ID NO: 455508 - DNA, 75 bp, synthetic construct
  source 1..75: mol_type = other DNA
gctctattttctaggtttgctgttttaatttcatccctaaaatacaaatcaatatgtctctctaatgttttcttt

SEQ ID NO: 455509 - DNA, 75 bp, synthetic construct
  source 1..75: mol_type = other DNA
catgaggttggtgcaaatattatcccttattacagtaataattataaagtggaacatgccagaactcatggcagt

SEQ ID NO: 455510 - DNA, 75 bp, synthetic construct
  source 1..75: mol_type = other DNA
atggccgagctggccggagaagggctaccactcgacctcatcactattacggaacggctggagaacagaggcgac

SEQ ID NO: 455511 - DNA, 75 bp, synthetic construct
  source 1..75: mol_type = other DNA
tatgcaggcattgtggtggagaagagcgttctgcgtcagttacaggccaccggaaacaccctgattgctgatgtg

SEQ ID NO: 455512 - DNA, 75 bp, synthetic construct
  source 1..75: mol_type = other DNA
tattatctattgggcggggtgaatacaggcttcaaaattcacttatatgctgatcaaaattttgcccctaccgcc

SEQ ID NO: 455513 - DNA, 75 bp, synthetic construct
  source 1..75: mol_type = other DNA
ccggacgatcttgatggtatcaattctgttgaggttgtgccggcatttactcaagctgaaattgatgatttttat

SEQ ID NO: 455514 - DNA, 75 bp, synthetic construct
  source 1..75: mol_type = other DNA
ttatctttgatgctgaagtgatgaggaatagtcgtaccttaaatgagctagataaagatgtcttccaggggttac

SEQ ID NO: 455515 - DNA, 75 bp, synthetic construct
  source 1..75: mol_type = other DNA
gtgatggcaaaatatatgatgccttacaattagcaagagaatgcattcaactttgggactcttatattccagagc

SEQ ID NO: 455516 - DNA, 75 bp, synthetic construct
  source 1..75: mol_type = other DNA
aaaaagaattattcaaccctattttgatcgatgttattcaagagttaaggaaaaacgattttgtgaggcgttctt

SEQ ID NO: 455517 - DNA, 75 bp, synthetic construct
  source 1..75: mol_type = other DNA
atgctttcagctacaataatcgtgatgttgcgagtaggaattttataaataaaaatttcaataagacacacagtt

SEQ ID NO: 455518 - DNA, 75 bp, synthetic construct
  source 1..75: mol_type = other DNA
atcccgctgacatcattgcgggtttgcgcaagaagggaacgtcaatggcggcggaatctcgcagaaatggtttga

SEQ ID NO: 455519 - DNA, 75 bp, synthetic construct
  source 1..75: mol_type = other DNA
tgttttatggaatccactggccgatccggtagaagtcgtacctcaaagtgttaacaaatgtcgtgaaggtgccga

SEQ ID NO: 455520 - DNA, 75 bp, synthetic construct
  source 1..75: mol_type = other DNA
gcatgaaagaacttcctaaaggcgcagtaccagcactggagaaagaactgcttaagcgcctgaatgatcactatg

SEQ ID NO: 455521 - DNA, 75 bp, synthetic construct
  source 1..75: mol_type = other DNA
gttgatggccaggtgtttgaatatagccgcaacgcttttaatactgatgactataaatttaccctgatagcgtag

SEQ ID NO: 455522 - DNA, 75 bp, synthetic construct
  source 1..75: mol_type = other DNA
tgatgttaactggcagctagggcttgggcttctgaatacgaataaaaatgaagcgataaagtgcctactcttagc

SEQ ID NO: 455523 - DNA, 75 bp, synthetic construct
  source 1..75: mol_type = other DNA
tcgctggttaaaagcatgcttacgaacccggtagtacgccgtaggtttgatgatcaagtctacagaatgtcattt

SEQ ID NO: 455524 - DNA, 75 bp, synthetic construct
  source 1..75: mol_type = other DNA
ttccgttgatttggttactccagctcaacaacaggttaaggctgggacctatacagcaacgctgtccatatcggc

SEQ ID NO: 455525 - DNA, 75 bp, synthetic construct
  source 1..75: mol_type = other DNA
ctccgaaatacggaaagtgtacagaaacgcaggaatgctgctgcaagagaggactactacaccaggagaacgttt

SEQ ID NO: 455526 - DNA, 75 bp, synthetic construct
  source 1..75: mol_type = other DNA
gtgccaaaatgatcagtaaaaacacaaaaaaaaaatggaatattaagagatttttctttcatttaaatgtaagat

SEQ ID NO: 455527 - DNA, 75 bp, synthetic construct
  source 1..75: mol_type = other DNA
acttgcacaaaagcgtcataatgatatgaataaattgaaatatcttatgacgcttcttactttaccgcttccagc

SEQ ID NO: 455528 - DNA, 75 bp, synthetic construct
  source 1..75: mol_type = other DNA
gccccggtgccgtccggtgtacctgatgagctggcagcgttgtaccgcgctgaaaactgcaactgggattacatc

SEQ ID NO: 455529 - DNA, 75 bp, synthetic construct
  source 1..75: mol_type = other DNA
atgatggcagctcagagggtagcgcagtttacggataatccggacattaccaaagctattcagacactgctgaac

SEQ ID NO: 455530 - DNA, 75 bp, synthetic construct
  source 1..75: mol_type = other DNA
gtgaaaaagtgtccggcccgggaatgacaaatgtttatcggctgacgctccggtatcaggggaaagcccataccc

SEQ ID NO: 455531 - DNA, 75 bp, synthetic construct
  source 1..75: mol_type = other DNA
acgtcgtcgcaagtggcctcaatgattttagaccattatcagaggtacggggcggcggggagagatttagtgatg

SEQ ID NO: 455532 - DNA, 75 bp, synthetic construct
  source 1..75: mol_type = other DNA
cggattaattcataaagaaatgcatttggggtggctggaagagtcgctggtagatgttattgtgccaggaggggc

SEQ ID NO: 455533 - DNA, 75 bp, synthetic construct
  source 1..75: mol_type = other DNA
aatcatttattccagtccttgaaagaatgaggaaatttgatgctgattgggtggaagaatataaagaagcagtta

SEQ ID NO: 455534 - DNA, 75 bp, synthetic construct
  source 1..75: mol_type = other DNA
catctaagatatatttcaattcaaattcatcctctctattcttcacattatataatttaataagtgataaccata

SEQ ID NO: 455535 - DNA, 75 bp, synthetic construct
  source 1..75: mol_type = other DNA
gagttagtttttggagcattgatgctcgtctcttaataaataaagttttgcttaacgaaagcaatgggttatatg

SEQ ID NO: 455536 - DNA, 75 bp, synthetic construct
  source 1..75: mol_type = other DNA
gaaaaatccacctgtaccactgcgaccatcgcggcctgccgctggcgctcatcagcacggaaggggcaacagcgt

SEQ ID NO: 455537 - DNA, 75 bp, synthetic construct
  source 1..75: mol_type = other DNA
tgctactaacaacactgggggtaaagaccgataatctcaatacagaagataattgtatttcactggatgaagcgg

SEQ ID NO: 455538 - DNA, 75 bp, synthetic construct
  source 1..75: mol_type = other DNA
gaacggtatgaacattacctaaacagaaaaacagtgatcagaaaaaccgacaaactggatttagaagttttaaat

SEQ ID NO: 455539 - DNA, 75 bp, synthetic construct
  source 1..75: mol_type = other DNA
catccacacctccctgttgaaagtcggcgtcaggcaaaggggacccgcttcctgtggcagtacaacgataaatgg

SEQ ID NO: 455540 - DNA, 75 bp, synthetic construct
  source 1..75: mol_type = other DNA
acgtacacggccagcggagaactgcgggcggtgtatgaccgcagcgggacgcaggttcgcgggtttacttatgat

SEQ ID NO: 455541 - DNA, 75 bp, synthetic construct
  source 1..75: mol_type = other DNA
atgaccttacctgaatttgaggatacagaagctgtagagtgggttggtaaagatgtattctatataggaagtgag

SEQ ID NO: 455542 - DNA, 75 bp, synthetic construct
  source 1..75: mol_type = other DNA
cttctaatgtttttagtgagttattaagcaaatttcctaactcgtacgaagtagataaatatgccgatgctagag

SEQ ID NO: 455543 - DNA, 75 bp, synthetic construct
  source 1..75: mol_type = other DNA
agatatcaatcttagtaggagcgtctttgctgcagagcgtaatatttctatttttggtcgactctcgcgaatatt

SEQ ID NO: 455544 - DNA, 75 bp, synthetic construct
  source 1..75: mol_type = other DNA
taaagaaactgcttgtggtttgattaaaccacaaacaaaaaaagcccccctcagcagattgatgcctttcgtaag

SEQ ID NO: 455545 - DNA, 75 bp, synthetic construct
  source 1..75: mol_type = other DNA
taaagaaactgcttgtggtttgattaaaccacaaacaaaaaaaagcccccctcagcagattgatgcctttcgtaa

SEQ ID NO: 455546 - DNA, 75 bp, synthetic construct
  source 1..75: mol_type = other DNA
ttcgcagggcgttgtatatgcctgcaatggtagccaccagtaagactgagtggggacggatgttccgtgaccgtc

SEQ ID NO: 455547 - DNA, 75 bp, synthetic construct
  source 1..75: mol_type = other DNA
attgtgaccgaggcgctggtaccgacacctgcctttttcccgttaatcgacaaactggcggcaaaagccaatacc

SEQ ID NO: 455548 - DNA, 75 bp, synthetic construct
  source 1..75: mol_type = other DNA
tcggccgatgaaaagccagaaactgaaggattttgacgagcaggtaacatactgcttcaaggggatgtggcagga

SEQ ID NO: 455549 - DNA, 75 bp, synthetic construct
  source 1..75: mol_type = other DNA
gctcatgccccccattttatggggccatgggaaaacgtcctgcaaactgccgcgcacaggaataaaagcggcgcg

SEQ ID NO: 455550 - DNA, 75 bp, synthetic construct
  source 1..75: mol_type = other DNA
aaagagagagtatatgcagaagttgaagctggcttagaccaactgcagacttttaaggaaagctttaatgaattt

SEQ ID NO: 455551 - DNA, 75 bp, synthetic construct
  source 1..75: mol_type = other DNA
attatctggtggtcaattgaatggtgcactgggtatcggaacatccagtgctcttggcggtaactcgattgtttt

SEQ ID NO: 455552 - DNA, 75 bp, synthetic construct
  source 1..75: mol_type = other DNA
ttacataagcctgattggtggtgcagggtataacgttggctccccgcagcaagcaggcatctctgagctggttct

SEQ ID NO: 455553 - DNA, 75 bp, synthetic construct
  source 1..75: mol_type = other DNA
attgtgaatttaatggttttgttatgcctggcggttggtctgatcgcggttcatatgcggctggttttttctcaa

SEQ ID NO: 455554 - DNA, 75 bp, synthetic construct
  source 1..75: mol_type = other DNA
cagggggtttaccaggccgggcaacagatccctaccgaaaacgagctttgtacacaatataacgtcagccgcatt

SEQ ID NO: 455555 - DNA, 75 bp, synthetic construct
  source 1..75: mol_type = other DNA
acagacaatattttatcagaaagaaaaacagcaagatggtcaaaaatgacccaaagaaagcttggaatattcttc

SEQ ID NO: 455556 - DNA, 75 bp, synthetic construct
  source 1..75: mol_type = other DNA
aaataataacaaagagcatatcttattagataaaccagttattattcattatactggtccagtcaaaccatggga

SEQ ID NO: 455557 - DNA, 75 bp, synthetic construct
  source 1..75: mol_type = other DNA
gaccctgggtggatcagttgctcagacagaactgatggtgtcatgtccgggatatcacccgttacagccaccaac

SEQ ID NO: 455558 - DNA, 75 bp, synthetic construct
  source 1..75: mol_type = other DNA
acagtattagctgtgctcctatatccagatattaaatatttgaacgaatcccataatgatttcgcaattttaaaa

SEQ ID NO: 455559 - DNA, 75 bp, synthetic construct
  source 1..75: mol_type = other DNA
cggtggaaaaatgcgtacggtcattgccgataaacagtttggttatcactactttgaccttgaataccttgaagg

SEQ ID NO: 455560 - DNA, 75 bp, synthetic construct
  source 1..75: mol_type = other DNA
cgataaaggattagcaaattctcgaatcggtttggtattagtgactccagcgctgttaaaccgactgcccaaaga

SEQ ID NO: 455561 - DNA, 75 bp, synthetic construct
  source 1..75: mol_type = other DNA
actgatgccgccaccggttcacaggttgagatcgtgaacgtgacagctaaggctggggacatcttcacgattgaa

SEQ ID NO: 455562 - DNA, 75 bp, synthetic construct
  source 1..75: mol_type = other DNA
aggaagcgccacgtattatcgcagtcctgatgatagctcgctggcaattgaagtcattaataacggagggactct

SEQ ID NO: 455563 - DNA, 75 bp, synthetic construct
  source 1..75: mol_type = other DNA
ttaactgattattcaagtatttttattgattttcttgttacaggtaagcctgttaattttattccgtatgattta

SEQ ID NO: 455564 - DNA, 75 bp, synthetic construct
  source 1..75: mol_type = other DNA
cgttgccggtgacgagctggccgcccgccgcacccttgtccgcgaatacgtgctttcccttgccgcccgtctgcc

SEQ ID NO: 455565 - DNA, 75 bp, synthetic construct
  source 1..75: mol_type = other DNA
cccctttttctggcttgcatccgttgtgtgtttcctggtacagttttgctgttgccgcaaaatcggcaaccgggc

SEQ ID NO: 455566 - DNA, 75 bp, synthetic construct
  source 1..75: mol_type = other DNA
tttgcgcggtacaaagcgttggctcctaacaacgttatgtatgacgaaaagcgcagagtgcacttgaagacgagc

SEQ ID NO: 455567 - DNA, 75 bp, synthetic construct
  source 1..75: mol_type = other DNA
gcgagagttccatttagcacttaaaaatccagaagcactatacggcgttgacaatgctgcactcgctcctggata

SEQ ID NO: 455568 - DNA, 75 bp, synthetic construct
  source 1..75: mol_type = other DNA
cgatcggtttagaagttatataagagcgggtatctatcaaaaaaagagcagtgatccagctcagttgttggcagt

SEQ ID NO: 455569 - DNA, 75 bp, synthetic construct
  source 1..75: mol_type = other DNA
cgctcggttaatccgattgtggcagagaagatgcgcgccatcctggaagaactgaaacgtaaggagagtggccgt

SEQ ID NO: 455570 - DNA, 75 bp, synthetic construct
  source 1..75: mol_type = other DNA
cacgctatgccggaatggcatcggtgaaatatatcagcagaatgccagaagaacggcggctggctatccttaccg

SEQ ID NO: 455571 - DNA, 75 bp, synthetic construct
  source 1..75: mol_type = other DNA
aaaactctgccgacatggcaattttacaacaggacatgagtaatctatcaaaaacgcgtgaacaaatgctttcag

SEQ ID NO: 455572 - DNA, 75 bp, synthetic construct
  source 1..75: mol_type = other DNA
tagtccctgtcagataatggtggtccgggcggggcagccttcgggctggccggtttccaataaggccggtattcc

SEQ ID NO: 455573 - DNA, 75 bp, synthetic construct
  source 1..75: mol_type = other DNA
atgcagcgtgctacaaacatcagccgtagtgttgaagttgattgccaaaataagtaatggcctggagaaaatagg

SEQ ID NO: 455574 - DNA, 75 bp, synthetic construct
  source 1..75: mol_type = other DNA
cgaaaagcaccaaagacagcctgacggacgcggaaaaagccgcgctgaagacgctgacccaacaactgaaagacg

SEQ ID NO: 455575 - DNA, 75 bp, synthetic construct
  source 1..75: mol_type = other DNA
ctttctatgtcttttttaatgagtatatattgacgccagcgatatatatttatatttctatttttttatcggtgg

SEQ ID NO: 455576 - DNA, 75 bp, synthetic construct
  source 1..75: mol_type = other DNA
aatttttaaatgcggagggtatattggtaaaggatgcgtttttgctttggctttctatgtcttttttaatgagta

SEQ ID NO: 455577 - DNA, 75 bp, synthetic construct
  source 1..75: mol_type = other DNA
gttactgccgcagcccgtgaactcagcctgtatgaatcacagcgctacaactggcgcagtaaacagcaaaattag

SEQ ID NO: 455578 - DNA, 75 bp, synthetic construct
  source 1..75: mol_type = other DNA
ctggttccgttggattaagtttaattcacgcatataattatggactaccttcaattattcataataatcgcgata

SEQ ID NO: 455579 - DNA, 75 bp, synthetic construct
  source 1..75: mol_type = other DNA
tggggaaatgggtttctatcatttaaaaataagatattgtggcataaggggttgcctatactttccatgctaaat

SEQ ID NO: 455580 - DNA, 75 bp, synthetic construct
  source 1..75: mol_type = other DNA
acactcttacaaaaagtcagaatgattatcgtcgagttgagttagtatttattggggttgatgttttaaaagaaa

SEQ ID NO: 455581 - DNA, 75 bp, synthetic construct
  source 1..75: mol_type = other DNA
cttctcccgggctttctggtttcatggcacccggacttttgccgggaatactttcccgaggggttacttgcgctg

SEQ ID NO: 455582 - DNA, 75 bp, synthetic construct
  source 1..75: mol_type = other DNA
cccctattccgcaaataccttattcaagaaggttttgttttcccaggtgaaccttggatgtgtggttccggctat

SEQ ID NO: 455583 - DNA, 75 bp, synthetic construct
  source 1..75: mol_type = other DNA
gacagtgaaaataccacatcggtaaaagtgggagagcaatccattggtggactagccatgaatggcggtacgctc

SEQ ID NO: 455584 - DNA, 75 bp, synthetic construct
  source 1..75: mol_type = other DNA
gtcttcttgctgcagttccaagtggtggttcaagtattgcgggtgcattagcacttattggaggaatagcgggcg

SEQ ID NO: 455585 - DNA, 75 bp, synthetic construct
  source 1..75: mol_type = other DNA
atgggaaaaataacaattattctactgcttacattctcatgtacaaaaggtctggcatttgacatttccatgtct

SEQ ID NO: 455586 - DNA, 75 bp, synthetic construct
  source 1..75: mol_type = other DNA
atgccggggtgaacatatatagctggcaggggggagaacagcgaccggccaccatcatcagtgaaccggaccgta

SEQ ID NO: 455587 - DNA, 75 bp, synthetic construct
  source 1..75: mol_type = other DNA
gacctttctaaaatcgaaagccactgggatgagatgatgcgggttgcaggttcgctgaagctgggcacaattcat

SEQ ID NO: 455588 - DNA, 75 bp, synthetic construct
  source 1..75: mol_type = other DNA
ataacgttcttgcctgtgccgcggatgcagccaccggcgaggtggtggggatgatagccacagatgcgtattacc

SEQ ID NO: 455589 - DNA, 75 bp, synthetic construct
  source 1..75: mol_type = other DNA
acgtagacacacataagaaaaagatagagcgtgacggcctcaaagggattacctacttcatacaaatggcaaaca

SEQ ID NO: 455590 - DNA, 75 bp, synthetic construct
  source 1..75: mol_type = other DNA
tgttctgtcgagtcaggtcttcgcggcgctgatggcttacggcgttgatcgttttatcatcgacgaagcgcacac

SEQ ID NO: 455591 - DNA, 75 bp, synthetic construct
  source 1..75: mol_type = other DNA
tcgctggatgtgacccatgcgcgcagtcagttagccgacgacagtcgtcatgagggggattccattcgcttcctc

SEQ ID NO: 455592 - DNA, 75 bp, synthetic construct
  source 1..75: mol_type = other DNA
aacctgacagtgccattaacattaccaaacgttttgccaaaaatttgaaaatatactcttcctggcattcaattt

SEQ ID NO: 455593 - DNA, 75 bp, synthetic construct
  source 1..75: mol_type = other DNA
gcggttacagcgctgggctgtacgcgacctggtatcagaacgatgcgaataagaccggcgcttatgttgacagct

SEQ ID NO: 455594 - DNA, 75 bp, synthetic construct
  source 1..75: mol_type = other DNA
gggcaaaacgcctttcttaaagcctgtcgtgagtttctgatttgcgatgacgccaccctgaaaagaatcagccgg

SEQ ID NO: 455595 - DNA, 75 bp, synthetic construct
  source 1..75: mol_type = other DNA
cgacgtggccgccgctgtgtttgcccgtgaccgcgatatgttggccgtactgccgaccgggtacggaaagacggc

SEQ ID NO: 455596 - DNA, 75 bp, synthetic construct
  source 1..75: mol_type = other DNA
tagaaatgtggctcaacaagaagcctgctcggtatgttgacccactgccgccagatttccccggcgtccgcgtag

SEQ ID NO: 455597 - DNA, 75 bp, synthetic construct
  source 1..75: mol_type = other DNA
gcgctgcgtgtttacggctacgctactacgtgaaaatgagcgcggtttaatggagtcgctgggatgccgtggcga

SEQ ID NO: 455598 - DNA, 75 bp, synthetic construct
  source 1..75: mol_type = other DNA
tacagaatgcctttccttcggctcaacgctgcgtgtttacggctacgctgctacgcgaaaatgagcgcagtttaa

SEQ ID NO: 455599 - DNA, 75 bp, synthetic construct
  source 1..75: mol_type = other DNA
agaacgccacgcaaacgctgagtggtttgccactacgccgggcgcaattctgattgctactaaagccttcgggct

SEQ ID NO: 455600 - DNA, 75 bp, synthetic construct
  source 1..75: mol_type = other DNA
ctatcactgaatacctggttagcatttacacaactaatcttgctgtggctcctgttgataagttgactgacccaa

SEQ ID NO: 455601 - DNA, 75 bp, synthetic construct
  source 1..75: mol_type = other DNA
ctgtgggataactggtacggcaaatctcgccgcgtgatgcagcgtactttctcttctcagtcacggcagaatgtg

SEQ ID NO: 455602 - DNA, 75 bp, synthetic construct
  source 1..75: mol_type = other DNA
gggttaagtcatgccgtcagcggtaagggcagcacggcgcatactggtacggtagatatcgtggcggataaaacg

SEQ ID NO: 455603 - DNA, 75 bp, synthetic construct
  source 1..75: mol_type = other DNA
cagtataccagctagcacgcgaacagcatcctgaacgttggggaaagcatctacgtaactgggactacatatcag

SEQ ID NO: 455604 - DNA, 75 bp, synthetic construct
  source 1..75: mol_type = other DNA
gaaaaacgaagtttgtctttatcccgaagaagtacaggtgctcagaaaactttcaactacgattaatagagttgg

SEQ ID NO: 455605 - DNA, 75 bp, synthetic construct
  source 1..75: mol_type = other DNA
atgagttaaaacttgcagaacataacgctattttaagtggatttaccagtgtcaatgcttttgctaagcataacg

SEQ ID NO: 455606 - DNA, 75 bp, synthetic construct
  source 1..75: mol_type = other DNA
ctgtcgacggcggccgggtctccaccaaccggtggggaattggtgtggtgacggatgtgagcagctattaccgca

SEQ ID NO: 455607 - DNA, 75 bp, synthetic construct
  source 1..75: mol_type = other DNA
ttatttctgtattatctttctcttcttttagtcagaaaactgaatcagttgactcttcaaaagagaaaataacat

SEQ ID NO: 455608 - DNA, 75 bp, synthetic construct
  source 1..75: mol_type = other DNA
ggggcaggctgtttttgtgatccaatacaatatatggaatatcaggctgattattatattacgattaacgattca

SEQ ID NO: 455609 - DNA, 75 bp, synthetic construct
  source 1..75: mol_type = other DNA
cgctcggtggtggaatcggtcctgacggaaggggccattggttacagggagtttgaagtcctgaaaggaaatcgt

SEQ ID NO: 455610 - DNA, 75 bp, synthetic construct
  source 1..75: mol_type = other DNA
gaaagctgaaggaaaataccggggcagggtggccaatacgcagaaacatgaactgatacgcactttgcgcctggt

SEQ ID NO: 455611 - DNA, 75 bp, synthetic construct
  source 1..75: mol_type = other DNA
tggaccgactatcccggctgagtgatgctggctgggagattctcagaaaagagatcacagacaaacggttatctg

SEQ ID NO: 455612 - DNA, 75 bp, synthetic construct
  source 1..75: mol_type = other DNA
gcgcgagaacaagcagcatccggacgccacgctgccgcactatgacgctggcggtaagttgatgctacccaccac

SEQ ID NO: 455613 - DNA, 75 bp, synthetic construct
  source 1..75: mol_type = other DNA
caacggacttactcaaagacgttatttatcgtcgtatcagagatatgatcatcaacggcacattaccgatgggct

SEQ ID NO: 455614 - DNA, 75 bp, synthetic construct
  source 1..75: mol_type = other DNA
aggcgggagaggctaccggggatgtggcggaacggggcgttgtgaatgttcagcacaaagttaccgctgacgagg

SEQ ID NO: 455615 - DNA, 75 bp, synthetic construct
  source 1..75: mol_type = other DNA
cctggagcgagtacaaaaaatacttcgaaaaagatgccgccctgtcgcgccgcttccagttggtgaaggtcagcg

SEQ ID NO: 455616 - DNA, 75 bp, synthetic construct
  source 1..75: mol_type = other DNA
attatgccgggatttttttgcgcgtcatctgtcacagctttacacgtttttcgggcgcatcatcagcgatgcata

SEQ ID NO: 455617 - DNA, 75 bp, synthetic construct
  source 1..75: mol_type = other DNA
gagaagcagatgaatgcacacagtgagttttggaaaaacgcaagagattttaacaacgcaatatctgagattgtt

SEQ ID NO: 455618 - DNA, 75 bp, synthetic construct
  source 1..75: mol_type = other DNA
ttcacgcagtctgtcagcgtggagtctgttgctctgactcctgattctgtctctgttgagaaggggaagtcagtc

SEQ ID NO: 455619 - DNA, 75 bp, synthetic construct
  source 1..75: mol_type = other DNA
gttataagtctgtggagaacttccagcagggtaatttggagctgtataagcaagaagttcgcagagcgcaggatg

SEQ ID NO: 455620 - DNA, 75 bp, synthetic construct
  source 1..75: mol_type = other DNA
caaaaactcctgggcaagatggtgcgtatattgcaggattaccaacagcaacagttgtcgcagagctatcagatc

SEQ ID NO: 455621 - DNA, 75 bp, synthetic construct
  source 1..75: mol_type = other DNA
cgttagtggacgcgctaggtaccgtgagttcaacagcgctgatggatatcgtgtactttattcagtggaagacaa

SEQ ID NO: 455622 - DNA, 75 bp, synthetic construct
  source 1..75: mol_type = other DNA
ctgaactgatccccgcactctgcttcgcggtcatctttatctttgcccgtttccgttctcaaacggcaactaact

SEQ ID NO: 455623 - DNA, 75 bp, synthetic construct
  source 1..75: mol_type = other DNA
gtgcaacgcgcttacgaaatcaacagtaaagcggtgtccaccaccgatcagatgctgcaaaaactgacgcaactc

SEQ ID NO: 455624 - DNA, 75 bp, synthetic construct
  source 1..75: mol_type = other DNA
acccatcggtgtcaaagcccgtgtcagtgatgtatcccgacaggcgctacctttctccaaaagtgcgcgtcttta

SEQ ID NO: 455625 - DNA, 75 bp, synthetic construct
  source 1..75: mol_type = other DNA
tgatttattctgttgcgccggggcgaccgccaggctggtatcggaggcgggttctgaagaactgcgtattaccgt

SEQ ID NO: 455626 - DNA, 75 bp, synthetic construct
  source 1..75: mol_type = other DNA
attgaggcttactcatcatctgaatacagttcctgaacttggggagaacagttactgggagatccttttaccaga

SEQ ID NO: 455627 - DNA, 75 bp, synthetic construct
  source 1..75: mol_type = other DNA
gctgtcgatggtgttgcatcaaataccggcaccggcgctccttctggcttcgtccatcgcgatggtcaggcatca

SEQ ID NO: 455628 - DNA, 75 bp, synthetic construct
  source 1..75: mol_type = other DNA
ttcctacctgctcttaattttctttatctcatgggattgattgagtatcgccccaaaaccgatgctctagaatat

SEQ ID NO: 455629 - DNA, 75 bp, synthetic construct
  source 1..75: mol_type = other DNA
gtttctaatatatctatcatcaatccgttactcactactggtgctattgactatacaaaaagctatatcagtgac

SEQ ID NO: 455630 - DNA, 75 bp, synthetic construct
  source 1..75: mol_type = other DNA
aaggaaaaaacatgcaaattgtctttttctccttttgttgttggtgcatccctgttgctcggggggccaatagct

SEQ ID NO: 455631 - DNA, 75 bp, synthetic construct
  source 1..75: mol_type = other DNA
ataagacccctgatatgcgtacaggctggctactatgggaggatagtctgacggaattcctctattttgaagagc

SEQ ID NO: 455632 - DNA, 75 bp, synthetic construct
  source 1..75: mol_type = other DNA
cgagcgcatcggcctgcagctaaatgtcgtcgacaccgggtggccgaccgcttcaacgattggctggggctctcc

SEQ ID NO: 455633 - DNA, 75 bp, synthetic construct
  source 1..75: mol_type = other DNA
catttaaagccgggatgctggtcggtattgggtttgaaggcgtcggcctggtaattggcctgctgctgacgaaca

SEQ ID NO: 455634 - DNA, 75 bp, synthetic construct
  source 1..75: mol_type = other DNA
cgcctttgcttatgcaggtttttgaagatgagtttttttattggcctcctgatggcgatgaaccgacttatgaag

SEQ ID NO: 455635 - DNA, 75 bp, synthetic construct
  source 1..75: mol_type = other DNA
ggcaacacgcgcaaaatcggctggcagactggctacaaacgctaccaccgcaaaccgggattattgccgttactg

SEQ ID NO: 455636 - DNA, 75 bp, synthetic construct
  source 1..75: mol_type = other DNA
aaatgaattctgatgaagaagcttgcaccagctttcttgattgctttgagtgtgagcaccattcattggtctctg

SEQ ID NO: 455637 - DNA, 75 bp, synthetic construct
  source 1..75: mol_type = other DNA
gctacaaaaacaaacatcacaccccttgtattcgaatatctacagtctaaatgatctgcatgaggtgttttcatg

SEQ ID NO: 455638 - DNA, 75 bp, synthetic construct
  source 1..75: mol_type = other DNA
actaaatttttccctgccgctcaatctgttgctccccagaagtaatgatagctataccaggaaaaaaattacgcc

SEQ ID NO: 455639 - DNA, 75 bp, synthetic construct
  source 1..75: mol_type = other DNA
gaatcaatgattacattagtaatttgtttattcaactcattggtcgcttcttattttattatgttatggatgtct

SEQ ID NO: 455640 - DNA, 75 bp, synthetic construct
  source 1..75: mol_type = other DNA
tttgatgcggcgttgcagtcaaacgatatggcccgcgtcgatgaggtcaggcggcgggcgagcgtttatttagcc

SEQ ID NO: 455641 - DNA, 75 bp, synthetic construct
  source 1..75: mol_type = other DNA
gagacttcaactgggtgttccagaaatttcatggcagccagcccgcgatcgcttttgtgaatacggcatggtact

SEQ ID NO: 455642 - DNA, 75 bp, synthetic construct
  source 1..75: mol_type = other DNA
atgaaaaaaataattttctctaacgagagtgcagtctatgatgaacttatgattcatttcccatgccagccatta

SEQ ID NO: 455643 - DNA, 75 bp, synthetic construct
  source 1..75: mol_type = other DNA
tgtctgctcttctctactctctttttgttattttcagaatacacaaaggtataccaacggaaaatcaggaaattt

SEQ ID NO: 455644 - DNA, 75 bp, synthetic construct
  source 1..75: mol_type = other DNA
taaaattcaatagtgaagaatgttctgcattcatcaaggtgcttgatttcactgtaatcaatgcaacattgatta

SEQ ID NO: 455645 - DNA, 75 bp, synthetic construct
  source 1..75: mol_type = other DNA
ccactgcgaccatcgcggcctgccgctggcgctcatcagcacggaaggggcaacagcgtggtgcgcagaatatga

SEQ ID NO: 455646 - DNA, 75 bp, synthetic construct
  source 1..75: mol_type = other DNA
agcacatcgtcggatggtgatgcaatggcgcgtgctttagccaagcagatcaatgatcaggcaaaaatgatagtg

SEQ ID NO: 455647 - DNA, 75 bp, synthetic construct
  source 1..75: mol_type = other DNA
atctagaggatgctggctacgagaaagagctggcagctcttcgtaactactacgccgaagaggataagctacggg

SEQ ID NO: 455648 - DNA, 75 bp, synthetic construct
  source 1..75: mol_type = other DNA
tcagcaaccatccacaaatggtgtcatggctacaacaatagagggattagcatcccgccaagagccaactgccga

SEQ ID NO: 455649 - DNA, 75 bp, synthetic construct
  source 1..75: mol_type = other DNA
atgactcagatgcataaaggatttttgttcatcggcgtctttttgtatgcggcatttttggccccgaagatttac

SEQ ID NO: 455650 - DNA, 75 bp, synthetic construct
  source 1..75: mol_type = other DNA
tgacagtcaaagacaccgaacacatgctggctgacccggcgatatggacgacaacgatccgcgaccatattctgg

SEQ ID NO: 455651 - DNA, 75 bp, synthetic construct
  source 1..75: mol_type = other DNA
acgtagtagaagaagcgggtctgggtcaggaaatgggcgagccggatcgtacttgtgttcctgttctcggttcct

SEQ ID NO: 455652 - DNA, 75 bp, synthetic construct
  source 1..75: mol_type = other DNA
cattaacggcgtgaccgacagtaacggtacggcaacctttactatccgccaggataactcgccggggtataaaac

SEQ ID NO: 455653 - DNA, 75 bp, synthetic construct
  source 1..75: mol_type = other DNA
gtcaataaagtgccgcgcaaagaacagctaaatatgctttatgccgccaacgacaataatactatccagacggtt

SEQ ID NO: 455654 - DNA, 75 bp, synthetic construct
  source 1..75: mol_type = other DNA
gatgccgtgccacgcaacccaggggcgactttgtatggcgacgtggcggcgatggcggcgatggatgacctgcgc

SEQ ID NO: 455655 - DNA, 75 bp, synthetic construct
  source 1..75: mol_type = other DNA
aacgtcaaaccgggcgagccggagtgggaagggcgagaccgctttctgctctcccatggccactacgccattgcc

SEQ ID NO: 455656 - DNA, 75 bp, synthetic construct
  source 1..75: mol_type = other DNA
atcgatgtgaacagacagcaggctgatggggattcacgcaaaatccttggctttgagccactgcatgaaaaatgg

SEQ ID NO: 455657 - DNA, 75 bp, synthetic construct
  source 1..75: mol_type = other DNA
gcgtagccaacatgtgggggcatatggcggaaacggtgacggcggcagatggcaccgtttttgtgcggcctaaaa

SEQ ID NO: 455658 - DNA, 75 bp, synthetic construct
  source 1..75: mol_type = other DNA
gtgtggccatcaccgcacaccccgcgccggaccggatacaggtcagtaccctgcctgatggtgtggagacatacg

SEQ ID NO: 455659 - DNA, 75 bp, synthetic construct
  source 1..75: mol_type = other DNA
cggtcaaatgctcctgaccatggtcgatgaagatggcgctccctttgacgttgagccgcggaacgttcttaaccg

SEQ ID NO: 455660 - DNA, 75 bp, synthetic construct
  source 1..75: mol_type = other DNA
tccggcagatggcgcggtcgctgaggcctcgccgggtcagtttgaaatcaacctttaccatactgataacgtgct

SEQ ID NO: 455661 - DNA, 75 bp, synthetic construct
  source 1..75: mol_type = other DNA
agccaacagatgcgcgactgtcgatttgtataatggccaggctgaggcggcgagcagaagccgcgcattgcaggc

SEQ ID NO: 455662 - DNA, 75 bp, synthetic construct
  source 1..75: mol_type = other DNA
taatgatacggcgcaggcgatgaaagcgaaggttggggaagacgccatcatgcgtctgactattactgacaacaa

SEQ ID NO: 455663 - DNA, 75 bp, synthetic construct
  source 1..75: mol_type = other DNA
ttcttcaaacgggcttattgtcaacaatgagaactggcagcgactgactatcgctaatgcgctgagtggtatgca

SEQ ID NO: 455664 - DNA, 75 bp, synthetic construct
  source 1..75: mol_type = other DNA
ttcatacattcttgacaccactaaaaacaaagtaaccattgcatatatttttaccctgattttgttttttttgat

SEQ ID NO: 455665 - DNA, 75 bp, synthetic construct
  source 1..75: mol_type = other DNA
gcctaagcccatcaaactgggtgagaaaagcactgcattcgatgcggtagagattaatcgctggctggaagaacg

SEQ ID NO: 455666 - DNA, 75 bp, synthetic construct
  source 1..75: mol_type = other DNA
gacaaagagcttgcggaaactctatttttagaattagttcattattgcattcctcatccagtgttagttaaacga

SEQ ID NO: 455667 - DNA, 75 bp, synthetic construct
  source 1..75: mol_type = other DNA
ttaatgaaaaaatggctggacgaggtctttgttcacggcttcgcgcatggctcaacggcgaaactgggcggtaaa

SEQ ID NO: 455668 - DNA, 75 bp, synthetic construct
  source 1..75: mol_type = other DNA
actttatgacaaccagctttgaaacctgtcgtgtggttcatgagattgatcatccagctatcaaaatgcagcttg

SEQ ID NO: 455669 - DNA, 75 bp, synthetic construct
  source 1..75: mol_type = other DNA
gaacaagaaagacaaaaattaatagacaccataaataaaaacattcgtgatggtgttagtaaggttaacactacc

SEQ ID NO: 455670 - DNA, 75 bp, synthetic construct
  source 1..75: mol_type = other DNA
aaaaaacgctggtggatggtatccgcaaagaggttgcggctgaaggcggtagcgtgctgctactttccggtggcg

SEQ ID NO: 455671 - DNA, 75 bp, synthetic construct
  source 1..75: mol_type = other DNA
aaatcacgggtgttgcacaaacgaatgcaaaggtcactgtctcacagaacaaccgtattatttatcaagaaaacg

SEQ ID NO: 455672 - DNA, 75 bp, synthetic construct
  source 1..75: mol_type = other DNA
actggaaaattcagaaaccgtggcagatgcgctgacacgggccgcgagacacagaggcgtcctggtaaccagtaa

SEQ ID NO: 455673 - DNA, 75 bp, synthetic construct
  source 1..75: mol_type = other DNA
acttgcaagagaagcacgtagtctttttatgaaatataaattagaaagtacgttaactataaaaaaaggtgaaac

SEQ ID NO: 455674 - DNA, 75 bp, synthetic construct
  source 1..75: mol_type = other DNA
tcgttagaataattgcctacaatgaagaaagctataaatctaaaatagctattgatgatgagtccccactttcca

SEQ ID NO: 455675 - DNA, 75 bp, synthetic construct
  source 1..75: mol_type = other DNA
ctcatataggattcataggcaaccctatagtatatgatttcattttagggatgattatatcagagacaatgcctt

SEQ ID NO: 455676 - DNA, 75 bp, synthetic construct
  source 1..75: mol_type = other DNA
ttacttatagtgtgcttttttgcggcatgggggatagtgtatatatcttcttattttttcgatatggcttttcaa

SEQ ID NO: 455677 - DNA, 75 bp, synthetic construct
  source 1..75: mol_type = other DNA
attgtaatcttgttcttaatgacaaagggggtaatgaatatgttgacaaagacgtaatcaggcccaaaattggta

SEQ ID NO: 455678 - DNA, 75 bp, synthetic construct
  source 1..75: mol_type = other DNA
agatgacggcggttcaccgcgaggaaggtatcagcctttaccgccactatgacaaccgtggccggttaaccggtg

SEQ ID NO: 455679 - DNA, 75 bp, synthetic construct
  source 1..75: mol_type = other DNA
aatccgtttctttttgctcggggagactggccttcaatttacgaaagaagaaaaaaaataagagttaagaatcag

SEQ ID NO: 455680 - DNA, 75 bp, synthetic construct
  source 1..75: mol_type = other DNA
aagtcttttgcacccgcatcgacggcattaagtaaaaatagtgaaacgcttggtcagtttcagctattacccaaa

SEQ ID NO: 455681 - DNA, 75 bp, synthetic construct
  source 1..75: mol_type = other DNA
tttcgccagccgcaggcgttgctgcgagcagcaccagtctgatgaaaacgggtttatctggtgttgggcttgcgt

SEQ ID NO: 455682 - DNA, 75 bp, synthetic construct
  source 1..75: mol_type = other DNA
accacctatgacgcctcttccgtaccgctttataaccgcctggttgaatttaaaatcggcaccactgaagtgata

SEQ ID NO: 455683 - DNA, 75 bp, synthetic construct
  source 1..75: mol_type = other DNA
gtgtataatcaaagattcatgaaagaaatttgtggtcaagttcagaaagcgatacaaaacaggatgtataaaaca

SEQ ID NO: 455684 - DNA, 75 bp, synthetic construct
  source 1..75: mol_type = other DNA
tatcagaacggtgccgcgtaagggttttaaaatcaatgaagaaatcaacataactgttctcgacaataatcacac

SEQ ID NO: 455685 - DNA, 75 bp, synthetic construct
  source 1..75: mol_type = other DNA
caattctttgaaaaagtctggagcgatagcagcgctgaagtcgcaaccaatactttatatcaaaacatttcgatg

SEQ ID NO: 455686 - DNA, 75 bp, synthetic construct
  source 1..75: mol_type = other DNA
acctagggttcatattgaatatcagacgtttaaaaacataatcgctgcccttgttgataaacaaatatttctccg

SEQ ID NO: 455687 - DNA, 75 bp, synthetic construct
  source 1..75: mol_type = other DNA
cagttataccgttagaagaaaatgaagctaggatagcattaaataatctatctgaattatatagttatgagttga

SEQ ID NO: 455688 - DNA, 75 bp, synthetic construct
  source 1..75: mol_type = other DNA
actgaagcgcatggagtatatggctaaagaccacaccaagagttatgacgatggatatcgatcaattggaatgag

SEQ ID NO: 455689 - DNA, 75 bp, synthetic construct
  source 1..75: mol_type = other DNA
agagatagccgattatcttgggaaagccaaaaaagacaaaaacaaaaaaacgacaaaaaaccaaaagatccgctc

SEQ ID NO: 455690 - DNA, 75 bp, synthetic construct
  source 1..75: mol_type = other DNA
tatggcggttcggaaattaaaaagtcaatgatgacatatgagatgtggaagtcctcaatcggtggttataggtct

SEQ ID NO: 455691 - DNA, 75 bp, synthetic construct
  source 1..75: mol_type = other DNA
tgcaacacgttgatccattagggcttagtactatgataataggtaacggccccgttcctgataatccttttgggc

SEQ ID NO: 455692 - DNA, 75 bp, synthetic construct
  source 1..75: mol_type = other DNA
gatattgacagttttgaacatcatgggacaagaaccccagaacttacttatgctgattccggtgcgaaaattgtt

SEQ ID NO: 455693 - DNA, 75 bp, synthetic construct
  source 1..75: mol_type = other DNA
ccgatatcacggcccttacaacacgacagatatacggttggctacggctgttagagccaagaaacgagatgcttt

SEQ ID NO: 455694 - DNA, 75 bp, synthetic construct
  source 1..75: mol_type = other DNA
cggcactagtgacacttgcacaatttggctatcggttcttaggtgagcgacgccacatggcggcccgtgctgcat

SEQ ID NO: 455695 - DNA, 75 bp, synthetic construct
  source 1..75: mol_type = other DNA
gtgaatgcccctgcgcaatatgtttttcaggctgacggctcactcaaagatggcgaagaaaacgcgccgacccaa

SEQ ID NO: 455696 - DNA, 75 bp, synthetic construct
  source 1..75: mol_type = other DNA
gttatattgctaacctgatagcaatgaacacgatgtttagtccttctctctatgaccgacacggtagcactattg

SEQ ID NO: 455697 - DNA, 75 bp, synthetic construct
  source 1..75: mol_type = other DNA
agaatcaaaacagatgagcaatcaagagtctactcaaatgagtagtcgccgagctagttcacagcttgtatcttc

SEQ ID NO: 455698 - DNA, 75 bp, synthetic construct
  source 1..75: mol_type = other DNA
gaaaaacggtcatgttattctcaataatagttcgtcaaatgtcggtcagacctatgttcagaaaggtaattggca

SEQ ID NO: 455699 - DNA, 75 bp, synthetic construct
  source 1..75: mol_type = other DNA
accaatacccagcaccgggtgttgaaggtggctttgctagcaccaaccctcacgccactttcctggctggcgaag

SEQ ID NO: 455700 - DNA, 75 bp, synthetic construct
  source 1..75: mol_type = other DNA
aatctgttacccggccgcgcactcgatgaagggcaaattagcgctattgtacatctggtttccagcgcggttgct

SEQ ID NO: 455701 - DNA, 75 bp, synthetic construct
  source 1..75: mol_type = other DNA
atacgcctatcaaccggtttaaaccgattaaaattgcagctaatccgttcgatcctcaatgggagatgtactttg

SEQ ID NO: 455702 - DNA, 75 bp, synthetic construct
  source 1..75: mol_type = other DNA
cttcttctcttcaatcaacgatgaagggtttcctgatgatctctctgcgctgagaaagacaataaattatattct

SEQ ID NO: 455703 - DNA, 75 bp, synthetic construct
  source 1..75: mol_type = other DNA
gagtccaggcgaacaccaaggaaagaactcttagtttcattagagataacatccatttatcacctctaaggctaa

SEQ ID NO: 455704 - DNA, 75 bp, synthetic construct
  source 1..75: mol_type = other DNA
cattctgtgggggcacatacccatagtgtgagtgcatataaccataacgcaggcgcacatacgcacacttttaat

SEQ ID NO: 455705 - DNA, 75 bp, synthetic construct
  source 1..75: mol_type = other DNA
taaaaatatcgcgtcacgagatgaaagaaaaaatcatattttttccgatgtcaccaatgctttgcaaaatataat

SEQ ID NO: 455706 - DNA, 75 bp, synthetic construct
  source 1..75: mol_type = other DNA
tcatcagtgatgagcagatcggtcgctaccggccgaaaatcatcctcgccgatcagcagacagacaccaccggtg

SEQ ID NO: 455707 - DNA, 75 bp, synthetic construct
  source 1..75: mol_type = other DNA
gagttttttgacgaattatcacgcgatatgggaattcccatatcggagttaattcaatcatttaaaggtggaaga

SEQ ID NO: 455708 - DNA, 75 bp, synthetic construct
  source 1..75: mol_type = other DNA
gcaagagtatctatgtacagatcgagatgtaggtattatgtggttcgaagacgacaagcctattttttcaaaatt

SEQ ID NO: 455709 - DNA, 75 bp, synthetic construct
  source 1..75: mol_type = other DNA
atgcgtgactgccattcttcagatgataaagacgttattgcaattgatggaaaaacgctccggcattcttatgac

SEQ ID NO: 455710 - DNA, 75 bp, synthetic construct
  source 1..75: mol_type = other DNA
aaattagttgattatgatttatatttacggttgatggctaagaatatcaatatggcatgtttaaatgaaaagctg

SEQ ID NO: 455711 - DNA, 75 bp, synthetic construct
  source 1..75: mol_type = other DNA
atgccccgtccgccatcaacccccgttgctgccagaatagagccctggacttacgctggtaaagtagtatctgac

SEQ ID NO: 455712 - DNA, 75 bp, synthetic construct
  source 1..75: mol_type = other DNA
acaataaatctagaattgaaaagctaaaatctagcttaactgaactcatcacaaaaaacatgataaggattgatg

SEQ ID NO: 455713 - DNA, 75 bp, synthetic construct
  source 1..75: mol_type = other DNA
agaaagatattgcagagaagatacaaaaacagggcggtgattatgtattcgctgtaaaaggaaatcagggacgac

SEQ ID NO: 455714 - DNA, 75 bp, synthetic construct
  source 1..75: mol_type = other DNA
gcacagtctggtcatcggacagatcaggacggatgagaaatccaatgagatcacagctatccctgaacttcttaa

SEQ ID NO: 455715 - DNA, 75 bp, synthetic construct
  source 1..75: mol_type = other DNA
ttaccagtgtcttaaaacaaattgcatttgatttagcatgcagaactatacagcagaatactccacaaaaaaata

SEQ ID NO: 455716 - DNA, 75 bp, synthetic construct
  source 1..75: mol_type = other DNA
tacagacaaaattggagggattctggtaaaaaatacctttcaggaagtcttttttcaaaattcagacaagatact

SEQ ID NO: 455717 - DNA, 75 bp, synthetic construct
  source 1..75: mol_type = other DNA
atgccagaagatagtatttttactaagatcaatacaaggattcctcgagacacaatgcccatccttcgtcgttat

SEQ ID NO: 455718 - DNA, 75 bp, synthetic construct
  source 1..75: mol_type = other DNA
attagggcatcggaagttgaactctctaaagaatcatacagcttgaactggctgggtaaatcttatgcccgtttg

SEQ ID NO: 455719 - DNA, 75 bp, synthetic construct
  source 1..75: mol_type = other DNA
taagctgacaccgattttaactgttcctgctaatgcgatattaggtagagtacaggccacattgcttttttcagt

SEQ ID NO: 455720 - DNA, 75 bp, synthetic construct
  source 1..75: mol_type = other DNA
cacgatgcaggactggagaaattatttgagctacgtaggcgaaaattgccgatggatgttcgaagaacgcccaaa

SEQ ID NO: 455721 - DNA, 75 bp, synthetic construct
  source 1..75: mol_type = other DNA
attttcaatattcggatcataattatggtgcagtcttacaagctgttgcactagaaaatgttttaaaacagctag

SEQ ID NO: 455722 - DNA, 75 bp, synthetic construct
  source 1..75: mol_type = other DNA
aagaatggtacgctgtcgaaaaaatccagactgggcgaagcgttcagctatgtactgaatcagtgggatgccctc

SEQ ID NO: 455723 - DNA, 75 bp, synthetic construct
  source 1..75: mol_type = other DNA
gtttccggctattgatgtgttgtataacgatttaacgcttcatgagaacaatggttttatcctcgaactatatcg

SEQ ID NO: 455724 - DNA, 75 bp, synthetic construct
  source 1..75: mol_type = other DNA
ctgtatctgctgatcaagccgggtggctcccgccactggtatctcaaagctggaggttgcgtcccgcacacggca

SEQ ID NO: 455725 - DNA, 75 bp, synthetic construct
  source 1..75: mol_type = other DNA
atgttccttaccgacgcaaaaatccgcaccctcaagccttctgataaaccctttaaagtctccgattctcacggt

SEQ ID NO: 455726 - DNA, 75 bp, synthetic construct
  source 1..75: mol_type = other DNA
caggaataaatatttgaacagaacaaaagcgtttcattccctcaatgaccttatggaattagaggatagttacag

SEQ ID NO: 455727 - DNA, 75 bp, synthetic construct
  source 1..75: mol_type = other DNA
aataccacttatcaggtcatgctgtggaaagataaaaacagcaacggctcctacgacactggcgaagaggttacc

SEQ ID NO: 455728 - DNA, 75 bp, synthetic construct
  source 1..75: mol_type = other DNA
ttggactagctctacttcagttacagtacccaatggtaaaagcaattatgccccacattgctaaatttggaaatg

SEQ ID NO: 455729 - DNA, 75 bp, synthetic construct
  source 1..75: mol_type = other DNA
cggcgcggagatgcaacgattaagccgggtaatggtattgagcaagcaactcactggatgccgctaccagaaccg

SEQ ID NO: 455730 - DNA, 75 bp, synthetic construct
  source 1..75: mol_type = other DNA
catgtattggcgctgtccgctgggggaacctgccggataatgcccgggagataatcaccgcgttaatgcactgcc

SEQ ID NO: 455731 - DNA, 75 bp, synthetic construct
  source 1..75: mol_type = other DNA
ccgtcgggaaagtgatcggtggtggagttattgctgagatagctaacggaacataccagtggtttgatctgagtc

SEQ ID NO: 455732 - DNA, 75 bp, synthetic construct
  source 1..75: mol_type = other DNA
gcatagtgcactggggtatcgttcgccacgggaatatctgcggcggcgaaccagtaatgggttaagtgataaaaa

SEQ ID NO: 455733 - DNA, 75 bp, synthetic construct
  source 1..75: mol_type = other DNA
gggtctcacgtgcgcaactgcatgccatggcccgtcggtcgaagggctggcaggatcgtcggtgcaagcgcaagc

SEQ ID NO: 455734 - DNA, 75 bp, synthetic construct
  source 1..75: mol_type = other DNA
ttagaaagagaatttttattgaagaaaaagatgtattcaaaaagggaggggctctttatacaaaggtaaagactg

SEQ ID NO: 455735 - DNA, 75 bp, synthetic construct
  source 1..75: mol_type = other DNA
tggatatgtgaaaatacgtcctccaaaagtgagaggtaaacttggagtatggacatgggatataaataaatttaa

SEQ ID NO: 455736 - DNA, 75 bp, synthetic construct
  source 1..75: mol_type = other DNA
ctacgacactggcgaagaggttaccagccagtacaactaccgctggcgctttaccggtaccagtctgcaactgcg

SEQ ID NO: 455737 - DNA, 75 bp, synthetic construct
  source 1..75: mol_type = other DNA
atcatcaccacgctgatgagccgtcagtattctgactggtttggtctggtcgggctgagtgaacacatcgatgca

SEQ ID NO: 455738 - DNA, 75 bp, synthetic construct
  source 1..75: mol_type = other DNA
tggagcatcgctgcaagccatatgtgaactaaatattgatgatgggggaataagaaagtttattggaatacagat

SEQ ID NO: 455739 - DNA, 75 bp, synthetic construct
  source 1..75: mol_type = other DNA
ggttcgcctataatgatgatcgcaagtttacacctgaacagctttctgaactggcaggtatcgatcttgatgaag

SEQ ID NO: 455740 - DNA, 75 bp, synthetic construct
  source 1..75: mol_type = other DNA
cccgctatggcgccgcaacttacagtaaaaacctttcacaaaaagtttttcttggccaggcaaacctcgttcggc

SEQ ID NO: 455741 - DNA, 75 bp, synthetic construct
  source 1..75: mol_type = other DNA
gttgctacctaaagtcctcgctgaccgcggcggcttagcgtttcattcgtttagacatacagttgcgactcagct

SEQ ID NO: 455742 - DNA, 75 bp, synthetic construct
  source 1..75: mol_type = other DNA
aagggaaaacaaagcgtcacacgctgcgttaatcgaaatattcgaccatctgggtctcaatgcagacgctaacag

SEQ ID NO: 455743 - DNA, 75 bp, synthetic construct
  source 1..75: mol_type = other DNA
tgttaaaccgcatcctcaacgaaccggaacccgtgtcacaactgccggggcgtgcgttccttcaacacgtacacg

SEQ ID NO: 455744 - DNA, 75 bp, synthetic construct
  source 1..75: mol_type = other DNA
gtattgtctgacttcatgacgcttgttgaggctcgtagaggcactgatggcgatgacgctatggtttttgatggt

SEQ ID NO: 455745 - DNA, 75 bp, synthetic construct
  source 1..75: mol_type = other DNA
tatcaatgaagacgatagtagtctacccggtaagagcatcaagaacgctcatagtgaccgctgtgtgcctctggt

SEQ ID NO: 455746 - DNA, 75 bp, synthetic construct
  source 1..75: mol_type = other DNA
gctcagggtctattacttacgatcgttatgctaaagaagttgaggttgataggttggttgatgtgatggtaggta

SEQ ID NO: 455747 - DNA, 75 bp, synthetic construct
  source 1..75: mol_type = other DNA
caagccgcagaggccgtaaaatctggtcgtatgagactggataagggtaatgaaactattgaggaagcgtcgaaa

SEQ ID NO: 455748 - DNA, 75 bp, synthetic construct
  source 1..75: mol_type = other DNA
gggtgcccggattgctgagtccctgatactgagcgggcatgtgtccggccggagaatgtatgaggtggccatggg

SEQ ID NO: 455749 - DNA, 75 bp, synthetic construct
  source 1..75: mol_type = other DNA
tatacatctcaattttcatttctgttattgtcactataatagccatatccggtataacattcctgggggacaact

SEQ ID NO: 455750 - DNA, 75 bp, synthetic construct
  source 1..75: mol_type = other DNA
gatatatttatgtcagcaataatgcgaaaaacagattttgtgcccgaatgcaataatcaaccgacagaacttaat

SEQ ID NO: 455751 - DNA, 75 bp, synthetic construct
  source 1..75: mol_type = other DNA
atggattgttcaaaatgcaatggttatgcgacgatgttattaaatatggtgcagggttctgacccggttaattta

SEQ ID NO: 455752 - DNA, 75 bp, synthetic construct
  source 1..75: mol_type = other DNA
atgctttgaaaaaaatcacattataaagtgggttagccataatataccattgtttataaaatatgacgctccata

SEQ ID NO: 455753 - DNA, 75 bp, synthetic construct
  source 1..75: mol_type = other DNA
tgaccgttacgctaaagaggttgaggtggatagattggttattgtgatgactgatatttataaggagagtagagt

SEQ ID NO: 455754 - DNA, 75 bp, synthetic construct
  source 1..75: mol_type = other DNA
atttgtcaataaaatcgtggcatctttggaccacattaggttggttagagttaagacagagatataaaagatcca

SEQ ID NO: 455755 - DNA, 75 bp, synthetic construct
  source 1..75: mol_type = other DNA
cgcccgtattctcgccagtatggaaaaccatatcttcccggcggttggtcatttgcccgttgccaaacttaaaac

SEQ ID NO: 455756 - DNA, 75 bp, synthetic construct
  source 1..75: mol_type = other DNA
gttcacgcatctggtatctcaaatatcgtttcaacggaaaagaatccagagtcagtcttggcgcatatccgctgg

SEQ ID NO: 455757 - DNA, 75 bp, synthetic construct
  source 1..75: mol_type = other DNA
atggttttatcctcgaactatatcgatttgatgatttgtcatgtctggaaaatcttgtaaaacgaactagtctgg

SEQ ID NO: 455758 - DNA, 75 bp, synthetic construct
  source 1..75: mol_type = other DNA
gcggagaatgaacgcagtacgttcggtctctccctgccacaggtgaatgacagtgccatcgggtacgggaaatcc

SEQ ID NO: 455759 - DNA, 75 bp, synthetic construct
  source 1..75: mol_type = other DNA
gacattcgccagctcaaaaccagccacctgttagccccgattaaaaaagttgatgccagtggaaagcatgacgtc

SEQ ID NO: 455760 - DNA, 75 bp, synthetic construct
  source 1..75: mol_type = other DNA
cattcagacatacagtggcgacccagttaaaacaacatggggtcgagctagcgtatgctcaggcgattatgggtc

SEQ ID NO: 455761 - DNA, 75 bp, synthetic construct
  source 1..75: mol_type = other DNA
gttcagggtctattacttacgaccgttatgctaaagaggttgaggttgataggctggtcaatgtgatggctgatg

SEQ ID NO: 455762 - DNA, 75 bp, synthetic construct
  source 1..75: mol_type = other DNA
gaccgttacgctaaagaggttgaggtggataggttggttaatgtgatggtaggtatttataaggaggtaaagtaa

SEQ ID NO: 455763 - DNA, 75 bp, synthetic construct
  source 1..75: mol_type = other DNA
cttaccgggcaagagcgttaagaatgcgcatagtgatcgctgtgtcccgttggtagatggtgcttatggttttgt

SEQ ID NO: 455764 - DNA, 75 bp, synthetic construct
  source 1..75: mol_type = other DNA
gttaatcgagatattcgactatctggatattcaggatgtcagcaaggcgacccgttcagatatgctcagggtccg

SEQ ID NO: 455765 - DNA, 75 bp, synthetic construct
  source 1..75: mol_type = other DNA
gaacgttgctgcctaaagtccttgctgaccgtagcggcttagcctttcactcattcaggcacactgttgcgaccc

SEQ ID NO: 455766 - DNA, 75 bp, synthetic construct
  source 1..75: mol_type = other DNA
ggataaattgaacaaattgcggaattcactggcacataacattgactctccaagagctgccgaagtcttcaagtc

SEQ ID NO: 455767 - DNA, 75 bp, synthetic construct
  source 1..75: mol_type = other DNA
tggaagcaatggtgcgtgatggtcttcttgagcgggttaatgtgtatgagcggcgtgacagcgttggtcatgatg

SEQ ID NO: 455768 - DNA, 75 bp, synthetic construct
  source 1..75: mol_type = other DNA
cagatcgaatcaacaaggcgcacactggaagcaatggtgcgtgatggtcttcttgagcgggttaatgtgtatgag

SEQ ID NO: 455769 - DNA, 75 bp, synthetic construct
  source 1..75: mol_type = other DNA
atgtcttttgatgttttcagcaaagataattttttcttaaagaaatgtcttctggataactacagtgacagtata

SEQ ID NO: 455770 - DNA, 75 bp, synthetic construct
  source 1..75: mol_type = other DNA
tggggggtggtcattttctttgagagaagggcaacggggagtatacaggcaaggagaagaaaaacaggctatctt

SEQ ID NO: 455771 - DNA, 75 bp, synthetic construct
  source 1..75: mol_type = other DNA
gcggtttatccccgctggcgcggggaacacgcgttctgaaacgtatccgaaaggctcggaattcggtttatcccc

SEQ ID NO: 455772 - DNA, 75 bp, synthetic construct
  source 1..75: mol_type = other DNA
taaatttcttgctattaacctgctgaaacggcgtggttacaaaccacagccacttaagcggtttatatacctaag

SEQ ID NO: 455773 - DNA, 75 bp, synthetic construct
  source 1..75: mol_type = other DNA
atccgatctcaaatatagatccattaggattatatgaatttaaatcaaaaaatatagatgatattggaatatttg

SEQ ID NO: 455774 - DNA, 75 bp, synthetic construct
  source 1..75: mol_type = other DNA
aaaaatttattcaatgaggcggaaatagctcatgccataaaatatgttgagggattgagagaaaaattcatgatg

SEQ ID NO: 455775 - DNA, 75 bp, synthetic construct
  source 1..75: mol_type = other DNA
cgcgcggggaactggacccggaagccgaccccggcctgctgtatgcaggacagtggcaggatgcggaatcggggc

SEQ ID NO: 455776 - DNA, 75 bp, synthetic construct
  source 1..75: mol_type = other DNA
gaataacattactcttatcgggagcagtacgagtgggaatgccatcaaccttaaaggcaacaacacgctgacggc

SEQ ID NO: 455777 - DNA, 75 bp, synthetic construct
  source 1..75: mol_type = other DNA
ggcccatttgatctcgtctcaggcgttatctctcctgatgcaaaatatgtagatcctttcggtctggggtgtgat

SEQ ID NO: 455778 - DNA, 75 bp, synthetic construct
  source 1..75: mol_type = other DNA
tggcagtgaagttaagccactgacaattaacaacggtcaacttgcgaccttaatgctatttattggccgcagttt

SEQ ID NO: 455779 - DNA, 75 bp, synthetic construct
  source 1..75: mol_type = other DNA
ttgtttaccttgaaatgtgctacattttcgcagatgttcactccatatctgggaaagaaatgaaaggtaaaatca

SEQ ID NO: 455780 - DNA, 75 bp, synthetic construct
  source 1..75: mol_type = other DNA
tatatgaaggattacctatggtgttgattgagtcccagagttttggaatcccgagtgttgcatatgattgtccaa

SEQ ID NO: 455781 - DNA, 75 bp, synthetic construct
  source 1..75: mol_type = other DNA
gataaccttccttctgaggaagagcaagaaaacattactaaagaagtaagttttataatatcagaattgaataaa

SEQ ID NO: 455782 - DNA, 75 bp, synthetic construct
  source 1..75: mol_type = other DNA
acctggtgaaaccgaactaatccttcgtctcaatcgtcatggcaataccggcacggtgtattgcattcaggcaaa

SEQ ID NO: 455783 - DNA, 75 bp, synthetic construct
  source 1..75: mol_type = other DNA
ggcgcagtaatgcatgtggtggcgttctctgccccgcctgaacgctattttcctggcagtgaagttaagccgctg

SEQ ID NO: 455784 - DNA, 75 bp, synthetic construct
  source 1..75: mol_type = other DNA
ccaccagcttagcgagcagctcctttcgaatctgggcgtcggtgacattatctatcaaagccaggcaatggaaga

SEQ ID NO: 455785 - DNA, 75 bp, synthetic construct
  source 1..75: mol_type = other DNA
gctacgcgatcgtccggaagatatccctctttttagcaaagcatttcacgcaaaaaatggcgcgccatatgaatc

SEQ ID NO: 455786 - DNA, 75 bp, synthetic construct
  source 1..75: mol_type = other DNA
aagaacaaatagataaaaagtgtcggcagttattaaaagcatctgcatctttgaaagatttaggtggatatttaa

SEQ ID NO: 455787 - DNA, 75 bp, synthetic construct
  source 1..75: mol_type = other DNA
tgataatgttttaatcgaaacaaatattgctgctgttataaatatattagctaaggaggatttttctaatgttga

SEQ ID NO: 455788 - DNA, 75 bp, synthetic construct
  source 1..75: mol_type = other DNA
tagtgaggaaaactgccagctactacaacatattgccgatcgcatcgctattgccgttggcaatgccgatgcctg

SEQ ID NO: 455789 - DNA, 75 bp, synthetic construct
  source 1..75: mol_type = other DNA
gcaaatggttgaagatcgccagtttcgcagcgatctcttttatcgcctgaatgtcttcccactggaattgccgcc

SEQ ID NO: 455790 - DNA, 75 bp, synthetic construct
  source 1..75: mol_type = other DNA
gtaccactgcgaccaccgcggcctgccgctggcgcttgtcagcacggaagggacaacagcgtggtacgcagaata

SEQ ID NO: 455791 - DNA, 75 bp, synthetic construct
  source 1..75: mol_type = other DNA
atgaacctcaaagaagtcgtgaaatctatgtgcaaagcatatccaggtgggcgcgaagcaatggctggcgcactg

SEQ ID NO: 455792 - DNA, 75 bp, synthetic construct
  source 1..75: mol_type = other DNA
aggacatttccaacacgtcgttactggctgactacttcgctcgccgtcgtggtgctctgctggtggatgttccgc

SEQ ID NO: 455793 - DNA, 75 bp, synthetic construct
  source 1..75: mol_type = other DNA
caaccatgctgagaccattggcaacaatcagatgattgcggttaccaacaatcagatacagacggtgggcgttaa

SEQ ID NO: 455794 - DNA, 75 bp, synthetic construct
  source 1..75: mol_type = other DNA
aaagcagtaataaaaccatgggataagtcgcaaacaaaaagtatctatttacctggtcgtgactttaaaaaagtg

SEQ ID NO: 455795 - DNA, 75 bp, synthetic construct
  source 1..75: mol_type = other DNA
tttaaaacagttgaagtttttcattttcaaaacaatagacctcagtgggatgaccgaaatagctatgaaaatgtt

SEQ ID NO: 455796 - DNA, 75 bp, synthetic construct
  source 1..75: mol_type = other DNA
ccgtcaaagcgatgtgcaaagcatatccgggcggccgcgaagcaatggctggcgccttgggtatgaccgtcacgc

SEQ ID NO: 455797 - DNA, 75 bp, synthetic construct
  source 1..75: mol_type = other DNA
attttgaaaatcacgtcaatgattcttttgaaaatgcattatttaaaaacttttgcacaggttgtacatgtttga

SEQ ID NO: 455798 - DNA, 75 bp, synthetic construct
  source 1..75: mol_type = other DNA
gccactgcaggcacagaaaaatgacgggcatcctccttaccgccataccggtgtggtgggttcccccctgtccac

SEQ ID NO: 455799 - DNA, 75 bp, synthetic construct
  source 1..75: mol_type = other DNA
gccaaatcaggtgtccagcgccctttccggtgcgctacttatcgtcgttgtcgtaggtcgttccgttagcctgca

SEQ ID NO: 455800 - DNA, 75 bp, synthetic construct
  source 1..75: mol_type = other DNA
tgcttataacctcacactctctccatcagcgcctaaaagtcccagacttttgggtgtggactacaattacggcac

SEQ ID NO: 455801 - DNA, 75 bp, synthetic construct
  source 1..75: mol_type = other DNA
ggggctggggcgtttctccggctttttccgcagtgccggtggactggccggccggctgggtggaggtgccctgtg

SEQ ID NO: 455802 - DNA, 75 bp, synthetic construct
  source 1..75: mol_type = other DNA
aatcgtgaacagagcatggtagtcgttcaggctcctacgctaagccagaaagattcctcggtatcgttaatagcc

SEQ ID NO: 455803 - DNA, 75 bp, synthetic construct
  source 1..75: mol_type = other DNA
cttcaatttgtgggtaacacggcgtgtgcaaacggtggatgaggacgggatcggtagcgacagtgaagttaaaaa

SEQ ID NO: 455804 - DNA, 75 bp, synthetic construct
  source 1..75: mol_type = other DNA
cgatgatgattatgtgcctgatggcgctggcattcttcggtaacggttttgcttcgattacctggtcgctggttt

SEQ ID NO: 455805 - DNA, 75 bp, synthetic construct
  source 1..75: mol_type = other DNA
atttttatcgaatgagaaaatgacaaaaacgatgatttttttatcagttttatcgcgcttcaggggcttttacgg

SEQ ID NO: 455806 - DNA, 75 bp, synthetic construct
  source 1..75: mol_type = other DNA
acgcctgtgtgctgtgttaatgacaaaagcagataaaaaagttgttattttttttcataacatgatcagtgtcag

SEQ ID NO: 455807 - DNA, 75 bp, synthetic construct
  source 1..75: mol_type = other DNA
gaggaaagccgccgctggctggcatcgtgcggcctgacggtggagcagatacaaaaccagatggacccggtgtac

SEQ ID NO: 455808 - DNA, 75 bp, synthetic construct
  source 1..75: mol_type = other DNA
aaataacacctatctaaaatataatctcaaagctaaagggaatggagttacaattatcaggcaagggagtaatta

SEQ ID NO: 455809 - DNA, 75 bp, synthetic construct
  source 1..75: mol_type = other DNA
atggcaacgttgacaaaaaaagaacaggcatggttgaacgaattacaggacgttcttgatcgctgtccatcaccg

SEQ ID NO: 455810 - DNA, 75 bp, synthetic construct
  source 1..75: mol_type = other DNA
acagcatcagcccggaagcagaacatttgcttctgaataactgtaacgcagatactcagcgtgaattaagcaatc

SEQ ID NO: 455811 - DNA, 75 bp, synthetic construct
  source 1..75: mol_type = other DNA
gcagtctataaagctgataaacaaccatacagcaaaagtaactccgcctgcacttttgtggaaaaacgtaaacat

SEQ ID NO: 455812 - DNA, 75 bp, synthetic construct
  source 1..75: mol_type = other DNA
tactttttgaccccgatttttgcgacttcaacctgtgggtaacgcgtcgcgcgcaaacggtggacgaggacggga

SEQ ID NO: 455813 - DNA, 75 bp, synthetic construct
  source 1..75: mol_type = other DNA
tgcgctatcagatgcgatagcggcaagggatggggttgcgagggaatgggcggctgtgtctaatgtggttgaact

SEQ ID NO: 455814 - DNA, 75 bp, synthetic construct
  source 1..75: mol_type = other DNA
tcctgctagaccctgatttctgtgattacacactggtgtgcacgcggaagacgcaggtgcttgacgctgatggct

SEQ ID NO: 455815 - DNA, 75 bp, synthetic construct
  source 1..75: mol_type = other DNA
acggcacggtcattaccgccacagattattattttattcaggacatcatctctgtggttcatgcggttcctgcaa

SEQ ID NO: 455816 - DNA, 75 bp, synthetic construct
  source 1..75: mol_type = other DNA
gtgctgccggaagatgttcgcctgagtccgcatgtgtacctggcgacaaacagccttcaggggccgtggtggata

SEQ ID NO: 455817 - DNA, 75 bp, synthetic construct
  source 1..75: mol_type = other DNA
atgctctactggcaccgctttgctcctgaaagccgcatgatgcgtaaagtcactgatgcgttgctcgattatggt

SEQ ID NO: 455818 - DNA, 75 bp, synthetic construct
  source 1..75: mol_type = other DNA
tttatgtccgttcgcctcgatagcgcgaaagccgcgggtaaaaatatcagcctgaacttcaatatgagcaatggc

SEQ ID NO: 455819 - DNA, 75 bp, synthetic construct
  source 1..75: mol_type = other DNA
aattattgaggctgtacattcttaatgttatcgtttcgtatgcaagcgatcccggattcagacaaatcgatggtt

SEQ ID NO: 455820 - DNA, 75 bp, synthetic construct
  source 1..75: mol_type = other DNA
agtaaaattagaatgaatataggtaggcgttcaagtgtgctgaatggtgaagtactaaaagggcttaatgataaa

SEQ ID NO: 455821 - DNA, 75 bp, synthetic construct
  source 1..75: mol_type = other DNA
aacgccggttgaggtaaagtatctgctggaagagaagctcggcattcgggtgatggtcgataatgactgcgtgat

SEQ ID NO: 455822 - DNA, 75 bp, synthetic construct
  source 1..75: mol_type = other DNA
ctgaagcgatgcataagcaggcaacgacagccgaacggttgataaaagcaggtggggtacatgaaaacaatcagg

SEQ ID NO: 455823 - DNA, 75 bp, synthetic construct
  source 1..75: mol_type = other DNA
cgggattgccaaaatcggtaatttacttttctcaccggcaggtgctgctgaaatctctccaaatataccgagcga

SEQ ID NO: 455824 - DNA, 75 bp, synthetic construct
  source 1..75: mol_type = other DNA
ccgaaagtaatgagcaatatgcccaccagcgccccggtgattcagcaggaaacgaacattaacatccacggcgtt

SEQ ID NO: 455825 - DNA, 75 bp, synthetic construct
  source 1..75: mol_type = other DNA
aatagcccgctgcacggagcgggagtttgcgaccattcttgccggtatcagcgccggcggcatgtactgcccgga

SEQ ID NO: 455826 - DNA, 75 bp, synthetic construct
  source 1..75: mol_type = other DNA
cgcaaaactcagtagcggcgaatacctgataaaagggaaaaatgtggcggcctttaccaacaaggaagaggaaga

SEQ ID NO: 455827 - DNA, 75 bp, synthetic construct
  source 1..75: mol_type = other DNA
gagggtattgccattgtctctggtggtgctcggggtgtcgatgaaacggcaatgctgggggctatgaaacaaggc

SEQ ID NO: 455828 - DNA, 75 bp, synthetic construct
  source 1..75: mol_type = other DNA
tacaagaaatggcaggttcgaaaacggcggatgttgaggaaatattatctaaagcgaaaatgatctcagtcaaac

SEQ ID NO: 455829 - DNA, 75 bp, synthetic construct
  source 1..75: mol_type = other DNA
aacggcagggaaaaacggtcaccagccaggtgctgatttttgaaatcatgcctgcgcctccggccattgccagcc

SEQ ID NO: 455830 - DNA, 75 bp, synthetic construct
  source 1..75: mol_type = other DNA
gttactggtagctgaagatggcggatttacacttgaaattaacggcagcgaaaaagagctctatctgctttccgg

SEQ ID NO: 455831 - DNA, 75 bp, synthetic construct
  source 1..75: mol_type = other DNA
ctgatgcagatgaccagtgctgttaaccgggaagctggagaaagaataaaatcaacaaacaacctgcagaatcag

SEQ ID NO: 455832 - DNA, 75 bp, synthetic construct
  source 1..75: mol_type = other DNA
ttcttccactgttcctcattctgaaaaaatagagatgagcggtgatacaacaaaggaaatataccactatgattt

SEQ ID NO: 455833 - DNA, 75 bp, synthetic construct
  source 1..75: mol_type = other DNA
attaattttttcattatgatgccgccggtcgcagatctgctggccggatttattccgtctgttcccgatcctgtc

SEQ ID NO: 455834 - DNA, 75 bp, synthetic construct
  source 1..75: mol_type = other DNA
aagcaatgggaaaagcctcttcacaggaagttgcagcacgcctgggcatgacccgggatgaagcaatcaacgagc

SEQ ID NO: 455835 - DNA, 75 bp, synthetic construct
  source 1..75: mol_type = other DNA
gttcaaggaaaactaataagcacagcacctattcgtaacatcaatataataaatactgaggatgattatttattc

SEQ ID NO: 455836 - DNA, 75 bp, synthetic construct
  source 1..75: mol_type = other DNA
ttacgacgaaacgtttccaaagcccgtcagactcggtgctgcctccgttggatggcgttccacttccgttgatga

SEQ ID NO: 455837 - DNA, 75 bp, synthetic construct
  source 1..75: mol_type = other DNA
caaataatcttggcggggaaattggtaactgggtcggagctatgataggtaaggcttactctggcagcctcaaaa

SEQ ID NO: 455838 - DNA, 75 bp, synthetic construct
  source 1..75: mol_type = other DNA
ttcagaaacctgagcaataaaattgaacgggcagaaaaaagacttaatgcaggcatcgccggagtaacagcaata

SEQ ID NO: 455839 - DNA, 75 bp, synthetic construct
  source 1..75: mol_type = other DNA
attgtgctggatggttacagcgtcagcctcggtaatgccaccagaattaacggtgattcatctgttgccataggt

SEQ ID NO: 455840 - DNA, 75 bp, synthetic construct
  source 1..75: mol_type = other DNA
gcccatctgcgcggacgctatatcctgccactggcagagataccgactgttctgcgggacattgccatcacgctg

SEQ ID NO: 455841 - DNA, 75 bp, synthetic construct
  source 1..75: mol_type = other DNA
ccagcaatagaaaaggcgaaaaaggcaattctctggctgcgcgataagctgcttgggctgaaggattctgtcggt

SEQ ID NO: 455842 - DNA, 75 bp, synthetic construct
  source 1..75: mol_type = other DNA
gtatcatcggtattctgttggctaacgaacaggtacgtctccagaccagtgccagtagccagacttttgagaata

SEQ ID NO: 455843 - DNA, 75 bp, synthetic construct
  source 1..75: mol_type = other DNA
attatttaccggatagcacaagggttgcatcaaaaatgttccatgaactggcttgtgcatttgttaatggtgggc

SEQ ID NO: 455844 - DNA, 75 bp, synthetic construct
  source 1..75: mol_type = other DNA
taagaatatgactttaaacgattatgtaaaacaggctgtcagtgagtcagttaatgggaaaaaagaggttcacta

SEQ ID NO: 455845 - DNA, 75 bp, synthetic construct
  source 1..75: mol_type = other DNA
aaagaatggaatccaaccagttctctttttggtatatattttagccaacaaagataaaatggctttatataaaga

SEQ ID NO: 455846 - DNA, 75 bp, synthetic construct
  source 1..75: mol_type = other DNA
aaaacattattaccaaacaggctcattacgctggatggatatatctctttgttcattagatgtattcaaagggaa

SEQ ID NO: 455847 - DNA, 75 bp, synthetic construct
  source 1..75: mol_type = other DNA
accagatggtcatcgatgggctcagtctgtagaagcagttgaacgcgtagaagctggttccgacaagctaaaggt

SEQ ID NO: 455848 - DNA, 75 bp, synthetic construct
  source 1..75: mol_type = other DNA
ttgtctaaagctgtttttcatagcttacacatgccccaatactccttacataaataccgtgaacaaatggaactt

SEQ ID NO: 455849 - DNA, 75 bp, synthetic construct
  source 1..75: mol_type = other DNA
ttgtcaggcatcctactattgactatttttgccgttatttctggtgcagaaagttgggaagatatagaggatttc

SEQ ID NO: 455850 - DNA, 75 bp, synthetic construct
  source 1..75: mol_type = other DNA
atgcctgttaccgaacatgcgcagcgtcgtgctgcgcgtgcggatgcgctcgtcaccgcacaacttgccttcgcc

SEQ ID NO: 455851 - DNA, 75 bp, synthetic construct
  source 1..75: mol_type = other DNA
actatctccccggtagtactcgagttagtgcaaaaatgatgcatgaattggctcgtgaacttctgcaaagaggtc

SEQ ID NO: 455852 - DNA, 75 bp, synthetic construct
  source 1..75: mol_type = other DNA
atgtttggtttattcaatgttacccaaatggcattagagatacctagttccgtttcaggcatctctggtaaatat

SEQ ID NO: 455853 - DNA, 75 bp, synthetic construct
  source 1..75: mol_type = other DNA
tcttctgatggcgctgtgggggcctttgtccggcaccagttacggcattgccgggctgctgatgctggcagtcag

SEQ ID NO: 455854 - DNA, 75 bp, synthetic construct
  source 1..75: mol_type = other DNA
taggtacgcccagtggtaattttaaagcaatagataaccacgggaaggaaataacaaacagaaaaggattaccta

SEQ ID NO: 455855 - DNA, 75 bp, synthetic construct
  source 1..75: mol_type = other DNA
gcgcaggcgcgaaaggactgtttcagtttatggatggcacggcgcgcgacatgggcctgcgtgggaatgatgtat

SEQ ID NO: 455856 - DNA, 75 bp, synthetic construct
  source 1..75: mol_type = other DNA
gtttcgcaggttggcggcagtgtggacgctgcgcgatcttctctggaaagcctctcccggtttattcgtaacaat

SEQ ID NO: 455857 - DNA, 75 bp, synthetic construct
  source 1..75: mol_type = other DNA
atagttcaacagcaagcacaaagaaaacactggtggctaaaaggagaaaagtacgatcgactaaagaagcgcggt

SEQ ID NO: 455858 - DNA, 75 bp, synthetic construct
  source 1..75: mol_type = other DNA
acttgagtcgctttatcaacttccagctggtctattgaaaagtgtggcgataaccgagtcaggtggtaaccagtt

SEQ ID NO: 455859 - DNA, 75 bp, synthetic construct
  source 1..75: mol_type = other DNA
atcccggggcggagggatttctgaatcgtctgggggtacagacacgggatgccagcggtaacatgcgtgacatgg

SEQ ID NO: 455860 - DNA, 75 bp, synthetic construct
  source 1..75: mol_type = other DNA
cccgctggcgtatcaggccgccgctggcagccttaaccagcagactgttataaatgttcatggagttaacaaccc

SEQ ID NO: 455861 - DNA, 75 bp, synthetic construct
  source 1..75: mol_type = other DNA
gcattgtggcaatggttgagacggcgaacgccaaaaagggaaacagccgtgcgttgagtgaaataacgctgaaac

SEQ ID NO: 455862 - DNA, 75 bp, synthetic construct
  source 1..75: mol_type = other DNA
gccaaaactttaaaaatcctgatgtatggcacctgcctgcaacctactggttctggcataccattccggacaaaa

SEQ ID NO: 455863 - DNA, 75 bp, synthetic construct
  source 1..75: mol_type = other DNA
gtatgatgtacagataagtaacgcttacaaacaagcgtcacagtttaagaacttgacgattgagtttatgaggac

SEQ ID NO: 455864 - DNA, 75 bp, synthetic construct
  source 1..75: mol_type = other DNA
ttagatgtgaaagagttactcggcgaagttgtatttcgacaggatatattttactcgttacgtaaagttgcagtc

SEQ ID NO: 455865 - DNA, 75 bp, synthetic construct
  source 1..75: mol_type = other DNA
ctggccataaatggctatacctcaatgaatgccataaagagacaggagatcattgacgccgaccatcagcgcctc

SEQ ID NO: 455866 - DNA, 75 bp, synthetic construct
  source 1..75: mol_type = other DNA
gaacgcaaggcgacactgatttccctttatctgggagctttacgccgcaaccggtgtggatgccgtaccgattcg

SEQ ID NO: 455867 - DNA, 75 bp, synthetic construct
  source 1..75: mol_type = other DNA
aacgaccatagctcatgtgtatatcaaggaaaaaacaaagcatgtgccatgaaacccactctgttgagtgtggtt

SEQ ID NO: 455868 - DNA, 75 bp, synthetic construct
  source 1..75: mol_type = other DNA
aagccgccgctggctggcatcgtgcggcctgacggtgaagcagatgcaaaaccagatggacccggtgtacacgcc

SEQ ID NO: 455869 - DNA, 75 bp, synthetic construct
  source 1..75: mol_type = other DNA
atggaggctatttaagattaggtactcaaactgcaggcgtcgggacggttaatgttgagggagaggactcggttt

SEQ ID NO: 455870 - DNA, 75 bp, synthetic construct
  source 1..75: mol_type = other DNA
taattttagtgggactgtttttgagaatacagtagccactactcttgatcatacatcaggtaagccatcagaata

SEQ ID NO: 455871 - DNA, 75 bp, synthetic construct
  source 1..75: mol_type = other DNA
cgcagtctgtagtggcggtcctgaaccgcaattatcagtaacttttccagtacgagtgcagctatatattaagct

SEQ ID NO: 455872 - DNA, 75 bp, synthetic construct
  source 1..75: mol_type = other DNA
ttccgattacgtcaaatacttcaatgtcgctacgtctgtcgccagtcgtgatgtaaaggctggggtaaatgcttt

SEQ ID NO: 455873 - DNA, 75 bp, synthetic construct
  source 1..75: mol_type = other DNA
gatattacaacacgattgcataataaccttgacagcaccctgcttcgacacgaaatggcacataataagtttcgt

SEQ ID NO: 455874 - DNA, 75 bp, synthetic construct
  source 1..75: mol_type = other DNA
gccgctacggtcagttgctggcgttcaccgactgctcgggctaccagacccgctatgagtatgaccgcttcggcc

SEQ ID NO: 455875 - DNA, 75 bp, synthetic construct
  source 1..75: mol_type = other DNA
gaagccgggctgaaacgtgtggtgaaaacggaactcgcggatggcagcatcacccgaagtaaatttgactatatg

SEQ ID NO: 455876 - DNA, 75 bp, synthetic construct
  source 1..75: mol_type = other DNA
attggtgggcgttcaggacggttcccacggtgtcgtcaacgtgaccgataaagggcattggaatttcctcggaac

SEQ ID NO: 455877 - DNA, 75 bp, synthetic construct
  source 1..75: mol_type = other DNA
atggaggctatttaagattaggttcttcgacaggaggcgtcgggacggtcaatgttgagggagaggactctgttc

SEQ ID NO: 455878 - DNA, 75 bp, synthetic construct
  source 1..75: mol_type = other DNA
catccataaccagttaccgcgtttgtctgcgctgtgtgccgcaacgaccgcagcaatgggggccgccgccgggat

SEQ ID NO: 455879 - DNA, 75 bp, synthetic construct
  source 1..75: mol_type = other DNA
taacgctgctggttatccggtatataacggacagattgccaaattcgtaactgtgcaaggccattctatggctgt

SEQ ID NO: 455880 - DNA, 75 bp, synthetic construct
  source 1..75: mol_type = other DNA
taatttaacaggcattgccgatcaggatattacaacacgattgcataataaccttgacagcaccctgcttcgaca

SEQ ID NO: 455881 - DNA, 75 bp, synthetic construct
  source 1..75: mol_type = other DNA
tgacgaccgcccaactgacgctgatcaccgatgaaggatcggtcaatgagaaacaggaaacatttattgtaccga

SEQ ID NO: 455882 - DNA, 75 bp, synthetic construct
  source 1..75: mol_type = other DNA
gatcgctttcggaatcaaacgtctggcacctggtttgggtatctttgacccgctgatcggcctgatgtcgccggt

SEQ ID NO: 455883 - DNA, 75 bp, synthetic construct
  source 1..75: mol_type = other DNA
agttgcgagcggcattatggcaagagtttgatctggacaacgctatttgggaaattcctgccgaaagaatgaaaa

SEQ ID NO: 455884 - DNA, 75 bp, synthetic construct
  source 1..75: mol_type = other DNA
ggcgtgatgttcccgtttttctcaccgttcctcggctggctggggggattccttaccggctcggacacttcttca

SEQ ID NO: 455885 - DNA, 75 bp, synthetic construct
  source 1..75: mol_type = other DNA
tatgctgcatccgatgtgtcacacacttgttcatgcgaaaggtatacatgtagtgaaaccggctcatgagagtgg

SEQ ID NO: 455886 - DNA, 75 bp, synthetic construct
  source 1..75: mol_type = other DNA
agcaacgggctgggcggtcacattgaaaccgggatgcgatttacggatggtaactggaacctgacgccgtatgca

SEQ ID NO: 455887 - DNA, 75 bp, synthetic construct
  source 1..75: mol_type = other DNA
caatgtcgtttaccttaataattataagtcgctttatgttgggtatatactcagtttttttttcaagaaaaacta

SEQ ID NO: 455888 - DNA, 75 bp, synthetic construct
  source 1..75: mol_type = other DNA
agcattgctgttgcttgataactcatatcagatatcacagatatctaatatgatagggttttccagtacatcata

SEQ ID NO: 455889 - DNA, 75 bp, synthetic construct
  source 1..75: mol_type = other DNA
gctccacttcctgaacaccattcctccatcaatgaagtttgcggcagcgtttctggtcggtgcgatgctggcgtt

SEQ ID NO: 455890 - DNA, 75 bp, synthetic construct
  source 1..75: mol_type = other DNA
caacagtagttgacgggttgttttaccgcgtagaaggtgatgatattcgcatccgcgttggctgtggtgagtggg

SEQ ID NO: 455891 - DNA, 75 bp, synthetic construct
  source 1..75: mol_type = other DNA
cagtattcgcgagcggttgaacataatgaaagcgagtccacacaacaataatgtctgggggacgacgtataacac

SEQ ID NO: 455892 - DNA, 75 bp, synthetic construct
  source 1..75: mol_type = other DNA
gactatgcggagtatggccgggataacggtatccgcctgtcagcggtgtggctcacgcacgaccctgaatacccg

SEQ ID NO: 455893 - DNA, 75 bp, synthetic construct
  source 1..75: mol_type = other DNA
cataatcatggttccgaaccaggtaatacttccacttatatttaccaagatacgttgataacaagaaaagcatgc

SEQ ID NO: 455894 - DNA, 75 bp, synthetic construct
  source 1..75: mol_type = other DNA
tgtcagggaaaataaactcaatgaaacagcgcgtaaatatactaaatggacaaaagttgtaaaaatcgttaatga

SEQ ID NO: 455895 - DNA, 75 bp, synthetic construct
  source 1..75: mol_type = other DNA
gtacttgctgccggagacatcagaaatgcactaagaatgacaagagaatttattgaacatggttatacaaatcca

SEQ ID NO: 455896 - DNA, 75 bp, synthetic construct
  source 1..75: mol_type = other DNA
ctgccgtaatgcgagaaacccaggctgataagggcacaatcggtgatttcagcgccaaagtcacgtttaacttca

SEQ ID NO: 455897 - DNA, 75 bp, synthetic construct
  source 1..75: mol_type = other DNA
ccttaattcaaataaggatctaatggctataacaacaaaagaccttggtaattggataacatatgggccatctgg

SEQ ID NO: 455898 - DNA, 75 bp, synthetic construct
  source 1..75: mol_type = other DNA
gttctgttcactctacttcgcccacattttcttccctccgggaacacgacgactcaactactacaaacagcaggt

SEQ ID NO: 455899 - DNA, 75 bp, synthetic construct
  source 1..75: mol_type = other DNA
aaacagggggatttccttaaacgatctgttaaccggctcaggcgggtcttatgctggggaactaaacaggctgta

SEQ ID NO: 455900 - DNA, 75 bp, synthetic construct
  source 1..75: mol_type = other DNA
caaaaacatgactctcgataccgggttccagaccgatcagccagcggtcggcccggcaatcttcgagaatcaaac

SEQ ID NO: 455901 - DNA, 75 bp, synthetic construct
  source 1..75: mol_type = other DNA
caaaaacatgacgctcgataccgggttccagaccgatcagccagcggtcggcccggccatattcgagaaccaaac

SEQ ID NO: 455902 - DNA, 75 bp, synthetic construct
  source 1..75: mol_type = other DNA
cgctgatgaggaagggcgtacacgggttactctcgcgcggggagaacccggaagaagtacacctgctgcaccgga

SEQ ID NO: 455903 - DNA, 75 bp, synthetic construct
  source 1..75: mol_type = other DNA
agcgtgataaacttctagcagagaaacgccggaaggctttcagggaaagtcagattacagcacctgtaccgcaat

SEQ ID NO: 455904 - DNA, 75 bp, synthetic construct
  source 1..75: mol_type = other DNA
agggcaagccctgaacgatttgctcttatccggcggttcttctggccaatttgatgaactgtacaacaaatacaa

SEQ ID NO: 455905 - DNA, 75 bp, synthetic construct
  source 1..75: mol_type = other DNA
tccgggatccttccctacgtcgacgagtacaggcagggttgaataaaggtgaggcccgcaatgcccttgttcgag

SEQ ID NO: 455906 - DNA, 75 bp, synthetic construct
  source 1..75: mol_type = other DNA
taaataccggggccggatggtggcgcaccgtcacacgggccgaccggaaatccgttaccgttacgacagcgacgg

SEQ ID NO: 455907 - DNA, 75 bp, synthetic construct
  source 1..75: mol_type = other DNA
ggcgctggtagccacaggctctaccgttcatgaagtggtcgatgccgcagaacttttagcgcagtctggtatcgc

SEQ ID NO: 455908 - DNA, 75 bp, synthetic construct
  source 1..75: mol_type = other DNA
atgggactggcatcaaaatatggacacttaaataatggcggatatggagcgagacccaacaaaccgcctacgccc

SEQ ID NO: 455909 - DNA, 75 bp, synthetic construct
  source 1..75: mol_type = other DNA
gatatccgcttacagatacgcgataacgaactgatactcaatgataacggtggcagaagcattcattttgagcac

SEQ ID NO: 455910 - DNA, 75 bp, synthetic construct
  source 1..75: mol_type = other DNA
aacgagatgtgcggattgaaggcgcgggtatcttaggtggtatgaactatcgggtcagcgaagggccgttacaag

SEQ ID NO: 455911 - DNA, 75 bp, synthetic construct
  source 1..75: mol_type = other DNA
cgccagacgctattagcagtcaaaaacaatacgctctcgccgcgcaccggtttgcggcagctcagtgaatttatc

SEQ ID NO: 455912 - DNA, 75 bp, synthetic construct
  source 1..75: mol_type = other DNA
cagtggatcagagctggtttccagtacggtagtctggatattttcggcgacagaaccgcaacacaagccatttcg

SEQ ID NO: 455913 - DNA, 75 bp, synthetic construct
  source 1..75: mol_type = other DNA
tgggctggcggagtctgaatttgtatgttatatctatgttttaattggttatttatttaagttgtttttgtttgt

SEQ ID NO: 455914 - DNA, 75 bp, synthetic construct
  source 1..75: mol_type = other DNA
gttaggtggtgatgagttggtgaagagtgaacagtcgactcttcacctttgtgatttgtgctcgtcctggatctg

SEQ ID NO: 455915 - DNA, 75 bp, synthetic construct
  source 1..75: mol_type = other DNA
aggctgacgctctgataagtggactgaggcagcggcttgcgcaatgcgggctgcagctgcatccgcaaaaaacac

SEQ ID NO: 455916 - DNA, 75 bp, synthetic construct
  source 1..75: mol_type = other DNA
gtgcagcatcatactcaggcacgctgggtggtgatgtacattgagcgcaggctgaaggcaccggtgcaaatgccg

SEQ ID NO: 455917 - DNA, 75 bp, synthetic construct
  source 1..75: mol_type = other DNA
cggcaaccacgggcgacaatgccgatgggaggactgctgtaaaatcggcaaagccatttcctgtaagtaaacgac

SEQ ID NO: 455918 - DNA, 75 bp, synthetic construct
  source 1..75: mol_type = other DNA
aaattatcggatattctattgttgactatttgtgccgttatttctggtgcggaaggttgggaagatatagaggat

SEQ ID NO: 455919 - DNA, 75 bp, synthetic construct
  source 1..75: mol_type = other DNA
atggaacttaaaaaattgatggaacatatttctgttattcccgattacagacaagcctggaaagtggaacataaa

SEQ ID NO: 455920 - DNA, 75 bp, synthetic construct
  source 1..75: mol_type = other DNA
tggtgcaaatgacggattcaatagtgcaaccgtttccggcacaattatccagttgcctgatattgataaacgttc

SEQ ID NO: 455921 - DNA, 75 bp, synthetic construct
  source 1..75: mol_type = other DNA
aggatgttgccgtatcggcagaaaagagtaataaagccctaccttattcaaatggcgacggatgggagcagaaac

SEQ ID NO: 455922 - DNA, 75 bp, synthetic construct
  source 1..75: mol_type = other DNA
atgaaaagcgcgattgaacgtcgcatggaaatcgcgaatctggtcggagtgagaggtaaggtcagtgttggagat

SEQ ID NO: 455923 - DNA, 75 bp, synthetic construct
  source 1..75: mol_type = other DNA
cgtaaagggccgctctcccgcgccctgcgacgtcgccttgaaggtacacaggggctggttatcatcgacgaagct

SEQ ID NO: 455924 - DNA, 75 bp, synthetic construct
  source 1..75: mol_type = other DNA
cagaagaattatcaaaagtaatgggtgaaaatagtgaaaaaagtgctgcttccacttcatcacttcaaagtttac

SEQ ID NO: 455925 - DNA, 75 bp, synthetic construct
  source 1..75: mol_type = other DNA
cttttccgttaattgtgtcatgctctacagatgtctataaaagaactcaaaatagtcatgacgcagaaaaaaata

SEQ ID NO: 455926 - DNA, 75 bp, synthetic construct
  source 1..75: mol_type = other DNA
cgatacgttaacgctgaccaatggactgattgatactggtttctcgcggcttactgccgatggtgaatgggttaa

SEQ ID NO: 455927 - DNA, 75 bp, synthetic construct
  source 1..75: mol_type = other DNA
atagcccgtgatacttctgtcgtgaaaatacttgataaattatatatcggaagtcgcagtactgatagcttgcat

SEQ ID NO: 455928 - DNA, 75 bp, synthetic construct
  source 1..75: mol_type = other DNA
ccatcagttggtgaagatggaaatattctgttgcaatatgggatcactatttcctctcttgtaggaagtaatgat

SEQ ID NO: 455929 - DNA, 75 bp, synthetic construct
  source 1..75: mol_type = other DNA
atattacttcaatatggtgtaaatttatctactttagtcggtgcatatggtggctttgaccaagtagtggtttca

SEQ ID NO: 455930 - DNA, 75 bp, synthetic construct
  source 1..75: mol_type = other DNA
actcctatatggggcatatgtataatggtaacgatatttccgccaggatgatgaccgctgcactcaaaaagcaga

SEQ ID NO: 455931 - DNA, 75 bp, synthetic construct
  source 1..75: mol_type = other DNA
cgtgaaggataaagaaggtgctggtgagcagaatcaaacagtgtggttggtcgactgggaaaatccagatgccaa

SEQ ID NO: 455932 - DNA, 75 bp, synthetic construct
  source 1..75: mol_type = other DNA
gcatgacacaaaaacgtgttatccagttattcaccgagcatctcggttatcactatcttggtaactggcacaaaa

SEQ ID NO: 455933 - DNA, 75 bp, synthetic construct
  source 1..75: mol_type = other DNA
gaaacatcgggggggatgattgcgcgctatgaggattttgtcaggacatttaaggctcatggattcataagcgat

SEQ ID NO: 455934 - DNA, 75 bp, synthetic construct
  source 1..75: mol_type = other DNA
atgcctgtttattttataaactttgaaggtaaacgctcatccaggcgatattcagagagtgagttgtctcaccca

SEQ ID NO: 455935 - DNA, 75 bp, synthetic construct
  source 1..75: mol_type = other DNA
gcaaatcaaatccgcattgatgttgagttttatacaaaagtccgggatgaaatcaaaatagccagtggcgatttc

SEQ ID NO: 455936 - DNA, 75 bp, synthetic construct
  source 1..75: mol_type = other DNA
tggaacagattgtggctgacatccttctcgattttgaacaaaaaccacggctcgccgatggccgaggtaacgcca

SEQ ID NO: 455937 - DNA, 75 bp, synthetic construct
  source 1..75: mol_type = other DNA
cctcacacttgcgctactgcgcaggctgcatcaccgagcagctcatcggtgaaagtgatatccgcacttttgctc

SEQ ID NO: 455938 - DNA, 75 bp, synthetic construct
  source 1..75: mol_type = other DNA
cttaagactcttaacggctttacattcagcgcttcaaccaacgtcaaggctgcactggaagcctgtcgcctagac

SEQ ID NO: 455939 - DNA, 75 bp, synthetic construct
  source 1..75: mol_type = other DNA
atagagttagctaaacattttcaagttttatttgattatatcactggtaagttagaatatttatatataccaaaa

SEQ ID NO: 455940 - DNA, 75 bp, synthetic construct
  source 1..75: mol_type = other DNA
gtgacgatacaggagtcaggaaccagcatattaaaaaatgatttagaaaacagtgaggacggtgcgggtcaaata

SEQ ID NO: 455941 - DNA, 75 bp, synthetic construct
  source 1..75: mol_type = other DNA
aggcatcaataaatcagaggttcgcattttatcgaccatcgaccagttacgattctggagcccattaaaacgctt

SEQ ID NO: 455942 - DNA, 75 bp, synthetic construct
  source 1..75: mol_type = other DNA
acttcaggaatctttttattaccagaaccagttgatccagcaaaaaattcaggattttcagcgggaaaaagaggt

SEQ ID NO: 455943 - DNA, 75 bp, synthetic construct
  source 1..75: mol_type = other DNA
ttcacgcatggctgggagaattattaccgttaattgagaaaggattactgaaaccagaagaaattgttacccact

SEQ ID NO: 455944 - DNA, 75 bp, synthetic construct
  source 1..75: mol_type = other DNA
tgattcatgaaggtagccatattggttcctggagtaccacagcaacggtttatgctccaccggaaagtgcagcgg

SEQ ID NO: 455945 - DNA, 75 bp, synthetic construct
  source 1..75: mol_type = other DNA
gtcgagccgatcaacatgatggactacggcatgcaaaaagggggcgccgtgctcgatttcgcactcaccctgata

SEQ ID NO: 455946 - DNA, 75 bp, synthetic construct
  source 1..75: mol_type = other DNA
tttttccataggctccgcccccctgacaagcatcacaaaatctgacgctcaaatcagcggtggcgaaacccgaca

SEQ ID NO: 455947 - DNA, 75 bp, synthetic construct
  source 1..75: mol_type = other DNA
gtgggcggggattcgttcgccctggtgaaactgaaaaacaacaaaattggggtttttcagacataaaaaaagcgg

SEQ ID NO: 455948 - DNA, 75 bp, synthetic construct
  source 1..75: mol_type = other DNA
tgctgtcgcaaaaaactaacggaagcacccagcagcaaaccgtcaggctgacgttacgcgttcatttttctgagc

SEQ ID NO: 455949 - DNA, 75 bp, synthetic construct
  source 1..75: mol_type = other DNA
cgcgagcagctgtcgcgtgcacgggcatggtggctgaaggaccaggccgagggccgcagcggcgttgcgcttccc

SEQ ID NO: 455950 - DNA, 75 bp, synthetic construct
  source 1..75: mol_type = other DNA
gagaaaactggccgattttctctgcactggagggataatacaaggcctgataagacgcgccagcgtcgcatcagg

SEQ ID NO: 455951 - DNA, 75 bp, synthetic construct
  source 1..75: mol_type = other DNA
gaaaggcagtccgctgcataaatctacgcaacaggttagaacccaaggcccgatacggcatggggactgcaggca

SEQ ID NO: 455952 - DNA, 75 bp, synthetic construct
  source 1..75: mol_type = other DNA
ggttcttacgcccgcggcagaaagtctgaatgcccggtggcgtactgcggtggtggatggctggaataatgcatt

SEQ ID NO: 455953 - DNA, 75 bp, synthetic construct
  source 1..75: mol_type = other DNA
gatgccaagaagaaacttaacagggaagcgataaggccacggcggagccgtttttccataggctccgcccccctg

SEQ ID NO: 455954 - DNA, 75 bp, synthetic construct
  source 1..75: mol_type = other DNA
catcgacgaagatgcattgaagcgagccattcagaaagcaaaggagattgcagacgctaccccggaaaaataccg

SEQ ID NO: 455955 - DNA, 75 bp, synthetic construct
  source 1..75: mol_type = other DNA
ataatacaaggcctgataagacgcgtcagcgtcgcatcaggcaacggcaccgcacttattgtcggatgcggcgtg

SEQ ID NO: 455956 - DNA, 75 bp, synthetic construct
  source 1..75: mol_type = other DNA
gtgagtcattttcgttcgtgactgaagcggctgctaattataccgaacagggggtttctgctacgccggggacgg

SEQ ID NO: 455957 - DNA, 75 bp, synthetic construct
  source 1..75: mol_type = other DNA
ttcagcatcaaagcaatgtgccgcgtgctccgggtggcccgcagcggctggtatacgtggtgtcagcggcggaca

SEQ ID NO: 455958 - DNA, 75 bp, synthetic construct
  source 1..75: mol_type = other DNA
atgaagtatgtctttattgaaaaacatcaggctgacttcagcatcaaagcaatgtgccacgtgccccgggtggcc

SEQ ID NO: 455959 - DNA, 75 bp, synthetic construct
  source 1..75: mol_type = other DNA
ttgtatttatgctacagcatgcggacatgcaggaattggtggtgggataaatgcggctatcacatattctgagac

SEQ ID NO: 455960 - DNA, 75 bp, synthetic construct
  source 1..75: mol_type = other DNA
tattgcggcggtcaggcgtggcggcattgttagcgtaccgggcgtctacgctggatttattcacggtttcctgtt

SEQ ID NO: 455961 - DNA, 75 bp, synthetic construct
  source 1..75: mol_type = other DNA
aggaaatattattctatcaattggaagacatacatctcaaaagcggtttgataagttgttatatatctggaaaga

SEQ ID NO: 455962 - DNA, 75 bp, synthetic construct
  source 1..75: mol_type = other DNA
atgaaaacttaagataccaactaagctcgaatgcaaaggctaatgtcgaaaggtttaatgaagaacatatttcaa

SEQ ID NO: 455963 - DNA, 75 bp, synthetic construct
  source 1..75: mol_type = other DNA
agaaggttgccaagattcgtgccgatttcgatgattttgacggtgacaggcgaggtatcggtgattgtctggatg

SEQ ID NO: 455964 - DNA, 75 bp, synthetic construct
  source 1..75: mol_type = other DNA
ggttgtgccggataatgcatcagagcctcttgcttatgcttacaaagagcttacgcctgagattatgcgcaacca

SEQ ID NO: 455965 - DNA, 75 bp, synthetic construct
  source 1..75: mol_type = other DNA
agatcacgatatcgtgattggtctgctggataagctggaagagcgggttattggtgcgcaggggatccagattga

SEQ ID NO: 455966 - DNA, 75 bp, synthetic construct
  source 1..75: mol_type = other DNA
gagcgtgacctgacgggggggatgtcgctgtcgcgtaaaccggaggagacatggtacggctgggacggcgacagg

SEQ ID NO: 455967 - DNA, 75 bp, synthetic construct
  source 1..75: mol_type = other DNA
acgatgaatcggaccgtatcactcaccgcacggtgaacggcgaaccggcagagcagtggcagtatgatggccacg

SEQ ID NO: 455968 - DNA, 75 bp, synthetic construct
  source 1..75: mol_type = other DNA
gcaagttccggtaactccggatggttggataagctgtagtgagagaatgcctgtaatcggcgagctaaattggag

SEQ ID NO: 455969 - DNA, 75 bp, synthetic construct
  source 1..75: mol_type = other DNA
gctcggaagttgccaacgcatttgtcgagaaaatgggagagaaaggaaaatatgccgaactcacctgtaatcttg

SEQ ID NO: 455970 - DNA, 75 bp, synthetic construct
  source 1..75: mol_type = other DNA
ctggatcctcgccagccttttcacattcgtaccactattggtaactttgcggcgctgttccgtcataagcgtgtc

SEQ ID NO: 455971 - DNA, 75 bp, synthetic construct
  source 1..75: mol_type = other DNA
gtgatgagcaaaaatctcgcagagtgtttcagtattcataatgataatttcagtgagctggaatgggagtgtaac

SEQ ID NO: 455972 - DNA, 75 bp, synthetic construct
  source 1..75: mol_type = other DNA
ggccaggcgaagcggccacgctccagccttttggtcagcaggcacagtccgtcgccggtggaccacagcagtttg

SEQ ID NO: 455973 - DNA, 75 bp, synthetic construct
  source 1..75: mol_type = other DNA
catatcctagaggtgttaagttgggggattatgaggcaggatttatttttccgcaagataattacttttactcta

SEQ ID NO: 455974 - DNA, 75 bp, synthetic construct
  source 1..75: mol_type = other DNA
ttgttgttattttatataataaaaaaattgtagattctctgacaatagattctataaatgattcctctcttgaaa

SEQ ID NO: 455975 - DNA, 75 bp, synthetic construct
  source 1..75: mol_type = other DNA
gaaaatgatggagtttttacatggctcccagatttttttccgcacgtagcggtggatatatcaatatacacaaat

SEQ ID NO: 455976 - DNA, 75 bp, synthetic construct
  source 1..75: mol_type = other DNA
cgagaagcgcataagattgcccgtgaaccaacaccaaaaccatcagaaccgttaaacatttttgacctcgatcag

SEQ ID NO: 455977 - DNA, 75 bp, synthetic construct
  source 1..75: mol_type = other DNA
tctcctgccgtcgatactcatccccctgaagcttctgccagtaaggggagcccgcagaattcggaaaaaatcgta

SEQ ID NO: 455978 - DNA, 75 bp, synthetic construct
  source 1..75: mol_type = other DNA
cgggccagaaaacacctgaaagagacgatgacagaactctgccagattgaggcggatgacacatcttttgtctgc

SEQ ID NO: 455979 - DNA, 75 bp, synthetic construct
  source 1..75: mol_type = other DNA
cgggccagaaagcacctgaaagagacgatgacagaactttgtcagattgaggcggatgacacttctcccgtctgc

SEQ ID NO: 455980 - DNA, 75 bp, synthetic construct
  source 1..75: mol_type = other DNA
gtgattatcgaaaccagcggttacgccgacgcgctgcaatcggcgctgcgtggccttgcttatggcggcaccatc

SEQ ID NO: 455981 - DNA, 75 bp, synthetic construct
  source 1..75: mol_type = other DNA
actgctattattagctatacgtgcagccggacccgacagctgcaattgagttcttatgaccgattatttcctaat

SEQ ID NO: 455982 - DNA, 75 bp, synthetic construct
  source 1..75: mol_type = other DNA
attaaaactggacatgattagcgatgaaaataaattaaagctgacgcgctggatggcgtatatccgacagcttaa

SEQ ID NO: 455983 - DNA, 75 bp, synthetic construct
  source 1..75: mol_type = other DNA
ggatggcatacatcagtcaggtgaaaaaaatggtattacccgccattaaaactgaagctgaatttaacgccatta

SEQ ID NO: 455984 - DNA, 75 bp, synthetic construct
  source 1..75: mol_type = other DNA
tccctgccattattcaccaaaaaatataaactttgcataacacctgacagcggcgttatctgctcaatatcacag

SEQ ID NO: 455985 - DNA, 75 bp, synthetic construct
  source 1..75: mol_type = other DNA
cggatgttttacaagattcgttttttaaaaatgtcgatttcattcatgaatctaactcgtataccgtagggatgg

SEQ ID NO: 455986 - DNA, 75 bp, synthetic construct
  source 1..75: mol_type = other DNA
gttgggttgcaaggtaatatcaacacggatgttttacaagattcgttttttaaaaatgtcgatttcattcatgaa

SEQ ID NO: 455987 - DNA, 75 bp, synthetic construct
  source 1..75: mol_type = other DNA
ggatggcgtatatccgacagcttaaagaaatgcaccttaatgatattgccagcgagaggcattaccaggcgattt

SEQ ID NO: 455988 - DNA, 75 bp, synthetic construct
  source 1..75: mol_type = other DNA
tcaatattatacatatgtttgctttaatatacccaagcaaattaaatatctggcaaggtctgcatctcaaggaaa

SEQ ID NO: 455989 - DNA, 75 bp, synthetic construct
  source 1..75: mol_type = other DNA
gaaatgctggctgcaacaaaccctttactatcccctggaatacctgaggacactgaatgggtaaatttccataaa

SEQ ID NO: 455990 - DNA, 75 bp, synthetic construct
  source 1..75: mol_type = other DNA
tgccctgttcatcgcggatatagacggttctgcgccccgaccagtcctcctccccggccatctggcccgccgcat

SEQ ID NO: 455991 - DNA, 75 bp, synthetic construct
  source 1..75: mol_type = other DNA
tatcgtgccggtatggcgtaaaagctggtggcagggcgtgtggtatgaaatccgctggtatctgttctggcaaaa

SEQ ID NO: 455992 - DNA, 75 bp, synthetic construct
  source 1..75: mol_type = other DNA
cacaatatcatgtgattcctgaaaatgacaaatggtggggagaaggttttacagaatggacaaatgttaaaagag

SEQ ID NO: 455993 - DNA, 75 bp, synthetic construct
  source 1..75: mol_type = other DNA
ccgccaaatgtgaaaacgacccggtatttcgtgagcgttacctactcgcccaggttaagccgctggcagtcgtac

SEQ ID NO: 455994 - DNA, 75 bp, synthetic construct
  source 1..75: mol_type = other DNA
gaagctggcaggctaactggccgaatcttgccacgttcttcgcttatccgacggacatccgcaaagtgatctata

SEQ ID NO: 455995 - DNA, 75 bp, synthetic construct
  source 1..75: mol_type = other DNA
acctgctcccccaatcgaacaagattaaacgtgccgacggtaagcgtggcccgtggtactcgcaggcatttacac

SEQ ID NO: 455996 - DNA, 75 bp, synthetic construct
  source 1..75: mol_type = other DNA
gtgttccgtgaccaatacttattagagttccgcaagctccagctcatgatgaaaccggataaccctataaaccgg

SEQ ID NO: 455997 - DNA, 75 bp, synthetic construct
  source 1..75: mol_type = other DNA
ttgaataaaaaaggcgagcgcattgactccatcaccaccagcacaggaactctggttgcggatgattatgtcgtt

SEQ ID NO: 455998 - DNA, 75 bp, synthetic construct
  source 1..75: mol_type = other DNA
gctgattgctgatgattatgtcgttgccgccggaaatggcagcacacatttacttaccgaaaccgggattcacgt

SEQ ID NO: 455999 - DNA, 75 bp, synthetic construct
  source 1..75: mol_type = other DNA
cattaagtcagtggcgctggttgctggcgtttttactggcctgcaataaccggacaaataaactcaatggcgatc

SEQ ID NO: 456000 - DNA, 75 bp, synthetic construct
  source 1..75: mol_type = other DNA
atacgacaagatgttattttgtatttgtttttgctcttgtattcatatttatattgaatggggtagattttatat

SEQ ID NO: 456001 - DNA, 75 bp, synthetic construct
  source 1..75: mol_type = other DNA
cgcttaccggatgatgtggaagcaacccgttctgttgtggaatcggcgctgacagaaggtgccattggttaccgg

SEQ ID NO: 456002 - DNA, 75 bp, synthetic construct
  source 1..75: mol_type = other DNA
aaattaaagatggtgtgaatgaactcgtcaaggcagatggcagtctacaacttccacaagatatcagtgacactt

SEQ ID NO: 456003 - DNA, 75 bp, synthetic construct
  source 1..75: mol_type = other DNA
attttccgtgatcaatacttactggagttccgcaagctacagctcatgatgaaaccggacaaccccattacccgg

SEQ ID NO: 456004 - DNA, 75 bp, synthetic construct
  source 1..75: mol_type = other DNA
cagtattattgattggtatgattataatggtaactggattcataaaagtattgtttttaatgtttctgatatatc

SEQ ID NO: 456005 - DNA, 75 bp, synthetic construct
  source 1..75: mol_type = other DNA
caccgccggtcagaaacaggatattgatgtgaccacgctctgctccacagagcaggagaacatcaacggtctggg

SEQ ID NO: 456006 - DNA, 75 bp, synthetic construct
  source 1..75: mol_type = other DNA
ctggaagataatcttgctgattttcactggcgccgttctggcaaactgattattcatcgccgtcagcaagattta

SEQ ID NO: 456007 - DNA, 75 bp, synthetic construct
  source 1..75: mol_type = other DNA
atatgagcgtggatatgtgaagaataacccatgcaaaggagtcaggaaatttacgcttaaagcccgcactgttta

SEQ ID NO: 456008 - DNA, 75 bp, synthetic construct
  source 1..75: mol_type = other DNA
gtgctggccgattctgtaaaaccagagcacatcagacgatacatggacaaaaggggcgagcagagtaaaacgcag

SEQ ID NO: 456009 - DNA, 75 bp, synthetic construct
  source 1..75: mol_type = other DNA
tttagccgcattatggaaaaagtatgaagaaacggttaaccatcgcgatcgcgcaatgacatttgggcgtttgtg

SEQ ID NO: 456010 - DNA, 75 bp, synthetic construct
  source 1..75: mol_type = other DNA
aacactgctggcgcatcactggccgcaggtcaaaaaccggtttatccccgctggcgcggggaacactcgcatgaa

SEQ ID NO: 456011 - DNA, 75 bp, synthetic construct
  source 1..75: mol_type = other DNA
tttatccccgctggcgcggggaacacgggtaaaggcattgttttagccctgaacccgccggtttatccccgctag

SEQ ID NO: 456012 - DNA, 75 bp, synthetic construct
  source 1..75: mol_type = other DNA
tacgaagagatcctgaatgatgctattgatgtcatgacgttcagtaaactctggaacaaatttctcaacagcacc

SEQ ID NO: 456013 - DNA, 75 bp, synthetic construct
  source 1..75: mol_type = other DNA
tcaccacccacagcctttatgcctggataaagaagtacggtccggattcttccactaataaagaactgaaccgcc

SEQ ID NO: 456014 - DNA, 75 bp, synthetic construct
  source 1..75: mol_type = other DNA
aggctgcgaaggacaagcttgcagagctgaatgcagacaagctgatcacgccggaagagaaggcgcagctggaaa

SEQ ID NO: 456015 - DNA, 75 bp, synthetic construct
  source 1..75: mol_type = other DNA
aggcggatgcagcagaagcgtccctggctgcagcggaagccgccgttcaggcagcggaagcgaagaaagaggcag

SEQ ID NO: 456016 - DNA, 75 bp, synthetic construct
  source 1..75: mol_type = other DNA
ttaacgaggcatggcgaaaagcaagagcagcagcagctaaccatctaggaagacctctggattgcacatttcatg

SEQ ID NO: 456017 - DNA, 75 bp, synthetic construct
  source 1..75: mol_type = other DNA
tcagacctcagtgaagagcagaagcagacgataagtacgctggcaaccgtttcagcagggctgaccggcggtcta

SEQ ID NO: 456018 - DNA, 75 bp, synthetic construct
  source 1..75: mol_type = other DNA
gtgaagctggcaatagatcgtgctctgggtgaagatatcccgatcaagatggtctacgatctgacggcgactttt

SEQ ID NO: 456019 - DNA, 75 bp, synthetic construct
  source 1..75: mol_type = other DNA
tatcaatataaacagcgatgctattgctaaaaatatctggagcgttctttgtattgctcttgtattcttaattgg

SEQ ID NO: 456020 - DNA, 75 bp, synthetic construct
  source 1..75: mol_type = other DNA
acagtttattccgatgatggcggactgttcgccgctgttgctggatcttaatgagaacgatccgggtattctggt

SEQ ID NO: 456021 - DNA, 75 bp, synthetic construct
  source 1..75: mol_type = other DNA
ttccgcctcgctgtgattcagttaggcacctacgacggtacgatttataacgcccgccaagtggtggataaaatt

SEQ ID NO: 456022 - DNA, 75 bp, synthetic construct
  source 1..75: mol_type = other DNA
atgaaagttggtacatgtggtgcaatttctttaatccatgatcacccgaagcctagttctaacaaagataaagat

SEQ ID NO: 456023 - DNA, 75 bp, synthetic construct
  source 1..75: mol_type = other DNA
cgggacaattttcaaaggatgtaaaacttgcacaaaagcgtcataaggatatgaataaattgaaatatcttatga

SEQ ID NO: 456024 - DNA, 75 bp, synthetic construct
  source 1..75: mol_type = other DNA
taaaacggcaacggatgcgcgagagcgcaacagggaatatgccgcagcagcaaaagattatttatcttcccgctt

SEQ ID NO: 456025 - DNA, 75 bp, synthetic construct
  source 1..75: mol_type = other DNA
gcagaagtttatacctcgaaaaatcttccaccagaaagctacccagtcggcgcaccaatcccgtggccatcagat

SEQ ID NO: 456026 - DNA, 75 bp, synthetic construct
  source 1..75: mol_type = other DNA
gtcgcgtgcgggtgaagttcaactgggaccgttataacccggcagaccaagacagttcgtgctggatccgtgtgg

SEQ ID NO: 456027 - DNA, 75 bp, synthetic construct
  source 1..75: mol_type = other DNA
ttaatgagatgtggttgcaacagccttcattgcgggagttaatccaggaacacttgacggctggattagagcatg

SEQ ID NO: 456028 - DNA, 75 bp, synthetic construct
  source 1..75: mol_type = other DNA
gttggatatgctgtagtgagcgaatgccggataagttaattccggtaatggtcatgtatgaagacggtgagatgt

SEQ ID NO: 456029 - DNA, 75 bp, synthetic construct
  source 1..75: mol_type = other DNA
cactggagacgccggaagctcgttgccgaagcggtgttccaccgctcccagcatgtcgccaacgggagagcatct

SEQ ID NO: 456030 - DNA, 75 bp, synthetic construct
  source 1..75: mol_type = other DNA
ttgatgaattaggctttcctaaatggaatggcattgattattttcgatggcgttttcttccgactaattggacat

SEQ ID NO: 456031 - DNA, 75 bp, synthetic construct
  source 1..75: mol_type = other DNA
ctgattgttgataacggcagtacattagaagaactttcagttttacaaactttaagtgataggattccattacat

SEQ ID NO: 456032 - DNA, 75 bp, synthetic construct
  source 1..75: mol_type = other DNA
tggcggaggctttatatattttggtgcaaaccatattgtcactttcttaagagttgagaaattactggaaaatga

SEQ ID NO: 456033 - DNA, 75 bp, synthetic construct
  source 1..75: mol_type = other DNA
tgaccttccccgctggttaccactgcaagcctggcaaatcaggctgtgggacactgtctggggacgcagggtatc

SEQ ID NO: 456034 - DNA, 75 bp, synthetic construct
  source 1..75: mol_type = other DNA
cgattcccatctctcagccatgcgatctctggagcgttgtcggcctggaagcgaaggggggcataacgctgataa

SEQ ID NO: 456035 - DNA, 75 bp, synthetic construct
  source 1..75: mol_type = other DNA
ttaatcaaatatggttagctgtgctggaaggtgaagaaaagttttttaatgtcaatgttcagaaatggatcagca

SEQ ID NO: 456036 - DNA, 75 bp, synthetic construct
  source 1..75: mol_type = other DNA
tgggacagctctaatgttcttcttatccttcaaaataagcaatatattgaatgtaagtaaaatatatgagcaaga

SEQ ID NO: 456037 - DNA, 75 bp, synthetic construct
  source 1..75: mol_type = other DNA
ggaatatttgatgctggtatgactcgtgcggtcattagagagatagctatctatcgtaatgattttttggaaaaa

SEQ ID NO: 456038 - DNA, 75 bp, synthetic construct
  source 1..75: mol_type = other DNA
acgcaatgaaatctcggattctggactaggaaaaccaggctttaaattactgggtggttcacgaaatggtaaaga

SEQ ID NO: 456039 - DNA, 75 bp, synthetic construct
  source 1..75: mol_type = other DNA
ttcctctcttgtaggaagtaatgatggttttgatcaggctacagttaatggaacaataattcagctgccaaacgt

SEQ ID NO: 456040 - DNA, 75 bp, synthetic construct
  source 1..75: mol_type = other DNA
cgcaaatgttatctctgataatcttaacaaagctacaggagatacagctgagcgctcagggacaaatattctgaa

SEQ ID NO: 456041 - DNA, 75 bp, synthetic construct
  source 1..75: mol_type = other DNA
atgaatcggtattccatagttcactgccgtacaggcagcttagaaaacatttccgccgttatgaatcggtattcc

SEQ ID NO: 456042 - DNA, 75 bp, synthetic construct
  source 1..75: mol_type = other DNA
ggtgcatatgcaaaaagattccagtgacttggaaaggctcagtgcggacctgaaaggaatggcaaggcttgtttt

SEQ ID NO: 456043 - DNA, 75 bp, synthetic construct
  source 1..75: mol_type = other DNA
tgaccaagtagtggtttcaggcactactatacaattaccaattgtggataaacgttcatttatccagtcaagtat

SEQ ID NO: 456044 - DNA, 75 bp, synthetic construct
  source 1..75: mol_type = other DNA
gtgcaggtggtttgccgtatggtggagagttgatcctggcactcgatccgcagcgttttcttggtgaggatgcag

SEQ ID NO: 456045 - DNA, 75 bp, synthetic construct
  source 1..75: mol_type = other DNA
ttgagtggttacaaaggtaaacaccttactggtcagtttggtgacatgttagcccgtattgaggctggggagttt

SEQ ID NO: 456046 - DNA, 75 bp, synthetic construct
  source 1..75: mol_type = other DNA
aacggcgagattgcgcgtatcagtacggtggtcgatgccatccccaaagagccgcagcccgtacaggagccagag

SEQ ID NO: 456047 - DNA, 75 bp, synthetic construct
  source 1..75: mol_type = other DNA
gcgcgattgcgccagggtgggctgtttcgcgcgccagaaacagaatgcttcttcgcgcctacgaggcggcgcacc

SEQ ID NO: 456048 - DNA, 75 bp, synthetic construct
  source 1..75: mol_type = other DNA
ccatcggatgcgggcattgcggaaaaccggtatggtgttggtatttactgggctgtaagtaactggcctgacggt

SEQ ID NO: 456049 - DNA, 75 bp, synthetic construct
  source 1..75: mol_type = other DNA
tggcgtggtggaggcgcacgttgaatggactgatgacggcgtggcgcagctgcgcggcaagaagtaccgctatta

SEQ ID NO: 456050 - DNA, 75 bp, synthetic construct
  source 1..75: mol_type = other DNA
ctgcgcgcaacgcaaaccggtaatgaccaggcggtgaaagccgattgtgataaagtttggcaggaaattcgcagt

SEQ ID NO: 456051 - DNA, 75 bp, synthetic construct
  source 1..75: mol_type = other DNA
ttcaaatttgaaaaatattatagacgatctttatcggccaaatgcaaaagtaggaagtggaagcacagcagatgc

SEQ ID NO: 456052 - DNA, 75 bp, synthetic construct
  source 1..75: mol_type = other DNA
tgggctgccgcaggcgcttatcagcccggaaggggaaacggcgtggcgcggggagtatgacgagtggggaaacct

SEQ ID NO: 456053 - DNA, 75 bp, synthetic construct
  source 1..75: mol_type = other DNA
caaaacttatccgcattacttaaaagtaagatggaatcgacaatttcgtcttgtaacggggaatcatctggatat

SEQ ID NO: 456054 - DNA, 75 bp, synthetic construct
  source 1..75: mol_type = other DNA
ttaaaccctttacctgactactgcaatgatccgagcgcctcatggccgattattgctgataacggagttaacatt

SEQ ID NO: 456055 - DNA, 75 bp, synthetic construct
  source 1..75: mol_type = other DNA
gtgctggcgatggcctttgccgaaggttctgccaacgactggttacccttattaatggttgacggtcacggtttt

SEQ ID NO: 456056 - DNA, 75 bp, synthetic construct
  source 1..75: mol_type = other DNA
ttctacacgcggatacagcacggcgagccacaggtggagagccgctacctctatgacccgctgggccgccggacg

SEQ ID NO: 456057 - DNA, 75 bp, synthetic construct
  source 1..75: mol_type = other DNA
tacatatccagaacaatacaaagctgtttatggcaaatatgctaatgaagcaaagaacattcactttgttccatt

SEQ ID NO: 456058 - DNA, 75 bp, synthetic construct
  source 1..75: mol_type = other DNA
cctgcgcatcaactgtgctttgccactcagcgaaacttatcgcgaagcgctgaagcaaattggcgaggccgtgta

SEQ ID NO: 456059 - DNA, 75 bp, synthetic construct
  source 1..75: mol_type = other DNA
cctcgatgagagcaactggccagcgatgatcgactggctgctggtcaacctgacggcgtttgaaaaagagctcga

SEQ ID NO: 456060 - DNA, 75 bp, synthetic construct
  source 1..75: mol_type = other DNA
cggtcagtttccgcaaagaagtgactaacaccgcgctgtggctgatgcagtttggcctgcgtgtgcaatgcttta

SEQ ID NO: 456061 - DNA, 75 bp, synthetic construct
  source 1..75: mol_type = other DNA
cgtcacggtgcaaccagaagacatggataaaaccagtccggttgtttctgacaacctttcacctgacaccgcagt

SEQ ID NO: 456062 - DNA, 75 bp, synthetic construct
  source 1..75: mol_type = other DNA
atattgccggagcaagccgtcgtggacgctcccatgaacatgtaggctcttttcgtgacgacgattattacctca

SEQ ID NO: 456063 - DNA, 75 bp, synthetic construct
  source 1..75: mol_type = other DNA
ccgtccacgcaaatggcggcggcaacgtttgtgctggaaggtcactatcatcgccatatccggcggatgcggcag

SEQ ID NO: 456064 - DNA, 75 bp, synthetic construct
  source 1..75: mol_type = other DNA
attttgaagagaattatatagtaactccttataataaagcattagaacattctgttgatggcaggataagacggt

SEQ ID NO: 456065 - DNA, 75 bp, synthetic construct
  source 1..75: mol_type = other DNA
ggttctgcattcacggcgggtgctgacggcacgtacagtgacagcacgggtgcttcagaggactcagcccgctgg

SEQ ID NO: 456066 - DNA, 75 bp, synthetic construct
  source 1..75: mol_type = other DNA
accgcgtattatgcagttagcccgtcgcagtacagtcacgccgggaggtaaagcctgtcagtataacgacatcat

SEQ ID NO: 456067 - DNA, 75 bp, synthetic construct
  source 1..75: mol_type = other DNA
agatcctcgacatcttccagctctatctcgacaaatacgagccggaagagacccgtccggcggctgaagtgatgg

SEQ ID NO: 456068 - DNA, 75 bp, synthetic construct
  source 1..75: mol_type = other DNA
caaaacaaagaataatggggtgggcaggagcattacccaatgcctttgatctttttagaaaagactttgccgttg

SEQ ID NO: 456069 - DNA, 75 bp, synthetic construct
  source 1..75: mol_type = other DNA
aacaatctaatgaattagttagcaatagaaggtcattaaaaaacctcataaattatcaacgcatgatggaagctt

SEQ ID NO: 456070 - DNA, 75 bp, synthetic construct
  source 1..75: mol_type = other DNA
tatttctaatgatgacgaaagcatgatacgaatggcgctgaatggaacgggtatcattcaacatctggattttgc

SEQ ID NO: 456071 - DNA, 75 bp, synthetic construct
  source 1..75: mol_type = other DNA
caacgggagagctggcagccagagcgattgccggaatgctgtatcctggcgtgaagcagtcagacctcagtgaag

SEQ ID NO: 456072 - DNA, 75 bp, synthetic construct
  source 1..75: mol_type = other DNA
acctggataccggaacgctgggtttcagtgaccttcacaacgaagcggattataaagtcagtcacagtggaatca

SEQ ID NO: 456073 - DNA, 75 bp, synthetic construct
  source 1..75: mol_type = other DNA
ttcattaccagtaaagggctgttagaagatccctcttcagcgtttaacagtaagctggtcatggcgacagtacgc

SEQ ID NO: 456074 - DNA, 75 bp, synthetic construct
  source 1..75: mol_type = other DNA
ttggaagatcaatgcatgtaactcatccaactcattatatgtacccaaatgcaacggaaatgctcagtcgtttct

SEQ ID NO: 456075 - DNA, 75 bp, synthetic construct
  source 1..75: mol_type = other DNA
cgttaatacttttctgcgttctttgcaacgtgattacccgtctaactcgaactctgcgaagaaagtaaacaaggg

SEQ ID NO: 456076 - DNA, 75 bp, synthetic construct
  source 1..75: mol_type = other DNA
atggcttaaaagaagttggttcggtagggttcatattgaggaattgattcaaaaacaccccgactcagatgcttt

SEQ ID NO: 456077 - DNA, 75 bp, synthetic construct
  source 1..75: mol_type = other DNA
cctggctacttaagatatgaaggtgcaggtcttgaaatgatctataacccgaaaacgggacaagttggtcatatt

SEQ ID NO: 456078 - DNA, 75 bp, synthetic construct
  source 1..75: mol_type = other DNA
ccacaccattattacctccgctccgcgcgaacgtagcggtggggccagtggcatgttaggaacggctcgtctact

SEQ ID NO: 456079 - DNA, 75 bp, synthetic construct
  source 1..75: mol_type = other DNA
cggtggcagtgtggtgttcccgccggtgctggtgcagatgctcgaccggctggaaagtgaaatcctggctgaccg

SEQ ID NO: 456080 - DNA, 75 bp, synthetic construct
  source 1..75: mol_type = other DNA
tcactcaggatccgattgggctgaaggggggatggaacctgtatacatatccgctgagcccggtgaatagcatgg

SEQ ID NO: 456081 - DNA, 75 bp, synthetic construct
  source 1..75: mol_type = other DNA
ttccaggctctgtggaaacacatctggtccagcgtgcgcaggactttattggtgggcaatggttgctggtggata

SEQ ID NO: 456082 - DNA, 75 bp, synthetic construct
  source 1..75: mol_type = other DNA
tactggtggcactttcgcctgtcgttcacagtgaaggtgtgcaggaagtcgagattgacgcaccgctctctggct

SEQ ID NO: 456083 - DNA, 75 bp, synthetic construct
  source 1..75: mol_type = other DNA
aatggcggatatggagcgagacccaacaaaccgcctacgcccgatctaagtaaattgccggacatagcgaaacaa

SEQ ID NO: 456084 - DNA, 75 bp, synthetic construct
  source 1..75: mol_type = other DNA
ggaccacaatcgttgccgcaacggcgaccattaaaggcaaggatgtagatctgctgaaagcgggggcaatacatc

SEQ ID NO: 456085 - DNA, 75 bp, synthetic construct
  source 1..75: mol_type = other DNA
aagactatcacttatttaagtgatattggttgtctggagattcagggggccagtctattttctgtaatgctgata

SEQ ID NO: 456086 - DNA, 75 bp, synthetic construct
  source 1..75: mol_type = other DNA
ctggagagcaggcaatcagaagcaggccacgcgcctgaacggaaaatctccggctgcggtgttagcagaagtcac

SEQ ID NO: 456087 - DNA, 75 bp, synthetic construct
  source 1..75: mol_type = other DNA
cagataacaggataaatataacaccaatgggtataacgatacatgaaatagtcaatggggatgataagttgtttt

SEQ ID NO: 456088 - DNA, 75 bp, synthetic construct
  source 1..75: mol_type = other DNA
cagaccgttaacctcggccatatcggtacaggttctctgactggtggcaaatcctccacggctgtgccgttcaaa

SEQ ID NO: 456089 - DNA, 75 bp, synthetic construct
  source 1..75: mol_type = other DNA
gctttccgacggataacgactggacacccacagaacaaaaaccccggtactttgatatttcgccgggcatgattt

SEQ ID NO: 456090 - DNA, 75 bp, synthetic construct
  source 1..75: mol_type = other DNA
atagaactcattatagtattagtgaggccgctaaaatattgggctgcgatgagcaagatgttatttatattgcgg

SEQ ID NO: 456091 - DNA, 75 bp, synthetic construct
  source 1..75: mol_type = other DNA
tgataaagcaatcatcgttctaggggcgttaattgcgctgctggaactgatccgctttctgcttcagcttctgaa

SEQ ID NO: 456092 - DNA, 75 bp, synthetic construct
  source 1..75: mol_type = other DNA
gagcagctgaacccggcaggcctgagttaccgctaccagtatgagcaggaccgcatcaccgtcacggacagcctg

SEQ ID NO: 456093 - DNA, 69 bp, synthetic construct
  source 1..69: mol_type = other DNA
atgccagaaggccatgcccagttctgcgagcgtcatatagccgcctgtgtgtgtaagttcacagagata

SEQ ID NO: 456094 - DNA, 75 bp, synthetic construct
  source 1..75: mol_type = other DNA
tgtctatctggtgggctggctggcgcatctggtgcaaaaacccgacgaaaagccatccgtagccgtggtgatgaa

SEQ ID NO: 456095 - DNA, 75 bp, synthetic construct
  source 1..75: mol_type = other DNA
ggcatcggttgtcgaatacaaccaacgggcgttttttatttcgcctggctacgggcaaacaggtcgtcgagcttc

SEQ ID NO: 456096 - DNA, 75 bp, synthetic construct
  source 1..75: mol_type = other DNA
gttattaccgtcaggctgttgacggtgtggaaaccatctgcgttattccggaggaatttgtgcgtcgtatcaatg

SEQ ID NO: 456097 - DNA, 75 bp, synthetic construct
  source 1..75: mol_type = other DNA
cctgttcgtttaagatttatggttatgatgttgccatgcttacgctgctgggattacaggccgggctttattcgc

SEQ ID NO: 456098 - DNA, 75 bp, synthetic construct
  source 1..75: mol_type = other DNA
acaatatgtttctcaattataaatgtgatcgagaggtgtggtgagaaaagatttgagctgtattattttcagcga

SEQ ID NO: 456099 - DNA, 75 bp, synthetic construct
  source 1..75: mol_type = other DNA
ggatgcacaacatgccgggtttgccggtcggcaagtttttcttccagcctggggcgctgatggcgtcaatggatt

SEQ ID NO: 456100 - DNA, 75 bp, synthetic construct
  source 1..75: mol_type = other DNA
cagtttacccgtccgatgctggaacgtctgatgcttcgtacctggctgcgcgatggtgaggtgtttgcccagatg

SEQ ID NO: 456101 - DNA, 75 bp, synthetic construct
  source 1..75: mol_type = other DNA
gaggtggagacactgcaggggatgatcaccagtatcacaccagatgcgcgtccggcgacatcacaggcggatgcc

SEQ ID NO: 456102 - DNA, 75 bp, synthetic construct
  source 1..75: mol_type = other DNA
atgattaacaaagcaattttagagacaaccacttttcatgatcttagacttctttctgaatgcttcataaacctg

SEQ ID NO: 456103 - DNA, 75 bp, synthetic construct
  source 1..75: mol_type = other DNA
tattgataacggtaatatttcctctttacaattctctggtttcgaagtaattaaacttggaaggaacggaggggt

SEQ ID NO: 456104 - DNA, 75 bp, synthetic construct
  source 1..75: mol_type = other DNA
tatctcttttggtggatggataacagttagtaatatcataagcccaatcatggcatatttcgatcgctttatcat

SEQ ID NO: 456105 - DNA, 75 bp, synthetic construct
  source 1..75: mol_type = other DNA
acgcaaacgggaccagtacggtcgttgatgtggtgctgatgcgtaaacatccggcagagatggctgagaaaatcc

SEQ ID NO: 456106 - DNA, 75 bp, synthetic construct
  source 1..75: mol_type = other DNA
attcgctggtggacggcgcgacactgacagatgaacagcgccagatcctggctgggtacaccggtgaaggtggca

SEQ ID NO: 456107 - DNA, 75 bp, synthetic construct
  source 1..75: mol_type = other DNA
accacagcttggacactggacatttgctactacagcgcctaatgatgcgcgacttcaagaacatgcccgactagt

SEQ ID NO: 456108 - DNA, 75 bp, synthetic construct
  source 1..75: mol_type = other DNA
gtgaaagtgaacaacgccaccgaattgccattgaagcacgcagagacttcatgaaagagcttatttcaattggtt

SEQ ID NO: 456109 - DNA, 75 bp, synthetic construct
  source 1..75: mol_type = other DNA
agaaattcagggaggcggcgcggctggtgctgcgtagtgcaaaacgtaaatacggatcggcatactggtatcacc

SEQ ID NO: 456110 - DNA, 75 bp, synthetic construct
  source 1..75: mol_type = other DNA
gttaattatatcaggtacacaccatgaattaataaatgctggtatattatatctttttatcttggctgtaataac

SEQ ID NO: 456111 - DNA, 75 bp, synthetic construct
  source 1..75: mol_type = other DNA
atatcacctcttcagaattggatattagtaaataatgataatatcgcatgtgagatagggttaaattcaacaata

SEQ ID NO: 456112 - DNA, 75 bp, synthetic construct
  source 1..75: mol_type = other DNA
cctgataagccgcgtcagcgtcgcatcaggcatcggttgtcggatgcgacgccatgcgtcttatccgacctacag

SEQ ID NO: 456113 - DNA, 75 bp, synthetic construct
  source 1..75: mol_type = other DNA
cttgctgagcagaccccggaaatattgaagcaacccgattcggtaacacatgacgcgatggacgaaaatatgctg

SEQ ID NO: 456114 - DNA, 75 bp, synthetic construct
  source 1..75: mol_type = other DNA
aagggggcggttttctgcctctgaaaacaggcataacccgtgacattactacatatctggcagcacatccggaaa

SEQ ID NO: 456115 - DNA, 75 bp, synthetic construct
  source 1..75: mol_type = other DNA
aagccagtatgtttatagatgaaagttctataaagatgatagataaacaaaacgcggaggagaaggggcatgtca

SEQ ID NO: 456116 - DNA, 75 bp, synthetic construct
  source 1..75: mol_type = other DNA
gtgtagcccttagatatgatgataatattgaattatataatgaaagtgatggctcgactttgaataaaaaaataa

SEQ ID NO: 456117 - DNA, 75 bp, synthetic construct
  source 1..75: mol_type = other DNA
atcatgcgtctagagtcataccggcaaggtaatatctcggaagggctcctgtcgattcttcttacttttaaactc

SEQ ID NO: 456118 - DNA, 75 bp, synthetic construct
  source 1..75: mol_type = other DNA
aacgtaccgttggtggtttcacaaacgcatgccgccgatggctccaccgtcaccatgaccgtgcagaacattctc

SEQ ID NO: 456119 - DNA, 75 bp, synthetic construct
  source 1..75: mol_type = other DNA
gtgccggaaaaaccggggctgggtgtagaaatcgatatggatcaagtgatgaaagcccatgagctgtatcagaaa

SEQ ID NO: 456120 - DNA, 75 bp, synthetic construct
  source 1..75: mol_type = other DNA
ttgggaagcatgataattgctctcctggaagccagtatgtttatagatgaaagctctataaagatgataaataaa

SEQ ID NO: 456121 - DNA, 75 bp, synthetic construct
  source 1..75: mol_type = other DNA
tgcatttggtttagaaatggaaaattaatgcccgccgtgatggaaattgagcacagcactgggattaaaagcgga

SEQ ID NO: 456122 - DNA, 75 bp, synthetic construct
  source 1..75: mol_type = other DNA
aatttcgtgagctagacacaaaattttttccttactctgccgtagaagaattgtattctctttgtgagcgccgaa

SEQ ID NO: 456123 - DNA, 75 bp, synthetic construct
  source 1..75: mol_type = other DNA
gctgattttgaaaccgtgcaagggcaatcagccattatgaacatcacacgaagtgatggtaaaaatattccattt

SEQ ID NO: 456124 - DNA, 75 bp, synthetic construct
  source 1..75: mol_type = other DNA
cctggaaaatggcactgaccaatcaggacgtcaatgtaattagcgaagttctggctgaaatgatttttaagctgg

SEQ ID NO: 456125 - DNA, 75 bp, synthetic construct
  source 1..75: mol_type = other DNA
ttgctgcaaagtcgcaatgatcatttacgccaaacggcattgcgcaacgcacataccccggcgttgttgttaacg

SEQ ID NO: 456126 - DNA, 75 bp, synthetic construct
  source 1..75: mol_type = other DNA
gtattgacataagtgagctatcttcagatgttacttatatcggaaaatatatgctctcttccggaagtaaaaaag

SEQ ID NO: 456127 - DNA, 75 bp, synthetic construct
  source 1..75: mol_type = other DNA
tattagtggttttttaattaccagcattttgctgaaagaatgcagcaatagaacatttacattctctgggtttta

SEQ ID NO: 456128 - DNA, 75 bp, synthetic construct
  source 1..75: mol_type = other DNA
gtctggttgatccttctttcgtgtacatctgtagtaattgcatggctgtcaggtataattacgaattggtttaca

SEQ ID NO: 456129 - DNA, 75 bp, synthetic construct
  source 1..75: mol_type = other DNA
cagtttactaaagttcaacctatgcctcagcttagtaattccacaaggctcattgacgaaataatatgtcaaata

SEQ ID NO: 456130 - DNA, 75 bp, synthetic construct
  source 1..75: mol_type = other DNA
aaaacgcaccgaacaggtgaatcagcaactgatggaacgcatcacgctggctaacgaagcgggcgggattggcat

SEQ ID NO: 456131 - DNA, 75 bp, synthetic construct
  source 1..75: mol_type = other DNA
tctggtactggtgccgctgggattgttatttaagccacactatctgctgcgccatcgcaacccacggttactttt

SEQ ID NO: 456132 - DNA, 75 bp, synthetic construct
  source 1..75: mol_type = other DNA
gaccagccagtacagacgaggcagaagagttaactcaacgagtttctgtgcaacttgatacggcgctggttctgg

SEQ ID NO: 456133 - DNA, 75 bp, synthetic construct
  source 1..75: mol_type = other DNA
attcattgacggcgtggttgatctggtgacggaaccacccgaagcactggcggtttacacgacattacgcaacca

SEQ ID NO: 456134 - DNA, 75 bp, synthetic construct
  source 1..75: mol_type = other DNA
acttgattctgaattaaataaacttgagccttcattgtcagcgaaaaatcaccttgaaaaaaaatcaaggtatta

SEQ ID NO: 456135 - DNA, 75 bp, synthetic construct
  source 1..75: mol_type = other DNA
gcaaaaataagagcggcagagcgggctatcgctaagaaggcaccgttccataagcagaagaatagtgtggctgat

SEQ ID NO: 456136 - DNA, 75 bp, synthetic construct
  source 1..75: mol_type = other DNA
aaaccgacgttgctgccgaccctgccgcttcgcccacctgtacaggtgcagcccacgcagaagtcgccgcaagcg

SEQ ID NO: 456137 - DNA, 75 bp, synthetic construct
  source 1..75: mol_type = other DNA
gccaacaactgtaagagctttataccagtaatcaattttcatgttcttaagcgaatttattggtggttgcgacat

SEQ ID NO: 456138 - DNA, 75 bp, synthetic construct
  source 1..75: mol_type = other DNA
cctattgcatcacatttaaatcagaaagtgtgtgtcataattcctgtaacttcgatgtaaatgcaactttcgtga

SEQ ID NO: 456139 - DNA, 75 bp, synthetic construct
  source 1..75: mol_type = other DNA
caaaccaggcatatttgggcgcacaagtacgaaccagtaatcatcgtctggatgaacagcccgtgtctgttcgaa

SEQ ID NO: 456140 - DNA, 75 bp, synthetic construct
  source 1..75: mol_type = other DNA
gccatcgcctcaaggaaccgattgaaagacccggcgttcattcttccgggtaaacctgtcgaggtaacagattga

SEQ ID NO: 456141 - DNA, 75 bp, synthetic construct
  source 1..75: mol_type = other DNA
aatgccgcgattgcttatcaaaaagaacattatccaaatatgacgttggttgaagatcgttttggtgttgctgaa

SEQ ID NO: 456142 - DNA, 75 bp, synthetic construct
  source 1..75: mol_type = other DNA
actttgattgggggatgctcaatgggaagctttctgccctgcgatgggtcttgggggatgagtgggacatgcttg

SEQ ID NO: 456143 - DNA, 75 bp, synthetic construct
  source 1..75: mol_type = other DNA
gtgagcaagagtaaactgttacaactaaaatccacagggacgataatcaccactacactttcgacctacctgatg

SEQ ID NO: 456144 - DNA, 75 bp, synthetic construct
  source 1..75: mol_type = other DNA
agaaaactccacgacattgtggtgaaggtgaataccagtagtcggcaaccgattgattctacgtgccgtttccaa

SEQ ID NO: 456145 - DNA, 75 bp, synthetic construct
  source 1..75: mol_type = other DNA
gtagttagtgaatttggtggcaccatctttatgaatggtgataattcagtcgagtcgggtggggcatattcagcg

SEQ ID NO: 456146 - DNA, 75 bp, synthetic construct
  source 1..75: mol_type = other DNA
aaccgccatctggcactcattaaagcggtgtttacctgggctatccgcatgggatatatcagccgctctccggcg

SEQ ID NO: 456147 - DNA, 75 bp, synthetic construct
  source 1..75: mol_type = other DNA
attttattttggtcagaccccgaatctacattaatgacaatatctcgctgggaccggggaaaatcgatcttttac

SEQ ID NO: 456148 - DNA, 75 bp, synthetic construct
  source 1..75: mol_type = other DNA
gcagatgacgctgcacagcatgcagcgcggcaaaattatgacctggcctgtcagggcgggacagcggggaagcgt

SEQ ID NO: 456149 - DNA, 75 bp, synthetic construct
  source 1..75: mol_type = other DNA
ggatcttatgaatgtaactcgaggggggataagatgtattttgcaacaacgttagatgactatattgttgaaatg

SEQ ID NO: 456150 - DNA, 75 bp, synthetic construct
  source 1..75: mol_type = other DNA
gacggatattcagcttcccatttattgggcatccattgctgagtccgtggattacggtgaaatgaaaacggggca

SEQ ID NO: 456151 - DNA, 75 bp, synthetic construct
  source 1..75: mol_type = other DNA
ggaaaatagacgacatttttggtgataatgtcccaaatatgtcccactgtggaattatggaggatataaagaagg

SEQ ID NO: 456152 - DNA, 75 bp, synthetic construct
  source 1..75: mol_type = other DNA
ggataagcgcaataaatattatgttagcaaccactacactaaccctatattatttgcccaagctatctgaaacac

SEQ ID NO: 456153 - DNA, 75 bp, synthetic construct
  source 1..75: mol_type = other DNA
ttatgtcatggcattatctgtctgcagcatatgcggcaacgtactttatatatctgatatttacatcaactttct

SEQ ID NO: 456154 - DNA, 75 bp, synthetic construct
  source 1..75: mol_type = other DNA
tatgccggagcggggcttcttgcccatgttgtcaccgggaaatatgcagaccatctgccgttataccgccagtca

SEQ ID NO: 456155 - DNA, 75 bp, synthetic construct
  source 1..75: mol_type = other DNA
tggtggtcattaaggatggttcagaggcggacggttcgacggcgaacacgctgcgggcgagggtgaccgatgcgt

SEQ ID NO: 456156 - DNA, 75 bp, synthetic construct
  source 1..75: mol_type = other DNA
ttgccgggcagacggtcagcgtgttggcggacaacggcgcaacggtcgccccgacggtcaccacgcagccggacg

SEQ ID NO: 456157 - DNA, 75 bp, synthetic construct
  source 1..75: mol_type = other DNA
atgggcgtataccaagccaaattgcatgaagtgtccagcggtgtttcctgctgctgaagttgtcacatgggttat

SEQ ID NO: 456158 - DNA, 75 bp, synthetic construct
  source 1..75: mol_type = other DNA
aaaaactaaccattaatgttaaacacaaacccacaacctgtcgtttctcgcaaccgacttacgaaataagaatac

SEQ ID NO: 456159 - DNA, 75 bp, synthetic construct
  source 1..75: mol_type = other DNA
gtgtacaagaattaaggacacaacatgttggcttagtagtcctagttaatagatatgatggtattgatttaccaa

SEQ ID NO: 456160 - DNA, 75 bp, synthetic construct
  source 1..75: mol_type = other DNA
ttgtaagtgcttccaaaatagagatatcacctcattgcataccaatccaaatgatcccaagcctatcaaacgcaa

SEQ ID NO: 456161 - DNA, 75 bp, synthetic construct
  source 1..75: mol_type = other DNA
tcaaagtggttaatggacgttctgcatttggcgttggagatgatggacaaagaataccaataggttctataataa

SEQ ID NO: 456162 - DNA, 75 bp, synthetic construct
  source 1..75: mol_type = other DNA
cagaagacaactggtatgacattgtaagaaggtctgacggctgcgtggtgtttagctttccttcatcgggcaggc

SEQ ID NO: 456163 - DNA, 75 bp, synthetic construct
  source 1..75: mol_type = other DNA
tatcaattacattcgatttggtttgcgctacaagatgaatactctcaacaactaaatattttaacagaaaaaaat

SEQ ID NO: 456164 - DNA, 75 bp, synthetic construct
  source 1..75: mol_type = other DNA
ttgattcaatcaaaggtgctcttgattattgtctgttacgcaattctgactgggtctcaaaaagcaaaggtatat

SEQ ID NO: 456165 - DNA, 75 bp, synthetic construct
  source 1..75: mol_type = other DNA
atcaacagaatttaaatgttaatataacaaaacacaaacctacaacctgtagtttctcgcaaccgacttacgaaa

SEQ ID NO: 456166 - DNA, 75 bp, synthetic construct
  source 1..75: mol_type = other DNA
gttaaaaaaaagactgaaagaagaaggcacctgtttcagtgagttgttgcttacagagagaatgagaatggcagc

SEQ ID NO: 456167 - DNA, 75 bp, synthetic construct
  source 1..75: mol_type = other DNA
agtctcagtgaatcgacaattagccgttacctgttgcgtagtggggtaaaacaggatgttgttttagtccggaaa

SEQ ID NO: 456168 - DNA, 75 bp, synthetic construct
  source 1..75: mol_type = other DNA
tgttcctgacaactatctagttgagcaagtggttttggaggctaatcaacttggtatacctgtaactcaagatga

SEQ ID NO: 456169 - DNA, 75 bp, synthetic construct
  source 1..75: mol_type = other DNA
tgaatttcagtcaggcggcccgaagtgcggcatggtactggaagacgaacggctgcaacgagctggccgacagtg

SEQ ID NO: 456170 - DNA, 75 bp, synthetic construct
  source 1..75: mol_type = other DNA
gtccgatggtgctaagggtgtagggttccagatttacaatggtaatgcaacgacaccgttaaagctgggcgatac

SEQ ID NO: 456171 - DNA, 75 bp, synthetic construct
  source 1..75: mol_type = other DNA
cattgatgaggaaattgttatatgggtgattgctgtaggtaaacgagagcggagtaacgtttataatatcgccag

SEQ ID NO: 456172 - DNA, 75 bp, synthetic construct
  source 1..75: mol_type = other DNA
tgcggatggtcattcttggcctgcaccacaaaggaaaaacctgccgaagcgaggttttcttgatagtggaaggtg

SEQ ID NO: 456173 - DNA, 75 bp, synthetic construct
  source 1..75: mol_type = other DNA
gaggaaggcatcttcttttatgaggagcacgcgcaaaaaagtaccgaccagagcctggtcctgtgcgacaccgtg

SEQ ID NO: 456174 - DNA, 75 bp, synthetic construct
  source 1..75: mol_type = other DNA
gtaataaagatagccgtattaataaaaatgtcgtcgttctggctggaaatcatgaaatcaattttaatggtaact

SEQ ID NO: 456175 - DNA, 75 bp, synthetic construct
  source 1..75: mol_type = other DNA
tgctttaaaataaagctgagagcatctggttttcgtttgatttacaaggttatcgatgacgagattgttatatgg

SEQ ID NO: 456176 - DNA, 75 bp, synthetic construct
  source 1..75: mol_type = other DNA
cattgatgaagaaatagtcatatgggttattgctgtagggaagcgagagcggagtaaagtttataatatcgccag

SEQ ID NO: 456177 - DNA, 75 bp, synthetic construct
  source 1..75: mol_type = other DNA
cagtatggcatcttggttgagaatgggaatgttactaaatttagtgcggaattagctgatctaatgtccgataaa

SEQ ID NO: 456178 - DNA, 75 bp, synthetic construct
  source 1..75: mol_type = other DNA
gaagtggtttagccagcgatgatatgggaaaattcattccagtgttggctattccgttaattaaaaccatacttg

SEQ ID NO: 456179 - DNA, 75 bp, synthetic construct
  source 1..75: mol_type = other DNA
ggcgtcgaaaagcgctccgagcatgccgaccgagaagtgatctggcaggtcgcagcacgccgcagcacctacaag

SEQ ID NO: 456180 - DNA, 75 bp, synthetic construct
  source 1..75: mol_type = other DNA
acaaaaagtgtttatgccgggtatgccggttaacgccaaaaccgttgccatgacctccagcgccacccttaactg

SEQ ID NO: 456181 - DNA, 75 bp, synthetic construct
  source 1..75: mol_type = other DNA
ttctttgatgcacaagtacaagttaagaaaatcgacattaattaaaacgttgggtgtttattatcttatgttaaa

SEQ ID NO: 456182 - DNA, 75 bp, synthetic construct
  source 1..75: mol_type = other DNA
gcaagctgatcgggaaagtagctgtgctacgcatggcctttggctgccccgacacagtgccagcgctttccgagt

SEQ ID NO: 456183 - DNA, 75 bp, synthetic construct
  source 1..75: mol_type = other DNA
tagtagtttggcaaaaacggggtgggacaagtacacatctgaaataattaaaagaaagcatcagctaagtattgc

SEQ ID NO: 456184 - DNA, 75 bp, synthetic construct
  source 1..75: mol_type = other DNA
aatatcctgaaagacccgacgctcagttcagaactgcgtgatgaactggcgaaaattgcgccgcaggagaacgtt

SEQ ID NO: 456185 - DNA, 75 bp, synthetic construct
  source 1..75: mol_type = other DNA
agtggcttcgcttatctttacttaataaacttcctgctgtcgttccagccatcaattttgaagcctggaaaactg

SEQ ID NO: 456186 - DNA, 75 bp, synthetic construct
  source 1..75: mol_type = other DNA
aatgggttcgtttagccctcattgaaaagcttccagtaactgtccctcctatcaacttagaagcatggaaatctc

SEQ ID NO: 456187 - DNA, 75 bp, synthetic construct
  source 1..75: mol_type = other DNA
caggtggagccggaatacacaccggcgcgaaaagttcatttttaccactgcgaccaccggggcctgccgctggcg

SEQ ID NO: 456188 - DNA, 75 bp, synthetic construct
  source 1..75: mol_type = other DNA
gccgcctgcaccatgttcgccagtgccgcgcgggtttctggccagccgcgcgttttcaggccacagtccgggttg

SEQ ID NO: 456189 - DNA, 75 bp, synthetic construct
  source 1..75: mol_type = other DNA
cggctaaatcgatgctggagtccgggagctgcatgatttatgcgccgggaaccatgggcgacctgaaacctgaac

SEQ ID NO: 456190 - DNA, 75 bp, synthetic construct
  source 1..75: mol_type = other DNA
cccggtaccagaaatctaaaacctctctggaaaacatacgtgcccgtctgcgtgaaggttataccgtcagcgact

SEQ ID NO: 456191 - DNA, 75 bp, synthetic construct
  source 1..75: mol_type = other DNA
tccgacttgaatgatggctggttctacaaagaacacagtgagcttgccgctgagattcgaggagtaagtgaagat

SEQ ID NO: 456192 - DNA, 75 bp, synthetic construct
  source 1..75: mol_type = other DNA
tattaagtatcatttaaagacgggtttaaatattgttgtatccacaatttcagtcgctatttatacaagattatc

SEQ ID NO: 456193 - DNA, 75 bp, synthetic construct
  source 1..75: mol_type = other DNA
gttcacagcaatacgcgggtgcgatttccaatggtgcgcaaaggctttcttgcgtcaccggaaaatccgcaaggc

SEQ ID NO: 456194 - DNA, 75 bp, synthetic construct
  source 1..75: mol_type = other DNA
tgctttatctaaccatgcacgcctgtttggatttaccgctgaagatattatggatttttggcaacacaaagcccc

SEQ ID NO: 456195 - DNA, 75 bp, synthetic construct
  source 1..75: mol_type = other DNA
cgaggttaaagctgaaaaacttcccagagaatgccccaaatgccacttcatgaagcctgctggtgtacacatgtg

SEQ ID NO: 456196 - DNA, 75 bp, synthetic construct
  source 1..75: mol_type = other DNA
tgccgaagctcttcgtcagctggctgatgttgccggtactgatgatgcagttaatgtgctgtgcctgtgtctgga

SEQ ID NO: 456197 - DNA, 75 bp, synthetic construct
  source 1..75: mol_type = other DNA
gtaaaaaatgcgttagaagataaacgatatgcatttgctgctgattatgtaagattctatgcgctaaaaaccatg

SEQ ID NO: 456198 - DNA, 60 bp, synthetic construct
  source 1..60: mol_type = other DNA
atgtcgattaaacattatgatgttgtcagggcggcgtcgccgtcagaccttgcggaaaag

SEQ ID NO: 456199 - DNA, 75 bp, synthetic construct
  source 1..75: mol_type = other DNA
tgcctgaaaaaggcgagtttttattgagttggggacaagctgcggatgaaaaatgtaaggcggcctatcacatca

SEQ ID NO: 456200 - DNA, 75 bp, synthetic construct
  source 1..75: mol_type = other DNA
acattaaaagaaaattcaatcaatcgttatatgttgtaactgaattattgctcgatatcgctttaatcgaatcac

SEQ ID NO: 456201 - DNA, 75 bp, synthetic construct
  source 1..75: mol_type = other DNA
aatcaccaccatttaccagcaaaaacagtatgagaactcagagaaaagagagttaaataaaaggtttgatgatag

SEQ ID NO: 456202 - DNA, 75 bp, synthetic construct
  source 1..75: mol_type = other DNA
tccaaaaaaagtggaaatataacaattgaaaatatgaccaataaaatattaagaattgttcctgatgattgttca

SEQ ID NO: 456203 - DNA, 75 bp, synthetic construct
  source 1..75: mol_type = other DNA
tggcagaggtgcgtactgccgcgcggtatcagaactgttaacctttacctcttatggttgtgataaatcgacagt

SEQ ID NO: 456204 - DNA, 75 bp, synthetic construct
  source 1..75: mol_type = other DNA
ccctcgaatattgttttcaatgtcactgtggtaacaccaggagaggttgcgtatgggaaatatagttctattgca

SEQ ID NO: 456205 - DNA, 75 bp, synthetic construct
  source 1..75: mol_type = other DNA
gattatggttgcccttggatcgcatccttttattcctatacagatttacccggatttggaagctatacggcccct

SEQ ID NO: 456206 - DNA, 75 bp, synthetic construct
  source 1..75: mol_type = other DNA
atattatattggcttaggtgcattacaatcgtataagagattccacgacgaacaaaaatttttattgcctgaatt

SEQ ID NO: 456207 - DNA, 75 bp, synthetic construct
  source 1..75: mol_type = other DNA
cagcggcaacgcatcgccattgccagagcactctcttcgcagcctgacgtgattgtgcttgatgagccaacctcg

SEQ ID NO: 456208 - DNA, 75 bp, synthetic construct
  source 1..75: mol_type = other DNA
atgatggtcgaagagatccgcaaaggcgaacagctctacttcatcgatatggctgcgcttatcaaagaagtggaa

SEQ ID NO: 456209 - DNA, 75 bp, synthetic construct
  source 1..75: mol_type = other DNA
ataaaagcattgattttatacttgaacatgtgagttatatgcaggagacaattgatttaataaaaaaaagtgaat

SEQ ID NO: 456210 - DNA, 75 bp, synthetic construct
  source 1..75: mol_type = other DNA
aaaaaactataataaaaataaatcagcaggcatcaataacacgttttactgctgtgaactttgttgtaatcctgc

SEQ ID NO: 456211 - DNA, 75 bp, synthetic construct
  source 1..75: mol_type = other DNA
caacagcggtactgaagtcagtcagtaagctcgataatacgctgctgtctaacggtacgttgctgaacgtgaaat

SEQ ID NO: 456212 - DNA, 75 bp, synthetic construct
  source 1..75: mol_type = other DNA
aaatacagtaacagcagataatgttgagttgttatttacggaacaacgtacaaaaataaaacaaattttacgcat

SEQ ID NO: 456213 - DNA, 75 bp, synthetic construct
  source 1..75: mol_type = other DNA
tctgaatgattatgaaatcattgtagacatgaatgacgttgaaaaatataacattttattggctacagaaatgga

SEQ ID NO: 456214 - DNA, 75 bp, synthetic construct
  source 1..75: mol_type = other DNA
atacgcattttggcgatatgaaagaaatcggtatttacacccgttatgaacgggctttgcagggcaaaaaggacg

SEQ ID NO: 456215 - DNA, 75 bp, synthetic construct
  source 1..75: mol_type = other DNA
ctggcagagcaggcccgggaacgagcctgccgctattttcaggaagatgttgcaaatattcagccagataaaggg

SEQ ID NO: 456216 - DNA, 75 bp, synthetic construct
  source 1..75: mol_type = other DNA
tattggttaaaagttaagtgggcacagaaatcatggtgtagaattgttacggagagttgtttagttgtattatct

SEQ ID NO: 456217 - DNA, 75 bp, synthetic construct
  source 1..75: mol_type = other DNA
ctgaatgacgaagccactattcgcatgggcggcggaggaataaaacctctatatcttagcaaagaatataacagt

SEQ ID NO: 456218 - DNA, 75 bp, synthetic construct
  source 1..75: mol_type = other DNA
atgattaaagcggaacatgctggcgatacatgttctgccttttcggatgtagtgaactttgttgtgggtagaacg

SEQ ID NO: 456219 - DNA, 75 bp, synthetic construct
  source 1..75: mol_type = other DNA
atgaacgtcctaatttatgcacgagcctctaccagagaacaagactccacacgtgctgtccctgcgctgcgtgag

SEQ ID NO: 456220 - DNA, 75 bp, synthetic construct
  source 1..75: mol_type = other DNA
tgaagcgtaccattcaggataaaggactgaaactggtggtggtggatttgcccacctcatggaagatgcttcaag

SEQ ID NO: 456221 - DNA, 75 bp, synthetic construct
  source 1..75: mol_type = other DNA
tggaacgaatgggctgaagggaattttattgagccagataatatatatggaaaaagatatctagaaatacttaaa

SEQ ID NO: 456222 - DNA, 75 bp, synthetic construct
  source 1..75: mol_type = other DNA
acgaacttcatgcagacccgctgaattttgagaaaaagtacggctctcagtttgtgttaatttttcgttttcttg

SEQ ID NO: 456223 - DNA, 75 bp, synthetic construct
  source 1..75: mol_type = other DNA
ttatggtttaaagcttggcttaattttcacttatctaaaaatcctgaagtatgggggcaattcggtgattttgtt

SEQ ID NO: 456224 - DNA, 75 bp, synthetic construct
  source 1..75: mol_type = other DNA
cagataatcttctatatttgaatggcaggatatttttagcggactttggattggtaaaatatcctgaaagaatcg

SEQ ID NO: 456225 - DNA, 75 bp, synthetic construct
  source 1..75: mol_type = other DNA
gaacgaatcatgcggtgagcgacctgacgggccgcccgctgatgctctttaacagtgaaggtaaaaccgtctggc

SEQ ID NO: 456226 - DNA, 75 bp, synthetic construct
  source 1..75: mol_type = other DNA
caacatgtgcacgccgggacgtgaagatgcggaagtgaaactctactcaaaagccgaatacaaagcctcgcgagg

SEQ ID NO: 456227 - DNA, 75 bp, synthetic construct
  source 1..75: mol_type = other DNA
gttttaccgcaaaactggatcccgatgttcagcaaccacgcggatatgatgctgacccaaatcgccattgggttg

SEQ ID NO: 456228 - DNA, 75 bp, synthetic construct
  source 1..75: mol_type = other DNA
gtcttggttggcgcttatgcaaataattctggaggttctgttttggttggaggtattaatccagctgaactacat

SEQ ID NO: 456229 - DNA, 75 bp, synthetic construct
  source 1..75: mol_type = other DNA
ataatcaatgggaggaaagattagattttattggaagtgattatttttataacctccatagacttcgtgaaaatg

SEQ ID NO: 456230 - DNA, 75 bp, synthetic construct
  source 1..75: mol_type = other DNA
aaaaacataagaaattcaaaaattaatttattagattcaattcctcatgaaaaattcaaaatgatcatatacaaa

SEQ ID NO: 456231 - DNA, 75 bp, synthetic construct
  source 1..75: mol_type = other DNA
ctgtgaacgatgcgctgaaattttaaagcccaaaaaactttcatttgaatcatttggtcatgatcccgaatggaa

SEQ ID NO: 456232 - DNA, 75 bp, synthetic construct
  source 1..75: mol_type = other DNA
atcccttctcatttttttcagccaacaatttaccccagtacaattgacctttttttgggattatttttatttatc

SEQ ID NO: 456233 - DNA, 75 bp, synthetic construct
  source 1..75: mol_type = other DNA
atgattacgggcttttcgccatcatataaaaaaattgttattggtgatgatgaaataacgatgcctggcgacaag

SEQ ID NO: 456234 - DNA, 75 bp, synthetic construct
  source 1..75: mol_type = other DNA
cggtggcgcgaacggacggtgaaggccaccgctggcagtaccgctacgataaagacacgctgcagctcacagaag

SEQ ID NO: 456235 - DNA, 75 bp, synthetic construct
  source 1..75: mol_type = other DNA
gccgtctgtgaagccgatcgcagctgcctcggggcgcgggatgcagcgatgctggcggtcattctcggctgcggc

SEQ ID NO: 456236 - DNA, 75 bp, synthetic construct
  source 1..75: mol_type = other DNA
ggtgagaatgccccggtcagcccggcccgggcctacctgctttcactcaattcccaccgcagccggcagaccatg

SEQ ID NO: 456237 - DNA, 75 bp, synthetic construct
  source 1..75: mol_type = other DNA
ttcaatgtgtggggccaatttaagtacccaaatagatcattttcttccccaagaattttttccggaatattctat

SEQ ID NO: 456238 - DNA, 75 bp, synthetic construct
  source 1..75: mol_type = other DNA
tcgttttgacaccctgacgaatgaccgcctgaccgaccaggcggtgtaccatgtcctgcaggtgcgccagcgcca

SEQ ID NO: 456239 - DNA, 75 bp, synthetic construct
  source 1..75: mol_type = other DNA
cgggtactgggtaagggaaacaaggagcggctggcatacatgccggctggtacctggcagcggctaacaatgtgg

SEQ ID NO: 456240 - DNA, 75 bp, synthetic construct
  source 1..75: mol_type = other DNA
cggcagaccatggcctcgttcctcgggatcgtcgccgggatgctcggggccgtaagcgcggacgcctgcagctgg

SEQ ID NO: 456241 - DNA, 75 bp, synthetic construct
  source 1..75: mol_type = other DNA
ggtagtgccacgaatacaaccgttaacggtggtggagagatggtagtccatggcatagctactgacactatcatt

SEQ ID NO: 456242 - DNA, 75 bp, synthetic construct
  source 1..75: mol_type = other DNA
atgctaagcaatttgcgaaaattggacgagaagcatacgaagcactaggacgtttatctagggaggaacacgttc

SEQ ID NO: 456243 - DNA, 75 bp, synthetic construct
  source 1..75: mol_type = other DNA
gacagcctcaggcaccgggctgggctatggcgaaggcgacgagacttatggctataacagctgcggctacctgaa

SEQ ID NO: 456244 - DNA, 75 bp, synthetic construct
  source 1..75: mol_type = other DNA
gactccaaaggagatgttgaatgtaaccgttggttggttaaaaggattggggaaaacaaaactgatacactaatg

SEQ ID NO: 456245 - DNA, 75 bp, synthetic construct
  source 1..75: mol_type = other DNA
ctggggcgttatatacgtgaacgtcggttaaatctggcaacacaggccctgttgaccacagatatgccaatttat

SEQ ID NO: 456246 - DNA, 75 bp, synthetic construct
  source 1..75: mol_type = other DNA
ctctatttcttacattacttggtcataaagatgctgcagagattcaaaaagctgagatccttagaggggaagatg

SEQ ID NO: 456247 - DNA, 75 bp, synthetic construct
  source 1..75: mol_type = other DNA
ctggtagacgtattaatgatgatatggcacgttatgttgcatcacagcttataaaggaaatgattaaggcaggta

SEQ ID NO: 456248 - DNA, 75 bp, synthetic construct
  source 1..75: mol_type = other DNA
ccatgtggaaaatcaaattgccgcaaagggcataaaaagggatttctggtagttacgaaagaaggatttgaaacg

SEQ ID NO: 456249 - DNA, 75 bp, synthetic construct
  source 1..75: mol_type = other DNA
gctttgatcgcattaatgactggacagaaattcaagctcgggaaagctatcattccaggctggaactgaccgatc

SEQ ID NO: 456250 - DNA, 75 bp, synthetic construct
  source 1..75: mol_type = other DNA
ttcatctgttcatcaacaaaaacagccatctcaaaaacatcagagtttcagacgtgatgaaaatcgctgattctg

SEQ ID NO: 456251 - DNA, 75 bp, synthetic construct
  source 1..75: mol_type = other DNA
gtgttgaccgcgggttatggtcgtcagtttttgatggcccggtacacagtttccgctttgaattcggtccaggtg

SEQ ID NO: 456252 - DNA, 75 bp, synthetic construct
  source 1..75: mol_type = other DNA
cacctgtgtttcaaatacttagaggtttatccggcagctacaatgtggctttaatgaaagcttcacctaaagaaa

SEQ ID NO: 456253 - DNA, 75 bp, synthetic construct
  source 1..75: mol_type = other DNA
tcctattgcacaaatgcagtactggaatgcaataatggatttagttgataatattgatgaagtgaccattaagat

SEQ ID NO: 456254 - DNA, 75 bp, synthetic construct
  source 1..75: mol_type = other DNA
aaggctccagcccgtcctgtttgtccggactgatgatggtgcggcagctgcggcgcggcgacacgctgaccatcg

SEQ ID NO: 456255 - DNA, 75 bp, synthetic construct
  source 1..75: mol_type = other DNA
gacatcaacccgccatccggtcgatgccgaactgttgtgcgagtttaaagaagagcacagccatgccacagacca

SEQ ID NO: 456256 - DNA, 75 bp, synthetic construct
  source 1..75: mol_type = other DNA
tacaaccgccaccgctattatgacccgctgcaggggcgatatatcactcaggatccgattgggctgaaaggggga

SEQ ID NO: 456257 - DNA, 75 bp, synthetic construct
  source 1..75: mol_type = other DNA
aagggctgaagaaattatgcgtggcagtctcctttcggtctataatagcagaacaaaagaaagagccagaaattg

SEQ ID NO: 456258 - DNA, 75 bp, synthetic construct
  source 1..75: mol_type = other DNA
gcgataatttccaaatgtacggagttatcgttatgaccactcaaatctctgttgaaactctctccccgatcaccc

SEQ ID NO: 456259 - DNA, 75 bp, synthetic construct
  source 1..75: mol_type = other DNA
aaagcagtttgcagaagaacctggaaaacagcgcatcacgtctcaacttgcttctggcctggctggaggaccatt

SEQ ID NO: 456260 - DNA, 75 bp, synthetic construct
  source 1..75: mol_type = other DNA
ttaagtaaggctgatgcggaagctatattgataatggctaacaaagctattgacacccttcagcagatgtatgag

SEQ ID NO: 456261 - DNA, 75 bp, synthetic construct
  source 1..75: mol_type = other DNA
acggatttaatggtgcaaatccagggctactggatagtcttgtttcacgggcagatgtaagaccgttccgtcttc

SEQ ID NO: 456262 - DNA, 75 bp, synthetic construct
  source 1..75: mol_type = other DNA
tggtacagatgccaccagcaccatcacaacgttaaagccggcactatttctgctaccagtacggatgcggttaac

SEQ ID NO: 456263 - DNA, 75 bp, synthetic construct
  source 1..75: mol_type = other DNA
ggtgaagtgaagcgtaaaggccgcaaagtctactttaagcagggtgagaatggccgcgttggtcgtcagtttgtg

SEQ ID NO: 456264 - DNA, 75 bp, synthetic construct
  source 1..75: mol_type = other DNA
tggtactaaatggaattttctaccttttcgtcctggtttggttggtggccattgtatcggggttgacccatatta

SEQ ID NO: 456265 - DNA, 75 bp, synthetic construct
  source 1..75: mol_type = other DNA
gccggacttaagtcccttggttagtgcttcgaaaatgttaagcaaggttatcaagaatggcgatataattatatt

SEQ ID NO: 456266 - DNA, 75 bp, synthetic construct
  source 1..75: mol_type = other DNA
gttatcggggagccgttgtcggcatgtatgtctactggatgggatatggtgatgtgtttcaacgaccaccatgcc

SEQ ID NO: 456267 - DNA, 75 bp, synthetic construct
  source 1..75: mol_type = other DNA
ttaaaagaaggatatctaaatacaattgcactatttgcgagggattatagcgcaagttttgcctccaagatacat

SEQ ID NO: 456268 - DNA, 75 bp, synthetic construct
  source 1..75: mol_type = other DNA
tgttccttccagtggtgatcttggtggcagcttattgaaagggaaaaatatactagaaattcctccacaagctaa

SEQ ID NO: 456269 - DNA, 75 bp, synthetic construct
  source 1..75: mol_type = other DNA
tattaatcatggctaataaagctatagatacccttcagcaaatgtatgagcaggtttatccatccgaacctgctg

SEQ ID NO: 456270 - DNA, 75 bp, synthetic construct
  source 1..75: mol_type = other DNA
tgtcctgttaattacctttggcaaactgattataaagttaatgtccgcaccaggagtcggttatgtttcttataa

SEQ ID NO: 456271 - DNA, 75 bp, synthetic construct
  source 1..75: mol_type = other DNA
atgcattacatcaaattaatacacagccagctaactattattataagccctgtcctgttaattacctttggcaaa

SEQ ID NO: 456272 - DNA, 75 bp, synthetic construct
  source 1..75: mol_type = other DNA
agattgataaaactatggggcaggcattgactggaatatcatgcgtgttcagaggtgaagtaaaaagaaaagaag

SEQ ID NO: 456273 - DNA, 75 bp, synthetic construct
  source 1..75: mol_type = other DNA
atgatcaaaactcgtcggactaaacgtaccttttccccggagttcaagcttgaagctatcgagcaggcggttaaa

SEQ ID NO: 456274 - DNA, 75 bp, synthetic construct
  source 1..75: mol_type = other DNA
gacgattgagcgaatttatcgacttcaaatcaaaggcatcctccgctgagtttagcaagctattaacgctgggtg

SEQ ID NO: 456275 - DNA, 75 bp, synthetic construct
  source 1..75: mol_type = other DNA
gatacgaagttaggatctgcaagatagatgtagaccccacaatttataaaaagaaaatttgtaaaccccaaaaaa

SEQ ID NO: 456276 - DNA, 75 bp, synthetic construct
  source 1..75: mol_type = other DNA
ctaatcaggtgtacagttcgattaaaggaaacattgatagtgcagctaactttaaaggttatacgctatttaata

SEQ ID NO: 456277 - DNA, 75 bp, synthetic construct
  source 1..75: mol_type = other DNA
tattatgtagcaatgctattttagttttgccttacaaaaatgcatcgcaatctggtgtgatgtatactgcacttt

SEQ ID NO: 456278 - DNA, 75 bp, synthetic construct
  source 1..75: mol_type = other DNA
caaggttgtcaaagagaataatatttgtcagcgagtttacatttaatgattttatttctaggtacggaaataatt

SEQ ID NO: 456279 - DNA, 75 bp, synthetic construct
  source 1..75: mol_type = other DNA
ctgaactggtgcggctgctggacaggctggaggaagaaatccgggcagaccgcgtgagcagtgaaagccgggcgt

SEQ ID NO: 456280 - DNA, 75 bp, synthetic construct
  source 1..75: mol_type = other DNA
taacaatgatgttaattatttaatttatggttttttgtttccatccgttgttttttatgcgtctcttttcctccg

SEQ ID NO: 456281 - DNA, 75 bp, synthetic construct
  source 1..75: mol_type = other DNA
ggctatggcaaaggcggtaaaaaagcgccagtcatgcgaaatacccacaggttatcaaatatacgccgcgcctga

SEQ ID NO: 456282 - DNA, 75 bp, synthetic construct
  source 1..75: mol_type = other DNA
attctgattgctgggttcccgtcgattcctggagctttgttgaatataaaggcgggaaaatctacggcggcgatg

SEQ ID NO: 456283 - DNA, 75 bp, synthetic construct
  source 1..75: mol_type = other DNA
ccgcatcatgtgtatcagccgtaccgtctgccagggcagcagcatgatgaggagtcggggctgtactataaccgt

SEQ ID NO: 456284 - DNA, 75 bp, synthetic construct
  source 1..75: mol_type = other DNA
cgcgtgagcagtgaaagccgggcgtggcttgcgcagtgcgggctgacggtggagcaactggccagacaggtggag

SEQ ID NO: 456285 - DNA, 75 bp, synthetic construct
  source 1..75: mol_type = other DNA
tggaagtggacggcctgccgccggacgcgtttgccgtggtttcctttcatctcacccagtcactctcttcactct

SEQ ID NO: 456286 - DNA, 75 bp, synthetic construct
  source 1..75: mol_type = other DNA
ctcaaccggtctggttactgttcagttgacaaatgttgatggtctggaaagaaccgttaatgtatcaatgttgcc

SEQ ID NO: 456287 - DNA, 75 bp, synthetic construct
  source 1..75: mol_type = other DNA
ttgccgccgtagtgattgtctacctgatttttgacagctggcggcatcgtcacgacccagccgtaacctttactc

SEQ ID NO: 456288 - DNA, 75 bp, synthetic construct
  source 1..75: mol_type = other DNA
atgaaacagctcaacggcatttacaacgtgccgctggttaccatcatcattatgggctttttcttcccgcgcatc

SEQ ID NO: 456289 - DNA, 75 bp, synthetic construct
  source 1..75: mol_type = other DNA
ctctccgtgaccgctggcaacgtacttgcgccgcccaaacgctggcacggcgcggtacgcgatggggtttcctgg

SEQ ID NO: 456290 - DNA, 75 bp, synthetic construct
  source 1..75: mol_type = other DNA
ctctggcggggggaccttgcaggtttccggaagtgacatgactggttttgttacttcagcaattaaccagaaggc

SEQ ID NO: 456291 - DNA, 75 bp, synthetic construct
  source 1..75: mol_type = other DNA
ttttcggcgaactgtgcgacagggccggaaggggaggtgtggtcgccggggcgaaatcctcatggattttaaacg

SEQ ID NO: 456292 - DNA, 75 bp, synthetic construct
  source 1..75: mol_type = other DNA
cgcacaaatccgcccttcttccgtggtgaccaaagactacacctttaaacgacccggctgggcaggacgttttga

SEQ ID NO: 456293 - DNA, 75 bp, synthetic construct
  source 1..75: mol_type = other DNA
aaacccggctggcccgccgcgcaccgagtcacgcaaccagcttaagcggctgtatgcgcagcagaactggacgga

SEQ ID NO: 456294 - DNA, 75 bp, synthetic construct
  source 1..75: mol_type = other DNA
ttgacgatgcgacagggaaagaacagttctacatccacgcacagaagaacatggataccgaggtgctgaataacc

SEQ ID NO: 456295 - DNA, 75 bp, synthetic construct
  source 1..75: mol_type = other DNA
gacacagcagacaggcatggtatcaggacaacgcaaggcgcagaaaacggcaggaacatcatgctcaggttcttg

SEQ ID NO: 456296 - DNA, 75 bp, synthetic construct
  source 1..75: mol_type = other DNA
gagatcgtctgttgagggggacacaaaaatccgatctgcggcagatggcgatcactggattaacttccgcgattt

SEQ ID NO: 456297 - DNA, 75 bp, synthetic construct
  source 1..75: mol_type = other DNA
aacatggtcgcgtgcgggtgaaatttaactgggaccgctataacccgtcaaaccaggacagttcatgctggatcc

SEQ ID NO: 456298 - DNA, 75 bp, synthetic construct
  source 1..75: mol_type = other DNA
aggcatccgctgaactactggagctgggtatgctcgagtaccgcaaagcgatgcgcaatatcgcaaccggattcg

SEQ ID NO: 456299 - DNA, 75 bp, synthetic construct
  source 1..75: mol_type = other DNA
ctttggtcgggctgcccgtaaactcgaaatgatgcctgcgtcactcagccgtttcatcaaactgctggaagaaga

SEQ ID NO: 456300 - DNA, 75 bp, synthetic construct
  source 1..75: mol_type = other DNA
aaaccagctggttatggcgcaaaattgttaaccacctggtcaatgagattttttgcctgactgacgatgattttc

SEQ ID NO: 456301 - DNA, 75 bp, synthetic construct
  source 1..75: mol_type = other DNA
cgccgccaagaatgcgaggttgtgctgggcatcattacattacggcgatgacttcagactgtattcaacaacatg

SEQ ID NO: 456302 - DNA, 75 bp, synthetic construct
  source 1..75: mol_type = other DNA
aacccacgtcactaaagagcagcagttggctgccagcgaaatgtcactggatgaaggcaatacatatctccatag

SEQ ID NO: 456303 - DNA, 75 bp, synthetic construct
  source 1..75: mol_type = other DNA
ctgttgccacgctacgatttacctgcaccaatgcttgaccgaccagcaaaaggggcggatagcgcactgctggcg

SEQ ID NO: 456304 - DNA, 75 bp, synthetic construct
  source 1..75: mol_type = other DNA
ctgaaggcgcagagtttttaaatgaggccaaagccgtgattgctgatttcgatgcgctacggctgcggttccgta

SEQ ID NO: 456305 - DNA, 75 bp, synthetic construct
  source 1..75: mol_type = other DNA
ggtgcccgcccgacgctgggggaaaggcgatgacattgctgcggcggttagcatggtactgaaaccggatgcgtt

SEQ ID NO: 456306 - DNA, 75 bp, synthetic construct
  source 1..75: mol_type = other DNA
tagaacggacccgtttagccgttgggtctgctcgttgattggtaggcggggatactggcgtgctgtcgttgcaat

SEQ ID NO: 456307 - DNA, 75 bp, synthetic construct
  source 1..75: mol_type = other DNA
ttgactccatcgcaatacagtagcggcggaaagtcgaagttaggcaggataacaaaagccggtgattcgtatctg

SEQ ID NO: 456308 - DNA, 75 bp, synthetic construct
  source 1..75: mol_type = other DNA
cgcggcgcacgagtggcgatgatctttcaggaaccgatgaccgcccttaatccgacacgtcgaataggtctttag

SEQ ID NO: 456309 - DNA, 75 bp, synthetic construct
  source 1..75: mol_type = other DNA
gcgtgcgtatcggtgctgacctgaaaaccatcagcatgtggaatgttaagcaggaaagcctgcgcgccaggctac

SEQ ID NO: 456310 - DNA, 75 bp, synthetic construct
  source 1..75: mol_type = other DNA
atgaaccgcatcgctaacgcgttcgacactggcgagtggccagcgccgatcaccgaagactacaccgacgaactg

SEQ ID NO: 456311 - DNA, 75 bp, synthetic construct
  source 1..75: mol_type = other DNA
gccgctgggcgccagcctggaggaaacggcccagagctatatggctttgccggcagagtaccagcgcatcgagcc

SEQ ID NO: 456312 - DNA, 75 bp, synthetic construct
  source 1..75: mol_type = other DNA
aaccagcggcagccgcgacgcactactcgaacaacttgcgattatcaatcctgacctggtcgcgcaggaagctca

SEQ ID NO: 456313 - DNA, 75 bp, synthetic construct
  source 1..75: mol_type = other DNA
gcatgctgctaacccccccgagccgcgccgttgaggtgagctactttggctttgacgaggagacgggactggaag

SEQ ID NO: 456314 - DNA, 75 bp, synthetic construct
  source 1..75: mol_type = other DNA
ttggctgccagcgaaatgtcactggatgaaggcaatacatatctccatagcctgcttgtggcaaggaacgatgtg

SEQ ID NO: 456315 - DNA, 75 bp, synthetic construct
  source 1..75: mol_type = other DNA
cccaacctgaaggtaaggagtctccgcgcaaatccttctgcactcacgaagagaacctgcaacgcgtgcgtgaag

SEQ ID NO: 456316 - DNA, 75 bp, synthetic construct
  source 1..75: mol_type = other DNA
atcgccatcatcgaggcatccgctgaactgctagagctgggcatgctcgagtaccgcaaggcgatgcgcgctatc

SEQ ID NO: 456317 - DNA, 75 bp, synthetic construct
  source 1..75: mol_type = other DNA
gccagcaagccgatgtaaaccagaatgcggactctgtcgtccaaaatagcgattctgtaaaccaagccgaaccag

SEQ ID NO: 456318 - DNA, 75 bp, synthetic construct
  source 1..75: mol_type = other DNA
aaagaaagtccattcaaggagtggtctgccgctcttcgcaatacccctggcattctcgactattcacgcgcatca

SEQ ID NO: 456319 - DNA, 75 bp, synthetic construct
  source 1..75: mol_type = other DNA
actcgcgctggtactccgtttcaccagaatgtgggcggcgactgattacattgaccgtggcatcctggcgcgtga

SEQ ID NO: 456320 - DNA, 75 bp, synthetic construct
  source 1..75: mol_type = other DNA
aggtgaaagatgcgcgtgtatcgctgatgtacttcaatgcgcgccacgttgccaaaacgatcaccaaagagcgtt

SEQ ID NO: 456321 - DNA, 75 bp, synthetic construct
  source 1..75: mol_type = other DNA
atcaccgctgattacaccgacgaactgaacgacttcgacctgcgccgccttgaagcgctgcgtactcaggcataa

SEQ ID NO: 456322 - DNA, 75 bp, synthetic construct
  source 1..75: mol_type = other DNA
cgcacgtcatgaaagttataccagagcggcagaggagttagcgttaacccaaagtgcagtattcagacaagtaag

SEQ ID NO: 456323 - DNA, 75 bp, synthetic construct
  source 1..75: mol_type = other DNA
aactgctggtgacttttgaggtcgtcgcacgtcatgaaagttataccagagcggcagaggagttagcgttaaccc

SEQ ID NO: 456324 - DNA, 75 bp, synthetic construct
  source 1..75: mol_type = other DNA
atgtctggaaatataggggcaaatccagcgcgcccgtgggtagattctggcaaagtgcaattaagaacattgttg

SEQ ID NO: 456325 - DNA, 75 bp, synthetic construct
  source 1..75: mol_type = other DNA
gatgacggtgttgtattcctcaataacatcaaaccggacatggtgctagatataaaagatgagcagcaatcatgc

SEQ ID NO: 456326 - DNA, 75 bp, synthetic construct
  source 1..75: mol_type = other DNA
tcgatctggctacaacgaacttttatcttttcagtatcaatgctcatggaaaacccgcaggaaagatcaaacttt

SEQ ID NO: 456327 - DNA, 75 bp, synthetic construct
  source 1..75: mol_type = other DNA
acaagccagtgctgggcgctgacatgaaagagctggcaaaggatatctggaacaggccatggagtgaggaaagac

SEQ ID NO: 456328 - DNA, 75 bp, synthetic construct
  source 1..75: mol_type = other DNA
cgccggtaaagaagctcgattcttacaagctactgacgagatgtcagcagcgttaacgcagtttatgaagaaaaa

SEQ ID NO: 456329 - DNA, 75 bp, synthetic construct
  source 1..75: mol_type = other DNA
gttaactttccatttaaaaactcaggagagattacaggagttgataggaatcttagaaaacaaggaagtgccgga

SEQ ID NO: 456330 - DNA, 75 bp, synthetic construct
  source 1..75: mol_type = other DNA
gtaaagtcagtgatgacgaccgaagtatctggaaagcattgcaaacagtaacgctcaggatgtggataaagacag

SEQ ID NO: 456331 - DNA, 75 bp, synthetic construct
  source 1..75: mol_type = other DNA
caaaactccgagagcttccgggagacgccataaaacatttgaccctacagttactgactcagggggttctgaatc

SEQ ID NO: 456332 - DNA, 75 bp, synthetic construct
  source 1..75: mol_type = other DNA
tgatggcggcttaagtgcgatccttaaagttcagacctttcggttacacagtgacacgattgttgcccttgagga

SEQ ID NO: 456333 - DNA, 75 bp, synthetic construct
  source 1..75: mol_type = other DNA
aatggcagaagacgatgctgtagatacttatgtcgaatggattggtagttatggctatcaaaatagaatgctggt

SEQ ID NO: 456334 - DNA, 75 bp, synthetic construct
  source 1..75: mol_type = other DNA
ccgctgaacgtgcgcaccagacagaaattattgccgccttcttgaggtatacccgaacaaaattacagatgctga

SEQ ID NO: 456335 - DNA, 75 bp, synthetic construct
  source 1..75: mol_type = other DNA
taccagacccgctatgaatacgaccgcttcggccagatgacggcggttcaccgcgaggaaggtatcagcctttac

SEQ ID NO: 456336 - DNA, 75 bp, synthetic construct
  source 1..75: mol_type = other DNA
cacgcttatcgatcacaatatcgtgggtactacacaccaacatatttataatttccgcctcgatctggatgtaga

SEQ ID NO: 456337 - DNA, 75 bp, synthetic construct
  source 1..75: mol_type = other DNA
ttatttgatttgcgcctgcacgagcgagatgacgttttacaggccgtattcgacaaaggcacatcaaaattttag

SEQ ID NO: 456338 - DNA, 75 bp, synthetic construct
  source 1..75: mol_type = other DNA
caaaaagaccgctgatatgctttctgaatatgaaagaagaagagatattctgaatactcagttgtttgagttgag

SEQ ID NO: 456339 - DNA, 75 bp, synthetic construct
  source 1..75: mol_type = other DNA
accgtctaacaccgcgcgtgcgggcggcattgtgttaccgatcatcaacagcgtggcggtggctttggggtccga

SEQ ID NO: 456340 - DNA, 75 bp, synthetic construct
  source 1..75: mol_type = other DNA
tcacgccgtcgaactgcccgcctgaagcgtgggcggcgcacatggataaactgcgcgagggaaagcagacagccc

SEQ ID NO: 456341 - DNA, 75 bp, synthetic construct
  source 1..75: mol_type = other DNA
cggcgggtggttttgccagctatatggaccacatcaaagcgtctaacgcgatggtgaacgtctgcattcgtcccc

SEQ ID NO: 456342 - DNA, 75 bp, synthetic construct
  source 1..75: mol_type = other DNA
accgggcgtatgcgcggcactcgtgaaatagtggctcgaccgaactatataatggtttacgccattgaagacgag

SEQ ID NO: 456343 - DNA, 75 bp, synthetic construct
  source 1..75: mol_type = other DNA
gccggacgagtcgctggtacacatgaagccgttgtcaggccgcattatgtgcttgtctatcaagtggagggcgat

SEQ ID NO: 456344 - DNA, 75 bp, synthetic construct
  source 1..75: mol_type = other DNA
gtgcgggaatggtacgtttgcccccactgtatgaaacgggctgcaaagctgtatattggcaaaaaagatattggc

SEQ ID NO: 456345 - DNA, 75 bp, synthetic construct
  source 1..75: mol_type = other DNA
gtaacccagtttggccgtatgctttctgaactggggatcgagttgatttgtgccaacagtccacaggctaaaggc

SEQ ID NO: 456346 - DNA, 75 bp, synthetic construct
  source 1..75: mol_type = other DNA
aatcagcctttgattacatgatggctacccgagagtatcttgaacaacatggcaaaccacttgcgttttacagcg

SEQ ID NO: 456347 - DNA, 75 bp, synthetic construct
  source 1..75: mol_type = other DNA
atcttaatgaagagttgaattcacttagtcgacgtagacgaaatattaatgacatgatctcagaaatgtcattta

SEQ ID NO: 456348 - DNA, 75 bp, synthetic construct
  source 1..75: mol_type = other DNA
tccgggcagaccgcgtgagcagtgaaagccgggcgtggcttgcgcagtgcgggctgacggtggagcaactggcca

SEQ ID NO: 456349 - DNA, 75 bp, synthetic construct
  source 1..75: mol_type = other DNA
tgccagggcagcagcatgatgaggaatcagggctgtactataaccgtcaccggtactacgatccgttgcaggggc

SEQ ID NO: 456350 - DNA, 75 bp, synthetic construct
  source 1..75: mol_type = other DNA
ttcattttcaattataaaaaaaattataagtgagtcatggccgttccttattagcagtattgcaataattattta

SEQ ID NO: 456351 - DNA, 75 bp, synthetic construct
  source 1..75: mol_type = other DNA
gttggatcgttcttgtcgtttcagtcattcttcttggcgtggcgagtcacattgacaactatcagccacctgaac

SEQ ID NO: 456352 - DNA, 75 bp, synthetic construct
  source 1..75: mol_type = other DNA
atatatggttgataccacggtttggtattaatggtgcggcaattactgctgtaattgctcaatttagctcagcga

SEQ ID NO: 456353 - DNA, 75 bp, synthetic construct
  source 1..75: mol_type = other DNA
tcaatattaaattaaaagcccctactgctgatgagtccttaacttggaaggctgtgttgccagttactgtttttt

SEQ ID NO: 456354 - DNA, 75 bp, synthetic construct
  source 1..75: mol_type = other DNA
atgatgcatctttatatagatatccatcctatttttcaaatctctatagaattgtatataaaaagctatatccta

SEQ ID NO: 456355 - DNA, 75 bp, synthetic construct
  source 1..75: mol_type = other DNA
ttcagcttcctgcaggaaaagtctggctgtcaccggtggtggactgcttcgatggaaaagttgtgagtgatctta

SEQ ID NO: 456356 - DNA, 75 bp, synthetic construct
  source 1..75: mol_type = other DNA
ctggaggtgagtcagtatccggagttgatagcgcagttttcaagtggtaaccaaacacgtataaaacaaggatta

SEQ ID NO: 456357 - DNA, 75 bp, synthetic construct
  source 1..75: mol_type = other DNA
gcgagcgggagaaagcgcagcgccgcagcctggcggagaagctgcagcaggaagggagcgaggacgggcacggcg

SEQ ID NO: 456358 - DNA, 75 bp, synthetic construct
  source 1..75: mol_type = other DNA
ttacgacagcctgcaccgcctggtccattacatccgtatccaatatgaggagccgctggtcgagagccgctacct

SEQ ID NO: 456359 - DNA, 75 bp, synthetic construct
  source 1..75: mol_type = other DNA
aacggcgagcgggagaaagcgcagcgccgcagcctggcggagaagctgcagcaggaagggagcgaggacgggcac

SEQ ID NO: 456360 - DNA, 75 bp, synthetic construct
  source 1..75: mol_type = other DNA
ttcgatatggtaaccagcgcaccggaaaaattatccgggcaggctgctgacaagatgcaggctggcgtgattctg

SEQ ID NO: 456361 - DNA, 75 bp, synthetic construct
  source 1..75: mol_type = other DNA
atgatgctaagcgaggaaacgtccgccgtacgcccaccaaaacaaacgcgatttaacggtgcaaaactggtatgg

SEQ ID NO: 456362 - DNA, 75 bp, synthetic construct
  source 1..75: mol_type = other DNA
gccgtcgggtttaatctctttggtgatggtattcgcgatctgcttgacccgaaagcaggaggaaagcagtcatga

SEQ ID NO: 456363 - DNA, 75 bp, synthetic construct
  source 1..75: mol_type = other DNA
ccatgctggcgattgctattgtgcgaattcccttttatgtgcgcctggcgcgggggcaagcattagttgtacgcc

SEQ ID NO: 456364 - DNA, 75 bp, synthetic construct
  source 1..75: mol_type = other DNA
atatgaaaacatctataatgcactcatagaaataactaattatgcgcagaaaaaaagaagtccgtgtcagataat

SEQ ID NO: 456365 - DNA, 75 bp, synthetic construct
  source 1..75: mol_type = other DNA
ttggatgaagcagtctgggtcaaacaagcactggaaaaaaatcaacctggaaagccagtacgggtgataaatcct

SEQ ID NO: 456366 - DNA, 75 bp, synthetic construct
  source 1..75: mol_type = other DNA
aagtcgccctgcgtccgttagcggacatcaacaccatctttactgagatggaagaaggcaaaatccgtggccgca

SEQ ID NO: 456367 - DNA, 75 bp, synthetic construct
  source 1..75: mol_type = other DNA
cactgttgattgaggcgttaaccagcattccaaaactcgaagccggagactccgtctggtggcactgcgacgtca

SEQ ID NO: 456368 - DNA, 75 bp, synthetic construct
  source 1..75: mol_type = other DNA
caaccctgaaaaatcccttgccatccagtctgaaatcgttcggattctggataaattcgacaccctgacaaactc

SEQ ID NO: 456369 - DNA, 75 bp, synthetic construct
  source 1..75: mol_type = other DNA
acaaaagaacgccttgcggtaattactttttccgtttggataagttggactgcgtttctttagcagataattcag

SEQ ID NO: 456370 - DNA, 75 bp, synthetic construct
  source 1..75: mol_type = other DNA
tgtaggtgatataattaaaataataagttggatttatgcattcactatgttggcttcaaaagcaactaggtggta

SEQ ID NO: 456371 - DNA, 75 bp, synthetic construct
  source 1..75: mol_type = other DNA
tggaagtgaacggcctgccgccggacgcttttgtggtggtttcctttcatctgagccagtcgctctcttcagtct

SEQ ID NO: 456372 - DNA, 75 bp, synthetic construct
  source 1..75: mol_type = other DNA
tacctggtgtcggtgagaatgcccggcgggataggagtatgaagatttataccgcaatttgcttccctccctgga

SEQ ID NO: 456373 - DNA, 75 bp, synthetic construct
  source 1..75: mol_type = other DNA
ggtagcagagtttctgagagcacagtcattcagatctataacaataccggtgggaatgcagtggtaacttcagcg

SEQ ID NO: 456374 - DNA, 75 bp, synthetic construct
  source 1..75: mol_type = other DNA
agatcgatttaataatccgggaaatctgcggtgggctgaaggatatagcagcgagaatacgagaagcggtaaatt

SEQ ID NO: 456375 - DNA, 75 bp, synthetic construct
  source 1..75: mol_type = other DNA
ccaggacccggccaaactgctcccgcagatgatccgtaatgcgcgagatatcttcgtgcagaacggcagcacgct

SEQ ID NO: 456376 - DNA, 75 bp, synthetic construct
  source 1..75: mol_type = other DNA
cctgcgtattcagctggaacaactggcaatcgtactgatcgcttttgtagtgacgccttatttctataacgacta

SEQ ID NO: 456377 - DNA, 75 bp, synthetic construct
  source 1..75: mol_type = other DNA
atttgggcgggcgggctgatgatggcgttgggcggactgctgtgtctgtttgatcctcgctatcgtaagcgcgtg

SEQ ID NO: 456378 - DNA, 75 bp, synthetic construct
  source 1..75: mol_type = other DNA
accgaaaaggccaaaggtgaggcgaaggagttaggcgcggagtttaatgccgtggccgaggccattctgaccatc

SEQ ID NO: 456379 - DNA, 75 bp, synthetic construct
  source 1..75: mol_type = other DNA
gctggtggagggggggcgcggtgctggtggggcgcccgtctcttcctctgcgactgcgcgagcggcgggggttcc

SEQ ID NO: 456380 - DNA, 75 bp, synthetic construct
  source 1..75: mol_type = other DNA
tccggacgctctgccggcgtctgtacagcctggtgcagggtaaacaggcgtcaggccgtccctggtggtaccggc

SEQ ID NO: 456381 - DNA, 75 bp, synthetic construct
  source 1..75: mol_type = other DNA
atctggtcctcgaacggtgccgtgatgaaattggcgactggcgtattattttgcactctccctatggaagacggg

SEQ ID NO: 456382 - DNA, 75 bp, synthetic construct
  source 1..75: mol_type = other DNA
atattattgagcggggctatgagggttactgtacggtggagctggtgacgatgtatatgaacgagcccagactct

SEQ ID NO: 456383 - DNA, 75 bp, synthetic construct
  source 1..75: mol_type = other DNA
aatcacggcagtcgcaaataccgtacgcgaagtgatgaccatccggggagcatggaaatcagaaaggcacggcta

SEQ ID NO: 456384 - DNA, 75 bp, synthetic construct
  source 1..75: mol_type = other DNA
aaccggctggcagaactgacaatgaacaaactttacgatcgcgtgccggcttccgtctggaaatatgtcacctga

SEQ ID NO: 456385 - DNA, 75 bp, synthetic construct
  source 1..75: mol_type = other DNA
ttaaagctatcgctcttgttgaaagcaatctaaaaaaggatagcataggcaagaacagagataagaataacaata

SEQ ID NO: 456386 - DNA, 75 bp, synthetic construct
  source 1..75: mol_type = other DNA
ttacgtgctaatttaactaataggctcgtactcaaggttgcagacaagaagaattctatattagttctagatgag

SEQ ID NO: 456387 - DNA, 75 bp, synthetic construct
  source 1..75: mol_type = other DNA
acaattcgcgatgtaacaaatagcaacaatggaaaacttgttgccccaaataaagacagtagtgatcgtggtaag

SEQ ID NO: 456388 - DNA, 75 bp, synthetic construct
  source 1..75: mol_type = other DNA
ggacaatattagagctgatgcattagaagagttactagcaaagtggccatcaaagcagcttgctgaatgggttag

SEQ ID NO: 456389 - DNA, 75 bp, synthetic construct
  source 1..75: mol_type = other DNA
atgttggaagcaattgacagctccaatacaaaacttaatgagaaagtggcaacaaaagctaaaagttttattttg

SEQ ID NO: 456390 - DNA, 75 bp, synthetic construct
  source 1..75: mol_type = other DNA
atgcggcgtattgatggcaaaaatcgttaccccattgatgtggtgaaaatccctctgtccggaccgctgacacag

SEQ ID NO: 456391 - DNA, 75 bp, synthetic construct
  source 1..75: mol_type = other DNA
acgccgtggcatcccttacgcctagcggaaataaatataaaagcaatacaggtttctaaattaattattgatgtt

SEQ ID NO: 456392 - DNA, 75 bp, synthetic construct
  source 1..75: mol_type = other DNA
agcaagtttttattagtcgtaaggctataggatggttatttacacggccagttgaaactgcaaaatttattcttt

SEQ ID NO: 456393 - DNA, 75 bp, synthetic construct
  source 1..75: mol_type = other DNA
gcaagaacagggataagaaaaacaatataaagagttttgattatggtttaatgcagataaaccagatgcacattc

SEQ ID NO: 456394 - DNA, 75 bp, synthetic construct
  source 1..75: mol_type = other DNA
gcaatggataaccaaaaaaagagacagcaatatgccccaaaatatatattgtatataccaggcttaatgaactag

SEQ ID NO: 456395 - DNA, 75 bp, synthetic construct
  source 1..75: mol_type = other DNA
ggcttttatctgaagccagagccgtaggtatcatcactcaagacaaagacagaatcggaactgacgaagtaatta

SEQ ID NO: 456396 - DNA, 75 bp, synthetic construct
  source 1..75: mol_type = other DNA
acctttaacgtaccagaaggtattattcgcgataaagtgtcatggttcgcagtcatttatcaattttcacaggaa

SEQ ID NO: 456397 - DNA, 75 bp, synthetic construct
  source 1..75: mol_type = other DNA
tcttacaacccgtatattcgcttcagttatcgaccgcaagactctgactggacgtactccggccgtattctttta

SEQ ID NO: 456398 - DNA, 75 bp, synthetic construct
  source 1..75: mol_type = other DNA
gacacttatcgcatgctgccctattcataagatattcttggcctgatgataagtcattaacctcatcgatctatt

SEQ ID NO: 456399 - DNA, 75 bp, synthetic construct
  source 1..75: mol_type = other DNA
atagatcgtttagcttattatttaggacgccccgttaccgaatcagatattggtccatcaagaaatgatattgaa

SEQ ID NO: 456400 - DNA, 75 bp, synthetic construct
  source 1..75: mol_type = other DNA
ttgggctgttacataataatgaaagtggtgcgtactttccatatggtgttggacaggaaatagcacggtgtcgac

SEQ ID NO: 456401 - DNA, 75 bp, synthetic construct
  source 1..75: mol_type = other DNA
gccctttctggaatcccggtgtcgccggaacattcccttcactggtagagaaatacgagcgatctttctgtgcca

SEQ ID NO: 456402 - DNA, 75 bp, synthetic construct
  source 1..75: mol_type = other DNA
acaaaagaaatcaaagaggcttatcattaattgagacctctatggtcctcgccctctccgccatcgtcgtccccg

SEQ ID NO: 456403 - DNA, 75 bp, synthetic construct
  source 1..75: mol_type = other DNA
ccctgtgtgaacattgcttccatgaactttggaactcagttagtcggagtcggggtgggtaatactgctgctatt

SEQ ID NO: 456404 - DNA, 75 bp, synthetic construct
  source 1..75: mol_type = other DNA
gtgcctttctgaaaggcgatgcggggaaatatcaggctattttaagttgggttgaggagcagggcggcttcaggt

SEQ ID NO: 456405 - DNA, 75 bp, synthetic construct
  source 1..75: mol_type = other DNA
tatttttattggagggtataaagaagttataaatttccatcgtcaggctgaggttcttagacttggtggagcaag

SEQ ID NO: 456406 - DNA, 75 bp, synthetic construct
  source 1..75: mol_type = other DNA
ctgttaatttacttttttttataaatgacccattaatagcaaatacaggcgttacaaaaaaaataaaaagtcaga

SEQ ID NO: 456407 - DNA, 75 bp, synthetic construct
  source 1..75: mol_type = other DNA
tctgcatcagccagtttcgctacagcgcacaaatccgcccttcttccgtggtgaccaaggactacacctttaaac

SEQ ID NO: 456408 - DNA, 75 bp, synthetic construct
  source 1..75: mol_type = other DNA
cagatcgctaaattaccttttgcgttatatcgccagggctacgagtactactggaaaacccacgcacacccaaac

SEQ ID NO: 456409 - DNA, 75 bp, synthetic construct
  source 1..75: mol_type = other DNA
ggctacgagtactactggaaaacccacgcacacccaaacatattcagaagcgtgagggatatagtgccatcaaag

SEQ ID NO: 456410 - DNA, 75 bp, synthetic construct
  source 1..75: mol_type = other DNA
catcgaacagcaaggtaatatccgcataaactgggttgaagagggtaaacctgtcgcatgtattgcccattataa

SEQ ID NO: 456411 - DNA, 75 bp, synthetic construct
  source 1..75: mol_type = other DNA
acacatcgtggttaacagcatgtcgtcgggcaggaattgaaaatttccgttttcatgacctccgccatacctggg

SEQ ID NO: 456412 - DNA, 75 bp, synthetic construct
  source 1..75: mol_type = other DNA
atgaacaccagagaaaacaaccttaaagccctttatgccccccgaaaaatcaatctgcgtgaggaagccggactg

SEQ ID NO: 456413 - DNA, 75 bp, synthetic construct
  source 1..75: mol_type = other DNA
cgctggtttgaggatgaaagccagatttgcatcgctgaaaaatcccgtcgtaccggtctgacatgggccgaagcg

SEQ ID NO: 456414 - DNA, 75 bp, synthetic construct
  source 1..75: mol_type = other DNA
tcaaggcgcttcccctttctgtgaatttgaattgagaatggatcggaaaatactcagtgattacttggctcgata

SEQ ID NO: 456415 - DNA, 75 bp, synthetic construct
  source 1..75: mol_type = other DNA
caggcgctgccggagcggtcgcgggcaatggagggcggttatcgtgatgacgatgaggcatatcatgaatttgat

SEQ ID NO: 456416 - DNA, 75 bp, synthetic construct
  source 1..75: mol_type = other DNA
gactggctgaaagattttaaacaggggcctaccggtgaagagcgtactgtttatggcatctacggcattagtgaa

SEQ ID NO: 456417 - DNA, 75 bp, synthetic construct
  source 1..75: mol_type = other DNA
gttccttgccagcaaggatgactgccaccgttacgagctgcaccgcctgaaccgcccggcgaaaccggaagaacg

SEQ ID NO: 456418 - DNA, 75 bp, synthetic construct
  source 1..75: mol_type = other DNA
aaaagatgaaaatgaattattaagcaacccatgcctaaatatcaaaataggaacggagattttatataaccattt

SEQ ID NO: 456419 - DNA, 75 bp, synthetic construct
  source 1..75: mol_type = other DNA
aaacttggttcagtcagggttccattaaaattcttagaaaatcagccgtttgacctgaaatttgaaggcgaaact

SEQ ID NO: 456420 - DNA, 75 bp, synthetic construct
  source 1..75: mol_type = other DNA
atgtatcgtgtattacgcttgtctgttcttatcataagtttgtcagggggaaatgttgttgctcatgctgataac

SEQ ID NO: 456421 - DNA, 75 bp, synthetic construct
  source 1..75: mol_type = other DNA
catcggccatgccggtttttagaacgatatagatgttttgaagcattaaaaagtgattcagattacagtatattt

SEQ ID NO: 456422 - DNA, 75 bp, synthetic construct
  source 1..75: mol_type = other DNA
aaggttttggtatcccaataatcgaagctatgcgggcagggtgtccggtaattgctattaataattcatctatac

SEQ ID NO: 456423 - DNA, 75 bp, synthetic construct
  source 1..75: mol_type = other DNA
agtcaatcatgacagtacttaatagttttgaaccactaacacaaagacaaactatcggtactggtgtaaaaagtt

SEQ ID NO: 456424 - DNA, 75 bp, synthetic construct
  source 1..75: mol_type = other DNA
catgcatgcaaaacataaacccgtccctcctgaagtggccgttttaagtaaaagaattgatgtttcacccgatgg

SEQ ID NO: 456425 - DNA, 75 bp, synthetic construct
  source 1..75: mol_type = other DNA
cccccggcagcctgccgggaacaaagacgcagatgaccattcgttcaaaaacctataagggcagcgggtttaatg

SEQ ID NO: 456426 - DNA, 75 bp, synthetic construct
  source 1..75: mol_type = other DNA
gcatcagaagggattacgactaactattcctgataattgcgagtaccgggatctaaaggagaggcaagtagagtg

SEQ ID NO: 456427 - DNA, 75 bp, synthetic construct
  source 1..75: mol_type = other DNA
ttgacggcaaactagaaaccccggtgatcgtaaaagccctcgcaagaagacacaaaagagggggcgtgaaccggg

SEQ ID NO: 456428 - DNA, 75 bp, synthetic construct
  source 1..75: mol_type = other DNA
tctcatcgtccatggaaacgacattcgtgctggatgcactggagcaggcgttatgggcccgtcgaccgtccggca

SEQ ID NO: 456429 - DNA, 75 bp, synthetic construct
  source 1..75: mol_type = other DNA
gggtggacaggtataacaatcgacgattgctggaaaggctgggccatattcctccggcagaagcagaaaaagctt

SEQ ID NO: 456430 - DNA, 75 bp, synthetic construct
  source 1..75: mol_type = other DNA
ggaagccagcaattgtgagattaatcagggcggcgtttttatgctggccgggaagccagtgatacgttgcttgct

SEQ ID NO: 456431 - DNA, 75 bp, synthetic construct
  source 1..75: mol_type = other DNA
gcggaaaaaatcattctcgatcaagagggcggcctgttggttaatgggacaacctcagcggtcgtggtagatgaa

SEQ ID NO: 456432 - DNA, 75 bp, synthetic construct
  source 1..75: mol_type = other DNA
aaaaaattattctcgatcaggctggtggtttattggtcaacgggacgacttcatctgcaatagtggatgatggcg

SEQ ID NO: 456433 - DNA, 75 bp, synthetic construct
  source 1..75: mol_type = other DNA
tgcccgctccgtgatcgatcatattgattttaactgcgatcagtctaaaatagctgagacattatttttcaacct

SEQ ID NO: 456434 - DNA, 75 bp, synthetic construct
  source 1..75: mol_type = other DNA
cgtgaagctaacaagaatatggcgcttctattaaataatcatcagttgaactggaaggacgcaattgattataac

SEQ ID NO: 456435 - DNA, 75 bp, synthetic construct
  source 1..75: mol_type = other DNA
tttaatacaaaggatatttaataatgttgagtcactatttaataaagtacctgtcagcattttagttaatgatat

SEQ ID NO: 456436 - DNA, 75 bp, synthetic construct
  source 1..75: mol_type = other DNA
ctgatttttgatcacattagacaaactcgcgctgtctatttgtttgatgaattcgacgctattggcacacaacgt

SEQ ID NO: 456437 - DNA, 75 bp, synthetic construct
  source 1..75: mol_type = other DNA
tggtggtaacttgtttgtggctaacatgcccggcatggggcactgtatgcgaaaattacgatggtgcgccgactg

SEQ ID NO: 456438 - DNA, 75 bp, synthetic construct
  source 1..75: mol_type = other DNA
tggaagatgacaaactggtgctcgccatgcatgcaaaacataaacccgtccctcctgaagtggccgttttaagta

SEQ ID NO: 456439 - DNA, 75 bp, synthetic construct
  source 1..75: mol_type = other DNA
tatatggaagggtcgcaatgagcaatggacacaaattacgcatggtggaatgaccatgcctttcctcgacatggg

SEQ ID NO: 456440 - DNA, 75 bp, synthetic construct
  source 1..75: mol_type = other DNA
gatgttgattttggggatattaaaatatcagagattagaaacaatatcgttaatcaccaacaaattaatttgatt

SEQ ID NO: 456441 - DNA, 75 bp, synthetic construct
  source 1..75: mol_type = other DNA
tgcaatggataagcgtaggggagcagaacatatcaggcagtgctttggtaaacatatttatccggtgattggtca

SEQ ID NO: 456442 - DNA, 75 bp, synthetic construct
  source 1..75: mol_type = other DNA
ccagtacagccgctttgcctcgtgggatggcccggaccgcccgctgaatatggcaggctttcgccgggtggaaaa

SEQ ID NO: 456443 - DNA, 75 bp, synthetic construct
  source 1..75: mol_type = other DNA
gtatgcatcgttaacggggttcaccgctgataaccccgaatatcatttatccaatggcatgaaatcgaaatcagt

SEQ ID NO: 456444 - DNA, 75 bp, synthetic construct
  source 1..75: mol_type = other DNA
acggtgatgtttatttatcagcacaaacagcagcgcctgccacaactaacggtatctacaatacgctgacaacca

SEQ ID NO: 456445 - DNA, 75 bp, synthetic construct
  source 1..75: mol_type = other DNA
cacagattggcatgctgatgaaaaaccgcttgtccctttttgatatagatcatcttgattgggaggcaatcacga

SEQ ID NO: 456446 - DNA, 75 bp, synthetic construct
  source 1..75: mol_type = other DNA
gagatctatagagttttcctcttttgtagagcaggctaaccgtaaaggactaaaagaggatagcgcttatagatt

SEQ ID NO: 456447 - DNA, 75 bp, synthetic construct
  source 1..75: mol_type = other DNA
ttcctttgaggcagattttgcaacggaaggatttttgcatcatcgtattttcgtgaagtttagatccgataagtc

SEQ ID NO: 456448 - DNA, 75 bp, synthetic construct
  source 1..75: mol_type = other DNA
cttgacgaaagcatggcttatgttcactcagaacttgaaagagctatcataactcttattatatctaaattgaag

SEQ ID NO: 456449 - DNA, 75 bp, synthetic construct
  source 1..75: mol_type = other DNA
tggttgaaagtggcaaccggtgggatcgccaaatgcacacagtacggtaacaatggcacgctatcggtcagcgat

SEQ ID NO: 456450 - DNA, 75 bp, synthetic construct
  source 1..75: mol_type = other DNA
ttgcttattgccagatgggaactgacagcagaacaggctgttacacagcagttaaaaaatgaggtgtcaaaagga

SEQ ID NO: 456451 - DNA, 75 bp, synthetic construct
  source 1..75: mol_type = other DNA
ctgtatctgctcgtcaatccgggcggttcgcgcatctggtatctcaaatatcgtttcaacggaaaagaatccaga

SEQ ID NO: 456452 - DNA, 75 bp, synthetic construct
  source 1..75: mol_type = other DNA
aattacgccagaacagctggaaaccatcgccagctatctgtacatcgaaatgctcaaagccgggtacacctcggt

SEQ ID NO: 456453 - DNA, 75 bp, synthetic construct
  source 1..75: mol_type = other DNA
tcacgtcatcaggtacgtacaccccgacgccaggaacaaaacggattagggtcacaataacgggcggcggtggcg

SEQ ID NO: 456454 - DNA, 75 bp, synthetic construct
  source 1..75: mol_type = other DNA
aatggtttatggcaaagatatggtgacaaagtccggggatatattgattgatatacaattaaataaggatggcag

SEQ ID NO: 456455 - DNA, 75 bp, synthetic construct
  source 1..75: mol_type = other DNA
attgctggggcgtgaagagccatatccagacacattcactcccgcagattgcgcgactgaacggcttaccagagc

SEQ ID NO: 456456 - DNA, 75 bp, synthetic construct
  source 1..75: mol_type = other DNA
aatgaaatttatgagatggtgctggcctggtatattacgctaccgacactggtggcactaatttccccggcgaaa

SEQ ID NO: 456457 - DNA, 75 bp, synthetic construct
  source 1..75: mol_type = other DNA
aaaaacactgtttatggtgcattagcgatgaactggccagaagataaaatcactatctggttattagatgacgga

SEQ ID NO: 456458 - DNA, 75 bp, synthetic construct
  source 1..75: mol_type = other DNA
caatctcgatcctgatgcgttagtacaacatttgccgattgcacaacgccaacaggtcgctatttgccgggctct

SEQ ID NO: 456459 - DNA, 75 bp, synthetic construct
  source 1..75: mol_type = other DNA
ccctgcttgctgaaggatgggctcacaatgtgcgtctggatgtcgatgctgccggcatgttaaccgccatcacgc

SEQ ID NO: 456460 - DNA, 75 bp, synthetic construct
  source 1..75: mol_type = other DNA
aaacttaatagcagataaattcaatgtatctgaagtaacaattagaaaacgactggaaagtgaaaatacttcctt

SEQ ID NO: 456461 - DNA, 75 bp, synthetic construct
  source 1..75: mol_type = other DNA
cgtctggggcgggctaatgaccgccggggctgttgccaataaacatgaagctgcagtgttgaacggcggcgtacg

SEQ ID NO: 456462 - DNA, 75 bp, synthetic construct
  source 1..75: mol_type = other DNA
gtggtttacataagtctgattggtggttctggatataatgttaactcccctatgcaggctggtatatctgaactt

SEQ ID NO: 456463 - DNA, 75 bp, synthetic construct
  source 1..75: mol_type = other DNA
tgtcgatgaaggaaaaacaggccgctggttccggcaggagctggagccggagctgcagcgcaagggatggtgggg

SEQ ID NO: 456464 - DNA, 75 bp, synthetic construct
  source 1..75: mol_type = other DNA
tcgagtaatagcgaataactgccaaggatttatcgggttctattcaactcttgctagtgcaggtctgtctggaat

SEQ ID NO: 456465 - DNA, 75 bp, synthetic construct
  source 1..75: mol_type = other DNA
cagtgttgttgtggacgaactatcatggttatcttcaggcgtggaaaagtcgctctattaaacgtgattacgatc

SEQ ID NO: 456466 - DNA, 75 bp, synthetic construct
  source 1..75: mol_type = other DNA
ggctatctaagcataagtcttggaaagatttactatactcataatctagtacattacttaattcaattttataac

SEQ ID NO: 456467 - DNA, 75 bp, synthetic construct
  source 1..75: mol_type = other DNA
gtgagcaatggaaacaactcccttttccgacaaataaacttctgtacacagtttgctgtgccggtgacggatttg

SEQ ID NO: 456468 - DNA, 75 bp, synthetic construct
  source 1..75: mol_type = other DNA
cgggggcagcataccgtcccgaccttgcccgctatcaggggacgcttcaaccgctggcacagcaggaactgagag

SEQ ID NO: 456469 - DNA, 75 bp, synthetic construct
  source 1..75: mol_type = other DNA
ctgattaaccagaaacgcattgcaccgctgaatcttctgagtgttgacccgaacaatcagagccagattattgcg

SEQ ID NO: 456470 - DNA, 75 bp, synthetic construct
  source 1..75: mol_type = other DNA
gatttatcagccggggagcttcacgccactcatcagggttgaaaccgccaccggtgagctggcgaaaacgcagcg

SEQ ID NO: 456471 - DNA, 75 bp, synthetic construct
  source 1..75: mol_type = other DNA
gcgacggacatcggttggatttactaattttgcatgggtgaatacatccggtgatacctatgatgtttatgttga

SEQ ID NO: 456472 - DNA, 75 bp, synthetic construct
  source 1..75: mol_type = other DNA
gtctgataactggcattgatatagatgataaggaatatttattaccggcaaaggatgaaaagttgcctgagatta

SEQ ID NO: 456473 - DNA, 75 bp, synthetic construct
  source 1..75: mol_type = other DNA
ttattcgtcagcatgccgcgaatgcggcattttactggcttcagaaagaagaaagcagattttcgccattagtta

SEQ ID NO: 456474 - DNA, 75 bp, synthetic construct
  source 1..75: mol_type = other DNA
ccataaatattacggggcgtgttaatccctcggattacggtaactttgattcccgctatgtgagagatgtcagac

SEQ ID NO: 456475 - DNA, 75 bp, synthetic construct
  source 1..75: mol_type = other DNA
tcatcaaagtgaaattcgtaacaattggcttcgcgagtttatgattcgtggttatcgctatgtatcagtaatacc

SEQ ID NO: 456476 - DNA, 75 bp, synthetic construct
  source 1..75: mol_type = other DNA
aaaaattggtcaatgtggaatgatattgctatattatttaaaacaattggcgttgtacttaagaaagatggtgct

SEQ ID NO: 456477 - DNA, 75 bp, synthetic construct
  source 1..75: mol_type = other DNA
atgaggtaatgatcttccgcgttcaacaaaatctggctaaagtttcttcaagggtactaaagcggatttttgata

SEQ ID NO: 456478 - DNA, 75 bp, synthetic construct
  source 1..75: mol_type = other DNA
ggcctatggcaggtaagcgggcgtagtgatgtcgattatgagactcgcgtttatcttgatgcatggtatgtaaaa

SEQ ID NO: 456479 - DNA, 75 bp, synthetic construct
  source 1..75: mol_type = other DNA
tgataggttgttagaaaatgatccggaagcaaaaaaagagtgggatgctacttttaaattaaaaaatgatcctcg

SEQ ID NO: 456480 - DNA, 75 bp, synthetic construct
  source 1..75: mol_type = other DNA
gagtggggtggggtacattgtttgttggcttttttgtgcgtttgttggttttcaatgcgtcttagacattatttt

SEQ ID NO: 456481 - DNA, 75 bp, synthetic construct
  source 1..75: mol_type = other DNA
ttttcgcggcctgggattttgcttcaaattatcgtgatggggaatcatatgttttactcgctgaaaaaatgacaa

SEQ ID NO: 456482 - DNA, 75 bp, synthetic construct
  source 1..75: mol_type = other DNA
atgacgctgatttatcactacaattcctcttatcttcgcttcgcatttaccctgacacaggacagtccacgcgtt

SEQ ID NO: 456483 - DNA, 75 bp, synthetic construct
  source 1..75: mol_type = other DNA
tgcctcaattacttaatgttttgaaaggagagatgagtttagttgggccgcgaccaataattaatgctgaattag

SEQ ID NO: 456484 - DNA, 75 bp, synthetic construct
  source 1..75: mol_type = other DNA
gactgatgttcttgccaatgatcctgaagctcgtgctgaatgggatttaaactttaagttaaggaatgacccgcg

SEQ ID NO: 456485 - DNA, 75 bp, synthetic construct
  source 1..75: mol_type = other DNA
ataagtagaaaagttaaagaagatggtggtccagcaatatatggacatgaaaggattgggaaaaatggagttgcg

SEQ ID NO: 456486 - DNA, 75 bp, synthetic construct
  source 1..75: mol_type = other DNA
gaaaatgtgttttctgaaactaaaaaattatcgaataaaaataatgccgatcagttttttgaatgcgctaaatga

SEQ ID NO: 456487 - DNA, 75 bp, synthetic construct
  source 1..75: mol_type = other DNA
attaaatgatcctgtatcaaaaatggaatgggacgccacgtttaaattgaaaaatgatccaagggttactaaaat

SEQ ID NO: 456488 - DNA, 75 bp, synthetic construct
  source 1..75: mol_type = other DNA
ttcgaccgtcggaacgtgcaggcgtccgacttttccaccagttatatcgtggtaaacggctcactaccgcaatca

SEQ ID NO: 456489 - DNA, 75 bp, synthetic construct
  source 1..75: mol_type = other DNA
aacggccagatgaatctgagggaaggtgcgaacaagttcctgatatgagatcatcatattcatccggagcgcatc

SEQ ID NO: 456490 - DNA, 75 bp, synthetic construct
  source 1..75: mol_type = other DNA
gcagcacgtcatactttatctctgtttttaaggcgttttacggcctgacaccgttgaattatctcgccaaacagc

SEQ ID NO: 456491 - DNA, 75 bp, synthetic construct
  source 1..75: mol_type = other DNA
tgaagcgaaactggttagtgactgccaccgtgcgtggtgatgggcgtacagcgctgcacgaactttcagtacgtt

SEQ ID NO: 456492 - DNA, 75 bp, synthetic construct
  source 1..75: mol_type = other DNA
gaaattaatcagttacgtattagtcagggctttacaccttttgcccccgacgaaggacactatattggtcctaaa

SEQ ID NO: 456493 - DNA, 75 bp, synthetic construct
  source 1..75: mol_type = other DNA
ggcaaaccttgccgcaggagcgcagataaaaaatatgtgctacgtgaatgaccacgcaacagcaaactcagtgct

SEQ ID NO: 456494 - DNA, 75 bp, synthetic construct
  source 1..75: mol_type = other DNA
ataagtcgaaaagtaaagaaggatggtgggcccgctatttatgcgcatgagcgtataggtaaaggcggacattca

SEQ ID NO: 456495 - DNA, 75 bp, synthetic construct
  source 1..75: mol_type = other DNA
ggactttggcaggttagcggaagaagtgatgttgattatggtacaagagtttatttagatgcttggtatgttaaa

SEQ ID NO: 456496 - DNA, 75 bp, synthetic construct
  source 1..75: mol_type = other DNA
ggaatgacaggcctttggcaagttagtgggcgtagtgatgtagattacgatactcgggtctatttagatgcatgg

SEQ ID NO: 456497 - DNA, 75 bp, synthetic construct
  source 1..75: mol_type = other DNA
atgtccaatgtgtggttcaatgcatagcgggactttggatcatgttttacccaaggaaaactatccagaattttc

SEQ ID NO: 456498 - DNA, 75 bp, synthetic construct
  source 1..75: mol_type = other DNA
taatatatctgtttttactctctttggtggcgattgtcgttgcaagtttagttcctgtatatgccattatcaggt

SEQ ID NO: 456499 - DNA, 75 bp, synthetic construct
  source 1..75: mol_type = other DNA
cgctggtggtgccggaagattacgcgtatcagctgtatgtctgcgatgaatccggaatgcccgcactgcgccgcc

SEQ ID NO: 456500 - DNA, 75 bp, synthetic construct
  source 1..75: mol_type = other DNA
tatttttggtgtaatcgaaattgcagtattatcatttacaaattgggaattgtctcgttatttatggattcttac

SEQ ID NO: 456501 - DNA, 75 bp, synthetic construct
  source 1..75: mol_type = other DNA
ctgagcctgaatcacagagcgattctcttgtacgtcagccgcatacactgggccgctacggtacagcctgtaccc

SEQ ID NO: 456502 - DNA, 75 bp, synthetic construct
  source 1..75: mol_type = other DNA
taacgccagtgccgaagcggcgctgacgatgctggcgcagttatccccggcacaatccggcgaagcgctgcacgg

SEQ ID NO: 456503 - DNA, 75 bp, synthetic construct
  source 1..75: mol_type = other DNA
gcggagtcgctctggatgtacattctgtttcttccaacagaaaattgaatgggcaagattaaaacagcatcatcc

SEQ ID NO: 456504 - DNA, 75 bp, synthetic construct
  source 1..75: mol_type = other DNA
aaggatccgtcagcgtcagtttcatgccagaaaagttacgacacgcgagttctctgttatcagcgaggcggtgtc

SEQ ID NO: 456505 - DNA, 75 bp, synthetic construct
  source 1..75: mol_type = other DNA
aggatgaaaccgcaagcgagcaatcagagaagtcagctcacacactcggaaaatatggcgcagcctccaggctct

SEQ ID NO: 456506 - DNA, 75 bp, synthetic construct
  source 1..75: mol_type = other DNA
atggctttacagtgtcctgagtgcggcgcaatttcacatgctcgttccagcttttatgaggccccatccataaag

SEQ ID NO: 456507 - DNA, 75 bp, synthetic construct
  source 1..75: mol_type = other DNA
tactataaagtcagaatttgaagaaaaaaatagtgaatattacacccggtttattaatgatgacactgtcttcat

SEQ ID NO: 456508 - DNA, 75 bp, synthetic construct
  source 1..75: mol_type = other DNA
gccagaataacgccccgtctcccgacaaaatgattcacggggacggacgcaccctggttatccgtctcgacgaac

SEQ ID NO: 456509 - DNA, 75 bp, synthetic construct
  source 1..75: mol_type = other DNA
aagaaacagggttaatttatcttgaaaatatacttcacggaactgaatcttatcttaacgcattagggataaacc

SEQ ID NO: 456510 - DNA, 75 bp, synthetic construct
  source 1..75: mol_type = other DNA
actattcacattgtgcagatgtttcacttgttatcacaggtattctataatctcaaaaagtttttaatgatggat

SEQ ID NO: 456511 - DNA, 75 bp, synthetic construct
  source 1..75: mol_type = other DNA
tttacgctggccgcgtcaccaaaacagatggtgtcagtaagaccgacagtaacgagccgatgaaccaaaaggcat

SEQ ID NO: 456512 - DNA, 75 bp, synthetic construct
  source 1..75: mol_type = other DNA
ggtggaccagacaatttgcacccaccgacgccaatgcgctctgctgaattgctcgtgcgccgcaagttagttgag

SEQ ID NO: 456513 - DNA, 75 bp, synthetic construct
  source 1..75: mol_type = other DNA
gttatagaagatagcattaataatgataatggaatacgtattctgagtggatttgttccttcaataaacgggtat

SEQ ID NO: 456514 - DNA, 75 bp, synthetic construct
  source 1..75: mol_type = other DNA
gctaattaccactaataggacaagaataatcagaaaagtatattttaatttaagcatgctacatgtttttattgc

SEQ ID NO: 456515 - DNA, 75 bp, synthetic construct
  source 1..75: mol_type = other DNA
ttcagattgcgctggactacgacaaaggcgtcgatattcacctgcatgaaaccactccggcaggcgtggcagcca

SEQ ID NO: 456516 - DNA, 75 bp, synthetic construct
  source 1..75: mol_type = other DNA
ggcctcaccacgccggatggcagggcatcggcgttttactataaccaccacagccagttaacgtcagccaccggg

SEQ ID NO: 456517 - DNA, 75 bp, synthetic construct
  source 1..75: mol_type = other DNA
tttccggggctggcggtgatagagcatgtgcatgatatagctgtgccggaagttaacaaattaaattttacatgc

SEQ ID NO: 456518 - DNA, 75 bp, synthetic construct
  source 1..75: mol_type = other DNA
gggatggtgatgcgtcatatcgattacatcaatattatacatatgtttactttaatatacccaagcaaattaaat

SEQ ID NO: 456519 - DNA, 75 bp, synthetic construct
  source 1..75: mol_type = other DNA
tttggatcattacaatgacacctcgggcaagccctacaacatcaattattcctttggcgaactgatcaataacgc

SEQ ID NO: 456520 - DNA, 75 bp, synthetic construct
  source 1..75: mol_type = other DNA
ggagcgggtaaacgggcgattcatgatgttgccgatctgacgcgaggatcgctgcgtatcgccgtcacccccacc

SEQ ID NO: 456521 - DNA, 75 bp, synthetic construct
  source 1..75: mol_type = other DNA
tcaaagaaatggagactatcatacgtatcagaggcattctgtatgtcagagatttcggtgcgaaagaaactggaa

SEQ ID NO: 456522 - DNA, 75 bp, synthetic construct
  source 1..75: mol_type = other DNA
atatctacaacctagcgtacattatatcaaaatctaaacaacttgagaaaatatattggtcgctatgtgtttccg

SEQ ID NO: 456523 - DNA, 75 bp, synthetic construct
  source 1..75: mol_type = other DNA
actgggatattcctgcaattcttcgtcttactaaagaacaaaaaaggctaaaattgtctgttcaagaagttgcag

SEQ ID NO: 456524 - DNA, 75 bp, synthetic construct
  source 1..75: mol_type = other DNA
gttgcggcggaaaaatagctggcagactgccgctgcgaaggcatttttgcacatggcgttggaggaatgtgcgga

SEQ ID NO: 456525 - DNA, 75 bp, synthetic construct
  source 1..75: mol_type = other DNA
gattcgccgcacttccctttccacattgttaccagcagcgattgccacacaacatgacgggcttaaagctatttc

SEQ ID NO: 456526 - DNA, 75 bp, synthetic construct
  source 1..75: mol_type = other DNA
tgtttccagttcgcaaatcatttaccgatatcgtttcatatgcaactgatgaattcggttgtgtgcaatctttta

SEQ ID NO: 456527 - DNA, 75 bp, synthetic construct
  source 1..75: mol_type = other DNA
ggcccagaagaaaaatatcttggaacgtggtcatgtccgtcacaatccactgcaaaaccagagtctggttaccct

SEQ ID NO: 456528 - DNA, 75 bp, synthetic construct
  source 1..75: mol_type = other DNA
gaagataatgctgtcggtgtgcttgaggtttttgctgccggcaattttgcaggtacgcaacgctttaccacgaga

SEQ ID NO: 456529 - DNA, 75 bp, synthetic construct
  source 1..75: mol_type = other DNA
aagacgtctatccggtacttggcaagcggtcgattgtcgatataaccgcccgtgacgtgctggcattgctacaga

SEQ ID NO: 456530 - DNA, 75 bp, synthetic construct
  source 1..75: mol_type = other DNA
cgggatgtgctgtctatcctgaagaagaaggagaagaagtcaccagagcaggcaaggaaaatcaggcagtggaca

SEQ ID NO: 456531 - DNA, 75 bp, synthetic construct
  source 1..75: mol_type = other DNA
aactcgacagggaacaaaaagcgatttaggttactattcagataaaggaattttaatttattatactatttccga

SEQ ID NO: 456532 - DNA, 75 bp, synthetic construct
  source 1..75: mol_type = other DNA
tggtaagcatgccttcgcaactcttcactatggcgcgttcttttaaagccgtagctaatggcaaaatttatatcg

SEQ ID NO: 456533 - DNA, 75 bp, synthetic construct
  source 1..75: mol_type = other DNA
aggtgcgcacgggcacaccatcacggtaaatgctacgggtaataccgaaaacaccgtcaaaaacatcgcatttaa

SEQ ID NO: 456534 - DNA, 75 bp, synthetic construct
  source 1..75: mol_type = other DNA
ccgctgccgtggccatcagatacaccacctgcaggctatgcaattatgcaggggcagacgtttgataaggcagca

SEQ ID NO: 456535 - DNA, 75 bp, synthetic construct
  source 1..75: mol_type = other DNA
aaagctctgaacagtccgtatggggttgaggtgctagtagacaggtatttgtttattaagacacctgtagttatg

SEQ ID NO: 456536 - DNA, 75 bp, synthetic construct
  source 1..75: mol_type = other DNA
gccggctccctgaaaaatgatgatgcggcagtattggtttttggagcaaatagcaacatggatttatattttaat

SEQ ID NO: 456537 - DNA, 75 bp, synthetic construct
  source 1..75: mol_type = other DNA
gtggagaacgaagacggctctcacgttcctgttccgcaaccaatcatcattaatgctgctggatatccggtatat

SEQ ID NO: 456538 - DNA, 75 bp, synthetic construct
  source 1..75: mol_type = other DNA
agcattctacagggcacttgagagagcgggcagcgtacagatcaggacggcaatacttttgctcatccttaccgc

SEQ ID NO: 456539 - DNA, 75 bp, synthetic construct
  source 1..75: mol_type = other DNA
ctggttaaccggaatccggttgcagatctggatacggcattgaaagccagacgcccaggccataacgcatggata

SEQ ID NO: 456540 - DNA, 75 bp, synthetic construct
  source 1..75: mol_type = other DNA
tgaagtcatgaaggcccgccgcccgcatgtggtcccgctatcacggcaggcggtcgagctattgcaggaccagtt

SEQ ID NO: 456541 - DNA, 75 bp, synthetic construct
  source 1..75: mol_type = other DNA
ttgagcaagacaccactgacagcaaaggccatagacgccgcacaaccgaaggataagccctacaaactcaccgat

SEQ ID NO: 456542 - DNA, 75 bp, synthetic construct
  source 1..75: mol_type = other DNA
gactggatcgagatacagcttgctcacgttccaaagggaatcagggcgatctacaaccaggcggcctatctgaag

SEQ ID NO: 456543 - DNA, 75 bp, synthetic construct
  source 1..75: mol_type = other DNA
cggcagaattgcgaaaaatgcggtgggaatgggtagatctgagcacggcaacaatcaccctacccgctgaagtca

SEQ ID NO: 456544 - DNA, 75 bp, synthetic construct
  source 1..75: mol_type = other DNA
taccccgtgctgggtaagcgctcgatcgtggatataacggcccgtgacgtgctggcattgcttcagaagaaagag

SEQ ID NO: 456545 - DNA, 75 bp, synthetic construct
  source 1..75: mol_type = other DNA
aagaaagagcggttgcaggctattggggtgtatccgctgattagcctcaaggaagcccgcaaacgcgccacagag

SEQ ID NO: 456546 - DNA, 75 bp, synthetic construct
  source 1..75: mol_type = other DNA
tgacagaattagcttggaaaatgcatacaaataatggtcagattctagaatctgagttgcaattatttttcaaag

SEQ ID NO: 456547 - DNA, 75 bp, synthetic construct
  source 1..75: mol_type = other DNA
cccgtaggatataaagaaaaacaacaaatagccgagttgctcgacttaagtgtcaagcaacaacgcataatggat

SEQ ID NO: 456548 - DNA, 75 bp, synthetic construct
  source 1..75: mol_type = other DNA
ttgagtaagacaccactcacagcaaaggccatagacgccgcacaaccacaggacaagccctacaaactcaccgat

SEQ ID NO: 456549 - DNA, 75 bp, synthetic construct
  source 1..75: mol_type = other DNA
aagtcgatagccacgggccacggctggagaaccaccttttcaacggcgcttaatgagtctggcagatactcacca

SEQ ID NO: 456550 - DNA, 75 bp, synthetic construct
  source 1..75: mol_type = other DNA
gtctttccgggccgattcatggacaagccactttcagccagtgccatccttaaagccctggagcgtatcgggtac

SEQ ID NO: 456551 - DNA, 75 bp, synthetic construct
  source 1..75: mol_type = other DNA
gcggtggcctttctggtgagctgtcaggcaatgctgctacagcaacaaagctgaaaacggcaaggacaattaacg

SEQ ID NO: 456552 - DNA, 75 bp, synthetic construct
  source 1..75: mol_type = other DNA
gtgggtattttcgtgggcatttatgtctttgccaaagtggttcgtctgatttcaggaaaaaataatgaaacgtaa

SEQ ID NO: 456553 - DNA, 75 bp, synthetic construct
  source 1..75: mol_type = other DNA
ccgcattggccgtatctctgttattcactgcaccggtttatgcagctgatgaaggttctggtgaaattcacttta

SEQ ID NO: 456554 - DNA, 75 bp, synthetic construct
  source 1..75: mol_type = other DNA
acctccagcgaacaaacgctgaatttctttgcctggatggaacaaattgatcaggctacacctgtaacgccaggc

SEQ ID NO: 456555 - DNA, 75 bp, synthetic construct
  source 1..75: mol_type = other DNA
ggaagtgcagataggatagtggatggattccgtagtgacatgaacattaaaaagttagttaagctgatgaaaaaa

SEQ ID NO: 456556 - DNA, 75 bp, synthetic construct
  source 1..75: mol_type = other DNA
ctctgttatcatcgacaagataaaacaacttgaccctaaagatatattttctcctatcgatactatgataatcag

SEQ ID NO: 456557 - DNA, 75 bp, synthetic construct
  source 1..75: mol_type = other DNA
tggaaagaaaaaatagcacatcaaacagttgagcaagttatagatttaataatcaccccaaaggctacaggtaat

SEQ ID NO: 456558 - DNA, 75 bp, synthetic construct
  source 1..75: mol_type = other DNA
tacatggctgaaagaagcatgggcccaacttaccggaccgcttgcagtactgaaacccgatggcaaccgttttta

SEQ ID NO: 456559 - DNA, 75 bp, synthetic construct
  source 1..75: mol_type = other DNA
gaagataatcagaacagacgctggcctcaaattcgtaatggcaacgtatcccatcgtttagcgaagttgctgatg

SEQ ID NO: 456560 - DNA, 75 bp, synthetic construct
  source 1..75: mol_type = other DNA
agctggccctgctcgcacagctcggcttgtctcgcgtgcgtgagttcgacgctgaccgccttgcggcggaactga

SEQ ID NO: 456561 - DNA, 75 bp, synthetic construct
  source 1..75: mol_type = other DNA
gatcaattctgagaccgctaaaaacaaagctgaccgatggcgctgaagtgacgctggatacgctatttaaagata

SEQ ID NO: 456562 - DNA, 75 bp, synthetic construct
  source 1..75: mol_type = other DNA
acgcttctgggacgtgctgtttaacgaccatgaagaagcgcagtcactgatgaataacacgcgaattaccggcgt

SEQ ID NO: 456563 - DNA, 75 bp, synthetic construct
  source 1..75: mol_type = other DNA
atgccggaaatctggaagctggatcgttcacaggaagactacgcagagggtctggcaaaagcacgcgactgggtc

SEQ ID NO: 456564 - DNA, 75 bp, synthetic construct
  source 1..75: mol_type = other DNA
atgtcagaagaaacctgacgatacttgatatgttcggtcccccaaaaacaaatgccgggatccgaacagtaacac

SEQ ID NO: 456565 - DNA, 75 bp, synthetic construct
  source 1..75: mol_type = other DNA
ccaggtatgagtcttaaagttgaaatacctaccaggaaggaatcaatcattaaatggatatttccttttttcaga

SEQ ID NO: 456566 - DNA, 75 bp, synthetic construct
  source 1..75: mol_type = other DNA
gcctgaagatatttatacaaactttggactcaaagttgaaaatgcctgtttcagggttggaattaaaattactga

SEQ ID NO: 456567 - DNA, 75 bp, synthetic construct
  source 1..75: mol_type = other DNA
acgttgaacaggcgctgaacgagacgccagagaagctgaatcgcgatcgtcgcctggtgctgctaagcgatccgg

SEQ ID NO: 456568 - DNA, 75 bp, synthetic construct
  source 1..75: mol_type = other DNA
tttactcagttaagcagtgcaacaaacagcaccagtgaaaagctggcggcaacgccaaaggcagtaaaagcagcc

SEQ ID NO: 456569 - DNA, 75 bp, synthetic construct
  source 1..75: mol_type = other DNA
tgcatgaattccgtaacggtcagttgcgcgccgtggctgctggcaccaggggaacctattccagtatcgcacgtg

SEQ ID NO: 456570 - DNA, 75 bp, synthetic construct
  source 1..75: mol_type = other DNA
ttttcgattttattgaatcgtacttgttcggtaaaaatcgcactatcattaacaagtcgaatataaatgataatc

SEQ ID NO: 456571 - DNA, 75 bp, synthetic construct
  source 1..75: mol_type = other DNA
aaaaacaatacgggtactctttatctgtccagttttaatcatgagcatgcacctgaatgccccatatatcgtcag

SEQ ID NO: 456572 - DNA, 75 bp, synthetic construct
  source 1..75: mol_type = other DNA
gatttggctatttgatatcgatatccttatcgattttctcagtgtgaaaattgaggcaaaacaggcactggcggc

SEQ ID NO: 456573 - DNA, 75 bp, synthetic construct
  source 1..75: mol_type = other DNA
gcttgccgtcatcaacaaacaaaaaacctgtggattatcgctgtatacacgggtattcgtcacggggagctggta

SEQ ID NO: 456574 - DNA, 75 bp, synthetic construct
  source 1..75: mol_type = other DNA
tctggcgttaagtctggagcggctcgatgcgctgctccacacctcagcacagcgaattggcctttctgccactgt

SEQ ID NO: 456575 - DNA, 75 bp, synthetic construct
  source 1..75: mol_type = other DNA
cgcacggttactgaatataaaaaatagtggtaatagcttagaaaataagatgttcctagatagtttacggaaaaa

SEQ ID NO: 456576 - DNA, 75 bp, synthetic construct
  source 1..75: mol_type = other DNA
atgccaatgaagcttgtaaagaagaatccccggagcaaagtgattcgggagcttagctgtgagcaagagatggca

SEQ ID NO: 456577 - DNA, 75 bp, synthetic construct
  source 1..75: mol_type = other DNA
gacggcagcaaagtagcccgcgcgcatgcgatcaccgctgtatgggaagcgggtaacgttttccttccccataaa

SEQ ID NO: 456578 - DNA, 75 bp, synthetic construct
  source 1..75: mol_type = other DNA
caaagacgaatggatcaagtattacctcccgaaagacttgccgaccaacttcgacatagtcatccacagctggga

SEQ ID NO: 456579 - DNA, 75 bp, synthetic construct
  source 1..75: mol_type = other DNA
aaaatatcctgaaatgcgcgtgggcgctttgtcgtactccgctgaccttgccggggacatgaacgccgatgttca

SEQ ID NO: 456580 - DNA, 75 bp, synthetic construct
  source 1..75: mol_type = other DNA
attatgggattatgttagattttgaatgggagtatttacccgagattgaaaacatcattactccaagtcggcttc

SEQ ID NO: 456581 - DNA, 75 bp, synthetic construct
  source 1..75: mol_type = other DNA
cttttgctttctttggatagtgatgctattgaaaacatcaataaaatagctaataaaacgatatttttatcttca

SEQ ID NO: 456582 - DNA, 75 bp, synthetic construct
  source 1..75: mol_type = other DNA
gaaatttacccgccatttataatggatgttttccttttagatgttctaacagagtttttaaatacgccgctatat

SEQ ID NO: 456583 - DNA, 75 bp, synthetic construct
  source 1..75: mol_type = other DNA
gccacgtacttcgttaaggcatctggtgactcgatgattgatgccgggatcggcgaaggcgatttactggtagtg

SEQ ID NO: 456584 - DNA, 75 bp, synthetic construct
  source 1..75: mol_type = other DNA
cggggaatttaccgttaagcgcctacagttatggccaactgtccagcttaaccctgaaaaccgcgcctggtcgcc

SEQ ID NO: 456585 - DNA, 75 bp, synthetic construct
  source 1..75: mol_type = other DNA
cgagttcacagttaaacgtctgcagttacatccaatacttatgcttgttcctgaaaatagctcttatgcacccat

SEQ ID NO: 456586 - DNA, 75 bp, synthetic construct
  source 1..75: mol_type = other DNA
accggcaagacattgctggccaaggctgttgccgggtggccgaatcgacccaggcgcgcatcgatcaggctatcc

SEQ ID NO: 456587 - DNA, 75 bp, synthetic construct
  source 1..75: mol_type = other DNA
aatgcctgctatctgaatatgtaccggtaactccttatgcaccagacatgagcgcgctacgcgattctgaagctt

SEQ ID NO: 456588 - DNA, 75 bp, synthetic construct
  source 1..75: mol_type = other DNA
ccctgatctccgtaaataataacctgatatcgcatattgactcatttccgccaaaggctaagaaaatttttatta

SEQ ID NO: 456589 - DNA, 75 bp, synthetic construct
  source 1..75: mol_type = other DNA
ttcgaggcttcggctttccggcgctggccatgccacgctggccgtcggactggccgggcctgctgaagccggcgc

SEQ ID NO: 456590 - DNA, 75 bp, synthetic construct
  source 1..75: mol_type = other DNA
taagttattgcttggtgtaacagataaaccaagtgatacaagtagagtaaaagagcttgatgatatagatgcaca

SEQ ID NO: 456591 - DNA, 75 bp, synthetic construct
  source 1..75: mol_type = other DNA
gagtgggctgtgggtgatttcaaccggcagaaggagacagtcctttgcgacaagttagcagcaggctttaagggg

SEQ ID NO: 456592 - DNA, 75 bp, synthetic construct
  source 1..75: mol_type = other DNA
attaagtgaaaatgaagttcttggaatatcaaaaagcatctcaaaatggacagcgaataatttttcagaggatcg

SEQ ID NO: 456593 - DNA, 75 bp, synthetic construct
  source 1..75: mol_type = other DNA
gggccgccggacgggaaaacgggtgtggcggcgggagcgtgacctgacggggtggatgtcgctgtcgcgtaaacc

SEQ ID NO: 456594 - DNA, 75 bp, synthetic construct
  source 1..75: mol_type = other DNA
gtgttgcaggaggacacgggtgtgacgctaccggcggagctggcggtgatgctgggaaggctggagcgggaactg

SEQ ID NO: 456595 - DNA, 75 bp, synthetic construct
  source 1..75: mol_type = other DNA
tggtaaaatattcaatcttcaatttttcccaacagctcaaacaagagcagatgaaggtttttttgagcctgacat

SEQ ID NO: 456596 - DNA, 75 bp, synthetic construct
  source 1..75: mol_type = other DNA
ttgcattctttatatcatgcgcgttgacttggggtttaaggttatatgccatcaagaataatgtaattgatcaac

SEQ ID NO: 456597 - DNA, 75 bp, synthetic construct
  source 1..75: mol_type = other DNA
cggtgaacaaatgccagaaaagagggttcctgatgaaaaaattaaagaagaacagaaaaatctggaacatcaggt

SEQ ID NO: 456598 - DNA, 75 bp, synthetic construct
  source 1..75: mol_type = other DNA
ttagagattgtctcggcgctggctgaaactgattcacgaattagagtcattaacaacacgacaaatcttggtggg

SEQ ID NO: 456599 - DNA, 75 bp, synthetic construct
  source 1..75: mol_type = other DNA
gtaaatcttttattggctcagtgaatgaatctaaaagcgcattcgctcacaattatgagcttgtttggcaagacg

SEQ ID NO: 456600 - DNA, 75 bp, synthetic construct
  source 1..75: mol_type = other DNA
ctggcgctcatcagcgaagacggcaatacggcgtggcgcggggagtatgatgaatggggcaaccagcttaatgaa

SEQ ID NO: 456601 - DNA, 75 bp, synthetic construct
  source 1..75: mol_type = other DNA
ttggaatgatcctcggtagtatctatcttgtatggatgttgaatttatataactttatggatggtattaatggtc

SEQ ID NO: 456602 - DNA, 75 bp, synthetic construct
  source 1..75: mol_type = other DNA
acatacttcgtgaaatcatctggtgattctatgactggagcggggatcggtaatggggatttgctggtcgtcgac

SEQ ID NO: 456603 - DNA, 75 bp, synthetic construct
  source 1..75: mol_type = other DNA
gaataactggtggaatcaggctaaacgcgcagccgagcaaaaagttggcgttctgaaccgccccgggaatcctgg

SEQ ID NO: 456604 - DNA, 75 bp, synthetic construct
  source 1..75: mol_type = other DNA
acgccggagaagatatcgaacgccttaccttgttgattgataattttgatggccttccatctcctgctttcgaac

SEQ ID NO: 456605 - DNA, 75 bp, synthetic construct
  source 1..75: mol_type = other DNA
cgattcgccgttaccttaagagatttagcggttggctatgaccacgaagctgcacaggttatcagcaatctaaat

SEQ ID NO: 456606 - DNA, 75 bp, synthetic construct
  source 1..75: mol_type = other DNA
tcaacactataaacaaaaccattaaggataattttgatgatatttttcggcaacagtcagaatatatgagtaatt

SEQ ID NO: 456607 - DNA, 75 bp, synthetic construct
  source 1..75: mol_type = other DNA
acactgggcaactcttcgtgttagatggtataaaagcagataatccaataaaagcaaagcaagggagttcagatg

SEQ ID NO: 456608 - DNA, 75 bp, synthetic construct
  source 1..75: mol_type = other DNA
acccaatggggttagatgcgattgagaatatgacatcaggtggactaatttatgccgtatctggtgtacctggat

SEQ ID NO: 456609 - DNA, 75 bp, synthetic construct
  source 1..75: mol_type = other DNA
ttataaccaggcggcctacctgaagcaacgacgggccatgatgcaggattatagcgactgtattgattcaatact

SEQ ID NO: 456610 - DNA, 75 bp, synthetic construct
  source 1..75: mol_type = other DNA
cgtgacgtgctggcattgcttcagaagaaagagcgcaccgcgccggaggcggcccgcaagttacgtcagcgtatc

SEQ ID NO: 456611 - DNA, 75 bp, synthetic construct
  source 1..75: mol_type = other DNA
aaacaggtcagatcggcactggagaaagacgtttatccggtacttggcaagcgttcaatcatcgatataacggcc

SEQ ID NO: 456612 - DNA, 75 bp, synthetic construct
  source 1..75: mol_type = other DNA
ccagcagaaaaaatattaggcgcacccgagtggaaagactacaaccccaaatactctggagccacatataagtat

SEQ ID NO: 456613 - DNA, 75 bp, synthetic construct
  source 1..75: mol_type = other DNA
attgggacagataaagttaattttggggttataaaattaaaaaatacatttgttagtgacagaacttataatatg

SEQ ID NO: 456614 - DNA, 75 bp, synthetic construct
  source 1..75: mol_type = other DNA
gagcggttggtcagagtcctatacaaagcaggtcagatcggcactggagaaagatatttaccccgtgctgggtaa

SEQ ID NO: 456615 - DNA, 75 bp, synthetic construct
  source 1..75: mol_type = other DNA
ttgtatcaccaaagtttgttccacgaaaaaaaaacggtcttgcgccaattaaactttgggatgagggtgaaaatg

SEQ ID NO: 456616 - DNA, 75 bp, synthetic construct
  source 1..75: mol_type = other DNA
actgccggaagaaatgagccgctattttgttcgcaatgaagatgcatttagtaacgcgccgtcaatgccaactcc

SEQ ID NO: 456617 - DNA, 75 bp, synthetic construct
  source 1..75: mol_type = other DNA
cgccgtcaatgccgatccagcagattgaccaatcaaccgctgataaacaggcacaggaagaagcagaccgggccg

SEQ ID NO: 456618 - DNA, 75 bp, synthetic construct
  source 1..75: mol_type = other DNA
caagcgcaacggcgagccgctgaccacccggacccagcgcacggcggtgcagcccatccaggtgtggttccgctg

SEQ ID NO: 456619 - DNA, 75 bp, synthetic construct
  source 1..75: mol_type = other DNA
gtgccgatgaacctgaacagcacctcggggcagcagatccgtcagggtattattgtgaataactggggccgtccg

SEQ ID NO: 456620 - DNA, 75 bp, synthetic construct
  source 1..75: mol_type = other DNA
acgaggagacaaagtgattattgtctgccgtctttccggttcccgctggctgggcgaactgaatccctggccgga

SEQ ID NO: 456621 - DNA, 75 bp, synthetic construct
  source 1..75: mol_type = other DNA
gttactataaaaaatcgctcatatcccaggaaggaagcataaaaaaaggtgcgccaggagacgcaccagttgttg

SEQ ID NO: 456622 - DNA, 75 bp, synthetic construct
  source 1..75: mol_type = other DNA
ctcatactgactggcacgcagagcgtcaggcgggcgacggtgacgccatcagccgctggacgccatatgacaagc

SEQ ID NO: 456623 - DNA, 75 bp, synthetic construct
  source 1..75: mol_type = other DNA
attctacacaaatctttaatggaaaggcctacttgtcaggaagtttgattagaagtgaacttatgaattttaata

SEQ ID NO: 456624 - DNA, 75 bp, synthetic construct
  source 1..75: mol_type = other DNA
gacgcaagagatagttattcacaatacgctaacattcaaccacgcttaaatataggcccatggagaataagaact

SEQ ID NO: 456625 - DNA, 75 bp, synthetic construct
  source 1..75: mol_type = other DNA
gggcaaaaacagtttgattgcggtaaccctgttatcgataaatttgtacgcgctacgcgcatcgctaaagaaaag

SEQ ID NO: 456626 - DNA, 75 bp, synthetic construct
  source 1..75: mol_type = other DNA
ccgctacctgctggcgatccagaacgcgcctgtacctgggaaatcggcactgaaagccgtgcagttacggcttga

SEQ ID NO: 456627 - DNA, 75 bp, synthetic construct
  source 1..75: mol_type = other DNA
gaaccagactaccagttactcacccgccttgggcatgagttcgccccggaaaacagtaccctgacagtccagaaa

SEQ ID NO: 456628 - DNA, 75 bp, synthetic construct
  source 1..75: mol_type = other DNA
tgtaactgttgacaacagttttcgccctacgttgacgtactttaactctgactggaacgcaggtttttattcaaa

SEQ ID NO: 456629 - DNA, 75 bp, synthetic construct
  source 1..75: mol_type = other DNA
ttgcatctatgttcgttttttctattgctacaaatgcctatgcatctacacaatcaaataaaaaagatctgtgtg

SEQ ID NO: 456630 - DNA, 75 bp, synthetic construct
  source 1..75: mol_type = other DNA
cagcgaaacgtcatcaatgtcgatctttctaatgccagcacaacacagccttatgatttcgatttaagtgcacgg

SEQ ID NO: 456631 - DNA, 75 bp, synthetic construct
  source 1..75: mol_type = other DNA
aattaacatggttaacatttatgccactattgtttgtaaattcatatttcgtaatgcttctgaatttttcgtgtg

SEQ ID NO: 456632 - DNA, 75 bp, synthetic construct
  source 1..75: mol_type = other DNA
acccgcgatcaggtgattgtgactcctgctccgggtcgttctgcccggctccccttctggcgtggtgaaggtaac

SEQ ID NO: 456633 - DNA, 75 bp, synthetic construct
  source 1..75: mol_type = other DNA
tgatttttataataaagatgtattatgtcaagtaataaaagtaatgaaagaaaataaatatgatgttatttatgg

SEQ ID NO: 456634 - DNA, 75 bp, synthetic construct
  source 1..75: mol_type = other DNA
cttcaaacctaataattcaacagttcgagttgaagtgattgatcaatccgttttagaacctttttggagatttta

SEQ ID NO: 456635 - DNA, 75 bp, synthetic construct
  source 1..75: mol_type = other DNA
gacgtgtcccgtgccatctacccggacaccacgcaactggagctgcgccgggagcttgattatctggcagatcgc

SEQ ID NO: 456636 - DNA, 75 bp, synthetic construct
  source 1..75: mol_type = other DNA
gcaaaatggtggaactggagaggagaccttccggtgactggtttgccgatctgagtcgccttggtgtggatattg

SEQ ID NO: 456637 - DNA, 75 bp, synthetic construct
  source 1..75: mol_type = other DNA
ttattctcgatgtaccggatcttgacggtgttcaggggatctacgaagcgattattagcgtgctggaaacgcatc

SEQ ID NO: 456638 - DNA, 75 bp, synthetic construct
  source 1..75: mol_type = other DNA
agtcccttccagcaaaaactcgccgcgctgtttgccgatgccaaagcgcagggcatcaaaaatccggtgatggtc

SEQ ID NO: 456639 - DNA, 75 bp, synthetic construct
  source 1..75: mol_type = other DNA
ctttactgcttaggaaattgttactctgtactttatgaaacacgtaaaactgagtggtattcagatgatttgatg

SEQ ID NO: 456640 - DNA, 75 bp, synthetic construct
  source 1..75: mol_type = other DNA
aggtggctagtgtgaatctggttctcgatgaggacaagattgtcgagcagttaattaacctactcggcatcaaca

SEQ ID NO: 456641 - DNA, 75 bp, synthetic construct
  source 1..75: mol_type = other DNA
cgactggcgggttgaattaatgctcggcgatatcagtgatgaagacaaagagaggttgtctgagtggatggcgta

SEQ ID NO: 456642 - DNA, 75 bp, synthetic construct
  source 1..75: mol_type = other DNA
cggtgttacagatgaagcactggctaagctcagtctgacacgacgagtaggcatgtcagttaatagttttcaagt

SEQ ID NO: 456643 - DNA, 75 bp, synthetic construct
  source 1..75: mol_type = other DNA
cgaatattaaaatctctgtacggcctgtagacaataaacgaatgtatcagcagttatctcagggagaagttgatc

SEQ ID NO: 456644 - DNA, 75 bp, synthetic construct
  source 1..75: mol_type = other DNA
atgcaggcggatgcgttcagcggttacgattggctgttctgtgccggacgtgaaggaggtgcactgacagaagtt

SEQ ID NO: 456645 - DNA, 75 bp, synthetic construct
  source 1..75: mol_type = other DNA
gtagcaataaataatattggaaaaagcgcaaaaggctatattttagttggtattgccgaaaataaattaaccgca

SEQ ID NO: 456646 - DNA, 75 bp, synthetic construct
  source 1..75: mol_type = other DNA
gggcacgttgaatggacaaatagattaattgctaaaaagcaaggtggctactttatcaatggagagggttactat

SEQ ID NO: 456647 - DNA, 75 bp, synthetic construct
  source 1..75: mol_type = other DNA
acaacgtcttaaaattcgcttattcaatcggacaacccgaagcgtatcgttaacggaagcgggttctaatctcta

SEQ ID NO: 456648 - DNA, 75 bp, synthetic construct
  source 1..75: mol_type = other DNA
ccgcagccatctggcgcaatggcagatgaacaggcaacgactgaagcagtggaaccggatacaactgaacataat

SEQ ID NO: 456649 - DNA, 75 bp, synthetic construct
  source 1..75: mol_type = other DNA
gaagcaccaattgggatcgaggtcatccccgcgcacgtcactgaatatctgaacaaggtactgactgaaaccgat

SEQ ID NO: 456650 - DNA, 75 bp, synthetic construct
  source 1..75: mol_type = other DNA
caaactgctatgcctggcagctggcgaaggcgaacgcccttgctgaacgcgaagggctgatgccctttgtttccg

SEQ ID NO: 456651 - DNA, 75 bp, synthetic construct
  source 1..75: mol_type = other DNA
ccctgaacttcaggcgttctatggtgcgctggccggacaaaaggctaaacgtggagtatttattactacttccgg

SEQ ID NO: 456652 - DNA, 75 bp, synthetic construct
  source 1..75: mol_type = other DNA
gaactggaggccgttttgatgggtgctggtatcgggtatctgctctatgaacagatcaaggagtaccttgatact

SEQ ID NO: 456653 - DNA, 75 bp, synthetic construct
  source 1..75: mol_type = other DNA
tacaccgccagcgagacgctgctgctggacgtatcccgcgccatctacccggacaccacgcaactggagctgcgc

SEQ ID NO: 456654 - DNA, 75 bp, synthetic construct
  source 1..75: mol_type = other DNA
gatttggcaatctactttgatgacgcgccgtcagcgcaattgactcatcactttctgatggatgaagaaatcctg

SEQ ID NO: 456655 - DNA, 75 bp, synthetic construct
  source 1..75: mol_type = other DNA
cgaaacaatgaattcggctaatagggaggattggcaggctgtaactcaacgaattctcaataaccaaatagactg

SEQ ID NO: 456656 - DNA, 75 bp, synthetic construct
  source 1..75: mol_type = other DNA
agtttttaagacactcagaagaaattattaagccccgtaagcaaatagcagcttcgaatgatgaggcagcgagaa

SEQ ID NO: 456657 - DNA, 75 bp, synthetic construct
  source 1..75: mol_type = other DNA
gtgggtgaatcaggaaacgccggcgttaccgcaagcggcgctggaatatgtcattgacggcgaccgtgaatatcg

SEQ ID NO: 456658 - DNA, 75 bp, synthetic construct
  source 1..75: mol_type = other DNA
ccgttatctggctggaaaaatggttgaagagctatcagggcacgctgatcctgatctctcacgaccgcgacttcc

SEQ ID NO: 456659 - DNA, 75 bp, synthetic construct
  source 1..75: mol_type = other DNA
gaatccggggagacagggaaacactgcgtgcagcgaccggttataccgacatgcgggtaaacgggctggagcgta

SEQ ID NO: 456660 - DNA, 75 bp, synthetic construct
  source 1..75: mol_type = other DNA
gatgtgaacgcagtagtgttcaacggcgtgcctgccattatcaacatcacagagggactcccggtgtcatatgct

SEQ ID NO: 456661 - DNA, 75 bp, synthetic construct
  source 1..75: mol_type = other DNA
aaaatacagtgtcaataatggttacctgagtatcagtattgcaaagctaaattacacccatcagattgtcagaaa

SEQ ID NO: 456662 - DNA, 75 bp, synthetic construct
  source 1..75: mol_type = other DNA
tggcgttcgcccttcaggccgttgctggcgcaacgttatccacccaggtgctggtggttattaccaccatctctt

SEQ ID NO: 456663 - DNA, 75 bp, synthetic construct
  source 1..75: mol_type = other DNA
tggtggcctggcaaacatgcggatgaaataaaaaatgtgaaagcatcgttgaaaaacacacttattgatgttaaa

SEQ ID NO: 456664 - DNA, 75 bp, synthetic construct
  source 1..75: mol_type = other DNA
attcaggatatggtcacactaaactggttgctgaaaaagtggcacaaggcgcccatgcagatttaatttcgattg

SEQ ID NO: 456665 - DNA, 75 bp, synthetic construct
  source 1..75: mol_type = other DNA
tcgaaggtgagatatcagaaattgaacttgatggctactcagcaaatgatattaaagagatcatagcattacatc

SEQ ID NO: 456666 - DNA, 75 bp, synthetic construct
  source 1..75: mol_type = other DNA
tcaactagaagcgcagctacacgacgccaacgaacgtaacgacgggcacgccattgcgaccattcatggcaagct

SEQ ID NO: 456667 - DNA, 75 bp, synthetic construct
  source 1..75: mol_type = other DNA
taaaagaaaacaaatacatcatacttttattttcttggatgttttttaatgactctcttaaaactaaaaaaataa

SEQ ID NO: 456668 - DNA, 75 bp, synthetic construct
  source 1..75: mol_type = other DNA
ccggaccagccgatcattatggggcgcacctaccaccaggaaaaccgcacccccggcagcctgccgggaacaaag

SEQ ID NO: 456669 - DNA, 75 bp, synthetic construct
  source 1..75: mol_type = other DNA
ataggcggtaaggacaacggggtgtttgaattggtgccagacgagaaacaaccaggggactttcataagtttaca

SEQ ID NO: 456670 - DNA, 75 bp, synthetic construct
  source 1..75: mol_type = other DNA
ggttgccctgaacaaaacccgcccttacaccgccagtgaaacgttgctgctggacgtgtcccgcgccatctaccc

SEQ ID NO: 456671 - DNA, 75 bp, synthetic construct
  source 1..75: mol_type = other DNA
gcaatgtgtaatggagaatcaattaacgagaataaagaatatggtggactaatatgtaagaagcaaggtgaatat

SEQ ID NO: 456672 - DNA, 75 bp, synthetic construct
  source 1..75: mol_type = other DNA
tgaatatgatttattattacgtgaacttctaaagatatcatataattcagcgagggcatcaaatggtggttataa

SEQ ID NO: 456673 - DNA, 75 bp, synthetic construct
  source 1..75: mol_type = other DNA
gatttctcctgtaccgtaaacactgcggatattgataagacggtagatttaggcagatggcctacgacacaatta

SEQ ID NO: 456674 - DNA, 75 bp, synthetic construct
  source 1..75: mol_type = other DNA
ggttgaagtaccgcaaaacggtaatgactccaacttactgatagtgttttatgttcagataatgcccgatgacct

SEQ ID NO: 456675 - DNA, 75 bp, synthetic construct
  source 1..75: mol_type = other DNA
atggccatgcttctggctgtgctggagtggggtgttgaagacgaggaattagcagagctagcaaagaaagtagcc

SEQ ID NO: 456676 - DNA, 75 bp, synthetic construct
  source 1..75: mol_type = other DNA
tggcaatggcatgtttgtggttaacaaacatatcctgggctactgtttgtgcaaatagtactggcgtagcagaag

SEQ ID NO: 456677 - DNA, 75 bp, synthetic construct
  source 1..75: mol_type = other DNA
aatttgtccacccggcacgctggtgaattatacataccgtagttatgtcaccaactttgttgttcaggaaactat

SEQ ID NO: 456678 - DNA, 75 bp, synthetic construct
  source 1..75: mol_type = other DNA
gctcccggctcgcactgggagcggcgagcccgactgaggaagtagatgcaaatggcaatgtcacactaaactttt

SEQ ID NO: 456679 - DNA, 75 bp, synthetic construct
  source 1..75: mol_type = other DNA
gcaaatacaccctgcgtcggctcgccgccctgttagatgtgatctgctgggtgctgattgccgtagtaaccgttg

SEQ ID NO: 456680 - DNA, 75 bp, synthetic construct
  source 1..75: mol_type = other DNA
ttagttctgtgtcattggactttatttttaatgcgtatagacaaggaattgcgtttgtttttgttttttcttctt

SEQ ID NO: 456681 - DNA, 75 bp, synthetic construct
  source 1..75: mol_type = other DNA
ctcagccgcgagcggatgaaggagatgctggggtactgtagccggcatctgtgctggccggaaggctattacaac

SEQ ID NO: 456682 - DNA, 75 bp, synthetic construct
  source 1..75: mol_type = other DNA
caagaatcaaaagaggcgctgaccgcacttcttgagaagccgggcgctgcgctgcagctggcagcaaaagttaat

SEQ ID NO: 456683 - DNA, 75 bp, synthetic construct
  source 1..75: mol_type = other DNA
tcaccctgaccgtcgcaggcgaggacattcgcttcgccccgaccgaagctgtctacaacaagttcgtgaatgaaa

SEQ ID NO: 456684 - DNA, 75 bp, synthetic construct
  source 1..75: mol_type = other DNA
atgatgaagaactggcgcccatggtggatggtttgagcggtgcactatgtatatttatattgataactactgttt

SEQ ID NO: 456685 - DNA, 75 bp, synthetic construct
  source 1..75: mol_type = other DNA
aagtgaacgaaatgttgcaatctggtctggtcgaatttcatgttcatacgcatactcatacacgttgggataaaa

SEQ ID NO: 456686 - DNA, 75 bp, synthetic construct
  source 1..75: mol_type = other DNA
acatgattttcctataacgaaagaaagtgttattgtagttcataatagcatgaagctatacactcaaattcgtaa

SEQ ID NO: 456687 - DNA, 75 bp, synthetic construct
  source 1..75: mol_type = other DNA
tggccgccggtgaaaaaattaattattcggcgcaggataatgacattttaacggccatcggattcaggcctgacg

SEQ ID NO: 456688 - DNA, 75 bp, synthetic construct
  source 1..75: mol_type = other DNA
gtattatggcaggtgggcagccaccggagcagatgcataattactaccatttagccgatctggtggttgttcctt

SEQ ID NO: 456689 - DNA, 75 bp, synthetic construct
  source 1..75: mol_type = other DNA
gagccggagcgggctggtcgagtttcatctgcacacacatacccaccgtcgctgggacctgctggataacgtccg

SEQ ID NO: 456690 - DNA, 75 bp, synthetic construct
  source 1..75: mol_type = other DNA
ggtcccgcccggcaacatgaagaaagcggggggcgtcatatgttttctcaccgggaatgcgagaccctgattgca

SEQ ID NO: 456691 - DNA, 75 bp, synthetic construct
  source 1..75: mol_type = other DNA
accatgattcttttcggatttatcactgatatttctctcacatcaattgcaactgcgacagtggccggggagcta

SEQ ID NO: 456692 - DNA, 75 bp, synthetic construct
  source 1..75: mol_type = other DNA
attagcgccggaggctcgctgattgtctataccggcggtattgcacatggggttaaccaggagagggcagtgctt

SEQ ID NO: 456693 - DNA, 75 bp, synthetic construct
  source 1..75: mol_type = other DNA
tcgatctgattgagattttattttatctgaagaaaaagattcgtgttatcctttttattatggctatatgtcaat

SEQ ID NO: 456694 - DNA, 75 bp, synthetic construct
  source 1..75: mol_type = other DNA
tacccgcataaggaagtactggtggatgcgaaaattatggatggcggccattttgaatcgcagctgcttttcgac

SEQ ID NO: 456695 - DNA, 75 bp, synthetic construct
  source 1..75: mol_type = other DNA
taatcggcggcgaacagcaaattgccgatttacaacagcaagataatcttggtgatgctgccaacttactgattt

SEQ ID NO: 456696 - DNA, 75 bp, synthetic construct
  source 1..75: mol_type = other DNA
atggtaatcaaagtttgttcaggctctcagggcttcgacaacccatccaaattccgcgatgaatgggataagcaa

SEQ ID NO: 456697 - DNA, 75 bp, synthetic construct
  source 1..75: mol_type = other DNA
actaccattgatgctggcggtaagctgattgtccagaaggaggctaaaacagatagctccagacttaataatggt

SEQ ID NO: 456698 - DNA, 75 bp, synthetic construct
  source 1..75: mol_type = other DNA
atgactcacgctcacgacgaaatcagggttggcgcggtgcgccttccctggctcaaagagaaaaacggatggttg

SEQ ID NO: 456699 - DNA, 75 bp, synthetic construct
  source 1..75: mol_type = other DNA
ccgctcgacgattgatgttgatgcggatggtgaagcgcatatgggccagctgcttatcgaaattgatattgagca

SEQ ID NO: 456700 - DNA, 75 bp, synthetic construct
  source 1..75: mol_type = other DNA
tgtttgggcctgagtttctttatttttttgataaaacagcattgcttatatgtttctttacacttttgtataatg

SEQ ID NO: 456701 - DNA, 75 bp, synthetic construct
  source 1..75: mol_type = other DNA
cagaaatggcaaggatcataaatctctcagcgaaggcgagttccctgtttacggttcaggtggaatcatgcgata

SEQ ID NO: 456702 - DNA, 75 bp, synthetic construct
  source 1..75: mol_type = other DNA
accttgtcagatttaagcaattaccgtcggatgtgcaggaacagattaaaaacaaatatcaatcggcattcgtgt

SEQ ID NO: 456703 - DNA, 75 bp, synthetic construct
  source 1..75: mol_type = other DNA
cagcgcagaggcggcgaaagtactggctctgctggaagagatgaaaatgcagcttaatagccgcgatgtactgct

SEQ ID NO: 456704 - DNA, 75 bp, synthetic construct
  source 1..75: mol_type = other DNA
gactttttctgcttttaccagccaggcatgaccttcgaacaatttgtacgtgagtttgccgaatggttttcacaa

SEQ ID NO: 456705 - DNA, 75 bp, synthetic construct
  source 1..75: mol_type = other DNA
aaaattgctacagaacaatgacctccctggtgatgttcgtgaggtcattacatctatattgatcgatttggaatc

SEQ ID NO: 456706 - DNA, 75 bp, synthetic construct
  source 1..75: mol_type = other DNA
tacatggctaagctgatttgggaatctgtgagcgtgacggtggtagctgcggttgaagcaatgaactggcttaag

SEQ ID NO: 456707 - DNA, 75 bp, synthetic construct
  source 1..75: mol_type = other DNA
tctggatctgacagatgagcagttgctgcaggctctggattacgtcccggtgcagcgtaatggtgcgctcaacca

SEQ ID NO: 456708 - DNA, 75 bp, synthetic construct
  source 1..75: mol_type = other DNA
aacgatgaaaggcaattttacggatcctacagaccctgtaagaggggctataacacatttaacgtcaattacatc

SEQ ID NO: 456709 - DNA, 75 bp, synthetic construct
  source 1..75: mol_type = other DNA
aaaatgggggggatgcgcagtttcttaaagaaattgtttttgagatcccagaagttattttttctacctacgatg

SEQ ID NO: 456710 - DNA, 75 bp, synthetic construct
  source 1..75: mol_type = other DNA
tgcttaaacttacctatttttcagatagtcgactttataatttaggaaagttgcatattgataaagttagggaga

SEQ ID NO: 456711 - DNA, 75 bp, synthetic construct
  source 1..75: mol_type = other DNA
tagccgcatgtatggctcatgtccggagaaaaatccacgatgtgcatgcaagagtgccaaccgacatcatcacgg

SEQ ID NO: 456712 - DNA, 75 bp, synthetic construct
  source 1..75: mol_type = other DNA
atacggcatggtatgtttacaattttaggaagagcactatagaagctctcataaaaaaagggtatcatgttatag

SEQ ID NO: 456713 - DNA, 75 bp, synthetic construct
  source 1..75: mol_type = other DNA
tcgctcagttactgctgagtgatgttctggcagacgacggcgtctattatttgaaccttgaaagcgataatgaaa

SEQ ID NO: 456714 - DNA, 75 bp, synthetic construct
  source 1..75: mol_type = other DNA
ccggctccgttgcgggcatcctccgctgacattgcccgtacgctaaaaaatgaaaattgcgtcaaagatgttctg

SEQ ID NO: 456715 - DNA, 75 bp, synthetic construct
  source 1..75: mol_type = other DNA
cagaacagggaatgtgtgaagaagaacaggtcgcgcggatcgcgtggttttactaccacgacgggctgacccaga

SEQ ID NO: 456716 - DNA, 75 bp, synthetic construct
  source 1..75: mol_type = other DNA
gtggccgtaggccggaaaaactggctgtgtgtgtcacgaaggagtacttatggcaacaatgtgaaaattgcagca

SEQ ID NO: 456717 - DNA, 75 bp, synthetic construct
  source 1..75: mol_type = other DNA
cgcgtatccagacggtatatcagccggggagcttcgcgccgctcatccgcatcgaaacagacaacggcgagcggg

SEQ ID NO: 456718 - DNA, 75 bp, synthetic construct
  source 1..75: mol_type = other DNA
cgatcgcgaaggccttgtctacgcccatgaaggtaacaaaggcttcgccgatctcgtcgccgaaggtgcctacaa

SEQ ID NO: 456719 - DNA, 75 bp, synthetic construct
  source 1..75: mol_type = other DNA
tagctaaaaaattatggccattgaatagaagtcttactggtgatggcgttagagatacactaaatatcttgaagg

SEQ ID NO: 456720 - DNA, 75 bp, synthetic construct
  source 1..75: mol_type = other DNA
gctcagcgttatatgtgttagctgcatcaaataccaacgacagcacttcaggatacacaaccagatgtgtaactg

SEQ ID NO: 456721 - DNA, 75 bp, synthetic construct
  source 1..75: mol_type = other DNA
gccgtgcagcgtatcagtatccggcgtcagctccacgcttttatgcaggtaagcggcgacgcgctggccgccgca

SEQ ID NO: 456722 - DNA, 75 bp, synthetic construct
  source 1..75: mol_type = other DNA
attttagatatttgtggaattgatgatattagttataatgttgaaaattataaaataaccctatcctgcaacccc

SEQ ID NO: 456723 - DNA, 75 bp, synthetic construct
  source 1..75: mol_type = other DNA
acttcaaaaaaatccctggagagccaattgcttattgggtaagtgatatatatagggatattttcacccagtcac

SEQ ID NO: 456724 - DNA, 75 bp, synthetic construct
  source 1..75: mol_type = other DNA
ggaagaccagcccggtattacccactctcgaacaggtctatgctctgctcaaggccaactataaacccgcacgat

SEQ ID NO: 456725 - DNA, 75 bp, synthetic construct
  source 1..75: mol_type = other DNA
atgccaacaataaccgcaaaagtatcagatgaacttttggcctatatagacctggtttcaggtggtaatcggtca

SEQ ID NO: 456726 - DNA, 75 bp, synthetic construct
  source 1..75: mol_type = other DNA
gaggacgggcacggcgtggtatttccggctgaactggtgcggctgctggacaggctggaggaagaaatccgggca

SEQ ID NO: 456727 - DNA, 75 bp, synthetic construct
  source 1..75: mol_type = other DNA
acctgtagctcgtgttccgcgcattgaacgcgcgcgccacggtgatgcgggaggaatgcgtggtgcggccttcct

SEQ ID NO: 456728 - DNA, 75 bp, synthetic construct
  source 1..75: mol_type = other DNA
cacctgcaccagccgtaccggctgccggggcagcagtatgataaggagtcggggctgtactataaccgtcaccgg

SEQ ID NO: 456729 - DNA, 75 bp, synthetic construct
  source 1..75: mol_type = other DNA
agaaccgggtaaaaccaaagcggcaaaagcagaggttgaacgtaacggctataaggtaatgactccaacttactg

SEQ ID NO: 456730 - DNA, 75 bp, synthetic construct
  source 1..75: mol_type = other DNA
cggctgttaccgaagctattgagctgtttgcaggcgtcatggcaaagcgcgcagaggagaccaacaaagcgaccg

SEQ ID NO: 456731 - DNA, 75 bp, synthetic construct
  source 1..75: mol_type = other DNA
agaagatattcaagcgtatctgaatgcagccattgaagagggagatactaaatatttctttaaagcacttggaaa

SEQ ID NO: 456732 - DNA, 75 bp, synthetic construct
  source 1..75: mol_type = other DNA
tcacagcgatgccgttgctgtcgacctgcgcttagtcaactgtgatctggaaaactccagcaacggttccggtgg

SEQ ID NO: 456733 - DNA, 75 bp, synthetic construct
  source 1..75: mol_type = other DNA
taacgcagtttcggttacccgggggccgttactgctaacgcaacttacgttctggattaccaataatccttttta

SEQ ID NO: 456734 - DNA, 75 bp, synthetic construct
  source 1..75: mol_type = other DNA
tttaaattcaagattaaaaaatggtttactagtttaggtgctagcagtagtaatacctgggatatcataaatact

SEQ ID NO: 456735 - DNA, 75 bp, synthetic construct
  source 1..75: mol_type = other DNA
ttatacggaatacaaccaggtgcggcggcaaaatctcaatccacgatagtcacggacaaaacgaaatatatcgct

SEQ ID NO: 456736 - DNA, 75 bp, synthetic construct
  source 1..75: mol_type = other DNA
agtatcgcttttggtctgagcattggttttgtggcctcggtggggatctcttttaccctgaaaaccgggctgcta

SEQ ID NO: 456737 - DNA, 75 bp, synthetic construct
  source 1..75: mol_type = other DNA
gcacgcgagcaaacgtatttcgtcgacaagacggcggatcatagagaaaaccgcctgtggatgatggccaacatg

SEQ ID NO: 456738 - DNA, 75 bp, synthetic construct
  source 1..75: mol_type = other DNA
gcacgcgagcaaacgtatttcgtcgacaacacggcggatcatagagaaaaccggctgtggatgatggccaacatg

SEQ ID NO: 456739 - DNA, 75 bp, synthetic construct
  source 1..75: mol_type = other DNA
gcacgcgagcaaacgtatttcgtcgacaacacggccgatcatagagaaaaccgcctgtggatgatggccaacatg

SEQ ID NO: 456740 - DNA, 75 bp, synthetic construct
  source 1..75: mol_type = other DNA
caggatacatttgcgcttgaaagtcagaagagagccttaaaggccattgacaatggagaatttgaggatgaaatt

SEQ ID NO: 456741 - DNA, 75 bp, synthetic construct
  source 1..75: mol_type = other DNA
ataactttagcagggagaacaatcgaaaaagcgcaagagaaagaaggattacttgtttttttaggaatgaaatcc

SEQ ID NO: 456742 - DNA, 75 bp, synthetic construct
  source 1..75: mol_type = other DNA
gtatatccgaaggcccgcatccagttatgcatcgtgcatatggtgcgcaacagcctgcgcttcgtgtcatggaag

SEQ ID NO: 456743 - DNA, 75 bp, synthetic construct
  source 1..75: mol_type = other DNA
aaaggagaaggtgaaagccgctgctaagcgcataaaggagcagaaagaagccgagaaggccgggcgcaaacgccg

SEQ ID NO: 456744 - DNA, 75 bp, synthetic construct
  source 1..75: mol_type = other DNA
tctattcaagcgaagccatcaatattcagagttcattgatatcacttgctgcatgcaaaattgaaattgatactc

SEQ ID NO: 456745 - DNA, 75 bp, synthetic construct
  source 1..75: mol_type = other DNA
ccaaaaagatttagcaaaccagttaggtgtttcctcaacgcaaattagcaagtggaaaaaaggggaacatatgtc

SEQ ID NO: 456746 - DNA, 75 bp, synthetic construct
  source 1..75: mol_type = other DNA
cgatatcgcgcgcttaccgcacatctggataaactgctcccgcaatcccctgaagaagacgaaaaagcgccccgt

SEQ ID NO: 456747 - DNA, 75 bp, synthetic construct
  source 1..75: mol_type = other DNA
agtgtgaaaacgtcccggcgctgacagcgtgtggtgacaacaaccagcgctgcgcctgttggtatccgcagcagg

SEQ ID NO: 456748 - DNA, 75 bp, synthetic construct
  source 1..75: mol_type = other DNA
tggtgctcgaatgtgcgacacgaagccgcctgaagcgtggttcggctccgccagggaacctgatgttccgtcatc

SEQ ID NO: 456749 - DNA, 75 bp, synthetic construct
  source 1..75: mol_type = other DNA
taagacggtcgccgttcctgagtgggaaggcgtcaaagtggttctccgtgagccgtcaggtgaagcctggctgcg

SEQ ID NO: 456750 - DNA, 75 bp, synthetic construct
  source 1..75: mol_type = other DNA
gccacaaaatcgattatttttcccgcctgccagataatgtaagccgggaagagttcattaaatattaccgtcagc

SEQ ID NO: 456751 - DNA, 75 bp, synthetic construct
  source 1..75: mol_type = other DNA
ttcacaataccgctgcccagtgtgtctattgcaaccgggatcgggacggcgcgcaaaaggcatttgaacagggcc

SEQ ID NO: 456752 - DNA, 75 bp, synthetic construct
  source 1..75: mol_type = other DNA
cgaataaatgggtgactgagcagaacctgatcgcagtcaccggattaaggccaggaaccattgaacgagcccgcc

SEQ ID NO: 456753 - DNA, 75 bp, synthetic construct
  source 1..75: mol_type = other DNA
aactttattgcggatacgctcagtgcgcaggttaatcttaacgttaccgaggacaactttatcgccaataacgtt

SEQ ID NO: 456754 - DNA, 75 bp, synthetic construct
  source 1..75: mol_type = other DNA
cacaggacgttgcggcaaactttaccctcgaaaataacggcattgccatcacccaagccaatggggaagcgcatg

SEQ ID NO: 456755 - DNA, 75 bp, synthetic construct
  source 1..75: mol_type = other DNA
tgccaacagggcacccagacggccttttcgcgccaggcgcttcgcaacgtatcacggacataacctgtcagtctc

SEQ ID NO: 456756 - DNA, 75 bp, synthetic construct
  source 1..75: mol_type = other DNA
gcacgcgagcaaacgtatttcgtcgacaacacggcagatcatagagaaaaccgactgtggatgatggccaacatg

SEQ ID NO: 456757 - DNA, 75 bp, synthetic construct
  source 1..75: mol_type = other DNA
ttcttcgtgatttcaatactccaccctttaagactgagcctgataactggatccagccggggctgacttatctta

SEQ ID NO: 456758 - DNA, 75 bp, synthetic construct
  source 1..75: mol_type = other DNA
agcgggtaacccggcaagcgccgaccacgcgctggcggtggacgttaccgcgccggatctcaccattaacaccgt

SEQ ID NO: 456759 - DNA, 75 bp, synthetic construct
  source 1..75: mol_type = other DNA
ggctaccgatgccactcacgcttacgatctcagcgctgaagcgggcaccgcgagcaacaacggcaagttcgttgg

SEQ ID NO: 456760 - DNA, 75 bp, synthetic construct
  source 1..75: mol_type = other DNA
atcgccagaacgttcatacattctgggtaaggatgctgaaggcggcgtttttgtctccgagaacttcttctacga

SEQ ID NO: 456761 - DNA, 75 bp, synthetic construct
  source 1..75: mol_type = other DNA
tcgacaaaaaagagttcaaaactggcgaagcggtcagcggcaaactgcaactgctctacccggatggcgagccgg

SEQ ID NO: 456762 - DNA, 75 bp, synthetic construct
  source 1..75: mol_type = other DNA
cggcggctcgtgccgcgcaaaaaggccgcgcgtcactcgttcccgcctcgccagcttccgctgcccgccctggtc

SEQ ID NO: 456763 - DNA, 75 bp, synthetic construct
  source 1..75: mol_type = other DNA
gcggcagatctggcaacacttgggcagggcgcacagaccattaccgccagcgtgaacgaccgcgccggtaacccc

SEQ ID NO: 456764 - DNA, 75 bp, synthetic construct
  source 1..75: mol_type = other DNA
gcgctgacggtggtgattaataatcaaacttacgctgcaacggtgctggcgaacggcaactggagcgtcggcgtt

SEQ ID NO: 456765 - DNA, 75 bp, synthetic construct
  source 1..75: mol_type = other DNA
ccagccataatgtgctggtcaacagcgccttgcctgccgtcaccattaacgcggtggcgaccgatgacattatca

SEQ ID NO: 456766 - DNA, 75 bp, synthetic construct
  source 1..75: mol_type = other DNA
aacaccattgctggcgatgatgtgataaacgccagcgaaaaaggggccgatgtccagattaccggcaccagcgat

SEQ ID NO: 456767 - DNA, 75 bp, synthetic construct
  source 1..75: mol_type = other DNA
acaccgttaacccggcgcaggtgctcaccatcgccagcatcagcaccgacacggggagttcggcaactgacttta

SEQ ID NO: 456768 - DNA, 75 bp, synthetic construct
  source 1..75: mol_type = other DNA
gtgaccaacggcgttggcaataccggcagcggttcgcgagatattactatcgacgccaacctgcctggcctgcgc

SEQ ID NO: 456769 - DNA, 75 bp, synthetic construct
  source 1..75: mol_type = other DNA
acaggaaatgtctctcaagttatcaattcagctttagagcttagaacacatgatcattttcgtacgtgtcgagat

SEQ ID NO: 456770 - DNA, 75 bp, synthetic construct
  source 1..75: mol_type = other DNA
tcagtaaattgaaagaactggatctattctgggataacaacccaatgactggactcgcagaactgaaactgaccg

SEQ ID NO: 456771 - DNA, 75 bp, synthetic construct
  source 1..75: mol_type = other DNA
acggtaccgaaaaacgttatctgccggagggcacgctggtgctggggaatacggcagcagaggggattcgttgct

SEQ ID NO: 456772 - DNA, 75 bp, synthetic construct
  source 1..75: mol_type = other DNA
catcactgtattaataggtatggtgatgtactcacaattctacaaaccgacggctggcttcctctaccgcagaaa

SEQ ID NO: 456773 - DNA, 75 bp, synthetic construct
  source 1..75: mol_type = other DNA
gcacgcgagcaaacgtatttcgtcgacaaaacggcagatcatagagaaaaccgcctgtggatgatggccaacatg

SEQ ID NO: 456774 - DNA, 75 bp, synthetic construct
  source 1..75: mol_type = other DNA
ttcgccggcgtggcatccatttttccgaggtggaggcgaactcctggatcgcacgcgagcagacgtatttcgtcg

SEQ ID NO: 456775 - DNA, 75 bp, synthetic construct
  source 1..75: mol_type = other DNA
tctagagagcagacgtactttgtcgacaaaaccaccgaccatagcgaaaaccgtttgtggatgatggctaacatg

SEQ ID NO: 456776 - DNA, 75 bp, synthetic construct
  source 1..75: mol_type = other DNA
ttgatggggagttgctgaaaggtggcggtggaattgctaatggacagccctcacatagacaatcagaaaaggatg

SEQ ID NO: 456777 - DNA, 75 bp, synthetic construct
  source 1..75: mol_type = other DNA
agaacttcgagtcttccaacgatgcctttgtggtggaagacttcggctgcggttgcctgtttgaaaacatcaagt

SEQ ID NO: 456778 - DNA, 75 bp, synthetic construct
  source 1..75: mol_type = other DNA
gcattacatttggcataggagcggaacacagccttcttgctgatggaacccataaagatgaattctcgggccatg

SEQ ID NO: 456779 - DNA, 75 bp, synthetic construct
  source 1..75: mol_type = other DNA
ggcgcggcctgccgactttgatttcctgcaccacatcggtgaaagctatgccacgctacgccgctacgcgccgca

SEQ ID NO: 456780 - DNA, 75 bp, synthetic construct
  source 1..75: mol_type = other DNA
ctgagaaataaagctaacaataaaggtgaggagctaccactcccggatgatgataagacgcttatagattggctg

SEQ ID NO: 456781 - DNA, 75 bp, synthetic construct
  source 1..75: mol_type = other DNA
ttacctctgcacctcagcagaccataacacacaccggaatcaaaaatttgttatggataatcaaaaaaaacctcc

SEQ ID NO: 456782 - DNA, 75 bp, synthetic construct
  source 1..75: mol_type = other DNA
accatcaccgttaacgctgctggtaacgcggaaaacaccgttaaaaacatcgcatttaattatattgtgaggctt

SEQ ID NO: 456783 - DNA, 75 bp, synthetic construct
  source 1..75: mol_type = other DNA
acgaacgcaggcaatcgctaatgccagcaaaagaatgctgccctatttcgaggaagttgcagcggcaaggtttaa

SEQ ID NO: 456784 - DNA, 75 bp, synthetic construct
  source 1..75: mol_type = other DNA
agaaaaaaaatcggaaattgaaaagaaatttccttttctcagtgagtcaggtaagcatgtggctaataatatccc

SEQ ID NO: 456785 - DNA, 75 bp, synthetic construct
  source 1..75: mol_type = other DNA
atgaaaatcatatccgttacgggaaatactgtgctgaatacagaggatattcatttcttttctgattcatctgag

SEQ ID NO: 456786 - DNA, 75 bp, synthetic construct
  source 1..75: mol_type = other DNA
acagcgccagcgtatccagtacggatttgggtacgaaaaccacatcatcgtttgattacggcactaaatccacga

SEQ ID NO: 456787 - DNA, 75 bp, synthetic construct
  source 1..75: mol_type = other DNA
agtgctggggcacatgcacacactgttggtattggcgctcatacgcactctgttgcgattggttcacatggacac

SEQ ID NO: 456788 - DNA, 75 bp, synthetic construct
  source 1..75: mol_type = other DNA
ttctttcgtgacgctgatggtacattttataaatcagaaggtcttcatggtgggggagttattagatacatagat

SEQ ID NO: 456789 - DNA, 75 bp, synthetic construct
  source 1..75: mol_type = other DNA
aacacgtcagttcgccaggatgttgggacttgaaccgaagaacacggcagtgcggagtccggagagtaacggaat

SEQ ID NO: 456790 - DNA, 75 bp, synthetic construct
  source 1..75: mol_type = other DNA
cccggggatggggagtaagcttcgtcagccgttgtctccgggtgtcacgtgcgcagttgcacgtcattctcagac

SEQ ID NO: 456791 - DNA, 75 bp, synthetic construct
  source 1..75: mol_type = other DNA
acaaaaaaaatgttggcctgctattacatcaactcagacacgaagaaatattttggtctggtatattaaaaatgt

SEQ ID NO: 456792 - DNA, 75 bp, synthetic construct
  source 1..75: mol_type = other DNA
caaagttttatccccggatgttaacgtaaatgatatcccggtacaaaatcataatgcatcaataaaaaatcgtga

SEQ ID NO: 456793 - DNA, 75 bp, synthetic construct
  source 1..75: mol_type = other DNA
ggttatattaccatatcaaagttaaaaacgattgcgtatgatatgaaaaatacttttctcgagtatgacccccct

SEQ ID NO: 456794 - DNA, 75 bp, synthetic construct
  source 1..75: mol_type = other DNA
atgaatcagcagaataacataaagagaaattattgcttaagcaggctgattttaaaaacagactcaccaaaagac

SEQ ID NO: 456795 - DNA, 75 bp, synthetic construct
  source 1..75: mol_type = other DNA
cagacaaatggacgaaggcatcaggcttatattctgcgatagtgaaagggtatacggagattgttgctgcctgga

SEQ ID NO: 456796 - DNA, 75 bp, synthetic construct
  source 1..75: mol_type = other DNA
gttcacttttgatgaaattttggagcagtttacccgtgactttgatgggaagtcattctctcatgtggtaactaa

SEQ ID NO: 456797 - DNA, 75 bp, synthetic construct
  source 1..75: mol_type = other DNA
tcgacaaaggacacaactgcgctatcgattattgcgctgacgccatccgcgccgctggaatcaaagtgaaggagt

SEQ ID NO: 456798 - DNA, 75 bp, synthetic construct
  source 1..75: mol_type = other DNA
caacatccctcaaagatatttttattcgccctcatacgaacgcaaagtatgagtgttttacaaaagagcagataa

SEQ ID NO: 456799 - DNA, 75 bp, synthetic construct
  source 1..75: mol_type = other DNA
atcagcattatatctattaatgcaaatggggacgtgtgaaaatattgttcttttattcgataagttacaacattc

SEQ ID NO: 456800 - DNA, 75 bp, synthetic construct
  source 1..75: mol_type = other DNA
cgatagatgactttgagaaagagtttggggtaaataaaaatgaaatacttctttatataggaaaaaaatatgctc

SEQ ID NO: 456801 - DNA, 75 bp, synthetic construct
  source 1..75: mol_type = other DNA
aatattagaaatgaaacaggatcgtggggggaatagatatagtgcagtagatcttaactcttctaagtatgggta

SEQ ID NO: 456802 - DNA, 75 bp, synthetic construct
  source 1..75: mol_type = other DNA
ggcggcagccatgacgggtgtccttggcagtgtggggatccgtggaagtgatgcaggtacggcgctgcgtgccag

SEQ ID NO: 456803 - DNA, 75 bp, synthetic construct
  source 1..75: mol_type = other DNA
cacaggccatacaggcggcgctacccggcgtgcttgatctggcaatggctgcagggatggacctgggacagactg

SEQ ID NO: 456804 - DNA, 75 bp, synthetic construct
  source 1..75: mol_type = other DNA
gacaaagtgatggctgaggatgatttcgacaaaggacacaactgcgctatcgattattgcgctgacgccatccgc

SEQ ID NO: 456805 - DNA, 75 bp, synthetic construct
  source 1..75: mol_type = other DNA
ctatagtaaaagaatctagcaatatctgtgattatattcagggggctgtacgtattggaatggactttgttccag

SEQ ID NO: 456806 - DNA, 75 bp, synthetic construct
  source 1..75: mol_type = other DNA
cccccccttctgatgcttcccctttttgccgacatttttcagcagggaaaccgcttcgtcagagggggaagtcgc

SEQ ID NO: 456807 - DNA, 75 bp, synthetic construct
  source 1..75: mol_type = other DNA
cgattacatcagcatcatgccgaaacccgacgggttaacagcggtaaagaaccttgcggaggccttcgaacatta

SEQ ID NO: 456808 - DNA, 75 bp, synthetic construct
  source 1..75: mol_type = other DNA
ctgacgaattgaccaaggcaatggaaaaccttgctccactgatgaaagggctaggcagcgcagccgcagacgttc

SEQ ID NO: 456809 - DNA, 75 bp, synthetic construct
  source 1..75: mol_type = other DNA
aaaggacgcagcggatcagctacgtgcagaggcccgccttgccaaagcaatggagaaccggttcaaaccccggaa

SEQ ID NO: 456810 - DNA, 75 bp, synthetic construct
  source 1..75: mol_type = other DNA
actactcagccgatgtctttaaagaagagctgattgcggccctgttgaaggctatgcccgatccgcaactgacct

SEQ ID NO: 456811 - DNA, 75 bp, synthetic construct
  source 1..75: mol_type = other DNA
agcttttgcactacgtcacaatatggcgaagctagcagaactcgcgggaatgaacgtccagacgctgcgtaacaa

SEQ ID NO: 456812 - DNA, 75 bp, synthetic construct
  source 1..75: mol_type = other DNA
atccacattttgatgaagcctgtcgtgcatttgcactgcgccacaatctggtgcaactggcagaacgtgcaggca

SEQ ID NO: 456813 - DNA, 75 bp, synthetic construct
  source 1..75: mol_type = other DNA
ccctgcgcactatctggatgttctacatgttcgcggatgtttatctgctgacgaccaaggtcgatattctcggtg

SEQ ID NO: 456814 - DNA, 75 bp, synthetic construct
  source 1..75: mol_type = other DNA
gtcacttactacggcaagctgggtgcggttgagccagtgtacaaagaaaccatttcgtacgttgatggcatttaa

SEQ ID NO: 456815 - DNA, 75 bp, synthetic construct
  source 1..75: mol_type = other DNA
ttaaactgccatatggtattcttgatgctcacaatgagcttaaggattcattgggaatctattatcgtgattata

SEQ ID NO: 456816 - DNA, 75 bp, synthetic construct
  source 1..75: mol_type = other DNA
catatcttaattggttctatggatttctgtgctttttgtcactttggcctttcttttcatggaagtggcctgcga

SEQ ID NO: 456817 - DNA, 75 bp, synthetic construct
  source 1..75: mol_type = other DNA
tggaggaacaaaggaaaataataattaccccttgatgcagatgtgtgttgatacttattttgcgcagagaaaacc

SEQ ID NO: 456818 - DNA, 75 bp, synthetic construct
  source 1..75: mol_type = other DNA
gtggatttcctggatgacaggcagatcaggcgctggagcgatgagcggaaagcggctgcccgcagacgaaatctg

SEQ ID NO: 456819 - DNA, 75 bp, synthetic construct
  source 1..75: mol_type = other DNA
attcgtttcttgtattcattattgtttttttgtggtggtaataattttaaacaggaaaacaaattcctgttatgt

SEQ ID NO: 456820 - DNA, 75 bp, synthetic construct
  source 1..75: mol_type = other DNA
gtgcggcatctggcgatgtaaaaaccagtgcaggccgtcgtgatgctatcagcagcattaactctgtaacacgac

SEQ ID NO: 456821 - DNA, 75 bp, synthetic construct
  source 1..75: mol_type = other DNA
aaagttggtggtagaggacatgtattgaaagcacaggattatacaagggctttacaggattggttggataagaat

SEQ ID NO: 456822 - DNA, 75 bp, synthetic construct
  source 1..75: mol_type = other DNA
cgattgagaatatgacatcaggtggactaatttatgccgtatctggtgtacctggattgattgctgcaaacagca

SEQ ID NO: 456823 - DNA, 75 bp, synthetic construct
  source 1..75: mol_type = other DNA
ccggcactacgatccgttgcaggggcggtatatcaccccggacccgattgggttgagaggtggatggaatatgta

SEQ ID NO: 456824 - DNA, 75 bp, synthetic construct
  source 1..75: mol_type = other DNA
taccggagagcaactcctggaaaggatactgctttgctttagaaaaaaaacaaaagatataactgagtcatcgaa

SEQ ID NO: 456825 - DNA, 75 bp, synthetic construct
  source 1..75: mol_type = other DNA
cagcgttagccctgaaaaatatctcaaggcggctatagcaattttgtatagcgataatattctggtgacggattc

SEQ ID NO: 456826 - DNA, 75 bp, synthetic construct
  source 1..75: mol_type = other DNA
tttgtgtggatgactaaactcgaatgggcgataggtgcggtagtgctggtgatcatcagcctgcttgcgactctc

SEQ ID NO: 456827 - DNA, 75 bp, synthetic construct
  source 1..75: mol_type = other DNA
tcgcgctatccgtttgagctttcaggtggtatgcgccagcgggtaatgattgcgctggcattctcctgcgagccg

SEQ ID NO: 456828 - DNA, 75 bp, synthetic construct
  source 1..75: mol_type = other DNA
tcccgcgcctacagcagctaccggaccagaacacccgcgccggtgggggtgtttggtcccggctggaaagcgccc

SEQ ID NO: 456829 - DNA, 75 bp, synthetic construct
  source 1..75: mol_type = other DNA
ttgctcgccggtttcccatgccagccgttcagtattgccggtgtcagcaaaaagaactctttgggccgaaaacac

SEQ ID NO: 456830 - DNA, 75 bp, synthetic construct
  source 1..75: mol_type = other DNA
tatttttattgtatggttgttctccagtggacatagagccagctagacaagaagttaatatctttcgtggtttat

SEQ ID NO: 456831 - DNA, 75 bp, synthetic construct
  source 1..75: mol_type = other DNA
ccttttgcgctggataatttaccaacgctggccgttggcggggagcttgatgttacagtgagagagagtaatggc

SEQ ID NO: 456832 - DNA, 75 bp, synthetic construct
  source 1..75: mol_type = other DNA
cccggacggtagccgcagtgagacacagtatgatgcgtggggtaaagccatcagcaccacgcagggcggtctgac

SEQ ID NO: 456833 - DNA, 75 bp, synthetic construct
  source 1..75: mol_type = other DNA
aaatataacgatgatgatccttagtcaacgggctatttttaatctattctcgtttttattgattgcgtttctatg

SEQ ID NO: 456834 - DNA, 75 bp, synthetic construct
  source 1..75: mol_type = other DNA
gaacgtcctgaccagctgtgggtagctgattttacttacgtcagcacatggcagggcttcgtctatagtggcgtt

SEQ ID NO: 456835 - DNA, 75 bp, synthetic construct
  source 1..75: mol_type = other DNA
tccggttcagtatatagattcaatgggactggcatcaaaatatggacacttaaataatggcggatatggagcgag

SEQ ID NO: 456836 - DNA, 75 bp, synthetic construct
  source 1..75: mol_type = other DNA
gtacaggctatatcaacggctttaccaataacggcgatggcaccttttccagcgctattcaggtcaccgtcggca

SEQ ID NO: 456837 - DNA, 75 bp, synthetic construct
  source 1..75: mol_type = other DNA
gcgtctcacgcgtggcgctggtcgatgccacgccgccggtggtaaccattaatccggtggcgaccgataacgtca

SEQ ID NO: 456838 - DNA, 75 bp, synthetic construct
  source 1..75: mol_type = other DNA
ggtcctggttgcctcggggttattaaaattatcttctacatttttatctttgccggtttgatagggaaaatactc

SEQ ID NO: 456839 - DNA, 75 bp, synthetic construct
  source 1..75: mol_type = other DNA
ttgccgatatgtggcagggcatcatggtagaaaagaaaaagaatgccttatgtgtaataacagttttcggtgtta

SEQ ID NO: 456840 - DNA, 75 bp, synthetic construct
  source 1..75: mol_type = other DNA
gtgaacctcctgtaggaagcattaatacagcttatgtcggtgattcaatgattaagcagggggtgtcacagaggt

SEQ ID NO: 456841 - DNA, 75 bp, synthetic construct
  source 1..75: mol_type = other DNA
cttccaccgtgatgagtatcatggccctgctaaaagctataaaactaatggcaaagcaatttcaccggaagaaaa

SEQ ID NO: 456842 - DNA, 75 bp, synthetic construct
  source 1..75: mol_type = other DNA
ccaggcaccgtacccgtccgctatgggcctggctaaaactactctggcaacgcattgatgaggacaacatgacaa

SEQ ID NO: 456843 - DNA, 75 bp, synthetic construct
  source 1..75: mol_type = other DNA
tgaaaataaaatactcaattcatttttgtttagagtaataaataaaagcgatacattaaatgaacttgatgcgcc

SEQ ID NO: 456844 - DNA, 75 bp, synthetic construct
  source 1..75: mol_type = other DNA
ggcctgacaaagaaatttgtcgcagccagaaaattaacaggtatccagttcagtgaaaacccaccaacttttcac

SEQ ID NO: 456845 - DNA, 75 bp, synthetic construct
  source 1..75: mol_type = other DNA
accagcggaattgaaagcgggcaaaccgtcaccgtcactttgggcggcaaaacctacactgcaagcgtcgccgcc

SEQ ID NO: 456846 - DNA, 75 bp, synthetic construct
  source 1..75: mol_type = other DNA
tccgcaggcaacagcggcacggcctcgcacactgtcaccgtggcgctcggcgcgccgatactcggcattaacacc

SEQ ID NO: 456847 - DNA, 75 bp, synthetic construct
  source 1..75: mol_type = other DNA
gacgtatcaggcaacggtacaggcagacggcagctggagtatcaatattccggcggcggatcttgcggcgttgac

SEQ ID NO: 456848 - DNA, 75 bp, synthetic construct
  source 1..75: mol_type = other DNA
caccaccgacggttccggtaactggagcgttaccgtgcctgcttcggcggtcggcgcactgggcgaggcggtgta

SEQ ID NO: 456849 - DNA, 75 bp, synthetic construct
  source 1..75: mol_type = other DNA
gcgcggcgttaacgctctccggcagcacctctggcgtcgaagcggggcaaacggtcaccgttagctttggcggta

SEQ ID NO: 456850 - DNA, 75 bp, synthetic construct
  source 1..75: mol_type = other DNA
gcagcgcgcaaactatcagcggccaggtcaccggggcggcggcgggcagcaccgtcaccgttgaactgggcggta

SEQ ID NO: 456851 - DNA, 75 bp, synthetic construct
  source 1..75: mol_type = other DNA
ccgctaaccacgggctggcggtggatctcaccgtaccggtgttgaccattaacaccgtctcgggcgatgacatta

SEQ ID NO: 456852 - DNA, 75 bp, synthetic construct
  source 1..75: mol_type = other DNA
cagctacacggttagcgcctccgcccaggacagcgccggaaacagcgccacggcctcgcgcagtgtggcggtgga

SEQ ID NO: 456853 - DNA, 75 bp, synthetic construct
  source 1..75: mol_type = other DNA
ggtagacacctcagcacccgtggtcagcgttaacaccgtggcgggcgacgatattcttaataatgccgagcaggc

SEQ ID NO: 456854 - DNA, 75 bp, synthetic construct
  source 1..75: mol_type = other DNA
accctttccactgacgatgtaattaacgctgctgaaaaaggctctgatttgcagctttccggcaccacctccggt

SEQ ID NO: 456855 - DNA, 75 bp, synthetic construct
  source 1..75: mol_type = other DNA
cacgctggacgcttccggtaactggagcgtcggcattccggcggtggatgtcacggcgctggcaacgggaagcca

SEQ ID NO: 456856 - DNA, 75 bp, synthetic construct
  source 1..75: mol_type = other DNA
tgaacgggcaaaattacaccaccacgaccgacgcctccggcaactggagcgtcaccgttccggcatcggcggtaa

SEQ ID NO: 456857 - DNA, 75 bp, synthetic construct
  source 1..75: mol_type = other DNA
cctcccgcaccattactgtcgacagccaggccccggccttaagcatcgactcactaactgccgataacatcatca

SEQ ID NO: 456858 - DNA, 75 bp, synthetic construct
  source 1..75: mol_type = other DNA
ctcatcatgctctgcaagattttcgataagcctatcgggtatttttatgagcaagatgatggcgagtttcgtttt

SEQ ID NO: 456859 - DNA, 75 bp, synthetic construct
  source 1..75: mol_type = other DNA
agtgttgagcaattgtctatatcaaaactttctttaggcgatataaatataatacatgatactatctttgttgat

SEQ ID NO: 456860 - DNA, 75 bp, synthetic construct
  source 1..75: mol_type = other DNA
acctttttacgttatttagcttcattagaaacgttcaaaaaagcgacgcaatttaaagtaaagccggacaggcaa

SEQ ID NO: 456861 - DNA, 75 bp, synthetic construct
  source 1..75: mol_type = other DNA
ggaagcaaatagaaaattatttatctctaaatttaagtgaaattgcagagcagcagttaaaatcgttggaaaaaa

SEQ ID NO: 456862 - DNA, 75 bp, synthetic construct
  source 1..75: mol_type = other DNA
cgacattgcgcagtcattcatggcaatccgtcgcgccaccaccgccagcggcaaccgcccgacctatgaagccag

SEQ ID NO: 456863 - DNA, 75 bp, synthetic construct
  source 1..75: mol_type = other DNA
cgacattgcgcagtcatttatggcaatccgtcgcgctaccactgccagtggcaaccgcccgacctatgaagccag

SEQ ID NO: 456864 - DNA, 75 bp, synthetic construct
  source 1..75: mol_type = other DNA
atggcttcaaactggataaagctcgaggttattacgccggataagccggaaatattcaggcttgctgagattctg

SEQ ID NO: 456865 - DNA, 75 bp, synthetic construct
  source 1..75: mol_type = other DNA
ccggcttaatggcgtatcacttccctactccacctatgacaaactgtctgaaatcgatcagggtgccattgtgga

SEQ ID NO: 456866 - DNA, 75 bp, synthetic construct
  source 1..75: mol_type = other DNA
tcgacgttaaaaatatgccgaaaccgacggcgcagcgtatcgatctggtcgcaccgcagttcagatacatcgccg

SEQ ID NO: 456867 - DNA, 75 bp, synthetic construct
  source 1..75: mol_type = other DNA
cgcaaaaaggccgcgcgtcactcgttcccgcctcgccagcttccgctgcccgccccggtccggcatggtcatgca

SEQ ID NO: 456868 - DNA, 75 bp, synthetic construct
  source 1..75: mol_type = other DNA
aaagagttaattggtgcaatattgaatttcatctggcgttcatcccccattttgtttatttatttgttatttaga

SEQ ID NO: 456869 - DNA, 75 bp, synthetic construct
  source 1..75: mol_type = other DNA
ttacaagatataaaaacttaaagttgaaatcatatgttttcgacattgtcaacgttatgtttttattgtacttat

SEQ ID NO: 456870 - DNA, 75 bp, synthetic construct
  source 1..75: mol_type = other DNA
ccaccggtcttattaactgtattgcgttttcagcacaggcagtggatacgacgattactgttacagggagggtat

SEQ ID NO: 456871 - DNA, 75 bp, synthetic construct
  source 1..75: mol_type = other DNA
tgtatgaaatttacggtatgtggattgatgacatgaacgacgaacaggtagccatgttgaatgcgcggttatcgt

SEQ ID NO: 456872 - DNA, 75 bp, synthetic construct
  source 1..75: mol_type = other DNA
tggtggtgaagctgttcagaaacgtatggatgacctcgcccggaatggttacgccctgagcgaagcacaacagga

SEQ ID NO: 456873 - DNA, 75 bp, synthetic construct
  source 1..75: mol_type = other DNA
gactttaatctcttccttgtgtacctcaagcaattgcagaagacttttaagttcacggataaagaaacagccgct

SEQ ID NO: 456874 - DNA, 75 bp, synthetic construct
  source 1..75: mol_type = other DNA
actaacagatggaatcttcagtctcttcttctaagtgcacaaattacggggatgacggtaactattaagactact

SEQ ID NO: 456875 - DNA, 75 bp, synthetic construct
  source 1..75: mol_type = other DNA
acattcttaaaatgccgctgccgggcagcgtggtgggttccgtcagtccggaagatctgatgaaaacgctgccga

SEQ ID NO: 456876 - DNA, 75 bp, synthetic construct
  source 1..75: mol_type = other DNA
tggaaaccagacgccaggcacgattaaaccgccagattgttaaggatagagcgaaagctgagcgtgctggtcgca

SEQ ID NO: 456877 - DNA, 75 bp, synthetic construct
  source 1..75: mol_type = other DNA
agcaggctcgtctgcaacagcgtatgacccgtgagcagaaagccgcaggtgttcgtgctggtcgtgtacgcacag

SEQ ID NO: 456878 - DNA, 75 bp, synthetic construct
  source 1..75: mol_type = other DNA
ttcaaccttgccggaaacctgatgtcacatatctttatcaaaaatgaaaagatcagaaaagaatggctgcgtctt

SEQ ID NO: 456879 - DNA, 75 bp, synthetic construct
  source 1..75: mol_type = other DNA
atgtctggattatttcagacgaaatacactgtgatttactgagaaacggaatcagtcatatcccaatggcaaaac

SEQ ID NO: 456880 - DNA, 75 bp, synthetic construct
  source 1..75: mol_type = other DNA
gtctggctgcgaccaaagcggcctggtcccggtgcgacgagtggctggaacaattaaaacactatcttgatgata

SEQ ID NO: 456881 - DNA, 75 bp, synthetic construct
  source 1..75: mol_type = other DNA
gatttcttggctcagttgctcgccctggagagtttcccattgccatgtgtgatcgtggaacatggcaaattattt

SEQ ID NO: 456882 - DNA, 75 bp, synthetic construct
  source 1..75: mol_type = other DNA
tcagtccattattgatgatctgcgcgatcagatagccctgcgggtgaccgaagcaggtgcggatgatgaggagga

SEQ ID NO: 456883 - DNA, 75 bp, synthetic construct
  source 1..75: mol_type = other DNA
gattaagtctaatggcgaatggctggcgtttgttgagcgcccggtatctatggcactggctgtctgtttcttttt

SEQ ID NO: 456884 - DNA, 75 bp, synthetic construct
  source 1..75: mol_type = other DNA
ggagccgccgttggcgacgcggtaaccgttacgctgggtggcaatacctacaccaccaccgtacagccgggatta

SEQ ID NO: 456885 - DNA, 75 bp, synthetic construct
  source 1..75: mol_type = other DNA
gcaggccagcgtcagcagcgcgagcggcaatagcgcctcagcgactcatgcgtacagcgttgacgtcagtgcgcc

SEQ ID NO: 456886 - DNA, 75 bp, synthetic construct
  source 1..75: mol_type = other DNA
ctctgtcagacggcgcggcgaacgtgcaggccagtatcagtagtgcgagcggcaataatgcgtcggcaacccatg

SEQ ID NO: 456887 - DNA, 75 bp, synthetic construct
  source 1..75: mol_type = other DNA
gccgttggcgacgcggtaaccgtgacgctgggcggtaatacctacaccaccaccgtgcaggccggcttaagctgg

SEQ ID NO: 456888 - DNA, 75 bp, synthetic construct
  source 1..75: mol_type = other DNA
atctcgcaaccttgccggacggcacagcaaacgtccaggccagtgtcagtagcgtcgcgggtaacaacgcccagg

SEQ ID NO: 456889 - DNA, 75 bp, synthetic construct
  source 1..75: mol_type = other DNA
aaagcgggtaacccggcaagcgccgaccacgcgctggcggtggatgtcaccgcgccggatctcaccattaatacc

SEQ ID NO: 456890 - DNA, 75 bp, synthetic construct
  source 1..75: mol_type = other DNA
ctataccgccgccgtagcgggcgatggtagctggacaaccaccgtacctgccgccgatcttgctacattacgcga

SEQ ID NO: 456891 - DNA, 75 bp, synthetic construct
  source 1..75: mol_type = other DNA
ttaagctggagcgtggacgttccggcgacggatattcaggccatcggtaatggctctctcacggttaacgcctcg

SEQ ID NO: 456892 - DNA, 75 bp, synthetic construct
  source 1..75: mol_type = other DNA
ttacactgcgacgacggacgccgcaggcaactggagcaccacggtgccagcttccgcagtcggtgcgctgggcga

SEQ ID NO: 456893 - DNA, 75 bp, synthetic construct
  source 1..75: mol_type = other DNA
accgccgatgatgtgatcaacgccgccgaaaaaggcgcggcgttaacgctttccggcagcacttctggtgtcgaa

SEQ ID NO: 456894 - DNA, 75 bp, synthetic construct
  source 1..75: mol_type = other DNA
caccgcgccttccgttactatcaacaccatcgccacggacgatattcttaacgccgctgaagccggaacggcgct

SEQ ID NO: 456895 - DNA, 75 bp, synthetic construct
  source 1..75: mol_type = other DNA
ggtcgatattacggttacaggcaccaacaccgccggaacgacaaccagcattagccatccggttacggtcgatct

SEQ ID NO: 456896 - DNA, 75 bp, synthetic construct
  source 1..75: mol_type = other DNA
ggcacatggagcgttggtgttccggcggcagacgtgagtaactggcctgcgggtacggtgaatatcacggtaagt

SEQ ID NO: 456897 - DNA, 75 bp, synthetic construct
  source 1..75: mol_type = other DNA
tttgcaggcgctgggtaacggtgaactgaccatcagcgcctcggtgaccaattccgcaaataataccggcaccgc

SEQ ID NO: 456898 - DNA, 75 bp, synthetic construct
  source 1..75: mol_type = other DNA
cacggtacaggcggacgggagctggagcgtcggcattccggcggcaaacgtcagcgcctggcctgcggggccgtt

SEQ ID NO: 456899 - DNA, 75 bp, synthetic construct
  source 1..75: mol_type = other DNA
aggcgaatttactggtcgacagcggcctgccgggcgtcaccatcaacaccgtggcgggcgatgatattatcaacg

SEQ ID NO: 456900 - DNA, 75 bp, synthetic construct
  source 1..75: mol_type = other DNA
caccggcagcagtacggcggaagtggggcaaacggtgaccgtcacgctcaatggcgcaaattataccggcacggt

SEQ ID NO: 456901 - DNA, 75 bp, synthetic construct
  source 1..75: mol_type = other DNA
cggcagttatccgatcaatgtttcagtgactgaccgcgccggaaacagcggcagccagtcactgaccgtcacggt

SEQ ID NO: 456902 - DNA, 75 bp, synthetic construct
  source 1..75: mol_type = other DNA
gccaccgcaggcaccgacacttacgacggttccggcggctgggtgtacagctccggcaccggaacctggctggcg

SEQ ID NO: 456903 - DNA, 75 bp, synthetic construct
  source 1..75: mol_type = other DNA
aacaccctttccactgacgatgtgattaacgccgccgaaaaaggcagcgatttgcagctctccggcaccacctcc

SEQ ID NO: 456904 - DNA, 75 bp, synthetic construct
  source 1..75: mol_type = other DNA
gacgtatcaggcaacggtacaggccgatggcagctggagtattaatattccggcggcagatcttgaggcattgac

SEQ ID NO: 456905 - DNA, 75 bp, synthetic construct
  source 1..75: mol_type = other DNA
gcggcggatctggccgcgctcgggcagggcgcacagaccattaccgccagcgtgaacgatcgcgccggtaacccc

SEQ ID NO: 456906 - DNA, 75 bp, synthetic construct
  source 1..75: mol_type = other DNA
aacagcagcaccgccagccataacgtgcaggtcaataccgcgctaccgggcgtcaccattaatccggtaacgacg

SEQ ID NO: 456907 - DNA, 75 bp, synthetic construct
  source 1..75: mol_type = other DNA
ccgtgcgcggcgtactgggcgcagcactcggggctaatgagttcgcacaaatcagtaccgacaacggcgcaactt

SEQ ID NO: 456908 - DNA, 75 bp, synthetic construct
  source 1..75: mol_type = other DNA
accaaacttacgccgccacggtgttggcgaatggtacctggagcgtcggcgtaccggcggcggatgtcagtaact

SEQ ID NO: 456909 - DNA, 75 bp, synthetic construct
  source 1..75: mol_type = other DNA
gagttttaccactactgtgcaggtcgatggctcctggagtctgacagtacccgctgccgatatgggtaatctgcc

SEQ ID NO: 456910 - DNA, 75 bp, synthetic construct
  source 1..75: mol_type = other DNA
gtgatgttgaacggcctggcgtacagcgcaactaccgacagttccggcaactggagcgttaccgtgcctgcggcg

SEQ ID NO: 456911 - DNA, 75 bp, synthetic construct
  source 1..75: mol_type = other DNA
tggtcgtcagcggcatcagtacgggcgcggaacccggcgatgtagtgaccgtcacgctgaacggtaaaaactaca

SEQ ID NO: 456912 - DNA, 75 bp, synthetic construct
  source 1..75: mol_type = other DNA
tccggcgtggagccagggcaaacggtcaccgtcacctttgacggcaaaacctacaccgccaccgtagcaggcgat

SEQ ID NO: 456913 - DNA, 75 bp, synthetic construct
  source 1..75: mol_type = other DNA
ctgggcgaagcgacctacagcgtgacggcgagcgtcaccaatgctcagggtaacagcagcaccgccagccataac

SEQ ID NO: 456914 - DNA, 75 bp, synthetic construct
  source 1..75: mol_type = other DNA
ttaacgccgccgaagcgggtgctgcgcaaaccatcagcgggcaggtgactggagccgccgttggcgacacggtaa

SEQ ID NO: 456915 - DNA, 75 bp, synthetic construct
  source 1..75: mol_type = other DNA
ctatcagggcgtcgtgcagtcagatggcacctggagcgtgaccgttcccgccgccaacgttggcgcactggctga

SEQ ID NO: 456916 - DNA, 75 bp, synthetic construct
  source 1..75: mol_type = other DNA
aactccaccacgtcgaacagcggcggtagcgccacggtgggcggggcggtgacggggtatctttcgcttaacgaa

SEQ ID NO: 456917 - DNA, 75 bp, synthetic construct
  source 1..75: mol_type = other DNA
tcgtaacggcacgggcgatctgtttattacccgtgatgactacggcacgggctatatcaacggctttaccaacaa

SEQ ID NO: 456918 - DNA, 75 bp, synthetic construct
  source 1..75: mol_type = other DNA
tacactgatgacgtcgggcagcggcaggggacattaagcagttcgcaggccaccgacgacactacgccgttgctg

SEQ ID NO: 456919 - DNA, 75 bp, synthetic construct
  source 1..75: mol_type = other DNA
gttaccgatgtggctggcaacagcgacaacgagacgcacacggtcaccgttaaccttaccgcgccgaccattggc

SEQ ID NO: 456920 - DNA, 75 bp, synthetic construct
  source 1..75: mol_type = other DNA
cagcgcgccaaccatcattatcaataccgtcgccagcgacaatatcgtcaacgccagcgaagccgatgcgggtgt

SEQ ID NO: 456921 - DNA, 75 bp, synthetic construct
  source 1..75: mol_type = other DNA
ggttccggcgtcgatcttaataatgatggcaggattgacctggttcagcacaccttcaacctgaacaactattac

SEQ ID NO: 456922 - DNA, 75 bp, synthetic construct
  source 1..75: mol_type = other DNA
ggtgaccgtgttgcttaacggcaaaggctacagcgccaccattcagagcaacgggagctggagcgtgaacgtgcc

SEQ ID NO: 456923 - DNA, 75 bp, synthetic construct
  source 1..75: mol_type = other DNA
attgccgtcgatgacatcatcaacgccacggagaaaggcgcagatctggcgatttccggcaccagcgaccagcct

SEQ ID NO: 456924 - DNA, 75 bp, synthetic construct
  source 1..75: mol_type = other DNA
cacgctggatgcctccggtaactggagcgtgggcattccggcggcggatgtcacggcgctggcgaccggtagcca

SEQ ID NO: 456925 - DNA, 75 bp, synthetic construct
  source 1..75: mol_type = other DNA
aatggcgtgggcaacaccggcagcggctcgcgcgatatcacgatcgacgccaatctgcctggcctgcgggtcgat

SEQ ID NO: 456926 - DNA, 75 bp, synthetic construct
  source 1..75: mol_type = other DNA
tgcaccatttcttgataccgttgctcagaccagcaccttcccgtggggatggttagcgggggcagcggtaggtgg

SEQ ID NO: 456927 - DNA, 75 bp, synthetic construct
  source 1..75: mol_type = other DNA
tgatcaacggcaaaacctacacctctgaaccgggcggcgcggtagtggtcgatccggcgcacaacacctggtatg

SEQ ID NO: 456928 - DNA, 75 bp, synthetic construct
  source 1..75: mol_type = other DNA
ataacgtgcaggtcaataccgcgctgccgggcgtcaccattaatccggtggcgacggacgatattatcaacgctt

SEQ ID NO: 456929 - DNA, 75 bp, synthetic construct
  source 1..75: mol_type = other DNA
tccggcaactggagcgtcggtgttccggcggcggatgtcaccgcgctgggtagcggcccgcaaaccgtgactgcg

SEQ ID NO: 456930 - DNA, 75 bp, synthetic construct
  source 1..75: mol_type = other DNA
cctgtggaacaacgccggcaccctgacaggcaactccaccaccgctaataacggggggagtgctacggtcggtgg

SEQ ID NO: 456931 - DNA, 75 bp, synthetic construct
  source 1..75: mol_type = other DNA
tcgctggtgatcagcggcaccaccaccgcgcccgtcgggcagacgctgaccctgaccttaaacggcaaaacctac

SEQ ID NO: 456932 - DNA, 75 bp, synthetic construct
  source 1..75: mol_type = other DNA
ccagcctgagcgatcgcgcgggcaacagcgacagcacgactcacgatgtgaccgttgatcttagcggcccgacgc

SEQ ID NO: 456933 - DNA, 75 bp, synthetic construct
  source 1..75: mol_type = other DNA
accgccagcagctataccgtgaccgccacggtgagcgacaaagcgggtaacccggcaagcgccgaccacgcgctg

SEQ ID NO: 456934 - DNA, 75 bp, synthetic construct
  source 1..75: mol_type = other DNA
ggcaacacctacaccgccacggtgcaggctaatttaagctggagtgtcagcgttccggcggcggatattcaggcg

SEQ ID NO: 456935 - DNA, 75 bp, synthetic construct
  source 1..75: mol_type = other DNA
cagaacaccaccaataccttcctgagcggggcgggcagtggcgctatgagcagcagcgtttccatgacctgggcc

SEQ ID NO: 456936 - DNA, 75 bp, synthetic construct
  source 1..75: mol_type = other DNA
aggggcagggcttcgttcagcctgaaatcaaccagaacgatatattgattcgccacaaagcagagtcgcgtattg

SEQ ID NO: 456937 - DNA, 75 bp, synthetic construct
  source 1..75: mol_type = other DNA
ttatcgggatgtacaacaggcatttgaagagtcagttaacaacaaacgcgacattattaaaggcgttattaaaat

SEQ ID NO: 456938 - DNA, 75 bp, synthetic construct
  source 1..75: mol_type = other DNA
ggtaactttttcggcagcacctgccagctttaccggtgcccggcctcagcccggcgtttttaacgctaccgcgac

SEQ ID NO: 456939 - DNA, 75 bp, synthetic construct
  source 1..75: mol_type = other DNA
attctgaactgttccagggtatagaaatacactatacggaggaaacacctttttttaatcctgcatcagattata

SEQ ID NO: 456940 - DNA, 75 bp, synthetic construct
  source 1..75: mol_type = other DNA
gacactacgccgctgctgaacggtgtactttccgcgccgcttgccagcggtgaagtggtttacctctaccgtaac

SEQ ID NO: 456941 - DNA, 75 bp, synthetic construct
  source 1..75: mol_type = other DNA
gatctggtagtcacccgggataactcagtggcagacggtgcaatggcgaatatgctgcgggcgagggtcaccgat

SEQ ID NO: 456942 - DNA, 75 bp, synthetic construct
  source 1..75: mol_type = other DNA
agtactgtcactgccagcattaacagcagcagcctgagccggaacgtaacgtttgtcgcggatgtcaggacggcg

SEQ ID NO: 456943 - DNA, 75 bp, synthetic construct
  source 1..75: mol_type = other DNA
tgacggttcgacggcgaatacgctgcaggtgagggtgaccgatgcgttcgggaatgcgctgaatgggcagacggt

SEQ ID NO: 456944 - DNA, 75 bp, synthetic construct
  source 1..75: mol_type = other DNA
tcacccgagccggtgcagaaaaactggcggcggcgacgctcccgaacgggaagaaagtcaattttgcggagatgg

SEQ ID NO: 456945 - DNA, 75 bp, synthetic construct
  source 1..75: mol_type = other DNA
ggaacgaaaaccaccacgacctttgactacgggacaaaaaccactaatgcaactggcaaccatgcgcacactttt

SEQ ID NO: 456946 - DNA, 75 bp, synthetic construct
  source 1..75: mol_type = other DNA
gtggctgacggcgcaatggcgaacacgctgcgggtgaaggtcaccgatgcgttcgggaatgcgctgaatggacag

SEQ ID NO: 456947 - DNA, 75 bp, synthetic construct
  source 1..75: mol_type = other DNA
tcgatgcttcttttacggggacgaaccgaagcagtgacgatacgatggtggcgacagacaatgctgatgtcggga

SEQ ID NO: 456948 - DNA, 75 bp, synthetic construct
  source 1..75: mol_type = other DNA
attacagagatggaagtaagagaggtgcagttatcgacttgctatgaacctcgatatggtcatccgataaatact

SEQ ID NO: 456949 - DNA, 75 bp, synthetic construct
  source 1..75: mol_type = other DNA
atagagatatatatgttgaaatcactggtgaagagagaaagtgtttttccattaaaatacttaatgagataagta

SEQ ID NO: 456950 - DNA, 75 bp, synthetic construct
  source 1..75: mol_type = other DNA
aatacttaaaggcagcaaaaatgaaattctaacaagaatgatgaacatacttctggttgaatattttaataataa

SEQ ID NO: 456951 - DNA, 75 bp, synthetic construct
  source 1..75: mol_type = other DNA
cttaaagcgaaaacatcaggaattcgtcgtgccgccggtaatcgactggagcaggttcagaatgctatggctgga

SEQ ID NO: 456952 - DNA, 75 bp, synthetic construct
  source 1..75: mol_type = other DNA
gcgccacgagtaacaacgcagggattagagcaggactttggccttcagcaaggcgcgctgactccacaaacgaca

SEQ ID NO: 456953 - DNA, 75 bp, synthetic construct
  source 1..75: mol_type = other DNA
tctagagctcttcaggtaacgacaacggaatcagcttattcattaatggttaggaatacatctacagcaatatct

SEQ ID NO: 456954 - DNA, 75 bp, synthetic construct
  source 1..75: mol_type = other DNA
cgaattatatgaattaaggaactcattgcttcacatgactaatcttaattcacacaaagttactcagggtaaaga

SEQ ID NO: 456955 - DNA, 75 bp, synthetic construct
  source 1..75: mol_type = other DNA
aggcgctgactgcacgttttaaccgtgcactctctgacagtctgacggcatatcagcgcgatcaccgggccgtca

SEQ ID NO: 456956 - DNA, 75 bp, synthetic construct
  source 1..75: mol_type = other DNA
gagtgtctggcgatccatgccggaaagtcgctgaaaggcgaggatgtggtcggtgtgatggaagggttgcgggtg

SEQ ID NO: 456957 - DNA, 75 bp, synthetic construct
  source 1..75: mol_type = other DNA
tatactattgattctgtaatttgcagctattattataataagttttcatcagaggataacagctctgttttgaat

SEQ ID NO: 456958 - DNA, 75 bp, synthetic construct
  source 1..75: mol_type = other DNA
ctggaaccggatactatagcagaacaattttcaaagaagatgaaaaaaacgtttattgaaataataaatagattt

SEQ ID NO: 456959 - DNA, 75 bp, synthetic construct
  source 1..75: mol_type = other DNA
aacaacagaacgaacaggagcggttttcaatttgcagccgtcaggctgccgtggttcaatatgataaagatatgt

SEQ ID NO: 456960 - DNA, 75 bp, synthetic construct
  source 1..75: mol_type = other DNA
taatcaaagaagccaaattaaaaatagcggttgcgaaatgtcaccccaattcagagatggctcgggtagagggcg

SEQ ID NO: 456961 - DNA, 75 bp, synthetic construct
  source 1..75: mol_type = other DNA
ggtgcggcggcaaaaactcaatcaacgattgtcgcggacaaaacgatatatatcgctggggatagcataacggtg

SEQ ID NO: 456962 - DNA, 75 bp, synthetic construct
  source 1..75: mol_type = other DNA
ttctccggcgcaagccacatcaactatcgctacggataaaaacgcctacaccgctggtgacactataaccgtcgc

SEQ ID NO: 456963 - DNA, 75 bp, synthetic construct
  source 1..75: mol_type = other DNA
gcgttcggtaatgcgcttgccggccagacggtcagcgtgttggcggataacggcgcaacggttgccccgacggtc

SEQ ID NO: 456964 - DNA, 75 bp, synthetic construct
  source 1..75: mol_type = other DNA
gggcgagggtgaccgatgcgttcggtaatacgcttgccgggcagacggtgagcgtgttgggaggcaacggcgcaa

SEQ ID NO: 456965 - DNA, 75 bp, synthetic construct
  source 1..75: mol_type = other DNA
gcaatatcaaagacagtatatggcgcattttgcggaagcgaatttgaatgcgcaactgaagatggctggttggag

SEQ ID NO: 456966 - DNA, 75 bp, synthetic construct
  source 1..75: mol_type = other DNA
agaataatggtgaatataccattgtctggacagcatgggttgccgaggaaaatctggttgccagtctgaaattaa

SEQ ID NO: 456967 - DNA, 75 bp, synthetic construct
  source 1..75: mol_type = other DNA
gtggagaacgaagatggctctcatgttcctgtttcgcaaccaatcatcattaacgctgctggatatccggtatat

SEQ ID NO: 456968 - DNA, 75 bp, synthetic construct
  source 1..75: mol_type = other DNA
gcgaagatcgctgatctggtggtcacctgggataactcagtggctgacggagcaatggcgaacacgctgcaggtg

SEQ ID NO: 456969 - DNA, 75 bp, synthetic construct
  source 1..75: mol_type = other DNA
ggtatgaaatacatcgctatggaaagtattcttgaagaggatgttcgtgcgcaattactagccgatgaaatgagc

SEQ ID NO: 456970 - DNA, 75 bp, synthetic construct
  source 1..75: mol_type = other DNA
tgtatttaaattcaagattaaaaaatggtttactagtttaggtgctaccagtagtaatacctgggatatcataaa

SEQ ID NO: 456971 - DNA, 75 bp, synthetic construct
  source 1..75: mol_type = other DNA
tataattggacggctgggatttatggaattaatgttgacagtaatggagaagtaacattatctgtgctgataaga

SEQ ID NO: 456972 - DNA, 75 bp, synthetic construct
  source 1..75: mol_type = other DNA
gttgccaatggcaaaatttatatcgggaagattgacactgaccctgtaaatccagaaaaccagattcaggtttat

SEQ ID NO: 456973 - DNA, 75 bp, synthetic construct
  source 1..75: mol_type = other DNA
ccgccagcatcaacaacagcagccagagccagaacgtcacctttgtaccgggtgatgcatcgcagctcacttcaa

SEQ ID NO: 456974 - DNA, 75 bp, synthetic construct
  source 1..75: mol_type = other DNA
gcaatgagatattgttacttgatgtgtcgaatgactaagacatttggatcaacaatagctgacgtgataggtaaa

SEQ ID NO: 456975 - DNA, 75 bp, synthetic construct
  source 1..75: mol_type = other DNA
tgtactgcagggtgcattgggcgacgctggtctgaataacactaatagttctgcaactggtgcctttcctgtcga

SEQ ID NO: 456976 - DNA, 75 bp, synthetic construct
  source 1..75: mol_type = other DNA
aaaattgggattgtgttaaaagtttaccagtaattataggtgataacgtttggataggttttcaagctgcgatac

SEQ ID NO: 456977 - DNA, 75 bp, synthetic construct
  source 1..75: mol_type = other DNA
gacaaagaactgattaaagaaatcaaagagcgcataggcagcttggacgttcgagacaatattgagcgccgtgct

SEQ ID NO: 456978 - DNA, 75 bp, synthetic construct
  source 1..75: mol_type = other DNA
gcgtgacctgacggggtggatgtcgctgtcgcgtaaaccggaggtgacgtggtatggctgggacggagacaggct

SEQ ID NO: 456979 - DNA, 75 bp, synthetic construct
  source 1..75: mol_type = other DNA
ccaaatgtagcgatgcatgtattgaaaaatataacattgggcaactcttcgggttagatggtataaaagcagata

SEQ ID NO: 456980 - DNA, 75 bp, synthetic construct
  source 1..75: mol_type = other DNA
cggcgcagatcgcggatctggtggtcattaaggacggttcagaggcagacggtgcaatggcgaatatgctgcggc

SEQ ID NO: 456981 - DNA, 75 bp, synthetic construct
  source 1..75: mol_type = other DNA
aaatctccgtcaccagccagaccgccggagccagtacggtcactgccagcattaacggtagcagccagagtcaga

SEQ ID NO: 456982 - DNA, 75 bp, synthetic construct
  source 1..75: mol_type = other DNA
acacgctgcgggcgagggtaaccgatgctaacggtaatgcgcttgccgggcagacggtcagcgtgttggcgggca

SEQ ID NO: 456983 - DNA, 75 bp, synthetic construct
  source 1..75: mol_type = other DNA
ggcagggagcggggacggcgctgaataatcactttgcggtgatcccggcagacagaacatggcgaccacagccgt

SEQ ID NO: 456984 - DNA, 75 bp, synthetic construct
  source 1..75: mol_type = other DNA
agatcgcggatctggtggtcattaaggacgactcagtggcagacggtgcaatggcgaatatgctgcgggcgagag

SEQ ID NO: 456985 - DNA, 75 bp, synthetic construct
  source 1..75: mol_type = other DNA
agatcgctgaactggtggtcattaaggacgactcagtggcagacggtgcaatggcgaatatgctgcgggcgagag

SEQ ID NO: 456986 - DNA, 75 bp, synthetic construct
  source 1..75: mol_type = other DNA
taatctcctctcgcccaaacagaagcagaccacgctttgttgtttctggaagaaaatagcctctacatttccaga

SEQ ID NO: 456987 - DNA, 75 bp, synthetic construct
  source 1..75: mol_type = other DNA
gaaatgcgatctaacaaatatgaattgcactggcgcaattcttgataatgcggtgatatatggtaaagaacctga

SEQ ID NO: 456988 - DNA, 75 bp, synthetic construct
  source 1..75: mol_type = other DNA
atgatgaaaaccatcaccaaacaaccgatcctgtttactgatgtaccggttgcagatttaagaaactcaatgaag

SEQ ID NO: 456989 - DNA, 75 bp, synthetic construct
  source 1..75: mol_type = other DNA
aagacctcaaccgcaaaatcaatatttttaccacaaactatgatggatgcctgtcccatacagctgacagccttc

SEQ ID NO: 456990 - DNA, 75 bp, synthetic construct
  source 1..75: mol_type = other DNA
gctgaacgaagcctacaaagtattgcaattacaaggctatcgcctctcggcatatgaagcgttttacctggccac

SEQ ID NO: 456991 - DNA, 75 bp, synthetic construct
  source 1..75: mol_type = other DNA
caatactatgtaaatggaaatatatcattttcaggtgatgttagtgcagggttatttacagataactggttatta

SEQ ID NO: 456992 - DNA, 75 bp, synthetic construct
  source 1..75: mol_type = other DNA
cagctggacgcaggaggcgtggtcacccgcggtgccggtgatggtattcgcgtggatgtgcgggcggtggatgcg

SEQ ID NO: 456993 - DNA, 75 bp, synthetic construct
  source 1..75: mol_type = other DNA
tgtgagcgtgaatacaacgatattgaggatcgacgctatcatgcccagcccaatgcctgcccagtttgcggccca

SEQ ID NO: 456994 - DNA, 75 bp, synthetic construct
  source 1..75: mol_type = other DNA
gcgtttgcactcaggtggagtacgaagcccaggcggccattgaactggaagcgctgctgcagtgtaaacttcata

SEQ ID NO: 456995 - DNA, 75 bp, synthetic construct
  source 1..75: mol_type = other DNA
aatgattatttaaagaaaatacctttaactgcacaattaattgcaaaatacaaaatggatgatcaattaaatcaa

SEQ ID NO: 456996 - DNA, 75 bp, synthetic construct
  source 1..75: mol_type = other DNA
aactatctctattgttgacgaggtagtaaagacttattcactcccaatagaaaaggatgacaatggacattacga

SEQ ID NO: 456997 - DNA, 75 bp, synthetic construct
  source 1..75: mol_type = other DNA
tctgtacttgagcagggactgacaatagcaggagaggaaaacgttgccctttataaacgtatcgatgcgttgatg

SEQ ID NO: 456998 - DNA, 75 bp, synthetic construct
  source 1..75: mol_type = other DNA
gttggtctgctgggcccgactctatctctcgccacccggaatccctgctcgccaagacccgtgcgctcaatgaag

SEQ ID NO: 456999 - DNA, 75 bp, synthetic construct
  source 1..75: mol_type = other DNA
acagcctgtcgggctgccgctcctgctcgacaccatcgcactgaccgaacgggcagacatgccggatatcgtgcg

SEQ ID NO: 457000 - DNA, 75 bp, synthetic construct
  source 1..75: mol_type = other DNA
gttttgtttataataaaggacttgcgctgttaaaggagagctatgagtcaggtcagaaacatatgcattacaacc

SEQ ID NO: 457001 - DNA, 75 bp, synthetic construct
  source 1..75: mol_type = other DNA
ggtgggttaagtatcgtaaaagccgagagataacaggagtattaaagaatgttactatttcaagaaagcttgata

SEQ ID NO: 457002 - DNA, 75 bp, synthetic construct
  source 1..75: mol_type = other DNA
gcgcacactgaaagcgatttattcaaaagagctgaaggccgcgaaaaaacgcgaactgctgccgttctggttgcc

SEQ ID NO: 457003 - DNA, 75 bp, synthetic construct
  source 1..75: mol_type = other DNA
catctggcgcagcgggtggagataatggactggtggggacggcagatcagcgaggcctccgtggcggcgagggag

SEQ ID NO: 457004 - DNA, 75 bp, synthetic construct
  source 1..75: mol_type = other DNA
tcatggccgtcatgctgtggcgtctcgatgccggtgagattgctggcgcgctggaaattgcgacctacgcgctga

SEQ ID NO: 457005 - DNA, 75 bp, synthetic construct
  source 1..75: mol_type = other DNA
taccgtctctattattaagatgagggagcctttggcgaaaaacatagaaacactaaattgggtgtgcgttaaaag

SEQ ID NO: 457006 - DNA, 75 bp, synthetic construct
  source 1..75: mol_type = other DNA
tttttatccagtatatcgctacgacattgttgattatgtttggtaatcgattgtcaaaatttaaattcaaaaaaa

SEQ ID NO: 457007 - DNA, 75 bp, synthetic construct
  source 1..75: mol_type = other DNA
ttaatataatggaatattcggagagaaacgtcaggcagttggctttaaatgaacaggaagaatatatccccagga

SEQ ID NO: 457008 - DNA, 75 bp, synthetic construct
  source 1..75: mol_type = other DNA
aattttgctaggccattcgaatcaaaaaatgaccgatatttacaacgacgcacgcggtaaggaatggaaaaaact

SEQ ID NO: 457009 - DNA, 75 bp, synthetic construct
  source 1..75: mol_type = other DNA
tgtttcaataataaaagcaaacaatgattttccagaacaagtggaatcaatgaactggctttgtgtaaaaagtat

SEQ ID NO: 457010 - DNA, 75 bp, synthetic construct
  source 1..75: mol_type = other DNA
aatggaaagttgatagttgataatccaaccccatattatataaattttggagagattgttatcaatgggaactcc

SEQ ID NO: 457011 - DNA, 75 bp, synthetic construct
  source 1..75: mol_type = other DNA
gtagtcatatgtcatggagctttctgttttttaaaaaacaattcattgatagttgcttgaataacgaaaaatgta

SEQ ID NO: 457012 - DNA, 75 bp, synthetic construct
  source 1..75: mol_type = other DNA
gccgttccgtcgcttgcggactctctgccgcccgcacccgcagaccccgcgccgtggccccgccatgccgccgga

SEQ ID NO: 457013 - DNA, 75 bp, synthetic construct
  source 1..75: mol_type = other DNA
ctgtgatctcttttgacgacgcaatcaaaattggtcgtatcgtgcgtgagcaggtacaggtcggtcgggtcatta

SEQ ID NO: 457014 - DNA, 75 bp, synthetic construct
  source 1..75: mol_type = other DNA
gtctaccgcttcctcgacagcctggtggcgaaagggctgctggtccggaccaaatatccggtggacggccgtcag

SEQ ID NO: 457015 - DNA, 75 bp, synthetic construct
  source 1..75: mol_type = other DNA
ggatgaagatgacagcttctacgctgccaatggcatctctaccgatgatattgtcgctttaggtctggtttatca

SEQ ID NO: 457016 - DNA, 75 bp, synthetic construct
  source 1..75: mol_type = other DNA
cgcactggaaaaaaaaggatatatacaacgcatcaacagcaacaatgaccgccgggctatatatattcagttgac

SEQ ID NO: 457017 - DNA, 75 bp, synthetic construct
  source 1..75: mol_type = other DNA
aacgttgttaaatcggaacatttacgtgcagcggctgaatgcaaaaagcttattgcaacctataagaatattgaa

SEQ ID NO: 457018 - DNA, 75 bp, synthetic construct
  source 1..75: mol_type = other DNA
ctatttgttctttggcgtcctgccgcgcgcgcctcactggtacatggtgttcccggtcgggctggtgatgggagc

SEQ ID NO: 457019 - DNA, 75 bp, synthetic construct
  source 1..75: mol_type = other DNA
tttgggcgttggtgtgctggctggcggtgctattaacgctgccggacgtggattaggtgctgcttatcgtggagt

SEQ ID NO: 457020 - DNA, 75 bp, synthetic construct
  source 1..75: mol_type = other DNA
catttaaaggtcaggatgctgcttatctgaaaggattgaaaaactacctgcaatccacgcagcaggctgcaaaag

SEQ ID NO: 457021 - DNA, 75 bp, synthetic construct
  source 1..75: mol_type = other DNA
taacggcaattaaagtctcgattgatttattacaggtaatacttgatgcaaaaagccaatctgaacgtgaaaagg

SEQ ID NO: 457022 - DNA, 75 bp, synthetic construct
  source 1..75: mol_type = other DNA
gattggcaccaatgtgggtgattactatcaagcactgattgcgtcaaccggacaggcgcaggttgataaagagca

SEQ ID NO: 457023 - DNA, 75 bp, synthetic construct
  source 1..75: mol_type = other DNA
ggcgcaggtacgtgactacacgatggtgctgggcatcccttcgctccagaccggcgtgtttggcggcatcattat

SEQ ID NO: 457024 - DNA, 75 bp, synthetic construct
  source 1..75: mol_type = other DNA
atgtatgctgaaacccgtaacatgactggttacggtgatgctgatgccatcgctaacaaaacccaaaactttgaa

SEQ ID NO: 457025 - DNA, 75 bp, synthetic construct
  source 1..75: mol_type = other DNA
gatgaagatcttgagtatggttatttaatgaacactggcaatcattatgacgtttacctccctcctgaacttttt

SEQ ID NO: 457026 - DNA, 75 bp, synthetic construct
  source 1..75: mol_type = other DNA
atctcagggaagatgttaagacattatttggcgttgatctgcaatctgacaacaaaattcagggtgtgggtagtc

SEQ ID NO: 457027 - DNA, 75 bp, synthetic construct
  source 1..75: mol_type = other DNA
tgaactttttgaccaggcttgcgagttaaacaataaggaaaggaatgcgcaaattgattttttaactcgttatgc

SEQ ID NO: 457028 - DNA, 75 bp, synthetic construct
  source 1..75: mol_type = other DNA
agatacgaaaatttattcaggagtttcaggaggttttacatatactataaaatattctcaagagagagagcttgt

SEQ ID NO: 457029 - DNA, 75 bp, synthetic construct
  source 1..75: mol_type = other DNA
tgaactttttgctcaggcttacaagttaaacaataaggaaatgaatgcgcaacttgactatttaaatcgttatgc

SEQ ID NO: 457030 - DNA, 75 bp, synthetic construct
  source 1..75: mol_type = other DNA
gaaatcagacgtcaaaaagctgaagactacattccatgcctggaatgcgaatcactagaaaaagaatttgaggaa

SEQ ID NO: 457031 - DNA, 75 bp, synthetic construct
  source 1..75: mol_type = other DNA
aatacccattggaactatttctaagagttatcactgtaagcctggaaactcagaagatagtaaaaggattaccta

SEQ ID NO: 457032 - DNA, 75 bp, synthetic construct
  source 1..75: mol_type = other DNA
tttatattgtaagtgagcccaattttttttatcacttcaaaaagcagccagatgataaaaataacgatgatcagc

SEQ ID NO: 457033 - DNA, 75 bp, synthetic construct
  source 1..75: mol_type = other DNA
ttttataaaagacgctgaatctattgagcacttaactgaaaatatgtttcttgctgccgatgaagaaacatcaat

SEQ ID NO: 457034 - DNA, 75 bp, synthetic construct
  source 1..75: mol_type = other DNA
atatctgatttagatactggtattgatttgtctggtatatcttttattcagagtgaaattaataaaacttatgga

SEQ ID NO: 457035 - DNA, 75 bp, synthetic construct
  source 1..75: mol_type = other DNA
gaagcaaaaggaaagttataagaagtatttaaataatgattttattagaattaagaaagtatggagtaaaaatgg

SEQ ID NO: 457036 - DNA, 75 bp, synthetic construct
  source 1..75: mol_type = other DNA
gttaaaggatggctacaaagacaaccaaaagttggggtttaagcgtacccactatccttggttgtacgaaatccc

SEQ ID NO: 457037 - DNA, 75 bp, synthetic construct
  source 1..75: mol_type = other DNA
gcagattgaagatttatctgcccgcagcaatgcgctgcaatcgatggtgacgcagtttaatctgggcgaaatgtt

SEQ ID NO: 457038 - DNA, 75 bp, synthetic construct
  source 1..75: mol_type = other DNA
gatgctatcagcggttaagtcattgggtggcggcgcaaaatggctaatgcaactgcttggtcgtggcctgattgg

SEQ ID NO: 457039 - DNA, 75 bp, synthetic construct
  source 1..75: mol_type = other DNA
agccgaccccggcctgctgtatgcggggcagtggcgggatgcggaatcggggctgtgctataaccggttccggta

SEQ ID NO: 457040 - DNA, 75 bp, synthetic construct
  source 1..75: mol_type = other DNA
ggctggcgtacaccgctcaggggctgctgtcggggatattccgccaggatgaacggcgtctgggcatagagtacg

SEQ ID NO: 457041 - DNA, 75 bp, synthetic construct
  source 1..75: mol_type = other DNA
tctggcgttaccgctatgacgccgatggcctctgtaccgccagggttaacggcctggaggaaaccatcctctaca

SEQ ID NO: 457042 - DNA, 75 bp, synthetic construct
  source 1..75: mol_type = other DNA
caaattcccctattaactttatgaccaggcgttttttcaggatttaccctgtatttttcatttgcacaatcttat

SEQ ID NO: 457043 - DNA, 75 bp, synthetic construct
  source 1..75: mol_type = other DNA
cggacccgcgcggggagcgggacgcagaagcggaccccggtctgctgtatgcggggcagtggcgggatgcggagt

SEQ ID NO: 457044 - DNA, 75 bp, synthetic construct
  source 1..75: mol_type = other DNA
gcggcaatgcatgaaactattgaagctgttcgcagtgttgcggataactccagtggaattgccggatggcatttg

SEQ ID NO: 457045 - DNA, 75 bp, synthetic construct
  source 1..75: mol_type = other DNA
aaatggcctcgcccattgaacagactaaagcgttacagctggcgttaaatgatttatggctcagcattggcttgc

SEQ ID NO: 457046 - DNA, 75 bp, synthetic construct
  source 1..75: mol_type = other DNA
atcgactgaatattgccccggaaaatttccacgccgcgcaaaacatgatgtacggcattagcaaaagcggtgggc

SEQ ID NO: 457047 - DNA, 75 bp, synthetic construct
  source 1..75: mol_type = other DNA
cagcggcaaaaaatacagccgccaaacccgtatctgcctctttacctggtaaatccgtaaccaaagcggcgacgc

SEQ ID NO: 457048 - DNA, 75 bp, synthetic construct
  source 1..75: mol_type = other DNA
gggcagtggcgggatgcggaatcggggctgtgctataaccggttccggtattacgagccggagagcgggatgtac

SEQ ID NO: 457049 - DNA, 75 bp, synthetic construct
  source 1..75: mol_type = other DNA
ggcgttgttcagtccggtcggtcttatcgtggctgcgcttgccggagctgccgttctcatctggaaatactggga

SEQ ID NO: 457050 - DNA, 75 bp, synthetic construct
  source 1..75: mol_type = other DNA
ccgttcttatctggaaatactgggatcccatcagggcatttttgccggggtgttcagcgggattatggaaaggct

SEQ ID NO: 457051 - DNA, 75 bp, synthetic construct
  source 1..75: mol_type = other DNA
gataaatgtaccagtgctggcgagatattcggtaacgttcttggcggtgcgttacaacttgttctgacacctgca

SEQ ID NO: 457052 - DNA, 75 bp, synthetic construct
  source 1..75: mol_type = other DNA
cccgcacaatcggcggcgtgtcattcgatggctccgccaatatcaacctgccgggtgtaaacattgctggtaacc

SEQ ID NO: 457053 - DNA, 75 bp, synthetic construct
  source 1..75: mol_type = other DNA
aatggctcaagttattcacctggatggcgcagagcgtataacactaaaaataaacctactactgctgaccttggc

SEQ ID NO: 457054 - DNA, 75 bp, synthetic construct
  source 1..75: mol_type = other DNA
aggatcagcaagaggcctttaataatgcaaaagcccatttagaaaaggcactaaatactgtctatcagccaaatg

SEQ ID NO: 457055 - DNA, 75 bp, synthetic construct
  source 1..75: mol_type = other DNA
gagtctgcagagaaagccgcggaagatgaactggtgaaagtgaaccaggacggcgtggtgggtaaagctgaagcc

SEQ ID NO: 457056 - DNA, 75 bp, synthetic construct
  source 1..75: mol_type = other DNA
taagctatacgacatatataagtgccgaatatcctgacttgtctttatgggttcaggatggcattgacatccgat

SEQ ID NO: 457057 - DNA, 75 bp, synthetic construct
  source 1..75: mol_type = other DNA
aaaaaccaatgcctaaccctcttaaaatgtacgcggttgatgctgttgccgctattgcagaggtgagaggctgga

SEQ ID NO: 457058 - DNA, 75 bp, synthetic construct
  source 1..75: mol_type = other DNA
cagcgtttacccgtaccaacactgaccttcgcgcactgggcgaaaccatgaaatatgcaggtccggtggcgggta

SEQ ID NO: 457059 - DNA, 75 bp, synthetic construct
  source 1..75: mol_type = other DNA
ttctattatgatgaaaaacctgacattaatgatttctttaaacgtaacgataatttacctattgaatttgaacta

SEQ ID NO: 457060 - DNA, 75 bp, synthetic construct
  source 1..75: mol_type = other DNA
ccgatggaagatctgctgtctgacctttataaagccacccgcaaatacggggaagttgaccgggtatcgttcttt

SEQ ID NO: 457061 - DNA, 75 bp, synthetic construct
  source 1..75: mol_type = other DNA
tagcgaatttttcgagggtgcgaataagctgtgtgacgaagccatattcgttatcgtaccaggcgaccgttttca

SEQ ID NO: 457062 - DNA, 75 bp, synthetic construct
  source 1..75: mol_type = other DNA
tgtgaccactctcagagaatacaatcccaaaagatttacaatacgaaagatagcaaaaatactagggctttcaaa

SEQ ID NO: 457063 - DNA, 75 bp, synthetic construct
  source 1..75: mol_type = other DNA
agcgaaggggtaacgttaagtcaggagttaggtgaaactattgctcttgttaaagcacctggggccgccgggtta

SEQ ID NO: 457064 - DNA, 75 bp, synthetic construct
  source 1..75: mol_type = other DNA
agctgggtggatctggggaggccagataagaagcccggagagaaaaactttcctttcgtggcacttcctgcagtc

SEQ ID NO: 457065 - DNA, 75 bp, synthetic construct
  source 1..75: mol_type = other DNA
acctcataaagtcaggggtcataggcgataaaataaccttccagagaattgcagcaaaagttgcaagagagatgg

SEQ ID NO: 457066 - DNA, 75 bp, synthetic construct
  source 1..75: mol_type = other DNA
ttagatggcgatttggagctgatcaaagggttactagattctgttagcaaaattaagccagaagaagatgctaag

SEQ ID NO: 457067 - DNA, 75 bp, synthetic construct
  source 1..75: mol_type = other DNA
agatttgagccgaatctctggcgaatccttcggtactccgttgaatagaataaactggggtaactatgacttggt

SEQ ID NO: 457068 - DNA, 75 bp, synthetic construct
  source 1..75: mol_type = other DNA
gtaaatactctaaaattatatctacaggaaaaaaacaaaaatatatgtcggtatatttacatatatcgttgtcag

SEQ ID NO: 457069 - DNA, 75 bp, synthetic construct
  source 1..75: mol_type = other DNA
tagaccaaatgaagtttatagggtcaagaattttagatgtctctttacataagggggtttgtttatctatgtgca

SEQ ID NO: 457070 - DNA, 75 bp, synthetic construct
  source 1..75: mol_type = other DNA
tggctgaaaatattcaaaattgtggttggtgaaaatgaaaattatcttaaagatgtgatgatgcaactggaagcg

SEQ ID NO: 457071 - DNA, 75 bp, synthetic construct
  source 1..75: mol_type = other DNA
ctgttgaaccacttgcgataattgatagaacttttggtatgaaggaaaatatctcaatggtaaatgcatcgaaat

SEQ ID NO: 457072 - DNA, 75 bp, synthetic construct
  source 1..75: mol_type = other DNA
attgatgcaaaatataatggagaaacttatcggggaaatgaagagtttgctattaatctttttctgcagcatata

SEQ ID NO: 457073 - DNA, 75 bp, synthetic construct
  source 1..75: mol_type = other DNA
cgtgctttgacctgggggactgaagccggaaaagtacaggatgctgttttgtttcaaaatggcaggtttagggtt

SEQ ID NO: 457074 - DNA, 75 bp, synthetic construct
  source 1..75: mol_type = other DNA
ttggtcctccaggttgtggcaaaactcttgcagctaagcatattgcatctgagttgagattacctcttttcactg

SEQ ID NO: 457075 - DNA, 75 bp, synthetic construct
  source 1..75: mol_type = other DNA
atggcagtcagagagcatgaacgaagcagtgcccggcagcgacgactggcacgaaacctcgtcgttgatattgac

SEQ ID NO: 457076 - DNA, 75 bp, synthetic construct
  source 1..75: mol_type = other DNA
gatccgtaaagcctggggcgtggcgctgaaaagagccgcgtctgcactgcggatgaaggctatggcagagtttaa

SEQ ID NO: 457077 - DNA, 75 bp, synthetic construct
  source 1..75: mol_type = other DNA
cgcgatctgcgcggacgcatcagtgggggacgacgcggcgaacgccatcagttgcgcgatgagcgggggcgtttt

SEQ ID NO: 457078 - DNA, 75 bp, synthetic construct
  source 1..75: mol_type = other DNA
attatactggcggcagtcatttaattaaaaatattgtcggcctgatgatatttattgcctctattggctggctgg

SEQ ID NO: 457079 - DNA, 75 bp, synthetic construct
  source 1..75: mol_type = other DNA
gcgaccagtttcttacctgccattcttgggctggtggtgctgattgccgggctttcagccaccatgtcttctgcc

SEQ ID NO: 457080 - DNA, 75 bp, synthetic construct
  source 1..75: mol_type = other DNA
atgcttttatcattcgtcgaaatggcgatgagtttgatgaggcgaaggtatggtttggcctgaacgccatcaaag

SEQ ID NO: 457081 - DNA, 75 bp, synthetic construct
  source 1..75: mol_type = other DNA
ttttggtggcaattttagctattatattatccggcagttcagcaaggcttaactttgttgatttttcaagcttcc

SEQ ID NO: 457082 - DNA, 75 bp, synthetic construct
  source 1..75: mol_type = other DNA
atggacataaaacaccaaagagcgttgagatatatctttctgaaaaaaatattatttataaaataattaatgacc

SEQ ID NO: 457083 - DNA, 75 bp, synthetic construct
  source 1..75: mol_type = other DNA
ctgttaattacaggtgccgggcgcggattttgtgctggtcaggatcttaacgatcgtaacgttgatcccactggc

SEQ ID NO: 457084 - DNA, 75 bp, synthetic construct
  source 1..75: mol_type = other DNA
gtagaaaaggttttttaggcgtaaatcgcaaaatagtgccgatgtcgttcaggttaacacccaaaaacggacggt

SEQ ID NO: 457085 - DNA, 75 bp, synthetic construct
  source 1..75: mol_type = other DNA
tgcatcgtgtcgacgttgctttgcgaatgggagcattgccggacagtgacctttttggtgcgcgtccttcaaacc

SEQ ID NO: 457086 - DNA, 75 bp, synthetic construct
  source 1..75: mol_type = other DNA
gctgcgttcagcgttcttattaatcacggcgctcatacaattattaccaatggagttcagcccatatttatagac

SEQ ID NO: 457087 - DNA, 75 bp, synthetic construct
  source 1..75: mol_type = other DNA
aaaacacctccacttacgatgaagaattggaaaagttatctcccgaagaactgcgggcggaactccgttaccttc

SEQ ID NO: 457088 - DNA, 75 bp, synthetic construct
  source 1..75: mol_type = other DNA
ttgccccacgcatgggcattgttctgcttcgccctggcgccgatctgatgccgatgttcaggagagggcgggtac

SEQ ID NO: 457089 - DNA, 75 bp, synthetic construct
  source 1..75: mol_type = other DNA
ctgagccgccggacggggaaacgggtgtggcgtcgcgagcgtgacctgacggggtggatgtcgctgtcgcgtaaa

SEQ ID NO: 457090 - DNA, 75 bp, synthetic construct
  source 1..75: mol_type = other DNA
cgaattactcacccccgtcgacggttatctggcacctttcgctcccgtggtggcgaatattctaaaaaactggat

SEQ ID NO: 457091 - DNA, 75 bp, synthetic construct
  source 1..75: mol_type = other DNA
ttgcggagtattcgtttaatccaagtagctaatgaggtgtcgccgtctgccttggctgcctcctcaagttgcgct

SEQ ID NO: 457092 - DNA, 75 bp, synthetic construct
  source 1..75: mol_type = other DNA
tgaatggtaatataggactacttcgaactcataacattacatttgaacctgctcatcaggatgttagtattcctg

SEQ ID NO: 457093 - DNA, 75 bp, synthetic construct
  source 1..75: mol_type = other DNA
aaatattattaattcttgtggagtttatcctcaggatttaaaacacagagaaattatatcaacttttcacgcaga

SEQ ID NO: 457094 - DNA, 75 bp, synthetic construct
  source 1..75: mol_type = other DNA
tcatcacccccaaaaaacctggcgaagcgattcttcatgcttttaatgccacctaccagcaaatcagggaaaata

SEQ ID NO: 457095 - DNA, 75 bp, synthetic construct
  source 1..75: mol_type = other DNA
aatggttgaaagaggtgataacagcggtgttcatcagtatggtccagctgaacatttcactcacattatatctga

SEQ ID NO: 457096 - DNA, 75 bp, synthetic construct
  source 1..75: mol_type = other DNA
gaagttgaaggtacctggcctaacaaattgcaacctggaatatataaaaacatggggagtaatagcgttaacatt

SEQ ID NO: 457097 - DNA, 75 bp, synthetic construct
  source 1..75: mol_type = other DNA
tggtttcacgcttatcaacccgaagatctttgtaccatccataatccaatgggagatttgcaggattttatcgca

SEQ ID NO: 457098 - DNA, 75 bp, synthetic construct
  source 1..75: mol_type = other DNA
acctaccagcaaatcagagaaaatatgtctgagtttgcacgttgccattatgggtatatacaaatccctccagtg

SEQ ID NO: 457099 - DNA, 75 bp, synthetic construct
  source 1..75: mol_type = other DNA
tactacagcacaccagaaatgcagaatattttgctgcaaaatgtcgttggccacgctgtccggaaagcaaaaaat

SEQ ID NO: 457100 - DNA, 75 bp, synthetic construct
  source 1..75: mol_type = other DNA
atttgataattattttggttgcaagttatttgatgcctacgctctcaaagcgtttccatgatggtgttgatgtta

SEQ ID NO: 457101 - DNA, 75 bp, synthetic construct
  source 1..75: mol_type = other DNA
aagtaggggcggcatttgcattgatcaaatgccaccataggcctgaagcagaatatgaatttactggtgagtttc

SEQ ID NO: 457102 - DNA, 75 bp, synthetic construct
  source 1..75: mol_type = other DNA
gcactggtgccgctgggattgttatttaaaccacactatctgctgcgccatcgcaacccacggttgctttttgag

SEQ ID NO: 457103 - DNA, 75 bp, synthetic construct
  source 1..75: mol_type = other DNA
cgggaaaacaaaaatcgactgttaatgtaaaaagacctgcatggtctgatgtatatgaaggatatccaaaagtta

SEQ ID NO: 457104 - DNA, 75 bp, synthetic construct
  source 1..75: mol_type = other DNA
ggcgtttggtgaatacccaggttttcacttcatcaggtacgtataccccaaccccaggaacaaaacggatcaggg

SEQ ID NO: 457105 - DNA, 75 bp, synthetic construct
  source 1..75: mol_type = other DNA
aactgcaaacagcacgcacaataggcggagtgtcattcgatggtagtgccaatatcgacctgccgggcgtgaata

SEQ ID NO: 457106 - DNA, 75 bp, synthetic construct
  source 1..75: mol_type = other DNA
cggtagttgttccggttgaagttgaagaagaatccgcaccagttaccaactttgaaacactgcgcaataacttta

SEQ ID NO: 457107 - DNA, 75 bp, synthetic construct
  source 1..75: mol_type = other DNA
gtaacaaagaggctcaccgacatgcaaaaaatgcacgtcgagaagattggtattgaaagcataacctacgcagac

SEQ ID NO: 457108 - DNA, 75 bp, synthetic construct
  source 1..75: mol_type = other DNA
ctaaaaaagttccagaaaatatatgtcgcatattcagagaagatttaaaaaaagccagtgaaaaaagtatcggaa

SEQ ID NO: 457109 - DNA, 75 bp, synthetic construct
  source 1..75: mol_type = other DNA
gataaaggaacttatatacgcctgaaaggcgttgtttttatgtcactggtaatagctgggggatacttccggaaa

SEQ ID NO: 457110 - DNA, 75 bp, synthetic construct
  source 1..75: mol_type = other DNA
atatcttgtttgtcggtatggtatttgtcccccatattaccggattcgccgataaaggaacttatatacgcctga

SEQ ID NO: 457111 - DNA, 75 bp, synthetic construct
  source 1..75: mol_type = other DNA
aggatgcaaaaggcattgctacaaatgctgaacttaaacaagaaatgtatgaagttttgaggtttaacccttata

SEQ ID NO: 457112 - DNA, 75 bp, synthetic construct
  source 1..75: mol_type = other DNA
ggctggagcgatgtcggttcctggtcttcattatgggagatcagcgcccacaccgccgagggcaacgtttgccac

SEQ ID NO: 457113 - DNA, 75 bp, synthetic construct
  source 1..75: mol_type = other DNA
cgcagcagggcagtcgccctaaaacaaagttagacatcatgagtgaaaaagtgcccgccgagatttcggtgcaac

SEQ ID NO: 457114 - DNA, 75 bp, synthetic construct
  source 1..75: mol_type = other DNA
gagtctttggctgggtatagagaatttgtggttatttcatttagcaacggtcacgtatttcaggtcgaggcccct

SEQ ID NO: 457115 - DNA, 75 bp, synthetic construct
  source 1..75: mol_type = other DNA
gtgaattcaaaacagcaagctaataccacacactttgacgtgggtagcaaggtgatgcaaaccattcaggaactt

SEQ ID NO: 457116 - DNA, 75 bp, synthetic construct
  source 1..75: mol_type = other DNA
acttataattactctaacgagcaatatgatgaagttggttatgcaacaattgggttgcactcggtatttcaatca

SEQ ID NO: 457117 - DNA, 75 bp, synthetic construct
  source 1..75: mol_type = other DNA
caaccggattgggcaggcgacgagcggaatgtagtgcttactttgtctcgcatttggtacagcgcagcaaccggc

SEQ ID NO: 457118 - DNA, 75 bp, synthetic construct
  source 1..75: mol_type = other DNA
tgctaactaaagcaaggcaacacagccttgccttggcaggttcggccgcggaagatttcttcaactcagtcccgg

SEQ ID NO: 457119 - DNA, 75 bp, synthetic construct
  source 1..75: mol_type = other DNA
cataataaaattagctacctttttggaacaaaacgtcataacgccgagaaggaaaaattaaaagcgataagaaat

SEQ ID NO: 457120 - DNA, 75 bp, synthetic construct
  source 1..75: mol_type = other DNA
atcgttaccaatcgcgatatgctcacggataccctgctatcaacggagggtacgccacactatccgggaatgact

SEQ ID NO: 457121 - DNA, 75 bp, synthetic construct
  source 1..75: mol_type = other DNA
ataatgttttttcggagtttattggtctgattaatgatggcgtgcctgaggataaattaaaatattcacctgtat

SEQ ID NO: 457122 - DNA, 75 bp, synthetic construct
  source 1..75: mol_type = other DNA
cggaaaatttcggggaaatacgaattcgtcaaccaacaattttcgggaaatctcggaaacgtcaaccagctctcc

SEQ ID NO: 457123 - DNA, 75 bp, synthetic construct
  source 1..75: mol_type = other DNA
ctggatattgtgtggaatagtttgtggccgctactggtgataacggccacgacagggtcagcggcgtacgcgatg

SEQ ID NO: 457124 - DNA, 75 bp, synthetic construct
  source 1..75: mol_type = other DNA
tttagaaagaataaatcttgagttaagtattcaaaatgaaattggttataaagactctgatgaagtagttaagcc

SEQ ID NO: 457125 - DNA, 75 bp, synthetic construct
  source 1..75: mol_type = other DNA
tttcgcttccgctggcattattgaaggtgaatatgttccgctaaacgccgcgcataaccgtaatgtaattcaaaa

SEQ ID NO: 457126 - DNA, 75 bp, synthetic construct
  source 1..75: mol_type = other DNA
agtttcacctcttttaacgaaaacccggcagcgtaaactggcgggtttcagattgttgagtgcgctttattcatg

SEQ ID NO: 457127 - DNA, 75 bp, synthetic construct
  source 1..75: mol_type = other DNA
agagctgaacggatggataaggcgcagtcgaggcgtaagcaaggaccttgcggcgcaaacagcaggaagctgcca

SEQ ID NO: 457128 - DNA, 75 bp, synthetic construct
  source 1..75: mol_type = other DNA
ctggtcgggaccgcattgaaaacgaacgctatggcatcgcaccgtcgctggcctttggactcgatacctcaactc

SEQ ID NO: 457129 - DNA, 75 bp, synthetic construct
  source 1..75: mol_type = other DNA
ttgtgatggcaggtggctccggtagccgcttatggccgctctcccgcgtactttaccccaagcagtttttatgcc

SEQ ID NO: 457130 - DNA, 75 bp, synthetic construct
  source 1..75: mol_type = other DNA
actatgcagtgatggaacatacggcggatgccgtggtggtgccaatggatgcgggctggagtgatgtcggttcat

SEQ ID NO: 457131 - DNA, 75 bp, synthetic construct
  source 1..75: mol_type = other DNA
actctcattaacgcttgtttcaggactaaaccaaagcacattgtaactgaacaaattaatgaaatatcatttaaa

SEQ ID NO: 457132 - DNA, 75 bp, synthetic construct
  source 1..75: mol_type = other DNA
ctctttacaatggctacttcggtaatttatatcttgctgttaatattgctaaactgagacggcgaaagcgtgata

SEQ ID NO: 457133 - DNA, 75 bp, synthetic construct
  source 1..75: mol_type = other DNA
aagttggctttaaaggaacctaggatcataattcttccctatggtgatatatatggaggggctgcaaagaatttt

SEQ ID NO: 457134 - DNA, 75 bp, synthetic construct
  source 1..75: mol_type = other DNA
ttacagcaggaagggagcgaagacggtcacggtgtggtgttcccggctgaactggtggggctgctggacaggctg

SEQ ID NO: 457135 - DNA, 75 bp, synthetic construct
  source 1..75: mol_type = other DNA
gtggctggcgcatctttagctggagacagtgaaggtattgtagccaagcttctggcgatcccggcctttatggtt

SEQ ID NO: 457136 - DNA, 75 bp, synthetic construct
  source 1..75: mol_type = other DNA
acaaccgcaattgatgcttctgagttaaaaggcatgacaactgctaagccactggaaaaattagatacagcttta

SEQ ID NO: 457137 - DNA, 75 bp, synthetic construct
  source 1..75: mol_type = other DNA
tgaaaaagcgactattagtgctgcagaactttccaaagcagtaggtacagacgactttactttaactactgataa

SEQ ID NO: 457138 - DNA, 75 bp, synthetic construct
  source 1..75: mol_type = other DNA
attccattcgccatttcgcccctccccccttctggcagctggcgcacagtagcgcagacaattttccggcactga

SEQ ID NO: 457139 - DNA, 75 bp, synthetic construct
  source 1..75: mol_type = other DNA
gttcgccattgccattcgccatttcgccccccccccttctggcaactggcgcacagtagcgcagacaattttccg

SEQ ID NO: 457140 - DNA, 75 bp, synthetic construct
  source 1..75: mol_type = other DNA
gtcacttacaattctatggttcattccaataaataaagagaaatttatcacaaaaataacactcgttaatataat

SEQ ID NO: 457141 - DNA, 75 bp, synthetic construct
  source 1..75: mol_type = other DNA
cgggagcgtgacctgacggggtggatgtcgctgtcgcgtaaaccggagatgacgtggtacgggtgggacggcgac

SEQ ID NO: 457142 - DNA, 75 bp, synthetic construct
  source 1..75: mol_type = other DNA
caaccagcttaatgaagagaacccgtattacctgcaccagccataccgtctgccggggcagcagcatgatgagga

SEQ ID NO: 457143 - DNA, 75 bp, synthetic construct
  source 1..75: mol_type = other DNA
gcacagtagcgcagacaatttccggcactgacggtcagccattttattaccgccaatctgctcccggtgatgctg

SEQ ID NO: 457144 - DNA, 75 bp, synthetic construct
  source 1..75: mol_type = other DNA
ttcaaactacagctattgaatcacatcggcaacgtcggtggagttctcgttttttatttccatatggaccgaatt

SEQ ID NO: 457145 - DNA, 75 bp, synthetic construct
  source 1..75: mol_type = other DNA
taattatcagtcagaccctgagaggtggcgagaatggctgaaaatattctcttttgatgatgatttcttgtattt

SEQ ID NO: 457146 - DNA, 75 bp, synthetic construct
  source 1..75: mol_type = other DNA
gcggtcatcggctgttcaacgatgccgatattgaccggatccgcgagatcaaacgctggatcgacaacggcgtgc

SEQ ID NO: 457147 - DNA, 75 bp, synthetic construct
  source 1..75: mol_type = other DNA
caccaaatactctaaatgggatttagctgaaatagcatcttgtttcaaatctgcatctaactcagatgtactgat

SEQ ID NO: 457148 - DNA, 75 bp, synthetic construct
  source 1..75: mol_type = other DNA
ctatcacttataaacgcagcgatggttaatcaacgtattactccagattacattgcattaaccgaaggagaaata

SEQ ID NO: 457149 - DNA, 75 bp, synthetic construct
  source 1..75: mol_type = other DNA
tctaccgattgatcaaaacgcctttatgcagaactcgcagcgtttagagcagcgtttgagatcattgggattgct

SEQ ID NO: 457150 - DNA, 75 bp, synthetic construct
  source 1..75: mol_type = other DNA
tcaggggccggcggtgtgggtgtacagttgtcggacaacgcggggctggttccggccggacaaccgaggtctctg

SEQ ID NO: 457151 - DNA, 75 bp, synthetic construct
  source 1..75: mol_type = other DNA
gtgataaagctcagaaaaaaataaaatccgccaaacaaacccaactgcaccttgcagacgcactgactaacgcgg

SEQ ID NO: 457152 - DNA, 75 bp, synthetic construct
  source 1..75: mol_type = other DNA
catgattttttttgtgattatatacagtatgggattgatattatagttgaaggtaagtctattattattgataca

SEQ ID NO: 457153 - DNA, 75 bp, synthetic construct
  source 1..75: mol_type = other DNA
gcgcagtattacgcaaccgggacagcaactgctggtgatgtaacaacaactgtcaattataccatcgcttacgaa

SEQ ID NO: 457154 - DNA, 75 bp, synthetic construct
  source 1..75: mol_type = other DNA
cgctgcgctgggagatgactggtacacggatatcatcttcccgtacctcgatgcccagagcctgaacaccattcg

SEQ ID NO: 457155 - DNA, 75 bp, synthetic construct
  source 1..75: mol_type = other DNA
tcactgacccgcatcaccagtgacagccaggcagaccagctttatggcaaagggtcgatgctggctgaaatgctc

SEQ ID NO: 457156 - DNA, 75 bp, synthetic construct
  source 1..75: mol_type = other DNA
tgggttaaatttgataaaaccaatcctgatcatataaacgcaaaaataatggaggcaatacaatgcattgaatct

SEQ ID NO: 457157 - DNA, 75 bp, synthetic construct
  source 1..75: mol_type = other DNA
tctcagttgcttctgggagaaagcgccaccagcggcagtatttttttccagctacacctttactggcgtgcaact

SEQ ID NO: 457158 - DNA, 75 bp, synthetic construct
  source 1..75: mol_type = other DNA
gagctgaaggagtcccgggaggacggtcgtcagcttcaggccgaactgctggccctggcccgccatgacgggaag

SEQ ID NO: 457159 - DNA, 75 bp, synthetic construct
  source 1..75: mol_type = other DNA
caacgcggggccggttccggccggacaaccgaggtctctgggacaggtaggtagctctcctgtgagtctggggct

SEQ ID NO: 457160 - DNA, 75 bp, synthetic construct
  source 1..75: mol_type = other DNA
tctcgttgatggaaaaataaatccgaacaaagatacaaaagcattacaaaaacatatcatgcgtaacaaactcat

SEQ ID NO: 457161 - DNA, 75 bp, synthetic construct
  source 1..75: mol_type = other DNA
ttccggtaaagctggatattctcgccattacctcaacggcaaaaacgattgattatgaggtcgaggttgaacgct

SEQ ID NO: 457162 - DNA, 75 bp, synthetic construct
  source 1..75: mol_type = other DNA
atactagaatcactcgtagaatgttgcttaactgatgaggaaatagattatattatgaagtctataaacatttat

SEQ ID NO: 457163 - DNA, 75 bp, synthetic construct
  source 1..75: mol_type = other DNA
aaaaaataaagaaatcaacgatgaattactgcagaaatggataaaaacttacctgaatcgtgaagtcgtcggagg

SEQ ID NO: 457164 - DNA, 75 bp, synthetic construct
  source 1..75: mol_type = other DNA
tggcaagcgacgtgattggctccaccaatgaagtggccttcagcgacacgttacatagactgaagggggatacgc

SEQ ID NO: 457165 - DNA, 75 bp, synthetic construct
  source 1..75: mol_type = other DNA
atgttatcccctaaaatatcgcagctttccattgttgtattgctctcactaattagcacaaacgttaatgcctgt

SEQ ID NO: 457166 - DNA, 75 bp, synthetic construct
  source 1..75: mol_type = other DNA
atatgttcgtctggcctgtgaaaaatatcttcagttacaccctgaagatactgaaaaagtaaacaaattactgtc

SEQ ID NO: 457167 - DNA, 75 bp, synthetic construct
  source 1..75: mol_type = other DNA
gtcaaaaacgatatatcgcatcaggagtccgtgcactgtggttgcgaaagttacgtaaaggaagtaaagagcatg

SEQ ID NO: 457168 - DNA, 75 bp, synthetic construct
  source 1..75: mol_type = other DNA
aataactattactttgcacataaatccaaaagcgattgcctgtatgcgaaagaaagcgcagaacatttatatctc

SEQ ID NO: 457169 - DNA, 75 bp, synthetic construct
  source 1..75: mol_type = other DNA
atgacgattgcagagcgaattcataatgatggatggctgttgggaagggaagaaggggaacagcgcattcttcga

SEQ ID NO: 457170 - DNA, 75 bp, synthetic construct
  source 1..75: mol_type = other DNA
gcggcaacttcacctcaaacggcattaccgtgcatacgcataaacacggtggcgtgaaaggcggcagcgattcga

SEQ ID NO: 457171 - DNA, 75 bp, synthetic construct
  source 1..75: mol_type = other DNA
cagaggcaaccggagccgccggataacttcggagacctgagaaaggcagtagatcgcacttatgctgaaatgggt

SEQ ID NO: 457172 - DNA, 75 bp, synthetic construct
  source 1..75: mol_type = other DNA
aactacttatccaacaaagatattagttgacgtaccaagtgatgcaaaagcaggaggagtcagcggtactatcac

SEQ ID NO: 457173 - DNA, 75 bp, synthetic construct
  source 1..75: mol_type = other DNA
gcgtgttggcggacaacggtgcagcggtcgctccgacggtcaccacgcatccggacggcacggtggagatctctg

SEQ ID NO: 457174 - DNA, 75 bp, synthetic construct
  source 1..75: mol_type = other DNA
atcacagagccggacgggacgttggagatctcagtcaccagccagacggcgggagtcagtgcagtcactgcaacc

SEQ ID NO: 457175 - DNA, 75 bp, synthetic construct
  source 1..75: mol_type = other DNA
ccggcggatacggtggcggttgaccttgcgtacgaagtggccggtcatggtgactggcgaacggatgcgtttatt

SEQ ID NO: 457176 - DNA, 75 bp, synthetic construct
  source 1..75: mol_type = other DNA
catttgatcgccatgttcgcccgcactcctgtagccaaagagttccgccgttgggttctggatattctcgatcga

SEQ ID NO: 457177 - DNA, 75 bp, synthetic construct
  source 1..75: mol_type = other DNA
ccatcattcagatggtgacaaaatgttatcagaacagagaatgtcagaatcttccttttgatgttcttcgtaaaa

SEQ ID NO: 457178 - DNA, 75 bp, synthetic construct
  source 1..75: mol_type = other DNA
attgtacaatacaaaaacattcctttgtttatggagaaatgcgtcgagtacggtaaaactctcgcggtcgccggg

SEQ ID NO: 457179 - DNA, 75 bp, synthetic construct
  source 1..75: mol_type = other DNA
tcagatatcttgatccagaaactgaagcattaatttatcaacgctacgtgaaaaacggtaaagcttttgactggg

SEQ ID NO: 457180 - DNA, 75 bp, synthetic construct
  source 1..75: mol_type = other DNA
tgctctggtgactgcggcgcagagatggaattacaggatctgcttaagcacaacctcacgtatgcctccgagttc

SEQ ID NO: 457181 - DNA, 75 bp, synthetic construct
  source 1..75: mol_type = other DNA
aagcggtacaagtcgcaattgatcttgactgctattccggcggcagcgttgattcgttccccgctgggaagcaaa

SEQ ID NO: 457182 - DNA, 75 bp, synthetic construct
  source 1..75: mol_type = other DNA
ggctgaacgtatcgaagagttacagacaaaacctacgccagattcgtttggcatcatcggtgaaaacattcgaac

SEQ ID NO: 457183 - DNA, 75 bp, synthetic construct
  source 1..75: mol_type = other DNA
tgttggttgagcgcagagggtactggcgggctgttgtggccatcgccgccaaaaatgcgcggctgtgttgggcat

SEQ ID NO: 457184 - DNA, 75 bp, synthetic construct
  source 1..75: mol_type = other DNA
gaagagggcgaagccgtaccaaaagccaccagtatggataactggctggcagatccagattattcaggggccgtg

SEQ ID NO: 457185 - DNA, 75 bp, synthetic construct
  source 1..75: mol_type = other DNA
cgcagccccgctgttctctaccgatgaagtctggggaagtatggacccggaaagcccttattatcatgccgataa

SEQ ID NO: 457186 - DNA, 75 bp, synthetic construct
  source 1..75: mol_type = other DNA
ggtttgcttactattgatgtagtcgtagttaataagtgtaaggcattcattaaaggtaaaaatgtttggatttat

SEQ ID NO: 457187 - DNA, 75 bp, synthetic construct
  source 1..75: mol_type = other DNA
atggacgcttctggcgaggcggtttcatggattgtccgtaatcaggatatgctgcccggttacgccgtgaatctt

SEQ ID NO: 457188 - DNA, 75 bp, synthetic construct
  source 1..75: mol_type = other DNA
aaaggagatacaaattatttaatggacgatttttcgttcagggaattgagaatgtaatattttttgaacgatatt

SEQ ID NO: 457189 - DNA, 75 bp, synthetic construct
  source 1..75: mol_type = other DNA
gcttcttgccagcttatatggcacagaaccagattacatccgaaaaaatttcaatcggaattctggacgatttgt

SEQ ID NO: 457190 - DNA, 75 bp, synthetic construct
  source 1..75: mol_type = other DNA
aagtctacgaggaagatggcgaagccagtattaatgtgactaatactggcagcgatgcggcattgctatatgtca

SEQ ID NO: 457191 - DNA, 75 bp, synthetic construct
  source 1..75: mol_type = other DNA
attaaactcgaaatcacaatcgcctgcattaggtttgggacatgagtttgctcatgcgcagtattaccttcttga

SEQ ID NO: 457192 - DNA, 75 bp, synthetic construct
  source 1..75: mol_type = other DNA
cgggaagcttcacaccgctcatccgcatcgaaacagacaacggcgagcgggagaaaacgcagcggcggagcctgg

SEQ ID NO: 457193 - DNA, 75 bp, synthetic construct
  source 1..75: mol_type = other DNA
tgggactgatcaatttttccattgtatggcattttgtcgagtgtctaaattaaatgacgctggtgttagccgatc

SEQ ID NO: 457194 - DNA, 75 bp, synthetic construct
  source 1..75: mol_type = other DNA
agcacagcatgtctttaagaccttctgtgaaaatcgcccgtaacgttcgctccctcatcctctggacagaacgcg

SEQ ID NO: 457195 - DNA, 75 bp, synthetic construct
  source 1..75: mol_type = other DNA
gagcctggcggaggtgttgcaggaggacacgggggtgacgcttccggcggagctggcggtgatgctggggaggct

SEQ ID NO: 457196 - DNA, 75 bp, synthetic construct
  source 1..75: mol_type = other DNA
tcgcggaagatgcgcactatgtctaccgccacgatgaatacggcaggctggcggagaagacggaccgcatcccgg

SEQ ID NO: 457197 - DNA, 75 bp, synthetic construct
  source 1..75: mol_type = other DNA
gccgggaagcttcacgccgctcatccgggtcgagacagagaacggcgagcgggagaaagcgcagcgccgcagcct

SEQ ID NO: 457198 - DNA, 75 bp, synthetic construct
  source 1..75: mol_type = other DNA
gaacaggggctggcgacccgtcaggagccggacggtctgccgccggtggagtggctgacgtatggcagcggttat

SEQ ID NO: 457199 - DNA, 75 bp, synthetic construct
  source 1..75: mol_type = other DNA
ggttcagccggggtgcgcattggtgcccccaccggcgtggcctgttcggtgtgccccggcggagtgacgtccggc

SEQ ID NO: 457200 - DNA, 75 bp, synthetic construct
  source 1..75: mol_type = other DNA
tatggcggcgggagcgtgacctgacggggtggatgtcgctgtcgcgtaaaccggaagtaacgtggtacggctggg

SEQ ID NO: 457201 - DNA, 75 bp, synthetic construct
  source 1..75: mol_type = other DNA
cagtggctggcacagtgcgggctgacggtggagcaactggaaaaacaggtggagccggaatacacaccggcgcga

SEQ ID NO: 457202 - DNA, 75 bp, synthetic construct
  source 1..75: mol_type = other DNA
ctaccggtatgatgataccgggcgggtgacggagcaggtcaacccggaggggctggactatcgctttgagtacgg

SEQ ID NO: 457203 - DNA, 75 bp, synthetic construct
  source 1..75: mol_type = other DNA
ggtgtttgacggcgtcgagccaaaccctaaagacaccaacgtgcgcgacggcctggacgtttttcgtaaagagca

SEQ ID NO: 457204 - DNA, 75 bp, synthetic construct
  source 1..75: mol_type = other DNA
gcatctgcgcgatctgggagtaaaagaggccgacttcccctacatggctgagatggctctgaaagacggcaatgc

SEQ ID NO: 457205 - DNA, 75 bp, synthetic construct
  source 1..75: mol_type = other DNA
cgacgcggtatgagtatgaccggtacggtcaacaaatcgccgttcaccgggaagaaggcatcagcacttacagca

SEQ ID NO: 457206 - DNA, 75 bp, synthetic construct
  source 1..75: mol_type = other DNA
ctaccactacgacagccagcaccgtctggtgttctacacgcggatacagcacggtgagccgccggttgagagccg

SEQ ID NO: 457207 - DNA, 75 bp, synthetic construct
  source 1..75: mol_type = other DNA
ctaccactacgacagccagcaccgtctggtgttctacacgcggatacagcacggtgagccgctggtcgagagccg

SEQ ID NO: 457208 - DNA, 75 bp, synthetic construct
  source 1..75: mol_type = other DNA
acgtggtacgggtgggacggcgaccggctgacgacggtacagaccgacaccacgcgtatccagacggtatatcag

SEQ ID NO: 457209 - DNA, 75 bp, synthetic construct
  source 1..75: mol_type = other DNA
ggctttaaaaatatcgctatagctgcaatggtcgctggtatggttggttgcgctgatatgccgaaacgtgaatgc

SEQ ID NO: 457210 - DNA, 75 bp, synthetic construct
  source 1..75: mol_type = other DNA
gctggctgacagacatcagccatatcagcaaagggcaccgggtgacggtgcattacgggtatgatgagaaaggcc

SEQ ID NO: 457211 - DNA, 75 bp, synthetic construct
  source 1..75: mol_type = other DNA
ataacgccaacctcggctacgtgcacgccatggcgcaccagctgggcggcctgtacgacatgccgcacggcgtgg

SEQ ID NO: 457212 - DNA, 75 bp, synthetic construct
  source 1..75: mol_type = other DNA
gtctctatcaacgatccgctgctgatgatcggtaaaccggccgccctgaccgcggcgaccgggatggatgccctg

SEQ ID NO: 457213 - DNA, 75 bp, synthetic construct
  source 1..75: mol_type = other DNA
gttacgatgtactcgaccggctgatacaggaaaccggctttgacggccgcacacagcgttatcaccacgacctga

SEQ ID NO: 457214 - DNA, 75 bp, synthetic construct
  source 1..75: mol_type = other DNA
gagcggtgagtgcggagagtgaggcatggcttgcgcagtgcgggctgacggcggaacagatggccgcgcagatgg

SEQ ID NO: 457215 - DNA, 75 bp, synthetic construct
  source 1..75: mol_type = other DNA
atgtagggaagagtattcaaaatttgaataaccgcatcaaccatgtggagaaaaatgcaaatgcaggcatagctg

SEQ ID NO: 457216 - DNA, 75 bp, synthetic construct
  source 1..75: mol_type = other DNA
cagcttcttacgcgggatagaacgtcgtggcttccacatgatcttagagtctcagaaacaggaccctgcagcctt

SEQ ID NO: 457217 - DNA, 75 bp, synthetic construct
  source 1..75: mol_type = other DNA
gaacaagcccggagtaccaaaaacagcttcggaacagcaccaaattctatcggggcatgcgttatgtaccacaag

SEQ ID NO: 457218 - DNA, 75 bp, synthetic construct
  source 1..75: mol_type = other DNA
atttttgtcgctagatttttacaagaaaagggagtttatgaatttattgaggctgcacaagtagtcaaaaagaaa

SEQ ID NO: 457219 - DNA, 75 bp, synthetic construct
  source 1..75: mol_type = other DNA
gctataccagtacattactgtttcagtcgaacagggctaaatccattttctgatattatcaatacctataaatta

SEQ ID NO: 457220 - DNA, 75 bp, synthetic construct
  source 1..75: mol_type = other DNA
ggacaggtttcattacgaactaaattactaaaaaaaatattggtttcgctttacaaagtgagtttcagacacatt

SEQ ID NO: 457221 - DNA, 75 bp, synthetic construct
  source 1..75: mol_type = other DNA
ttttatgctgatggtgccgggttgagtgctaaggtaacgaaagctggtggcattagctgggtgtttacttaccga

SEQ ID NO: 457222 - DNA, 75 bp, synthetic construct
  source 1..75: mol_type = other DNA
attctaacccgcccggataaaacgacgctccggattgaaataagtaaacgctgggagtccactgctaatgcctta

SEQ ID NO: 457223 - DNA, 75 bp, synthetic construct
  source 1..75: mol_type = other DNA
attcttacccgcccggataaaacaacgctccggattgaaataagtaaacgctgggagtccaccgctaatgcctta

SEQ ID NO: 457224 - DNA, 75 bp, synthetic construct
  source 1..75: mol_type = other DNA
gcgctacaatttttgctctaatgatgattgtcagagcactttttacttatatctaccctggaaaactaccattta

SEQ ID NO: 457225 - DNA, 75 bp, synthetic construct
  source 1..75: mol_type = other DNA
aaagtaccggaagaatatcgcgacgcaattaatgggcttctatatattcttaactactttgagtttcttgcccaa

SEQ ID NO: 457226 - DNA, 75 bp, synthetic construct
  source 1..75: mol_type = other DNA
tccggctaccttcttggggttgtgaagaatagcgaagcggttagccagtggggccgtagtgtttataaaaaactg

SEQ ID NO: 457227 - DNA, 75 bp, synthetic construct
  source 1..75: mol_type = other DNA
cgtgatctttccctgcaaatggaacgcaaaataaacacctattccatgagttatataatttttcacaatgattaa

SEQ ID NO: 457228 - DNA, 75 bp, synthetic construct
  source 1..75: mol_type = other DNA
cgcaccgtacggtgaacggcgacccggcggagcagtggcagtatgatgagcacgggtggttaaccaccatcagcc

SEQ ID NO: 457229 - DNA, 75 bp, synthetic construct
  source 1..75: mol_type = other DNA
gaagcgggtggtgaagaaggagcatgcggacgggagcatcacccgcagcgagtatgatgaggcggggaggctgaa

SEQ ID NO: 457230 - DNA, 75 bp, synthetic construct
  source 1..75: mol_type = other DNA
gataaccgtatcgcccgtgacgcgcactatctttaccggtatgaccgttacggcaggctgacggagaaaaccgac

SEQ ID NO: 457231 - DNA, 75 bp, synthetic construct
  source 1..75: mol_type = other DNA
tgccgggcgcatcaccgtgctgaccaacgagaacggcagccagtccacgttcctgtatgacccggtggaccgcct

SEQ ID NO: 457232 - DNA, 75 bp, synthetic construct
  source 1..75: mol_type = other DNA
gtacacgcgggacaggctgcaccgtgagacggcccgcagcttcggcggggaggcatatgaacttgccaccgcctg

SEQ ID NO: 457233 - DNA, 75 bp, synthetic construct
  source 1..75: mol_type = other DNA
gctggccttcacggactgctcggggtacacgacgcggtatgagtacgaccagtacggtcaacaaatcgccgttca

SEQ ID NO: 457234 - DNA, 75 bp, synthetic construct
  source 1..75: mol_type = other DNA
tattctgaccttgctattaccactgcccttgtgattaaacgcgtattccggctgaccgaccctgcgggcttgaac

SEQ ID NO: 457235 - DNA, 75 bp, synthetic construct
  source 1..75: mol_type = other DNA
tatctgcggtatgggggggatcgccctgaacgctgttgccgtggataaacgcgtaaaagcggtcgttgccagcac

SEQ ID NO: 457236 - DNA, 75 bp, synthetic construct
  source 1..75: mol_type = other DNA
tctgccacagtctgcgtgacggttaccagttaccggtcagccagctggctcctgttccggtcaccgttccttttg

SEQ ID NO: 457237 - DNA, 75 bp, synthetic construct
  source 1..75: mol_type = other DNA
tctgccgccggtggagtggctgacctacggcagcggctatcttgcgggcatgaagctgggcgggacgccgctgct

SEQ ID NO: 457238 - DNA, 75 bp, synthetic construct
  source 1..75: mol_type = other DNA
aaaatcatgaggcggcaggggatagacaaggtcagccagctaaagaaagaatcatggatcttaaaaataacactg

SEQ ID NO: 457239 - DNA, 75 bp, synthetic construct
  source 1..75: mol_type = other DNA
gcgcttttactttcggccttatcgaagaaatggacggtaggcttgcatcaatactggatcgacaacaatctgacg

SEQ ID NO: 457240 - DNA, 75 bp, synthetic construct
  source 1..75: mol_type = other DNA
ggtgtacagctccggcaccggaacgtggctggcgaacggcgggatggacgtggttgatttccggctttcgacggt

SEQ ID NO: 457241 - DNA, 75 bp, synthetic construct
  source 1..75: mol_type = other DNA
agcgtaccgtcagccgacttaagcaccctgaccgccagcaactacaccgtgaacgcggcggtgagcgacaaagcc

SEQ ID NO: 457242 - DNA, 75 bp, synthetic construct
  source 1..75: mol_type = other DNA
gcgaaatcaccatagacgcgaatctccccggtctgcgggtcgacaccgtggcgggcgatgatgtggttaatatta

SEQ ID NO: 457243 - DNA, 75 bp, synthetic construct
  source 1..75: mol_type = other DNA
cgtcgcggcgaacggttcgtggagcaccacggttccggcggcggatatggcagccctgcgtgatggcgatgccag

SEQ ID NO: 457244 - DNA, 75 bp, synthetic construct
  source 1..75: mol_type = other DNA
ttttgcaggcgctgggcaacggcgaactgaccatcagcgcctcggtgactaattccgcaaataataccggcaccg

SEQ ID NO: 457245 - DNA, 75 bp, synthetic construct
  source 1..75: mol_type = other DNA
ccagtcataatgtgctggtcaacagcgccttgcctgccgtcaccattaacgcggtggcgaccgatgacattatta

SEQ ID NO: 457246 - DNA, 75 bp, synthetic construct
  source 1..75: mol_type = other DNA
ccgaaaaaggcgcggcgttaacgctctccggcagcacctctggcgtcgaagccggacaaacggtcaccgtcacct

SEQ ID NO: 457247 - DNA, 75 bp, synthetic construct
  source 1..75: mol_type = other DNA
actaccggtaatacggtttccgtgacgattggcacgaccacctataccaccgtgctggacgccaacggcaactgg

SEQ ID NO: 457248 - DNA, 75 bp, synthetic construct
  source 1..75: mol_type = other DNA
tccggcaactggagcgtcggcgttccggcggcggatgtcacagcgctgggcagcggcccgcaaactgtcaccgcc

SEQ ID NO: 457249 - DNA, 75 bp, synthetic construct
  source 1..75: mol_type = other DNA
attgtgtcgtataccgatgatgtcgggcagcggcaggggacattaagcagttcgcaggccaccgacgacactacg

SEQ ID NO: 457250 - DNA, 75 bp, synthetic construct
  source 1..75: mol_type = other DNA
cggcagacgtgagtaactggcctgcgggtacggtgaatatcacggtaagtggcactaacacagccggaacaacat

SEQ ID NO: 457251 - DNA, 75 bp, synthetic construct
  source 1..75: mol_type = other DNA
ggtgcaggcgaatttaagctggagcgtcgatgttccggcctccgcgctacaggcgttgggcaacggcgaactgac

SEQ ID NO: 457252 - DNA, 75 bp, synthetic construct
  source 1..75: mol_type = other DNA
agcgtaccgtcagccgacttaagcgccctgaccgccagcaactacaccgtcagcgcggcggtgagcgacaaagcc

SEQ ID NO: 457253 - DNA, 75 bp, synthetic construct
  source 1..75: mol_type = other DNA
taaccgcacttgccaataacggctacaccctgaccgccacggtcagcgatcaggcgggtaaccctggcagcgcca

SEQ ID NO: 457254 - DNA, 75 bp, synthetic construct
  source 1..75: mol_type = other DNA
tggatgtggttgatttccgcctctcgacggtgggcgtgaccgcgaatttaagcgtcaccaccgcgcaggccaccg

SEQ ID NO: 457255 - DNA, 75 bp, synthetic construct
  source 1..75: mol_type = other DNA
acgggcgcggcggcgggcgatgtggtcacggttaacctgaacggtaaaaactacaccaccacgctggacgcctcc

SEQ ID NO: 457256 - DNA, 75 bp, synthetic construct
  source 1..75: mol_type = other DNA
attttcggggcaggcagatggtaataatgatgatttattagccattgtttcaggcactaatgtagcgacggcaac

SEQ ID NO: 457257 - DNA, 75 bp, synthetic construct
  source 1..75: mol_type = other DNA
cactggctgatggcggcgcatacgtgattaacgctcaggtcagcaatgccattggcaataccggcagcagcaatc

SEQ ID NO: 457258 - DNA, 75 bp, synthetic construct
  source 1..75: mol_type = other DNA
accgtttcgacggacgatcgactcaacgccgccgaacaacagcagccgttaacccttaacggctcgaccagcgcg

SEQ ID NO: 457259 - DNA, 75 bp, synthetic construct
  source 1..75: mol_type = other DNA
gggcagattgttacggtaacgctcaatagcccaaccgtgcagacatatcaggcaacggtacaggccgatggcacc

SEQ ID NO: 457260 - DNA, 75 bp, synthetic construct
  source 1..75: mol_type = other DNA
ataactacagcgtcgacagcagtgcgccaaccatcattattaataccgttgccagcgacaatatcgtcaatggca

SEQ ID NO: 457261 - DNA, 75 bp, synthetic construct
  source 1..75: mol_type = other DNA
ttgagctgggtggcaatacgtacacggcgacggtggggagcaacctcacctggagtgtgaacgttccggcggctg

SEQ ID NO: 457262 - DNA, 75 bp, synthetic construct
  source 1..75: mol_type = other DNA
gcgcccaggccgatcgcgcgtacagcgtcgatgccaccgcgccgcttgtgaccatcaacaccattgccagcgacg

SEQ ID NO: 457263 - DNA, 75 bp, synthetic construct
  source 1..75: mol_type = other DNA
gggcgcggcgttgacggtagtcatcaacaacgtcacctacggcgcaacggtactcgccgatggcagctggagcgt

SEQ ID NO: 457264 - DNA, 75 bp, synthetic construct
  source 1..75: mol_type = other DNA
gtaatggcgacctgacggttaacgcctcggtgaccaacagcgtgggcaataccggcagcggttcgcgagatatta

SEQ ID NO: 457265 - DNA, 75 bp, synthetic construct
  source 1..75: mol_type = other DNA
aactggagcgtcaccgttccggcatcggcggtaaccgcactgggccaggccaactacacggtaacggcggcggtg

SEQ ID NO: 457266 - DNA, 75 bp, synthetic construct
  source 1..75: mol_type = other DNA
aactgctcaacgccagcgacgccaccggtggcaacggctcggacgtggtgaatggctttacggtagggacatggg

SEQ ID NO: 457267 - DNA, 75 bp, synthetic construct
  source 1..75: mol_type = other DNA
ggggatttccggctctaactttaacgataccctgaccggcagcacgggcgataaccaactggaagggcgcggcgg

SEQ ID NO: 457268 - DNA, 75 bp, synthetic construct
  source 1..75: mol_type = other DNA
ctataacgcggtgctgatcaaatccaccggtgccaccgccagcaatatcgaccagacggtcaataccacctgggg

SEQ ID NO: 457269 - DNA, 75 bp, synthetic construct
  source 1..75: mol_type = other DNA
ccgtcacgttaaacagtaaaacctacaccacgacgctggacgcctccggcaactggagcgttggcgttccggcgg

SEQ ID NO: 457270 - DNA, 75 bp, synthetic construct
  source 1..75: mol_type = other DNA
accaatcaaaacggcaacattggcagcggctcgcgcgatatcaccatcgacgccaatctgcccggtctgcgggtc

SEQ ID NO: 457271 - DNA, 75 bp, synthetic construct
  source 1..75: mol_type = other DNA
tagcgcactgcccggcgtgaccattaacccggtggcgagcgacgatattattaacgtcgcagaagcaggcgcagc

SEQ ID NO: 457272 - DNA, 75 bp, synthetic construct
  source 1..75: mol_type = other DNA
cacggtcgatctcgctaccgtggcgattaccatcaacaccctttccactgacgatgtaattaacgctgctgaaaa

SEQ ID NO: 457273 - DNA, 75 bp, synthetic construct
  source 1..75: mol_type = other DNA
tcgggcagacggcgacgcaaaacgtggtggtcgataccaccagccccgaagcggcgaaaagcatcaccattaccg

SEQ ID NO: 457274 - DNA, 75 bp, synthetic construct
  source 1..75: mol_type = other DNA
ggtaagcggcacgctgggcgcggcgctttctgccggtgagttcgcgcaaatcagcattgatggcggcagcacctg

SEQ ID NO: 457275 - DNA, 75 bp, synthetic construct
  source 1..75: mol_type = other DNA
ggcctcgacacgcacgggatgtggacggtgctggccaaccagcaggtgatgcaatctaccgacccgcttacctgg

SEQ ID NO: 457276 - DNA, 75 bp, synthetic construct
  source 1..75: mol_type = other DNA
gcggcactcggtagcggtgcacagaccatcaccgccagcgtcagcgatcgggcaggcaacagcgacgacgccagc

SEQ ID NO: 457277 - DNA, 75 bp, synthetic construct
  source 1..75: mol_type = other DNA
ccacggtacagggcaacttaagctggagcgtcagcgttccggcagccgatctccaggcgctgggcaatggtgatt

SEQ ID NO: 457278 - DNA, 75 bp, synthetic construct
  source 1..75: mol_type = other DNA
acgtgcaggttaacacggcggcagtgtcgctctcggtcagcaccatcagcggcgataaccttattaacgccgccg

SEQ ID NO: 457279 - DNA, 75 bp, synthetic construct
  source 1..75: mol_type = other DNA
tttgacgtggtggttcttgaagcctcacgcatcggcttcggcgcaagcggacgcaacggcgggcagcttgtgaac

SEQ ID NO: 457280 - DNA, 75 bp, synthetic construct
  source 1..75: mol_type = other DNA
gcgacgccgaacgtttcgatgccttcgccaatctgccgcattacccgttccccggcgggcgcacgctgcgcgtgc

SEQ ID NO: 457281 - DNA, 75 bp, synthetic construct
  source 1..75: mol_type = other DNA
accctacctacccagttgaagaaaacagcggtttggttgtcccacgtatgactaacccggatgtctctttcctcc

SEQ ID NO: 457282 - DNA, 75 bp, synthetic construct
  source 1..75: mol_type = other DNA
actcaacaggctgagacaggacaaaccgtcacagtaaccctggctggacagagttttaccactaccgtgcaggcc

SEQ ID NO: 457283 - DNA, 75 bp, synthetic construct
  source 1..75: mol_type = other DNA
ccaccgagcggctttccgatgatttagcccgttcgctgatcccgaaaaactactgcgtcgaagactgtaactatc

SEQ ID NO: 457284 - DNA, 75 bp, synthetic construct
  source 1..75: mol_type = other DNA
taaacctcgccattggtgaagccgatgccatccgcctgaacggcgggcgcgtgtatgagctttctgccgtgacgc

SEQ ID NO: 457285 - DNA, 75 bp, synthetic construct
  source 1..75: mol_type = other DNA
tcgccattgcgagcatcagcgatgacaccgggttaagcagcagcgattttgttacacgcgacaccacgctgaccg

SEQ ID NO: 457286 - DNA, 75 bp, synthetic construct
  source 1..75: mol_type = other DNA
caccaccgacgcctccggcaactggagtgttaccgtgcctgcctcggcggtcagtgcgctgggcgaagcgaccta

SEQ ID NO: 457287 - DNA, 75 bp, synthetic construct
  source 1..75: mol_type = other DNA
ctcgatggcggcgttacctggaccacgttaaccgttatcggcaccaactggagctatgccgatggtcgcacgctg

SEQ ID NO: 457288 - DNA, 75 bp, synthetic construct
  source 1..75: mol_type = other DNA
gtttaccaggcgctggcaaaactgcgtcgccaggtagcccaggcgttaggcggtgcccgcaactatagtgaccgt

SEQ ID NO: 457289 - DNA, 75 bp, synthetic construct
  source 1..75: mol_type = other DNA
agtttgaaggtctggatctggttggaaaactggaggataccaaagagggcaactatctaatccaggatttgggcc

SEQ ID NO: 457290 - DNA, 75 bp, synthetic construct
  source 1..75: mol_type = other DNA
accaacggcgtgctgggaagtccggtggcggtgggcgtaacggcgacgacctacgccagtcagtttagcctggcg

SEQ ID NO: 457291 - DNA, 75 bp, synthetic construct
  source 1..75: mol_type = other DNA
ttcttcgatacaagctgaacttaataatgcttatggggttagcaaagctgtagctgaaagctatgtccaaaaata

SEQ ID NO: 457292 - DNA, 75 bp, synthetic construct
  source 1..75: mol_type = other DNA
tacggcagacaagttgcgcgtgaccgatatcactaaaaatgcgacttacccggtactgattgacagtatcgtggt

SEQ ID NO: 457293 - DNA, 75 bp, synthetic construct
  source 1..75: mol_type = other DNA
ttttgagggtaaattctactctggaataaaatatctcccaatgataaatgatagactttatttaatttcggatga

SEQ ID NO: 457294 - DNA, 75 bp, synthetic construct
  source 1..75: mol_type = other DNA
ggacaaccctgcacggtcaggctgggcgcggataccgtgctgacggggtatatagatgattttattcccagctat

SEQ ID NO: 457295 - DNA, 75 bp, synthetic construct
  source 1..75: mol_type = other DNA
acggccagcagtgggacggatggacagagatgtccatcacttcctcactggaggctgttgccggcgaatttgatc

SEQ ID NO: 457296 - DNA, 75 bp, synthetic construct
  source 1..75: mol_type = other DNA
attacatcacaatctttagatcctgtaactagtgatgtagtaggtcaggcagaatttagatcggataatgctggt

SEQ ID NO: 457297 - DNA, 75 bp, synthetic construct
  source 1..75: mol_type = other DNA
agacggctattcgttatttccgcaggtaataaccgtgacgttagtcatggcacggactattggcatcaggtaacg

SEQ ID NO: 457298 - DNA, 75 bp, synthetic construct
  source 1..75: mol_type = other DNA
atgaatactatcgctgtctatcctgttggtggatggtggaaatatcgtactgcgcaggatcgctatattaacaat

SEQ ID NO: 457299 - DNA, 75 bp, synthetic construct
  source 1..75: mol_type = other DNA
gatggttctactgatcctacattgaatgaaatgcatctgttttcactcccttggcccgtagaagctcttcgctta

SEQ ID NO: 457300 - DNA, 75 bp, synthetic construct
  source 1..75: mol_type = other DNA
ttgtttcccaacttcataattattttattcatcgattagtgaacgaaaatgatttgtttttgttaaaaaatactt

SEQ ID NO: 457301 - DNA, 75 bp, synthetic construct
  source 1..75: mol_type = other DNA
cagagaggcggaaacatggaaagattataggcttgagttatttgaggaaataataaaagagggaaggaagtttgg

SEQ ID NO: 457302 - DNA, 75 bp, synthetic construct
  source 1..75: mol_type = other DNA
ccgcaaacgcgttgccaacggtgagcgtagcgtgctggtgggcttacagtcctttgccgaaggtcttgatctgaa

SEQ ID NO: 457303 - DNA, 75 bp, synthetic construct
  source 1..75: mol_type = other DNA
gaggaggggtttcagactgttctcaatggcggaaatgtctccgggactcacattagcggaggtgagcagaacatt

SEQ ID NO: 457304 - DNA, 75 bp, synthetic construct
  source 1..75: mol_type = other DNA
cggaactctcgccaaaagccgggcactccgaagggattgacgcgttgcgctgctctgtaacggcatttaccgcaa

SEQ ID NO: 457305 - DNA, 75 bp, synthetic construct
  source 1..75: mol_type = other DNA
ttccattatttgatacaccattaaatggtatcaatatggttattaaaaggggggaagatataattttatcattac

SEQ ID NO: 457306 - DNA, 75 bp, synthetic construct
  source 1..75: mol_type = other DNA
gtcgcatccgtaatgcctatggcccgcgtaaagccgccatgcgcgaggaactggacgcgatcccccgcgacggca

SEQ ID NO: 457307 - DNA, 75 bp, synthetic construct
  source 1..75: mol_type = other DNA
tgacatttataacatatttaataagtttttttgcgggccaataaaaaataagcgtgttactacaattcacaacat

SEQ ID NO: 457308 - DNA, 75 bp, synthetic construct
  source 1..75: mol_type = other DNA
gagcccgcgtccattccggtcagtacctatgattcgaagcgtgtggctatctcgggcgtcggtgcagtatccgca

SEQ ID NO: 457309 - DNA, 75 bp, synthetic construct
  source 1..75: mol_type = other DNA
cagtcaggcgttaaaaatggggcggatagtgaggcggttttgactgcgcttattgaacatttagaattgatcaat

SEQ ID NO: 457310 - DNA, 75 bp, synthetic construct
  source 1..75: mol_type = other DNA
cagggcatccattgcattggtttttattgcctcctgaagagggggagcaaattttcacccctgacacgatgaaaa

SEQ ID NO: 457311 - DNA, 75 bp, synthetic construct
  source 1..75: mol_type = other DNA
tggtttgtggtttaatcataaaggacgtcattatttcagtggtattgcggaagtcggtcacatctcacgactgat

SEQ ID NO: 457312 - DNA, 75 bp, synthetic construct
  source 1..75: mol_type = other DNA
tacggtggctgaagtgcatgcgcgtattggtattccggtggaactggttgaaatgggttttcgcgtactgaagaa

SEQ ID NO: 457313 - DNA, 75 bp, synthetic construct
  source 1..75: mol_type = other DNA
tatcagcctgcgttatgcaatgggggatgactttgcccgccaccgcgatttttccgccattgtgctgatggccat

SEQ ID NO: 457314 - DNA, 75 bp, synthetic construct
  source 1..75: mol_type = other DNA
atattatgtggttccattcggtcctgctatatcgttaactgcatttttcatatatttatctagtatcaacaaagt

SEQ ID NO: 457315 - DNA, 75 bp, synthetic construct
  source 1..75: mol_type = other DNA
gatcaagaacaaatgctaaaagatatgaaagacaaaaaagagtcaatggatcgcacagtcgaaaggtggctcgct

SEQ ID NO: 457316 - DNA, 75 bp, synthetic construct
  source 1..75: mol_type = other DNA
tggtggagccatcccccgagctgctcgaccacgttgcaatttgtgaacagggcgtgtgggacaagctccttgccc

SEQ ID NO: 457317 - DNA, 75 bp, synthetic construct
  source 1..75: mol_type = other DNA
cgctaccattcagaacaacgggagctggagtgtgaacgtgcctgcggcggacgttgcagcactggcggatggcac

SEQ ID NO: 457318 - DNA, 75 bp, synthetic construct
  source 1..75: mol_type = other DNA
agtagcggactggcggcgggggcggcgttgacggtggttattaatagcgtcacctacggcgcaacggtactcgcc

SEQ ID NO: 457319 - DNA, 75 bp, synthetic construct
  source 1..75: mol_type = other DNA
gcagcaccacccatacggtgaatgtcgaatcgctcctgcctggggtgatcattaataccgttgcgggcgatgaca

SEQ ID NO: 457320 - DNA, 75 bp, synthetic construct
  source 1..75: mol_type = other DNA
ccgggacaacctccactattacccatccggttaccgtcgatctggcggcggttgccatcaccattaacacccttt

SEQ ID NO: 457321 - DNA, 75 bp, synthetic construct
  source 1..75: mol_type = other DNA
accagcaccgcggaaaccgggcagacgctcaccgttacgcttaacggcactaactaccagaccacggtgcaggca

SEQ ID NO: 457322 - DNA, 75 bp, synthetic construct
  source 1..75: mol_type = other DNA
cagcggagcacggctcgtcgctggtgatcagcggcaccaccaccgcacccatcgggcagacgctgaccctgactt

SEQ ID NO: 457323 - DNA, 75 bp, synthetic construct
  source 1..75: mol_type = other DNA
agtatctaaatactcacccatgtaaatttaaaagtctgaatgcgctaactaccgttatctataatgggcaaactc

SEQ ID NO: 457324 - DNA, 75 bp, synthetic construct
  source 1..75: mol_type = other DNA
taccacggtgcagattctatttacggattaaaagattccgagacactcccgtttttatccccaacacaaattgat

SEQ ID NO: 457325 - DNA, 75 bp, synthetic construct
  source 1..75: mol_type = other DNA
taccacggtacagattctattaacggattaaaagattccgaggtacttccttttttatccccaacacaaattgat

SEQ ID NO: 457326 - DNA, 75 bp, synthetic construct
  source 1..75: mol_type = other DNA
gtcagcgatcgggcgggtaacagcgatgacgccagccgcaccgtgaccgtcagcctcagcgcgccagtgattagc

SEQ ID NO: 457327 - DNA, 75 bp, synthetic construct
  source 1..75: mol_type = other DNA
attaataccgtcgcaggtgatgacattatcaacgccatcgaacatggtcaggcgctggtggtccgcggcaccagt

SEQ ID NO: 457328 - DNA, 75 bp, synthetic construct
  source 1..75: mol_type = other DNA
ggtcgctacgcaaatcatcaacccgcagtcggggatgggggttaacgacacctcggcgctggtcaacttctacgg

SEQ ID NO: 457329 - DNA, 75 bp, synthetic construct
  source 1..75: mol_type = other DNA
agcggcaactggagcgttggcgtgcctgccagcgtgatttccggccttgcggacggcacagtgactatcagcgcc

SEQ ID NO: 457330 - DNA, 75 bp, synthetic construct
  source 1..75: mol_type = other DNA
tgtcacaaactggcctgcggggacggtcaatattgccgtctctggcactaacactgccggaaccacaaccagcat

SEQ ID NO: 457331 - DNA, 75 bp, synthetic construct
  source 1..75: mol_type = other DNA
agcggcaccagcacggcagaagccgggcagacggtgaccgtgacgctaaacggcgttaattacagcggcaacgtg

SEQ ID NO: 457332 - DNA, 75 bp, synthetic construct
  source 1..75: mol_type = other DNA
gtccaggccagcgtcagcagcgtcgcaggtaacagcgcccaggcaacgcatgcttacagcgttgatgccaccgcg

SEQ ID NO: 457333 - DNA, 75 bp, synthetic construct
  source 1..75: mol_type = other DNA
acgtcaccgcgcaggtaaaaagctcggcgggcaacggcaacactgccaacgtcagcactggcacggtaacggtca

SEQ ID NO: 457334 - DNA, 75 bp, synthetic construct
  source 1..75: mol_type = other DNA
ggtgatcaacggcaaaacttacacttcgcagccaggcggcgcggtggtggtcgatccggcgcacaacacctggta

SEQ ID NO: 457335 - DNA, 75 bp, synthetic construct
  source 1..75: mol_type = other DNA
gggcaacggcgagctgaccatctcggcttcggtgacgaacagcgttggtaataccggtaacggcacgcgggaaat

SEQ ID NO: 457336 - DNA, 75 bp, synthetic construct
  source 1..75: mol_type = other DNA
acctgaacggtaaaaactacaccaccacgctggacgcctccggtaactggactgtgggcattccggcggcggatg

SEQ ID NO: 457337 - DNA, 75 bp, synthetic construct
  source 1..75: mol_type = other DNA
gcagggggcgcagaccattaccgccagcgtgaacgatcgcgcgggtaatcttggacaggtcacgcacaccctgac

SEQ ID NO: 457338 - DNA, 75 bp, synthetic construct
  source 1..75: mol_type = other DNA
tcggtcagcaccatcagcggcgataaccttattaatgccgccgaagcaggcagtgcgctgaccctgagcggcacc

SEQ ID NO: 457339 - DNA, 75 bp, synthetic construct
  source 1..75: mol_type = other DNA
cggggcaaaccatcaccgttatcttcggcggcaaaagctacaccaccacggttgccgcgggcggcacctgggggc

SEQ ID NO: 457340 - DNA, 75 bp, synthetic construct
  source 1..75: mol_type = other DNA
aaactggcctgcggggacggtcaatattgccgtttctggcaccaataccgccggaaccacaaccagcattactca

SEQ ID NO: 457341 - DNA, 75 bp, synthetic construct
  source 1..75: mol_type = other DNA
ggtcaggtcacgggaacagcggttgcggggaatacggtgattgtcaccattggcggcaatcaatataacgccacc

SEQ ID NO: 457342 - DNA, 75 bp, synthetic construct
  source 1..75: mol_type = other DNA
acttaagcagcaccgccgcgcaggccaccggttttaacacctcgacatttaccaatatcgaaggcatttccggct

SEQ ID NO: 457343 - DNA, 75 bp, synthetic construct
  source 1..75: mol_type = other DNA
cgggtacggtggatatcaccgtaagcggcaccaacagcgccggaacaacctccaccattacccatccggtcaccg

SEQ ID NO: 457344 - DNA, 75 bp, synthetic construct
  source 1..75: mol_type = other DNA
tacgcgacggcgacgccacggtacaggccagcgtcagcactattaacggtaacacggcttcggcaacgcacgcct

SEQ ID NO: 457345 - DNA, 75 bp, synthetic construct
  source 1..75: mol_type = other DNA
tgatggcggcaccacctggcagaatctttcggtaagcggtttgacctggagctatcttgacgggcgtacgctgac

SEQ ID NO: 457346 - DNA, 75 bp, synthetic construct
  source 1..75: mol_type = other DNA
cgccgcccgtggtgaatattaatccggtggcaaccgataacgtcattaacacgccggaacacactcaggcgcaaa

SEQ ID NO: 457347 - DNA, 75 bp, synthetic construct
  source 1..75: mol_type = other DNA
cagcgccggaaacccggtcagcgtcagccatccgttcaccgtcgatttaacggcggtggcaatcagcatcaacac

SEQ ID NO: 457348 - DNA, 75 bp, synthetic construct
  source 1..75: mol_type = other DNA
caccgtcacgctgaacggacaaaactacagcgccaccaccgacgcctccggcaactggagtgttaccgtgcctgc

SEQ ID NO: 457349 - DNA, 75 bp, synthetic construct
  source 1..75: mol_type = other DNA
ataatgcggagaaaactcaggatctgaccatcagcggcggctccagcggtctggcgaccggcaccacggtcaccg

SEQ ID NO: 457350 - DNA, 75 bp, synthetic construct
  source 1..75: mol_type = other DNA
tcaccatcaacacctttgcgggcgacgatgtggtgaatgcagcggaacacggctcatcgctggtgatcagcggca

SEQ ID NO: 457351 - DNA, 75 bp, synthetic construct
  source 1..75: mol_type = other DNA
caaagccagctacgtcaacggcgtggcaacgctggatgcgcaggccggaaacatcggtgactttgtcaaagtcac

SEQ ID NO: 457352 - DNA, 75 bp, synthetic construct
  source 1..75: mol_type = other DNA
atgggaaggcaccgccgacaccgatcgcattgatattcgtgaactgttacagggcagcggctacaccggcaacgg

SEQ ID NO: 457353 - DNA, 75 bp, synthetic construct
  source 1..75: mol_type = other DNA
attactgccgatgacgtgattaacgctgccgaaaaaggcgcggcgttaacgctctctggcagcacttctggtgtc

SEQ ID NO: 457354 - DNA, 75 bp, synthetic construct
  source 1..75: mol_type = other DNA
gatgtctctgcgctgggcagtggcccgcaaaccgtgacggcgaccgttaccgatgtggctggcaacagcgacaac

SEQ ID NO: 457355 - DNA, 75 bp, synthetic construct
  source 1..75: mol_type = other DNA
accgcgcccgtcatcagcttcaacaccgtggcgggtgatgatgtgattaataacgtcgaacacgctcaggcgcag

SEQ ID NO: 457356 - DNA, 75 bp, synthetic construct
  source 1..75: mol_type = other DNA
ctaacgctctccggtagcacatccggcgtcgaagcggggcaaaccgttacccttacttttggcggcaaaacttac

SEQ ID NO: 457357 - DNA, 75 bp, synthetic construct
  source 1..75: mol_type = other DNA
accctttccactgacgatgtgattaatgccgccgaaaaaggcagcgatttgcagctctccggcaccacctccgat

SEQ ID NO: 457358 - DNA, 75 bp, synthetic construct
  source 1..75: mol_type = other DNA
cggcaacgcataacctgacggtagatctcgttgctccggtcgttaccatcaacacggtagcaagcgacgacgtca

SEQ ID NO: 457359 - DNA, 75 bp, synthetic construct
  source 1..75: mol_type = other DNA
cagaccatcaccgccagcgtcagcgatcgggcaggcaacagcgacgacgccagccgcaccgtgaccgtcagcctc

SEQ ID NO: 457360 - DNA, 75 bp, synthetic construct
  source 1..75: mol_type = other DNA
acggtcataactacagcgccaccaccgacgcggcgggcaactggacgttaaccgtgccggtaagcgatctggcgg

SEQ ID NO: 457361 - DNA, 75 bp, synthetic construct
  source 1..75: mol_type = other DNA
gtttatagcgtcgatgccaccgcgccctccgttactatcaacaccatcgccagcgacgatattcttaatgccgcc

SEQ ID NO: 457362 - DNA, 75 bp, synthetic construct
  source 1..75: mol_type = other DNA
ccggtcaccgtcgatcttgcggccgtggcgattaccatcaacaccctttccactgacgatgtgataaacgccgcc

SEQ ID NO: 457363 - DNA, 75 bp, synthetic construct
  source 1..75: mol_type = other DNA
attaatccggtggcgagcgacgatattattaacgctgccgaatcgggcgtggcgcagaccatcagcggccaggtg

SEQ ID NO: 457364 - DNA, 75 bp, synthetic construct
  source 1..75: mol_type = other DNA
ccatcgaacatggtcaggcgctggtcgtcagcggcaccagcacgggcgcggcggcgggcgatgtggtaaccgtca

SEQ ID NO: 457365 - DNA, 75 bp, synthetic construct
  source 1..75: mol_type = other DNA
cagatgtcaccgcgctgggcagcggcccgcaaaccatcactgcggcaattaccgactcggcagggaacagtgatg

SEQ ID NO: 457366 - DNA, 75 bp, synthetic construct
  source 1..75: mol_type = other DNA
aagtgacgctgcctgcagcagaggtacaggcgctggcagaaggcagccaaaccctcagtgccagcgtcagcgacc

SEQ ID NO: 457367 - DNA, 75 bp, synthetic construct
  source 1..75: mol_type = other DNA
gcactggcactaatttcgcgacaggtacagtggtgaccgtgttgcttaacggcaaaggctacagcgccaccattc

SEQ ID NO: 457368 - DNA, 75 bp, synthetic construct
  source 1..75: mol_type = other DNA
aacataacacccacaactcagaatatggttataccagctaatagtaaaatcaatattaaatccgtattgaaaaaa

SEQ ID NO: 457369 - DNA, 75 bp, synthetic construct
  source 1..75: mol_type = other DNA
taaatgatgtgatgaagtttattgttggtcatgaatattcacattacgtacttgggcatttgaatgatgaatcaa

SEQ ID NO: 457370 - DNA, 75 bp, synthetic construct
  source 1..75: mol_type = other DNA
cttttgatgattgtgatgttcctgatgatgtaagaattgctgcattaagaattgcaataagaactatgatgcaaa

SEQ ID NO: 457371 - DNA, 75 bp, synthetic construct
  source 1..75: mol_type = other DNA
attacctacttaagaaaagagatgtatttaaagggaaagctcatcttgatacagatgtaatggctgattgggtag

SEQ ID NO: 457372 - DNA, 75 bp, synthetic construct
  source 1..75: mol_type = other DNA
gtggtagaaggtatcttaacaaaaaaccacaatgcgagattaagcggatatatttttgtcgatttttcagtaagt

SEQ ID NO: 457373 - DNA, 75 bp, synthetic construct
  source 1..75: mol_type = other DNA
tgctgataatcgtcctattgataggtggagtttggctgaggcagagcaaaatcttggtatagtgtctcttccatt

SEQ ID NO: 457374 - DNA, 75 bp, synthetic construct
  source 1..75: mol_type = other DNA
cagtgcggaagcggtaatccatcgtgccaaaatggagttgggcaagatccgcgacggttttgtcattccattcaa

SEQ ID NO: 457375 - DNA, 75 bp, synthetic construct
  source 1..75: mol_type = other DNA
gctggtaagacacattgaattatatttcaaggatgaaataaagaaagcaaacgctgaaaacagggctccctacat

SEQ ID NO: 457376 - DNA, 75 bp, synthetic construct
  source 1..75: mol_type = other DNA
gatgaagctattcatgagcttacaggagcaacgcgaagaggcaaaattgttaaaggagaaccaacaccgcaatcc

SEQ ID NO: 457377 - DNA, 75 bp, synthetic construct
  source 1..75: mol_type = other DNA
cgatggcactggcgctgaaaattgcagcgcgcatgattgaagatggcgagctggataaacgcatcgcgcagcgtt

SEQ ID NO: 457378 - DNA, 75 bp, synthetic construct
  source 1..75: mol_type = other DNA
aaccgactaaacatcaatatgattacgatgccgcgacggtctatggcttcctgaaacagtttggtctggaaaaag

SEQ ID NO: 457379 - DNA, 75 bp, synthetic construct
  source 1..75: mol_type = other DNA
tggcgggggcgtgggaacgactggagcaggggcgggcggatattgttatcgcgccggatatgcattttcgttcct

SEQ ID NO: 457380 - DNA, 75 bp, synthetic construct
  source 1..75: mol_type = other DNA
ttcacaagcatttcatggtgcgaacgactatgtgcattccgaggtgcttacactcgttgaaaacgttagtgttct

SEQ ID NO: 457381 - DNA, 75 bp, synthetic construct
  source 1..75: mol_type = other DNA
tggggtgatcattaataccgtggcgggcgatgacattatcaacgcggctgaaatcgctgtggcgcagaccatcag

SEQ ID NO: 457382 - DNA, 75 bp, synthetic construct
  source 1..75: mol_type = other DNA
gatttccattaacaccgtttccggcgacgatgtgattaacgccgccgaaaaaggggcagatttaaccctttccgg

SEQ ID NO: 457383 - DNA, 75 bp, synthetic construct
  source 1..75: mol_type = other DNA
caaaccgaacgccgaatgatagagcttataagggaacaaaaagatttaattccagaaaagtatttacatcaatca

SEQ ID NO: 457384 - DNA, 75 bp, synthetic construct
  source 1..75: mol_type = other DNA
tcgccatcagcatgaacagcatcaccagcgatgatgcgattaacgccgccgaaaaaggcgcggcgttaacgctct

SEQ ID NO: 457385 - DNA, 75 bp, synthetic construct
  source 1..75: mol_type = other DNA
cccacgcctacagcgtcgatgccacggccccgacgcttgccattaacaccatcgccaccgacgatattctgaacg

SEQ ID NO: 457386 - DNA, 75 bp, synthetic construct
  source 1..75: mol_type = other DNA
ttaacggtcgagattaacaacgttacttatggcgcgacggtattagccgacggcacatggagcctcggtgttccg

SEQ ID NO: 457387 - DNA, 75 bp, synthetic construct
  source 1..75: mol_type = other DNA
tgttggagctcgccttgcatttgagcttggcaaaaacacccgtgttggcatcgactatgagcgttcatttggcgg

SEQ ID NO: 457388 - DNA, 75 bp, synthetic construct
  source 1..75: mol_type = other DNA
aagaatatgaaggtactaaagagtatcaggcaaatttgaagtacttcagaaatgggaaattctatccatatgctg

SEQ ID NO: 457389 - DNA, 75 bp, synthetic construct
  source 1..75: mol_type = other DNA
gaagatttcagtaatgggattacaccaattgaggcagatatactattagctcatgatatcgaaaaggcaaaagca

SEQ ID NO: 457390 - DNA, 75 bp, synthetic construct
  source 1..75: mol_type = other DNA
atcgttatgaggttaattctaaattcatcccttattttcatgttacacctgaatctcaggattcgaataataaaa

SEQ ID NO: 457391 - DNA, 75 bp, synthetic construct
  source 1..75: mol_type = other DNA
cgagtggccggagctcgctatccagctggcgcgcgaaaaagcgctaggtatggctgacggtggcctgcggacagt

SEQ ID NO: 457392 - DNA, 75 bp, synthetic construct
  source 1..75: mol_type = other DNA
cttcgatgtgttgcaaatgcagttgatattgaatcatttttttctgcggctaccgctgaagataaacaacaagtt

SEQ ID NO: 457393 - DNA, 75 bp, synthetic construct
  source 1..75: mol_type = other DNA
ataaaagcatgctgggcttctggtggtcaagcggccccttacactggaactctatataataaatttaagagtatt

SEQ ID NO: 457394 - DNA, 75 bp, synthetic construct
  source 1..75: mol_type = other DNA
gaaacagatgaagcagaagaagagggcgtttatgatgttgatgatgaaaatgatacgcctgtacgcaagagaaca

SEQ ID NO: 457395 - DNA, 75 bp, synthetic construct
  source 1..75: mol_type = other DNA
tcaaacaacacaatgcaaggaagtagggggaaaaacgagttcatcataaactcaataatatggaaaaaaaatgag

SEQ ID NO: 457396 - DNA, 75 bp, synthetic construct
  source 1..75: mol_type = other DNA
aggacggtcttcccgatccggtgaaagccatggggcggatcctggtggaaaacatcaacaccgatccgaaactgg

SEQ ID NO: 457397 - DNA, 75 bp, synthetic construct
  source 1..75: mol_type = other DNA
gggcaactcttcgggttagatggtataaaagcagataatccaataaaagcaaagcaagggagttcagatgcttca

SEQ ID NO: 457398 - DNA, 75 bp, synthetic construct
  source 1..75: mol_type = other DNA
acaagtagataaacttattagcatggttgaaagatcaattcctctttcagaggaatataagcagaaatatcttgg

SEQ ID NO: 457399 - DNA, 75 bp, synthetic construct
  source 1..75: mol_type = other DNA
tcattggtggggctgaagttcaatgtagccgcctcatccgcgaatttaataaaactggtaaagttaatatagtga

SEQ ID NO: 457400 - DNA, 75 bp, synthetic construct
  source 1..75: mol_type = other DNA
cttagttttcacaacctctataacgtttgtattattagtttttataaatagattgcttggtgatgttatatttga

SEQ ID NO: 457401 - DNA, 75 bp, synthetic construct
  source 1..75: mol_type = other DNA
acgttataaagaatatactaaaccagagtgctcacacataaatgttggttctggtaaagattattcaattcggca

SEQ ID NO: 457402 - DNA, 75 bp, synthetic construct
  source 1..75: mol_type = other DNA
gtaatagcgttaacattattattaatacccgaaaaattatcccccctggtaaagcatttatgcttagaggcggaa

SEQ ID NO: 457403 - DNA, 75 bp, synthetic construct
  source 1..75: mol_type = other DNA
actttataacgactctgcttataccgctatcgatgttgaaggcaaggctgaaatgaagtttattgcacgctatgt

SEQ ID NO: 457404 - DNA, 75 bp, synthetic construct
  source 1..75: mol_type = other DNA
tttttcctgccgttcctgtacggtagcaacgccggactcgagatgaccagcggtttctacgggatgcaggccatt

SEQ ID NO: 457405 - DNA, 75 bp, synthetic construct
  source 1..75: mol_type = other DNA
attattgggggcgcaattgttggttcacagcataaatggaaagaattctataaattagttctggaaagtcaaaaa

SEQ ID NO: 457406 - DNA, 75 bp, synthetic construct
  source 1..75: mol_type = other DNA
acagcttgacgcccgccagccggttgcggccctgacctctcttcagaccgacaccgtgaccgtgccggataaaaa

SEQ ID NO: 457407 - DNA, 75 bp, synthetic construct
  source 1..75: mol_type = other DNA
ttcttgatgcgcaaagtcagcaagaaatcccgctcaatcaggtccagcctcttacgcccttaaaagccggggata

SEQ ID NO: 457408 - DNA, 75 bp, synthetic construct
  source 1..75: mol_type = other DNA
cgcgtgaggcaatgaagaacttaccgcagattctggacgtggaaggggtcgacggcgtgtttatcggcccggcgg

SEQ ID NO: 457409 - DNA, 75 bp, synthetic construct
  source 1..75: mol_type = other DNA
ggcgcaaaaatggtcagcttcgatccccgtttgtcagttttctccagcaaggcggatgaatggcatgcgctcaag

SEQ ID NO: 457410 - DNA, 75 bp, synthetic construct
  source 1..75: mol_type = other DNA
ttacccgaatgcacctaccttgaacgtgatgaagaagtctctgacatgtcgggcctgaatccggcctatgccctg

SEQ ID NO: 457411 - DNA, 75 bp, synthetic construct
  source 1..75: mol_type = other DNA
agttgcggtgcataccaacggcgcgacgcaatatgtaccactgctgagtgagctgatgtgggataacgcggtgtg

SEQ ID NO: 457412 - DNA, 75 bp, synthetic construct
  source 1..75: mol_type = other DNA
agccgatctccgatcagcgcgccgccgagcagtacgtgattgacgagtacaacaagttgaaaactcgcctgcgcg

SEQ ID NO: 457413 - DNA, 75 bp, synthetic construct
  source 1..75: mol_type = other DNA
tgtatatgctgggcgggatgagcgacaccgccagcaaccgcatcacgtttgagcgcgacagccagtaccgcatca

SEQ ID NO: 457414 - DNA, 75 bp, synthetic construct
  source 1..75: mol_type = other DNA
gccagggccgccgtcacccttccccctcctcccccacctggagcaatacctgaagtcccacagggggaaccctca

SEQ ID NO: 457415 - DNA, 75 bp, synthetic construct
  source 1..75: mol_type = other DNA
aatttaaacaagcaatcaaatctttattacgtgaattgaaacattacaaataccgcaaagtaattataggtgtaa

SEQ ID NO: 457416 - DNA, 75 bp, synthetic construct
  source 1..75: mol_type = other DNA
atccatatcagattgctgaagttctggatatggatatccgtagcatctacgcgtacaagcaacgaatcgaaaaga

SEQ ID NO: 457417 - DNA, 75 bp, synthetic construct
  source 1..75: mol_type = other DNA
tgcaagcaacaatgttgcaagttggttcaacttgtcggcagaggttgctaattttattaaagaacaatggcctaa

SEQ ID NO: 457418 - DNA, 75 bp, synthetic construct
  source 1..75: mol_type = other DNA
tcattcttatgggcgggtttgtgctcctgcccgtcaggccggtcgtgcagcacatccacttctgcagtcattgcg

SEQ ID NO: 457419 - DNA, 75 bp, synthetic construct
  source 1..75: mol_type = other DNA
aacggcaacagcgcccaggccgatcgcgcgtacagcgtcgatgccaccgtgccgcttgtgaccattaacaccatt

SEQ ID NO: 457420 - DNA, 75 bp, synthetic construct
  source 1..75: mol_type = other DNA
cgacaccgccggaaatatcggcgcgaccgccagccagatagtcactgtggataccaccgcgccgctggcgagcaa

SEQ ID NO: 457421 - DNA, 75 bp, synthetic construct
  source 1..75: mol_type = other DNA
tcaacaacgtcacttacgccgcgacggtgttagccgacggcacatggaacctcggcgttccggcggcagacgtca

SEQ ID NO: 457422 - DNA, 75 bp, synthetic construct
  source 1..75: mol_type = other DNA
tcgccttgcggctcgcccttcgggccgttgctaaagcaacgttatcctccctggtgcctgcggttattaccgcca

SEQ ID NO: 457423 - DNA, 75 bp, synthetic construct
  source 1..75: mol_type = other DNA
gtgattaccggtaatgcacgcttttttgccgctggggctgatctcaacgaaatggcagaaaaagatctcgcggcc

SEQ ID NO: 457424 - DNA, 75 bp, synthetic construct
  source 1..75: mol_type = other DNA
aacaaaaaattaagatggggtattaaggagggagaattgttagtagaaaacccatcccccctctatataaatata

SEQ ID NO: 457425 - DNA, 75 bp, synthetic construct
  source 1..75: mol_type = other DNA
aatggcgatttgaccattaccgcctcagtcaccaacgctaatggcaacactggcagcggtacgcgggatatcacc

SEQ ID NO: 457426 - DNA, 75 bp, synthetic construct
  source 1..75: mol_type = other DNA
taagcgccctgaccgccagcaactacaccgtgagcgcggcggtgaacgacaaagccggaaacccggcctcggtta

SEQ ID NO: 457427 - DNA, 75 bp, synthetic construct
  source 1..75: mol_type = other DNA
ggctggagcctgaccgttcccgccagtgcggtgagcagcctggcagacggcgcggcggaaattaccgcgacggtc

SEQ ID NO: 457428 - DNA, 75 bp, synthetic construct
  source 1..75: mol_type = other DNA
accggcagcagcggcgataaccaactggaagggcgcggcggcaacgacacccttaacatcggcaacggcggtcac

SEQ ID NO: 457429 - DNA, 75 bp, synthetic construct
  source 1..75: mol_type = other DNA
ggcacggcgatcaccgtcacgctgaacggacaaaactacagcgccaccacggatgcctccggcaactggagtgtt

SEQ ID NO: 457430 - DNA, 75 bp, synthetic construct
  source 1..75: mol_type = other DNA
aacaccatcgccaccgatgacgtgattaacgccagcgaaaaaggcgcggatctgcaaatttccggcaccagtaat

SEQ ID NO: 457431 - DNA, 75 bp, synthetic construct
  source 1..75: mol_type = other DNA
tttaaagaccgcttaatgggcgtggtgcagctttgcctgaaatacaatcttgattattcaccgcttaccaaagcc

SEQ ID NO: 457432 - DNA, 75 bp, synthetic construct
  source 1..75: mol_type = other DNA
cacttcagccgcaagcgatcgcagaaagcataccctcaatgtagtgctaagcaccagaacatgtactgaatatca

SEQ ID NO: 457433 - DNA, 75 bp, synthetic construct
  source 1..75: mol_type = other DNA
atgatctcccgctacccatattttcctggttctccctgtctggccatcagagtaaactggtggggcagggaggca

SEQ ID NO: 457434 - DNA, 75 bp, synthetic construct
  source 1..75: mol_type = other DNA
tggtgtatacggagaagcacatccgtatcatcagtgtgacgactgcggcggccatccatccagtcatcggttcgt

SEQ ID NO: 457435 - DNA, 75 bp, synthetic construct
  source 1..75: mol_type = other DNA
accgcaccaggtaatggtttgtacgttaactatgggctgaaagcgctgaacatccatggtgggcaaaagctgacg

SEQ ID NO: 457436 - DNA, 75 bp, synthetic construct
  source 1..75: mol_type = other DNA
ctctgacgacgctcaatttgctggaacacgacgatagccatgtcggcgttcaactggtgaaggcgcaaacggtta

SEQ ID NO: 457437 - DNA, 75 bp, synthetic construct
  source 1..75: mol_type = other DNA
tcgagcgtgtgctatttctgtttctgaatgattttattgaacaatttccaatgttcaaccttggcgttcccatca

SEQ ID NO: 457438 - DNA, 75 bp, synthetic construct
  source 1..75: mol_type = other DNA
actattgaacatattcagaagatgcgggaaatgtaccatgatgtgacggaaaccttttactgggtggcacttccc

SEQ ID NO: 457439 - DNA, 75 bp, synthetic construct
  source 1..75: mol_type = other DNA
gaccttttactgggtggcacttcccctgaccacggtaaacggtgtctcacagtttcagccggagcgttttttcca

SEQ ID NO: 457440 - DNA, 75 bp, synthetic construct
  source 1..75: mol_type = other DNA
ccagagcgattacacagcaaatggcaaaaaataaagaaatcaacgatgaattactgcagaaatggataaaaactt

SEQ ID NO: 457441 - DNA, 75 bp, synthetic construct
  source 1..75: mol_type = other DNA
acagttcagaaagcacataccgttgtatgccctgtacgccacggataccgtcagaacaatacagacaggcccgtt

SEQ ID NO: 457442 - DNA, 75 bp, synthetic construct
  source 1..75: mol_type = other DNA
cagttcctccgtctgttcgggcagaactccatgctgcaggaaaccatcacccgactctcgggtcttgaaatccat

SEQ ID NO: 457443 - DNA, 75 bp, synthetic construct
  source 1..75: mol_type = other DNA
ggctagacgtattgagcaaacatatgggatgccaggtggttatcttgatattgagccagaagacatagcggagtc

SEQ ID NO: 457444 - DNA, 75 bp, synthetic construct
  source 1..75: mol_type = other DNA
cagtgcgacaggcttaaaagtcattgcgattggcggagacaaactggctcgagggctaacgcttgagggattatg

SEQ ID NO: 457445 - DNA, 75 bp, synthetic construct
  source 1..75: mol_type = other DNA
ggtgtaacgtttttctacattctttcaggtttcattataaactatagcttcacaaatcatataaaaaaagagaga

SEQ ID NO: 457446 - DNA, 75 bp, synthetic construct
  source 1..75: mol_type = other DNA
tccccggatgccgtggccgaacgcagtcactccgcccgtattctgatcctgattcgacacggagaacgttgtgac

SEQ ID NO: 457447 - DNA, 75 bp, synthetic construct
  source 1..75: mol_type = other DNA
ccgtctgggtgagccgcaatatacagattcactgcattctcaggattcagcaagcagtatgtggatgcgtcatgt

SEQ ID NO: 457448 - DNA, 75 bp, synthetic construct
  source 1..75: mol_type = other DNA
ggtaattctgcaggtaatttcgcgctgaccaccggaactgtcgaagctggggcttacgtctacacgctggctaaa

SEQ ID NO: 457449 - DNA, 75 bp, synthetic construct
  source 1..75: mol_type = other DNA
tcttatcaggccttgtattatccctccagtgcagagaaaatcggccagttttctctgcctgcagtccgcatgccg

SEQ ID NO: 457450 - DNA, 75 bp, synthetic construct
  source 1..75: mol_type = other DNA
ttcctgtttcgcaaccaatcatcattaacgctgctggttatcctgtatataacggacagattgccaaattcgtaa

SEQ ID NO: 457451 - DNA, 75 bp, synthetic construct
  source 1..75: mol_type = other DNA
ttacaggtgatggacagcgcgacgttctacaaaaacaagccgaagaacctgcaacgtatcgccagtgaccgggta

SEQ ID NO: 457452 - DNA, 75 bp, synthetic construct
  source 1..75: mol_type = other DNA
gcactggtttccgcttccatctctgtcgcagtcctgcttcgcatcctcgccaaatcaaaacgggggaagatgccg

SEQ ID NO: 457453 - DNA, 75 bp, synthetic construct
  source 1..75: mol_type = other DNA
ccggtaccggcagtcgcataaaatatggtgtcgtgaatgattacggggcggtgcgcgaatatgagggaatcgtcc

SEQ ID NO: 457454 - DNA, 75 bp, synthetic construct
  source 1..75: mol_type = other DNA
atgctacctgattctatgcaaagctttacacctttagtacaaggtgttgcgcaaagtaatgccttgataacggtt

SEQ ID NO: 457455 - DNA, 75 bp, synthetic construct
  source 1..75: mol_type = other DNA
tactatcgcagatttgcaactttcgggcagcggctctgatctcgatgtcagcataaaggaagcagatggtagtgt

SEQ ID NO: 457456 - DNA, 75 bp, synthetic construct
  source 1..75: mol_type = other DNA
ctaagttaactctgcaaatggttcgtcaatttgaactcgatttacctggactaaaaaagcaacaagcgataggtg

SEQ ID NO: 457457 - DNA, 75 bp, synthetic construct
  source 1..75: mol_type = other DNA
tgttttctttatgttagttataaatctatcaaaaacaaaggctagaattacacaatttggattttatttatcagt

SEQ ID NO: 457458 - DNA, 75 bp, synthetic construct
  source 1..75: mol_type = other DNA
ccgggagctgcaataaatccgttctactcagcgatgcgtaagcacggcggtattcgtcacattctgggtaagcgt

SEQ ID NO: 457459 - DNA, 75 bp, synthetic construct
  source 1..75: mol_type = other DNA
attttgcgaactatggtcttgctatatctagaggcccggtaccgaaaaaagcatttaaggatatgataaaaaaaa

SEQ ID NO: 457460 - DNA, 75 bp, synthetic construct
  source 1..75: mol_type = other DNA
tgcgtggcgatgactggctttgtcgtggcaacccggaaactcagaaggcgatttggtttaatctgcaaaacggcg

SEQ ID NO: 457461 - DNA, 75 bp, synthetic construct
  source 1..75: mol_type = other DNA
aagtggaagtgctgattggtgatgagctggtgatcaccggctgggtggaggcgactcccgttcggtcagcaccgg

SEQ ID NO: 457462 - DNA, 75 bp, synthetic construct
  source 1..75: mol_type = other DNA
accctgtactgggcagtctctaactcactgccgggtggtgagcgcagtgagcagaaagctgacggtaacaaaatc

SEQ ID NO: 457463 - DNA, 75 bp, synthetic construct
  source 1..75: mol_type = other DNA
aagtgccgtcgatatcgacagaggtaatcaccgtattattaatgtggaaaagattaactttcgacagccagaaga

SEQ ID NO: 457464 - DNA, 75 bp, synthetic construct
  source 1..75: mol_type = other DNA
tgcctcatcactcacgaagagaggcattgagtttcataaaatctgctcaaccatagcgggtggtccgaatactac

SEQ ID NO: 457465 - DNA, 75 bp, synthetic construct
  source 1..75: mol_type = other DNA
gtgcgcattctgctcaataatgccattgaacatgtggtcgatggtgaaaaagtagaactgacgctgcaaagtggc

SEQ ID NO: 457466 - DNA, 75 bp, synthetic construct
  source 1..75: mol_type = other DNA
cgcttcgcttatcaggccttgtattatccctccagtgcagagaaaatcggccagttttctctgcctgcagtccgc

SEQ ID NO: 457467 - DNA, 75 bp, synthetic construct
  source 1..75: mol_type = other DNA
gggtatcaaccggcaggcaccggcttctgcaacggttgcttcaccaccgcctcttctgcagggggaagccgcgat

SEQ ID NO: 457468 - DNA, 75 bp, synthetic construct
  source 1..75: mol_type = other DNA
ggaacgacaacggacagctaatccgcatcagcggcccgcaggagagccgggagtaccgttacagcgacacgggaa

SEQ ID NO: 457469 - DNA, 75 bp, synthetic construct
  source 1..75: mol_type = other DNA
gatgagttgtgtaagaaagtgacaagttggatgtattcgcatcctggagagagaattagatatgaacgttttaag

SEQ ID NO: 457470 - DNA, 75 bp, synthetic construct
  source 1..75: mol_type = other DNA
ttatgatatggatgctattgttggcggagctcataatggggccgccgatgcaatgagacattgttacttgatgtg

SEQ ID NO: 457471 - DNA, 75 bp, synthetic construct
  source 1..75: mol_type = other DNA
gtgatagacccaatggggttagatgcgattgagaatatgacatcaggtggactaatttatgccgtatctggtgta

SEQ ID NO: 457472 - DNA, 75 bp, synthetic construct
  source 1..75: mol_type = other DNA
ttatattaataattcttgtctctctttcttttcaacgataataacggcatttattttttttgtttttatattgat

SEQ ID NO: 457473 - DNA, 75 bp, synthetic construct
  source 1..75: mol_type = other DNA
ggtcgagtacacgcgggacaggctgcaccgtgagacggcccgcagcttcggcggggaggcatatgaacttgccac

SEQ ID NO: 457474 - DNA, 75 bp, synthetic construct
  source 1..75: mol_type = other DNA
ccgctgctaggggcgaaggtgctgcccggcgagacggaccttgcgctgcccggcccgctgccgttcattctctcc

SEQ ID NO: 457475 - DNA, 75 bp, synthetic construct
  source 1..75: mol_type = other DNA
aaagcgcccttcgatatccgcttacaggttcatgagcgggaactgatactcaacgacagcggcggcaggagcatt

SEQ ID NO: 457476 - DNA, 75 bp, synthetic construct
  source 1..75: mol_type = other DNA
tctatactacagatactagagcaagatggctacatggtgggggatcatcgttgcgcgatccttatgctcctcgac

SEQ ID NO: 457477 - DNA, 75 bp, synthetic construct
  source 1..75: mol_type = other DNA
acggcagcggttacctggcgggcatgaagctgggcgggacgccgctggtcgagtatacgcgggacaggctgcacc

SEQ ID NO: 457478 - DNA, 75 bp, synthetic construct
  source 1..75: mol_type = other DNA
cgacgagcggacccaccactaccactacgacagccagcaccgcctggtgttctacacgcggatacagcacggcga

SEQ ID NO: 457479 - DNA, 75 bp, synthetic construct
  source 1..75: mol_type = other DNA
ccactacgacagccagcaccgtctggtgttctacacgcggatacagcatggcgagccactggtcgagagccgcta

SEQ ID NO: 457480 - DNA, 75 bp, synthetic construct
  source 1..75: mol_type = other DNA
ttcaggtttatcatttttcgattaacagtattgatatagccatggaagttatgacccgggcgtttacctttagcg

SEQ ID NO: 457481 - DNA, 75 bp, synthetic construct
  source 1..75: mol_type = other DNA
gaaaatgctgaagaagaaaaagaacggcaaatagcctcattactttcatgggaaatagatattatttataaagtt

SEQ ID NO: 457482 - DNA, 75 bp, synthetic construct
  source 1..75: mol_type = other DNA
tcaacacattcgttaatgatcggacttatgaattacgtggcgaaaagatagttattcctggcatggcaaaagtac

SEQ ID NO: 457483 - DNA, 75 bp, synthetic construct
  source 1..75: mol_type = other DNA
tgaccaccggaactgtcgaagctggggcttacgtctacacgctggctaaagggaaggggaatgacgagaaaaact

SEQ ID NO: 457484 - DNA, 75 bp, synthetic construct
  source 1..75: mol_type = other DNA
aaaggggaagtgctcgaccgcaaagcgaccaaagagcatggcgcaccagtgtttaaaaaatgtgagcggtgtgat

SEQ ID NO: 457485 - DNA, 75 bp, synthetic construct
  source 1..75: mol_type = other DNA
gcatatctgggcaaagccggtgtaagcaaatcagatgaacaactggctgttcaggcgctcgccaggcacgctata

SEQ ID NO: 457486 - DNA, 75 bp, synthetic construct
  source 1..75: mol_type = other DNA
ggacaaattcaggatgaatatcgggatcgtttcttcctttcaaaggggcatggtcctatggcattttatgccgta

SEQ ID NO: 457487 - DNA, 75 bp, synthetic construct
  source 1..75: mol_type = other DNA
gcagccgccttaaccgggccgcactgacggcagatctggccttatacagacaagatccccggccccccatttctt

SEQ ID NO: 457488 - DNA, 75 bp, synthetic construct
  source 1..75: mol_type = other DNA
caacaacagattgctcagatagatgtagtgattatattaatccagagcataaaaaaacgataaaggctttacaag

SEQ ID NO: 457489 - DNA, 75 bp, synthetic construct
  source 1..75: mol_type = other DNA
ttcaaagcattacgtaaaggcaatgcttatattgatatctttttttgcggccattttcattgtaatggtctcagg

SEQ ID NO: 457490 - DNA, 75 bp, synthetic construct
  source 1..75: mol_type = other DNA
cttgtttttaatctggacataccggaagacttgcaagcagaattatatgaaatagcttcattaacacgtggacaa

SEQ ID NO: 457491 - DNA, 75 bp, synthetic construct
  source 1..75: mol_type = other DNA
gccagccccagcgggttggcatgaacagcagcgtggcggtgacgctggaaggtgataccggaaaggtctatctgc

SEQ ID NO: 457492 - DNA, 75 bp, synthetic construct
  source 1..75: mol_type = other DNA
attgtgtcagagaccacagtgaatgtttctggtactcagaatatatactccggaggaagtgcccttagtgcaaac

SEQ ID NO: 457493 - DNA, 75 bp, synthetic construct
  source 1..75: mol_type = other DNA
aggtattcgtgcatcctggaaggtgaaaagcaccctggataaggataccgggcgggagttccgtccgtatataga

SEQ ID NO: 457494 - DNA, 75 bp, synthetic construct
  source 1..75: mol_type = other DNA
acaggtgaattctggttgcagcctcatctgcaggctgtctggatgggggttacaccggatacacatcaggaggat

SEQ ID NO: 457495 - DNA, 75 bp, synthetic construct
  source 1..75: mol_type = other DNA
ctaataacaaaaatataatccttaatccgacaaaggaaagtgctggtaatactctcattgtgtcagattatatcg

SEQ ID NO: 457496 - DNA, 75 bp, synthetic construct
  source 1..75: mol_type = other DNA
aaaatggtgggattgtattgggctctgcagtagtcaatgcagatatggctgtcagccagaatgcctatataaaca

SEQ ID NO: 457497 - DNA, 75 bp, synthetic construct
  source 1..75: mol_type = other DNA
gtactattgtaaatcagagtggttatgtaaatatttcatcagggggctatgctgagagcaccattattaacagtg

SEQ ID NO: 457498 - DNA, 75 bp, synthetic construct
  source 1..75: mol_type = other DNA
aagaggaaggaaagggacatgtaaagcttatgagtcaacaaaggttctatctggaacaaaattcccctacgaccc

SEQ ID NO: 457499 - DNA, 75 bp, synthetic construct
  source 1..75: mol_type = other DNA
atgaatttcaagacactaaagagattcaatatgtcattgttgctaaaataattaaatctagcaagggtgctattg

SEQ ID NO: 457500 - DNA, 75 bp, synthetic construct
  source 1..75: mol_type = other DNA
atttctcatttcaattgataagcaaacaatctatatcaaaaatactgagtggtattttttcctacatatttatag

SEQ ID NO: 457501 - DNA, 75 bp, synthetic construct
  source 1..75: mol_type = other DNA
catatatgcaagtgcaaacgatgtgattttgcctaatcttgcgctgggcacgggcgtcgtgatcgcgggatgggt

SEQ ID NO: 457502 - DNA, 75 bp, synthetic construct
  source 1..75: mol_type = other DNA
accttctccggggattatctccgcgtaactgacaataaggggaaaacgtacgatgtgctgaacggaagtgatgac

SEQ ID NO: 457503 - DNA, 75 bp, synthetic construct
  source 1..75: mol_type = other DNA
gataaaaagtttgtactagcgatcacttatacccataaagctgctgatgaaattaaagagcgaattgagttatta

SEQ ID NO: 457504 - DNA, 75 bp, synthetic construct
  source 1..75: mol_type = other DNA
agttctggaggacagcaacgtatcagtagtggtggtacaggaacaaataccatacttaataattccggtatacaa

SEQ ID NO: 457505 - DNA, 75 bp, synthetic construct
  source 1..75: mol_type = other DNA
tgatactctctgcaataaactgttatgcctctacagaggctacttataaaaaccctgctccctcctcttctgtac

SEQ ID NO: 457506 - DNA, 75 bp, synthetic construct
  source 1..75: mol_type = other DNA
gaaaaaacactttttaaccagggtataaaggttctctctctcttttttattgacgaagtcgcaaagtatagggac

SEQ ID NO: 457507 - DNA, 75 bp, synthetic construct
  source 1..75: mol_type = other DNA
cctaacacatccggcgttacctaccgaatcgaccctggcgttgccaaggataagtttggcaatgctggttgggat

SEQ ID NO: 457508 - DNA, 75 bp, synthetic construct
  source 1..75: mol_type = other DNA
ataatggagagatgattggtcttaaacctcaagataagatgactcctctgactaaacttgagtttgcaccggttg

SEQ ID NO: 457509 - DNA, 75 bp, synthetic construct
  source 1..75: mol_type = other DNA
tcactttcacaatttacatatggtgtggactcgcaaagaataacccataagaaatatacacccccatcatatatg

SEQ ID NO: 457510 - DNA, 75 bp, synthetic construct
  source 1..75: mol_type = other DNA
gcgttattataattgccactgaactggaaaaaaggtgtatcatgaaaaacgtcctctcattgtcattgctactat

SEQ ID NO: 457511 - DNA, 75 bp, synthetic construct
  source 1..75: mol_type = other DNA
tttatatacagtaatggtgaggccagtaataccattgttaatacaagtggattccagagggtgaacaatcttgga

SEQ ID NO: 457512 - DNA, 75 bp, synthetic construct
  source 1..75: mol_type = other DNA
aatgacgcaactgtcctgtcgaactttcccttcattttaaatttaggagctgacaggggtgattgccagttattt

SEQ ID NO: 457513 - DNA, 75 bp, synthetic construct
  source 1..75: mol_type = other DNA
ggttaatgatagtggttatcaaaatattattaatggtggtgttgctgagggtacagaaattaatcggggtgggcg

SEQ ID NO: 457514 - DNA, 75 bp, synthetic construct
  source 1..75: mol_type = other DNA
cctatcaggctgccgccgtgcaggcggtcgtcgatatttttcaggggcagccaccggcctctgatgcggccatga

SEQ ID NO: 457515 - DNA, 75 bp, synthetic construct
  source 1..75: mol_type = other DNA
tcaatcgcaaggctacttacagcgtgctgtttgatgatgttgagctagtgaacaatgcgatcaaggcgctcaatg

SEQ ID NO: 457516 - DNA, 75 bp, synthetic construct
  source 1..75: mol_type = other DNA
ggccaagctaaaccttgatatcgagatggaaacgggtactggcaagacctattgctacattaagacgattttcga

SEQ ID NO: 457517 - DNA, 75 bp, synthetic construct
  source 1..75: mol_type = other DNA
atctatcatgaaaatctaaaggatggatttaagatactcaatagctatgactcagaagaattgattactaatatt

SEQ ID NO: 457518 - DNA, 75 bp, synthetic construct
  source 1..75: mol_type = other DNA
gtcaccgatgcgttcggtaatgcgcttgccgggcagacggtcagcgtgatggcggacaacggtgcagcggtcgct

SEQ ID NO: 457519 - DNA, 75 bp, synthetic construct
  source 1..75: mol_type = other DNA
atacggcatcccgtgctgactccacgattgagacagaccaggataattacgtcgcgggtaagccgatagtcgtta

SEQ ID NO: 457520 - DNA, 75 bp, synthetic construct
  source 1..75: mol_type = other DNA
gagcgtacctatatggcttacaaagaaggagaaaacttaaactcttatctacatattaatggttggtatgtagac

SEQ ID NO: 457521 - DNA, 75 bp, synthetic construct
  source 1..75: mol_type = other DNA
tacgctgggcgggcagacggtcagcgtgttggcggataacggcgcaacggttgccccgacggtcaccacgcagcc

SEQ ID NO: 457522 - DNA, 75 bp, synthetic construct
  source 1..75: mol_type = other DNA
ccgggcagacggtcagcgtgatggcggacaacggtgcagcggtcgcttcgacgatgaccacaaagccggacggca

SEQ ID NO: 457523 - DNA, 75 bp, synthetic construct
  source 1..75: mol_type = other DNA
ggttatttcgcttagcgatttatcatcgttcaaatatgcccatcctgtgtgagatgattgagcaactgtgggtca

SEQ ID NO: 457524 - DNA, 75 bp, synthetic construct
  source 1..75: mol_type = other DNA
tattgcaagaggttgaagaaagtcttgacataatgagacagacacagcatatcaagcctgtaaaagtcaaagcta

SEQ ID NO: 457525 - DNA, 75 bp, synthetic construct
  source 1..75: mol_type = other DNA
ggctggtgcactacacgcggacacaatatgcagagccgctggtcgaaagtcgctatctttacgacccgctgggcc

SEQ ID NO: 457526 - DNA, 75 bp, synthetic construct
  source 1..75: mol_type = other DNA
accgcagcgaaccttgatatccgcatcccgtatgccacagacccggcaggtaaccgcctgcccgacccggagctg

SEQ ID NO: 457527 - DNA, 75 bp, synthetic construct
  source 1..75: mol_type = other DNA
agttacggtgacactcaaggatagctatgaaaacctggtcggggggcaacgagacgctatcaacctggctatcca

SEQ ID NO: 457528 - DNA, 75 bp, synthetic construct
  source 1..75: mol_type = other DNA
atatgcagtttttgtttcaatccaagactatcaaactggtaataactggcttggaatgatgtgtaacctcacgaa

SEQ ID NO: 457529 - DNA, 75 bp, synthetic construct
  source 1..75: mol_type = other DNA
catggtttatgtgtgattttttatttatcgtcgaaactgaattgtttatcattgcttttcacaacgctaacatct

SEQ ID NO: 457530 - DNA, 75 bp, synthetic construct
  source 1..75: mol_type = other DNA
ggctcagtggcagacggcgcaatggcgaacacgctgcaggtgaaggtcaccgatgcgttcggcaatgcgcttggc

SEQ ID NO: 457531 - DNA, 75 bp, synthetic construct
  source 1..75: mol_type = other DNA
agatcgcgctcattcccctgaatttctgtttttccgctccggttccgtcttctgcctttccgaaagtatgaaaaa

SEQ ID NO: 457532 - DNA, 75 bp, synthetic construct
  source 1..75: mol_type = other DNA
gaaagtcagaatgtttgtgtaaaaaataataatgcgaatggctggcaactgaccattatcgatgatcacggcaac

SEQ ID NO: 457533 - DNA, 75 bp, synthetic construct
  source 1..75: mol_type = other DNA
agcagccagagccggaacgtgacgtttattgcggatgtcaggacggcgaagatcgcggacctggtggtcacccgg

SEQ ID NO: 457534 - DNA, 75 bp, synthetic construct
  source 1..75: mol_type = other DNA
atggataacgggcaacggcatcatcatctttatcctactcattggccattgttatggtttgctctgctggcggcg

SEQ ID NO: 457535 - DNA, 75 bp, synthetic construct
  source 1..75: mol_type = other DNA
tttcgttaaccaaccgtttgcattctttcatattacggcggtacatcatccgtggtggctcaattttttattaca

SEQ ID NO: 457536 - DNA, 75 bp, synthetic construct
  source 1..75: mol_type = other DNA
tttcacaagatatctacattggtgataatattgtacctactttcggtgacggttcatctattgaaatcattagca

SEQ ID NO: 457537 - DNA, 75 bp, synthetic construct
  source 1..75: mol_type = other DNA
acaaaacgaaatatatcgctggggatagcataacggtgaccgttgttcttaaagatgcccagggtaactttatta

SEQ ID NO: 457538 - DNA, 75 bp, synthetic construct
  source 1..75: mol_type = other DNA
gtagtaatacctgggatatcataaatgcttcatgcagctatggtcaaatgccgtcatctttagaattagcgcagc

SEQ ID NO: 457539 - DNA, 75 bp, synthetic construct
  source 1..75: mol_type = other DNA
aaaaacgcatacaccgctggcgagactataaccgtcgccgtgacgctgaaagatgcgcacggtaacctggttgaa

SEQ ID NO: 457540 - DNA, 75 bp, synthetic construct
  source 1..75: mol_type = other DNA
ttcaggaatcatggagtgagatgaattcatattgtattggtaatggttatatattaccgtctagtacggatttag

SEQ ID NO: 457541 - DNA, 75 bp, synthetic construct
  source 1..75: mol_type = other DNA
gacggcgcagatcgctgatctggtggtcattaaggacggctcagaggcggacagttcgacggcgaacacgctgcg

SEQ ID NO: 457542 - DNA, 75 bp, synthetic construct
  source 1..75: mol_type = other DNA
gaatgacggtctggatttgctgacagatgatgcagtgtacttacaaaatgtggaaaagaaacattggtccagttg

SEQ ID NO: 457543 - DNA, 75 bp, synthetic construct
  source 1..75: mol_type = other DNA
acatgagtatatcagtcagggccttgagtccattcttggcgcgctggatatcgaaggaagctatgataagcaacg

SEQ ID NO: 457544 - DNA, 75 bp, synthetic construct
  source 1..75: mol_type = other DNA
aacagttatgtattaatatcatgtgataatggttacttagttgggcaaatagagtggcttgctgtagaacattcg

SEQ ID NO: 457545 - DNA, 75 bp, synthetic construct
  source 1..75: mol_type = other DNA
cacttgctaacaatgctaatgtggctgtagatcccgacagattatttggtcgtcatatagcagtacttggtaata

SEQ ID NO: 457546 - DNA, 75 bp, synthetic construct
  source 1..75: mol_type = other DNA
tgcgcaccctcgcaccggacctggacatccgcatcccgtatgccacggacccggcgggcaaccggctgccggacc

SEQ ID NO: 457547 - DNA, 75 bp, synthetic construct
  source 1..75: mol_type = other DNA
tggttaaattactggcagtccaataatgaaagcatcaatggcctgacgtcgggattccctcagggagggaaacga

SEQ ID NO: 457548 - DNA, 75 bp, synthetic construct
  source 1..75: mol_type = other DNA
ttataaagatattggtccggttatcgaagcccaacaagaagccggattaattcagccagcggtcagatttcgacc

SEQ ID NO: 457549 - DNA, 75 bp, synthetic construct
  source 1..75: mol_type = other DNA
aggccagttatgggcagataccgtactggatagtgaaagcacatcaggacgcctgaaactgggcactactcttta

SEQ ID NO: 457550 - DNA, 75 bp, synthetic construct
  source 1..75: mol_type = other DNA
actgataaaggaaatcatgttcgtgtaaatggtgaaattacccaggataaagctgaagcagcccttctttatgca

SEQ ID NO: 457551 - DNA, 75 bp, synthetic construct
  source 1..75: mol_type = other DNA
aatctcagttgttattgcagcaaaatgaatacggttatttatcaacggctggacgacaaaaagtcgatccagatc

SEQ ID NO: 457552 - DNA, 75 bp, synthetic construct
  source 1..75: mol_type = other DNA
atgctagttgtgctttataaagaaagtattgattcttctacaacattggagtcaataaaaaaagttttcgaacat

SEQ ID NO: 457553 - DNA, 75 bp, synthetic construct
  source 1..75: mol_type = other DNA
tgggctgaaggggggatggaatttttatcagtatccgttgaatccagttacgaatacagatcctctggggttaga

SEQ ID NO: 457554 - DNA, 75 bp, synthetic construct
  source 1..75: mol_type = other DNA
agcggactcaccggtaccattacgacagtcagcaccggctggtgcactacacgcggacacaatatgaagagccgc

SEQ ID NO: 457555 - DNA, 75 bp, synthetic construct
  source 1..75: mol_type = other DNA
taatttaagaaaggagtcatatcctctgaaaagaaaatgtcccacaggtacagatagagttgctgcttatcatac

SEQ ID NO: 457556 - DNA, 75 bp, synthetic construct
  source 1..75: mol_type = other DNA
ggtgctgacgggcgtggtggacggcttcgggcggacgctgactttccaccgggcggcggagggtgacgtggcggg

SEQ ID NO: 457557 - DNA, 75 bp, synthetic construct
  source 1..75: mol_type = other DNA
gtggctgacacacgacccggcatacccggatgaacagccgactgcgccgctggcgcgctacacgtacacggccag

SEQ ID NO: 457558 - DNA, 75 bp, synthetic construct
  source 1..75: mol_type = other DNA
ataacggtatccggctggaggcggtgtggctgacacacgacccggcatacccggatgaacagccgactgcgccgc

SEQ ID NO: 457559 - DNA, 75 bp, synthetic construct
  source 1..75: mol_type = other DNA
tgcggtgacggcggtgacggggccggacggcaggacggtacggtatggctataacagccagcggcaggtgacgtc

SEQ ID NO: 457560 - DNA, 75 bp, synthetic construct
  source 1..75: mol_type = other DNA
ttaggtgagtgtaccagaggagctcatagtggactgcctttttatcgggtggatggaccgttgcagacgatgaaa

SEQ ID NO: 457561 - DNA, 75 bp, synthetic construct
  source 1..75: mol_type = other DNA
acgccgctggtcgagtacacgcgggaccggctgcaccgcgagacggcccgtagcttcggcggggcgggcagtaca

SEQ ID NO: 457562 - DNA, 75 bp, synthetic construct
  source 1..75: mol_type = other DNA
gccagtggcccgaaccagaagtgggcaggagacatcacgtacttacgtacagatgaaggctggctgtatctggca

SEQ ID NO: 457563 - DNA, 75 bp, synthetic construct
  source 1..75: mol_type = other DNA
tatggcgtcgggcgcggtgacggcggtgacggggccggacggcaggacggtgcggtatggctataacagccagcg

SEQ ID NO: 457564 - DNA, 75 bp, synthetic construct
  source 1..75: mol_type = other DNA
tccggctggaggcggtgtggctgacacacgacccggcatacccggatgaacagccgactgcgccgctggcgcgct

SEQ ID NO: 457565 - DNA, 75 bp, synthetic construct
  source 1..75: mol_type = other DNA
gcagcgggcggaagccttccgtaaacagcgcgccacgtctttatcttcccctgccggtccccgttctgcttcctc

SEQ ID NO: 457566 - DNA, 75 bp, synthetic construct
  source 1..75: mol_type = other DNA
tcagcggcccgcaggagtgccgggagtaccgttacagcggcacgggaaggctgacgggcgtccacactacggcag

SEQ ID NO: 457567 - DNA, 75 bp, synthetic construct
  source 1..75: mol_type = other DNA
gctgcaccgtgagacggcccgcagcttcggcggggaggcatatgagcttgccaccgcctggaataccagcggcca

SEQ ID NO: 457568 - DNA, 75 bp, synthetic construct
  source 1..75: mol_type = other DNA
actcgactcaagagtcctttattttcacgacagtatatatctgatcgttctatcccacttttaaaacccacaaag

SEQ ID NO: 457569 - DNA, 75 bp, synthetic construct
  source 1..75: mol_type = other DNA
agtcaacctgctacccaatatgtcggtcgctgataatctatttataggccgcgaacccaaacgcttcggccttct

SEQ ID NO: 457570 - DNA, 75 bp, synthetic construct
  source 1..75: mol_type = other DNA
caacagtatgaccggtgataaacccggagaagctcattcatcaggctggaccctggctgccaaacgtggacggga

SEQ ID NO: 457571 - DNA, 75 bp, synthetic construct
  source 1..75: mol_type = other DNA
gcgtggagcggggagtatgatgagtggggcaaccagctgaatgaagagaacccgcatcacctgcaccagccgtac

SEQ ID NO: 457572 - DNA, 75 bp, synthetic construct
  source 1..75: mol_type = other DNA
agcagcatcatcaatctgccatcaccgccgacacgctgcccgggctgcctgcaagacgaactgaattttctgaag

SEQ ID NO: 457573 - DNA, 75 bp, synthetic construct
  source 1..75: mol_type = other DNA
atcgaccgcatgaacgacggcggcggctgcacgatttcgtttacctgggacagctatcgggagaaccggtcatga

SEQ ID NO: 457574 - DNA, 75 bp, synthetic construct
  source 1..75: mol_type = other DNA
atgccgaagcagcagggactttctctgaaagagcttcagaagggggccagcaacgtagcggcggacgcgatcaag

SEQ ID NO: 457575 - DNA, 75 bp, synthetic construct
  source 1..75: mol_type = other DNA
aaagtcttttttccaaaagttgtaatggttgaaaatgtaccagctttggcatttgacgaacgaataaacatgttt

SEQ ID NO: 457576 - DNA, 75 bp, synthetic construct
  source 1..75: mol_type = other DNA
ggtgggttaaattgtagttgcagcataggagttgccagtacagatgagtgcatgaataacattgaacggttgaaa

SEQ ID NO: 457577 - DNA, 75 bp, synthetic construct
  source 1..75: mol_type = other DNA
catgaataacattgaacggttgaaattgctggcagatgaacggttatataaaagtaagcaaaatggccgagcaca

SEQ ID NO: 457578 - DNA, 75 bp, synthetic construct
  source 1..75: mol_type = other DNA
ttcccggtgctttctggctccgggttgcgcatcgtggtgtgggttatcgccactctgattggcctgatctttacc

SEQ ID NO: 457579 - DNA, 75 bp, synthetic construct
  source 1..75: mol_type = other DNA
aatggtccggctgggctatgacagtattaccaccgtcctggtgacctatattgccacgcaaatcggttttgccag

SEQ ID NO: 457580 - DNA, 75 bp, synthetic construct
  source 1..75: mol_type = other DNA
ccttacgagtattggctgccatgtcataaacgatatccaaatggttttcgcgatgtttacggtcgtatgaggtgg

SEQ ID NO: 457581 - DNA, 75 bp, synthetic construct
  source 1..75: mol_type = other DNA
tggagcggatgaaagagagactgccaccgtatctcattatggtgctggaagaccagtacaacagactgagtgagc

SEQ ID NO: 457582 - DNA, 75 bp, synthetic construct
  source 1..75: mol_type = other DNA
gcttcttccccggatgagtacagcgcataaaagctatacatcgcgccaacaaaagcaacaaagtttgcaactttc

SEQ ID NO: 457583 - DNA, 75 bp, synthetic construct
  source 1..75: mol_type = other DNA
tcgatgggaaagcaaaaccagtgctaaatcagggcactcgcgggcctgcgctaacgaatggcagccgggaatagc

SEQ ID NO: 457584 - DNA, 75 bp, synthetic construct
  source 1..75: mol_type = other DNA
tgcagtggcctacaccatggcagcgaccagcacgcggaatcttcaggaaggtgatgatccagaccgtggcctgcg

SEQ ID NO: 457585 - DNA, 75 bp, synthetic construct
  source 1..75: mol_type = other DNA
cgacgcaatacacgcattattgattcgaccgggactatggcggcgcgcactctcgccagcggcatgatgtcaggc

SEQ ID NO: 457586 - DNA, 75 bp, synthetic construct
  source 1..75: mol_type = other DNA
gtacggaagctgaccgctgggcgcaggcagaagagcagaagtatgagatgctggagaatgagtaccctcagaggg

SEQ ID NO: 457587 - DNA, 75 bp, synthetic construct
  source 1..75: mol_type = other DNA
atgccactgagagctgtgaggaccgtgtcgcgctcacatggaacaatctccggaaaaccctcctggtccatcagg

SEQ ID NO: 457588 - DNA, 75 bp, synthetic construct
  source 1..75: mol_type = other DNA
tgttgttcttgtatccgttgagaacaaggaaggggagcctttgtttgttacgctctatgacagtaaaagctgcaa

SEQ ID NO: 457589 - DNA, 75 bp, synthetic construct
  source 1..75: mol_type = other DNA
ctggcatattgtgagctggccggagggtgatttacgcaccatccagccgcgcggagaactgccgctactggagcg

SEQ ID NO: 457590 - DNA, 75 bp, synthetic construct
  source 1..75: mol_type = other DNA
tttgagtatgatggtaagcgtgcagcaagaaccgtattgacggggatgtgttattcagtcggcagtgctacgcgc

SEQ ID NO: 457591 - DNA, 75 bp, synthetic construct
  source 1..75: mol_type = other DNA
ttccccgacacactgcccggtaccgaatacggccccgacaggggcatccgtctttcggcggtgtggctgatgcac

SEQ ID NO: 457592 - DNA, 75 bp, synthetic construct
  source 1..75: mol_type = other DNA
gtggagatggtggcaggacgtgtgaattactggcagcgagatttgcttgatgatacaacacgtaacaaaagtgtg

SEQ ID NO: 457593 - DNA, 75 bp, synthetic construct
  source 1..75: mol_type = other DNA
tctgtggttattttcttctgttttttgtttgtggagtagttccggtacaggcttcagagtctgttgacaatgagt

SEQ ID NO: 457594 - DNA, 75 bp, synthetic construct
  source 1..75: mol_type = other DNA
gaagctattaacagcagggaaacaagctgacgacgcattcgatcgtatagagcgcggggcaatgaaagctgatag

SEQ ID NO: 457595 - DNA, 75 bp, synthetic construct
  source 1..75: mol_type = other DNA
atgatgacgctggcggggaaaaatctccgccttttcctgcctgtccccggacagagcacaaaggatgtcgccggc

SEQ ID NO: 457596 - DNA, 75 bp, synthetic construct
  source 1..75: mol_type = other DNA
atgatgaagctactcatcatcgtggtgctcttagtgattagctacccagcatactacgactaccagggcggggga

SEQ ID NO: 457597 - DNA, 75 bp, synthetic construct
  source 1..75: mol_type = other DNA
gactgaaaggcgctattagtgacgcagcaacagaagccagaaacgcaaactttaccactatgctaaacaccgtag

SEQ ID NO: 457598 - DNA, 75 bp, synthetic construct
  source 1..75: mol_type = other DNA
ccgccatccagaaaaccgcgtcaatgcgccgccagcaaatcatcaaagatgaagccgatacgttgttcaacaatc

SEQ ID NO: 457599 - DNA, 75 bp, synthetic construct
  source 1..75: mol_type = other DNA
ggacgctttacgcaacaggtaatgaccgaatatcaaacgaccgtggatccggcaacaggccaggcattgaatccg

SEQ ID NO: 457600 - DNA, 75 bp, synthetic construct
  source 1..75: mol_type = other DNA
taaaaaaactcgctcctttaaatattaattctgcttatgccagagcaggtatatcgtctacaaatgagcacctga

SEQ ID NO: 457601 - DNA, 75 bp, synthetic construct
  source 1..75: mol_type = other DNA
atgaatcagttaacggcttacaccttgcgcctgggcgataactgcctggtgctctcccagcggttgggggaatgg

SEQ ID NO: 457602 - DNA, 75 bp, synthetic construct
  source 1..75: mol_type = other DNA
cagcactgctgcagaatgcacgaggctcagtcaccggacaagagcgggaacgctggcattttttgcgttacaaac

SEQ ID NO: 457603 - DNA, 75 bp, synthetic construct
  source 1..75: mol_type = other DNA
tgtttgaatcgttcaaagagctgtttttatctactgccaatactgccgtgaatcgagccaaaaaccctgtgcttg

SEQ ID NO: 457604 - DNA, 75 bp, synthetic construct
  source 1..75: mol_type = other DNA
cacaatacacgggaatttatagcgtgtctggaatccagattatccgaaaaggggattattcctggacagtgtcct

SEQ ID NO: 457605 - DNA, 75 bp, synthetic construct
  source 1..75: mol_type = other DNA
tagataagtggaaaatgaccgatctggagcggatcgataaacaagctcgtctgagcgtgggcgctcagttcacgt

SEQ ID NO: 457606 - DNA, 75 bp, synthetic construct
  source 1..75: mol_type = other DNA
aacggtggtgcggtaggcgctggcaacctataccgcgtgggggaacacggtaagccggagctattccagaccaat

SEQ ID NO: 457607 - DNA, 75 bp, synthetic construct
  source 1..75: mol_type = other DNA
caatcactgagactcctgaccccgtcaaaccggtgacaaatcctttctggcgaaacaagtctgatgaaagccaga

SEQ ID NO: 457608 - DNA, 75 bp, synthetic construct
  source 1..75: mol_type = other DNA
ccgttgctggctctgctcgataaattgctggaagccagtctgccctcccgggttatcagtattcaactggatcat

SEQ ID NO: 457609 - DNA, 75 bp, synthetic construct
  source 1..75: mol_type = other DNA
gatcttgctccggaaccatcagtataccgaaaaatcagttttcttggatatccggatgttccattatctccatcg

SEQ ID NO: 457610 - DNA, 75 bp, synthetic construct
  source 1..75: mol_type = other DNA
ggggagactggagctcatatagaccgcattgtggcgcacgaggttacaaggtaaaactcaatggtgtacttattg

SEQ ID NO: 457611 - DNA, 75 bp, synthetic construct
  source 1..75: mol_type = other DNA
ggtaactgtcgttattgcacttccccacatgcagcctggcgtgattaatgttgagcaggaaggtgtcagtgcaga

SEQ ID NO: 457612 - DNA, 75 bp, synthetic construct
  source 1..75: mol_type = other DNA
cagacctggaaggccagccttcacgatatccgcctgcgcgaagaggctgacctctggctgtcggtgcgctcggat

SEQ ID NO: 457613 - DNA, 75 bp, synthetic construct
  source 1..75: mol_type = other DNA
gagcaggaatatcagaacacgctaaccgccatccagaaaaccgcgtcaatgcgacggcagcaaatcatcaaagac

SEQ ID NO: 457614 - DNA, 75 bp, synthetic construct
  source 1..75: mol_type = other DNA
gcgatgaagcgcgtagctatgggcgtttgcaggcaggagtcaaccagaccgggaggaatgttagccccgcgccgt

SEQ ID NO: 457615 - DNA, 75 bp, synthetic construct
  source 1..75: mol_type = other DNA
ttccagtctggtggtaagcagtacatgattcctggtgagaatggacgggttatcccgaaccgtaaccttgagagt

SEQ ID NO: 457616 - DNA, 75 bp, synthetic construct
  source 1..75: mol_type = other DNA
atgaccaaaacgtctgccgcagtcaaaagcaacctttccccggcaatccgtaacgcatcataccagatcgcagac

SEQ ID NO: 457617 - DNA, 75 bp, synthetic construct
  source 1..75: mol_type = other DNA
taacgctgaagtagcgaaacagatgcggaacatggctgaaatccaggcaattgcagcactgcgtgacctgaaaga

SEQ ID NO: 457618 - DNA, 75 bp, synthetic construct
  source 1..75: mol_type = other DNA
accatagaaaacacagcgatgcgactgatgcagcgtgaatcacaacgacccggaggaattttgcagccgcgcaga

SEQ ID NO: 457619 - DNA, 75 bp, synthetic construct
  source 1..75: mol_type = other DNA
cactggatatggctgccacgctggcagcgcctttcacaggtgacgggcgggatgctgcggagatcctgcatacac

SEQ ID NO: 457620 - DNA, 75 bp, synthetic construct
  source 1..75: mol_type = other DNA
tgtccggataaccgcatcaccgaagacgcgcactacctgtaccgctatgacaggtatggcaggctgacggagaag

SEQ ID NO: 457621 - DNA, 75 bp, synthetic construct
  source 1..75: mol_type = other DNA
aggccggttacagagtcagcacctgaacagcctggtgtatgaccgtgactacggctggaatgacaatggcgacct

SEQ ID NO: 457622 - DNA, 75 bp, synthetic construct
  source 1..75: mol_type = other DNA
acacgcggacggcagcgtcacgcagagtcagtttgatgcggtgggcaggcttaaggcacagacggatgccgcagg

SEQ ID NO: 457623 - DNA, 75 bp, synthetic construct
  source 1..75: mol_type = other DNA
ccctattgctatacttatgatgttgtcttttcctgtagcttctcaagcggcgggattagtcataaaaaatggaac

SEQ ID NO: 457624 - DNA, 75 bp, synthetic construct
  source 1..75: mol_type = other DNA
gtgcaaaggtccttcccggtgaaaccgacatcgccctgcccggcccgctgccgttcatcctctcccgcacctaca

SEQ ID NO: 457625 - DNA, 75 bp, synthetic construct
  source 1..75: mol_type = other DNA
aagccgggctgaagcgggtggtgaaaaaggaacacgcggacggcagcgtcacgcagagtcagtttgatgcggtgg

SEQ ID NO: 457626 - DNA, 75 bp, synthetic construct
  source 1..75: mol_type = other DNA
ggatgaacaatataaaaataaagaagaggcgagagttatcactttaattgaacagcatgcggcgaaaactttagg

SEQ ID NO: 457627 - DNA, 75 bp, synthetic construct
  source 1..75: mol_type = other DNA
gcagacggtggagaacccggagacgggggaactgctgtggcagcatgagacaacacacgcctacaacgaacaggg

SEQ ID NO: 457628 - DNA, 75 bp, synthetic construct
  source 1..75: mol_type = other DNA
ggccaccgcgtgtcggtccactacggctatgacgataaaggccgcctgacgggtgaacggcagacggtggagaac

SEQ ID NO: 457629 - DNA, 75 bp, synthetic construct
  source 1..75: mol_type = other DNA
ctataactggaatgacaacggcgacctgatgcgcatcagcggcccgcgacagacgcgggaatacggctacagtgc

SEQ ID NO: 457630 - DNA, 75 bp, synthetic construct
  source 1..75: mol_type = other DNA
tgccgtccactatggctatgacgataagggccgtctgaccggggagcgccagacggtggagaacccggagacggg

SEQ ID NO: 457631 - DNA, 75 bp, synthetic construct
  source 1..75: mol_type = other DNA
gcatcccgtatgcgaccgacccggcgggaaaccggctgccggacccggagctgcacccggacagcaccctcacgg

SEQ ID NO: 457632 - DNA, 75 bp, synthetic construct
  source 1..75: mol_type = other DNA
gtctaatggcaacgtctccctgtcaagttacagcacgatcgacgactatgcgggcaaaattctgtccaacagcaa

SEQ ID NO: 457633 - DNA, 75 bp, synthetic construct
  source 1..75: mol_type = other DNA
ttttaatcaggctgttgagtatttaaaacaagattcacaaatgaaagaaactatagattttttatcaagctctga

SEQ ID NO: 457634 - DNA, 75 bp, synthetic construct
  source 1..75: mol_type = other DNA
actggaggcggaatacatcccggagaggaaacttcatctttaccactgtgaccactgtgggctgccgctggcgct

SEQ ID NO: 457635 - DNA, 75 bp, synthetic construct
  source 1..75: mol_type = other DNA
tgatgggcgtgccgggaaggctctgagcgatgggcagttaataaattctcaggctgaaatgtgttactggaccag

SEQ ID NO: 457636 - DNA, 75 bp, synthetic construct
  source 1..75: mol_type = other DNA
tgttctcgggcaaaacttatacaccgaaaactgatgatgttcttatcgaatggggcaagctgtttaacgtatcag

SEQ ID NO: 457637 - DNA, 75 bp, synthetic construct
  source 1..75: mol_type = other DNA
cgggcagtacagcggggtacgaacaggccacggcgtacaccctcacagggcagctccggagcaggcacctgaacc

SEQ ID NO: 457638 - DNA, 75 bp, synthetic construct
  source 1..75: mol_type = other DNA
gagcttcgcgccgctcatccgcatcgaaacagacaacggtgaacgggagaaagcgcagtgccgcagcctggcgga

SEQ ID NO: 457639 - DNA, 75 bp, synthetic construct
  source 1..75: mol_type = other DNA
acctgtatttcgacaactgggagcgggaagggtttgtcgaatgcgacccgtcaccaggctgtatggtcatcatgc

SEQ ID NO: 457640 - DNA, 75 bp, synthetic construct
  source 1..75: mol_type = other DNA
accagcggggcggatgcatctattcaggttggcggaacgtattacaacaactacgctaccacctggagtgcgggc

SEQ ID NO: 457641 - DNA, 75 bp, synthetic construct
  source 1..75: mol_type = other DNA
gttcgacaacacgcgtgctctggtcaccagcggggcggatgcatctattcaggttggcggaacgtattacaacaa

SEQ ID NO: 457642 - DNA, 75 bp, synthetic construct
  source 1..75: mol_type = other DNA
cggcggaacagatggccgcgcagatggaggcggaatacatcccggagaggaaacttcatctttaccactgtgacc

SEQ ID NO: 457643 - DNA, 75 bp, synthetic construct
  source 1..75: mol_type = other DNA
ggcagggtgacatgacccgcaagggactggatattgtgcagggttcagcaggggggctgataggtgcgccaaccg

SEQ ID NO: 457644 - DNA, 75 bp, synthetic construct
  source 1..75: mol_type = other DNA
tcgtacaatagaagatcggcaggcacaatgtgaacggctggaatccgccctgaaggaggccgttaccgaatggag

SEQ ID NO: 457645 - DNA, 75 bp, synthetic construct
  source 1..75: mol_type = other DNA
attaccgatttactgtaagtcaggcaggatttaaacaagcatgcagaaagtaccagcgagcttcggttaaaaatc

SEQ ID NO: 457646 - DNA, 75 bp, synthetic construct
  source 1..75: mol_type = other DNA
gttgctgaaaagcgaacccccccccccccccgcgggggggggggcgggggggtgggggggggggcgagccacaac

SEQ ID NO: 457647 - DNA, 75 bp, synthetic construct
  source 1..75: mol_type = other DNA
gatgaacaactgacgcaaatcgccagtgcgcagatggctgaatggttttcgttgctgaaaagcgaaccccccccc

SEQ ID NO: 457648 - DNA, 75 bp, synthetic construct
  source 1..75: mol_type = other DNA
ccatataatatacacacttacaagacagaggaagttgtaaaccagaggaatataaaagttaaaaacatgacctta

SEQ ID NO: 457649 - DNA, 75 bp, synthetic construct
  source 1..75: mol_type = other DNA
ctccgcagaatcgtgaatcaatacgttctatcgtcagatctctgcggagtgcatttggtattactgggcttaaat

SEQ ID NO: 457650 - DNA, 75 bp, synthetic construct
  source 1..75: mol_type = other DNA
agctacagcagcatcattgaccgccgccacagcaaaacagcctgaaaatagtgcaggggtcactgaaagccaact

SEQ ID NO: 457651 - DNA, 75 bp, synthetic construct
  source 1..75: mol_type = other DNA
ttattgttagtggtattgatgatcgtagtgatattggcattgactccaatgatacagacgatattacttttgata

SEQ ID NO: 457652 - DNA, 75 bp, synthetic construct
  source 1..75: mol_type = other DNA
caaaatcgccagacggaatatcaaaatgaaattaatcaactatctgcgccaggtgttaattttgatgatatttaa

SEQ ID NO: 457653 - DNA, 75 bp, synthetic construct
  source 1..75: mol_type = other DNA
tcacacaaactcagacatacggtaacggaatttgatgagagcgggaaaagcgaaccaacggacttatttacctgg

SEQ ID NO: 457654 - DNA, 75 bp, synthetic construct
  source 1..75: mol_type = other DNA
agtttctactttattcgataacgaagttaacactgaccattctcaaaatatatatgtgcactataagaaactcga

SEQ ID NO: 457655 - DNA, 75 bp, synthetic construct
  source 1..75: mol_type = other DNA
cgaagataaagttgaaaaaaggcttcaaaatcgccaggctaaatatcaaaatgaaattaatcaactatctgcatt

SEQ ID NO: 457656 - DNA, 75 bp, synthetic construct
  source 1..75: mol_type = other DNA
atgttatttaatttgttttccccagcacttaagcttaatactggcctggcaattctttcgcctggtgcatttgaa

SEQ ID NO: 457657 - DNA, 75 bp, synthetic construct
  source 1..75: mol_type = other DNA
gcaattgggttaccagcctgtggttctggggttgctcaaccgtgaaccgctctctgtcgaaataatgacgcgaat

SEQ ID NO: 457658 - DNA, 75 bp, synthetic construct
  source 1..75: mol_type = other DNA
agcttagcgttcaagctggcagagatgaaacaccatggtcaattgttgcggatgacgccacaagagagtgacaaa

SEQ ID NO: 457659 - DNA, 75 bp, synthetic construct
  source 1..75: mol_type = other DNA
gggtggagtaatctggcgaaaaaatcagtatctgagcacgtcgatgaaacaaaaaatttggcaacgtgctttatc

SEQ ID NO: 457660 - DNA, 75 bp, synthetic construct
  source 1..75: mol_type = other DNA
ggaagcgcgtttattgaggccgggttaaagcgctgcctggatatgtatatcaagcgatgggggagcaagcgcaat

SEQ ID NO: 457661 - DNA, 75 bp, synthetic construct
  source 1..75: mol_type = other DNA
gcatgggcgcaaccttgtgctgccctctatgccgatcaagtctacagcaaagagttgtatatcaaggcacattga

SEQ ID NO: 457662 - DNA, 75 bp, synthetic construct
  source 1..75: mol_type = other DNA
cacaactggatgtactggcaaaacaaccggatcgtatatggtggagggctttgttgaataaatcagatttcgggt

SEQ ID NO: 457663 - DNA, 75 bp, synthetic construct
  source 1..75: mol_type = other DNA
actggcgattatctacctgaccattcaggtggcggtttacggattaattttcttcctgccgacgcaggttgctgc

SEQ ID NO: 457664 - DNA, 75 bp, synthetic construct
  source 1..75: mol_type = other DNA
tcaactggcaagtgaagaacaacagaaagtgacttctcgactgagcgatgcgctgcgtaatgggcgagtctggca

SEQ ID NO: 457665 - DNA, 75 bp, synthetic construct
  source 1..75: mol_type = other DNA
ggtgccacacacccgtatgagtccctgtcgccgggggctgatacagccacaacctgccgcactgactgtccaggg

SEQ ID NO: 457666 - DNA, 75 bp, synthetic construct
  source 1..75: mol_type = other DNA
agttgagttcttaagaaaagtatatgggggaggattctacttaataggtattcatgcagatgagaaacggcggca

SEQ ID NO: 457667 - DNA, 75 bp, synthetic construct
  source 1..75: mol_type = other DNA
cattggtatcgggctttctggtctgctttcgccagtactggcgattgttgcgctgtgtgtcgcggcaatagggtt

SEQ ID NO: 457668 - DNA, 75 bp, synthetic construct
  source 1..75: mol_type = other DNA
agcggcggggcacgccgttcttgcctgtggagagatggtgcagtcaggccgctcgttgaagcaggaacccaccga

SEQ ID NO: 457669 - DNA, 75 bp, synthetic construct
  source 1..75: mol_type = other DNA
acactgtccagtgaattattttctcgccgtatccagttgtatgcttttacaccaccacagagccaggctgataaa

SEQ ID NO: 457670 - DNA, 75 bp, synthetic construct
  source 1..75: mol_type = other DNA
ggtaacgcattcaatcggtatcaatctgtggtgagaaacatgttgcctcgtataggggaaagccgactggcctca

SEQ ID NO: 457671 - DNA, 75 bp, synthetic construct
  source 1..75: mol_type = other DNA
ccgcatatggtttcactataacggcaaacgtgtcagagaaaacctcggtgttcctgacaccgccaaaaaccggaa

SEQ ID NO: 457672 - DNA, 75 bp, synthetic construct
  source 1..75: mol_type = other DNA
gtgtaattcaccttattaagccagcaatcgacgcactccagagtcagatgacactaacgagactgagcaaagagc

SEQ ID NO: 457673 - DNA, 75 bp, synthetic construct
  source 1..75: mol_type = other DNA
tttaacggcatcaagccgctaaagagggccaggatagaaccagatccgctcacacgtgatgaattcgttcgcttc

SEQ ID NO: 457674 - DNA, 75 bp, synthetic construct
  source 1..75: mol_type = other DNA
tgatgatggcaaagctatttatatttatgactcatctgaaatgcgtaatgcattaatcactttacgaaaaatttc

SEQ ID NO: 457675 - DNA, 75 bp, synthetic construct
  source 1..75: mol_type = other DNA
acgcttccttcgctcgccaccgccgcccatatcgccagtcatcactatatggaagtcattattgatggcgcactg

SEQ ID NO: 457676 - DNA, 75 bp, synthetic construct
  source 1..75: mol_type = other DNA
tgattctgcacggaagctcttttgtgggcttgctttatatcttctggataaggaacgattccatcttcagcaaaa

SEQ ID NO: 457677 - DNA, 75 bp, synthetic construct
  source 1..75: mol_type = other DNA
ggctggatttgctgcaccatgtgcaatatttattggttttgttgttattgtcatagtcggactgatgccaaaaaa

SEQ ID NO: 457678 - DNA, 75 bp, synthetic construct
  source 1..75: mol_type = other DNA
gtagacatagtgcgcatcttccgcgatgcggttatccggccatgccgtgagggtgctgtccgggtgcagttccgg

SEQ ID NO: 457679 - DNA, 75 bp, synthetic construct
  source 1..75: mol_type = other DNA
cgacaaaaaacaggcgcgttgcaggtgagctgcgcgcctctgtttgttatgcaataaaaaccggcgttttcgact

SEQ ID NO: 457680 - DNA, 75 bp, synthetic construct
  source 1..75: mol_type = other DNA
atggaatacatttaataatgtcattacacaatttagcggaaaacctgaatataaaaaattggtcgcgattacatg

SEQ ID NO: 457681 - DNA, 75 bp, synthetic construct
  source 1..75: mol_type = other DNA
ccagaacagaatcctgagttgaaatatcagtgtcttgtccttcttgatgaatttacatcaatgggtaagtctgaa

SEQ ID NO: 457682 - DNA, 75 bp, synthetic construct
  source 1..75: mol_type = other DNA
aaggagcgttttcacctggaccagaaagccaaaggtcataatgcaccggacgtccttgtttccatcagcgccata

SEQ ID NO: 457683 - DNA, 75 bp, synthetic construct
  source 1..75: mol_type = other DNA
tgtttttgttcttttcctcgttttcttttgctgaggggaaagaaaatccggatgcacttgttcagtgtgcaggcc

SEQ ID NO: 457684 - DNA, 75 bp, synthetic construct
  source 1..75: mol_type = other DNA
gcgttgagaaccacggaggaactctccgcatatggttcatctataaaggcagccgggttcgtgaaagtctcggcg

SEQ ID NO: 457685 - DNA, 75 bp, synthetic construct
  source 1..75: mol_type = other DNA
tactggaattatcagaaaggaaaaaacttcaagatacaaatgaagttcataccatagttgataaattacaaaaac

SEQ ID NO: 457686 - DNA, 75 bp, synthetic construct
  source 1..75: mol_type = other DNA
ccagaatatttcccattctgctcatttttctgatttcttatcccgccttccggagccggcacagcaggcttttcc

SEQ ID NO: 457687 - DNA, 75 bp, synthetic construct
  source 1..75: mol_type = other DNA
ggattacatcgtcgctgaggcgcagcgcggcacgctggaggcgtttaacaacctatcgcagcagtcgcaggtata

SEQ ID NO: 457688 - DNA, 75 bp, synthetic construct
  source 1..75: mol_type = other DNA
cgaggcacgctggaggcttttaacaacctatcgcagcagtctcaggtgtacgccagccagacgacgctacagcag

SEQ ID NO: 457689 - DNA, 75 bp, synthetic construct
  source 1..75: mol_type = other DNA
gagtgttaatttagatggaattgatcaattcgacgaactaatattgcggtgctacctccaactctgttcagatgt

SEQ ID NO: 457690 - DNA, 75 bp, synthetic construct
  source 1..75: mol_type = other DNA
gatcctctcacccgtgacgaatttattcgttttattgaggcctgccgtcatcaacaaacaaaaaacctgtggatt

SEQ ID NO: 457691 - DNA, 75 bp, synthetic construct
  source 1..75: mol_type = other DNA
tgataaaacagatttggaacagataggtgcagacttggatttgcccctatatttccagacacctgttatcactta

SEQ ID NO: 457692 - DNA, 75 bp, synthetic construct
  source 1..75: mol_type = other DNA
catattggcattaatgttaattcagacaatattctggacccagaatttgaaaaacaatgtgttcgaatgcttgaa

SEQ ID NO: 457693 - DNA, 75 bp, synthetic construct
  source 1..75: mol_type = other DNA
cttcaccccaaaataggaataatttctccagaaatatttattcctattgcggaatcctctaacttggttgttccc

SEQ ID NO: 457694 - DNA, 75 bp, synthetic construct
  source 1..75: mol_type = other DNA
gaacacacaacagccatttctgcgtcgcgttctatctggtaaggaaaaatttaaaactacgccactcaaaaggta

SEQ ID NO: 457695 - DNA, 75 bp, synthetic construct
  source 1..75: mol_type = other DNA
agataaggagaatatcacttgagaaagaattttttgataaatttttaatcaatattggggaggccttcttttgtc

SEQ ID NO: 457696 - DNA, 75 bp, synthetic construct
  source 1..75: mol_type = other DNA
gcggctcggtggtcaccgccgatgacatcatcatcaccagcggctgccataactcgatgtcgctggcgttaatgg

SEQ ID NO: 457697 - DNA, 75 bp, synthetic construct
  source 1..75: mol_type = other DNA
cctgaaaccgctgtggcgtgagctaagccgggtggtgcagcataatctgcaaaccgttctcggttatgacttgtt

SEQ ID NO: 457698 - DNA, 75 bp, synthetic construct
  source 1..75: mol_type = other DNA
gctgcgtgccgttgtagataaacacgccctgctcgcccatcaacaacgggtagtgagtggggaacaggaaccgag

SEQ ID NO: 457699 - DNA, 75 bp, synthetic construct
  source 1..75: mol_type = other DNA
ctaccgagtttgtttcattcagcgagccgaccaaaaatctgtcagagcaaatcgccgttcgttcgcgctccattg

SEQ ID NO: 457700 - DNA, 75 bp, synthetic construct
  source 1..75: mol_type = other DNA
taccagaacctgatcacaatgtcgcgcagtgagatttccattgccttgctggggcagaatcagaccactgaagcc

SEQ ID NO: 457701 - DNA, 75 bp, synthetic construct
  source 1..75: mol_type = other DNA
catcgttggttaattatattattggaatggtgattgctttcgctgtcgcttttagcctctctttattactcaaat

SEQ ID NO: 457702 - DNA, 75 bp, synthetic construct
  source 1..75: mol_type = other DNA
catgtgtctactctatgccatgagttatctcatttttgtagatattttatcgatggtaaacattgtggcggaatg

SEQ ID NO: 457703 - DNA, 75 bp, synthetic construct
  source 1..75: mol_type = other DNA
gctgtacttcgtggttttccgcaccctgattctgcagttcaacatgtgcacgccgggacgtgaagatgcggaagt

SEQ ID NO: 457704 - DNA, 75 bp, synthetic construct
  source 1..75: mol_type = other DNA
ccgcttggcggagtaatgccactggcagctgatacccgcattcacggcattgtcgttcgcgatatctacggtgaa

SEQ ID NO: 457705 - DNA, 75 bp, synthetic construct
  source 1..75: mol_type = other DNA
tcctaccagtttctttggcaccaacgcctgggccgcgccgtggctggggcttattggttcactgtttatcattgc

SEQ ID NO: 457706 - DNA, 75 bp, synthetic construct
  source 1..75: mol_type = other DNA
gtgattgtgctggtatgtgcattactcacctatggcggagtgtcgctgtttgtggtggcatttgccgtttatccg

SEQ ID NO: 457707 - DNA, 75 bp, synthetic construct
  source 1..75: mol_type = other DNA
ttttatgcgcaactgaaaatcgaggtggcgcacggctggattctggagccagcccctgccgaaatgcgcgagaag

SEQ ID NO: 457708 - DNA, 75 bp, synthetic construct
  source 1..75: mol_type = other DNA
tgaccggcctcgattccgtcctggggaaactggatgccgtctcacaggtcactcgcgataaatccggtcgtgcag

SEQ ID NO: 457709 - DNA, 75 bp, synthetic construct
  source 1..75: mol_type = other DNA
taggcctgcactgaacggggtcgatgccgatgtgattaacgtttttgctttggagctggaaaagtccattgatcg

SEQ ID NO: 457710 - DNA, 75 bp, synthetic construct
  source 1..75: mol_type = other DNA
ttctaaactctacatcgcaagctcttgtgaatgctgtaaactgccaaggagtcatgggaaagggtattgctttgg

SEQ ID NO: 457711 - DNA, 75 bp, synthetic construct
  source 1..75: mol_type = other DNA
tgatctgggtccttatatgattagtgatgataaatgtatcaaaattacgtcaaaaggagatgatttttgtgacga

SEQ ID NO: 457712 - DNA, 75 bp, synthetic construct
  source 1..75: mol_type = other DNA
agtaaatatctatatatatgtgcgtttttcgtttttgcatcggcaatatctgcagtcataatgtatgtttattat

SEQ ID NO: 457713 - DNA, 75 bp, synthetic construct
  source 1..75: mol_type = other DNA
attaaattaatgcaaaaaatcataaataagggtaagtcagaaaaagaatctatattatcgaataatcattataat

SEQ ID NO: 457714 - DNA, 75 bp, synthetic construct
  source 1..75: mol_type = other DNA
ggattcggtgcactaaccatgatgcccatatcaggcattctgatggaaaagatggggacacaaatcgtaacgcgt

SEQ ID NO: 457715 - DNA, 75 bp, synthetic construct
  source 1..75: mol_type = other DNA
aaaatgggttttcagtgcgtaatgctcactgaaaaaatgatggaagagatgaaaaagatgaaaaagaacaacgcc

SEQ ID NO: 457716 - DNA, 75 bp, synthetic construct
  source 1..75: mol_type = other DNA
ctgaaagcattggaattgccgaaagaagtgaacgccgatttcttcttgatcttgtatcgaacccgtgaggtaaag

SEQ ID NO: 457717 - DNA, 75 bp, synthetic construct
  source 1..75: mol_type = other DNA
ctgtcgataaaagaaaacatcctgtttgggctggcaaaaaaacagctctccatgcagaaaatgaagaacttgctg

SEQ ID NO: 457718 - DNA, 75 bp, synthetic construct
  source 1..75: mol_type = other DNA
gaattggcggccaaggccttggaatacatcggtggactctacgagatcgagcgggaaaccaaagatctgccaccg

SEQ ID NO: 457719 - DNA, 75 bp, synthetic construct
  source 1..75: mol_type = other DNA
agaaaggttcgctcttttcgctagtggttgaaaatgcctgggaaaaatcacgctcaaatagtttaagccgcagta

SEQ ID NO: 457720 - DNA, 75 bp, synthetic construct
  source 1..75: mol_type = other DNA
attgaatctctgcaagcgttcctgcgttcggcgggtgcacttggggtctgggtttacaccttcctcgaacgtatt

SEQ ID NO: 457721 - DNA, 75 bp, synthetic construct
  source 1..75: mol_type = other DNA
atgaacaggaccagtccctattattgtcgtcgctcagtactttccttattgatatctgccttgatatatgccccg

SEQ ID NO: 457722 - DNA, 75 bp, synthetic construct
  source 1..75: mol_type = other DNA
ttgatcttgggacctatgagtatgtcctgaaaagcgacggcaacagcaactggaacctgaccaatgatgtcaaac

SEQ ID NO: 457723 - DNA, 75 bp, synthetic construct
  source 1..75: mol_type = other DNA
atgactgactggtcgacggtgagcggtacgaatagtgaaggtgcattctctattcacaataacgtggcagacaat

SEQ ID NO: 457724 - DNA, 75 bp, synthetic construct
  source 1..75: mol_type = other DNA
tacaacctcggcgaaaaataccaccgttgatgctggcggtaaactgatcgtccagaaggaggccaaaacagatac

SEQ ID NO: 457725 - DNA, 75 bp, synthetic construct
  source 1..75: mol_type = other DNA
atgttattggtgtggtaaacgatgagactgtagatggtgtccaaaaagtagatgaacgaggtacaacaaataaca

SEQ ID NO: 457726 - DNA, 75 bp, synthetic construct
  source 1..75: mol_type = other DNA
caagcaaacggtatatggtttagccactgaggcaaatatcgaaagtggtgaacaaattgttgatggtgggtcaac

SEQ ID NO: 457727 - DNA, 75 bp, synthetic construct
  source 1..75: mol_type = other DNA
acgccgtatgcatcgttaacggggttcaccgctgataaccccgaatatcatttatccaatggcatggaatcgaaa

SEQ ID NO: 457728 - DNA, 75 bp, synthetic construct
  source 1..75: mol_type = other DNA
ttattgcttcatattttgattttaattacaacaattacgtttggctttatggttttatacataaagaaaataata

SEQ ID NO: 457729 - DNA, 75 bp, synthetic construct
  source 1..75: mol_type = other DNA
caacagtctgtgggtacagaaggatgcttccggcggtgcaaacacagagattatcaatacctccgggaatattga

SEQ ID NO: 457730 - DNA, 75 bp, synthetic construct
  source 1..75: mol_type = other DNA
gcacgatggcgcggctttaaaagcaatgactgactggtcgacggtgagcggtacgaatagtgaaggtgcattctc

SEQ ID NO: 457731 - DNA, 75 bp, synthetic construct
  source 1..75: mol_type = other DNA
tccattattaatggcggttcacaggtagttaatgagggcggtctggctgaaaactcggtgcttaatgaaggcggc

SEQ ID NO: 457732 - DNA, 75 bp, synthetic construct
  source 1..75: mol_type = other DNA
acagtcaacgataatggcaaagcgacagatatcgtccagaacagcggtgccgctctccagacgagcacggctaac

SEQ ID NO: 457733 - DNA, 75 bp, synthetic construct
  source 1..75: mol_type = other DNA
agcgggcatctcggggtggggtatagcaacggtgccgatgtggaatccccgtggaacgcggtggctggtgtgaac

SEQ ID NO: 457734 - DNA, 75 bp, synthetic construct
  source 1..75: mol_type = other DNA
aagtactatgggtgcgtatagagaacgatttcaacgctgttgagcaaaagattagtttatctcttgtggatcaat

SEQ ID NO: 457735 - DNA, 75 bp, synthetic construct
  source 1..75: mol_type = other DNA
tgtttagtttcagaggattttagagagactggaataactgatgaagacttactaagattatcctcggctgggttt

SEQ ID NO: 457736 - DNA, 75 bp, synthetic construct
  source 1..75: mol_type = other DNA
gggtaagtggtccaactggacttaaaggatactttcctttgtttgcgttaaaaaacggattagtcaagtttggtt

SEQ ID NO: 457737 - DNA, 75 bp, synthetic construct
  source 1..75: mol_type = other DNA
cggcctctgaacttgctgccgccatgaataaaattaaagaacttcagcgcctgctaggtaagaaaacgatggtaa

SEQ ID NO: 457738 - DNA, 75 bp, synthetic construct
  source 1..75: mol_type = other DNA
ctggtgtcacgtgaatatctggcctcagtcgaaacgctcgctgatatcggactgaaagccgaaagggcaaggcca

SEQ ID NO: 457739 - DNA, 75 bp, synthetic construct
  source 1..75: mol_type = other DNA
cgttagattccagttctaagactctcataccgactctagccaagggctgctgcgtagtcactggaaccgcttttg

SEQ ID NO: 457740 - DNA, 75 bp, synthetic construct
  source 1..75: mol_type = other DNA
attagcgccggaggctcgctgattgtctataccggtggtattgcacatggggttaaccaggagacgggcagtgct

SEQ ID NO: 457741 - DNA, 75 bp, synthetic construct
  source 1..75: mol_type = other DNA
ctaacggtgaggcaataaaaacaacgatcaatgaaggcggtacgctgacagtcaacgataatggcaaagcgacag

SEQ ID NO: 457742 - DNA, 75 bp, synthetic construct
  source 1..75: mol_type = other DNA
gcgcttttatgggttattcccattcacatatcggttttgatcgcggaggacatggcagtgtgggcagttattctc

SEQ ID NO: 457743 - DNA, 75 bp, synthetic construct
  source 1..75: mol_type = other DNA
attatatgcgctagagttgaatgcaaaatatgagagtggtatgaatcctcttaccaaaatcatagctactgatgg

SEQ ID NO: 457744 - DNA, 75 bp, synthetic construct
  source 1..75: mol_type = other DNA
ggtaaaggtagtaccaaaaaaatatattatccagactatcttgtaattataaatggtgttcctgtattactagta

SEQ ID NO: 457745 - DNA, 75 bp, synthetic construct
  source 1..75: mol_type = other DNA
gcctttcggctcccccacacagcccgccataaatcgcgaatgtgactgtgcaaacgatatgaaaaaagacgcggg

SEQ ID NO: 457746 - DNA, 75 bp, synthetic construct
  source 1..75: mol_type = other DNA
tgtactacgacaacggatcccacgccgggtgcatcatctacatcggtgcagcgcaggtaaaccgcgaaagcatgg

SEQ ID NO: 457747 - DNA, 75 bp, synthetic construct
  source 1..75: mol_type = other DNA
caacgccgccgccggtgattgtttacaacgcctgcccgaaggtcagcccctgcccgatgccgggcagcgacccgg

SEQ ID NO: 457748 - DNA, 75 bp, synthetic construct
  source 1..75: mol_type = other DNA
atgagtcagcaagtggcggtggaaaaactggtcgtggacgcctgggaacagcgttcatatcagcacctgtggcag

SEQ ID NO: 457749 - DNA, 75 bp, synthetic construct
  source 1..75: mol_type = other DNA
tgacgattcaggatgagagcgaaataataaatatctgctcacgaaggagcgcaagatattattcatccagaaaaa

SEQ ID NO: 457750 - DNA, 75 bp, synthetic construct
  source 1..75: mol_type = other DNA
cgggcatcttatttttttctgttccagctgtatacccgcattcacaatacatttttctcccaaaagcaacaactg

SEQ ID NO: 457751 - DNA, 75 bp, synthetic construct
  source 1..75: mol_type = other DNA
gcgcaatgcgcttgcgaccaccgaccagacgcagcgtacccgggactaccaacaggcacagaaaatcgtcattga

SEQ ID NO: 457752 - DNA, 75 bp, synthetic construct
  source 1..75: mol_type = other DNA
tggcaggttgcggaaatgtagtgatggcttgggcgaccaataccgagtcaggttttgaatttcagacctggggtg

SEQ ID NO: 457753 - DNA, 75 bp, synthetic construct
  source 1..75: mol_type = other DNA
ccgggctgctcgccgtggtgctgtggctgcgtcatgacaacgcaaatttatcccgatcattcgaaaaagcgaaca

SEQ ID NO: 457754 - DNA, 75 bp, synthetic construct
  source 1..75: mol_type = other DNA
atgaaagtgctgataattctgctggccgggttgctcgccgcggtgctgtggctgcgccacgataacgcgaactta

SEQ ID NO: 457755 - DNA, 75 bp, synthetic construct
  source 1..75: mol_type = other DNA
aagaaaccttgctaaagcaggagtttttcggtgggttacaaatatccacgaacaaaaaagatattactatacctt

SEQ ID NO: 457756 - DNA, 75 bp, synthetic construct
  source 1..75: mol_type = other DNA
atggcggagacatttcgctcacttctgccgccttccgcggtcaggccggagcgggcacaggagcaggccacaaca

SEQ ID NO: 457757 - DNA, 75 bp, synthetic construct
  source 1..75: mol_type = other DNA
tcactgcattcaaaagaaaagtatcacatgattatgaaactgtcggtgggcctgttgatgtcgctgtgatatcaa

SEQ ID NO: 457758 - DNA, 75 bp, synthetic construct
  source 1..75: mol_type = other DNA
ttcacagggtttagacaaccgcaacgccatcctacaaaaagtaggtggtatggcggtgagctctaaggagctgat

SEQ ID NO: 457759 - DNA, 75 bp, synthetic construct
  source 1..75: mol_type = other DNA
agctattttttcagtcttgaatattatacatgatgaaatcactcctgttgctggcttgaaaaatattgatgaagc

SEQ ID NO: 457760 - DNA, 75 bp, synthetic construct
  source 1..75: mol_type = other DNA
ttctactattagtattctgtagcttctctattaaagctgaagataactttaaaggtgtatacatagtccctactt

SEQ ID NO: 457761 - DNA, 75 bp, synthetic construct
  source 1..75: mol_type = other DNA
tttcgttcatggcggtgccatgttgcaggaagtgtgtgttcccatcttgaagattcgcgcgcttgagaaaaaagc

SEQ ID NO: 457762 - DNA, 75 bp, synthetic construct
  source 1..75: mol_type = other DNA
cccagatatccttgcagaaagctaaaatgatggtttctgggtataaaaatactcagagcgatatagtaatttact

SEQ ID NO: 457763 - DNA, 75 bp, synthetic construct
  source 1..75: mol_type = other DNA
catgaaggtgcacccgccgctgtggcgtgccggtctgcgccagaacttccgtatcttccagaacttccgtaccgg

SEQ ID NO: 457764 - DNA, 75 bp, synthetic construct
  source 1..75: mol_type = other DNA
gtgtttccactggaaacagtgctcaaaacttaaccggtgtttccactggaaacagtgctcaaaacttaatcagtg

SEQ ID NO: 457765 - DNA, 75 bp, synthetic construct
  source 1..75: mol_type = other DNA
ttatatcgttggtaataacttgccttcagatgaagcctgttggaaaggctcaataaacgatacggctcatggctc

SEQ ID NO: 457766 - DNA, 75 bp, synthetic construct
  source 1..75: mol_type = other DNA
gtgaaacgattaactttgatagcgtgagtaaagtgatggatgagcgtactcgcgaagccaggttaaaacttattg

SEQ ID NO: 457767 - DNA, 75 bp, synthetic construct
  source 1..75: mol_type = other DNA
ggcggcattattgcctcataaggcgctcagttaccagccagagcaaggcacggctgtttatgtggatggtatttc

SEQ ID NO: 457768 - DNA, 75 bp, synthetic construct
  source 1..75: mol_type = other DNA
catcagctgcctgaaagtgagtattgctggcacggcaaactagcaaatactgcaggcgtaagcgatgagagtgaa

SEQ ID NO: 457769 - DNA, 75 bp, synthetic construct
  source 1..75: mol_type = other DNA
aatgcggaaatgagaacccgttatagccaatacgcggtaaccattgatttggcattccaagatgattttttctaa

SEQ ID NO: 457770 - DNA, 75 bp, synthetic construct
  source 1..75: mol_type = other DNA
tgaagtatccagtcgtgaaacgattaactttgatagcgtgagtaaagttatggatgagcgtactcgcgaagctag

SEQ ID NO: 457771 - DNA, 75 bp, synthetic construct
  source 1..75: mol_type = other DNA
ggtgagcaggcggcaaggcgggaagaaaccataacgaggctgatgaatgaaaatgagacgttacgccgctggtac

SEQ ID NO: 457772 - DNA, 75 bp, synthetic construct
  source 1..75: mol_type = other DNA
atgtcaacatattattttttgcccacacggaatgtctttggtgagggaagtgtgcaagaagccggtgttcttgcg

SEQ ID NO: 457773 - DNA, 75 bp, synthetic construct
  source 1..75: mol_type = other DNA
ttcaaaagaaacatttgttttatttattgataaattcaaagggcatactgacgtaaataaaggcctttacctttt

SEQ ID NO: 457774 - DNA, 75 bp, synthetic construct
  source 1..75: mol_type = other DNA
gcatgtatttgactttaagagggataccaactgactcaattggaggtgaggacatttactttatacatgatcctc

SEQ ID NO: 457775 - DNA, 75 bp, synthetic construct
  source 1..75: mol_type = other DNA
tatcagcgtttcaactgaaagtgaggcccgtctttcagtgttttccagtccccgccccattcgatggcagttccc

SEQ ID NO: 457776 - DNA, 75 bp, synthetic construct
  source 1..75: mol_type = other DNA
tgcagaagtcacacgccaaccgctacgggaaagtatcaaaggtgcggcctcgttggtttgacgtagtagaaattg

SEQ ID NO: 457777 - DNA, 75 bp, synthetic construct
  source 1..75: mol_type = other DNA
tgtacggattatggtgacagggttgttttccgtaatcaccatgaccgcaatgcgctggcagataaactggatttg

SEQ ID NO: 457778 - DNA, 75 bp, synthetic construct
  source 1..75: mol_type = other DNA
aaacattcgatgaagagaatcaggttgaagctaaggaaaatgatccggaggaaatggaaggcgctgaacatccgc

SEQ ID NO: 457779 - DNA, 75 bp, synthetic construct
  source 1..75: mol_type = other DNA
tccgaaatgggtaaaggggatccagactcgcgactctgtgtaccagaaccatccagaaacggaacaaaacacgcc

SEQ ID NO: 457780 - DNA, 75 bp, synthetic construct
  source 1..75: mol_type = other DNA
ggataactgccctgactgtggtgcggtgatgggcgacgcaacataccaggaaacattcgatgaagagaatcaggt

SEQ ID NO: 457781 - DNA, 75 bp, synthetic construct
  source 1..75: mol_type = other DNA
cagcagtgagccagcaaatttttgggtatacgtggagcgctggaaaagagtcgtgaatgccttctttcacaagcc

SEQ ID NO: 457782 - DNA, 75 bp, synthetic construct
  source 1..75: mol_type = other DNA
gtaatattggaatcgatattgaccaacaggttattgatgtatggcgcggcggggatattccctgcgaactcattc

SEQ ID NO: 457783 - DNA, 75 bp, synthetic construct
  source 1..75: mol_type = other DNA
caggacgatgaagaaaaaccacaaccatctggaacaacggcagatgaacaggcaaaggctgaaacaatggaaccg

SEQ ID NO: 457784 - DNA, 75 bp, synthetic construct
  source 1..75: mol_type = other DNA
ttcgatggggggaaaagttgcccaactgatggcgtcgcgtcggcctgcaggtcttgaaggcctgatgcttatcgc

SEQ ID NO: 457785 - DNA, 75 bp, synthetic construct
  source 1..75: mol_type = other DNA
gagacagggcagcgagtctggcaggaactgcaaagcgggagatggggtgagattaccccgttcgtcgttacacca

SEQ ID NO: 457786 - DNA, 75 bp, synthetic construct
  source 1..75: mol_type = other DNA
gtctttatccggcagtaatggcatcaaagtctgacacagcgcgaaaaaccatggtatggggcgatgcggaaaacc

SEQ ID NO: 457787 - DNA, 75 bp, synthetic construct
  source 1..75: mol_type = other DNA
atgagatttatcgtcgtcagcgggagatgaaggaagaactgaataacctagatgatttacgctcaatccgagcgt

SEQ ID NO: 457788 - DNA, 75 bp, synthetic construct
  source 1..75: mol_type = other DNA
atgaaagtgctgatgattctgctggcagggttgctcgccatggtgctgtggctgcgccacgataacgtgaactta

SEQ ID NO: 457789 - DNA, 75 bp, synthetic construct
  source 1..75: mol_type = other DNA
ccaataatcaacaggtgaaactgtcaatgtcggaactggaagaactggcggtagcaatggcgcaggcgcagctcg

SEQ ID NO: 457790 - DNA, 75 bp, synthetic construct
  source 1..75: mol_type = other DNA
cgccagcgggagatgaaggaagaactgaataatctggaggatttggcttcagttcgagcgtttgacgttacgtaa

SEQ ID NO: 457791 - DNA, 75 bp, synthetic construct
  source 1..75: mol_type = other DNA
gttctactcaatgcttactatggcaatattcagagaggttaccggctgccaatggttaataccatttgacggacg

SEQ ID NO: 457792 - DNA, 75 bp, synthetic construct
  source 1..75: mol_type = other DNA
ttgtcgcaggggctctgttctgttcgtatgcaggagcagcgtcttttggcccccgagaaagcacgcttatcttcg

SEQ ID NO: 457793 - DNA, 75 bp, synthetic construct
  source 1..75: mol_type = other DNA
aagctcataaacagttgctgtgtgtggataaacggtatcaacagacgataaaggataaggtcggcgcgcttaagg

SEQ ID NO: 457794 - DNA, 75 bp, synthetic construct
  source 1..75: mol_type = other DNA
tgaagtgccaacaggtattgttgctcaaattatgggacacaaaccaagtgcactggcggaaaaacactaccgccg

SEQ ID NO: 457795 - DNA, 75 bp, synthetic construct
  source 1..75: mol_type = other DNA
ataatgtcattcatcccattttcagatagagttgccgcatattcatggtgtctttcccccattattctattatgg

SEQ ID NO: 457796 - DNA, 75 bp, synthetic construct
  source 1..75: mol_type = other DNA
tcaacttctttttcgaccacgatcttaagcgcagaaacgagctatggtggggcgcaaacagtagatataacgctg

SEQ ID NO: 457797 - DNA, 75 bp, synthetic construct
  source 1..75: mol_type = other DNA
tgggcgcaggagatgaatttgccgtgcaaaacgttgttgaaagggttggatgaagctatcgcccggcgcggaact

SEQ ID NO: 457798 - DNA, 75 bp, synthetic construct
  source 1..75: mol_type = other DNA
agttccgctcccgccgggagccgacgttgaacggacaacgtggggcatttcggtcaataaacctaacgccgcgaa

SEQ ID NO: 457799 - DNA, 75 bp, synthetic construct
  source 1..75: mol_type = other DNA
ctgatgttgcccgagcaggcgagcaatatccggctacaaagtagtgaaacgccgcaggagattttccgcaacaat

SEQ ID NO: 457800 - DNA, 75 bp, synthetic construct
  source 1..75: mol_type = other DNA
ttcgcctggcgcagaaatataaaccagaatatgtctttattcgtaataagcctctggcaatgaccgtcgggattt

SEQ ID NO: 457801 - DNA, 75 bp, synthetic construct
  source 1..75: mol_type = other DNA
tgaatattatttatacagcatcctctctaggtatcagtggacaagaactacaggttttgactcagatgaggaccc

SEQ ID NO: 457802 - DNA, 75 bp, synthetic construct
  source 1..75: mol_type = other DNA
gcggaccattattacctgtggcaccggtttaccgtattgcttctctgctagtcatgccatcaaggaatgaaacct

SEQ ID NO: 457803 - DNA, 75 bp, synthetic construct
  source 1..75: mol_type = other DNA
tacttttagtgactatgtttcaaagcaagactctatctataacatttggagtaataaattaaagaacagggtttc

SEQ ID NO: 457804 - DNA, 75 bp, synthetic construct
  source 1..75: mol_type = other DNA
aacgttaccagaaatgaaacgagagggagtatcagattatagtttttctttcggacgttatgataacaaaggggc

SEQ ID NO: 457805 - DNA, 75 bp, synthetic construct
  source 1..75: mol_type = other DNA
gaggattcagtcacggtatcacttcctatggagaaacaattcaatcagacaattatcaattgattggtttaggaa

SEQ ID NO: 457806 - DNA, 75 bp, synthetic construct
  source 1..75: mol_type = other DNA
gctattcctggatgctgctggttttagttgtgtggatggcttctctgaaaatgatatctatgccgcaggcggtaa

SEQ ID NO: 457807 - DNA, 75 bp, synthetic construct
  source 1..75: mol_type = other DNA
atggtgtagctcgcttagagaacggtcactgggatatattgattaattgtgttcaggcagagaaaggtgatttct

SEQ ID NO: 457808 - DNA, 75 bp, synthetic construct
  source 1..75: mol_type = other DNA
atgacagccagagagcttgcttataacgcaccaggaaatcagggactgcgcattgattacgcgagtgtgttacaa

SEQ ID NO: 457809 - DNA, 75 bp, synthetic construct
  source 1..75: mol_type = other DNA
gaaacaggtcaactttgcagacgtccgggactgtgggaaacaggtcaactttgcagacgtccgggactgtgggaa

SEQ ID NO: 457810 - DNA, 75 bp, synthetic construct
  source 1..75: mol_type = other DNA
tggaagctgcgcaatattggacagatgtcggaggaaaagcgcgcgcagtcactggagaaactagaaaaggtcatg

SEQ ID NO: 457811 - DNA, 75 bp, synthetic construct
  source 1..75: mol_type = other DNA
acaatctccggaaaaccctcctggtccatcaggcatcagaaggccttttcgataatgataccggcgctctgctct

SEQ ID NO: 457812 - DNA, 75 bp, synthetic construct
  source 1..75: mol_type = other DNA
acgaagtttttaaacgtttaggtcgagcaataagatataattttcaagtggacgatgcaaaatttagacgcgata

SEQ ID NO: 457813 - DNA, 75 bp, synthetic construct
  source 1..75: mol_type = other DNA
cgacttcggaaagattgtcagcgatccggttaaagggcttgccagcctcaatgaacaatatggtttcgttgatga

SEQ ID NO: 457814 - DNA, 75 bp, synthetic construct
  source 1..75: mol_type = other DNA
accgatacctttcaggcatacaacaaaatcctggatgacacccgcctcaagctgaccgacaccggagaagccgcg

SEQ ID NO: 457815 - DNA, 75 bp, synthetic construct
  source 1..75: mol_type = other DNA
acctgaactgcctgttacgctaaaaaaattatattccgccagcaataaattatcagaattgcccgtgctacctcc

SEQ ID NO: 457816 - DNA, 75 bp, synthetic construct
  source 1..75: mol_type = other DNA
aaacaattcactgaacaagccctgagtaatattgccaggagcttaggtgttgatatcgctgatctctttacctca

SEQ ID NO: 457817 - DNA, 75 bp, synthetic construct
  source 1..75: mol_type = other DNA
aaacaacaacggcaaaaccatcgttgacggcaaggattccaccggtacggaaatcaacggtaataacgggaaagt

SEQ ID NO: 457818 - DNA, 75 bp, synthetic construct
  source 1..75: mol_type = other DNA
ccaccgcgaataacagtggaaaaaccactgttgatggaaaagattccacgggtaccaaaatcgcgggcaatatcg

SEQ ID NO: 457819 - DNA, 75 bp, synthetic construct
  source 1..75: mol_type = other DNA
ccagcgtgtttacgacatgcgcatttcacatgtcttcctgcaggcgtatgccgaccccaaaggcgatgggaatat

SEQ ID NO: 457820 - DNA, 75 bp, synthetic construct
  source 1..75: mol_type = other DNA
agcgaagcctggtttgcgcaaaacctgaatgatttcctcaatacctatgactggacggcacccatggcgatgcca

SEQ ID NO: 457821 - DNA, 75 bp, synthetic construct
  source 1..75: mol_type = other DNA
gaaattaatcaggttgtggcttcatttcatcgtccacacccggaaaaagaagcgaaagcctatcaggttcgcgat

SEQ ID NO: 457822 - DNA, 75 bp, synthetic construct
  source 1..75: mol_type = other DNA
ggcagggtgacatgacccgcaagggactggatattgtgcagggttcagcaggggtgctgataggcgcgccgacgg

SEQ ID NO: 457823 - DNA, 75 bp, synthetic construct
  source 1..75: mol_type = other DNA
tatcctgtcagcataacaggaaacaaacctgatgagggacctgtaacgtcaagagcatatttgcgtgtggatttt

SEQ ID NO: 457824 - DNA, 75 bp, synthetic construct
  source 1..75: mol_type = other DNA
acggcatccacggaagataaaaccttcgaagcgtgccgcacggcggtgactgaactgaaagatttagtcaccaag

SEQ ID NO: 457825 - DNA, 75 bp, synthetic construct
  source 1..75: mol_type = other DNA
cgctttaccgcagaactgcgatcgcagctcggcgtgctccccagctacacccaactgggaatggcggcgttgctg

SEQ ID NO: 457826 - DNA, 75 bp, synthetic construct
  source 1..75: mol_type = other DNA
tggagagttgctcaatcttaaaatagatgattttgatctcagagacaacactttaagtatagtcagaagacatga

SEQ ID NO: 457827 - DNA, 75 bp, synthetic construct
  source 1..75: mol_type = other DNA
gaagaagagatcaatgtgcttttccgtctattggaaattggcgggattgaaaaccctttccataaggaagtacag

SEQ ID NO: 457828 - DNA, 75 bp, synthetic construct
  source 1..75: mol_type = other DNA
aggaatagaaggcgctgaattagaatatagtagaaggaaagatttaaggaattatctaatgggttggtcaaagga

SEQ ID NO: 457829 - DNA, 75 bp, synthetic construct
  source 1..75: mol_type = other DNA
tgctaatcgtgaggaactcccttatgaaagagagccactggaatctactcggaagtttttaatagatccaatcac

SEQ ID NO: 457830 - DNA, 75 bp, synthetic construct
  source 1..75: mol_type = other DNA
cgggtatctaataatttaagcaaatctatttctgccatagcttatgagttaaaaaaagttactcaacatttggct

SEQ ID NO: 457831 - DNA, 75 bp, synthetic construct
  source 1..75: mol_type = other DNA
aaattccttttcattatggcgtacataaattcaaaatttttaagggtcataggtggggagctttagatcattttt

SEQ ID NO: 457832 - DNA, 75 bp, synthetic construct
  source 1..75: mol_type = other DNA
gataacaacaccatggaaaaacgcgtacgcgaagttacgctgaagctgattggcgctaacttcaaccgtcgcaat

SEQ ID NO: 457833 - DNA, 75 bp, synthetic construct
  source 1..75: mol_type = other DNA
atgtggatgaattcgttcgttggggatgcagccagatcctcgaccctgatagtccctacattgccctttcttgtg

SEQ ID NO: 457834 - DNA, 75 bp, synthetic construct
  source 1..75: mol_type = other DNA
cacaaaaaatgagcatcatgattttgttttagatgcaagagacaaagcaacaaaatcaatatttattgcgagtca

SEQ ID NO: 457835 - DNA, 75 bp, synthetic construct
  source 1..75: mol_type = other DNA
ggctccagtgatgatttacaagtggcaattctagaatcagatggcactatacagtcctttaaaatacccttcact

SEQ ID NO: 457836 - DNA, 75 bp, synthetic construct
  source 1..75: mol_type = other DNA
gagacgaaacacgcctacaacgaacaggggctggcaaaccgcgtcacgccggacagcctgccgccggtggagtgg

SEQ ID NO: 457837 - DNA, 75 bp, synthetic construct
  source 1..75: mol_type = other DNA
gtcagccgaatgttgggaaggatttgacggatgaagagaagaactgcctggccggcggcagtgcaggaagtccgg

SEQ ID NO: 457838 - DNA, 75 bp, synthetic construct
  source 1..75: mol_type = other DNA
tgacgggggtggtggacggcttcgggcggacgctggcctttcaccgggcagctaagggtgacgtggcgggcgcgg

SEQ ID NO: 457839 - DNA, 75 bp, synthetic construct
  source 1..75: mol_type = other DNA
gccgggcgcatcaccgtgctgaccaacgagaacggcagccagtccacgttccggtatgacccggtcgacaggctg

SEQ ID NO: 457840 - DNA, 75 bp, synthetic construct
  source 1..75: mol_type = other DNA
gcagcagggcaggcagtaatgccgcatatgaactgaccagcacatacacccccgcaggccagttacagagccagc

SEQ ID NO: 457841 - DNA, 75 bp, synthetic construct
  source 1..75: mol_type = other DNA
agcacctgaacagcctggtgtatgaccgtgactacgggtggaatgacaacggcgacctggtgcgcatcagcggcc

SEQ ID NO: 457842 - DNA, 75 bp, synthetic construct
  source 1..75: mol_type = other DNA
ggggactatacttgtggtggccaagaccaacggggagaatcaaaaggagatggtctatgggggccaggtaaagca

SEQ ID NO: 457843 - DNA, 75 bp, synthetic construct
  source 1..75: mol_type = other DNA
ataagttcagtagataattttagctataacgaattgcttgttttacttaaccagtgtgagtcaagagaacaaggt

SEQ ID NO: 457844 - DNA, 75 bp, synthetic construct
  source 1..75: mol_type = other DNA
atgaatgagtttaagcgttttgaagaccagctgaccggactgattgagtcactgtcaccatcagggcgtcggcga

SEQ ID NO: 457845 - DNA, 75 bp, synthetic construct
  source 1..75: mol_type = other DNA
acaaaacttatgcccgtcttggttttaaaggggaaacacaaatcaattccgatctgaccggctacggtcagtggg

SEQ ID NO: 457846 - DNA, 75 bp, synthetic construct
  source 1..75: mol_type = other DNA
caatgcgggaacgctatgtaaaacgtgctaatgctctatttgtgaaaatgaatggcggtactttctctaatggcg

SEQ ID NO: 457847 - DNA, 75 bp, synthetic construct
  source 1..75: mol_type = other DNA
tcaacgatggcaaaaaatattgccatcgggcgagacgagcacaacccaatttctgtctaccaacaacaaattgaa

SEQ ID NO: 457848 - DNA, 75 bp, synthetic construct
  source 1..75: mol_type = other DNA
cgcttactggacacgcattaccgccgcggctggaatgtgaagcggggctaccgtctgacagagctggtcccgatg

SEQ ID NO: 457849 - DNA, 75 bp, synthetic construct
  source 1..75: mol_type = other DNA
tttttcacttacattagccatttctgaagggatattttggggttatactgggaactattcatttgctgtgtctca

SEQ ID NO: 457850 - DNA, 75 bp, synthetic construct
  source 1..75: mol_type = other DNA
aaaactaacacttacgttaaccccgaatacagctttgctgattgcgatacggacaccgttattatctcggtgcaa

SEQ ID NO: 457851 - DNA, 75 bp, synthetic construct
  source 1..75: mol_type = other DNA
cagcgacttgataatatgaacggtaagtcaggtgtcacacctcaaatgatcacgctctataagagctttgttgac

SEQ ID NO: 457852 - DNA, 75 bp, synthetic construct
  source 1..75: mol_type = other DNA
gccgctgacctgcagcagtggcgcagcagaaaccggcgtggaagattgcacagtagcgtggttattcatcactaa

SEQ ID NO: 457853 - DNA, 75 bp, synthetic construct
  source 1..75: mol_type = other DNA
gtaggattctatgggcttaataatgcaaggtttgtaaatagattttttaaaggtggacatagtcattattttgat

SEQ ID NO: 457854 - DNA, 75 bp, synthetic construct
  source 1..75: mol_type = other DNA
agcccggcgcgggcaatcccccgaacaggcgctgaatgtcgtctgcgaacgcctggcaggcggcctcgccaacgc

SEQ ID NO: 457855 - DNA, 75 bp, synthetic construct
  source 1..75: mol_type = other DNA
cccgcagacggataaaaaacactggtatacccggctgacctgggtacagcacctggccggattactgccggtgac

SEQ ID NO: 457856 - DNA, 75 bp, synthetic construct
  source 1..75: mol_type = other DNA
tttccttattccgccattcctttttttgtatggtatcctttttatcatttgggctttgttttcaataagtataat

SEQ ID NO: 457857 - DNA, 75 bp, synthetic construct
  source 1..75: mol_type = other DNA
atgctgccgtctgacctgcagaaggcgctgtacgacattgcctctgacaacgatgagggcgtcatcaatgtccgc

SEQ ID NO: 457858 - DNA, 75 bp, synthetic construct
  source 1..75: mol_type = other DNA
cctgatggatatgtttccggaagggaccatggtgtgcatgaccgtggtggtgcagccccaggaccggcttgaaga

SEQ ID NO: 457859 - DNA, 75 bp, synthetic construct
  source 1..75: mol_type = other DNA
tcatccacaactgctggaacgcgcgcacgcctggctcttcatttcgtcgctgattaaccaccgtttaaccagcga

SEQ ID NO: 457860 - DNA, 75 bp, synthetic construct
  source 1..75: mol_type = other DNA
cattgaagcacatgcagcagaagaaacctttgacacccattttatgatgggaggaatgaaaggagcaagtaacaa

SEQ ID NO: 457861 - DNA, 75 bp, synthetic construct
  source 1..75: mol_type = other DNA
taaaactcaagaaggggctcttcagtttggtcgtcatacagtgccggtgacaataacaggtgtccctgatgattg

SEQ ID NO: 457862 - DNA, 75 bp, synthetic construct
  source 1..75: mol_type = other DNA
taaccaccctcagccataccagtgaaggccaccgcgtgtcggtccactacggctatgacgataaaggccgcctga

SEQ ID NO: 457863 - DNA, 75 bp, synthetic construct
  source 1..75: mol_type = other DNA
gaaaactgcagtcaggaacaggaagtaaacagatatgagagaacattacagggggatattctgttcgatcatgat

SEQ ID NO: 457864 - DNA, 75 bp, synthetic construct
  source 1..75: mol_type = other DNA
gttaaaacattcgattttagtctaagctcttttgttataggctggccacgaaatacccctcatatactaccaaca

SEQ ID NO: 457865 - DNA, 75 bp, synthetic construct
  source 1..75: mol_type = other DNA
attgccactgatgaaatggaatatgcagttaaaagcatgcgctccaccccaccttttcctgtacaaaacccaact

SEQ ID NO: 457866 - DNA, 75 bp, synthetic construct
  source 1..75: mol_type = other DNA
ggcgcagcgggcggaagccttccgtaaacagcgcgagtcttccttatcttccccggccagtccccgttctgtttc

SEQ ID NO: 457867 - DNA, 75 bp, synthetic construct
  source 1..75: mol_type = other DNA
acgagaaaaatacctcaataaaacaagaaacacggatgatataaaagaaaaactaattcaaagacacgctgtttt

SEQ ID NO: 457868 - DNA, 75 bp, synthetic construct
  source 1..75: mol_type = other DNA
agcaacgcgatttcagtccgcaaattttacaagccaccggtattccacgccgactcttccctcgtctggtggaag

SEQ ID NO: 457869 - DNA, 75 bp, synthetic construct
  source 1..75: mol_type = other DNA
gagtgaagaaagccagcagtggcttgcgcagtgcgggctgacggcggagcagatggccgcgcagctggaggcgga

SEQ ID NO: 457870 - DNA, 75 bp, synthetic construct
  source 1..75: mol_type = other DNA
tgccgctggggctcatcagcccgggaagggagacggcgttgactgcggagtatgacgagtggggaaacctgctga

SEQ ID NO: 457871 - DNA, 75 bp, synthetic construct
  source 1..75: mol_type = other DNA
gcagggcagcgtgagtgaagaaagccagcagtggcttgcgcagtgcgggctgacggcggaacagatggccgcgca

SEQ ID NO: 457872 - DNA, 75 bp, synthetic construct
  source 1..75: mol_type = other DNA
gcagtggtacacgcgtctgatgtgggtgcagcatctggcggggctcctgccggtgaccgggcgggagacgggcac

SEQ ID NO: 457873 - DNA, 75 bp, synthetic construct
  source 1..75: mol_type = other DNA
gaccgtatcactcaccgcacggtgaacggcgaaccggcagagcagtggcagtatgatggccacggctggctgaca

SEQ ID NO: 457874 - DNA, 75 bp, synthetic construct
  source 1..75: mol_type = other DNA
acctgcaccagccgtaccgtctgccagggcagcagcatgatgaggagtcggggctgtactataaccgtcaccggc

SEQ ID NO: 457875 - DNA, 75 bp, synthetic construct
  source 1..75: mol_type = other DNA
cgcagggcgggctgacgcgcagtatggaatacgaccttgccggacgcatcaccacgctgaccaacgagaacggca

SEQ ID NO: 457876 - DNA, 75 bp, synthetic construct
  source 1..75: mol_type = other DNA
tgagccgctgctgccgggggaggcggtgtacagccgcagcgagtcaatgtggctggtgcgcggtggtaaggcagc

SEQ ID NO: 457877 - DNA, 75 bp, synthetic construct
  source 1..75: mol_type = other DNA
tttgtggtgttctttcacgtataataggaccaagtaaatttgatagtactgcagatgctgcgttagatgctttga

SEQ ID NO: 457878 - DNA, 75 bp, synthetic construct
  source 1..75: mol_type = other DNA
gcgaccaccggggcctgccgctggcgctcatcagcgaagacggcaatacggcgtggagcggggagtatgatgagt

SEQ ID NO: 457879 - DNA, 75 bp, synthetic construct
  source 1..75: mol_type = other DNA
gtgcatagcgcgtgccgcacgtcgtcgccgactgattgctcagggcctctacatcgacgaaatggagtcagtgct

SEQ ID NO: 457880 - DNA, 75 bp, synthetic construct
  source 1..75: mol_type = other DNA
aaaatgcacaacaggcaccacacgtcatgcatggattcggattgttcatttttatactatttgttgttttttcag

SEQ ID NO: 457881 - DNA, 75 bp, synthetic construct
  source 1..75: mol_type = other DNA
tgcttcattcgcgatgccattttctccggacattgcgaattccctgcatgtggacggacggtttttgtaaacaga

SEQ ID NO: 457882 - DNA, 75 bp, synthetic construct
  source 1..75: mol_type = other DNA
atacggaagccggtgaactgctggcggtatatgaccgcagcaatacgcaggtgcgcgctttcacgtatgacgcgc

SEQ ID NO: 457883 - DNA, 75 bp, synthetic construct
  source 1..75: mol_type = other DNA
gtcacgccggacagcctgccgccggtggagtggctgacgtatggcagcggttatcttgcgggaatgaagctgggc

SEQ ID NO: 457884 - DNA, 75 bp, synthetic construct
  source 1..75: mol_type = other DNA
cgtaacgccacagggtaaatcgcggctgttcacccggcgcgccataaagcaatcgcaagaaggaaggcggcagga

SEQ ID NO: 457885 - DNA, 75 bp, synthetic construct
  source 1..75: mol_type = other DNA
gcgcggctttgatggcaggacacagcgttaccggtacagcgccacagggcagctcatccgcagcgaggatgaggg

SEQ ID NO: 457886 - DNA, 75 bp, synthetic construct
  source 1..75: mol_type = other DNA
cctgtggctggcgctggggatgacggaaaagcacgaaaaggcagtgcggatgcggattatgagggagtttggatg

SEQ ID NO: 457887 - DNA, 75 bp, synthetic construct
  source 1..75: mol_type = other DNA
aacggacggtggacagcctgtaccagaaaggcgcgtcgttcgtcgattttctgccgtgggtagagtatcagccag

SEQ ID NO: 457888 - DNA, 75 bp, synthetic construct
  source 1..75: mol_type = other DNA
gccccattccgatccggagaacggggtgtggtggattgatgatctgccacattgtgccgtggtggtggagaagct

SEQ ID NO: 457889 - DNA, 75 bp, synthetic construct
  source 1..75: mol_type = other DNA
ggagtttgatgtggggccactgaacagctggctgcgtgcgctgcccatgtgttttgatccggatacggacaggaa

SEQ ID NO: 457890 - DNA, 75 bp, synthetic construct
  source 1..75: mol_type = other DNA
ttttgagagtctcgggctttcggtgaacaaaatcagcgtgaaaccgggcaccggtgtcagcctgccaccgtttgc

SEQ ID NO: 457891 - DNA, 75 bp, synthetic construct
  source 1..75: mol_type = other DNA
cagatgctgccttctgacctgcagaaagcgttatacagcattgccggtgatgacagcgatgaggggcagaatgtc

SEQ ID NO: 457892 - DNA, 75 bp, synthetic construct
  source 1..75: mol_type = other DNA
ggcggactcagcgcggcaggtcggcctggctggttgtatggttcgctggaaaaccaggacgtgaagaactacgtc

SEQ ID NO: 457893 - DNA, 75 bp, synthetic construct
  source 1..75: mol_type = other DNA
tcatgagtgtatatcattctgatgatcctcaaatgtttaaagatgccatcaatagtatactctatcagtctatat

SEQ ID NO: 457894 - DNA, 75 bp, synthetic construct
  source 1..75: mol_type = other DNA
atatcagtaatgaggggcttgttgtcagcaacggaggaagctcactcggttatggagaaaccggcgtcgggaagg

SEQ ID NO: 457895 - DNA, 75 bp, synthetic construct
  source 1..75: mol_type = other DNA
aaaggatattacgctaaccagttgttgggtgccggtagcgcttacatgagcagccagattgaaggccaggacagt

SEQ ID NO: 457896 - DNA, 75 bp, synthetic construct
  source 1..75: mol_type = other DNA
gagactgtggcgatattcagaataaatatgctgtattaagcgcagagaaccgacagaaattacacattgatgtgg

SEQ ID NO: 457897 - DNA, 75 bp, synthetic construct
  source 1..75: mol_type = other DNA
actgaaagtaacagctatgacctgaactatctgaacaacaacacatcgaaaggtgataaggctctggctttcttc

SEQ ID NO: 457898 - DNA, 75 bp, synthetic construct
  source 1..75: mol_type = other DNA
ggcgtaacaggctaccagccgcgtattcttgtcgccaccggctacagcgaggatgatggtgtggcaaaggcgctg

SEQ ID NO: 457899 - DNA, 75 bp, synthetic construct
  source 1..75: mol_type = other DNA
aatggcaacgccgcaggatgtggttcagcgtcgcgcgtcctttggcggacgcgtggagcttctgcgtccgcgcgt

SEQ ID NO: 457900 - DNA, 75 bp, synthetic construct
  source 1..75: mol_type = other DNA
tgcacggcaaacctgctgaacatggaaaatatctccaccattattcgccatgacggttttaaacactggggtaac

SEQ ID NO: 457901 - DNA, 75 bp, synthetic construct
  source 1..75: mol_type = other DNA
aatccgtacgacgtacagcagatgttatcgaggacagcattcaggaaaccatgctggagtatgttgaccgtccgc

SEQ ID NO: 457902 - DNA, 75 bp, synthetic construct
  source 1..75: mol_type = other DNA
ctggataacgttctgaacttcacagcaaaggagaggggccgggctggcaatgttatccaggtggacgcggtggcg

SEQ ID NO: 457903 - DNA, 75 bp, synthetic construct
  source 1..75: mol_type = other DNA
cgcccttactctgcttttgccgccggattacgtgcccgtatcgactacgaaaagggctggtggtggagcaaatcg

SEQ ID NO: 457904 - DNA, 75 bp, synthetic construct
  source 1..75: mol_type = other DNA
ccacccggatcgcaaatctgaaatcagctatttcgggtttgatgaagaaaccgggctggaaatcagggtccgtcc

SEQ ID NO: 457905 - DNA, 75 bp, synthetic construct
  source 1..75: mol_type = other DNA
gcgccacaatgcactggatgacgcccgtcaccaggcaaaatacgtttcagcaatctggcaaaaactgatcccgaa

SEQ ID NO: 457906 - DNA, 75 bp, synthetic construct
  source 1..75: mol_type = other DNA
atgggttaaggggattgaaacccgcgattctgtgaaccagaaccagcccgaatcggaacaaaacgaccagaaagc

SEQ ID NO: 457907 - DNA, 75 bp, synthetic construct
  source 1..75: mol_type = other DNA
tgcagatgtgattgaggacagcatccaggaggccatgttgccttatgtcgatcgtccgcttgatcgggatgtggc

SEQ ID NO: 457908 - DNA, 75 bp, synthetic construct
  source 1..75: mol_type = other DNA
acgcaatggcagatgaacaggcaacgactgaagcaatggagccggatacaactgaacatcgccaggacacgcaat

SEQ ID NO: 457909 - DNA, 75 bp, synthetic construct
  source 1..75: mol_type = other DNA
aaagttttccctaatcctggtaattcagacctgggactgataaccgcttttttcgaagcatacctgggcgctaac

SEQ ID NO: 457910 - DNA, 75 bp, synthetic construct
  source 1..75: mol_type = other DNA
tgcgtccgtaaaagaagcaccaattgggatcgaggttatccccgcacacgtcactgaatatctgaacaaagtact

SEQ ID NO: 457911 - DNA, 75 bp, synthetic construct
  source 1..75: mol_type = other DNA
ttgctaaaaagaaaggtgaaatgttatctgatatttgtatttatgctacagcatgcggacatgcaggaattggtg

SEQ ID NO: 457912 - DNA, 75 bp, synthetic construct
  source 1..75: mol_type = other DNA
gctacggtttttagcttctacgccaataaaactatgacaaccggtgaaggcggaatggttgtttcaaaaaataaa

SEQ ID NO: 457913 - DNA, 75 bp, synthetic construct
  source 1..75: mol_type = other DNA
aaatcaaaactcaacgagcagagtgaatattacgaaggtgttatctcgaatggaagtaagcgtattgctgaactg

SEQ ID NO: 457914 - DNA, 75 bp, synthetic construct
  source 1..75: mol_type = other DNA
aaatattcgataaagtgcgaaataatttcaactatcactggttttattctgaactaaaacgtcacaatgtctcac

SEQ ID NO: 457915 - DNA, 75 bp, synthetic construct
  source 1..75: mol_type = other DNA
acattaactcagatggaattcaccataatggggtatatggtttctggttataatccatatcagattgctggtgat

SEQ ID NO: 457916 - DNA, 75 bp, synthetic construct
  source 1..75: mol_type = other DNA
tcaccgcgtttgcagtactgcgcaaactcgtgtttttgtatgtggcccgaagaaagttcatattttaatcgtggt

SEQ ID NO: 457917 - DNA, 75 bp, synthetic construct
  source 1..75: mol_type = other DNA
cgagcgtaactgtgatgccaacctgctcaatatgcagaatgtatcgaccatcatcagacgagcaggatttaaaca

SEQ ID NO: 457918 - DNA, 75 bp, synthetic construct
  source 1..75: mol_type = other DNA
tgccgccgggcgcatttcatgaagaacgggcgcaggagcaggcgacgacagaacacatcatcgcactggatacca

SEQ ID NO: 457919 - DNA, 75 bp, synthetic construct
  source 1..75: mol_type = other DNA
aaccgacgggaggccaggaagaaaacgcgcaggcagacgcccacgaggattgccaggattgcgaagtctctgtag

SEQ ID NO: 457920 - DNA, 75 bp, synthetic construct
  source 1..75: mol_type = other DNA
aaatatttagtctcttggaaggacttggtttttgctatacgaataattctagtccaattagtctcaaaaggaaga

SEQ ID NO: 457921 - DNA, 75 bp, synthetic construct
  source 1..75: mol_type = other DNA
aagcaaccaaagattgataaaatacattttgggatggtttcgcgattactagtcgagaaaggtattcgcgaattt

SEQ ID NO: 457922 - DNA, 75 bp, synthetic construct
  source 1..75: mol_type = other DNA
atttcggaccgaaatcacctacggagctgatcagtatgcgggtcagtgtgaataatgaatacgggattaaggagt

SEQ ID NO: 457923 - DNA, 75 bp, synthetic construct
  source 1..75: mol_type = other DNA
cagcaaggaaactctcactgctgcacgacatacaccggaaaaagacatcctggaagaagttaaccgcgaactggc

SEQ ID NO: 457924 - DNA, 75 bp, synthetic construct
  source 1..75: mol_type = other DNA
atttattgtgagttctgtaatacaccgcaaaaaaaagaaaatgaaatatcatatgatgattgttttttgtcgtgt

SEQ ID NO: 457925 - DNA, 75 bp, synthetic construct
  source 1..75: mol_type = other DNA
tgactgtgggccagcgatcccagcttgacgatttcgccgtcgatatactcccagttcgggttgtcatctttcagc

SEQ ID NO: 457926 - DNA, 75 bp, synthetic construct
  source 1..75: mol_type = other DNA
caacgacagcggcggcaggagcattcactttgagccgctgtttcccggcgagataagctacagccgcagcgagtc

SEQ ID NO: 457927 - DNA, 75 bp, synthetic construct
  source 1..75: mol_type = other DNA
agcagcttatccgcctgccggggcagcagtatgatgaggagtccggcctgtattacaaccgccaccgctattatg

SEQ ID NO: 457928 - DNA, 75 bp, synthetic construct
  source 1..75: mol_type = other DNA
tggacacttaaataatggcggatatggagcgagacccaacaaaccgcctacgcccgatccaagtaaattgccgga

SEQ ID NO: 457929 - DNA, 75 bp, synthetic construct
  source 1..75: mol_type = other DNA
ccagatatatgggggaatccgttctatcatcaatatctttgtgtcccagatggtaaaggggactatacttgtggt

SEQ ID NO: 457930 - DNA, 75 bp, synthetic construct
  source 1..75: mol_type = other DNA
ggcgtcgcgagagtgacctgacgggatggatgtcgctgtcgcgtaaaccggaggtgacgtggtacggatgggacg

SEQ ID NO: 457931 - DNA, 75 bp, synthetic construct
  source 1..75: mol_type = other DNA
atttgcccgttgccaaacttaaaacgcaggatttcactgccctgctgagggttattgaggataagggctttctgg

SEQ ID NO: 457932 - DNA, 75 bp, synthetic construct
  source 1..75: mol_type = other DNA
gttaacccattgttttacttcaaagaagaatggtctgttcagaaattacaagaccatcttaataaagacgatatt

SEQ ID NO: 457933 - DNA, 75 bp, synthetic construct
  source 1..75: mol_type = other DNA
atagtagcaatagaattgatcgtcgttctcaacgtggtgctggtgatccatatacaggtgaagtcgttggttgtg

SEQ ID NO: 457934 - DNA, 75 bp, synthetic construct
  source 1..75: mol_type = other DNA
taaaccggaggtgacatggtacgggtgggacggtgacaggctgacgacggtacagaccggcaccacgcgtatcca

SEQ ID NO: 457935 - DNA, 75 bp, synthetic construct
  source 1..75: mol_type = other DNA
aaccatatcttcccggcggttggtcatttgcccgttgccaaacttaaaacgcaggatttcactgccctgctgagg

SEQ ID NO: 457936 - DNA, 75 bp, synthetic construct
  source 1..75: mol_type = other DNA
attataacactggtatgaaattaaatattaacataacagtaccgccgccgactttacctaaagtgcagtgttata

SEQ ID NO: 457937 - DNA, 75 bp, synthetic construct
  source 1..75: mol_type = other DNA
cgagattcaggcgcagctggatgacctggaccgcctgaacaacgcgctaagcgcgatgagttcggtgagtaaagc

SEQ ID NO: 457938 - DNA, 75 bp, synthetic construct
  source 1..75: mol_type = other DNA
agtcaggaacaggccgtgattttggcccggattggctggacggttggtgtgaaactaagtcggtgtgtgtacggt

SEQ ID NO: 457939 - DNA, 75 bp, synthetic construct
  source 1..75: mol_type = other DNA
gcgatcgcttacaggcagggacggtgtgggtaaacagccataccttaattgacgctaacttaccgtttggtggga

SEQ ID NO: 457940 - DNA, 75 bp, synthetic construct
  source 1..75: mol_type = other DNA
tgtatatgtgaaaattgatactttacattttctcgggacagagaggaaaataatagatgcgatatgcgacatcaa

SEQ ID NO: 457941 - DNA, 75 bp, synthetic construct
  source 1..75: mol_type = other DNA
gtatatcactcaggatccgattgggctgaaggggggatggaatttttatcagtatccgctgaatccggttcagta

SEQ ID NO: 457942 - DNA, 75 bp, synthetic construct
  source 1..75: mol_type = other DNA
tttgttatcttgatgaaaataaatttaaaggaatgccgatgtcttatgaagaggatattcctttttggggagaaa

SEQ ID NO: 457943 - DNA, 75 bp, synthetic construct
  source 1..75: mol_type = other DNA
ggtggcgcaccgtcacacgggccgaccggaaatccgttaccgttacgacagtgacgggcgggtgacagaacagct

SEQ ID NO: 457944 - DNA, 75 bp, synthetic construct
  source 1..75: mol_type = other DNA
gttgaaggtcaacctgaaagggaacgggtgggaatatggtaataacggtgaactatactttggtacagaaagaaa

SEQ ID NO: 457945 - DNA, 75 bp, synthetic construct
  source 1..75: mol_type = other DNA
gtttcaacatggtgcaagcttttggtcttcgcggaccaggagacctccagggaaactttggtgatcttcaattga

SEQ ID NO: 457946 - DNA, 75 bp, synthetic construct
  source 1..75: mol_type = other DNA
tcttctgaacagactacaagcccttgagtctggcaaagtaaagcaatcgcagccaaaagtaatcactaagaaaga

SEQ ID NO: 457947 - DNA, 75 bp, synthetic construct
  source 1..75: mol_type = other DNA
acagatggtacaatccagctgacggacgaaggtaaagcgttgaccgtatccaaacaaagcggaaaaacctggacg

SEQ ID NO: 457948 - DNA, 75 bp, synthetic construct
  source 1..75: mol_type = other DNA
aggtgggtggaatctgtatcagtatccgctgaatccggtgagcaggatagatccgttggggttattctcatgtga

SEQ ID NO: 457949 - DNA, 75 bp, synthetic construct
  source 1..75: mol_type = other DNA
ccgcctggtgttccacacgcggatacagcatggcgagccactggtcgagagccgctacctctacgacccgctgag

SEQ ID NO: 457950 - DNA, 75 bp, synthetic construct
  source 1..75: mol_type = other DNA
tgtcgcgtaaaccggaggagacatggtacggctgggacggcgacaggctgacgacggtacagaccgacaccacac

SEQ ID NO: 457951 - DNA, 75 bp, synthetic construct
  source 1..75: mol_type = other DNA
gtgtttaaatttcttgtattaacattaggcattatctcttgccaggcttacgcagaagaagatacggttagagta

SEQ ID NO: 457952 - DNA, 75 bp, synthetic construct
  source 1..75: mol_type = other DNA
ttctctgccatttttaccggtttgggttcggcaggcgctttttgttcgcgtccgcgtatccaccaggccagcccg

SEQ ID NO: 457953 - DNA, 75 bp, synthetic construct
  source 1..75: mol_type = other DNA
cttgcttaaaaaatcacaacgagcctggctggattttagggacaaagaatgtgaattaatcctttcaaatgagga

SEQ ID NO: 457954 - DNA, 75 bp, synthetic construct
  source 1..75: mol_type = other DNA
tacgatgcagcgggacgtgtcatcagcctgaccaacgagaacggtagccatacagaatttagctgggatgtgctt

SEQ ID NO: 457955 - DNA, 75 bp, synthetic construct
  source 1..75: mol_type = other DNA
tgggggaatccgttctatcatcaatatctttgtgtcccagatggtaaaggggactatacttgtggtggccaagac

SEQ ID NO: 457956 - DNA, 75 bp, synthetic construct
  source 1..75: mol_type = other DNA
agtccattattattctgaaacagatacgggaaatatccgagcatcaggagctgatttttcccggtgatcataatc

SEQ ID NO: 457957 - DNA, 75 bp, synthetic construct
  source 1..75: mol_type = other DNA
cccgacaggggtatccgcctttcggcggtgtggctgatgcacgacccggcatacccggagagcctgcccggtgcg

SEQ ID NO: 457958 - DNA, 75 bp, synthetic construct
  source 1..75: mol_type = other DNA
acagatagagccggtttatttgcctgagcgaaaaatacatctttatcactgtgaccaccggggcctgccgctggc

SEQ ID NO: 457959 - DNA, 75 bp, synthetic construct
  source 1..75: mol_type = other DNA
aagggccgcctgacgggcgaacggcagacggtggagaacccggagacgggggaactgctgtggcagcatgagacg

SEQ ID NO: 457960 - DNA, 75 bp, synthetic construct
  source 1..75: mol_type = other DNA
ccgctgaacgtgcgcaccagacagaaattatttgccgccttcttgaggtatatccgaacaaaattacagatgctg

SEQ ID NO: 457961 - DNA, 75 bp, synthetic construct
  source 1..75: mol_type = other DNA
gaagcaagaagatggagagaaaacaaaggaggttacgccacctaaaaaaacgaatgactaccggaaacgaaccga

SEQ ID NO: 457962 - DNA, 75 bp, synthetic construct
  source 1..75: mol_type = other DNA
gcgcataccctataaccctgacctctacatcccggaaaacacctcgatcccctgttcactggatcgccgctttgt

SEQ ID NO: 457963 - DNA, 75 bp, synthetic construct
  source 1..75: mol_type = other DNA
accggtgttgtcgttaatcataagggctatcaagcacaagcaacatttgataagaaaggacataagtttgggaca

SEQ ID NO: 457964 - DNA, 75 bp, synthetic construct
  source 1..75: mol_type = other DNA
caggcccgccaggatacagaaaccctcgccggggaaatacggcaggatgcagaagaaattgcaggcaatgtgcag

SEQ ID NO: 457965 - DNA, 75 bp, synthetic construct
  source 1..75: mol_type = other DNA
acagaacggggaatatgacttccccgttctgccgggtgtgtacagcgttcgcctgacacaaagcacacagcgcct

SEQ ID NO: 457966 - DNA, 75 bp, synthetic construct
  source 1..75: mol_type = other DNA
ataaacgaatcgatatggtaaatacagcagcggctggtcccctgggagaagcgggcattgatggatggatcgatt

SEQ ID NO: 457967 - DNA, 75 bp, synthetic construct
  source 1..75: mol_type = other DNA
ctgaaaagatggtaaataacacccgtcttgaaaccacagataaaacgaacattgttacctctggggaaaatgagt

SEQ ID NO: 457968 - DNA, 75 bp, synthetic construct
  source 1..75: mol_type = other DNA
ctgacagccttaagtttggtaaagcggtgctgaataagctcggtaaaatcaacaagctgcataaaaatcaagttg

SEQ ID NO: 457969 - DNA, 75 bp, synthetic construct
  source 1..75: mol_type = other DNA
aacaattgagggttatcgggaaatgtacgctatcaaaaagcagttgagacaagcagcacaaatcaaaaacagcca

SEQ ID NO: 457970 - DNA, 75 bp, synthetic construct
  source 1..75: mol_type = other DNA
ggcaaacaagagaagagcaccaacgagctttccgcaaaagaagcaaacagccttgtatggctatgggattatgcc

SEQ ID NO: 457971 - DNA, 75 bp, synthetic construct
  source 1..75: mol_type = other DNA
ggcgacggcattaacgacgcgccagcgctggctcaggcggatgtcggcattgcgatgggtggcggcagtgatgtt

SEQ ID NO: 457972 - DNA, 75 bp, synthetic construct
  source 1..75: mol_type = other DNA
ctgccggacggtaaagccgaagcgatcaaacgtctgcaaagtgaaggacgtcaggtggcaatggtgggcgacggc

SEQ ID NO: 457973 - DNA, 75 bp, synthetic construct
  source 1..75: mol_type = other DNA
ggaaggctggcgataaagattattgccgagccaccggataagcgccgccgtgacttggacaatattctgaaagcg

SEQ ID NO: 457974 - DNA, 75 bp, synthetic construct
  source 1..75: mol_type = other DNA
agtatccgctggatgcggttcatgtggataaatttgctgatttattagggaagccaaagacagccgtcagtgaaa

SEQ ID NO: 457975 - DNA, 75 bp, synthetic construct
  source 1..75: mol_type = other DNA
gttcaatcgtgcaatgcgtgacgcctactacaaccgtccgagagagcagcgcgacgcttggttgctgtggatcgg

SEQ ID NO: 457976 - DNA, 75 bp, synthetic construct
  source 1..75: mol_type = other DNA
tagagttttgcatgcaaaaatattggctattcaacctcacatagatctactcgttgatgatttaacgtttaacac

SEQ ID NO: 457977 - DNA, 75 bp, synthetic construct
  source 1..75: mol_type = other DNA
tcctgttgagcgtgaagcatttgcagatgaagccggaaccaccagtcattacatccagacgcacctgaccgggcg

SEQ ID NO: 457978 - DNA, 75 bp, synthetic construct
  source 1..75: mol_type = other DNA
actcagatccaacaactgatacagcttatcagcctttgccgccagcggcggctgcgggaggttcgccatgacgcc

SEQ ID NO: 457979 - DNA, 75 bp, synthetic construct
  source 1..75: mol_type = other DNA
agccgaaaaggtcctctggccgccaccgccggaagcggaaaaagcaccactaccagagcctgagccaccgactga

SEQ ID NO: 457980 - DNA, 75 bp, synthetic construct
  source 1..75: mol_type = other DNA
ctggtgtacagcaatcgcctcggtaacaaagcatcaggcgatgggtggaaatatcgtggccgtgggctgattcag

SEQ ID NO: 457981 - DNA, 75 bp, synthetic construct
  source 1..75: mol_type = other DNA
gccatcacagcgtatcgccattgagcgagaagcgcggcggctggcgggctatcgtcaggggcgagaaatttgcga

SEQ ID NO: 457982 - DNA, 75 bp, synthetic construct
  source 1..75: mol_type = other DNA
ctttgctgaaaacaaaacctcgcaaaacagcgtttatggttacggcgtctgctccgatccggcgaatgcttacag

SEQ ID NO: 457983 - DNA, 75 bp, synthetic construct
  source 1..75: mol_type = other DNA
tacgtgccacgatatcctgcgccattttggtatcaagatgccagccagccataagtcctccgttatgcacggctt

SEQ ID NO: 457984 - DNA, 75 bp, synthetic construct
  source 1..75: mol_type = other DNA
agcggtttcaaggcatcaatgaagctatgggttttcgtgctgagattgaagagccacgtcgcgcagagcttcgcg

SEQ ID NO: 457985 - DNA, 75 bp, synthetic construct
  source 1..75: mol_type = other DNA
ttgtcgaagagggaaaagaaagtatccaggacaggatcaagcagctaatcggcagcagaagtatgcggcaagcag

SEQ ID NO: 457986 - DNA, 75 bp, synthetic construct
  source 1..75: mol_type = other DNA
gggtcagagttgatgggcaactgacgtttaatttgctgccagaaagaattgatgccgcattatccggatttggta

SEQ ID NO: 457987 - DNA, 75 bp, synthetic construct
  source 1..75: mol_type = other DNA
aatgtgtttatgtgtatatacacattacacacaactagcacaaaaaacaacgccccgcagtgatgggaacacata

SEQ ID NO: 457988 - DNA, 75 bp, synthetic construct
  source 1..75: mol_type = other DNA
gcgcagttgcacgtcattctcagacgaaccgatgactggaaggacggccgccgcagccgtcctacggatgatacg

SEQ ID NO: 457989 - DNA, 75 bp, synthetic construct
  source 1..75: mol_type = other DNA
tgccggtcctgcgaatgcgatgaagatcattgctcgtgctaaattatcactagatggtgagtcatgtgagtatga

SEQ ID NO: 457990 - DNA, 75 bp, synthetic construct
  source 1..75: mol_type = other DNA
gggaccacacctggcctaaaagtagttagcaatatatgcaaggtagaaaacgtatcgttggaatggctcatattg

SEQ ID NO: 457991 - DNA, 75 bp, synthetic construct
  source 1..75: mol_type = other DNA
ttaaaaattacgcagcacgaagcggtatttatgttttattacaaccgcccgatcggggaaggaaaagaaattcac

SEQ ID NO: 457992 - DNA, 75 bp, synthetic construct
  source 1..75: mol_type = other DNA
acatatcgcggctgtggtatttgcaggacggcgtagtttatacgcggtatggaaataagcccgttgctttttcta

SEQ ID NO: 457993 - DNA, 75 bp, synthetic construct
  source 1..75: mol_type = other DNA
tggtagccgactgaccactgccactatgcggcaaatcaataaacgcgatcgccttcgctatagatgccgacatta

SEQ ID NO: 457994 - DNA, 75 bp, synthetic construct
  source 1..75: mol_type = other DNA
ccgcgtcgtcagttcgtggcagaacgacctgaccagctgtgggtggctgattttacttacgtcagcacatggcgg

SEQ ID NO: 457995 - DNA, 75 bp, synthetic construct
  source 1..75: mol_type = other DNA
cttatcgggtgaccttacagatcgcaacagagcgccttatcaaagacgttctgatgtgacagatcctgccccata

SEQ ID NO: 457996 - DNA, 75 bp, synthetic construct
  source 1..75: mol_type = other DNA
aaacagctaccaccaaccagtttctttgatcgaagtgccgacggagaagatgacgatgatgccgcggctttaagt

SEQ ID NO: 457997 - DNA, 75 bp, synthetic construct
  source 1..75: mol_type = other DNA
gtggtggtagtaaacgtatccctcgaaaaaatattaaaatgttttgcgggaaaccaatgattgcctggtcgatta

SEQ ID NO: 457998 - DNA, 75 bp, synthetic construct
  source 1..75: mol_type = other DNA
caggaaataaaacgcttaatagcaaatattatgtccggttctcgcagtgttaataccgaaatccttaactatttt

SEQ ID NO: 457999 - DNA, 75 bp, synthetic construct
  source 1..75: mol_type = other DNA
atattgatactccagaagactggcgagtagctgagtggttatataaaaccatggagtttaaaaatgaaagtgttt

SEQ ID NO: 458000 - DNA, 75 bp, synthetic construct
  source 1..75: mol_type = other DNA
ttatgggcatcatggtgaaaatgctatgttttataaaacactcttttttggatacagagagagtatctccggtgg

SEQ ID NO: 458001 - DNA, 75 bp, synthetic construct
  source 1..75: mol_type = other DNA
gcttgccgcctttgtgtcacgctttctgtggtcagctgtctttgaagcgatcacttcccctgctcagagtgagtt

SEQ ID NO: 458002 - DNA, 75 bp, synthetic construct
  source 1..75: mol_type = other DNA
ctgcaaatcgatctcaatgagccggacctctttctcgacagcgactctctgagccagcttcccaaagacctcctt

SEQ ID NO: 458003 - DNA, 75 bp, synthetic construct
  source 1..75: mol_type = other DNA
gcggcggccacggagaaagtggaagcggcagaagcggcggacaaggctgcgaaggacaagcttgcagagctgaat

SEQ ID NO: 458004 - DNA, 75 bp, synthetic construct
  source 1..75: mol_type = other DNA
tgaaggcgttgccggatacagccgcggagaaaggtggcctgcagggtcgtgtggatgcactggatggtatccagg

SEQ ID NO: 458005 - DNA, 75 bp, synthetic construct
  source 1..75: mol_type = other DNA
tcaaccgtccacatttggtgataaggtatcttctgtttctaagaactggtctactttacttgatagtaatcctgg

SEQ ID NO: 458006 - DNA, 75 bp, synthetic construct
  source 1..75: mol_type = other DNA
ggacagttttactggggaacagtatctgcatggttgcaagaaaagccaatatttagcgctaactcctattcaatt

SEQ ID NO: 458007 - DNA, 75 bp, synthetic construct
  source 1..75: mol_type = other DNA
gggcaattttattggggaacgtcatctgcatggttaaatgaaacaccaatatttagcgctaattcttgttcaatt

SEQ ID NO: 458008 - DNA, 75 bp, synthetic construct
  source 1..75: mol_type = other DNA
gatattgttatgggggcaggaaatgatactgttctggctttagggtatgaaggtaatagtgcggatgctattatt

SEQ ID NO: 458009 - DNA, 75 bp, synthetic construct
  source 1..75: mol_type = other DNA
tcctgatccttttaatatgcatggtgactggtagtgctgttggtgtttttataaccatactatctatgtctttat

SEQ ID NO: 458010 - DNA, 75 bp, synthetic construct
  source 1..75: mol_type = other DNA
atggcgcgtatcccacacaacgtaaggagtttgataaatacgcgacatcagcaacatttgcttcttgggtacaga

SEQ ID NO: 458011 - DNA, 75 bp, synthetic construct
  source 1..75: mol_type = other DNA
aaggacattatagaaggggttgtttttagcggagaggtagagataaaaatgctggaaacagcaacgcatgaaaat

SEQ ID NO: 458012 - DNA, 75 bp, synthetic construct
  source 1..75: mol_type = other DNA
tgacggatggtgcgggactccccatgtccggataccatattattctgaaagcccgacagaatacatccgcagtgg

SEQ ID NO: 458013 - DNA, 75 bp, synthetic construct
  source 1..75: mol_type = other DNA
aaacgcccacgggagaaccgctgggcggcgcaaccattacactgacctccctgcacaaccgtgcaggaattctga

SEQ ID NO: 458014 - DNA, 75 bp, synthetic construct
  source 1..75: mol_type = other DNA
ctggcgacacctggcgcatttggttttgggcatatttttttgcccgcagagcgtatccgttttaacacagaggat

SEQ ID NO: 458015 - DNA, 75 bp, synthetic construct
  source 1..75: mol_type = other DNA
aaaactggcggaaggtgttcagcagaacgccgacgcggttgcggagggtaaacaacaggccgaaaatctggcctc

SEQ ID NO: 458016 - DNA, 75 bp, synthetic construct
  source 1..75: mol_type = other DNA
cagttttttgaatgcgctaagagaaatgaacagaccctattcgataatataagaaaaagtgattttcatgttggt

SEQ ID NO: 458017 - DNA, 75 bp, synthetic construct
  source 1..75: mol_type = other DNA
gaaaaagtgattttcatgttggtttacttaagccaagtagtacgcgtagtgttattttagaaacgccgccaaatg

SEQ ID NO: 458018 - DNA, 75 bp, synthetic construct
  source 1..75: mol_type = other DNA
cagattatttgtcaatacgtaatcgtttgattattgcgcgtcgtttttttcccataagttttctgactgtttggc

SEQ ID NO: 458019 - DNA, 75 bp, synthetic construct
  source 1..75: mol_type = other DNA
gatggcctcagcgtacgaatttcaccgaagggggtcatccagttccagtaccgctatcgctggcatggcaagcct

SEQ ID NO: 458020 - DNA, 75 bp, synthetic construct
  source 1..75: mol_type = other DNA
ggatgacgggggaagcgagccggaacaacatgcgcagtcggcgaggaaaaatctgacttccggtaatccagataa

SEQ ID NO: 458021 - DNA, 75 bp, synthetic construct
  source 1..75: mol_type = other DNA
gtgagcctgacgtagtatgtttaagcaagcaggtctgggaaaatcttctcattaaattaaaaccggagattaaag

SEQ ID NO: 458022 - DNA, 75 bp, synthetic construct
  source 1..75: mol_type = other DNA
atggcatggtatatagatagtaagaacgttaagaaaaatacaaatgaaaaggctaatgcaaaatacgaaaaaatt

SEQ ID NO: 458023 - DNA, 75 bp, synthetic construct
  source 1..75: mol_type = other DNA
gtcgatttttttaaacgctacaacgacacttatgggcaccctgctggcgatcgttgtctgatacaagttgccaac

SEQ ID NO: 458024 - DNA, 75 bp, synthetic construct
  source 1..75: mol_type = other DNA
tatcaaccctgctccatcttttttttgagcgtgacgatatttgccaaaagcttaatattattgatcaaaacgaga

SEQ ID NO: 458025 - DNA, 75 bp, synthetic construct
  source 1..75: mol_type = other DNA
ctcgctctttagaatatattgaacaaaactataatgaaaaagaaatctgtccctatgcgcttatggtgtatggtg

SEQ ID NO: 458026 - DNA, 75 bp, synthetic construct
  source 1..75: mol_type = other DNA
aacattactctccaaaaagaagaggatggtttatataatttaggtggattggattttaagggatgcttcttttct

SEQ ID NO: 458027 - DNA, 75 bp, synthetic construct
  source 1..75: mol_type = other DNA
taaagctggagaacaaagaaaatgcggtttctgaaattaacctgtcatctaataaaaataatgttgatcagttta

SEQ ID NO: 458028 - DNA, 75 bp, synthetic construct
  source 1..75: mol_type = other DNA
tggcgaagagtttgccattattcttttcaatgcgagcttgcaggaagccgaagcgatagcagccagaattaagca

SEQ ID NO: 458029 - DNA, 75 bp, synthetic construct
  source 1..75: mol_type = other DNA
taaacaatagtcgtggaattaatattaaaggggcaagaaatctaacatttacgggaaacactatcacttactgtg

SEQ ID NO: 458030 - DNA, 75 bp, synthetic construct
  source 1..75: mol_type = other DNA
aatatatacaacggaaataagactggcggtctatcgttggtaaattgcaaagaggtatctgtcatcggcggtgct

SEQ ID NO: 458031 - DNA, 75 bp, synthetic construct
  source 1..75: mol_type = other DNA
aaacacccactggagagccgctgggtggcgcaaccattacactgacctccctgcacaaccgtgcagggattctga

SEQ ID NO: 458032 - DNA, 75 bp, synthetic construct
  source 1..75: mol_type = other DNA
ttttgcagatattggtaaacaaaaattcacattctccttatttcctcatcatggagattaccgtgtgggtggtgt

SEQ ID NO: 458033 - DNA, 75 bp, synthetic construct
  source 1..75: mol_type = other DNA
ttcagttctaactctccgattgacgtatgggataccgccgatttatatatcagccaatgtacgatgtttgttgga

SEQ ID NO: 458034 - DNA, 75 bp, synthetic construct
  source 1..75: mol_type = other DNA
cactatggcgcgttcttttaaagcggttgccaatggaaaaatttatatcggtaaaattgatactgacccggtaaa

SEQ ID NO: 458035 - DNA, 75 bp, synthetic construct
  source 1..75: mol_type = other DNA
ccggggcagcagtatgataaggagtcggggctgtactacaaccggaaccggtactacgatccgttgcaggggcgg

SEQ ID NO: 458036 - DNA, 75 bp, synthetic construct
  source 1..75: mol_type = other DNA
tgaaagcaggcatcctgatacacggcttaattatgccaacgaatttgatttgaacgttaaaggctggttttttaa

SEQ ID NO: 458037 - DNA, 75 bp, synthetic construct
  source 1..75: mol_type = other DNA
taaacaacattttaaaatgccttatatcggtctgacaggaaattaccgttacgatgatttcgagtttggtggcgc

SEQ ID NO: 458038 - DNA, 75 bp, synthetic construct
  source 1..75: mol_type = other DNA
ttggataagaatccaacagcatctccaggggatcgagcagcagcagaaaacgttcttcaggatttacagaatgct

SEQ ID NO: 458039 - DNA, 75 bp, synthetic construct
  source 1..75: mol_type = other DNA
gtcgtgcgcgaagggatgcaggtgatccgtggggagtctgatgccttccagcgtcaggggctggtgctgcaaatg

SEQ ID NO: 458040 - DNA, 75 bp, synthetic construct
  source 1..75: mol_type = other DNA
agcgccagcgccgccagtatcgcacaatggctgtcgcgcctgacgctggtgcatcgcgagcagccgccagtgatt

SEQ ID NO: 458041 - DNA, 75 bp, synthetic construct
  source 1..75: mol_type = other DNA
cacgtggtgcaccttctccctttctgttccctttctctgttttctccgatcccattcatcctggcattaccccaa

SEQ ID NO: 458042 - DNA, 75 bp, synthetic construct
  source 1..75: mol_type = other DNA
gcgaaaactataaacattatgggtacactactcttttttctttattaacaaataataaaaactcttttttttcaa

SEQ ID NO: 458043 - DNA, 75 bp, synthetic construct
  source 1..75: mol_type = other DNA
gccgctacctgccgttggtgtggcggtaacaggcatccccgctattgaacgtttacgttttaaagaggtggatga

SEQ ID NO: 458044 - DNA, 75 bp, synthetic construct
  source 1..75: mol_type = other DNA
tgggggcgattaagttcggccctattgatgagttgcgtgaaaagtatggcgatgtcagtgatgtgaaaggtttac

SEQ ID NO: 458045 - DNA, 75 bp, synthetic construct
  source 1..75: mol_type = other DNA
cgcacagctggaggcggaatacatcccggagaggaaacttcatctttaccactgcgaccaccggggactgccgct

SEQ ID NO: 458046 - DNA, 75 bp, synthetic construct
  source 1..75: mol_type = other DNA
ggttggtggagaaatttatgtaaaaaaaataccctctatgaaagttacagatatagctactgctgttgcgcctaa

SEQ ID NO: 458047 - DNA, 75 bp, synthetic construct
  source 1..75: mol_type = other DNA
tggtgatccatatacaggtgaagtcgttggttgtgagacaaatgaatcaggaatatcggcagcatatggcacaac

SEQ ID NO: 458048 - DNA, 75 bp, synthetic construct
  source 1..75: mol_type = other DNA
ttaataacttcattatcgctaataaggctcatgcgaaaaattttggaaattttgagtgggataattcaagttggg

SEQ ID NO: 458049 - DNA, 75 bp, synthetic construct
  source 1..75: mol_type = other DNA
aaatggcgtccgtcactctgtatatgccagcaagaatcgttagtcatcgatcgactggaattattgcatgacgcc

SEQ ID NO: 458050 - DNA, 75 bp, synthetic construct
  source 1..75: mol_type = other DNA
ttttggctttcaaaaaaaatgataaagttatttattatagaggtcggaaaagtgacatgttgaacagttcaatga

SEQ ID NO: 458051 - DNA, 75 bp, synthetic construct
  source 1..75: mol_type = other DNA
aagtgagtttggcgaagaatgggatagtttagacagcgaaacaaaatcaagttacattgattcaggggcttttag

SEQ ID NO: 458052 - DNA, 75 bp, synthetic construct
  source 1..75: mol_type = other DNA
atggcgagtgtcgacgaaatctccggtcatattgtggacaatattgtcgaactagcgcgtaagcctggtctgagt

SEQ ID NO: 458053 - DNA, 75 bp, synthetic construct
  source 1..75: mol_type = other DNA
ttaaagaacttgaaaagaagattttagatttagacttttcagggcaagaaaaaatatctgaaaaaataaaaacat

SEQ ID NO: 458054 - DNA, 75 bp, synthetic construct
  source 1..75: mol_type = other DNA
aaatataaaaattatttatcacaaaaccaataaatatataagcagtgataaacctgttgtatgcacaaatattga

SEQ ID NO: 458055 - DNA, 75 bp, synthetic construct
  source 1..75: mol_type = other DNA
taaccgtcagtgaaaaatcccgtgcagggacgctgaatgagtttttgctgaatgaagaaacggcggcggaatatc

SEQ ID NO: 458056 - DNA, 75 bp, synthetic construct
  source 1..75: mol_type = other DNA
tatgctaatcggcgggatcgtcacaatattaattgtccgctggttaaagaatatagctatcgtggacgccaaacc

SEQ ID NO: 458057 - DNA, 75 bp, synthetic construct
  source 1..75: mol_type = other DNA
aactgttaagtatcaggaattctgggtggcgttaagcgcagaagagaaacaggttatcggcgcggttgagaaccc

SEQ ID NO: 458058 - DNA, 75 bp, synthetic construct
  source 1..75: mol_type = other DNA
atgcacactcaccctcacttaataaaacaaactattgttccacgactcattaatgaaataaacaaaagaacacaa

SEQ ID NO: 458059 - DNA, 75 bp, synthetic construct
  source 1..75: mol_type = other DNA
ttgtgcagggtgactttgaacctgaatccggttatcgcgccatgcagcaaatcctgtcgcagccgcatcgcccta

SEQ ID NO: 458060 - DNA, 75 bp, synthetic construct
  source 1..75: mol_type = other DNA
ttcactgcatttataatatccactttttatcctaagacgtggaaagagatgcatgagtcagggtatataaataga

SEQ ID NO: 458061 - DNA, 75 bp, synthetic construct
  source 1..75: mol_type = other DNA
acacttaaataatggcggatatggagcgaaacccagcaaaccgcctacgcccgatccaagtaagttgccagacat

SEQ ID NO: 458062 - DNA, 75 bp, synthetic construct
  source 1..75: mol_type = other DNA
cgcgtgtcggtccactacgggtacgacgataagggccgcctgacgggcgaacggcagacggtggagaacccggag

SEQ ID NO: 458063 - DNA, 75 bp, synthetic construct
  source 1..75: mol_type = other DNA
attactacctcaaacaaaggaaaatataaaaatagccaatgagtggagttctacaattcatcagctttactgtga

SEQ ID NO: 458064 - DNA, 75 bp, synthetic construct
  source 1..75: mol_type = other DNA
taactctggcgggcaatatacccttgggcggtcaaaagatgagtttcaggctctggcccgggcagaagatctcca

SEQ ID NO: 458065 - DNA, 75 bp, synthetic construct
  source 1..75: mol_type = other DNA
tatggcaaacgggacagcggaaggttccattattaatgggggttcacaggtagttaatgagggcggtctggctga

SEQ ID NO: 458066 - DNA, 75 bp, synthetic construct
  source 1..75: mol_type = other DNA
gcactacgctggcgttcgtgatggcggccggattcattgccgataccgccagcctgccgcttattgtctccaacc

SEQ ID NO: 458067 - DNA, 75 bp, synthetic construct
  source 1..75: mol_type = other DNA
atgcgctgcgcttatcaggccttgtattatccctccagtgcagagaaaatcggccagttttctctgcctgcagtc

SEQ ID NO: 458068 - DNA, 75 bp, synthetic construct
  source 1..75: mol_type = other DNA
gcgtagatttatgcagcggatgcctttctcccaaagtgataaaccggacagtatcatggaccggttttcccggta

SEQ ID NO: 458069 - DNA, 75 bp, synthetic construct
  source 1..75: mol_type = other DNA
agtcgcggaagtcaattggcccgcgttgcttctactggcggtcgcgccacagctggccttgctggctcagttggg

SEQ ID NO: 458070 - DNA, 75 bp, synthetic construct
  source 1..75: mol_type = other DNA
attgatttttacaacaaaacaactaattcagaaataagccttcttaagattgatagcattacaccaagtagtggg

SEQ ID NO: 458071 - DNA, 75 bp, synthetic construct
  source 1..75: mol_type = other DNA
taaaaaaattaataagaaaggcatttcctgaatttagcaataaggtaacatggactttactcactgcagggatcg

SEQ ID NO: 458072 - DNA, 75 bp, synthetic construct
  source 1..75: mol_type = other DNA
tgcggcctcgcttgcaatgcaagtcacattcacatggctaagcgtcaacagccttgggtttgataccaagcccta

SEQ ID NO: 458073 - DNA, 75 bp, synthetic construct
  source 1..75: mol_type = other DNA
gtaagccagaacgtaccgagaatccttatattaatgtcgcattacctatgttcaccgctgcaatatgtctgctgc

SEQ ID NO: 458074 - DNA, 75 bp, synthetic construct
  source 1..75: mol_type = other DNA
attccctccccccgacggtggcttaccgtcatcccgtgtccctccgccctttggggccgttaacggccccgtttt

SEQ ID NO: 458075 - DNA, 75 bp, synthetic construct
  source 1..75: mol_type = other DNA
cgacacaatcagcagacgttcgcccggaaagcgaattaaaccgcgcagatcgcattaaggctgccttaaaggcta

SEQ ID NO: 458076 - DNA, 75 bp, synthetic construct
  source 1..75: mol_type = other DNA
ttatatgagcatgttttacaatcccagttgcatggtatttataatttatcagcagcaccaatttcaaaattcgat

SEQ ID NO: 458077 - DNA, 75 bp, synthetic construct
  source 1..75: mol_type = other DNA
tcccacagaaagaagtgaaaaattaaaaagattgattgcaaaatgttgcgcacattggcctgaagaacgatatca

SEQ ID NO: 458078 - DNA, 75 bp, synthetic construct
  source 1..75: mol_type = other DNA
tggtcagcacgtcaccgcaacagccgccactcgaacagcttaccgccctgtccgttccgcccggttttcacccga

SEQ ID NO: 458079 - DNA, 75 bp, synthetic construct
  source 1..75: mol_type = other DNA
acagtggcacggctggcggctggagcggtttgatgagcgccgggcggtgttccgtcacggtaaacgccagttgac

SEQ ID NO: 458080 - DNA, 75 bp, synthetic construct
  source 1..75: mol_type = other DNA
agtgattgcctttactccagagcaccagatggagatggaaactcagagctctcgtaagaaaacatcctgtaccac

SEQ ID NO: 458081 - DNA, 75 bp, synthetic construct
  source 1..75: mol_type = other DNA
gggcgtacaaccccggaatctcccgcagtcgcgagctggatgaacagctacgcagaaaacaggaagcgtttgaca

SEQ ID NO: 458082 - DNA, 75 bp, synthetic construct
  source 1..75: mol_type = other DNA
gtctgtggatacccgcctgctgacggacacccttgaactgaccgccacggctgacatgcctgatgaagtgcgcgc

SEQ ID NO: 458083 - DNA, 75 bp, synthetic construct
  source 1..75: mol_type = other DNA
gcaattaagcagaaatatgataataaaaacacagattatattctattaaattcgtactttccacatcttcttaat

SEQ ID NO: 458084 - DNA, 75 bp, synthetic construct
  source 1..75: mol_type = other DNA
tcttgccgtcgggaagaacggtcctaccgtttatgagcaaacttgtcgcgtctgttttcactcagagcgccatgt

SEQ ID NO: 458085 - DNA, 75 bp, synthetic construct
  source 1..75: mol_type = other DNA
ggcaacgagttttatgccgaagcccgtctgaaacatatccagcccgagctggaacaacttgcgactgagggcgct

SEQ ID NO: 458086 - DNA, 75 bp, synthetic construct
  source 1..75: mol_type = other DNA
atatttttttgagtacccgaattccggggcggaagcataccaccctacttttgcttgcttattgtgaaaagtgca

SEQ ID NO: 458087 - DNA, 75 bp, synthetic construct
  source 1..75: mol_type = other DNA
caatttccaaagcttgttatagaaggtagtggggaactaacggagaataataacgcccattcagtctacatgaaa

SEQ ID NO: 458088 - DNA, 75 bp, synthetic construct
  source 1..75: mol_type = other DNA
tgcgatggccacaccggcgctgacattcgccgcggtcaccgctacacagataaagaatgtgacgctttgctgcag

SEQ ID NO: 458089 - DNA, 75 bp, synthetic construct
  source 1..75: mol_type = other DNA
tgatgtgctgtacccagttaatgaaaaccgcgctgctggaaaacctgtttggttatttcgcgcacctcgatccat

SEQ ID NO: 458090 - DNA, 75 bp, synthetic construct
  source 1..75: mol_type = other DNA
cggggccacagggaccaaaaggggatacgggagccgcaggcccggcagggccacagggaccgaaaggggatacgg

SEQ ID NO: 458091 - DNA, 75 bp, synthetic construct
  source 1..75: mol_type = other DNA
taactttttttgaacctacagcaagtaatattgaacgtacggggatgatatattatttggtttcacagcttggtg

SEQ ID NO: 458092 - DNA, 75 bp, synthetic construct
  source 1..75: mol_type = other DNA
tattaagagtcgggcagtgttatggagatccttttgtttcagaaacaatcaattttataaatggcgctcgacaga

SEQ ID NO: 458093 - DNA, 75 bp, synthetic construct
  source 1..75: mol_type = other DNA
ggcatatgcagaagggctggcatctcacatgtataagcaacatgtgatcgaatggctgacggatgaacagctttt

SEQ ID NO: 458094 - DNA, 75 bp, synthetic construct
  source 1..75: mol_type = other DNA
gctatggaattaatggagtgcgcaccaggggggcttccagagcgaatggatacagtgtggttgaaaataaatgtt

SEQ ID NO: 458095 - DNA, 75 bp, synthetic construct
  source 1..75: mol_type = other DNA
aatttctgataagaaacagcattgtattattaagtatgaccattataatctttttgcgtgttttagctcgataaa

SEQ ID NO: 458096 - DNA, 75 bp, synthetic construct
  source 1..75: mol_type = other DNA
aaagaacgcatcagcccgctggttagggtaacgccagttctgcgtaacatcataggtgactcaaagcagaagagt

SEQ ID NO: 458097 - DNA, 75 bp, synthetic construct
  source 1..75: mol_type = other DNA
tgcgcatgacgtcatttatggtgacctggaaacagaggaaccgtggaagcgccttgatgcgtatttgaaacagat

SEQ ID NO: 458098 - DNA, 75 bp, synthetic construct
  source 1..75: mol_type = other DNA
aattaccgggtgccatcgtggatgaggctatggctcctgttaagcgtaagaacatttctaaactcctgccgcaat

SEQ ID NO: 458099 - DNA, 75 bp, synthetic construct
  source 1..75: mol_type = other DNA
tacaatcgatattgagaatattgaacgtaacatgcttgctaaactagatgagatagctgacgatgaatcacgtcc

SEQ ID NO: 458100 - DNA, 75 bp, synthetic construct
  source 1..75: mol_type = other DNA
aaacacaaggtctatttgaaagagctataaaaatatcaaagaaattcgggactaatcaacaattgctagatgcgt

SEQ ID NO: 458101 - DNA, 75 bp, synthetic construct
  source 1..75: mol_type = other DNA
ttatgataaccatcaggagtacctttctgtgctcaagcaaatctcggggctggatgatttgaataagcttggcca

SEQ ID NO: 458102 - DNA, 75 bp, synthetic construct
  source 1..75: mol_type = other DNA
tggtcaattgttgcggatgacgccacaagagagtgacaaaatagcagtatatttataccaaaaattcgagaatga

SEQ ID NO: 458103 - DNA, 75 bp, synthetic construct
  source 1..75: mol_type = other DNA
gtgaaaatctccctctggatatcgtcatgactctggcgaaaagagattgggatatgatcattcaggagctttata

SEQ ID NO: 458104 - DNA, 75 bp, synthetic construct
  source 1..75: mol_type = other DNA
gtggaaaattctatcttggatgtgatgcgatgttaaaaaatattgttcctgagcatccacaaagagatagtttag

SEQ ID NO: 458105 - DNA, 75 bp, synthetic construct
  source 1..75: mol_type = other DNA
aataccgggaaagattttgtgtatccagataacttccaagataacatgaaaaattatcttgaaatcactggacaa

SEQ ID NO: 458106 - DNA, 75 bp, synthetic construct
  source 1..75: mol_type = other DNA
gattactcaattaccacaccatcaggacgtattgtaacccctcccgccagtagatgctggcaggtttctgaaaaa

SEQ ID NO: 458107 - DNA, 75 bp, synthetic construct
  source 1..75: mol_type = other DNA
gtgtacacgccggcgcgaaaaatccacctgtaccactgcgaccatcgcggcctgccgctggcgcttgtcagcacg

SEQ ID NO: 458108 - DNA, 75 bp, synthetic construct
  source 1..75: mol_type = other DNA
gctgtcgaatacaatcaacgggcgttttttatttcacctggctacgggcaaacaggttgtcgagcttctcttcgt

SEQ ID NO: 458109 - DNA, 75 bp, synthetic construct
  source 1..75: mol_type = other DNA
ggttgtcgaatacaaccaacgggcgttttttatttcgcctggctacgggcaaacaggtcgtcgagcttctcttcg

SEQ ID NO: 458110 - DNA, 75 bp, synthetic construct
  source 1..75: mol_type = other DNA
tatccttgttcagttgccagagcgtttacatacaagtgtgaaagaacaaaaaatcgcttacgaattctgtaataa

SEQ ID NO: 458111 - DNA, 75 bp, synthetic construct
  source 1..75: mol_type = other DNA
caatcaaatatgtattggtcatctagggaaggtgcgaataagcaggtcatttcttcccaagctgactcgctgatt

SEQ ID NO: 458112 - DNA, 75 bp, synthetic construct
  source 1..75: mol_type = other DNA
aaagcgagcagcaggtggggcaacatgctgaagcagcatccctgataaaagagcaggttgaaacgctggcagata

SEQ ID NO: 458113 - DNA, 75 bp, synthetic construct
  source 1..75: mol_type = other DNA
taggtatattagagatactatatatggcgaatgataaaattaccgttataactataaattacaataatgcagaag

SEQ ID NO: 458114 - DNA, 75 bp, synthetic construct
  source 1..75: mol_type = other DNA
ttaatgttaatttggatgaacttgaaaagcctgagcaggtaacgcggttaaaaaccgttcttagggctttagctt

SEQ ID NO: 458115 - DNA, 75 bp, synthetic construct
  source 1..75: mol_type = other DNA
tgcgcgctggtttccgcacattgatgcggcattgaaagagtttggaatcacagcagttaacgatcaggccatgtt

SEQ ID NO: 458116 - DNA, 75 bp, synthetic construct
  source 1..75: mol_type = other DNA
aggtcagaatgctctgcaggaatcacgctataatctgggattaaaagacgcagccacaatggatgtgcagagcag

SEQ ID NO: 458117 - DNA, 75 bp, synthetic construct
  source 1..75: mol_type = other DNA
tttgaagcacagaccgggaaatactgcgtatatctgaaacaggactggcgcgacgagtactgtgttggcgatatt

SEQ ID NO: 458118 - DNA, 75 bp, synthetic construct
  source 1..75: mol_type = other DNA
gcattaggtttgggacatgagtttgctcatgcgcagtattaccttcttgataaggaaaatttcatggctctttta

SEQ ID NO: 458119 - DNA, 75 bp, synthetic construct
  source 1..75: mol_type = other DNA
ggtggagagccgctacctctatgacccgctgggccgccggacgggaaaacgggtgtggcggcgggagcgtgacct

SEQ ID NO: 458120 - DNA, 75 bp, synthetic construct
  source 1..75: mol_type = other DNA
gaaaatatattggcgataaagaaggcaaacggcacgccgtcgtcaacggtgtccttatggttcaccgtggatggg

SEQ ID NO: 458121 - DNA, 75 bp, synthetic construct
  source 1..75: mol_type = other DNA
accgcattgtcggcggtaacagcctgccgacggcgatccatgcattgcgcgttgctatcgacgatgaggtaatga

SEQ ID NO: 458122 - DNA, 75 bp, synthetic construct
  source 1..75: mol_type = other DNA
gttcaacatagcgaaacctggtatcaaacactcgcctggtgggcgctgcctgccgttgttgcgctctttgcctag

SEQ ID NO: 458123 - DNA, 75 bp, synthetic construct
  source 1..75: mol_type = other DNA
catctcttttgacgctacccgatcgagtagtaagttaaataatgatataacacacgaaggtacgagctatcaggt

SEQ ID NO: 458124 - DNA, 75 bp, synthetic construct
  source 1..75: mol_type = other DNA
acaatacagaacgacagaacccgcatccagacgatttatcagccggggagcttcacgccactcatcagggttgaa

SEQ ID NO: 458125 - DNA, 75 bp, synthetic construct
  source 1..75: mol_type = other DNA
cggacagtgacgggaaaatcgtgtgggagacggggtatcaggtctggggtaacacgatacaggagaaggaccacg

SEQ ID NO: 458126 - DNA, 75 bp, synthetic construct
  source 1..75: mol_type = other DNA
agttatgaaccgctggcgcgggtggataaggcgggcaaagagggcccgaaccggatactgtattttcacacggat

SEQ ID NO: 458127 - DNA, 75 bp, synthetic construct
  source 1..75: mol_type = other DNA
aggcgtcgtcgcgcatacttccatgcgcaacatgatgtgttgtgctgtaactggtgaggctgcagggactgcggc

SEQ ID NO: 458128 - DNA, 75 bp, synthetic construct
  source 1..75: mol_type = other DNA
caaaacacaggtcaatacgggcggacgggagatcgtcaaaacaaaagccactgcgacaggcacgacgctcaccgg

SEQ ID NO: 458129 - DNA, 75 bp, synthetic construct
  source 1..75: mol_type = other DNA
aattggcagcaatattagcgccggaggctcgctgattgtctataccggcggtattgcacatggggttaaccagga

SEQ ID NO: 458130 - DNA, 75 bp, synthetic construct
  source 1..75: mol_type = other DNA
aggttgttgagaaagatggtacggcaattggcagcaatattagcgccggaggctcgctgattgtctataccggcg

SEQ ID NO: 458131 - DNA, 75 bp, synthetic construct
  source 1..75: mol_type = other DNA
ctcctcgcagccgaggaaaagaattatctccaggctgcgacatatcttaagtttgccgcagaaaaaggcgacaaa

SEQ ID NO: 458132 - DNA, 75 bp, synthetic construct
  source 1..75: mol_type = other DNA
aagtcgtgcaatagctttcgttgaaagtgagattgatagctggattcagtctgttatcgaaacaagtcgaaataa

SEQ ID NO: 458133 - DNA, 75 bp, synthetic construct
  source 1..75: mol_type = other DNA
atttattggtattagcaggtaccgaagcccgtgactccacggttggcaagggggggggcaatgcaaaacctgggt

SEQ ID NO: 458134 - DNA, 75 bp, synthetic construct
  source 1..75: mol_type = other DNA
aaaaaaatagactaactccaaaccaaaatgctcaaatcaatgccatctattcgctatcacaaaatagaatcattt

SEQ ID NO: 458135 - DNA, 75 bp, synthetic construct
  source 1..75: mol_type = other DNA
aaattatgatgaagctgaattttacttaggacagatttatcattacggatatgataatacggggcctaactatcg

SEQ ID NO: 458136 - DNA, 75 bp, synthetic construct
  source 1..75: mol_type = other DNA
ttttaataattagcgccactgcaataggcgccgaagataccccttcacattttgatattcccgagcaagtattaa

SEQ ID NO: 458137 - DNA, 75 bp, synthetic construct
  source 1..75: mol_type = other DNA
tgaactgggcgcaacgctgagttacaacatgcgtctggggaacggtatggaagttgagccgtggctgaaggcggc

SEQ ID NO: 458138 - DNA, 75 bp, synthetic construct
  source 1..75: mol_type = other DNA
cgaagaagaacgtcagcgcattgttcaggtattgcgagaaaccaatggcattgttgccgggccccgtggcgcggc

SEQ ID NO: 458139 - DNA, 75 bp, synthetic construct
  source 1..75: mol_type = other DNA
aacaaacagccgcatctggggatctccaccggacaggctatgtggttattagccgtgaaagtgcgcacattctgg

SEQ ID NO: 458140 - DNA, 75 bp, synthetic construct
  source 1..75: mol_type = other DNA
cagttagctccaaggaatttacttttccagaagggagtcctaaaggtagtgttattagttttatactaagaagac

SEQ ID NO: 458141 - DNA, 75 bp, synthetic construct
  source 1..75: mol_type = other DNA
tataagaggtttgatcttgtatttggtactagcaccggtgcgattattgccgcgctcatcgctctaggatacgaa

SEQ ID NO: 458142 - DNA, 75 bp, synthetic construct
  source 1..75: mol_type = other DNA
atgcagttcacttttaatgaaggccacattcaactgccgtctcaatggcaggatcagtcaatgcaggtcctggtg

SEQ ID NO: 458143 - DNA, 75 bp, synthetic construct
  source 1..75: mol_type = other DNA
gcttgggtaaagatggctgagttggccgggcagcagaatttgccagcggaaaagagaaaagctcacgaaattata

SEQ ID NO: 458144 - DNA, 75 bp, synthetic construct
  source 1..75: mol_type = other DNA
tgtagtcaagtaatacaaaatgttaaagctctaagagccagtgaaaaactccattatatggaagtttttggtatt

SEQ ID NO: 458145 - DNA, 75 bp, synthetic construct
  source 1..75: mol_type = other DNA
agccacgcaagcaccttaaaatcaccatcatacactaaatcagtaagttggcagcattaccgcaaaatggatgtt

SEQ ID NO: 458146 - DNA, 75 bp, synthetic construct
  source 1..75: mol_type = other DNA
cggtaacttctacctgcataccaacgttgcaggctcccggggcgatcaactggtcgtcaacaacaacgccactgg

SEQ ID NO: 458147 - DNA, 75 bp, synthetic construct
  source 1..75: mol_type = other DNA
tcatcgatcttttgcaaaaagaacgagcgcagatcggcttaattgagtctcgggaacactaccccaccgatattg

SEQ ID NO: 458148 - DNA, 75 bp, synthetic construct
  source 1..75: mol_type = other DNA
ggttgagagataccagttccggtatggaatgtgacggggttcgctggatttataacacaacagaacaatggctgg

SEQ ID NO: 458149 - DNA, 75 bp, synthetic construct
  source 1..75: mol_type = other DNA
tggtgattatcgcagggagaaaataagtgatcctgtccaccttaccggagagaaaggttcagaaaattcgacaag

SEQ ID NO: 458150 - DNA, 75 bp, synthetic construct
  source 1..75: mol_type = other DNA
gtgctcacgcatgggaaatgagcgttgtcagagtgcgccgaagctggtggaaaaaacatcgggatgagttttctt

SEQ ID NO: 458151 - DNA, 75 bp, synthetic construct
  source 1..75: mol_type = other DNA
agtgtattgcgcgtatcgaatcggcggtaagtcaggggaaatgcatcgcctggatccggaattctgtcgatgacg

SEQ ID NO: 458152 - DNA, 75 bp, synthetic construct
  source 1..75: mol_type = other DNA
aggggctggtaccggtaaccgtgtgtgagtttgaaattgaccactttaaccgacgtggcattgatgcgaatggtg

SEQ ID NO: 458153 - DNA, 75 bp, synthetic construct
  source 1..75: mol_type = other DNA
atgaagtcttgttttgacactgacaaagattttcagatgtcatctgatgaagtcactttcaatgctgacagcgtt

SEQ ID NO: 458154 - DNA, 75 bp, synthetic construct
  source 1..75: mol_type = other DNA
taattgaagaagctaaattaaaaatagcgattgcgaaatgccatcccaattcaggcgtggcacgagtagagggtg

SEQ ID NO: 458155 - DNA, 75 bp, synthetic construct
  source 1..75: mol_type = other DNA
ccggagatggcaaacgtgattttagtcaacgatgacgaaagttgcgggtattcggctacggaaggattgattggc

SEQ ID NO: 458156 - DNA, 75 bp, synthetic construct
  source 1..75: mol_type = other DNA
gcagtctggaactgtataccggcaaagacgttgaggtagtgaatatcgtgaagggtgaatccgctccatcacacc

SEQ ID NO: 458157 - DNA, 75 bp, synthetic construct
  source 1..75: mol_type = other DNA
cagtattatgaccccagataactccagaattaacattgattatttttgtagcaaaattagcctgatgaaagaaaa

SEQ ID NO: 458158 - DNA, 75 bp, synthetic construct
  source 1..75: mol_type = other DNA
ctcgacattaacgatgatggcatttccgaaacgcttaactgcacgtattcaccctccacgcctcccgctgcctgc

SEQ ID NO: 458159 - DNA, 75 bp, synthetic construct
  source 1..75: mol_type = other DNA
aaatgaccagtggtcctgccatgttgcgcatttttcccgtaacggaaaactctatttgacgcctgatctggtcac

SEQ ID NO: 458160 - DNA, 75 bp, synthetic construct
  source 1..75: mol_type = other DNA
aggggggcgacgctggaagctgccatgagtacagagaagggctccaaagagctcctgaaccagctctatatgctc

SEQ ID NO: 458161 - DNA, 75 bp, synthetic construct
  source 1..75: mol_type = other DNA
tttcctgtgcatggataccattaaagcggaggagctcgaatggtacattcacagacgtaaattcaggtctaatca

SEQ ID NO: 458162 - DNA, 75 bp, synthetic construct
  source 1..75: mol_type = other DNA
tctgttgatatcgcttttgtaactcacaatgatgatgaccatatcggtggtttcaaatacctaattgaaaataaa

SEQ ID NO: 458163 - DNA, 75 bp, synthetic construct
  source 1..75: mol_type = other DNA
caaaagaagtgaatttactctttcgcaaagttaaaaccacttacagtaaaggagtcacaaagaacggtagcggct

SEQ ID NO: 458164 - DNA, 75 bp, synthetic construct
  source 1..75: mol_type = other DNA
tacgagtggttcattgataactatgtagaaggctggcagcttgataaagatatagtaggtgacggtactacctat

SEQ ID NO: 458165 - DNA, 75 bp, synthetic construct
  source 1..75: mol_type = other DNA
gaacaattttcatatgaggttttactaaaccatgcatatgagtttcttccaggggggcatcaatatcagataggt

SEQ ID NO: 458166 - DNA, 75 bp, synthetic construct
  source 1..75: mol_type = other DNA
atggttttgtatatgtgcagtagttgtaaaaaagaacataaaattaatttaagtgattttgatgtttgggaagag

SEQ ID NO: 458167 - DNA, 75 bp, synthetic construct
  source 1..75: mol_type = other DNA
gggcgcgacaatcgcggcgccagcagccatgactgcaacagcggacacagcatcttcggcgtctgatgttgctgg

SEQ ID NO: 458168 - DNA, 75 bp, synthetic construct
  source 1..75: mol_type = other DNA
gcttatacctgcgaggtaacggattctgcagaacagccgcagagcattacctctgatgcgtgtacagtaacggtt

SEQ ID NO: 458169 - DNA, 75 bp, synthetic construct
  source 1..75: mol_type = other DNA
gattgcgctgagctgctcgctgggaaatatcgccgcatccatcctgcttttttccaccagctcgctgaacatgac

SEQ ID NO: 458170 - DNA, 75 bp, synthetic construct
  source 1..75: mol_type = other DNA
ccagccaggtgaagctgaagagcgaattgcattactcgcaatcaatagcctacctgaatcagtgaaaacactgca

SEQ ID NO: 458171 - DNA, 75 bp, synthetic construct
  source 1..75: mol_type = other DNA
aataaagaattcaagcaataaaatatcgaccaaacaagatataaatcttgatagaatagtgaaagatggaagttt

SEQ ID NO: 458172 - DNA, 75 bp, synthetic construct
  source 1..75: mol_type = other DNA
ttcacgttttccttatcttacagctgcacaaaaaagttcacttcttaataaactcatagatgcaaatcaatatgt

SEQ ID NO: 458173 - DNA, 75 bp, synthetic construct
  source 1..75: mol_type = other DNA
gtgacggccctaatactaatactagctccattcgttaaatattttaggataaagtatattttttattccttacta

SEQ ID NO: 458174 - DNA, 75 bp, synthetic construct
  source 1..75: mol_type = other DNA
gtggcgcgggcgctgaatgatacagcgcaaaacgctgcgtttttgatattcgacggtgagaaaaaaaccaaaggg

SEQ ID NO: 458175 - DNA, 75 bp, synthetic construct
  source 1..75: mol_type = other DNA
ttccgccgtcggggaaattatggggcgcatgttaatcgatatcatgaaccccatctataaacagcatcccgaact

SEQ ID NO: 458176 - DNA, 75 bp, synthetic construct
  source 1..75: mol_type = other DNA
ttctggaacgcatccgccgactgaccccgcaacatgtaaccgccccattcagaacggtagcggagtggcgcgagt

SEQ ID NO: 458177 - DNA, 75 bp, synthetic construct
  source 1..75: mol_type = other DNA
ttgatattgatattgatattgatattgatattgaaaatcaagaaccaataaaatcacctacgaacgatgaaaaaa

SEQ ID NO: 458178 - DNA, 75 bp, synthetic construct
  source 1..75: mol_type = other DNA
atataatggagatcctgatttcattttcgataaaatatcacgtaacctcatacatacggtaacgaaatccgatga

SEQ ID NO: 458179 - DNA, 75 bp, synthetic construct
  source 1..75: mol_type = other DNA
ccatctatgccgctttacagcaatccggtgtggttcgcgtcagactgatctctcccgtggctgatctggaagccg

SEQ ID NO: 458180 - DNA, 75 bp, synthetic construct
  source 1..75: mol_type = other DNA
tctcccgtggctgatctggaagccgaagccggaaaagcaccgtggtgtactgccatcaacgtcacccgcagggag

SEQ ID NO: 458181 - DNA, 75 bp, synthetic construct
  source 1..75: mol_type = other DNA
atgctggtcactcagatagtggcgaagtatcaggagctggatacgttgttttcggctctggtggaatctgatccc

SEQ ID NO: 458182 - DNA, 75 bp, synthetic construct
  source 1..75: mol_type = other DNA
cttcagcgtggtttgaaagcagcaaagctatcatggcagaatcatttgcaacaggttccgatcatcaggttgtaa

SEQ ID NO: 458183 - DNA, 75 bp, synthetic construct
  source 1..75: mol_type = other DNA
taaaagaaatatatgatggagatcctggttttatcttcgataagatatcacacaaactcagacatacggtaacgg

SEQ ID NO: 458184 - DNA, 75 bp, synthetic construct
  source 1..75: mol_type = other DNA
tttacggactgctcggggtacacgacgcggtatgagtacgaccggtacggtcaacaaatcgccgttcaccgggag

SEQ ID NO: 458185 - DNA, 75 bp, synthetic construct
  source 1..75: mol_type = other DNA
aagaaccaacaaaatcacctgcgaacgatgaaaacaaaaaagtcggccaaaccatcatccatgaaaatgtagtag

SEQ ID NO: 458186 - DNA, 75 bp, synthetic construct
  source 1..75: mol_type = other DNA
aataatgctgagtttactgatggtattattgttagtggtattgatgatcgtagtgatattggcattgactccaat

SEQ ID NO: 458187 - DNA, 75 bp, synthetic construct
  source 1..75: mol_type = other DNA
gggaaagactgagagaaccaaacgaagtttttaaacgttatggtcaagcaataagatatgattttcaagtggacg

SEQ ID NO: 458188 - DNA, 75 bp, synthetic construct
  source 1..75: mol_type = other DNA
gttccggcaaatccggatgccgtgcctccgacggatgcgattatggaagaggacgatgcttttcgcgaacgcatc

SEQ ID NO: 458189 - DNA, 75 bp, synthetic construct
  source 1..75: mol_type = other DNA
tgacaataattctggtggagatgcaatgtttaaagttgttaatcacgctcaccaacgaaatccaaataaaaaatg

SEQ ID NO: 458190 - DNA, 75 bp, synthetic construct
  source 1..75: mol_type = other DNA
cagcgagagataatagcaggaaccgccgcagagaggccaggaaggcagaaagagcagagaaggaaaacaagagcc

SEQ ID NO: 458191 - DNA, 75 bp, synthetic construct
  source 1..75: mol_type = other DNA
cacttcgtgccgctctgtatcgccgtgccgttgcctgtgcctggctggctctaagcaatcatcaggaacgttatt

SEQ ID NO: 458192 - DNA, 75 bp, synthetic construct
  source 1..75: mol_type = other DNA
atcattctttgccatttgctagcaaagaggatgcagatgaaggactattggctttctttactgttcttaaggtct

SEQ ID NO: 458193 - DNA, 75 bp, synthetic construct
  source 1..75: mol_type = other DNA
tcaataatagtgatgaatgggcaaatcaactaaaacacctattatcgaaaggagaaaatctggcattactacatg

SEQ ID NO: 458194 - DNA, 75 bp, synthetic construct
  source 1..75: mol_type = other DNA
cggattatggcaaggtttttatgtcactgtggaagagataccaaaaatatcgagccagtattgactgccatcaca

SEQ ID NO: 458195 - DNA, 75 bp, synthetic construct
  source 1..75: mol_type = other DNA
ggtaatgcccgtgcggatgatctggtccgtaataatggcattgccgcgaatgctgtggaaatccataaagaccat

SEQ ID NO: 458196 - DNA, 75 bp, synthetic construct
  source 1..75: mol_type = other DNA
acggacagcccctgcgacagagtatgggatattccggtggcggctccggatttggtgggcaacttgcggaatggt

SEQ ID NO: 458197 - DNA, 75 bp, synthetic construct
  source 1..75: mol_type = other DNA
gttaccgtcccaactggcgctggctggggatgtcggaagcagattcacatgcttttattgaagatgttgaggcgg

SEQ ID NO: 458198 - DNA, 75 bp, synthetic construct
  source 1..75: mol_type = other DNA
tatctccaacggcgatatcaatattattgaacaaaaaatcaaactgaatacccgaatgatatacgctgagtcacc

SEQ ID NO: 458199 - DNA, 75 bp, synthetic construct
  source 1..75: mol_type = other DNA
agtatggttgaaaccaaacttgctttgctggaggggggggaagaggcgcggtgctttgcatcaggcatgggggca

SEQ ID NO: 458200 - DNA, 75 bp, synthetic construct
  source 1..75: mol_type = other DNA
ggcggcacctggctctccattcctggcgatggcatcaagggtgagcttatcaaaaccggggatatcaccagcggc

SEQ ID NO: 458201 - DNA, 75 bp, synthetic construct
  source 1..75: mol_type = other DNA
caggcattgcgcttattccacgctctatgctggaaagtatgccggggcatcaccaggttgaagcgtggccgttag

SEQ ID NO: 458202 - DNA, 75 bp, synthetic construct
  source 1..75: mol_type = other DNA
tccttatgagcccgttgatctggaacgcgtcatgaccgcgcgcaagaaatattttacaacatcggcggagaagca

SEQ ID NO: 458203 - DNA, 75 bp, synthetic construct
  source 1..75: mol_type = other DNA
actggcagcagcggaagcgaacaaagcagggactgcagagaaatggcaggaagagcagcaggctgcgattagaga

SEQ ID NO: 458204 - DNA, 75 bp, synthetic construct
  source 1..75: mol_type = other DNA
atacataaatcttacctcagaaggtaatttgcttgttgacagtgcgatacttaaatcaacgattgaaaaaccttt

SEQ ID NO: 458205 - DNA, 75 bp, synthetic construct
  source 1..75: mol_type = other DNA
aacacaaaaccacagccatgactggtataaacatttcgtttctcaggtcaatagtatgccagaagtgatgacttt

SEQ ID NO: 458206 - DNA, 75 bp, synthetic construct
  source 1..75: mol_type = other DNA
cagtatatcaactggcacgcgagcaacatcctgaacgttggagcaagcatctacgtaaattggactacatatcag

SEQ ID NO: 458207 - DNA, 75 bp, synthetic construct
  source 1..75: mol_type = other DNA
acaggattcacccggctacaggaaaacttcaattacagcgtagtcgggttggcaaacttcattcgagctggacga

SEQ ID NO: 458208 - DNA, 75 bp, synthetic construct
  source 1..75: mol_type = other DNA
atttatttctgaaaatacttatttacgttatcttaatgttctggtcaatattcgtgattcttttgttaccgggat

SEQ ID NO: 458209 - DNA, 75 bp, synthetic construct
  source 1..75: mol_type = other DNA
ttgagaataactcactggcgcatgtactggcagcagcggaagcgaacaaagcagggactgcagagaaatggcagg

SEQ ID NO: 458210 - DNA, 75 bp, synthetic construct
  source 1..75: mol_type = other DNA
caaagttcttcaggggcaactcgataagttcattaatccaaactggaagaattgggagtgggttgatgttggtat

SEQ ID NO: 458211 - DNA, 75 bp, synthetic construct
  source 1..75: mol_type = other DNA
acatcctgaacgttggagcaagcatctacgtaaattggactacatatcagaagtctacctgaatccggaaaaaga

SEQ ID NO: 458212 - DNA, 75 bp, synthetic construct
  source 1..75: mol_type = other DNA
gctgcgttactaccagggcaaggaaacagagattgccgctgccgttgaatggtggaatgagttcggcggtgatgg

SEQ ID NO: 458213 - DNA, 75 bp, synthetic construct
  source 1..75: mol_type = other DNA
cagaggtgcgtcaggacatgcagcagcgggttgatgcggcgcaccggatgtttgccgaaaaagtggcgatgtata

SEQ ID NO: 458214 - DNA, 75 bp, synthetic construct
  source 1..75: mol_type = other DNA
cctggcgtcggttacaacaaaaaatatggaatgtcggtccctgagcatccggctaaccggattttttatgtcaga

SEQ ID NO: 458215 - DNA, 75 bp, synthetic construct
  source 1..75: mol_type = other DNA
gctggcgaatatcaaatatctttattacaacccgagcgtggcgaaaactcgtggtgattcaacgccgtcatcacc

SEQ ID NO: 458216 - DNA, 75 bp, synthetic construct
  source 1..75: mol_type = other DNA
cgctgtcgcgtaaaccggaggagacctggtacgggtgggacggtgacaggctgaccactgtacagacccaacaga

SEQ ID NO: 458217 - DNA, 75 bp, synthetic construct
  source 1..75: mol_type = other DNA
atggctacatacggcggtcagtttacgcttacggttccacaacagcaggtgcagcttgatgctcccggaatgctg

SEQ ID NO: 458218 - DNA, 75 bp, synthetic construct
  source 1..75: mol_type = other DNA
aaggggcagaagcgcaggctgaaaaactggcggcctgcccgggaatgaccgtggagaacgcccgggctgtgctgg

SEQ ID NO: 458219 - DNA, 75 bp, synthetic construct
  source 1..75: mol_type = other DNA
ccattagcggcaatactgttacaggcacgggaacaaacttttccgcgccgctctctctcatccgtgtggggtgca

SEQ ID NO: 458220 - DNA, 75 bp, synthetic construct
  source 1..75: mol_type = other DNA
gttagatcttgcgcaaggtggcacagcaggacgtaatgcagaacaagcgcgcacaaaccttgaagttatgcatga

SEQ ID NO: 458221 - DNA, 75 bp, synthetic construct
  source 1..75: mol_type = other DNA
atacagacctattatttgtttaacaatatggcaattatttatagaaggtcttatggcgagcaaggttggagcgca

SEQ ID NO: 458222 - DNA, 75 bp, synthetic construct
  source 1..75: mol_type = other DNA
gacggtgggcgtggctgcggcttttgcggttaaccccattgttggcgcggcagtgtttgccgccagtaaagtgct

SEQ ID NO: 458223 - DNA, 75 bp, synthetic construct
  source 1..75: mol_type = other DNA
ttttgcacagcagggcggtttccaagggcctgaagcagagcgttcaacagtagcgcaggcaaaagaactgaagga

SEQ ID NO: 458224 - DNA, 75 bp, synthetic construct
  source 1..75: mol_type = other DNA
cgcttacaggcgagtattccggtttttattaccaggggttaaacgcaaatgccacgactgcgcgcggttatcctg

SEQ ID NO: 458225 - DNA, 75 bp, synthetic construct
  source 1..75: mol_type = other DNA
ctgaaaacaaaagcatcatgattggcttcagactgacaaatgaagagtattcaaaatttgcatctgttatagaag

SEQ ID NO: 458226 - DNA, 75 bp, synthetic construct
  source 1..75: mol_type = other DNA
ggcgcaatcgttgccgtcatcggtctggagctggcgggcgtagctgccggtatggcgggggttttcccccccggg

SEQ ID NO: 458227 - DNA, 75 bp, synthetic construct
  source 1..75: mol_type = other DNA
ggcgcaatcgttgccgtcatcggtctggagctggcgggcgtagctgccgggatggcggggtttactcccggctga

SEQ ID NO: 458228 - DNA, 75 bp, synthetic construct
  source 1..75: mol_type = other DNA
gtactgttggcaacgcttattcatcattttggcgaacaaattattgatttcgtcgcgggtgatgccacgacataa

SEQ ID NO: 458229 - DNA, 75 bp, synthetic construct
  source 1..75: mol_type = other DNA
ccatcgggtgtggaggtaacaacgccgacagcagaagaacagctcgccggaatggtccgggacgttattgatgcg

SEQ ID NO: 458230 - DNA, 75 bp, synthetic construct
  source 1..75: mol_type = other DNA
aatggtccgtgaagttattgatgcggcctgcaagccagccctggaaaaactggaagaaatatccgggcggctggc

SEQ ID NO: 458231 - DNA, 75 bp, synthetic construct
  source 1..75: mol_type = other DNA
cgcgataagttctggcgtaaagacagcccgaatcatcaggctattccagagcttagcggtaaggttgtcggtctg

SEQ ID NO: 458232 - DNA, 75 bp, synthetic construct
  source 1..75: mol_type = other DNA
ttgctctcacagatgcaatctgcacgggcacgatcatgctggcgcatggacatccagcctgccggtttcagatct

SEQ ID NO: 458233 - DNA, 75 bp, synthetic construct
  source 1..75: mol_type = other DNA
ccgtcaacgaaagtcgtcgacctgaaaggtaagcgggtattgcctggcctgattgataaccacacgcatgtggtg

SEQ ID NO: 458234 - DNA, 75 bp, synthetic construct
  source 1..75: mol_type = other DNA
ttattctgcatcatggtctgttcaccacccttgataaaagcaatccaaccgcaagtgctgtcgccattaaagacg

SEQ ID NO: 458235 - DNA, 75 bp, synthetic construct
  source 1..75: mol_type = other DNA
aacgcgatggcggagagcatcaatggtctttacaaagcggaggtaatacaccgtaagagctggaaaaccgtgcag

SEQ ID NO: 458236 - DNA, 75 bp, synthetic construct
  source 1..75: mol_type = other DNA
actgtggcacgtctcatggcagttatgggacttgccggtgttctccggggtaaaaaggtccgcactaccgtcagc

SEQ ID NO: 458237 - DNA, 75 bp, synthetic construct
  source 1..75: mol_type = other DNA
gcgtaaagtctggcgccagttgttacgcgaaggtatcagggtggccagatgtacagtggcccgcctcatggcggt

SEQ ID NO: 458238 - DNA, 75 bp, synthetic construct
  source 1..75: mol_type = other DNA
gttgaagtcacccttgaaaatggcgtgaaacaaacgttaatcgtcagttttgtcggcgactcgagtaccgcacag

SEQ ID NO: 458239 - DNA, 75 bp, synthetic construct
  source 1..75: mol_type = other DNA
aactaacgatacccctacaggcgattaatacagaatcgcgaactatcgatgtagcgttttgctcagaaacaccag

SEQ ID NO: 458240 - DNA, 75 bp, synthetic construct
  source 1..75: mol_type = other DNA
atgaacatgcataagtctctggttgccgtgctcggccttatcctgatttcatccacggcaagtgctgcaacctgt

SEQ ID NO: 458241 - DNA, 75 bp, synthetic construct
  source 1..75: mol_type = other DNA
tagtaaagcgcttggtagtacaagaaataaaaaaattggctatattggtcgtatctgtaaagaaaaaggtgtaga

SEQ ID NO: 458242 - DNA, 75 bp, synthetic construct
  source 1..75: mol_type = other DNA
aggctgtagcttccacatcaaaggtggagagaaaacatgtgatatcactgcgattgactgatgaggaatatcagt

SEQ ID NO: 458243 - DNA, 75 bp, synthetic construct
  source 1..75: mol_type = other DNA
ctgctgctgtagcaatggttgagggataccgtgcagatgcaatgtggctaaatgacgaagtacaggtagtcgttt

SEQ ID NO: 458244 - DNA, 75 bp, synthetic construct
  source 1..75: mol_type = other DNA
cgaaacccctacaggcgattaatacagaatcgcgtaccatcgaagtagcgttttgttcagaaacccctgtagaac

SEQ ID NO: 458245 - DNA, 75 bp, synthetic construct
  source 1..75: mol_type = other DNA
ctagttaatgtcggcgcacaaatagccgccatgacaccgggcgagctggcggcctggcttgcggagaatcttcag

SEQ ID NO: 458246 - DNA, 75 bp, synthetic construct
  source 1..75: mol_type = other DNA
tgttggacatgtgcctgtacgatggttttaacggtaatgccatcagttatgaaatcatgctcaaagatgaagggc

SEQ ID NO: 458247 - DNA, 75 bp, synthetic construct
  source 1..75: mol_type = other DNA
ccggagactgaaactgagcacccgtcgtgcccgggcggctcagtttcgtgatggctgggttcaggggattcgtca

SEQ ID NO: 458248 - DNA, 75 bp, synthetic construct
  source 1..75: mol_type = other DNA
tcctgataatcccaattcattatcagacagcataaaattgttggcatatgatgatgaagtctatgaaaaaatgag

SEQ ID NO: 458249 - DNA, 75 bp, synthetic construct
  source 1..75: mol_type = other DNA
caagttatagatttaataatttccccaaaagctacagataatccagttttattgaaactggaggctcctggtcat

SEQ ID NO: 458250 - DNA, 75 bp, synthetic construct
  source 1..75: mol_type = other DNA
agtaaaaaagaaagtgttagtcagccaataaaaaagacttcattcctgaaaaatattattctgaaaatagtcttt

SEQ ID NO: 458251 - DNA, 75 bp, synthetic construct
  source 1..75: mol_type = other DNA
acacaccagacggtttaaatgagccggttaccgaaatacgcgggttgccggtgtctgaacgcctggcggtcaggc

SEQ ID NO: 458252 - DNA, 75 bp, synthetic construct
  source 1..75: mol_type = other DNA
gaaagaaaaactttatgttcttcggcagcgatcacggcggcgagcgtggagcactgttgtacgggctgatcggca

SEQ ID NO: 458253 - DNA, 75 bp, synthetic construct
  source 1..75: mol_type = other DNA
tggtacggctgggacggcgaccgcctgaccacaatacagaacgacagaacccgcatccagacgatttatcagccg

SEQ ID NO: 458254 - DNA, 75 bp, synthetic construct
  source 1..75: mol_type = other DNA
gtaaacgtttctcatatagcctgagtgatggaattactgctgtaaaaaaaaccggcataccgatggtggtatttg

SEQ ID NO: 458255 - DNA, 75 bp, synthetic construct
  source 1..75: mol_type = other DNA
actatctaaagcaaaaatagggatatctctttcagtgctggcgcttgtattttatcatcttatcaaaaagaaaaa

SEQ ID NO: 458256 - DNA, 75 bp, synthetic construct
  source 1..75: mol_type = other DNA
atacggcgaaagcgttcacctatctgctgaagcaatgggacgccctgaacgaatactgccgcaatggctgggtgg

SEQ ID NO: 458257 - DNA, 75 bp, synthetic construct
  source 1..75: mol_type = other DNA
atgatatggaatactctggtattgtctgtaaagatactaatggaaaatattttgcatctaaggcagaaactgata

SEQ ID NO: 458258 - DNA, 75 bp, synthetic construct
  source 1..75: mol_type = other DNA
ttgacccaagatagcacgcaagaacaaattaaatgcaatgattttaaccgccaattaagaaagtttatcaatgag

SEQ ID NO: 458259 - DNA, 75 bp, synthetic construct
  source 1..75: mol_type = other DNA
aaaccgcgtggcattgaacagcgactatttctccaaagccaatattgaactggaaaacaccgtcatcaacctggt

SEQ ID NO: 458260 - DNA, 75 bp, synthetic construct
  source 1..75: mol_type = other DNA
caataaatatgctcgcgattttcactatttttccagtgcattcgcaattaacagggaggatttactaaaaaacta

SEQ ID NO: 458261 - DNA, 75 bp, synthetic construct
  source 1..75: mol_type = other DNA
gggaatatgatgaattgggccgtctgattcaggaaactgcccctgacggcgatatcacccgctaccgttatgata

SEQ ID NO: 458262 - DNA, 75 bp, synthetic construct
  source 1..75: mol_type = other DNA
gccgttcatcctctcccgcacctacagcagttaccggacaaaaacgcccgcgccggtggggagcctcggccccgg

SEQ ID NO: 458263 - DNA, 75 bp, synthetic construct
  source 1..75: mol_type = other DNA
caaggtgagcgaggtgcaacggggcccgtggggccgcagggggcgacggggccaaagggcgataaaggcgagaga

SEQ ID NO: 458264 - DNA, 75 bp, synthetic construct
  source 1..75: mol_type = other DNA
atcgtaatacctaaattagcagaagccaacagcattggtcttgataattcattaataacattcgccccattaggt

SEQ ID NO: 458265 - DNA, 75 bp, synthetic construct
  source 1..75: mol_type = other DNA
gatcgaaaagtttttcatctgggcctatagctgccgcttaaccagccacgctgtgtatatcgaaaccatggataa

SEQ ID NO: 458266 - DNA, 75 bp, synthetic construct
  source 1..75: mol_type = other DNA
tcctttatcagaccgtgcacagcagattcttaacgcgctcaatagctatggggcacggcatcgaacgggcgatcg

SEQ ID NO: 458267 - DNA, 75 bp, synthetic construct
  source 1..75: mol_type = other DNA
agacaatgttgatactttcacttatgtaaaagaagcagtgaaggcatatccagaaatttattttgcaaaagttgt

SEQ ID NO: 458268 - DNA, 75 bp, synthetic construct
  source 1..75: mol_type = other DNA
ccaattgcttaaagtcggatgtgatgaagatatagtacttcaaacagaaggaggcaaactcactttaaaagaact

SEQ ID NO: 458269 - DNA, 75 bp, synthetic construct
  source 1..75: mol_type = other DNA
attgatatcaaatcttttaaagaccacgaacaatattactggtatcgatatttattccttggtagaggcaaaccg

SEQ ID NO: 458270 - DNA, 75 bp, synthetic construct
  source 1..75: mol_type = other DNA
gtgaccccggcccggcaggccctgccggtgagcgggggccgaaaggtgagcgaggtgcaacgggccccgtggggc

SEQ ID NO: 458271 - DNA, 75 bp, synthetic construct
  source 1..75: mol_type = other DNA
gggccaaaaggcgataccggcgagcgtgggccaaagggtgagcgtggtgaggcaggcccacagggggtacagggg

SEQ ID NO: 458272 - DNA, 75 bp, synthetic construct
  source 1..75: mol_type = other DNA
gagacacacataccatctatttcccgatagcttttccgtcagcggcgctgaatgtcattgtatcaccggtaggtt

SEQ ID NO: 458273 - DNA, 75 bp, synthetic construct
  source 1..75: mol_type = other DNA
aaggagaatacgccaaagccgtcgaaagtttgcaacgcgtgatatcccaggacagagaactggtcagcgaaacgc

SEQ ID NO: 458274 - DNA, 75 bp, synthetic construct
  source 1..75: mol_type = other DNA
cctgagaggatgcgccattgaagtgatggggtcatgggagaatgcgatagtccggatcagcgcaggtgatgaccg

SEQ ID NO: 458275 - DNA, 75 bp, synthetic construct
  source 1..75: mol_type = other DNA
cgcagggggcgacggggccaaagggcgataaaggcgagagaggagcgcaggggcctgcgggtccggcagggaagt

SEQ ID NO: 458276 - DNA, 75 bp, synthetic construct
  source 1..75: mol_type = other DNA
gtcagcagcttgacgtacgcgacgaaatctcatttgaaagcgcactgcgcacgttgatcccgctcagtctgctgt

SEQ ID NO: 458277 - DNA, 75 bp, synthetic construct
  source 1..75: mol_type = other DNA
ttatcccgccggtcaacgcgcggcttatcgggcgttatcgcgattatcgtcgtcacggcgcgtcggctgtttttg

SEQ ID NO: 458278 - DNA, 75 bp, synthetic construct
  source 1..75: mol_type = other DNA
gcttgactttcccaccctagccgaaatgaaaggatgggtacttgctcatgcacttattcttccacgtaaggagaa

SEQ ID NO: 458279 - DNA, 75 bp, synthetic construct
  source 1..75: mol_type = other DNA
taccaaatgtttttatcagaccatacacgcaaccgggaacctttataattacagcgtggaactaggtgatgctgc

SEQ ID NO: 458280 - DNA, 75 bp, synthetic construct
  source 1..75: mol_type = other DNA
gaaaggttaataggggaatggctcagtttatccagttccccgttaaatctaaagtatcctgaactaaaatataat

SEQ ID NO: 458281 - DNA, 75 bp, synthetic construct
  source 1..75: mol_type = other DNA
ttattaatttcagataattttgcttatgcggttatttataatacaaagatttgtgatctgatttatccagaggag

SEQ ID NO: 458282 - DNA, 75 bp, synthetic construct
  source 1..75: mol_type = other DNA
tccctgcaagatgattaacggagaacgaatatctacccgttctccgtcaaaaaccattattccggcatcgcctca

SEQ ID NO: 458283 - DNA, 75 bp, synthetic construct
  source 1..75: mol_type = other DNA
aatctgggactgaaaagcgccgctacaatggagccacagagtgatatttatgaccggacagaaggccgactggcg

SEQ ID NO: 458284 - DNA, 75 bp, synthetic construct
  source 1..75: mol_type = other DNA
ggaacatacgtttcccggatattactggagtctgacctcctatccgtggctgaaaacgagtgattatattctggg

SEQ ID NO: 458285 - DNA, 75 bp, synthetic construct
  source 1..75: mol_type = other DNA
aatgacccgaactttgcgacaaccgtcactaacgcgctggcgggtaaacaaccactcagtgatgtgttaacggca

SEQ ID NO: 458286 - DNA, 75 bp, synthetic construct
  source 1..75: mol_type = other DNA
ttatttctcagttatcgaaaaaggtaaaagcatcaagatcactcttgaccagcctgcaggtgcggatgctatcaa

SEQ ID NO: 458287 - DNA, 75 bp, synthetic construct
  source 1..75: mol_type = other DNA
aaacttaccctgttaataatgtaagagctaaagaccttgccccggtaattgatgtatttcttaaaggggataaca

SEQ ID NO: 458288 - DNA, 75 bp, synthetic construct
  source 1..75: mol_type = other DNA
gcgcacaccatgctggaaaagcggttagcccggcgatgcacacttttattcagtgtgttgaagagtgttttttgc

SEQ ID NO: 458289 - DNA, 75 bp, synthetic construct
  source 1..75: mol_type = other DNA
atggcgcgctaactggctatggcgaacttgttgaagtggatgataaattgggcgtagagattcattcttggggtg

SEQ ID NO: 458290 - DNA, 75 bp, synthetic construct
  source 1..75: mol_type = other DNA
ttcaagccttaccccattttcgttttatccagcagtcactgcttgcgtttgttccggctgacagcccaccggaat

SEQ ID NO: 458291 - DNA, 75 bp, synthetic construct
  source 1..75: mol_type = other DNA
ctccctgcgtaatcgcacccgccagtccggttccttcgccatcaggcgcattgtctttctggcgactgattcagg

SEQ ID NO: 458292 - DNA, 75 bp, synthetic construct
  source 1..75: mol_type = other DNA
gataatcagccgtctggttgcgggtgaaacgttgagcgtgcgcaaactggcggctgagtttggcgtgtcagtgcg

SEQ ID NO: 458293 - DNA, 75 bp, synthetic construct
  source 1..75: mol_type = other DNA
acacagttattcagggaggtgattgaatccctgcatccacttgctctggaaaaaagtattgatattggcgtactg

SEQ ID NO: 458294 - DNA, 75 bp, synthetic construct
  source 1..75: mol_type = other DNA
ttcgatgtgacacatgctcgtgcgaattttagccatgatgatacagaaacgggtcagtcatatcgctttctctat

SEQ ID NO: 458295 - DNA, 75 bp, synthetic construct
  source 1..75: mol_type = other DNA
ggctggcgtatgcaggagagcgtcttgcatcactggtcagtgccgcgtctgaacatgttcagaaggataatcgct

SEQ ID NO: 458296 - DNA, 75 bp, synthetic construct
  source 1..75: mol_type = other DNA
atggcgcgctaactggctatggcgaacttgttgaagtggatgataaattgggcgtagagattcattcttggttat

SEQ ID NO: 458297 - DNA, 75 bp, synthetic construct
  source 1..75: mol_type = other DNA
gagatttatgatgaaaatgacgatcagatgattaatagttttgaagacttgcctgtaaaaagtttgggcatgata

SEQ ID NO: 458298 - DNA, 75 bp, synthetic construct
  source 1..75: mol_type = other DNA
tacgattatgttagcttcgaaaatatagatgaaatattacgtcttctgctgtggcttgaagatgtggagaatgct

SEQ ID NO: 458299 - DNA, 75 bp, synthetic construct
  source 1..75: mol_type = other DNA
gaacggtttggatcatcgctatcgccaccgtggaaaacatattggtaagcacgatcttgaaagcgacctgttctt

SEQ ID NO: 458300 - DNA, 75 bp, synthetic construct
  source 1..75: mol_type = other DNA
gtggcgacgggctcaattgcccccattctgacgctgtatgtccgcgaactggcgggtaacgtcagtaacgtcgcc

SEQ ID NO: 458301 - DNA, 75 bp, synthetic construct
  source 1..75: mol_type = other DNA
tggctgcggctattctgacagtgattgctgcctgtgtcagtggtttacgtatcactcagccacgatccagggcat

SEQ ID NO: 458302 - DNA, 75 bp, synthetic construct
  source 1..75: mol_type = other DNA
ataatgaattaggctcagctgtgctgcatattcatgcctacggtcttgtagctaaatctaatacagctgataatg

SEQ ID NO: 458303 - DNA, 75 bp, synthetic construct
  source 1..75: mol_type = other DNA
tgttagatgatacgagactccgcagtaaattactcataaatgttattcatcttcttcctcttacaacaacccgca

SEQ ID NO: 458304 - DNA, 75 bp, synthetic construct
  source 1..75: mol_type = other DNA
tagtggtccctgcctattgtgaaccatcgaaagttaagcgtttcatggatgccatactgaatattgattatccag

SEQ ID NO: 458305 - DNA, 75 bp, synthetic construct
  source 1..75: mol_type = other DNA
tttggcattactccgcgacacccttctccccaaactcctctcgggtgaaatcaccctaccggaagccgagctggc

SEQ ID NO: 458306 - DNA, 75 bp, synthetic construct
  source 1..75: mol_type = other DNA
ataaaacagcgggcaattcgccttcaggcactgagtctggtgcagcgttaactgacaaaattgtcagggaggcgt

SEQ ID NO: 458307 - DNA, 75 bp, synthetic construct
  source 1..75: mol_type = other DNA
gcaaattatggcattgtcgttttgatccgtggcgagatttacttatctcagtgggagacgttatcgatcgtgggt

SEQ ID NO: 458308 - DNA, 75 bp, synthetic construct
  source 1..75: mol_type = other DNA
atggacatgaaaggagctatagctgaaaatggcatttcagatttcatggaaaatttaatggaagttaattcatgg

SEQ ID NO: 458309 - DNA, 75 bp, synthetic construct
  source 1..75: mol_type = other DNA
tgctggatttaatgaaatggagtcattgcagcattcagcgctggcgggaatggatgagggatggattaaatacca

SEQ ID NO: 458310 - DNA, 75 bp, synthetic construct
  source 1..75: mol_type = other DNA
tcctctgcgacaagaagagtatggcggctggcttgcggtcggtactgttggacatattcagggaggcaatcgtgg

SEQ ID NO: 458311 - DNA, 75 bp, synthetic construct
  source 1..75: mol_type = other DNA
ttttccgcctgcaacagcaaataaaacagtgggacgatgactactggaaggaaggaaaaagtgaggtggaagacg

SEQ ID NO: 458312 - DNA, 75 bp, synthetic construct
  source 1..75: mol_type = other DNA
tctgggtgcccgccgccatcttcctgttcgccacccatcagctttggcaagggctgtttattgtcggcttcttcg

SEQ ID NO: 458313 - DNA, 75 bp, synthetic construct
  source 1..75: mol_type = other DNA
aatacacttaatgatgtagttcaaaatatcaggagttggctaaaagaaaatgaaaatatggtgaaagctattaag

SEQ ID NO: 458314 - DNA, 75 bp, synthetic construct
  source 1..75: mol_type = other DNA
gtgcggcggcaaagcagctcttaatcagcatttatttaaagtctcatctaccaagtaccctaaatggctttacta

SEQ ID NO: 458315 - DNA, 75 bp, synthetic construct
  source 1..75: mol_type = other DNA
acttattgctgctgatgtttttaatgttcagccatgtgaaccaacaaggaaagactttttttctatctgcaataa

SEQ ID NO: 458316 - DNA, 75 bp, synthetic construct
  source 1..75: mol_type = other DNA
atgattgttggcattgaccacttcatgacggcctcggctaagtattgcgatatcctgttgcccgacctgatgcca

SEQ ID NO: 458317 - DNA, 75 bp, synthetic construct
  source 1..75: mol_type = other DNA
cgctcggctatctcccctgatgcacgggcatatcaatatgttgggccattatacttcacgttgccagaggatatt

SEQ ID NO: 458318 - DNA, 75 bp, synthetic construct
  source 1..75: mol_type = other DNA
tgacaaggtaccaagcagaaaatagggttaagatatttgtagccataaatatcatatatacgttagcctattttt

SEQ ID NO: 458319 - DNA, 75 bp, synthetic construct
  source 1..75: mol_type = other DNA
agtgtcagtacacccgcctcgggttttttgcagtgatggaaagtgccgggcaacatgctgttcaggttatttccg

SEQ ID NO: 458320 - DNA, 75 bp, synthetic construct
  source 1..75: mol_type = other DNA
ggtattccgcttactcaggactggagtgaagacagcacgcaaccacgctgctgcagcattccacgtatgccttaa

SEQ ID NO: 458321 - DNA, 75 bp, synthetic construct
  source 1..75: mol_type = other DNA
tcgcggggtactggggaggtggtgaggttgcctccgcagatggtatgcgttttgtcacaccggttaaaacggtta

SEQ ID NO: 458322 - DNA, 75 bp, synthetic construct
  source 1..75: mol_type = other DNA
aggcgattcgtttagtacgcaggagataagtcatggaagaaaagaaacacgtttgcatattgtcagtaacgtaac

SEQ ID NO: 458323 - DNA, 75 bp, synthetic construct
  source 1..75: mol_type = other DNA
gcccggtggggcaggtgcttatcagcagtactgtaatggagttccggaagcataaccgtgtggtggatgctgtgc

SEQ ID NO: 458324 - DNA, 75 bp, synthetic construct
  source 1..75: mol_type = other DNA
tgggatgagatgatgcgaaccgccggttcgctgaaactgggcaccattcatgcttcagaactcattcgctctttg

SEQ ID NO: 458325 - DNA, 75 bp, synthetic construct
  source 1..75: mol_type = other DNA
agattccatttttgtgctggaaggccttctggagcagcagacagggctgaatccggttgagatcatgacagacac

SEQ ID NO: 458326 - DNA, 75 bp, synthetic construct
  source 1..75: mol_type = other DNA
tacaacttcgtctccgatcaatactccggtttccatggcattgtagttcccgggacgcttcgtgattccatcttt

SEQ ID NO: 458327 - DNA, 75 bp, synthetic construct
  source 1..75: mol_type = other DNA
ttcctcttgatgaagagtatagcttgaattttgctatgcttgccattgctatatctatattatctcatagcaaaa

SEQ ID NO: 458328 - DNA, 75 bp, synthetic construct
  source 1..75: mol_type = other DNA
taaaaaataacaacgcctcagagtatgaactaacggtagttgatgattacgggaataatatcaatagtaaaatcg

SEQ ID NO: 458329 - DNA, 75 bp, synthetic construct
  source 1..75: mol_type = other DNA
taataatgaaagtatattactacctccattttctaataacgacattacattaaaaaataacaacgcctcagagta

SEQ ID NO: 458330 - DNA, 75 bp, synthetic construct
  source 1..75: mol_type = other DNA
gatattattgattttaggatcaatgaacaaagaaacctaccttcagaaattgctacaactctggcgagcgccgct

SEQ ID NO: 458331 - DNA, 75 bp, synthetic construct
  source 1..75: mol_type = other DNA
caatcagtgcttcaactatcctcggtaactgggctgcgccgctggtttctgcattcaccgcctttgcgtgcctga

SEQ ID NO: 458332 - DNA, 75 bp, synthetic construct
  source 1..75: mol_type = other DNA
taactggattggtaacctggcgattggtattaccgctgtatcttatctttccaccttcttcccagtattaaatga

SEQ ID NO: 458333 - DNA, 75 bp, synthetic construct
  source 1..75: mol_type = other DNA
ccggcatttatagccagccagatggggcatgaaactgcgcagatggtgtatgaaatttacggtatgtggattgat

SEQ ID NO: 458334 - DNA, 75 bp, synthetic construct
  source 1..75: mol_type = other DNA
gaaagaatttatgtattactttgggtttagttagtcttctatctgggggggctaacgctgcgttacaaaaaccta

SEQ ID NO: 458335 - DNA, 75 bp, synthetic construct
  source 1..75: mol_type = other DNA
gggctcaacagttgacgaggtagcggtatcaatcggaaatcaatttcaggaagaagtgggagtcaagacaataac

SEQ ID NO: 458336 - DNA, 75 bp, synthetic construct
  source 1..75: mol_type = other DNA
acaacacatgcaccatctttacttaatcgggtagaacctgagaatataagatatttccgtcttaatgataataaa

SEQ ID NO: 458337 - DNA, 75 bp, synthetic construct
  source 1..75: mol_type = other DNA
gatgtagggattataggagcaattcgagttcgacctataaccctgaacgcaataattttattaatgagttacaca

SEQ ID NO: 458338 - DNA, 75 bp, synthetic construct
  source 1..75: mol_type = other DNA
tgtggattgcctgtgctgtgctggcggggctggcgctgacgattggtctggtgctgtatgcgctgcgctcgaata

SEQ ID NO: 458339 - DNA, 75 bp, synthetic construct
  source 1..75: mol_type = other DNA
atacgccgccagaagtcgaaaaagccatggaagcgaatcaccgtcgcccggcgagtgtttataaggatccagcat

SEQ ID NO: 458340 - DNA, 75 bp, synthetic construct
  source 1..75: mol_type = other DNA
ccgtcattagattctgttccggcatgggtatatggtgtgacagggaaaataatatctgaattgtctgaacgttga

SEQ ID NO: 458341 - DNA, 75 bp, synthetic construct
  source 1..75: mol_type = other DNA
aaaccatgaccacagacccggttacagatgaggtgaataaggctgcaaatgtggccgcccatgctgtggtgaatg

SEQ ID NO: 458342 - DNA, 75 bp, synthetic construct
  source 1..75: mol_type = other DNA
aatctgacaccggaacaaacacaggctgggctggataagatagcgaaaggtgatatgccggacagtaccaatatc

SEQ ID NO: 458343 - DNA, 75 bp, synthetic construct
  source 1..75: mol_type = other DNA
ggctggtttactatcggatgacaatgttgtgctcggttcagggactaccctctctttgttgaatgaacaatcgac

SEQ ID NO: 458344 - DNA, 75 bp, synthetic construct
  source 1..75: mol_type = other DNA
tgtcgcgagtggagccatgtcaaaagagactgcagccaacttggttatagagttgagaagcaaaaatttacagcc

SEQ ID NO: 458345 - DNA, 75 bp, synthetic construct
  source 1..75: mol_type = other DNA
cctctgttcaccgataagttaaacaaggttgaagaaggactaattctttacggtgggatctgttataactcagac

SEQ ID NO: 458346 - DNA, 75 bp, synthetic construct
  source 1..75: mol_type = other DNA
aaatcagacatcacaataaaaaaaatagagttttttgaaaaactaggaaaaatgaaaatttctcttgatgctaac

SEQ ID NO: 458347 - DNA, 75 bp, synthetic construct
  source 1..75: mol_type = other DNA
tggagtttggaaaaacgctggatgggcacgactggcaggttacagcgaaggcaggtttaagttatcaatttgacc

SEQ ID NO: 458348 - DNA, 75 bp, synthetic construct
  source 1..75: mol_type = other DNA
ctggggtaaaaaagctcctcgaagaactccgctcggcgaaacggttcaatgcaaccattgaacagctttttgaac

SEQ ID NO: 458349 - DNA, 75 bp, synthetic construct
  source 1..75: mol_type = other DNA
ctgatgaggctgaacttgccggggctttcgaagacgacgcactgagtatgcgtgacgcatacgacagtgcttttg

SEQ ID NO: 458350 - DNA, 75 bp, synthetic construct
  source 1..75: mol_type = other DNA
gactttccacaaattaaatgcttttgatgacggtgcaattattacaagtaatggcgggttggccagactgacact

SEQ ID NO: 458351 - DNA, 75 bp, synthetic construct
  source 1..75: mol_type = other DNA
ggcctgaccgttgagaaatcagcatttggtaagtacaacgtcgatgatgctatcaatgcgaatatccgctattca

SEQ ID NO: 458352 - DNA, 75 bp, synthetic construct
  source 1..75: mol_type = other DNA
tgatccacagtatgtcgtcagtgtgaagcataatggtagctatagtagtgtacggtttggtacgagtaattataa

SEQ ID NO: 458353 - DNA, 75 bp, synthetic construct
  source 1..75: mol_type = other DNA
agacggcaatacggcgtggagcgcggaatatgatgaatggggcaaccagcttaatgaggagaacccgcatcatgt

SEQ ID NO: 458354 - DNA, 75 bp, synthetic construct
  source 1..75: mol_type = other DNA
tgtggtgcaaaacacattgatggtacgcatcacccagacatcctccaccattctcatcgccatgctgctgaactc

SEQ ID NO: 458355 - DNA, 75 bp, synthetic construct
  source 1..75: mol_type = other DNA
gtatgccttgcatacggcggtacgtaccgcgccggatggtcgagctgccccccttaaatacgccgccgccatcga

SEQ ID NO: 458356 - DNA, 75 bp, synthetic construct
  source 1..75: mol_type = other DNA
agtgcatgaagtttaatccgcgtatgttctgctatgaccgtgaccggggaatggagccgtttattcgcagtgtcg

SEQ ID NO: 458357 - DNA, 75 bp, synthetic construct
  source 1..75: mol_type = other DNA
agatcatcagtattctccgcgaagcggaagccggagtttctgcccgcgagctctgccgtaagcacgccatttcag

SEQ ID NO: 458358 - DNA, 75 bp, synthetic construct
  source 1..75: mol_type = other DNA
atgaagaagcgtttttccgacgaacagatcatcagtattctccgcgaggctgaagccggggtttctgcccgtgag

SEQ ID NO: 458359 - DNA, 75 bp, synthetic construct
  source 1..75: mol_type = other DNA
atgaagaagcgtttttccgacgaacagatcatatgtattctccgcgaggccgaagccggcgtttctgcccgtgag

SEQ ID NO: 458360 - DNA, 75 bp, synthetic construct
  source 1..75: mol_type = other DNA
acgttaaagaccatgtccttactggatacatttaaaattgcttttgcgtcggctctgcctgcacatgccactggt

SEQ ID NO: 458361 - DNA, 75 bp, synthetic construct
  source 1..75: mol_type = other DNA
ggacactaaccacgagccgacgatcaatctctatcgccgtgcccgcgatctgaaaggcattaaaaagatcctgat

SEQ ID NO: 458362 - DNA, 75 bp, synthetic construct
  source 1..75: mol_type = other DNA
gacacctactcgaaacaggcaggtaaagagcagtatctgatcccatatttcatctccgcgcaccccggtacacgc

SEQ ID NO: 458363 - DNA, 75 bp, synthetic construct
  source 1..75: mol_type = other DNA
taaagaccttaatacgctggtcaagagcttcggaacagaccatgtagagctgtggacgcatgaatatcaccatga

SEQ ID NO: 458364 - DNA, 75 bp, synthetic construct
  source 1..75: mol_type = other DNA
tggcacagctggcgacggcgttcgaacgtagcggactgcataacgtcgataacgtctccacgatttcgcgctcga

SEQ ID NO: 458365 - DNA, 75 bp, synthetic construct
  source 1..75: mol_type = other DNA
cctgagatggatgaggatatgattgttccagtgtttaaaaagttttctccatatcgtgcgaatctgaataaggac

SEQ ID NO: 458366 - DNA, 75 bp, synthetic construct
  source 1..75: mol_type = other DNA
gagccgccaacggagaactacgcagacctgagaaatgcagtaaatcgcacttacgcagacatggggctgagcaaa

SEQ ID NO: 458367 - DNA, 75 bp, synthetic construct
  source 1..75: mol_type = other DNA
cgaagacggttaaggattatctgaaactgtgccaagggctgttctctacatacctaacatctgaaatggatgtgc

SEQ ID NO: 458368 - DNA, 75 bp, synthetic construct
  source 1..75: mol_type = other DNA
ccaagatggagccaacccaactattggatatagtgcagaaaatgaagaaattagaacaaaaagacattgataact

SEQ ID NO: 458369 - DNA, 75 bp, synthetic construct
  source 1..75: mol_type = other DNA
gattttaaaaacaggcgcattgttcacagcttacgccacactttcgtaactgaaattcaggcaaaacacaccctc

SEQ ID NO: 458370 - DNA, 75 bp, synthetic construct
  source 1..75: mol_type = other DNA
tccacagtttgcgccatacattcatcactgaagcagcgaaaacaaatactttaccacttgtacaacggactgtcg

SEQ ID NO: 458371 - DNA, 75 bp, synthetic construct
  source 1..75: mol_type = other DNA
cgctgcaaattatacggtgcttctgcttcagtctctagatgcacactctgcattttggcggaaggatatttcccg

SEQ ID NO: 458372 - DNA, 75 bp, synthetic construct
  source 1..75: mol_type = other DNA
tcccttatacactccgccgtaatggcatttactatgtctactttcgctttactgaatgtcgttttttccgctgtt

SEQ ID NO: 458373 - DNA, 75 bp, synthetic construct
  source 1..75: mol_type = other DNA
gctctcttcgctgttctgcgccctttctgattcgctgcaaatgctcaccctggcgcgagtaatccagggattcgg

SEQ ID NO: 458374 - DNA, 75 bp, synthetic construct
  source 1..75: mol_type = other DNA
acgtagcggtggagccagtggcatgttaggaacggctcgttgggtcagagtagcggcgcggcactggtggcgctg

SEQ ID NO: 458375 - DNA, 75 bp, synthetic construct
  source 1..75: mol_type = other DNA
ccattattacctccgctccgcgcgaacgtagcggtggggccagtggcatgttagggacggctcgtctattgggtc

SEQ ID NO: 458376 - DNA, 75 bp, synthetic construct
  source 1..75: mol_type = other DNA
catctcagaggataagcctgaaaaaccattgcgctctaaactgaccctatctgaggcatggaaaggttttgtaaa

SEQ ID NO: 458377 - DNA, 75 bp, synthetic construct
  source 1..75: mol_type = other DNA
cccagcagtgtttggacttggatgaagtaccagaagatgatctggtatcctcaaaaaccgtcaaagattacctga

SEQ ID NO: 458378 - DNA, 75 bp, synthetic construct
  source 1..75: mol_type = other DNA
cgccagctttctcttcccgtaccgctgctaccggtggatttactgcgcattccgctgttttcactttctatttgc

SEQ ID NO: 458379 - DNA, 75 bp, synthetic construct
  source 1..75: mol_type = other DNA
atcccgcatccgtatggcgaagatttgccgtgcgcggataacaaaccggtggcaccgaaaaagcaggaagcgaaa

SEQ ID NO: 458380 - DNA, 75 bp, synthetic construct
  source 1..75: mol_type = other DNA
ggccatcccggtggcgggcgtggggcttatccgtccgccgcgtccgccgcagcctccgctggctgaacgggaaat

SEQ ID NO: 458381 - DNA, 75 bp, synthetic construct
  source 1..75: mol_type = other DNA
tgagctggatgattttttagctgcactcgcgccattacacattagatttgatcgccagtgcgttaatccaggtga

SEQ ID NO: 458382 - DNA, 75 bp, synthetic construct
  source 1..75: mol_type = other DNA
gctgacagggcctgggtacctgtttgataatctgtttaatggtgcagagaatgatctaattaaaaaggtttctga

SEQ ID NO: 458383 - DNA, 75 bp, synthetic construct
  source 1..75: mol_type = other DNA
gtgcaaaaacgcggcgcggcagatgccgtattgccgtcgaaactgaccaatattctggcggtaggcggtaacgcg

SEQ ID NO: 458384 - DNA, 75 bp, synthetic construct
  source 1..75: mol_type = other DNA
cgactgcaaacagattataaaggagatggaggagctcagccttaagcaacagcaggaaatgatagctgtctgtgc

SEQ ID NO: 458385 - DNA, 75 bp, synthetic construct
  source 1..75: mol_type = other DNA
aggatgttacactgtggccactcgccatcgaagaagcacgtctgaccgccgcaccgccagatatgcccgccctgc

SEQ ID NO: 458386 - DNA, 75 bp, synthetic construct
  source 1..75: mol_type = other DNA
gcgcaatggtgtatcacggtgagatgatgccccttgatgcaaaacttatcactattactgacccacaatttacaa

SEQ ID NO: 458387 - DNA, 75 bp, synthetic construct
  source 1..75: mol_type = other DNA
taaatatgggatacccgtgtgcgataatgcctgcaatggttggagtatataactacagacgaacaccttacgaca

SEQ ID NO: 458388 - DNA, 75 bp, synthetic construct
  source 1..75: mol_type = other DNA
aatcatgcctgcactggtcgggtattataactggaaaagaactccttatgatcgaccgatttataccacatccac

SEQ ID NO: 458389 - DNA, 75 bp, synthetic construct
  source 1..75: mol_type = other DNA
gatatcgccgtttatctggtggcttcggtacaggaagaatttaatatccgcggcattgttcccgtattacgccgt

SEQ ID NO: 458390 - DNA, 75 bp, synthetic construct
  source 1..75: mol_type = other DNA
tccaggttgagcaggatggtattccctgcgccagtctctctattccttgtcgctatacccattctccggcggaag

SEQ ID NO: 458391 - DNA, 75 bp, synthetic construct
  source 1..75: mol_type = other DNA
gatttttgccctgccaccagaggctactagtggcgtctttcgccagattagggaagaacatcgcactaaagaatc

SEQ ID NO: 458392 - DNA, 75 bp, synthetic construct
  source 1..75: mol_type = other DNA
gagaactattccgcctggcggtacaaacgagaagagggggccgccacggtgtggcgctgcccgctgtacgtgcca

SEQ ID NO: 458393 - DNA, 75 bp, synthetic construct
  source 1..75: mol_type = other DNA
tgcaacagagaaacaacgtcaggaatatcttgcgaaactgcgtgacacgcaggcttacaggaatgaaatggcgaa

SEQ ID NO: 458394 - DNA, 75 bp, synthetic construct
  source 1..75: mol_type = other DNA
gatggttataaagatggcgtattgattgcaggcgcctggtatctggggcctgcggtgtcagtgggtaaagcagtg

SEQ ID NO: 458395 - DNA, 75 bp, synthetic construct
  source 1..75: mol_type = other DNA
aaagggaattcccagcctaaaattgaacaaatcctcaagccagagaaaaactgggaaactgctcgaaacaaggca

SEQ ID NO: 458396 - DNA, 75 bp, synthetic construct
  source 1..75: mol_type = other DNA
tgccgtgcgcggataacaaacctgttgcgccgaaaaagcaggaagcgaaagccgtaaccgtgcagccgccgcgcc

SEQ ID NO: 458397 - DNA, 75 bp, synthetic construct
  source 1..75: mol_type = other DNA
gcgtggaaagatgtaccggtgatcctcggtggtattgaggctagtctgcgccgtaccgcgcattatgattactgg

SEQ ID NO: 458398 - DNA, 75 bp, synthetic construct
  source 1..75: mol_type = other DNA
cgcgcattgatgcaaaaacacggcgaccgctatgtgtggatcaacccgcctgctattccgctttctaccgaagag

SEQ ID NO: 458399 - DNA, 75 bp, synthetic construct
  source 1..75: mol_type = other DNA
cagcagtctgtttgccggactgtatgacctgctcaggatgcaccccgggcaggcaccacgtgaaacagacccggc

SEQ ID NO: 458400 - DNA, 75 bp, synthetic construct
  source 1..75: mol_type = other DNA
ggagccccggaatatgtcaccagagacaccggtcaggctctgagagccgtgattcaggcaggcaaaaatgtcact

SEQ ID NO: 458401 - DNA, 75 bp, synthetic construct
  source 1..75: mol_type = other DNA
gaccagatgcgctacctgatggataacgctgcccgtgcacagaagacgctcggtctgaagtttggtgtggcactg

SEQ ID NO: 458402 - DNA, 75 bp, synthetic construct
  source 1..75: mol_type = other DNA
atgaagtcctgtcaggcgaaaggcggtgactgcggcggtattatcaaaaagtacgaagagttgagtacggcacag

SEQ ID NO: 458403 - DNA, 75 bp, synthetic construct
  source 1..75: mol_type = other DNA
gtacactttgagcctgagaataaagtatctgtagttacaaattcatctggaaaggttgtaacagttaaatatggt

SEQ ID NO: 458404 - DNA, 75 bp, synthetic construct
  source 1..75: mol_type = other DNA
agtggggcttatcagtgacataggcagtcaggtggcggatatcgcgcggacgcagggggaactgaatgcgttgaa

SEQ ID NO: 458405 - DNA, 75 bp, synthetic construct
  source 1..75: mol_type = other DNA
gcaatgggagattggttataaatggtcagaggattgacgtttatgatgacaataatgtccttcgagttaggattg

SEQ ID NO: 458406 - DNA, 75 bp, synthetic construct
  source 1..75: mol_type = other DNA
aattctgagcagttcggcagcactatgccttctcgctcttatttggtgcgtggcctaaaaattcgtgtgccatca

SEQ ID NO: 458407 - DNA, 75 bp, synthetic construct
  source 1..75: mol_type = other DNA
taccgctgtttattgcaggtgcgggtggtaaaaaaagcagcaaaagctccagccgtacaccggttgaagccgacg

SEQ ID NO: 458408 - DNA, 75 bp, synthetic construct
  source 1..75: mol_type = other DNA
acgtctgctggccggacggtggtttgggcctgcgtatgccattcatctgccttttattggctttctggtcagagt

SEQ ID NO: 458409 - DNA, 75 bp, synthetic construct
  source 1..75: mol_type = other DNA
ctgaaagtgaagtcatatctcggtttgatgagtttgccgaagcgattaaatcgctaaaggctgctggtatcagtg

SEQ ID NO: 458410 - DNA, 75 bp, synthetic construct
  source 1..75: mol_type = other DNA
agagtcaaacgggcaaggatattaaggcggctgtagctgaagagacgaaagccagaactgatgctgattccgctt

SEQ ID NO: 458411 - DNA, 75 bp, synthetic construct
  source 1..75: mol_type = other DNA
actggagtctaaagtaaatactgatatttcaaccgctattagagaagagcaacaaacaagagcaacgcaagatga

SEQ ID NO: 458412 - DNA, 75 bp, synthetic construct
  source 1..75: mol_type = other DNA
atgggagattagttatcaatgggcagaggatcgacgtttacgatgacaataatgtactccgggtaagaattggtc

SEQ ID NO: 458413 - DNA, 75 bp, synthetic construct
  source 1..75: mol_type = other DNA
tcaggatattgccggtgcattccgcggcatggtgttttgggctggtggcatggttaatatcatgcaggatagccc

SEQ ID NO: 458414 - DNA, 75 bp, synthetic construct
  source 1..75: mol_type = other DNA
tggttaacatcatgcaggatagcccatcagatccagtaatgatgtttaccaactcgaacgtcaaagatggattgt

SEQ ID NO: 458415 - DNA, 75 bp, synthetic construct
  source 1..75: mol_type = other DNA
ttcggtagaccttgatcacattaatgtttacgcatcccagaccaacaatctggatacagcgaaactgatcgcaga

SEQ ID NO: 458416 - DNA, 75 bp, synthetic construct
  source 1..75: mol_type = other DNA
acctatgcgcgttcgcatcgttaacatcgcgcagggggaaacgccgggtagctttgacatcaccgctgttgagaa

SEQ ID NO: 458417 - DNA, 75 bp, synthetic construct
  source 1..75: mol_type = other DNA
gaagtgttgcagtcaacggtagaggaaagctccgctgccgttgaagaaatgaaaaagacggttgcagaggtcgat

SEQ ID NO: 458418 - DNA, 75 bp, synthetic construct
  source 1..75: mol_type = other DNA
agaccattcagggtaaaggtctggccactgagtctctgcaggatgtggagatgtttcagcagtacggttttacat

SEQ ID NO: 458419 - DNA, 75 bp, synthetic construct
  source 1..75: mol_type = other DNA
atgtttcagcagtacggttttacatccaacccgcccagggggactaaagccattgtgctcccgcttaacgggcgc

SEQ ID NO: 458420 - DNA, 75 bp, synthetic construct
  source 1..75: mol_type = other DNA
cagcactgtacgaaagctggtcagtcccgttctcggtcattctggtgatccctctggggcttcttggcgcggcgc

SEQ ID NO: 458421 - DNA, 75 bp, synthetic construct
  source 1..75: mol_type = other DNA
ggaaagggtgggtgtatacccaacacaaggtcaataaaaacgtcctggaatatctaaaaaacactatccggatga

SEQ ID NO: 458422 - DNA, 75 bp, synthetic construct
  source 1..75: mol_type = other DNA
taaggtcaataaaaacgtcctggaatatttaaaaaaacattatccggatgaagaccagaaaagtatgggtaaaac

SEQ ID NO: 458423 - DNA, 75 bp, synthetic construct
  source 1..75: mol_type = other DNA
cacacagctacgtagtgatgtgaacgggcagatagctaccgttaaccaacagatgagcacaaaggcaactgcaag

SEQ ID NO: 458424 - DNA, 75 bp, synthetic construct
  source 1..75: mol_type = other DNA
gaactgacgcgagccgtcagacgtgacctggaagagttcgctatgagctatgaagaaagcctgaaggaagagtcc

SEQ ID NO: 458425 - DNA, 75 bp, synthetic construct
  source 1..75: mol_type = other DNA
ttgaggcgttagccaaaacaaatattgacctggctcttcgtcaagatgaagaccagcacaagcagatggtcaata

SEQ ID NO: 458426 - DNA, 75 bp, synthetic construct
  source 1..75: mol_type = other DNA
tcgaatactgaatcaggaaggcaaaatcgttgaacgcgatgttcttgaaactggcgaaaacataacaaaggttac

SEQ ID NO: 458427 - DNA, 75 bp, synthetic construct
  source 1..75: mol_type = other DNA
tttacgtttgaattgttagctaacggtggaaccgatcgtgaaacactgctgcaaatgcgtaatcagttgatagaa

SEQ ID NO: 458428 - DNA, 75 bp, synthetic construct
  source 1..75: mol_type = other DNA
attaaagcgtctgcagataagccggcggtttgcggaaggttatgtcctgcatctgctgattatagccgccattgt

SEQ ID NO: 458429 - DNA, 75 bp, synthetic construct
  source 1..75: mol_type = other DNA
gaacaagtgcagacaacgctctaggaaaacgaattgatacactgaaagcgtctgtagatggaaatgttgccgtta

SEQ ID NO: 458430 - DNA, 75 bp, synthetic construct
  source 1..75: mol_type = other DNA
ccaggaccagtaacggcggtaaaatcagtaatggtacgaacgagcaatacgtaggccgtgacctttatatgccgc

SEQ ID NO: 458431 - DNA, 75 bp, synthetic construct
  source 1..75: mol_type = other DNA
tgacaacgtgccggatgtacctatcctgaatgatattgaacattatgaaattccacgcgataagcggcgtgatat

SEQ ID NO: 458432 - DNA, 75 bp, synthetic construct
  source 1..75: mol_type = other DNA
cctgagatcctgattggtaaagttgcaaaaggcagatacaaaggtaaataccttaagtttgcagggcaacagttc

SEQ ID NO: 458433 - DNA, 75 bp, synthetic construct
  source 1..75: mol_type = other DNA
gtgatctgattcctgataccgaaagctatcaggaagtattcgcacagccacatttgattgacgaaaacgatcctt

SEQ ID NO: 458434 - DNA, 75 bp, synthetic construct
  source 1..75: mol_type = other DNA
gttgtgcatattggcgatggtgaattcaccgacatcgaacgcaaagcggagcttggcggcaatatccatgcgaaa

SEQ ID NO: 458435 - DNA, 75 bp, synthetic construct
  source 1..75: mol_type = other DNA
cctcactgccgataaactgaacattaagtttgcgccaaatggtactggaaaaagtacgctgtcacgggccataag

SEQ ID NO: 458436 - DNA, 75 bp, synthetic construct
  source 1..75: mol_type = other DNA
atgcttattgatacttgatgaatttccggcgatggggcgtgttggtattatcgaaaactcaattgcatttacggc

SEQ ID NO: 458437 - DNA, 75 bp, synthetic construct
  source 1..75: mol_type = other DNA
cagcaaaaaaaattccctcaactgtacgtagcaccctacgagaatccggttcactggctcgtgataaacgtaatg

SEQ ID NO: 458438 - DNA, 75 bp, synthetic construct
  source 1..75: mol_type = other DNA
cctggtgtcttcaagaacagttaacggctatttaaaactgtgtcagggattgtttgcctatttggtcaaagaaga

SEQ ID NO: 458439 - DNA, 75 bp, synthetic construct
  source 1..75: mol_type = other DNA
gttgcaggactggttttcctgccggtaccaggcattttctttgattacctgaaagcagtgcagcttcccggggac

SEQ ID NO: 458440 - DNA, 75 bp, synthetic construct
  source 1..75: mol_type = other DNA
cagaagtgaatccgcttaccggagatgatcctgatttaaagggagagacgtttttggactggcttaaagcagggc

SEQ ID NO: 458441 - DNA, 75 bp, synthetic construct
  source 1..75: mol_type = other DNA
atgtttaagcggttcagacgtatgctgcccggcacaaagggcacggagcctggcgtggtcgcgccggtgataccg

SEQ ID NO: 458442 - DNA, 75 bp, synthetic construct
  source 1..75: mol_type = other DNA
tctctgtgtgaaggcgatacctttaccggcgaacagctaaacttaatgctacaacagcgacagtggcgcgaaggt

SEQ ID NO: 458443 - DNA, 75 bp, synthetic construct
  source 1..75: mol_type = other DNA
aggtcagcagcacaatggaggctgcacaggtccgtggactggcttttacttcattggttgactttatcgaaccgg

SEQ ID NO: 458444 - DNA, 75 bp, synthetic construct
  source 1..75: mol_type = other DNA
gcgaaaagctaacggtgaacctaaaaaagattctatattacaggatattaaaactattcatgagcgcccagccga

SEQ ID NO: 458445 - DNA, 75 bp, synthetic construct
  source 1..75: mol_type = other DNA
taacaaacagtggtgcgcctaacattcgcgaactttacgttggcaatggcttcaaggtgtatcctatgccatccc

SEQ ID NO: 458446 - DNA, 75 bp, synthetic construct
  source 1..75: mol_type = other DNA
cactatcaagagaagttagtagtttaaaaacaaaaacaggtaaagacattgcagcggcggtagcagttgaaacca

SEQ ID NO: 458447 - DNA, 75 bp, synthetic construct
  source 1..75: mol_type = other DNA
atgagtgcaatagacactttaagggaatacgccgaagtatggcatttatttggtggtctgccagatgatgcaacc

SEQ ID NO: 458448 - DNA, 75 bp, synthetic construct
  source 1..75: mol_type = other DNA
cagaagaaagatttaaaatttatttagcagaaaaacatatcaatatcgtttggatctcagtagaagaagctttgc

SEQ ID NO: 458449 - DNA, 75 bp, synthetic construct
  source 1..75: mol_type = other DNA
ctgaccgaatcattggtgatatcgtcaagggatacacggttgatatggggcagggcgtaatgactcagaaccagc

SEQ ID NO: 458450 - DNA, 75 bp, synthetic construct
  source 1..75: mol_type = other DNA
tgatgtcggaactgcagcttgagcaacagatccctttctcggcgtcactgacctttgagcagtcttacagtgaag

SEQ ID NO: 458451 - DNA, 75 bp, synthetic construct
  source 1..75: mol_type = other DNA
cgctgccacttagtccgcagtggatcctccgccagtgtaaagaggtcgcttcattatgcgaaggtgataccttct

SEQ ID NO: 458452 - DNA, 75 bp, synthetic construct
  source 1..75: mol_type = other DNA
ccatagaaaaacaggatacgatggctgaaattagctatatgcgcaccattcggactccggatgaatatgagcgtc

SEQ ID NO: 458453 - DNA, 75 bp, synthetic construct
  source 1..75: mol_type = other DNA
ccggcggtggcattcagtggcgctaaacatgagcaagatcatactgatatctactcctcatgccgtcggctctgg

SEQ ID NO: 458454 - DNA, 75 bp, synthetic construct
  source 1..75: mol_type = other DNA
acaaagccgatgtttgttggtcagggcgatcagatattcatgaacgaagtgttcctgaaatatctgacggctccc

SEQ ID NO: 458455 - DNA, 75 bp, synthetic construct
  source 1..75: mol_type = other DNA
tgaatttaccatgacgcagtccgcaccgctgatggtgctgccggacccggatgagtttgtggtggtacaggtgaa

SEQ ID NO: 458456 - DNA, 75 bp, synthetic construct
  source 1..75: mol_type = other DNA
gtggaagaaatgcaggcggtgaatgccgtgctgtatggcaaatacacgatggaaggagaccagttcgagaaaatt

SEQ ID NO: 458457 - DNA, 75 bp, synthetic construct
  source 1..75: mol_type = other DNA
tgaattcaccatgacgcagtccgcgccgctgatggtactccctgatccggatgagttcgtggtggtacaggtgaa

SEQ ID NO: 458458 - DNA, 75 bp, synthetic construct
  source 1..75: mol_type = other DNA
cgcccgtgaatttaccatgacgcagtccgcgccgctgatggtgttgccggacccggatgagtttgtggtggtaca

SEQ ID NO: 458459 - DNA, 75 bp, synthetic construct
  source 1..75: mol_type = other DNA
agaacgcgcgtaaaagttgatttattcgaacagttggaaaatcgattaaataaaataatgaatggggcacacaca

SEQ ID NO: 458460 - DNA, 75 bp, synthetic construct
  source 1..75: mol_type = other DNA
acctctactgcgaccaggccagcggtcttgtgaatattgccattatggacggtaccgtctggcgtctgctgaatg

SEQ ID NO: 458461 - DNA, 75 bp, synthetic construct
  source 1..75: mol_type = other DNA
gcggataccggcaaaacgttgtacccggcacaggcagaacgtctgctaatagatctgtgggcctatcgcgaaatg

SEQ ID NO: 458462 - DNA, 75 bp, synthetic construct
  source 1..75: mol_type = other DNA
cgttgacctgctggtgagcaatctgatggccagttccggcggttcagaacaggaagacgatgacaggctccggga

SEQ ID NO: 458463 - DNA, 75 bp, synthetic construct
  source 1..75: mol_type = other DNA
gtctgagcgtcgatgtcacggccacatgtaccaccgctggcgttgtgggtaatggctggcaaccggcgcagatta

SEQ ID NO: 458464 - DNA, 75 bp, synthetic construct
  source 1..75: mol_type = other DNA
tctgcctgagagcacgctggtcctggggaatacggctgcagagggcattcgttgttacggtgccattcaggatgc

SEQ ID NO: 458465 - DNA, 75 bp, synthetic construct
  source 1..75: mol_type = other DNA
tccacaccgaagaggtgatgctggacaaaattaccggaaaaacgccggtggcggcctatgtctccccgatcgttg

SEQ ID NO: 458466 - DNA, 75 bp, synthetic construct
  source 1..75: mol_type = other DNA
ttggcaatctgatgttagaaattaccaacatgaaagagcgtatggcaaagatggaatcagagattaaatcactta

SEQ ID NO: 458467 - DNA, 75 bp, synthetic construct
  source 1..75: mol_type = other DNA
gcaggcgttgtccgaaggtgtggtggcctcttcccgttatccgaaacactggctgacggtgggggatcccgcccg

SEQ ID NO: 458468 - DNA, 75 bp, synthetic construct
  source 1..75: mol_type = other DNA
gggtattacggcgatctggccattgtggtggcgaaaacgtcttatgtggcagaggacggtaccgaaaaacgttat

SEQ ID NO: 458469 - DNA, 75 bp, synthetic construct
  source 1..75: mol_type = other DNA
aaacaatcagggttgactttcaacataaaaatgatatagaagaagcatttaaatatgcttcaataaataatatgg

SEQ ID NO: 458470 - DNA, 75 bp, synthetic construct
  source 1..75: mol_type = other DNA
aacactcaggcacgcggtctgcgcacctatggctgcattcaggatgcggacgcattgagtgagggtattaatgcg

SEQ ID NO: 458471 - DNA, 75 bp, synthetic construct
  source 1..75: mol_type = other DNA
ggtcgagctgattaaaaacgatcgcgtgattggtggtatgacgccggtttgttcggcccgcgccagcgaactgta

SEQ ID NO: 458472 - DNA, 75 bp, synthetic construct
  source 1..75: mol_type = other DNA
attgtctggccgccactgataaacgcgccagcgagctaaaaattgcctgctttgggctggcgtttaagccgaata

SEQ ID NO: 458473 - DNA, 75 bp, synthetic construct
  source 1..75: mol_type = other DNA
gcgcagaacccgcagcaggcgcggcttatccgtacagccagggaagtgaacgatcacaaacctttttgggtaatt

SEQ ID NO: 458474 - DNA, 75 bp, synthetic construct
  source 1..75: mol_type = other DNA
aaggaaaagtgctgcgtcatcgtggtggtgaaacccgcgtgttgcgtccgggctacgtcaagccgaaacacgaat

SEQ ID NO: 458475 - DNA, 75 bp, synthetic construct
  source 1..75: mol_type = other DNA
ggtgaagatccatctcaactgaacgatccggcttaccgccgtctgcgtatcattaccgataacctcaaacaggaa

SEQ ID NO: 458476 - DNA, 75 bp, synthetic construct
  source 1..75: mol_type = other DNA
ttgcgtccgggctacgtcaagccgaaacacgaatttaattaccagcaggcggttgagcgccttcccggtgaagat

SEQ ID NO: 458477 - DNA, 75 bp, synthetic construct
  source 1..75: mol_type = other DNA
cgaagaggtgatgctggacaaaattaccggaaaaacgccggtggcggcctatgtctccccggttgttgaaggaaa

SEQ ID NO: 458478 - DNA, 75 bp, synthetic construct
  source 1..75: mol_type = other DNA
ggaaggagaccagttcgagaaaattgaggtcgattttggcaggtcgacgaagaataacattacgcaggccagtgg

SEQ ID NO: 458479 - DNA, 75 bp, synthetic construct
  source 1..75: mol_type = other DNA
gttgctacggtgccattcaggatgcgcaggcattgtctgaaggcgtggtggcgtcttcccgttatccgaaacact

SEQ ID NO: 458480 - DNA, 75 bp, synthetic construct
  source 1..75: mol_type = other DNA
actgcttcaggcggtggatgtgccgatgagggtgacgacgccctgcgtgagcgtatccggctggccccggagtgc

SEQ ID NO: 458481 - DNA, 75 bp, synthetic construct
  source 1..75: mol_type = other DNA
atattgatcggaatgtctgcggggattgctggggctactatcagcctaccaataattgctattgtggcttttata

SEQ ID NO: 458482 - DNA, 75 bp, synthetic construct
  source 1..75: mol_type = other DNA
aagcgagaatgcatacatccgcaaccggtacaaagaactggacctattaatcgggaaaaacattctggtcatgca

SEQ ID NO: 458483 - DNA, 75 bp, synthetic construct
  source 1..75: mol_type = other DNA
ttacgcataatggtatctgggactggggacaaagtcgctttggtgtttattacgagaaaaccaataatacccgca

SEQ ID NO: 458484 - DNA, 75 bp, synthetic construct
  source 1..75: mol_type = other DNA
gaatagccagatatcagtagccaaatcctccgacgatgataatgacgagactctggtggtggaagccaccgctga

SEQ ID NO: 458485 - DNA, 75 bp, synthetic construct
  source 1..75: mol_type = other DNA
agttgggagagtttgatttttacagacaaatttatcctgtgacaggaggagagcacctggttgaagctttgatgt

SEQ ID NO: 458486 - DNA, 75 bp, synthetic construct
  source 1..75: mol_type = other DNA
aaaacacccggaagcgattaagaacccgttcttcctgttggctccggattgggcgctgatcccgctactgatcat

SEQ ID NO: 458487 - DNA, 75 bp, synthetic construct
  source 1..75: mol_type = other DNA
atttgcgtctgcgcggcaagctgtacttgctgctgcaacgtaatgcgctgcgtgcaccggatcaatttgaaatcc

SEQ ID NO: 458488 - DNA, 75 bp, synthetic construct
  source 1..75: mol_type = other DNA
acgggggtcgaggcgctgtatgctgatatggggcactttggtaagttccctattcgtctggcgtggttcaccgtc

SEQ ID NO: 458489 - DNA, 75 bp, synthetic construct
  source 1..75: mol_type = other DNA
tactttaatcgcaaatatgcaccgattgacgaaaagcttatggcgcttcacaagtggttttgggaacaaagtgaa

SEQ ID NO: 458490 - DNA, 75 bp, synthetic construct
  source 1..75: mol_type = other DNA
gattgactatcaggcactgcgtgaggcggcgcagaacgcgaaagatttaggtgggattaagaattacaagcgagg

SEQ ID NO: 458491 - DNA, 75 bp, synthetic construct
  source 1..75: mol_type = other DNA
tctggcggtcgattctatttcgttcgatgcggtacgtgtcgcgctcaatctggtagcaaatatgcagcgcctgga

SEQ ID NO: 458492 - DNA, 75 bp, synthetic construct
  source 1..75: mol_type = other DNA
cattgatcagaccactgaataaacaaaaaatgcaggtagcagcccaacatattgatgggttagtcaagccgacaa

SEQ ID NO: 458493 - DNA, 75 bp, synthetic construct
  source 1..75: mol_type = other DNA
tgattcagcctaccttgattacggaatatccggcagaagtgtccccgctggcgcgccgtaatgatgttaacccgg

SEQ ID NO: 458494 - DNA, 75 bp, synthetic construct
  source 1..75: mol_type = other DNA
tgattcagcctaccttgattacggaatatccggcagaagtctccccgctggcgcggcgtaatgatgttaacccgg

SEQ ID NO: 458495 - DNA, 75 bp, synthetic construct
  source 1..75: mol_type = other DNA
tgattcagcctaccttgattacggaatatccggcagaagtttccccgctggcgcgccgtaaagatgttaacccgg

SEQ ID NO: 458496 - DNA, 75 bp, synthetic construct
  source 1..75: mol_type = other DNA
ggaactggcatagcgtcgccatttatttgctggctggatgtctgatttccgcaatgaccgctttgttgatgaaag

SEQ ID NO: 458497 - DNA, 75 bp, synthetic construct
  source 1..75: mol_type = other DNA
ggcatctgctcgcccgtttattacccatcataatgctctggatttagatatgtatctgcgtatcgcgccggagct

SEQ ID NO: 458498 - DNA, 75 bp, synthetic construct
  source 1..75: mol_type = other DNA
gcgagctttccattcactgtactgagttacgcctgctgactaaggcactgcgtcccttgccagataaatttcatg

SEQ ID NO: 458499 - DNA, 75 bp, synthetic construct
  source 1..75: mol_type = other DNA
ttccgatcttctgaaggggcgaatacctataacgagccaggccgggcttactatgccggagttaccgcatcattc

SEQ ID NO: 458500 - DNA, 75 bp, synthetic construct
  source 1..75: mol_type = other DNA
gttcgaaaaacgcagccgggcatgaaggggtacgtaacaaagatattaacggcgttgtctcgtggaaattaaatc

SEQ ID NO: 458501 - DNA, 75 bp, synthetic construct
  source 1..75: mol_type = other DNA
gggccgccgggggggtggtgaacatcattaccaaacgtcccaccaacgactggcacggttcgctgtcgttataca

SEQ ID NO: 458502 - DNA, 75 bp, synthetic construct
  source 1..75: mol_type = other DNA
tgattcagcctaccttgattacggaatatccggcagaagtatccccgctggcgcgtcgtaaggatgttaacccgg

SEQ ID NO: 458503 - DNA, 75 bp, synthetic construct
  source 1..75: mol_type = other DNA
atgtctaaccaacaccagtatggcctcttaccgtgcaaattgcaaggaggtgtatgggtccaccacatattgcaa

SEQ ID NO: 458504 - DNA, 75 bp, synthetic construct
  source 1..75: mol_type = other DNA
ttgatggtgtaccggtgacgtcacgtaactccgtgcgttatagctggcgtggggagcgtgatacccgcggtgaca

SEQ ID NO: 458505 - DNA, 75 bp, synthetic construct
  source 1..75: mol_type = other DNA
caacatcaatcattcagggatcgacactcatcaatcatcacatcgtgagggggtgtccatgcttctgtctctgtt

SEQ ID NO: 458506 - DNA, 75 bp, synthetic construct
  source 1..75: mol_type = other DNA
atgacatctcaccagttattacgcctcagacaggttgaacaaaaaacagggctgaagcgttcacagatatatctt

SEQ ID NO: 458507 - DNA, 75 bp, synthetic construct
  source 1..75: mol_type = other DNA
gctcaataaaaataggaccatctagtgtagcctggctcgaatctgaaattgacgaatgggtcaacgaaaagttat

SEQ ID NO: 458508 - DNA, 75 bp, synthetic construct
  source 1..75: mol_type = other DNA
aaggtgagattgtaattactgctgcatatgcaccaccactgaaccctaatgccggcagtgaatatgttcgcgcga

SEQ ID NO: 458509 - DNA, 75 bp, synthetic construct
  source 1..75: mol_type = other DNA
gtaagccccatcgcggcaacaattactccttgggtagtgagtagggaaacatacgtaattcctcctgatacgagt

SEQ ID NO: 458510 - DNA, 75 bp, synthetic construct
  source 1..75: mol_type = other DNA
gtaacgcaaaagttacaaacccaatgttaagaatccctttttccagtagtgacttgggtgcaatagtaaacgctg

SEQ ID NO: 458511 - DNA, 75 bp, synthetic construct
  source 1..75: mol_type = other DNA
accgatagtgacgccagccttgctaagccgtgaggtttttttatatccgacgccagcgacctccattcccagaga

SEQ ID NO: 458512 - DNA, 75 bp, synthetic construct
  source 1..75: mol_type = other DNA
tgaactacatgatgacgggttccgccacggataacccggcggagctggacgaggattccggcaccatcagtgcca

SEQ ID NO: 458513 - DNA, 75 bp, synthetic construct
  source 1..75: mol_type = other DNA
cagaggacggtaccgaaaaacgttatctgccggagggcacgctggtcctgggaaatacggctgcagatgggatcc

SEQ ID NO: 458514 - DNA, 75 bp, synthetic construct
  source 1..75: mol_type = other DNA
gataagcgtgatagtacggctatggcgggggttgcctggtatcaccacgagcgttggggaaccgtgaaagcctct

SEQ ID NO: 458515 - DNA, 75 bp, synthetic construct
  source 1..75: mol_type = other DNA
attcaacataaactctttgcctggcttaatttaacgccacaagtggctacattattattagagagggataattac

SEQ ID NO: 458516 - DNA, 75 bp, synthetic construct
  source 1..75: mol_type = other DNA
tcgcagcaatgaaagcagctggatattcggctcctgtttcgccattaattgtatttactggattgctggcactgg

SEQ ID NO: 458517 - DNA, 75 bp, synthetic construct
  source 1..75: mol_type = other DNA
ggtgaagatgcaacttacaacaactatgaaaacgttatttctatattagaacaacacggagttaaatatgatgag

SEQ ID NO: 458518 - DNA, 75 bp, synthetic construct
  source 1..75: mol_type = other DNA
atgacaccagcctgaatgcacagaacgatattctgctggctgccgccgctgacacccgacagacaaccgggaaga

SEQ ID NO: 458519 - DNA, 75 bp, synthetic construct
  source 1..75: mol_type = other DNA
ggtaaactatgctatgacgcagttcggtgtggataaagcgacggctgaaagctacgtcgaaacctatgacgggat

SEQ ID NO: 458520 - DNA, 75 bp, synthetic construct
  source 1..75: mol_type = other DNA
tctgccgggcacagcgccctgctttctgcaggtaacgacctgagtctgaatgcagtcagggaaagcaaaaacagt

SEQ ID NO: 458521 - DNA, 75 bp, synthetic construct
  source 1..75: mol_type = other DNA
tcctgtgagcattattcaggtggtgcaacatgggatattcgaaagccttatgtagacaaagttcttgttattaat

SEQ ID NO: 458522 - DNA, 75 bp, synthetic construct
  source 1..75: mol_type = other DNA
tgatggatatcatgcactaaggcttcatgtaattgtcaggggaacgaaccctggtgttacgacggtttatgcttt

SEQ ID NO: 458523 - DNA, 75 bp, synthetic construct
  source 1..75: mol_type = other DNA
ttaataccagttgatatcaagtttgagaaggaccttggatatccatgcgcaattatgcctgcactggttggatat

SEQ ID NO: 458524 - DNA, 75 bp, synthetic construct
  source 1..75: mol_type = other DNA
tacatcgctagtggttcaaatgagggatgatttcatcgattatcggttattcccttatgaagcaattcatacaat

SEQ ID NO: 458525 - DNA, 75 bp, synthetic construct
  source 1..75: mol_type = other DNA
aagattacagtttcgttaaggttgattgctctccttctatcggaatggaattaagagattatttctcttttgagg

SEQ ID NO: 458526 - DNA, 75 bp, synthetic construct
  source 1..75: mol_type = other DNA
acagactttaatgtttcaccatcattgattaaagcattattaattcattccgctcaattatcttctcctgattac

SEQ ID NO: 458527 - DNA, 75 bp, synthetic construct
  source 1..75: mol_type = other DNA
ttgcacgccgggaatgcgcctgctggcgaaactctctggcgcgcgtaccgtgctgcatattcaggattacgaagt

SEQ ID NO: 458528 - DNA, 75 bp, synthetic construct
  source 1..75: mol_type = other DNA
tggtaccggcagcgatatgcagcgcggtatccaggctgcaacggctgcatttcagggcctggcgggcggcaatat

SEQ ID NO: 458529 - DNA, 75 bp, synthetic construct
  source 1..75: mol_type = other DNA
tttatcagaacagagaagaaggccgatgtcatgtacacgcatgaacagattgatggatatcatgcactaaggctt

SEQ ID NO: 458530 - DNA, 75 bp, synthetic construct
  source 1..75: mol_type = other DNA
tgctcggttataccgaacaaaaagtgaaatatcgtgcgctgtttctggagctgtttttccgccgtacggtgaatt

SEQ ID NO: 458531 - DNA, 75 bp, synthetic construct
  source 1..75: mol_type = other DNA
attgaaacaaaccgtgggcactggctgggacaggtgatctactccggttgtgcgcaggagaataccggtgttcca

SEQ ID NO: 458532 - DNA, 75 bp, synthetic construct
  source 1..75: mol_type = other DNA
atgaatattttcacagaggctgcaaaactcgaagagcaaaattgtccgtttgcgatggcgcaaattgttgatagc

SEQ ID NO: 458533 - DNA, 75 bp, synthetic construct
  source 1..75: mol_type = other DNA
gctggatacccgtcgcggctctaattccgaactggagacagcggtaaaagacctgggcgaagcggtgtcctataa

SEQ ID NO: 458534 - DNA, 75 bp, synthetic construct
  source 1..75: mol_type = other DNA
cagctctgcggaagcgatgaaacttaccgaacgcggattcattcctgtgatggtagatcccgcctgttcattgct

SEQ ID NO: 458535 - DNA, 75 bp, synthetic construct
  source 1..75: mol_type = other DNA
attgaaacaaatcgcgggcactggctcggtcaggtgatttactctggttgtgcgcaggagaataccggtgttcct

SEQ ID NO: 458536 - DNA, 75 bp, synthetic construct
  source 1..75: mol_type = other DNA
ttaggcgatctggtgaaagagggcgatgtgattgcctggattggtgagcatgaaattaaagcaccgttgacgggg

SEQ ID NO: 458537 - DNA, 75 bp, synthetic construct
  source 1..75: mol_type = other DNA
gttccttcaaagccgtcagggagaagctggatacccgtcgcggctctaattccgaactggagacagcggtaaaag

SEQ ID NO: 458538 - DNA, 75 bp, synthetic construct
  source 1..75: mol_type = other DNA
aaagatctgggcgcagtggtgtccttcaaggggtattacggcgatctggccattgtggtggcgaaaacgtcttat

SEQ ID NO: 458539 - DNA, 75 bp, synthetic construct
  source 1..75: mol_type = other DNA
gcacagaatccgcagcaggcgcggcttatccgtaccgcgcgtgaagtaaacgatcacaaaccgttctgggtgatt

SEQ ID NO: 458540 - DNA, 75 bp, synthetic construct
  source 1..75: mol_type = other DNA
gacggtaccgtctggcgtctgctgaatggctttaagcttttccgcgaaaaactggatacccgtcgcggttcaaat

SEQ ID NO: 458541 - DNA, 75 bp, synthetic construct
  source 1..75: mol_type = other DNA
gaagaggtgatgctggacaaaattaccggaaaaacgccggtggcggcctatgtctccccggttgttgaaggaaaa

SEQ ID NO: 458542 - DNA, 75 bp, synthetic construct
  source 1..75: mol_type = other DNA
gtggcgctgcccgctgtacgtgccaaaacagccgagcaccctgaaacgcttgttgcatctcggcagttttgccgt

SEQ ID NO: 458543 - DNA, 75 bp, synthetic construct
  source 1..75: mol_type = other DNA
ataattttgtcctgattgccacgaataatcaggatcgtgaagccctcgacaaactcattgaacagcccattgcat

SEQ ID NO: 458544 - DNA, 75 bp, synthetic construct
  source 1..75: mol_type = other DNA
gcttcttcccgttatccgaaacactggctgacggtgggggatcctgcccgtgaatttaccatgacgcagtccgca

SEQ ID NO: 458545 - DNA, 75 bp, synthetic construct
  source 1..75: mol_type = other DNA
gaggggattcgttgctatggtgccattaaggatgcacaggcgttgtctgaaggagtggtggcttcttcccgttac

SEQ ID NO: 458546 - DNA, 75 bp, synthetic construct
  source 1..75: mol_type = other DNA
actggataccagccgcggctccaaatctgagctggaaaccgcactgaaagacctgggctccgtggtttcctttaa

SEQ ID NO: 458547 - DNA, 75 bp, synthetic construct
  source 1..75: mol_type = other DNA
gacacctttgatccaacgcacgatctggatgcgtactgcgattttgcctccgggaccatcaatatcgcgattatg

SEQ ID NO: 458548 - DNA, 75 bp, synthetic construct
  source 1..75: mol_type = other DNA
ctggacaaaattaccggaaaaacgccggtggcggcctatgtctccccggttgttgaaggaaaagtgctgcgtcat

SEQ ID NO: 458549 - DNA, 75 bp, synthetic construct
  source 1..75: mol_type = other DNA
atggctgggtttactggccagtcgccgtaaggttcagcttttcttgcgccagttacgcgagaaaggcgtctcaga

SEQ ID NO: 458550 - DNA, 75 bp, synthetic construct
  source 1..75: mol_type = other DNA
tttatcgcgaaagtctgaaccccgaacttttcccaccatcaactacgcttctacacgctgagtcgtttggcgcgg

SEQ ID NO: 458551 - DNA, 75 bp, synthetic construct
  source 1..75: mol_type = other DNA
aaaaataacgcgccgggtgggctgatgatgaaacctacgcatccttccggacaccaactggtggtaattcgcggc

SEQ ID NO: 458552 - DNA, 75 bp, synthetic construct
  source 1..75: mol_type = other DNA
aaacactggctgaccgtgggcgatccggcccgtgaatttaccatgacgcagtccgcaccgctgatggtgctgccg

SEQ ID NO: 458553 - DNA, 75 bp, synthetic construct
  source 1..75: mol_type = other DNA
gagcggggaacagtttgagacggtggaagtggattttgggcgctctgccaccaataacattactcaggctggcgg

SEQ ID NO: 458554 - DNA, 75 bp, synthetic construct
  source 1..75: mol_type = other DNA
taaatcccctttgtgtggtggacgctatcctggcgaaacagaatttgggtacgcgggcagatatggcgccagtga

SEQ ID NO: 458555 - DNA, 75 bp, synthetic construct
  source 1..75: mol_type = other DNA
atcgctggcctggcgcggcaacggattgtctttgcgacatttctctgcaactcaaacaaggtgaatggctggcgc

SEQ ID NO: 458556 - DNA, 75 bp, synthetic construct
  source 1..75: mol_type = other DNA
ttcattcacggcgactcgtcacggagccgctttccatgactatagtggtagtgctgactcgcgttttatgatcga

SEQ ID NO: 458557 - DNA, 75 bp, synthetic construct
  source 1..75: mol_type = other DNA
aggatatgtttatccgataaaaatacatgcagctattcagtttgttgtgacagggcctgtcggtaatggggtcat

SEQ ID NO: 458558 - DNA, 75 bp, synthetic construct
  source 1..75: mol_type = other DNA
tcggtcacggagcgctggaaattggcgaacgccgcaagctaggtcagagcctgcgcgaaaaacgttacgaccgcg

SEQ ID NO: 458559 - DNA, 75 bp, synthetic construct
  source 1..75: mol_type = other DNA
aattcattcccttggaacggcaaagccgctggaagaatatctacaggtttatgaaataaaaaaggctaccttcgg

SEQ ID NO: 458560 - DNA, 75 bp, synthetic construct
  source 1..75: mol_type = other DNA
cagtaatattgcaacaacaggcattacatacgcttaagaaccgccagcgcgcggcaaagattggcgtactgtttc

SEQ ID NO: 458561 - DNA, 75 bp, synthetic construct
  source 1..75: mol_type = other DNA
atcaccaagggacaatcacaaagttatatttctgagaaatacagcttatcacgcagccaattctacaagcttaaa

SEQ ID NO: 458562 - DNA, 75 bp, synthetic construct
  source 1..75: mol_type = other DNA
tccggaaaccaaaaatgtcacgctggaacatatcgaacgcaaactgatggcaggcgagaagttgagaaatatcgg

SEQ ID NO: 458563 - DNA, 75 bp, synthetic construct
  source 1..75: mol_type = other DNA
cgcgccagaactgttccgtcgtatccgcctgaaagatccgctgaagcaaaaacagcttctcaaagggctggtaca

SEQ ID NO: 458564 - DNA, 75 bp, synthetic construct
  source 1..75: mol_type = other DNA
gatgtgtttcagacgaatgttccagggattggttttcgtgctgcatgggcgaataacgttaatgcgcaactcacc

SEQ ID NO: 458565 - DNA, 75 bp, synthetic construct
  source 1..75: mol_type = other DNA
acggcaaatggtgagatctggcaaggatataccgtattgacaaacggtgataagcgtactgataacccacttaca

SEQ ID NO: 458566 - DNA, 75 bp, synthetic construct
  source 1..75: mol_type = other DNA
atgctatgcacatttgattatcatgcgttttatcgccatagaggccaccttgtccgtgagaataacggaacatgg

SEQ ID NO: 458567 - DNA, 75 bp, synthetic construct
  source 1..75: mol_type = other DNA
aggcatgatgcggaccgcacaagatctgccgcagccattgttatggccgcaattgcaggtgagcgaaggcgaaaa

SEQ ID NO: 458568 - DNA, 75 bp, synthetic construct
  source 1..75: mol_type = other DNA
tttctactctatgttgcgcgcaatattgcttcattttttgctacgattcacgagcacgggcacgtcgtgggtgac

SEQ ID NO: 458569 - DNA, 75 bp, synthetic construct
  source 1..75: mol_type = other DNA
tattaaatcggcgctgcgctgcaatgccgcaagagtgattctggtgcataaccatccatcaggcgttaccgatgc

SEQ ID NO: 458570 - DNA, 75 bp, synthetic construct
  source 1..75: mol_type = other DNA
cagaagtccatccccgggaggtgattaaacgtgccctgtaccacaatgccgctgccgtggtgctggcgcacaatc

SEQ ID NO: 458571 - DNA, 75 bp, synthetic construct
  source 1..75: mol_type = other DNA
acagggagaaatttgaagcatggaagaaagttgcgctaaacagttttagaaaatattcaacaattgttgatatcc

SEQ ID NO: 458572 - DNA, 75 bp, synthetic construct
  source 1..75: mol_type = other DNA
aggttgaaaaataaaaattttattcataccacttcaatagatcgatggaccaataatttattgattatattagga

SEQ ID NO: 458573 - DNA, 75 bp, synthetic construct
  source 1..75: mol_type = other DNA
gtcaatatgaacgcgtccggctatgaaattacccgtacccgcgatgccgttaccaacttcgaacaactacctgca

SEQ ID NO: 458574 - DNA, 75 bp, synthetic construct
  source 1..75: mol_type = other DNA
cgaacaggcaatgtccgtggttctacgtgccagcattattactccggaagcccgtgaagtggcggaactactggg

SEQ ID NO: 458575 - DNA, 75 bp, synthetic construct
  source 1..75: mol_type = other DNA
aaacagtcgctggaacagggtgcactgcagccgagctttaaatcggtgaccggcaaaggcggcatcaaagttatt

SEQ ID NO: 458576 - DNA, 75 bp, synthetic construct
  source 1..75: mol_type = other DNA
gcctggtcgcgcagctgatggaaaaagtgatgaaggaaaaacagtcgctggagcagggcgcaatgcagccgagct

SEQ ID NO: 458577 - DNA, 75 bp, synthetic construct
  source 1..75: mol_type = other DNA
gcgcagatcatccagcaggcgggtaactctgtgctgtctaaagctaaccaggtaccgcagcaggttctgtctctg

SEQ ID NO: 458578 - DNA, 75 bp, synthetic construct
  source 1..75: mol_type = other DNA
atagtgaatgcactgactctggtggatatccgggtgctggatcatttcatcatcggtgatggtgatgcgttgtcg

SEQ ID NO: 458579 - DNA, 75 bp, synthetic construct
  source 1..75: mol_type = other DNA
gctgagcttattgctgatcgggaagaaactgttagaaagattgttaacattggtaagaatgtagaagttttacct

SEQ ID NO: 458580 - DNA, 75 bp, synthetic construct
  source 1..75: mol_type = other DNA
gcctgatggttatcgacgccgcaaaaggtgtagaagatcgtacccgtaagctgatggaagttacccgtctgcgcg

SEQ ID NO: 458581 - DNA, 75 bp, synthetic construct
  source 1..75: mol_type = other DNA
gcaggtctatccgataggtattggtttgcaggggctggaaacgccagtgatggaaacgcgtgtggggcagaaaat

SEQ ID NO: 458582 - DNA, 75 bp, synthetic construct
  source 1..75: mol_type = other DNA
tacggtgcaagaaggggataaaaaccttcaggccatcgcccgacgttttgatactgcggcaatgttgatccttga

SEQ ID NO: 458583 - DNA, 75 bp, synthetic construct
  source 1..75: mol_type = other DNA
gcggcgtttttcgcctttgcatggatcatgatccactcagtaaaagtgcattttgccgagcaggatattaatgat

SEQ ID NO: 458584 - DNA, 75 bp, synthetic construct
  source 1..75: mol_type = other DNA
gcaggcattcgtcagcgttcgctggagcgtggcattaaattaccgccagtcgttcctgccggaccaaataacccg

SEQ ID NO: 458585 - DNA, 75 bp, synthetic construct
  source 1..75: mol_type = other DNA
gtataaattgcccgttggttttatgcaattcaaagataatcaggctgtagatcagacacgggtcgataaagcatt

SEQ ID NO: 458586 - DNA, 75 bp, synthetic construct
  source 1..75: mol_type = other DNA
cgttttcgctggcaacccgcctgaccttttttatcagcctcgccaccatcgcggcgtttttcgcctttgcatgga

SEQ ID NO: 458587 - DNA, 75 bp, synthetic construct
  source 1..75: mol_type = other DNA
acaactggtactgtcgttcaaccatatgatcgagcgtattgaggatgtctttacccgccagtccaatttctcagc

SEQ ID NO: 458588 - DNA, 75 bp, synthetic construct
  source 1..75: mol_type = other DNA
atagtgaaatcaattgttgtcgcgcataaaggcacggttgcagtaacgtcagatgcgcggggaacaaggtttatg

SEQ ID NO: 458589 - DNA, 75 bp, synthetic construct
  source 1..75: mol_type = other DNA
ttgcgtcgggcgttaagcaacctgctttcgaacgccctgcgttatacgccacccggagaggcaattgttgtgcgc

SEQ ID NO: 458590 - DNA, 75 bp, synthetic construct
  source 1..75: mol_type = other DNA
tgatgccgggccacggtcacgggcatatggaacacagcaactggcggatgattagcttgccggttggcccactgg

SEQ ID NO: 458591 - DNA, 75 bp, synthetic construct
  source 1..75: mol_type = other DNA
tatccggtggtgcacatcggggacgacagctaccgcctgatgaccacggacatggccagcgtcacggcctccgtc

SEQ ID NO: 458592 - DNA, 75 bp, synthetic construct
  source 1..75: mol_type = other DNA
atgtaataactgtgtttgataatcatttaaaacaagcatcaacaattaaattattaaaagcagatgataatagct

SEQ ID NO: 458593 - DNA, 75 bp, synthetic construct
  source 1..75: mol_type = other DNA
gaatctgataaaagttataagtgtaatgtaataactgtgtttgataatcatttaaaacaagcatcaacaattaaa

SEQ ID NO: 458594 - DNA, 75 bp, synthetic construct
  source 1..75: mol_type = other DNA
ctgcaatgctcgccgttcagggcgggttgatgggaacgggatggacagatgtattttcgccaaacatttggcagg

SEQ ID NO: 458595 - DNA, 75 bp, synthetic construct
  source 1..75: mol_type = other DNA
gctggatggcctggtggagtgggcgccagcgccgatgccgcgtcagaccgatacccgtaccgtagaagcgagcga

SEQ ID NO: 458596 - DNA, 75 bp, synthetic construct
  source 1..75: mol_type = other DNA
gaatccgataaaagttataagtgtaatgtagtaacggtaattgatggtaatctcaagcaagcagcatccattaaa

SEQ ID NO: 458597 - DNA, 75 bp, synthetic construct
  source 1..75: mol_type = other DNA
ttatcctttctacttttctattaacagcctgtaattccgaaccttctgaaaaagatatttattctgctttaagta

SEQ ID NO: 458598 - DNA, 75 bp, synthetic construct
  source 1..75: mol_type = other DNA
attaacttgccggttggcccgttggtggacggcaaaccgatttatacgctctacatcgcgctttcgatcgatttt

SEQ ID NO: 458599 - DNA, 75 bp, synthetic construct
  source 1..75: mol_type = other DNA
aaatgctcaacctggcggatgaagtcggcaaagtgttcgattttttcgaggcgttagcggaagatcgcggcgtgg

SEQ ID NO: 458600 - DNA, 75 bp, synthetic construct
  source 1..75: mol_type = other DNA
ccaattactaatctcataacgcaaacggaaatcgccctcagccagtcgcgcagccagaaggagctggaagatgtg

SEQ ID NO: 458601 - DNA, 75 bp, synthetic construct
  source 1..75: mol_type = other DNA
cacgcgattcacctgatttgtgcggcggcgtggtttgggggattactgccggtgctctggtgtatgcaactcatc

SEQ ID NO: 458602 - DNA, 75 bp, synthetic construct
  source 1..75: mol_type = other DNA
gccgtctggagtttgagcagcgccgctgcgatgttcgccgtacagggcgggttgatgggcgcgggatggtcggat

SEQ ID NO: 458603 - DNA, 75 bp, synthetic construct
  source 1..75: mol_type = other DNA
gaatctgataaaagctataagtgcaatataattatggatatgagcggaacaaagcaagctggaacagttaaatta

SEQ ID NO: 458604 - DNA, 75 bp, synthetic construct
  source 1..75: mol_type = other DNA
gccgctggtgccaccaatacccagccctctgatgatattgaaatctggcagacacttttcctgaaagaatccggt

SEQ ID NO: 458605 - DNA, 75 bp, synthetic construct
  source 1..75: mol_type = other DNA
cggcgtgacgccagcctgtggctacattggggttggcggcgcgttgattatcggcgtggtagctggtctggcggg

SEQ ID NO: 458606 - DNA, 75 bp, synthetic construct
  source 1..75: mol_type = other DNA
ttatcagtatatccacgtggcgtttcagggatcgtttgcctgcattaccgtaggcttgatcgttggggcgctggc

SEQ ID NO: 458607 - DNA, 75 bp, synthetic construct
  source 1..75: mol_type = other DNA
tgccagtgaaatcggtcaggccggattcggcggcggtgccagctctgcagccaaaacactctctgattactacat

SEQ ID NO: 458608 - DNA, 75 bp, synthetic construct
  source 1..75: mol_type = other DNA
gttccgcccccgaccagtttctggcccgcaggtggggagcaggctccggccgcaccggtgatgaccccgcttcag

SEQ ID NO: 458609 - DNA, 75 bp, synthetic construct
  source 1..75: mol_type = other DNA
ttgaatggatggcggcacaggcgctccagtacgcgaaggtgacgatcgccggtgagggctacccgaccacggaag

SEQ ID NO: 458610 - DNA, 75 bp, synthetic construct
  source 1..75: mol_type = other DNA
tccactcagggatatgtctatctgcagtactcatttacaaatgacgaaatttgtcaggcagaaattgaaggggcg

SEQ ID NO: 458611 - DNA, 75 bp, synthetic construct
  source 1..75: mol_type = other DNA
ctgcaaccaacgtttaacccgcttacagataacgttgtcccgctcaatctaaccacgggcagtgaagaggacgcg

SEQ ID NO: 458612 - DNA, 75 bp, synthetic construct
  source 1..75: mol_type = other DNA
atttctggccgaggggctgtctacttacaggccgctgaaagccagcaaccaataccgcattgatcgcctgagtgg

SEQ ID NO: 458613 - DNA, 75 bp, synthetic construct
  source 1..75: mol_type = other DNA
gaagtgaaagaccgtgatttaagtgcgctggaagacgctgcggaagatcaaccgcgtgttgtaagagctgcgcaa

SEQ ID NO: 458614 - DNA, 75 bp, synthetic construct
  source 1..75: mol_type = other DNA
tttgctctggaaaacattaccatggcagaaatgttcggctgtaaaaaccgctttacccggatggctatttctaaa

SEQ ID NO: 458615 - DNA, 75 bp, synthetic construct
  source 1..75: mol_type = other DNA
gcaaaaaacagtactgaaacggaagtaacagccaaaaattcccaagagcaacttcctttactcccgccagcggat

SEQ ID NO: 458616 - DNA, 75 bp, synthetic construct
  source 1..75: mol_type = other DNA
taaaacggtaagctggtcaatgaagaggtggaaaacaatgctgcgaccgataaagcgccatccactcatacttca

SEQ ID NO: 458617 - DNA, 75 bp, synthetic construct
  source 1..75: mol_type = other DNA
tcttatatcggcacgcagatggtggtgacctttgctctcgccacgctcgaaaacgtctttggtccggtttacgac

SEQ ID NO: 458618 - DNA, 75 bp, synthetic construct
  source 1..75: mol_type = other DNA
ctggcaaagcgactggcggatcagtgaaagtgaagcgatggcggcacgggaatgtaacctggagaatatctgcca

SEQ ID NO: 458619 - DNA, 75 bp, synthetic construct
  source 1..75: mol_type = other DNA
ttagcctcagaaatcaacaaactgcagcatgccattgccgaaggtcagtgctggcaaagcgactggcggatcact

SEQ ID NO: 458620 - DNA, 75 bp, synthetic construct
  source 1..75: mol_type = other DNA
ggtcatggggggacgcactttcaaaggtcgagaaaccgaaagtaagaaattactaacctggggcttccgtttctt

SEQ ID NO: 458621 - DNA, 75 bp, synthetic construct
  source 1..75: mol_type = other DNA
ttctggcgagcgcgatggatgaagtcgcctgggagcacggactgcggctggtcagacgtaagcaaatgggaggaa

SEQ ID NO: 458622 - DNA, 75 bp, synthetic construct
  source 1..75: mol_type = other DNA
gtggtcgtgcgcttaacgctgtggtgtatcgttgtcggcctctacccgacgttattgatgacgttaatcggcgtg

SEQ ID NO: 458623 - DNA, 75 bp, synthetic construct
  source 1..75: mol_type = other DNA
agcgcactcagccgttctcctcaaattacacttgaagagacacccgcctcgcaggccatcctgccgaccttatta

SEQ ID NO: 458624 - DNA, 75 bp, synthetic construct
  source 1..75: mol_type = other DNA
aacatggggttgcggaggtgcaatcccctgacgctctcgcctgagctggcgcacccaactctcaagcgtggtaga

SEQ ID NO: 458625 - DNA, 75 bp, synthetic construct
  source 1..75: mol_type = other DNA
taaaacggtaaccagcatcctgatggcgtgggtatttactttaccggcggcgatttttctttctggtgggttgta

SEQ ID NO: 458626 - DNA, 75 bp, synthetic construct
  source 1..75: mol_type = other DNA
tgtttgatctgttacaccttctacagcggcgtggactgggaaggcattcacacctgtatgctgacatgcgtgatc

SEQ ID NO: 458627 - DNA, 75 bp, synthetic construct
  source 1..75: mol_type = other DNA
ttcgcccgcttgccagactggacagccccggcattaacgcccgccacggaacaggcacaaggagccacgcaatga

SEQ ID NO: 458628 - DNA, 75 bp, synthetic construct
  source 1..75: mol_type = other DNA
ttcgtcgtaccagaagatggtgctgcgttttggcggggccttttgcggcgcgattctggcgctgttattcacgct

SEQ ID NO: 458629 - DNA, 75 bp, synthetic construct
  source 1..75: mol_type = other DNA
ctctgtggatacgctgagctatatccgcatcccgattgattatcaagatgactggactgcacccacctttcgcgc

SEQ ID NO: 458630 - DNA, 75 bp, synthetic construct
  source 1..75: mol_type = other DNA
cgtatattattatgaatacctccgcgattgtgctggcatggccaatgctttctatcattgtagataaaagctatg

SEQ ID NO: 458631 - DNA, 75 bp, synthetic construct
  source 1..75: mol_type = other DNA
tttgctatctggttgcgtatgaatctgaaagaaagcccggtctttgagaaggttaacgacagcaaccaaccgaca

SEQ ID NO: 458632 - DNA, 75 bp, synthetic construct
  source 1..75: mol_type = other DNA
ctttttctgcttctgccggaggaatatggcccagcctttccagcaatcgtcgattgttataccagtccacccacg

SEQ ID NO: 458633 - DNA, 75 bp, synthetic construct
  source 1..75: mol_type = other DNA
gcgtaccgtcgcacgctgacttccaggcacagcaaggattagccgacaagccgctgattgataaagagatcggcg

SEQ ID NO: 458634 - DNA, 75 bp, synthetic construct
  source 1..75: mol_type = other DNA
tgaatacttcagctattgtcctggcgtggccaatgctttctatcattgtagataaaagctatgcaccgggcacca

SEQ ID NO: 458635 - DNA, 75 bp, synthetic construct
  source 1..75: mol_type = other DNA
tccttgctggttatttagtgcaaactttgctgtttaataaagcaattcccgcagatgcattaatgatcagttcta

SEQ ID NO: 458636 - DNA, 75 bp, synthetic construct
  source 1..75: mol_type = other DNA
gttgaccagactgcatctaactccagcgttaacgtgacccaggttggctttggcaacaacgcgactgcccatcag

SEQ ID NO: 458637 - DNA, 75 bp, synthetic construct
  source 1..75: mol_type = other DNA
tacggcggcggcggcaaccacggcggtggcggtaataacagcggcccgaattcagagttgaatatttatcagtac

SEQ ID NO: 458638 - DNA, 75 bp, synthetic construct
  source 1..75: mol_type = other DNA
ttatgctaaacatgctgcaaattatcaaaaatataaagtaattgttgacatcccggaatacggtgctgaacgttg

SEQ ID NO: 458639 - DNA, 75 bp, synthetic construct
  source 1..75: mol_type = other DNA
tcaggtgctgatactgaactcaccgggaggcacccggcaccatgcaaaattgtctacactaccactgtaaaaagc

SEQ ID NO: 458640 - DNA, 75 bp, synthetic construct
  source 1..75: mol_type = other DNA
acggtacatagcgctactctccagcccctctccggaggggctttttaatgaggggaagacactgggcagtgaaat

SEQ ID NO: 458641 - DNA, 75 bp, synthetic construct
  source 1..75: mol_type = other DNA
aaggttctgatgacagctcaatcgatctgactcagcgtggtttcggcaacagcgctactcttgatcagtggaatg

SEQ ID NO: 458642 - DNA, 75 bp, synthetic construct
  source 1..75: mol_type = other DNA
ggcctgaaaccgcgccagtacgatccgcagaaagcgaaagcgttgctggaacaagcaggctggacgctgcccgca

SEQ ID NO: 458643 - DNA, 75 bp, synthetic construct
  source 1..75: mol_type = other DNA
ggaccactcaaggccgcgccctcactgtcctttctcgggctcgcggtgatggatgaactttgcgcccgtcatatc

SEQ ID NO: 458644 - DNA, 75 bp, synthetic construct
  source 1..75: mol_type = other DNA
tggtttgtagctaaagatgtttgtgatgctttagctttgactaactcacgcaaggcgcttactgcacttgatgac

SEQ ID NO: 458645 - DNA, 75 bp, synthetic construct
  source 1..75: mol_type = other DNA
aaagtttgcatctggagttgagcgaagacgtattagctgaaattgaagcggtgcatcaggtttatacgtatcctg

SEQ ID NO: 458646 - DNA, 75 bp, synthetic construct
  source 1..75: mol_type = other DNA
gaacgcgaaatgacaatggtgatggactcatatcgcctgttcaacgttgggctgcgtcgtcctgactgcgttatc

SEQ ID NO: 458647 - DNA, 75 bp, synthetic construct
  source 1..75: mol_type = other DNA
atgaaaacacccttaccgcccgtcttacgcgcagccctttaccgtcgtgctgtcgcctgtgcctggctgaccgtg

SEQ ID NO: 458648 - DNA, 75 bp, synthetic construct
  source 1..75: mol_type = other DNA
cgtggcctgtgcatggctaaccctgtgcgaacgtcagcaccgctatccgcaactcaccctcgatgcactcgaaag

SEQ ID NO: 458649 - DNA, 75 bp, synthetic construct
  source 1..75: mol_type = other DNA
agctggcagtacgtgaagctcttaattacgcggtaaacaaaaaatcgctgattgataacgcgttgtatggcaccc

SEQ ID NO: 458650 - DNA, 75 bp, synthetic construct
  source 1..75: mol_type = other DNA
caccctgaaaagcgcctactatcctttcctgcaagaactggccctgccccgtcctttccgttttatcgccccctc

SEQ ID NO: 458651 - DNA, 75 bp, synthetic construct
  source 1..75: mol_type = other DNA
aaatcgatggcggaaatcattcaggctgatatgcgccagattggcgcagatgtctcgctgattggcgaagaagag

SEQ ID NO: 458652 - DNA, 75 bp, synthetic construct
  source 1..75: mol_type = other DNA
ctaaagatgtttgtgatgctttagctttgactaactcacgcaaggcgcttactgcacttgatgacgatgaaaagg

SEQ ID NO: 458653 - DNA, 75 bp, synthetic construct
  source 1..75: mol_type = other DNA
acacacgagatgttgatatcaatgagccagacggaccaacaaatctttctgcatggataaggcttaagaataaag

SEQ ID NO: 458654 - DNA, 75 bp, synthetic construct
  source 1..75: mol_type = other DNA
attgaactgtcgttcatcggcaccgatgcgttaagcaaatcgatggcggaaatcattcaggctgatatgcgccag

SEQ ID NO: 458655 - DNA, 75 bp, synthetic construct
  source 1..75: mol_type = other DNA
ataataaaatcttatcaaaaaatatattcctgtcttaccaggcatttgtcaacaaagatttttccactgctcaat

SEQ ID NO: 458656 - DNA, 75 bp, synthetic construct
  source 1..75: mol_type = other DNA
agagcagtttgcttttgttgccggtatttcgccacattttacaacagctaaatataatttggcaaagtcattaag

SEQ ID NO: 458657 - DNA, 75 bp, synthetic construct
  source 1..75: mol_type = other DNA
ctggaacagacagcccgggcttacattgaatcgcatggtgctgttgaacgtcatcttgggtgtagtgacttttaa

SEQ ID NO: 458658 - DNA, 75 bp, synthetic construct
  source 1..75: mol_type = other DNA
gtgcggagagttacgccccggcacgcgcatatctgatgatgatgtacgtcttatacgtgcgctgcgtgattccga

SEQ ID NO: 458659 - DNA, 75 bp, synthetic construct
  source 1..75: mol_type = other DNA
ggtgttcctaatcgcccacttattattggcgcgggagccattataggtatgggggctgttgtcactaaaagtgtt

SEQ ID NO: 458660 - DNA, 75 bp, synthetic construct
  source 1..75: mol_type = other DNA
gcgacaacctgaatgcgggcagtcgcaccatcgctttccaacaaagtttgtttctcaacgcctttgccctgattg

SEQ ID NO: 458661 - DNA, 75 bp, synthetic construct
  source 1..75: mol_type = other DNA
ctatcaggaagtatttgcacagccacatttgattgacgaaaacgagcctttattcagtgacattcaaccgcggct

SEQ ID NO: 458662 - DNA, 75 bp, synthetic construct
  source 1..75: mol_type = other DNA
aatatctattcgaagcgaatgcagattgaagaaaccttccgagacttgaaaagtccggcactgttgcaaagttag

SEQ ID NO: 458663 - DNA, 75 bp, synthetic construct
  source 1..75: mol_type = other DNA
aaaaaactcagagcttgctcatcttttcctcgatacgatgagttgtaaatatatatccagggaggttagggaggt

SEQ ID NO: 458664 - DNA, 75 bp, synthetic construct
  source 1..75: mol_type = other DNA
gctgctgctacacatcctaaaattaaattattacagtttaaattaataccttgccctggtattaataaggcaatt

SEQ ID NO: 458665 - DNA, 75 bp, synthetic construct
  source 1..75: mol_type = other DNA
gatagtgcctcgatggctgaactctgcgccctgataagcgcccttgccgatgtgccggtgaatcagagtatcgct

SEQ ID NO: 458666 - DNA, 75 bp, synthetic construct
  source 1..75: mol_type = other DNA
gcttctttgctatttgccagcaacgtgagttaaccgggaaacaaggtgtcattatccccacagctaacgttcgcc

SEQ ID NO: 458667 - DNA, 75 bp, synthetic construct
  source 1..75: mol_type = other DNA
tcgcctgccgggtcagcagtatgatgaggagtccggcctgtattacaaccgccaccgctattatgacccgctgct

SEQ ID NO: 458668 - DNA, 75 bp, synthetic construct
  source 1..75: mol_type = other DNA
ataaagatgggatgacagtttggttattttcttgtaatacaggtaaaggacaaaattcatttgctagccaattag

SEQ ID NO: 458669 - DNA, 75 bp, synthetic construct
  source 1..75: mol_type = other DNA
aatctggcgatacgtatttgcataccgtgccgaaatattatccgcatttgtatggtgagaaagaggggggcggta

SEQ ID NO: 458670 - DNA, 75 bp, synthetic construct
  source 1..75: mol_type = other DNA
ctgtgcaaccagaaaggtgtggaacgtctcgataaaggcggtctgcctggctgcgtagaagtgtgcccggcgggc

SEQ ID NO: 458671 - DNA, 75 bp, synthetic construct
  source 1..75: mol_type = other DNA
acgcacgactcttgggaagaaaaactcggcgcacgcgtcaacattgaaatcgatccacaaactcaggcagtggta

SEQ ID NO: 458672 - DNA, 75 bp, synthetic construct
  source 1..75: mol_type = other DNA
acggtctggaaaccggtgcctccgtggcgcataacggttgctgcctgaccgtgacggaaattaacggcaaccatg

SEQ ID NO: 458673 - DNA, 75 bp, synthetic construct
  source 1..75: mol_type = other DNA
aattataattatttttttataataagcctattgtattattataaagaccactctgttttcgaagataaaaagaaa

SEQ ID NO: 458674 - DNA, 75 bp, synthetic construct
  source 1..75: mol_type = other DNA
ctgccgttgcaacaggggctggcactgtctgcaatcccggtgatttttacgtcgtttggttttcacggtagcgtg

SEQ ID NO: 458675 - DNA, 75 bp, synthetic construct
  source 1..75: mol_type = other DNA
ttgttcacttttgttgccggtggcgtggtttgtgtcggaacttcgctggtcgatttatttaaccgttttctgttc

SEQ ID NO: 458676 - DNA, 75 bp, synthetic construct
  source 1..75: mol_type = other DNA
atggaaggttccgattttttactcgcaggagtgctgtttctcttcgcggctggggattggcgctgtgttgggata

SEQ ID NO: 458677 - DNA, 75 bp, synthetic construct
  source 1..75: mol_type = other DNA
tttaaccgaagcgctcgacacgacattaggactgcttacaaaaacaggacgagactggaacacgcagcatactga

SEQ ID NO: 458678 - DNA, 75 bp, synthetic construct
  source 1..75: mol_type = other DNA
tgtctgcaatcccggtgatttttacctcgtttggttttcacggtagcgtgccgagtattgtcagctatatggatg

SEQ ID NO: 458679 - DNA, 75 bp, synthetic construct
  source 1..75: mol_type = other DNA
gtgaaaaacagaactctgggaagtgtttttatcgtggcaggaaccacaattggcgcgggtatgttggcaatgccg

SEQ ID NO: 458680 - DNA, 75 bp, synthetic construct
  source 1..75: mol_type = other DNA
tttgctggcgtattgagccagggcggcgagtttgcctttgtcctcttttcttccgcgtcttcacaacgcttattc

SEQ ID NO: 458681 - DNA, 75 bp, synthetic construct
  source 1..75: mol_type = other DNA
ggcgctccatttttggcgtcggcgcagcgcaggtgctgttaagcgcggcgttgctggcaggattattgatgctga

SEQ ID NO: 458682 - DNA, 75 bp, synthetic construct
  source 1..75: mol_type = other DNA
caagttgaccttttacgctccgcaggcgcagaggccgcagagtctatcgttattacctgtaacgaaccggaagac

SEQ ID NO: 458683 - DNA, 75 bp, synthetic construct
  source 1..75: mol_type = other DNA
catgccgataccgtacaaatttctcgcgccagggaagcccgacgcgaactggaagagattttccagcgtgaaatg

SEQ ID NO: 458684 - DNA, 75 bp, synthetic construct
  source 1..75: mol_type = other DNA
tggaaatatgccagcagcactttccgcatttgcatattcttgcgcgagcgcgcgagcgcgcggacgtgtggaagc

SEQ ID NO: 458685 - DNA, 75 bp, synthetic construct
  source 1..75: mol_type = other DNA
aatgtcgctcaacctcggtgtgctttatacccatctgttgtgggtggtgttaagcgttattgtgttggtggcggt

SEQ ID NO: 458686 - DNA, 75 bp, synthetic construct
  source 1..75: mol_type = other DNA
ctacgtaaaaatctggcaacagcaggcacccggatcagcactctggaaaatcaggtaagcgaactggttgcactt

SEQ ID NO: 458687 - DNA, 75 bp, synthetic construct
  source 1..75: mol_type = other DNA
gagcacggtacccggcattacctatgctcagctggtggcgcagtccaccagcattgatataaaacgcgctaacaa

SEQ ID NO: 458688 - DNA, 75 bp, synthetic construct
  source 1..75: mol_type = other DNA
cgacgctgaaagtgcagggcgttgatttgcaagattacgctaaccgattaattgcacgctatagcaacccggcgc

SEQ ID NO: 458689 - DNA, 75 bp, synthetic construct
  source 1..75: mol_type = other DNA
acggcgaagtggcaccaccgaaagaagatccggtgccattacctgagctgccgtgcgaaaaatcagatgcttatt

SEQ ID NO: 458690 - DNA, 75 bp, synthetic construct
  source 1..75: mol_type = other DNA
attaaactgattaacggtaaatatgtaggtgaaagcctgaaagttaatagcacctctatgctaaaagcgcggttg

SEQ ID NO: 458691 - DNA, 75 bp, synthetic construct
  source 1..75: mol_type = other DNA
tgaaaccaagctaagaacattatcattaatccatcctcgttcacaatataattatattgagttttacaatcaatt

SEQ ID NO: 458692 - DNA, 75 bp, synthetic construct
  source 1..75: mol_type = other DNA
aacacaaccttgcattgatatctgttaatgcctcggatgagtcggtccaccagcatcaccgtgtcagaattcgat

SEQ ID NO: 458693 - DNA, 75 bp, synthetic construct
  source 1..75: mol_type = other DNA
atgatgtcgcgcgaggttttaacagaacggctgctggaagctgaaattgccctgcacaaattattaacgggtaga

SEQ ID NO: 458694 - DNA, 75 bp, synthetic construct
  source 1..75: mol_type = other DNA
tattgcactccctccccattaaaacctttgctgatttatttgtgacgatactgttatttatagcgattatcgctg

SEQ ID NO: 458695 - DNA, 75 bp, synthetic construct
  source 1..75: mol_type = other DNA
tgaaacagatgatcgcgttaccgcgctggaagaagaaaacgcagaattaaaacaaagattatctgcaattgaggc

SEQ ID NO: 458696 - DNA, 75 bp, synthetic construct
  source 1..75: mol_type = other DNA
ctgttattcagaaggctgtacaaagtagtgccgaagggaaagcgcgcgtccagtcattgctggcgattaaggcga

SEQ ID NO: 458697 - DNA, 75 bp, synthetic construct
  source 1..75: mol_type = other DNA
tgagcggttacgagcaatttaaccgcccggcctttcattccgcagcaaagaggctaacggacaagggatatgttg

SEQ ID NO: 458698 - DNA, 75 bp, synthetic construct
  source 1..75: mol_type = other DNA
cggttcgttcactgccggactgcctcttgtttacccggactggcttgcccctgaccatctcacggtttactggcg

SEQ ID NO: 458699 - DNA, 75 bp, synthetic construct
  source 1..75: mol_type = other DNA
gttatcattaccacttgatcctacaatgagtgaagaagaggttcgatatgtaattaatataataaatggttttaa

SEQ ID NO: 458700 - DNA, 75 bp, synthetic construct
  source 1..75: mol_type = other DNA
gaataaatgctcaatatgaaatggaattaaaagatgcttgctccagagttattgattctggttggtatattatgg

SEQ ID NO: 458701 - DNA, 75 bp, synthetic construct
  source 1..75: mol_type = other DNA
gtttagatgccttaactttagtactacgtgcatggaaagaacttgggaaaataaaggctggtgatgaagtcattg

SEQ ID NO: 458702 - DNA, 75 bp, synthetic construct
  source 1..75: mol_type = other DNA
gcttggggaaacgcttcaggtttcagcttctatccaggtaaaaaccttggcgcattgggtgatgccggggccgtt

SEQ ID NO: 458703 - DNA, 75 bp, synthetic construct
  source 1..75: mol_type = other DNA
tcggaattgacatgccattccaggatgatccaaccgacgaatgggcgatacgtgatggtgactggaaaatgatca

SEQ ID NO: 458704 - DNA, 75 bp, synthetic construct
  source 1..75: mol_type = other DNA
atttcgtactggaattcgctcatggattccttcaggcaaagatgttgccttagggcgtaacgaactcacgattgc

SEQ ID NO: 458705 - DNA, 75 bp, synthetic construct
  source 1..75: mol_type = other DNA
aagtatgccgtaggagttgctaatggtttagatgctctaacattggtacttagggcttggaagataatggggagg

SEQ ID NO: 458706 - DNA, 75 bp, synthetic construct
  source 1..75: mol_type = other DNA
tggttcccatgttaaatatgaaaatatttaccaaggtataaacagtcgcttggatgaatttcaggctgcagtact

SEQ ID NO: 458707 - DNA, 75 bp, synthetic construct
  source 1..75: mol_type = other DNA
aattcttgctataacaaataataatctcgttccggtgttcattgaaccagatgaaacgacttttaatttaaatcc

SEQ ID NO: 458708 - DNA, 75 bp, synthetic construct
  source 1..75: mol_type = other DNA
gctggcagggatgagtctgggatttttgattgtgatgttactgtgtgcgggcatttcattttcactggcagtgat

SEQ ID NO: 458709 - DNA, 75 bp, synthetic construct
  source 1..75: mol_type = other DNA
tacatttgtatgggcaaatatcaccaatgcaagaaattatcgaatttgcccgtgaaagaaatttgttagtattag

SEQ ID NO: 458710 - DNA, 75 bp, synthetic construct
  source 1..75: mol_type = other DNA
atcaataccattagatccaacaatgtcagataatgaagtcgagcaagttataaagattataaacggctttggtaa

SEQ ID NO: 458711 - DNA, 75 bp, synthetic construct
  source 1..75: mol_type = other DNA
tgtacacgcagaaagcgctaaggtatcgccagaagggagaccgcgaaggaatgcgcgtatgcctaaatgcggcaa

SEQ ID NO: 458712 - DNA, 75 bp, synthetic construct
  source 1..75: mol_type = other DNA
aagcatactggattatattgaacaggaacagttaactgccgaaaaacgtaaccattgtatgaggctgtctaaaaa

SEQ ID NO: 458713 - DNA, 75 bp, synthetic construct
  source 1..75: mol_type = other DNA
gaactcattataagtctcctcatagaatacacatcgatagcgacacaccaacgccttcatcagagcctattaatc

SEQ ID NO: 458714 - DNA, 75 bp, synthetic construct
  source 1..75: mol_type = other DNA
cacatcacggaagagtgcaggtggaatcggacgtacactcaacgcgttttatcttatccgtgcccagactggaga

SEQ ID NO: 458715 - DNA, 75 bp, synthetic construct
  source 1..75: mol_type = other DNA
aacaaccagctaatccccgaaaagaaaatgctcaacctggcggatgaagtcggcaaagtgttcgattttttcgag

SEQ ID NO: 458716 - DNA, 75 bp, synthetic construct
  source 1..75: mol_type = other DNA
tgatgccaggccacggtcacggacatatggaacacagcaactggcggatgattaacttgccggttggcccgctgg

SEQ ID NO: 458717 - DNA, 75 bp, synthetic construct
  source 1..75: mol_type = other DNA
tgccctttttaccattaactttgccacttcacccatccatgcagaaaatatactcattacattacactataaaaa

SEQ ID NO: 458718 - DNA, 75 bp, synthetic construct
  source 1..75: mol_type = other DNA
gaacagttaactgccgaaaatcgtaaccattgtatgaaactgtctaaaaaatccatagagaaaaaactatacaac

SEQ ID NO: 458719 - DNA, 75 bp, synthetic construct
  source 1..75: mol_type = other DNA
actattttttgtcgccatccgtcattacaatacgcccttgattcattgcgaaatggaaaaggcaaagtcaacctg

SEQ ID NO: 458720 - DNA, 75 bp, synthetic construct
  source 1..75: mol_type = other DNA
atgagtcaaaacgatatcattatcagaactcattataagtctcctcatagcttgcacatcgatagcgacatacca

SEQ ID NO: 458721 - DNA, 75 bp, synthetic construct
  source 1..75: mol_type = other DNA
ctgcctggttgagggagatccacaaatgttcagaagggcgatcaataatctgttatccaatgccctgcgttatac

SEQ ID NO: 458722 - DNA, 75 bp, synthetic construct
  source 1..75: mol_type = other DNA
accgctattatgacccgctgcaggggcggtatatcactcaggatccgattgggctgaaggggggatggaattttt

SEQ ID NO: 458723 - DNA, 75 bp, synthetic construct
  source 1..75: mol_type = other DNA
tcacctccgagaatcttgatgcgcgactggaaccgacacgcgttcccattgagctggagcaactggttatctcgt

SEQ ID NO: 458724 - DNA, 75 bp, synthetic construct
  source 1..75: mol_type = other DNA
cacattccattcctcggtacggtaggttccatcagcccatatattggtctgtttggtacagtctgggggatcatg

SEQ ID NO: 458725 - DNA, 75 bp, synthetic construct
  source 1..75: mol_type = other DNA
gacttgcgtcaggagcgtgaacaactgggccgctttatgcagatggtggttgagcataaacataaaatcggcttc

SEQ ID NO: 458726 - DNA, 75 bp, synthetic construct
  source 1..75: mol_type = other DNA
caatctggagtttatcagctactggaattccggtgtattggcagaccctgataatcacctgacccacgaagagcg

SEQ ID NO: 458727 - DNA, 75 bp, synthetic construct
  source 1..75: mol_type = other DNA
cggatccctggcccgttaatatgcaatcaggtggcgttttcgcggatccctggcccgttaatatatcccggctga

SEQ ID NO: 458728 - DNA, 75 bp, synthetic construct
  source 1..75: mol_type = other DNA
gacttaacagcaccagtggccggatggcacggcaggcatatgactggctgagtctggcaccactctttctggata

SEQ ID NO: 458729 - DNA, 75 bp, synthetic construct
  source 1..75: mol_type = other DNA
gatctgttctacggtcatattggggcgatggatacgatggcgctgtcactgaaaattgcagcccgcatgattgaa

SEQ ID NO: 458730 - DNA, 75 bp, synthetic construct
  source 1..75: mol_type = other DNA
accagttcccgaacagtgtggaagagaatgcgctggtgatgtatgaaattctcaaagcaggcggtttcaccaccg

SEQ ID NO: 458731 - DNA, 75 bp, synthetic construct
  source 1..75: mol_type = other DNA
aagttgcttttggacgtcatatgttatacgcgggagctggcaaaaaacggtgtcacgctgtttggtgtaggtgaa

SEQ ID NO: 458732 - DNA, 75 bp, synthetic construct
  source 1..75: mol_type = other DNA
aagttcatgtgattgatgtggggatagatactgcagagccaatccccggacttatccacatgcgtgtcgcccgag

SEQ ID NO: 458733 - DNA, 75 bp, synthetic construct
  source 1..75: mol_type = other DNA
atacaatccctgctatcgattctgccgctatgtcgcgcgtacaacggtatattgacgggttactaaaacccgtcg

SEQ ID NO: 458734 - DNA, 75 bp, synthetic construct
  source 1..75: mol_type = other DNA
ctatcattattttatgggaatgggtatttatcgtagtaaaggctttttctggctaccaggaagacctgacatggc

SEQ ID NO: 458735 - DNA, 75 bp, synthetic construct
  source 1..75: mol_type = other DNA
tcggcgatcgccgatgcacggatgacggccggggtggtgaacgccattgccgcataccatctggcattgctgcag

SEQ ID NO: 458736 - DNA, 75 bp, synthetic construct
  source 1..75: mol_type = other DNA
tagcagggcaggaaaagagtttgagtctattcttgagctattaatgatgggggcaggaattcctgttgatgtgca

SEQ ID NO: 458737 - DNA, 75 bp, synthetic construct
  source 1..75: mol_type = other DNA
gtttatggcgagaaggcactaagttaataaaagaacacgtagctaaagataacaaaaaaaatgaaagaacatatg

SEQ ID NO: 458738 - DNA, 75 bp, synthetic construct
  source 1..75: mol_type = other DNA
cgctcattgcaaaaaggtatcttgcactatatttctgacttaacaaaatcattaaactcaatgaactttgatatt

SEQ ID NO: 458739 - DNA, 75 bp, synthetic construct
  source 1..75: mol_type = other DNA
tgatcggccttgcagtttgcacaggaaatgtttttaaccctgcgttagcagcagaaactaaacaacctaacttag

SEQ ID NO: 458740 - DNA, 75 bp, synthetic construct
  source 1..75: mol_type = other DNA
tgcttctattcttgctataacagagaacaaacttgttcctgttcttgttgaaccagatatagaaacttataatat

SEQ ID NO: 458741 - DNA, 75 bp, synthetic construct
  source 1..75: mol_type = other DNA
tatcttacaaaacataatattcaaacagtcattcattatcctacaccacctcatcgacaactggcatataaagaa

SEQ ID NO: 458742 - DNA, 75 bp, synthetic construct
  source 1..75: mol_type = other DNA
ttacgaggagcataaaggaaaatttgagcaggctgaagctcagacatcatcaaaattaacaacgctcggaaataa

SEQ ID NO: 458743 - DNA, 75 bp, synthetic construct
  source 1..75: mol_type = other DNA
tcgcgctgcaacaggatttcttcgataaagtcttcccgaatattttgccgatggcttacaccctgttgatgtatt

SEQ ID NO: 458744 - DNA, 75 bp, synthetic construct
  source 1..75: mol_type = other DNA
atatcacccgtctgggctttcgttcgtcactgctacaagcgagctttaactacgaaaggatgcaggcgggcggct

SEQ ID NO: 458745 - DNA, 75 bp, synthetic construct
  source 1..75: mol_type = other DNA
tagatgattcttttagcgaggagacaataaatatattgtacgaggctaatgtggtcgttgtaacgacgatagaaa

SEQ ID NO: 458746 - DNA, 75 bp, synthetic construct
  source 1..75: mol_type = other DNA
ttctcaaactatccagcaaagttcaccgttatggctaactaatcagcaaagcggctgtagtgttcttattgttcg

SEQ ID NO: 458747 - DNA, 75 bp, synthetic construct
  source 1..75: mol_type = other DNA
agcgtcagtgagggaaatggcggttttattttaatgctggtgatgatttctctgtcgtatatatttctctctttc

SEQ ID NO: 458748 - DNA, 75 bp, synthetic construct
  source 1..75: mol_type = other DNA
tatcgctgctaaaaattgccgggttaacaaccctggttgtcgggattgtgttgattaaatctggtacacgcaaag

SEQ ID NO: 458749 - DNA, 75 bp, synthetic construct
  source 1..75: mol_type = other DNA
ccctcttaccgtcagtgggtcgaaattcaggctgctcagggagacagggctgctgtatcgcagttgagaggctgg

SEQ ID NO: 458750 - DNA, 75 bp, synthetic construct
  source 1..75: mol_type = other DNA
ttaatttcaccagtaactctgtgggtgatggtgtgaattttgttgctgtcagaccgcgcaatattgcatttaact

SEQ ID NO: 458751 - DNA, 75 bp, synthetic construct
  source 1..75: mol_type = other DNA
caccaataaattaccggatttacgcggtgaatttatccgtggctgggatgatgggcgcgggattgatgcggggcg

SEQ ID NO: 458752 - DNA, 75 bp, synthetic construct
  source 1..75: mol_type = other DNA
acaatacgcttaccaatttgagtggaaaggatgtagctggtcttctcacataccttggtttgggagaaggttcgg

SEQ ID NO: 458753 - DNA, 75 bp, synthetic construct
  source 1..75: mol_type = other DNA
gtggaggcatccggtgccagcctggagaaggggcggcacgatcagcttcttaccgcgcttcgtgcgctgctgtta

SEQ ID NO: 458754 - DNA, 75 bp, synthetic construct
  source 1..75: mol_type = other DNA
ggctctcgaaaacctgggaatgacagacattctgaatgataaacaggataaaaatgataatctgacatcattgtc

SEQ ID NO: 458755 - DNA, 75 bp, synthetic construct
  source 1..75: mol_type = other DNA
ttgccgacattatcagcgttatcgatggtattgccttccagactaatatcctcgcgctgaatgccgcggttgaag

SEQ ID NO: 458756 - DNA, 75 bp, synthetic construct
  source 1..75: mol_type = other DNA
taacccgctggcaaaaatcattacccacatccgtgaaattgcgggtggtaacctggcgaataacctggccattgc

SEQ ID NO: 458757 - DNA, 75 bp, synthetic construct
  source 1..75: mol_type = other DNA
gcgcagagcgtttcacatatgcaacgctctttgactgacaccgtcactcatgtccgcgaaggttcagatgccatc

SEQ ID NO: 458758 - DNA, 75 bp, synthetic construct
  source 1..75: mol_type = other DNA
tgcctgttccgtggccttccgccactccgccaacaggctggctgaaatgcaacggggcggctttttctgctgaag

SEQ ID NO: 458759 - DNA, 75 bp, synthetic construct
  source 1..75: mol_type = other DNA
atgaaaaatataaaaactattacacagcgttaactgaactgattgattatcttgattatggcaatactggagctt

SEQ ID NO: 458760 - DNA, 75 bp, synthetic construct
  source 1..75: mol_type = other DNA
cattgatcaagtggcgcaggccgtgtcggaaatggatcgtgtgactcaacagaacgcctcgttggtgcaggagtc

SEQ ID NO: 458761 - DNA, 75 bp, synthetic construct
  source 1..75: mol_type = other DNA
acccggaactggcaaaggcttacccgaccaataaattgcctgatttacgtggtgagtttattcgtggctgggatg

SEQ ID NO: 458762 - DNA, 75 bp, synthetic construct
  source 1..75: mol_type = other DNA
aggctctgcattacctgtcggtgtgcctgttccgtggccttacgccactccgccgacaggctggctgaaatgcaa

SEQ ID NO: 458763 - DNA, 75 bp, synthetic construct
  source 1..75: mol_type = other DNA
ccgttggtgtgcctgttccgtggccctcagccactccgccaacaggctggctaaaatgcaacggagcagcttttt

SEQ ID NO: 458764 - DNA, 75 bp, synthetic construct
  source 1..75: mol_type = other DNA
caacggagcagctttttctgctgaagaatacccggagctggcaaaggcttacccgacaaataaattgcctgattt

SEQ ID NO: 458765 - DNA, 75 bp, synthetic construct
  source 1..75: mol_type = other DNA
ccggaactggcaaaggcttacccgacaaataaattacctgatttacgtggtgagtttattcgtggctgggatgac

SEQ ID NO: 458766 - DNA, 75 bp, synthetic construct
  source 1..75: mol_type = other DNA
tacccggaactggcaaaggcttacccgacaaataaattgcctgatttacgaggtgaatttattcgtggctgggat

SEQ ID NO: 458767 - DNA, 75 bp, synthetic construct
  source 1..75: mol_type = other DNA
ttttcataaacgttggtttgggagaaggctctgcattgcctgttggtgtgcctgttccgtggccttcagccactc

SEQ ID NO: 458768 - DNA, 75 bp, synthetic construct
  source 1..75: mol_type = other DNA
agtgggaaagcggcatataccagattgaggtctctgaccccgttctgggcggacctgacggaatttctaaccgcc

SEQ ID NO: 458769 - DNA, 75 bp, synthetic construct
  source 1..75: mol_type = other DNA
attacctgttggggtgcctgttccatggccttcagccacaccgccaacaggctggctgaaatgcaacggtgcggc

SEQ ID NO: 458770 - DNA, 75 bp, synthetic construct
  source 1..75: mol_type = other DNA
cctttacaaaagaacaatatcctgttctggccagagtctacccgaccctccgtcttcccgatttacgcggtgagt

SEQ ID NO: 458771 - DNA, 75 bp, synthetic construct
  source 1..75: mol_type = other DNA
tgcaatcagaggggctttttacgatgcaggaacacgatcagcgacaatggcgaataacacaactgctataggcaa

SEQ ID NO: 458772 - DNA, 75 bp, synthetic construct
  source 1..75: mol_type = other DNA
tgtagcaattccattaattatttctggcgttcggagaccacttattatccagtggggagtggggcagtttggggg

SEQ ID NO: 458773 - DNA, 75 bp, synthetic construct
  source 1..75: mol_type = other DNA
aggttctccagctattggcgttccgttcttctggccgtccgctgcaatgccaaatactgtaatcgacagctggtc

SEQ ID NO: 458774 - DNA, 75 bp, synthetic construct
  source 1..75: mol_type = other DNA
tagcgattatgttctagcatcatcagataactccataacaggcactcaaaggacggcagaggataattttaccgg

SEQ ID NO: 458775 - DNA, 75 bp, synthetic construct
  source 1..75: mol_type = other DNA
cccgacaaataaattgcctgatttacgtggtgagtttattcgtggctgggatgatgggcgcggggtagatgccgg

SEQ ID NO: 458776 - DNA, 75 bp, synthetic construct
  source 1..75: mol_type = other DNA
gactgctgctttcaagtcaggcagcatctatccttgaacataaccatgaaatgcatggatggacagggaacccac

SEQ ID NO: 458777 - DNA, 75 bp, synthetic construct
  source 1..75: mol_type = other DNA
taacccccagaccggcacgcctgccaccgatctggatgatgactactttgacatgttgcaggaggagctttgcag

SEQ ID NO: 458778 - DNA, 75 bp, synthetic construct
  source 1..75: mol_type = other DNA
gttcctcgaaccggttaccggttcgttcgccgtttatgcgcatcgttatatgagcccgttctttggctatctcac

SEQ ID NO: 458779 - DNA, 75 bp, synthetic construct
  source 1..75: mol_type = other DNA
caaagcgagtaacatttgatgcttccagagttgttccaactgcaaacgaaaaccgtccgcgtaatattgcattta

SEQ ID NO: 458780 - DNA, 75 bp, synthetic construct
  source 1..75: mol_type = other DNA
tattattttgatgcatcacgtgttgccagaacatcaacggaaacacgtgcgcgaaatattgcatttaactttatc

SEQ ID NO: 458781 - DNA, 75 bp, synthetic construct
  source 1..75: mol_type = other DNA
gtattcgacgcctctcgtgtcgtgccaacagctaatgaaaaccgtcctcgtaatattgcctttaattatatcgta

SEQ ID NO: 458782 - DNA, 75 bp, synthetic construct
  source 1..75: mol_type = other DNA
ttgggggaaggctcggcgctgcctgttggcgtgccggttccatggccgtcagccacaccgccagagggctggctg

SEQ ID NO: 458783 - DNA, 75 bp, synthetic construct
  source 1..75: mol_type = other DNA
atttattgagggttatggagcttataactggacattcgacgcttctcgagcggttcgtacagcatctgaaacccg

SEQ ID NO: 458784 - DNA, 75 bp, synthetic construct
  source 1..75: mol_type = other DNA
aaaccatcttttcatcagcaaaaacagttggtgtggattactggtctaacagtgaaagagtttttacttatacca

SEQ ID NO: 458785 - DNA, 75 bp, synthetic construct
  source 1..75: mol_type = other DNA
taggagaaggctcagcattgcctgttggcgtacctgttccgtggccctcagccactccgccaacaggctggctga

SEQ ID NO: 458786 - DNA, 75 bp, synthetic construct
  source 1..75: mol_type = other DNA
acgcggtgagtttattcgtggctgggatgacgggcgcggagtagatacaggacgtgttttattaagtaatcaaac

SEQ ID NO: 458787 - DNA, 75 bp, synthetic construct
  source 1..75: mol_type = other DNA
gcgaatctggcggcggtgcggttgtacggcgaaatcgagttctggttcgcgatgatcaaagtcaccacgattatc

SEQ ID NO: 458788 - DNA, 75 bp, synthetic construct
  source 1..75: mol_type = other DNA
gttttttattgatatttggcattgtgttgaatgtttatgctaattctgagtttacaaaaaataatagtgtgtcat

SEQ ID NO: 458789 - DNA, 75 bp, synthetic construct
  source 1..75: mol_type = other DNA
aatttacccgccactccggcattacactgctgatggaagatctaaacgacggtttacgcacacccggcgcaatta

SEQ ID NO: 458790 - DNA, 75 bp, synthetic construct
  source 1..75: mol_type = other DNA
atatattgaatttggtagaatttgtaggccggataaggcgttttagccgcatccggtataaacaaagcgcactat

SEQ ID NO: 458791 - DNA, 75 bp, synthetic construct
  source 1..75: mol_type = other DNA
ccccagaccggcactcctgccaccgatctggatgatgactactttgacatgttgcaggaggagctttgcagcgtt

SEQ ID NO: 458792 - DNA, 75 bp, synthetic construct
  source 1..75: mol_type = other DNA
aaggcatcactcagctcagtagtgccactaacagcacgtctgaagtgctggccgccacaccgaaagctgtcaagg

SEQ ID NO: 458793 - DNA, 75 bp, synthetic construct
  source 1..75: mol_type = other DNA
accgacacttcattcacgaggaagtattggtaacactggtggtagtgaaactcgcccccgcaatatcgcatttaa

SEQ ID NO: 458794 - DNA, 75 bp, synthetic construct
  source 1..75: mol_type = other DNA
gcgattttcgttatcgtcaccatcttcccgtggaatgaaataggcagcaacggtagcccgttcgtactgactttc

SEQ ID NO: 458795 - DNA, 75 bp, synthetic construct
  source 1..75: mol_type = other DNA
cgcctggtcttactggtttatgtggatggcggtggggatctcagaaatcaccgccattggcgtttatgtccagtt

SEQ ID NO: 458796 - DNA, 75 bp, synthetic construct
  source 1..75: mol_type = other DNA
gcatcatctttatgctggcggtgacggcgatttataaagtttttgggcttaatcgccacggtaaagcgcataaac

SEQ ID NO: 458797 - DNA, 75 bp, synthetic construct
  source 1..75: mol_type = other DNA
accaccgagcagctttaccagcgccttaaagcgcgcggcgtgctgatggtgccaggacacaacttcttccctggg

SEQ ID NO: 458798 - DNA, 75 bp, synthetic construct
  source 1..75: mol_type = other DNA
cctggcatcatcttcagcgaagcgcgcccgctgtggaatccgaatatcgtgctgtgcatgagcctttccaagctg

SEQ ID NO: 458799 - DNA, 75 bp, synthetic construct
  source 1..75: mol_type = other DNA
caccgccatcaccaacatgaacggcattatcagcctggcgcctggcggtattggtccggcgatgatgtgtgaaat

SEQ ID NO: 458800 - DNA, 75 bp, synthetic construct
  source 1..75: mol_type = other DNA
tcctgctcaccgcagcgcgtcgctgctcgctggtgatcgacaacccggcaccggaagtcttcctggtggatctgc

SEQ ID NO: 458801 - DNA, 75 bp, synthetic construct
  source 1..75: mol_type = other DNA
gattttcgccaactttatctctggcctgattatcctgttcgaaaaaccgattcgcattggcgatacggtgacgat

SEQ ID NO: 458802 - DNA, 75 bp, synthetic construct
  source 1..75: mol_type = other DNA
aaggggcaattgaagtcgatgaaagcgaagtcgatctcgatgctatcagcgcgcaatccttgcggttggtgcgtt

SEQ ID NO: 458803 - DNA, 75 bp, synthetic construct
  source 1..75: mol_type = other DNA
tctgccttaaatgcgcttgaggaacgaaaaggttcccttgagcgcatcaagcaatatcaagaagttattgataat

SEQ ID NO: 458804 - DNA, 75 bp, synthetic construct
  source 1..75: mol_type = other DNA
gcgcgcagttaaacaacatgcgtgacgagccacgcagcgtgtcgccgggaatgtctaacgatgcgctgaatcagg

SEQ ID NO: 458805 - DNA, 75 bp, synthetic construct
  source 1..75: mol_type = other DNA
actcgatgcgtatttgcagacattacgcaaccagttaaacagccagcgccaactggaggcggaacgggcgctgga

SEQ ID NO: 458806 - DNA, 75 bp, synthetic construct
  source 1..75: mol_type = other DNA
gtggatacgggcggtgaagccggagtgacggataatgcctatcgtttctggcggcagtgccgccgcgaagggctg

SEQ ID NO: 458807 - DNA, 75 bp, synthetic construct
  source 1..75: mol_type = other DNA
gacgtgctgacgtgctgatgctgcgggcagaagactatggcaaacgacttgtgccgccgaaagtccgttttcttc

SEQ ID NO: 458808 - DNA, 75 bp, synthetic construct
  source 1..75: mol_type = other DNA
agtgcatcctgtgcggaggtcagatgcgtttttacggggctgaagcggggctaccgtctgacagagctggtcctg

SEQ ID NO: 458809 - DNA, 75 bp, synthetic construct
  source 1..75: mol_type = other DNA
aacagcttgataccgaaatggcgcagttgcgtgtgcaacggttacgttatgaggatctgcttaataaacagccgc

SEQ ID NO: 458810 - DNA, 75 bp, synthetic construct
  source 1..75: mol_type = other DNA
actgcttgaacagcgtgccgagccgtttccccggcgatctgtgccggatggtgtgcgttttattgaggcaacggt

SEQ ID NO: 458811 - DNA, 75 bp, synthetic construct
  source 1..75: mol_type = other DNA
atggaggggccggctgcggcgtttcagacctgggaacaactgatttttaaactgctggcggcagaagaagagtat

SEQ ID NO: 458812 - DNA, 75 bp, synthetic construct
  source 1..75: mol_type = other DNA
atcaccaaatatctgctgatgctaattggcgggctggtcggcttctcgatgattggtattgagtggtcgaaattg

SEQ ID NO: 458813 - DNA, 75 bp, synthetic construct
  source 1..75: mol_type = other DNA
ctgggatcttttgctcactgacgtctttgagaaaacgtggcctctggcatctgacccgtcaaagggcatgcggct

SEQ ID NO: 458814 - DNA, 75 bp, synthetic construct
  source 1..75: mol_type = other DNA
ggcgtaacgataacaacgtctacgatcgtacattccgcgccggtaactatctgaagctcggctggccatccgtca

SEQ ID NO: 458815 - DNA, 75 bp, synthetic construct
  source 1..75: mol_type = other DNA
ggtgatttttgttggtcctgcgcgaacagggaagaccattggtctgatcgatggatggattgtctataccatcgt

SEQ ID NO: 458816 - DNA, 75 bp, synthetic construct
  source 1..75: mol_type = other DNA
gcgcgtctcgctggataaggtcatcgaaacgatgtacgaaaccggtaaggacatgaacgctaaataccgcgaaac

SEQ ID NO: 458817 - DNA, 75 bp, synthetic construct
  source 1..75: mol_type = other DNA
gcggtagcccggaacaggtttgtgtggcagcggaaattggcatggagcacaacctcggtttgacctgcgaccccg

SEQ ID NO: 458818 - DNA, 75 bp, synthetic construct
  source 1..75: mol_type = other DNA
ggcagcgggcgcgattggtgcactgtataaaatgaacgcgtctatttccggtgcggaagtcggttgccagggcga

SEQ ID NO: 458819 - DNA, 75 bp, synthetic construct
  source 1..75: mol_type = other DNA
ccatgcccacggtatcgatatgccattcccgcccttccagatgcgtctggaaagcctcaacggtaaacaaacggg

SEQ ID NO: 458820 - DNA, 75 bp, synthetic construct
  source 1..75: mol_type = other DNA
ggtagtgatgatttgcgctacctttgcccgcccgaacggcttgtttatcgctcattttggctggccgcgcgaacg

SEQ ID NO: 458821 - DNA, 75 bp, synthetic construct
  source 1..75: mol_type = other DNA
cagttaaatgagatcgagcgccgcctgggaacgcttaccggcaataccccgcttaatcaggcgcaaaatttcgcg

SEQ ID NO: 458822 - DNA, 75 bp, synthetic construct
  source 1..75: mol_type = other DNA
gattaaccgtaccttcccggataataccggcagaagtgcccgccgtgccagagccagtggcgatgtcgcgctgtg

SEQ ID NO: 458823 - DNA, 75 bp, synthetic construct
  source 1..75: mol_type = other DNA
catcacgcagtcattgcgcagtgactgcgacggggagagccagcgaattgatccggccagctaccgtcagggttt

SEQ ID NO: 458824 - DNA, 75 bp, synthetic construct
  source 1..75: mol_type = other DNA
ttcccgcccttccagatgcgtctggaaagcctcaacggtaaacaaacggggagaacgctgacgtctgcgggcaaa

SEQ ID NO: 458825 - DNA, 75 bp, synthetic construct
  source 1..75: mol_type = other DNA
ggagggaaaagcagaaaagctcacgtggcataaggcgtggacagcggtatcgtctggtttttcaatttcctatac

SEQ ID NO: 458826 - DNA, 75 bp, synthetic construct
  source 1..75: mol_type = other DNA
gataaggggttccgtatggtgaggttctacgggttccttagtccggcgaaacgccggttgctggaagaattagtg

SEQ ID NO: 458827 - DNA, 75 bp, synthetic construct
  source 1..75: mol_type = other DNA
gagtccgtcgaaacggcggttactggaagaggtggtgtacggcctagcggagacggtgaggaagaagtcgatgcc

SEQ ID NO: 458828 - DNA, 75 bp, synthetic construct
  source 1..75: mol_type = other DNA
tactacggttttctgagtccggtgaagcgccggttactggaagatgtagtgtacgtcataacggaaacagagaga

SEQ ID NO: 458829 - DNA, 75 bp, synthetic construct
  source 1..75: mol_type = other DNA
cggtcaggatgaaactggtctgcgttacaacagccaccgcacaaaacgggaagaatacctggtgatgagtggcga

SEQ ID NO: 458830 - DNA, 75 bp, synthetic construct
  source 1..75: mol_type = other DNA
tacgtcacctgaccaaatcggctgaagccgtgctgggtatggcaaccgcgccagtttatatttttaacagtgaac

SEQ ID NO: 458831 - DNA, 75 bp, synthetic construct
  source 1..75: mol_type = other DNA
ggataagggattccggatggtgaggtactacgggttcctgagtccggtgaagcgcccgttactggaagaggttgt

SEQ ID NO: 458832 - DNA, 75 bp, synthetic construct
  source 1..75: mol_type = other DNA
gcattacccgttggtgtgcctgttccgtggccttcagccactccgccaacaggctggctgaaatgcaacggagca

SEQ ID NO: 458833 - DNA, 75 bp, synthetic construct
  source 1..75: mol_type = other DNA
gttgtcgccaacgatgggtatgactcaaaagaggaatgggaactggcgacaatcttcagaagagcatatacgcaa

SEQ ID NO: 458834 - DNA, 75 bp, synthetic construct
  source 1..75: mol_type = other DNA
caaataaattacctgatttacgtggtgagtttattcgtggctgggatgacggaagaggaattgatactaaccgta

SEQ ID NO: 458835 - DNA, 75 bp, synthetic construct
  source 1..75: mol_type = other DNA
agataaggggttccgtatggtgaggtactacgggttcctgagtccggtgaagcggcgcttactggaagaggtggt

SEQ ID NO: 458836 - DNA, 75 bp, synthetic construct
  source 1..75: mol_type = other DNA
cgccacacatgtggcagtgtactttggctcttacctgaaaaagccgccggtgccgatgagccgtctggagcacta

SEQ ID NO: 458837 - DNA, 75 bp, synthetic construct
  source 1..75: mol_type = other DNA
tcaaatcggatggcacggtgaaaacagctctcgaaaaccttggtttgggagaaggttcggcattacccgttggtg

SEQ ID NO: 458838 - DNA, 75 bp, synthetic construct
  source 1..75: mol_type = other DNA
aggaaacagcaaacgggactggaatcgcttcctggacccccactaccggagtggctggaatgtcaacgtatcccg

SEQ ID NO: 458839 - DNA, 75 bp, synthetic construct
  source 1..75: mol_type = other DNA
ttccccgttttgccgatatttttcagcagggtaaccgctggcttaactggctggagaaacagccggaaggttcag

SEQ ID NO: 458840 - DNA, 75 bp, synthetic construct
  source 1..75: mol_type = other DNA
tttacggggctgaagcggggttaccgactggcagagctggtcctgatgcatgagcgactggcacgacagcaggtg

SEQ ID NO: 458841 - DNA, 75 bp, synthetic construct
  source 1..75: mol_type = other DNA
agtatctgctgagtctggtccccgactgtccgtggcaacatatagtgttcacacttccctgccagaactggtccc

SEQ ID NO: 458842 - DNA, 75 bp, synthetic construct
  source 1..75: mol_type = other DNA
aaaaaccgccattcataccctgaatcaatcagagccatccagtttaatcgtcggttccgttcatatggagcaaaa

SEQ ID NO: 458843 - DNA, 75 bp, synthetic construct
  source 1..75: mol_type = other DNA
gatgtgatactggaaatctgccgccaggcagatgtggagccgggggtattcacggtcatccacacatggggtcgt

SEQ ID NO: 458844 - DNA, 75 bp, synthetic construct
  source 1..75: mol_type = other DNA
acgggaatggaatcgcttcctggacacgcattaccgccgtggctggaatgtcaacgtatcccgggtgatggataa

SEQ ID NO: 458845 - DNA, 75 bp, synthetic construct
  source 1..75: mol_type = other DNA
tgacccgctgaagtgcattctgtgcggaagtcagatgcgctttacggggctgaaacggggttaccgactggcaga

SEQ ID NO: 458846 - DNA, 75 bp, synthetic construct
  source 1..75: mol_type = other DNA
aaatcagctctcgctgtcgctgacgcagctggcgtgtctgtgccttggttactcggtgaggatgtcggcgagaag

SEQ ID NO: 458847 - DNA, 75 bp, synthetic construct
  source 1..75: mol_type = other DNA
tccttgttgctggggactcagactttgtgcctgccgccaaacacgccagaattaaaggtattgattttattcttg

SEQ ID NO: 458848 - DNA, 75 bp, synthetic construct
  source 1..75: mol_type = other DNA
gtggcgttaccggataacgcgattactgtcccggaaatacccggagctggtgataccggctgagctggcagcaga

SEQ ID NO: 458849 - DNA, 75 bp, synthetic construct
  source 1..75: mol_type = other DNA
aggatggtcttaagcctgatgaacaacgtattctggagctctacagacagttaccggaagaagaacagcagaata

SEQ ID NO: 458850 - DNA, 75 bp, synthetic construct
  source 1..75: mol_type = other DNA
tgccggtcaggatgaaatcggtctgcgttacaacagtcaccgtacaaaacgggaagaatacctgttgatgagtgg

SEQ ID NO: 458851 - DNA, 75 bp, synthetic construct
  source 1..75: mol_type = other DNA
tccgccagcaggcgttgattaacggggaatggctggacgctaacaatggtgaagtcatcgacgtcaccaatccgg

SEQ ID NO: 458852 - DNA, 75 bp, synthetic construct
  source 1..75: mol_type = other DNA
cgtggccctcagccactccgccaacaggctggctaaaatgcaacggagcagctttttctgctgaagaatacccgg

SEQ ID NO: 458853 - DNA, 75 bp, synthetic construct
  source 1..75: mol_type = other DNA
agccgcaataatccgtttggcgatatcaaatcggatggtacggtgaaaacagctctcgaaaaccttggtttggga

SEQ ID NO: 458854 - DNA, 75 bp, synthetic construct
  source 1..75: mol_type = other DNA
ccgcaagaatccgtttggcgatatcaaatcggatggcacggtgaaaacagctctcgaaaaccttggtttgggaga

SEQ ID NO: 458855 - DNA, 75 bp, synthetic construct
  source 1..75: mol_type = other DNA
gcatattgccgatgcgctggagaaaggcgcgcgcgtggtttgcggcggtaaagcacatgaacgcggcggtaactt

SEQ ID NO: 458856 - DNA, 75 bp, synthetic construct
  source 1..75: mol_type = other DNA
ggcgcactggcctcgaaattccgcaacgccgggcaaacctgcgtctgcgccaaccgtttatacgtgcaggacggc

SEQ ID NO: 458857 - DNA, 75 bp, synthetic construct
  source 1..75: mol_type = other DNA
gcacgtcctggctatctggagcacttctgggcgctggtgaactgggagttcgtagcgaaaaatctcgctgcataa

SEQ ID NO: 458858 - DNA, 75 bp, synthetic construct
  source 1..75: mol_type = other DNA
gcgccaccaaaatggtgtctgaagccatcgcctccggtgatattcaggcggtgaactacttcgtagcgcagaaat

SEQ ID NO: 458859 - DNA, 75 bp, synthetic construct
  source 1..75: mol_type = other DNA
agcgatttttgcgccaggagatgcgcgaacccgcctccctcgaactggtgcaaagccgcctgcaaattctctttc

SEQ ID NO: 458860 - DNA, 75 bp, synthetic construct
  source 1..75: mol_type = other DNA
agaagaggcgtatcagtggtcctcaatggtcagaaaaggtgagataatggtcaaaaaagcaattgaattaaaatt

SEQ ID NO: 458861 - DNA, 75 bp, synthetic construct
  source 1..75: mol_type = other DNA
ctccatatgcatcatatgatgctggaaaccacacattaccgggaaaatatcaccgatgcccgttgtatccgtgaa

SEQ ID NO: 458862 - DNA, 75 bp, synthetic construct
  source 1..75: mol_type = other DNA
tggaaccatactttctactggaactgcctggcaccgaacgccggtggcgaaccgactggaaaagtcgctgaagct

SEQ ID NO: 458863 - DNA, 75 bp, synthetic construct
  source 1..75: mol_type = other DNA
tttttaactttttggcgtgttattgggcggacttagcgttgcctatgccattgtccatatgttgccaaccgattt

SEQ ID NO: 458864 - DNA, 75 bp, synthetic construct
  source 1..75: mol_type = other DNA
gtttttacttataccactggtggaagaaatggtgctgaatcagtgagttcacctgatgcctcctctttaattaaa

SEQ ID NO: 458865 - DNA, 75 bp, synthetic construct
  source 1..75: mol_type = other DNA
ccccagaccggcacacctgccaccgatctggatgatgactactttgacatgttgcaggaggagctttgcagcgtg

SEQ ID NO: 458866 - DNA, 75 bp, synthetic construct
  source 1..75: mol_type = other DNA
cgcggtgagtttattcgtggctgggatgacggacgtggtattgatgctggacgagctttattgagcattcagaca

SEQ ID NO: 458867 - DNA, 75 bp, synthetic construct
  source 1..75: mol_type = other DNA
ccactgcaacgcaggatggcaaatatactgatggaagtgttgctggtggtattgccgcaacgaggctgcgggctg

SEQ ID NO: 458868 - DNA, 75 bp, synthetic construct
  source 1..75: mol_type = other DNA
aaacatatccaaaggcggttggatttgacgcttcaaaagtagttccaactgctaatgaaaaccgtcctcgtaaca

SEQ ID NO: 458869 - DNA, 75 bp, synthetic construct
  source 1..75: mol_type = other DNA
cgcccattgatggcctgatgaatggcctaccgttggcgcatgagttactggcacatgtacgtaaccccgacgcgc

SEQ ID NO: 458870 - DNA, 75 bp, synthetic construct
  source 1..75: mol_type = other DNA
gacgcagcagaggaatgggatatcggcgtaattgttaaatcatcatatgcacaaggcagaggaatcgatgctgct

SEQ ID NO: 458871 - DNA, 75 bp, synthetic construct
  source 1..75: mol_type = other DNA
acaatacgctgactaatttgagtggaaaggatgtagctggtcttctcgcataccttggtttgggagaaggttcag

SEQ ID NO: 458872 - DNA, 75 bp, synthetic construct
  source 1..75: mol_type = other DNA
tgggcaaggatatgcaacggaggatcatgctcacggattaccgtcaaaatcaaccgtagcaactgacagctcaat

SEQ ID NO: 458873 - DNA, 75 bp, synthetic construct
  source 1..75: mol_type = other DNA
cttacccgacaaataaattgcctgatttacgtggtgagtttattcgtggctgggatgacgggcgtggagtggata

SEQ ID NO: 458874 - DNA, 75 bp, synthetic construct
  source 1..75: mol_type = other DNA
atgacggctttgggagaaggctctgcattacctgttggtgtccctgttccgtggccttcagccactccgccaaca

SEQ ID NO: 458875 - DNA, 75 bp, synthetic construct
  source 1..75: mol_type = other DNA
gtgctttattgagccttcaggctgggatgctggaaaaacaccgccatattgttgttgccaatgatggttacgaca

SEQ ID NO: 458876 - DNA, 75 bp, synthetic construct
  source 1..75: mol_type = other DNA
atttcgattattataaacttggttttggaccagtagttaaagacattgagatgttaaatacacaattattgtcca

SEQ ID NO: 458877 - DNA, 75 bp, synthetic construct
  source 1..75: mol_type = other DNA
aggccgcgcggctgacattgttatcaagggtgtctcgcctgatattgttcatgcttatcttgatgggaaatatcc

SEQ ID NO: 458878 - DNA, 75 bp, synthetic construct
  source 1..75: mol_type = other DNA
gaattactggtaattcttgaggatgtacgagagcacttcgggaagccagtaattattaacagtgggaaccgttgc

SEQ ID NO: 458879 - DNA, 75 bp, synthetic construct
  source 1..75: mol_type = other DNA
taatcgaagaagttaaattaaaaatagcgattgcgaaatgccatcccaattcaggcgtggcacgagtagagggtg

SEQ ID NO: 458880 - DNA, 75 bp, synthetic construct
  source 1..75: mol_type = other DNA
atgaaagatttaactttgaagtttcatgacaaactgcagtttaaggccttcctgtcatctcttgactgggcggac

SEQ ID NO: 458881 - DNA, 75 bp, synthetic construct
  source 1..75: mol_type = other DNA
agtcgctgaagctatcgccgcatcttttggcagctttgccgatttcaaagctcagtttactgatgcagcgatcaa

SEQ ID NO: 458882 - DNA, 75 bp, synthetic construct
  source 1..75: mol_type = other DNA
gtcgatagctattttgcggtgctggtgcgcgttggcctggcggcgctcgtttttctgccgttcctgcgtacccgc

SEQ ID NO: 458883 - DNA, 75 bp, synthetic construct
  source 1..75: mol_type = other DNA
aaaagctaatccagactgcaaattaccggagatggcgatggactacctgaagcgaaacggactgataagcgtgga

SEQ ID NO: 458884 - DNA, 75 bp, synthetic construct
  source 1..75: mol_type = other DNA
cgggtatcagtggccaaggggatcctgattggaaattttgcaaaggttgttgggcttaagcaaaacgcgttgttt

SEQ ID NO: 458885 - DNA, 75 bp, synthetic construct
  source 1..75: mol_type = other DNA
attttgcaaaggttgttggactgaagcaaaacgcactgtttgcctggttgcgtgagaacggcatcctgattgcgt

SEQ ID NO: 458886 - DNA, 75 bp, synthetic construct
  source 1..75: mol_type = other DNA
ttgaaccggaaaggaagcgcacaaatcgccgtcgtggtgaacactccactaaacccaaatgcgaaaatccgtcct

SEQ ID NO: 458887 - DNA, 75 bp, synthetic construct
  source 1..75: mol_type = other DNA
ggagaaagattatgggggcctcacagaatacgggtaaagtataatgaaaccgtaccagagattcaaccctgtgca

SEQ ID NO: 458888 - DNA, 75 bp, synthetic construct
  source 1..75: mol_type = other DNA
catgcctataaccgtctggtaaaaaaggacccggaaaccggggagcagagactacgtatgcgcatgtcgttgcat

SEQ ID NO: 458889 - DNA, 75 bp, synthetic construct
  source 1..75: mol_type = other DNA
atgaaagatttaactttgaagtttcatgacaaactgcagtttaaggccttcctgtcatctcttgcctgggaggag

SEQ ID NO: 458890 - DNA, 75 bp, synthetic construct
  source 1..75: mol_type = other DNA
aagtaaaccttggtctggataacaatacctggggcggtggtttttccaaatattgtcttgttcctggtgaaattc

SEQ ID NO: 458891 - DNA, 75 bp, synthetic construct
  source 1..75: mol_type = other DNA
atttgctaacggcgcagtaagatcggcattgtggctgagtggcaaggaaagtggtctttttgatatgagagatgt

SEQ ID NO: 458892 - DNA, 75 bp, synthetic construct
  source 1..75: mol_type = other DNA
ataaactattctcgcttaatggcgttacgcccagattatggatatagaaataaaagtttttcttgggaattgttt

SEQ ID NO: 458893 - DNA, 75 bp, synthetic construct
  source 1..75: mol_type = other DNA
aaatatatttgtggtttggatttaaatcccaacaccaagaattatctataaaaaataatattaaaactgaaataa

SEQ ID NO: 458894 - DNA, 75 bp, synthetic construct
  source 1..75: mol_type = other DNA
gccgatatttaccaaaaaagagctgatttatctgattatgctgttgctgtgcgatattatcgtcgttgccctgtt

SEQ ID NO: 458895 - DNA, 75 bp, synthetic construct
  source 1..75: mol_type = other DNA
tgctgggtgtgctgatcgattattcggacctgtttaaaaacttttggggagaatcacccgcgatcctcagtggca

SEQ ID NO: 458896 - DNA, 75 bp, synthetic construct
  source 1..75: mol_type = other DNA
ccgacagggccgacttttcggcctttatggagagtgccggctattatgatgacgagtcgatgcaggatgatattc

SEQ ID NO: 458897 - DNA, 75 bp, synthetic construct
  source 1..75: mol_type = other DNA
atgaaagatttaactttgaagtttcatgacaaactgcagtttaaggccttcctgtcatctcttgcctggggggaa

SEQ ID NO: 458898 - DNA, 75 bp, synthetic construct
  source 1..75: mol_type = other DNA
atgaaagatttaactttgaagtttcatgacaaactgcagtttaaggccttcctgtcatctcttgcctgggtggat

SEQ ID NO: 458899 - DNA, 75 bp, synthetic construct
  source 1..75: mol_type = other DNA
acggaaaaccaggtttaccctggctggtgtttttgcacggtttttccggcgattgccacgaatggcaagaagtgg

SEQ ID NO: 458900 - DNA, 75 bp, synthetic construct
  source 1..75: mol_type = other DNA
taacgtttaaacattttcaagacaatccaacatgggcggctgcggctggatatgactttaattattttgattgtc

SEQ ID NO: 458901 - DNA, 75 bp, synthetic construct
  source 1..75: mol_type = other DNA
gatggctctgtttgttttatggaaggataacaccacactgggaaaattactggttaaggagattaacttcgtaag

SEQ ID NO: 458902 - DNA, 75 bp, synthetic construct
  source 1..75: mol_type = other DNA
aatttctgagccagagcggtaagatggttaccgccgccgcgctgtttggtacctctgtgccgctcgcccatgcgg

SEQ ID NO: 458903 - DNA, 75 bp, synthetic construct
  source 1..75: mol_type = other DNA
gagcagaaaatgctgccggagttgcaaccgtacactcaggaacgggcggagaaactgatcgatttattgcagtcg

SEQ ID NO: 458904 - DNA, 75 bp, synthetic construct
  source 1..75: mol_type = other DNA
gcggtggcgcgtatctcgccgagaaccgcaacgttccataaagggcaactggtgtgggggagtgtggcaggttga

SEQ ID NO: 458905 - DNA, 75 bp, synthetic construct
  source 1..75: mol_type = other DNA
cctcctgttccgccgaggcggtggcgcgtatctcgccgagaaccgcaacgttccataaagggcaactggtgtggg

SEQ ID NO: 458906 - DNA, 75 bp, synthetic construct
  source 1..75: mol_type = other DNA
cacgacaaaggcgtaaaagtcatgaccggaactgacagcgttattgaccactggtcaccttatggcctgggcgac

SEQ ID NO: 458907 - DNA, 75 bp, synthetic construct
  source 1..75: mol_type = other DNA
aaaaccttctacggcgggccgtggcgctcgctcaatcgtccggcaggcaccactatccaggacatgatcaagctt

SEQ ID NO: 458908 - DNA, 75 bp, synthetic construct
  source 1..75: mol_type = other DNA
aagatggcgagttcaactatgaaaacgcagatcctttcgatgagactatcaattctatagaaatcaactcggtga

SEQ ID NO: 458909 - DNA, 75 bp, synthetic construct
  source 1..75: mol_type = other DNA
tccgccaacaggctggctaaaatgcaatggtgcggctttttctgctgaagaatacccggaactggcaaaggttta

SEQ ID NO: 458910 - DNA, 75 bp, synthetic construct
  source 1..75: mol_type = other DNA
cagtatggtgtttttgaagttcaacggcgcgaaattctctgccactgattaccctgtgctggcgaaagtgtttcc

SEQ ID NO: 458911 - DNA, 75 bp, synthetic construct
  source 1..75: mol_type = other DNA
cgtttgcgacagacactgacgcaaatgttacctcgcaggaggaatgggaggcgctcaccgccctgaagaaggggt

SEQ ID NO: 458912 - DNA, 75 bp, synthetic construct
  source 1..75: mol_type = other DNA
cattaccggttggggtgcctgttccgtggccttcagccactccgccaacaggctggttgaaatgcaatggtgcgg

SEQ ID NO: 458913 - DNA, 75 bp, synthetic construct
  source 1..75: mol_type = other DNA
aattcagtgggtgatggtgtgaattttatagccgtcagaccacgtaacatcgcatttaactttctggtgagggct

SEQ ID NO: 458914 - DNA, 75 bp, synthetic construct
  source 1..75: mol_type = other DNA
ccgcaagaatccgtttggtgatatcaaatcggatggcacggtgaaaacggctctcgaaaaccttggttttggaga

SEQ ID NO: 458915 - DNA, 75 bp, synthetic construct
  source 1..75: mol_type = other DNA
cagtcaaagttcgtgttttaagaacaactaatgggacttcatgggcgggtgcttcagctgccggttgtttattcg

SEQ ID NO: 458916 - DNA, 75 bp, synthetic construct
  source 1..75: mol_type = other DNA
ccgtttggtgatatcaaatcggatggcacggtgaaaacggctctcgaaaaccttggtttgggagaaggttcagca

SEQ ID NO: 458917 - DNA, 75 bp, synthetic construct
  source 1..75: mol_type = other DNA
cttcattgacagcgaaaggcatcactcagctcagtagtgccactaacagcacgtctgaagtgctggccgccacac

SEQ ID NO: 458918 - DNA, 75 bp, synthetic construct
  source 1..75: mol_type = other DNA
atggcacggtgaaaacggctctcgaaaaccttggtttgggagaaggttcggcattacccgttggtgtgcctgttc

SEQ ID NO: 458919 - DNA, 75 bp, synthetic construct
  source 1..75: mol_type = other DNA
ttttcataaatgttggtttgggagaaggctctgcattacctgttggtgtccctgttccgtggccctcagccactc

SEQ ID NO: 458920 - DNA, 75 bp, synthetic construct
  source 1..75: mol_type = other DNA
atgccagttagccattatctctgcattttcttaaacgttggtttgggagaaggctctgcattacctgttggtgtg

SEQ ID NO: 458921 - DNA, 75 bp, synthetic construct
  source 1..75: mol_type = other DNA
ccggcgacggaatgcattctgagcggggactcgcccgggtgcgtatgctgaaaacggcgcatatgccagcctgtg

SEQ ID NO: 458922 - DNA, 75 bp, synthetic construct
  source 1..75: mol_type = other DNA
ttgctaaaacatttgtcaatactgtagcaactgcttggaaaggtaaattcgacattttttttatacactctaatt

SEQ ID NO: 458923 - DNA, 75 bp, synthetic construct
  source 1..75: mol_type = other DNA
aaatcggatggcacggtgaaaacggctctcgaaaaccttggtttgggagaaggagctccagctattggcgttccg

SEQ ID NO: 458924 - DNA, 75 bp, synthetic construct
  source 1..75: mol_type = other DNA
ggcaaaggtttacccaacgttaaaattacctgatttacgcggtgagtttatccgtggctgggatgatgggcgagg

SEQ ID NO: 458925 - DNA, 75 bp, synthetic construct
  source 1..75: mol_type = other DNA
cacgattttcaaaaaaacatatacacaaggcagggggcttgatgccacaaatacaggagggagtttgattccatc

SEQ ID NO: 458926 - DNA, 75 bp, synthetic construct
  source 1..75: mol_type = other DNA
gacgacgggcgcaaagttgatacaggacgtaagttgctgtccgcacaaggggcaacgctgttaagaacagcaatg

SEQ ID NO: 458927 - DNA, 75 bp, synthetic construct
  source 1..75: mol_type = other DNA
ggtttgggagaaggtgctcctgctattggcgttccgttcttctggccctccgctgcaatgccaaattctgtcatc

SEQ ID NO: 458928 - DNA, 75 bp, synthetic construct
  source 1..75: mol_type = other DNA
cgcgggcgtcaaaatcgtgccgcagggctatcagtggacggtagaacgttttggtcgctataccaaaacgttaca

SEQ ID NO: 458929 - DNA, 75 bp, synthetic construct
  source 1..75: mol_type = other DNA
ttaagccgcaagaatccgtttggcgatatcaaattggacggcacggtgcaaaaggctctcgaaaaccttggtttg

SEQ ID NO: 458930 - DNA, 75 bp, synthetic construct
  source 1..75: mol_type = other DNA
cggcgttagtcagccggctggaagtgctttgcccgcttttcaaaacccaggcggtactgaaacgcgtccccgtaa

SEQ ID NO: 458931 - DNA, 75 bp, synthetic construct
  source 1..75: mol_type = other DNA
gggaacgggtgaggtgatgcgcattgaagcaccgatggatgagggtttgaagcgttgtttgcagaagttgcgtaa

SEQ ID NO: 458932 - DNA, 75 bp, synthetic construct
  source 1..75: mol_type = other DNA
tatcccaccggttcgcgttgctgagcgggaagaagaggcggtttcgccacatctgcaaaaggtggcggcgctggc

SEQ ID NO: 458933 - DNA, 75 bp, synthetic construct
  source 1..75: mol_type = other DNA
gagggtggtgttgttgcggcaacgactaaacctgcaggtgcgaatgaaacacgcccacgaaatgtcgcttttaac

SEQ ID NO: 458934 - DNA, 75 bp, synthetic construct
  source 1..75: mol_type = other DNA
gaaattagtgaaaatgtaggtacagaaactcgtcctcgtaacatcgcttttaattatattgtgagggccgcatga

SEQ ID NO: 458935 - DNA, 75 bp, synthetic construct
  source 1..75: mol_type = other DNA
tactggctacatacggtgacgggggaatagttaaaacggacgaacccggtcttaaggtgccttcctcactacgag

SEQ ID NO: 458936 - DNA, 75 bp, synthetic construct
  source 1..75: mol_type = other DNA
ccatttgccgatatcaaatcagatggtgcagcggcgatttctacggctctcacaaaccttggtttgggagaaggt

SEQ ID NO: 458937 - DNA, 75 bp, synthetic construct
  source 1..75: mol_type = other DNA
gcattacctgtcggtgtgcctgttccgtggccttccgccactccgccgacaggctggctaaaatgcaatggtgcg

SEQ ID NO: 458938 - DNA, 75 bp, synthetic construct
  source 1..75: mol_type = other DNA
aaaatactattgctgacattctcacataccttggtttaggagaaggctcagcattgcctgttggcgtacctgttc

SEQ ID NO: 458939 - DNA, 75 bp, synthetic construct
  source 1..75: mol_type = other DNA
cgattaaatatatgattaatgcaaccacttttaatggctctggttgggtttacgtaaaggcgaatggttcaacag

SEQ ID NO: 458940 - DNA, 75 bp, synthetic construct
  source 1..75: mol_type = other DNA
gaggtgatgcgtatcgaagcaccgatggatgaggggttgaagcgttgtttgcagaaactgcgtaacgcgcgctaa

SEQ ID NO: 458941 - DNA, 75 bp, synthetic construct
  source 1..75: mol_type = other DNA
taaaattttttccattgctgtattttccttcttttttactttcaccatatttgtaagcgactcgtcagaaccgta

SEQ ID NO: 458942 - DNA, 75 bp, synthetic construct
  source 1..75: mol_type = other DNA
atgcgctatttcatactaatgttcactttcgtatgttcctttgttgcagcccaaccaactattgtcccacaatta

SEQ ID NO: 458943 - DNA, 75 bp, synthetic construct
  source 1..75: mol_type = other DNA
taaaattttttccattgctgtattttccttcttttttactttcaccatatttatggtctttacctgtttatgtgt

SEQ ID NO: 458944 - DNA, 75 bp, synthetic construct
  source 1..75: mol_type = other DNA
gagaaggctcagcgttacccgttggtgtacctgttccgtggccttcagccactcctccaacaggctggctgaaat

SEQ ID NO: 458945 - DNA, 75 bp, synthetic construct
  source 1..75: mol_type = other DNA
gagaacaatattatcagctcagggcgatgccatacgtaatatctatggtgagttcagaactgtaaacactgaaaa

SEQ ID NO: 458946 - DNA, 75 bp, synthetic construct
  source 1..75: mol_type = other DNA
cattcgtgtgttcctttgttgcagcccaaccaactattgtcccacaattacagcaacaagttacggatcttacga

SEQ ID NO: 458947 - DNA, 75 bp, synthetic construct
  source 1..75: mol_type = other DNA
tatacgaaggcggcgctggtcaaacaacctcatcgcccggtaataggtatgacgtaggtttttccgccgccagag

SEQ ID NO: 458948 - DNA, 75 bp, synthetic construct
  source 1..75: mol_type = other DNA
atgagtggcgcgaatcctgttggctatttagaatcgcccaccatgaaaacagagactccatccgtaaaaatcgtt

SEQ ID NO: 458949 - DNA, 75 bp, synthetic construct
  source 1..75: mol_type = other DNA
gtgtgcatacgcaatacgctggtcatccgattgcctttgatgatcgttacggcgaccgcgaatttgataaacaac

SEQ ID NO: 458950 - DNA, 75 bp, synthetic construct
  source 1..75: mol_type = other DNA
agtcagcttgggaagaaatgacctgcttattcgcaccttccctaagggattagagctagctataaacgctttgaa

SEQ ID NO: 458951 - DNA, 75 bp, synthetic construct
  source 1..75: mol_type = other DNA
tttattcctgttctccgatcaaactttttccattgctgtattttccttcttttttgctttcaccaccattatggt

SEQ ID NO: 458952 - DNA, 75 bp, synthetic construct
  source 1..75: mol_type = other DNA
gcgcatgtaaaagtggagtctgtatttcagcaatctatcttttagatttattcctgttctccgataaaatttttt

SEQ ID NO: 458953 - DNA, 75 bp, synthetic construct
  source 1..75: mol_type = other DNA
ctggcagatttctgcaaacgtcagggcaagaattttgatatcgacgaactggaagccctgcatcaggaactggaa

SEQ ID NO: 458954 - DNA, 75 bp, synthetic construct
  source 1..75: mol_type = other DNA
gttgatgagctggaaaaagcggtagtggtgaaaatcgccgatcgccagtggcgttactcccgcttcccggaagtg

SEQ ID NO: 458955 - DNA, 75 bp, synthetic construct
  source 1..75: mol_type = other DNA
acgggattgcgtgtttgtccgactacatgatcgacagagaaatcgctcgcggagaattggtggagttaatggcag

SEQ ID NO: 458956 - DNA, 75 bp, synthetic construct
  source 1..75: mol_type = other DNA
caatcaacggtccgctggcgcgtaacgaagcgtgggaggtcgcccgcgaactgctgcgcgaaggggtcgatcagc

SEQ ID NO: 458957 - DNA, 75 bp, synthetic construct
  source 1..75: mol_type = other DNA
cgtctggatgaagcccaggaagccgcgcgttttgttcagcagtttggcaatcaactggcgaaactggaaccgatc

SEQ ID NO: 458958 - DNA, 75 bp, synthetic construct
  source 1..75: mol_type = other DNA
ggcagcgcaaaacagtctcaaccagttgagcgaacagtgcggcgaagagtttacctccagccaggacgtcaccga

SEQ ID NO: 458959 - DNA, 75 bp, synthetic construct
  source 1..75: mol_type = other DNA
gttgcttatgctgcagctcaagagaatgcaaaagattttgaagagcgtgtcgtttcggatttaacaaaaaacgtt

SEQ ID NO: 458960 - DNA, 75 bp, synthetic construct
  source 1..75: mol_type = other DNA
aaacactgaaagcggcagatattgctgaaagtgtcgggatgattcacgaccggattaacgatattgagagcgata

SEQ ID NO: 458961 - DNA, 75 bp, synthetic construct
  source 1..75: mol_type = other DNA
cagccgcacaacatggtgcgtcacccggatatgccaaaagcggcgtttgcggatatgtggttcaccctgaaaaaa

SEQ ID NO: 458962 - DNA, 75 bp, synthetic construct
  source 1..75: mol_type = other DNA
caattagggcaagcaaactcagcggtaagccgggcagtgaaaaagctggagatgaaacttggcgttagcctgctt

SEQ ID NO: 458963 - DNA, 75 bp, synthetic construct
  source 1..75: mol_type = other DNA
tgatgttgcgctgcgtttgatttatgcgctggggaaaatggataaatggctgtacgccgatatcacgcacttttc

SEQ ID NO: 458964 - DNA, 75 bp, synthetic construct
  source 1..75: mol_type = other DNA
aggaagggaaagaaagctaatatggatgtgctttctcagttgttagttgaacgagtctccaataacaatgacgat

SEQ ID NO: 458965 - DNA, 75 bp, synthetic construct
  source 1..75: mol_type = other DNA
gcgatcacctgaacctggtgcaaaccgcactgcgtcagcaggagaagatcgaacgttacgaagcggatctcgatg

SEQ ID NO: 458966 - DNA, 75 bp, synthetic construct
  source 1..75: mol_type = other DNA
caactacgtggcggcggactacatgcgtcacgccaacgagcgccgtgtccatctcgataaggccctggagtttcg

SEQ ID NO: 458967 - DNA, 75 bp, synthetic construct
  source 1..75: mol_type = other DNA
accagcagcaacgcattcagtttgagcaggcgaaagagggcgtgacagcgcttaaccgcatcctgccgcgcctta

SEQ ID NO: 458968 - DNA, 75 bp, synthetic construct
  source 1..75: mol_type = other DNA
gtggtcggtgtgcgtctgcaacaggttgccggacgcgatcgtaaagtggatatcaaaccgtttgccattcagggc

SEQ ID NO: 458969 - DNA, 75 bp, synthetic construct
  source 1..75: mol_type = other DNA
tgatcgtagtaaattctatcgtctgattgaagcttcgctgtacggcgggatttccagcgccatcacccgttctct

SEQ ID NO: 458970 - DNA, 75 bp, synthetic construct
  source 1..75: mol_type = other DNA
gagcagaaccgtatccgtatgctcaaccagggtttgcagagcgtatcgttcggtcaggtgaacagtgtacgtctg

SEQ ID NO: 458971 - DNA, 75 bp, synthetic construct
  source 1..75: mol_type = other DNA
tggaagctatcgagcagatggaaatcgaactcagccgtctgaccgaagaattaacttctcgcgagcagaaactgg

SEQ ID NO: 458972 - DNA, 75 bp, synthetic construct
  source 1..75: mol_type = other DNA
cggtgaagcaattggtacaggtatgtcgattctggtgatggtggtacagagctgggaagatgaatcacgccgact

SEQ ID NO: 458973 - DNA, 75 bp, synthetic construct
  source 1..75: mol_type = other DNA
cgaacttagccgtctgactgaagagttaacttcccgcgaacagaaactggcgatcagttcccgcagcgtggcgaa

SEQ ID NO: 458974 - DNA, 75 bp, synthetic construct
  source 1..75: mol_type = other DNA
accagggattgcagaacgtttcgttcggtcaggtgaacagcgtgcgtctgaacgtgaacgtgcgtgaaactcacg

SEQ ID NO: 458975 - DNA, 75 bp, synthetic construct
  source 1..75: mol_type = other DNA
atctcaacgaaaaactgcgtgaacgtctggaacaggcggaagcggagcgtacccgcgcgcgtgaagcgttgcgcg

SEQ ID NO: 458976 - DNA, 75 bp, synthetic construct
  source 1..75: mol_type = other DNA
gtcacaggtaaccgaacacctggaaggcttgaccgattgcccggaagatctctatctgatcgaaggggatccgca

SEQ ID NO: 458977 - DNA, 75 bp, synthetic construct
  source 1..75: mol_type = other DNA
gtgtctgttattcgatgctcgacactattaactcgcgtcaccagcgcgtggtagttggtgtgcgtctgcaacagg

SEQ ID NO: 458978 - DNA, 75 bp, synthetic construct
  source 1..75: mol_type = other DNA
agcaaaataccccgctggcggacgataccactctgatgtccactaccgatctgcaaagctatatcactcatgcta

SEQ ID NO: 458979 - DNA, 75 bp, synthetic construct
  source 1..75: mol_type = other DNA
gtgttcagcgggattatggaaaggctgaccccgttgcgcgaaacctttgaacggtttggtcctgtttttgacgca

SEQ ID NO: 458980 - DNA, 75 bp, synthetic construct
  source 1..75: mol_type = other DNA
gtgcggccattcttcaggacaaggttgctctgtttcagggagacattgcgaaaatcaatccgccgaagtctgcgg

SEQ ID NO: 458981 - DNA, 75 bp, synthetic construct
  source 1..75: mol_type = other DNA
cggttgttgactggatcaacatgtttgcactggcagtgaacgaggagaacgctgctggcggtcgcgtggtgactg

SEQ ID NO: 458982 - DNA, 75 bp, synthetic construct
  source 1..75: mol_type = other DNA
aaatcacagaccgctttgagttcttcattggtggtcgtgaaatcggtaacggctttagcgaactgaatgacgcgg

SEQ ID NO: 458983 - DNA, 75 bp, synthetic construct
  source 1..75: mol_type = other DNA
tgctgccgggcgttttttgcagcctgcgatcgggttcgggaaagagatgtcccgcgttcaggcgctgacgcgaat

SEQ ID NO: 458984 - DNA, 75 bp, synthetic construct
  source 1..75: mol_type = other DNA
cagcagcattcacccggaccaatactgatttacgcgcgctgggcgaaaccatgaagtataccggtccggttgccg

SEQ ID NO: 458985 - DNA, 75 bp, synthetic construct
  source 1..75: mol_type = other DNA
ccgatgatttgattaaaagctacgtcgcggcgggattcaaaaaaattcaccttgattgcagcatgtcctgtcagg

SEQ ID NO: 458986 - DNA, 75 bp, synthetic construct
  source 1..75: mol_type = other DNA
aacgccgcaatcgctgcgccagttggtgattgaccactttgccattctgaaagttggcccggcgctgaccttcgc

SEQ ID NO: 458987 - DNA, 75 bp, synthetic construct
  source 1..75: mol_type = other DNA
ggcggcgcgcatgaaaccttaagcgagctggcggtcaccacgccggatgccgcccgcgccacgctggaagcccat

SEQ ID NO: 458988 - DNA, 75 bp, synthetic construct
  source 1..75: mol_type = other DNA
gacaagtttatccgtgaagtgaacgctaactcactggctcgttacctgctggtggcaagcgccattggttctctt

SEQ ID NO: 458989 - DNA, 75 bp, synthetic construct
  source 1..75: mol_type = other DNA
ggtagccagcgccattggttctctttataagatgaacgcgtcgatttctggtgctgaagtgggttgccagggtga

SEQ ID NO: 458990 - DNA, 75 bp, synthetic construct
  source 1..75: mol_type = other DNA
tataagatgaacgcgtcaatttctggtgctgaagtcggctgccagggtgaagttggtgtgcgtgctcaatggcgg

SEQ ID NO: 458991 - DNA, 75 bp, synthetic construct
  source 1..75: mol_type = other DNA
gggccgcattcagctgtacgttgcccgtgacgatctgccggaaggcgtttataacgagcagttcaaaaaatggga

SEQ ID NO: 458992 - DNA, 75 bp, synthetic construct
  source 1..75: mol_type = other DNA
atcgtcttcaccaacttcgttgacttcgactcttcctggggccaccgccgcgacgtcgccggttatgctgcgggt

SEQ ID NO: 458993 - DNA, 75 bp, synthetic construct
  source 1..75: mol_type = other DNA
accctattactggccaggtacagcaaatgcctactttagaacagttaaagtcctgggttcgtaataatggcgagg

SEQ ID NO: 458994 - DNA, 75 bp, synthetic construct
  source 1..75: mol_type = other DNA
ccatccggcactgacgcgccagttactgatagcgggaggcgcactgctggcgacaacagcaacggttggttcgtt

SEQ ID NO: 458995 - DNA, 75 bp, synthetic construct
  source 1..75: mol_type = other DNA
gtgttcctggtgatgtatctgttcttgcagaatatgcgagcaacgctgatccccaccattgcggtacccgtggtg

SEQ ID NO: 458996 - DNA, 75 bp, synthetic construct
  source 1..75: mol_type = other DNA
ctgttgagccgccagcaccgaccgtgctgcagaaactggttgatgaaaaacacggccaggtggtttctgtcggta

SEQ ID NO: 458997 - DNA, 75 bp, synthetic construct
  source 1..75: mol_type = other DNA
agcacatgaaaaccggcaagccgattttctatacctccgccgactccgtgttccagattgcctgccatgaagaaa

SEQ ID NO: 458998 - DNA, 75 bp, synthetic construct
  source 1..75: mol_type = other DNA
aaaccgctcacagacagcaataccgggacgctacgcagactcagcaaaattgctgataacacaggtaagctggtt

SEQ ID NO: 458999 - DNA, 75 bp, synthetic construct
  source 1..75: mol_type = other DNA
taaagccacccgcaaatacggggaagttgaccgggtatcgttctttaaggacattgccggagaagaggctttcac

SEQ ID NO: 459000 - DNA, 75 bp, synthetic construct
  source 1..75: mol_type = other DNA
tggctccgttgcgcgaaacctttgaacggtttggtcctgtttttgacgcaatcggaagcgggataagtcaggtgt

SEQ ID NO: 459001 - DNA, 75 bp, synthetic construct
  source 1..75: mol_type = other DNA
atacgatcgccagtggcatcagttcctgcaacttcccgtaaccgggagcctgttgcctccggatttggcggtgaa

SEQ ID NO: 459002 - DNA, 75 bp, synthetic construct
  source 1..75: mol_type = other DNA
gtggctgcgcttgccggagctgccgttcttatctggaaatactgggatcccatcagggcattttttgccggggtg

SEQ ID NO: 459003 - DNA, 75 bp, synthetic construct
  source 1..75: mol_type = other DNA
gggcaaaatgcgcccgatggaggatgtgctggccgacctttataaagccacccgcaaatacggggaagttgaccg

SEQ ID NO: 459004 - DNA, 75 bp, synthetic construct
  source 1..75: mol_type = other DNA
gctgtggctgggtaaagtgaaaggtgaacagtttgatcgcctgagcctgctgaacgacattctgccggtttatca

SEQ ID NO: 459005 - DNA, 75 bp, synthetic construct
  source 1..75: mol_type = other DNA
aacagttcaaactgacctggacgcagctgctggaggaagtggacgaggcgctggcgctgggccacaaggtgaaac

SEQ ID NO: 459006 - DNA, 75 bp, synthetic construct
  source 1..75: mol_type = other DNA
cggaaattcgtaccctgcgtctggatttcaaaaagggcaatctcgacgccaacaactaccgcacgggcattgcgg

SEQ ID NO: 459007 - DNA, 75 bp, synthetic construct
  source 1..75: mol_type = other DNA
gtgttattgcgagttcaacgacatcatggattcgattgcggcgctggacgcagacgtcatcaccatcgaaacctc

SEQ ID NO: 459008 - DNA, 75 bp, synthetic construct
  source 1..75: mol_type = other DNA
gatgctttagaagccgcacagctggcggcaccggaactgccgcgtggtttattgcttgatgaatggcgcgacgac

SEQ ID NO: 459009 - DNA, 75 bp, synthetic construct
  source 1..75: mol_type = other DNA
tcgtcgctcatcgtggtggcggtaagctggccccggaaaacaccctggcggcaatcgacgtcggggcaaaatacg

SEQ ID NO: 459010 - DNA, 75 bp, synthetic construct
  source 1..75: mol_type = other DNA
ggtacagcaaagcgtttaaaggtgagccgctgccgttgctttcgcaggtggcggaacgctgtcgcgaacacggga

SEQ ID NO: 459011 - DNA, 75 bp, synthetic construct
  source 1..75: mol_type = other DNA
acgaacccgcgctggtactggaactaccgcaggcgtggctggacgcatacaaacccgcttacgacgcgctccagg

SEQ ID NO: 459012 - DNA, 75 bp, synthetic construct
  source 1..75: mol_type = other DNA
tggtcgtaacgtctggcgcgccgatctcaccgagaaatatgcgcaaattaaggacattgtcggcaaacgtgattt

SEQ ID NO: 459013 - DNA, 75 bp, synthetic construct
  source 1..75: mol_type = other DNA
ccggcgctacgcgaaggtttaccgctgcgtcgcagcgactgggatgcctatctccagtggggcgtggaggctttc

SEQ ID NO: 459014 - DNA, 75 bp, synthetic construct
  source 1..75: mol_type = other DNA
cgcatgacaggagctgactggctgacagcgattgagatgtacaaaccaactgtgcgcatcgtggaagttaatgtg

SEQ ID NO: 459015 - DNA, 75 bp, synthetic construct
  source 1..75: mol_type = other DNA
cgtgatgatctgccggaaggcgtttataacgatcaatttaagaaatgggatcttggcgatattatcggcgcaaaa

SEQ ID NO: 459016 - DNA, 75 bp, synthetic construct
  source 1..75: mol_type = other DNA
cacatctgattcagcctaccttgattactgaatatccggcagaagtttccccgctggcccgccgtaatgaggtta

SEQ ID NO: 459017 - DNA, 75 bp, synthetic construct
  source 1..75: mol_type = other DNA
atgtgggcggttcatttcttccttgagtataaaaccgtctctttcattgcattaggtgcggtagtgctgtcaatc

SEQ ID NO: 459018 - DNA, 75 bp, synthetic construct
  source 1..75: mol_type = other DNA
gtagcattattgctaacccggaagtgctgcatgcgctgaatccgatgtgggcggtgcatttcttccttgaataca

SEQ ID NO: 459019 - DNA, 75 bp, synthetic construct
  source 1..75: mol_type = other DNA
ccagcaatacatcaaatcccgcgaccaggagaacgaggatattgcgctaacggttgggaggctgctaatcgaaaa

SEQ ID NO: 459020 - DNA, 75 bp, synthetic construct
  source 1..75: mol_type = other DNA
cacatctgattcagcctaccttaattactgaatatccggcagaagtatctccgctggcccgccgtaatgaggtta

SEQ ID NO: 459021 - DNA, 75 bp, synthetic construct
  source 1..75: mol_type = other DNA
gcgaaaggtaaactgttcaaaaccaaaactggcgaactgtctatccactgcaccgagctgcgtctgctgaccaaa

SEQ ID NO: 459022 - DNA, 75 bp, synthetic construct
  source 1..75: mol_type = other DNA
cacatctgattcagcctaccttcattactgaatatccggcagaagtttcgccgctggcccgccgtaatgaggtta

SEQ ID NO: 459023 - DNA, 75 bp, synthetic construct
  source 1..75: mol_type = other DNA
cacatctgattcagcctacctttattactgaatatccggcagaagtgtccccgctggcccgccgtaatgaggtta

SEQ ID NO: 459024 - DNA, 75 bp, synthetic construct
  source 1..75: mol_type = other DNA
cacatctgattcagcctacctttattactgaatatccggcagaagtctcgccgctggcccgccgtaatgaggtta

SEQ ID NO: 459025 - DNA, 75 bp, synthetic construct
  source 1..75: mol_type = other DNA
ggattctggtttataccgtcaacaaaccccagcgcgcggcagagttgctgcgctggggcgtggattgcatctgta

SEQ ID NO: 459026 - DNA, 75 bp, synthetic construct
  source 1..75: mol_type = other DNA
gtgcggccattcttcaggacaaggttgctctgtttcagggagacattgcgaaaatcaatccgccgaagcctgtgg

SEQ ID NO: 459027 - DNA, 75 bp, synthetic construct
  source 1..75: mol_type = other DNA
aaaatttaaccccgccgccgggtaacagcagtggcaaccttgagcaacagatagccagtacttcacagctaattg

SEQ ID NO: 459028 - DNA, 75 bp, synthetic construct
  source 1..75: mol_type = other DNA
gtgcaactcaaccagtttcgtacgtttgctcgaggttttgataatgtccgcccgggtgatgaactggatgtcccg

SEQ ID NO: 459029 - DNA, 75 bp, synthetic construct
  source 1..75: mol_type = other DNA
tgacggctccttacccaaactgagaaaagaacttgaaggcgcacgcggtgaggctgaacgcacggcaaaggttat

SEQ ID NO: 459030 - DNA, 75 bp, synthetic construct
  source 1..75: mol_type = other DNA
gcttccggatgaagcggaaagggcgagaaagaaaatcgaagacgcacagcgtgcggccattcttcaggacaaggt

SEQ ID NO: 459031 - DNA, 75 bp, synthetic construct
  source 1..75: mol_type = other DNA
ggaagggttgcgcatccgcattgcagatctgattgacggtccgctgcgttctgtcacgcagtggctcacgcgggt

SEQ ID NO: 459032 - DNA, 75 bp, synthetic construct
  source 1..75: mol_type = other DNA
tgatacccctgggaaaatcgacccaatcccgcatccgtatggcgaagatttgccgtgcgcggataacaaaccggt

SEQ ID NO: 459033 - DNA, 75 bp, synthetic construct
  source 1..75: mol_type = other DNA
caatacccgtccggcgttgactaaacatacgccgatggcgacccagcgtcagacgcctgctacggcaaaaaaagc

SEQ ID NO: 459034 - DNA, 75 bp, synthetic construct
  source 1..75: mol_type = other DNA
agatcgaacgtttaagccagccaggtggttctgaagaccagcgtctgaatgcgctggcggagcgttttggcggcg

SEQ ID NO: 459035 - DNA, 75 bp, synthetic construct
  source 1..75: mol_type = other DNA
ccgtaccgcgcattatgattactggtccgataccgtgcgccgttccgtgttggtggattcgaaagccgacatgct

SEQ ID NO: 459036 - DNA, 75 bp, synthetic construct
  source 1..75: mol_type = other DNA
tcggcggtattgaggccagcctgcgccgtaccgcgcattatgattactggtcggataccgtgcgccgttccgtgc

SEQ ID NO: 459037 - DNA, 75 bp, synthetic construct
  source 1..75: mol_type = other DNA
catctccgcgcacccgggtacgcgtgatgaagatatggtgaatctggcgctatggctgaaaaagcatcgcttccg

SEQ ID NO: 459038 - DNA, 75 bp, synthetic construct
  source 1..75: mol_type = other DNA
ttgtctttaagaacctgccccgagcacttgctgttcgtggggagtggcaggagcggaagattgcgcaggtcagta

SEQ ID NO: 459039 - DNA, 75 bp, synthetic construct
  source 1..75: mol_type = other DNA
gcattccacggctgatcttcctgaccgcgccgctggcgttcctgctgcttcatgcttacatcatctacgcacccg

SEQ ID NO: 459040 - DNA, 75 bp, synthetic construct
  source 1..75: mol_type = other DNA
tcaatggatggatgagcttccggctcgcttcagtcataacacgcaacatcttgatgagaaaaaagagctgggcca

SEQ ID NO: 459041 - DNA, 75 bp, synthetic construct
  source 1..75: mol_type = other DNA
tatcgggcgttatcgcgattatcgtcgccacggtgcgtcggctttcagcgcgacgctcggctgtttctggatgat

SEQ ID NO: 459042 - DNA, 75 bp, synthetic construct
  source 1..75: mol_type = other DNA
ttcagacctgctggttgctggtcagtgcttcgcgcagagaaacgccgaaaccgcgctggcggtcgttttcacgct

SEQ ID NO: 459043 - DNA, 75 bp, synthetic construct
  source 1..75: mol_type = other DNA
atgagtatcctgacccggtggttgcttatcccgccggttaacgcacgtcttatcgggcgttatcgggaatatcgt

SEQ ID NO: 459044 - DNA, 75 bp, synthetic construct
  source 1..75: mol_type = other DNA
cctgagcgcgttagccataaaacacagcatcttgatgagaaaaaagagctcggtcatttgagtgccggggcgcgg

SEQ ID NO: 459045 - DNA, 75 bp, synthetic construct
  source 1..75: mol_type = other DNA
tgcaccgtcgtggctacacctctgcatatatgcgtattccgcaggcggcggggctggcgaccgaaagtctgtcgg

SEQ ID NO: 459046 - DNA, 75 bp, synthetic construct
  source 1..75: mol_type = other DNA
ttctctggtttcctgggttgtttcgttcattccgcgccgcccggagcggagcgaaacggtacaaccatcggatca

SEQ ID NO: 459047 - DNA, 75 bp, synthetic construct
  source 1..75: mol_type = other DNA
ggggtgttcagcgggattatggaaaggctgaccccgttgcgcgaaacctttgaacggtttggtcctgtttttgac

SEQ ID NO: 459048 - DNA, 75 bp, synthetic construct
  source 1..75: mol_type = other DNA
acccgctcaccggtaaagggctgaagtttgctcagcggctatgttacacgtcaacgccatgttccacttcttgtc

SEQ ID NO: 459049 - DNA, 75 bp, synthetic construct
  source 1..75: mol_type = other DNA
attgtgctgtcgctgaccgtttcttgccgttatatctggtggcgttacacctcgacgttaaactgggacgatccg

SEQ ID NO: 459050 - DNA, 75 bp, synthetic construct
  source 1..75: mol_type = other DNA
attccgcaggcagcggggctggcgaccgaaagtctctcggcgcatatcggtcagcgtattccgcaggcagcgggg

SEQ ID NO: 459051 - DNA, 75 bp, synthetic construct
  source 1..75: mol_type = other DNA
cattcggtcagcccaagcgcgctgaacgggcagggaagggttaaagagctgattgatgcaattccaccagagggg

SEQ ID NO: 459052 - DNA, 75 bp, synthetic construct
  source 1..75: mol_type = other DNA
ccggtcgcaatatggtgaagttcctggtggatgccatgcgcccggaagatcgccggtatgcgcttgaactactgt

SEQ ID NO: 459053 - DNA, 75 bp, synthetic construct
  source 1..75: mol_type = other DNA
ttgttaagtttccccggtgtgccagcgatatatattcaaagtattcttggctcgcgtaatgattacgcaggtgtc

SEQ ID NO: 459054 - DNA, 75 bp, synthetic construct
  source 1..75: mol_type = other DNA
aggcaatagcgcactcagtgccacggtgactgaaggttcagcggtgctggcaactgattataaaatctcatttag

SEQ ID NO: 459055 - DNA, 75 bp, synthetic construct
  source 1..75: mol_type = other DNA
cgctggtacaaggtagcacggcgcgccagcttgcggcagtaccgtccagcgccgatccttctcgtaccactgtcg

SEQ ID NO: 459056 - DNA, 75 bp, synthetic construct
  source 1..75: mol_type = other DNA
tactgcgcctgcacggaagttgaatgcggccacacctttgtttttaacgcccagttttcacataccctcagcccc

SEQ ID NO: 459057 - DNA, 75 bp, synthetic construct
  source 1..75: mol_type = other DNA
ctccctgtcttacagggatgcagaaggggataaatataaatcagaggctgatgttaaaaatcatgacatcatgtt

SEQ ID NO: 459058 - DNA, 75 bp, synthetic construct
  source 1..75: mol_type = other DNA
ggtcaggtggttactggcgtgatgacctgaagaatgaagtgtcagtcaacactctgatgctgaatgcgtactatg

SEQ ID NO: 459059 - DNA, 75 bp, synthetic construct
  source 1..75: mol_type = other DNA
acgttgacggtgaaggggatgccttcacgctggcatcaaaacgcaccaccacctttatgtcttccgggatgacgc

SEQ ID NO: 459060 - DNA, 75 bp, synthetic construct
  source 1..75: mol_type = other DNA
attcagcatgtaaatattactaatctgcatggtcgggatctgattagtgaagttgatatattgggtaatgaaata

SEQ ID NO: 459061 - DNA, 75 bp, synthetic construct
  source 1..75: mol_type = other DNA
caggtttattctcgcccatgcgattttgttaagtttccccggtgtgccagcgatatatattcaaagtattcttgg

SEQ ID NO: 459062 - DNA, 75 bp, synthetic construct
  source 1..75: mol_type = other DNA
tcgcccatgcgattttgttaagtttccccggtgtgccagcgatatatattcaaagcattctggggtcgcgtaatg

SEQ ID NO: 459063 - DNA, 75 bp, synthetic construct
  source 1..75: mol_type = other DNA
tgcgatcggtgcaacggtaactgatgcctccgcggtactggcgacagattacaaaatctcgttcgataataatca

SEQ ID NO: 459064 - DNA, 75 bp, synthetic construct
  source 1..75: mol_type = other DNA
aactggatatcggctgcgagcaccgcctggaacagtgtatgaccgcgctgcaagaaacgttgacgccggagtcgc

SEQ ID NO: 459065 - DNA, 75 bp, synthetic construct
  source 1..75: mol_type = other DNA
cgtatttattaacaatgctaatctgatcaagaaactcagttttccgaaaatctgtctgccgatcatcgtgacgtt

SEQ ID NO: 459066 - DNA, 75 bp, synthetic construct
  source 1..75: mol_type = other DNA
tctacgttctggtgccggagaacggagatacttttaaaatcggcatttcatgtggtccattggcacggtttaaag

SEQ ID NO: 459067 - DNA, 75 bp, synthetic construct
  source 1..75: mol_type = other DNA
cgcatccgtgacgcggtgccggaaaaagtcaacgaatgggggctgatgccgtcactcgacttagcgccgggtgaa

SEQ ID NO: 459068 - DNA, 75 bp, synthetic construct
  source 1..75: mol_type = other DNA
ttaaccgcctgcgcgacgcggtgccggaaaaggtcagtgaatgggggctgacgccttcgccggatctgccgccgg

SEQ ID NO: 459069 - DNA, 75 bp, synthetic construct
  source 1..75: mol_type = other DNA
gttatcgtctgcaccgttttccgccgcgccagcgagctatggcgagtgaaccactgaccgcagggatcagcgccg

SEQ ID NO: 459070 - DNA, 75 bp, synthetic construct
  source 1..75: mol_type = other DNA
gggggctgacgccttcgccggatctgccaccgggcgaatgccgggtgatcaccgacaaatccgaactggatatcg

SEQ ID NO: 459071 - DNA, 75 bp, synthetic construct
  source 1..75: mol_type = other DNA
aacatcacgatggccaatggttactcactggttcagggaagtacggctcggcaactggcggcagttccttccagc

SEQ ID NO: 459072 - DNA, 75 bp, synthetic construct
  source 1..75: mol_type = other DNA
atttccagctataacgttgccggatatacccgtcaaacgaccattatggcgcaggccaatagcactttgggtgca

SEQ ID NO: 459073 - DNA, 75 bp, synthetic construct
  source 1..75: mol_type = other DNA
gaataatatcggtgccctttatctttatatttgttagtcaaccaaaagatttatggatcgcggctcttataacga

SEQ ID NO: 459074 - DNA, 75 bp, synthetic construct
  source 1..75: mol_type = other DNA
tgtttcttattttttaagatattgtttattttggtggttttctaaaaaaatagaattatataaaaatgataattt

SEQ ID NO: 459075 - DNA, 75 bp, synthetic construct
  source 1..75: mol_type = other DNA
cctacgataccaacgtggaaggttctatcgtctacggcgcaccgcgtaatttcagcattaccggcacgtatcaat

SEQ ID NO: 459076 - DNA, 75 bp, synthetic construct
  source 1..75: mol_type = other DNA
ggcgacctgcgtgaaggcctgtataaaggggggcaggggcgttatgtggacggcaattttgatgaaacttttgtc

SEQ ID NO: 459077 - DNA, 75 bp, synthetic construct
  source 1..75: mol_type = other DNA
acgatggtgctgaagcccgccagtcagacgccgttctctgcgctggcgctggcggagctggcgatccgcgcgggc

SEQ ID NO: 459078 - DNA, 75 bp, synthetic construct
  source 1..75: mol_type = other DNA
ctctgccggatacagccccgccagcattcccatgaacaacatattgaagaactccgcgcagccctggcccggatg

SEQ ID NO: 459079 - DNA, 75 bp, synthetic construct
  source 1..75: mol_type = other DNA
atgggctgcggagcaaaattcatctgtccatatcgccccgccggaagccacactgcagtgtatggctcggcggag

SEQ ID NO: 459080 - DNA, 75 bp, synthetic construct
  source 1..75: mol_type = other DNA
gtcgtggcgagcttaaccgggctttaatggttgtgccggcaggtctggttaacaactggcaccgcgaactgaatg

SEQ ID NO: 459081 - DNA, 75 bp, synthetic construct
  source 1..75: mol_type = other DNA
ccgtcacaaaagagtggctacgggcacattgtgacgatgtggaagtgatccccctgtgccgtatgcatgacggtc

SEQ ID NO: 459082 - DNA, 75 bp, synthetic construct
  source 1..75: mol_type = other DNA
aggatatccgtgatggcctgacggcggcactggctgacggcgggacgttccgggagtttgctgcacaactggaac

SEQ ID NO: 459083 - DNA, 75 bp, synthetic construct
  source 1..75: mol_type = other DNA
gacaccggcgaactgcatggcagacaactgacgccgcgccggttgcgcacgatatttgataccaatattcagtcg

SEQ ID NO: 459084 - DNA, 75 bp, synthetic construct
  source 1..75: mol_type = other DNA
cagtgcccgggcgttcacggtggcaggcgtgctgaaactggatgttctgaaggatatccgtgatggcctgacgac

SEQ ID NO: 459085 - DNA, 75 bp, synthetic construct
  source 1..75: mol_type = other DNA
tgctttaagaaaagctcagcagctagccgatgcagatgggatttcattagacgaaatcgttgcctacgcaatacg

SEQ ID NO: 459086 - DNA, 75 bp, synthetic construct
  source 1..75: mol_type = other DNA
gtaccttgcggatttatgctactggcattcgttattatctggttttatccgctcacggataaaaaattcaaagaa

SEQ ID NO: 459087 - DNA, 75 bp, synthetic construct
  source 1..75: mol_type = other DNA
tattgccattgtcatttcatgccaacgcgtactatttaagttgcgagcaagttggaaaaatagcagtagcggtaa

SEQ ID NO: 459088 - DNA, 75 bp, synthetic construct
  source 1..75: mol_type = other DNA
aactactggggctgttcccttcagtccgtgaaactaaagtagataagctcattggagctttgggtgtgctgtggc

SEQ ID NO: 459089 - DNA, 75 bp, synthetic construct
  source 1..75: mol_type = other DNA
cgacacaccgctggtggagtacacccgcgaccgcctgcaccgggaaacgctgcgccgcttcggccgttatgaact

SEQ ID NO: 459090 - DNA, 75 bp, synthetic construct
  source 1..75: mol_type = other DNA
atcaggcagagttcggtaagtaaccgttatggtacgacgaaagtgtttgaaagccagactttgacggataaacag

SEQ ID NO: 459091 - DNA, 75 bp, synthetic construct
  source 1..75: mol_type = other DNA
atgaaaaaggttattgcggtttcagcgcttgcaatggctggcatgttttcggcccaggctctggctgatgaggat

SEQ ID NO: 459092 - DNA, 75 bp, synthetic construct
  source 1..75: mol_type = other DNA
ggccgctggcttctgatccggatgtgcgcatgcgtctgatggccatggcggtggaatacgggaggggaagccggg

SEQ ID NO: 459093 - DNA, 75 bp, synthetic construct
  source 1..75: mol_type = other DNA
tcgtcaggaaggaaagaaaaatgccgtcaccggcaggaaaaactgcgcacagagcgggcagaggataatccgtgg

SEQ ID NO: 459094 - DNA, 75 bp, synthetic construct
  source 1..75: mol_type = other DNA
cgtcaccggcaggaaaagctgcgcacagagcgtgcagaggataatccgtggataacatcaggaggctggttgtga

SEQ ID NO: 459095 - DNA, 75 bp, synthetic construct
  source 1..75: mol_type = other DNA
atggccatcgtcagtaagtcagagtttgcccgccggaaaggtatttctccggcaatggttacgaagctctgtcgt

SEQ ID NO: 459096 - DNA, 75 bp, synthetic construct
  source 1..75: mol_type = other DNA
aacgcattattgaagacgagattaattttgcgcttcaggcgctccaggaatcccgatttattaagcaggaagaat

SEQ ID NO: 459097 - DNA, 75 bp, synthetic construct
  source 1..75: mol_type = other DNA
cgggaaggtatcaacctgcaacatgcacgggtgctgtttaactttgacctgccgtggaatccaatggatatggaa

SEQ ID NO: 459098 - DNA, 75 bp, synthetic construct
  source 1..75: mol_type = other DNA
actgatgcgatgggctgccagaaagatattgcagaaaagatacaaaaacagggaggtgattatttattcgcggta

SEQ ID NO: 459099 - DNA, 75 bp, synthetic construct
  source 1..75: mol_type = other DNA
aagtcacagatgcggaaagagtggagtgaaacgctggctaaggatattcgtgatgaactgattcgtcggagggtg

SEQ ID NO: 459100 - DNA, 75 bp, synthetic construct
  source 1..75: mol_type = other DNA
tgacggcgaggtggttcgtcccaaagaaccgaactggacagcctgggcaaacgaaattcgcctgatgtgtgtgca

SEQ ID NO: 459101 - DNA, 75 bp, synthetic construct
  source 1..75: mol_type = other DNA
aaaatcatcgctctgtacgagcaggccgccgaatgtgacggcgaagtggtacgtcctaaagaaccgaactggaca

SEQ ID NO: 459102 - DNA, 75 bp, synthetic construct
  source 1..75: mol_type = other DNA
cgcgtcagtcgcgatccgttctggtgccgtaacgtgctcagcccgtcgaagctgcgggaaaaatgggatgagctt

SEQ ID NO: 459103 - DNA, 75 bp, synthetic construct
  source 1..75: mol_type = other DNA
aaagtggcggaagaaacctgtcgtgaacactttggcgaagccgatctggagtatgtcattggtaccgaagtgccg

SEQ ID NO: 459104 - DNA, 75 bp, synthetic construct
  source 1..75: mol_type = other DNA
aagattcgttctggtgtaaaaacgtgctcagcccgtcgaagcttcgggaaaaatgggatgagctgtcgttaaaac

SEQ ID NO: 459105 - DNA, 75 bp, synthetic construct
  source 1..75: mol_type = other DNA
taaaacctgatccgtcagataaaagatcttttcgtccggaagcttcgcaaccggacccgcagacggctgaacagg

SEQ ID NO: 459106 - DNA, 75 bp, synthetic construct
  source 1..75: mol_type = other DNA
gctgatctatgtccatggcgcaaatgacccggaaagtcggttgcctgccgggttgctggatattggcgtcagcaa

SEQ ID NO: 459107 - DNA, 75 bp, synthetic construct
  source 1..75: mol_type = other DNA
gctaagacgctggtacgaacaacagccccgaaattacccattgagcgatcttttcgtccatgcgggaaacgcccc

SEQ ID NO: 459108 - DNA, 75 bp, synthetic construct
  source 1..75: mol_type = other DNA
tagccgtgtatggtccggtgcatgcgcggcttcttcggcagtctctggaactgatcagtgatgccggcgaggtta

SEQ ID NO: 459109 - DNA, 75 bp, synthetic construct
  source 1..75: mol_type = other DNA
atgaacagtttaacaacacactaccgtcgctcgcaactgaaaaaaacttctcgtccggacgcttcgcaaccggac

SEQ ID NO: 459110 - DNA, 75 bp, synthetic construct
  source 1..75: mol_type = other DNA
atttaatgcgttgcaggggaattataccctcgcaagaaaaacacaggccgtggaatttaatgataagggcgatat

SEQ ID NO: 459111 - DNA, 75 bp, synthetic construct
  source 1..75: mol_type = other DNA
ggttgctggatattggcgtcactaaacggcaaatcgccgtcatcagtaaaacggacatgccggatgctgacgtcg

SEQ ID NO: 459112 - DNA, 75 bp, synthetic construct
  source 1..75: mol_type = other DNA
taagcgagctggcggtcaccacgccggatgccgcccgcgccacgctggaagcccatcgtcacgcctttgaaaagc

SEQ ID NO: 459113 - DNA, 75 bp, synthetic construct
  source 1..75: mol_type = other DNA
ctggataaatgtaccagtgctggcgagatattcggtaacgttcttggtggcgcgctacagcttgttctgacgcct

SEQ ID NO: 459114 - DNA, 75 bp, synthetic construct
  source 1..75: mol_type = other DNA
ctcttatccttatctggaataaccgctgtcgctacaccttgctccgacaactgcgaaccccagggcagcgtattc

SEQ ID NO: 459115 - DNA, 75 bp, synthetic construct
  source 1..75: mol_type = other DNA
aaagctgcggctgatgcgctgaaagagctgggagtgtcagttgctgacgccagaggcaaaatgcgcccgatggag

SEQ ID NO: 459116 - DNA, 75 bp, synthetic construct
  source 1..75: mol_type = other DNA
aatcaggtggatcagttcggcggatataccggaatgacgcccgccgattttcgcggctttgtttgccagcttgcc

SEQ ID NO: 459117 - DNA, 75 bp, synthetic construct
  source 1..75: mol_type = other DNA
gcaatgtccaaaacctatattaatttccgggagaaagataaacacgggaagctaattaatattccgttagatatc

SEQ ID NO: 459118 - DNA, 75 bp, synthetic construct
  source 1..75: mol_type = other DNA
cattcctataattattatactaagtgcaaaaactttagttttattatatttaataacgatactaattttaactcc

SEQ ID NO: 459119 - DNA, 75 bp, synthetic construct
  source 1..75: mol_type = other DNA
gcggtgcttacggaaaagcagcaagcgcgctgtatcgggtgatgaatggtatctgtcagggaattacgtgggggc

SEQ ID NO: 459120 - DNA, 75 bp, synthetic construct
  source 1..75: mol_type = other DNA
ttcggctagcaggaaaagatattgctgaattgatggaaagtatgatggggatctccttaaaccatggcgtacatg

SEQ ID NO: 459121 - DNA, 75 bp, synthetic construct
  source 1..75: mol_type = other DNA
gaccatctggggccaaaccgctggcaaaacctgcctgccgctcaggcaatggccaatgccgatgatttgattaaa

SEQ ID NO: 459122 - DNA, 75 bp, synthetic construct
  source 1..75: mol_type = other DNA
caaaacttggtatcagtcttgaagaagcggcggccatggccgggatgcttgccaataatggtcttcgcggaagcg

SEQ ID NO: 459123 - DNA, 75 bp, synthetic construct
  source 1..75: mol_type = other DNA
gcgatggctggctggggagtggcaatgtgtctcgcacagcgatgatagtttgtgtctggtgtatgaacatcgcag

SEQ ID NO: 459124 - DNA, 75 bp, synthetic construct
  source 1..75: mol_type = other DNA
gatccgttctggtgccgtaacgtgctcagcccgtcgaagctgcgggaaaaatgggatgagctttccctgcgctta

SEQ ID NO: 459125 - DNA, 75 bp, synthetic construct
  source 1..75: mol_type = other DNA
aagcagttaggattcagttctgacctctacgctatgcagagcgaaatgtggttctacagcaacacgatggcggac

SEQ ID NO: 459126 - DNA, 75 bp, synthetic construct
  source 1..75: mol_type = other DNA
caaccactggcgcgattaacacagatgaatccactggctcttcgtttgtatcagatgcatggtcatgacctgact

SEQ ID NO: 459127 - DNA, 75 bp, synthetic construct
  source 1..75: mol_type = other DNA
tgtaatggtagcctccagcaaagccttctggggaacttccgcctgttctggttctgataaacaaacgcttcacac

SEQ ID NO: 459128 - DNA, 75 bp, synthetic construct
  source 1..75: mol_type = other DNA
cctgctggatgtcgcagtttatgaagagactcaaaaagggcgcgatgtttttcttgattttctacgggaaccaga

SEQ ID NO: 459129 - DNA, 75 bp, synthetic construct
  source 1..75: mol_type = other DNA
acctggttttgtaatcagtgcggtcatggtgatggtctggatctggttcgtctggtgaccgggagaaaggtaaag

SEQ ID NO: 459130 - DNA, 75 bp, synthetic construct
  source 1..75: mol_type = other DNA
agggggatcgatataaagttaaaaagataatcgtgaaacccggggaagggctatccttacgtatgcaccatcatc

SEQ ID NO: 459131 - DNA, 75 bp, synthetic construct
  source 1..75: mol_type = other DNA
ctctgattctgcgctagttgctgctgtaggtgttgagaatattgtcatagtgcaaactaaggatgcagtattagt

SEQ ID NO: 459132 - DNA, 75 bp, synthetic construct
  source 1..75: mol_type = other DNA
aggcgaacgaggacaaattgttattcctcccgcctgtgagaaatctactgtgtcgatgacgtttcgtaaaccgtc

SEQ ID NO: 459133 - DNA, 75 bp, synthetic construct
  source 1..75: mol_type = other DNA
ccgccacactgacagggctgaatatcattcaggagatcccgggggatattttcgcggcggcagcaacttacgacg

SEQ ID NO: 459134 - DNA, 75 bp, synthetic construct
  source 1..75: mol_type = other DNA
aactggatatcggctgtgagcatcgcctggaacaatgcatgaccgcgctgaaagaaaccctcacgccggagtcgc

SEQ ID NO: 459135 - DNA, 75 bp, synthetic construct
  source 1..75: mol_type = other DNA
gccgcgcatctattcgcaggaccactccgggcgtcagtataattttctggcagcttattaccccacgactcgtat

SEQ ID NO: 459136 - DNA, 75 bp, synthetic construct
  source 1..75: mol_type = other DNA
gctggcagagtcatttattaaaaaatactccacggtgctggtgaaaaatatcaccctgtcggaatctacccgccg

SEQ ID NO: 459137 - DNA, 75 bp, synthetic construct
  source 1..75: mol_type = other DNA
tgcaatggcctgttcagcccgccgtccacattgccgaaaccagcgatttaggccagcacggacgaagcgcccagt

SEQ ID NO: 459138 - DNA, 75 bp, synthetic construct
  source 1..75: mol_type = other DNA
gccgcaagtgggctatgccgatggaaatgctgggcggcagcggggaagagctgcgccgcgtgttactggttaatg

SEQ ID NO: 459139 - DNA, 75 bp, synthetic construct
  source 1..75: mol_type = other DNA
gccgcaggcgtggctggacgcatacaaacccgcttacgacgcgctccagggacaggtgaaactgctgctgaccac

SEQ ID NO: 459140 - DNA, 75 bp, synthetic construct
  source 1..75: mol_type = other DNA
ttcctttgccaccggaagtaattgctgctcgagctgctgaactatgtcgggttgcagaaaatgtagcaactgcag

SEQ ID NO: 459141 - DNA, 75 bp, synthetic construct
  source 1..75: mol_type = other DNA
taccgttagcaccagaaacggttgcggaacgagcggctgtgctttgctttgctgcggaaagtgtggcgacagatt

SEQ ID NO: 459142 - DNA, 75 bp, synthetic construct
  source 1..75: mol_type = other DNA
accgtgcgcgatatcaccctgaccagcacttgtgaacaccattttgtcactattgatggcaaagcgacggtggct

SEQ ID NO: 459143 - DNA, 75 bp, synthetic construct
  source 1..75: mol_type = other DNA
gtttgatggaaacgccgcatcgcatcgctaaaatgtatgtcgatgaaattttctccggtctggattacgccaact

SEQ ID NO: 459144 - DNA, 75 bp, synthetic construct
  source 1..75: mol_type = other DNA
gtcaattaatgaacgcgagcacctgcacggcacgccgcgtgaactggcaccgccggagcagttccgcgtaccgat

SEQ ID NO: 459145 - DNA, 75 bp, synthetic construct
  source 1..75: mol_type = other DNA
gaatcccggcagagcctttgctgaacgggcggcaaaagctgttggcggctggatgacgctgccaccaggagagat

SEQ ID NO: 459146 - DNA, 75 bp, synthetic construct
  source 1..75: mol_type = other DNA
gccggatgcgtagtggctgccatatctgcgggcaacctgcccaatgtggcgcagtcgctgcgggcacgctggcct

SEQ ID NO: 459147 - DNA, 75 bp, synthetic construct
  source 1..75: mol_type = other DNA
tctgaccggaagcgtacagcatatcagcggtaaggattttcctgccggttccctgctgttaccactcacgaccaa

SEQ ID NO: 459148 - DNA, 75 bp, synthetic construct
  source 1..75: mol_type = other DNA
cggggaattatcagcaataccgcatcagctgattatggataaaatttatgatgttttgcgcgcctatcgctacgg

SEQ ID NO: 459149 - DNA, 75 bp, synthetic construct
  source 1..75: mol_type = other DNA
ttacagcctgtcggatcgtattcgttattactggccgcatagtcggattaaaaatagcgtcgaaacgatgatggt

SEQ ID NO: 459150 - DNA, 75 bp, synthetic construct
  source 1..75: mol_type = other DNA
gatggacggcggcggctaccacctcaagggggaatcgactgacggtaagaccaccaccatgaaagcggcaacctc

SEQ ID NO: 459151 - DNA, 75 bp, synthetic construct
  source 1..75: mol_type = other DNA
gaacgtactccgtgctcttggaacccgttattttaatataaaacctggtgaatttacctggatacaaccgtttca

SEQ ID NO: 459152 - DNA, 75 bp, synthetic construct
  source 1..75: mol_type = other DNA
cattctcaccggaaagtaatgctaaggtgccctggttggggcaccatgttgcacctgaaatttgtactctgggca

SEQ ID NO: 459153 - DNA, 75 bp, synthetic construct
  source 1..75: mol_type = other DNA
acgtcgcctctacgcgcgtggtgctgctgcacgggcatctcggcgcggacgcggcgggtaaggggattgagtcgt

SEQ ID NO: 459154 - DNA, 75 bp, synthetic construct
  source 1..75: mol_type = other DNA
gggcgtttgttcacaactgagatagctgcggggatgtacgctagtgaggtgaggaaagcagttaagccgctattc

SEQ ID NO: 459155 - DNA, 75 bp, synthetic construct
  source 1..75: mol_type = other DNA
gaaattggatatctgaacgattgctcttggatgaccagtccttaaagcagtttagttcagaaatagtctacgggg

SEQ ID NO: 459156 - DNA, 75 bp, synthetic construct
  source 1..75: mol_type = other DNA
aaatagaagttgataataaagcatctgagtcggggattgtaatagtttggagagtagccagtttttttgaatcac

SEQ ID NO: 459157 - DNA, 75 bp, synthetic construct
  source 1..75: mol_type = other DNA
gattcgcggcgtgcggcaggtgatatccgacggcaacggcgtgctgctgccggagatccgcattcgggaaaactt

SEQ ID NO: 459158 - DNA, 75 bp, synthetic construct
  source 1..75: mol_type = other DNA
atgtttgtgctggcagtggtgccggggatgccgcacctgccgttcctgatgttcagcgccctgcttggctttacc

SEQ ID NO: 459159 - DNA, 75 bp, synthetic construct
  source 1..75: mol_type = other DNA
gattatcgtcacccgcgtcagcgacaacggcgatatcgcccatgatgtgcgtaaccagctgctggcaagcccgtc

SEQ ID NO: 459160 - DNA, 75 bp, synthetic construct
  source 1..75: mol_type = other DNA
tcgacccgaatatgctcaaccagttccagagtacgatgccgcaggtgaaggagcagatgaaagcggcggggaaag

SEQ ID NO: 459161 - DNA, 75 bp, synthetic construct
  source 1..75: mol_type = other DNA
ccagagtacgatgccgcaggtaaaagagcagatgaaagcggcggggaaagacccggtgctgctggtgccgccgca

SEQ ID NO: 459162 - DNA, 75 bp, synthetic construct
  source 1..75: mol_type = other DNA
gcttaagcctcggctacaaactggtggcgctggtggacaaagcgcagggcaacccgctcacccagcgtattcgcg

SEQ ID NO: 459163 - DNA, 75 bp, synthetic construct
  source 1..75: mol_type = other DNA
tcgaaaccaatacaggcatgaataacatgctggaacgcattggggcggagtcgtacaagcgttaccgattgtatg

SEQ ID NO: 459164 - DNA, 75 bp, synthetic construct
  source 1..75: mol_type = other DNA
gcagattggtgagttcgcgtttatcctggcgggactaggaatggcattgaatttactgccgcaggccggacaaaa

SEQ ID NO: 459165 - DNA, 75 bp, synthetic construct
  source 1..75: mol_type = other DNA
cctggtactggcaggcgcgattctgtcgattatgctcaacccggtactgttcgcgctgctggaaaaatatctggc

SEQ ID NO: 459166 - DNA, 75 bp, synthetic construct
  source 1..75: mol_type = other DNA
gccgtgtataaggtcttttctgccagtgcagccccggcaggaatggagaggtgtgtggggccggagaatatgccg

SEQ ID NO: 459167 - DNA, 75 bp, synthetic construct
  source 1..75: mol_type = other DNA
tcaggtagtgatgggtgagcgtgaaattgcccgtactatgctggaactgctggaaacgccaccggcgggtgaggt

SEQ ID NO: 459168 - DNA, 75 bp, synthetic construct
  source 1..75: mol_type = other DNA
tgggcgagcgtgaaattgcccgtactatgctggaactgctggaaacgccaccggcgggtgaagtggtgacggggt

SEQ ID NO: 459169 - DNA, 75 bp, synthetic construct
  source 1..75: mol_type = other DNA
tctgcccgcgcgaaaaatccggatattgagattattgcccgcgcccattatgacgatgaagtggcgtatatcacc

SEQ ID NO: 459170 - DNA, 75 bp, synthetic construct
  source 1..75: mol_type = other DNA
atgtattttatcggttatcatggcacgagtgaggcgtcagcccagaatattctctctgtgggagttcaggagcgc

SEQ ID NO: 459171 - DNA, 75 bp, synthetic construct
  source 1..75: mol_type = other DNA
gaacggtacgctaccacagtggggcgctgaaaacgcaaccgaattagcccgcagaaatcagccgtatttcactcg

SEQ ID NO: 459172 - DNA, 75 bp, synthetic construct
  source 1..75: mol_type = other DNA
atgcggtctggaccggtattggcgctgttggggcggccattacagggattttgctgctgggtgagtctgccagcc

SEQ ID NO: 459173 - DNA, 75 bp, synthetic construct
  source 1..75: mol_type = other DNA
cggatctgattgcggcggcaaaggcgggaatggattctcacggtttcggcatggcttcggtgcgttttatttgcg

SEQ ID NO: 459174 - DNA, 75 bp, synthetic construct
  source 1..75: mol_type = other DNA
tagacgactcccacgcggtcggttttgtcggtgaaaatggtcgtggttcccatgaatactgcgatgtgatggggc

SEQ ID NO: 459175 - DNA, 75 bp, synthetic construct
  source 1..75: mol_type = other DNA
actctatgacaacggaggcccaggtctggatctaaagcgcgattgcaaatggttgcaaatggttgtaccaccaga

SEQ ID NO: 459176 - DNA, 75 bp, synthetic construct
  source 1..75: mol_type = other DNA
gttcagcgccctgctgggttttaccggctggcggatgagcaaacagccgcaggcggcggaggcggaagagaaaag

SEQ ID NO: 459177 - DNA, 75 bp, synthetic construct
  source 1..75: mol_type = other DNA
ggggctggcagtgacaattgttggcattgcctttagccagaactatagcgttgagcgtgatgtgcgcatgaagtc

SEQ ID NO: 459178 - DNA, 75 bp, synthetic construct
  source 1..75: mol_type = other DNA
tgcggaagctgcgctgcgtatttcacgtggcacgaaaaccaccttcagttattggggaatggtggcggctcacct

SEQ ID NO: 459179 - DNA, 75 bp, synthetic construct
  source 1..75: mol_type = other DNA
atgaaatgctcatctgtttttacttcaaccactaatcatgttttcacgttcgaacgagtaacgctttgcactatt

SEQ ID NO: 459180 - DNA, 75 bp, synthetic construct
  source 1..75: mol_type = other DNA
cggaaaatagctggcgaaatagctttcgttgcccgctacggtacttataaagatcacaacacgctaacagatgcc

SEQ ID NO: 459181 - DNA, 75 bp, synthetic construct
  source 1..75: mol_type = other DNA
cgaaaaatggctggtgaaatagctttcgcaatgctctacgggttttatacagatcataacacgctaattgacgcc

SEQ ID NO: 459182 - DNA, 75 bp, synthetic construct
  source 1..75: mol_type = other DNA
atgcactcactggcggtcactgaacaacgcgccagcttcaaagcgtggacattactgctggcaatcagtgccttc

SEQ ID NO: 459183 - DNA, 75 bp, synthetic construct
  source 1..75: mol_type = other DNA
ggggcaacgccgtttcgcaaaccacgcttcacgtcgttgcggcgggtccctgcccgttgttctgtccggtgccat

SEQ ID NO: 459184 - DNA, 75 bp, synthetic construct
  source 1..75: mol_type = other DNA
tcgcgccgcctctgtcgcgccgtggcctgcgctcccggcatcccggcaaaaggccgccgggatgtaaggggcaac

SEQ ID NO: 459185 - DNA, 75 bp, synthetic construct
  source 1..75: mol_type = other DNA
cctgccgggtgccacacacccgtatgagtccctgtcgccgggggctgatacagccacaacctgccgcactgactg

SEQ ID NO: 459186 - DNA, 75 bp, synthetic construct
  source 1..75: mol_type = other DNA
taaggctgagcgatccggcgtcactgcatccaaaccaggatctgttgcaactcggcatggactcgctgctcttcc

SEQ ID NO: 459187 - DNA, 75 bp, synthetic construct
  source 1..75: mol_type = other DNA
atgcccggcgcgcttttgccgcgggcgtggatggcattgtgttatcaaaccatggcgggcgacaactggacggtt

SEQ ID NO: 459188 - DNA, 75 bp, synthetic construct
  source 1..75: mol_type = other DNA
attcacctgtttaagcccctgtcgccgggggcaaagacagccacaaccgtctccgccagtccaggggtgaaatgt

SEQ ID NO: 459189 - DNA, 75 bp, synthetic construct
  source 1..75: mol_type = other DNA
cgtggtcggttttatgaattggtatacagcgaaaaaagggagaaagaatatctgaacgaatcgacccctatgtgg

SEQ ID NO: 459190 - DNA, 75 bp, synthetic construct
  source 1..75: mol_type = other DNA
attttcgctggattgatcgtggaaggcgagcgtaataccgggcagcgtgggcaaccttcactgccgctccgcctt

SEQ ID NO: 459191 - DNA, 75 bp, synthetic construct
  source 1..75: mol_type = other DNA
atgccaacaccaaccatcatcaaaacactcgccacccaccgcgaaaaaccgtttgtcagcgtcgtcacgcccacc

SEQ ID NO: 459192 - DNA, 75 bp, synthetic construct
  source 1..75: mol_type = other DNA
gtgaatattgacccggcgataacgattgatatggccctgaacaccggcctggcacttcttggttatttctacatc

SEQ ID NO: 459193 - DNA, 75 bp, synthetic construct
  source 1..75: mol_type = other DNA
aaactggtggcgctggtggataaagcgcagggcaacccgctcacccagcgtattcgcggcgtacgtcaggtgatt

SEQ ID NO: 459194 - DNA, 75 bp, synthetic construct
  source 1..75: mol_type = other DNA
attctggcttttgcttttgttgccatgctggggccggggctggttaacggcgcactggcgctggcattaaccacc

SEQ ID NO: 459195 - DNA, 75 bp, synthetic construct
  source 1..75: mol_type = other DNA
caagcgccgaacagtcagcactggctcggtacggacagttacgggcgagatctactttcacgtttaatctacggc

SEQ ID NO: 459196 - DNA, 75 bp, synthetic construct
  source 1..75: mol_type = other DNA
ggtaaacaaaacccttaaagagggatttgcaaaaaacaccattaaggataagtacaaactttgggaagctggtga

SEQ ID NO: 459197 - DNA, 75 bp, synthetic construct
  source 1..75: mol_type = other DNA
gcatccaaaccaggatctgttgcaactcggcatggactcgctgctcttccttgaactcagtagcgatattcagca

SEQ ID NO: 459198 - DNA, 75 bp, synthetic construct
  source 1..75: mol_type = other DNA
ttctgcgccacgggttttatgcagatcataacacgctaattgatgccgaactggtgacaactctttacgaaggag

SEQ ID NO: 459199 - DNA, 75 bp, synthetic construct
  source 1..75: mol_type = other DNA
agcagagggggcgtagtaatccttgtatatcggagtgaagagaaaaatgagcgagatcaactatcaggcactgcg

SEQ ID NO: 459200 - DNA, 75 bp, synthetic construct
  source 1..75: mol_type = other DNA
aacctgagtcttggcgtggcgaactctatcgcggcggtggaagagggctgcgatagagttcgccagcctcgcggg

SEQ ID NO: 459201 - DNA, 75 bp, synthetic construct
  source 1..75: mol_type = other DNA
tcgatacggccctaaataccggactggcacttctcggttggctttacatcatgtccagtacatggcgatggctgg

SEQ ID NO: 459202 - DNA, 75 bp, synthetic construct
  source 1..75: mol_type = other DNA
gtccggcctggagccgctgaacattggcgaagatagcctgtttgtgaacgtgggtgaacgcaccaacgtcaccgg

SEQ ID NO: 459203 - DNA, 75 bp, synthetic construct
  source 1..75: mol_type = other DNA
agatgtgattcttaatcgtcgcgacgatggcactgagcgtttactggagcttgccgagaaatatcgcggcagcaa

SEQ ID NO: 459204 - DNA, 75 bp, synthetic construct
  source 1..75: mol_type = other DNA
gggcagacaaaggcaaaggtaagaacgataacaaacctctgaaccgccccggttttcctggagagtgttttatct

SEQ ID NO: 459205 - DNA, 75 bp, synthetic construct
  source 1..75: mol_type = other DNA
attcttcgaaatgggacgtcatcgaaaaaggactgaagtgtattcagggcaaaggcattgttaactctatctcga

SEQ ID NO: 459206 - DNA, 75 bp, synthetic construct
  source 1..75: mol_type = other DNA
ccgctgaactgcgcgacgcggtggaagatgtgattcttaaccgtcgcgacgatggcactgagcgtttactggagc

SEQ ID NO: 459207 - DNA, 75 bp, synthetic construct
  source 1..75: mol_type = other DNA
cgcgaagctattcacgcagtgtttctctactacgccatccgtaacggtatggatatggggatcgtcaacgccggg

SEQ ID NO: 459208 - DNA, 75 bp, synthetic construct
  source 1..75: mol_type = other DNA
gattacgttggtggcgatcggcccgttgacgaatatcgcgctattgctttcacagtgcccggaatgcaaaccaca

SEQ ID NO: 459209 - DNA, 75 bp, synthetic construct
  source 1..75: mol_type = other DNA
caactgctgcatttctggaatgcggatattccgctcgcccagggagccgctgtgccgctggtacgcgcaccgcgt

SEQ ID NO: 459210 - DNA, 75 bp, synthetic construct
  source 1..75: mol_type = other DNA
tgaacacaacagaagcccgctggataaaccggcatttctggctattcgtgatgctctgatacgtgcgccagaacc

SEQ ID NO: 459211 - DNA, 75 bp, synthetic construct
  source 1..75: mol_type = other DNA
ggtcgatccgcgcaaagccgccgtcgaagccgctattgcccgtgccaaagcacgcaagctggaacagcaacaggc

SEQ ID NO: 459212 - DNA, 75 bp, synthetic construct
  source 1..75: mol_type = other DNA
aagcacgcaagctggagcagcaacaggctaatgcggaaccagaagaacaggtcgatccgcgcaaagccgccgtcg

SEQ ID NO: 459213 - DNA, 75 bp, synthetic construct
  source 1..75: mol_type = other DNA
gatgcggcatctgtacacggtgaatcgggaatggctggctatgactttgttgaacacaaccgtcagccactgggt

SEQ ID NO: 459214 - DNA, 75 bp, synthetic construct
  source 1..75: mol_type = other DNA
cgtatattgaagccagcaaagagcagggtaaaaccaacggtaagatggtgatcgccaccgtgaagggtgacgtgc

SEQ ID NO: 459215 - DNA, 75 bp, synthetic construct
  source 1..75: mol_type = other DNA
acttgaacgtttttatatacaaaaaaatgaactgcaagaaaaaaactgtaaattaaaaaatgaagttgacaagca

SEQ ID NO: 459216 - DNA, 75 bp, synthetic construct
  source 1..75: mol_type = other DNA
aacacaccggcatgaaacttacggaatctttcgcgatgtggcctggagcgtcggtttcaggttggtatttcagcc

SEQ ID NO: 459217 - DNA, 75 bp, synthetic construct
  source 1..75: mol_type = other DNA
cgtgatgattttgtcgctcgtacccgcaaggagtacgaaaccgtacgtattcagcacgggcgcaagaaaccgcgc

SEQ ID NO: 459218 - DNA, 75 bp, synthetic construct
  source 1..75: mol_type = other DNA
aactccataatttgaaagaagaagttgaacataatcaaaagattaaagagaaagatgattttgatgttaaagaat

SEQ ID NO: 459219 - DNA, 75 bp, synthetic construct
  source 1..75: mol_type = other DNA
aaggatcattttttggattcattattcttccattttctatatacagaactgttcgtcaatttaagaaaatcaaaa

SEQ ID NO: 459220 - DNA, 75 bp, synthetic construct
  source 1..75: mol_type = other DNA
acagggcattttttagaacgattggaatcagtatttaaaataccattaaatttgtgtgatttgaaagagtgtttg

SEQ ID NO: 459221 - DNA, 75 bp, synthetic construct
  source 1..75: mol_type = other DNA
gcgcgaccacttctaaagcacacacggcggtgaagatcgagcaaaactacagcggcccgacggtgtatgtacaga

SEQ ID NO: 459222 - DNA, 75 bp, synthetic construct
  source 1..75: mol_type = other DNA
aaccgacgacaccgccaacgcccagcaggcggagtggcgctcgtgggaagtgaataaacgtctggaatactcgct

SEQ ID NO: 459223 - DNA, 75 bp, synthetic construct
  source 1..75: mol_type = other DNA
gaaattgttgatctcggcgtgatggtgccagcggaaaaaatcctccgcactgccaaagaggtgaatgctgatttg

SEQ ID NO: 459224 - DNA, 75 bp, synthetic construct
  source 1..75: mol_type = other DNA
atgatccagagttatcgtctgagcgaagccgattttcgcggcgagcgttttgccgactggccgtgcgacctcaaa

SEQ ID NO: 459225 - DNA, 75 bp, synthetic construct
  source 1..75: mol_type = other DNA
ctgtttaaagacgccaacgacatgctggataaattaagcgccgagaaaacgctgaatccgcgtggcgtggtgggg

SEQ ID NO: 459226 - DNA, 75 bp, synthetic construct
  source 1..75: mol_type = other DNA
ttgccgagaaatatcgcggtagtaaaacagacgacaccgctaacgctcagcaggcagagtggcgctcgtgggatg

SEQ ID NO: 459227 - DNA, 75 bp, synthetic construct
  source 1..75: mol_type = other DNA
cgcatgggtaaacctgccaacgttcgggtggcgctggatctggacgtgaacggctttcgccagtgggtagctgag

SEQ ID NO: 459228 - DNA, 75 bp, synthetic construct
  source 1..75: mol_type = other DNA
ttactgtgacggcgatgatagtcagtatggcgctacttgcctgggcgatgaaatcgttaccggtagggacggctt

SEQ ID NO: 459229 - DNA, 75 bp, synthetic construct
  source 1..75: mol_type = other DNA
atcagagccgctggaattaaagagaagaatttcgatgaagcaaatatacatgcttcgcaacgaagcaatcagaaa

SEQ ID NO: 459230 - DNA, 75 bp, synthetic construct
  source 1..75: mol_type = other DNA
atggacgaatcaagaaagcagtttgaagaaagttggttgcgacgtggaggcgaatcttcagaccttatccgttac

SEQ ID NO: 459231 - DNA, 75 bp, synthetic construct
  source 1..75: mol_type = other DNA
gcaagaaatggtgataggtacttcgcattttcaagcatggatattcgtcactccttaaatgagtggtgggcttta

SEQ ID NO: 459232 - DNA, 75 bp, synthetic construct
  source 1..75: mol_type = other DNA
gtgctgctcggtgagtctgctagtccgatgcgcctggcgagtctggcgttaatcgtactggggatagttggtctg

SEQ ID NO: 459233 - DNA, 75 bp, synthetic construct
  source 1..75: mol_type = other DNA
atgccgtgtggacgggtattggcgcagtcggcgcggccatcaccggcattgtgctgctcggtgagtccgctaacc

SEQ ID NO: 459234 - DNA, 75 bp, synthetic construct
  source 1..75: mol_type = other DNA
caaccgctggcggtgctggctacgctggcgattattctgtttggtaaatcagtggcagcgcttttcctggttcgt

SEQ ID NO: 459235 - DNA, 75 bp, synthetic construct
  source 1..75: mol_type = other DNA
ctggaactgctggaaacgccaccggcgggggaagtggtgacgggggaaacggtggttgccggatgtaaaatatga

SEQ ID NO: 459236 - DNA, 75 bp, synthetic construct
  source 1..75: mol_type = other DNA
tgggtgagcgtgaaattgcccggactatgctggaactgctggaaacgccaccggcgggggggggggggacggggg

SEQ ID NO: 459237 - DNA, 75 bp, synthetic construct
  source 1..75: mol_type = other DNA
gatggtgaagaaggtgcttatgcgatggggcatgaggatgggaaggacaaaacggtaattgcagtgatgaaagcc

SEQ ID NO: 459238 - DNA, 75 bp, synthetic construct
  source 1..75: mol_type = other DNA
gagacgatgagcaaattatcgtaaaacttaacagcatcgatccgaagtacgaaaaaattgtctttattgttcaga

SEQ ID NO: 459239 - DNA, 75 bp, synthetic construct
  source 1..75: mol_type = other DNA
ggtcttggctgggacatcaatgaagagaaaaaaggtttccttggcggaatttttggcaaaaaagaggaggagtat

SEQ ID NO: 459240 - DNA, 75 bp, synthetic construct
  source 1..75: mol_type = other DNA
gatggacgatgttcaaggccactggcaaacgtggcaggcatcgcgatcagctattgaaataaccgcgccaaagtt

SEQ ID NO: 459241 - DNA, 75 bp, synthetic construct
  source 1..75: mol_type = other DNA
actcaacagaaaacgagaaatggatccagcagtatcttgacgaactgaaaaaaaccggggttatcgccggtgatt

SEQ ID NO: 459242 - DNA, 75 bp, synthetic construct
  source 1..75: mol_type = other DNA
tgctgccattatggcgcagccggtcaaaaagcagatgagctacgaacgccagctggcaatgatggccaataccgc

SEQ ID NO: 459243 - DNA, 75 bp, synthetic construct
  source 1..75: mol_type = other DNA
agacgcgctgtccagcctgatagacaaaatcgttgccagcgataaacgctatcaggagctgcaaaagaaactggc

SEQ ID NO: 459244 - DNA, 75 bp, synthetic construct
  source 1..75: mol_type = other DNA
agctggaacagcaacaggctaacgcagaaccagaagaacaggttgatccgcgcaaagccgccgtcgaagctgcta

SEQ ID NO: 459245 - DNA, 75 bp, synthetic construct
  source 1..75: mol_type = other DNA
caacaggctaatgcggaaccagaagaacaggtcgatccgcgcaaagctgccgtcgaagcggctattgcccgtgcc

SEQ ID NO: 459246 - DNA, 75 bp, synthetic construct
  source 1..75: mol_type = other DNA
cagtgatgaggccggaaataacgtgtttaacctgctggctaaactgaccagccacgatattgaaacagcggcaaa

SEQ ID NO: 459247 - DNA, 75 bp, synthetic construct
  source 1..75: mol_type = other DNA
attgacggttttcaacggattgttgagcacggaactttcggctacacctacgcctttaatgagttttatgaggcc

SEQ ID NO: 459248 - DNA, 75 bp, synthetic construct
  source 1..75: mol_type = other DNA
atggcaccgtcacacgcattaaaaacgtgccacgccgcgcggctggcccggacattcgtcacatcatcatcggca

SEQ ID NO: 459249 - DNA, 75 bp, synthetic construct
  source 1..75: mol_type = other DNA
tttgccgacggcaaatgcgtgctgatctttatggctgaaggtaaccctcgcattgcgaaggcgacgggcgaaggg

SEQ ID NO: 459250 - DNA, 75 bp, synthetic construct
  source 1..75: mol_type = other DNA
cacgcactgggggccacctgccagccccataaatttcactacacaactggtgctcgatggtcaggtcgtggcgga

SEQ ID NO: 459251 - DNA, 75 bp, synthetic construct
  source 1..75: mol_type = other DNA
ggatttcacctcaccacctgcggtgattgacggtttccggcgcatcgtggagcacggcacctttggttatacctg

SEQ ID NO: 459252 - DNA, 75 bp, synthetic construct
  source 1..75: mol_type = other DNA
agggggttaaagtgctggcaaatccgttaagcattgcggatagccgttatcaactggatttttcgctggttgaag

SEQ ID NO: 459253 - DNA, 75 bp, synthetic construct
  source 1..75: mol_type = other DNA
ctggcgttacgaccatcctggtgacgctatctacgcgccgttgttgttaaaacaactgtcggatcgtaaacctgc

SEQ ID NO: 459254 - DNA, 75 bp, synthetic construct
  source 1..75: mol_type = other DNA
gcaattatgccggtttacgatgcattgtatgacggtggcgtggaacacttgctgtgccgacacgagcaaggtgca

SEQ ID NO: 459255 - DNA, 75 bp, synthetic construct
  source 1..75: mol_type = other DNA
aacgataacctgctctttaactggcggcatctctggcgtaacggtggcctgcaaccgcccggcgaacatgaaaca

SEQ ID NO: 459256 - DNA, 75 bp, synthetic construct
  source 1..75: mol_type = other DNA
accgaacgataccgtcgtctgtatctccggtgacggctctttcatgatgaatgtgcaagagctgggcaccgtaaa

SEQ ID NO: 459257 - DNA, 75 bp, synthetic construct
  source 1..75: mol_type = other DNA
tccggtgacggctctttcatgatgaatgtgcaagagctgggcaccgtaaaacgcaagcaattaccgttgaaaatt

SEQ ID NO: 459258 - DNA, 75 bp, synthetic construct
  source 1..75: mol_type = other DNA
cattgcagggtgatttaaatgctctgttaccggcattacgacagccgttgaatatcaatgactggcagcaacact

SEQ ID NO: 459259 - DNA, 75 bp, synthetic construct
  source 1..75: mol_type = other DNA
cgcaacaccagatgaagtatatgccgcgctgctggtagccgaccagtacggtcagcgtttcctgcaagactggga

SEQ ID NO: 459260 - DNA, 75 bp, synthetic construct
  source 1..75: mol_type = other DNA
cattccgttggcctgccgatcacactggcgcaactggatattaaagaagatatcccggcgaaaatgcgcattgtt

SEQ ID NO: 459261 - DNA, 75 bp, synthetic construct
  source 1..75: mol_type = other DNA
gctgcggcacacgctgtgcataacggcctgaccgctatcccggacgcgcatcactattatcacggtgaaaaagtg

SEQ ID NO: 459262 - DNA, 75 bp, synthetic construct
  source 1..75: mol_type = other DNA
ccgccggaaccgattttcaccggagtttaaatggagactggttcagcaaactcttttacccggtgcctgtgtcgc

SEQ ID NO: 459263 - DNA, 75 bp, synthetic construct
  source 1..75: mol_type = other DNA
cggagggaaaaccctcgatacagccaaagcgttagcatactttatggatgttcctgttgcagttgccccaaccat

SEQ ID NO: 459264 - DNA, 75 bp, synthetic construct
  source 1..75: mol_type = other DNA
aattgaaaccgtcgctgcacttagccacgctgttggcctgcctattacgctggcacaactggatattaaagaaaa

SEQ ID NO: 459265 - DNA, 75 bp, synthetic construct
  source 1..75: mol_type = other DNA
tgaatttctcgctgctacaaaaatgcctgtcacctgcacgctgaaagggctgggcgcagttgaagcggattatcc

SEQ ID NO: 459266 - DNA, 75 bp, synthetic construct
  source 1..75: mol_type = other DNA
tgataacgcccgaacaggatgttgcgacgataacgtcagaatagttaccgcagggtatgcagcgcaaattgccag

SEQ ID NO: 459267 - DNA, 75 bp, synthetic construct
  source 1..75: mol_type = other DNA
ttgctgactatgtgtgtaacagaaaatacgacaggttaaaaaatgacagctataaaaggaaagcgaaaaccgcag

SEQ ID NO: 459268 - DNA, 75 bp, synthetic construct
  source 1..75: mol_type = other DNA
ggcagcgttacacaaacggatcaaaaagcgttaccagaggaagaggaagaggaagaggaagatataaatactgat

SEQ ID NO: 459269 - DNA, 75 bp, synthetic construct
  source 1..75: mol_type = other DNA
gaccgactgctcaaccgaagtgaaaaaaggcgaagtagtggtggtttgcggcccgtctggttccggcaaatcaac

SEQ ID NO: 459270 - DNA, 75 bp, synthetic construct
  source 1..75: mol_type = other DNA
attttgcagtcagtttgcccgcagcgacgatcatgctcgcatcggctgttgtgaggataacgccagaatcgcaac

SEQ ID NO: 459271 - DNA, 75 bp, synthetic construct
  source 1..75: mol_type = other DNA
gtagttcaggagaacgtgctcgcgtggcggtggcgggtaattcaacacggatcagcagtgccggagatagtagcc

SEQ ID NO: 459272 - DNA, 75 bp, synthetic construct
  source 1..75: mol_type = other DNA
tcctcatgttagccagcgccttcggcatccctggccaacacatcacccataaagaccaggttgaagcggcactcg

SEQ ID NO: 459273 - DNA, 75 bp, synthetic construct
  source 1..75: mol_type = other DNA
tatggatatcgacccagcagaaatgaacaaactgcgtcaggcgcatgtggcattacagggcgatttgaatgcttt

SEQ ID NO: 459274 - DNA, 75 bp, synthetic construct
  source 1..75: mol_type = other DNA
gctggcaaaagcgcaaaaaccgatgctgtacgttggcggtggcgtgggtatggcgcaggcagttcctgctttacg

SEQ ID NO: 459275 - DNA, 75 bp, synthetic construct
  source 1..75: mol_type = other DNA
ggcagcgttacacaaacggatcaaaaagcgttaccagaggaagaggaagatataaatactgatctaacccatccc

SEQ ID NO: 459276 - DNA, 75 bp, synthetic construct
  source 1..75: mol_type = other DNA
caccaggtattcactgactggcctctttccggggaatattcctgcgtgcaactggcccgggctttgttcccgggg

SEQ ID NO: 459277 - DNA, 75 bp, synthetic construct
  source 1..75: mol_type = other DNA
gcggcctgcagccgcccggcgaacatgaaacatcgctacttcccgtgacgttaactccggagccggataataaaa

SEQ ID NO: 459278 - DNA, 75 bp, synthetic construct
  source 1..75: mol_type = other DNA
ccctgctggaagaaggcgaaaaagcgatgcttgccgccgaacagcatgtagtaaccccggcgctggagcgcgtga

SEQ ID NO: 459279 - DNA, 75 bp, synthetic construct
  source 1..75: mol_type = other DNA
gcaaaggcaagattcaggctgaagaattacgcggtcagttaggggacagaatggcaggtgctttccagttatttg

SEQ ID NO: 459280 - DNA, 75 bp, synthetic construct
  source 1..75: mol_type = other DNA
cgaattagcggaaacagagcaatcacagcagcgcatagtgtgaatatgtctaagcttggtgatattaatccgctg

SEQ ID NO: 459281 - DNA, 75 bp, synthetic construct
  source 1..75: mol_type = other DNA
tgattggtacatccagattaatggggctaagcaccgatgaaattaacgggattttaaaagctttcgagcagatgg

SEQ ID NO: 459282 - DNA, 75 bp, synthetic construct
  source 1..75: mol_type = other DNA
ttatcgttgagctaggcttcaatgaaaacgttattaagggactgcaaagagttgaaaaggcagctttgcagtcag

SEQ ID NO: 459283 - DNA, 75 bp, synthetic construct
  source 1..75: mol_type = other DNA
ggggggcgcttttcttttttttggtatatacggtaagtatttctatcatgatgccattgaggataaaaaaccatt

SEQ ID NO: 459284 - DNA, 75 bp, synthetic construct
  source 1..75: mol_type = other DNA
ttttgattgagctaagttttagctctcagcgagttttaaaaggcttggaaaaagccgagaaacaaacgatgcagg

SEQ ID NO: 459285 - DNA, 75 bp, synthetic construct
  source 1..75: mol_type = other DNA
cagtcttgatgacactaaacgaaaactacttgatgaggtcggtgatggatttatcaacttcgtcaaaggtcttgc

SEQ ID NO: 459286 - DNA, 75 bp, synthetic construct
  source 1..75: mol_type = other DNA
agaagagatccgccaccgagcttggcgagcttgcgaccagtatcaacaccatcgcccgtcatgcgcatatggaag

SEQ ID NO: 459287 - DNA, 75 bp, synthetic construct
  source 1..75: mol_type = other DNA
cctgcgtttgtttattgcagggggcacatgcggcctattacggttttagcgccatttactggcaggctgctggct

SEQ ID NO: 459288 - DNA, 75 bp, synthetic construct
  source 1..75: mol_type = other DNA
gcgatagacgagaaaagttaaaacatgcagagctggacgtgattaagataaaagctcgtcaaaaaatctacgatc

SEQ ID NO: 459289 - DNA, 75 bp, synthetic construct
  source 1..75: mol_type = other DNA
cccgctttgaccatattatctttgataccgcgccaaccggtcacactattcgtcttctccagttgcccggtgcgt

SEQ ID NO: 459290 - DNA, 75 bp, synthetic construct
  source 1..75: mol_type = other DNA
atgaatatgccatttttaaaagacattcccccgtttatctttttcaccggtaaaggtggtgtgggtaaaacatcc

SEQ ID NO: 459291 - DNA, 75 bp, synthetic construct
  source 1..75: mol_type = other DNA
agtaaacacgtcaccgtacaggatatcggctggttttgtccggggctgacggcacaggatctgcgggggaaaaag

SEQ ID NO: 459292 - DNA, 75 bp, synthetic construct
  source 1..75: mol_type = other DNA
atgttgaccgttgacgtagccgccgacattgtcgccagcggcataaaagtagtgattttactggtttcggtgctg

SEQ ID NO: 459293 - DNA, 75 bp, synthetic construct
  source 1..75: mol_type = other DNA
ctcgccgaaagacgctttcttcgataatccgaaatcggaccgcgcaaaagacttcctcgcaaaaatcctgcatta

SEQ ID NO: 459294 - DNA, 75 bp, synthetic construct
  source 1..75: mol_type = other DNA
agcacgcgcatcactatcagggaaatccatcattttgcgccggtgctgacggcgcgggagctgcggggcagcagg

SEQ ID NO: 459295 - DNA, 75 bp, synthetic construct
  source 1..75: mol_type = other DNA
gcactggctgaactgtgctacaacaccctgctggaagaaggcgaaaaagcgatgcttgccgccgaacagcatgta

SEQ ID NO: 459296 - DNA, 75 bp, synthetic construct
  source 1..75: mol_type = other DNA
gcgcacctgcacgtctgttagcagcgggtatcggcgatgcgctggcaacctggtttgaagcgcgtgcttgctctc

SEQ ID NO: 459297 - DNA, 75 bp, synthetic construct
  source 1..75: mol_type = other DNA
ctcttttacccggtgcctgtgtcgcacaaatagctcgtgagaacggaatcaacgataacctgctctttaactggc

SEQ ID NO: 459298 - DNA, 75 bp, synthetic construct
  source 1..75: mol_type = other DNA
cgcagaagaactgcgcggcaaccgttctcagtggctgtatgcagtcgatgtgctgattgaaactcagggcgaggt

SEQ ID NO: 459299 - DNA, 75 bp, synthetic construct
  source 1..75: mol_type = other DNA
aaaagaaagcccggaatctgtccggcaactggagcgctggatggtacccaacaagctgatgcatcaggaggcaag

SEQ ID NO: 459300 - DNA, 75 bp, synthetic construct
  source 1..75: mol_type = other DNA
acttgagccaatggagcgctggatgatggcgaaccagcctttctggagtgtgatggtcgaatctgatgccctcgc

SEQ ID NO: 459301 - DNA, 75 bp, synthetic construct
  source 1..75: mol_type = other DNA
ggcgctggagcgagcgtttcccgtcactggagccaatggagtgctggatgatggcaaaccagcctttctggagtg

SEQ ID NO: 459302 - DNA, 75 bp, synthetic construct
  source 1..75: mol_type = other DNA
acctgaggaagttatcagggaattatcaactaagaacactaacaaagtccaacaattaggatttaataataaaca

SEQ ID NO: 459303 - DNA, 75 bp, synthetic construct
  source 1..75: mol_type = other DNA
cttcagtggctgtatgccatcgatgtgctgattgaaacacagggcgaggtctgcctccttccccttccaggcgat

SEQ ID NO: 459304 - DNA, 75 bp, synthetic construct
  source 1..75: mol_type = other DNA
caacagggagcctgccatcagtacagctgatggaatagtggccagcgcatcagataaggttaattacattactga

SEQ ID NO: 459305 - DNA, 75 bp, synthetic construct
  source 1..75: mol_type = other DNA
actcggcgtcactggcggcaacaagaaaagcggcctctatgaagatggcgtgcgcaaagaccgtctggacaacaa

SEQ ID NO: 459306 - DNA, 75 bp, synthetic construct
  source 1..75: mol_type = other DNA
cgcattcgtgcgaaagccagtcagctggacgaagcgcgtcgaattgacgttcagcaggttggaaaaataataacg

SEQ ID NO: 459307 - DNA, 75 bp, synthetic construct
  source 1..75: mol_type = other DNA
tcggacgttcgctatgtaggagacggacttgttgaactagctcaacgcttaggcgctactatcacagaagaataa

SEQ ID NO: 459308 - DNA, 75 bp, synthetic construct
  source 1..75: mol_type = other DNA
tagaaggtattgaatcggacgttcgctatgtgggagatggccttgtcgaactagctcaacgcttaggcgctacta

SEQ ID NO: 459309 - DNA, 75 bp, synthetic construct
  source 1..75: mol_type = other DNA
tagaaggtcttgaatcggacgttcgctatgtaggggatggacttatcgaactcgctcaacgcttaggcgctacta

SEQ ID NO: 459310 - DNA, 75 bp, synthetic construct
  source 1..75: mol_type = other DNA
tagtgtcaaattgaaaagacagtttagaggttattataatactgcattgggattatatggtctttatgagaaacc

SEQ ID NO: 459311 - DNA, 75 bp, synthetic construct
  source 1..75: mol_type = other DNA
atcgaggggagttctgattggatttctgatggcaaacaggtcgtcgtgaatggctgcaggtgtgaatgtggctgt

SEQ ID NO: 459312 - DNA, 75 bp, synthetic construct
  source 1..75: mol_type = other DNA
attcgggcgcggtgcggcagatatgaaaggctcgctggcggcgatggtggtagcggcagaacgctttgtcgcaca

SEQ ID NO: 459313 - DNA, 75 bp, synthetic construct
  source 1..75: mol_type = other DNA
cgatccggtcgaagagatcaaagtcggtttcgatattttgaaatcgcttcgtatccgttcgcgagggatcaactt

SEQ ID NO: 459314 - DNA, 75 bp, synthetic construct
  source 1..75: mol_type = other DNA
tgggaatgtgccgattggcgatggtgctcccatcgccgtacagtccatgaccaatacgcgcacgacagacgtcga

SEQ ID NO: 459315 - DNA, 75 bp, synthetic construct
  source 1..75: mol_type = other DNA
ttgcaggggctggaaacgccggtgatggaaacgcgtgttgggcagaaaatccctaacccaacctggacgcctacg

SEQ ID NO: 459316 - DNA, 75 bp, synthetic construct
  source 1..75: mol_type = other DNA
ggcgtttaaacactgggatttagctgtgaatgcctttgagaacctctgtaagcgtgtagagatgctctgtaagcg

SEQ ID NO: 459317 - DNA, 75 bp, synthetic construct
  source 1..75: mol_type = other DNA
ctgacgttccggggtatgcgtgttctggtgccatcatcactggcgacagccatgatacagcacggaacggctgag

SEQ ID NO: 459318 - DNA, 75 bp, synthetic construct
  source 1..75: mol_type = other DNA
aggagttgctcgactgcatttccaggcttcgggatgatgtaaatgctctcactgttgcattttcatatctggcct

SEQ ID NO: 459319 - DNA, 75 bp, synthetic construct
  source 1..75: mol_type = other DNA
tggcggctggctgtgttggcggttatggcgcagcggtaaagcaactgaccgtttaagtcattatttgtcgcgtgg

SEQ ID NO: 459320 - DNA, 75 bp, synthetic construct
  source 1..75: mol_type = other DNA
tatctcgttggtgatgattacgcagagcagcgcgacaggctgattacagcgattgaaaccgccgggccggggacg

SEQ ID NO: 459321 - DNA, 75 bp, synthetic construct
  source 1..75: mol_type = other DNA
gggagtgctgcggatattgcgcaacgtgtgtctgagtgggaagaggagcttgctgcttcccgggagggcattatg

SEQ ID NO: 459322 - DNA, 75 bp, synthetic construct
  source 1..75: mol_type = other DNA
ttcacgaataccggagagtacggacagacaggtattgcaaatggcggggtgatcctgatgacggagaaaaccgcg

SEQ ID NO: 459323 - DNA, 75 bp, synthetic construct
  source 1..75: mol_type = other DNA
acataacggtaaatttggcatcgttatcccgggcgttgcagcaactaactggacgtgggcggtgggaagtgtgtc

SEQ ID NO: 459324 - DNA, 75 bp, synthetic construct
  source 1..75: mol_type = other DNA
atttggcgaagtggtatcggcagcggcagacgcacgagtatttgtcgaaggccgctggcagtttgatgatgataa

SEQ ID NO: 459325 - DNA, 75 bp, synthetic construct
  source 1..75: mol_type = other DNA
aggagctgctcgactgcatttccaggcttcgggatgatgtaaatgccctcactgttgcattttcatatctcgcat

SEQ ID NO: 459326 - DNA, 75 bp, synthetic construct
  source 1..75: mol_type = other DNA
cctggctggcggggattgttggctgcctgatgggggactggatctctttctggctgggctggcgttttaaaaagc

SEQ ID NO: 459327 - DNA, 75 bp, synthetic construct
  source 1..75: mol_type = other DNA
gttgtggctgacgccgctgatttctgccattggtgtcgtggcgctggtggtgttaattcgccatccgctgatgcc

SEQ ID NO: 459328 - DNA, 75 bp, synthetic construct
  source 1..75: mol_type = other DNA
tgctacggcattccggtagtgaaaggcccggtgcttggtttgcctctggtcgaggaaaaatgtctggcgtggatg

SEQ ID NO: 459329 - DNA, 75 bp, synthetic construct
  source 1..75: mol_type = other DNA
ttttgggcatggcgtgggcagggtgaaacgttagcctttgccgggcataccgacgtggtgccgcctggcgacgcc

SEQ ID NO: 459330 - DNA, 75 bp, synthetic construct
  source 1..75: mol_type = other DNA
gaagttatcagagaattatcaaccaagaacactaataaagttcaagaattaggatttaataataaacaattagaa

SEQ ID NO: 459331 - DNA, 75 bp, synthetic construct
  source 1..75: mol_type = other DNA
tggccgccgttttacttcctgccagggattctggcgggcgcggcgatcgatattcctgccgggatgcagagcggt

SEQ ID NO: 459332 - DNA, 75 bp, synthetic construct
  source 1..75: mol_type = other DNA
cggtattcgcaaatcacttgagcaaattgagggggtgaatgttgtcggcgaatttgaagactctacagcactgat

SEQ ID NO: 459333 - DNA, 75 bp, synthetic construct
  source 1..75: mol_type = other DNA
ctggctgtgctggcggttatggcgcagcggcaaagcaaccgatcgtttaagtcattatttgtcgcgcggtcgttt

SEQ ID NO: 459334 - DNA, 75 bp, synthetic construct
  source 1..75: mol_type = other DNA
acggcgtgtttatgacatcactgaacaaggcagaactgcacttgctgatgcgaaaacaaaggtcaaggagctgtt

SEQ ID NO: 459335 - DNA, 75 bp, synthetic construct
  source 1..75: mol_type = other DNA
ggatgatccgtttgcacatcctgcatcatgcagccaaagaacccgtctttggtctgggcatcattgaggaattgc

SEQ ID NO: 459336 - DNA, 75 bp, synthetic construct
  source 1..75: mol_type = other DNA
ctttccgcacacgccaataagtttccggcgcagctttccggtggtcagcaacagcgtgtagcgatcgctcgcgcg

SEQ ID NO: 459337 - DNA, 75 bp, synthetic construct
  source 1..75: mol_type = other DNA
ctttccgcacatgccaataaatttccggcgcagctttccggcggtcagcagcagcgtgtggcaatcgctcgcgca

SEQ ID NO: 459338 - DNA, 75 bp, synthetic construct
  source 1..75: mol_type = other DNA
ctttccgcacatgccaataaatttccagcgcagctttccggcggtcaacagcagcgtgtggcaatcgctcgcgca

SEQ ID NO: 459339 - DNA, 75 bp, synthetic construct
  source 1..75: mol_type = other DNA
ctggatatcgaagggatcgtactgaagcaaggcgcgcctacggatctgccgaaagccctcgccgcgttgcaaaaa

SEQ ID NO: 459340 - DNA, 75 bp, synthetic construct
  source 1..75: mol_type = other DNA
ctggatatcgaagggatcgtgctgaaacaaggtgcaccgaccgatctgccgaaagctctcgccgcgctgcagaaa

SEQ ID NO: 459341 - DNA, 75 bp, synthetic construct
  source 1..75: mol_type = other DNA
tgcctggcgataagtacggcgatggcattaccttaatcaagtacatcaagcgccatttcccaagcctgtcgatca

SEQ ID NO: 459342 - DNA, 75 bp, synthetic construct
  source 1..75: mol_type = other DNA
acgtaacggtaagtttggcatcgttatcccgggcgttgcggcgactaactggacgtgggcggtgggaagtgtgtc

SEQ ID NO: 459343 - DNA, 75 bp, synthetic construct
  source 1..75: mol_type = other DNA
gcagttaggaattagcgtcttaagctggcgcgaggaccaacgcattagtcaggcgaagctgcttttgagcaccac

SEQ ID NO: 459344 - DNA, 75 bp, synthetic construct
  source 1..75: mol_type = other DNA
ttgggcaaattattaacgccggacaaggagaagggcgctattcggaactgctggcgataaatcttcttgagcaat

SEQ ID NO: 459345 - DNA, 75 bp, synthetic construct
  source 1..75: mol_type = other DNA
ccgcttatcagtctgcttccggggtggttaatttgattacgccaacctctgcggtagtgatgggcggtctggcga

SEQ ID NO: 459346 - DNA, 75 bp, synthetic construct
  source 1..75: mol_type = other DNA
gttcgggcgcggcgcggcagatatgaaaggctcactggcggcgatggtggtagcagcagaacgttttgtcgcgca

SEQ ID NO: 459347 - DNA, 75 bp, synthetic construct
  source 1..75: mol_type = other DNA
cgtaatgagcgtctcgattactgtctggttggcgaaccgtcgagtatcgaagtggttggtgatgtggtgaaaaat

SEQ ID NO: 459348 - DNA, 75 bp, synthetic construct
  source 1..75: mol_type = other DNA
gcagctagggattagcgttttaagctggcgtgaagatcagcgtatcagtcaggcgaagctgttattgagcaccac

SEQ ID NO: 459349 - DNA, 75 bp, synthetic construct
  source 1..75: mol_type = other DNA
ctgaacaatggtgattcgattctgaaatacggcgccattatcggacacgccactcgcgatattgccatgggtgaa

SEQ ID NO: 459350 - DNA, 75 bp, synthetic construct
  source 1..75: mol_type = other DNA
tgctatggtattccggttgtgaaaggcccggtgcttggtttgccgctggtcgaggaaaaatgtctggcgtggatg

SEQ ID NO: 459351 - DNA, 75 bp, synthetic construct
  source 1..75: mol_type = other DNA
gtttggcgaagtggtatcagcagcggcagaccacgggtatttgtcgaaggccgctggcagtttgatgatgataag

SEQ ID NO: 459352 - DNA, 75 bp, synthetic construct
  source 1..75: mol_type = other DNA
catatccattcccataacctgaacagcgattatatcgccgtattccaccatgataatgcgggctatgagccagca

SEQ ID NO: 459353 - DNA, 75 bp, synthetic construct
  source 1..75: mol_type = other DNA
gtgaaacacggtgattcaattgtgaaatatggtgctgttatcggacacgctacccgtgatatcgccataggtgaa

SEQ ID NO: 459354 - DNA, 75 bp, synthetic construct
  source 1..75: mol_type = other DNA
ccggagatgattgcccgcaaagatggtcgcattgtgatgatgtcttcggtcaccggcgatatggtggccgatccg

SEQ ID NO: 459355 - DNA, 75 bp, synthetic construct
  source 1..75: mol_type = other DNA
atggaacgtcacgaaggcggtgctgccggagatgattgcccgcaaagatggtcgcattgtgatgatgtcttcagt

SEQ ID NO: 459356 - DNA, 75 bp, synthetic construct
  source 1..75: mol_type = other DNA
gcccgggatacgttcgcacgccaatggcggaaagcattgcccgccagtcgaacccggaagatccagagtcggtgc

SEQ ID NO: 459357 - DNA, 75 bp, synthetic construct
  source 1..75: mol_type = other DNA
ccgatgtggagcagtcagtggtggtggcagtgggtaattctcaacatcgtcggctggtcgcttttgccaaactgc

SEQ ID NO: 459358 - DNA, 75 bp, synthetic construct
  source 1..75: mol_type = other DNA
atgttcaactttgtaaaaggagtcaacgatgccgtacaaaacgaaaagcgatctgccggaaagcgtaaagcacgt

SEQ ID NO: 459359 - DNA, 75 bp, synthetic construct
  source 1..75: mol_type = other DNA
ttgtttatcctgtattttcagagggaatggagtgtaacgctctgtattaacaaggagagcattaaaataggtaaa

SEQ ID NO: 459360 - DNA, 75 bp, synthetic construct
  source 1..75: mol_type = other DNA
tcgtggcttgccagttccatccggagtttacttctactccacgtgatggccacccgctgtttgcaggctttgtga

SEQ ID NO: 459361 - DNA, 75 bp, synthetic construct
  source 1..75: mol_type = other DNA
atatttgtaaacgattcagcttaaactgcccggaagcgaatctgtctgaatgggaacaggttatcttcgaagaag

SEQ ID NO: 459362 - DNA, 75 bp, synthetic construct
  source 1..75: mol_type = other DNA
tgaaaccgacctggacctggggcactatgagcgtttcattcgtaccaaaatgagccgccgcaacaacttcaccac

SEQ ID NO: 459363 - DNA, 75 bp, synthetic construct
  source 1..75: mol_type = other DNA
agctatttaaccggtacacagaatgtgattgatggcggcagcacactgccggagacggttagcgtcggcatctga

SEQ ID NO: 459364 - DNA, 75 bp, synthetic construct
  source 1..75: mol_type = other DNA
tcgcatccgatgaatccggctatttaaccggtacacagaatgtgattgatggcggcagcacgttgccggagacgg

SEQ ID NO: 459365 - DNA, 75 bp, synthetic construct
  source 1..75: mol_type = other DNA
cggtactgtcggtgatatcgaatccctgccgttcctcgaagcgattcgccagatggctgttgaaattggccgtga

SEQ ID NO: 459366 - DNA, 75 bp, synthetic construct
  source 1..75: mol_type = other DNA
cccttaccctcaggagtgcggggaaaactgaaatttcagaccgttaatgattatggttcagtaactccggtcaga

SEQ ID NO: 459367 - DNA, 75 bp, synthetic construct
  source 1..75: mol_type = other DNA
gaggagcagtatccgctgcaggagaacgggcagatactgctggcatttccgcggctgtttgttgttgcccgacgt

SEQ ID NO: 459368 - DNA, 75 bp, synthetic construct
  source 1..75: mol_type = other DNA
acgctgttgatggggagcttatggggcatttcctggggatgtgcaatgtggtttatctactggggggcgtcagga

SEQ ID NO: 459369 - DNA, 75 bp, synthetic construct
  source 1..75: mol_type = other DNA
cggactgctcatggcctctttccacggcactgttgcaaagttagcgatgaggcagccttttgtcttattcaaagg

SEQ ID NO: 459370 - DNA, 75 bp, synthetic construct
  source 1..75: mol_type = other DNA
gcctcatcgctaactttgcaacagtgcccctatcccgatgaactggcggtaaaaaactttgtggtagcgaacatc

SEQ ID NO: 459371 - DNA, 75 bp, synthetic construct
  source 1..75: mol_type = other DNA
tcatttcgtaaggcgtttaatgaagcacaaaccgtggtcgtccctgcggacatcgtttgtgaagacatcaacaat

SEQ ID NO: 459372 - DNA, 75 bp, synthetic construct
  source 1..75: mol_type = other DNA
atctacacttttccgctgaacgatcgcgtccggcggtggagctgcttgccagagtgccgctggaaaatgtcgaat

SEQ ID NO: 459373 - DNA, 75 bp, synthetic construct
  source 1..75: mol_type = other DNA
acacgtttctctatctcacccgcgacactttctcgccgtgggagaatctggcgttgctattgcagaactacgaca

SEQ ID NO: 459374 - DNA, 75 bp, synthetic construct
  source 1..75: mol_type = other DNA
tcgtcttttttatcgtggtcttcggcgcaagtctgatgatcgcaaaactgttgtactggctttttgaaagtgccg

SEQ ID NO: 459375 - DNA, 75 bp, synthetic construct
  source 1..75: mol_type = other DNA
atgagtctgctgcaattcagtggcctgtttgttgtctggctgctctgcacgctgtttattgccacgctgacctgg

SEQ ID NO: 459376 - DNA, 75 bp, synthetic construct
  source 1..75: mol_type = other DNA
tccggactgctcatggcctctttccactggtggcgcaggaaagttaaccgactgccaccatgggatgatgtgtaa

SEQ ID NO: 459377 - DNA, 75 bp, synthetic construct
  source 1..75: mol_type = other DNA
attccttcctggctgtggccgggtcggcccagtatggtgctgaactccgccaactatttcacctgggaagtgctg

SEQ ID NO: 459378 - DNA, 75 bp, synthetic construct
  source 1..75: mol_type = other DNA
ttgtggatgctggcggcggcgggcgtgctggggattgttggcatgttctggctggcgctaaaacgctatggaatg

SEQ ID NO: 459379 - DNA, 75 bp, synthetic construct
  source 1..75: mol_type = other DNA
ggctacgtcattccctgaacagtcactgcataccttccatcattatcaataacaccgtacgttcatttcagaggt

SEQ ID NO: 459380 - DNA, 75 bp, synthetic construct
  source 1..75: mol_type = other DNA
ctttgcgctggccgcaaaggagcatcatagattaatgacgattgcggatgctgtcccccattacgatctggtgat

SEQ ID NO: 459381 - DNA, 75 bp, synthetic construct
  source 1..75: mol_type = other DNA
gttctttggcccatttatcggtgccatcgcgcggtcggttggtggtgctatttccgataaattcggcggcgtgcg

SEQ ID NO: 459382 - DNA, 75 bp, synthetic construct
  source 1..75: mol_type = other DNA
caggtctgggaagtggttctactttccagatgatcgccgtcatctttcgccagataaccatttatcgggtgaaga

SEQ ID NO: 459383 - DNA, 75 bp, synthetic construct
  source 1..75: mol_type = other DNA
agaccgcctgctggaagaggttgaacaaaagctggcgacagagataacgtccagccaattatttgcggtgagctg

SEQ ID NO: 459384 - DNA, 75 bp, synthetic construct
  source 1..75: mol_type = other DNA
ttttacccgccgtcattcaataaccgaagattttcgcccgacggaagatgaagaagctctctataaacaggtttc

SEQ ID NO: 459385 - DNA, 75 bp, synthetic construct
  source 1..75: mol_type = other DNA
attctttatcctggcgcttcttattattaaggcaatgaaatcgattacgttgcgtttgattcttgccttcccgtt

SEQ ID NO: 459386 - DNA, 75 bp, synthetic construct
  source 1..75: mol_type = other DNA
ccatttctcaggctacccgacaggttgcccgcgataccgtagccggtgataaccaggtgaaggggatccccctga

SEQ ID NO: 459387 - DNA, 75 bp, synthetic construct
  source 1..75: mol_type = other DNA
actgaaagccagtccgtcaggaaaaatgtatgcccgcattcgcattaaccggggcaacctgcccgccattaagct

SEQ ID NO: 459388 - DNA, 75 bp, synthetic construct
  source 1..75: mol_type = other DNA
actgcaaaggagaaccctgggaaaccatccatgcctgcgccaatattggcaatgacaccgatagcatcgctacga

SEQ ID NO: 459389 - DNA, 75 bp, synthetic construct
  source 1..75: mol_type = other DNA
ggggcaacctgccagccattaagctcggggcggctcaggtcaggctggcgcggcgtggcggaaagctacggtacc

SEQ ID NO: 459390 - DNA, 75 bp, synthetic construct
  source 1..75: mol_type = other DNA
tattccgcaggcgtttggcatgtcgctcaatatgaccggctctccggtcggcgcgatgaaagtgtttttaatctt

SEQ ID NO: 459391 - DNA, 75 bp, synthetic construct
  source 1..75: mol_type = other DNA
atctagtaacattagtcattcgcaaaattctggcctcatcgtccactgcgattcagggaacgctggagactatga

SEQ ID NO: 459392 - DNA, 75 bp, synthetic construct
  source 1..75: mol_type = other DNA
ccagcctgtgtcagaaaatctgctggagcaggatttttacgccagtggcccgaaccagaagtgggcgggagacat

SEQ ID NO: 459393 - DNA, 75 bp, synthetic construct
  source 1..75: mol_type = other DNA
tgtcgggtaaataaaataggtaaatttaaattcgtaattgtatctataattatctcctttattatctcaaacttt

SEQ ID NO: 459394 - DNA, 75 bp, synthetic construct
  source 1..75: mol_type = other DNA
ggtttgttggattactggaatgaatgagacttacactagggtccgtggtggtaatgcaatgcaagctgaatgcgt

SEQ ID NO: 459395 - DNA, 75 bp, synthetic construct
  source 1..75: mol_type = other DNA
gttgaccgggttattttcgtggtcgatcgtcgcgatctggattatcagaccgcgaaagagtttaacagtttcgct

SEQ ID NO: 459396 - DNA, 75 bp, synthetic construct
  source 1..75: mol_type = other DNA
gattctggaacgcaaaagcgttcgagctcgggtttacgaacgtgttcgggatgtaattgatacgtttatcaatgg

SEQ ID NO: 459397 - DNA, 75 bp, synthetic construct
  source 1..75: mol_type = other DNA
ccacccaatatgaccggcgtggtgtctcagacgtttgacaagaaagtctcagatgccgcggtggcggatattcag

SEQ ID NO: 459398 - DNA, 75 bp, synthetic construct
  source 1..75: mol_type = other DNA
tggtcacggttttagccccacttccggctcactgatttatgccggtttcacattggggatgaccgttggacgctt

SEQ ID NO: 459399 - DNA, 75 bp, synthetic construct
  source 1..75: mol_type = other DNA
aatgtcatcctggtcacgatgtcctgcgcattgatcgggatgatgatattaagtctggcactctggctgacatcg

SEQ ID NO: 459400 - DNA, 75 bp, synthetic construct
  source 1..75: mol_type = other DNA
atgaataaaacggttttgccgatgatgcacggtttttatagcctgggcacgctggcaggcgctggtgtcgggatg

SEQ ID NO: 459401 - DNA, 75 bp, synthetic construct
  source 1..75: mol_type = other DNA
attcatgaaacgaaaattcatgagggtatttgccagataatccagattcagccggataacccacgttttaaagat

SEQ ID NO: 459402 - DNA, 75 bp, synthetic construct
  source 1..75: mol_type = other DNA
gcactggtaggcatcgcgcctatttatattgctattcaggcaatacctgacggtactggcaaaaatgctgccgat

SEQ ID NO: 459403 - DNA, 75 bp, synthetic construct
  source 1..75: mol_type = other DNA
ccagtgcgctaatgggtgcgttgggtattgggctgattatttttgtcgatagcgcctgggtcgcgggggtgtctg

SEQ ID NO: 459404 - DNA, 75 bp, synthetic construct
  source 1..75: mol_type = other DNA
accctgaccataaacgggaccggagtaaaccctgggggacttaaaacgggtgacggtaccgttgtacttaatcag

SEQ ID NO: 459405 - DNA, 75 bp, synthetic construct
  source 1..75: mol_type = other DNA
ctgatatcccaggcgggtattgtgcgtgctgatatttcgtatcagttatttcgtgattttgctgaaaacaaagga

SEQ ID NO: 459406 - DNA, 75 bp, synthetic construct
  source 1..75: mol_type = other DNA
accctgatcgtaaacgggacaggtgtaaacccggggggacttaaaacgggtgacggtaccgttgtgcttaaccag

SEQ ID NO: 459407 - DNA, 75 bp, synthetic construct
  source 1..75: mol_type = other DNA
acattcgttatatttttttgtattggtggtggtgcgtggtatacaactaaaaaatcgggcattcaattacgtacc

SEQ ID NO: 459408 - DNA, 75 bp, synthetic construct
  source 1..75: mol_type = other DNA
cagagcgttgttgagtgtaaatgtaggagggaagatagttacagatcgtgtaatgaggtctgtatggagtttctt

SEQ ID NO: 459409 - DNA, 75 bp, synthetic construct
  source 1..75: mol_type = other DNA
atgacctataccgacagcagtgcagacagtgatgcgttcagcgggaaaaccaaatccgtggggggcggtctgtat

SEQ ID NO: 459410 - DNA, 75 bp, synthetic construct
  source 1..75: mol_type = other DNA
gaccaaaaaagccagcggctcagataacaccctgaacgtcagttttatgaagaacccgactccgggacagtccct

SEQ ID NO: 459411 - DNA, 75 bp, synthetic construct
  source 1..75: mol_type = other DNA
gtttgttggcatggacaaaaacaaagcagttcagacagtaaaagataggatcctggccgggcgggcaaaacaacc

SEQ ID NO: 459412 - DNA, 75 bp, synthetic construct
  source 1..75: mol_type = other DNA
attatggtgctgaaatcagcaacgataatcagacagataaatccatagtcacactttcgttatctcctttgaaag

SEQ ID NO: 459413 - DNA, 75 bp, synthetic construct
  source 1..75: mol_type = other DNA
acttgttggccgcttggataaggcaccgatggtagatttcagcagtgtcagcacgagtggatttgccactcttgt

SEQ ID NO: 459414 - DNA, 75 bp, synthetic construct
  source 1..75: mol_type = other DNA
actgtcctgtgtccggaggacttattgctgtatctgaacttgccagccaggtaataaaaagaacgggacgaaaat

SEQ ID NO: 459415 - DNA, 75 bp, synthetic construct
  source 1..75: mol_type = other DNA
cagtcgtgtgacgccgacgctgcatgtcgacgccacgggtggcagtacgaagtggattctggatggtttcaggac

SEQ ID NO: 459416 - DNA, 75 bp, synthetic construct
  source 1..75: mol_type = other DNA
agacggtatcgttgtacttaaccagcaggcagacattgcaggtaatatccaggccttcagttcagtgaacctcgc

SEQ ID NO: 459417 - DNA, 75 bp, synthetic construct
  source 1..75: mol_type = other DNA
cgggggcttttgtcggcagttcgctgacagtacatgatggaggtcaccttacagcactggacggtattttcagcg

SEQ ID NO: 459418 - DNA, 75 bp, synthetic construct
  source 1..75: mol_type = other DNA
ggttatctcgaatttaaagacagttacaccgtatctgctgaatccggaaaaacctggacgggtgccggcattatt

SEQ ID NO: 459419 - DNA, 75 bp, synthetic construct
  source 1..75: mol_type = other DNA
cccccgtagactttgtttccggactgggccccctgaactggacatacgacaaaacatcaggcacaggtaccctga

SEQ ID NO: 459420 - DNA, 75 bp, synthetic construct
  source 1..75: mol_type = other DNA
agccaccggcgaggtggtgggaatgatagccacacagatgtacggtaagccggtgagtgaactgagtgagaccga

SEQ ID NO: 459421 - DNA, 75 bp, synthetic construct
  source 1..75: mol_type = other DNA
gactcgctgtgtgagtttacggtgaaggaacgtaatattgagttcagggctgttctcgcttacgaaccgaagaag

SEQ ID NO: 459422 - DNA, 75 bp, synthetic construct
  source 1..75: mol_type = other DNA
gcgctgttccgcgaattagtaagcatctgtcagaaaggccagtctcaagcgaggctggctttttttcttttggta

SEQ ID NO: 459423 - DNA, 75 bp, synthetic construct
  source 1..75: mol_type = other DNA
agttattccctcagcggtaacatcagaaggaaccaaagccaatgcttataaatacactgaacgttacaccgcttt

SEQ ID NO: 459424 - DNA, 75 bp, synthetic construct
  source 1..75: mol_type = other DNA
tagaagcgggtgcactggcgggagtgttgcgtaagcaggagcacgaactgatcgaaaacgtgttcgaactggaat

SEQ ID NO: 459425 - DNA, 75 bp, synthetic construct
  source 1..75: mol_type = other DNA
agagcagattgtcgcccgtgatgagaactcatggttgattgatggcggcaccccgattgacgacgtaatgcgtgt

SEQ ID NO: 459426 - DNA, 75 bp, synthetic construct
  source 1..75: mol_type = other DNA
cattcagtggaaaaaccaaatccgtgggtggcggtctgtatgcctctgcactctttaattccggagcttattttg

SEQ ID NO: 459427 - DNA, 75 bp, synthetic construct
  source 1..75: mol_type = other DNA
gaaagacagtgtgactcagggtgccggttatctcgaatttaaagacagttacaccgtatctgctgaatccggaaa

SEQ ID NO: 459428 - DNA, 75 bp, synthetic construct
  source 1..75: mol_type = other DNA
ccgtggtgctcggggatgcccgtcaggtcaatccggataacatttcatggggataccggggaggtaagcttgacc

SEQ ID NO: 459429 - DNA, 75 bp, synthetic construct
  source 1..75: mol_type = other DNA
acaaggactacaatccgctgattggccgaactggtgtggatgtgggtaaatccttctctggtaaggactggaaag

SEQ ID NO: 459430 - DNA, 75 bp, synthetic construct
  source 1..75: mol_type = other DNA
ctggcggaggtatttatcaacagcgacggagtaccgactctgggcgaagggaacgccgactgccggacgcaaacc

SEQ ID NO: 459431 - DNA, 75 bp, synthetic construct
  source 1..75: mol_type = other DNA
cgcaacccgcagaccggtaaagaaatcaaaattgccgcagctaacgtaccggcatttgtttctggcaaggcactg

SEQ ID NO: 459432 - DNA, 75 bp, synthetic construct
  source 1..75: mol_type = other DNA
aagagattgcatgttatttaatggtccgatctggcaggctattggttgatgcacctgaaatcgaccttaaatatg

SEQ ID NO: 459433 - DNA, 75 bp, synthetic construct
  source 1..75: mol_type = other DNA
cttaaaatagagagagataaaaacagaagcgcggattgttggagtatgacaggtgatggcatgtgcgatcttaat

SEQ ID NO: 459434 - DNA, 75 bp, synthetic construct
  source 1..75: mol_type = other DNA
gattctggtcgtggatgatcatccgattaaccgacgtctgctggcagatcagttgggatcgttgggctatcaatg

SEQ ID NO: 459435 - DNA, 75 bp, synthetic construct
  source 1..75: mol_type = other DNA
catctcctttaactggcttgcgctgcatcaactggtacgctgggtgtaatatgaccaccagtcttatcctgccgc

SEQ ID NO: 459436 - DNA, 75 bp, synthetic construct
  source 1..75: mol_type = other DNA
taaacattttgttattcgtaatatcaaagcccgcaatatcacgccggatttcagtaagaaagcaggtattgataa

SEQ ID NO: 459437 - DNA, 75 bp, synthetic construct
  source 1..75: mol_type = other DNA
tttccgtgctgctcagaaacgttctgacatcgagatcgttgcaatcaatgacctgttagacgctgattacatggc

SEQ ID NO: 459438 - DNA, 75 bp, synthetic construct
  source 1..75: mol_type = other DNA
ccgccggaacggattcaggaggcaaccggactttccggtgaagaactgaaaaagctgtttcctgatgagcagtag

SEQ ID NO: 459439 - DNA, 75 bp, synthetic construct
  source 1..75: mol_type = other DNA
gattctggttaatatcgaaaaactgctaaatagtgaagagatggcgctgttagataatgcgaccgcagacgtcgc

SEQ ID NO: 459440 - DNA, 75 bp, synthetic construct
  source 1..75: mol_type = other DNA
gatatcgacaggattaatcaccatattgttaatgtggaaaagattaactttagattgccggaacggagggagtag

SEQ ID NO: 459441 - DNA, 75 bp, synthetic construct
  source 1..75: mol_type = other DNA
tccttggaagcctgcgcggcaacggcagagggcgatttgtcttacaggatggcagccaggtgacaggggaggggg

SEQ ID NO: 459442 - DNA, 75 bp, synthetic construct
  source 1..75: mol_type = other DNA
taggcggtaatacatgggtcgaatgcacaagagctgcatacgtaagagcaaaagacaagggtgaattagccagag

SEQ ID NO: 459443 - DNA, 75 bp, synthetic construct
  source 1..75: mol_type = other DNA
atggcaatcgtggcctggcgttgctggacctgatcgaagagggcaacctggggctgatccgcgcggtagagaagt

SEQ ID NO: 459444 - DNA, 75 bp, synthetic construct
  source 1..75: mol_type = other DNA
ctgccggacgcttataaatccgtgattgaagcactgaaacacggcgggctgaaaaatcgtgttagcgtcaacatc

SEQ ID NO: 459445 - DNA, 75 bp, synthetic construct
  source 1..75: mol_type = other DNA
gaaacggcacatgtaaaattccagccttggcaggatgataagtggagtcgagtgttaccatatttccgtcaggaa

SEQ ID NO: 459446 - DNA, 75 bp, synthetic construct
  source 1..75: mol_type = other DNA
atctccagtttacagggaattataaagtatctgcgcaaaatggtcagacatggatgggggcgggaattatcaccg

SEQ ID NO: 459447 - DNA, 75 bp, synthetic construct
  source 1..75: mol_type = other DNA
actgaagtcactccggcggaagtatcagatatcggggccgtcaatggaggatataaggccggaggccgatttacg

SEQ ID NO: 459448 - DNA, 75 bp, synthetic construct
  source 1..75: mol_type = other DNA
acgagcacgattggcgctttgtggaagccgaggggactacaaacatccccaaggatgttgtaaccggctgcatac

SEQ ID NO: 459449 - DNA, 75 bp, synthetic construct
  source 1..75: mol_type = other DNA
cgctggcgaatgccgcatggatttgggtaccgctactggcgattgccacgatcgccgcatggtcagggatgaatg

SEQ ID NO: 459450 - DNA, 75 bp, synthetic construct
  source 1..75: mol_type = other DNA
ccgcaggccaatggttccgtaatgtcgctggcgaacgcggcatggatttgggtgccgctgctggcaattgccaca

SEQ ID NO: 459451 - DNA, 75 bp, synthetic construct
  source 1..75: mol_type = other DNA
aattctgtagttctaaaagatgtcggtgaaaaggaattagtaggcggcactccagcgacatacctaaaaaaatta

SEQ ID NO: 459452 - DNA, 75 bp, synthetic construct
  source 1..75: mol_type = other DNA
tggcgagcaagtgatacgatgttaaccgcctgccagaacgttactccacttcttcaggttgcggagcaccgcgaa

SEQ ID NO: 459453 - DNA, 75 bp, synthetic construct
  source 1..75: mol_type = other DNA
attgcgcgatcggttggcggcgctatctccgataagttcggcggcgttcgcgttacgcttatcaactttattttt

SEQ ID NO: 459454 - DNA, 75 bp, synthetic construct
  source 1..75: mol_type = other DNA
ccagatgattgccgtcatctttcgccagataacaatctatcgggtgaagatgaaaggcggtagcgatgagcaagc

SEQ ID NO: 459455 - DNA, 75 bp, synthetic construct
  source 1..75: mol_type = other DNA
gtgatcatgctgagtctgctttagctgatatgtattttgcagcaaccggggataggccggagtggagcaacttgt

SEQ ID NO: 459456 - DNA, 75 bp, synthetic construct
  source 1..75: mol_type = other DNA
ttaacccagatgggccaactgtatggccatgtggcggatgagctcgcaaccccgtcctctgctattctcaatatt

SEQ ID NO: 459457 - DNA, 75 bp, synthetic construct
  source 1..75: mol_type = other DNA
tcgataacggtcagagccgcgaagaatggaaagggcaggcggaaaccaacaagatcctcaacacatcttccgtaa

SEQ ID NO: 459458 - DNA, 75 bp, synthetic construct
  source 1..75: mol_type = other DNA
ctgacgataaaaagccagccgcaaaaagggtgggccgtccgcatggttatacagaagaaaaagcgttagagatct

SEQ ID NO: 459459 - DNA, 75 bp, synthetic construct
  source 1..75: mol_type = other DNA
ggtaaagcgtgaaaaaccgcccgtcgaaacaggagcatggaaagacgctgttgactgggtattaaaggaagcatg

SEQ ID NO: 459460 - DNA, 75 bp, synthetic construct
  source 1..75: mol_type = other DNA
gacagaattgctgatttagaagctaaacagccatcgccagtagtaccggaaggactgattaaagcggtgcgtttt

SEQ ID NO: 459461 - DNA, 75 bp, synthetic construct
  source 1..75: mol_type = other DNA
gcggcaaccatcctcaaactaatgaatatggtctgattagcaatgtaacccactggatgcctctaccagaaccgc

SEQ ID NO: 459462 - DNA, 75 bp, synthetic construct
  source 1..75: mol_type = other DNA
tgcgtgaaaaggcagagaaagcaacgagtggtgtgtggtcgctcgaatatggagaggagagatttgatgctgatg

SEQ ID NO: 459463 - DNA, 75 bp, synthetic construct
  source 1..75: mol_type = other DNA
tgagtattacgaaggtgttatctcggatggaagtaagcgcatagcagaactggaagcgcgggaaataaaaccagc

SEQ ID NO: 459464 - DNA, 75 bp, synthetic construct
  source 1..75: mol_type = other DNA
acgcctgtcgtgccgccatgcttcatggtgccaaacctgtaagccagacttacaagttgaacaagctgtcgggca

SEQ ID NO: 459465 - DNA, 75 bp, synthetic construct
  source 1..75: mol_type = other DNA
caactcatcaacgagcgtgaccatgctgagtatgctttagctgatatgtattttgcagcaaccgggaacaggccg

SEQ ID NO: 459466 - DNA, 75 bp, synthetic construct
  source 1..75: mol_type = other DNA
cgcgccagagaacatcaaaaaggaagaactgaacagacaccatttgatgattgaaactcgtaaatggctattagc

SEQ ID NO: 459467 - DNA, 75 bp, synthetic construct
  source 1..75: mol_type = other DNA
atggatgaaattagaaattatagtttatctgacaaaaataacagtcagccaatatgtttttttcttggtcgtgat

SEQ ID NO: 459468 - DNA, 75 bp, synthetic construct
  source 1..75: mol_type = other DNA
tttactggtggcgtcagttactgaacaaggaaggacctgaggggctaatcccgcacagtaaggcacctctggtgc

SEQ ID NO: 459469 - DNA, 75 bp, synthetic construct
  source 1..75: mol_type = other DNA
atattcgcgcccgttataaagctcaggggattgagctacctgcagtggttccggcaggaccggataacccaatgg

SEQ ID NO: 459470 - DNA, 75 bp, synthetic construct
  source 1..75: mol_type = other DNA
atatagccaaaataatgcttgaatccggagtccctcttacagacatcatgcgctttaccggggtgtcagaagaag

SEQ ID NO: 459471 - DNA, 75 bp, synthetic construct
  source 1..75: mol_type = other DNA
ctgatgaggaagtgaagcaattgtgccgtgagcatagcttcagaataaagcggtcggtatttaacggtaagagct

SEQ ID NO: 459472 - DNA, 75 bp, synthetic construct
  source 1..75: mol_type = other DNA
tctatagtgaatctcgcttttttataataggtcatgatgattgggataagttagagtattttattaactcatctg

SEQ ID NO: 459473 - DNA, 75 bp, synthetic construct
  source 1..75: mol_type = other DNA
tatcattcgtgaagcggctaaacatcacgaagtcggcctgcacgcctgggatcaccatgcctggcaagcccatag

SEQ ID NO: 459474 - DNA, 75 bp, synthetic construct
  source 1..75: mol_type = other DNA
tgaaaatccgccagtcgaaaccggagcatggaaagacgctgttgactgggtactcaaagaggcttgcaaggctgt

SEQ ID NO: 459475 - DNA, 75 bp, synthetic construct
  source 1..75: mol_type = other DNA
acaaggcgaatgggtcgcatttatttcgccgggcaaatacggcacgtacgccgtgcacacaccaggtgataatca

SEQ ID NO: 459476 - DNA, 75 bp, synthetic construct
  source 1..75: mol_type = other DNA
ccggcaggaccggataatccaatgggtcatcatgcgattcgtctggcggcctatggcggcgtttatttgcttcac

SEQ ID NO: 459477 - DNA, 75 bp, synthetic construct
  source 1..75: mol_type = other DNA
ttaaaaatgctgcgcaaactgacgccgaagtgatgcagcacgtaatggacgtgcgttccggaatgccggttgatg

SEQ ID NO: 459478 - DNA, 75 bp, synthetic construct
  source 1..75: mol_type = other DNA
atcttgagtaagcataatattcaggccagcatttttttcagcgtcggcccggacaatatgggccgtcatctctgg

SEQ ID NO: 459479 - DNA, 75 bp, synthetic construct
  source 1..75: mol_type = other DNA
tcagtattatctccgatgaatatactcagacaccgtcgcgggagggatatgtcggcagcggcgagtcggcactcg

SEQ ID NO: 459480 - DNA, 75 bp, synthetic construct
  source 1..75: mol_type = other DNA
taccagtcacaaatacaggcatataaagaccaactggcgacggccactggcgttcgtgatattgctgattttgtt

SEQ ID NO: 459481 - DNA, 75 bp, synthetic construct
  source 1..75: mol_type = other DNA
gtgatctccctgttcacctggcggcgggcggagcctgatgacaacgccgacgtcccgatgggatggtggggggat

SEQ ID NO: 459482 - DNA, 75 bp, synthetic construct
  source 1..75: mol_type = other DNA
aaactaagccatacaattgtagcctctcttgtacacctaggttacgatgcaaccgaacaaacaaaaaaaaatgga

SEQ ID NO: 459483 - DNA, 75 bp, synthetic construct
  source 1..75: mol_type = other DNA
atgaaaagatttcgcccccttattctggcggttcttattgccagtccgatagtaaacgctgcgggtatacccgta

SEQ ID NO: 459484 - DNA, 75 bp, synthetic construct
  source 1..75: mol_type = other DNA
atgaacacggataacatgccgtcgctggtggcagagccgatagtaagagagcttggcgagtatattttttcgcag

SEQ ID NO: 459485 - DNA, 75 bp, synthetic construct
  source 1..75: mol_type = other DNA
aaaatgcgcttgaagcggagcgtgttaagcagtggaatcaacaacaattaaatgctccagatataaattttaatt

SEQ ID NO: 459486 - DNA, 75 bp, synthetic construct
  source 1..75: mol_type = other DNA
gccgggagtcaggcggtcagactggaggtcagggggcgatggagagaggctgccggagcgtggcgtcgggccgca

SEQ ID NO: 459487 - DNA, 75 bp, synthetic construct
  source 1..75: mol_type = other DNA
aaagccgccgtcgaagccgctattgcccgagccaaagcgcgcaaacgggaacagcaaccggctaatgcggagcca

SEQ ID NO: 459488 - DNA, 75 bp, synthetic construct
  source 1..75: mol_type = other DNA
ttattaataacacggtagagcatttaattgataactggatagcttataatacggcattgcttgatttttattcta

SEQ ID NO: 459489 - DNA, 75 bp, synthetic construct
  source 1..75: mol_type = other DNA
gaaataaaaatatatcatagcaatgaacttgacgaagaatatgaagatgaagatgaagatgaagatgaagatgaa

SEQ ID NO: 459490 - DNA, 75 bp, synthetic construct
  source 1..75: mol_type = other DNA
gtgatttccctgttcacctggcggcgggcggagcctgatgacaatgccgacgtcccgatgggatggtggggggat

SEQ ID NO: 459491 - DNA, 75 bp, synthetic construct
  source 1..75: mol_type = other DNA
ggtaaaggatgtgctcacctttttatgccagtcaggataccaactggcactggcgacctcttcatcttatcaggt

SEQ ID NO: 459492 - DNA, 75 bp, synthetic construct
  source 1..75: mol_type = other DNA
atgaacgtaaaagcagcggagaagcgtgaaaagatgcttgctgaggaacgccgtaagaaatggaatcagcagcaa

SEQ ID NO: 459493 - DNA, 75 bp, synthetic construct
  source 1..75: mol_type = other DNA
aggcaaagtggtggtttcgggaattggcaaatcgggccacattggtaagaaaatcgccgcaacgcttgccagcac

SEQ ID NO: 459494 - DNA, 75 bp, synthetic construct
  source 1..75: mol_type = other DNA
ttacgtcgctggctggttggcggcggcgcactcaccacgccagttaatgaagcgatgacgacaggcggcaccaca

SEQ ID NO: 459495 - DNA, 75 bp, synthetic construct
  source 1..75: mol_type = other DNA
tggggatgattgaaagccgcgatgtgatgctgtttatctcttactccggtggcgcgaaggaactggatctgatta

SEQ ID NO: 459496 - DNA, 75 bp, synthetic construct
  source 1..75: mol_type = other DNA
gtgctaaggcagaaaaagcaacgtgtggtgagtggtcgctcgaatatggagaggaccgatttgattgtgatgatg

SEQ ID NO: 459497 - DNA, 75 bp, synthetic construct
  source 1..75: mol_type = other DNA
cagtgtgtgatgatcaacgactggtgaaaggcgtctttaccgacggcgatttacgtcgctggctggttggcggtg

SEQ ID NO: 459498 - DNA, 75 bp, synthetic construct
  source 1..75: mol_type = other DNA
taccttgctggcaatgaccggcaaaccgacctcaccgctggggttagcggcaaaagcagtgctggatatttccgt

SEQ ID NO: 459499 - DNA, 75 bp, synthetic construct
  source 1..75: mol_type = other DNA
tgcgatcttaaaaacacagatcaaaataggcgtctccatcgaacaacaagagaagttgcccacaaaatccaaatt

SEQ ID NO: 459500 - DNA, 75 bp, synthetic construct
  source 1..75: mol_type = other DNA
tgcgctggcgcagggttttgccgcgttgatgcgtgagcaggccacgatgcgtggtatcactacgctggtatttag

SEQ ID NO: 459501 - DNA, 75 bp, synthetic construct
  source 1..75: mol_type = other DNA
ggtatcactacgctggtatttagcggcggagttattcataaccgtttgctgcgtgcacgtctggcgcattatctc

SEQ ID NO: 459502 - DNA, 75 bp, synthetic construct
  source 1..75: mol_type = other DNA
atgattgaaagccgcgatgtgatgctgtttatctcttattccggtggcgcgaaggaactggatctcattattccg

SEQ ID NO: 459503 - DNA, 75 bp, synthetic construct
  source 1..75: mol_type = other DNA
gaaaaaacaggtatctctcgatcgacgtacttcaggttaaaaagaacaataaaaaatgatgctaaaattgcaacg

SEQ ID NO: 459504 - DNA, 75 bp, synthetic construct
  source 1..75: mol_type = other DNA
acaattcacacaacttataatagatataaaaaaagcgttcccgaaaaggaatcaggaaaatactcaacaccttat

SEQ ID NO: 459505 - DNA, 75 bp, synthetic construct
  source 1..75: mol_type = other DNA
actggtattggccttgccgagcaactgatcgcgcttcagcgtggtgatgtattgatcatgatggcgcaaaaatcc

SEQ ID NO: 459506 - DNA, 75 bp, synthetic construct
  source 1..75: mol_type = other DNA
gccacgttaaacacttccgatgccacagtaattcgggctatacaggctctggggtttgccgggctgcgcgatctg

SEQ ID NO: 459507 - DNA, 75 bp, synthetic construct
  source 1..75: mol_type = other DNA
ttgatatttttggggagcgttttcgtactcgtgcgagtcagttaacgccagggttaagaaccgtcgccagctaca

SEQ ID NO: 459508 - DNA, 75 bp, synthetic construct
  source 1..75: mol_type = other DNA
tgaaatggcagattgccaacggcattcagcatgtgcgtacccatgtcgatgtctccgacgcaaccctgactgcgc

SEQ ID NO: 459509 - DNA, 75 bp, synthetic construct
  source 1..75: mol_type = other DNA
cacgcaaaccgccggacaaccgaactggaatcagtccggcacgctgtttgaaggcattgaacgctgggccgagcg

SEQ ID NO: 459510 - DNA, 75 bp, synthetic construct
  source 1..75: mol_type = other DNA
cagcgtgcggttaaaaccattaagcgaattaacgatttccatcggggactgaaaacgggaagaaagaatggctaa

SEQ ID NO: 459511 - DNA, 75 bp, synthetic construct
  source 1..75: mol_type = other DNA
tgccgcaaccttcgacgccttatcgattaacaacggctgaaggtgatattctacaggggatcaccgatgaaaatg

SEQ ID NO: 459512 - DNA, 75 bp, synthetic construct
  source 1..75: mol_type = other DNA
gccggtttcctgagtttctcgcacgtcttgcggcatatcgtggccgtgtaatgacacggatcgcggtcgaacttt

SEQ ID NO: 459513 - DNA, 75 bp, synthetic construct
  source 1..75: mol_type = other DNA
ggtgctatgggtgagtcagggttgtggagtgatgacgcgatagagcgacagctgagccattcagaacgtaataac

SEQ ID NO: 459514 - DNA, 75 bp, synthetic construct
  source 1..75: mol_type = other DNA
actttgttcttgaagggcatttgtatacttgtaatgtcctgtcagagcctgaaaaccgccacgcgcttgcgcaag

SEQ ID NO: 459515 - DNA, 75 bp, synthetic construct
  source 1..75: mol_type = other DNA
cgtgcaggcgggaatgccgaaaaagaaaaaacggacgctttcgccagactctccgcgcgatccggcgcaggtata

SEQ ID NO: 459516 - DNA, 75 bp, synthetic construct
  source 1..75: mol_type = other DNA
ggatgtgaagataattctgctggcgcacaacaatcatttacaaaaaaccccagtctccttttcaggcgagcttac

SEQ ID NO: 459517 - DNA, 75 bp, synthetic construct
  source 1..75: mol_type = other DNA
gtgcgtgcagcatatattcatacctctgagcatttagacgaacgtagattaatggttcaatggtgggctgattat

SEQ ID NO: 459518 - DNA, 75 bp, synthetic construct
  source 1..75: mol_type = other DNA
cggtgcgctatcgacaaccaaagcgcgacattaccccgctttaccctccagccggttccctgagtttcttgctcg

SEQ ID NO: 459519 - DNA, 75 bp, synthetic construct
  source 1..75: mol_type = other DNA
ttttccctggcgatcatgacgcaactaaggttatgagtgaaaacacagtaaacaacgcattgcgtgcgatgggat

SEQ ID NO: 459520 - DNA, 75 bp, synthetic construct
  source 1..75: mol_type = other DNA
tgccactcagtaaacaggctgtagccatactgacagaacttcagacatgggcaggtgaaaatggtctgatattta

SEQ ID NO: 459521 - DNA, 75 bp, synthetic construct
  source 1..75: mol_type = other DNA
aactgtagtcacccgaaggcgtttctctcagactaccgaaacattggatggtcacccgaaggtgacaaagttagc

SEQ ID NO: 459522 - DNA, 75 bp, synthetic construct
  source 1..75: mol_type = other DNA
gatgattttgctaaaccagttaaagcagattagtggtgataaagagctgctttttccgggtgatcatgacgcaac

SEQ ID NO: 459523 - DNA, 75 bp, synthetic construct
  source 1..75: mol_type = other DNA
aatagtgctttgcgggctatgggatatgacactaaaactgaagtatgcggtcacggtttcagaacgatggcgcga

SEQ ID NO: 459524 - DNA, 75 bp, synthetic construct
  source 1..75: mol_type = other DNA
gatcgactcgcttttggtgtatacccgacggtcactttggctgaagcgcggggtaagcgcgatgcagcaaagaaa

SEQ ID NO: 459525 - DNA, 75 bp, synthetic construct
  source 1..75: mol_type = other DNA
cttgagctttatatttttcctcatatcggttcgtcagacattcgcctgctcaaaaccagccacctgttagcacca

SEQ ID NO: 459526 - DNA, 75 bp, synthetic construct
  source 1..75: mol_type = other DNA
aagccgaacagaaagaagctcaggccgagaattcgggggcatatactttcgaaaccattgctcgtgaatggcatg

SEQ ID NO: 459527 - DNA, 75 bp, synthetic construct
  source 1..75: mol_type = other DNA
ggcatgattttaatgcgattggtttggaatgtggggcgattcaggcatcccggttatctgaatggctcaactcaa

SEQ ID NO: 459528 - DNA, 75 bp, synthetic construct
  source 1..75: mol_type = other DNA
ggagcaagaggcaataacgtttgaagtggttgccagagaatggcacgctagtaataaaaaatggtcggcatcgca

SEQ ID NO: 459529 - DNA, 75 bp, synthetic construct
  source 1..75: mol_type = other DNA
actatcacgctataaagggcgactaatgacacggcttgccgttgaattaacgctactcacatttatacgttcaag

SEQ ID NO: 459530 - DNA, 75 bp, synthetic construct
  source 1..75: mol_type = other DNA
atatcgttccgcttagtcgtcaggcgatgaatttattagaccagctaaagcagattagtggtgataaggatctgc

SEQ ID NO: 459531 - DNA, 75 bp, synthetic construct
  source 1..75: mol_type = other DNA
ctggtttactggactggtcaaaagataaattacgcattgaattaacattaagaacaactgaattaattgatttga

SEQ ID NO: 459532 - DNA, 75 bp, synthetic construct
  source 1..75: mol_type = other DNA
atacgcaagaatactggcattacttcatattcctcatgatctcccgtcatatcgtcaggtaatgtctggtcagta

SEQ ID NO: 459533 - DNA, 75 bp, synthetic construct
  source 1..75: mol_type = other DNA
aaaactatagatcatacgacttaccgtggttgcaatctctcttctgaaggagtttatatacaaaaggaatataaa

SEQ ID NO: 459534 - DNA, 75 bp, synthetic construct
  source 1..75: mol_type = other DNA
attcaaataatgttgttccattagtaagaacacttgaggctaaaccagccaaaattccatcatgggtttatgaga

SEQ ID NO: 459535 - DNA, 75 bp, synthetic construct
  source 1..75: mol_type = other DNA
tacatatttgttgtggaagcagggcgcgaacatgaaagaaatgttaccgaaacctacattctaccgacatcgtaa

SEQ ID NO: 459536 - DNA, 75 bp, synthetic construct
  source 1..75: mol_type = other DNA
cgcacttaaattaccgtgcagtcgtgtttaccaaagaacaatacgcccgcattccgctacgtgatgacaccgtag

SEQ ID NO: 459537 - DNA, 75 bp, synthetic construct
  source 1..75: mol_type = other DNA
atgactatggaaaatgagcatcaactcagtggtatcctgccgtcagggcaagatatcgatgccgctaaacgtcag

SEQ ID NO: 459538 - DNA, 75 bp, synthetic construct
  source 1..75: mol_type = other DNA
gaaataaaaatatatcatagcaatgaacttgacgaagaatatgaagatgaagatgaagatgaagattcgaatata

SEQ ID NO: 459539 - DNA, 75 bp, synthetic construct
  source 1..75: mol_type = other DNA
atggcttgctatcaaatgatagcttccagaaaacaagtggagctgttacgaaatattatgactgactctttatta

SEQ ID NO: 459540 - DNA, 75 bp, synthetic construct
  source 1..75: mol_type = other DNA
atcaggaagattattgttgaacacaaagacaaatgttcagacattaatacaacgtgcactgaattattgcaaaat

SEQ ID NO: 459541 - DNA, 75 bp, synthetic construct
  source 1..75: mol_type = other DNA
atagatcatgcgacttccagttattgcaatctctcttctgaaggagtttatatacaaaaggaatataaagataat

SEQ ID NO: 459542 - DNA, 75 bp, synthetic construct
  source 1..75: mol_type = other DNA
gttttttctcccccggttggaaagcggcgcggttacgctcaagggcattaattatggcctatgaggccgtgaaac

SEQ ID NO: 459543 - DNA, 75 bp, synthetic construct
  source 1..75: mol_type = other DNA
gtcgggcaacacatctctacattgacggtaatccatcaaagtttttgcaaggtcactctgttatcggttccgacg

SEQ ID NO: 459544 - DNA, 75 bp, synthetic construct
  source 1..75: mol_type = other DNA
gcgaatggcgtcgatccgggagataaaaagaaaaatgataaggttgaacagagtaaagcacgaacctttaaagaa

SEQ ID NO: 459545 - DNA, 75 bp, synthetic construct
  source 1..75: mol_type = other DNA
tgttagttttcatccgttcaagcgaactacgttttgctcgctggccagaagtggattttgaaacggccatgtgga

SEQ ID NO: 459546 - DNA, 75 bp, synthetic construct
  source 1..75: mol_type = other DNA
atggctctgagtgatgtgaaggttcgttcggctaagcctgaagcaaaagcctataaacttactgacggcgacggt

SEQ ID NO: 459547 - DNA, 75 bp, synthetic construct
  source 1..75: mol_type = other DNA
acatgggtttaggacgatggcgcgtggtgcgttgggagagtcaggattatggagcgatgatgcgatagagcgcca

SEQ ID NO: 459548 - DNA, 75 bp, synthetic construct
  source 1..75: mol_type = other DNA
aaagatgctggatatgaatgaagctatccgccaactggagcaggcattatctctggcccgaagtatggcgaaggc

SEQ ID NO: 459549 - DNA, 75 bp, synthetic construct
  source 1..75: mol_type = other DNA
ttgatcgaatcaggtttgtggtctcgtgatgctgttgaacgtcagatgagtcacatggagcgaaattcagtgagg

SEQ ID NO: 459550 - DNA, 75 bp, synthetic construct
  source 1..75: mol_type = other DNA
aggtctgttggatctgatggtgaaggtagggcaacacatctctacattgacggtaatccatcaaagtttttgcaa

SEQ ID NO: 459551 - DNA, 75 bp, synthetic construct
  source 1..75: mol_type = other DNA
ggcgctaactggaatatgaaaacaccacgtcaattattctctgaatatgtagggagaatagaaatgaatcagaat

SEQ ID NO: 459552 - DNA, 75 bp, synthetic construct
  source 1..75: mol_type = other DNA
ttacgccagaatattggcattactgcatattcctcatgatctaccatcctatcggcaggtcatggaagggcaatt

SEQ ID NO: 459553 - DNA, 75 bp, synthetic construct
  source 1..75: mol_type = other DNA
tgatgccctgtgcgtggtgtttaaagtgggcgcttatggcagggaaataaacgggtgtattcctgaagaatgcca

SEQ ID NO: 459554 - DNA, 75 bp, synthetic construct
  source 1..75: mol_type = other DNA
tatcaacagactgttttaccgctacgcaacagtattcttcgggcattactgaaaaatacaggcgctgccggattg

SEQ ID NO: 459555 - DNA, 75 bp, synthetic construct
  source 1..75: mol_type = other DNA
gactggtcaaaagataaattacgcattgaattaacattaagaacaactgaattaattgatttgaatcttacgctt

SEQ ID NO: 459556 - DNA, 75 bp, synthetic construct
  source 1..75: mol_type = other DNA
tcctgtaagcacagtatgtgtatggaaatataccgtttactttgcgaaacccagacgatgttggcgggatattac

SEQ ID NO: 459557 - DNA, 75 bp, synthetic construct
  source 1..75: mol_type = other DNA
atgaatcttgatgacattatcaacagcatgacgcctgaggtataccagcgtttgtcgactgccgttgaactgggg

SEQ ID NO: 459558 - DNA, 75 bp, synthetic construct
  source 1..75: mol_type = other DNA
gcatgacgccagagatttatctgcgtttatcgaccgccattgaactgggaaaatggcccgatggcgttgcgctga

SEQ ID NO: 459559 - DNA, 75 bp, synthetic construct
  source 1..75: mol_type = other DNA
agggacttcatattcattttatcggctacctggatgggcaacgtcacaacaaatctgaaccgccccgggtttcct

SEQ ID NO: 459560 - DNA, 75 bp, synthetic construct
  source 1..75: mol_type = other DNA
ggaaggggagggttattttcacctgtgcagggctaaagacaaatacccggtgcgtatcgatcacgtgattcacta

SEQ ID NO: 459561 - DNA, 75 bp, synthetic construct
  source 1..75: mol_type = other DNA
ctacttggatgggcaacgtcacaagaaattttatcggatatccaggcaactgggagatatctggagtcggatcac

SEQ ID NO: 459562 - DNA, 75 bp, synthetic construct
  source 1..75: mol_type = other DNA
gaaacccagacgatgttggcgggatattactgggtaatggaatatacaccagacaaagggcttcatattcatttt

SEQ ID NO: 459563 - DNA, 75 bp, synthetic construct
  source 1..75: mol_type = other DNA
gccgaattgcatgggggaagtgctacgtatcactatttaaatcaacataatgtgttccgtattacgttaccgcaa

SEQ ID NO: 459564 - DNA, 75 bp, synthetic construct
  source 1..75: mol_type = other DNA
ccatgctgataaaattttgctacaacgaatgttatcgaatcttattgttaatgctattcgatattcaccagaaaa

SEQ ID NO: 459565 - DNA, 75 bp, synthetic construct
  source 1..75: mol_type = other DNA
atgtataatgctaaccccaattacgaaatgaatttcgcgattctgaaagatgtgaatgaacacatggagggattg

SEQ ID NO: 459566 - DNA, 75 bp, synthetic construct
  source 1..75: mol_type = other DNA
cgaaatatttctatgcttctcttgcccggttaaatgccaaagcacagggctggcaccgtaaacatagcctatatt

SEQ ID NO: 459567 - DNA, 75 bp, synthetic construct
  source 1..75: mol_type = other DNA
ccaaacgatgttggcaggatattactgggtaatggaatatacgtcaaacaagggacttcatattcattttatcgg

SEQ ID NO: 459568 - DNA, 75 bp, synthetic construct
  source 1..75: mol_type = other DNA
tattattctggggcgtagcaggcttcccgaaaaaagtaaccggggccgaccgcgactggacagtaccctgtcgga

SEQ ID NO: 459569 - DNA, 75 bp, synthetic construct
  source 1..75: mol_type = other DNA
ctggcggtcagatagcccgccatgtgattaatcaactggcagataaacaaaccattaaacaaactttatttgccc

SEQ ID NO: 459570 - DNA, 75 bp, synthetic construct
  source 1..75: mol_type = other DNA
cctggcgacatgcctcagtacggggggcagccctggctgccctgctgatgcacataacaacacagtggttatggg

SEQ ID NO: 459571 - DNA, 75 bp, synthetic construct
  source 1..75: mol_type = other DNA
atgggcatggcgggtcatgtgacatttgtacacaacggcaaggcttatgttactggcggtgttaaccagaatatc

SEQ ID NO: 459572 - DNA, 75 bp, synthetic construct
  source 1..75: mol_type = other DNA
tgattatggatagtcagcaaaactccgtagatttaaatgctctggcaacatcagtaggcgttccgttcagattgg

SEQ ID NO: 459573 - DNA, 75 bp, synthetic construct
  source 1..75: mol_type = other DNA
aactgatcaatcagatgcgattaacatgtgtagaaccagtaagaataaaatacgccatgtatataacattacgac

SEQ ID NO: 459574 - DNA, 75 bp, synthetic construct
  source 1..75: mol_type = other DNA
ggatgttgtgtatgccaaccttacgggggaagatttagatattcaggcaaattcagtgatcgctgcgatgaaagc

SEQ ID NO: 459575 - DNA, 75 bp, synthetic construct
  source 1..75: mol_type = other DNA
gcaatatacccatcaaaaattagcagtgtcgtgaatgttaataatttttttagttgctacaattattgcaacaac

SEQ ID NO: 459576 - DNA, 75 bp, synthetic construct
  source 1..75: mol_type = other DNA
tggaaaaccccttcccggattcggcatgttgtctgacatggcagcaaaatgatatgtcgcctgcgttaacctggt

SEQ ID NO: 459577 - DNA, 75 bp, synthetic construct
  source 1..75: mol_type = other DNA
tattattctgggccgtagcaggcttcccgaaaaaagtcaccgggggcgaccgcgactggacagcaccctgccggg

SEQ ID NO: 459578 - DNA, 75 bp, synthetic construct
  source 1..75: mol_type = other DNA
gttgtatctcgcaaaagcgttgccgcattaatcgccgatatgattgataaacctgaaaaacatatcggtgaaaat

SEQ ID NO: 459579 - DNA, 75 bp, synthetic construct
  source 1..75: mol_type = other DNA
aaaacatggtctcagctgagcggataaaaaaacatttattccaggcgcagtatcggcagctacatataataacat

SEQ ID NO: 459580 - DNA, 75 bp, synthetic construct
  source 1..75: mol_type = other DNA
aaattcgcatggtactggctgataaccaaaaagaggaagtaccagatcttcaatttgtacgtgaggtgaaatacc

SEQ ID NO: 459581 - DNA, 75 bp, synthetic construct
  source 1..75: mol_type = other DNA
gatagccgagagcctgttgaggttagcgcattaccgagagaactaaaacctcttgggcaggcgttgaataaaatg

SEQ ID NO: 459582 - DNA, 75 bp, synthetic construct
  source 1..75: mol_type = other DNA
tatgttcacgttctgtctgaacccaaacccccgacaccggagggcggcgacgctaacgccgcatgggtggacgcg

SEQ ID NO: 459583 - DNA, 75 bp, synthetic construct
  source 1..75: mol_type = other DNA
gccatcagaaccgtttcaacggtgccacccgtgaagtggagcgcacgctgctttttgtgggctatggcaaaaaga

SEQ ID NO: 459584 - DNA, 75 bp, synthetic construct
  source 1..75: mol_type = other DNA
gttgaagttggattctttgccggactttcaacgctggcgctggtggcggcgatggatatgaccaacggcggactt

SEQ ID NO: 459585 - DNA, 75 bp, synthetic construct
  source 1..75: mol_type = other DNA
ttgttcgcgctaacgcctcaggtaacgatatcgacaaagcgcagcaactgcgcagcaaactcaataacaccttcc

SEQ ID NO: 459586 - DNA, 75 bp, synthetic construct
  source 1..75: mol_type = other DNA
gccatacaggcgttacgtcagaccatcatcaataaatatcagcgccgcatctggttcatcctgaccatcgccgcc

SEQ ID NO: 459587 - DNA, 75 bp, synthetic construct
  source 1..75: mol_type = other DNA
caatgccggacagaatgcctttttctatgttgccgttctgccggaagccggcaagggcaaagaagcgacgccagc

SEQ ID NO: 459588 - DNA, 75 bp, synthetic construct
  source 1..75: mol_type = other DNA
atttattcaacaaagccacaacctgatcatcgctggcttgaattgcagttgcgtatgctgctggagcaggtggaa

SEQ ID NO: 459589 - DNA, 75 bp, synthetic construct
  source 1..75: mol_type = other DNA
gacatgagaaaaccgtggcagtttaaggtcacactcacgcgcagtggccaggactataccgtcaataacccgacg

SEQ ID NO: 459590 - DNA, 75 bp, synthetic construct
  source 1..75: mol_type = other DNA
ctgacgtatgtcaacgactacggtggacgactgcctctctatttccagtgcagcggcgcagagtgccatgtcgat

SEQ ID NO: 459591 - DNA, 75 bp, synthetic construct
  source 1..75: mol_type = other DNA
acaaaggacattgcacatcgcgatcccttaaccaatatatttaacagaaattatttttttaatgaactgacggtt

SEQ ID NO: 459592 - DNA, 75 bp, synthetic construct
  source 1..75: mol_type = other DNA
tcggtgacgcccgacaggacacggctggtgtttaacgaaagcgacaagtccatcagcgtcacgctgcgcaataac

SEQ ID NO: 459593 - DNA, 75 bp, synthetic construct
  source 1..75: mol_type = other DNA
cacgcctgatcttcaatgaaggcgacaaatctattagcgtcacgttgcgcaataacgacccgaagcagccctacc

SEQ ID NO: 459594 - DNA, 75 bp, synthetic construct
  source 1..75: mol_type = other DNA
acagggcgcgtttcagcgtaccaacgtggtatcccgactacgaaggttactactgggccgacggcgtcacgctcg

SEQ ID NO: 459595 - DNA, 75 bp, synthetic construct
  source 1..75: mol_type = other DNA
gatatcaacaagctgcctgccgaccgcgagagcgtgttctacttcaacgtgcgtgaaattccgccgaaatcgaat

SEQ ID NO: 459596 - DNA, 75 bp, synthetic construct
  source 1..75: mol_type = other DNA
gtgacgttgcgcaataacgatccgaaactgccttatctggcccaaagctggatcgaagatgaaaagggtaacaag

SEQ ID NO: 459597 - DNA, 75 bp, synthetic construct
  source 1..75: mol_type = other DNA
ggcagccggtttctcgccaatagtgatgtcgccgaaaacctctgcaccgctgaatgtgaagatgggtagcgtgcc

SEQ ID NO: 459598 - DNA, 75 bp, synthetic construct
  source 1..75: mol_type = other DNA
ctttgcggataaaattttactgcaacgaatgttatcgaatcttattgttaacgctattcgatattcaccagaaaa

SEQ ID NO: 459599 - DNA, 75 bp, synthetic construct
  source 1..75: mol_type = other DNA
tatccggtaaacattaaccacgtcattcactattcagatcacaaagcggtgaatgatttacgctatgccatcagc

SEQ ID NO: 459600 - DNA, 75 bp, synthetic construct
  source 1..75: mol_type = other DNA
tattccggcacaggtcgtggtcaaccgctatatccgcccgcagtacagctgtccctgctgtgagaaagtgttcag

SEQ ID NO: 459601 - DNA, 75 bp, synthetic construct
  source 1..75: mol_type = other DNA
ggcgcagtgcaacgctgattggtgttttcgtgaaacgggagaaacctggcaatccatccccaccgatcgccttcg

SEQ ID NO: 459602 - DNA, 75 bp, synthetic construct
  source 1..75: mol_type = other DNA
caaaaaagccgtggaaatttacattgtggtgcgcacgtgggaagtgcctctgcaaatcacgatcagcctgttact

SEQ ID NO: 459603 - DNA, 75 bp, synthetic construct
  source 1..75: mol_type = other DNA
ctacagcgtgccgatgtggtatcacgactatgacggcatctactgggctgacggtcgcaccctggacgttgaagg

SEQ ID NO: 459604 - DNA, 75 bp, synthetic construct
  source 1..75: mol_type = other DNA
tggcacaaagctggatcgaagatgaaaagggcgtcaagattagttcgccgctggcagtattgccccccgtacagc

SEQ ID NO: 459605 - DNA, 75 bp, synthetic construct
  source 1..75: mol_type = other DNA
gcataatacgtcagtgagtcggttgaatagacaagggaataaaaaccttaattatcaacgtcactatattaagat

SEQ ID NO: 459606 - DNA, 75 bp, synthetic construct
  source 1..75: mol_type = other DNA
aacttacgaagcattgcgtgtttgccatgcggtgcgcaaagagccggatattcttacccgccaacggatgattgc

SEQ ID NO: 459607 - DNA, 75 bp, synthetic construct
  source 1..75: mol_type = other DNA
gatctatgcgctgatagttgccggaatggtagtgttgtttttacgtctcccttcttcctttttgccggaagaaga

SEQ ID NO: 459608 - DNA, 75 bp, synthetic construct
  source 1..75: mol_type = other DNA
actgtggaagctgtacaagctggccgggctgagcctgttgtaattatcggtgcgaggggccaaggtaaatcacac

SEQ ID NO: 459609 - DNA, 75 bp, synthetic construct
  source 1..75: mol_type = other DNA
tgctgctcaggtgccacatcttgagcccattctttccgctctctggcttcgttccctgtcactggagaatcatgc

SEQ ID NO: 459610 - DNA, 75 bp, synthetic construct
  source 1..75: mol_type = other DNA
cggaattacagccattcttcccgcagggaatgaaggttctctacccttatgacaccacgccattcgtccagcttt

SEQ ID NO: 459611 - DNA, 75 bp, synthetic construct
  source 1..75: mol_type = other DNA
cggtcaggcgcaaaacgctggtatggccttcgttagtctgaaaccctgggaagagcgcaatggtaaaaaaaatag

SEQ ID NO: 459612 - DNA, 75 bp, synthetic construct
  source 1..75: mol_type = other DNA
ctttaatcaaaaaaatgactgtagattcaatctgtcaatgcaacacccctttcaattatctctttcggtgttttg

SEQ ID NO: 459613 - DNA, 75 bp, synthetic construct
  source 1..75: mol_type = other DNA
atgactaagaaatacacgctaatctatgcagatccaccatgggtataccgggacaaagccgcagatggtaatcgc

SEQ ID NO: 459614 - DNA, 75 bp, synthetic construct
  source 1..75: mol_type = other DNA
cgcgttggatattgccagattaacaaatgcattcagcaatgctccgctgtcaccaacagacaaccaggggcggga

SEQ ID NO: 459615 - DNA, 75 bp, synthetic construct
  source 1..75: mol_type = other DNA
ttgaactgttcgcccgccagacgtctcatggcttcgatgtttggggtaatcagtgcgaagacccggcagtgcaac

SEQ ID NO: 459616 - DNA, 75 bp, synthetic construct
  source 1..75: mol_type = other DNA
taaaccattcatccttattctggatgaattccagacgtggtttgaaggcttaacaaactccaaccagtacaaacg

SEQ ID NO: 459617 - DNA, 75 bp, synthetic construct
  source 1..75: mol_type = other DNA
agttttctggtcgtcgtattaaaggaacgatgatcgaaatgcataaccggaatggcactggtgcgctcgataagt

SEQ ID NO: 459618 - DNA, 75 bp, synthetic construct
  source 1..75: mol_type = other DNA
gttaaaaaatcatgggttccgttgttgcagccatattttaaaaataaaattgaagtagataagtactggtatcaa

SEQ ID NO: 459619 - DNA, 75 bp, synthetic construct
  source 1..75: mol_type = other DNA
ctggcagcttagtcagtgtgcgccctaatggcctggaagataccgcgcaattcaaacttgaagttgaccaggaaa

SEQ ID NO: 459620 - DNA, 75 bp, synthetic construct
  source 1..75: mol_type = other DNA
ttgcacaggaacgagcgttaaacatgttgcgccgtgactggaaggcaaacgacaccttcatggtgtattcgccaa

SEQ ID NO: 459621 - DNA, 75 bp, synthetic construct
  source 1..75: mol_type = other DNA
gaatgaaagcgtctgctggcggtggcgaggttaaggctgagaaacttcccagagaatgccccaaatgccacttca

SEQ ID NO: 459622 - DNA, 75 bp, synthetic construct
  source 1..75: mol_type = other DNA
accgaaaccagcgagcaacaggtcagttgggaaaccattccgctgatcgagcccatcagcttaagcctcggctac

SEQ ID NO: 459623 - DNA, 75 bp, synthetic construct
  source 1..75: mol_type = other DNA
gttcggcgaatggcctgacgggctgagcagttttccgatggaaatcaccccggaggtcagtaattacatcagaca

SEQ ID NO: 459624 - DNA, 75 bp, synthetic construct
  source 1..75: mol_type = other DNA
cgtgaaatgcgcgtaatgtttgtggccccgtatacggtactgcttgaccagactgccacccgattcatggaatat

SEQ ID NO: 459625 - DNA, 75 bp, synthetic construct
  source 1..75: mol_type = other DNA
cctgccttatcttcgatcacagcggcaccgtgcaccgtctgggttatccggattcaatcgagtacgacgatcttc

SEQ ID NO: 459626 - DNA, 75 bp, synthetic construct
  source 1..75: mol_type = other DNA
tatgcaaggttgtttgcgccggggctgcatgtgctgtcgtataacgaagtgccggacgagctggagttgaagatt

SEQ ID NO: 459627 - DNA, 75 bp, synthetic construct
  source 1..75: mol_type = other DNA
tctggcgatcaacctgatcggcggcgtctgtatcgggatcttcaaatacaacctgagcgccgacgccgccttcca

SEQ ID NO: 459628 - DNA, 75 bp, synthetic construct
  source 1..75: mol_type = other DNA
tttatggtgggtttgttaacgacaattggcttgtcggccaaaaacgccatattgattgttgagttcgctaaggat

SEQ ID NO: 459629 - DNA, 75 bp, synthetic construct
  source 1..75: mol_type = other DNA
gcggcgggtaaggtgattgagtcgtttggtcaggtggtgatcggcggcaactttgttgtcggctttgtggtgttt

SEQ ID NO: 459630 - DNA, 75 bp, synthetic construct
  source 1..75: mol_type = other DNA
tccgacggcaacggcgtgctgctgccggagatccgcattcgggaaaacttccgcctcaagcccagccagtacgct

SEQ ID NO: 459631 - DNA, 75 bp, synthetic construct
  source 1..75: mol_type = other DNA
acccgctcacccagcggattcgcggcgtgcggcaggtgatttccgacggcaacggcgtgctgctgccggagatcc

SEQ ID NO: 459632 - DNA, 75 bp, synthetic construct
  source 1..75: mol_type = other DNA
tggcggattaacaaatgcattcagcaattctccgctttcaccaacagacaaccaaggccgggagcgtgcagcatg

SEQ ID NO: 459633 - DNA, 75 bp, synthetic construct
  source 1..75: mol_type = other DNA
gatgggacgtggttatgcatggttggacacgggcacacatcaaagtctgattgaagcaagtaacttcattgcaac

SEQ ID NO: 459634 - DNA, 75 bp, synthetic construct
  source 1..75: mol_type = other DNA
tttgataaaaacggcacggcaataagcttggaagaaaaaccgcttcaaccgaaaagcaattatgcagttacagga

SEQ ID NO: 459635 - DNA, 75 bp, synthetic construct
  source 1..75: mol_type = other DNA
gatgggccgtggttatgcatggctggacacggggacacatcaaagcctgattgaggcaagcaacttcattgctac

SEQ ID NO: 459636 - DNA, 75 bp, synthetic construct
  source 1..75: mol_type = other DNA
tgatggagtcatctcttctggctgcgggcatcagtgcagaaaagcccgttctttcaatgtctgatattcagcctt

SEQ ID NO: 459637 - DNA, 75 bp, synthetic construct
  source 1..75: mol_type = other DNA
gcaggtgaaaatattagctgaaccactgaaaaaaaatgcttatggtcagtatctgctaaatatcataaataataa

SEQ ID NO: 459638 - DNA, 75 bp, synthetic construct
  source 1..75: mol_type = other DNA
ttatatttttatgacaacgatgtcgtagaaatggcgaaaagtctgaagccttcaccgcgtggtgaactggaaatt

SEQ ID NO: 459639 - DNA, 75 bp, synthetic construct
  source 1..75: mol_type = other DNA
atgaaaacgcgtaaaggtattattttagcgggtggttctggtacacgtctttatcctgtgactatggctgtcagt

SEQ ID NO: 459640 - DNA, 75 bp, synthetic construct
  source 1..75: mol_type = other DNA
gatgggccgtggttatgcctggcttgataccggcacccatgagagcctgattgaggccagcaacttcatccagac

SEQ ID NO: 459641 - DNA, 75 bp, synthetic construct
  source 1..75: mol_type = other DNA
gatgaggagcatttcttattgttgatggatatatctccaatatgtagcaaaaaagtgtttgagtctttaagagcc

SEQ ID NO: 459642 - DNA, 75 bp, synthetic construct
  source 1..75: mol_type = other DNA
cgggctgctacgattgaccttaatattcatcagcaactgtctaattttgcaaaaacagagactggggtgaataac

SEQ ID NO: 459643 - DNA, 75 bp, synthetic construct
  source 1..75: mol_type = other DNA
gctgggtgacggtagccagtgggggctaaatcttcagtacaaagtgcaaccgactccagatgggcttgcgcaggc

SEQ ID NO: 459644 - DNA, 75 bp, synthetic construct
  source 1..75: mol_type = other DNA
gcctggaagaaaaaccgctacaaccaaaaagtaattatgcggtaaccgggctttatttctatgataacgacgttg

SEQ ID NO: 459645 - DNA, 75 bp, synthetic construct
  source 1..75: mol_type = other DNA
cgtaccgtggtgccaaaaggggaagtggtgctcaatgagagcaacatcgactccgtgctgctggaagatggcgat

SEQ ID NO: 459646 - DNA, 75 bp, synthetic construct
  source 1..75: mol_type = other DNA
ttccggggttcgttttcagatgcctgaggaaaaaatacctgagtatgcgaacgcggtgatgaaagccgctggcat

SEQ ID NO: 459647 - DNA, 75 bp, synthetic construct
  source 1..75: mol_type = other DNA
cacacctcgttcacgcaatgccgttcctccattcagtcgcagaagccgtgaacacgcagcaaaaaactgccgcga

SEQ ID NO: 459648 - DNA, 75 bp, synthetic construct
  source 1..75: mol_type = other DNA
tctggactggattatacaattcttcgccctgcctggctgactgatgaagatattattgattatgagcttacctca

SEQ ID NO: 459649 - DNA, 75 bp, synthetic construct
  source 1..75: mol_type = other DNA
tacaccctggatacgcgttggatattggcggattaacaaatgcattcagcaattctccgctgtcaccaacagaca

SEQ ID NO: 459650 - DNA, 75 bp, synthetic construct
  source 1..75: mol_type = other DNA
aggactggtcccgtcagctcagtgctgaacttctaaaagcaggtgatgacgtccgcaaattcttcgagcagagca

SEQ ID NO: 459651 - DNA, 75 bp, synthetic construct
  source 1..75: mol_type = other DNA
taacatcccgcctgatcagcagacacctgttaatttgcagcagtttatttttgctggccgacgatcgagagacaa

SEQ ID NO: 459652 - DNA, 75 bp, synthetic construct
  source 1..75: mol_type = other DNA
cgatgattaatgccaactcggtagaggatgagatccgtatccttcgtgagcgttacaaggccaacccggaagcat

SEQ ID NO: 459653 - DNA, 75 bp, synthetic construct
  source 1..75: mol_type = other DNA
cctgtcgttgcggatgatgagaccgacgatcaactcagtggcctaattgggcaacaggttctggtaccgaacgac

SEQ ID NO: 459654 - DNA, 75 bp, synthetic construct
  source 1..75: mol_type = other DNA
ccgaatcttggacgccccccattgcgacagacaaaagttggtggagcatttctttcgataaatggacgttcaaag

SEQ ID NO: 459655 - DNA, 75 bp, synthetic construct
  source 1..75: mol_type = other DNA
tgattgccgcctgtcacgcggcgcaggccagcgcggccattgatattaacgctgacccaaacctgacaggagccg

SEQ ID NO: 459656 - DNA, 75 bp, synthetic construct
  source 1..75: mol_type = other DNA
ccgcaccgccggtggtaatgagccgtatgtttggtgctcaacttttcaacggcaccagcgcggatagcggtgcga

SEQ ID NO: 459657 - DNA, 75 bp, synthetic construct
  source 1..75: mol_type = other DNA
acgagctggcgcatacctatctcaatatgcttacgcatgaggatcgccagcgcctgacgcagatcatttgtggtc

SEQ ID NO: 459658 - DNA, 75 bp, synthetic construct
  source 1..75: mol_type = other DNA
atggcttgccacctgtacatatcattaccgctgaatacgacccactttgcgatgaaggtgaagcgttgtatcacc

SEQ ID NO: 459659 - DNA, 75 bp, synthetic construct
  source 1..75: mol_type = other DNA
ggttgcgccacacgttaccgaaaggatgcttggtcatgagcttggcggggtaatggctgtctataacaagcatga

SEQ ID NO: 459660 - DNA, 75 bp, synthetic construct
  source 1..75: mol_type = other DNA
tgctggaaaacgtatggaccgtaccgaaagagcatagcaagatgggtaatgttatccgccgtccaatcttcgaac

SEQ ID NO: 459661 - DNA, 75 bp, synthetic construct
  source 1..75: mol_type = other DNA
ttgccattttctgcctgctgtgggggccaacaaaaaacatcttcgcgcgctggcttggatcggtaatcaactacg

SEQ ID NO: 459662 - DNA, 75 bp, synthetic construct
  source 1..75: mol_type = other DNA
ccggttcttcaatgcaggcgcttggcaacatgggtagtcatggcatgtttggcggtaatgcgttccggggcggta

SEQ ID NO: 459663 - DNA, 75 bp, synthetic construct
  source 1..75: mol_type = other DNA
ggcaacacgccgaacgactcggcgttgataaacaacgaataactcttgccggtgacagtgcgggcgggcatctgg

SEQ ID NO: 459664 - DNA, 75 bp, synthetic construct
  source 1..75: mol_type = other DNA
atgaactggcgcgagcagtgctggaaggcgtgggttatgcactggcagatggcatggatgtcgtgcatgcctgcg

SEQ ID NO: 459665 - DNA, 75 bp, synthetic construct
  source 1..75: mol_type = other DNA
aacagtggtggcaggcaactgatcgcgcaatgaaagctctgggcgttcagcattctctgcaagacgttaaagcat

SEQ ID NO: 459666 - DNA, 75 bp, synthetic construct
  source 1..75: mol_type = other DNA
ggatttactgcgcctaaattgctatgggttcagcggcatgagccggagatattccgtcaaatcgacaaagtatta

SEQ ID NO: 459667 - DNA, 75 bp, synthetic construct
  source 1..75: mol_type = other DNA
ctgcagcaggatctacgccgagctggcatcgagccgtgggcatgggtcgttaataacagcctggcagctgctcaa

SEQ ID NO: 459668 - DNA, 75 bp, synthetic construct
  source 1..75: mol_type = other DNA
aggcgtggggtatgcgttggcggatggcatggatgtcgtacatgcctgtggcattcaaccgcaaagcattacact

SEQ ID NO: 459669 - DNA, 75 bp, synthetic construct
  source 1..75: mol_type = other DNA
gcattatacgaaggcagcgaaattaccggcactttgctacctgaggttgcaaaagcgtggggaatgaatgcagtg

SEQ ID NO: 459670 - DNA, 75 bp, synthetic construct
  source 1..75: mol_type = other DNA
agcaaattgttgatgccagcaaagggaatgtgaattggcagtggaagcatatgcctctcgatttccataacccga

SEQ ID NO: 459671 - DNA, 75 bp, synthetic construct
  source 1..75: mol_type = other DNA
tctgtacaagaatcggtgagtgcttacgtcactaacctgaatacgcatccggcttacgcgtctttccgcaaatca

SEQ ID NO: 459672 - DNA, 75 bp, synthetic construct
  source 1..75: mol_type = other DNA
taggctggccgccggaacggattcaggaggtcacgggactttccggtgaagaactgaaaaagctgtttcctgatg

SEQ ID NO: 459673 - DNA, 75 bp, synthetic construct
  source 1..75: mol_type = other DNA
ttccgggcttttttgccagcaggagcagagaaaacagtatgacgattgcagaacgtcttgttcaaaaaggcgctc

SEQ ID NO: 459674 - DNA, 75 bp, synthetic construct
  source 1..75: mol_type = other DNA
attctgccggctgttgctaacggattaggccgaactggtcagctgtatgcggacagcaattcgcagatgattatc

SEQ ID NO: 459675 - DNA, 75 bp, synthetic construct
  source 1..75: mol_type = other DNA
acttaccagtacaattgcaggtgcaatcagttacttatttcttaaagcaggattgttagttctggaatctagctc

SEQ ID NO: 459676 - DNA, 75 bp, synthetic construct
  source 1..75: mol_type = other DNA
gcgaaaatacccttccggaacaccaagaaaaaaagcgtttctccggactgtaatgccctatattaccagccaaaa

SEQ ID NO: 459677 - DNA, 75 bp, synthetic construct
  source 1..75: mol_type = other DNA
ttaaataacatacctgctagtgagacaatcagcgcagcaggcatttacagaagcattattaatgatacagagata

SEQ ID NO: 459678 - DNA, 75 bp, synthetic construct
  source 1..75: mol_type = other DNA
ctacagggaaaatgattaccgtatcgcggtaggcaacaagagagtcgattatgctgatgccgcagccagaagcct

SEQ ID NO: 459679 - DNA, 75 bp, synthetic construct
  source 1..75: mol_type = other DNA
cagacaggcaagagtcagctactcggtggtgctcaaccggcacaagccatcatggcggtgatgcgaaaaatgatg

SEQ ID NO: 459680 - DNA, 75 bp, synthetic construct
  source 1..75: mol_type = other DNA
ttggtatgcaacttaacggactggcaaaatcatggcagagaaaaaagaacccgctggcagcggcggccaggcacg

SEQ ID NO: 459681 - DNA, 75 bp, synthetic construct
  source 1..75: mol_type = other DNA
cggtggaagtccggcatcagtcccctggatttgtggcgacacgacatacgcgtggaaacaagaacacggtacgca

SEQ ID NO: 459682 - DNA, 75 bp, synthetic construct
  source 1..75: mol_type = other DNA
tcgccgtaaaaacttcgatttgatgaccggtctggccgttgccactgcgctcggtctgatcatcactttcattct

SEQ ID NO: 459683 - DNA, 75 bp, synthetic construct
  source 1..75: mol_type = other DNA
atgcctgcggcattaaaccgcaaagtgttacgttgattggtggcggggcgcgtagtgagtactggcgtcagatgc

SEQ ID NO: 459684 - DNA, 75 bp, synthetic construct
  source 1..75: mol_type = other DNA
aggtggcttattacaacataaggcaggagtttaattactcaactgaaattactgatttcatgaaagcggtatatt

SEQ ID NO: 459685 - DNA, 75 bp, synthetic construct
  source 1..75: mol_type = other DNA
gcacatttagtggttatcacactgccggttttacagatgacgatcagtatcatctggcgtctattcttgagcgcc

SEQ ID NO: 459686 - DNA, 75 bp, synthetic construct
  source 1..75: mol_type = other DNA
cacctggcatccgttcttgaacatcggtcatcagaaggacatccgatcattgtttctaacagtgacacatccctg

SEQ ID NO: 459687 - DNA, 75 bp, synthetic construct
  source 1..75: mol_type = other DNA
gtaatacgttggcggccatgctaatacgtgaattacgtgctgcgttggaactcttcgaacaagaaggattggcac

SEQ ID NO: 459688 - DNA, 75 bp, synthetic construct
  source 1..75: mol_type = other DNA
atcacctggcatccgttcttgaacatcggtcatcagaaggacatccggtcattatttctaacagtgacacatccc

SEQ ID NO: 459689 - DNA, 75 bp, synthetic construct
  source 1..75: mol_type = other DNA
gaaataaaaccgccattatgtccgaactgaaaaaacatcttcctgctggtccgcgactggttgaacctttcgcgg

SEQ ID NO: 459690 - DNA, 75 bp, synthetic construct
  source 1..75: mol_type = other DNA
gaaatcccggaaggcaacttcttcggcaaaatcattgattacattaagttaatgttccatcactggtttggttaa

SEQ ID NO: 459691 - DNA, 75 bp, synthetic construct
  source 1..75: mol_type = other DNA
gaaatcccggaaggtaacttcttcggcaaaatcattgattatattaaattaatgttccatcactggtttggttaa

SEQ ID NO: 459692 - DNA, 75 bp, synthetic construct
  source 1..75: mol_type = other DNA
gtattaacctgcaatccggtaacgatgcttgtgttgctatggcagactttgccgccggtagtcaggatgcttttg

SEQ ID NO: 459693 - DNA, 75 bp, synthetic construct
  source 1..75: mol_type = other DNA
tgaaaaagaacttcgcacatttgcagaaaaagcccagcgagcaacgtttatctgcgccagatttgatgaaacgct

SEQ ID NO: 459694 - DNA, 75 bp, synthetic construct
  source 1..75: mol_type = other DNA
ctgtttccgggacacgctgctgggtgggatttgattattcgcgtggcgtggatagttcagccgtgtacggagtac

SEQ ID NO: 459695 - DNA, 75 bp, synthetic construct
  source 1..75: mol_type = other DNA
ctaaaattggcgaacgtcaggccaggaactgtataaagagatgcagaaacgtggctgggatgtcaaagaaagcgc

SEQ ID NO: 459696 - DNA, 75 bp, synthetic construct
  source 1..75: mol_type = other DNA
ccgtggattatgtcgctataacaagagcgggcgtttcaacattccgtacggtaattataaaaatccgtatttccc

SEQ ID NO: 459697 - DNA, 75 bp, synthetic construct
  source 1..75: mol_type = other DNA
tagggtggctgggtatgccgctggcgctgtcgttgatggcgcgcggctggcaggtaacgggcagtaaaacgacag

SEQ ID NO: 459698 - DNA, 75 bp, synthetic construct
  source 1..75: mol_type = other DNA
aatgctcgtgaggaaggccttgtcctcgagacggagttatttacctacatctttcagcgagtggcacagaatata

SEQ ID NO: 459699 - DNA, 75 bp, synthetic construct
  source 1..75: mol_type = other DNA
acgaaaaactccgtaaagagatcgaggatttgagggctgccagcgaatcagaccttcagcccggcaccattgatt

SEQ ID NO: 459700 - DNA, 75 bp, synthetic construct
  source 1..75: mol_type = other DNA
ggcattgaaagatccgaagccaacggcgaaagaaacgccgtatgagccgatgccggaaaatgtcgaggagatcgt

SEQ ID NO: 459701 - DNA, 75 bp, synthetic construct
  source 1..75: mol_type = other DNA
ttcgaagttgctttccaggtattacggtagaatattcggtaggaaattaaaaaaaattgatggtttggattttat

SEQ ID NO: 459702 - DNA, 75 bp, synthetic construct
  source 1..75: mol_type = other DNA
ctgaatgttacggaatggtattttgtgaagctgcagcttatggattgccagttgtcgccacagatacaggtggaa

SEQ ID NO: 459703 - DNA, 75 bp, synthetic construct
  source 1..75: mol_type = other DNA
gtcgacggttcagcagagacatgcccatggttggtggggttgacggcaaacagttctacacgggtaatcgatggt

SEQ ID NO: 459704 - DNA, 75 bp, synthetic construct
  source 1..75: mol_type = other DNA
ggagtttaattactccactgatattactgatttcatgaaagcggtatattttctgtatctcaatcgtcatggtta

SEQ ID NO: 459705 - DNA, 75 bp, synthetic construct
  source 1..75: mol_type = other DNA
ggcgatgttgaaggcgggggatgtggtgtattgcgatccgccgtatgacggtacgttttccggctatgacactga

SEQ ID NO: 459706 - DNA, 75 bp, synthetic construct
  source 1..75: mol_type = other DNA
ttgaaatcggagatagcaaaagcgtctaataagtgcgcggatacagcagatgggttaccagatatgcttgcagac

SEQ ID NO: 459707 - DNA, 75 bp, synthetic construct
  source 1..75: mol_type = other DNA
aacaattactggttggcaaagccaggggctgagagttttgtcggggggtggcaaaggcattgaggtcatgttcaa

SEQ ID NO: 459708 - DNA, 75 bp, synthetic construct
  source 1..75: mol_type = other DNA
cagagatttttgagtgcgatgtcagaacaattactggttggcaaagccaggggctgagagttttgtcggggggtg

SEQ ID NO: 459709 - DNA, 75 bp, synthetic construct
  source 1..75: mol_type = other DNA
tggagcttattgtcgctttatggcgcagctaatgaccttttcggcacagggttgtgacaacagcaaagtgagcgt

SEQ ID NO: 459710 - DNA, 75 bp, synthetic construct
  source 1..75: mol_type = other DNA
gatattcctctgcgcggtgtaaagtatttgctgttgagtttttttctctatatcgcgttattgatgcctgctcag

SEQ ID NO: 459711 - DNA, 75 bp, synthetic construct
  source 1..75: mol_type = other DNA
tgaaatatagccttacaacaggtcagttaccgtccgtccataccgctgcaatgctgttactggctgcctttataa

SEQ ID NO: 459712 - DNA, 75 bp, synthetic construct
  source 1..75: mol_type = other DNA
ctacaggcacctaaaggcggacacatctataatatatgtgcgccagctcatcctgcgcgcaatgttttctacccg

SEQ ID NO: 459713 - DNA, 75 bp, synthetic construct
  source 1..75: mol_type = other DNA
tagggtggttaggcatgccgctggcgatgtcactttcagcgcgaggctggcaagtcaccgggagtaaaaccacac

SEQ ID NO: 459714 - DNA, 75 bp, synthetic construct
  source 1..75: mol_type = other DNA
gctgtctcggctatacttcaccggatggtggaattaacgaaaacaacaactggtgtcacatcccgcaagcgaaga

SEQ ID NO: 459715 - DNA, 75 bp, synthetic construct
  source 1..75: mol_type = other DNA
ttgacgactaatggggtttatcatggggagtattatcagaatataccgcttggcgttgaggtaggaaatctccct

SEQ ID NO: 459716 - DNA, 75 bp, synthetic construct
  source 1..75: mol_type = other DNA
aacagttgaagatcgaaccgcgtgagttttcaccgcgtgaagtgatgaaccacatcaccgccaactatttaccgc

SEQ ID NO: 459717 - DNA, 75 bp, synthetic construct
  source 1..75: mol_type = other DNA
ttgcagcgcagcggcatcgtcgttacaacatacgaagggcaggaaccgactcccgaagatgtgttaatcactgac

SEQ ID NO: 459718 - DNA, 75 bp, synthetic construct
  source 1..75: mol_type = other DNA
cgacgcaattattactgttggcaatgaatatttatattgccatcacgttctggtattgggtgcgctattacgaaa

SEQ ID NO: 459719 - DNA, 75 bp, synthetic construct
  source 1..75: mol_type = other DNA
tttgccggtggcggggtccgtattgaaggaagcagcccgtcattatttgtgcggacggatacggtgcgtgctgtg

SEQ ID NO: 459720 - DNA, 75 bp, synthetic construct
  source 1..75: mol_type = other DNA
ttggtcaacgtttaaatcgcaaaggctggattggcctggtcttgctgttggctggaatgattatggtgaagtttg

SEQ ID NO: 459721 - DNA, 75 bp, synthetic construct
  source 1..75: mol_type = other DNA
agctttgaatagtaagttatttctccctcaaatcataaaaaatgcaatattaaataataaaatagatatgtatgt

SEQ ID NO: 459722 - DNA, 75 bp, synthetic construct
  source 1..75: mol_type = other DNA
cgaaatcctttcagcgacagagatgatgactatgtcagtcgtccacctgactggggtaaacggctggaagtcagc

SEQ ID NO: 459723 - DNA, 75 bp, synthetic construct
  source 1..75: mol_type = other DNA
ggttcgtcagttagctgactttgccattcgtcattactggtcacatcttgaagatgatgaggacaaataccgtct

SEQ ID NO: 459724 - DNA, 75 bp, synthetic construct
  source 1..75: mol_type = other DNA
ataatcagcctgccgtcgcgttgtggaatttacagcgtctggcacagacattgtcgccatttatttctgtggatg

SEQ ID NO: 459725 - DNA, 75 bp, synthetic construct
  source 1..75: mol_type = other DNA
cagggatgtggaagacgaatatttcttgcctgagcgcaattctcttttttacctcctgcgcgcaggccgccattg

SEQ ID NO: 459726 - DNA, 75 bp, synthetic construct
  source 1..75: mol_type = other DNA
gacatttatgaatgtcatgattggctacgggattgtcgcttcggtgatgaccaccgacattgacctgtcgaaaga

SEQ ID NO: 459727 - DNA, 75 bp, synthetic construct
  source 1..75: mol_type = other DNA
atttagtagccaatgtgagaactatagtttaactatagctgagttattaaataaaaatggccgagttgtgtggaa

SEQ ID NO: 459728 - DNA, 75 bp, synthetic construct
  source 1..75: mol_type = other DNA
cgcttcatcagaagggcactggtgcaacggaaattgctcatcagctcagtattgcccgctccacggtttataaaa

SEQ ID NO: 459729 - DNA, 75 bp, synthetic construct
  source 1..75: mol_type = other DNA
aaccatgaatgagtttggccatgtctataacaatgtattatcagatatagaaataatgattgataactttagaaa

SEQ ID NO: 459730 - DNA, 75 bp, synthetic construct
  source 1..75: mol_type = other DNA
tcattttatcgactcggtgatcgacagattccgcgataagaaggccattattttctatgcagcggaccacggtga

SEQ ID NO: 459731 - DNA, 75 bp, synthetic construct
  source 1..75: mol_type = other DNA
cgttgctatttatctggatgaaccgctcacaagacaccttctggcgtcagctttgtaccccgaaaacacgctggc

SEQ ID NO: 459732 - DNA, 75 bp, synthetic construct
  source 1..75: mol_type = other DNA
gcttatgctaatgggaaaaaagcatatattaatttagattatgtggtacttgaaactgtggctgatggaagttat

SEQ ID NO: 459733 - DNA, 75 bp, synthetic construct
  source 1..75: mol_type = other DNA
tgcaacagtgccgccgatatgatccaactgataaaggaatttgacgctcagggcgtggcagtccggttcattgat

SEQ ID NO: 459734 - DNA, 75 bp, synthetic construct
  source 1..75: mol_type = other DNA
tttgccggtagcggggtccgtattgaaggaagcagcccgtcattatttgtgcggacggatacggttcgtgccgtg

SEQ ID NO: 459735 - DNA, 75 bp, synthetic construct
  source 1..75: mol_type = other DNA
ccatcgataacggtactgaagggtctgcggtacgtgttggtctgggtactcagttcagcttcaccaagaacttca

SEQ ID NO: 459736 - DNA, 75 bp, synthetic construct
  source 1..75: mol_type = other DNA
atgttgccaaccgatttgttgctgaatatggggtcaactcacggtctggcgatggtcttttccatgctgctggcg

SEQ ID NO: 459737 - DNA, 75 bp, synthetic construct
  source 1..75: mol_type = other DNA
gttaacatgaacgcatcaggatatgaaattactcgtactcgagatgcggtcactaacttcgaacactatttgcaa

SEQ ID NO: 459738 - DNA, 75 bp, synthetic construct
  source 1..75: mol_type = other DNA
cacaaatcattacggttatggcgtatcggatctttgtttcgtataaaaatggcgcgaaaagccactccctgaaca

SEQ ID NO: 459739 - DNA, 75 bp, synthetic construct
  source 1..75: mol_type = other DNA
tggcaatgggaaagtcagtgctggacttcgcaagttaattgaaatggcagatattcctgagttaaaaaatgcatg

SEQ ID NO: 459740 - DNA, 75 bp, synthetic construct
  source 1..75: mol_type = other DNA
ttcagcttcaccaagaacttcagcgcctataccgatgctaactacctcggtggtggtgacgtagatcaagactgg

SEQ ID NO: 459741 - DNA, 75 bp, synthetic construct
  source 1..75: mol_type = other DNA
caaatacttttgatgcgattgctcgtgtcaaaacgatgctgccgggcaatatggaaagctacgagccgttaaacg

SEQ ID NO: 459742 - DNA, 75 bp, synthetic construct
  source 1..75: mol_type = other DNA
cgcctataccgatgctaactacctcggtggtggtgacgtagatcaagactggtccgcgaacgtgggtgttaaata

SEQ ID NO: 459743 - DNA, 75 bp, synthetic construct
  source 1..75: mol_type = other DNA
acgataacgatgtgaacggtgattccatcgataacggtactgaagggtctgcggtacgtgttggtctgggtactc

SEQ ID NO: 459744 - DNA, 75 bp, synthetic construct
  source 1..75: mol_type = other DNA
tggtggacggcggtgggttacagcgtaaaacggtaaccagcatcctgatggcgtgggtgtttactttaccggcgg

SEQ ID NO: 459745 - DNA, 75 bp, synthetic construct
  source 1..75: mol_type = other DNA
ggctggcgtcgtgtagcgatgaccatcggtgagaagattggtaagcgcggcatgacgtatgcgcaaggcatggcg

SEQ ID NO: 459746 - DNA, 75 bp, synthetic construct
  source 1..75: mol_type = other DNA
gggaattgcgcccgccgggtttgtcgtcaatatgaacgcctccggctatgaaattacccgtacccgcgatgctgt

SEQ ID NO: 459747 - DNA, 75 bp, synthetic construct
  source 1..75: mol_type = other DNA
ggcgcaatcatcggtattggtttaaccaatgcgttgatgaccggtacgtcagtggtggatgcactcaatatcccg

SEQ ID NO: 459748 - DNA, 75 bp, synthetic construct
  source 1..75: mol_type = other DNA
ttatatatttcaccccattaccatttagaccaaagttgaatattagagatagtaggtttattaacgcatctccaa

SEQ ID NO: 459749 - DNA, 75 bp, synthetic construct
  source 1..75: mol_type = other DNA
cggcgagaggcaatggcaattatcgcccgctgggatctggcggatcagcttgatgggcagagggacgcggcatga

SEQ ID NO: 459750 - DNA, 75 bp, synthetic construct
  source 1..75: mol_type = other DNA
ggtaaaggcgttcgccaggaagtactggaggccgctaaagacagtccagagttcgaagaactgatggattcctac

SEQ ID NO: 459751 - DNA, 75 bp, synthetic construct
  source 1..75: mol_type = other DNA
ccttgacggcacttatactgatgcctataagtgcccaggggttctcaacattgatccaaatgtcgactggagttg

SEQ ID NO: 459752 - DNA, 75 bp, synthetic construct
  source 1..75: mol_type = other DNA
tgcaagaaaacctgcaaaaaaaactgcacgaggtcctggaagaaaaccggcaaaacaaacagtcagaaattccct

SEQ ID NO: 459753 - DNA, 75 bp, synthetic construct
  source 1..75: mol_type = other DNA
gttagccacagacgttcccaaagactttataactagactaccaattgaaaatgctacgttaagtggttttgcatc

SEQ ID NO: 459754 - DNA, 75 bp, synthetic construct
  source 1..75: mol_type = other DNA
attgtgcatatgctgccgacagatctgctgcttaatatgggatcgtctcatggccttgccatggtgttctctatg

SEQ ID NO: 459755 - DNA, 75 bp, synthetic construct
  source 1..75: mol_type = other DNA
gggtggtctgagtgttgcctatgccattgtgcatatgctgccgacagatctgctgcttaatatgggatcgtctca

SEQ ID NO: 459756 - DNA, 75 bp, synthetic construct
  source 1..75: mol_type = other DNA
ggctccggaagctggcgcaacgcaacccgcggagttccattgccatccgtcgaataccattaacgcgctcaaccg

SEQ ID NO: 459757 - DNA, 75 bp, synthetic construct
  source 1..75: mol_type = other DNA
ccatgcacgggttgatggttacaaacaaacaggtatgcgttttcggtgtgcttatcggtggcgacgacttccgaa

SEQ ID NO: 459758 - DNA, 75 bp, synthetic construct
  source 1..75: mol_type = other DNA
cagtttgaagttaacggtgaaatgcaatactggacgggcagagggcgtaaacctaaagctattgaggaagctata

SEQ ID NO: 459759 - DNA, 75 bp, synthetic construct
  source 1..75: mol_type = other DNA
cgactctgttataccacgctactggaagatggctataaggcaaaagtcgcggttgaacaaggtgttagcaccaaa

SEQ ID NO: 459760 - DNA, 75 bp, synthetic construct
  source 1..75: mol_type = other DNA
gaagacctacgatgaaccgttcagtttccagatgagtgacggtacaaccatcggctatcacatcggcgtggccta

SEQ ID NO: 459761 - DNA, 75 bp, synthetic construct
  source 1..75: mol_type = other DNA
cggactggtagttgtgcatccgatgaccgcgctgggccgtgaaatgggcctgcaagagatgaccggattctctaa

SEQ ID NO: 459762 - DNA, 75 bp, synthetic construct
  source 1..75: mol_type = other DNA
atgaaagaagtcgaaaaaaacgaaatcaaacgtctcagcgatcgcctggacgccatccgtcaccagcaggccgat

SEQ ID NO: 459763 - DNA, 75 bp, synthetic construct
  source 1..75: mol_type = other DNA
gtaaaacagcgcgaagcggaagccaacatgttgcgcgcggaagctgccggacaggcagatgcgattcgcacaaaa

SEQ ID NO: 459764 - DNA, 75 bp, synthetic construct
  source 1..75: mol_type = other DNA
gccatcaacaagtggaacagtacactgccgcaatacatgaccagcggtgccaacacaccatttattcaggttaag

SEQ ID NO: 459765 - DNA, 75 bp, synthetic construct
  source 1..75: mol_type = other DNA
ccaacatgctgcgcgcagaagctgccggacaggctgatgccattcgcacaaaagcccaggctgaagccgacgcca

SEQ ID NO: 459766 - DNA, 75 bp, synthetic construct
  source 1..75: mol_type = other DNA
cctgcgccagaagatagcagatgcactaaatcggctggccagcaaaatgaccactgataaatttatcgacggtgg

SEQ ID NO: 459767 - DNA, 75 bp, synthetic construct
  source 1..75: mol_type = other DNA
ttccagatgagtgacggtacaaccatcggctatcacatcggtgtggcctacaaagttgatccatccaaagttacc

SEQ ID NO: 459768 - DNA, 75 bp, synthetic construct
  source 1..75: mol_type = other DNA
acgacggtgttccagacctatcgcaaaggcgtagacgatatcaccgaatcagatctgcgtcagaaaattgccgac

SEQ ID NO: 459769 - DNA, 75 bp, synthetic construct
  source 1..75: mol_type = other DNA
aatatgccgagctggaaaaagaaaaagccaccctggaagcggaaattgcccgcctgcgtgaagttcacagccaga

SEQ ID NO: 459770 - DNA, 75 bp, synthetic construct
  source 1..75: mol_type = other DNA
aagcaacgcgaagcagaagccaacatgttgcgcgcagaagctgccggacaggctgatgccattcgcacaaaagcc

SEQ ID NO: 459771 - DNA, 75 bp, synthetic construct
  source 1..75: mol_type = other DNA
acggtgtttcagacctaccgcaaaggcgtggatgacattaccgacactgacctgcgccagaagatcgccgacgca

SEQ ID NO: 459772 - DNA, 75 bp, synthetic construct
  source 1..75: mol_type = other DNA
cagaagggctggcggtgctggaggaagacctccgctcaccatgcactgaagagattgccgtcttccaggcattct

SEQ ID NO: 459773 - DNA, 75 bp, synthetic construct
  source 1..75: mol_type = other DNA
ggccatgtgaaacgcgcgccgaaaatctggcaaaaactggggctggagtggctctatcgcctgctttcgcagcca

SEQ ID NO: 459774 - DNA, 75 bp, synthetic construct
  source 1..75: mol_type = other DNA
ggtcatgtgaaacgagcgccagaggcctggcaaaaactggggctggagtggctttatcgcctgctatcacagccg

SEQ ID NO: 459775 - DNA, 75 bp, synthetic construct
  source 1..75: mol_type = other DNA
aggtaagggacgaacaaaaaatccccggtgaatgcctcccgttaaaaaaagtattgctgtacctgaataacgaaa

SEQ ID NO: 459776 - DNA, 75 bp, synthetic construct
  source 1..75: mol_type = other DNA
cggcgaaccacctatgaacttcgacgatgaaatcccctttgcaccagtaactctccccttccctcgtcacgctat

SEQ ID NO: 459777 - DNA, 75 bp, synthetic construct
  source 1..75: mol_type = other DNA
aggcaagagacgagcaaaaaatttctggtgaatgcctcccggtaaaaaaaaaagtatcgctgtacctgaataacg

SEQ ID NO: 459778 - DNA, 75 bp, synthetic construct
  source 1..75: mol_type = other DNA
tgacggtttttcttacagcaggtgagtcacagaatatgattaccggaatttatgacagtaaggcaacctgccttc

SEQ ID NO: 459779 - DNA, 75 bp, synthetic construct
  source 1..75: mol_type = other DNA
cgcttaccactgttaagcgcggtgcgtgaagagcgcctgttgggggtaaaacgtattccccagcgtgattttggt

SEQ ID NO: 459780 - DNA, 75 bp, synthetic construct
  source 1..75: mol_type = other DNA
gcgtaccttgttccggcgtttgttttcgccggttatcgataagctattgtttgctgccactaaagcggaccatgt

SEQ ID NO: 459781 - DNA, 75 bp, synthetic construct
  source 1..75: mol_type = other DNA
acgcttgccgaaacgacccctgtactggaagcggcaaacctgcagcaggatttgcgtcgggctgaaattgaacca

SEQ ID NO: 459782 - DNA, 75 bp, synthetic construct
  source 1..75: mol_type = other DNA
actttattcagcctgggcgctttgttctaccgggggatatggcaggcgcacccgcgctgcaattcttcccgtggc

SEQ ID NO: 459783 - DNA, 75 bp, synthetic construct
  source 1..75: mol_type = other DNA
tactcaatggtcagcgcggcgaatggtcggcgaaatggcgaatgatgtgcgaagggctggacccgttagcgcctg

SEQ ID NO: 459784 - DNA, 75 bp, synthetic construct
  source 1..75: mol_type = other DNA
aggcatttcgtccgcaggtgatggatgtcgacaaaccactaccgcatattcgtcttgatgctgcgctggaatttt

SEQ ID NO: 459785 - DNA, 75 bp, synthetic construct
  source 1..75: mol_type = other DNA
tcggctatcacatcggcgtggcctacaaggttgatccatccaaagttaccacggtgtttcagacttaccgcaaag

SEQ ID NO: 459786 - DNA, 75 bp, synthetic construct
  source 1..75: mol_type = other DNA
gtggtggggcattgaaaattactcagtatgcagtcttcattgtgtatcaggtcgaaaataatcctggcagcatca

SEQ ID NO: 459787 - DNA, 75 bp, synthetic construct
  source 1..75: mol_type = other DNA
cagacaaatatcttcctgcgcggcctgcgcccatgcaccgtaatgcccggttgttgcacccacatcagccagccg

SEQ ID NO: 459788 - DNA, 75 bp, synthetic construct
  source 1..75: mol_type = other DNA
atggctgggctggaaaaacaacgcgagcaatatgctcatgcggttgaggcattatccgatcctgaacgaactcgc

SEQ ID NO: 459789 - DNA, 75 bp, synthetic construct
  source 1..75: mol_type = other DNA
atatcgctctgcatctgcataaagcggaagaacgcggtgaagatctgccgattgccatcacgctcggtaacgatc

SEQ ID NO: 459790 - DNA, 75 bp, synthetic construct
  source 1..75: mol_type = other DNA
cagtatgaattgttgcgtcaacaattgacgatgcagtatatggactggttgccttccacgtttaatgagcaacaa

SEQ ID NO: 459791 - DNA, 75 bp, synthetic construct
  source 1..75: mol_type = other DNA
tttacgccgatgatagacatctggatttcaggaaagcgatgcgtggtgagtacaaactttcacaaatcaatgcct

SEQ ID NO: 459792 - DNA, 75 bp, synthetic construct
  source 1..75: mol_type = other DNA
agcgggtgcgtcggcagtttattctgactagcgcattgtgtggtctggtggtggtcagcctgattgcattgatga

SEQ ID NO: 459793 - DNA, 75 bp, synthetic construct
  source 1..75: mol_type = other DNA
tttattcgccgctgtgagcgggtgcgtcggcagtttattctgaccagcgcattgtgtggtctggtggtggtcagc

SEQ ID NO: 459794 - DNA, 75 bp, synthetic construct
  source 1..75: mol_type = other DNA
ccgctggcgtgaactggaagaacagatccgtaagccaatgagcgaaatcgaaatggttgccgcgatggcgctcga

SEQ ID NO: 459795 - DNA, 75 bp, synthetic construct
  source 1..75: mol_type = other DNA
aatattgtccctgcgcgaaggcagttcagggcaaagtcagacgaagcaagaaaagaccctctcattgcctgctaa

SEQ ID NO: 459796 - DNA, 75 bp, synthetic construct
  source 1..75: mol_type = other DNA
gcgctggcaggagatcgttaaagccagggaagatgatacatcgccatctgttgcagagcgtgcccgccgaaatct

SEQ ID NO: 459797 - DNA, 75 bp, synthetic construct
  source 1..75: mol_type = other DNA
cggcagtttattctgaccagcgcattgtgtggtctggtggtggtaagcctgattgcattgatgatttggcattaa

SEQ ID NO: 459798 - DNA, 75 bp, synthetic construct
  source 1..75: mol_type = other DNA
gtacacccacggcctgctggcgattatctccaccaaaaaacgctacggtggctttgcccgcgcggtgggcctgcg

SEQ ID NO: 459799 - DNA, 75 bp, synthetic construct
  source 1..75: mol_type = other DNA
ttgcatcctgcggcgagtgggcgtgtttacgcggcttatggtggcgtttatgtctgcacggcgttgatgtggctg

SEQ ID NO: 459800 - DNA, 75 bp, synthetic construct
  source 1..75: mol_type = other DNA
acgaattcgtttatattatgagccaaatgtatggaataatgaagactttaaaaaatctcttacaagtaatgcttt

SEQ ID NO: 459801 - DNA, 75 bp, synthetic construct
  source 1..75: mol_type = other DNA
ctaaaataacaacaaatgctatagctggtttctcaacctgctttaaggaagatcaatgctttggtccagagcgca

SEQ ID NO: 459802 - DNA, 75 bp, synthetic construct
  source 1..75: mol_type = other DNA
atgaaaaaaacgttgattagtgcagcgattatttttggttctttatgtctgaccggatgcgatcgggtagagcca

SEQ ID NO: 459803 - DNA, 75 bp, synthetic construct
  source 1..75: mol_type = other DNA
gctctaaaagacatccaggaagaaatgacacccatcggtattcaggtaatgagcctctcatatgtgggtaagcca

SEQ ID NO: 459804 - DNA, 75 bp, synthetic construct
  source 1..75: mol_type = other DNA
aacagcaccagtactccgatgcggttaaagcgctgtccgacgcagctctcacacgcttagtgctggttgcccgag

SEQ ID NO: 459805 - DNA, 75 bp, synthetic construct
  source 1..75: mol_type = other DNA
tggcagttaagcctttgcgtcctagaatgccatctaggccacgggtagttaaaggaagtctggctgaagctactt

SEQ ID NO: 459806 - DNA, 75 bp, synthetic construct
  source 1..75: mol_type = other DNA
ttaaaacgaaacgccagtatctggctgttgcttccggcggggatttcactggcgctgtttgtctggttgttaacg

SEQ ID NO: 459807 - DNA, 75 bp, synthetic construct
  source 1..75: mol_type = other DNA
tcgatgaagacgttgatccgttcaacctgccgcaggtgatgtgggcgctttcgtcgaaagtgaacccggcagggg

SEQ ID NO: 459808 - DNA, 75 bp, synthetic construct
  source 1..75: mol_type = other DNA
atggcgatggcggtttctatctcgacaaagcctgcgtggtttcccgcgatccgctcgacccggataacttcggca

SEQ ID NO: 459809 - DNA, 75 bp, synthetic construct
  source 1..75: mol_type = other DNA
attctgccactgtttcgtttaaacgacggtgatggcggtttctatctcgacaaagcgtgcgtggtttcccgcgat

SEQ ID NO: 459810 - DNA, 75 bp, synthetic construct
  source 1..75: mol_type = other DNA
cggaagtgcaggcggtaaatgccatgtacacccacggcctgctggcgattatctccaccaaaaaacgctacggcg

SEQ ID NO: 459811 - DNA, 75 bp, synthetic construct
  source 1..75: mol_type = other DNA
cccggtcgccactgaacgcttacacagccagggcaacctgtcgcagaccaacaacagcaaagatgtcgcgattaa

SEQ ID NO: 459812 - DNA, 75 bp, synthetic construct
  source 1..75: mol_type = other DNA
gcccggtaagatggattacacctcgcgcccgctggacgttgcgttgcagcaggatggctggctggccgtgcagac

SEQ ID NO: 459813 - DNA, 75 bp, synthetic construct
  source 1..75: mol_type = other DNA
tggatgcaacaggagcctatcaccgggaaatggtgcgacagatggggcaggcacacgaccatgtgattacgccaa

SEQ ID NO: 459814 - DNA, 75 bp, synthetic construct
  source 1..75: mol_type = other DNA
tctttagcattgaacgattattgcgtacaggccttggtttcgtcgtttcaattatgattacaaaagcatacggcg

SEQ ID NO: 459815 - DNA, 75 bp, synthetic construct
  source 1..75: mol_type = other DNA
ataaagcaaatgaaattatttgcaatgaatttatgccagtgctatttgatacttggaaggaaaatagaccgtatt

SEQ ID NO: 459816 - DNA, 75 bp, synthetic construct
  source 1..75: mol_type = other DNA
aattctggtaaatataatccggaatttttctatactctttcaagagcgatagagtttatacgtgatgataacttc

SEQ ID NO: 459817 - DNA, 75 bp, synthetic construct
  source 1..75: mol_type = other DNA
ttggtttgatgctgcgacttatgctgctaactggaatactgcggataccaccgatggtcatgcgatcattaaaag

SEQ ID NO: 459818 - DNA, 75 bp, synthetic construct
  source 1..75: mol_type = other DNA
ttggtttgatgctgcaacttatgcagctaactggaatactgcggataccactgatggtcatgcgatcattaaaag

SEQ ID NO: 459819 - DNA, 75 bp, synthetic construct
  source 1..75: mol_type = other DNA
ttggattatctctattattggtgcaatgtcgctggcttatgtatatgcccgactggcaaccaaaaacccgcagca

SEQ ID NO: 459820 - DNA, 75 bp, synthetic construct
  source 1..75: mol_type = other DNA
aagaatctgcccgcagaaaaaaaagccggatttctggcaactctgattgcaatgaaattaaaaggtgaaatctga

SEQ ID NO: 459821 - DNA, 75 bp, synthetic construct
  source 1..75: mol_type = other DNA
aggcgtgaagcagggcagcgtcagcattgtgggcatgaccgctgacgggaattttgtggctgtggctgcggtgac

SEQ ID NO: 459822 - DNA, 75 bp, synthetic construct
  source 1..75: mol_type = other DNA
acaggccaaagaagaacagtccgatgaagtcgcggcagatgtggaggcagaggtagcggaggatgctgatgctga

SEQ ID NO: 459823 - DNA, 75 bp, synthetic construct
  source 1..75: mol_type = other DNA
acttgtttcaaaaaatataaatcaggatgaaaatgaagatccgatttactggaagctaaaaatgacagttatttg

SEQ ID NO: 459824 - DNA, 75 bp, synthetic construct
  source 1..75: mol_type = other DNA
gtcattatctttgcgctgagtaataagcttttccgccgttgtagcgcccgtgatatgttgctgatctcggcagta

SEQ ID NO: 459825 - DNA, 75 bp, synthetic construct
  source 1..75: mol_type = other DNA
caatatctggggcacggcgtgttctgggtgatggctttagtggcgcttccggcaatgtttttgcgcccgaaagtc

SEQ ID NO: 459826 - DNA, 75 bp, synthetic construct
  source 1..75: mol_type = other DNA
atggttttgcaatccacgcgctggttggcgctcggctatttcacatactttttagttacggctatttttctacct

SEQ ID NO: 459827 - DNA, 75 bp, synthetic construct
  source 1..75: mol_type = other DNA
gccatttactggcaggcagcgggttactcggcttcggcggtgggctatttgtggtcacttggggtggtggcggaa

SEQ ID NO: 459828 - DNA, 75 bp, synthetic construct
  source 1..75: mol_type = other DNA
tcgcgccccgcgtcagcgatccttctcgtctgatttccgcgctgcgggtgctggcgttgctgacgctgctgtttg

SEQ ID NO: 459829 - DNA, 75 bp, synthetic construct
  source 1..75: mol_type = other DNA
ggcatccatgctacttggttttctgattcgcccgaccattcaaccgcaaggggagagccgccagcaggagagcac

SEQ ID NO: 459830 - DNA, 75 bp, synthetic construct
  source 1..75: mol_type = other DNA
tttaaattaagtcttacgcaagacattattgagaacgaagatctaactatccctcaactctcaaactttgatgat

SEQ ID NO: 459831 - DNA, 75 bp, synthetic construct
  source 1..75: mol_type = other DNA
agaagcatttcattaaactcatgagcgatgattatttacaatcagatctaactaaaataatatacatgagcatag

SEQ ID NO: 459832 - DNA, 75 bp, synthetic construct
  source 1..75: mol_type = other DNA
gcttgttatgagaaatctaaagcaggataaaaatcaagatcctatttattggaagctaaagttcacagtgatctg

SEQ ID NO: 459833 - DNA, 75 bp, synthetic construct
  source 1..75: mol_type = other DNA
atgctaataatgcactgaacattcttcctgaagcagcaaacacagctgtagacaacgatgaaaaatatctgtcct

SEQ ID NO: 459834 - DNA, 75 bp, synthetic construct
  source 1..75: mol_type = other DNA
gggctgacgctggatccgactgatgacacacaactctggcaggcgttatcgaaatactttgcctcacaggagaat

SEQ ID NO: 459835 - DNA, 75 bp, synthetic construct
  source 1..75: mol_type = other DNA
gtgaacactgccatgggtgctctgggtacgatggccggtcagaacagtgatgcggtggatatcaccggcggcgcg

SEQ ID NO: 459836 - DNA, 75 bp, synthetic construct
  source 1..75: mol_type = other DNA
ctggatgtataccggcaagggcgatgcgtttgcgaaccctttgtcggacactgactggctgcgtcttgcgatggt

SEQ ID NO: 459837 - DNA, 75 bp, synthetic construct
  source 1..75: mol_type = other DNA
acagcggcggcggcaaactttgccacgctgacagagctggagatagccgaagcggaacaggtgacaaccatcaac

SEQ ID NO: 459838 - DNA, 75 bp, synthetic construct
  source 1..75: mol_type = other DNA
agtgatgcaggtaagcgcaatggcggaccagatgctgctggatgccaaaaatccgcaaagcgcgggcaatcggcg

SEQ ID NO: 459839 - DNA, 75 bp, synthetic construct
  source 1..75: mol_type = other DNA
gaagagacggagaaaaaagcgcgcgacgtcaacgagaaaacggcgctgctgaagaagaaatccgccaccgagctt

SEQ ID NO: 459840 - DNA, 75 bp, synthetic construct
  source 1..75: mol_type = other DNA
cgctgacagagcgggagattgcggaagcggaacaggtgacaaccatcaacgttaaaaccggagagcagacagcat

SEQ ID NO: 459841 - DNA, 75 bp, synthetic construct
  source 1..75: mol_type = other DNA
catgactgagcacaccttaaaggtggcaatcagaacgatagaccgccacacgcgggaaggatacgcgaaggaaca

SEQ ID NO: 459842 - DNA, 75 bp, synthetic construct
  source 1..75: mol_type = other DNA
tcgcgctttgcgattcagggactccggcgccacaccgactgggagcttgcgcgcaatcgccattacattacccat

SEQ ID NO: 459843 - DNA, 75 bp, synthetic construct
  source 1..75: mol_type = other DNA
cgtcacctggagtcagtagtaaccaataagatcagcgagattgaagccgatctggaaaaactaacgcgtaaataa

SEQ ID NO: 459844 - DNA, 75 bp, synthetic construct
  source 1..75: mol_type = other DNA
ctgattcagaaagtggtggatgaatcgaaaagcgtggcctcagccgttttctacaagcaaatcaaaatactgcat

SEQ ID NO: 459845 - DNA, 75 bp, synthetic construct
  source 1..75: mol_type = other DNA
tcacagcgaaccacctatggagtttgacgacgatataccttttgcgccagtaaccctccccttccctcgtcacgc

SEQ ID NO: 459846 - DNA, 75 bp, synthetic construct
  source 1..75: mol_type = other DNA
gaaacctgccaccgtggcggtgccggaagagacggagaaaaaagcccgcgacgtcaacgagaaaacggcgctact

SEQ ID NO: 459847 - DNA, 75 bp, synthetic construct
  source 1..75: mol_type = other DNA
aatccgcaaagcgcgggcaaccgacgcattgagattatggtgctgaccaaaagtgcgtccgatacgctgtatcaa

SEQ ID NO: 459848 - DNA, 75 bp, synthetic construct
  source 1..75: mol_type = other DNA
aagcgcaatggcggaccagatgctgctggatgccaaaaatccgcaagcgcgggcaatcgacgcattgagattatg

SEQ ID NO: 459849 - DNA, 75 bp, synthetic construct
  source 1..75: mol_type = other DNA
cagcaccaaaatataaagcgttagacatgacagagcacgccttaaaggtggcaatcagaacgatagaccgccacg

SEQ ID NO: 459850 - DNA, 75 bp, synthetic construct
  source 1..75: mol_type = other DNA
accattatcgccagtaaaatggatttggcgattcaggatcatcgcggccagaaaaccttttttaaggatgccttt

SEQ ID NO: 459851 - DNA, 75 bp, synthetic construct
  source 1..75: mol_type = other DNA
aaactggaaccttaaaacaaatctgctcgccggatgtctgactcatccggcttttatcatcatgttgatgaatga

SEQ ID NO: 459852 - DNA, 75 bp, synthetic construct
  source 1..75: mol_type = other DNA
gaactggcaagagcgcttgatgtcgcgccttccactgttcagcgactggtttcaggtaatgcgacaatatctcct

SEQ ID NO: 459853 - DNA, 75 bp, synthetic construct
  source 1..75: mol_type = other DNA
ggtttaatgcgaaagagctggaagggatgcctggtgtaccaaagttggcgactaacattaccaggaaagctgtgg

SEQ ID NO: 459854 - DNA, 75 bp, synthetic construct
  source 1..75: mol_type = other DNA
atattcgccgaatcgatatactgccgtaccaccagctggggcgcaaaaagtatgaacgactggagatgccctacc

SEQ ID NO: 459855 - DNA, 75 bp, synthetic construct
  source 1..75: mol_type = other DNA
agcgaacttcgcaactgtcttaaaaatctcgaaacctctgccctgagcgataaagagacgctctcgtcagttgat

SEQ ID NO: 459856 - DNA, 75 bp, synthetic construct
  source 1..75: mol_type = other DNA
cagcaccaaaatatcgcgcattagacatgacagagcacgccttaaaggtggcaatcagaacgatagaccgccacg

SEQ ID NO: 459857 - DNA, 75 bp, synthetic construct
  source 1..75: mol_type = other DNA
aagcgcattcatgaccacagcggcggcaaactttgccacgctgacagaacgggagattgccgaagcggaacaggt

SEQ ID NO: 459858 - DNA, 75 bp, synthetic construct
  source 1..75: mol_type = other DNA
atgcgcatacatcaaaatcacttaacaaacatgccagccgaaaacatgaatcaggggcgacaaatgaccaaaatt

SEQ ID NO: 459859 - DNA, 75 bp, synthetic construct
  source 1..75: mol_type = other DNA
atacagcaggcataagcgatgaaacccgtcgcgccctggacaatgaatatcaaaaactggagcgcgaactcgagc

SEQ ID NO: 459860 - DNA, 75 bp, synthetic construct
  source 1..75: mol_type = other DNA
gcagctgcaaactttgccacgctgacagaacgggagatcgcagaagcagaacaggtaacaaccatcaacgttaaa

SEQ ID NO: 459861 - DNA, 75 bp, synthetic construct
  source 1..75: mol_type = other DNA
catcccgaactgataagcgcattcatgaccacggcggcggcaaactttgccacgctgacagaacgggagattgcc

SEQ ID NO: 459862 - DNA, 75 bp, synthetic construct
  source 1..75: mol_type = other DNA
atggaaaattttatctaaagaaaacaaatgatgattcaaaagaacttgcatacactttgtcgcttctcctagcag

SEQ ID NO: 459863 - DNA, 75 bp, synthetic construct
  source 1..75: mol_type = other DNA
gcaatcagcgcttggttcataatatcctcccagacactcaacctgctgacagtctgctggtagtggaagtatata

SEQ ID NO: 459864 - DNA, 75 bp, synthetic construct
  source 1..75: mol_type = other DNA
ccaccagggctggaaatattcaacatatttctccgcaaaacgcaggctgggagtatgtcggttttgatgtctggc

SEQ ID NO: 459865 - DNA, 75 bp, synthetic construct
  source 1..75: mol_type = other DNA
gtagcccagggatataaaccttccgggtacaacatcatcgtgcctactgcgggtcttgatgccaaaccgttcgtc

SEQ ID NO: 459866 - DNA, 75 bp, synthetic construct
  source 1..75: mol_type = other DNA
aaagaaaataaatgatgactccaaagaacttgtatacactttgtcacttctcctggcaggtaaaaatttaacacc

SEQ ID NO: 459867 - DNA, 75 bp, synthetic construct
  source 1..75: mol_type = other DNA
aagctaaatgtaaaaagacgatatgatacaacctatgggacttacactataaacatcacagttaatttaactgat

SEQ ID NO: 459868 - DNA, 75 bp, synthetic construct
  source 1..75: mol_type = other DNA
ttgagtgtcagagaaatagtgacgcagatagctatacccagagggatcactatcggcgctttgtactttgtgcgg

SEQ ID NO: 459869 - DNA, 75 bp, synthetic construct
  source 1..75: mol_type = other DNA
attttacctacgcagacctaaatcaaatactggtaggatatgaacgcctttctgcggcctcagagtatgccataa

SEQ ID NO: 459870 - DNA, 75 bp, synthetic construct
  source 1..75: mol_type = other DNA
gataatcactaaagacattccatacaactccagtactaaggttctgtggccttcgccgaatggcgtaatttaccc

SEQ ID NO: 459871 - DNA, 75 bp, synthetic construct
  source 1..75: mol_type = other DNA
attaagcaatgcgggtaaagccgacgccaccggcgttgagcttgaagcgaagtggcggtttgcgccaggctggtc

SEQ ID NO: 459872 - DNA, 75 bp, synthetic construct
  source 1..75: mol_type = other DNA
tgatatggtgtttgggctgtaccggcagaacacccgcgagaagttaaattcagcctacgacatgccgacaatgcc

SEQ ID NO: 459873 - DNA, 75 bp, synthetic construct
  source 1..75: mol_type = other DNA
tggccttggggggattattgctccccgccattgctaatgcccagacttcacagcaagacgaaagcacgctggtgg

SEQ ID NO: 459874 - DNA, 75 bp, synthetic construct
  source 1..75: mol_type = other DNA
actctcacatatatacatgtgagaagcagcatgctaatggaacaaaactgtccatggatattccagcaggcgaac

SEQ ID NO: 459875 - DNA, 75 bp, synthetic construct
  source 1..75: mol_type = other DNA
aaaatgacattgcaatttattatttgtttcgtcagatgagtttgtgcatattaatatttctggcattggtgaata

SEQ ID NO: 459876 - DNA, 75 bp, synthetic construct
  source 1..75: mol_type = other DNA
aacgacacctgggggcatccggttggcgatcaggtgataaaaacagtggtgaatatcattgggaaaagcatacga

SEQ ID NO: 459877 - DNA, 75 bp, synthetic construct
  source 1..75: mol_type = other DNA
ggcggcgaagagtttggcgtcttgctgacggacatcgatactgaacgtgcgaaagctttagcggaaaggattcgg

SEQ ID NO: 459878 - DNA, 75 bp, synthetic construct
  source 1..75: mol_type = other DNA
atgctgccctcgccggggtagacagtacgatcgttgaagtgatgggactctgtgcgcagttcacctcgggggcac

SEQ ID NO: 459879 - DNA, 75 bp, synthetic construct
  source 1..75: mol_type = other DNA
ccggtggtattaaatctcgatcacgggctgcattttgaatcggtggtgcaagcgttgcggctgggattcaactcg

SEQ ID NO: 459880 - DNA, 75 bp, synthetic construct
  source 1..75: mol_type = other DNA
aacaaattcaaatcccttgcacaatttcttctggatggagatcatgaaaatttcagaaaagatgtcttagctctt

SEQ ID NO: 459881 - DNA, 75 bp, synthetic construct
  source 1..75: mol_type = other DNA
atctgacgtcggaaatggtgaaagagcggctattgtcgccgcgttttcgcaaccgtcagtttgccggattactgc

SEQ ID NO: 459882 - DNA, 75 bp, synthetic construct
  source 1..75: mol_type = other DNA
atggcgaaccgtgcgaacgctgcggcggtatcattgagaaaaccacgttatcctcgcgcccgttttactggtgtc

SEQ ID NO: 459883 - DNA, 75 bp, synthetic construct
  source 1..75: mol_type = other DNA
tggcaattatttgcgggtggagatcctctggcaggttgggttgactggaaatcataaagcgaaagatctcaatgc

SEQ ID NO: 459884 - DNA, 75 bp, synthetic construct
  source 1..75: mol_type = other DNA
gatacggttcgtgccgtgcggcgtggtgacacgctgaccattaatggtgagacattctgggtggatcgtgtttct

SEQ ID NO: 459885 - DNA, 75 bp, synthetic construct
  source 1..75: mol_type = other DNA
gtatcgggtgataaaatgaatatgtgtaagggggttactaaacatccagatggatatgtttattacggtgataca

SEQ ID NO: 459886 - DNA, 75 bp, synthetic construct
  source 1..75: mol_type = other DNA
cgctgtggcagcatcattgagaaaaccacgttgtcctcgcgcccgttttactggtgtccaggctgccagcactag

SEQ ID NO: 459887 - DNA, 75 bp, synthetic construct
  source 1..75: mol_type = other DNA
gaagctgttgaaggctatgaccaggtattgaacgaaacaacttcaggtatgctggttgcagcggcttcacttctg

SEQ ID NO: 459888 - DNA, 75 bp, synthetic construct
  source 1..75: mol_type = other DNA
gggcgatgagattatggttctgccgaaatatgaatcgaaaaacattgaagttactcgtggtatttccaccatcct

SEQ ID NO: 459889 - DNA, 75 bp, synthetic construct
  source 1..75: mol_type = other DNA
tccgcagttcaaaaagctgatggatgataccatcgctcaggtgcagacctccggtgaagcggaaaaatggtttga

SEQ ID NO: 459890 - DNA, 75 bp, synthetic construct
  source 1..75: mol_type = other DNA
ttctctgacactattttcgtggtcggtacgcgcctgttgaccaaaaagggtggcgatatcaaagatttcgccgat

SEQ ID NO: 459891 - DNA, 75 bp, synthetic construct
  source 1..75: mol_type = other DNA
attatagtaaaaaatttgcaatgagcatcttggatgcaacaccgtcatcgatgatagtaaataatgatcttaccc

SEQ ID NO: 459892 - DNA, 75 bp, synthetic construct
  source 1..75: mol_type = other DNA
atagtattctatgacaaagataaagatgtcactaagatacttgatggccatttaagggttgaggctttaaaagac

SEQ ID NO: 459893 - DNA, 75 bp, synthetic construct
  source 1..75: mol_type = other DNA
atgaaattattgaaatcaattttactgattgccgcctgtcacgcggcgcaggccagcgcggccattgatattaac

SEQ ID NO: 459894 - DNA, 75 bp, synthetic construct
  source 1..75: mol_type = other DNA
atggcgaaaacaactaaatcgttccttgcgctgctgcgcggcggcaatctcggcgtgccgctggtcatactgtgt

SEQ ID NO: 459895 - DNA, 75 bp, synthetic construct
  source 1..75: mol_type = other DNA
atgttcgtgctggcggtggtgccgggaatgccgcatttcccgttcctgatgttcagcgccctgcttggttttacc

SEQ ID NO: 459896 - DNA, 75 bp, synthetic construct
  source 1..75: mol_type = other DNA
gcgtaaatgcagaggttatgactgcagatacgcctgcggaagaacgccaaaccatcattcaccgcttcgaaactg

SEQ ID NO: 459897 - DNA, 75 bp, synthetic construct
  source 1..75: mol_type = other DNA
tcgaacctatcagtttaagcctcggctacaaactggtggcgctggtggataaagcgcagggtaatccgctcaccc

SEQ ID NO: 459898 - DNA, 75 bp, synthetic construct
  source 1..75: mol_type = other DNA
gtcagttgggaaactattccgctgatcgaacctatcagtttaagcctcggctacaaactggtggcgctggtggat

SEQ ID NO: 459899 - DNA, 75 bp, synthetic construct
  source 1..75: mol_type = other DNA
tcgaacctatcagtttaagcctcggctacaaactggtggcgctggtggataaagcgcagggcaacccgctcaccc

SEQ ID NO: 459900 - DNA, 75 bp, synthetic construct
  source 1..75: mol_type = other DNA
aaatcaccccggtattttttggtactgcgctgggtaacttcggcgtggatcatatgctggacgggctggtggagt

SEQ ID NO: 459901 - DNA, 75 bp, synthetic construct
  source 1..75: mol_type = other DNA
cacgtaccggcaactggccactgtgggtgctgacggcactgtttggttttgccgctgtgctgatgagtctgcgag

SEQ ID NO: 459902 - DNA, 75 bp, synthetic construct
  source 1..75: mol_type = other DNA
tgctgatgatggttagcggcctgctggcactggcgttggtcaaacgcaactggcgtccgctggtggtggccgtcg

SEQ ID NO: 459903 - DNA, 75 bp, synthetic construct
  source 1..75: mol_type = other DNA
cacgtaccggcaactggccgctgtgggtactgacggcattgtttggttttgctgctgtgctgatgagcctgcgtc

SEQ ID NO: 459904 - DNA, 75 bp, synthetic construct
  source 1..75: mol_type = other DNA
tggaactggcacgcccgttgctgcgcagtaccaataacggcattacggcagtgattggtccgcagggtgagattc

SEQ ID NO: 459905 - DNA, 75 bp, synthetic construct
  source 1..75: mol_type = other DNA
attgccgctcctgctctctggcaagtgaccgagtttctgcgcggttgggtgctgactggcttcccgtggttacag

SEQ ID NO: 459906 - DNA, 75 bp, synthetic construct
  source 1..75: mol_type = other DNA
cacgtaccggcaactggccgctgtgggtgctgacggcactgtttggttttgccgctgtgttgatgagtctgcgtc

SEQ ID NO: 459907 - DNA, 75 bp, synthetic construct
  source 1..75: mol_type = other DNA
cggcttcctgatccgcattattgagtggtggcagaccggagaaataccaggcacgtttcgcctggatatcggcgt

SEQ ID NO: 459908 - DNA, 75 bp, synthetic construct
  source 1..75: mol_type = other DNA
gtcctgtatgaaatggacggtgttccggaagagctggcccgtgaagcattcaagctggcagcagcgaaactgccg

SEQ ID NO: 459909 - DNA, 75 bp, synthetic construct
  source 1..75: mol_type = other DNA
acttgctcgacaccccggggcacgaagacttctcggaagatacctatcgtaccctgacggcggtggactgctgcc

SEQ ID NO: 459910 - DNA, 75 bp, synthetic construct
  source 1..75: mol_type = other DNA
cgttaaaagggctggcaccgataatgggcgtggaagccattaacttcctgctgatgatggttagcggcctgctgg

SEQ ID NO: 459911 - DNA, 75 bp, synthetic construct
  source 1..75: mol_type = other DNA
cacgtaccggcaactggccgctgtgggtacttacggcgctgtttggttttgccgccgtgttgatgagtctgcgtc

SEQ ID NO: 459912 - DNA, 75 bp, synthetic construct
  source 1..75: mol_type = other DNA
ccggctcatcaccgcttgaaattgctgccgcgaaagcctgtgcagaaattgaaaaaacgccggtcagtattcgtg

SEQ ID NO: 459913 - DNA, 75 bp, synthetic construct
  source 1..75: mol_type = other DNA
gagttcgacgtccaaacgcaagtcctgttacggactcgtgagaaactggcgctgcttgaacaaagaatcagcgaa

SEQ ID NO: 459914 - DNA, 75 bp, synthetic construct
  source 1..75: mol_type = other DNA
ggggaagatgtggagaaaaaaatccgccaaaccctacaagcgcagctgacgcgtctcgatctggtaagccgcgaa

SEQ ID NO: 459915 - DNA, 75 bp, synthetic construct
  source 1..75: mol_type = other DNA
atccgccaggcgatgctggcccgtgccggatttgaaaatgtcgagaaggataacgcctataacgggatgaccctg

SEQ ID NO: 459916 - DNA, 75 bp, synthetic construct
  source 1..75: mol_type = other DNA
aaaagcgaatagctgacttgttacctatttgggaaagcaaaataggtgtcactgtcgacgcttggggcgtgagaa

SEQ ID NO: 459917 - DNA, 75 bp, synthetic construct
  source 1..75: mol_type = other DNA
atccgtcgtatcccttggattaaacagcagcagaataattttataaaacaaccccgccaatcagaacgcgaaatg

SEQ ID NO: 459918 - DNA, 75 bp, synthetic construct
  source 1..75: mol_type = other DNA
gtgcctttctcttattacgacaatcagcaaaaagtggtgggttactcgcaggattactccaacgccattgttgaa

SEQ ID NO: 459919 - DNA, 75 bp, synthetic construct
  source 1..75: mol_type = other DNA
atttgtcctggtccccgccgcgctggagtctgccgcacatcgcgccattctgtcatcgtcatcactctttccggt

SEQ ID NO: 459920 - DNA, 75 bp, synthetic construct
  source 1..75: mol_type = other DNA
ctgttgatggtgtcgcctggaaggtgcgcatagatgcaggtgtcgcggccctcgattatcgtggactactgaaat

SEQ ID NO: 459921 - DNA, 75 bp, synthetic construct
  source 1..75: mol_type = other DNA
atgatggaggcggaaacctggatggatggcaatgagtgtaaggcgaacggcttcgcagatgaggttatacccgcg

SEQ ID NO: 459922 - DNA, 75 bp, synthetic construct
  source 1..75: mol_type = other DNA
attttttccgttacccgtcaggccattatcaacgatgacctgacccagttaactacaatccccatggcgatggga

SEQ ID NO: 459923 - DNA, 75 bp, synthetic construct
  source 1..75: mol_type = other DNA
gaaatggcccgtgaacgcctgcttaaagaaatgggtaagaaccacacaccaaccaataaaaatattccgtctcat

SEQ ID NO: 459924 - DNA, 75 bp, synthetic construct
  source 1..75: mol_type = other DNA
ttgaaggcatcgccatctataacctgttacggaatcatccggcagaaattacggtttatatcgatggtgttgcgg

SEQ ID NO: 459925 - DNA, 75 bp, synthetic construct
  source 1..75: mol_type = other DNA
aagcctatatggataagctacttcctgattggcaagaacgcaaagacttgctgaataaagcaccgttggcttaca

SEQ ID NO: 459926 - DNA, 75 bp, synthetic construct
  source 1..75: mol_type = other DNA
aaatggttgccgcgatggctcttgaagcagttcgtcagcagaaacggatcactcaggtggaagaaaaagtcagcc

SEQ ID NO: 459927 - DNA, 75 bp, synthetic construct
  source 1..75: mol_type = other DNA
ggttatgcatcggtatggtgccgacacatttcgccaaaccgtggcttaatgaggggaagtgggtagctctagaac

SEQ ID NO: 459928 - DNA, 75 bp, synthetic construct
  source 1..75: mol_type = other DNA
acgtcacggacgctgcccaaacgtattacctggctgctcgataaccaaaagcgcctggttgtcccggactgggaa

SEQ ID NO: 459929 - DNA, 75 bp, synthetic construct
  source 1..75: mol_type = other DNA
ccgcgatggctcttgaagccgttcgtcagcaaaaacgcctcgacaagatggaagaaaaagtcagtcacgttactg

SEQ ID NO: 459930 - DNA, 75 bp, synthetic construct
  source 1..75: mol_type = other DNA
gtctcgtcgcgcgattgttgcagtagaacccttcatgtttgcttttcatcgcatgatgagtgaagcagaaccacg

SEQ ID NO: 459931 - DNA, 75 bp, synthetic construct
  source 1..75: mol_type = other DNA
ctgaattcactgctcgcctggtagatcgctggcgcgaactggaagaacagatccgtaagccaatgagcgaaatcg

SEQ ID NO: 459932 - DNA, 75 bp, synthetic construct
  source 1..75: mol_type = other DNA
aaaggtatggagctgggagcgccagcgggactggctggcctccaatgggtatgagttcgtgaagattgatgaggt

SEQ ID NO: 459933 - DNA, 75 bp, synthetic construct
  source 1..75: mol_type = other DNA
cagaagaatggttacgtcagcgttacatggttgacctgatgagaaaagaagacattgccgccgaagctggttgca

SEQ ID NO: 459934 - DNA, 75 bp, synthetic construct
  source 1..75: mol_type = other DNA
aatttagagcttgctaaaaagccaccggagtgtttggagtacatcctagtgcatgaattggtgcacttgcttgag

SEQ ID NO: 459935 - DNA, 75 bp, synthetic construct
  source 1..75: mol_type = other DNA
caagcaaagatttaacgaattcttatatgaatggaatgggaaaaaagaatacagtagttacttgggaacaccaaa

SEQ ID NO: 459936 - DNA, 75 bp, synthetic construct
  source 1..75: mol_type = other DNA
aagccgctatctttacgacccgctgggccgcagggtggcaaaacgggtatggcgacgtgaacgggacctgacggg

SEQ ID NO: 459937 - DNA, 75 bp, synthetic construct
  source 1..75: mol_type = other DNA
accgataccgggcgcgcctggcttggaaaagcgttgccagcacgaaaaagcgatccgcgtaaagagctgctggaa

SEQ ID NO: 459938 - DNA, 75 bp, synthetic construct
  source 1..75: mol_type = other DNA
attcattcacccggtggcgatgtttttgacggcatcgctatctataaccttctgaataaacacccggcaaaaatt

SEQ ID NO: 459939 - DNA, 75 bp, synthetic construct
  source 1..75: mol_type = other DNA
atgtcaaaacattgtgaaaattgcggatgcgcaatccgatccggatattgcacaaactgccaggaagaagcgttt

SEQ ID NO: 459940 - DNA, 75 bp, synthetic construct
  source 1..75: mol_type = other DNA
gattcaataaaagaatcggtggtgaagtgcagattagtgctgatatccgtgtcaatgacttaatgacagaaggtg

SEQ ID NO: 459941 - DNA, 75 bp, synthetic construct
  source 1..75: mol_type = other DNA
gtagatataattcagcagcatgtaataaccattaataataagctctggaagaaattcgtaaaacaagccatgacg

SEQ ID NO: 459942 - DNA, 75 bp, synthetic construct
  source 1..75: mol_type = other DNA
agcactaatggcggtgccgggctggagatggcttatcagcaggcagcgaaggggtttattaaaggtggcgtcaat

SEQ ID NO: 459943 - DNA, 75 bp, synthetic construct
  source 1..75: mol_type = other DNA
aaaagccttagtccagcaagaagcgcaacaatcctcagacaaacaagctttacaggggcgattgcaggaagcgcc

SEQ ID NO: 459944 - DNA, 75 bp, synthetic construct
  source 1..75: mol_type = other DNA
tgaatacctgaataatacatcctggcagcagatcgaacagtgggcgcggcaagcgaaaggaccggatcaacaagg

SEQ ID NO: 459945 - DNA, 75 bp, synthetic construct
  source 1..75: mol_type = other DNA
gcgacagcgttggctatgaaacgcttggtcgcatctggcagtggctgaaaggttcgtcaggcgagccacggcaag

SEQ ID NO: 459946 - DNA, 75 bp, synthetic construct
  source 1..75: mol_type = other DNA
cttatacacaagtccccgaatccggggatttgttatttcagccaaactgctttcagttgttgcgtgtggctacgc

SEQ ID NO: 459947 - DNA, 75 bp, synthetic construct
  source 1..75: mol_type = other DNA
gagatgttctgggtggaccgtgtttctccggatgacggagggagttgttatctctggctcaaccgtgggcaacca

SEQ ID NO: 459948 - DNA, 75 bp, synthetic construct
  source 1..75: mol_type = other DNA
atgctgcccttgccggggtggacagtacgattgttgaagtgatggggctctgtgcgcagttcacctcgggggcac

SEQ ID NO: 459949 - DNA, 75 bp, synthetic construct
  source 1..75: mol_type = other DNA
tgccggtagcggggtccgtattgaaggaagcagcccgtcattatttgtgcggacggatacggttcgtgccgtgcg

SEQ ID NO: 459950 - DNA, 75 bp, synthetic construct
  source 1..75: mol_type = other DNA
tggatttgccaaaagataccgaagaagaagcagccgcagtgaaacaggccattggtgacgcccctttcctgctgg

SEQ ID NO: 459951 - DNA, 75 bp, synthetic construct
  source 1..75: mol_type = other DNA
cagcgaaatcggacaaagcgaaagagctggcatggttaaagatacgctggaaataccctcagggaaaagaaagtc

SEQ ID NO: 459952 - DNA, 75 bp, synthetic construct
  source 1..75: mol_type = other DNA
agggtagcgccagaattgacggcgtaccgggtactgccgcaccggttgcgctcactttcctgaatgccgccggaa

SEQ ID NO: 459953 - DNA, 75 bp, synthetic construct
  source 1..75: mol_type = other DNA
ctgcggcaatatgctgtctggggttggggcattcgccattgaaaatggtttgattgcagcgacttcgccagttac

SEQ ID NO: 459954 - DNA, 75 bp, synthetic construct
  source 1..75: mol_type = other DNA
tgatatggccatgccggttgtcattattcccgctgactatctgggaaaaacaggctatgaatcgcctgcggaact

SEQ ID NO: 459955 - DNA, 75 bp, synthetic construct
  source 1..75: mol_type = other DNA
gaaaggggaaacccttacgccatgatgagtctgtttgaaatggcgcaggcttcgctggtggatcgtggtatcagc

SEQ ID NO: 459956 - DNA, 75 bp, synthetic construct
  source 1..75: mol_type = other DNA
ctgtttgcgcaggtaatcgttcatgagcaacgtgtcgataccacgcctaactgcggcaatatgctgtctggtgtt

SEQ ID NO: 459957 - DNA, 75 bp, synthetic construct
  source 1..75: mol_type = other DNA
cctgtgcttatttctccagcgcagaaaggcgggcaattaatgtgcgttattttatgccgcattcttgccatcgcg

SEQ ID NO: 459958 - DNA, 75 bp, synthetic construct
  source 1..75: mol_type = other DNA
gcgcattgcggcggcgctggcgccgtctgctggaaaagcgcatcgggaactggcggcttctggccgacgaatacg

SEQ ID NO: 459959 - DNA, 75 bp, synthetic construct
  source 1..75: mol_type = other DNA
ttgatctgactaatttttcaggaagggttttctttctggcagaccctcatggtcattattcgacgctatgtaacc

SEQ ID NO: 459960 - DNA, 75 bp, synthetic construct
  source 1..75: mol_type = other DNA
tgaaagggcaaaaagcatcaattgataagttacgctatgcccggataacaaatcagcgaaatcggacaaaacaaa

SEQ ID NO: 459961 - DNA, 75 bp, synthetic construct
  source 1..75: mol_type = other DNA
tcgctatatagagatattattattccgttgacggatgaatcatgccgtaacgcagccgcagacgggcaaactttg

SEQ ID NO: 459962 - DNA, 75 bp, synthetic construct
  source 1..75: mol_type = other DNA
tgttgtcttgttcgttgttcttatcgtcggcatggggatgtcggctttccgcgcctgaacataatatttaccaga

SEQ ID NO: 459963 - DNA, 75 bp, synthetic construct
  source 1..75: mol_type = other DNA
agtgtaaaatatcatatgaatttcccgaatatacatctaaaaaaaatgaagccgcagagttagtaattgacttca

SEQ ID NO: 459964 - DNA, 75 bp, synthetic construct
  source 1..75: mol_type = other DNA
aaatttgcgggtagctttaaactactcacaaaatccagtctcccccaaagcgcgctctctcatcctgtggacaga

SEQ ID NO: 459965 - DNA, 75 bp, synthetic construct
  source 1..75: mol_type = other DNA
ttatcggtgctgtggttcgtggaaatgatgtcatgatagccaatgataatttgcgcattgagcaaggcgatcacg

SEQ ID NO: 459966 - DNA, 75 bp, synthetic construct
  source 1..75: mol_type = other DNA
gtgatggttttgatccagcgtcgcgcttatgtggatttggttcagggaagcgtgatcgatattgcaatttctccc

SEQ ID NO: 459967 - DNA, 75 bp, synthetic construct
  source 1..75: mol_type = other DNA
gaacatatgccgcatattgacacccgcgtcgctgcaattttccgccatgatcgccccattcgcccacaaggatca

SEQ ID NO: 459968 - DNA, 75 bp, synthetic construct
  source 1..75: mol_type = other DNA
atccacgcgaccagaagcatctgaccgatgaagaacgcgactatattattaatggtcaggaagcccagcaccagg

SEQ ID NO: 459969 - DNA, 75 bp, synthetic construct
  source 1..75: mol_type = other DNA
tggaccgtgttgcagaacaaaccggcgattgaggtggcgcaggaatcacataacgatcccgcaccgcaacattaa

SEQ ID NO: 459970 - DNA, 75 bp, synthetic construct
  source 1..75: mol_type = other DNA
cggtttggtggaggttagatgcaggagaacgaacgaacaaggccaggataacagcagggataacatgtactggca

SEQ ID NO: 459971 - DNA, 75 bp, synthetic construct
  source 1..75: mol_type = other DNA
ctctgcgggtagcgacattcgtgttccgctgccgccgctgacggaagaacgtcgtaaagatctgaccaaaatcgt

SEQ ID NO: 459972 - DNA, 75 bp, synthetic construct
  source 1..75: mol_type = other DNA
ggaatattacggcacgccgacgccgctgcgtcagctggcaagcgtaacggtagaagattcccgtactctgaaaat

SEQ ID NO: 459973 - DNA, 75 bp, synthetic construct
  source 1..75: mol_type = other DNA
gtttgcctggcgaaccgctggagacgcatgaacaccgggatacgaccatacatgactggatgctccagcatgtcg

SEQ ID NO: 459974 - DNA, 75 bp, synthetic construct
  source 1..75: mol_type = other DNA
tctggttcgaactgagggaacgaatcccgcatattatcaggcagcaacggaactcattcagcgccggcaaatgcc

SEQ ID NO: 459975 - DNA, 75 bp, synthetic construct
  source 1..75: mol_type = other DNA
acttctgctgagagaagaagtcagccgacgagggattgcgttgccgtttgagtcaggaaatgtggcttctgttcg

SEQ ID NO: 459976 - DNA, 75 bp, synthetic construct
  source 1..75: mol_type = other DNA
tgaacccgaactctgcgggtagcgacatccgtgttccgctgccgccgctgacggaagaacgtcgtaaagatctga

SEQ ID NO: 459977 - DNA, 75 bp, synthetic construct
  source 1..75: mol_type = other DNA
atgctgtttgctgacctcggttgtatcctcggtggttacctgccgccgctgttccagcgttggtttggtgtgaac

SEQ ID NO: 459978 - DNA, 75 bp, synthetic construct
  source 1..75: mol_type = other DNA
atgtgcggtctggatgtcaccaatcaggcaatattaacccctgactatctcgctactttgccggagttgaatcgc

SEQ ID NO: 459979 - DNA, 75 bp, synthetic construct
  source 1..75: mol_type = other DNA
gccaaatcaacagaaacctaccggagctggcggagagtttctggagcaacagagcgattgcatatggtcatcaat

SEQ ID NO: 459980 - DNA, 75 bp, synthetic construct
  source 1..75: mol_type = other DNA
gcgatggaagagatcaactgtcaccacaactatgtgcaaaaagaacagcactttggcgaagagatctatgtgacg

SEQ ID NO: 459981 - DNA, 75 bp, synthetic construct
  source 1..75: mol_type = other DNA
aaagtgagccagggaaaggtgccggatacggcaaacccgtcgatgccgatccagttctgcccggcaccacctccg

SEQ ID NO: 459982 - DNA, 75 bp, synthetic construct
  source 1..75: mol_type = other DNA
ctatgagtatccgtccccgatcatccccaaagagcgctggcgctatcagatggtgaacatgtacccggacagcgg

SEQ ID NO: 459983 - DNA, 75 bp, synthetic construct
  source 1..75: mol_type = other DNA
gggaaaaatccgcccaacacaaagaaaaacttcggctacctgatgtggcgtaaacgtaactgtgtattcctgtga

SEQ ID NO: 459984 - DNA, 75 bp, synthetic construct
  source 1..75: mol_type = other DNA
tgttaattgccgatctcggcgctaaaccgcaagtgcgagtgttgctgcttgatgtcgtgattggcttcggcgcga

SEQ ID NO: 459985 - DNA, 75 bp, synthetic construct
  source 1..75: mol_type = other DNA
agcaccaggttgacacagcgaagaaaatgtccgttggtcagatcctgcgtaaccgtcagttctggggtatcgcgc

SEQ ID NO: 459986 - DNA, 75 bp, synthetic construct
  source 1..75: mol_type = other DNA
gcatctgaccgatgaagaacgcgactacattattaatggtcaggaagcccagcaccaggttgacacagcgaagaa

SEQ ID NO: 459987 - DNA, 75 bp, synthetic construct
  source 1..75: mol_type = other DNA
gtagaaaaactgaatcaggtttgcgctaaagatccgcaaatgctgttgatcacggcaattgatgacaccatgcgt

SEQ ID NO: 459988 - DNA, 75 bp, synthetic construct
  source 1..75: mol_type = other DNA
ttacttgcgcagaagccaacgaaatggcaaaaactgacagcgcacaggttgcagatatcgtcgcggtaatgggta

SEQ ID NO: 459989 - DNA, 75 bp, synthetic construct
  source 1..75: mol_type = other DNA
atggtgtcggtctggtgattaaaaacccgctcgatggtctgccagtggcgctgggtgatttcgcgaccttcccgg

SEQ ID NO: 459990 - DNA, 75 bp, synthetic construct
  source 1..75: mol_type = other DNA
gccccctctgatgacgactatgatggcgtggacgtgacgtatatcaacagtacaacatgggcagaagagacggtg

SEQ ID NO: 459991 - DNA, 75 bp, synthetic construct
  source 1..75: mol_type = other DNA
acgtcacccggacgcctcactgaccgcaaaaggctttgttcaactcagtagcgacactaacagcgtgtctgaaac

SEQ ID NO: 459992 - DNA, 75 bp, synthetic construct
  source 1..75: mol_type = other DNA
cgcaacaccaaaagcggtgaagtctgcctatgacaatgctgaaaaacgtcttcagaaagatcaaaatggcgcgga

SEQ ID NO: 459993 - DNA, 75 bp, synthetic construct
  source 1..75: mol_type = other DNA
gaacaggacggcattaaatcacactcccacagtgccagcgcgtccagtacggacttggggacaaaaaccacatca

SEQ ID NO: 459994 - DNA, 75 bp, synthetic construct
  source 1..75: mol_type = other DNA
gcagagctggtcattcctcctgaggtgggcggcttctggatgcgtgagctgggtctgtatgatgacgcaggcacg

SEQ ID NO: 459995 - DNA, 75 bp, synthetic construct
  source 1..75: mol_type = other DNA
ggattaaatgagtacgccgaaaatataagtgatattgctactgatttacgtacgcgtggtggcttttttaatgct

SEQ ID NO: 459996 - DNA, 75 bp, synthetic construct
  source 1..75: mol_type = other DNA
caaaactaccagtaacgccgggagtcacacgcattcaataccaacatcagatggtgcaaaccaggggggggaaat

SEQ ID NO: 459997 - DNA, 75 bp, synthetic construct
  source 1..75: mol_type = other DNA
tgatgcaggacggcgcattcagcctgacggcaccgccggtacagggaatgccggtacagactgccctgcgcaccc

SEQ ID NO: 459998 - DNA, 75 bp, synthetic construct
  source 1..75: mol_type = other DNA
aataagggcgcaatctcggtgcaggcgcagaacgacttgatggaactgttggcgaagaaggaaatcatcattacc

SEQ ID NO: 459999 - DNA, 75 bp, synthetic construct
  source 1..75: mol_type = other DNA
aagccatcacgccggagtcggtactgatgcaggacggcgcattcagcctgacggcaccgccggtacagggaatgc

SEQ ID NO: 460000 - DNA, 75 bp, synthetic construct
  source 1..75: mol_type = other DNA
cacaccacaagctcaaaattcgcggcctgaaaagcccggtggacgtgctgacttttacaggccgcgaacagctca

SEQ ID NO: 460001 - DNA, 75 bp, synthetic construct
  source 1..75: mol_type = other DNA
gtatggcgctgctgacccgcagccgccagaatgccatctaccagaatctgacggtgccgcaaatcgtcgaaaaaa

SEQ ID NO: 460002 - DNA, 75 bp, synthetic construct
  source 1..75: mol_type = other DNA
cgaatatggcggcaagagccagttaaacctcggccatctggtggatgccgggaaacagcagcgcggggaaggttt

SEQ ID NO: 460003 - DNA, 75 bp, synthetic construct
  source 1..75: mol_type = other DNA
gacggcgtatgaccttgctaatggtaaatatacggctcaggacgcgagcacggcgcagaaaggtctggtgaaact

SEQ ID NO: 460004 - DNA, 75 bp, synthetic construct
  source 1..75: mol_type = other DNA
tttccaccaggcgcggacgtttccggcgatgagcgcagtgaaaactgggtcaatagtactgaggtcggagggaca

SEQ ID NO: 460005 - DNA, 75 bp, synthetic construct
  source 1..75: mol_type = other DNA
atgaaagtgggtgattatgaattatctgttcctgaacaagcagaattcattaacatcataatgaacgacccagca

SEQ ID NO: 460006 - DNA, 75 bp, synthetic construct
  source 1..75: mol_type = other DNA
tggtgatgggtttaactacacagtgtatcaacccgggcaaagcgttagtggagatcaacgatcagaaaactggtt

SEQ ID NO: 460007 - DNA, 75 bp, synthetic construct
  source 1..75: mol_type = other DNA
ggctaccgggtgaaccccttgaaacgcacgagcatggtgtgctgacgctgcatgagtggatgagcagaaatgtcc

SEQ ID NO: 460008 - DNA, 75 bp, synthetic construct
  source 1..75: mol_type = other DNA
ctcagcgctggaaatgctgcagaagatagccaatgccgggaagtcacgttttctgctgagtgatggcctggcgac

SEQ ID NO: 460009 - DNA, 75 bp, synthetic construct
  source 1..75: mol_type = other DNA
gttcgctgccgtcggcgcaatgagcagggctcaaacaacgccagggattcgatgtactggcaggcactgcgcggg

SEQ ID NO: 460010 - DNA, 75 bp, synthetic construct
  source 1..75: mol_type = other DNA
ttcagataatgtcatccgggccagttaagccggacaactcactgctgacacaccggataatcatgacagaccagc

SEQ ID NO: 460011 - DNA, 75 bp, synthetic construct
  source 1..75: mol_type = other DNA
atgaagttgacaaaaatgatggcgaccttgttcctgcttattcccttgacatctttttcgcaggaattgggccag

SEQ ID NO: 460012 - DNA, 75 bp, synthetic construct
  source 1..75: mol_type = other DNA
ggctggggatgcactcgtcgaatatttcgtggtcagccggggatcgcattgaggggagtggtaatcatgcacatg

SEQ ID NO: 460013 - DNA, 75 bp, synthetic construct
  source 1..75: mol_type = other DNA
cagcagcccgttcgctggcggttccataaccaacagccctttacccgctgctgtgttcggcgatgcgccagtcaa

SEQ ID NO: 460014 - DNA, 75 bp, synthetic construct
  source 1..75: mol_type = other DNA
ccggtatcgctggttaccaattacgtcaccatgtcggggctggtttcctcgattacctcccagctctcaggttcc

SEQ ID NO: 460015 - DNA, 75 bp, synthetic construct
  source 1..75: mol_type = other DNA
ggttgccgggcgaaccgttggaaacgcatcaacatgaaacgatgacccttagcgcctggtttgcgcagaacgtga

SEQ ID NO: 460016 - DNA, 75 bp, synthetic construct
  source 1..75: mol_type = other DNA
tctgggcggggtcgataggcggcacgatgattgaggggagttttctgctcatgaatggcctgaatatcattcgtt

SEQ ID NO: 460017 - DNA, 75 bp, synthetic construct
  source 1..75: mol_type = other DNA
tgcaacccggtctttttgaccgatatatggagcgaaaaggttctgttgccagggacagtggttttcttgcccgtt

SEQ ID NO: 460018 - DNA, 75 bp, synthetic construct
  source 1..75: mol_type = other DNA
ctatcgcagctgcgatagatgtcctcaatgaagaacgtgtcatcgcctatccaacggaagccgttttcggtgttg

SEQ ID NO: 460019 - DNA, 75 bp, synthetic construct
  source 1..75: mol_type = other DNA
ctgtgccatctcattgaccgccttcaccgcatttagtctggttctcgggcagcaaattagcgttcctgtcgcgtt

SEQ ID NO: 460020 - DNA, 75 bp, synthetic construct
  source 1..75: mol_type = other DNA
tcgatggcggtgttaagggaatatagagaaaagtttccggcatggcgggatgcggatgagtttaggttgtggtga

SEQ ID NO: 460021 - DNA, 75 bp, synthetic construct
  source 1..75: mol_type = other DNA
gacgcgatgtgatcgttctaccggagatgtttaccagcggctttgccatggaagcggcagcttcgtcgctagcac

SEQ ID NO: 460022 - DNA, 75 bp, synthetic construct
  source 1..75: mol_type = other DNA
tatgaaaataaccaactcacccgcaccgagcttgtgccgtttaccaaaactggcggtctgacagacggaaatgcc

SEQ ID NO: 460023 - DNA, 75 bp, synthetic construct
  source 1..75: mol_type = other DNA
tgttgtaaagaaacgcgccagcattcgttacagcggagatgtcacttgtagtgtggtgacttattcacaattacc

SEQ ID NO: 460024 - DNA, 75 bp, synthetic construct
  source 1..75: mol_type = other DNA
agcagttcctgaaatgtccgctgaatgttttgaagaaacgcgccagcattcgctatagcggggatgtgaattgta

SEQ ID NO: 460025 - DNA, 75 bp, synthetic construct
  source 1..75: mol_type = other DNA
cggtgttttccatcgtaatgacaacggtggcgataacgacgacaacggcttgtacttatcgttttcgttatctga

SEQ ID NO: 460026 - DNA, 75 bp, synthetic construct
  source 1..75: mol_type = other DNA
ctgcgttgggacaaacagcagagctttgaaaataactatcttcgccagacgacggcgcaaagtatttccgaaact

SEQ ID NO: 460027 - DNA, 75 bp, synthetic construct
  source 1..75: mol_type = other DNA
cgcctgccattacatccgcaatatgagctctatgcagggctggcgaatgcagatgatgttagtgccttcgagtta

SEQ ID NO: 460028 - DNA, 75 bp, synthetic construct
  source 1..75: mol_type = other DNA
agatggtaagtctctgattttcagcctcgatattatgggcgcactccagccaactgtacttccgagtgtactggc

SEQ ID NO: 460029 - DNA, 75 bp, synthetic construct
  source 1..75: mol_type = other DNA
gcagatacattcataaagacatcttctagatatatattcaatcctgacagtagtatagtatataatattaatgat

SEQ ID NO: 460030 - DNA, 75 bp, synthetic construct
  source 1..75: mol_type = other DNA
ggaaacagcttcagccgcctgttgctggaagagaggatgcggggggcagtaaatatgttatgctttcaatatgga

SEQ ID NO: 460031 - DNA, 75 bp, synthetic construct
  source 1..75: mol_type = other DNA
gctgatataaatcacgatatagtcagtcaatatctggaaggtgggcgaaggcggatgagctccccacaggcatgt

SEQ ID NO: 460032 - DNA, 75 bp, synthetic construct
  source 1..75: mol_type = other DNA
aggaggggagtgggaacacatcagagatattgttctgaaagcaggttctaatatactgaggatagcgggtttatt

SEQ ID NO: 460033 - DNA, 75 bp, synthetic construct
  source 1..75: mol_type = other DNA
aaacagactggtgatgaacccctgttacgaatttgccgatcgactcattcaacaatacgaagagagaaacaaaga

SEQ ID NO: 460034 - DNA, 75 bp, synthetic construct
  source 1..75: mol_type = other DNA
aatccgcacattgataaacgaagcgaatctgctgattgattttgtcctggctgatacagacaaagggaaaataac

SEQ ID NO: 460035 - DNA, 75 bp, synthetic construct
  source 1..75: mol_type = other DNA
ggctcttaagactttgtatattacaaggctggccttacattcctttcttgaactcagaattgaacttacacctga

SEQ ID NO: 460036 - DNA, 75 bp, synthetic construct
  source 1..75: mol_type = other DNA
gctgcaaaggcaccagttgaagtcgtgagagcgattgcagcagagctacagaagcaccgtaaggcctatgccaat

SEQ ID NO: 460037 - DNA, 75 bp, synthetic construct
  source 1..75: mol_type = other DNA
gggggcaaagccctgaccagtgactcggtaagttcaatattctccggtttggtgggtgcagcacctgcggcagtt

SEQ ID NO: 460038 - DNA, 75 bp, synthetic construct
  source 1..75: mol_type = other DNA
gcttatccgaatactttgattacatgcaatgtatggatcccagtagagttatatataatggattagtaccttttg

SEQ ID NO: 460039 - DNA, 75 bp, synthetic construct
  source 1..75: mol_type = other DNA
atatgctgatttttatgggacagagttgcgaactgttcccaactaaaatcattttgcacgatcagcgcactacga

SEQ ID NO: 460040 - DNA, 75 bp, synthetic construct
  source 1..75: mol_type = other DNA
taatcctcgtcaaatgagcgtgatggaagaactcaatcaggcttgcgctgacatgaaacgggataaaaacattgc

SEQ ID NO: 460041 - DNA, 75 bp, synthetic construct
  source 1..75: mol_type = other DNA
gttatctgatacgccaacgatggacagcaataacaacagccattcaaccaatgtttctacggattatcgttatag

SEQ ID NO: 460042 - DNA, 75 bp, synthetic construct
  source 1..75: mol_type = other DNA
tggtgaatatgtacccggacagcggacagtgccatccgttcggacgtagtgtgatgcgctgggagacgggaaaaa

SEQ ID NO: 460043 - DNA, 75 bp, synthetic construct
  source 1..75: mol_type = other DNA
cccgctgacgtactggctgaacatcatcacatcgctgggctgtctggaaggtggtgacctggatatcgcttatct

SEQ ID NO: 460044 - DNA, 75 bp, synthetic construct
  source 1..75: mol_type = other DNA
atccgcccaacacaaagaaaaacttcggctacctgatggtaagcgtacagcctgaaccgtctggtcagaatctga

SEQ ID NO: 460045 - DNA, 75 bp, synthetic construct
  source 1..75: mol_type = other DNA
acagggggcctgcgcagcagatgccattgccagcgcctttaatatgcctctcgatgttctgttctggtgtgccgg

SEQ ID NO: 460046 - DNA, 75 bp, synthetic construct
  source 1..75: mol_type = other DNA
ttcactggtacaaatatccggtgacgtactggctgaacattatcacctctgccgggtgtctgatgggcggggata

SEQ ID NO: 460047 - DNA, 75 bp, synthetic construct
  source 1..75: mol_type = other DNA
gcagtgccatccgttcgggcgcagtgtgatgcgctgggaagccgggaaaaatccccctaacacaaagaaaaactt

SEQ ID NO: 460048 - DNA, 75 bp, synthetic construct
  source 1..75: mol_type = other DNA
gacgctaatgatgggtggataattccaggtgcgtcgtggataccatcacactggatgccgctaccagaaccgccg

SEQ ID NO: 460049 - DNA, 75 bp, synthetic construct
  source 1..75: mol_type = other DNA
gggcagtatgtatccgtttaacggctatgtttctaacgaattcagtccgttacagacgtcactgttactcagtga

SEQ ID NO: 460050 - DNA, 75 bp, synthetic construct
  source 1..75: mol_type = other DNA
caccgtcagggcatgattatgaacaccatcgggcagaacacggcagtctgttacgaatatccgtccccaatcctt

SEQ ID NO: 460051 - DNA, 75 bp, synthetic construct
  source 1..75: mol_type = other DNA
cgctgggaagcaggcaaaaacatgcccaatgaccggcgtaactttgggtatctcttctggcgcaagcgcaactgc

SEQ ID NO: 460052 - DNA, 75 bp, synthetic construct
  source 1..75: mol_type = other DNA
cagcaatgaccctggtattgttacaaacgtagaatatggccaggagtggaaaatcaagaaagaagatatttcaga

SEQ ID NO: 460053 - DNA, 75 bp, synthetic construct
  source 1..75: mol_type = other DNA
cgaccccacctggacggacagcagcctgaccaccattctcaatccggaagccgtcatttttgccaatccgatagc

SEQ ID NO: 460054 - DNA, 75 bp, synthetic construct
  source 1..75: mol_type = other DNA
gggcagcatgtatccctttaccgggtttaccagcggagaattttcccctctggaatcctcgcttctggtcagtga

SEQ ID NO: 460055 - DNA, 75 bp, synthetic construct
  source 1..75: mol_type = other DNA
ataatgttgagtcagtttcgaaggagattaaaaatgaggcagaggttattcatgaaaatctcagtgcagatgaac

SEQ ID NO: 460056 - DNA, 75 bp, synthetic construct
  source 1..75: mol_type = other DNA
caaatggctgatggcaagcacgattacgcctttgtgcatatgacgctaaaaatcggcagcgggcgcagcctggaa

SEQ ID NO: 460057 - DNA, 75 bp, synthetic construct
  source 1..75: mol_type = other DNA
ctggcgttgtcgtttgagattgaagagctgcatccgacgctgaattttaaacaaaacaacgtgcacgcattgttt

SEQ ID NO: 460058 - DNA, 75 bp, synthetic construct
  source 1..75: mol_type = other DNA
atgtctggaaatataggggcaaatccagtacgcctgccattacatccgcaatatgagctctacgcagggctggcg

SEQ ID NO: 460059 - DNA, 75 bp, synthetic construct
  source 1..75: mol_type = other DNA
aaagaactgtatctgctttccggacacgaattccttaaatgtccgctgactgttgtgaagaaacgcgccagcatt

SEQ ID NO: 460060 - DNA, 75 bp, synthetic construct
  source 1..75: mol_type = other DNA
ggtaataactggacgtcgagtttaggcggggcggggaatcttgctataagcgccagcctgttccgtaatgatgac

SEQ ID NO: 460061 - DNA, 75 bp, synthetic construct
  source 1..75: mol_type = other DNA
cacaaacattctgtttcaggtgtacaaagtggtggggcaacaataaattccaatgcaacggataaaccgacatga

SEQ ID NO: 460062 - DNA, 75 bp, synthetic construct
  source 1..75: mol_type = other DNA
gtgatattcaggataacgcaagttcacagtcatctactgttaaaaatttaagggacaattataacaatcacaaac

SEQ ID NO: 460063 - DNA, 75 bp, synthetic construct
  source 1..75: mol_type = other DNA
ccgaaatgaccgctgctgatgaagcaaggttctttacaatttttgatcgacaacttgaatatgattcaggtgaag

SEQ ID NO: 460064 - DNA, 75 bp, synthetic construct
  source 1..75: mol_type = other DNA
cgggtggaaaaccctgacctgcgcaccgtcgatgtgttaattcgtcgtttacgtcataaactcagcgcggattta

SEQ ID NO: 460065 - DNA, 75 bp, synthetic construct
  source 1..75: mol_type = other DNA
tcacggatatttgctggagctgcattttccctctctcgttgggcagcacaaaagtgagccaggggaaggtgccgg

SEQ ID NO: 460066 - DNA, 75 bp, synthetic construct
  source 1..75: mol_type = other DNA
caccgtcagggaatgataatgaacaccatcggcgtggatgtggctgtctgttatgaatatccgtcgcccatactt

SEQ ID NO: 460067 - DNA, 75 bp, synthetic construct
  source 1..75: mol_type = other DNA
tggccgctgtgaaaaacctccagataaatgcgggaaacaacgccgatatcggcgtggtgaagaatatgtttatcg

SEQ ID NO: 460068 - DNA, 75 bp, synthetic construct
  source 1..75: mol_type = other DNA
gatgcacgcgccgaaaggggtggcggtcgccagcggcgagcacctgcaactggccgccgtgaaaaacctccagat

SEQ ID NO: 460069 - DNA, 75 bp, synthetic construct
  source 1..75: mol_type = other DNA
gatgcacgcgccgaaaggcgtggcggtcgccagcggcgagcacctgcaactggccgcggtgaaaaacctccagat

SEQ ID NO: 460070 - DNA, 75 bp, synthetic construct
  source 1..75: mol_type = other DNA
cgccatctaccagaaacagacggtgccgcaaatcgtcgaaaaaatcctgcgcgagcgtcatcatatgcgcggtca

SEQ ID NO: 460071 - DNA, 75 bp, synthetic construct
  source 1..75: mol_type = other DNA
tgcaaaacgccatgattatttcaccagtgctcttccgtggcctcagaaaggtgaaggtgttgagatttctttagg

SEQ ID NO: 460072 - DNA, 75 bp, synthetic construct
  source 1..75: mol_type = other DNA
tggccgcggtgaaaaacctccagataaatgcgggaaacaacgccgatatcggcgttgtgaagaatatgtttatcg

SEQ ID NO: 460073 - DNA, 75 bp, synthetic construct
  source 1..75: mol_type = other DNA
gggtcaccagcacggtgaagaacgacatctacgcccatatcgacaaggacgggcgctaccgggtcaacctcgact

SEQ ID NO: 460074 - DNA, 75 bp, synthetic construct
  source 1..75: mol_type = other DNA
cacaccagaaatactctggcaacaaactggcaaacctgcaaaaaatcaaaaggtacaggtcacacggggtgatgg

SEQ ID NO: 460075 - DNA, 75 bp, synthetic construct
  source 1..75: mol_type = other DNA
ggtgatggtacggtggaatgcgcagccccagacaagatcatagagcgtggggccgtatggcagaagttcagcggc

SEQ ID NO: 460076 - DNA, 75 bp, synthetic construct
  source 1..75: mol_type = other DNA
gatgcacgccccgaaaggggtggcggtcgccagcggcgagcacctgcaactggccgcggtgaaaaacctccagat

SEQ ID NO: 460077 - DNA, 75 bp, synthetic construct
  source 1..75: mol_type = other DNA
gatgcacgctccgaaaggtgtggcggtcgccagcggcgagcacctgcaactggccgcagtgaaaaacctccagat

SEQ ID NO: 460078 - DNA, 75 bp, synthetic construct
  source 1..75: mol_type = other DNA
gatgcacgcaccgaaaggtgtggcggtcgccagcggcgagcacctgcaactggccgctgtgaaaaacctccagat

SEQ ID NO: 460079 - DNA, 75 bp, synthetic construct
  source 1..75: mol_type = other DNA
cgccatctaccagaatcagacggtgccgcaaatcgtcgaaaaaatcctgcgcgagcgtcatcaaatgcgcggtca

SEQ ID NO: 460080 - DNA, 75 bp, synthetic construct
  source 1..75: mol_type = other DNA
ggggcgatctcggtacaggcacagaacgatctgatggaactgttggcacagaaatcgatagtgatcaccagtacg

SEQ ID NO: 460081 - DNA, 75 bp, synthetic construct
  source 1..75: mol_type = other DNA
ggtggatgccgggaaacagcagcgcggggaaggctttgaactgcgaaccgatctgtggggtgcagtacgggctaa

SEQ ID NO: 460082 - DNA, 75 bp, synthetic construct
  source 1..75: mol_type = other DNA
tggaaagactgataattttaactgtgataaagagcaggaaatagaggtcaggttactacatcagagcattgatat

SEQ ID NO: 460083 - DNA, 75 bp, synthetic construct
  source 1..75: mol_type = other DNA
agcgacgacgcgcctgcggtatttcgcaagggcgtactgattaccggcgtgacggcctgcgcggcgcgtgaccgc

SEQ ID NO: 460084 - DNA, 75 bp, synthetic construct
  source 1..75: mol_type = other DNA
cggcgcgggtcaccagcacggtgaagaacgatatctatgcccatatcgacaaggacgggcgctaccgggtcaacc

SEQ ID NO: 460085 - DNA, 75 bp, synthetic construct
  source 1..75: mol_type = other DNA
cggctggatgcctgcgggatagaagcgggaacgccgggagaatataacgttaaggccggatattacgggcgtaaa

SEQ ID NO: 460086 - DNA, 75 bp, synthetic construct
  source 1..75: mol_type = other DNA
tgacggtaccgcaaatcgtcgaaaaaatcctgcgcgagcggcaccagatgcgcggtcaggacttcgtgtttaacc

SEQ ID NO: 460087 - DNA, 75 bp, synthetic construct
  source 1..75: mol_type = other DNA
cgccatctaccagaagcagacggtgccgcaaatcgtcgaaaaaatcctgcgcgagcgacatcacatgcgcggtca

SEQ ID NO: 460088 - DNA, 75 bp, synthetic construct
  source 1..75: mol_type = other DNA
cgccatctaccagaaccagacggtgccgcaaatcgtcgaaaaaatcctgcgcgagcgacatcagatgcgcggtca

SEQ ID NO: 460089 - DNA, 75 bp, synthetic construct
  source 1..75: mol_type = other DNA
cagctcaacctcggtcatctggtggatgccgggaaacagcagcgcggcgaaggctttgaactgcgtaccgatatg

SEQ ID NO: 460090 - DNA, 75 bp, synthetic construct
  source 1..75: mol_type = other DNA
ttaccggcgtgacggccagcgcggcgcgtgaccacagctatgagctgacgtttactgccatcccgtactcagagc

SEQ ID NO: 460091 - DNA, 75 bp, synthetic construct
  source 1..75: mol_type = other DNA
tcgcggcctgcaaagtccggtggatgtgctgaccttcgaaggccgcgaacaactgagtaccccgttccgctacga

SEQ ID NO: 460092 - DNA, 75 bp, synthetic construct
  source 1..75: mol_type = other DNA
agtacggaagatgagatcaggatttcagcgaagaaaaaaataacgattaatggtggtggaagttatatccggatt

SEQ ID NO: 460093 - DNA, 75 bp, synthetic construct
  source 1..75: mol_type = other DNA
ctgttacaggctgcagaattagaactgtcttctctcaacaggatgggagggaatctatcagatggtacaagaatt

SEQ ID NO: 460094 - DNA, 75 bp, synthetic construct
  source 1..75: mol_type = other DNA
tgatgaggcgcgccaggcaatgatgaaggctgccaatgctgcacttgccctgcagggcgtatcagagtcatttat

SEQ ID NO: 460095 - DNA, 75 bp, synthetic construct
  source 1..75: mol_type = other DNA
ggcgtacgtgcggagatcgtgcagctggatctcggtaaactgccagaaggtgcgcaggcgctggagaaactcatt

SEQ ID NO: 460096 - DNA, 75 bp, synthetic construct
  source 1..75: mol_type = other DNA
tctgatgtccaaagcggccaccgcgagtggcatggagttgctggatatcagcgatgaaattgaccagatcatgca

SEQ ID NO: 460097 - DNA, 75 bp, synthetic construct
  source 1..75: mol_type = other DNA
tctgattttcgccaggataaagacgggctgacacgcattctgatacttgaacgggacctgacagaggcacagctg

SEQ ID NO: 460098 - DNA, 75 bp, synthetic construct
  source 1..75: mol_type = other DNA
ttgtactgtttctattattctggcgatttcaataaaggtacttgctcgcgctctgtcattttctgaaactcttca

SEQ ID NO: 460099 - DNA, 75 bp, synthetic construct
  source 1..75: mol_type = other DNA
ggtcaacatggatgagtggcggtatcgggcttgttgctggtgtcctgattcgctactgcctcgttcggctgttcg

SEQ ID NO: 460100 - DNA, 75 bp, synthetic construct
  source 1..75: mol_type = other DNA
atttgttgaattatcagcaaacagcactgcattgcttgagcctgatttacagcttgcgctggcgctgctgaaacc

SEQ ID NO: 460101 - DNA, 75 bp, synthetic construct
  source 1..75: mol_type = other DNA
atgaatatttcgtggcaaacagaaattgcgatctaccgctttggcgcaaagaacgtttacggcgaggcgcaatta

SEQ ID NO: 460102 - DNA, 75 bp, synthetic construct
  source 1..75: mol_type = other DNA
cctccgattcggggatcggcaaagaatgcgcgttattactggcgcagcagggttttgatattggcattacgtggc

SEQ ID NO: 460103 - DNA, 75 bp, synthetic construct
  source 1..75: mol_type = other DNA
attcaccagaacgcgtttccctgttacccattgcgccgggggtggattttgcaacagcgctctccctgagaagaa

SEQ ID NO: 460104 - DNA, 75 bp, synthetic construct
  source 1..75: mol_type = other DNA
ggtcacctgatgtatgggctggtggaggtattggacttattgcaggtctgctacttcgttacgtcctcgtcagag

SEQ ID NO: 460105 - DNA, 75 bp, synthetic construct
  source 1..75: mol_type = other DNA
ttaggtgcggttttattatgggtcgcgaatcgtctcgatttgccgctgctgccggtgattttccctacgcagctg

SEQ ID NO: 460106 - DNA, 75 bp, synthetic construct
  source 1..75: mol_type = other DNA
gaactacaagcgcaacgtactgcgcaccccggcgaacaacaaaatccgcctcgatgacgagcgcggcaaagagca

SEQ ID NO: 460107 - DNA, 75 bp, synthetic construct
  source 1..75: mol_type = other DNA
tccgatgcgcaggacaaggcgcagggtcaggtgcgcgaaatggctccggcgatggcaatactggatggcgcacag

SEQ ID NO: 460108 - DNA, 75 bp, synthetic construct
  source 1..75: mol_type = other DNA
actgtctgacgatgcggccacggcgaacgccgatccggcggatatggccgcgcaggtggcgctgataaccagccg

SEQ ID NO: 460109 - DNA, 75 bp, synthetic construct
  source 1..75: mol_type = other DNA
tcatctggtggatgccgggaaacagcagcgcggggaaggctttgaactgcgtaccgatatgtggggcgcagtgcg

SEQ ID NO: 460110 - DNA, 75 bp, synthetic construct
  source 1..75: mol_type = other DNA
tggcgggaacggaagtcagcatcgcgtttgaggaaggcaacccggaccgaccttatattgcaggcgtaaaacacg

SEQ ID NO: 460111 - DNA, 75 bp, synthetic construct
  source 1..75: mol_type = other DNA
ggcgacgacgcgcctgcggtgttccgcaagggcgtgctgattaccggcgtgacggccagcgcggcccgtgaccgc

SEQ ID NO: 460112 - DNA, 75 bp, synthetic construct
  source 1..75: mol_type = other DNA
ctgaatgaacaggccattctcaaaggccagagcaccagttcactgctgatgccggggctggaaatcagggttcag

SEQ ID NO: 460113 - DNA, 75 bp, synthetic construct
  source 1..75: mol_type = other DNA
tcttcactctgtgctgcgcattccgcagaatattatccgcttgcaaccgttgcatttttcttacgaaaaaggccg

SEQ ID NO: 460114 - DNA, 75 bp, synthetic construct
  source 1..75: mol_type = other DNA
attgaaaaagtatacttaacaaaaatgcatggggtagccagcctaaagcctggagataatttgcttatttatcgt

SEQ ID NO: 460115 - DNA, 75 bp, synthetic construct
  source 1..75: mol_type = other DNA
tcgacaaggacgggcgctaccgggtcaacctcgactttgaccgcgatacgtggaaaccgggttatgaaagcctgt

SEQ ID NO: 460116 - DNA, 75 bp, synthetic construct
  source 1..75: mol_type = other DNA
gtttgtttcacgcctgctgtcagaggtgggtatctggttccgcttcgccaccgatgcccggctgaaaattgaggt

SEQ ID NO: 460117 - DNA, 75 bp, synthetic construct
  source 1..75: mol_type = other DNA
cctcgacgatgagcgcgggaaagagcatatcaaggtcagcaccgaatatggcggcaagagccagttaaacctcgg

SEQ ID NO: 460118 - DNA, 75 bp, synthetic construct
  source 1..75: mol_type = other DNA
tttatgcgtgaaaatgacttcgatactcccgtaatggtgatgtgttaccacggcaatagcagcaaaggcgcggca

SEQ ID NO: 460119 - DNA, 75 bp, synthetic construct
  source 1..75: mol_type = other DNA
tttgactaacgacacgctgggcgcgtttatgcgtgataatgacttcgatacgccggtcatggtgatgtgttacca

SEQ ID NO: 460120 - DNA, 75 bp, synthetic construct
  source 1..75: mol_type = other DNA
atgattctaggtaatgattacgttgatttagctcctctgttccaggcacacagcactagaaactatctgctttct

SEQ ID NO: 460121 - DNA, 75 bp, synthetic construct
  source 1..75: mol_type = other DNA
gcagcagccagtttcgccacaggtcgcgtcagcgccgcagccagtgcattcagcaccgcaaccggcacaacaggc

SEQ ID NO: 460122 - DNA, 75 bp, synthetic construct
  source 1..75: mol_type = other DNA
ggctgaggtcgttgcggcgcagtacaccaacgtggcaattgaggacgatcagggtacacattttcgtctggtcgt

SEQ ID NO: 460123 - DNA, 75 bp, synthetic construct
  source 1..75: mol_type = other DNA
ttcatgcgcgaaaatgacttcgataccccggtaatggtgatgtgttaccacggtaatagcagcaaaggcgcagcg

SEQ ID NO: 460124 - DNA, 75 bp, synthetic construct
  source 1..75: mol_type = other DNA
ggggattaaactgatcggcgcgattctggtcggcattttgatgatctcgctgctgattggtcagtcgccagcgat

SEQ ID NO: 460125 - DNA, 75 bp, synthetic construct
  source 1..75: mol_type = other DNA
aagatttagcgggtattgagattgatcacaccacctcgatggtgatgattttcggtattatttttctgaccgccg

SEQ ID NO: 460126 - DNA, 75 bp, synthetic construct
  source 1..75: mol_type = other DNA
aagatccgattcttggtctggtggcaggtattcagctttccgcgaacgatatgctgaaactgggcgactggctgg

SEQ ID NO: 460127 - DNA, 75 bp, synthetic construct
  source 1..75: mol_type = other DNA
ctgattgaaatcccttacttcctgcgtgaagatgtgatccgtccttctgatgttcaaggcaaacgtaaacctggc

SEQ ID NO: 460128 - DNA, 75 bp, synthetic construct
  source 1..75: mol_type = other DNA
acctgcgcgcagttgtggatcatgatgtatgcgctgctttcagtcttctcgctgctggatgttattttgaatctg

SEQ ID NO: 460129 - DNA, 75 bp, synthetic construct
  source 1..75: mol_type = other DNA
cctgcgccgaatgaccaatattggaacgtttcgcgcctatctgaacgaatatctacgcaatcatccgcggattcg

SEQ ID NO: 460130 - DNA, 75 bp, synthetic construct
  source 1..75: mol_type = other DNA
tgatgctgcaatctgcgcagcatattgccgatgaagtgggcggcgtcgtgcttgacgatcagcgccgtatgatga

SEQ ID NO: 460131 - DNA, 75 bp, synthetic construct
  source 1..75: mol_type = other DNA
catacccattcgatgacatttgtttcaggtggttccagtggtgctccgggaagtggagcatctgattattctaaa

SEQ ID NO: 460132 - DNA, 75 bp, synthetic construct
  source 1..75: mol_type = other DNA
gcaggctgcaacgccgaaagcagtaaaggccgcgtatgatcttgctaacgggaaatatactgcgcaggatgccac

SEQ ID NO: 460133 - DNA, 75 bp, synthetic construct
  source 1..75: mol_type = other DNA
atgctttccgcgctggtagttgaactggtattgagtgcaggtttcctgttggtgatccacggcgcaaccgacaaa

SEQ ID NO: 460134 - DNA, 75 bp, synthetic construct
  source 1..75: mol_type = other DNA
gttttctgtaaacctgaagccttctccgcaattcgattctctgctggtatggcaaacgcattccagtatgtaagc

SEQ ID NO: 460135 - DNA, 75 bp, synthetic construct
  source 1..75: mol_type = other DNA
tgttaacgttgttacagagaatagccagatggtggtaaaccacggtgttggcttctctgtgcagatcacagttaa

SEQ ID NO: 460136 - DNA, 75 bp, synthetic construct
  source 1..75: mol_type = other DNA
actgatttccaggaaacactcactgatatctacgcggaatatgttgctaaacacaatgttgcattccagcgtaca

SEQ ID NO: 460137 - DNA, 75 bp, synthetic construct
  source 1..75: mol_type = other DNA
aatttcgactggctggatggtgcatcaagtggcacggtggtagggaatggaactgtgccttcttctggcgcacat

SEQ ID NO: 460138 - DNA, 75 bp, synthetic construct
  source 1..75: mol_type = other DNA
tgccctttcggggatctcgattgcttatggattttcgaaattcatcatgggttcggtatcggatcgctcgaatcc

SEQ ID NO: 460139 - DNA, 75 bp, synthetic construct
  source 1..75: mol_type = other DNA
gcgccagcgccgcagccagtgcattcagcaccgcaaccggcacaacaggctttccagcctgcagaacccgtagcg

SEQ ID NO: 460140 - DNA, 75 bp, synthetic construct
  source 1..75: mol_type = other DNA
gtgcagcttcctcggcaacggcggcaggcaattccgcgaaggcggccaaaacgtctgagacgaacgctaggtctt

SEQ ID NO: 460141 - DNA, 75 bp, synthetic construct
  source 1..75: mol_type = other DNA
gccgcgactccgaaagcggtgaaagctgctaatgacaatgcaaacgggcgtgtgccctctggacgtaaggttaat

SEQ ID NO: 460142 - DNA, 75 bp, synthetic construct
  source 1..75: mol_type = other DNA
cgttgccgaagggtccggtcgtgcacagacatttcgcaccattctgaccgtatccagcactgccaccgtggcact

SEQ ID NO: 460143 - DNA, 75 bp, synthetic construct
  source 1..75: mol_type = other DNA
ggtggtactgcggaccttcgaaaaacgtgccatcgccagttcacggctttggttgcaaatcattacccagaataa

SEQ ID NO: 460144 - DNA, 75 bp, synthetic construct
  source 1..75: mol_type = other DNA
gacaacctggaaaactacatccagtcgttctcttcggatgcccgcgaaattttcgaacacttcaagttcagcgag

SEQ ID NO: 460145 - DNA, 75 bp, synthetic construct
  source 1..75: mol_type = other DNA
gtttatcagccaccgcgcccattggaggagattgatgcggatctggatgcggtaagtgccgagattatgaaactg

SEQ ID NO: 460146 - DNA, 75 bp, synthetic construct
  source 1..75: mol_type = other DNA
cagtggagggaggacagctatggtgatttctccgaactggaagccgaagcgcgcgccatcatcaaagccgaattt

SEQ ID NO: 460147 - DNA, 75 bp, synthetic construct
  source 1..75: mol_type = other DNA
cgacggcagcaacctgtgcggcaagatgcgtaaatcgctgggatcaaaacgtaatattctcggggaggaggatat

SEQ ID NO: 460148 - DNA, 75 bp, synthetic construct
  source 1..75: mol_type = other DNA
cgagaatgtgccgttaaatccggcggtatctaccagcgagttgatcgagggttacttcaaagcagaagtattgcc

SEQ ID NO: 460149 - DNA, 75 bp, synthetic construct
  source 1..75: mol_type = other DNA
aaagaggcgttcagaaccgcaggcgtgaagctggatgcgaaagagaacaagcagtttattgatgctatcacccgt

SEQ ID NO: 460150 - DNA, 75 bp, synthetic construct
  source 1..75: mol_type = other DNA
gctggcgacgaacgccgtgctcgagcaaaatttcactggcaattcctggaacattatccggctgctcaggactga

SEQ ID NO: 460151 - DNA, 75 bp, synthetic construct
  source 1..75: mol_type = other DNA
caaagctgcgattggtcgtctaaagggtgacgaattggcccagtacaacctttggcttgattacctggatgcact

SEQ ID NO: 460152 - DNA, 75 bp, synthetic construct
  source 1..75: mol_type = other DNA
ccgcccggcgcttatcccccgccccgtaatggccggaacgctcccggcgcgggttaccagtacggtgaagaacga

SEQ ID NO: 460153 - DNA, 75 bp, synthetic construct
  source 1..75: mol_type = other DNA
gggcttatggtcaggagctaaacccagagtcttacgctatctgtaaagcggacatgctgatcaagggacaggata

SEQ ID NO: 460154 - DNA, 75 bp, synthetic construct
  source 1..75: mol_type = other DNA
aaagataaggagtttatgtgtgcaatacataaaaataatataaataaaattaccaacattaatattggtgttgat

SEQ ID NO: 460155 - DNA, 75 bp, synthetic construct
  source 1..75: mol_type = other DNA
aggtaattatgtgggcacgaattgaaaataatattgtactggaattgaccgatatagaccccgccggtcgtttcc

SEQ ID NO: 460156 - DNA, 75 bp, synthetic construct
  source 1..75: mol_type = other DNA
aaccggcggctttctctcttccggcatggagtacgtccacaaacaaaaccccaatgccgtgatgcgcgcgtttgg

SEQ ID NO: 460157 - DNA, 75 bp, synthetic construct
  source 1..75: mol_type = other DNA
tgcatcagccgcgattcacctgcacccgcaacgaggttcatcttatgtcgactcgtacccctttatcatcttcat

SEQ ID NO: 460158 - DNA, 75 bp, synthetic construct
  source 1..75: mol_type = other DNA
gggggcggcgttgccgaatcttatcgccctgacgtctgaagccgcgggtccacgttttcgtgggacggcagtgag

SEQ ID NO: 460159 - DNA, 75 bp, synthetic construct
  source 1..75: mol_type = other DNA
tcctcccgaatttaaacagcagctcgttgggggatgcggacgatttcctggactctcaggagataaaacatgttt

SEQ ID NO: 460160 - DNA, 75 bp, synthetic construct
  source 1..75: mol_type = other DNA
cgtgcaaggcaaacgaaaagccggaagctctattgaagaaacactgccggatctgtatgcggaatatatcgctaa

SEQ ID NO: 460161 - DNA, 75 bp, synthetic construct
  source 1..75: mol_type = other DNA
cagttccttcgatctgctgtctcaaggcgctaaagagtattacagctatgctttcgaatcgaatcgcggcgacgc

SEQ ID NO: 460162 - DNA, 75 bp, synthetic construct
  source 1..75: mol_type = other DNA
ccgttgattctggtgccgctgttaatgcgttggctgccggagtcggcggttttcgctggtgaaaaacaggccgcg

SEQ ID NO: 460163 - DNA, 75 bp, synthetic construct
  source 1..75: mol_type = other DNA
atctgatgaagtatgaacggccaccagcaagggtttccgggctcgatttcagcctgaacctgaacagctttaata

SEQ ID NO: 460164 - DNA, 75 bp, synthetic construct
  source 1..75: mol_type = other DNA
gccgtagcgggggcgcagataaacaccagtgaactccatggcgtaccagggtgcccacactgcggaaacagtagt

SEQ ID NO: 460165 - DNA, 75 bp, synthetic construct
  source 1..75: mol_type = other DNA
tgcagcacacgctacccggccaggtgctgctccagtcatggcttacccgcaacggcatagatcgtaagctctctt

SEQ ID NO: 460166 - DNA, 75 bp, synthetic construct
  source 1..75: mol_type = other DNA
gaaactgctggagttttatgcgcaaaaccttccggcgcatccggaatggaaaattaagcctgacgatgaattaat

SEQ ID NO: 460167 - DNA, 75 bp, synthetic construct
  source 1..75: mol_type = other DNA
aaatccgggctgtatttccagtgggggcagaaaaagactgagagtattactccggtaatgaaccccagtcccggt

SEQ ID NO: 460168 - DNA, 75 bp, synthetic construct
  source 1..75: mol_type = other DNA
acttgatgccagccgcacacaactggtgtggatcaccgccgatggtaatcctctgaaattcgtcatgcgcagcga

SEQ ID NO: 460169 - DNA, 75 bp, synthetic construct
  source 1..75: mol_type = other DNA
atatgataaggatgcgttagtgcaacttgttgaaactggtggagctcatcctctgagtcgagaacctataacaga

SEQ ID NO: 460170 - DNA, 75 bp, synthetic construct
  source 1..75: mol_type = other DNA
aacctataacagaatcaatgatcatgagaaaagacgaatgtcactttgattcaaaaaaagaagcctttgttgcaa

SEQ ID NO: 460171 - DNA, 75 bp, synthetic construct
  source 1..75: mol_type = other DNA
agagcagagcacagggaagagaaaacaggtaatacagtattacaaggtaaagtatattcttgttcatttcatcca

SEQ ID NO: 460172 - DNA, 75 bp, synthetic construct
  source 1..75: mol_type = other DNA
cgtaaaggtgagcacccacttctcgatgagcacatagcgtgggcgattgcgcagcaaatagagagacgaaatgcg

SEQ ID NO: 460173 - DNA, 75 bp, synthetic construct
  source 1..75: mol_type = other DNA
ggcttccaacatcttctttgctgagggatctgtagagctgatgtacggcaagctggcattcccgaccgggcaggg

SEQ ID NO: 460174 - DNA, 75 bp, synthetic construct
  source 1..75: mol_type = other DNA
tcacttttcttgcccggagtcatttttgacatgcccgataacgctggacacacctgcgaatggagtgttcatgag

SEQ ID NO: 460175 - DNA, 75 bp, synthetic construct
  source 1..75: mol_type = other DNA
agcggcgtccgctggcccgaattccagttggtcatcgtggtggtgctcgcgggtctggcggtctgcctgtggtat

SEQ ID NO: 460176 - DNA, 75 bp, synthetic construct
  source 1..75: mol_type = other DNA
gcgcagtctgtactccagaccactatcagcgccgttcgggtgacacagaaaatgaaggataaccccgttgtcgca

SEQ ID NO: 460177 - DNA, 75 bp, synthetic construct
  source 1..75: mol_type = other DNA
ataacagtaaagattttgctgtctcaatgaacggtgtgaaagtcgaacaagacggggcgcgtaatctgggggaaa

SEQ ID NO: 460178 - DNA, 75 bp, synthetic construct
  source 1..75: mol_type = other DNA
aaatgaaacatggcgtaaatggcaatctgaatcctgcggccagcgtctggggtaatgtgggcgtgcagctgggtg

SEQ ID NO: 460179 - DNA, 75 bp, synthetic construct
  source 1..75: mol_type = other DNA
tccggcggccagcgtctggggtaatgtgggcgtgcagctgggtgataatggctacaatgacaccgcaatgatggt

SEQ ID NO: 460180 - DNA, 75 bp, synthetic construct
  source 1..75: mol_type = other DNA
atgaaaaacgaagcagaaaaggcgatgtggagttgcaaaacctcggataccccatggaccttcagttccctgctg

SEQ ID NO: 460181 - DNA, 75 bp, synthetic construct
  source 1..75: mol_type = other DNA
aaaaagcccgccaattgaagaaaaagcaggcttataaaccggatcctgaagcgtcatttagctggtcagcaaata

SEQ ID NO: 460182 - DNA, 75 bp, synthetic construct
  source 1..75: mol_type = other DNA
ttgaaaataccgatgttgcgagtcgtccatatgcaaacgtcgatgccaaaccggcagcatcagcagcaatcacca

SEQ ID NO: 460183 - DNA, 75 bp, synthetic construct
  source 1..75: mol_type = other DNA
gagccgtccatatgcaaacgtcgatgccaagccggcagaaactgcagcaatcaccattctcaacaagaacgcagc

SEQ ID NO: 460184 - DNA, 75 bp, synthetic construct
  source 1..75: mol_type = other DNA
tttgtaaagagaataatacgaaatattttgtttctatactaccagaggaatatcttgcactatgtaagtactcgc

SEQ ID NO: 460185 - DNA, 75 bp, synthetic construct
  source 1..75: mol_type = other DNA
aaaatcccgactataaatataggaaatagacaaaaaggacgcgtccgtggagattctgtgattgataccgattgt

SEQ ID NO: 460186 - DNA, 75 bp, synthetic construct
  source 1..75: mol_type = other DNA
gctctcgtgctgaatacggtataatgaaaaggctattactacaattagataaagaagatgatattaagctaacaa

SEQ ID NO: 460187 - DNA, 75 bp, synthetic construct
  source 1..75: mol_type = other DNA
ctgttgcagttgctgcagcgattcacaatttaccaataattcacattcatggcggtgaaaaaactttaggtaatt

SEQ ID NO: 460188 - DNA, 75 bp, synthetic construct
  source 1..75: mol_type = other DNA
aggccagaagcacagttacagtatgttgggcatctgaacccagggatttatatcaaaacgggtcgcttcgttgga

SEQ ID NO: 460189 - DNA, 75 bp, synthetic construct
  source 1..75: mol_type = other DNA
gggcgatcccggaagagttgcgaccgttaatgggaaaccgtatttacggttgcgatgactgccagcttatctgcc

SEQ ID NO: 460190 - DNA, 75 bp, synthetic construct
  source 1..75: mol_type = other DNA
cgaactgaagacgctactggatcgggcgcgtattgcgcatggtcgcctgttgaccaactcggaaaccaacagcat

SEQ ID NO: 460191 - DNA, 75 bp, synthetic construct
  source 1..75: mol_type = other DNA
gttctcgtgctgaatatggaataatgaaaagattattacagcaactaaaagaagatgatagtatagatctatcta

SEQ ID NO: 460192 - DNA, 75 bp, synthetic construct
  source 1..75: mol_type = other DNA
gctcgccgtggcataaacaaaccggtaattgccctggtgacacaaacgcgagtcagcccacatgacgatgctttc

SEQ ID NO: 460193 - DNA, 75 bp, synthetic construct
  source 1..75: mol_type = other DNA
tttaagccagaaacgcagttacagtatgttgggcacctgaagcctgggatttatatcaaggcgggtcgctttgtt

SEQ ID NO: 460194 - DNA, 75 bp, synthetic construct
  source 1..75: mol_type = other DNA
gccagcaccaccttcactcgtatgtcgccggggttaagcaccatggcagctaaaattctggcgaggagtgtgtga

SEQ ID NO: 460195 - DNA, 75 bp, synthetic construct
  source 1..75: mol_type = other DNA
cgaatgcctgccccggcgatgacagcgccgcctgcccgattatcgaaaatctctccggctgttgtcatcataagg

SEQ ID NO: 460196 - DNA, 75 bp, synthetic construct
  source 1..75: mol_type = other DNA
gaatctgtttaacgacccgcagcgccacagtgctgatgtaaaacggcgcacgctggagaaggtggcggagatcga

SEQ ID NO: 460197 - DNA, 75 bp, synthetic construct
  source 1..75: mol_type = other DNA
ttaccggcctgaccagcaaagccattcgcttctatgaagagaaggggctggtgacgccgccgatgcgcagcgaaa

SEQ ID NO: 460198 - DNA, 75 bp, synthetic construct
  source 1..75: mol_type = other DNA
gtcacgctgccaaaactgacccgtaagctcgaaaactatcgcggtgcgggaatgaacggcagcgcaccggtagac

SEQ ID NO: 460199 - DNA, 75 bp, synthetic construct
  source 1..75: mol_type = other DNA
ctgcaatctatgcgcaaccagctactggcgctggcgaatgcctgccccggtgatgacagcgccgactgcccgatt

SEQ ID NO: 460200 - DNA, 75 bp, synthetic construct
  source 1..75: mol_type = other DNA
ttaccggcctgaccagcaaagccatccgcttctatgaagagaagggattggtgacaccgccaatgcgcagcgaaa

SEQ ID NO: 460201 - DNA, 75 bp, synthetic construct
  source 1..75: mol_type = other DNA
gtggccgtcgaagtggtcatgcgtgggcgtcagaaagaagtcgacaccggagagggtaaacagggagaggatacc

SEQ ID NO: 460202 - DNA, 75 bp, synthetic construct
  source 1..75: mol_type = other DNA
gacgtatatctcagataaaatgaacgccgcgtttcctgaactcaactggcagatcccgcaatccacttatctggc

SEQ ID NO: 460203 - DNA, 75 bp, synthetic construct
  source 1..75: mol_type = other DNA
tggttttccacccagcattacaccgcaattgatacgcagtcggtggtgtatggcccttctgttatctatatggtt

SEQ ID NO: 460204 - DNA, 75 bp, synthetic construct
  source 1..75: mol_type = other DNA
gctttccatcgctatgtcgcagggcggggattttcttggtgacaatggcggccatgcttcgtgggtgaaacgcaa

SEQ ID NO: 460205 - DNA, 75 bp, synthetic construct
  source 1..75: mol_type = other DNA
gttataactggtatcgaaaaagaaaaaatacatacatttgaacgaaataaaagaggattaagtgcgtcactatta

SEQ ID NO: 460206 - DNA, 75 bp, synthetic construct
  source 1..75: mol_type = other DNA
cgaggggaaacagggagaagacaccgagtcgaaaatctccgtggtctgcacctatttccggctgacgatggacgg

SEQ ID NO: 460207 - DNA, 75 bp, synthetic construct
  source 1..75: mol_type = other DNA
aaggtacgacgctgacaaaaaaacacattaatacggcctttaaagaggtttatacagaacccgattcgctattaa

SEQ ID NO: 460208 - DNA, 75 bp, synthetic construct
  source 1..75: mol_type = other DNA
cgtacagagcctacgcatggaacggagagaaaagcgtttacgtagggtgttatccatccgtggatgaggctgtcg

SEQ ID NO: 460209 - DNA, 75 bp, synthetic construct
  source 1..75: mol_type = other DNA
tcaacggcgctatcgccaacgaaatcaccctgctctgcaatgctcgcgatctgcacgcattccttggggtaggga

SEQ ID NO: 460210 - DNA, 75 bp, synthetic construct
  source 1..75: mol_type = other DNA
tggcgatggtggagcgcaacgaaaaaggccgccagatccgccgatacttcatcgagtgcgaacgcaaactgcacc

SEQ ID NO: 460211 - DNA, 75 bp, synthetic construct
  source 1..75: mol_type = other DNA
cggctttgaggccactttcggtgtcgattatgcggaacatgcccgcatagagggtaagcccggcctgcagttcgt

SEQ ID NO: 460212 - DNA, 75 bp, synthetic construct
  source 1..75: mol_type = other DNA
agggtaaacccggcctgcagtttgtcggcgacaggctggacgaaatccagataagcctggtcttccatcagcatt

SEQ ID NO: 460213 - DNA, 75 bp, synthetic construct
  source 1..75: mol_type = other DNA
gatgggctgtattaacatcattgtgggcgtaccaggtgtgggtaaaacagtcaccgccagcaattattgtcagga

SEQ ID NO: 460214 - DNA, 75 bp, synthetic construct
  source 1..75: mol_type = other DNA
gtcacaaagaagtggattccggagagtggaagacgggcgaaagcaacaccaccaaagtgaccagtaccaacagct

SEQ ID NO: 460215 - DNA, 75 bp, synthetic construct
  source 1..75: mol_type = other DNA
cccggattcggttatctgggagctttacgccgcaatcggtgtggatgctgtgccgattcgttttgcaggctctta

SEQ ID NO: 460216 - DNA, 75 bp, synthetic construct
  source 1..75: mol_type = other DNA
attacaagctgaccatcaacggcgaagagattatcgaagttgatgtgctcaacatgatctacaaagttgccggtg

SEQ ID NO: 460217 - DNA, 75 bp, synthetic construct
  source 1..75: mol_type = other DNA
actaacccgctgcatccgaacgtggtgtctaacccggttgttcgtctgtatgaacaagacgcgctgcggatgggt

SEQ ID NO: 460218 - DNA, 75 bp, synthetic construct
  source 1..75: mol_type = other DNA
cagctacatgggcgttgttgaatccgtgacgctgccgaagctgacccgcaagctcgaaaactatcgcggcggtgg

SEQ ID NO: 460219 - DNA, 75 bp, synthetic construct
  source 1..75: mol_type = other DNA
gacaccatcaacatgattgagaaggtgaacggcgtcgaccggctggagcaacaccgtcgcaatatcggcctgtga

SEQ ID NO: 460220 - DNA, 75 bp, synthetic construct
  source 1..75: mol_type = other DNA
ggcagtggaaggggattgtacgtggccgcagtatgatcgacaaaagcacgatccggtagaagatgcattgcacgt

SEQ ID NO: 460221 - DNA, 75 bp, synthetic construct
  source 1..75: mol_type = other DNA
ggagggacgcttcggctgggcattattgaatgtcttcgttaacctgctggggtcttttgccatgacggcgctggc

SEQ ID NO: 460222 - DNA, 75 bp, synthetic construct
  source 1..75: mol_type = other DNA
ctgaacgttttcgtcaaccttctggggtcttttgccatgaccgcactggctttctggctgttttcggcctcaacc

SEQ ID NO: 460223 - DNA, 75 bp, synthetic construct
  source 1..75: mol_type = other DNA
gtaccttttccgcggagttcaagcttgaagctttcgagcaggtggtggttaaataccagcgtgatgtcagagaag

SEQ ID NO: 460224 - DNA, 75 bp, synthetic construct
  source 1..75: mol_type = other DNA
tataagcaggaacttcagagtattgagcccgctggtaatgctattacccctgaacaacgcgaaattcagcagatt

SEQ ID NO: 460225 - DNA, 75 bp, synthetic construct
  source 1..75: mol_type = other DNA
atgatcaagactcgtcggactaaacgtatcttttccccggagttcaagcttaaagctatcgaacaggtggttaaa

SEQ ID NO: 460226 - DNA, 75 bp, synthetic construct
  source 1..75: mol_type = other DNA
cagcatgaggcaatttgcgaagctatatgtaaaggagatgctgataaagcagaaacaatacttaaagagcatctg

SEQ ID NO: 460227 - DNA, 75 bp, synthetic construct
  source 1..75: mol_type = other DNA
tatcctcatccaggaaaaaacaacgcaaaaatgcggtaagcgaacaagaacaggaaagatttgcgccatgtgcgt

SEQ ID NO: 460228 - DNA, 75 bp, synthetic construct
  source 1..75: mol_type = other DNA
tggcaggtgctttagcccaactttttgttcatatgatttcattccctctcatgggactgacgccacctctgtttg

SEQ ID NO: 460229 - DNA, 75 bp, synthetic construct
  source 1..75: mol_type = other DNA
taccaagagcgcagcctcaggataaaaatcttcggcaagtagtgcataaacttctttcgatattttatgctgctt

SEQ ID NO: 460230 - DNA, 75 bp, synthetic construct
  source 1..75: mol_type = other DNA
ctgagtggcgtgctgtacttaattctgtatcaggaaaacataaagaaagagatcgttgtattatttacatgatgt

SEQ ID NO: 460231 - DNA, 75 bp, synthetic construct
  source 1..75: mol_type = other DNA
ccgcagctatcaacaatgacccgaaattcagtaccaccattaacaatgcgctggcaggtaaacaaccgctggaca

SEQ ID NO: 460232 - DNA, 75 bp, synthetic construct
  source 1..75: mol_type = other DNA
gcttaatcatcagcgcaaagatgcgcctgtcgtgtgggtccatgacggtgaacgcgatcacccgactattgctct

SEQ ID NO: 460233 - DNA, 75 bp, synthetic construct
  source 1..75: mol_type = other DNA
ccaatgtcgagcgtgtgctggtgaatagtcgtcaggccaatctgatagtagagatgaccgaagaaggcagatatc

SEQ ID NO: 460234 - DNA, 75 bp, synthetic construct
  source 1..75: mol_type = other DNA
gtgaaaattgaattaacggtgaatggtctgaaggtacaagcacagtaccatgatgatgaaattgagaatgttcat

SEQ ID NO: 460235 - DNA, 75 bp, synthetic construct
  source 1..75: mol_type = other DNA
ggaaactggttgttgctggacgacgagaagtggtgccagcttgcgcaattttgtgatttctcgatctttatcaaa

SEQ ID NO: 460236 - DNA, 75 bp, synthetic construct
  source 1..75: mol_type = other DNA
tcgttttgttgtctctggtagcttcaactcaggcctttgccggtcgttgtcagcacgacagcgacactgctgctg

SEQ ID NO: 460237 - DNA, 75 bp, synthetic construct
  source 1..75: mol_type = other DNA
gcgtacggtggtttttctttgcgctccgccggggacgggtaaatcaaccctaaccaccttctgggaatatctcgc

SEQ ID NO: 460238 - DNA, 75 bp, synthetic construct
  source 1..75: mol_type = other DNA
caaatgttcgcagggtgcttgaacagagtctgcccgcaaatttgaccttaatgatgacggctagcggcgaatatc

SEQ ID NO: 460239 - DNA, 75 bp, synthetic construct
  source 1..75: mol_type = other DNA
gtgaaaggggcgacccagcaaccgctgatctacggaccgaacatcaaagactggccggaattgggcgcgctgact

SEQ ID NO: 460240 - DNA, 75 bp, synthetic construct
  source 1..75: mol_type = other DNA
atggctacaccgcttattcgtgtcatgaacggacacatctacagagtatcaaatcgtcgtaagcgtaggcctgag

SEQ ID NO: 460241 - DNA, 75 bp, synthetic construct
  source 1..75: mol_type = other DNA
attcgcaccattctcaagcaaaaaccccagacaacccgaaagggatctggacagcaattgttcttaactcggaag

SEQ ID NO: 460242 - DNA, 75 bp, synthetic construct
  source 1..75: mol_type = other DNA
atgacaaatctcaacgtgggcaactggaaaactatcgaaatattccgggcgggaacacataccgcgatggcggga

SEQ ID NO: 460243 - DNA, 75 bp, synthetic construct
  source 1..75: mol_type = other DNA
cagtaaaggggctggcgcaggtagaatttatggaaagctgttacccggtttgcttttatcacaatgaatcacacg

SEQ ID NO: 460244 - DNA, 75 bp, synthetic construct
  source 1..75: mol_type = other DNA
gtgaaaggggcaactcagcaaccgctgatttacggaccgaacattaaagactggccggaattgggtgcgctgact

SEQ ID NO: 460245 - DNA, 75 bp, synthetic construct
  source 1..75: mol_type = other DNA
tactggcagtatgaactggttaattcccatctggggcctgttcaggtaactcataaggcgcttgtgcgattcggg

SEQ ID NO: 460246 - DNA, 75 bp, synthetic construct
  source 1..75: mol_type = other DNA
gacctttaccggttgtggtttcgcggcaggcgcgctggcgaccacggcggcgcgcaatggtatgacgctgattga

SEQ ID NO: 460247 - DNA, 75 bp, synthetic construct
  source 1..75: mol_type = other DNA
caggaagttaaacgttggatggcggaaataccgtccatttcagtaggtctgggggcgggtgacccggcgcagtat

SEQ ID NO: 460248 - DNA, 75 bp, synthetic construct
  source 1..75: mol_type = other DNA
tggctcaccagtcacggcgatattagcctgctggatatgaccgcctgtacctttaatgcgcccgaaggtagtgac

SEQ ID NO: 460249 - DNA, 75 bp, synthetic construct
  source 1..75: mol_type = other DNA
gtgtttttcgtgcgccgcctcagcgtggcaattaatgtgctggcgaaagatatcgccaatgcccgtgaaatcttt

SEQ ID NO: 460250 - DNA, 75 bp, synthetic construct
  source 1..75: mol_type = other DNA
atgcaaaagattaatttctatcgtaatcgcgtggcaattaatgtgctggcgaaagatatcgccaatgcccgtgaa

SEQ ID NO: 460251 - DNA, 75 bp, synthetic construct
  source 1..75: mol_type = other DNA
atagcagcgactatgctctcctggtacaaagactggaaaaagcggccttccctgccggaaccgccgcagtttgtg

SEQ ID NO: 460252 - DNA, 75 bp, synthetic construct
  source 1..75: mol_type = other DNA
tataaaatgaacgcttccatctctggcgcggaagtcggctgtcagggggaaattggcgtggcctgttcaatggcg

SEQ ID NO: 460253 - DNA, 75 bp, synthetic construct
  source 1..75: mol_type = other DNA
agagaaaaaatatgatgctgtcattatattaggtgatcgatacgaaatattttcagtggcagtagcagcttctat

SEQ ID NO: 460254 - DNA, 75 bp, synthetic construct
  source 1..75: mol_type = other DNA
tttcattgaacgtgtaaaaaatgctcataatccttactataataatgatgtaatgaatagtattgttaaaatcat

SEQ ID NO: 460255 - DNA, 75 bp, synthetic construct
  source 1..75: mol_type = other DNA
acaggctgttggtcgcgggcgctacaacaaattcagctttgcgcccgaatagacgctaattatacccgagaggct

SEQ ID NO: 460256 - DNA, 75 bp, synthetic construct
  source 1..75: mol_type = other DNA
attctcccacctccgccctggatagaggatctgctggctgctctcgcctgtaacgcccgtggtgaagcgcaggaa

SEQ ID NO: 460257 - DNA, 75 bp, synthetic construct
  source 1..75: mol_type = other DNA
ttctcacgttttgtgagtcatataactttccttatttactatcattaccaactcaagattacttaggattatgta

SEQ ID NO: 460258 - DNA, 75 bp, synthetic construct
  source 1..75: mol_type = other DNA
acaacgccagcagcagctcggctggactctgatggaggatgccgggcgcgggtggcggcgtacggttccctctcc

SEQ ID NO: 460259 - DNA, 75 bp, synthetic construct
  source 1..75: mol_type = other DNA
tttactgttgattattccaatggctttggtgatgcaatggatgcttatgaggaaaacatccgctctgctgagtca

SEQ ID NO: 460260 - DNA, 75 bp, synthetic construct
  source 1..75: mol_type = other DNA
atggagaagaaatcggggttgaagatatcgcccggttgtccccactgatgcacgggcatatcaatatgctggggc

SEQ ID NO: 460261 - DNA, 75 bp, synthetic construct
  source 1..75: mol_type = other DNA
taaggtggcccgtaagaacgccattgagaaaatctggccgctggaaggttatctgctgaagcaaaagctcagcga

SEQ ID NO: 460262 - DNA, 75 bp, synthetic construct
  source 1..75: mol_type = other DNA
gggatgctagccatcgataaatcaaccgcggataacgaagggcaaatcaccctggatacgctgtgggttgatgaa

SEQ ID NO: 460263 - DNA, 75 bp, synthetic construct
  source 1..75: mol_type = other DNA
tagtgaaggggcaaaaacctttgaactgcgtgaaggtctgaatgtgacaccttatgcgggtgtgaaactgcgtca

SEQ ID NO: 460264 - DNA, 75 bp, synthetic construct
  source 1..75: mol_type = other DNA
tgagcggcggcggtcacggcattgatatcactggtgatagcgccactgtaatcaacaaaggcaatataactgtca

SEQ ID NO: 460265 - DNA, 75 bp, synthetic construct
  source 1..75: mol_type = other DNA
ttctggtctattgaaattattcgcagagatttacgaaacagaattacccatgagccagaccctgagatcccttta

SEQ ID NO: 460266 - DNA, 75 bp, synthetic construct
  source 1..75: mol_type = other DNA
agagacagaccagaccgcgccgctgaacgtctacggcgaaaccaagctggcgggcgaacaggttgccgcgctctg

SEQ ID NO: 460267 - DNA, 75 bp, synthetic construct
  source 1..75: mol_type = other DNA
cactactccaccgactacgtcttcaacggcagcggcgaaaagccgtgggtggagaccgaccagactgccccgctg

SEQ ID NO: 460268 - DNA, 75 bp, synthetic construct
  source 1..75: mol_type = other DNA
taccttcgccggacatgtctttaactgggttggtgtaacgcacataatcttttcgatagtttttgctgttggtta

SEQ ID NO: 460269 - DNA, 75 bp, synthetic construct
  source 1..75: mol_type = other DNA
ttctggtccattgaaattattcgtagggatctgagaaacagaattactcatgagcctgatccagaaatacctctg

SEQ ID NO: 460270 - DNA, 75 bp, synthetic construct
  source 1..75: mol_type = other DNA
gccctgcaactgttcggcgcggggcgcgagaagcgcatctatgcggtgccgccgtttacccgcgtggaaagtctc

SEQ ID NO: 460271 - DNA, 75 bp, synthetic construct
  source 1..75: mol_type = other DNA
cgaccggtgaaaccggcaaaaccatcacagagtcatttatgaacaagccgaaagacattctgtcgccggatgcgc

SEQ ID NO: 460272 - DNA, 75 bp, synthetic construct
  source 1..75: mol_type = other DNA
cacagagtcatttatgaacaagccgaaagacattctgtcaccggatgcgccgtttattcagaccggtcgggatgt

SEQ ID NO: 460273 - DNA, 75 bp, synthetic construct
  source 1..75: mol_type = other DNA
attcccggctataacgcggatccggacgagacaaaatattacggtggtgtgactgccggtggagatggtggcctg

SEQ ID NO: 460274 - DNA, 75 bp, synthetic construct
  source 1..75: mol_type = other DNA
atgaacaagccgaaagacattctgtcaccggatgcaccgttcattcagaccggcagggatgtggtgaaccgggct

SEQ ID NO: 460275 - DNA, 75 bp, synthetic construct
  source 1..75: mol_type = other DNA
atgtctggaaatataggggcaaatccatcggggtttatcagaagtctggcggttaattattccgggatggtgtgg

SEQ ID NO: 460276 - DNA, 75 bp, synthetic construct
  source 1..75: mol_type = other DNA
tggcggttaattattccgggatggtgtgggcgtttttcgccgcgctggctgccggttggctggcctctgtaagtg

SEQ ID NO: 460277 - DNA, 75 bp, synthetic construct
  source 1..75: mol_type = other DNA
caggttcggggtgctcatctaacggaaactgtatttatggcgggaatggcgacgatgttatctatgaaaaactgg

SEQ ID NO: 460278 - DNA, 75 bp, synthetic construct
  source 1..75: mol_type = other DNA
tttttaacccagtcgaacatcgaccatacggtaaacagctgcgcggttggtgaatacaaaagcgagttgagcggc

SEQ ID NO: 460279 - DNA, 75 bp, synthetic construct
  source 1..75: mol_type = other DNA
gtagtggctgtactgcaaacggtaattgcctcccgcacgggaatggtgacaggaaagtctatgaatcgcttgtca

SEQ ID NO: 460280 - DNA, 75 bp, synthetic construct
  source 1..75: mol_type = other DNA
tggggctggcagtcagtgtggcacaggctgacagcaacagtgattaccgggtgggttctgattttgcccgtcaga

SEQ ID NO: 460281 - DNA, 75 bp, synthetic construct
  source 1..75: mol_type = other DNA
gacctgatgaagaaccagcaaatcccggataacggtgcgctgaccgaaaaagtgaaagagcagatagccggccag

SEQ ID NO: 460282 - DNA, 75 bp, synthetic construct
  source 1..75: mol_type = other DNA
ggtcaggcagtgtcagcgctggcggcagtggctgctgccggagaggatgtggcggaactgaacggcgagaatgtc

SEQ ID NO: 460283 - DNA, 75 bp, synthetic construct
  source 1..75: mol_type = other DNA
tatggcgtcgaccacgtaaaagtagcggaaggtttaggttgtaaagcaattcgcgttttcaaaccggaagatatt

SEQ ID NO: 460284 - DNA, 75 bp, synthetic construct
  source 1..75: mol_type = other DNA
atcctgactgtcggggattacggttgatgagctgcagaaaattcagttcgacagactggatttcactaacttcta

SEQ ID NO: 460285 - DNA, 75 bp, synthetic construct
  source 1..75: mol_type = other DNA
ggactgccagtatcaccggggactggaaatacacggatgaatatcgtgaggtgacgataccgcactcacagttcc

SEQ ID NO: 460286 - DNA, 75 bp, synthetic construct
  source 1..75: mol_type = other DNA
cggctgggggcaggatatcgggctggccagatgcagcagtgatgaaaaggccctggctaaagcaaaatcaaacaa

SEQ ID NO: 460287 - DNA, 75 bp, synthetic construct
  source 1..75: mol_type = other DNA
tcagtatctaagcattgaattagataaagccaatggtgagaagatgcgatttgatgccccttcagaagggtatga

SEQ ID NO: 460288 - DNA, 75 bp, synthetic construct
  source 1..75: mol_type = other DNA
tatcggcccgacgcaagtggtcgctctgcggcaatcgcaactgagatcgaccgtcagggacaaattattttcggc

SEQ ID NO: 460289 - DNA, 75 bp, synthetic construct
  source 1..75: mol_type = other DNA
gggatttgcatatccacagcccgatgacgtggcaggccaatggttactccagtcagtgtgatatagagcactatg

SEQ ID NO: 460290 - DNA, 75 bp, synthetic construct
  source 1..75: mol_type = other DNA
ccggcggcgctgggggtttgtgccgctgatccagagcgcaatgtggtggcgatttccggtgacttcgacttccag

SEQ ID NO: 460291 - DNA, 75 bp, synthetic construct
  source 1..75: mol_type = other DNA
gtcataccggttcggtagagaaatacaccgaagggcgcaaaatcgttcatatcgatattgagccgacgcaaattg

SEQ ID NO: 460292 - DNA, 75 bp, synthetic construct
  source 1..75: mol_type = other DNA
tgcataaagaagatttccaggctgttgatatcgaagctatcgccaagccggtcagtaaaatggcggttacagtac

SEQ ID NO: 460293 - DNA, 75 bp, synthetic construct
  source 1..75: mol_type = other DNA
gactgccggcggggatggtggcctgaaaaatgacggcaccacggaatgggcgaccggtgaaaccggaaaaaccat

SEQ ID NO: 460294 - DNA, 75 bp, synthetic construct
  source 1..75: mol_type = other DNA
gtgctgggaacaccactgagctggaatgcgaaatactcagcagatgcatcatttacgccagtacagaagacgctg

SEQ ID NO: 460295 - DNA, 75 bp, synthetic construct
  source 1..75: mol_type = other DNA
accatcacagagtccttcatgaacaagccgaaagacattctgtcaccggatgcaccgttcattcagaccggcagg

SEQ ID NO: 460296 - DNA, 75 bp, synthetic construct
  source 1..75: mol_type = other DNA
cgcagcagataaaccgcagtgagttcacaaactatacctgtgagcgggacacgatggtggaggagtactgcacac

SEQ ID NO: 460297 - DNA, 75 bp, synthetic construct
  source 1..75: mol_type = other DNA
gcacagagccttgtggatctgactggtggggcctacctcttcattgctccggttatcggcgctcttggtacattt

SEQ ID NO: 460298 - DNA, 75 bp, synthetic construct
  source 1..75: mol_type = other DNA
atgcccatacactattctgtgcttagcactctcctgctcacgctaatccttggaggggttttctggcagacgcca

SEQ ID NO: 460299 - DNA, 75 bp, synthetic construct
  source 1..75: mol_type = other DNA
ctatacgaggcgttgggttcatgaccttaatgtgcggtgtgagcacattaatcccacagtatctgatggctgttt

SEQ ID NO: 460300 - DNA, 75 bp, synthetic construct
  source 1..75: mol_type = other DNA
accgtgctgttaaccttcctgccacccgcgttgttgtatctcgtcttcccgaacggctttatttacgggatcggc

SEQ ID NO: 460301 - DNA, 75 bp, synthetic construct
  source 1..75: mol_type = other DNA
tgcctcgtcactcagcttctctctgagtaacggcagcaatctgtcgatgaagattgaatggatcgcaacccccgg

SEQ ID NO: 460302 - DNA, 75 bp, synthetic construct
  source 1..75: mol_type = other DNA
ttgttgccatggcaacggtaatggatgtttgtgggttaattggcactctggcacaaagccttgtggatctcactg

SEQ ID NO: 460303 - DNA, 75 bp, synthetic construct
  source 1..75: mol_type = other DNA
gctaaatcagatctaaactcgctacgctctcaatataacctctctagcgatgtcgtagagacacagcaaagatat

SEQ ID NO: 460304 - DNA, 75 bp, synthetic construct
  source 1..75: mol_type = other DNA
gcaggaaagggcgaagagactcacaaatttacaaaaagaattttctaatgccgacactccacagaaaaagcagat

SEQ ID NO: 460305 - DNA, 75 bp, synthetic construct
  source 1..75: mol_type = other DNA
ttaattacatcatgaaacataacatatcagcacggagtagtggattcctgtcccgttttctttttgcatgggtaa

SEQ ID NO: 460306 - DNA, 75 bp, synthetic construct
  source 1..75: mol_type = other DNA
ggcggttttattcagggagcgtccgcacgcgggatgctggaagtatttatcaaaacgattttccagcttaaaaac

SEQ ID NO: 460307 - DNA, 75 bp, synthetic construct
  source 1..75: mol_type = other DNA
gggcgttgttacgtgcgtgctcaatctacatcctgatttttctgttcattctgctttgctctccactgttcccga

SEQ ID NO: 460308 - DNA, 75 bp, synthetic construct
  source 1..75: mol_type = other DNA
gtagttcacacaacgacaaaaacatttgtaaaaaaattaacattacctcaagttaagccatttaatgataaattt

SEQ ID NO: 460309 - DNA, 75 bp, synthetic construct
  source 1..75: mol_type = other DNA
aaaaacactctgcattttggggtgttatggttatagccggtacagtaattggcggtgggatgtttgctttacctg

SEQ ID NO: 460310 - DNA, 75 bp, synthetic construct
  source 1..75: mol_type = other DNA
cccggactgtggctcccacgacaccattccctgggccgatggctggatgtgccgggactgcgggtgtgagtgggg

SEQ ID NO: 460311 - DNA, 75 bp, synthetic construct
  source 1..75: mol_type = other DNA
acagtactggctgcggtggtgcttggtggcactagtttgctcggcgggcgctggcgcggcggtgataatcggttt

SEQ ID NO: 460312 - DNA, 75 bp, synthetic construct
  source 1..75: mol_type = other DNA
acgcgcattgatgcggagctgtcgatggcggtgttacgggaatatagagaaaagtttccggcatggcgggatgcg

SEQ ID NO: 460313 - DNA, 75 bp, synthetic construct
  source 1..75: mol_type = other DNA
aaaggaattttgatggcctgcccggtgcaaaagatatcattctgggcgaatttaccaagagggttcaccggattt

SEQ ID NO: 460314 - DNA, 75 bp, synthetic construct
  source 1..75: mol_type = other DNA
atggtcataccaaacgctgccttgtcagagcattcaatgttaatacagcaacaacagatatactcttcgaccaaa

SEQ ID NO: 460315 - DNA, 75 bp, synthetic construct
  source 1..75: mol_type = other DNA
acgctgcgtaacatggtggcggctggtagcggtatcactttactgcctgcgctggccgtgccgccggagcgtaaa

SEQ ID NO: 460316 - DNA, 75 bp, synthetic construct
  source 1..75: mol_type = other DNA
tctttggtgtcacgctgggattgttcgattatctggcggatctgtttaagattgataactcccacggcgggcgtt

SEQ ID NO: 460317 - DNA, 75 bp, synthetic construct
  source 1..75: mol_type = other DNA
cgattatctcttcgggcggcaatgttgattcgctggtaaaatcgttcctcggcaccaaacagcatggcattattg

SEQ ID NO: 460318 - DNA, 75 bp, synthetic construct
  source 1..75: mol_type = other DNA
gcgcaatcattagcgaaacgatatcgatgaatttcggctatcacgctaatcctcgcattgttgggatctgcacgg

SEQ ID NO: 460319 - DNA, 75 bp, synthetic construct
  source 1..75: mol_type = other DNA
caggataatatcgccattatccagcagacgatggatccgggcatgaatgtttcacatgtcgccgcctgcatggta

SEQ ID NO: 460320 - DNA, 75 bp, synthetic construct
  source 1..75: mol_type = other DNA
ttaccgttgccttcgttctctatatcctcacttatgcctatatctctgctaatggtgcgatcattagtgaaacga

SEQ ID NO: 460321 - DNA, 75 bp, synthetic construct
  source 1..75: mol_type = other DNA
cgctgctggcgctggtgatttatctcttctggctctattgcacgatggggaatatcccgcgagaaagctttaagg

SEQ ID NO: 460322 - DNA, 75 bp, synthetic construct
  source 1..75: mol_type = other DNA
acaactggcgcaactgcaaatgcagacccatgagcaaggttatcaggcgggaattaccgaaggtcgccagcaagg

SEQ ID NO: 460323 - DNA, 75 bp, synthetic construct
  source 1..75: mol_type = other DNA
ggattgccgaaggtcgccagcaaggtcataagcagggctatcaggaaggactggcccaggggctggaacaaggtc

SEQ ID NO: 460324 - DNA, 75 bp, synthetic construct
  source 1..75: mol_type = other DNA
cgaagacctgatgaataaccagaaaatcccggacagtggcgttctgacgcagaaagtgaaagagcagattgctga

SEQ ID NO: 460325 - DNA, 75 bp, synthetic construct
  source 1..75: mol_type = other DNA
gtgacgccgccgatgcgcagcgaaaacggttatcgaacctacacgcagcagcatctcaacgaactgaccttactg

SEQ ID NO: 460326 - DNA, 75 bp, synthetic construct
  source 1..75: mol_type = other DNA
agcttgcggagaacaatacgtcagacgaggcagtaatccaccttcacgaggcgttagcatggggaatgcacattc

SEQ ID NO: 460327 - DNA, 75 bp, synthetic construct
  source 1..75: mol_type = other DNA
tggcagaggcaaaatctcaacaagcaccgattcatgcccggatgcagcaactggtcagtgagtttcagaccactc

SEQ ID NO: 460328 - DNA, 75 bp, synthetic construct
  source 1..75: mol_type = other DNA
gttttacattactggaaattatggtggtgattgtcattatcggcgtacttgccagcctggtggttcccaacctga

SEQ ID NO: 460329 - DNA, 75 bp, synthetic construct
  source 1..75: mol_type = other DNA
atgccgggcagtgacccgaaaaccaatggtgacctgagcgcggatatccgccgtcttgagggcgcgctgactgcc

SEQ ID NO: 460330 - DNA, 75 bp, synthetic construct
  source 1..75: mol_type = other DNA
gtgccaatgccgcgatggtcagcaactccttcatctacccggctgatgccctgatgtttgacctcgaagactccg

SEQ ID NO: 460331 - DNA, 75 bp, synthetic construct
  source 1..75: mol_type = other DNA
gagcgttacgctgagttccgggctggatataacagatgggcagtcattgctgttttccataacgaacagacacaa

SEQ ID NO: 460332 - DNA, 75 bp, synthetic construct
  source 1..75: mol_type = other DNA
gcaaacctctctccgcagatacccgtaagcttatcaataccacaaccattgcgctaagcttggcgtttgcttata

SEQ ID NO: 460333 - DNA, 75 bp, synthetic construct
  source 1..75: mol_type = other DNA
tatatcgcgccattggtaattatccctatcctgataaaatatattgggttgggggaatatggggaattagtctat

SEQ ID NO: 460334 - DNA, 75 bp, synthetic construct
  source 1..75: mol_type = other DNA
acctggaagagagcggcgaactggtgaatctgtttaacgacccgcagcggcatagcgccgacgtcaaacggcgca

SEQ ID NO: 460335 - DNA, 75 bp, synthetic construct
  source 1..75: mol_type = other DNA
acacggaattttcaatcggcggcaccgaactgctgttattcaaacagatgggagctgccacggtggacggtatcc

SEQ ID NO: 460336 - DNA, 75 bp, synthetic construct
  source 1..75: mol_type = other DNA
atggcaatgccgcgcaaactcaaatacatgaatgtctttctgaacggttacagctatcagggcgttgcaaagtcc

SEQ ID NO: 460337 - DNA, 75 bp, synthetic construct
  source 1..75: mol_type = other DNA
tgctgatgacttcgagcctggcgcgcgttaactgggatgattttaccgaatcggtgcctgcgtttattaccacgg

SEQ ID NO: 460338 - DNA, 75 bp, synthetic construct
  source 1..75: mol_type = other DNA
agcttacggtatcattgaaaacagcgagagccgcgagacgtatttatcagcactgaaaggtcgtgatgggctttc

SEQ ID NO: 460339 - DNA, 75 bp, synthetic construct
  source 1..75: mol_type = other DNA
gatttagaagccaaacagccatcgccagtagtaccggaagaaaaaccaatgcctaaccctcttagcatgtacaca

SEQ ID NO: 460340 - DNA, 75 bp, synthetic construct
  source 1..75: mol_type = other DNA
actaacgaggatgttcaccctggtagcgataacatgctacgtctgtgggatgacctgaatgaccgttacgcgccg

SEQ ID NO: 460341 - DNA, 75 bp, synthetic construct
  source 1..75: mol_type = other DNA
tcaccgctggtggcgatagttcctccttacgcaaccgccggagcgttaatctttgttggcgtgctgatgacttcg

SEQ ID NO: 460342 - DNA, 75 bp, synthetic construct
  source 1..75: mol_type = other DNA
gggcttgaggcgctgatccagcagccagccaatatggcggactcccgcaactaccgtactggtggatacattaaa

SEQ ID NO: 460343 - DNA, 75 bp, synthetic construct
  source 1..75: mol_type = other DNA
gctaatgatgggtggataattcctggtgcgtcgtggaaaccgtcacactggatgccgctaccagaaccgccgcag

SEQ ID NO: 460344 - DNA, 75 bp, synthetic construct
  source 1..75: mol_type = other DNA
acgtcattttcatgccgcggtgctggtttctattgtggtgacgtcttgctgtggattatttttcggtgatgttca

SEQ ID NO: 460345 - DNA, 75 bp, synthetic construct
  source 1..75: mol_type = other DNA
ggtgcgttatcacttgaactcgccggtatcattttctcctttatgctgatcaacttatttgattcatcaggaaca

SEQ ID NO: 460346 - DNA, 75 bp, synthetic construct
  source 1..75: mol_type = other DNA
ccgcggtgcttgtttctattgtggtgacgtcttgctgtggattatttttcggtgatgttcattttagcggtgtct

SEQ ID NO: 460347 - DNA, 75 bp, synthetic construct
  source 1..75: mol_type = other DNA
tgtgcgcaacctgcgtacagaacgctccccggaaggaactgaactgctgttcgcacgctgctccattttgcaggc

SEQ ID NO: 460348 - DNA, 75 bp, synthetic construct
  source 1..75: mol_type = other DNA
aattcaagactggttcaatgaattgcacgaagaaaataatctaatgaagaacaatctggagcgccacattgccac

SEQ ID NO: 460349 - DNA, 75 bp, synthetic construct
  source 1..75: mol_type = other DNA
tgaccttgttcaggctattcaggattggttcaacgagctgcatgaagaaaacaataagatgaaagaaaatcttgt

SEQ ID NO: 460350 - DNA, 75 bp, synthetic construct
  source 1..75: mol_type = other DNA
cagcggataaccagcaattcagcatcatcctggcggggaccacctggcggattagcatcacctggcgcgatctgt

SEQ ID NO: 460351 - DNA, 75 bp, synthetic construct
  source 1..75: mol_type = other DNA
atggcttataaagttttaggtaaattagtcggtaacactggtgatgccagtcagttaactatggttgtacaagac

SEQ ID NO: 460352 - DNA, 75 bp, synthetic construct
  source 1..75: mol_type = other DNA
atcaggtcgatggcgtagttgatgtgattttgcaggcgtgccatacctacgcggtggaatcgctggcgattaaac

SEQ ID NO: 460353 - DNA, 75 bp, synthetic construct
  source 1..75: mol_type = other DNA
aaggtacttacagtcctgatgagttcatcgaaaaggtaaagcagtataaaagcgtgcaagcatatattgctgcgg

SEQ ID NO: 460354 - DNA, 75 bp, synthetic construct
  source 1..75: mol_type = other DNA
agaacagaaagccaagtaagacaaatacctgatagcaaaataaaagaattctttaacaataacaatattttttaa

SEQ ID NO: 460355 - DNA, 75 bp, synthetic construct
  source 1..75: mol_type = other DNA
atgaaatgttgcctaaacttcataaagcaactttcttaaatacgctaatatattgcatacttctagttatttacg

SEQ ID NO: 460356 - DNA, 75 bp, synthetic construct
  source 1..75: mol_type = other DNA
cggctaaaaagcatcataaaaatgccaaagctgaacagaaagcccctgaacaaaaagcgcaggcagcgaagaaac

SEQ ID NO: 460357 - DNA, 75 bp, synthetic construct
  source 1..75: mol_type = other DNA
gcggcgcctgcccaaaaagcgcaggcggctaaaaagcatcataaaaaagcgaaaaatgaacagaaagcgcctgag

SEQ ID NO: 460358 - DNA, 75 bp, synthetic construct
  source 1..75: mol_type = other DNA
tgtgacgacagtacacaggattatccgacgaaaaccgacctgggcggccgcagtcatttactggtatcaacggag

SEQ ID NO: 460359 - DNA, 75 bp, synthetic construct
  source 1..75: mol_type = other DNA
gaaatacacggatgaatatcgtgaagtgacgataccgcactcacagttccggttcagtatgaacgggctgaaact

SEQ ID NO: 460360 - DNA, 75 bp, synthetic construct
  source 1..75: mol_type = other DNA
atgccaggagtaccggaagtcaaattcatgggggtattgactgtttatgtactggaggggaagcgggaatataaa

SEQ ID NO: 460361 - DNA, 75 bp, synthetic construct
  source 1..75: mol_type = other DNA
atggttcaggttatgaaagaaaagataaatacctttttcaggtctctgaattttaattattccgtaaagccgtgc

SEQ ID NO: 460362 - DNA, 75 bp, synthetic construct
  source 1..75: mol_type = other DNA
gataaggcacagagcggaaaaagcagtgattttggtgaagcagtatcacagctggctgcgcttgccgccgcaggt

SEQ ID NO: 460363 - DNA, 75 bp, synthetic construct
  source 1..75: mol_type = other DNA
cgttcgcggcggcgcagacgttgtacgtctgccgaaaaccgataccgctcaggacgttctggatatcgagaaaga

SEQ ID NO: 460364 - DNA, 75 bp, synthetic construct
  source 1..75: mol_type = other DNA
cgcgtcagattgatctgctacacaacctctacgcgccaactcagaaagaagtggatcacgcacgtcgcgtcgtag

SEQ ID NO: 460365 - DNA, 75 bp, synthetic construct
  source 1..75: mol_type = other DNA
atggtgacctgagcgcagatatccgccgccttgagggtgcgctgatcgcctgcgcgctacaggtcaaaaccgtca

SEQ ID NO: 460366 - DNA, 75 bp, synthetic construct
  source 1..75: mol_type = other DNA
aatcccggacagtggtgttctgacgcagaaagtgaaagaacagattgctgaccagctgaaacaggcaggacagta

SEQ ID NO: 460367 - DNA, 75 bp, synthetic construct
  source 1..75: mol_type = other DNA
tggggattaccacacagaatcccttacttaatacacaaatcacgtttatgaacaccacagtgaatgtcacctgga

SEQ ID NO: 460368 - DNA, 75 bp, synthetic construct
  source 1..75: mol_type = other DNA
aagaataacggcaccacggaatgggcgaccggtgaaaccggcaaaaccatcacagagtcattcatgaacaagccg

SEQ ID NO: 460369 - DNA, 75 bp, synthetic construct
  source 1..75: mol_type = other DNA
tgtgggtctggcgaagtgcaacagcgaagaaaaggcgctgggaaaggcaaaggacaacaaactgacggtgagtgt

SEQ ID NO: 460370 - DNA, 75 bp, synthetic construct
  source 1..75: mol_type = other DNA
acgatggtggaggaatattgttccaggacagccaggatcacaggagactggaaatacacggatgaatatcgtgag

SEQ ID NO: 460371 - DNA, 75 bp, synthetic construct
  source 1..75: mol_type = other DNA
tggagagttgtccgtttaataaagcggatggcgtgctgaaaggtactgagtgttcagagccgggtggtacgaaaa

SEQ ID NO: 460372 - DNA, 75 bp, synthetic construct
  source 1..75: mol_type = other DNA
ggacgtgcctttggacaaaagctatactgggatatacgtgaacagatagtacctggtagcaaatatgatgcagat

SEQ ID NO: 460373 - DNA, 75 bp, synthetic construct
  source 1..75: mol_type = other DNA
aaatatggtgccatataatcaacgtgaatttgctcctgtagtgagaggtattgcccgaacccaagcacgaataga

SEQ ID NO: 460374 - DNA, 75 bp, synthetic construct
  source 1..75: mol_type = other DNA
tcatatattcgtgttgagcgtgggttaaacaatataaaaagtcgtttgacgtttggggatgactatacaccatca

SEQ ID NO: 460375 - DNA, 75 bp, synthetic construct
  source 1..75: mol_type = other DNA
gcagcagaagggacatgattatgagaccggtgacacctggcgtatccgttataacaagtcgtttgagctgacggg

SEQ ID NO: 460376 - DNA, 75 bp, synthetic construct
  source 1..75: mol_type = other DNA
atctaagtcagtctctgggaacgctaggatatataagcctttgggggagtcgtgatgaatatcatgacagtaggc

SEQ ID NO: 460377 - DNA, 75 bp, synthetic construct
  source 1..75: mol_type = other DNA
gtttatctttatattgcgtaaaaacaaaaattacagcggttgctctctctgtgatggcggcctgtacccttcttt

SEQ ID NO: 460378 - DNA, 75 bp, synthetic construct
  source 1..75: mol_type = other DNA
gccagtgccatgcggattaccggctgccggaagagaaagggccggcaggcgtctatctgacccgcacggtatgta

SEQ ID NO: 460379 - DNA, 75 bp, synthetic construct
  source 1..75: mol_type = other DNA
gtatggtttaccatgggctttgactgcatttggtggtttacaaggctcggaatattatcagggtgtggcattggg

SEQ ID NO: 460380 - DNA, 75 bp, synthetic construct
  source 1..75: mol_type = other DNA
tcacgttatgaaatgggcttaaacgggcgagcctttgaacaacgtttatactgggatttccgtcagcagagagta

SEQ ID NO: 460381 - DNA, 75 bp, synthetic construct
  source 1..75: mol_type = other DNA
gggacaatatcgtccttcagattctgctgttgagcactcactgttgggagagctaacgtctatatatgggctacc

SEQ ID NO: 460382 - DNA, 75 bp, synthetic construct
  source 1..75: mol_type = other DNA
agtggggaaggaatagtcaatgctatgcagactacattcttccaaaagaaaaggggccagccggagtttttttaa

SEQ ID NO: 460383 - DNA, 75 bp, synthetic construct
  source 1..75: mol_type = other DNA
gaaaatggggatcgttcagtgtgggaggtgtcagggatgagtatagaggagggcgaccatcgcaagattctataa

SEQ ID NO: 460384 - DNA, 75 bp, synthetic construct
  source 1..75: mol_type = other DNA
ctggataaaggcgacattggcctgctgggttcactgttttatctcagctacggattgtcgaaatttaccgccgga

SEQ ID NO: 460385 - DNA, 75 bp, synthetic construct
  source 1..75: mol_type = other DNA
aaaatgacaatgccgttatggattcaggggtactgagagcagtcgttacggggtatggcgaggcccccatgcctg

SEQ ID NO: 460386 - DNA, 75 bp, synthetic construct
  source 1..75: mol_type = other DNA
catggtatcgctgctgtttgtcctcagtttctggtgggcttcaacgcgtatccgctatctgtggcaggggattct

SEQ ID NO: 460387 - DNA, 75 bp, synthetic construct
  source 1..75: mol_type = other DNA
aactatcaggttttattgcaggcggtgaatggtcaggcgcgaatttccagccagacggtgaggaatttattgggg

SEQ ID NO: 460388 - DNA, 75 bp, synthetic construct
  source 1..75: mol_type = other DNA
atggcgatttatcatctcagcatgaaaatcatctccagaagcagcggctacagcgccgttgcttctgctgcctat

SEQ ID NO: 460389 - DNA, 75 bp, synthetic construct
  source 1..75: mol_type = other DNA
ctgagccagcaaatggaaaaattgcgacagcattaccggaaggtggagaaacaggacattcccgcgagtcagacg

SEQ ID NO: 460390 - DNA, 75 bp, synthetic construct
  source 1..75: mol_type = other DNA
gaccttctgaatatcgtgcttcctgacaacgcaacttcgtacacactacgtgacatcatcgaagcgttgccgaag

SEQ ID NO: 460391 - DNA, 75 bp, synthetic construct
  source 1..75: mol_type = other DNA
tgacagagcccgcacgccgtatggctgaccttctgaatattgagcttcctgacaacgcaacttcgtacatactgc

SEQ ID NO: 460392 - DNA, 75 bp, synthetic construct
  source 1..75: mol_type = other DNA
cagcctgaaaaaatcatcgccgttttcgtccggtttttcccgtattcccctgatgcaatgggcggcaccggaata

SEQ ID NO: 460393 - DNA, 75 bp, synthetic construct
  source 1..75: mol_type = other DNA
atgggctgaccatgcaaacagggcactggcgaacgccggttatcaggaagagatagaccatcgttcatacgagcg

SEQ ID NO: 460394 - DNA, 75 bp, synthetic construct
  source 1..75: mol_type = other DNA
tcgcgcttcccgcaaacggaaagcgccgtgcaggcgtcggaaaatctcggcggcgtgctggatagcgccaatcat

SEQ ID NO: 460395 - DNA, 75 bp, synthetic construct
  source 1..75: mol_type = other DNA
ttaacgaccagctcaccacgttgcagcaggcggatcactatctcgggcaactggagcagcagttgctcgattatc

SEQ ID NO: 460396 - DNA, 75 bp, synthetic construct
  source 1..75: mol_type = other DNA
ggttcactgatgcttgatgagcgtaccggactgactcacgactacacccgcaaaagcggtgtggctgaggctgtg

SEQ ID NO: 460397 - DNA, 75 bp, synthetic construct
  source 1..75: mol_type = other DNA
taaagacaagtcttactgctgtggcatattcagtgatgatgacatgtacattacttcatgttgaagatgttatag

SEQ ID NO: 460398 - DNA, 75 bp, synthetic construct
  source 1..75: mol_type = other DNA
ttttgctgaatgccgtgaccgcgccttaccggcggagcgaaaccgtgctggctcactccatgctcgccaccatcc

SEQ ID NO: 460399 - DNA, 75 bp, synthetic construct
  source 1..75: mol_type = other DNA
aacaaaacgcccccgaccatcaaggccgagggcagttaagatatcaaaaatccgttatccggtgaaacgcagcac

SEQ ID NO: 460400 - DNA, 75 bp, synthetic construct
  source 1..75: mol_type = other DNA
ggggtgctctggaaattgtgttcataacaaaacgcccccgaccatcaaggccgagggcagttaagatatcaaaaa

SEQ ID NO: 460401 - DNA, 75 bp, synthetic construct
  source 1..75: mol_type = other DNA
cggttaaaactatatctaggactcctgcgtcaacacaggaaatgttgacctataagggagcacctcaaaatacgc

SEQ ID NO: 460402 - DNA, 75 bp, synthetic construct
  source 1..75: mol_type = other DNA
cgggcgttgactgacgggaaagttgactccctgagtgtcactgtcgggcaaatggtcaataccggagacagcctt

SEQ ID NO: 460403 - DNA, 75 bp, synthetic construct
  source 1..75: mol_type = other DNA
ttacagcgcagacctgctgctgacgctgaaccagcagggttgtaaccgccactggctactgcctgcgtggaagaa

SEQ ID NO: 460404 - DNA, 75 bp, synthetic construct
  source 1..75: mol_type = other DNA
ggcaattaagaatcagctttgtggtaaatggcgttcagttggtattatgtcagatgaagccggtattatatttga

SEQ ID NO: 460405 - DNA, 75 bp, synthetic construct
  source 1..75: mol_type = other DNA
acgacgaaattcgaatttcatggtttacgagtatcttaaacgttcaggccagagctctcataaagtggaggacat

SEQ ID NO: 460406 - DNA, 75 bp, synthetic construct
  source 1..75: mol_type = other DNA
tcatccgcaagtcagcaagaacgtcagcaaaaattatttcccgaaaagttacttttccgctcgatgacttggata

SEQ ID NO: 460407 - DNA, 75 bp, synthetic construct
  source 1..75: mol_type = other DNA
acagccctctgcacaactgtttgcagagcaccttcccgtcgagtggatacagcactgtctgacgctttctgcgca

SEQ ID NO: 460408 - DNA, 75 bp, synthetic construct
  source 1..75: mol_type = other DNA
cgggtctggcagactatcagttcggttgttacagacgccttcagtcctgaaggcttttttatttgtggtaaatgg

SEQ ID NO: 460409 - DNA, 75 bp, synthetic construct
  source 1..75: mol_type = other DNA
atcttaaattttagattatggttttattttttttcattcgttgcatatttcaaaacttttaaagagttagaaatt

SEQ ID NO: 460410 - DNA, 75 bp, synthetic construct
  source 1..75: mol_type = other DNA
ctgaaccagcagggttgtaaccgccactggctactgcctgcgtggaagaatatcgcggcagaaacagaagaaagt

SEQ ID NO: 460411 - DNA, 75 bp, synthetic construct
  source 1..75: mol_type = other DNA
tccgtcctaccgttatcttcggtgaacgcaaccgcggtaacgtctataacttgctgaaacagatcgctggcggca

SEQ ID NO: 460412 - DNA, 75 bp, synthetic construct
  source 1..75: mol_type = other DNA
ccgagatttacacccgcgttttttcgctggacgtcctgacaggaagtggcctgtcctttacctgcgatccacagc

SEQ ID NO: 460413 - DNA, 75 bp, synthetic construct
  source 1..75: mol_type = other DNA
ttcgctggacgtcctgacaggaagtggcctgtcctttacctgcgatccacagcgtgcaaaacagcttctcggata

SEQ ID NO: 460414 - DNA, 75 bp, synthetic construct
  source 1..75: mol_type = other DNA
gtgcagcctgggtatatcctgatttcaacacagattacaccctgccgacataccagagagaggccagaacaatga

SEQ ID NO: 460415 - DNA, 75 bp, synthetic construct
  source 1..75: mol_type = other DNA
atgaaagcgttaaatcagttgcgtagtgtggttgaaggtacattcaattttctctgtgaaaacgggtacattcag

SEQ ID NO: 460416 - DNA, 75 bp, synthetic construct
  source 1..75: mol_type = other DNA
atcagcagacggcggaaatttttgcggtgttatgggataacttcccggtgccgcaggtcatcacctacgaaaaat

SEQ ID NO: 460417 - DNA, 75 bp, synthetic construct
  source 1..75: mol_type = other DNA
tctgcgcaacaacacagtttgacgcaacgaaagtgcattcttcaggttttgtggcaccttacacattgtcacaag

SEQ ID NO: 460418 - DNA, 75 bp, synthetic construct
  source 1..75: mol_type = other DNA
cctggtacgcagcgccgcgttttacattccggacaatgagaagttttccagcgagctgccgatgcggataaaccg

SEQ ID NO: 460419 - DNA, 75 bp, synthetic construct
  source 1..75: mol_type = other DNA
gttcatggagtggttcctcactccgaacgtacagtttggcctgctggccatactgaccgtgctgggtctgtttct

SEQ ID NO: 460420 - DNA, 75 bp, synthetic construct
  source 1..75: mol_type = other DNA
agccctacttctctctattatgatgtcaatgttcagggtacccgcaatgtgctggcggccatggaaaaaaatggc

SEQ ID NO: 460421 - DNA, 75 bp, synthetic construct
  source 1..75: mol_type = other DNA
atataaattatttggtagccgattactcaacgattgtggtcaattggataaagacctcctcgaaatggctatgca

SEQ ID NO: 460422 - DNA, 75 bp, synthetic construct
  source 1..75: mol_type = other DNA
gaacaaaaagatcccttctatgcacttgccttacccactaggaatgctgggtggatattgctttgatatcctgag

SEQ ID NO: 460423 - DNA, 75 bp, synthetic construct
  source 1..75: mol_type = other DNA
gcacagcttactgatcgccagaaaatggacctggcaaaagagcgtgttgccgatgaggtgcgcgcgcagctggca

SEQ ID NO: 460424 - DNA, 75 bp, synthetic construct
  source 1..75: mol_type = other DNA
gaccaccgccgacagcgaacagcagccgtcgccgcacgttttcagcctgctggcgcgtcaggggctggcgaagtt

SEQ ID NO: 460425 - DNA, 75 bp, synthetic construct
  source 1..75: mol_type = other DNA
aaggagcgacggtaaactgaaagggctggataacttatccgccctggctgtagccaaagacagccgttctgccat

SEQ ID NO: 460426 - DNA, 75 bp, synthetic construct
  source 1..75: mol_type = other DNA
ggataatcccgacaaggattactggcaggtattcactgatgacagaccggatacaatgcgtgtgattgcagagcg

SEQ ID NO: 460427 - DNA, 75 bp, synthetic construct
  source 1..75: mol_type = other DNA
tgtgcggaaggccaccaatggtgtgaaacatgtggtgccgatggatgttatcgagagactaccggaactgatgca

SEQ ID NO: 460428 - DNA, 75 bp, synthetic construct
  source 1..75: mol_type = other DNA
agcctaccgttactacgtccccctgaaagggcaggatgttgacggtgtggtgtcacagccacgtacaggcaaggg

SEQ ID NO: 460429 - DNA, 75 bp, synthetic construct
  source 1..75: mol_type = other DNA
tggagaatgattatctggtcaatatccgtaaggcggatgaccatggacagccggacacctacgcttatccgacga

SEQ ID NO: 460430 - DNA, 75 bp, synthetic construct
  source 1..75: mol_type = other DNA
ctggttatctcccgcgacactgtgcggaaggctaccaatggcgtgaaacatgtggtgccaatggatgttatcgag

SEQ ID NO: 460431 - DNA, 75 bp, synthetic construct
  source 1..75: mol_type = other DNA
gttaagcgtgcgaaaacatcgacaattattgcaaaaaataaacatgtgtatttctggaataaaaatggtatcgag

SEQ ID NO: 460432 - DNA, 75 bp, synthetic construct
  source 1..75: mol_type = other DNA
aaagagcgtaacctcgtcattatgaaatcggtgttcgggggcaaggccggagagtactggagtattcctctgcct

SEQ ID NO: 460433 - DNA, 75 bp, synthetic construct
  source 1..75: mol_type = other DNA
gaaaaatagacgacagtaacaacgcttatatggcggaagaactcttccacgggaaggcggaaaacgacctgaacg

SEQ ID NO: 460434 - DNA, 75 bp, synthetic construct
  source 1..75: mol_type = other DNA
gaggtacaggcccgccttgcccgtggcaacgcgccgacggcggaggagcttgtacgttcacagatggctgaaggt

SEQ ID NO: 460435 - DNA, 75 bp, synthetic construct
  source 1..75: mol_type = other DNA
ggcgaagacgaaacacaatacggctggctggggggagagcgtaaaaaaagtacgacacagtgtatcggaaatgct

SEQ ID NO: 460436 - DNA, 75 bp, synthetic construct
  source 1..75: mol_type = other DNA
cagcagtcgcagattcagccgcaattcacagacgaggaaattatcctcctctgctacatgcaactctggatggaa

SEQ ID NO: 460437 - DNA, 75 bp, synthetic construct
  source 1..75: mol_type = other DNA
acctttcccctgttacctataaccagatccccgtaattactactgaactgttggctcatctttacggaacaaaaa

SEQ ID NO: 460438 - DNA, 75 bp, synthetic construct
  source 1..75: mol_type = other DNA
cctctggacagaacgaggcgcagcccgtcacgccaaaatgctagaaaccgatcaggcgtgggaagtgttcgaaaa

SEQ ID NO: 460439 - DNA, 75 bp, synthetic construct
  source 1..75: mol_type = other DNA
atcatcaaatcgtggtcgatattccccacggagaagcgtggctgcgcgatgatgaagagcgtccgatgattttga

SEQ ID NO: 460440 - DNA, 75 bp, synthetic construct
  source 1..75: mol_type = other DNA
cctcggtagaagctatcacggataccgtatatcgtgtccgcatcgtgccagacgcggccttttcttttcgtgctg

SEQ ID NO: 460441 - DNA, 75 bp, synthetic construct
  source 1..75: mol_type = other DNA
tttgagactatctacatggtgacgaagaacaaggaagcactactgcgggaggcggcacagcttgaccagtcaagt

SEQ ID NO: 460442 - DNA, 75 bp, synthetic construct
  source 1..75: mol_type = other DNA
tgagcaaagtgttcccgaaaccggactatgcaaaactggcgaacgaaggggccgacgctgacacactggcaatga

SEQ ID NO: 460443 - DNA, 75 bp, synthetic construct
  source 1..75: mol_type = other DNA
cgtagcggtaagcctgatccgttcaaagtgccggaaggtgagggcgagcgttatcgtgatgaccttgccagaatg

SEQ ID NO: 460444 - DNA, 75 bp, synthetic construct
  source 1..75: mol_type = other DNA
tcttgccatgaacgaaaacttcatgggggcgcagatttaccaggagaacatgccgtttggtacaccaaaacctga

SEQ ID NO: 460445 - DNA, 75 bp, synthetic construct
  source 1..75: mol_type = other DNA
cggaatggatgtgtcaccgtgggagggcgtggctgacgcaacgatcgaaggtgcagcccttggtgctgcaatggg

SEQ ID NO: 460446 - DNA, 75 bp, synthetic construct
  source 1..75: mol_type = other DNA
ggatgaggtcatcgacactctgcctgatggaaaaaatgcggttactgatactgtcggtaaaggtctgaaggtcac

SEQ ID NO: 460447 - DNA, 75 bp, synthetic construct
  source 1..75: mol_type = other DNA
ctggcggactacaaaattgcgcaggccgatctggatgagtacctctacgcccgtcacgcgccggaacgtaacgcg

SEQ ID NO: 460448 - DNA, 75 bp, synthetic construct
  source 1..75: mol_type = other DNA
gactgggaacatattcaggcagtgtatctgaatccagaaaagaaacagcataatgtaattttattacaaaaggcg

SEQ ID NO: 460449 - DNA, 75 bp, synthetic construct
  source 1..75: mol_type = other DNA
tgcgcaggcgaaagaagaccgcaaagccgaagaagaaaaagttcgtcagtactacgaacaggagaaagcgaccaa

SEQ ID NO: 460450 - DNA, 75 bp, synthetic construct
  source 1..75: mol_type = other DNA
atgatctgggcattcgcaaaagcatactggaaacagttgcttatcgtggtgatgcttgctgttctggtcatatcg

SEQ ID NO: 460451 - DNA, 75 bp, synthetic construct
  source 1..75: mol_type = other DNA
ggtgcttgctgttctggtcatatcaggggttgttgcctggaatgtacacggtagtcgtcagtacgacgccgggta

SEQ ID NO: 460452 - DNA, 75 bp, synthetic construct
  source 1..75: mol_type = other DNA
acatcgcagcagcagaagaggctgagcgatatcggtctgcaggactcacatgcgagcgacagtatgactccctga

SEQ ID NO: 460453 - DNA, 75 bp, synthetic construct
  source 1..75: mol_type = other DNA
cgcgcaggcacagtcagaccagaaacaggctgatgataaggccaggtcacaacgtgatcaggagaagacacaaat

SEQ ID NO: 460454 - DNA, 75 bp, synthetic construct
  source 1..75: mol_type = other DNA
actggaaacagttgcttttcgtgaaagcatactggaaacagttgcttattgtcgtgatgcttgctgcgttggtta

SEQ ID NO: 460455 - DNA, 75 bp, synthetic construct
  source 1..75: mol_type = other DNA
taaaaaatattcaggccggagatgctaaaaaattcacgttatccagcgccaacaactccacgaaaaacgcaacgt

SEQ ID NO: 460456 - DNA, 75 bp, synthetic construct
  source 1..75: mol_type = other DNA
catcgaaacagaacgcggcgaacagaatcgcctgattaacaggcttaacctggaaatacaggtttcccgcgacga

SEQ ID NO: 460457 - DNA, 75 bp, synthetic construct
  source 1..75: mol_type = other DNA
tgtttacggaacgggcaatcaggcagatgtatgcgcattgtgaaaaaccgatcatttttccactgtccaatccca

SEQ ID NO: 460458 - DNA, 75 bp, synthetic construct
  source 1..75: mol_type = other DNA
gtgcagccgtattcctcgcaagtccggcatcgaattatgtcaacggacatttattagtggttgatggcggttatt

SEQ ID NO: 460459 - DNA, 75 bp, synthetic construct
  source 1..75: mol_type = other DNA
taggtcaatataatattcaggtgaatggtatttccccgggatattacgctaccgatatcactctggcgacccgta

SEQ ID NO: 460460 - DNA, 75 bp, synthetic construct
  source 1..75: mol_type = other DNA
tgaacgtgaagcacaatcccgtatcgatgcggcgcgtgctgatgctgagtatgctaataccgttgctgacagcat

SEQ ID NO: 460461 - DNA, 75 bp, synthetic construct
  source 1..75: mol_type = other DNA
tgcggtgtcggcagtggctgaataccacgccaccggtgctggtgacgctgatggtttcagggctgtcaccacaaa

SEQ ID NO: 460462 - DNA, 75 bp, synthetic construct
  source 1..75: mol_type = other DNA
acacatccttaaataagcactctacacactggtttacactgacaccggacctgccgggaatgcatatacgcctga

SEQ ID NO: 460463 - DNA, 75 bp, synthetic construct
  source 1..75: mol_type = other DNA
tgacaatactgagtctgttcctgacactgtggctgatttcgggattcctgccgctgtctgcagtaaaccagataa

SEQ ID NO: 460464 - DNA, 75 bp, synthetic construct
  source 1..75: mol_type = other DNA
taacgatgatattcagggaaccgcggcggtaacggtaggcacgctgatcgcagcaagtcgcgcggcaggtggtca

SEQ ID NO: 460465 - DNA, 75 bp, synthetic construct
  source 1..75: mol_type = other DNA
tggaaagataaaatctaccctatcgcccagtgtaacaacgcctttattttcccgggcatcgggctgggtgttatt

SEQ ID NO: 460466 - DNA, 75 bp, synthetic construct
  source 1..75: mol_type = other DNA
tagcgagacgccggcggccattctggttgatgatgttgacgcttccactcatggcgatcagtccggcggcctgta

SEQ ID NO: 460467 - DNA, 75 bp, synthetic construct
  source 1..75: mol_type = other DNA
ggaaactggattgcaaaatccagaaccagaaaaattagttgaggatatgggcgggaacaaagaatttttatccga

SEQ ID NO: 460468 - DNA, 75 bp, synthetic construct
  source 1..75: mol_type = other DNA
tttaacgagagtaaagggcattactatgaagaaaaagggaacaacatgtgccatgtgaatccggcgcgggtggcg

SEQ ID NO: 460469 - DNA, 75 bp, synthetic construct
  source 1..75: mol_type = other DNA
acatcgcagcagcagaagaggctgagcgatatcgttctgcaggactgacatgcgagcggcagtacgactccctga

SEQ ID NO: 460470 - DNA, 75 bp, synthetic construct
  source 1..75: mol_type = other DNA
gatgggggaattcaaccagcaccgaattatttttgataactcctggacgaccgctgacctgaaaaaagcgctccg

SEQ ID NO: 460471 - DNA, 75 bp, synthetic construct
  source 1..75: mol_type = other DNA
agtggagagtccgcaagcccaatattgacaaagtttaagttgggaaaaatttgggatttaccacaaagttcttca

SEQ ID NO: 460472 - DNA, 75 bp, synthetic construct
  source 1..75: mol_type = other DNA
gaacggtaattgctgttgttagagcgtcactggctgacatagatatttggcaaaaaaatggcgttagtcgtgatg

SEQ ID NO: 460473 - DNA, 75 bp, synthetic construct
  source 1..75: mol_type = other DNA
atgatcttgagtatatccgtgagtggagtgtatggttagatttaaagattatttttttaacagtgtttaaaggtt

SEQ ID NO: 460474 - DNA, 75 bp, synthetic construct
  source 1..75: mol_type = other DNA
tttgattgctagcggtgtattttctatttttatagattacgatcttagctttaaattcatattacaatggtatgt

SEQ ID NO: 460475 - DNA, 75 bp, synthetic construct
  source 1..75: mol_type = other DNA
cttgttctgtattgctaattcctgatattttcacttttaacatcctccagtctcgtacagaggaaataaatggcg

SEQ ID NO: 460476 - DNA, 75 bp, synthetic construct
  source 1..75: mol_type = other DNA
agtggtggctagcagtgagtgaagcactggccgaaatgctgcgtgctcagccattcgccaagccggtggcgaatc

SEQ ID NO: 460477 - DNA, 75 bp, synthetic construct
  source 1..75: mol_type = other DNA
gaactggagaaagagcttaagcgtaaagataaagctctggcggaagctgcggccctgcttatattgagggaaaag

SEQ ID NO: 460478 - DNA, 75 bp, synthetic construct
  source 1..75: mol_type = other DNA
cacatgcagtttctcacaatgaacaataccgtacacttatcaaaggttatatgttacgacataaagttaaaccgg

SEQ ID NO: 460479 - DNA, 75 bp, synthetic construct
  source 1..75: mol_type = other DNA
ggtggaaagcgtccgggaaagcctgccggttaccgaacagcaacgcattctggaacaacaactgacggcgttgtc

SEQ ID NO: 460480 - DNA, 75 bp, synthetic construct
  source 1..75: mol_type = other DNA
cggctgggtagcgtctggcacgcggtgtatgttgaaacccctgccctgcaccgcttaccggaaaaaaacgtcggg

SEQ ID NO: 460481 - DNA, 75 bp, synthetic construct
  source 1..75: mol_type = other DNA
acgtgaacaacatcgctgtcgggattatggacaccgcgatgatccgtaaaaatattgaacaggacccagcctatt

SEQ ID NO: 460482 - DNA, 75 bp, synthetic construct
  source 1..75: mol_type = other DNA
ttatggaatggacggaaaacctataaaagtctggaaatttcgctcgatgactgtgatggaaaacgacgataaagt

SEQ ID NO: 460483 - DNA, 75 bp, synthetic construct
  source 1..75: mol_type = other DNA
tttagacaaatacgatatggaatggatggtaaaccaatacgagtgtggaaatttcgttctatgcgggttatggaa

SEQ ID NO: 460484 - DNA, 75 bp, synthetic construct
  source 1..75: mol_type = other DNA
atttcatgatgataagcgttttgtgttttttaccgatcaatttattgctgaatttagtccgcaggaatttgtgga

SEQ ID NO: 460485 - DNA, 75 bp, synthetic construct
  source 1..75: mol_type = other DNA
aatatgtcgctggcgattgccatcgcgggtgtgctggtacatccgagttttattgaactgatggcgaaagcggcc

SEQ ID NO: 460486 - DNA, 75 bp, synthetic construct
  source 1..75: mol_type = other DNA
cgtcgattacgaataaatatcccgccggagaagttggttctgacattctcgatctgcccgtcaacgtatggcagg

SEQ ID NO: 460487 - DNA, 75 bp, synthetic construct
  source 1..75: mol_type = other DNA
agttgtagtagccacagcggttagcggcatgtctgtttatgcacagcagcggttgaaccgaaagaagacactatc

SEQ ID NO: 460488 - DNA, 75 bp, synthetic construct
  source 1..75: mol_type = other DNA
gctgaccagtatcggactggtggtttgccgttcatgtattcgcattggggcgggctggctgcgtaatcatggcta

SEQ ID NO: 460489 - DNA, 75 bp, synthetic construct
  source 1..75: mol_type = other DNA
accactttgcaaaatccactctgattagcgattctccgcgtgctaccgcctctgattcactgacttgcaccgaca

SEQ ID NO: 460490 - DNA, 75 bp, synthetic construct
  source 1..75: mol_type = other DNA
gccactggtgatgcaccagctggccaccttcgcgtttgaggactattcccgcagcgccgccagcgtgaagcagtg

SEQ ID NO: 460491 - DNA, 75 bp, synthetic construct
  source 1..75: mol_type = other DNA
agccattctacgacctgctgatcacgaaatttgatatcgaagagtcctgggccgaaaaacagcttaagcagataa

SEQ ID NO: 460492 - DNA, 75 bp, synthetic construct
  source 1..75: mol_type = other DNA
tagaaaatattacatttcaaggttctaggactcttgcggatgttcttttttgcataagtttattgttgattatat

SEQ ID NO: 460493 - DNA, 75 bp, synthetic construct
  source 1..75: mol_type = other DNA
gtaagcgctgccagattcttaccagataaatatagaattgtgatagttggagatggcccttataaagcaaattta

SEQ ID NO: 460494 - DNA, 75 bp, synthetic construct
  source 1..75: mol_type = other DNA
cattattatatctgaacgataaagtagaacggattgatacatacggaataaaaataaaaaaaataaatcttgtaa

SEQ ID NO: 460495 - DNA, 75 bp, synthetic construct
  source 1..75: mol_type = other DNA
gacactgctcgtggacctcttgtacttaaagtttatgcgccaaagcataaaatgaccgaacgtttcttaaaatct

SEQ ID NO: 460496 - DNA, 75 bp, synthetic construct
  source 1..75: mol_type = other DNA
aaaagaggtgctggctaaagccaacgaactgcgttcgggggatgtgctggcgggcgttgctgcggcaagctcata

SEQ ID NO: 460497 - DNA, 75 bp, synthetic construct
  source 1..75: mol_type = other DNA
atatccattcaatagcccttgccctaatggtactgagaaagtatcagcttatcatactcatggtgcagatagtca

SEQ ID NO: 460498 - DNA, 75 bp, synthetic construct
  source 1..75: mol_type = other DNA
tgagtgtcttggcctgattcaaaatctcggcaacatgccggcgcctatcctgactgaggagggccgtctggtctt

SEQ ID NO: 460499 - DNA, 75 bp, synthetic construct
  source 1..75: mol_type = other DNA
aatgccatcaaccttacaggcactgccacgctgaatgccacgaataacattactcttatcgggagcagtacgagt

SEQ ID NO: 460500 - DNA, 75 bp, synthetic construct
  source 1..75: mol_type = other DNA
gcggcgcccgcattgacgtttctgcaacgcagcagggtaacggcggtacggctgtgctgtggtcagacagctaca

SEQ ID NO: 460501 - DNA, 75 bp, synthetic construct
  source 1..75: mol_type = other DNA
caaaaccgcggtgtccgacagcctcacggccctgacccttgccaccgttgccgcactgctgacgggcggaggggc

SEQ ID NO: 460502 - DNA, 75 bp, synthetic construct
  source 1..75: mol_type = other DNA
ctgcacgagcatatcgcaaccagaagaactggaatgattctttagccatctgggaaagcgttttacaggaagagc

SEQ ID NO: 460503 - DNA, 75 bp, synthetic construct
  source 1..75: mol_type = other DNA
agcgctgtttactgacaacatagcaaaaataacgaaaatatgcgaagagtcactcaggcagcacacccgtgttaa

SEQ ID NO: 460504 - DNA, 75 bp, synthetic construct
  source 1..75: mol_type = other DNA
gtgcagcgggagacagcaaaaataacattactgccattttcgatattttcattaatctcacccccgcatggataa

SEQ ID NO: 460505 - DNA, 75 bp, synthetic construct
  source 1..75: mol_type = other DNA
attgtgattatgttgatgcactttcattaaatatggaaaatcgtacagcgaccgaaggtttactattgaaaaaaa

SEQ ID NO: 460506 - DNA, 75 bp, synthetic construct
  source 1..75: mol_type = other DNA
agttttaaatgagcattataattgggaaaatatcaatcaggtaatgatacaaaatgaaaaaaatactgcttttta

SEQ ID NO: 460507 - DNA, 75 bp, synthetic construct
  source 1..75: mol_type = other DNA
gtaagctgggtaaagttgatattctggttaacaacgccggtggcggtggacctaaaccgtttgatatgccaatgg

SEQ ID NO: 460508 - DNA, 75 bp, synthetic construct
  source 1..75: mol_type = other DNA
gctaatctgaaccttggtggtgatgcttctatctctggaaatggtggtgtaggagtgttatttgctgcttccgtc

SEQ ID NO: 460509 - DNA, 75 bp, synthetic construct
  source 1..75: mol_type = other DNA
tcaccattctgaccaacagcaccgtggcaggttcgcaacaaagcggcaatattaccgttaatgcggcaatcagca

SEQ ID NO: 460510 - DNA, 75 bp, synthetic construct
  source 1..75: mol_type = other DNA
gcaccatcaccggtaatgcaaccggtaacggcaccatcaccggtaatgcaaccggtaacggcaccatcaccggta

SEQ ID NO: 460511 - DNA, 75 bp, synthetic construct
  source 1..75: mol_type = other DNA
atctatggttcgccaacgccgcagccaaacgataactggctgctgggacagtcgctgctgacgcaatatcatatc

SEQ ID NO: 460512 - DNA, 75 bp, synthetic construct
  source 1..75: mol_type = other DNA
atgggcgcaattcccgcgccggtgctcacagaagaagggcgaatagtcttccgattgcaatttgcctgcacgttt

SEQ ID NO: 460513 - DNA, 75 bp, synthetic construct
  source 1..75: mol_type = other DNA
aataaaaaaatccatcaggaaagaggatatattagggcgcttaggcggtgaggagttcggtattatcattaaagg

SEQ ID NO: 460514 - DNA, 75 bp, synthetic construct
  source 1..75: mol_type = other DNA
ctacgcatcagagcgggaaatgaagacgacgcatatttgtgtcgtgaactttacagggagggactgaccatatcg

SEQ ID NO: 460515 - DNA, 75 bp, synthetic construct
  source 1..75: mol_type = other DNA
cgaaatgacctcggatctgatccctacgtgctggtggatgtcatctccgccaaggacaagcgccgcgctaccgca

SEQ ID NO: 460516 - DNA, 75 bp, synthetic construct
  source 1..75: mol_type = other DNA
atgtcgaacagaacgatattaccgacgaatgccttggcctgattcaaaacctcggcaatatgccagcacctatcc

SEQ ID NO: 460517 - DNA, 75 bp, synthetic construct
  source 1..75: mol_type = other DNA
atgacacctgccatgtatgagcgcgtgcgtaactacttcgttgatgccgggcttaccactggcttcattgttcag

SEQ ID NO: 460518 - DNA, 75 bp, synthetic construct
  source 1..75: mol_type = other DNA
cccatcagagatgttgattaatgctgacaaggcgttatacgaagctaaaagaacgggaagaaacaaagttgtgat

SEQ ID NO: 460519 - DNA, 75 bp, synthetic construct
  source 1..75: mol_type = other DNA
gaaatattgaaataaaaacccagaatctaactgtaaagtatggtgtaaaaaaagtcactatcagcattggtggtt

SEQ ID NO: 460520 - DNA, 75 bp, synthetic construct
  source 1..75: mol_type = other DNA
tattacaaccccaaaagcgatttctctgtggtacccggcttgagcgcggagcaggtcctttaccgacactatgac

SEQ ID NO: 460521 - DNA, 75 bp, synthetic construct
  source 1..75: mol_type = other DNA
gatgcaggccctggattgttatttttgatgacgttctcactgccggtagtcattttaaagcgatgaaaagcctga

SEQ ID NO: 460522 - DNA, 75 bp, synthetic construct
  source 1..75: mol_type = other DNA
atgaactgatacgtaaacaacatcattatctggaggatggtgatctgtgttattgctttggcgaatacacagccc

SEQ ID NO: 460523 - DNA, 75 bp, synthetic construct
  source 1..75: mol_type = other DNA
ccagtatgtatatcatatcaactctcatgtattttgtgtttttaagactgaaacatgccaattatatggcaactc

SEQ ID NO: 460524 - DNA, 75 bp, synthetic construct
  source 1..75: mol_type = other DNA
agccagtccgccagaaggcggctgccccctgggaacggagccacgattatgtggcgttgctggttgatgtacaga

SEQ ID NO: 460525 - DNA, 75 bp, synthetic construct
  source 1..75: mol_type = other DNA
actggcagaggcggttgagtgccgttgcgctgttgtgtggtctggcctgtggtgtacaggctgctccgtccgcac

SEQ ID NO: 460526 - DNA, 75 bp, synthetic construct
  source 1..75: mol_type = other DNA
agcgtcacggagtgtctgctggagctggccgatgcgctggggattgattacacccgcgcgaacaaaggggcatta

SEQ ID NO: 460527 - DNA, 75 bp, synthetic construct
  source 1..75: mol_type = other DNA
tggcaaggatcataaatctctcagcgaaggcgagttccctgtttacggttcaggtggaatcatgcgatatgtaga

SEQ ID NO: 460528 - DNA, 75 bp, synthetic construct
  source 1..75: mol_type = other DNA
attctcatctgtggcgcgctgggtactatggcaggcggcaatgccattattgttgcggtgattattcctgtggcg

SEQ ID NO: 460529 - DNA, 75 bp, synthetic construct
  source 1..75: mol_type = other DNA
cgggtgtaccgctaccgggtcagtaaccgtcagtctgaggtaagggctttaccggagcgtctcttcagtgcgcct

SEQ ID NO: 460530 - DNA, 75 bp, synthetic construct
  source 1..75: mol_type = other DNA
gtactgaaggtgccacgctggagttttacgaagctgaggcgaaaaaacaggcgaagcagtttttcatggatgcgg

SEQ ID NO: 460531 - DNA, 75 bp, synthetic construct
  source 1..75: mol_type = other DNA
ccactgcaagtactgattataaactgaccgacggcactaacaaaattccgttccaggctcgctatattgctgttg

SEQ ID NO: 460532 - DNA, 75 bp, synthetic construct
  source 1..75: mol_type = other DNA
ctcactggcagagcacgtcgacggagtgcaatcgagcaacattgttgttgcaattgctgatatttgcagaatcgt

SEQ ID NO: 460533 - DNA, 75 bp, synthetic construct
  source 1..75: mol_type = other DNA
atgtggacaagcacatcgccgataaccgcctgccgccgccgacgcctgcaatgctggaatatttgccgccggagc

SEQ ID NO: 460534 - DNA, 75 bp, synthetic construct
  source 1..75: mol_type = other DNA
cagggtgctgacggtgcatcaccatgagaatggtgaaatcagtcacgtcgatgtggacaagcacattgccgaggc

SEQ ID NO: 460535 - DNA, 75 bp, synthetic construct
  source 1..75: mol_type = other DNA
ggggaacttccgcttttgaaaggtgaacggcaaagccagttttcccacatcactcgtctctccttcgagcaattg

SEQ ID NO: 460536 - DNA, 75 bp, synthetic construct
  source 1..75: mol_type = other DNA
tggtgtctccgtccggtcacagcggcattattattcgccaccagccatcacgtaaatcataaactatggcgcatt

SEQ ID NO: 460537 - DNA, 75 bp, synthetic construct
  source 1..75: mol_type = other DNA
catgcggcaaaaaaatggcagcggcagacggggggggggtggtggatttatcaaatctggaacgccagcgtaaat

SEQ ID NO: 460538 - DNA, 75 bp, synthetic construct
  source 1..75: mol_type = other DNA
caaaacgttggctaagcttgccaatcatgcggcaaaaaaaatggcagcggcagacggggggggtggtggatttat

SEQ ID NO: 460539 - DNA, 75 bp, synthetic construct
  source 1..75: mol_type = other DNA
gaagtcaggcgacacacaacgctggtatgcggggtcggtattgcccgtactaagacgctggcgttatacagtgat

SEQ ID NO: 460540 - DNA, 75 bp, synthetic construct
  source 1..75: mol_type = other DNA
tggaagaaggtgattgtcttgtagtgaccaagattgaccgcttaggaagggataacattgatgtacagaagaccg

SEQ ID NO: 460541 - DNA, 75 bp, synthetic construct
  source 1..75: mol_type = other DNA
cagaaggtagaatgatgcttcaaatgttcggggcttttgcagagttcgaacgtaaccgcatcagagaacgtacta

SEQ ID NO: 460542 - DNA, 75 bp, synthetic construct
  source 1..75: mol_type = other DNA
aaagtgtttttgtattcaatggtgaacgtgacgttccggtaatgtctttgccagaagagccgatactgaccggaa

SEQ ID NO: 460543 - DNA, 75 bp, synthetic construct
  source 1..75: mol_type = other DNA
atgcatggccaagacgtatggctgtggaggtggtgacaagcgttgctgaaaccagagccgaaatgatgcgttatg

SEQ ID NO: 460544 - DNA, 75 bp, synthetic construct
  source 1..75: mol_type = other DNA
ccggcaaccttgacgcataaagttatgcacttaggtagttgctcgatggcaacaacaccagttaatttggacttc

SEQ ID NO: 460545 - DNA, 75 bp, synthetic construct
  source 1..75: mol_type = other DNA
acccatatcgggttagggaaaactcgctggggtttcataaaaaagttccagagtatttatcaagaattgaaactc

SEQ ID NO: 460546 - DNA, 75 bp, synthetic construct
  source 1..75: mol_type = other DNA
ggtgcagcagcctaaaatgactgttgcgatggaggctcgcgggcatcccatcactgggccagggaaatcaggaaa

SEQ ID NO: 460547 - DNA, 75 bp, synthetic construct
  source 1..75: mol_type = other DNA
taattgcttataatttggttgccgataaatcaatgtctcctcgtgaggcttgggacgccgctgttgctaaggtta

SEQ ID NO: 460548 - DNA, 75 bp, synthetic construct
  source 1..75: mol_type = other DNA
gggatgcccaagggcaacgtttctcgctctggcggatagcggttatctgaagaatgtaaaaccacatcatgggga

SEQ ID NO: 460549 - DNA, 75 bp, synthetic construct
  source 1..75: mol_type = other DNA
aataagcgatggcaactaactacattctcccttgatgctctgatgaaaggaacgaaaaaatgggatgaactgaca

SEQ ID NO: 460550 - DNA, 75 bp, synthetic construct
  source 1..75: mol_type = other DNA
atggatactgatatttcagaaatcaatgacatagataattttcggaacactacagagaaaaaacaggcagggagg

SEQ ID NO: 460551 - DNA, 75 bp, synthetic construct
  source 1..75: mol_type = other DNA
cagtatccgttaaatccggttcagtatatagattcaatgggactggcatctaaatatggacacttaaataatggc

SEQ ID NO: 460552 - DNA, 75 bp, synthetic construct
  source 1..75: mol_type = other DNA
gctgaccgggtgagtgaggaaagccgccgctggctggcatcgtgcggcctgacggtggagcagatacaaaaccag

SEQ ID NO: 460553 - DNA, 75 bp, synthetic construct
  source 1..75: mol_type = other DNA
agatagtgtaccttccgacgatatggttgatacactttatcatgcgcttcagaaccacgatgatgctgctgccgt

SEQ ID NO: 460554 - DNA, 75 bp, synthetic construct
  source 1..75: mol_type = other DNA
agcttaagaaagcacaagcgaaagcacgcgcgctgatagacgccgcgaagttattagacctgaaatcaaatccat

SEQ ID NO: 460555 - DNA, 75 bp, synthetic construct
  source 1..75: mol_type = other DNA
agcttaagaaagcacgggcgaaagcgcgggcgctgatagacaccgcgaagttattagacctgaaatcaaatccat

SEQ ID NO: 460556 - DNA, 75 bp, synthetic construct
  source 1..75: mol_type = other DNA
gcattactacaatcatttcctttagcttataagtttcatgatgacgaaaacccgctaagcgtagctacattagct

SEQ ID NO: 460557 - DNA, 75 bp, synthetic construct
  source 1..75: mol_type = other DNA
ataagccaagcccgacaattacaactctttgttatggttttgggaatggtcgttttggccacccagaacagaaca

SEQ ID NO: 460558 - DNA, 75 bp, synthetic construct
  source 1..75: mol_type = other DNA
tctttgttatggtttcggaaatggacgttttggacatccagaacagcatagagcgatttctcttagagaggctgc

SEQ ID NO: 460559 - DNA, 75 bp, synthetic construct
  source 1..75: mol_type = other DNA
ccctttacatgagtgaaagcttactgaaacgaaaacttcgggaggaaaaaacttctttttctcagattctgctgg

SEQ ID NO: 460560 - DNA, 75 bp, synthetic construct
  source 1..75: mol_type = other DNA
actcattctgcgggggctgatacatcgcggactggttttgaatttttcacacgatgttaacggagagactttatg

SEQ ID NO: 460561 - DNA, 75 bp, synthetic construct
  source 1..75: mol_type = other DNA
tgcactgatggcaggtaaaacgctaatgaaggcactggaggacggtctggactgtgatgcagcttttgaacccac

SEQ ID NO: 460562 - DNA, 75 bp, synthetic construct
  source 1..75: mol_type = other DNA
atctttgggactatttctttccggtttagtgaacttattgattggatatataccgggaattatcacttcagtcac

SEQ ID NO: 460563 - DNA, 75 bp, synthetic construct
  source 1..75: mol_type = other DNA
cacaagtcaggaacgatgagcaggatgtgattctggtcgatcacgaagaaagaattcgtcagctccgcatcgacg

SEQ ID NO: 460564 - DNA, 75 bp, synthetic construct
  source 1..75: mol_type = other DNA
agaaatgttaaatcataaagaatccgttaaacgaatgggtgaaatgattaaacagcaggttctaaaagacaagga

SEQ ID NO: 460565 - DNA, 75 bp, synthetic construct
  source 1..75: mol_type = other DNA
aaaaagtagagaaacgaaaagaacaagaaatgttaaatcataaagaatccgttaaacgaatgggtgaaatgatta

SEQ ID NO: 460566 - DNA, 75 bp, synthetic construct
  source 1..75: mol_type = other DNA
taccggccgaccgccgcagtatcagaaagaaattgccggaatgctggtggatgcggatcgcgtctgtggtgacca

SEQ ID NO: 460567 - DNA, 75 bp, synthetic construct
  source 1..75: mol_type = other DNA
gcagcagagcaaacatgccgggtagtggtgttggaagacgacgcgcttcctgtacagggcttcaccgataaggta

SEQ ID NO: 460568 - DNA, 75 bp, synthetic construct
  source 1..75: mol_type = other DNA
ccaatgctctaattgctgagcgtcggcgcactaaggctttggaagacgccttgcgtgcacatgggttgattgact

SEQ ID NO: 460569 - DNA, 75 bp, synthetic construct
  source 1..75: mol_type = other DNA
cctgccgttcgccagccgctggcggaggataaatcattactgccgtttttcagtaacgaacgggtgattcgtgct

SEQ ID NO: 460570 - DNA, 75 bp, synthetic construct
  source 1..75: mol_type = other DNA
tgccgttgatccggagtcaccggctcagtatctccagcgccagaaatcacaacgggaagagatgcctgtatacac

SEQ ID NO: 460571 - DNA, 75 bp, synthetic construct
  source 1..75: mol_type = other DNA
gcacggacctggagtacgtcggagcattatgagttgtacattccgtccatcacctggcatgcgcggtttgcctat

SEQ ID NO: 460572 - DNA, 75 bp, synthetic construct
  source 1..75: mol_type = other DNA
ataaacgcggcctttctcttgaagacttaaataatatcgaaccagaactattagatgcattatatgtatatgata

SEQ ID NO: 460573 - DNA, 75 bp, synthetic construct
  source 1..75: mol_type = other DNA
tctcgctgggcattaagaatctcggccaggacaccaaatacggttcgtccttcatcgttatgaccatcattggcg

SEQ ID NO: 460574 - DNA, 75 bp, synthetic construct
  source 1..75: mol_type = other DNA
gggctatgacgtcaaagaaaccaagagaacgcaagatcagggggcagatctcttcgtcactcgatttggtaagga

SEQ ID NO: 460575 - DNA, 75 bp, synthetic construct
  source 1..75: mol_type = other DNA
ggctgtttaattacatactgcaaaccggcgacgcggtacgttttaacgattttatcgacggcgttgccgaacgtt

SEQ ID NO: 460576 - DNA, 75 bp, synthetic construct
  source 1..75: mol_type = other DNA
gccgcaatgcaaaatcaccttgatgccggatacaaaacattgccgatggtggtgccattgttgttttaccacggt

SEQ ID NO: 460577 - DNA, 75 bp, synthetic construct
  source 1..75: mol_type = other DNA
tacgtgctattgccaaaaccatgctggatgccggagtccctcttgaggacgttctgcgatttaccgggctgtcag

SEQ ID NO: 460578 - DNA, 75 bp, synthetic construct
  source 1..75: mol_type = other DNA
cggcgtcaccactattgtggtcgatattattgtgatgatcggttacgccacccttgctcaacggattgctctatg

SEQ ID NO: 460579 - DNA, 75 bp, synthetic construct
  source 1..75: mol_type = other DNA
gcgccggacaggtttactggtgagtctgatttgtctgaactagcaatgaaccctgactacttcggagggcgttca

SEQ ID NO: 460580 - DNA, 75 bp, synthetic construct
  source 1..75: mol_type = other DNA
tgaatccggagtccctcttgcagacatcatgcgctttaccgggctgtcagaagaagagttggctgcggcgagcca

SEQ ID NO: 460581 - DNA, 75 bp, synthetic construct
  source 1..75: mol_type = other DNA
cgcgcggcgtcgagtacaacatggcgcagaatgctgtttatcgcgtgtgtggcggcaagctgtacaaaggagaaa

SEQ ID NO: 460582 - DNA, 75 bp, synthetic construct
  source 1..75: mol_type = other DNA
agtcgggcgcatcaggaaaaatgtcggcttcaaattgcgcgttattacgaagtcaccagtcactctctcaggctg

SEQ ID NO: 460583 - DNA, 75 bp, synthetic construct
  source 1..75: mol_type = other DNA
agcaatccggcaacaggtgcgccgtctgtgtatatcatcggctccggtcaggtgtcaccaatcgccagcgcgagc

SEQ ID NO: 460584 - DNA, 75 bp, synthetic construct
  source 1..75: mol_type = other DNA
tgatggcacggttaaaacagtctcaaactggcctacagacagcggattcactcagtatgagttaggttcagtccg

SEQ ID NO: 460585 - DNA, 75 bp, synthetic construct
  source 1..75: mol_type = other DNA
cagtgaatatgctggctacacccaaagaaatcctgaacagcagcggatatcttcgctcattcccgggcattgcca

SEQ ID NO: 460586 - DNA, 75 bp, synthetic construct
  source 1..75: mol_type = other DNA
tggtcgcgtatcaatggcgcatggtcggacatcacaggcggtaggcgttaatggtcaactggtcgagtatcgcta

SEQ ID NO: 460587 - DNA, 75 bp, synthetic construct
  source 1..75: mol_type = other DNA
gttatgagaatcaaggaaacgttgaggttgagcaggccgccactcttttctccagcttgaatctcggcgaaaagg

SEQ ID NO: 460588 - DNA, 75 bp, synthetic construct
  source 1..75: mol_type = other DNA
cagaaagccttttttgggttgatcgacttttagaacaggaatatgaaaatatcggattgaacgaattgctagttg

SEQ ID NO: 460589 - DNA, 75 bp, synthetic construct
  source 1..75: mol_type = other DNA
attacaagccattcttcagaaataaagagccacccttcatatttccttctcatgatgtcaaaagccaaaaaataa

SEQ ID NO: 460590 - DNA, 75 bp, synthetic construct
  source 1..75: mol_type = other DNA
cagaaagccttttctgggttgatcgacttttagatcaggaatatgaaaatattggattgaatgaattgctaattg

SEQ ID NO: 460591 - DNA, 75 bp, synthetic construct
  source 1..75: mol_type = other DNA
aaaattactttcatatggcagaatgcgtgtatgaccaactggttaaagagtatcccgtaatgtggctgcgggatt

SEQ ID NO: 460592 - DNA, 75 bp, synthetic construct
  source 1..75: mol_type = other DNA
gacaccagccatggccgttttgcatgggaagtacgacaggaacgcgatcaactttttgttggtgatgacgccatc

SEQ ID NO: 460593 - DNA, 75 bp, synthetic construct
  source 1..75: mol_type = other DNA
ctgcgaaagctcgtatacaaatggatatatgtatcaacatataaataatgccattgataatgatgatggtaccat

SEQ ID NO: 460594 - DNA, 75 bp, synthetic construct
  source 1..75: mol_type = other DNA
tattgctgaaccgaaagcgttaatcggctttgccggtccgcgtgttatcgaacagaccgttcgcgaaaaactgcc

SEQ ID NO: 460595 - DNA, 75 bp, synthetic construct
  source 1..75: mol_type = other DNA
ccgaccatgggcggtgtttctgcaagtttcgcgatgctgggcgatctcaacattgctgaaccgaaagccttgatt

SEQ ID NO: 460596 - DNA, 75 bp, synthetic construct
  source 1..75: mol_type = other DNA
tgatcgtccgtcgtccggaaatgcgcctgaaactggcgagcattctggcgaagttgatgaatctgccagcgccga

SEQ ID NO: 460597 - DNA, 75 bp, synthetic construct
  source 1..75: mol_type = other DNA
gtcgccctatgcgctttgccgcgccgccgagtaagaacgtcagcaaagatgtcttccatccggtattcgatgtcg

SEQ ID NO: 460598 - DNA, 75 bp, synthetic construct
  source 1..75: mol_type = other DNA
ccggatctgcgccgtgaactgatgcgccagcgtggctatttcgcttacgcctctaaccactaccagacgcatcag

SEQ ID NO: 460599 - DNA, 75 bp, synthetic construct
  source 1..75: mol_type = other DNA
ggcttttcgatctcctggtatgataagtggtctgagggtgctgtaatcccttcaaaggccaatctcgatattctt

SEQ ID NO: 460600 - DNA, 75 bp, synthetic construct
  source 1..75: mol_type = other DNA
attgagaaaatcctccgctcctacactgctgatgaactggctgatggtgtgatggaatcgctgcgatttgatgct

SEQ ID NO: 460601 - DNA, 75 bp, synthetic construct
  source 1..75: mol_type = other DNA
tggtgccgctttgtatgtcgcacagccatcgctgatggtgcagaaaggtattgccgggacttactgcaaaacacc

SEQ ID NO: 460602 - DNA, 75 bp, synthetic construct
  source 1..75: mol_type = other DNA
ccagtgaatatgctggctacacccaaagaaatcctgaacagcagcggatatcttcgctcattcccgggcattgcc

SEQ ID NO: 460603 - DNA, 75 bp, synthetic construct
  source 1..75: mol_type = other DNA
acgtgcggcgataaactggaacccgtgaccgggaaattgcaattcgacatcagcagccagtatggtcttcaacag

SEQ ID NO: 460604 - DNA, 75 bp, synthetic construct
  source 1..75: mol_type = other DNA
tacatggcgagacttcatcgtctgctttggttcatcgacgattgaatatttctccctgactggcgcaaccactgt

SEQ ID NO: 460605 - DNA, 75 bp, synthetic construct
  source 1..75: mol_type = other DNA
atcttcaagcgccaatggcccacaatggtgtgtgctgaaaacaggcttatatgacgatgcgtaccgcgctattga

SEQ ID NO: 460606 - DNA, 75 bp, synthetic construct
  source 1..75: mol_type = other DNA
cgcgccatgttctggtgtacgacgcatcttcaagcgccaatggcccacaatggtgtgtgctgaaaacaggcttat

SEQ ID NO: 460607 - DNA, 75 bp, synthetic construct
  source 1..75: mol_type = other DNA
atgttctggcgaattttccgtcttgaactgcgcgtggcgtttcgtcatagcgccgaaatcgctaacccgctgtgg

SEQ ID NO: 460608 - DNA, 75 bp, synthetic construct
  source 1..75: mol_type = other DNA
ggcgcgttgctggcaggcaccgcgacattaagtccttttgcgacggcggcagcgttacgaatcagcattcaataa

SEQ ID NO: 460609 - DNA, 75 bp, synthetic construct
  source 1..75: mol_type = other DNA
tgttgccgttacccttgcccgccgttgtgctggcgaaggtgatggcgcactggatggtaaccggtctgccgttac

SEQ ID NO: 460610 - DNA, 75 bp, synthetic construct
  source 1..75: mol_type = other DNA
cctgatgtatgagggtaatcagataacctgcggagacaagcttcagccagtaaccgggcaacttcagttcgacat

SEQ ID NO: 460611 - DNA, 75 bp, synthetic construct
  source 1..75: mol_type = other DNA
attgagaaaattctccgctcctacactgctgatgaactggctgatggcgtgatggaatcgttgcggtttgatgcg

SEQ ID NO: 460612 - DNA, 75 bp, synthetic construct
  source 1..75: mol_type = other DNA
attgagaaaattcttcgctcctacactgctgatgaactggctgatggtgtgatggagtctctgcgatttgatgcg

SEQ ID NO: 460613 - DNA, 75 bp, synthetic construct
  source 1..75: mol_type = other DNA
tttttctctctgcaaccactgacggcataaattatggtcgtgagcagatgattgagcagaatgaaccgttcgttt

SEQ ID NO: 460614 - DNA, 75 bp, synthetic construct
  source 1..75: mol_type = other DNA
actggaaaaactgtccaggctctatcatctcacatggtattatgatgagaacattttgtatatttataaaacaaa

SEQ ID NO: 460615 - DNA, 75 bp, synthetic construct
  source 1..75: mol_type = other DNA
gccggggatcgcggtggcgctgacgttaatggatgatattgcacatctgaaacaggaaaaccgcctgctgcgcca

SEQ ID NO: 460616 - DNA, 75 bp, synthetic construct
  source 1..75: mol_type = other DNA
ctgggtgtttgacgaccatgcggccattgtggtgcaacgggcagtaaggctgcgtcaggaactggcgctggactg

SEQ ID NO: 460617 - DNA, 75 bp, synthetic construct
  source 1..75: mol_type = other DNA
ttgtgtaatgaaaaaaataagtttttttatttttacagcactattttgctgcagtgctcaggctgcccgtcctct

SEQ ID NO: 460618 - DNA, 75 bp, synthetic construct
  source 1..75: mol_type = other DNA
atgaaaaaaataagtttttttatttttacagcattattttgctgcagtgcgcaagctgctccgtcctctctggaa

SEQ ID NO: 460619 - DNA, 75 bp, synthetic construct
  source 1..75: mol_type = other DNA
tggttcacttcccagtaccggtaaaggtgccgtcgagcgaagcggtaacctgtttgataacagtgtaacgatttc

SEQ ID NO: 460620 - DNA, 75 bp, synthetic construct
  source 1..75: mol_type = other DNA
cgacgccggagaactggcgaaagcgggggagaagctactgagtgccaaagggagtatgaccgtcgataaacgcac

SEQ ID NO: 460621 - DNA, 75 bp, synthetic construct
  source 1..75: mol_type = other DNA
gcagtatgactgttgataagcgcaccaatcgccttttattacgcgataacaaagtggcgttaacggcgctggaac

SEQ ID NO: 460622 - DNA, 75 bp, synthetic construct
  source 1..75: mol_type = other DNA
attcatggtttatcactgaccttgaagacgaatcacatcctgaccgttacagcgcacaatatcgcgcagaatcgc

SEQ ID NO: 460623 - DNA, 75 bp, synthetic construct
  source 1..75: mol_type = other DNA
cttcgagctgtggtttaggtcgtttagtggggatcgtgcttacgcaagctcactacgttcctggtttaccgccca

SEQ ID NO: 460624 - DNA, 75 bp, synthetic construct
  source 1..75: mol_type = other DNA
ttgccggtcgggcaggttgaattgtcggcgcacattgtcaccattaatgaaaaaagtttgcgggaattgggggtg

SEQ ID NO: 460625 - DNA, 75 bp, synthetic construct
  source 1..75: mol_type = other DNA
aagcaggagagaagctactgagtgccaaaggcagcatgactgtcgataaacgtactaatcgccttttgctgcgtg

SEQ ID NO: 460626 - DNA, 75 bp, synthetic construct
  source 1..75: mol_type = other DNA
atatctacttaaacttgctttgattggtaaatcaaaccgtcgtaatcgtagaccagcagttgatgaacttgacat

SEQ ID NO: 460627 - DNA, 75 bp, synthetic construct
  source 1..75: mol_type = other DNA
ctttacaggacgcaattaaaaacgcggcaggcatcatcaaagaaatcgaagagatgattgctgctgaacaacagt

SEQ ID NO: 460628 - DNA, 75 bp, synthetic construct
  source 1..75: mol_type = other DNA
atgttagtattgtcaaataatttaaaaaagcagaagcgtgattactctcacacaacacctctgctttccatgtta

SEQ ID NO: 460629 - DNA, 75 bp, synthetic construct
  source 1..75: mol_type = other DNA
gtatgcaacggctccggcgctgatgtacgttggcctgctgatgctgagcaacgtggcgaaaatcgactttgctga

SEQ ID NO: 460630 - DNA, 75 bp, synthetic construct
  source 1..75: mol_type = other DNA
gatgatgagcttcatgcaataaaggaacatttatctaatatatttaatgtaaataaagatgctatcggaaacgaa

SEQ ID NO: 460631 - DNA, 75 bp, synthetic construct
  source 1..75: mol_type = other DNA
aatgctggaatcccaggaagtggatttgatggtaaccaccctgatcttacccagcaatagtggacacgcggctaa

SEQ ID NO: 460632 - DNA, 75 bp, synthetic construct
  source 1..75: mol_type = other DNA
gctcaacactttaccgtatggcactgaaaatcttcggcccggaagcacagttactgaaactgacagaagaagccg

SEQ ID NO: 460633 - DNA, 75 bp, synthetic construct
  source 1..75: mol_type = other DNA
cccgatcacggattcggcatgattttgaacaaaaacaaatcactaaagcctattttttgtgcaaaatttgcgtca

SEQ ID NO: 460634 - DNA, 75 bp, synthetic construct
  source 1..75: mol_type = other DNA
atgaaaggacgttgggtaaagtaccttcttatgggcgctgttgtggcgatgcttgccgcctgctcctccaaacca

SEQ ID NO: 460635 - DNA, 75 bp, synthetic construct
  source 1..75: mol_type = other DNA
ctccaccaactatctgaccgaaatgtacggcatgtcgctggtggcagcgagctacatggggattgtgatcaacaa

SEQ ID NO: 460636 - DNA, 75 bp, synthetic construct
  source 1..75: mol_type = other DNA
ggcatggcggcgcttggcatggtgatcatctttacctttttgctgttccaaaaaattcgtactgctgatagcgcc

SEQ ID NO: 460637 - DNA, 75 bp, synthetic construct
  source 1..75: mol_type = other DNA
atctacagtgtggtttacatcttgttggggattctgtgctggttttttgttagcgataacaacaacctgcgcagt

SEQ ID NO: 460638 - DNA, 75 bp, synthetic construct
  source 1..75: mol_type = other DNA
ggcggcaaagccctgaccagtgactcagtaagttcaatattctccggcctggtgggcgcagcgcccgcggcggtt

SEQ ID NO: 460639 - DNA, 75 bp, synthetic construct
  source 1..75: mol_type = other DNA
gttgaactgggctatttcacccagcaaaacaaagatgcgaatagtaataaatttaatgagtctggttataaaacc

SEQ ID NO: 460640 - DNA, 75 bp, synthetic construct
  source 1..75: mol_type = other DNA
tatcaaagccctggaaaacgaactggatggcttcaccttcgaagacaataaagacgaccagtttgctgtcggtgc

SEQ ID NO: 460641 - DNA, 75 bp, synthetic construct
  source 1..75: mol_type = other DNA
atgtcacggcaaacgaaagcgcatcggaaaaagataatcaggataataacgggtattatgactggaaagatacct

SEQ ID NO: 460642 - DNA, 75 bp, synthetic construct
  source 1..75: mol_type = other DNA
aaacgctggggaaaaaattatcactccgggcattcgctcagcgcatgacggcggacggattacctgtcagcattt

SEQ ID NO: 460643 - DNA, 75 bp, synthetic construct
  source 1..75: mol_type = other DNA
agtaataaatatatccagtttccaatctggctatttacgtatatttttcgcggtacgccgctgtatgttcagctg

SEQ ID NO: 460644 - DNA, 75 bp, synthetic construct
  source 1..75: mol_type = other DNA
ggaaaccactgctgtggactgacggttatcgctttactggcgtggcgatcaccctgtggctgctgattttgtcgg

SEQ ID NO: 460645 - DNA, 75 bp, synthetic construct
  source 1..75: mol_type = other DNA
agggtggaggacgaggtattgaccaacatatgctggcaacactgcgtgatgctgttctcggggggttcgccccga

SEQ ID NO: 460646 - DNA, 75 bp, synthetic construct
  source 1..75: mol_type = other DNA
ttcataccattgatgccacccagccgctggaggccgtgatggatgcaatccgcactaccgtgaccaattgggtga

SEQ ID NO: 460647 - DNA, 75 bp, synthetic construct
  source 1..75: mol_type = other DNA
acttaacgctttatcttgatgtcaccccagaggtcggcttaaaacgtgctcgcgcccgtggtgagctggatcgta

SEQ ID NO: 460648 - DNA, 75 bp, synthetic construct
  source 1..75: mol_type = other DNA
tcgtcgcaaatgcagccaggaatctgcggctgatgatgttcagtggtgcagcttcagaaaatccctgccgtggat

SEQ ID NO: 460649 - DNA, 75 bp, synthetic construct
  source 1..75: mol_type = other DNA
aagaagatgatgttgtggtcatcaaaacaccgggcggcgaagtagaatttgaagtcgttaaggtggaatacctgt

SEQ ID NO: 460650 - DNA, 75 bp, synthetic construct
  source 1..75: mol_type = other DNA
cggtaggcgatgaagtcattaccgataaagccgaagtgctgatgttttatgccgcgcgtgtacagctggtagaaa

SEQ ID NO: 460651 - DNA, 75 bp, synthetic construct
  source 1..75: mol_type = other DNA
cgcttacagcaactccctgatggataacttcattatggatgtgcagggtagcgggtatatcgactttggtgatgg

SEQ ID NO: 460652 - DNA, 75 bp, synthetic construct
  source 1..75: mol_type = other DNA
ctgaagctaaaaaaatggcagtagagatgatgttctggcctgcttgtcctgtagatgatgattattgtttcgacg

SEQ ID NO: 460653 - DNA, 75 bp, synthetic construct
  source 1..75: mol_type = other DNA
aatgaaggcaacaggaaatatgccagacaccgatgctttcctgtctgaagtgcgggcgcagggggtagagatgat

SEQ ID NO: 460654 - DNA, 75 bp, synthetic construct
  source 1..75: mol_type = other DNA
gcaaggcgtggagatgtttgcggagtgtgcatacacacttgaacatcatgatcacgcagtagcttttgccgccga

SEQ ID NO: 460655 - DNA, 75 bp, synthetic construct
  source 1..75: mol_type = other DNA
gaaaaaaatcgtcttccttggcgcaggttcagcgggatgcggcattgccgaaatgatcatcgcccagacccagcg

SEQ ID NO: 460656 - DNA, 75 bp, synthetic construct
  source 1..75: mol_type = other DNA
gaccgggctgtttacggaagagatcattcgtgagatgcataaacactgtccgcgtccgatcgtgatgccgctgtc

SEQ ID NO: 460657 - DNA, 75 bp, synthetic construct
  source 1..75: mol_type = other DNA
gatgatgttctggcctgcttgtcctgtagatgatgattattgtttcgacgctataatgtatacatcagttattga

SEQ ID NO: 460658 - DNA, 75 bp, synthetic construct
  source 1..75: mol_type = other DNA
cggtacgtgtgccaaccattaatgtgacggcaatcgacctgagcgtgacggtgaagaaacctgtaaaagccaatg

SEQ ID NO: 460659 - DNA, 75 bp, synthetic construct
  source 1..75: mol_type = other DNA
ttgtaaattgacctatttagaaactgaacatgacgttaaaacgtttaatgaggctcttaatgcgatgatgcgctg

SEQ ID NO: 460660 - DNA, 75 bp, synthetic construct
  source 1..75: mol_type = other DNA
cccgtcgcggcatttttgccggggggattacttataaaggggcatggactcaacaaaccgtagaaatttacagct

SEQ ID NO: 460661 - DNA, 75 bp, synthetic construct
  source 1..75: mol_type = other DNA
gtactgcgtacgctttcacagttagactggctgattaataagttaatggcccgtccgatgaccggcaaacagcgg

SEQ ID NO: 460662 - DNA, 75 bp, synthetic construct
  source 1..75: mol_type = other DNA
tgcataccatcctgacctgcgtcgcactcgggcagccagtcagtcgatcattccggtcgatactaaactggccgc

SEQ ID NO: 460663 - DNA, 75 bp, synthetic construct
  source 1..75: mol_type = other DNA
ggcgtatatggctcccgcgagcatggcgaagcgcacattgccgccggggctaaaaaagtgctcttttcacatcct

SEQ ID NO: 460664 - DNA, 75 bp, synthetic construct
  source 1..75: mol_type = other DNA
gctggggttactgccggaagtggtcgaaaccatcgaagaacaagcggaacgtgcgtggatccagtatcagggatt

SEQ ID NO: 460665 - DNA, 75 bp, synthetic construct
  source 1..75: mol_type = other DNA
taagctcatctctgcggcattaaccttaggatttgcttacgcggcgtggaatatcggtatattgcatggtaacgt

SEQ ID NO: 460666 - DNA, 75 bp, synthetic construct
  source 1..75: mol_type = other DNA
cggcgggcaaagtgtgttgtatgcgctggcgccgctgttttacagcacgcagatccgcgccacaggcgtgggaac

SEQ ID NO: 460667 - DNA, 75 bp, synthetic construct
  source 1..75: mol_type = other DNA
cgccgacaggctggctgaaatgcaacggggctgctttttcggctgaagaatacccggagctggcaaaggcttacc

SEQ ID NO: 460668 - DNA, 75 bp, synthetic construct
  source 1..75: mol_type = other DNA
ttggcctgattgcgatcatcttgtggagcacgatggttgggttgattcgtggggtcagtgaggggctcggtccgg

SEQ ID NO: 460669 - DNA, 75 bp, synthetic construct
  source 1..75: mol_type = other DNA
atggtaggattgattcgcggtgtcagcgaggggctcggcccggtcggtggtgcggcggcgatctattcattaagc

SEQ ID NO: 460670 - DNA, 75 bp, synthetic construct
  source 1..75: mol_type = other DNA
gctatcattttcattctggcaaggcgcactgatggtctgtggcggctccctgctctgctggctggcgacccgcca

SEQ ID NO: 460671 - DNA, 75 bp, synthetic construct
  source 1..75: mol_type = other DNA
atgaacgaatatcagtttgtgcttccatacccgccgtcgctgaacacctactggcgaagacgaggaagccaatat

SEQ ID NO: 460672 - DNA, 75 bp, synthetic construct
  source 1..75: mol_type = other DNA
ggaacagtgctcaagtacaaccgagacagcaaaggcgagcgtcacgtaatagttaacggcgtcctgatggtaacg

SEQ ID NO: 460673 - DNA, 75 bp, synthetic construct
  source 1..75: mol_type = other DNA
acacgagaagttttcggcgcttgcggcggagaatgagctggctcgtaaggcagttcaggcattctgcgatgttgt

SEQ ID NO: 460674 - DNA, 75 bp, synthetic construct
  source 1..75: mol_type = other DNA
tcgcgacctggacaatatcctgaaagcaccgctggatgcgctgacgcatgcgggagtgttaatggacgatgagca

SEQ ID NO: 460675 - DNA, 75 bp, synthetic construct
  source 1..75: mol_type = other DNA
gcaattcgatgacattcgcgtaattcgtggagtgaaagtaccaggcggaaggcttggaataaaaatcaccgaact

SEQ ID NO: 460676 - DNA, 75 bp, synthetic construct
  source 1..75: mol_type = other DNA
acggaagaacaatgggacgaactcatcgccagcgaaatggcgtatgtgaatgcggtgcaggagattgcacacctg

SEQ ID NO: 460677 - DNA, 75 bp, synthetic construct
  source 1..75: mol_type = other DNA
atcatagactctccgccggtgatacatataacttaattaaaacgcttgatgtttgtaattatgacccagaaagga

SEQ ID NO: 460678 - DNA, 75 bp, synthetic construct
  source 1..75: mol_type = other DNA
gttacgattgagcgtaaggacggttattattttattaatttctccggagataaatcagacataatttataaagtt

SEQ ID NO: 460679 - DNA, 75 bp, synthetic construct
  source 1..75: mol_type = other DNA
tattaaatacgagagacatgatattgaatgagttgcatcaacatgtttttttaaaggacgatgcgataacccctt

SEQ ID NO: 460680 - DNA, 75 bp, synthetic construct
  source 1..75: mol_type = other DNA
gtctctaaagagacgtttactaaggaaaagtttgatagctatgttaaatctgtgttttcaaaaatagacttttat

SEQ ID NO: 460681 - DNA, 75 bp, synthetic construct
  source 1..75: mol_type = other DNA
atacattagacaaaaatatggccatcatggggtcggggtagatcagaatcaacaatttgataatggtgttatggg

SEQ ID NO: 460682 - DNA, 75 bp, synthetic construct
  source 1..75: mol_type = other DNA
taaacatctcttcaagccatcaagataagcattcagataaagttaacagtcatcaacaccatggcaaggttgata

SEQ ID NO: 460683 - DNA, 75 bp, synthetic construct
  source 1..75: mol_type = other DNA
tactgcaggtgcatttaccgctgattctgtcggcaacatctatgtgcaggggcacgaagacgagatgctggtgca

SEQ ID NO: 460684 - DNA, 75 bp, synthetic construct
  source 1..75: mol_type = other DNA
gggcattctccagctactacgccagcagcaaatacgctgctgagcaggctattgccggggcggtatctcaatatc

SEQ ID NO: 460685 - DNA, 75 bp, synthetic construct
  source 1..75: mol_type = other DNA
ccagcggcctggggcgcaatgccgtacaattcttgctggaatcgggtgtttcggtggtggcaacagggcgaaatc

SEQ ID NO: 460686 - DNA, 75 bp, synthetic construct
  source 1..75: mol_type = other DNA
catttaatcagatgaaaaatcctactgatcctgaggaattagcatatatatttaataaaaacataaacaacatat

SEQ ID NO: 460687 - DNA, 75 bp, synthetic construct
  source 1..75: mol_type = other DNA
ataaagatagccgtattaataaaaatgtcgtcgttctggctggaaatcatgaaatcaattttaatggtaactata

SEQ ID NO: 460688 - DNA, 75 bp, synthetic construct
  source 1..75: mol_type = other DNA
acctctgtggaaggcaaacaggagcattatttcaccacccgcctgcccaccgctgtggcgcacagggctgcgcca

SEQ ID NO: 460689 - DNA, 75 bp, synthetic construct
  source 1..75: mol_type = other DNA
gatgcttttaattactttaaattacaaggtattgatattacaaaattttctcctattagaggattattacctttt

SEQ ID NO: 460690 - DNA, 75 bp, synthetic construct
  source 1..75: mol_type = other DNA
tacatgctgaccagtcgttagaagtgattgatgatggtcgcgggatgccggtggatattcaccctgaagaaggcg

SEQ ID NO: 460691 - DNA, 75 bp, synthetic construct
  source 1..75: mol_type = other DNA
acctcgacaacggagcagacgacgcagaacgaggtggttttgattatgccgttaagtttctacgcagtgaagcgt

SEQ ID NO: 460692 - DNA, 75 bp, synthetic construct
  source 1..75: mol_type = other DNA
atttggggcaagaagttattgataacagtgtcgatgaagcactggcgggtcacgcaaaacgcgtggatgtaatct

SEQ ID NO: 460693 - DNA, 75 bp, synthetic construct
  source 1..75: mol_type = other DNA
gcggcctgcacggcgtggggatttcggtggttaacgccctgtcaaagcgcgtagaagtcaacgtgcgccgcgatg

SEQ ID NO: 460694 - DNA, 75 bp, synthetic construct
  source 1..75: mol_type = other DNA
cattgacgatggccgtggaatgccggtggatattcacccggaagaaggtgttccggcggtagaattgatcctctg

SEQ ID NO: 460695 - DNA, 75 bp, synthetic construct
  source 1..75: mol_type = other DNA
agagaaagagggcgtgctcgagcaattaaaacgcaagaaaggcaagccgaacgttcagcgttttaaaggtctggg

SEQ ID NO: 460696 - DNA, 75 bp, synthetic construct
  source 1..75: mol_type = other DNA
gcaaaaaagcggtaaaatcattaatatctgttcattgttttcttacctgggcgggcaatggtctccagcatattc

SEQ ID NO: 460697 - DNA, 75 bp, synthetic construct
  source 1..75: mol_type = other DNA
gtcaaagataacggcgaaacaaaggaaatgattgaaaaacagggtgttgaagttgattttatgcaggtggatatc

SEQ ID NO: 460698 - DNA, 75 bp, synthetic construct
  source 1..75: mol_type = other DNA
tgttttggtggggatggtggcagtaactggcggtttaaccttttccgcattttacgatacgccggcgggtccgtc

SEQ ID NO: 460699 - DNA, 75 bp, synthetic construct
  source 1..75: mol_type = other DNA
ccgtcgatattctggttaacaatgccggtatttgtaagctgaataaggtgctggacttcggtcgtgccgactggg

SEQ ID NO: 460700 - DNA, 75 bp, synthetic construct
  source 1..75: mol_type = other DNA
tggggtgatactcaggatttaatgggggcagcaatattcctcgcaagtccggcttcaaactatgttaatggtcat

SEQ ID NO: 460701 - DNA, 75 bp, synthetic construct
  source 1..75: mol_type = other DNA
gataacggcgaaacaaaggaaatgattgaaaaacagggtgttgaggtggacttcatgcaggtggatatcaccgca

SEQ ID NO: 460702 - DNA, 75 bp, synthetic construct
  source 1..75: mol_type = other DNA
gacctgccagaaacttatcttgcgcgagcattctccagccattatgccagcagtaaatatgccgctgagcaggtt

SEQ ID NO: 460703 - DNA, 75 bp, synthetic construct
  source 1..75: mol_type = other DNA
accggactcgcgacacattgctccgcgaagcagcaaaacttgatcccgccaactatatggtgcatagggccagaa

SEQ ID NO: 460704 - DNA, 75 bp, synthetic construct
  source 1..75: mol_type = other DNA
ggaggtaacacgtctcgacatgtcaagttccgttatccagagggccatgccaatgctgaaaagcctgcgggcaag

SEQ ID NO: 460705 - DNA, 75 bp, synthetic construct
  source 1..75: mol_type = other DNA
ggaaaaatgctaccaaaaagagacggtagtaaaaaaactggttttcaaacccgtaagaatgccgggtgatatcag

SEQ ID NO: 460706 - DNA, 75 bp, synthetic construct
  source 1..75: mol_type = other DNA
tcaattgttggtgcgttatccatcggtctttccattcctggattatggttgtaccgcaagcgccctcgcgtataa

SEQ ID NO: 460707 - DNA, 75 bp, synthetic construct
  source 1..75: mol_type = other DNA
cgctggcacaggatatgatcctcgcggctataccggcggtcggtttcgccatggtgttcaacgtacccattaggg

SEQ ID NO: 460708 - DNA, 75 bp, synthetic construct
  source 1..75: mol_type = other DNA
ttgagtggtcaacctttatggcctctatgctggtcggcaccattggtattcaatggtcgcgctggtatctggcgc

SEQ ID NO: 460709 - DNA, 75 bp, synthetic construct
  source 1..75: mol_type = other DNA
tcgctcgtgacctgttctgcaatgagcgtagtgcgcgggaagatcgcctgtttggcgatgcatttgagtttatct

SEQ ID NO: 460710 - DNA, 75 bp, synthetic construct
  source 1..75: mol_type = other DNA
gccggacgttttgagatggcgaaaattgcccgtgacctgttttgcagtgagcgtaatgcgcgggaagatcgcctg

SEQ ID NO: 460711 - DNA, 75 bp, synthetic construct
  source 1..75: mol_type = other DNA
gagcttgaggcgctttcgttaaagcaccctggtctgcaagtggtgccggtggttgaacaaccggaagcaggctgg

SEQ ID NO: 460712 - DNA, 75 bp, synthetic construct
  source 1..75: mol_type = other DNA
gctttcagcgggctgcaattgagcaagggcgggaaccttcctgggggtttaccgagaaaagccgtaccagcgata

SEQ ID NO: 460713 - DNA, 75 bp, synthetic construct
  source 1..75: mol_type = other DNA
cacgacttgaccagacaagcgcccttttcgaacgggcaagaccaatgttgaaaagccttctggcgagacaattcg

SEQ ID NO: 460714 - DNA, 75 bp, synthetic construct
  source 1..75: mol_type = other DNA
tacagatggagaatgcacaggacatctgcaaacgcctgtacccgataatgaaggaacttaactcatcatacgcga

SEQ ID NO: 460715 - DNA, 75 bp, synthetic construct
  source 1..75: mol_type = other DNA
gcccctaaggatactggacctggaattatcagatgtgcgaccagatcctgttatggacttttcccgaagcgaatt

SEQ ID NO: 460716 - DNA, 75 bp, synthetic construct
  source 1..75: mol_type = other DNA
atgtcatcgacaaatattgaacaagtgatgccagttaagctggcgcaggcgctggcgaatccgttatttccggcg

SEQ ID NO: 460717 - DNA, 75 bp, synthetic construct
  source 1..75: mol_type = other DNA
tgaaactggtaaacaaccgttctaccggttcagacgtcgatcgccagaagttgcaggaaaaagtacgttcctcgc

SEQ ID NO: 460718 - DNA, 75 bp, synthetic construct
  source 1..75: mol_type = other DNA
cgcgttataacgttgagcttattcgcgcgccggaaggtttcttctatttacgtccacgttccaccacgttgatcc

SEQ ID NO: 460719 - DNA, 75 bp, synthetic construct
  source 1..75: mol_type = other DNA
ttgctgccgttccctggccgttgctttctctggtcgcgcgcagcctggaactgtacgggaaatgtgttaatcagg

SEQ ID NO: 460720 - DNA, 75 bp, synthetic construct
  source 1..75: mol_type = other DNA
gtcgtgctgcctacggttatatatatttaatagacagcatgataagaccacctatcatggttttcggattctttt

SEQ ID NO: 460721 - DNA, 75 bp, synthetic construct
  source 1..75: mol_type = other DNA
ggatgatgttagtattaaagttgatttcttttcattaataaaaaataaaatcaaaaacttcaataaggataattt

SEQ ID NO: 460722 - DNA, 75 bp, synthetic construct
  source 1..75: mol_type = other DNA
ttacagggagcccccaaaaataccggacctgatgttattcggtgcgcaacccgggcctgttatgggcttttccca

SEQ ID NO: 460723 - DNA, 75 bp, synthetic construct
  source 1..75: mol_type = other DNA
ggtaggcactgttttaggcgtagcgctgtttcgcggcgtaccggttgggccgcttattgccgcgggtctggtttc

SEQ ID NO: 460724 - DNA, 75 bp, synthetic construct
  source 1..75: mol_type = other DNA
ggtatatactaccacataagacagttcgcaaaccactaagtgatatcgccagtaaaaaacggtccgagtacaaga

SEQ ID NO: 460725 - DNA, 75 bp, synthetic construct
  source 1..75: mol_type = other DNA
gtgaaagaggtgaaacgctacctggcaagcccggcggcagtgggggaatatcttgctgaccagctagtgttgcca

SEQ ID NO: 460726 - DNA, 75 bp, synthetic construct
  source 1..75: mol_type = other DNA
gacctgatgttattcggtgcgcaacccgggcctgttatgggattttcccaaaacggattatttttgaagcatttt

SEQ ID NO: 460727 - DNA, 75 bp, synthetic construct
  source 1..75: mol_type = other DNA
ggattatatccatgaaactactatccactctttggatgcatatcctgtacactcagaacatcaggatttaaatta

SEQ ID NO: 460728 - DNA, 75 bp, synthetic construct
  source 1..75: mol_type = other DNA
aaacgttctgatgtgaacggtatatcgcgcggcgtcgagtacaacatggcgcagagtgctgtttatcgcgtgtgt

SEQ ID NO: 460729 - DNA, 75 bp, synthetic construct
  source 1..75: mol_type = other DNA
acgtgcggcgataagctggaatccgtgaccgggaaattgcagttcgatatcagcagccagtacgacaagcagcag

SEQ ID NO: 460730 - DNA, 75 bp, synthetic construct
  source 1..75: mol_type = other DNA
attcatggtttatcactgaccttgaagacgaatcgcatcctgaccgctacagcgcacaatatcgtgccgagtcgc

SEQ ID NO: 460731 - DNA, 75 bp, synthetic construct
  source 1..75: mol_type = other DNA
cacacaatgtccgtatgcctcagcctgatcagcttccccgaactgttcgtaactcattgcctgagctcgcacagc

SEQ ID NO: 460732 - DNA, 75 bp, synthetic construct
  source 1..75: mol_type = other DNA
aaatgagttcagccgtatggggctgccgggagtagcaactgttcaggatatttttgtcggtggcagcaagggggc

SEQ ID NO: 460733 - DNA, 75 bp, synthetic construct
  source 1..75: mol_type = other DNA
gctgatgctgacccgatggagcagcccgcgttcatgcgtgacccgcgattccgtggtttcacgggggatgatacg

SEQ ID NO: 460734 - DNA, 75 bp, synthetic construct
  source 1..75: mol_type = other DNA
gcaaaccgggtttgcccgcacattgccgctgaccggacggctgactgaaaaatccctcatcaccgtatctcaggg

SEQ ID NO: 460735 - DNA, 75 bp, synthetic construct
  source 1..75: mol_type = other DNA
aaacgcggaaaaccggaaaattatctctaccgccggttgtcctggaaactgcaaaccgggtttgcccgcaccctg

SEQ ID NO: 460736 - DNA, 75 bp, synthetic construct
  source 1..75: mol_type = other DNA
atgcagaccattcattttttacccgatcgccttaacgtggagccggccgtgttccggggcttcaccacgccggag

SEQ ID NO: 460737 - DNA, 75 bp, synthetic construct
  source 1..75: mol_type = other DNA
ggtatcaccaatcgccagcgcgagcattgagaaaatactccgctcctacactgctgatgaactggctgatggcgt

SEQ ID NO: 460738 - DNA, 75 bp, synthetic construct
  source 1..75: mol_type = other DNA
ctccgatggtctgcacattgccacgctgctctgcgctttgttcgtaaaacacttccgcgcgttggtgaaacacgg

SEQ ID NO: 460739 - DNA, 75 bp, synthetic construct
  source 1..75: mol_type = other DNA
atagcctttccgaccgtggcgctgctgatgccgctggtcacggttatttttggcggcaggttaatggcgcgtttt

SEQ ID NO: 460740 - DNA, 75 bp, synthetic construct
  source 1..75: mol_type = other DNA
ggcgtcccgtgctgccggtaatgttgtcggtggtatcctgggggcattcagcccgattggcagtgagacgtcgga

SEQ ID NO: 460741 - DNA, 75 bp, synthetic construct
  source 1..75: mol_type = other DNA
tggaagttaaccgtattgcttctgtttacggaacggaaaacgggaaaaaactgaagagtatggaaatggctggct

SEQ ID NO: 460742 - DNA, 75 bp, synthetic construct
  source 1..75: mol_type = other DNA
acgaatggttccattctctggataattattttggtcgttatgacgtttccactgacgggaaaattacgtcaggtg

SEQ ID NO: 460743 - DNA, 75 bp, synthetic construct
  source 1..75: mol_type = other DNA
cgtttaccggaatacccgcagtggcgatatttttatcgcttacggcaaaaacaaaatgcgggtgagaggtggttt

SEQ ID NO: 460744 - DNA, 75 bp, synthetic construct
  source 1..75: mol_type = other DNA
tcagccgctggctaaattactggcggactacaaaattgcgcaggccgatctggatgagtacctctacgcccgtca

SEQ ID NO: 460745 - DNA, 75 bp, synthetic construct
  source 1..75: mol_type = other DNA
aacagtatggataagtctggcttgaccttgtatcgaaaacgtcctgcaagtcgcgataatgtgaaaaataaaaac

SEQ ID NO: 460746 - DNA, 75 bp, synthetic construct
  source 1..75: mol_type = other DNA
aacaacggaaaattgtcgatgaacgggcttatgcaggatacccggaagagactgaaggatttgcgtaaacagcgt

SEQ ID NO: 460747 - DNA, 75 bp, synthetic construct
  source 1..75: mol_type = other DNA
tgaacggtcgtcttgggcttgcttttggtgcccgtggtaagggtaaggcggcggcacactatgagccgggtgagg

SEQ ID NO: 460748 - DNA, 75 bp, synthetic construct
  source 1..75: mol_type = other DNA
tctgcattgcagattgataaagcatccggctatcgtgtcaggtccggtgtttattcgtttgtcgggggaaaacgt

SEQ ID NO: 460749 - DNA, 75 bp, synthetic construct
  source 1..75: mol_type = other DNA
ttacggtacggaaggaggaatgagtaaggcaaatagtctggataaagccggattaacgctttaccggaagaaaaa

SEQ ID NO: 460750 - DNA, 75 bp, synthetic construct
  source 1..75: mol_type = other DNA
atgccatggcggcaaaactgggcgatgcacagttgcttaatctggcgatgcggggtacggcgaagaccgttaaga

SEQ ID NO: 460751 - DNA, 75 bp, synthetic construct
  source 1..75: mol_type = other DNA
gcgtccgtttgcgaaccttgccatgaatgaaaacttcatgggggcgcagatttaccaggagaacatgccgtttgg

SEQ ID NO: 460752 - DNA, 75 bp, synthetic construct
  source 1..75: mol_type = other DNA
gatggcaaaaacgcggttactgatactgtcggtaaaggtctgaaggcaaccggtaaggctgtcagtgatggtgcc

SEQ ID NO: 460753 - DNA, 75 bp, synthetic construct
  source 1..75: mol_type = other DNA
tatattacatggcaacgtcaccattatggcggtaggttcgtattttacgcccgtcctttcctcagcgcttgcagc

SEQ ID NO: 460754 - DNA, 75 bp, synthetic construct
  source 1..75: mol_type = other DNA
gcgggtatatcgactttggtgatggcagtccgcttaactttttcagctatgcagggaaaaacggtcatgcctatc

SEQ ID NO: 460755 - DNA, 75 bp, synthetic construct
  source 1..75: mol_type = other DNA
gggtgtggggattgaaaactgggcacttggtgtagggctgtttgatatgtccttaagccgtgatgatgtcgatgt

SEQ ID NO: 460756 - DNA, 75 bp, synthetic construct
  source 1..75: mol_type = other DNA
cgagttctgtgaataccgcaacattctgccgcgcggcgtgaagctgtcggcagaagatatctgggatcgctgcgc

SEQ ID NO: 460757 - DNA, 75 bp, synthetic construct
  source 1..75: mol_type = other DNA
tcggcgcaatccccgcgtctgctggaactcaccttcaccgaacagacgaccaatcggttcctcgaacaggttgcc

SEQ ID NO: 460758 - DNA, 75 bp, synthetic construct
  source 1..75: mol_type = other DNA
atgaaaatcgacgagcagaacatgcagggcggtaactcgctgctgctgcatctcgatgactgggaacatctggac

SEQ ID NO: 460759 - DNA, 75 bp, synthetic construct
  source 1..75: mol_type = other DNA
ggggcgaaacacacagtgaagctgaggttcgcgagctgctggaacagaaccgtctttcgtcttctttaaaccgca

SEQ ID NO: 460760 - DNA, 75 bp, synthetic construct
  source 1..75: mol_type = other DNA
tcagcataccagaatgcagtgagagcatgggttttatgtgaaggggggattaaagataaaagtatacatgatgaa

SEQ ID NO: 460761 - DNA, 75 bp, synthetic construct
  source 1..75: mol_type = other DNA
cactattatgataatgccgtaagtgaaatggctgaaaataaacaggaagatcccatgcagggaacaggccgatga

SEQ ID NO: 460762 - DNA, 75 bp, synthetic construct
  source 1..75: mol_type = other DNA
gtagatattcacccggaagagggggtaccggcggttgaactgattctttgccgtctgcacgcgggcggtaaattc

SEQ ID NO: 460763 - DNA, 75 bp, synthetic construct
  source 1..75: mol_type = other DNA
cagcggtccggcgctgcctggcaaactggctgactgtaccgcgcaggaccttaaccgcaccgaactgtttcttgt

SEQ ID NO: 460764 - DNA, 75 bp, synthetic construct
  source 1..75: mol_type = other DNA
aacatcaagccaaccacttctcggatgttcgcaatgagttgattggcatccgtggcgacatgcacggaatggagc

SEQ ID NO: 460765 - DNA, 75 bp, synthetic construct
  source 1..75: mol_type = other DNA
aatcaaaagtggatcatcgtcctgttgattttatcaattcttatcccgctacttatcgcattggtcacaaaatga

SEQ ID NO: 460766 - DNA, 75 bp, synthetic construct
  source 1..75: mol_type = other DNA
tttgcgaaaaagctaaaaaagtgctgtgacaatccgcatattccttccgcaaaactgcgcgggataaaggactgc

SEQ ID NO: 460767 - DNA, 75 bp, synthetic construct
  source 1..75: mol_type = other DNA
gcctggcgatgaagtagtggtggaagtagaaggcgtgggctgcctggtgaaccgaattgtgagtgaggaaacagc

SEQ ID NO: 460768 - DNA, 75 bp, synthetic construct
  source 1..75: mol_type = other DNA
cgtaccagtgccgcactctgcgccgaagtacgtccgcaggttgggggaattatccagaaacgcctgtttaatgag

SEQ ID NO: 460769 - DNA, 75 bp, synthetic construct
  source 1..75: mol_type = other DNA
gtgatgtttataatcttgccagccgagtaggcagcctggcggctgcggcttgtcatggactgaaattaccgttat

SEQ ID NO: 460770 - DNA, 75 bp, synthetic construct
  source 1..75: mol_type = other DNA
ccaccagtccattaagttatttcctggcgttcattggcgcttttatctgggcagcttattgtacagtaacgaata

SEQ ID NO: 460771 - DNA, 75 bp, synthetic construct
  source 1..75: mol_type = other DNA
gtgccggatatgaccggtgtggtggatacgacctttgatgacaaggtgcgcagcatgccaccacagagatgcagg

SEQ ID NO: 460772 - DNA, 75 bp, synthetic construct
  source 1..75: mol_type = other DNA
gtgccggatatgaccggtgttgtggatacgacctttgatgacaaggtgcgtcagcatgccaccacagagatgcag

SEQ ID NO: 460773 - DNA, 75 bp, synthetic construct
  source 1..75: mol_type = other DNA
aagctctggaaaacgaactggatggcttcacctttgaagacaataaagacgaccagtttgctgtcggtgcccagg

SEQ ID NO: 460774 - DNA, 75 bp, synthetic construct
  source 1..75: mol_type = other DNA
attcgtttctacgctacatatatcaaagctctggaaaacgaactggatggcttcacctttgaagacaataaagac

SEQ ID NO: 460775 - DNA, 75 bp, synthetic construct
  source 1..75: mol_type = other DNA
gatttcgtctggtttatcaggtgattgacgatatgttaattattgcggttgttgcggtaggaaaacgagaacgta

SEQ ID NO: 460776 - DNA, 75 bp, synthetic construct
  source 1..75: mol_type = other DNA
tataaaataaaacttcgcgcatcgggttttcgtctggtttatcaggtgattgatgatatgttaattattgcggtt

SEQ ID NO: 460777 - DNA, 75 bp, synthetic construct
  source 1..75: mol_type = other DNA
tataaaatcaaacttcgcgcatcaggttttcgtctggtttatcagattattgatgatatgttaattattgcggtc

SEQ ID NO: 460778 - DNA, 75 bp, synthetic construct
  source 1..75: mol_type = other DNA
atttcactttgtatatcatcttttccattgcgtttatgctgatctccatcctgattatcctgatcgccaaaccca

SEQ ID NO: 460779 - DNA, 75 bp, synthetic construct
  source 1..75: mol_type = other DNA
tgtgtaactgtgcagaacgtgtttatgtacagaaaggcatttatgatcagttcgtcaatcggctgggtgaagcga

SEQ ID NO: 460780 - DNA, 75 bp, synthetic construct
  source 1..75: mol_type = other DNA
aaaagacatttttcgacattgaagtagatgtattaaaggatgaacttgaattattcagaatagataatggcgaaa

SEQ ID NO: 460781 - DNA, 75 bp, synthetic construct
  source 1..75: mol_type = other DNA
acttctcacacctcagggcaatcaaagctctggacatacgaagaagagaggtaaattaccttctgatgcagtcag

SEQ ID NO: 460782 - DNA, 75 bp, synthetic construct
  source 1..75: mol_type = other DNA
gttcatacgcgacggcggtttgttcttttgccgctgtcagggggaataatacgattgtgttcaaagtcgacaaac

SEQ ID NO: 460783 - DNA, 75 bp, synthetic construct
  source 1..75: mol_type = other DNA
ctggactgccgatattccggtgggcaccttatgcccggaatgggcgcagcgtctcggcctgcctgaaagcgtggt

SEQ ID NO: 460784 - DNA, 75 bp, synthetic construct
  source 1..75: mol_type = other DNA
aaaatccgtctctggatcacctgccggtggtgctcgactggtttaacggccgccgcacaccgaacgctaaccaac

SEQ ID NO: 460785 - DNA, 75 bp, synthetic construct
  source 1..75: mol_type = other DNA
atataccgggtgtaggcacaccatttcccaagataggtgaaatggattacagcaacagcgggctggagttcgcta

SEQ ID NO: 460786 - DNA, 75 bp, synthetic construct
  source 1..75: mol_type = other DNA
gttccctgaagatgggcgattaatattatctgaagcgcaggtaaacgcgaactacctaaaacaaatcaataaaac

SEQ ID NO: 460787 - DNA, 75 bp, synthetic construct
  source 1..75: mol_type = other DNA
ttatctgaagcgcaggtaaacgcgaactacctgaaacaaatcaataaaacagaggagcacaaaaccaactgtagt

SEQ ID NO: 460788 - DNA, 75 bp, synthetic construct
  source 1..75: mol_type = other DNA
aaacaggctggatttagaattggctttacgtgtaatcaaagtctgcatattagtctgttttttgatggtacaaat

SEQ ID NO: 460789 - DNA, 75 bp, synthetic construct
  source 1..75: mol_type = other DNA
tcggctggatcaccgcctggcgtatcggtcgctatgcgaataacagtcttcttgtacaacctttttatattaagg

SEQ ID NO: 460790 - DNA, 75 bp, synthetic construct
  source 1..75: mol_type = other DNA
ctgagctattccattgacccttcccataagcgactggatgataatgtggcaaaagagcacattcctcttatgcgc

SEQ ID NO: 460791 - DNA, 75 bp, synthetic construct
  source 1..75: mol_type = other DNA
cgcgccgcaacccaactacattccagggctgattgcggtggtcgggtgcgatggcaccggtaaatctacgctgac

SEQ ID NO: 460792 - DNA, 75 bp, synthetic construct
  source 1..75: mol_type = other DNA
tgctcaggtactgcatgataaatatatgatctggtgcggagagcagttatggtccgcattcgttctggccacagt

SEQ ID NO: 460793 - DNA, 75 bp, synthetic construct
  source 1..75: mol_type = other DNA
gcgtatccgcatgttcagtcagatcgccaatatcatactttactgcctgtttatttttttctggatcctagttgg

SEQ ID NO: 460794 - DNA, 75 bp, synthetic construct
  source 1..75: mol_type = other DNA
tataatgatgatggttcctattatatgcatactgattcaggtatcataaggcaatttttgtatggtggagggggg

SEQ ID NO: 460795 - DNA, 75 bp, synthetic construct
  source 1..75: mol_type = other DNA
gcaacaaccggttgcaccgcagcagcaatatcagcagccacaacagccggttacacagcagccgcagtatcagca

SEQ ID NO: 460796 - DNA, 75 bp, synthetic construct
  source 1..75: mol_type = other DNA
acagccacaacagccagtgtcttctgtcatcaatgataagaagtcagatgcaggtgtgagtgttccggccggggg

SEQ ID NO: 460797 - DNA, 75 bp, synthetic construct
  source 1..75: mol_type = other DNA
attttgataatgtcgcgaatacgctgatcccgatgggcacgaaagaggatccgttctggcaggggtcaggacgca

SEQ ID NO: 460798 - DNA, 75 bp, synthetic construct
  source 1..75: mol_type = other DNA
tggggcgtcagggtaaacaacagagcgaaaatgaagtcacaggtggtcgtcagctgacagacaatccgaaagagg

SEQ ID NO: 460799 - DNA, 75 bp, synthetic construct
  source 1..75: mol_type = other DNA
tttcttgtcgagtattatgcaatgaaaaaataaaacagaaagatattggcgatatctatgaacagtttcttgaaa

SEQ ID NO: 460800 - DNA, 75 bp, synthetic construct
  source 1..75: mol_type = other DNA
atgtcagaaatgagcaaaaaaaataaactctacaaattgattgagcatgtgggtattgagtatatttttgttgcc

SEQ ID NO: 460801 - DNA, 75 bp, synthetic construct
  source 1..75: mol_type = other DNA
tgactggatgcgggtgtccgggaagatcagaaaaacggctggctgtttatctcgtcgaatgccgacacccatgcc

SEQ ID NO: 460802 - DNA, 75 bp, synthetic construct
  source 1..75: mol_type = other DNA
gggggatcgagcaggagctgaaaatgaaaccggaagaagagatggaacagcaactgccgcccgggatcagtgaat

SEQ ID NO: 460803 - DNA, 75 bp, synthetic construct
  source 1..75: mol_type = other DNA
cctgaatccgctggatgcacgctgtgccgcctgggatttgtggaaggagtgcctgacacagccggattttgataa

SEQ ID NO: 460804 - DNA, 75 bp, synthetic construct
  source 1..75: mol_type = other DNA
cgcagcgtctggaccatgacgacattgacgccatactggccgccgccgacgtgggatgttttgccacctatatca

SEQ ID NO: 460805 - DNA, 75 bp, synthetic construct
  source 1..75: mol_type = other DNA
tgttcgtgctggctttacagcactacgctgaacgcaaaatgctgctggtggtggcgatttcgctggctggcggca

SEQ ID NO: 460806 - DNA, 75 bp, synthetic construct
  source 1..75: mol_type = other DNA
acagcgtttcgtcgatgctgggccgtggtttgtactttaatcaggcgcagaagcattttcagcagttgctgttga

SEQ ID NO: 460807 - DNA, 75 bp, synthetic construct
  source 1..75: mol_type = other DNA
ccgccatattttgcagattgttcgcgacaatgaagcggctgaatatctggagttaaatgtcggtgaaaactggcg

SEQ ID NO: 460808 - DNA, 75 bp, synthetic construct
  source 1..75: mol_type = other DNA
tctggcctgtgattactgtttttacctggcgaaaggacagggcgtattgcgtgatgcctgtgggcagcggcatat

SEQ ID NO: 460809 - DNA, 75 bp, synthetic construct
  source 1..75: mol_type = other DNA
gcgctggatgtttttgggcgagtgtatctggcgcatgagggcattaacgcgcaaatcagcgtacctgcgagcaat

SEQ ID NO: 460810 - DNA, 75 bp, synthetic construct
  source 1..75: mol_type = other DNA
gttgcaaaaccaaaccagtgccagactgacgctcgactgccgtctgccaaccctggcgctggatgcacaaatgca

SEQ ID NO: 460811 - DNA, 75 bp, synthetic construct
  source 1..75: mol_type = other DNA
agggcgcggctgggtggatccggttgcagagaaaaaaggcgccattcttggtctggatgccggactttccaccct

SEQ ID NO: 460812 - DNA, 75 bp, synthetic construct
  source 1..75: mol_type = other DNA
acacgcgctttaaaagaagctggatctctgaaaggattatggcgcaatcgccgtgcattcatttttaccgctgcg

SEQ ID NO: 460813 - DNA, 75 bp, synthetic construct
  source 1..75: mol_type = other DNA
cgttgcgtttaacgacctttgcgcggcgtttgtcaggcacgcaaaagttgcagggctggatgatgtcgataccgt

SEQ ID NO: 460814 - DNA, 75 bp, synthetic construct
  source 1..75: mol_type = other DNA
cattgtgctgctgtcgattctttccacgggtatcgctctgctaactctggcgagcagtttgcgcgacgctgaggc

SEQ ID NO: 460815 - DNA, 75 bp, synthetic construct
  source 1..75: mol_type = other DNA
gtggtgcatgactttgatcatgaccgtgcgggccagcatcgtggtgtcggtattctcaatcccgtggttcagcgt

SEQ ID NO: 460816 - DNA, 75 bp, synthetic construct
  source 1..75: mol_type = other DNA
cactggagaacctgggcatacgacacaggccgttattgtgacgttgagcgcaagctaaccgttccacaaatgttg

SEQ ID NO: 460817 - DNA, 75 bp, synthetic construct
  source 1..75: mol_type = other DNA
tcacccggtgctccaggcgggttacctgagttatccagagaagatgtttggtcgtgagcgtaaatttattcccgt

SEQ ID NO: 460818 - DNA, 75 bp, synthetic construct
  source 1..75: mol_type = other DNA
cggcaccagaccctgaactggtaccgggcgcggtaatgcgtatcacctgcgctacctggtggaacaaccagctgc

SEQ ID NO: 460819 - DNA, 75 bp, synthetic construct
  source 1..75: mol_type = other DNA
gagtccttcagataaagtcgggaatggcatttataaaaaactgattaataaacaagatcagttttatgtggtggc

SEQ ID NO: 460820 - DNA, 75 bp, synthetic construct
  source 1..75: mol_type = other DNA
cctgacaggctctataaaaaataacaatatggaaatagacaacatcaataaatcaatagagatgtacaaacagca

SEQ ID NO: 460821 - DNA, 75 bp, synthetic construct
  source 1..75: mol_type = other DNA
ggtacggcgtgcgcaccgtggagccccaccacgacggtacaccgcactggcacatgctggtattcaccagccagg

SEQ ID NO: 460822 - DNA, 75 bp, synthetic construct
  source 1..75: mol_type = other DNA
acgactacggcgaattcccgcagcgcatttacggcgtccgcgccccgttactcggggagcgccacaccatatgca

SEQ ID NO: 460823 - DNA, 75 bp, synthetic construct
  source 1..75: mol_type = other DNA
tctggaggacgtgtactggtcagggctggggaatccgcgcaaccgccgcaacgagatgatggcctgcgtcagagg

SEQ ID NO: 460824 - DNA, 75 bp, synthetic construct
  source 1..75: mol_type = other DNA
cggcggggtctgtcgggatcggtggatcgcaaacgggtgtttatccggtggcaacgccgggcggttggcagttga

SEQ ID NO: 460825 - DNA, 75 bp, synthetic construct
  source 1..75: mol_type = other DNA
ggagacccagtgttttatttccgggccgcaggagagtttctggctggtccaaacagataatattaattcccgttg

SEQ ID NO: 460826 - DNA, 75 bp, synthetic construct
  source 1..75: mol_type = other DNA
aaagagccgatcgctgttcatcgcgaccagtttcagcgccgactgtccattaccggcattaaattggtggacggt

SEQ ID NO: 460827 - DNA, 75 bp, synthetic construct
  source 1..75: mol_type = other DNA
tttgtaacatcaataaaaaatagcatttattataaggggttctacacctataaaatcgaagattgcaccaagttt

SEQ ID NO: 460828 - DNA, 75 bp, synthetic construct
  source 1..75: mol_type = other DNA
tctataacacaaaataacaacagcataaaatcaaccaatgaatcactagaggaatacaaacagaaaacgcctctg

SEQ ID NO: 460829 - DNA, 75 bp, synthetic construct
  source 1..75: mol_type = other DNA
cttccaacaaaattacggagtgaacaaattatattccactgccaggcaggtaaacgcaccgctaataatgctcaa

SEQ ID NO: 460830 - DNA, 75 bp, synthetic construct
  source 1..75: mol_type = other DNA
tttacggtgtcaagcattgttgtcagtggggccacccgactgacgtctgcagaaaccgacagactggtggcaccg

SEQ ID NO: 460831 - DNA, 75 bp, synthetic construct
  source 1..75: mol_type = other DNA
gcggtgggaaatggctcgaccattgattactcgataccataagccagttttttttgatgtgattttcaaaactga

SEQ ID NO: 460832 - DNA, 75 bp, synthetic construct
  source 1..75: mol_type = other DNA
atggttttcccgggaatggaggggaaggttctgaacctgcgggatattgagcaggggatggagcagattaatcgt

SEQ ID NO: 460833 - DNA, 75 bp, synthetic construct
  source 1..75: mol_type = other DNA
agaagaataccggtactgggcagttaaatggtgtcctttcctttaataatcctctggggctggctgacaactggt

SEQ ID NO: 460834 - DNA, 75 bp, synthetic construct
  source 1..75: mol_type = other DNA
cacttcattttctgtcgggctgaatcacacacacaagtttctgggtggtgtcggaacactgaatccggtattcac

SEQ ID NO: 460835 - DNA, 75 bp, synthetic construct
  source 1..75: mol_type = other DNA
gtgatgcgctggagcgcagtgcgccgctgaccatcacgccgtctccggaaacgtctgccggtactgaaggtccct

SEQ ID NO: 460836 - DNA, 75 bp, synthetic construct
  source 1..75: mol_type = other DNA
gaaccggcggatcagcgtaatcgccgtattccgttggtacgttttgaaagccgtttgtataaagatatttaccag

SEQ ID NO: 460837 - DNA, 75 bp, synthetic construct
  source 1..75: mol_type = other DNA
ggaaaacggagtgcttaaaggcgatttagtggcgcgatttggtgccgatccgacgttaaaacgtcaggatattcg

SEQ ID NO: 460838 - DNA, 75 bp, synthetic construct
  source 1..75: mol_type = other DNA
gattaccacagtcagcagatggcgctgcccgccagtacgcaaaaagtaatcactgcgctggcggcgttgattcaa

SEQ ID NO: 460839 - DNA, 75 bp, synthetic construct
  source 1..75: mol_type = other DNA
agttgcataacctctataaagtgctggataaagcccgtgaagaacgcggtgggatctcatttgagagcgaagaag

SEQ ID NO: 460840 - DNA, 75 bp, synthetic construct
  source 1..75: mol_type = other DNA
gaaccggcggatcagcgtaatcgccgtattccgttagtgcgatttgaaagccgtttgtataaagatatttatcag

SEQ ID NO: 460841 - DNA, 75 bp, synthetic construct
  source 1..75: mol_type = other DNA
ttcagccaggtacgcaccctcccccgtggttctgccgaagcgcaatactgcgaactggatgtcgtaccaggcgac

SEQ ID NO: 460842 - DNA, 75 bp, synthetic construct
  source 1..75: mol_type = other DNA
ctggacggcggctggctgcactctgacagagatgacccgtactcgtccggcacgctgtggggtgctgctgccggg

SEQ ID NO: 460843 - DNA, 75 bp, synthetic construct
  source 1..75: mol_type = other DNA
cagaaaaacaatgatgtattatatggtatcagaactaatgtatccggtgccggattttatgatggtgaagtaaca

SEQ ID NO: 460844 - DNA, 75 bp, synthetic construct
  source 1..75: mol_type = other DNA
ctggtataatatatacattattgtgcaatgaagttgataatatctctgtgcagaaaaataatgatatgttatatg

SEQ ID NO: 460845 - DNA, 75 bp, synthetic construct
  source 1..75: mol_type = other DNA
tctcttaattttgttttacttggaggtacagatggggctatgaaactgagagaaatgctgtcaatatataactac

SEQ ID NO: 460846 - DNA, 75 bp, synthetic construct
  source 1..75: mol_type = other DNA
tgcttcagggcagcagccgtaaactcacttcattttctgtcgggctgaatcacacacacaagtttctggggggtg

SEQ ID NO: 460847 - DNA, 75 bp, synthetic construct
  source 1..75: mol_type = other DNA
gttcattctgccctacccttgttctaatggccctggaaacagattgcatttgcgagtgtcatgcttaaggtgttg

SEQ ID NO: 460848 - DNA, 75 bp, synthetic construct
  source 1..75: mol_type = other DNA
cattcaacaatcatgcaatatattctggcatagttcatgttatcgcatgtcttctgaaagaagaaactttgagga

SEQ ID NO: 460849 - DNA, 75 bp, synthetic construct
  source 1..75: mol_type = other DNA
atgattacggtcattgagcatgaggagcatacctaccgtgcatggccgataagagcaggaaagttaacatggctg

SEQ ID NO: 460850 - DNA, 75 bp, synthetic construct
  source 1..75: mol_type = other DNA
tcctcacattcagaggttaacggaatcttttgcttttttaagctcaaggatccatcagcgattagatgaggattt

SEQ ID NO: 460851 - DNA, 75 bp, synthetic construct
  source 1..75: mol_type = other DNA
ttcttgatcactttctgggacttcatgctcctgtaaatagctttactcgtatgattacggtcattgagcatgagg

SEQ ID NO: 460852 - DNA, 75 bp, synthetic construct
  source 1..75: mol_type = other DNA
cttctgaaaaaagaaactctgaggaaaatgtatatgttcgtctgagcgatgatggtggagaacagtcacgtatta

SEQ ID NO: 460853 - DNA, 75 bp, synthetic construct
  source 1..75: mol_type = other DNA
atgactacggccattgaaaatgaagagcattctcgtcgagtatggccgataagagcaggaaagttaacatggctg

SEQ ID NO: 460854 - DNA, 75 bp, synthetic construct
  source 1..75: mol_type = other DNA
acttatttggacttgaacattcagccattaaacaatcatgcaatatatactggcatagttcacattatcgtatgt

SEQ ID NO: 460855 - DNA, 75 bp, synthetic construct
  source 1..75: mol_type = other DNA
ttcgcagggcgttgtatatgcctgcaatggtagccaccagtaagactgagtggggacgggcgttccgtgaccgtc

SEQ ID NO: 460856 - DNA, 75 bp, synthetic construct
  source 1..75: mol_type = other DNA
aggatgcccgtaaggcaatcgatgcagcagaacgtgcacaaccagaatgggaagcgttgcctgctattgaacgcg

SEQ ID NO: 460857 - DNA, 75 bp, synthetic construct
  source 1..75: mol_type = other DNA
ttcgtcaatcggctgggtgaagcgatgcaggcggttcaatttggtaaccccgctgaacgcaacgacattgctgct

SEQ ID NO: 460858 - DNA, 75 bp, synthetic construct
  source 1..75: mol_type = other DNA
atggtcagtatgacaggcagcgtctctgcaggtgagaagattatggcgactgcggcgaaaaacatcaccaaagtg

SEQ ID NO: 460859 - DNA, 75 bp, synthetic construct
  source 1..75: mol_type = other DNA
aatcccgcctgaacgaagtgctgatcgaccgttatcaggacggcgaaaacgcaggttatccgacgctatgtaaag

SEQ ID NO: 460860 - DNA, 75 bp, synthetic construct
  source 1..75: mol_type = other DNA
atggaatacttagaaataaacggttggaaaatctgctttcacgagtgttttttaaggcagattacaggattaatg

SEQ ID NO: 460861 - DNA, 75 bp, synthetic construct
  source 1..75: mol_type = other DNA
gcacgaatctgaattatcacgccgagttaaacaattaataagagcagcaaagaaacaactggaggcgttatgcgc

SEQ ID NO: 460862 - DNA, 75 bp, synthetic construct
  source 1..75: mol_type = other DNA
caccgcagccgcagtatcagcagccgcaacaaccggttgcaccgcagccgcagtatcagcagccgcaacaaccag

SEQ ID NO: 460863 - DNA, 75 bp, synthetic construct
  source 1..75: mol_type = other DNA
caccgcagccgcagtatcagcagccgcaacaaccagttgcgccacagccgcaatatcaacagccgcaacaaccgg

SEQ ID NO: 460864 - DNA, 75 bp, synthetic construct
  source 1..75: mol_type = other DNA
atatcagcagccgcaacaaccggttgcaccgcagcagcaatatcagcagccgcaacagccggttgcacagcagcc

SEQ ID NO: 460865 - DNA, 75 bp, synthetic construct
  source 1..75: mol_type = other DNA
cctttggcccggtgctgcctgttgtcgctttcgatacgctggaacacgctatcgccatggctaacgacagcgatt

SEQ ID NO: 460866 - DNA, 75 bp, synthetic construct
  source 1..75: mol_type = other DNA
gggacaactgatcaaacgtccgttccgtctggaaggggtgcaaacgcaggatggttacgatgagatggttaaagt

SEQ ID NO: 460867 - DNA, 75 bp, synthetic construct
  source 1..75: mol_type = other DNA
tgatgtgaagtatgtgattgccaacaacaacttgtgggccagcccgttggatcaacagttgcgcaacaccctggt

SEQ ID NO: 460868 - DNA, 75 bp, synthetic construct
  source 1..75: mol_type = other DNA
gcaaacttcacatcgcgattaacacttttgcgcatccggacggttacgcccgctggcagcgcgccgtggatatgg

SEQ ID NO: 460869 - DNA, 75 bp, synthetic construct
  source 1..75: mol_type = other DNA
gaagtatctggtgaatactgcgggaatgcacgcaaacgtagcaagcggcattatgacagcagcactgtttgtatt

SEQ ID NO: 460870 - DNA, 75 bp, synthetic construct
  source 1..75: mol_type = other DNA
gttagatgaaacttcgcaacaagaaacgcgcgctttaaaagaagctggatctctgaaaggattatggcgcaatcg

SEQ ID NO: 460871 - DNA, 75 bp, synthetic construct
  source 1..75: mol_type = other DNA
ggttttacgcttcatttcagtatgtcacgttgataggcgggcaacttctggcattgttggttgtggtggttttac

SEQ ID NO: 460872 - DNA, 75 bp, synthetic construct
  source 1..75: mol_type = other DNA
acgaactttcaatacactttctttcgaataattctttcagcagcagttgctggggtagtctcatttatacccggg

SEQ ID NO: 460873 - DNA, 75 bp, synthetic construct
  source 1..75: mol_type = other DNA
cactgcgctgcacataacagaacagtagatgaattaaataatactcaatggaatcaatggcttgcagaaacatgc

SEQ ID NO: 460874 - DNA, 75 bp, synthetic construct
  source 1..75: mol_type = other DNA
gcagaagtatctggtaaatactgcgggaatgcatgccaacgtggcgagtggcattatgactgccgcattgtttgt

SEQ ID NO: 460875 - DNA, 75 bp, synthetic construct
  source 1..75: mol_type = other DNA
tgttgttgttaggggcatgttccagcagtttcaagccaccgccggagccggactggagccacaccgtgccagtca

SEQ ID NO: 460876 - DNA, 75 bp, synthetic construct
  source 1..75: mol_type = other DNA
aacgagttccatgaacagtgcgtggaacgcatctttaatgacctgttacgcttctgccagccagagaaattgagc

SEQ ID NO: 460877 - DNA, 75 bp, synthetic construct
  source 1..75: mol_type = other DNA
gcgtaaatctgattgagtcgaagagttttaagctctatctcaacagttttaaccagacgcgttttaataactggg

SEQ ID NO: 460878 - DNA, 75 bp, synthetic construct
  source 1..75: mol_type = other DNA
gctggctgctatttttaccgtcccgatcctgtcggcattgcagaatgtcacctcaccttatgcagcctttgggct

SEQ ID NO: 460879 - DNA, 75 bp, synthetic construct
  source 1..75: mol_type = other DNA
cgcgccgcagcccaactacattccggggctgattgcggtggtcgggtgtgatggcaccggtaaatccacactgac

SEQ ID NO: 460880 - DNA, 75 bp, synthetic construct
  source 1..75: mol_type = other DNA
tgcgaagaatggcgaatctacgcaaggttcagcgactggcgcaaagtggcgttctggtggtcagcgatcgcttcc

SEQ ID NO: 460881 - DNA, 75 bp, synthetic construct
  source 1..75: mol_type = other DNA
gtgggctttccggagggcaaaagcaacgtattttgttggcaagggcgctgtataaaaaaccgggatttttgctac

SEQ ID NO: 460882 - DNA, 75 bp, synthetic construct
  source 1..75: mol_type = other DNA
ctgtgtcactataagctcaccagaaataaaaataaataccctgctgccatttgcctggctctgggattttttcta

SEQ ID NO: 460883 - DNA, 75 bp, synthetic construct
  source 1..75: mol_type = other DNA
tgaggctaatctcggaacgactttactgtatggatttatcattaccattccgacagttattgtcgcaggaccgct

SEQ ID NO: 460884 - DNA, 75 bp, synthetic construct
  source 1..75: mol_type = other DNA
cagcccagatgtcaagaacagagaaataaagctggaatggtcaggagataagagagatttaccaactgctgaagc

SEQ ID NO: 460885 - DNA, 75 bp, synthetic construct
  source 1..75: mol_type = other DNA
actataagctcaccagaaataaaaaataaataccctgctgccatttgcctggctctgggattttttctaagtatt

SEQ ID NO: 460886 - DNA, 75 bp, synthetic construct
  source 1..75: mol_type = other DNA
gaacatgaaccatttcgtcgtgctttataaagttcgcgggagcaggctggttatccacgacccggacaaagggaa

SEQ ID NO: 460887 - DNA, 75 bp, synthetic construct
  source 1..75: mol_type = other DNA
agattcgcgtcgatacattaaagaacttaataataataaaaggggaacctaacttattatctaaaaacgagtgtc

SEQ ID NO: 460888 - DNA, 75 bp, synthetic construct
  source 1..75: mol_type = other DNA
gttggcgcgcatatcagtttttcgctggggtacggccggccaaccagacatcctttaaccggtacatccgggcta

SEQ ID NO: 460889 - DNA, 75 bp, synthetic construct
  source 1..75: mol_type = other DNA
aacggcaaatatccctatatcgtcgatgcctttatggtaacgcgggaaaatacgacgtcagagacacaaaaattg

SEQ ID NO: 460890 - DNA, 75 bp, synthetic construct
  source 1..75: mol_type = other DNA
gcctcgccatgttttttgaagtgggttttgtcctgctgttgccgttggtatttaccatcgtggcatcatctggat

SEQ ID NO: 460891 - DNA, 75 bp, synthetic construct
  source 1..75: mol_type = other DNA
aaccccgacgccgttctggcaggtcttcagcaacagaaaaggcaacatctcctcatgctgaatcacaggacaaag

SEQ ID NO: 460892 - DNA, 75 bp, synthetic construct
  source 1..75: mol_type = other DNA
aggtttttatgttcacgggcatcggatggcgacaggatgaagatcatcgtggtgaaacggtatattcaaccgatg

SEQ ID NO: 460893 - DNA, 75 bp, synthetic construct
  source 1..75: mol_type = other DNA
ttctggatgctctttctgccgacatttatccccagattcgtgttgttagtgttactgatgctggaggagcaggag

SEQ ID NO: 460894 - DNA, 75 bp, synthetic construct
  source 1..75: mol_type = other DNA
aggtctgatccgcaaactgctggatgtacagagctttgacagccacgctgcacaatcgctggcccgtaaccccaa

SEQ ID NO: 460895 - DNA, 75 bp, synthetic construct
  source 1..75: mol_type = other DNA
gtacagagttttgacggtcaggccgcgcagtcgctggcacgtaacccgaatcatatcgaaatcagcgctaaccag

SEQ ID NO: 460896 - DNA, 75 bp, synthetic construct
  source 1..75: mol_type = other DNA
accggcaccggcggcgcatcgctggcggtaacccgtttcctggaagacaaaatgcgtagccgcgatattcgcgcc

SEQ ID NO: 460897 - DNA, 75 bp, synthetic construct
  source 1..75: mol_type = other DNA
ttgaaagatcagggcaaagtccctgccgtggcgaatgattacagccagtacgtgacctcgcgcttcgtgcaataa

SEQ ID NO: 460898 - DNA, 75 bp, synthetic construct
  source 1..75: mol_type = other DNA
tgcttccggcggtcactgcgataccgcaattgcctctgcgctttccatcatcgtcgcgccactggttcgcggtcg

SEQ ID NO: 460899 - DNA, 75 bp, synthetic construct
  source 1..75: mol_type = other DNA
ccacgatggttgatctgcatgaaaaaggtctgatccgcaaactgttggacgtacagagctttgacagccacgccg

SEQ ID NO: 460900 - DNA, 75 bp, synthetic construct
  source 1..75: mol_type = other DNA
gccaatgcactgacgattgtgccgccgtcctgtacggtgagcggcggcaataacctcaacgttgatgttggggcg

SEQ ID NO: 460901 - DNA, 75 bp, synthetic construct
  source 1..75: mol_type = other DNA
aatcaatcgcccgactctggctcaatgttgctgcctgcacctctgtacaccagaagaatgctgttcgcttcatga

SEQ ID NO: 460902 - DNA, 75 bp, synthetic construct
  source 1..75: mol_type = other DNA
atgggactgttaaagggaaagacggtgcatttaatacgatgtgccgtaaattccttaagagcaatgttattgcct

SEQ ID NO: 460903 - DNA, 75 bp, synthetic construct
  source 1..75: mol_type = other DNA
tcgccagaggactacgctgctgctgaagactgggggacgataacgggaatcgtacatagccaccccgacgcgacg

SEQ ID NO: 460904 - DNA, 75 bp, synthetic construct
  source 1..75: mol_type = other DNA
gcggagaactgccactgctggagcgtccgtttgtgcttggacacttcgactgctgggggctggtaatgagctatt

SEQ ID NO: 460905 - DNA, 75 bp, synthetic construct
  source 1..75: mol_type = other DNA
ccaccgaaacccggcgatatggtgatcatgcaggtccaggctgataagtggaaccacgctggaattctgctggag

SEQ ID NO: 460906 - DNA, 75 bp, synthetic construct
  source 1..75: mol_type = other DNA
ctggttggctggataatcacgctacatctggcagattatcaatttcgccagatgggttcgggctggttggcagat

SEQ ID NO: 460907 - DNA, 75 bp, synthetic construct
  source 1..75: mol_type = other DNA
cgctataagggcattaacgcgattcaccttatggcgcagggttacagcgatcagcgctggatgacctataagcag

SEQ ID NO: 460908 - DNA, 75 bp, synthetic construct
  source 1..75: mol_type = other DNA
gcagacaccgatcacggacagaagcacccgattatggacggtgaaggccatcgtattaccgtcgaaggtgataaa

SEQ ID NO: 460909 - DNA, 75 bp, synthetic construct
  source 1..75: mol_type = other DNA
cgtggtcactgagagccaggggcaatctgacagtaaccaggtggtgatgcgcactaacagcgcgataaaagcact

SEQ ID NO: 460910 - DNA, 75 bp, synthetic construct
  source 1..75: mol_type = other DNA
actttgagcgccacgatgggtggtggctgcgtggtgaaaacctgtacataaaaaacctgccactaaacgggtttt

SEQ ID NO: 460911 - DNA, 75 bp, synthetic construct
  source 1..75: mol_type = other DNA
tttgccagcatagataacaacctgactttagcggctaaaaaggttcagagtcagattgaaaatatcagtggcgac

SEQ ID NO: 460912 - DNA, 75 bp, synthetic construct
  source 1..75: mol_type = other DNA
agtcatgcaaaatgaaggtgaaggataaggccagtgtaaacgttggcagggaaaaggcgctggagacagcgaaag

SEQ ID NO: 460913 - DNA, 75 bp, synthetic construct
  source 1..75: mol_type = other DNA
ctcggcggcacgctgaccacggaagccggagacaagggcgcgcgctcgctgggtgaagtgcataacgaggtgcgc

SEQ ID NO: 460914 - DNA, 75 bp, synthetic construct
  source 1..75: mol_type = other DNA
tcgacgaatatcttcattccgccgactggtttgatgccatgctgtttgatgccaccgatgccatcctgaagggct

SEQ ID NO: 460915 - DNA, 75 bp, synthetic construct
  source 1..75: mol_type = other DNA
taatggcggcgcaatacttccactccacaatggcattcctggtcatcccattttaatctcaaagtcgagtctgat

SEQ ID NO: 460916 - DNA, 75 bp, synthetic construct
  source 1..75: mol_type = other DNA
acctgatggcccagggttacagcgatcagcgctggatgacctataagcaggctaccgctgctaatgcacaggtaa

SEQ ID NO: 460917 - DNA, 75 bp, synthetic construct
  source 1..75: mol_type = other DNA
atgaccaaccgtctggtgttgtccggcaccgtgtgcaggactccccttcgaaaggtcagtccatcaggaattcct

SEQ ID NO: 460918 - DNA, 75 bp, synthetic construct
  source 1..75: mol_type = other DNA
ggggctgaacgtggcgatctgattgcccagtccgatctggcggctgacattgaagaaaaggatacccaccttttt

SEQ ID NO: 460919 - DNA, 75 bp, synthetic construct
  source 1..75: mol_type = other DNA
ggaagtgtgcgggctggtgatagataacgattatttttacccgtgcgctaacgtgtctgaaacgccgcacaacag

SEQ ID NO: 460920 - DNA, 75 bp, synthetic construct
  source 1..75: mol_type = other DNA
ccagcctgccgaaaacgcccgccgcctgatggggcagtttggtgactccatccagcgaacgcagggggcgatcaa

SEQ ID NO: 460921 - DNA, 75 bp, synthetic construct
  source 1..75: mol_type = other DNA
gagaggcgctgcgcctggaaacggcgatgaatgatgaagtggcagaaatcaccgcccgttatacgccgcagattg

SEQ ID NO: 460922 - DNA, 75 bp, synthetic construct
  source 1..75: mol_type = other DNA
aaaaccttaaaaaagaaatcaaagtgctttttaaggggattcatgactggtgcaaaaccaaccgcgatgagctga

SEQ ID NO: 460923 - DNA, 75 bp, synthetic construct
  source 1..75: mol_type = other DNA
gcgtacccaatttatgcttctgcattttatgcattaagtgtaataccagaggattttcacgtttgggaatatctg

SEQ ID NO: 460924 - DNA, 75 bp, synthetic construct
  source 1..75: mol_type = other DNA
cggttaccaggcttatttatataaacagcttaatcccggcgtcggtgtgcgtgaaaatattgatacctgggcctg

SEQ ID NO: 460925 - DNA, 75 bp, synthetic construct
  source 1..75: mol_type = other DNA
atggcgcatggttgaacatttaccggcgctgggttcaccattaaatgtatttattacgccctacggcgaagcatt

SEQ ID NO: 460926 - DNA, 75 bp, synthetic construct
  source 1..75: mol_type = other DNA
aggccgcagccgaggccgcaccacagacccgcgaagaagtcagccgcgatatccgacgctttggggatatgcagc

SEQ ID NO: 460927 - DNA, 75 bp, synthetic construct
  source 1..75: mol_type = other DNA
caatctgaccaccggaacggtgtcatggcgactggggaatccatcatgcagcgtcagtcgtgatgtggaaggtgt

SEQ ID NO: 460928 - DNA, 75 bp, synthetic construct
  source 1..75: mol_type = other DNA
atccgcactctgggtgatattcagcgagaggcgctgcgcctggaaacggcgatgaatgatgaagtggcagaaatc

SEQ ID NO: 460929 - DNA, 75 bp, synthetic construct
  source 1..75: mol_type = other DNA
tggctgccgacctgcgccgtgcgttctccggtattgtggcggggaacgtaaaagaagacgggattcgcgccattg

SEQ ID NO: 460930 - DNA, 75 bp, synthetic construct
  source 1..75: mol_type = other DNA
tttgctgggaattttaatgaacccggccaacaaagatcaggttttaccattgatcctcaccggcccaaaagagag

SEQ ID NO: 460931 - DNA, 75 bp, synthetic construct
  source 1..75: mol_type = other DNA
gcgtcagccgtgatgtggaaggcgtgattgaaatgctgcgccgtatgggccttgagcgcttcatccgcacgaaag

SEQ ID NO: 460932 - DNA, 75 bp, synthetic construct
  source 1..75: mol_type = other DNA
tagctcaagttggggcgatggcgaaattgaaagccatctgatgggcgcttttaacgtcagcaacctgctgctcgc

SEQ ID NO: 460933 - DNA, 75 bp, synthetic construct
  source 1..75: mol_type = other DNA
gaactgtcacggacgctggttgaaagcgaccgaagtgaactatcacgacagcggtgcgactattcgctttagctc

SEQ ID NO: 460934 - DNA, 75 bp, synthetic construct
  source 1..75: mol_type = other DNA
gcggtgcgaccattcgctttagttcaagttggggcgatggcgaaattgaaagccatctgatgggcgcttttaacg

SEQ ID NO: 460935 - DNA, 75 bp, synthetic construct
  source 1..75: mol_type = other DNA
tttccgatatcggccttgagctttccattaccggcgggattaccctgctgacctgccgctgtttaaagatattcg

SEQ ID NO: 460936 - DNA, 75 bp, synthetic construct
  source 1..75: mol_type = other DNA
tgaccatcatctgcgccgcaccgctcgcgacggtggaaaaaggccacgcgatggcgcaacgctgcggtggtgaaa

SEQ ID NO: 460937 - DNA, 75 bp, synthetic construct
  source 1..75: mol_type = other DNA
ggcactggcaggcgcggcaaatccggcgcaagtggctggggatttccatgcgcaaatcgacgctatctggggagg

SEQ ID NO: 460938 - DNA, 75 bp, synthetic construct
  source 1..75: mol_type = other DNA
gcaggcaagttctcgatgagatacaaacgccttcagcaattaacagtgagctttatacaaaaatgatatacctga

SEQ ID NO: 460939 - DNA, 75 bp, synthetic construct
  source 1..75: mol_type = other DNA
atgtctggaaatataggggcaaatccagacaatataaaagtgatttacagcctaaaaataaaccagacaacgcca

SEQ ID NO: 460940 - DNA, 75 bp, synthetic construct
  source 1..75: mol_type = other DNA
ctatggtgctgttgtttctgtatatcaataaagacaatataaaagtgatttacagcctaaaaataaaccagacaa

SEQ ID NO: 460941 - DNA, 75 bp, synthetic construct
  source 1..75: mol_type = other DNA
agccatctgatgggcgcttttaacgtcagcaacttgctgctggcgctggcgacgctgctggcgctgggctatcca

SEQ ID NO: 460942 - DNA, 75 bp, synthetic construct
  source 1..75: mol_type = other DNA
gagaaaatattcttttgtttaaacgtgcgcttggtgtgactaccggcattctgccgtggaacttcccgttcttcc

SEQ ID NO: 460943 - DNA, 75 bp, synthetic construct
  source 1..75: mol_type = other DNA
tgggattttttctaagcattgtaatttctgtaatgttttgccttgtcaaaaaaatggtagatgaataccaacaaa

SEQ ID NO: 460944 - DNA, 75 bp, synthetic construct
  source 1..75: mol_type = other DNA
cgcgggtgaaacgctcgcgcaacaggcgtttggcgcaggcgctaactggatgaccatcatctgcgccgcaccgct

SEQ ID NO: 460945 - DNA, 75 bp, synthetic construct
  source 1..75: mol_type = other DNA
ctgcgtgcagttgttgataaacacgccctgctcgcccatcaacaacgagtggtgagtggggaacaggaaccgagt

SEQ ID NO: 460946 - DNA, 75 bp, synthetic construct
  source 1..75: mol_type = other DNA
gcccttgccctatacccgcttgtacgaaggtttagcgagtggactgaaagctcagtttgatggcattccttttta

SEQ ID NO: 460947 - DNA, 75 bp, synthetic construct
  source 1..75: mol_type = other DNA
ggtaatcgactgaaaaccatagatgagctggcaactgaatgccgttcatccgttggcctgacgcaggccgcgttg

SEQ ID NO: 460948 - DNA, 75 bp, synthetic construct
  source 1..75: mol_type = other DNA
ttaccgcagccaaacaatgctcgtgcaattatcaacaatacggctgcactgattcgtaagaatatcggaactctg

SEQ ID NO: 460949 - DNA, 75 bp, synthetic construct
  source 1..75: mol_type = other DNA
atggttgattcacttgaaaagggtagcaaactggtcggaggagatgagcgcaattttgcgcccatcggtttttat

SEQ ID NO: 460950 - DNA, 75 bp, synthetic construct
  source 1..75: mol_type = other DNA
ggatgttatgcgtgattttcgtcgcatgattgattctcttgaaaaaggaagcgaattagccgggcgcaattttgc

SEQ ID NO: 460951 - DNA, 75 bp, synthetic construct
  source 1..75: mol_type = other DNA
gttgttattcaggaatggaagcgactgaaagaagaaaatgaaaaactgcgtcaggaacgtttagccgttaacccg

SEQ ID NO: 460952 - DNA, 75 bp, synthetic construct
  source 1..75: mol_type = other DNA
atgagcagaccacttctgcaactggctctcgaccactcatcatttgaagccgcgcagcgcgacgtgacgctgtta

SEQ ID NO: 460953 - DNA, 75 bp, synthetic construct
  source 1..75: mol_type = other DNA
tcgttgctgactggaaggtcgccgacgctggtgaaacgctcgcgcaacaggcgtttggcgcgggtgccaactgga

SEQ ID NO: 460954 - DNA, 75 bp, synthetic construct
  source 1..75: mol_type = other DNA
aaaacgctggaatcaagcggagcgatacggattgaacgccgtgggcgcaatggcagttatctggtcgagatggat

SEQ ID NO: 460955 - DNA, 75 bp, synthetic construct
  source 1..75: mol_type = other DNA
gtttactgttgatgtgcttccggtgctggttgaattgggtgttctggaagaagaacagaaagcaactctgaatct

SEQ ID NO: 460956 - DNA, 75 bp, synthetic construct
  source 1..75: mol_type = other DNA
ctttctgccgcatgaatgctcactaccaacttgagtttactgttgatgttcttcctgtgttggttgaattgggta

SEQ ID NO: 460957 - DNA, 75 bp, synthetic construct
  source 1..75: mol_type = other DNA
tacagcctaaaaataaaccagacaacaccaggcatacttgttaactgtgatagcaataataactttgcctgtcag

SEQ ID NO: 460958 - DNA, 75 bp, synthetic construct
  source 1..75: mol_type = other DNA
tctgttgttcctgcttcaagtataaatgctattattcacagcgaaaatattaaactgcaagaagaaaaacataaa

SEQ ID NO: 460959 - DNA, 75 bp, synthetic construct
  source 1..75: mol_type = other DNA
tcacatgcggccactgacagtattggcctgactgttactactgacgtagaaatgggtacctgtacatcaacgttg

SEQ ID NO: 460960 - DNA, 75 bp, synthetic construct
  source 1..75: mol_type = other DNA
ccaccatcaatttcggtgatgtatatatttctgaaattaatgccgaaactaaaattaaaaccttcaaattacaat

SEQ ID NO: 460961 - DNA, 75 bp, synthetic construct
  source 1..75: mol_type = other DNA
gcttttgttggttctgttgcgtgctggggaataagcgcatgggtgttgattatatgctggattaagctgcattaa

SEQ ID NO: 460962 - DNA, 75 bp, synthetic construct
  source 1..75: mol_type = other DNA
tctcgataaaaggcactgatgggaaagtaggaaaaatagaaatttatacagatacaggcgagcttattttggaac

SEQ ID NO: 460963 - DNA, 75 bp, synthetic construct
  source 1..75: mol_type = other DNA
gcgtctgcgccgcgcggggctggactaccatgaatttaccgccgtcacgcgtcatcatgactatagtgcgttcct

SEQ ID NO: 460964 - DNA, 75 bp, synthetic construct
  source 1..75: mol_type = other DNA
cgtgcctgaaggtgacgttccggggctggtgaaggggaatacctatctgacgccgcagcaacaaacggcagaact

SEQ ID NO: 460965 - DNA, 75 bp, synthetic construct
  source 1..75: mol_type = other DNA
caccgcgcagtttttgaaagatcagggcaaagtccctgccgtggcgaatgattacagccagtacgttacctcgcg

SEQ ID NO: 460966 - DNA, 75 bp, synthetic construct
  source 1..75: mol_type = other DNA
tcctgaggtggtgaaagcgttcgctaaaagcgccatcgatgcccagcaaccgtacattgcgaatccggacgcgtg

SEQ ID NO: 460967 - DNA, 75 bp, synthetic construct
  source 1..75: mol_type = other DNA
gtggtcgcgaaagataaaaccgttacagatgtcaccgcgggtgatttcaccgctccggcaacatttactgtgact

SEQ ID NO: 460968 - DNA, 75 bp, synthetic construct
  source 1..75: mol_type = other DNA
ttaaagactgcgcggggatacctggcaaaaaagctaagattaaactgacaaaacgtgccacctgtgaaggagcaa

SEQ ID NO: 460969 - DNA, 75 bp, synthetic construct
  source 1..75: mol_type = other DNA
ttgggtaactccgaggcgctggtagttaagaaaaacatcagtaaacccgaagatctcattggtaagcgcatcgcc

SEQ ID NO: 460970 - DNA, 75 bp, synthetic construct
  source 1..75: mol_type = other DNA
gccgcagataaagcaagtgctgtcgccgttgaagtctggagcactgtaactccggcaacagggagtgcaacacaa

SEQ ID NO: 460971 - DNA, 75 bp, synthetic construct
  source 1..75: mol_type = other DNA
tcgccggtggcatgatcgtagtcgttggttatgcaatggttatcaacatgatgcgtgctggctatctgatgccgt

SEQ ID NO: 460972 - DNA, 75 bp, synthetic construct
  source 1..75: mol_type = other DNA
gtggctatcccggccgttatcgtcgcactgtctgtcggcaccagcgaagtgcagaacatgctgagcgcaattcca

SEQ ID NO: 460973 - DNA, 75 bp, synthetic construct
  source 1..75: mol_type = other DNA
agcgcgagctatggatgacgatccacacgaaacttaataccaaaacagttaatgaaatgactgcggctgattatc

SEQ ID NO: 460974 - DNA, 75 bp, synthetic construct
  source 1..75: mol_type = other DNA
cagtgctggtgaacggtcgcgaagtgccgattgtcgggcgcgtggcgatggatatgatctgcgtagacttaggtc

SEQ ID NO: 460975 - DNA, 75 bp, synthetic construct
  source 1..75: mol_type = other DNA
tcttgagaccgcgcgaacgctccccgatgctgacgccttcggcgttgcccgtctcgaagaagccttacgacttcg

SEQ ID NO: 460976 - DNA, 75 bp, synthetic construct
  source 1..75: mol_type = other DNA
atgcggcgcgactgagaaacaactcgatatcttcaataccttttgcgaaggcagacctggcaagcgttcaatcgc

SEQ ID NO: 460977 - DNA, 75 bp, synthetic construct
  source 1..75: mol_type = other DNA
aggcatgatgtatcccgatgcctacaccatgattcatcaacgcttcgccgtctctcacatagaacaactgtcaca

SEQ ID NO: 460978 - DNA, 75 bp, synthetic construct
  source 1..75: mol_type = other DNA
gtatttaaaagtgatgagaagtataaagataaaaaaataattctttattcagcggaacagtctgggaacatcttc

SEQ ID NO: 460979 - DNA, 75 bp, synthetic construct
  source 1..75: mol_type = other DNA
cagccgcagataaagcaagtgccgtcgccgttgaagtctggagcaccgaaactccggcaacagggagcgcaacac

SEQ ID NO: 460980 - DNA, 75 bp, synthetic construct
  source 1..75: mol_type = other DNA
tatgactattctgcgtgtctttcaacgcgaaaagagtaccatcttcttactctcgttgttgtggctccggatacg

SEQ ID NO: 460981 - DNA, 75 bp, synthetic construct
  source 1..75: mol_type = other DNA
ttgttgcgccgccagaatatattcatgaagcaccaataccaaccacgcacatacaatatatcaataaacccgcat

SEQ ID NO: 460982 - DNA, 75 bp, synthetic construct
  source 1..75: mol_type = other DNA
gggaagcattactttttgctcgaaggtgaggagttgcgcgaatttaagcacagcatgtctttaagacctcctgtg

SEQ ID NO: 460983 - DNA, 75 bp, synthetic construct
  source 1..75: mol_type = other DNA
ttctatcatcttctctgggtgggcttctgtttgggatcagctcaggtgttttagctcaggaggtacctcctatca

SEQ ID NO: 460984 - DNA, 75 bp, synthetic construct
  source 1..75: mol_type = other DNA
agatataaggtgcatgagcctgtgttgaaggattttgcccgaatggcagaaaagcttcggactggcgataaagta

SEQ ID NO: 460985 - DNA, 75 bp, synthetic construct
  source 1..75: mol_type = other DNA
tagctgttggtacaggggccagcgcggataaagaaattgcaacatcagtgggatcatggtctgcagcacgaggac

SEQ ID NO: 460986 - DNA, 75 bp, synthetic construct
  source 1..75: mol_type = other DNA
gcatattgcgcgttggcggtaacaagaaagggatcttcactcgcgaccgcaaaccgaagtcggcggcttttctgc

SEQ ID NO: 460987 - DNA, 75 bp, synthetic construct
  source 1..75: mol_type = other DNA
gcgcgttggtatccggtcagtggcagtgagtggcgaacagttcctgatcaaccacaaaccgttctacttcactgg

SEQ ID NO: 460988 - DNA, 75 bp, synthetic construct
  source 1..75: mol_type = other DNA
gctctacaccacgccgaacacctgggtggacgatatcaccgtggtgacgcatgtcgcgcaagactgtaaccacgc

SEQ ID NO: 460989 - DNA, 75 bp, synthetic construct
  source 1..75: mol_type = other DNA
tggcaattgatcttatcaacacgctaaatcccacggaggaacagctgttggttggcttacgcacagcttacgccg

SEQ ID NO: 460990 - DNA, 75 bp, synthetic construct
  source 1..75: mol_type = other DNA
cggtagataaaggtaaagtctaccgcttcggcggtgacgaatttgcggtgatttatacgggtggaacgctggaag

SEQ ID NO: 460991 - DNA, 75 bp, synthetic construct
  source 1..75: mol_type = other DNA
taaccattttgaccgcgtgctggatggtgggcttttcttctcggcggcggatgtcaaaaaactctacagcatgta

SEQ ID NO: 460992 - DNA, 75 bp, synthetic construct
  source 1..75: mol_type = other DNA
gcgcaggaagaaaaatacacagtgctgtatgccataggtcaatatggcagcacctatgaagttgtaaagacaggc

SEQ ID NO: 460993 - DNA, 75 bp, synthetic construct
  source 1..75: mol_type = other DNA
ttatttccgttgttattggcggtattttatttggtgtaagcgctggcgttctggctcaggatgcagcggagaata

SEQ ID NO: 460994 - DNA, 75 bp, synthetic construct
  source 1..75: mol_type = other DNA
ggtgggcttttcttttcggcggcggatgtcaaaaaactctacagcatgtataactcggcgtttcttgacgatctg

SEQ ID NO: 460995 - DNA, 75 bp, synthetic construct
  source 1..75: mol_type = other DNA
aaaagtgtacgtatcaccgtttgtgtgaacaatgaactgaactggcagactatcccgccgggaatggtgattacc

SEQ ID NO: 460996 - DNA, 75 bp, synthetic construct
  source 1..75: mol_type = other DNA
gaaacatatatttctaaccttggcgacaccatttctaccaagttcgatgattacacagcaaagattggtgatgct

SEQ ID NO: 460997 - DNA, 75 bp, synthetic construct
  source 1..75: mol_type = other DNA
atttacctggtaaagcattagatgcagcggttgatgccgttaaaaatacccctgcggcaatgattgtatcaaaaa

SEQ ID NO: 460998 - DNA, 75 bp, synthetic construct
  source 1..75: mol_type = other DNA
aggcgcgtccggtggccagcaactcaagttactttgaccaactcggcgcacaaatggggattgatggactattcg

SEQ ID NO: 460999 - DNA, 75 bp, synthetic construct
  source 1..75: mol_type = other DNA
agagctgctggtaatcgagcgtgatttaaatgctcaaggccatacgattacgttaattacccaaccggagctgca

SEQ ID NO: 461000 - DNA, 75 bp, synthetic construct
  source 1..75: mol_type = other DNA
taaaacagttaaagaaactgccaatcagattatcaatgcaaatgccgtagaaacgggcaatagcgcgttgcagaa

SEQ ID NO: 461001 - DNA, 75 bp, synthetic construct
  source 1..75: mol_type = other DNA
tgccatcaaagacttctttactgtcgataacctgaaacaggttttcagtgatgcaattgatagtgcaattgattt

SEQ ID NO: 461002 - DNA, 75 bp, synthetic construct
  source 1..75: mol_type = other DNA
tctatccaactcccgaacaaaccgagctattagcccggacttttgggtgtgtgcgttttgtctataacagcctcc

SEQ ID NO: 461003 - DNA, 75 bp, synthetic construct
  source 1..75: mol_type = other DNA
accacaaaccgttctactttactggctttggtcgtcatgaagatgcggactgcgtggcaaaggattcgataacgt

SEQ ID NO: 461004 - DNA, 75 bp, synthetic construct
  source 1..75: mol_type = other DNA
tccagaaaaatcggcagaagctgctgctcttctcatgagcaattatttgaaacaagcaaagggagattggaacga

SEQ ID NO: 461005 - DNA, 75 bp, synthetic construct
  source 1..75: mol_type = other DNA
gtctaaatgctgaatcaggtttattaaaaaaactgtcaaaagtagctgaaggtataggtaacccttcagagactc

SEQ ID NO: 461006 - DNA, 75 bp, synthetic construct
  source 1..75: mol_type = other DNA
aattcgacaaaacgctacaggaagccaccgtcgggttcgtatggacttatctctatacgccgaaaataaatgcca

SEQ ID NO: 461007 - DNA, 75 bp, synthetic construct
  source 1..75: mol_type = other DNA
aaagaatctgatttctttcctgtgcaagatattgagcaaaccttagttaaagatgctttatacggtattcctcgt

SEQ ID NO: 461008 - DNA, 75 bp, synthetic construct
  source 1..75: mol_type = other DNA
tacgcgatcaaggtcaatactcatcgtgctcgctatttaggtggtgaaatctatacacctggagcaggagcacag

SEQ ID NO: 461009 - DNA, 75 bp, synthetic construct
  source 1..75: mol_type = other DNA
gtccaaattatttagcctgttagggaagggggccggtggcgtcgcgtcgttgttaatggggcgtggcatgctgaa

SEQ ID NO: 461010 - DNA, 75 bp, synthetic construct
  source 1..75: mol_type = other DNA
atgaacacaaaacagtctgttgctcaactcgccgtaccgcaccgcaagcgcctttcatccactgtggtggtggcg

SEQ ID NO: 461011 - DNA, 75 bp, synthetic construct
  source 1..75: mol_type = other DNA
gaaaatgcaacagaaggtactgcgttaggggcaaaggcaacagtaacaaataaaaacagtgttgcattaggtgct

SEQ ID NO: 461012 - DNA, 75 bp, synthetic construct
  source 1..75: mol_type = other DNA
gcagaccgcagcgaaagcaggcgtggcattcagtgatggcgatgcctcctggaacgttggtgtgaacttcgagtt

SEQ ID NO: 461013 - DNA, 75 bp, synthetic construct
  source 1..75: mol_type = other DNA
gtgtcggcattaaatcgcacaatcgaaaattcacgtcctgactttgtgaccaatgcgccatcagtggaccctatt

SEQ ID NO: 461014 - DNA, 75 bp, synthetic construct
  source 1..75: mol_type = other DNA
ttatctttctgttctctgtcaacaatgccctcgcttctccacttcctgccctcctgagagatgctctcattcatg

SEQ ID NO: 461015 - DNA, 75 bp, synthetic construct
  source 1..75: mol_type = other DNA
ccttttttatctttgaaacgttaaccgcgcaacgtttacacccgatgcagtatttgctggtgggattgtctttgg

SEQ ID NO: 461016 - DNA, 75 bp, synthetic construct
  source 1..75: mol_type = other DNA
tggtatgcgttttcactgccgaaaatgaaaaccagcaaagaagccacaatggacgatgagttacgtatctggaaa

SEQ ID NO: 461017 - DNA, 75 bp, synthetic construct
  source 1..75: mol_type = other DNA
gcgcagatagctgcagctaccggacgactggactctgttgcccgaatgattgatgaaaccggacgattatcgctg

SEQ ID NO: 461018 - DNA, 75 bp, synthetic construct
  source 1..75: mol_type = other DNA
gcagctaccggacgactggactctgtcgcccgaatgattgatgaaaccgggcgattatctctgataacagtcaga

SEQ ID NO: 461019 - DNA, 75 bp, synthetic construct
  source 1..75: mol_type = other DNA
cgcttctccactgccggccctcctgagggatgctctcattcatgatccatcagtgatggaggcaagggcagaagc

SEQ ID NO: 461020 - DNA, 75 bp, synthetic construct
  source 1..75: mol_type = other DNA
agaaatcattgaagttgatgtgctcaatatgatctacaaagttggcggcgttgacatgatggaaaaacaccgcgc

SEQ ID NO: 461021 - DNA, 75 bp, synthetic construct
  source 1..75: mol_type = other DNA
gacattattaacgatataatacttcaaggtgaaaagaaattctcaaatgatcgggcaggggctattgagaaagca

SEQ ID NO: 461022 - DNA, 75 bp, synthetic construct
  source 1..75: mol_type = other DNA
acagaaagcgaattatgttgaaagggaaattcaagaagttagtaaaattataaatcatattgtcagttattatct

SEQ ID NO: 461023 - DNA, 75 bp, synthetic construct
  source 1..75: mol_type = other DNA
ttgctcaaagagctatgctctctgatatagaaatagctttttggtcagggaggaaaaatgttgaacaaaataatg

SEQ ID NO: 461024 - DNA, 75 bp, synthetic construct
  source 1..75: mol_type = other DNA
aaggaaattaaagaaatcgataaaatcataagccatatcattagatattacaataaaggtgacgaacatgagcaa

SEQ ID NO: 461025 - DNA, 75 bp, synthetic construct
  source 1..75: mol_type = other DNA
cagccaagacaccttttaaatactcttgctcaaagagctatgctttctgatatagaaatagctttttggtcaggg

SEQ ID NO: 461026 - DNA, 75 bp, synthetic construct
  source 1..75: mol_type = other DNA
agatatatttactacatctatcattgcactgctgctttgtgctccaacacgaatatctgaggtattgagccttga

SEQ ID NO: 461027 - DNA, 75 bp, synthetic construct
  source 1..75: mol_type = other DNA
gtcgggctgattgtcattcttatttataacaatgtgactaatcatggtgcgcaaataaccacctggttattaagt

SEQ ID NO: 461028 - DNA, 75 bp, synthetic construct
  source 1..75: mol_type = other DNA
ttcgccaatgtctggattgaatatagccgaatcaaagcgatgaacttgtcggaagatggcgtgttggtgatgcaa

SEQ ID NO: 461029 - DNA, 75 bp, synthetic construct
  source 1..75: mol_type = other DNA
atgacaatcacggacctggtactgattcttttcatcgccgcactcctggccttcgcgatctacgatcagttcatc

SEQ ID NO: 461030 - DNA, 75 bp, synthetic construct
  source 1..75: mol_type = other DNA
gatttcacaacctcttctaaatggattttccagaatcctgatgtgcgctatctgaatataaacgtcagccgtttt

SEQ ID NO: 461031 - DNA, 75 bp, synthetic construct
  source 1..75: mol_type = other DNA
ccggaaaacgcgctggtggtggcggcggcgggcagcctgccgggcgacctccagcgtgtctggcaaagccgcgga

SEQ ID NO: 461032 - DNA, 75 bp, synthetic construct
  source 1..75: mol_type = other DNA
catcttcaaacaaaaaggttttttcttcgccaatgtctggattgaatataaccggattaaagcgatgaacttatc

SEQ ID NO: 461033 - DNA, 75 bp, synthetic construct
  source 1..75: mol_type = other DNA
ggtgacggtttcccgtctttcccgtctgctggctgagcaggtgcgttttggtgtgctgggagtgtcagaggaaac

SEQ ID NO: 461034 - DNA, 75 bp, synthetic construct
  source 1..75: mol_type = other DNA
cgtctgccacgctatgtctggataacaccggcagggtggcagatgctgggcgtcgacatggttaaacttcacgaa

SEQ ID NO: 461035 - DNA, 75 bp, synthetic construct
  source 1..75: mol_type = other DNA
tcagtgatgccggcacacacactgtggggatgagcgtctcccgtctggccagagaaatcagcccaaaagacagta

SEQ ID NO: 461036 - DNA, 75 bp, synthetic construct
  source 1..75: mol_type = other DNA
cctgcacatttctgggactgatttcatcgcctaacggcacattgattatgcagattggcgatggtggcgtggtgg

SEQ ID NO: 461037 - DNA, 75 bp, synthetic construct
  source 1..75: mol_type = other DNA
cagattggtgatggtggcgtggtggtggattttggtgaagggctacagctaccactaacgccgatgaatggcgaa

SEQ ID NO: 461038 - DNA, 75 bp, synthetic construct
  source 1..75: mol_type = other DNA
cagccgttggaacgtcgcacatcagtgcggacttgccttgccaggatgcctgccagatacaggttgcctggctaa

SEQ ID NO: 461039 - DNA, 75 bp, synthetic construct
  source 1..75: mol_type = other DNA
aagccgaaagcggcgaagaaagaggcgagaaaagcgaaaaagccctcggctaaaacgcaaaaaatagctgcagcg

SEQ ID NO: 461040 - DNA, 75 bp, synthetic construct
  source 1..75: mol_type = other DNA
atctccagcgttaccggatttggtttcttcgtccgtctggacgaactgtttattgatggcctggttcacgtctct

SEQ ID NO: 461041 - DNA, 75 bp, synthetic construct
  source 1..75: mol_type = other DNA
gttgccgaccgtcctgatgcagaaatgctgcaaaccatgctgctgcgctcaatgaaacaggcgatttacgatccg

SEQ ID NO: 461042 - DNA, 75 bp, synthetic construct
  source 1..75: mol_type = other DNA
ctgctggccgaacaggtgcgttttggtgtgctgggtgtgtcggaagaaacgatgtgggaccgtgaaacccgccag

SEQ ID NO: 461043 - DNA, 75 bp, synthetic construct
  source 1..75: mol_type = other DNA
atgaccatctgaagcgactggccatcagggagttgcgtcagcttgaactgacgctggctgcgccaccgccgcact

SEQ ID NO: 461044 - DNA, 75 bp, synthetic construct
  source 1..75: mol_type = other DNA
actggagtcagctgtcgaccgaagaccagatctgcttctgggaagagtacgaagcgggcagaacgacgtctttcc

SEQ ID NO: 461045 - DNA, 75 bp, synthetic construct
  source 1..75: mol_type = other DNA
cctttctttaccccgtttttcaatggactggcggcagcaacgcaggaacaactcgatttattacctgaattgtta

SEQ ID NO: 461046 - DNA, 75 bp, synthetic construct
  source 1..75: mol_type = other DNA
tctgaattacgcaaccgtcgcagccgaagcacgcaaggaggcacacagaatgaaagcaactaacgttaaatcaga

SEQ ID NO: 461047 - DNA, 75 bp, synthetic construct
  source 1..75: mol_type = other DNA
aatggataaagatggttactattatgagcgactttggggacatataccaaatggtgtaggtgatgcagaatccat

SEQ ID NO: 461048 - DNA, 75 bp, synthetic construct
  source 1..75: mol_type = other DNA
cgctttgaagaaggtaaacactactttcttttaactggttcaaaattaagagaatttaagaacagagttactttt

SEQ ID NO: 461049 - DNA, 75 bp, synthetic construct
  source 1..75: mol_type = other DNA
atcagtaccagggatataccgggcgttattgccaactacttcatgatcaccaaacaactttaccggagaaaggac

SEQ ID NO: 461050 - DNA, 75 bp, synthetic construct
  source 1..75: mol_type = other DNA
ataaagttattggagatgatttgaacaatttgcgggtgactttaagtaactcacaaaatcctatctctcctaaag

SEQ ID NO: 461051 - DNA, 75 bp, synthetic construct
  source 1..75: mol_type = other DNA
acaaccgagactcttgctagagggtatgggacagaaacaatccgtattcgccaaaatcatcatgagaacaaagta

SEQ ID NO: 461052 - DNA, 75 bp, synthetic construct
  source 1..75: mol_type = other DNA
tatgccaatatgacgcacttcattactgatgaagatgccgtttccagactggaaactttcaccagcactgagcgt

SEQ ID NO: 461053 - DNA, 75 bp, synthetic construct
  source 1..75: mol_type = other DNA
cgctgatggcgcaggcagcgtctcgcagggtggcgaaggtgcgatgcttgccgtcaatgaagcgatggcttatat

SEQ ID NO: 461054 - DNA, 75 bp, synthetic construct
  source 1..75: mol_type = other DNA
ccgatgaagatgccgtttccagactggaaactttcaccagcactgagcgtgcgcacaaagttgcagcatttacgg

SEQ ID NO: 461055 - DNA, 75 bp, synthetic construct
  source 1..75: mol_type = other DNA
caaccgatcgcaatcccccagacgcttcctgaagccctacgcctggctgccgaactggctgaacaaaagcaactt

SEQ ID NO: 461056 - DNA, 75 bp, synthetic construct
  source 1..75: mol_type = other DNA
acccgccagcgtctgccgcgctatgtctggataacaccggctggctggcagatgctgggcgtcgacatggtaaaa

SEQ ID NO: 461057 - DNA, 75 bp, synthetic construct
  source 1..75: mol_type = other DNA
agcgcacgaagcgccgtcgtggcgagcactccaccagacccaaatgtgaaaatccgtcctggtatcgtcctgcgc

SEQ ID NO: 461058 - DNA, 75 bp, synthetic construct
  source 1..75: mol_type = other DNA
gcgccgctggttaagcatctcgaagagctgcataacctctataaagtgctggataaagcccgtgaagagcgcggc

SEQ ID NO: 461059 - DNA, 75 bp, synthetic construct
  source 1..75: mol_type = other DNA
agttattcactgggcgtcaccaactccgggcaactggatatggggctactgtttgtctgctaccaacacgatctg

SEQ ID NO: 461060 - DNA, 75 bp, synthetic construct
  source 1..75: mol_type = other DNA
ggaatacgttaaacctatcggcggcggttatttttttgcgctgccgggggtgaaggacacgaacgattatctcgg

SEQ ID NO: 461061 - DNA, 75 bp, synthetic construct
  source 1..75: mol_type = other DNA
cttgtccatgcttcggtgtttaccactataggtatgatggattctcgttactttgcttattacgacgatactgat

SEQ ID NO: 461062 - DNA, 75 bp, synthetic construct
  source 1..75: mol_type = other DNA
gatgttagcaaactttctgctcatgatattctaacagcttgtaatgttagtaatattgattgtgtcatcggtgga

SEQ ID NO: 461063 - DNA, 75 bp, synthetic construct
  source 1..75: mol_type = other DNA
aagacggcactgctaatcctgacagccaaaatgcgaaagtgatgcaaaaagtagtgtgggtgacggcagatcagc

SEQ ID NO: 461064 - DNA, 75 bp, synthetic construct
  source 1..75: mol_type = other DNA
ggcggttatttctttgcattgccaggggtgaaggacacgaacgattatctcggaagcgcattattgcgggtttaa

SEQ ID NO: 461065 - DNA, 75 bp, synthetic construct
  source 1..75: mol_type = other DNA
gctaacaaggctcttgagcatggcataattaattccataaaaactgcaaggctggcatccaatcaggcaaactgg

SEQ ID NO: 461066 - DNA, 75 bp, synthetic construct
  source 1..75: mol_type = other DNA
tgatagtaccccttcctgcggcaactcgcgttttggctgttggacctgtaccgttgtcactaaagataaggcgat

SEQ ID NO: 461067 - DNA, 75 bp, synthetic construct
  source 1..75: mol_type = other DNA
ggtgggaaagattcttccgctgtgatcacgctggtgtatctggccttgctcggcctgcccccggaaatgcgcagc

SEQ ID NO: 461068 - DNA, 75 bp, synthetic construct
  source 1..75: mol_type = other DNA
ctttcatgctggaagcccagccgaaaggcgcttttttgctgttcggtaatggtgatgtcggggaaggggcatgca

SEQ ID NO: 461069 - DNA, 75 bp, synthetic construct
  source 1..75: mol_type = other DNA
ggtgatgtcggggaaggttcctgcatggtgcataaccccggatacgacttcaacgatgcaagtctggtgccggca

SEQ ID NO: 461070 - DNA, 75 bp, synthetic construct
  source 1..75: mol_type = other DNA
atgatcgaacactatattcgagggtttgaggaagaactgcgtgagatccgccatcagatccacgaaaacccggag

SEQ ID NO: 461071 - DNA, 75 bp, synthetic construct
  source 1..75: mol_type = other DNA
atgcaggcattaacaggaatggttaattcttttagccactttattttaatgcgtattggtctgggtattggcgaa

SEQ ID NO: 461072 - DNA, 75 bp, synthetic construct
  source 1..75: mol_type = other DNA
tgggcgttacagcctgaacgatctgcacagggcagccgggggagaacaaaaaaccgcccgaaatactggctctcc

SEQ ID NO: 461073 - DNA, 75 bp, synthetic construct
  source 1..75: mol_type = other DNA
tctcaaacgttggtgagtataatgcgttaggttttgagcttttatttaagttgttatgtatatcactcttatttt

SEQ ID NO: 461074 - DNA, 75 bp, synthetic construct
  source 1..75: mol_type = other DNA
ccgccgaggcggtggcgcgtatctcgccgagaaccgcaacgttccataaagggcaactggtgtgggggagtgtgg

SEQ ID NO: 461075 - DNA, 75 bp, synthetic construct
  source 1..75: mol_type = other DNA
ctgacgctgcaccgcgccattaagtatctgctggcgaaagagcaggggcatcagggcaacaccactgaaaccggc

SEQ ID NO: 461076 - DNA, 75 bp, synthetic construct
  source 1..75: mol_type = other DNA
cattgcagtcctatgcgcactttacttcgccgattcgtcgttatcctgacctgacgctgcaccgcgccattaagt

SEQ ID NO: 461077 - DNA, 75 bp, synthetic construct
  source 1..75: mol_type = other DNA
catccctagtcgggaatttatcctcgaacatttaaccaaacgtgaaaaaccggccagccgtgatgagctggcggt

SEQ ID NO: 461078 - DNA, 75 bp, synthetic construct
  source 1..75: mol_type = other DNA
atgactatgacaagactgaagatttcgaaaactctgctggctgttgtaatgttgacctctgccgtcgcgaccggc

SEQ ID NO: 461079 - DNA, 75 bp, synthetic construct
  source 1..75: mol_type = other DNA
caccattgaatcaaacactagtctgaacaaacagaagttgctctgcgacctttgcggcattgcttcgaaatgccc

SEQ ID NO: 461080 - DNA, 75 bp, synthetic construct
  source 1..75: mol_type = other DNA
aatctggcgctggttattgcggcctgcgtgaccttcatcggcgcgctgtgttacttctttatcgtcaaagatcgc

SEQ ID NO: 461081 - DNA, 75 bp, synthetic construct
  source 1..75: mol_type = other DNA
cgcagctctatattcgccctaacgaacagaatttatcccgctcgctgtttttagccaccggtgatgtattgccgc

SEQ ID NO: 461082 - DNA, 75 bp, synthetic construct
  source 1..75: mol_type = other DNA
cggatggcggcgcagcaaatttctatcgcctcgacggtgccgattggcacgctgcatatgccgctcaaacagttg

SEQ ID NO: 461083 - DNA, 75 bp, synthetic construct
  source 1..75: mol_type = other DNA
cggcgggctggacccgaccagtgttgatggcgcgatggaaaaatccctcgacaccatgttccagattgcgctgga

SEQ ID NO: 461084 - DNA, 75 bp, synthetic construct
  source 1..75: mol_type = other DNA
atgatgacaactgaagagccagggttaacagggttttattctgcctttagaacaacctcgacaagtccaactgtt

SEQ ID NO: 461085 - DNA, 75 bp, synthetic construct
  source 1..75: mol_type = other DNA
tggcacgaaaatttgtaggcctgataagcgtagcgcatcaggcagtctggcgttggtcataaccccatcaccctc

SEQ ID NO: 461086 - DNA, 75 bp, synthetic construct
  source 1..75: mol_type = other DNA
atgcagacgacgaaaaaggggatagtacagctcagcagtgcgaccaacagtacgtctgaaacgctggcggcaacg

SEQ ID NO: 461087 - DNA, 75 bp, synthetic construct
  source 1..75: mol_type = other DNA
gagtagcccgcgtattccggcggtgaaaagccagcttcgtcaactggatagcgaggcgtgtcgggaactggcgcg

SEQ ID NO: 461088 - DNA, 75 bp, synthetic construct
  source 1..75: mol_type = other DNA
ttacgcgctgggaactgagacattccgtctggattactacagcgctatgcaagtgctggaacgacttaagacgct

SEQ ID NO: 461089 - DNA, 75 bp, synthetic construct
  source 1..75: mol_type = other DNA
acgccagtcaaagtcagggcaaacgccatgacatcattcagcttggtggagaaaatctggctgccgggttaaacg

SEQ ID NO: 461090 - DNA, 75 bp, synthetic construct
  source 1..75: mol_type = other DNA
ctgttgaatctctatctcaatgctattcaggcgattggtcagcatggcgtgattagcgtgacggccagcgaaagc

SEQ ID NO: 461091 - DNA, 75 bp, synthetic construct
  source 1..75: mol_type = other DNA
ggatcgatagcgcagacggcgagcctgttctggaaatttatcgccagtttcaaccgatgtttgctgctggaatgc

SEQ ID NO: 461092 - DNA, 75 bp, synthetic construct
  source 1..75: mol_type = other DNA
atccgtacttaatcttggcctgttgtgtctcggcctgattttgatcgtcttcctcggcaaagaaacggtgcatct

SEQ ID NO: 461093 - DNA, 75 bp, synthetic construct
  source 1..75: mol_type = other DNA
agtgttggaacagttgatataacattacctgtagctttccctgctgcttgtcgttcggtaaacgctcttatttca

SEQ ID NO: 461094 - DNA, 75 bp, synthetic construct
  source 1..75: mol_type = other DNA
tgcgcttgaggtctatcgtttgtttcagcccatgtcagcctcctggaggcatgggatgcataatatgccgcgctg

SEQ ID NO: 461095 - DNA, 75 bp, synthetic construct
  source 1..75: mol_type = other DNA
gattagcgtgacggccagcgaaagcggcgcgggcgtgaaaatcagcgttaccgacagcggtaagggaattgcggc

SEQ ID NO: 461096 - DNA, 75 bp, synthetic construct
  source 1..75: mol_type = other DNA
atacagaaaaggtaatcctctgacacttgcagaacgtcagcaggcatccctggcaagaaaacgagctacacataa

SEQ ID NO: 461097 - DNA, 75 bp, synthetic construct
  source 1..75: mol_type = other DNA
ctatcctgtttgtggggtgcagtattggcaaagtcagtatcgacagggcaataaaaccattgctaccgatgtttc

SEQ ID NO: 461098 - DNA, 75 bp, synthetic construct
  source 1..75: mol_type = other DNA
agcaattctgatatttacgcccattttcctgccgatcgctcaacatctcggtatagatcctattcactttggcat

SEQ ID NO: 461099 - DNA, 75 bp, synthetic construct
  source 1..75: mol_type = other DNA
cacgccgtacctgagctacatcaacgactacggcggacgtccggttctgcagttctcctgtgcaggaagtcgctg

SEQ ID NO: 461100 - DNA, 75 bp, synthetic construct
  source 1..75: mol_type = other DNA
tggcccgccagcttgatgaacgtgaacgcaggctgaaggcaaaagccaggagtaactacagcgatcaggggggat

SEQ ID NO: 461101 - DNA, 75 bp, synthetic construct
  source 1..75: mol_type = other DNA
cgtgcagctactgtgccgcccatttaccggattgaagcaccgacgcagatcatcatccagacacagccaggacaa

SEQ ID NO: 461102 - DNA, 75 bp, synthetic construct
  source 1..75: mol_type = other DNA
tgctggcgatgatttatagagaaattacccttaagaaactcaatgacattctgttagattctgtggtaaccagct

SEQ ID NO: 461103 - DNA, 75 bp, synthetic construct
  source 1..75: mol_type = other DNA
cgactaaatatatgtttcgtatctccaagcaaatggcttgcagaaaaagctaagctgagcggtctattacaaggt

SEQ ID NO: 461104 - DNA, 75 bp, synthetic construct
  source 1..75: mol_type = other DNA
tgtgggaactcaaaaaaatggcgttgttgataaaacgggtcacacctggtttctggctggtgaaggtgaatccgg

SEQ ID NO: 461105 - DNA, 75 bp, synthetic construct
  source 1..75: mol_type = other DNA
acggttacggcgtcaaacgggaagcctttcatgaaactgagcttgttccgggggagaagagtcgttcatcggaag

SEQ ID NO: 461106 - DNA, 75 bp, synthetic construct
  source 1..75: mol_type = other DNA
agacggtgaaatcaggaacatacagcacgccgtacctgagctacatcaacgactacggcggacgtccggttctgc

SEQ ID NO: 461107 - DNA, 75 bp, synthetic construct
  source 1..75: mol_type = other DNA
tcatcaatggtcagaagtttaccacccgcaatgccatgccagacggttttactccagtagactttgatatcactt

SEQ ID NO: 461108 - DNA, 75 bp, synthetic construct
  source 1..75: mol_type = other DNA
gatctgtttatgcagatttttgccgacgtgttcaaccttccggcacgacgtaacgccattaacggttgtgcaagc

SEQ ID NO: 461109 - DNA, 75 bp, synthetic construct
  source 1..75: mol_type = other DNA
ccgattatttccacgccatcttgtcctatccacagcggcgagtcattttacacggtaccatgctggcagccgctg

SEQ ID NO: 461110 - DNA, 75 bp, synthetic construct
  source 1..75: mol_type = other DNA
agtcaatggaagcggcgctgaaaaccgtgctggcagcgcttagtgccgaacagcgcgcaaccgtggtcgggattg

SEQ ID NO: 461111 - DNA, 75 bp, synthetic construct
  source 1..75: mol_type = other DNA
tgccagccctgctctctggcaccactcgcccgcaagatatccgtcgcgggcgttgcagcgccggacacaaatcac

SEQ ID NO: 461112 - DNA, 75 bp, synthetic construct
  source 1..75: mol_type = other DNA
gtgctggcgctacgcccggagtttgctgaaaacccgaacgcgatgttcgtcttgtggaaagaccacacagcggtt

SEQ ID NO: 461113 - DNA, 75 bp, synthetic construct
  source 1..75: mol_type = other DNA
ggcgatgagcgcagaacaacactactttccaacttccgacccggcgctggctgaccaggccgttccgactctata

SEQ ID NO: 461114 - DNA, 75 bp, synthetic construct
  source 1..75: mol_type = other DNA
aaaatccgtctctggatcacctgccggtggtgctcgactggtttaacggccgccgcacgccaaacgctaaccaac

SEQ ID NO: 461115 - DNA, 75 bp, synthetic construct
  source 1..75: mol_type = other DNA
actttatgcccggaatgggcgcaacgtctcggtctgccagaaagcgtagtgatttccggcggcgcgtttgactgc

SEQ ID NO: 461116 - DNA, 75 bp, synthetic construct
  source 1..75: mol_type = other DNA
tatctggatgatgttctgcttcagggcagcagccgtaaactcacttcattttctgtcgggctgaatcacacacac

SEQ ID NO: 461117 - DNA, 75 bp, synthetic construct
  source 1..75: mol_type = other DNA
taaccgtctgcgtacggagccggtacagattgaaatatcgcccggtgaccgtgagggatggtcggtggtgacact

SEQ ID NO: 461118 - DNA, 75 bp, synthetic construct
  source 1..75: mol_type = other DNA
ttttcgtctccggcagccatgctgtctccgggtgaccgcagtgcaattcagcagcaacagcagcagttgctggat

SEQ ID NO: 461119 - DNA, 75 bp, synthetic construct
  source 1..75: mol_type = other DNA
ccgaaaacccgaacgcgatgttcgtattgtggaaagaccacactgcggttgaaagaagcgaagagattacccgtt

SEQ ID NO: 461120 - DNA, 75 bp, synthetic construct
  source 1..75: mol_type = other DNA
tggcaaacagaacattgttgcccggtatggcttccggtcagtacgtattcaggctctgcactttctctccggtgg

SEQ ID NO: 461121 - DNA, 75 bp, synthetic construct
  source 1..75: mol_type = other DNA
ggcaggctgcagcaaatccgggcggaaggcgctgaccttcctgcccgcaccctgaagatggtttttccgggaatg

SEQ ID NO: 461122 - DNA, 75 bp, synthetic construct
  source 1..75: mol_type = other DNA
cgaaattattatcactggccagtattttcaacagtcctctattggatggtaaagcgctaacagaaatttttacgc

SEQ ID NO: 461123 - DNA, 75 bp, synthetic construct
  source 1..75: mol_type = other DNA
tattgatactgcttttgcggtggcaaatattgctgaatatcggcgtagcgtggcaattgatcttatcaatacgct

SEQ ID NO: 461124 - DNA, 75 bp, synthetic construct
  source 1..75: mol_type = other DNA
ataaagagattggccgggcgttaaatatcagtaccggaacggtaaaagcgcatctggaatcgctctatcggcgtc

SEQ ID NO: 461125 - DNA, 75 bp, synthetic construct
  source 1..75: mol_type = other DNA
agttttgctactggttgttgcaaaaaaccgtggtgcaatttcctgaggttaaggtgttaatcacggcttcggatt

SEQ ID NO: 461126 - DNA, 75 bp, synthetic construct
  source 1..75: mol_type = other DNA
atgccccttaccctggtctgtatctgatggatgtggttcccgacggcgaagcgcgtttcggctatcccaacatca

SEQ ID NO: 461127 - DNA, 75 bp, synthetic construct
  source 1..75: mol_type = other DNA
gcagagtcggtatacgtaacagcgtacaagtcatctttatggtggaatgcgccagccacgttgccaaagcgatcg

SEQ ID NO: 461128 - DNA, 75 bp, synthetic construct
  source 1..75: mol_type = other DNA
ttgacgaagatttaaaagcgctgccggaaaaaggcggttatttgtgcctgtttgacgtcgataaattcaaaaaca

SEQ ID NO: 461129 - DNA, 75 bp, synthetic construct
  source 1..75: mol_type = other DNA
ctaaggacggattgactgacatcgggcgcgagatatggcaaagcatgattaatgatatgggcgcgaccgtggcag

SEQ ID NO: 461130 - DNA, 75 bp, synthetic construct
  source 1..75: mol_type = other DNA
gaaggtgccggcggtcgcaggaataaccgccatcgacaccattggcgcggcgataactttgcttcaggttttatt

SEQ ID NO: 461131 - DNA, 75 bp, synthetic construct
  source 1..75: mol_type = other DNA
aaattactcaccgggaaagagacactggatgaaattgctgactgctttcttgcgtgcggcgtaaaaacggtggtg

SEQ ID NO: 461132 - DNA, 75 bp, synthetic construct
  source 1..75: mol_type = other DNA
agtcaatatttattcatggaatgaaaatcagtttacagcaacgtattccaggcgtaggtattcagggcgtcggtc

SEQ ID NO: 461133 - DNA, 75 bp, synthetic construct
  source 1..75: mol_type = other DNA
catctggaatcgctttatcgacgtctggaagtgaaaaaccgaacccaggcggcaatgatgttaaatatctcctcc

SEQ ID NO: 461134 - DNA, 75 bp, synthetic construct
  source 1..75: mol_type = other DNA
accgacagaaaagaaagttttccccggcaaacaaagaagactgccagaccatcaatggaaagcgggtttacacag

SEQ ID NO: 461135 - DNA, 75 bp, synthetic construct
  source 1..75: mol_type = other DNA
gttaacggaaaacgggtttatatgggtagaagctcaaaactggaaaaacgcagggaacacgagagcgatttatca

SEQ ID NO: 461136 - DNA, 75 bp, synthetic construct
  source 1..75: mol_type = other DNA
accgccagaaaagaaagttctctccagcagacaaagaagactgccaaaccgttaacggaaaacgggtttatatgg

SEQ ID NO: 461137 - DNA, 75 bp, synthetic construct
  source 1..75: mol_type = other DNA
aacagtgcggcgtataccacgcagctgttttacggtgcaattcgtgcgatcccggaaggtcagtggcagtcctgt

SEQ ID NO: 461138 - DNA, 75 bp, synthetic construct
  source 1..75: mol_type = other DNA
atacgctggcgatcctgctgccgtatgcctttaaacgctcgctctcttcttattccaacgaagtggtgctggtgt

SEQ ID NO: 461139 - DNA, 75 bp, synthetic construct
  source 1..75: mol_type = other DNA
agcgccctgggaatgagcaaaaaagatacgctggcgatcctgctgccgtatgcctttaaacgctcgctctcttct

SEQ ID NO: 461140 - DNA, 75 bp, synthetic construct
  source 1..75: mol_type = other DNA
actttaaccttcgactcatcattcttgagatcattaaaagtaaatgtatcaggaagtaatgttacgctacaaagt

SEQ ID NO: 461141 - DNA, 75 bp, synthetic construct
  source 1..75: mol_type = other DNA
cgggatggataaccagatcctgtcgttgtacgccaaaggcctgacaaccgtaagcgtacagcctgaaccgtctgg

SEQ ID NO: 461142 - DNA, 75 bp, synthetic construct
  source 1..75: mol_type = other DNA
aaactcagaagtcgatgcactgattaaggtgctgccgcgcatgacggcaccgatgctgaccgagcaggaagtcgc

SEQ ID NO: 461143 - DNA, 75 bp, synthetic construct
  source 1..75: mol_type = other DNA
gttatccgaacatccgtatttatacccaccaagcgacagagtacctggcttgcgtgagattgtagcccaccctaa

SEQ ID NO: 461144 - DNA, 75 bp, synthetic construct
  source 1..75: mol_type = other DNA
aaaatgcacagttttatatttcaaagggaaataaaccaatagaagacgcatttattcttgatgtattgaacgctt

SEQ ID NO: 461145 - DNA, 75 bp, synthetic construct
  source 1..75: mol_type = other DNA
aaaccagtgtccaattttcgaaagggtcaatgtttaatctagttgagaagatacataaaaatgatgactatgttt

SEQ ID NO: 461146 - DNA, 75 bp, synthetic construct
  source 1..75: mol_type = other DNA
gctgacggtcgcctcgctgattgtggcgctgattctggcgttaatttttaccatcgtcctgacgctgaaaacacc

SEQ ID NO: 461147 - DNA, 75 bp, synthetic construct
  source 1..75: mol_type = other DNA
ggtgatacgcgatcttttgcaggcaaaaccagcctcttgcgccaacgcacaggaaaaaccggcattcaggaaaac

SEQ ID NO: 461148 - DNA, 75 bp, synthetic construct
  source 1..75: mol_type = other DNA
atgacaatcgtaaaaacccataccggtaccgtgatcaccaaagatgggccgaaggtaaaaaaactgcaccaaaca

SEQ ID NO: 461149 - DNA, 75 bp, synthetic construct
  source 1..75: mol_type = other DNA
atgacaatcgtaaaaacccataccggcaccgttatcaccaaagacggtccgaaggtaaaaaaactgcaccagaca

SEQ ID NO: 461150 - DNA, 75 bp, synthetic construct
  source 1..75: mol_type = other DNA
tattgtgattagtgtaggtgatgcgcgtggtattggggtggtgaaagcacctgaacttaacggaacgacgctgac

SEQ ID NO: 461151 - DNA, 75 bp, synthetic construct
  source 1..75: mol_type = other DNA
gggtcgcaaaagttggtcgggccgctcatcgctatccctgtaactgagctttatacggtgcaggaagaagaaaaa

SEQ ID NO: 461152 - DNA, 75 bp, synthetic construct
  source 1..75: mol_type = other DNA
gcggcgctgaaagcgcaggagcttgcccggtatccccgggtggatttaacgggatcagtgacccgggatgacagg

SEQ ID NO: 461153 - DNA, 75 bp, synthetic construct
  source 1..75: mol_type = other DNA
tccacgcctggcagacggataaagactacgaagacgaagccggattctgcttctccgcgacgctggaagatattc

SEQ ID NO: 461154 - DNA, 75 bp, synthetic construct
  source 1..75: mol_type = other DNA
tgccgataccctgctggacgaccagcatccggatctgcgcgccgacttcgttatggctaacccaccgttcaacat

SEQ ID NO: 461155 - DNA, 75 bp, synthetic construct
  source 1..75: mol_type = other DNA
gcaactgaaagatcaactggaagagagcgcaaagctggaagcgcagatcaaggcgaatctgggggggctgggtta

SEQ ID NO: 461156 - DNA, 75 bp, synthetic construct
  source 1..75: mol_type = other DNA
acgctatgttggtgcggttgagcaggaagaagatgacgagccatttgcagaaaagatggcacggttagctataca

SEQ ID NO: 461157 - DNA, 75 bp, synthetic construct
  source 1..75: mol_type = other DNA
caggaagaagacgatgagccatttgctgaaaaaatggcgcgacttacgtcgcagcttaaagaccagctagcagag

SEQ ID NO: 461158 - DNA, 75 bp, synthetic construct
  source 1..75: mol_type = other DNA
tccacgcctggcaggcggataaaaactacgaagacgaagccgggttctgcttctcagcaacactggatgatatcc

SEQ ID NO: 461159 - DNA, 75 bp, synthetic construct
  source 1..75: mol_type = other DNA
tcgatttgtggatttgcccctatatttccagacatctgttatcacttaacccattacaagcccgctgccgcagat

SEQ ID NO: 461160 - DNA, 75 bp, synthetic construct
  source 1..75: mol_type = other DNA
aatctcctatccggacgtacagtggcagcatgaaagcctgaaaccggtactggagccaacctacggcatcatcct

SEQ ID NO: 461161 - DNA, 75 bp, synthetic construct
  source 1..75: mol_type = other DNA
gtggcagcatgaaagcctgaaatcggtactggagccaacctacggcattatcttgtatcaggaacaggtcatgca

SEQ ID NO: 461162 - DNA, 75 bp, synthetic construct
  source 1..75: mol_type = other DNA
gacttcgacgttgacttctgtatggaaaaacgcgaccaggttatcgaacacgtggcagatatgtacggccgtgat

SEQ ID NO: 461163 - DNA, 75 bp, synthetic construct
  source 1..75: mol_type = other DNA
tccagcttgaatcgcgcggcatgaaggacctgatcaagcgtctacaacctgactgcttcgaagatatgatcgccc

SEQ ID NO: 461164 - DNA, 75 bp, synthetic construct
  source 1..75: mol_type = other DNA
catgagcaccgaagattatctggtcaagcgtgcaaaagaaggcctggaagagcgtctggcatttttattccctga

SEQ ID NO: 461165 - DNA, 75 bp, synthetic construct
  source 1..75: mol_type = other DNA
ggaagagatggccaagcagcgttctgtttttgccgaaggtgcagaaaagaacggcatcaatgccgaactggcgat

SEQ ID NO: 461166 - DNA, 75 bp, synthetic construct
  source 1..75: mol_type = other DNA
attgtgatgacggatatcgcccctttactcgaagaatatttctttgatgacccctataaacaacagatatgggcc

SEQ ID NO: 461167 - DNA, 75 bp, synthetic construct
  source 1..75: mol_type = other DNA
ttatcggtttaatgaatactgccgatcgctctctggccgttgttgattatgccctgcgcagacgattttctttca

SEQ ID NO: 461168 - DNA, 75 bp, synthetic construct
  source 1..75: mol_type = other DNA
ggcgtggtggaaggattcaaagcggcggtaggtcccgtcagtgcagcgttcgaaccgcttaagcctgtgttccag

SEQ ID NO: 461169 - DNA, 75 bp, synthetic construct
  source 1..75: mol_type = other DNA
gactttgacgttgacttctgtatggagaaacgcgatcaggttatcgaacacgtggcggacatgtacggtcgtgat

SEQ ID NO: 461170 - DNA, 75 bp, synthetic construct
  source 1..75: mol_type = other DNA
gtggcagcatgaaagtctgaaaccggtactggagccgacttacggcattatcctgtatcaggaacaggtcatgca

SEQ ID NO: 461171 - DNA, 75 bp, synthetic construct
  source 1..75: mol_type = other DNA
tctatggagatcctcctgatttaaataggagccagaattggaatatatcagcatcaataaataacatagggtatt

SEQ ID NO: 461172 - DNA, 75 bp, synthetic construct
  source 1..75: mol_type = other DNA
ggccaggtcgtggctccggtgcgggttctctggtggcttatgcgctgaaaatcaccgacctcgatccgctggaat

SEQ ID NO: 461173 - DNA, 75 bp, synthetic construct
  source 1..75: mol_type = other DNA
cgctgaatattctcggtgataaaaccactgcagattatgttgatgccggttactgggcggcaagtgccattaaag

SEQ ID NO: 461174 - DNA, 75 bp, synthetic construct
  source 1..75: mol_type = other DNA
acgactccatgtttaacacgccgccgacatttgcctggtatctgtctggtctggtctttaaatggctgaaagcga

SEQ ID NO: 461175 - DNA, 75 bp, synthetic construct
  source 1..75: mol_type = other DNA
acggctccatgtttaacacgccgccgacatttgcctggtatctatctggtctggtctttaaatggctgaaagcga

SEQ ID NO: 461176 - DNA, 75 bp, synthetic construct
  source 1..75: mol_type = other DNA
cggggattttgctgggtctggcactgatggtaatagccggtattatcgcggtacgtcgcggttatccaaagccag

SEQ ID NO: 461177 - DNA, 75 bp, synthetic construct
  source 1..75: mol_type = other DNA
ccgacgggtttgcttattccaccaagtaatacgttaatcgtctattcactggtcagtggtggtacttctattgcc

SEQ ID NO: 461178 - DNA, 75 bp, synthetic construct
  source 1..75: mol_type = other DNA
aacgaaaccattgacggtatcgctatcgatgaaacaccagacttcggtaaagacgtggtggtcgccgctgacttc

SEQ ID NO: 461179 - DNA, 75 bp, synthetic construct
  source 1..75: mol_type = other DNA
agcgtattgcagaccaacaatccgatatggtaaagaaaattgtctttgatacgctcagagatttatataaaaaag

SEQ ID NO: 461180 - DNA, 75 bp, synthetic construct
  source 1..75: mol_type = other DNA
tgtgggaactgaaaagaaatggcgttgttgataaacgggtcacatctggtttctggctggagaaggtgaatccgg

SEQ ID NO: 461181 - DNA, 75 bp, synthetic construct
  source 1..75: mol_type = other DNA
gcgcactatccggcgcccccccccccccccccccgccgatatggacaacaccgagaaggtggtgggcctggtgga

SEQ ID NO: 461182 - DNA, 75 bp, synthetic construct
  source 1..75: mol_type = other DNA
gcaggttatcgaacaggtcacgctgatgaaacccaatgccgggacgctgcgcggtgtcagtctggctgcagtcgc

SEQ ID NO: 461183 - DNA, 75 bp, synthetic construct
  source 1..75: mol_type = other DNA
atgaacaaagaaaatgtcattaccctggaaaatccggtcaaacgtggtgagcaggtcatcgaacaggtcacgctg

SEQ ID NO: 461184 - DNA, 75 bp, synthetic construct
  source 1..75: mol_type = other DNA
cgtgcaaaaatgaataacaggtctatcaattctgaaattgtggctacgatggaagaatcactctccaaaccatca

SEQ ID NO: 461185 - DNA, 75 bp, synthetic construct
  source 1..75: mol_type = other DNA
tgtccctttgtcattacgcttaccctgatggtggaagaccaggttaaatcacagaacgaagcgaacctgaagttt

SEQ ID NO: 461186 - DNA, 75 bp, synthetic construct
  source 1..75: mol_type = other DNA
cttcacgatgacgcccggatggtggtactggagctcggtggcctggagtcgcggccctctctgcttatcgcggtg

SEQ ID NO: 461187 - DNA, 75 bp, synthetic construct
  source 1..75: mol_type = other DNA
atccgtgggaatttatgctgcgcgaaatgttctctaccaagctggaagatgctggcgtacgctggctggaaccgg

SEQ ID NO: 461188 - DNA, 75 bp, synthetic construct
  source 1..75: mol_type = other DNA
gagctggggggcctgcaggacaagcctgacctgctggttgcggtgatgttttccctcatcatctacatcgaagac

SEQ ID NO: 461189 - DNA, 75 bp, synthetic construct
  source 1..75: mol_type = other DNA
cgcgggccatgaacttcatgctggagaacaacccggatatgttcatgctatggatgggcggcgataacctgtcca

SEQ ID NO: 461190 - DNA, 75 bp, synthetic construct
  source 1..75: mol_type = other DNA
gggatgccaaagaccagtggttctcctcctttatgctgcgcatcaatgatacctgcagtttccatcgtctctttg

SEQ ID NO: 461191 - DNA, 75 bp, synthetic construct
  source 1..75: mol_type = other DNA
gacggcgatgcggcagagcaggcggcgcttaccatgatcgccagctcgacacgaaggttaaaggaaatcacatga

SEQ ID NO: 461192 - DNA, 75 bp, synthetic construct
  source 1..75: mol_type = other DNA
aggcggtgtggcagctggcgtggaagaagtcagggccggagatggcttcgctggaagcctggctggaagaacatg

SEQ ID NO: 461193 - DNA, 75 bp, synthetic construct
  source 1..75: mol_type = other DNA
gagcgcagcgttatctccaaattcggggatgccaaagaccagtggttctcctcctttatgctgcgcattaacgat

SEQ ID NO: 461194 - DNA, 75 bp, synthetic construct
  source 1..75: mol_type = other DNA
attcctgctgatgttgaagaaaaactgctgcgctttgcccgcgccggtttggccgtcgccagcatgaaaggtaaa

SEQ ID NO: 461195 - DNA, 75 bp, synthetic construct
  source 1..75: mol_type = other DNA
ggttactcttcccgcttccttaccgaaggcggcgtcccgttcaccatgacccgtgtcaacatcatcaaaggcctg

SEQ ID NO: 461196 - DNA, 75 bp, synthetic construct
  source 1..75: mol_type = other DNA
caacgccatcgctgcaggcttccaggggcaacgtcactggaccgatcaatatcccaatggcgataccgctgaagc

SEQ ID NO: 461197 - DNA, 75 bp, synthetic construct
  source 1..75: mol_type = other DNA
acgccgtggcgtggattgagcactggcttgatttacgcgacctgtttggcagcgaagacgacgcacttttcctgt

SEQ ID NO: 461198 - DNA, 75 bp, synthetic construct
  source 1..75: mol_type = other DNA
agccgccttccgtgccgaaggaatcaaggtactggaacatacgcaagccagccaagtcgcccatgtggacggcga

SEQ ID NO: 461199 - DNA, 75 bp, synthetic construct
  source 1..75: mol_type = other DNA
agtgaagtcgccaaacgcttaggaccagacgtttatcaaacctttactgaaggtcgcagtcagcatgaatggatc

SEQ ID NO: 461200 - DNA, 75 bp, synthetic construct
  source 1..75: mol_type = other DNA
atgatccgcgccgcccacatcgcccatctgcgccgggaaagcccattcgacggcggcatgccacccacaccgccg

SEQ ID NO: 461201 - DNA, 75 bp, synthetic construct
  source 1..75: mol_type = other DNA
ggacggcgaattcgtgctcaccacgcgcacggcgaactgcgcgccgacaagctgctggtcgccaccggccgcgcg

SEQ ID NO: 461202 - DNA, 75 bp, synthetic construct
  source 1..75: mol_type = other DNA
ctgacgctgggcctgcgtgagaacggcaggaacagcacggcccgcatcctgaatttccatctggcccgtaacccg

SEQ ID NO: 461203 - DNA, 75 bp, synthetic construct
  source 1..75: mol_type = other DNA
gaagatattgaagtgctcgagctgccgttcagccaggcgctggagatgatcaaaaccggcgagatacgtgacggt

SEQ ID NO: 461204 - DNA, 75 bp, synthetic construct
  source 1..75: mol_type = other DNA
tgatatgaatcggctgctggatatcgatatcaatgatcccctcgccgtgcgcgaccgggcaatgctggaagtgat

SEQ ID NO: 461205 - DNA, 75 bp, synthetic construct
  source 1..75: mol_type = other DNA
agtgaagacgacgcgctttttctgtcgaaactgggcaaacgtatctccgcgcgtaatgtgcagaaacgctttgcc

SEQ ID NO: 461206 - DNA, 75 bp, synthetic construct
  source 1..75: mol_type = other DNA
aggcgatcatcaattttgccagtgaaaacgacctgcaaagctggcaacaatgtgatgtgacgatggtgcgtaatt

SEQ ID NO: 461207 - DNA, 75 bp, synthetic construct
  source 1..75: mol_type = other DNA
tttcgatgtttatgtggaccgatgccattgaacgtggcccggaaatgacagcgctgcgtgatggtgtacgcggga

SEQ ID NO: 461208 - DNA, 75 bp, synthetic construct
  source 1..75: mol_type = other DNA
atctacatcgagaacaggatgtaccgcacgccgcgtaacctcaagaaactgaacgtcattgatgaaggctggcgt

SEQ ID NO: 461209 - DNA, 75 bp, synthetic construct
  source 1..75: mol_type = other DNA
ccgttcatcctgacgctgacactggtggtggaagaccaggtgaaaacccacagcgaagccaacctgaagtacatg

SEQ ID NO: 461210 - DNA, 75 bp, synthetic construct
  source 1..75: mol_type = other DNA
ccgtgaatctgctgccggtggtggccgacaaccgtctgtgtcaggggggactgctgacgccgtcctaccgtaatc

SEQ ID NO: 461211 - DNA, 75 bp, synthetic construct
  source 1..75: mol_type = other DNA
cggcactggccgagctggtcaacgcacagaaagagcggcctctggccgcattctggggcgacgggacaacatcgt

SEQ ID NO: 461212 - DNA, 75 bp, synthetic construct
  source 1..75: mol_type = other DNA
ggcatgcttccccatccgaaaattacggagatactggaagaagttgatagctggacgggatttacgcgtcacttc

SEQ ID NO: 461213 - DNA, 75 bp, synthetic construct
  source 1..75: mol_type = other DNA
ggctactaccggagctgcttttgatggtgtgaccgtagataagtttaagcagttatataatgatgaccttgaagg

SEQ ID NO: 461214 - DNA, 75 bp, synthetic construct
  source 1..75: mol_type = other DNA
tctgaacgacgcaattttctcggaacattattcagtgaaggtggtttacctttccggctactcaaagaatcagac

SEQ ID NO: 461215 - DNA, 75 bp, synthetic construct
  source 1..75: mol_type = other DNA
cacaaaaaaatccagtgattggtattaatcctgacgcaaatcaccgctattccgtggcctggttacccgtcttcg

SEQ ID NO: 461216 - DNA, 75 bp, synthetic construct
  source 1..75: mol_type = other DNA
gacggggccgaggccaaagacaggacgttgctgctgtccgcaatcctcggtgatgcgatcaacctcgggctgacc

SEQ ID NO: 461217 - DNA, 75 bp, synthetic construct
  source 1..75: mol_type = other DNA
atgaagcgtgcggaatggggatccgtgaagataacacactgatcaccaaagacacctcacgtttcgttccgcatt

SEQ ID NO: 461218 - DNA, 75 bp, synthetic construct
  source 1..75: mol_type = other DNA
ggagtaccgtgctgtacttgcaggactgcgcccagcaggcagggcaggagtcgcggtttatctacattgaagatc

SEQ ID NO: 461219 - DNA, 75 bp, synthetic construct
  source 1..75: mol_type = other DNA
agagttctggccttcagaaaaaaacagagacgatgtaattccgtttatatccagagaatacggacttgttggata

SEQ ID NO: 461220 - DNA, 75 bp, synthetic construct
  source 1..75: mol_type = other DNA
atgtatgtacttgaccagttgagcgttgctcctaaccggcgactttggacattggttgacaccactactaactta

SEQ ID NO: 461221 - DNA, 75 bp, synthetic construct
  source 1..75: mol_type = other DNA
atcgttctgattttcgacccagcaagcaaaagcattcacacaaacattttaatagccttacagcagacatggtca

SEQ ID NO: 461222 - DNA, 75 bp, synthetic construct
  source 1..75: mol_type = other DNA
tgttgctgaccacgatcctcgccgacgcgatcaacctgggcctgaccaagatggcggaatcgtgccccggcacga

SEQ ID NO: 461223 - DNA, 75 bp, synthetic construct
  source 1..75: mol_type = other DNA
ctgctatgcgcagcctctgtagaggctaagcctcgactacaaaaaaataagagtacgcgttgccaattctattgg

SEQ ID NO: 461224 - DNA, 75 bp, synthetic construct
  source 1..75: mol_type = other DNA
ttacccgcagatgaacgcggaagacctgcaggagcggctggcacggatactgtttgtggcaactgtctgggggcg

SEQ ID NO: 461225 - DNA, 75 bp, synthetic construct
  source 1..75: mol_type = other DNA
acccaaaaaatcactgaccgcgcagattgcctcccgcagccgcgccatcgacttttacgctctgggaatgtactt

SEQ ID NO: 461226 - DNA, 75 bp, synthetic construct
  source 1..75: mol_type = other DNA
cgatgtgccgtgtccagtctgggccatgtgggaacaggaggccattgatgacacccgtgccacccgcgacgaaaa

SEQ ID NO: 461227 - DNA, 75 bp, synthetic construct
  source 1..75: mol_type = other DNA
aacagcaaccagacctgcattgtccgctattactacaacatcaccacgttctgtccggacacggatgaggacgcg

SEQ ID NO: 461228 - DNA, 75 bp, synthetic construct
  source 1..75: mol_type = other DNA
cgagacaccaccgtcggaacgacagaataacatgctgccgctgtcatttgccgaggcgattgatgctgatattca

SEQ ID NO: 461229 - DNA, 75 bp, synthetic construct
  source 1..75: mol_type = other DNA
cgatgtggccagccccgtctggaagatgtgggaacagggaacggtcgacgatacccaggcaacccgcgacgagaa

SEQ ID NO: 461230 - DNA, 75 bp, synthetic construct
  source 1..75: mol_type = other DNA
gcagtgaaatctccatcgccctgctggggcagaaccagaccaccgaggccaacagtaaccgcgcctccgcgcagg

SEQ ID NO: 461231 - DNA, 75 bp, synthetic construct
  source 1..75: mol_type = other DNA
cccgtgaccttcaaaaaaggcggcatgaagttctgggtgcgctttgccgagaaatatggctcaccgtgggttatc

SEQ ID NO: 461232 - DNA, 75 bp, synthetic construct
  source 1..75: mol_type = other DNA
gagcacagtgaggctcgctggcctgaatatggctgcaagcgtctgtataaatggatgatgtcacaaaaaaatcca

SEQ ID NO: 461233 - DNA, 75 bp, synthetic construct
  source 1..75: mol_type = other DNA
ggctactaccggagctgctttcgatggtgtgaccgtagataagtttaagcagctatataatgatgaccttgaagg

SEQ ID NO: 461234 - DNA, 75 bp, synthetic construct
  source 1..75: mol_type = other DNA
gacatgctcgacgatctggatctgtcccgtatcatcggtgagatgagcgatgccgtgctctacgggtatcagccc

SEQ ID NO: 461235 - DNA, 75 bp, synthetic construct
  source 1..75: mol_type = other DNA
ggcacagcaggccctggacgacgcgctggatattatgatgaacggaggcgcgttaaatggcacgctggaacccgt

SEQ ID NO: 461236 - DNA, 75 bp, synthetic construct
  source 1..75: mol_type = other DNA
ctgaaatgcaacggtgccgctttttctgctgaagaatacccggagctggcaaaggcttatccgacaaataaattg

SEQ ID NO: 461237 - DNA, 75 bp, synthetic construct
  source 1..75: mol_type = other DNA
acgcttttcagctccctggtggtaacgaaacccgcccacgaaatgttgcatttaactatatcgtgagggctgcat

SEQ ID NO: 461238 - DNA, 75 bp, synthetic construct
  source 1..75: mol_type = other DNA
cgctgactaatttgagtggaaaggatgtaactggtcttctcacataccttggtttgggagaagccagatatgtca

SEQ ID NO: 461239 - DNA, 75 bp, synthetic construct
  source 1..75: mol_type = other DNA
cagttgcaggaaggaagcggtcgtacccagactatccgcatgattctggttgtctcgaataccgaagccatcacg

SEQ ID NO: 461240 - DNA, 75 bp, synthetic construct
  source 1..75: mol_type = other DNA
aataacaccacgcaggttgcgaccaccgcatttgttcaggcggcactgacggctcttattaatgatgcgccagcc

SEQ ID NO: 461241 - DNA, 75 bp, synthetic construct
  source 1..75: mol_type = other DNA
ctggcactcaaagcgccactgtcgagtcctgcatttaccggaacgccaacagcaccgactgcggcacagtcggtc

SEQ ID NO: 461242 - DNA, 75 bp, synthetic construct
  source 1..75: mol_type = other DNA
gtggctgggatgacgggagaggcattgaccccggaaggattctattggcttcacaggagcatgcaatgcaaaacg

SEQ ID NO: 461243 - DNA, 75 bp, synthetic construct
  source 1..75: mol_type = other DNA
ggcagcaacatctttatcgcaatttggaggtaattatccagaggggtccggccattcgattgctaatcacgatgg

SEQ ID NO: 461244 - DNA, 75 bp, synthetic construct
  source 1..75: mol_type = other DNA
gaaggcttgatcagtgaatcagtcaggttaattgacctggggtcggatgaggtggcaacggccgggaaaaccatg

SEQ ID NO: 461245 - DNA, 75 bp, synthetic construct
  source 1..75: mol_type = other DNA
gaagcgaaatattgcgcaagccgaatcggagattaaacagtcgcagcaaggttatcgtgcttatcagaatcgacc

SEQ ID NO: 461246 - DNA, 75 bp, synthetic construct
  source 1..75: mol_type = other DNA
cttggtttgggagaaggttcggcattacccgttggtgtgcctgttccgtggccttccgccactccgccaacaggc

SEQ ID NO: 461247 - DNA, 75 bp, synthetic construct
  source 1..75: mol_type = other DNA
aggctggaatgctggaaaaacaccgccatatggttgtagccaacgatgggtatgattcaaaagaggaatgggaac

SEQ ID NO: 461248 - DNA, 75 bp, synthetic construct
  source 1..75: mol_type = other DNA
gccttcagccactccgcctactggctggctgaaatgcaacggtgcggctttttctgctgaagaatacccggaact

SEQ ID NO: 461249 - DNA, 75 bp, synthetic construct
  source 1..75: mol_type = other DNA
atggaaaacagttttaaagcggcgctgaaagcaggccgtccgcagattggattatggctggggctgagcagcagc

SEQ ID NO: 461250 - DNA, 75 bp, synthetic construct
  source 1..75: mol_type = other DNA
tggcgttgacctgagtaccgccagtgggcgctataacttccgtaatattctctctgcggcacaatatgagtccga

SEQ ID NO: 461251 - DNA, 75 bp, synthetic construct
  source 1..75: mol_type = other DNA
atgcttgagcccggtgacgaactggtcatctggaagctggatcgtatcggtcgcaatgtactgcacgcattattg

SEQ ID NO: 461252 - DNA, 75 bp, synthetic construct
  source 1..75: mol_type = other DNA
tcatggaagcgcccgactgttgaatatgcgtatcgtgagttttcagtctggtggcatgaaaaacacgcgaatgat

SEQ ID NO: 461253 - DNA, 75 bp, synthetic construct
  source 1..75: mol_type = other DNA
atggaaaacagttttaaagcggcgctgaaagcaggccgcccgcagatcggattatggctggggctgagcagcagc

SEQ ID NO: 461254 - DNA, 75 bp, synthetic construct
  source 1..75: mol_type = other DNA
caggattcgactggttgttgatcgacggtgagcacgcgccgaataacgtgcaaaccgtgctcacccagctacagg

SEQ ID NO: 461255 - DNA, 75 bp, synthetic construct
  source 1..75: mol_type = other DNA
ccgcataaacaatacgcaccaaaagaaagtcccgctcttactggcaggccgactgcgccaacggcggaaggcaaa

SEQ ID NO: 461256 - DNA, 75 bp, synthetic construct
  source 1..75: mol_type = other DNA
ggcaaaggcttatccgacaaataaattgcctgatttacgaggtgaatttattcgtggctgggatgacgggcgtga

SEQ ID NO: 461257 - DNA, 75 bp, synthetic construct
  source 1..75: mol_type = other DNA
aatggtgggttctgcccctgcggcactggatacactgaatgaactggcggcggcgctggggaatgaccctaactt

SEQ ID NO: 461258 - DNA, 75 bp, synthetic construct
  source 1..75: mol_type = other DNA
gacggtgacaaaatcagtgcgcagctcagtcttgcataccgctttaaggtgccgatgatttatcgaccagctgca

SEQ ID NO: 461259 - DNA, 75 bp, synthetic construct
  source 1..75: mol_type = other DNA
accggcagtcgcataaaatatggcgtcgtgaatgattacggggcggtgcgcgaatatgagggaatcgtccgttaa

SEQ ID NO: 461260 - DNA, 75 bp, synthetic construct
  source 1..75: mol_type = other DNA
ataaaggcaccagaataaaatatggtgtcataaatgactatggcgcggtaaaagaatatgatggtgttgttaagt

SEQ ID NO: 461261 - DNA, 75 bp, synthetic construct
  source 1..75: mol_type = other DNA
gatgccactaattcgttaattggtaatgatgattacaactgtctgattgaaggaaataaaaataacaaacgaaca

SEQ ID NO: 461262 - DNA, 75 bp, synthetic construct
  source 1..75: mol_type = other DNA
gattttggtgcccgcgcccttcgcgaatccttctctctggatttcgtgcacttccgggagcagacggcggcggtc

SEQ ID NO: 461263 - DNA, 75 bp, synthetic construct
  source 1..75: mol_type = other DNA
acgggagaaaacgccttacgccgatgccgtggccctgatgaaaaaagcagccgacgtactgactatcggacgcgg

SEQ ID NO: 461264 - DNA, 75 bp, synthetic construct
  source 1..75: mol_type = other DNA
gcccaacacacgcaagctggcactggatgcgacgggcgtcacgctcaccccgcaaggcgcatcgtcatcgacccc

SEQ ID NO: 461265 - DNA, 75 bp, synthetic construct
  source 1..75: mol_type = other DNA
accacgctcaccccctggcttgtccgggaacgctgctggctgaccgtctggagctctgaagaactgctgagccgg

SEQ ID NO: 461266 - DNA, 75 bp, synthetic construct
  source 1..75: mol_type = other DNA
accagccgttcggagtacacggattacctgaaaaagaaaacgcagacagaaacagcaatgcctcatgccaggtac

SEQ ID NO: 461267 - DNA, 75 bp, synthetic construct
  source 1..75: mol_type = other DNA
ctttaacctgaaagagatcgcgatgtttgcctggatgccgatgctgtttgctgacctcggttgtatcctcggtgg

SEQ ID NO: 461268 - DNA, 75 bp, synthetic construct
  source 1..75: mol_type = other DNA
gcccgtgcggcatggggtaactcctcctacaaaattatcctcaaacagagtgcgaaggagttcgcaaaatacaac

SEQ ID NO: 461269 - DNA, 75 bp, synthetic construct
  source 1..75: mol_type = other DNA
gagtccattgtggaggcgctcgatcatatgctgcgcaccaaactgccgcgcggtattccgttgtgtatccatctg

SEQ ID NO: 461270 - DNA, 75 bp, synthetic construct
  source 1..75: mol_type = other DNA
ccttgccgtccgtttaaacgatggcggcgagcgtgtggtggcgttcgaccgctgcctggtcgccacgggtgccag

SEQ ID NO: 461271 - DNA, 75 bp, synthetic construct
  source 1..75: mol_type = other DNA
cagctataggcgaagccgtcacggccgcactccgcatggagggcatcgaggcgagggaacacacccaggccagcc

SEQ ID NO: 461272 - DNA, 75 bp, synthetic construct
  source 1..75: mol_type = other DNA
accggcggtgacgcggccctgaacctgaccgcgatgccggccgtggtgttcaccgacccgaagtggcgaccgtag

SEQ ID NO: 461273 - DNA, 75 bp, synthetic construct
  source 1..75: mol_type = other DNA
ggagacgggaaaaaatccgcccaacacaaagaaaaacttcggctacctgatgtggcgtaaacgtaactgtgtatt

SEQ ID NO: 461274 - DNA, 75 bp, synthetic construct
  source 1..75: mol_type = other DNA
aaagagtacggtgaaaataatccgcgactttatcgcgcctcaacggaagaactggtggattcagcactgcaggac

SEQ ID NO: 461275 - DNA, 75 bp, synthetic construct
  source 1..75: mol_type = other DNA
acgggctgcgtgagttctcctggtcaggtgaacaggctgaacggtttaacgccattacccgtgcctattatatga

SEQ ID NO: 461276 - DNA, 75 bp, synthetic construct
  source 1..75: mol_type = other DNA
caaaattatcctcaaacagagtgcgaaggagttcgcgaaatacaaccagctgtatccggaccagttccagccact

SEQ ID NO: 461277 - DNA, 75 bp, synthetic construct
  source 1..75: mol_type = other DNA
cctgcgggatgatgccagaatggtggtgctggagctgggtgggctggaagaccgtccgtccctgcttgttgcggt

SEQ ID NO: 461278 - DNA, 75 bp, synthetic construct
  source 1..75: mol_type = other DNA
tcagatggttactgtaagtataagcggcccggtggcgatgaatggaatgactgataatgcttatgccattacagg

SEQ ID NO: 461279 - DNA, 75 bp, synthetic construct
  source 1..75: mol_type = other DNA
aacagcggcaaagtgaaactcgtgccgcgcagtcattggttaatcaacggcaagctgaactggactccgttgcca

SEQ ID NO: 461280 - DNA, 75 bp, synthetic construct
  source 1..75: mol_type = other DNA
cagcaggcggtcgggtgctaaatatggtcgatctcagcgacgtctatatgaccttcttcctgccaactgaacagg

SEQ ID NO: 461281 - DNA, 75 bp, synthetic construct
  source 1..75: mol_type = other DNA
gttggagtcattacccatttagtgagtgaggaaggtgatgcccgtataaataatgcggtagtgctacctgcagac

SEQ ID NO: 461282 - DNA, 75 bp, synthetic construct
  source 1..75: mol_type = other DNA
aatggcagaaaggacagtcttgaacaatctcaagccgatctctaccaaatgcttgcctatggattgaattaccag

SEQ ID NO: 461283 - DNA, 75 bp, synthetic construct
  source 1..75: mol_type = other DNA
tacgtttatgggttgtacctttctttattggcgagagtttacagacatcagagttgcgttttcctagggaaggtg

SEQ ID NO: 461284 - DNA, 75 bp, synthetic construct
  source 1..75: mol_type = other DNA
gaactgcgtcagcggctgggctccggtcagtcttctgtcgtgtcctacttcctcaacatcacagccttctgcaag

SEQ ID NO: 461285 - DNA, 75 bp, synthetic construct
  source 1..75: mol_type = other DNA
gctataagccgcaactggctgaaggcagcgggcgtacccagaccgtacggatggtgctgattaccagcagtaccg

SEQ ID NO: 461286 - DNA, 75 bp, synthetic construct
  source 1..75: mol_type = other DNA
attaggcgggatcgttttcaggtggagtatgacgagtacagcgtcaatcgtctggaaaaccggatactcaaaact

SEQ ID NO: 461287 - DNA, 75 bp, synthetic construct
  source 1..75: mol_type = other DNA
cctgtcgaatgaaaaattccagcaggcatttggggtgactctcccggactggcgtcagggtgtggctcgcgtggt

SEQ ID NO: 461288 - DNA, 75 bp, synthetic construct
  source 1..75: mol_type = other DNA
cactattccacggactatgtattcgacggcgccggcagccattatcgtcgggaagatgaagcaacaggcccgctg

SEQ ID NO: 461289 - DNA, 75 bp, synthetic construct
  source 1..75: mol_type = other DNA
ctatcgatcattaacgatcagcacggcgcgccgaccggggcagagctgctggcggactgcactgccatcgccatc

SEQ ID NO: 461290 - DNA, 75 bp, synthetic construct
  source 1..75: mol_type = other DNA
gccggatgccgtcgatttagatccgaaagccgactctcccgatcatgaagaacttgcaaagagcagcccggacga

SEQ ID NO: 461291 - DNA, 75 bp, synthetic construct
  source 1..75: mol_type = other DNA
ttacgaatgtcaaactcaagtcacagccggatgccgtcgatttagagccaaaagccgacactcccgatcatgaag

SEQ ID NO: 461292 - DNA, 75 bp, synthetic construct
  source 1..75: mol_type = other DNA
ggcaaaacttggcgcattattgattcattattcaacagactatgttttcaatggtgagggtactcactatcgcca

SEQ ID NO: 461293 - DNA, 75 bp, synthetic construct
  source 1..75: mol_type = other DNA
ctggaaatggcgacatgccatggctcgagactgatgtaaccgctccgctcaatgtttatggtaaaaccaaattgg

SEQ ID NO: 461294 - DNA, 75 bp, synthetic construct
  source 1..75: mol_type = other DNA
taatgaagttggggcttgggtaattcattactcaactgactacgtcttccctggaaatggcgacatgccatggct

SEQ ID NO: 461295 - DNA, 75 bp, synthetic construct
  source 1..75: mol_type = other DNA
gtgtcgaagcgatcgcgaaagcagccaatgaagtcggtgcctgggttattcactactctactgactacgtatttc

SEQ ID NO: 461296 - DNA, 75 bp, synthetic construct
  source 1..75: mol_type = other DNA
acggccaggtgggctgggagcttcagcgctcgctgtcgacgctgggagaggtggtggcggttgactacttcgata

SEQ ID NO: 461297 - DNA, 75 bp, synthetic construct
  source 1..75: mol_type = other DNA
tgaagcattaggtgcgtggctagtacattattccaccgactatgttttcgatggaagtggtgaacgtccttgggt

SEQ ID NO: 461298 - DNA, 75 bp, synthetic construct
  source 1..75: mol_type = other DNA
cagtggtaccacaacctggtacgattatgctgcgctggtttttgaagaggcgcgcaaagcaggcattccccttgc

SEQ ID NO: 461299 - DNA, 75 bp, synthetic construct
  source 1..75: mol_type = other DNA
atggcggaggcgatgagctgtttgcgctggataagggagaacaaccttaccgactgtaagattgcatcattccct

SEQ ID NO: 461300 - DNA, 75 bp, synthetic construct
  source 1..75: mol_type = other DNA
ggaaacggatgcaacagcgcctctgaatgtttacggtgaaaccaagttagccggagaaaaggcattacaggaaca

SEQ ID NO: 461301 - DNA, 75 bp, synthetic construct
  source 1..75: mol_type = other DNA
cagggcaggtaggctgggagctacagcgctccctggcccctctggggaacttgattgctcttgatattcactcca

SEQ ID NO: 461302 - DNA, 75 bp, synthetic construct
  source 1..75: mol_type = other DNA
tatgctgcgctggtttttgaagaggcgcgcaaagcaggcattccccttgcactcaacaagctcaacgcagtacca

SEQ ID NO: 461303 - DNA, 75 bp, synthetic construct
  source 1..75: mol_type = other DNA
cactactctactgactacgtatttccggggaccggcgaaataccgtggcaggagacggatgcaacagcacccttg

SEQ ID NO: 461304 - DNA, 75 bp, synthetic construct
  source 1..75: mol_type = other DNA
aaaaaaattcgccctgatgttattgttaatgctgctgctcacactgcagtagacaaagcggaatcagaaccggat

SEQ ID NO: 461305 - DNA, 75 bp, synthetic construct
  source 1..75: mol_type = other DNA
ctaattattgtggagatttcagcaaccccgaaggtgtggcagaaaccgtcaaaaaaattcgtcctgacgttattg

SEQ ID NO: 461306 - DNA, 75 bp, synthetic construct
  source 1..75: mol_type = other DNA
gcgtctggcaaaagagcgtgaagaattagcggttattaacgatcagtttggtgcaccaacgggtgctgagctgct

SEQ ID NO: 461307 - DNA, 75 bp, synthetic construct
  source 1..75: mol_type = other DNA
ttagctgttattaacgatcagtttggcgcaccaactggcgcagagttgctggctgattgtacggcacatgcaatt

SEQ ID NO: 461308 - DNA, 75 bp, synthetic construct
  source 1..75: mol_type = other DNA
aaatgaagttggggcttgggtaattcattactcaactgactacgtattccctggaaatggcgacacgccatggct

SEQ ID NO: 461309 - DNA, 75 bp, synthetic construct
  source 1..75: mol_type = other DNA
catacagcacagtatggtggctttacaaccgccgaaccgccgccgacgccgtgctgtacgagctattaccaaact

SEQ ID NO: 461310 - DNA, 75 bp, synthetic construct
  source 1..75: mol_type = other DNA
ggagcgccatcgtactgaacgccccggtgttgagcttcacctctatctgtagcccgattttcggcatggtagggt

SEQ ID NO: 461311 - DNA, 75 bp, synthetic construct
  source 1..75: mol_type = other DNA
aatgtttacggtgaaactaagttagctggagaaaaagcattacaagagcattgtgcgaagcaccttattttccgg

SEQ ID NO: 461312 - DNA, 75 bp, synthetic construct
  source 1..75: mol_type = other DNA
cgggcgtccttcggtgcgtgaagcgctggcagcgttaaaacgcaaaggtctggtgcaaataaacaacggcgaacg

SEQ ID NO: 461313 - DNA, 75 bp, synthetic construct
  source 1..75: mol_type = other DNA
tcgatagtcaagggattgagggcgtcgagaagagtttcgataaatggcttaccgggcagccgggtgagcgcattg

SEQ ID NO: 461314 - DNA, 75 bp, synthetic construct
  source 1..75: mol_type = other DNA
gacgtgtttgaaccgggctcaacggttaaaccgatggtggtgatgaccgcgttgcaacgtggcgtggtgcgggaa

SEQ ID NO: 461315 - DNA, 75 bp, synthetic construct
  source 1..75: mol_type = other DNA
atccgcaggcggggaaatactacggcggggccggtttcgcgcgccggtctttggtgccatcatgggcggcgtatt

SEQ ID NO: 461316 - DNA, 75 bp, synthetic construct
  source 1..75: mol_type = other DNA
cggggattcatctgcgtgaagagtctcgccgttactatccgtccggcgaagtgactgctcacctcatcggcttta

SEQ ID NO: 461317 - DNA, 75 bp, synthetic construct
  source 1..75: mol_type = other DNA
ggcgttagcgatgccgtcctcagagttagtagatacttactcacgttttggactgggaaaagcgaccaatttggg

SEQ ID NO: 461318 - DNA, 75 bp, synthetic construct
  source 1..75: mol_type = other DNA
tgcgtaaagaccgctatggtcgcgtaattgaagatatttcttctactgacagccaggctgcgcacaacctggcgc

SEQ ID NO: 461319 - DNA, 75 bp, synthetic construct
  source 1..75: mol_type = other DNA
taagtaatattgttttatttccggtaaaagaggatgacccacgtaatcaggttaatttctttatgagccatcgga

SEQ ID NO: 461320 - DNA, 75 bp, synthetic construct
  source 1..75: mol_type = other DNA
caattaccgctggcattcgcatcaaaggagaggagcatggaaatataggggcaaatccaaccctcgtaatcaggt

SEQ ID NO: 461321 - DNA, 75 bp, synthetic construct
  source 1..75: mol_type = other DNA
tctgtatatttgcaagagtatttttattcaatggctaaaggaaatgcattttctgaattcgtttcagaagtaact

SEQ ID NO: 461322 - DNA, 75 bp, synthetic construct
  source 1..75: mol_type = other DNA
atctgggaactgagggtgctgagcagtgctcacggtacgaccaaaacaggtttttactatgtcgatagcaatcgc

SEQ ID NO: 461323 - DNA, 75 bp, synthetic construct
  source 1..75: mol_type = other DNA
caacgctttataaagacgccaccggggagtgtatctggtcgccggagaaacccactcgaacatcagcttgtgggg

SEQ ID NO: 461324 - DNA, 75 bp, synthetic construct
  source 1..75: mol_type = other DNA
aaacgctttctggagacattagccgggtgtatttcgccggagcgcgaaggaaccttacgggaagtcatctgggag

SEQ ID NO: 461325 - DNA, 75 bp, synthetic construct
  source 1..75: mol_type = other DNA
ggatattggcggcggcaccaccggtattgccatcgtgaaacagggcaaagtgacctactcggcggatgaagccac

SEQ ID NO: 461326 - DNA, 75 bp, synthetic construct
  source 1..75: mol_type = other DNA
ctcggcctgattcgtcagtcacaacgcgcttttgacatggactactgcgtgcaactcgctttcgagaatatcaac

SEQ ID NO: 461327 - DNA, 75 bp, synthetic construct
  source 1..75: mol_type = other DNA
gtcatggaatttgaagatatcgccgataacgcagtggatgcaccgactgaaacctgcttcatgcactatgaataa

SEQ ID NO: 461328 - DNA, 75 bp, synthetic construct
  source 1..75: mol_type = other DNA
gctgggagcatctgaaagagcaaattgttgaagctctgctggcctggcatcgacaggacagtcgaggttgcgtcg

SEQ ID NO: 461329 - DNA, 75 bp, synthetic construct
  source 1..75: mol_type = other DNA
gttatgcggcggaacatgccaccgatgagcaaattgatcggttggcaaaggcgctggaaatcaacagtcagtcgc

SEQ ID NO: 461330 - DNA, 75 bp, synthetic construct
  source 1..75: mol_type = other DNA
gattgaaaaagcggtcgaaatgttaatccaggctgaacgtccggtgattgttgctgggggcggggtcatcaatgc

SEQ ID NO: 461331 - DNA, 75 bp, synthetic construct
  source 1..75: mol_type = other DNA
gcgcctttgacatggactactgcgtgcaaggtaatgactctaacttattgatagtgttttatgttcagataatgc

SEQ ID NO: 461332 - DNA, 75 bp, synthetic construct
  source 1..75: mol_type = other DNA
ttactggtgccgtgtataatctcactaaaaccaacaacctgatggcggaccctgagggttccttcttctcggttg

SEQ ID NO: 461333 - DNA, 75 bp, synthetic construct
  source 1..75: mol_type = other DNA
agccacgcaagcaccttaaaatcaccatcatacactaaatcagtaagttggcagcattacccgggatgtacgcac

SEQ ID NO: 461334 - DNA, 75 bp, synthetic construct
  source 1..75: mol_type = other DNA
atggcgcacgacgaacaatggctcaccccacgtctgcacatagcagcaacgctgtgtaaccagacgcctgccgcg

SEQ ID NO: 461335 - DNA, 75 bp, synthetic construct
  source 1..75: mol_type = other DNA
atgggatgaagttgcgcaactggtcaacaccggacgatttagtcggcgtaacttcgatctggcatcaaaatcact

SEQ ID NO: 461336 - DNA, 75 bp, synthetic construct
  source 1..75: mol_type = other DNA
atgggatgaagttgcgcaactggtcaacacgggacgttttaatcgtaataatttcgatctggcggcgaaatcact

SEQ ID NO: 461337 - DNA, 75 bp, synthetic construct
  source 1..75: mol_type = other DNA
ggaaaaccaccatgctggcaagaagtgggactgtccgtatgccgactatttatggtgtgatgacgcatgaagaac

SEQ ID NO: 461338 - DNA, 75 bp, synthetic construct
  source 1..75: mol_type = other DNA
tacgctgcgcgtgatcagcgtgcggatgaattaccttcctgctaacgccgcatttgccagcacgctgaaaaaccc

SEQ ID NO: 461339 - DNA, 75 bp, synthetic construct
  source 1..75: mol_type = other DNA
cccttgggatgaaacgattttgacagcgctggaaagtcgtaaaggtgagcacccacttctcgatgagcacatagc

SEQ ID NO: 461340 - DNA, 75 bp, synthetic construct
  source 1..75: mol_type = other DNA
gaaaaatggctgcgttacgtcattgagcatatccaggactggccggcaaatcgggtacgcgatctgttgccctgg

SEQ ID NO: 461341 - DNA, 75 bp, synthetic construct
  source 1..75: mol_type = other DNA
cactttcagcatggccttatgccaccgctttctttcgctgcctgaatggcagtcgccggatttcgctgaccgatc

SEQ ID NO: 461342 - DNA, 75 bp, synthetic construct
  source 1..75: mol_type = other DNA
cgcggtattaccagaccgcagccacgattactgcaggtgttgccaatgccacggcgaccttcacgctgacctata

SEQ ID NO: 461343 - DNA, 75 bp, synthetic construct
  source 1..75: mol_type = other DNA
gtggtcgaagtgcaattgccgaaaaaacagcgtctggttcgggtgattgaaaaagggttaccgcgtgacgcctga

SEQ ID NO: 461344 - DNA, 75 bp, synthetic construct
  source 1..75: mol_type = other DNA
gcaatccggcatcaagacagtcacgcagcagagcaggcggcactcacgatgattgccagctcaacacgaaggtta

SEQ ID NO: 461345 - DNA, 75 bp, synthetic construct
  source 1..75: mol_type = other DNA
caaacaatcaggaccgtgcagcctttaacgaagcggacattcgctatcacgaagcggtactagagtcagtccata

SEQ ID NO: 461346 - DNA, 75 bp, synthetic construct
  source 1..75: mol_type = other DNA
gcgtgagcagtgggcgcaacatatcgtgcaggatggcgatcagatcctgctttttcaggttattgcagggggttg

SEQ ID NO: 461347 - DNA, 75 bp, synthetic construct
  source 1..75: mol_type = other DNA
ggtttttcagggcttcaacctgtttccccataagacagtgctggaaaacctgatgctggccccgcgactgcataa

SEQ ID NO: 461348 - DNA, 75 bp, synthetic construct
  source 1..75: mol_type = other DNA
tgcgtaggtatgcgtggcgcgcgtgttcaggcggtttctactgaactgggcggcgaacgtatcgatatcgtcctg

SEQ ID NO: 461349 - DNA, 75 bp, synthetic construct
  source 1..75: mol_type = other DNA
cgaagaagtgattgaaattaaagcagcggctcgcgatccggggtctcgtgcgaaaatcgcggtgaaaaccaacga

SEQ ID NO: 461350 - DNA, 75 bp, synthetic construct
  source 1..75: mol_type = other DNA
gtcataccatgcagtcggtaatgactccaacttattgatagtgttttatgttcagataatgcccgatgactttgt

SEQ ID NO: 461351 - DNA, 75 bp, synthetic construct
  source 1..75: mol_type = other DNA
tcatggatcaacgcggttacatcatcaccaataaacacgttatcaacgacgccgatcagatcattgtcgccttgc

SEQ ID NO: 461352 - DNA, 75 bp, synthetic construct
  source 1..75: mol_type = other DNA
atgtttgtgaagctcttacgttccgttgcgatcggattaattgtcggcgctattttgctggtggcgatgccttcg

SEQ ID NO: 461353 - DNA, 75 bp, synthetic construct
  source 1..75: mol_type = other DNA
acgggtcgaatcggtctgaacccgaccgggcggcaaaacttcctgcaaactgatgcttccattaaccacggtaac

SEQ ID NO: 461354 - DNA, 75 bp, synthetic construct
  source 1..75: mol_type = other DNA
ccggcgaatctggcgcaggtctggtaaaagtgaccatcaacggtgcacacaactgccgtcgcgtagagatcgacc

SEQ ID NO: 461355 - DNA, 75 bp, synthetic construct
  source 1..75: mol_type = other DNA
cgccctggctcggtgatcccggttgtcgtgatgcgtgacgataagcagttaacgttgcaggtcaccattcaggaa

SEQ ID NO: 461356 - DNA, 75 bp, synthetic construct
  source 1..75: mol_type = other DNA
tgggcgaactgatgggcattaacacgctgtcgtttgataagagtaacgatggcgaaacgccggaaggtatcggct

SEQ ID NO: 461357 - DNA, 75 bp, synthetic construct
  source 1..75: mol_type = other DNA
gaggagattttaaaacatcagggaggggaatttaaatgtggaaaactggcagattatgttcgtcgtgaaacgtct

SEQ ID NO: 461358 - DNA, 75 bp, synthetic construct
  source 1..75: mol_type = other DNA
agatgtccgtcgagaaatctcatgcaatctcgcgcaggatgtttgcacgcactgccgaagatatggctcaggagc

SEQ ID NO: 461359 - DNA, 75 bp, synthetic construct
  source 1..75: mol_type = other DNA
gcctttgctgttggtcatatttctggtggtcattttaacccggcggtcactattggtttatgggctggcggacgt

SEQ ID NO: 461360 - DNA, 75 bp, synthetic construct
  source 1..75: mol_type = other DNA
acaataatccattttggctagataatgatgccgccccagggttaaaaaagaatctgggggatgtcactaaggctg

SEQ ID NO: 461361 - DNA, 75 bp, synthetic construct
  source 1..75: mol_type = other DNA
ctgaaaggcttgcgaaggtcgcagtggtgctaactaatctggtgctatctctgtctgtattggggttggtctatt

SEQ ID NO: 461362 - DNA, 75 bp, synthetic construct
  source 1..75: mol_type = other DNA
ccatccgtgtcgatccatacacgcaaaaacgcttcacgttctttaacgatccggacgggctgccgttggaactgt

SEQ ID NO: 461363 - DNA, 75 bp, synthetic construct
  source 1..75: mol_type = other DNA
atgattcagtgcgtttatagtcaccggggtatgcatgtaccggagcataccattatctggtggataacaagccgg

SEQ ID NO: 461364 - DNA, 75 bp, synthetic construct
  source 1..75: mol_type = other DNA
cctggcgcgctcgtcgcctgcgggaatcgctggcgaaaggggagagcgtcactcaggcgattctcaacgccggat

SEQ ID NO: 461365 - DNA, 75 bp, synthetic construct
  source 1..75: mol_type = other DNA
gcaatgcacaaagcgcgcgaaggcgtcggcagttggttgccgacgaccgtaaccgcgccactcaatgacattcat

SEQ ID NO: 461366 - DNA, 75 bp, synthetic construct
  source 1..75: mol_type = other DNA
gcaagtgctggggagttatctcgaaggaccgtacttcacgccgcagaataaaggcgcgcatccgccggagctgtt

SEQ ID NO: 461367 - DNA, 75 bp, synthetic construct
  source 1..75: mol_type = other DNA
acgatcaacgctggcaatctgtcttagcccgcgacccgaacgccgacggcgaattcgttttcgccgtgcgcacca

SEQ ID NO: 461368 - DNA, 75 bp, synthetic construct
  source 1..75: mol_type = other DNA
gctgctggaacaagaaacgcccgtgacgctggaggctttagccgaccaggtggcgatgagtccattccacttaca

SEQ ID NO: 461369 - DNA, 75 bp, synthetic construct
  source 1..75: mol_type = other DNA
ctgacgaaacgctgggcatgacggctaaacaattccgtcacggtggcgaaaatctggcggtgcgttacgcgctgg

SEQ ID NO: 461370 - DNA, 75 bp, synthetic construct
  source 1..75: mol_type = other DNA
gccagcaaaattgccgggcgtatcgacaccattctggtgaaagaaggccagtttgttcgcgaaggtgaagtgctg

SEQ ID NO: 461371 - DNA, 75 bp, synthetic construct
  source 1..75: mol_type = other DNA
ggctgattgtacggcacatgccattcgtgtggcactgaataaaccagaagtcgcaggcttgtaccatctggtagc

SEQ ID NO: 461372 - DNA, 75 bp, synthetic construct
  source 1..75: mol_type = other DNA
tacagaaaaatttcagcagaactttgcgcttgtcttgcctgactggcaggttggtgtgaaacgaatgctcaacga

SEQ ID NO: 461373 - DNA, 75 bp, synthetic construct
  source 1..75: mol_type = other DNA
gacggtgtaatcgcagcaatcgaaccgattccagtgggcgtgactgaacgcgatgcggaactgctctgccccgct

SEQ ID NO: 461374 - DNA, 75 bp, synthetic construct
  source 1..75: mol_type = other DNA
ggaatggttggcgcgggtttaacggacaagcgcgcctggctggaattgatagccgatgggcatcatgtacatccg

SEQ ID NO: 461375 - DNA, 75 bp, synthetic construct
  source 1..75: mol_type = other DNA
ggtcgatctcagcgacgtctatatgaccttcttcctgccaaccgaacaggcgggcacgctgaaactgggtggtga

SEQ ID NO: 461376 - DNA, 75 bp, synthetic construct
  source 1..75: mol_type = other DNA
cccgttccaaacgtggcatgcgtcgttcccatgacgcgctgaccgcagtccccagcctgtctgtagacaaaactt

SEQ ID NO: 461377 - DNA, 75 bp, synthetic construct
  source 1..75: mol_type = other DNA
gcggccccccaggatccagtcataccatcggaaactgagtcacgaatctggcctctcgaggttggtctggtgttt

SEQ ID NO: 461378 - DNA, 75 bp, synthetic construct
  source 1..75: mol_type = other DNA
tatgtcaaaacgggcttgccgggcgtggcgtgggtacgggtgaacgaacaacttccgtggcctgaagacctggca

SEQ ID NO: 461379 - DNA, 75 bp, synthetic construct
  source 1..75: mol_type = other DNA
ggatgaggttgtcatcaactcagaaggatattttgttcattctatatgcaattgaagtcggtggaaaagccgagc

SEQ ID NO: 461380 - DNA, 75 bp, synthetic construct
  source 1..75: mol_type = other DNA
gtcttcgacaaaacatggcggggtgagcgtttcagttacatcaaccgcaccgacctggaggccaaaggccgtgct

SEQ ID NO: 461381 - DNA, 75 bp, synthetic construct
  source 1..75: mol_type = other DNA
gtggctcgaacgtatgccgacgagtgaaattatcacgaccgctggtggtctcttcaacagcatgcagggggccgt

SEQ ID NO: 461382 - DNA, 75 bp, synthetic construct
  source 1..75: mol_type = other DNA
atgacgttaaacaaatattgccaggcgctggtggcactacgtagccaaccagcccacgaattgaaagaagttggc

SEQ ID NO: 461383 - DNA, 75 bp, synthetic construct
  source 1..75: mol_type = other DNA
gcttattatcagtaccatcagcaactgagagcactgacaaccctcctgaatgaaaatagctcactgccaccactg

SEQ ID NO: 461384 - DNA, 75 bp, synthetic construct
  source 1..75: mol_type = other DNA
gattggtgagtcgacacagcgcgaacgcatgagcttatacgggtatctacgtgaaacgacgccggagctggatgc

SEQ ID NO: 461385 - DNA, 75 bp, synthetic construct
  source 1..75: mol_type = other DNA
atgcatttaaataccggacagaacaggcctactttcagctggagcgcgctgggatgggcaattttttattttggc

SEQ ID NO: 461386 - DNA, 75 bp, synthetic construct
  source 1..75: mol_type = other DNA
agaatccaccagccagaatatcgccgggttctgtaatgagtggggaatcgacagtagcctgcaacaggccggagg

SEQ ID NO: 461387 - DNA, 75 bp, synthetic construct
  source 1..75: mol_type = other DNA
cgctggattggtaacccgtacaagaaaaacgcgctgatcgattacgacacgctgccgtatggcgaccaggtaggt

SEQ ID NO: 461388 - DNA, 75 bp, synthetic construct
  source 1..75: mol_type = other DNA
gattggtgagtcgacacagcgcgaacgcatgagtttatacggatatccgcgtaaaaccacgccggagctggatgc

SEQ ID NO: 461389 - DNA, 75 bp, synthetic construct
  source 1..75: mol_type = other DNA
ggatagcaatggattttcaagggatgatcctttcccatgctattcgtgctgcacaaacagggaatgtaaatcttg

SEQ ID NO: 461390 - DNA, 75 bp, synthetic construct
  source 1..75: mol_type = other DNA
aaaatttgccattattttaacattcgtaagcaatgctgatggctatctgacggcagcaatggatgctattaaatc

SEQ ID NO: 461391 - DNA, 75 bp, synthetic construct
  source 1..75: mol_type = other DNA
aaaaagtgccggaagagtgtgatatccctgtgagggttgcagccctggttgtgctgtggctggtattcagtggcc

SEQ ID NO: 461392 - DNA, 75 bp, synthetic construct
  source 1..75: mol_type = other DNA
agcctcttcgaaccggatatcccggaggttgtttccggagaagacgtggttcaggctgaacagccacaacagcca

SEQ ID NO: 461393 - DNA, 75 bp, synthetic construct
  source 1..75: mol_type = other DNA
caactgccacccgggatcagtgaatccggtgaagtggtggatatggccgcttatgaggcatggcaacaggaaaat

SEQ ID NO: 461394 - DNA, 75 bp, synthetic construct
  source 1..75: mol_type = other DNA
agatggccagcctcttcgaaccggaggttgcctccggagaaggcgtgactcaggctgaacagccacaacagccac

SEQ ID NO: 461395 - DNA, 75 bp, synthetic construct
  source 1..75: mol_type = other DNA
cacagcagccacagcagccacagcagccacagcagccacagcaactgacgcccgcgccccgcgctgcagacgcgg

SEQ ID NO: 461396 - DNA, 75 bp, synthetic construct
  source 1..75: mol_type = other DNA
gcccaacgcaattggcgaatgcaatgaaactggttcgccagcaaaatggctggacgcagagcgagctggcgaaaa

SEQ ID NO: 461397 - DNA, 75 bp, synthetic construct
  source 1..75: mol_type = other DNA
gaagccagtggtttccatgtggctgtccattgccattcgtggcctgatggcgatgggggagaaccgtaaccgtcg

SEQ ID NO: 461398 - DNA, 75 bp, synthetic construct
  source 1..75: mol_type = other DNA
caaacggaggaagaagtgggaacgatcagcagagaggaacttgatgctcgcttagctgctaataaagcagagatg

SEQ ID NO: 461399 - DNA, 75 bp, synthetic construct
  source 1..75: mol_type = other DNA
atcatggaaagcaagacaccaacatatctgaaagccggaggttgaaggttgttggcggttccgattttgaggctg

SEQ ID NO: 461400 - DNA, 75 bp, synthetic construct
  source 1..75: mol_type = other DNA
tatctacgacaagggctgtacgtttattgaggatttctacgacgaatcctgggataaagtgcttaatgcgctgga

SEQ ID NO: 461401 - DNA, 75 bp, synthetic construct
  source 1..75: mol_type = other DNA
tggaaggagtgtctgacacagccggattttgataatacggcaaataccctgatcccgatgggcacaaaagaggac

SEQ ID NO: 461402 - DNA, 75 bp, synthetic construct
  source 1..75: mol_type = other DNA
cctctttggtctgctattatgggtaaaaataagctggcagacgtttataaacggctgtatttactggtggtgtac

SEQ ID NO: 461403 - DNA, 75 bp, synthetic construct
  source 1..75: mol_type = other DNA
tctcgttggtctggtattatgggtaaaaataagctggcagacgtttataaacggctgtatttactggtggtgtac

SEQ ID NO: 461404 - DNA, 75 bp, synthetic construct
  source 1..75: mol_type = other DNA
tctccttggtctgctattatgggtaaaaataagctggcagacgtttataaacggctgtatttactggtggtgtac

SEQ ID NO: 461405 - DNA, 75 bp, synthetic construct
  source 1..75: mol_type = other DNA
atccgttacctgcaggggattgagcataacggtgaacccttcaccatccgtgactggatgcggggtgtcaaggag

SEQ ID NO: 461406 - DNA, 75 bp, synthetic construct
  source 1..75: mol_type = other DNA
gctctttggtctggtattatgggtaaaaataagctggcagacgtttataaacggctgtatttactggtggtgtac

SEQ ID NO: 461407 - DNA, 75 bp, synthetic construct
  source 1..75: mol_type = other DNA
gctcattggtctgttattatgggtaaaaataagctggcagacgtttataaacggctgtatttactggtggtgtac

SEQ ID NO: 461408 - DNA, 75 bp, synthetic construct
  source 1..75: mol_type = other DNA
actctttggtctgatattatgggtaaaaataagctggcagacgtttataaacggctgtatttactggtggtgtac

SEQ ID NO: 461409 - DNA, 75 bp, synthetic construct
  source 1..75: mol_type = other DNA
gacctgccgattatccgggattctgaaatccagaacttctgtctgcacggcacggtcggggccggtaagtcggaa

SEQ ID NO: 461410 - DNA, 75 bp, synthetic construct
  source 1..75: mol_type = other DNA
gaaagaggcgaaggagtggggggaactgcgtcagcgtctgggctccggtcagtcttctgtcgtgtcctacttcct

SEQ ID NO: 461411 - DNA, 75 bp, synthetic construct
  source 1..75: mol_type = other DNA
tctctttggtctgttattatgggtaaaaataagctggcagacgtttataaacggctgtatttactggtggtgtac

SEQ ID NO: 461412 - DNA, 75 bp, synthetic construct
  source 1..75: mol_type = other DNA
tctcattggtctgatattatgggtaaaaataagctggcagacgtttataaacggctgtatttactggtggtgtac

SEQ ID NO: 461413 - DNA, 75 bp, synthetic construct
  source 1..75: mol_type = other DNA
actcgttggtctgttattatgggtaaaaataagctggcagacgtttataaacggctgtatttactggtggtgtac

SEQ ID NO: 461414 - DNA, 75 bp, synthetic construct
  source 1..75: mol_type = other DNA
agaaagagcacctgaaagccagcgagcagtattcctacggtgctgacccggtacgtgacggggtatcgaccggta

SEQ ID NO: 461415 - DNA, 75 bp, synthetic construct
  source 1..75: mol_type = other DNA
agaacaatgcttccgtgaagatgaccatcctctgacaacacagatattcatccgccgtaacggtcacttttatcc

SEQ ID NO: 461416 - DNA, 75 bp, synthetic construct
  source 1..75: mol_type = other DNA
tgaagagcaacaggttgctgaaagcatcgcactgactgatgacacgctggtgccattcctcgccggggaaacggt

SEQ ID NO: 461417 - DNA, 75 bp, synthetic construct
  source 1..75: mol_type = other DNA
aatgcccaatctggctccgcccgtgaccaccgttgaggctgccgtggcgtatcgccagcgtattcttgatgccgt

SEQ ID NO: 461418 - DNA, 75 bp, synthetic construct
  source 1..75: mol_type = other DNA
gtgaagacttcattaccgacagattttccggagaacttggtgacggcagttgaaaccaatgtgttgaggttgcac

SEQ ID NO: 461419 - DNA, 75 bp, synthetic construct
  source 1..75: mol_type = other DNA
ggagaacgtggtgacggcagttgaaaccaatgtgttgaggttgcatggacggttaagccgagaatacggtagtaa

SEQ ID NO: 461420 - DNA, 75 bp, synthetic construct
  source 1..75: mol_type = other DNA
ccgcgtgtatgaacgtgttggtgactcggatgaatatcgtccgattgctctcgatattgccggtgcgggggtgtg

SEQ ID NO: 461421 - DNA, 75 bp, synthetic construct
  source 1..75: mol_type = other DNA
ccgacggcgaacgctgggataatctggcatggcattactacggtgatgcactggcttacgaacgcattatcgccg

SEQ ID NO: 461422 - DNA, 75 bp, synthetic construct
  source 1..75: mol_type = other DNA
ggtactgccttccggtattcagctcatcattccggtcatttccgtcaataaaaccttatcggagatcccaccatg

SEQ ID NO: 461423 - DNA, 75 bp, synthetic construct
  source 1..75: mol_type = other DNA
ccgatggcgaacgctgggataacctggcatggcattactacggtgatgcgctggcttatgaacgcataatcgccg

SEQ ID NO: 461424 - DNA, 75 bp, synthetic construct
  source 1..75: mol_type = other DNA
cgaagagcagcaagttgctgagagtattgccctgacggatgacacactggtgcctttcctggctggggaaacggt

SEQ ID NO: 461425 - DNA, 75 bp, synthetic construct
  source 1..75: mol_type = other DNA
ctcaaacgaaacgtgcatcaacaagcactgcgtgaactggtcgccagtggttttgaacgcgtgtttctcggtacc

SEQ ID NO: 461426 - DNA, 75 bp, synthetic construct
  source 1..75: mol_type = other DNA
cggctgttttaatgccccaacggcgctgggcagttacgccactgtctttgaagaaatgaatgcgttacagcactt

SEQ ID NO: 461427 - DNA, 75 bp, synthetic construct
  source 1..75: mol_type = other DNA
ccgctacgtccggtgatggttttcatccccgagcaaaaacggcaaattgtcgcccaatttcggcagaactcgctg

SEQ ID NO: 461428 - DNA, 75 bp, synthetic construct
  source 1..75: mol_type = other DNA
accattggcaatgtgcccgtcgcaaagggacgtcagccggatacgccgaatcctggcatgcccatccagttttgt

SEQ ID NO: 461429 - DNA, 75 bp, synthetic construct
  source 1..75: mol_type = other DNA
cggaagtcagggcagtatgtacccgtttaacggctatgtttccaacgaattcagtccattacagacatcactgct

SEQ ID NO: 461430 - DNA, 75 bp, synthetic construct
  source 1..75: mol_type = other DNA
ctgaccgcgggtctgggaagtggttctactttccagatgatcgccgtcatctttcgccagataacaatttatcgg

SEQ ID NO: 461431 - DNA, 75 bp, synthetic construct
  source 1..75: mol_type = other DNA
cgcccaatgaggcccgtaaacgtgagaacctgccgccccttgccggcggtgatgcactgtatcttcagcagcaga

SEQ ID NO: 461432 - DNA, 75 bp, synthetic construct
  source 1..75: mol_type = other DNA
ttgtcagcttaagggcgcagcttaccgaagcgaaatataaccttgagcagaccgtcattcgcgcgccgagcaatg

SEQ ID NO: 461433 - DNA, 75 bp, synthetic construct
  source 1..75: mol_type = other DNA
caccgtcagggaatgattatgaacaccatcgggcagaacacggcggtctgttatgagtatccgtcgcccattctt

SEQ ID NO: 461434 - DNA, 75 bp, synthetic construct
  source 1..75: mol_type = other DNA
aatagggcgagatagcgttggtgccgtgacgttaatccccgaagatgaaaccgtaacgtgtccgataatggcatg

SEQ ID NO: 461435 - DNA, 75 bp, synthetic construct
  source 1..75: mol_type = other DNA
gcaatggggcttaacgcatccaaaggcaaaaaaacggcaatcgataaaatttatccgcgacattttttggcgaca

SEQ ID NO: 461436 - DNA, 75 bp, synthetic construct
  source 1..75: mol_type = other DNA
gatcgtgctgcgcttgaagccctgcctggtgtaggtcgtaaaacagccaacgtcgtattaaacactgcattcggc

SEQ ID NO: 461437 - DNA, 75 bp, synthetic construct
  source 1..75: mol_type = other DNA
tggagatacaatatttttaattaaatcacctgattcagaggagtggtcatcacaaaaagcttccaaagacgtaga

SEQ ID NO: 461438 - DNA, 75 bp, synthetic construct
  source 1..75: mol_type = other DNA
tcaccattactatcacagctggatgcactatttttccgcctattcgttaggacgtctctactggcaatcttctca

SEQ ID NO: 461439 - DNA, 75 bp, synthetic construct
  source 1..75: mol_type = other DNA
ttgatttatacccaattcgttgcccaaaccgctatgtgctgtggggaagggggaatcaaagcctgggattatgtt

SEQ ID NO: 461440 - DNA, 75 bp, synthetic construct
  source 1..75: mol_type = other DNA
accgtggcgtatcaaacctcagccgaaccggcgaaagtggctcaggccgacaacacctttgctaaagaaagcgga

SEQ ID NO: 461441 - DNA, 75 bp, synthetic construct
  source 1..75: mol_type = other DNA
cggttgcagccagccaacaggtgccgattgaagtcttcttgctggcgtcaaaactgggtaactccgaagcgctgg

SEQ ID NO: 461442 - DNA, 75 bp, synthetic construct
  source 1..75: mol_type = other DNA
ttcttgccgcactggcattcatcgcttttcaggcgcaggcggtgaacgtcaccgtggcgtatcaaacctcagccg

SEQ ID NO: 461443 - DNA, 75 bp, synthetic construct
  source 1..75: mol_type = other DNA
aaataaaaagtgccgggcatggcggaaataaacattatcagaaactcctggaaaatatgtggaaagaatgtgaaa

SEQ ID NO: 461444 - DNA, 75 bp, synthetic construct
  source 1..75: mol_type = other DNA
gtgggcaacaacattatccacaaaagccgggaaacacagcgctggctgaaggagaacccgaagttcaggggcatt

SEQ ID NO: 461445 - DNA, 75 bp, synthetic construct
  source 1..75: mol_type = other DNA
atgtcagcccatctaactactgattctttaaatcaatggcttagtgtgagctctcttgctgcagttatcgtaggc

SEQ ID NO: 461446 - DNA, 75 bp, synthetic construct
  source 1..75: mol_type = other DNA
atgaggggaaaatatgcgaaccataaatgcctcatcttcagcaatgcagccggcatccgaacaggacgatatgta

SEQ ID NO: 461447 - DNA, 75 bp, synthetic construct
  source 1..75: mol_type = other DNA
gaaactggttcgccagcaaaacggctggacgcagagcgagttggcgaaaaaaatcggcattaagcaggcgacaat

SEQ ID NO: 461448 - DNA, 75 bp, synthetic construct
  source 1..75: mol_type = other DNA
ttctattttcctaatgtgctgaagtatgatcctgatcagttacggcagcaattagaagacccagatggagcgaat

SEQ ID NO: 461449 - DNA, 75 bp, synthetic construct
  source 1..75: mol_type = other DNA
cgccgccgggtgctcctgtctattctcagctttctttgcggccttctcttttacaaaccagcagcatcgattctt

SEQ ID NO: 461450 - DNA, 75 bp, synthetic construct
  source 1..75: mol_type = other DNA
cgatcacgcaggattcttttgagaagggcattgtgttttctgccggtgctttcgtatcagcaatcgttgctgtcc

SEQ ID NO: 461451 - DNA, 75 bp, synthetic construct
  source 1..75: mol_type = other DNA
cgctcgctggtgcggtaatttttgttacctctgctgtcgagtatccgatccgccgccgggttctcctgtcgatgc

SEQ ID NO: 461452 - DNA, 75 bp, synthetic construct
  source 1..75: mol_type = other DNA
agggtgtctttttaactcttttaaattctggtttaatgacaatatttacacctctgctattgtaacatcagtcat

SEQ ID NO: 461453 - DNA, 75 bp, synthetic construct
  source 1..75: mol_type = other DNA
attttctgcattacatctacaatatactgactttcgtacatttttgatgctctttctgatatcgttagttcttat

SEQ ID NO: 461454 - DNA, 75 bp, synthetic construct
  source 1..75: mol_type = other DNA
atattttcttccgtacttcttgttcctgtatatgaagagattgtatttcgagggtgtctttttaactcttttaaa

SEQ ID NO: 461455 - DNA, 75 bp, synthetic construct
  source 1..75: mol_type = other DNA
gcattatttcttgctgaatttctaattcttgttccactgtattttattttcttccgaaaaagagaaggattagga

SEQ ID NO: 461456 - DNA, 75 bp, synthetic construct
  source 1..75: mol_type = other DNA
cacaggctgacctggcctttgatatggaagaaaaggacacccaccttttttccgaactgagcaaacgccgccttg

SEQ ID NO: 461457 - DNA, 75 bp, synthetic construct
  source 1..75: mol_type = other DNA
ttatctggccttttatttttaaaaactattccgtgcgtgattttgcagagtttctggaaatttacggactcccca

SEQ ID NO: 461458 - DNA, 75 bp, synthetic construct
  source 1..75: mol_type = other DNA
ggcagccgtttgattttgacgatgaaatgcagacccgcagcgatgagctggcaatggtcatgaagcgcacgcagg

SEQ ID NO: 461459 - DNA, 75 bp, synthetic construct
  source 1..75: mol_type = other DNA
cggttaatacgccgactgccgggttaattcccaatggtgcaacggtggagcgcgagatccccagcgattttcaga

SEQ ID NO: 461460 - DNA, 75 bp, synthetic construct
  source 1..75: mol_type = other DNA
tttcgtcgattggcgatgccaaaagtattcgtggcggcactttgttgctgacccagttgcacggcgcggatggcg

SEQ ID NO: 461461 - DNA, 75 bp, synthetic construct
  source 1..75: mol_type = other DNA
cgcgggcagaccattgatgtcactgtttcgtcgattggcgatgccaaaagtattcgtggcggcactttgttgctg

SEQ ID NO: 461462 - DNA, 75 bp, synthetic construct
  source 1..75: mol_type = other DNA
tccgtcgcctgccgcgtatttgtttccagaccaaagaaccgggggatatcaccaaaataaccagtgcggtgatgc

SEQ ID NO: 461463 - DNA, 75 bp, synthetic construct
  source 1..75: mol_type = other DNA
ctcggcggcacgctgaccacggaagccggagacaaaggcgcgcgctcgctgggtgaggtgcataacgaggtgcgc

SEQ ID NO: 461464 - DNA, 75 bp, synthetic construct
  source 1..75: mol_type = other DNA
ggcgcaacggggcttgtcagaacgcttatctggccgttcatcttcaaaaactattccgtgcgcgatctggcggag

SEQ ID NO: 461465 - DNA, 75 bp, synthetic construct
  source 1..75: mol_type = other DNA
ccagagttaacgtcaatgagtggagtctggataatgtagagtgggttaatgttactgatcagatttatcagggcg

SEQ ID NO: 461466 - DNA, 75 bp, synthetic construct
  source 1..75: mol_type = other DNA
ttgcaatttactctttacaccaacaatttatcttctactcaacgtctttatgctgacgctgggcgcattactgct

SEQ ID NO: 461467 - DNA, 75 bp, synthetic construct
  source 1..75: mol_type = other DNA
atttgtgatcctacttgtgggtctggttctcttttaattaccctaggggaaaagataaaaaaatcctttaaaagc

SEQ ID NO: 461468 - DNA, 75 bp, synthetic construct
  source 1..75: mol_type = other DNA
cggtggtaaaaagaaaaatgccggaagtaaatcagaagacttatatacaattgtcagccataggcaataatataa

SEQ ID NO: 461469 - DNA, 75 bp, synthetic construct
  source 1..75: mol_type = other DNA
gttggaacgcatatcagtttttcgctgggatacggctggccgacaaggcatcctttaaccggcacgtccgggcta

SEQ ID NO: 461470 - DNA, 75 bp, synthetic construct
  source 1..75: mol_type = other DNA
atctggcagattatcaatttcgccagatggtttcaggttggttggcagatcttatgcttccctggctgggtgttt

SEQ ID NO: 461471 - DNA, 75 bp, synthetic construct
  source 1..75: mol_type = other DNA
atttatcttctactcaacgtctttatgctgacgctgggggcgataatcctatttttctctggtcgcgtgtgggcc

SEQ ID NO: 461472 - DNA, 75 bp, synthetic construct
  source 1..75: mol_type = other DNA
gagccagaagggaaacggctggcggaaatcgcccaaaaacagccgctgaccctgctctactcggcaaaaaatacc

SEQ ID NO: 461473 - DNA, 75 bp, synthetic construct
  source 1..75: mol_type = other DNA
cgcaaagcctttcacggcgaagcgatcgattttaaaacctttcgcgaacaatatattgcagaactggcgcaacac

SEQ ID NO: 461474 - DNA, 75 bp, synthetic construct
  source 1..75: mol_type = other DNA
ccatcgccaacaaacagccgctgaccctactctactcggcaaaaaacaccacgcagaaccatgcgctggtactgg

SEQ ID NO: 461475 - DNA, 75 bp, synthetic construct
  source 1..75: mol_type = other DNA
ggtcgtcagatggccagcctctttgaaccggaggttgcctccggagaagatgtgactcaggctgaacagccacaa

SEQ ID NO: 461476 - DNA, 75 bp, synthetic construct
  source 1..75: mol_type = other DNA
aagggaagcagaaggtcgccagatggccagcctcttcgaaccggaggttgcctccggagaagacgtgactcaggc

SEQ ID NO: 461477 - DNA, 75 bp, synthetic construct
  source 1..75: mol_type = other DNA
caacagccgcaacagccgcaacagccgcaacagccggtgtctcctgccatcaacgataagaagtcagattcaggt

SEQ ID NO: 461478 - DNA, 75 bp, synthetic construct
  source 1..75: mol_type = other DNA
gggtattgagccgtatgcgcgtacagaaaagattaagacctttacgttacgctatccagaatcgctgagtgaacg

SEQ ID NO: 461479 - DNA, 75 bp, synthetic construct
  source 1..75: mol_type = other DNA
atattatgatggcattctgtatctgacgaccagggggacattaagtactcaacccggtagttcattgcacagaag

SEQ ID NO: 461480 - DNA, 75 bp, synthetic construct
  source 1..75: mol_type = other DNA
atgacagatatcaccgcaaatgttgtggtaagcatgccttcgcaactcttcactatggcgcgttcttttaaagca

SEQ ID NO: 461481 - DNA, 75 bp, synthetic construct
  source 1..75: mol_type = other DNA
aaggcgctggatgtcgagcaaattcgccatcagcttgagcacatcctcaatgaagaacatatcgctcacgagccg

SEQ ID NO: 461482 - DNA, 75 bp, synthetic construct
  source 1..75: mol_type = other DNA
ttgtggtaagcatgccttcgcaactcttcactatggctcgttcttttaaagccgtagctaatggaaagatttata

SEQ ID NO: 461483 - DNA, 75 bp, synthetic construct
  source 1..75: mol_type = other DNA
ccccaccagcattgaacgccttgccggatataaagacgcgctggcgcagcatggtattgcactcaatgaaaaact

SEQ ID NO: 461484 - DNA, 75 bp, synthetic construct
  source 1..75: mol_type = other DNA
acatcattgagcgcgttgaaataacgccagcaggatctagatggggggtcagacctgatctcttattctatatcg

SEQ ID NO: 461485 - DNA, 75 bp, synthetic construct
  source 1..75: mol_type = other DNA
atgacgctgctgcgcgcgctggcgttccatccgcgtatgccgctgcctgagccagaagtgccacgccagtccttt

SEQ ID NO: 461486 - DNA, 75 bp, synthetic construct
  source 1..75: mol_type = other DNA
gaagaacgaaaacaaatgaagcattggtgaggttgcaggatcatttgcaacgttatccagatttttataacgaag

SEQ ID NO: 461487 - DNA, 75 bp, synthetic construct
  source 1..75: mol_type = other DNA
aggcagaggagaacgccgcattcacgacaccgttactgacagtcagcgataagctgactgtggaaggtaaaatca

SEQ ID NO: 461488 - DNA, 75 bp, synthetic construct
  source 1..75: mol_type = other DNA
gccggaccgccgtatgggcgttgagatgacgctgctgcgcgcgctggcgttccatccacgtatgcctctgcctga

SEQ ID NO: 461489 - DNA, 75 bp, synthetic construct
  source 1..75: mol_type = other DNA
gcgcccgtcgcgccaacggcggtaatgacgtcatcgcaagtgccgccgcagccgcaatcagcgccgcagcaggta

SEQ ID NO: 461490 - DNA, 75 bp, synthetic construct
  source 1..75: mol_type = other DNA
tacgcttgacgacgatcaggcgctgtcgctggttgaagcgatggtcgaggccaacggcgagcgcgtaatggcgct

SEQ ID NO: 461491 - DNA, 75 bp, synthetic construct
  source 1..75: mol_type = other DNA
cgcggcacggtgaaagaatttggcctgtgggatgtggttcagcaaggcaaaatttcagtgtatgtcgcggatgca

SEQ ID NO: 461492 - DNA, 75 bp, synthetic construct
  source 1..75: mol_type = other DNA
acctgaaaaatgacaaagttgcgattgtcggattcagtacgccaaacgtgatgcgtccatatgtggaacgcggca

SEQ ID NO: 461493 - DNA, 75 bp, synthetic construct
  source 1..75: mol_type = other DNA
ggcgcagcgggcctacaataacggtatggcggcctccggttttggaacgggaggcaaataccagcaggcgataca

SEQ ID NO: 461494 - DNA, 75 bp, synthetic construct
  source 1..75: mol_type = other DNA
gagtatgagattttatttgtcgataaaaatatagacgtaaaaacgctttcatccatactaattaaatatgggaag

SEQ ID NO: 461495 - DNA, 75 bp, synthetic construct
  source 1..75: mol_type = other DNA
agaaaaagatgatgttgaatcgcgtattgaaaaactggagtgctatatcgctgaattgaaaaaaagcaccccaac

SEQ ID NO: 461496 - DNA, 75 bp, synthetic construct
  source 1..75: mol_type = other DNA
ggcggtctggtgggcgagtcgggggcttcagcggtagccggcgcacagtcgggtaagacaacggttgagaataat

SEQ ID NO: 461497 - DNA, 75 bp, synthetic construct
  source 1..75: mol_type = other DNA
atgaagaaaaaatacgaactgggtgttaaagggataaataattatccggataagattactgttactgtggcactg

SEQ ID NO: 461498 - DNA, 75 bp, synthetic construct
  source 1..75: mol_type = other DNA
accgggccgactttaaaacggaacatcagagtgcagggctcagtaccggtggcagtgttgccggaaatttcctgg

SEQ ID NO: 461499 - DNA, 75 bp, synthetic construct
  source 1..75: mol_type = other DNA
tgaaatctgtgatcgactggcgaagatcgcagctttttccgcagcagatacgcctcacaagaaagatattggttt

SEQ ID NO: 461500 - DNA, 75 bp, synthetic construct
  source 1..75: mol_type = other DNA
caatattgctaccgtgggatgtgttccgcaaagacagctcagtgcgctcgcgcgttgaaaaaagcgaagccgacg

SEQ ID NO: 461501 - DNA, 75 bp, synthetic construct
  source 1..75: mol_type = other DNA
tattgctgaaattatcaaacagaccaccccggacggtgcgggacgtgtggcaactcatgcagtagtgaatgcagc

SEQ ID NO: 461502 - DNA, 75 bp, synthetic construct
  source 1..75: mol_type = other DNA
gtgtaatgattgccggggcatggtatctggggtctgctgcgtcagcaggtaaagttcttggtggcgggcttcttg

SEQ ID NO: 461503 - DNA, 75 bp, synthetic construct
  source 1..75: mol_type = other DNA
tacaatagcgctcctattaaagatgtttctaaaatatacggaaaaaaagataggtatagagtccttgttatagga

SEQ ID NO: 461504 - DNA, 75 bp, synthetic construct
  source 1..75: mol_type = other DNA
atgttaccaacaagtgcttcttcagcaaatctttattcatggatgtatatatcgggaaaaggtaacccttcgact

SEQ ID NO: 461505 - DNA, 75 bp, synthetic construct
  source 1..75: mol_type = other DNA
acctgttggcaatatgggtattatgaattatcgcgctggtttatcgttaaaacacgatgcggtgaataaagcgcg

SEQ ID NO: 461506 - DNA, 75 bp, synthetic construct
  source 1..75: mol_type = other DNA
attctgcgtggttcctgtttgacaccaccaaaccggtgaaaccgctgatttatcagctgcgtaaaaagcctgttt

SEQ ID NO: 461507 - DNA, 75 bp, synthetic construct
  source 1..75: mol_type = other DNA
agagtagtaattcaaccgggattatgggctttagcattgaaaattgataacaatgaaccgatcctgaatatagga

SEQ ID NO: 461508 - DNA, 75 bp, synthetic construct
  source 1..75: mol_type = other DNA
cgttggcagtcattgacgaagtgattgtccgcgcgggggactatatcgacattggtacgcctctttttggcggat

SEQ ID NO: 461509 - DNA, 75 bp, synthetic construct
  source 1..75: mol_type = other DNA
gtcgtattaaacactgcattcggctggccgactattgctgtcgacacgcacattttccgcgtttgtaatcgtact

SEQ ID NO: 461510 - DNA, 75 bp, synthetic construct
  source 1..75: mol_type = other DNA
tgggatgcattccgcaaagacagttcagtgcgctcacgcgtggaaaaaagtgaagccgacgcgcaggccatcaat

SEQ ID NO: 461511 - DNA, 75 bp, synthetic construct
  source 1..75: mol_type = other DNA
tttaagcaaaaaactgaaccgcagcaaattgaacttgattcggcatgcaatcctcatgttagcggagtctgagga

SEQ ID NO: 461512 - DNA, 75 bp, synthetic construct
  source 1..75: mol_type = other DNA
taaataatcagaatataaccccggttaatcggatgctattagcggcaatatattgcgaagctgggaggtatttat

SEQ ID NO: 461513 - DNA, 75 bp, synthetic construct
  source 1..75: mol_type = other DNA
cgccggtaaatcggtgtccaacaaaggcaccaaaaaactcaaagttggctcgcttgccgaggcgaaagcctccta

SEQ ID NO: 461514 - DNA, 75 bp, synthetic construct
  source 1..75: mol_type = other DNA
caggcgaaaggtgcgggccagtccgctgcagaactgcctgccgatatcgtcttcgctctcctgagcaaaggtttc

SEQ ID NO: 461515 - DNA, 75 bp, synthetic construct
  source 1..75: mol_type = other DNA
agaaaacgactacagctggctaagccggttcccgaaaatgcgtgagtggattggcgacaaggtggttaaagcgct

SEQ ID NO: 461516 - DNA, 75 bp, synthetic construct
  source 1..75: mol_type = other DNA
taccagcaggcgatacaggccgcaacggcagcagtacaggggctggccggcggtaatctgagtgcagccctggca

SEQ ID NO: 461517 - DNA, 75 bp, synthetic construct
  source 1..75: mol_type = other DNA
atgaggcggtgtggcagctggcgtggaagaagtcagggccggagatggcttcgctggaagcctggctggaagaac

SEQ ID NO: 461518 - DNA, 75 bp, synthetic construct
  source 1..75: mol_type = other DNA
caggacatcctgaacagcttccgtaaaaacggttttgagctgatttcaccgcgctttaaccacatgcgcaatttc

SEQ ID NO: 461519 - DNA, 75 bp, synthetic construct
  source 1..75: mol_type = other DNA
agagaacagggcacgtattgatgacgtggtggatttcctgaaaaacgccagtgacagcgagcagtatgccgagtc

SEQ ID NO: 461520 - DNA, 75 bp, synthetic construct
  source 1..75: mol_type = other DNA
cggcagcagtacaggggctggccggcggtaatctgagtgcagccctggcaggtggtgcagtaccgtatattgctg

SEQ ID NO: 461521 - DNA, 75 bp, synthetic construct
  source 1..75: mol_type = other DNA
cttacggccggtattttaactctgatgagccgtccctgcgggatgatgccagaatggtggtgctggagctgggtg

SEQ ID NO: 461522 - DNA, 75 bp, synthetic construct
  source 1..75: mol_type = other DNA
cgatgagccgtccctgcgggatgatgcgaaaatggtggtgctggagctgggcggactggaagaccgtccgtcact

SEQ ID NO: 461523 - DNA, 75 bp, synthetic construct
  source 1..75: mol_type = other DNA
aacatttcgcggggaaattcagttattcaacaatatttattactcgtatgaactggccgcagagcacgggaatga

SEQ ID NO: 461524 - DNA, 75 bp, synthetic construct
  source 1..75: mol_type = other DNA
ttcagaaacatctatttctcaacagaactggcagcagagcacggaaatgaagtcagggtttgttacgacattcac

SEQ ID NO: 461525 - DNA, 75 bp, synthetic construct
  source 1..75: mol_type = other DNA
cggccagaagtgacgctggttatggatgcggggcagcgctttgttgtgggctggtcgctgtccctgtcggagaac

SEQ ID NO: 461526 - DNA, 75 bp, synthetic construct
  source 1..75: mol_type = other DNA
tccggagtccctcttgcagacatcatgcgctttaccggggtgtcagaagaagagttggctgcggcgagccagtaa

SEQ ID NO: 461527 - DNA, 75 bp, synthetic construct
  source 1..75: mol_type = other DNA
gtatatccatgacagtaaaatacttgaacgagatggagttaaagagtttgtttcgcaaatatccactcacgattg

SEQ ID NO: 461528 - DNA, 75 bp, synthetic construct
  source 1..75: mol_type = other DNA
ctcgctggtggttatcgctggtgtcctgtggcgcatcttagtggcgcagagagcttttcggcgtaagcgggagca

SEQ ID NO: 461529 - DNA, 75 bp, synthetic construct
  source 1..75: mol_type = other DNA
atcctgaaagaaggtatcgaaaaaggtatcgctaactccatcctgataaaattcaaccagatcggttctctgacc

SEQ ID NO: 461530 - DNA, 75 bp, synthetic construct
  source 1..75: mol_type = other DNA
cctgtgtgagaacatgggcggggtatatctggacggtgaaaccctgcgctttaatccgtttgcgaacatcaccga

SEQ ID NO: 461531 - DNA, 75 bp, synthetic construct
  source 1..75: mol_type = other DNA
aacaaggaaaccgcgctgcaggtggagcaggacatcctgaacagtttccgcaagaacgggtttgaactgatttcc

SEQ ID NO: 461532 - DNA, 75 bp, synthetic construct
  source 1..75: mol_type = other DNA
ggttgcggtgatgttcagcctcattatttacatcgagaacaggatgtaccgcacgccgcgtaacctcaaaaaact

SEQ ID NO: 461533 - DNA, 75 bp, synthetic construct
  source 1..75: mol_type = other DNA
aataacccacttgaggccgtcactcaggcggttaactccctcgtcacagcactgaaactgcctgacgaatcagca

SEQ ID NO: 461534 - DNA, 75 bp, synthetic construct
  source 1..75: mol_type = other DNA
cacgggaaattatgacgaagcggttatcgagcatattaacgacaacatgaatgatgccacccggcagattgcggc

SEQ ID NO: 461535 - DNA, 75 bp, synthetic construct
  source 1..75: mol_type = other DNA
ccgtgcggcatggggtaactcctcctacaaaattatcctcaaacagagtgcgaaggagttcgcgaaatacaacca

SEQ ID NO: 461536 - DNA, 75 bp, synthetic construct
  source 1..75: mol_type = other DNA
aatgacagcaataaacctgcttcagttgattctggcgaagacgtacgtcaaacgcgaagagtttgatttgttgcg

SEQ ID NO: 461537 - DNA, 75 bp, synthetic construct
  source 1..75: mol_type = other DNA
atgcggccatgcctgcaggtcgctccaataaggatattggtgtcatcatgaagccggagggatcggttaaaatat

SEQ ID NO: 461538 - DNA, 75 bp, synthetic construct
  source 1..75: mol_type = other DNA
atgccgctatgccagctggtcgcagcagcactgatatgggtgtgatcatgaagccggaaggctcgatgaaaatct

SEQ ID NO: 461539 - DNA, 75 bp, synthetic construct
  source 1..75: mol_type = other DNA
ggatgcactgtacccgaaaaagcgccagctggacccgtactccgacctgaattaccagtgtgtggatgacagttt

SEQ ID NO: 461540 - DNA, 75 bp, synthetic construct
  source 1..75: mol_type = other DNA
cggagtgccgttctgcatccatctgatgtccagtcagcttgttggtgacagaattgaatacgggctgcgtgagtt

SEQ ID NO: 461541 - DNA, 75 bp, synthetic construct
  source 1..75: mol_type = other DNA
gctgtacagcagggattcatcagatacaacccggcacttgatctgaatggtatcgtggctcctgtcgcggtgcaa

SEQ ID NO: 461542 - DNA, 75 bp, synthetic construct
  source 1..75: mol_type = other DNA
tcgcaggctccgcgcaaaagttgatgatccttttcctgaaaagctaatcgccacaatccgggggatgggctattc

SEQ ID NO: 461543 - DNA, 75 bp, synthetic construct
  source 1..75: mol_type = other DNA
aaatccccacatcaacgcccacctccgacgcgctttctaaagcattgaaaaaacgcggttttaaattcgttggat

SEQ ID NO: 461544 - DNA, 75 bp, synthetic construct
  source 1..75: mol_type = other DNA
cgacaatttgttactcctttatgcaagcatgcgggttggtgaacgatcatattgttggctgttgttgccatcccg

SEQ ID NO: 461545 - DNA, 75 bp, synthetic construct
  source 1..75: mol_type = other DNA
atgcatacaggggatttgtgtttttttacaggtgccagcctgtttatcgtgggggttgttggttatttctttaca

SEQ ID NO: 461546 - DNA, 75 bp, synthetic construct
  source 1..75: mol_type = other DNA
gagagaaaacgcgtcgccgttttggcgcgttaatattgctgtttgatgaggcagaggaagagctggaagggcatt

SEQ ID NO: 461547 - DNA, 75 bp, synthetic construct
  source 1..75: mol_type = other DNA
atgttccggcgcggctctccgtggatatgctatctctccctctccgttttttctggtttttttatccccgcattt

SEQ ID NO: 461548 - DNA, 75 bp, synthetic construct
  source 1..75: mol_type = other DNA
gatcctctcagggcatttttgatatgggtactgtcagaatccatcggcgctctggcactggtgccgctgggattg

SEQ ID NO: 461549 - DNA, 75 bp, synthetic construct
  source 1..75: mol_type = other DNA
caaaccaacaaagcgctctgccagtttctcgggtacagtcaggaagagctgcgcggactcaccattttcagcaac

SEQ ID NO: 461550 - DNA, 75 bp, synthetic construct
  source 1..75: mol_type = other DNA
ttccgcctctgttgggggctgtctcttatacacaaatccccacccggggatttgtgatgtctgtcagtctgcttt

SEQ ID NO: 461551 - DNA, 75 bp, synthetic construct
  source 1..75: mol_type = other DNA
aaatccctacttcaactcccgcctccgatgcgctctctaaggccttaaaaaagcgcggctttaagtttgttggca

SEQ ID NO: 461552 - DNA, 75 bp, synthetic construct
  source 1..75: mol_type = other DNA
cgtctggcactcggcagcgccattgttccgcctctgttagggggtgttctggttgtcctgctgacgcccggagac

SEQ ID NO: 461553 - DNA, 75 bp, synthetic construct
  source 1..75: mol_type = other DNA
gaatgcgtgctgtgcggcggccggatggtataccaccgggccattgcggggctgaatgtatcagggctgaagaaa

SEQ ID NO: 461554 - DNA, 75 bp, synthetic construct
  source 1..75: mol_type = other DNA
cctgattaaagactttaaagcagcagacccgaacggtttcctggtttatttctctgaccacggtgaagaggttta

SEQ ID NO: 461555 - DNA, 75 bp, synthetic construct
  source 1..75: mol_type = other DNA
gtgctgactgtcagattctggtttctttgtggtgcggttatgaatcagtgtgccgtgcccgttgtttcaatgaca

SEQ ID NO: 461556 - DNA, 75 bp, synthetic construct
  source 1..75: mol_type = other DNA
atgagtgaagattatttgaaaatgtttacaggtattgttctgttaatatttatcattgttgccggttatttcttt

SEQ ID NO: 461557 - DNA, 75 bp, synthetic construct
  source 1..75: mol_type = other DNA
cgctggattggtaacccgtataagaaaaatgcgctgatcgattacgacactctgccgtatggcgatcaggtgggt

SEQ ID NO: 461558 - DNA, 75 bp, synthetic construct
  source 1..75: mol_type = other DNA
gctgccctccgggttgttgttactgatcccggttatcgaggctgaagaagccagtacagaagaggatattgcccc

SEQ ID NO: 461559 - DNA, 75 bp, synthetic construct
  source 1..75: mol_type = other DNA
aaaagagattaacctccagttcgattgtgaaaatattaccgatggcattcaggtatctctaaggattgaaggaaa

SEQ ID NO: 461560 - DNA, 75 bp, synthetic construct
  source 1..75: mol_type = other DNA
cgatcagtgagtacgggaatgtcgaaggcgtaaaagctatcaagggaatttacagcagcgctgttgatgttaatg

SEQ ID NO: 461561 - DNA, 75 bp, synthetic construct
  source 1..75: mol_type = other DNA
tggatcaccaaccagcaaacgatgaccgcccgcaacaccatgctgacggtattttcgcgccagaccgacaagcag

SEQ ID NO: 461562 - DNA, 75 bp, synthetic construct
  source 1..75: mol_type = other DNA
aacccgtatttagctggaaagccctggggtgggcgctcctctatttttggttcttttcttcgttactgcaggccg

SEQ ID NO: 461563 - DNA, 75 bp, synthetic construct
  source 1..75: mol_type = other DNA
gctgtggacgtcggaaaaatggcaagcgactcatccccgtgatttctcgcaggatgttgatcgtaaatacagcct

SEQ ID NO: 461564 - DNA, 75 bp, synthetic construct
  source 1..75: mol_type = other DNA
ctgaaggaccctgcgccgaagaaactgatcatcgttcatctgctgggtacgcatatcaagtacaagtaccgttat

SEQ ID NO: 461565 - DNA, 75 bp, synthetic construct
  source 1..75: mol_type = other DNA
attaaacgcagaagagctggagtcatataacgattatgacaacgctaacctgtataacgatcatgtggttgccag

SEQ ID NO: 461566 - DNA, 75 bp, synthetic construct
  source 1..75: mol_type = other DNA
gctgtggacctcggaaaaatggcaggccgcacacccgcgtgacttctcacaggatgtgaatcgcaaatacagcag

SEQ ID NO: 461567 - DNA, 75 bp, synthetic construct
  source 1..75: mol_type = other DNA
tcagacgctgtcccccatctttgacagggaaaaagagcagcagcgactgcagcaggcgcaactcattggtgagat

SEQ ID NO: 461568 - DNA, 75 bp, synthetic construct
  source 1..75: mol_type = other DNA
ctttccggtggatccacgccgcgcgaaagtatgccgcagatggtgcaggacattatgctgaccatgccgacgaca

SEQ ID NO: 461569 - DNA, 75 bp, synthetic construct
  source 1..75: mol_type = other DNA
tttacgcggatttcgcgataagcaggctgaactgaaactctacgcgcgtcattactcagtggaaaattgcacaga

SEQ ID NO: 461570 - DNA, 75 bp, synthetic construct
  source 1..75: mol_type = other DNA
ctgtggtgctgattttggatttgacccctatatcagtgatgtaccagatgttcaatgtgatctgaacacgacaaa

SEQ ID NO: 461571 - DNA, 75 bp, synthetic construct
  source 1..75: mol_type = other DNA
aatcgtctggccgcagttcctgacgctgatagcgattggcggcgcgtttttcaccatcgcactgctgcgattcag

SEQ ID NO: 461572 - DNA, 75 bp, synthetic construct
  source 1..75: mol_type = other DNA
aatcgtctggccgcagttcctgacgctgatggcaattggcggcgcgtttttcaccatcgcactgctgcgattcag

SEQ ID NO: 461573 - DNA, 75 bp, synthetic construct
  source 1..75: mol_type = other DNA
tgccgataacgccgtttgagatcatgatggcgaaggtctggtcgatggggctggtggtgctggtggtgtcgggat

SEQ ID NO: 461574 - DNA, 75 bp, synthetic construct
  source 1..75: mol_type = other DNA
tgacacaagctgaaacaggcgccatagtaggtcgcataggtgatgcatcaaatcggcttagcgaacacacccgag

SEQ ID NO: 461575 - DNA, 75 bp, synthetic construct
  source 1..75: mol_type = other DNA
ggaaacaacgggaacaaatcgcagcggccagtgaaggtctgaccctagagcgttaccgagcaatgcacccggctt

SEQ ID NO: 461576 - DNA, 75 bp, synthetic construct
  source 1..75: mol_type = other DNA
gactgcatccgggcgatgctaatagtgttatgagccaacttgcgacgatgcttggcgcacctgtcccgatagtcg

SEQ ID NO: 461577 - DNA, 75 bp, synthetic construct
  source 1..75: mol_type = other DNA
atggaattagttaatacattatttgcaagccttgccggtactgatcccttcacaggcgtggatattacgattgcc

SEQ ID NO: 461578 - DNA, 75 bp, synthetic construct
  source 1..75: mol_type = other DNA
cgagtgtagctcacgcagaggaagcagctacagctcttgatggaattggccaacgcgttaacgaaattaccgaca

SEQ ID NO: 461579 - DNA, 75 bp, synthetic construct
  source 1..75: mol_type = other DNA
caatgtacttacagttgagcagcaggcagagacagatcaaatagcaacggcagtaaaccaaatggtggcaagcat

SEQ ID NO: 461580 - DNA, 75 bp, synthetic construct
  source 1..75: mol_type = other DNA
acaacattaccatgctggcgattgtattgaccggatcggcactgatccgcgagcgtgaacacggcacggtggaac

SEQ ID NO: 461581 - DNA, 75 bp, synthetic construct
  source 1..75: mol_type = other DNA
gaagaagtgaacgccgatcgcaatgtttctaataacgccaaaaatcgccagatcgtgctgaatctttacgagaaa

SEQ ID NO: 461582 - DNA, 75 bp, synthetic construct
  source 1..75: mol_type = other DNA
gggatcttcgatattaaagacgcgatcaaccaggttgctgaccgcctgaacatctccaaacacactgtctatctc

SEQ ID NO: 461583 - DNA, 75 bp, synthetic construct
  source 1..75: mol_type = other DNA
ggtctgctgtgcatcaatatgaatcttgatgttcccttctcgcagattatgagcacttttgtgccgccagaaacc

SEQ ID NO: 461584 - DNA, 75 bp, synthetic construct
  source 1..75: mol_type = other DNA
tttcgatagtgatactaatacggtggatgtcgctattcgcaggctccgcgcaaaagttgatgatccttttcctga

SEQ ID NO: 461585 - DNA, 75 bp, synthetic construct
  source 1..75: mol_type = other DNA
ctattacaaccctgacagcaggtgttgtgaatggttctgctcttgatgaggcaggaaaaacagttagcgattcca

SEQ ID NO: 461586 - DNA, 75 bp, synthetic construct
  source 1..75: mol_type = other DNA
acctggtgcacgaacaggtgattagtccgctacacagccaccttacacgcctgattgccgcctggaccggctgcg

SEQ ID NO: 461587 - DNA, 75 bp, synthetic construct
  source 1..75: mol_type = other DNA
cctgattatgcacggcgtggaagcgccggatattcactatcaggacaccatgagccagagcttcagcactaactt

SEQ ID NO: 461588 - DNA, 75 bp, synthetic construct
  source 1..75: mol_type = other DNA
agatccgaaggtgatattgaagcggttaaaagatctggaaaaagagattctggcggatctggatgagctggaggg

SEQ ID NO: 461589 - DNA, 75 bp, synthetic construct
  source 1..75: mol_type = other DNA
cccgaaaaggcaacgcgacggccagcaccaagcaaacaggggcaaagggcgcgggtccggctgccggagctgatg

SEQ ID NO: 461590 - DNA, 75 bp, synthetic construct
  source 1..75: mol_type = other DNA
aaaccagtgagttggatttactggatcaacgtcctttcgaccagaccgattttgatattctgaaatcctacgaag

SEQ ID NO: 461591 - DNA, 75 bp, synthetic construct
  source 1..75: mol_type = other DNA
aaatcaatactcaggacgcattctggggagcggtgaataatacgctgggaggatggctggataaaacaggtgttg

SEQ ID NO: 461592 - DNA, 75 bp, synthetic construct
  source 1..75: mol_type = other DNA
ctgcgcgtgtcgggggttattgattttaacgatgaagctattctgacccgtatttttcagcttgcggaggcaaca

SEQ ID NO: 461593 - DNA, 75 bp, synthetic construct
  source 1..75: mol_type = other DNA
atgagatgctcctggattacagcgatgaagaacaaaaaaattaagacctttttcactagtgatcacatctattgt

SEQ ID NO: 461594 - DNA, 75 bp, synthetic construct
  source 1..75: mol_type = other DNA
taagttggatgcgtccggtgccagcaaatctacgaattcaaacgtggcagaaatcttcaaccaggtactgatgat

SEQ ID NO: 461595 - DNA, 75 bp, synthetic construct
  source 1..75: mol_type = other DNA
cgcgccggggctgaccgggcaacactggctggagggcgaccacacggtgctgatatacggcggcaggccatcagc

SEQ ID NO: 461596 - DNA, 75 bp, synthetic construct
  source 1..75: mol_type = other DNA
tgtcatccggcattctggaaaaagtgaaggaaaagcggatgaacctctccgtcctgacgtcatcgggcatcatcc

SEQ ID NO: 461597 - DNA, 75 bp, synthetic construct
  source 1..75: mol_type = other DNA
acatcacatatttacgtacggatgaaggctggccgtatctggctgtggtcacgtgccattattggctggtcaatg

SEQ ID NO: 461598 - DNA, 75 bp, synthetic construct
  source 1..75: mol_type = other DNA
gggattctgtgaacattaatcactctcctcatgatggactagttataataaataaaggaaacgaagaagttgaag

SEQ ID NO: 461599 - DNA, 75 bp, synthetic construct
  source 1..75: mol_type = other DNA
tgcggcagagcgtgttgccgtcactgctgcgtattttcatgaaaggagatcactcaataacttccatcgagatcg

SEQ ID NO: 461600 - DNA, 75 bp, synthetic construct
  source 1..75: mol_type = other DNA
gcggaacgtaagcagtcgattaacgacctgaaaatcaaggttgaagatcaactggttcacgctcacttcgaagcg

SEQ ID NO: 461601 - DNA, 75 bp, synthetic construct
  source 1..75: mol_type = other DNA
aaagccttttcatttggtggcgatctccaaacccttgcatcaaaaccgggttccacaatctcaagtatcccatca

SEQ ID NO: 461602 - DNA, 75 bp, synthetic construct
  source 1..75: mol_type = other DNA
gtcgcgctgacgaaattcgttcgccgaataaaccgtttcgttacacgctgacggtaacggaatataaagcgggcg

SEQ ID NO: 461603 - DNA, 75 bp, synthetic construct
  source 1..75: mol_type = other DNA
gtttggtaattgcattgtgtattgatgccatagccggaacaactactctcatgagtgcggctcccaggaggactt

SEQ ID NO: 461604 - DNA, 75 bp, synthetic construct
  source 1..75: mol_type = other DNA
aaagctataattaggaaaaaattaaaaatatttactgatttggatttcctcaaggatagtatatggggatatatt

SEQ ID NO: 461605 - DNA, 75 bp, synthetic construct
  source 1..75: mol_type = other DNA
accaggcagaaagcgttaagcgcgccaacctgccgccaatagcaaagcacagccagaccaaaaccaaccagccac

SEQ ID NO: 461606 - DNA, 75 bp, synthetic construct
  source 1..75: mol_type = other DNA
tgcgccatttttgcattactaataagaaaaagcaaaaaacatcgatattcatttttggtcaatggattttctggc

SEQ ID NO: 461607 - DNA, 75 bp, synthetic construct
  source 1..75: mol_type = other DNA
tatcattttcatcttgccaggatcgcacgtaatcacgttattcggggactttatctgcgggatattacccttcag

SEQ ID NO: 461608 - DNA, 75 bp, synthetic construct
  source 1..75: mol_type = other DNA
ggcagataaacgactgacgtctgccggtggggtgctgttcacttccgtggctattacgaacataagctgcagtac

SEQ ID NO: 461609 - DNA, 75 bp, synthetic construct
  source 1..75: mol_type = other DNA
ctttggcaaaaaaatacaatgcccgcctcaagctggatatatcatactatcacaatcaaccgcataaagatacgc

SEQ ID NO: 461610 - DNA, 75 bp, synthetic construct
  source 1..75: mol_type = other DNA
atttgaaagctatctgtatacgtttaaggaatttggttttatatctcttgatgttatcaagaataagcacacaaa

SEQ ID NO: 461611 - DNA, 75 bp, synthetic construct
  source 1..75: mol_type = other DNA
ctgtacgaccgtctgttcagcgtgccgaaccctggtgctgcggatgatttcctgtcggtgattaacccggaatcg

SEQ ID NO: 461612 - DNA, 75 bp, synthetic construct
  source 1..75: mol_type = other DNA
ctgggcacggcggcgctgtctgcccttaccgggatcaaaacccgtgcggatgcgcacgacaccctgaaaacgcag

SEQ ID NO: 461613 - DNA, 75 bp, synthetic construct
  source 1..75: mol_type = other DNA
atgaatgagcaattacgccagttgctgacggcgctcggtctgaccgtggctgacggtgacgaatttacaccggaa

SEQ ID NO: 461614 - DNA, 75 bp, synthetic construct
  source 1..75: mol_type = other DNA
aaccaccagtcactgattgaggggcatgcggcaccggctgccggttttgtcatggcctcgccggagaacttccgt

SEQ ID NO: 461615 - DNA, 75 bp, synthetic construct
  source 1..75: mol_type = other DNA
atcaccgcttcagaaattcactatgtgatagcaaaaccccgctccggaaaaagtggcctgacatgaaaatgtcct

SEQ ID NO: 461616 - DNA, 75 bp, synthetic construct
  source 1..75: mol_type = other DNA
gtcaccatcaccaccgatatttacggcgatgatgtgaaatacaccggtaaagtggttggtctggatatgggcaca

SEQ ID NO: 461617 - DNA, 75 bp, synthetic construct
  source 1..75: mol_type = other DNA
atgggcgcagtgatttatgataaacgagagtttacaggacttgagcctattccaggaccaataggttttgttaaa

SEQ ID NO: 461618 - DNA, 75 bp, synthetic construct
  source 1..75: mol_type = other DNA
cggcggtcaaagcgaaatttggtctggatgaccttgctgtgaatgccctcgatggtgcggcacttgatggcctgt

SEQ ID NO: 461619 - DNA, 75 bp, synthetic construct
  source 1..75: mol_type = other DNA
tatattgatattggctccaatgatacagactatattactattggtatcgacaaccaagaaccggtaatgactcca

SEQ ID NO: 461620 - DNA, 75 bp, synthetic construct
  source 1..75: mol_type = other DNA
agcctcgtccgctgaaatgctggctgaccgaagacgaaatcagggccgttcttgatgcggtgcgcgatgcagtat

SEQ ID NO: 461621 - DNA, 75 bp, synthetic construct
  source 1..75: mol_type = other DNA
ttcagaagtctgaagaacgagtgggcaccagtgactggttactttagccttaacgaaggtgtccatacaataaca

SEQ ID NO: 461622 - DNA, 75 bp, synthetic construct
  source 1..75: mol_type = other DNA
aactggtggccgcgctgagccattcgcgaaagagatagctgcttccggtgacgtgtcacgctcacgagcgaacct

SEQ ID NO: 461623 - DNA, 75 bp, synthetic construct
  source 1..75: mol_type = other DNA
cgcgccccggtaggccaggtgatgaaatccatcgtcgccgagcaaattaagtacatcaaatctctgcctcttgag

SEQ ID NO: 461624 - DNA, 75 bp, synthetic construct
  source 1..75: mol_type = other DNA
atgcggatgccattcgttataatgctcgaacgcctctgcaaggttctttgctgccgttaacccgtctggtttggg

SEQ ID NO: 461625 - DNA, 75 bp, synthetic construct
  source 1..75: mol_type = other DNA
aaacggtgtggccggacagcttcatctaccgcgatgacaccaaatacctgaagcagaagtacctcatcgatgatg

SEQ ID NO: 461626 - DNA, 75 bp, synthetic construct
  source 1..75: mol_type = other DNA
cagctaacttttcaggaaattaacttcaaagctattgtagggcaaactgatgtttcagcagccactggacggact

SEQ ID NO: 461627 - DNA, 75 bp, synthetic construct
  source 1..75: mol_type = other DNA
tacgacaagtcttggaagccctatgctgacctgtaaagagctttttagctattcggcaagtgagttatcagatga

SEQ ID NO: 461628 - DNA, 75 bp, synthetic construct
  source 1..75: mol_type = other DNA
taccgcgagctggggccagccggtctggtcagccggcgccgtggaaagccaggcaatcatcagttaaacaccacc

SEQ ID NO: 461629 - DNA, 75 bp, synthetic construct
  source 1..75: mol_type = other DNA
aagcatcctcggcacgattttgcaggaaaacggggtgaccgactggagcccgctgttcagcgagccgcatccttc

SEQ ID NO: 461630 - DNA, 75 bp, synthetic construct
  source 1..75: mol_type = other DNA
aagcatcctcggcacgattttgcaggaaaacggggtgaccgattggagaccgctgttcagcgagcctcatccttc

SEQ ID NO: 461631 - DNA, 75 bp, synthetic construct
  source 1..75: mol_type = other DNA
aagcatcctcggcacgattttgcaggaaaacggggtgaccgaatggagaccgctgttcagcgagccgcatccttc

SEQ ID NO: 461632 - DNA, 75 bp, synthetic construct
  source 1..75: mol_type = other DNA
aagcatcctcggcacgattttgcaggaaaacggggtgaccgagtggaggccgctgttcagcgagccgcatccttc

SEQ ID NO: 461633 - DNA, 75 bp, synthetic construct
  source 1..75: mol_type = other DNA
aagcatcctcggcacgattttgcaggaaaacggggtgaccgagtggagcccgctgttcagcgagccccatccttc

SEQ ID NO: 461634 - DNA, 75 bp, synthetic construct
  source 1..75: mol_type = other DNA
aagcatcctcggcacgattttgcaggaaaacggggtgaccgagtggagaccgctgttcagcgagccacatccttc

SEQ ID NO: 461635 - DNA, 75 bp, synthetic construct
  source 1..75: mol_type = other DNA
ggtcgttcatgtcggcaaccatcatcacgcagaagatgtgttttgtgaacttaacaaaatcacaaatgcaacacc

SEQ ID NO: 461636 - DNA, 75 bp, synthetic construct
  source 1..75: mol_type = other DNA
acaggagacgcggcaggtgctgggcagtctggacacggagaagccgctgggactgcgcaaccgggcgatcctcga

SEQ ID NO: 461637 - DNA, 75 bp, synthetic construct
  source 1..75: mol_type = other DNA
agcaatgagatagacttcgattttgctaagttttgttatgagtccctaaatataatcagaagaaaagatattaca

SEQ ID NO: 461638 - DNA, 75 bp, synthetic construct
  source 1..75: mol_type = other DNA
acaagctacttttggtgaaatttttaaatttattggcgaatctgaaatgcaaagttcagaagccaaagaatcttg

SEQ ID NO: 461639 - DNA, 75 bp, synthetic construct
  source 1..75: mol_type = other DNA
cgagtagatgatatttggtcattgcgttcgtcggtagatgcttttgtacatttaggctatttgctgggtgaagaa

SEQ ID NO: 461640 - DNA, 75 bp, synthetic construct
  source 1..75: mol_type = other DNA
tcctgcaaaaaatcgcccgtgagcatcaactgaagatgacgatcgacttcgatcgccatacggtcacggtttcac

SEQ ID NO: 461641 - DNA, 75 bp, synthetic construct
  source 1..75: mol_type = other DNA
ccacttcttacacacctggagggggaactggtcagtggaaagttatggctgccggggatgtcatcaccggatgaa

SEQ ID NO: 461642 - DNA, 75 bp, synthetic construct
  source 1..75: mol_type = other DNA
ttcctggtaacagcaatgccagcagtgctgagataaccgccccggaagccacacgtcagccggagcacctgccgg

SEQ ID NO: 461643 - DNA, 75 bp, synthetic construct
  source 1..75: mol_type = other DNA
taacagcacctttgctcccggaaaacactgtgcagcctgaagataatgtgccatctgacagccagccagaaacat

SEQ ID NO: 461644 - DNA, 75 bp, synthetic construct
  source 1..75: mol_type = other DNA
cgctggctaaagggaaggggaatgacgagaaaaactggtatctgaccagtataaatccagacaaccgtttgattt

SEQ ID NO: 461645 - DNA, 75 bp, synthetic construct
  source 1..75: mol_type = other DNA
tacagcagttatcaggtgttgagccaaatgccatactaaaaagcctcattgatgatgcttataaaagaatgaagg

SEQ ID NO: 461646 - DNA, 75 bp, synthetic construct
  source 1..75: mol_type = other DNA
cttgtcaccctctggcactacgatgcgtcggaccgcatcacgcaccggacggtgaacggcgacccggcagagcag

SEQ ID NO: 461647 - DNA, 75 bp, synthetic construct
  source 1..75: mol_type = other DNA
ccgccgctggctggcatcgtgcggcctgacggtgaagcagatgcaaaaccagctggacccggtgtacacgccggc

SEQ ID NO: 461648 - DNA, 75 bp, synthetic construct
  source 1..75: mol_type = other DNA
cccctgacagtccccgccctctctcagctccttccttccccgacacgctgcccgccggtacagagtacggtgccg

SEQ ID NO: 461649 - DNA, 75 bp, synthetic construct
  source 1..75: mol_type = other DNA
ctggagtgtgtgctgacaaaataccgtctcggtggcacagcatacgaatatttttattcttcaggagataactga

SEQ ID NO: 461650 - DNA, 75 bp, synthetic construct
  source 1..75: mol_type = other DNA
tgatgataccgatatgctgctgagtctgttttcagcagtcagtgatgacactgagcccacggaggctgatgtggc

SEQ ID NO: 461651 - DNA, 75 bp, synthetic construct
  source 1..75: mol_type = other DNA
gataatgcgccatccggcagcccgccagaaacatcaacagaggccagtacgccggaaacgccggcagttgtcacg

SEQ ID NO: 461652 - DNA, 75 bp, synthetic construct
  source 1..75: mol_type = other DNA
ctgcgcgcctggctttatcagggcgactactgcctggagagcaggcaatcagaagcaggcgtcacgcgcctgaac

SEQ ID NO: 461653 - DNA, 75 bp, synthetic construct
  source 1..75: mol_type = other DNA
cttacataatacaggagattgctaataattttgctacagatgacgaatgtgccttattgacagcaaacgttcttc

SEQ ID NO: 461654 - DNA, 75 bp, synthetic construct
  source 1..75: mol_type = other DNA
gattctggttataacccccgagaagctgctttatgttcttcggcatgctcccgagctggctgcccacgttggcct

SEQ ID NO: 461655 - DNA, 75 bp, synthetic construct
  source 1..75: mol_type = other DNA
gatggcactgccgtatgaggattttgtggcaataatgctggcagaggcggaagagaggaagcagtgttatggcaa

SEQ ID NO: 461656 - DNA, 75 bp, synthetic construct
  source 1..75: mol_type = other DNA
tcgttgcgatatgcttgtttattaccggtgtcgctattttgaacatccagctctggtattccgcaaaagcagagt

SEQ ID NO: 461657 - DNA, 75 bp, synthetic construct
  source 1..75: mol_type = other DNA
atgacaaacatgatctcatatcagggacttgttcgcaccttccttaacccaaaatatcataaaaaagccgttatg

SEQ ID NO: 461658 - DNA, 75 bp, synthetic construct
  source 1..75: mol_type = other DNA
taacttgtcagttggatgaacaacaaatgtcatcactgctttatgaaagagatgatttaagcgccattgattttt

SEQ ID NO: 461659 - DNA, 75 bp, synthetic construct
  source 1..75: mol_type = other DNA
cgtgaaggcgctgaaaaaagatcgggacggagccagggcggtaatggagaaatacccaagctatttccaggagag

SEQ ID NO: 461660 - DNA, 75 bp, synthetic construct
  source 1..75: mol_type = other DNA
tatggtggactaatatgtaagaagcaaggtgaatatttccccatgaatccgataagttcaaatgataatgatagt

SEQ ID NO: 461661 - DNA, 75 bp, synthetic construct
  source 1..75: mol_type = other DNA
agcaataaaagccggaggttctcttgatgattttcttatatctcaggatacatcatcttgttctgattatgagtg

SEQ ID NO: 461662 - DNA, 75 bp, synthetic construct
  source 1..75: mol_type = other DNA
aaagcattatatccactagtacaccatatatttgattttgaggttgcgaagctatgcgaatttgactcacataac

SEQ ID NO: 461663 - DNA, 75 bp, synthetic construct
  source 1..75: mol_type = other DNA
cgtgaacgtgttcgccagattcaggttgaaggcctgcgccgtttgcgcgaaatcctgcaaacgcaggggctgaat

SEQ ID NO: 461664 - DNA, 75 bp, synthetic construct
  source 1..75: mol_type = other DNA
gtaggaagtactatcagtatctgagatgccttgagacgctctacaaagaaaaggtgaactgggaagaagtgagac

SEQ ID NO: 461665 - DNA, 75 bp, synthetic construct
  source 1..75: mol_type = other DNA
cctgaggtttattttatttggatgaaagatagtgacagggttgcatgttatacaatgttttggctagcaagccat

SEQ ID NO: 461666 - DNA, 75 bp, synthetic construct
  source 1..75: mol_type = other DNA
gttacagattgatgtgatcggtataagcggcggacgttttacctgtatcgataacgtcatgacaccgcttctgag

SEQ ID NO: 461667 - DNA, 75 bp, synthetic construct
  source 1..75: mol_type = other DNA
gacgtatcacgagccagtcatgaggattctgtagtgtatcaaacatatctatcttctgttaatgaaagtcctcat

SEQ ID NO: 461668 - DNA, 75 bp, synthetic construct
  source 1..75: mol_type = other DNA
agcggttgttcatgcagactggtgtttcatggtcagatccgttacgcgcacagtatttttctgtgcagttttctg

SEQ ID NO: 461669 - DNA, 75 bp, synthetic construct
  source 1..75: mol_type = other DNA
gaagtgagtgtgctttatgccattgctccgaaagcagggagccgtcaggtgccggatgaactgcgggcatggcct

SEQ ID NO: 461670 - DNA, 75 bp, synthetic construct
  source 1..75: mol_type = other DNA
acgggttcgtgatgcagaagtccgtccggcatccggtggtatggcttatatcacagtaaagcaggtattaccgga

SEQ ID NO: 461671 - DNA, 75 bp, synthetic construct
  source 1..75: mol_type = other DNA
aaaaaactctgatccgagatctaattcgattgaagggttggaaattgccatgacggaaggacatgataaaatact

SEQ ID NO: 461672 - DNA, 75 bp, synthetic construct
  source 1..75: mol_type = other DNA
atgatgtccgttaatggtgatgtccacactataatactcagatcttctactacaaatactacaaaagacctgtgc

SEQ ID NO: 461673 - DNA, 75 bp, synthetic construct
  source 1..75: mol_type = other DNA
acaactagttgttttaaataaaagaaaaaaagacttatatagatgggaggagacagaaaaaaaagaatttcttga

SEQ ID NO: 461674 - DNA, 75 bp, synthetic construct
  source 1..75: mol_type = other DNA
atggaacatttggctgtattaggcttagagattgatacagaaatgaataatcgctctaactcctgtggtgagcga

SEQ ID NO: 461675 - DNA, 75 bp, synthetic construct
  source 1..75: mol_type = other DNA
atgaccaataaaatgcaacccttttctggacctgagctgacttccataactctgaatgtttatcgatctttaacc

SEQ ID NO: 461676 - DNA, 75 bp, synthetic construct
  source 1..75: mol_type = other DNA
cataccgcaaccctgtacgcaggcagaggttttactgatgacgacgattacagaaatcatcggacgtgtgaatac

SEQ ID NO: 461677 - DNA, 75 bp, synthetic construct
  source 1..75: mol_type = other DNA
ccaagtggattgcccgcaaacacaagcgagcgcgaggtagtctggtgcgtgcattcgagtggttactgcgaattc

SEQ ID NO: 461678 - DNA, 75 bp, synthetic construct
  source 1..75: mol_type = other DNA
ttcttactgaaaacaaagtgaattcgatagcagaaaaatattgtaaaaagtataatcttaatggctcgctggcat

SEQ ID NO: 461679 - DNA, 75 bp, synthetic construct
  source 1..75: mol_type = other DNA
catgatgaggtcatgctccgctataaacaggttatagaagccatcgatggtgaaatctcacagctacaatgcagt

SEQ ID NO: 461680 - DNA, 75 bp, synthetic construct
  source 1..75: mol_type = other DNA
ttcagcggaagattactggtccacattactgcatgagctggtacacagtaccggtcatgcgaaacgtcttaaccg

SEQ ID NO: 461681 - DNA, 75 bp, synthetic construct
  source 1..75: mol_type = other DNA
gtgccgtgaataaaacgccggaacgtgacctgtatcaactggtgaccgacaggattgtgacggctattgaaaatg

SEQ ID NO: 461682 - DNA, 75 bp, synthetic construct
  source 1..75: mol_type = other DNA
cgtaaaggagaggtggccacactggcggtgatttacaaagactggaaaagacaggctgtggatgagcacggtaac

SEQ ID NO: 461683 - DNA, 75 bp, synthetic construct
  source 1..75: mol_type = other DNA
ctcatatgctgcggcatgcgtgtggttttgcgcttgctgacaggggggtggatacgcgtctgatacaggattatc

SEQ ID NO: 461684 - DNA, 75 bp, synthetic construct
  source 1..75: mol_type = other DNA
aaaaggaaaccggactccctggatgtttttatcaaggcatggaggaagcctttccaggcaacgattttatcagtt

SEQ ID NO: 461685 - DNA, 75 bp, synthetic construct
  source 1..75: mol_type = other DNA
actctgatggcatccgtttttttaacaaaacgaggatttaacaaagtattcaaagaattctttaatttattatgg

SEQ ID NO: 461686 - DNA, 75 bp, synthetic construct
  source 1..75: mol_type = other DNA
ccttggccctgagtgcactcagtattcagtcaacacttgccgctgaatacagcgaaaaagcgcagtatctggggg

SEQ ID NO: 461687 - DNA, 75 bp, synthetic construct
  source 1..75: mol_type = other DNA
tttgttaatgataagttagaacatactgctgatgcttcatatatacattcggtccaggagttaacgactgttttt

SEQ ID NO: 461688 - DNA, 75 bp, synthetic construct
  source 1..75: mol_type = other DNA
aagttgaattaagaacagatacgccggcagagctggaagttccggtcggttaccgtggaaacctgcagatagatt

SEQ ID NO: 461689 - DNA, 75 bp, synthetic construct
  source 1..75: mol_type = other DNA
attttgttgacggattttggttttaattttactgccagtagaaaaatagctcaatttaaagatagtaaagtcagg

SEQ ID NO: 461690 - DNA, 75 bp, synthetic construct
  source 1..75: mol_type = other DNA
ccctggccctgagtgcactcagtattcagtcagcacaggccgctgaatacagggagaaaactcagtatctggggg

SEQ ID NO: 461691 - DNA, 75 bp, synthetic construct
  source 1..75: mol_type = other DNA
tggttgagttaagaacggatgcaccggcagagctggaagtaccggtcagctaccggggaaacctgcagatagcgc

SEQ ID NO: 461692 - DNA, 75 bp, synthetic construct
  source 1..75: mol_type = other DNA
acctgaaatacaaacaactataaattctccattgccaatggcggcgatagttggttttcagtctccatatcatac

SEQ ID NO: 461693 - DNA, 75 bp, synthetic construct
  source 1..75: mol_type = other DNA
cggaatggcaaggccagcgcgtggtcggcatagtcggtgatcagtttcatgatgggattggtggttgctccagag

SEQ ID NO: 461694 - DNA, 75 bp, synthetic construct
  source 1..75: mol_type = other DNA
cgcaggcagctggacgatcgccagcgccagctggatcaggagcgtcggcagctagaagatgaagagcggagaatg

SEQ ID NO: 461695 - DNA, 75 bp, synthetic construct
  source 1..75: mol_type = other DNA
tggaaccagacaaccattgacaacctgaagaacaagtattcttacaacgtggatatgtcaggggctcaggttgca

SEQ ID NO: 461696 - DNA, 75 bp, synthetic construct
  source 1..75: mol_type = other DNA
gaaaacccgaccagcagcaatttgtggcttgatattggacgtaccagtgaacttgaactggtagttcagagactc

SEQ ID NO: 461697 - DNA, 75 bp, synthetic construct
  source 1..75: mol_type = other DNA
aaagaaaatttttgagattaagtgctgcaataattggcttggggttattatgtttttaccaggcaaatacagcat

SEQ ID NO: 461698 - DNA, 75 bp, synthetic construct
  source 1..75: mol_type = other DNA
accgccaccaccaacggcgcgcacggtacggtgaccgtcagcaacggcaaggtggtttacaccctgaacgacggc

SEQ ID NO: 461699 - DNA, 75 bp, synthetic construct
  source 1..75: mol_type = other DNA
cgctcgatatctccgttacgccggtgcaggatgcgtttaacgacagccagaccggccacgggcgcgacccgctgg

SEQ ID NO: 461700 - DNA, 75 bp, synthetic construct
  source 1..75: mol_type = other DNA
ccattacggcaaccggcggcaccagcgctgacagtttctggggcgtggctatcactaacctgtcagtcaacagcg

SEQ ID NO: 461701 - DNA, 75 bp, synthetic construct
  source 1..75: mol_type = other DNA
atgaagatgagttattgggcgctcattttaacgtttattgcttgtattgctggtggtcttgtctggtcagcgaat

SEQ ID NO: 461702 - DNA, 75 bp, synthetic construct
  source 1..75: mol_type = other DNA
atgaaaatgagttattgggtgctcattgtgacgtttatcgcctgtattgcaggcggtcttgtctggtcagcggat

SEQ ID NO: 461703 - DNA, 75 bp, synthetic construct
  source 1..75: mol_type = other DNA
gcggccagactgctcagccgggcgacaccgtccagctggcgggcgtcggcgcgctgaccgttaaccgcgacggca

SEQ ID NO: 461704 - DNA, 75 bp, synthetic construct
  source 1..75: mol_type = other DNA
tgggtattggtatcacattgatagcggacagctacgcgcagatgaactggcccggtgtcatattccgtccgctca

SEQ ID NO: 461705 - DNA, 75 bp, synthetic construct
  source 1..75: mol_type = other DNA
acaagttttttgttaatacttttctttcttgaagttcatgccagagtacaatttactaaaaacaggttgagatat

SEQ ID NO: 461706 - DNA, 75 bp, synthetic construct
  source 1..75: mol_type = other DNA
attataacaactctgaatattatatccttcataatatgttatataacatttttgttatttcaaaaatttaggttc

SEQ ID NO: 461707 - DNA, 75 bp, synthetic construct
  source 1..75: mol_type = other DNA
ttactcgattggctacatgcgtcatgaagtggcacacggcgagctttcccccgttacgctgtgcgattactacgg

SEQ ID NO: 461708 - DNA, 75 bp, synthetic construct
  source 1..75: mol_type = other DNA
ctcgtatttttgtacatgtgcatcctaaccttcaggagtatccaaacgcctctctttttgtagaagagttcgaag

SEQ ID NO: 461709 - DNA, 75 bp, synthetic construct
  source 1..75: mol_type = other DNA
gatcccctatatcatgttcatatcttcaagccggatgatgaaaagtgtgtctggcatgatgataatggtattagc

SEQ ID NO: 461710 - DNA, 75 bp, synthetic construct
  source 1..75: mol_type = other DNA
atggcaattattgatgatgtgatcggcgtgttttcccccgggtggaaagcagccagactgcgttcaagggcgtta

SEQ ID NO: 461711 - DNA, 75 bp, synthetic construct
  source 1..75: mol_type = other DNA
cagaatcacaaattatcactttgtgcaaggatttcccagcgtttactgatcctgaaaaattagatggattcatta

SEQ ID NO: 461712 - DNA, 75 bp, synthetic construct
  source 1..75: mol_type = other DNA
aaatctgcaaaatcagaataccgttcagctggcgattaaatcccgtatcaaacttttttaccggcccgctgcgct

SEQ ID NO: 461713 - DNA, 75 bp, synthetic construct
  source 1..75: mol_type = other DNA
gttacgaaagctatcccatttcagttgggaatattcgcggatgtttggagagtcacccaagagagatattaccag

SEQ ID NO: 461714 - DNA, 75 bp, synthetic construct
  source 1..75: mol_type = other DNA
ttcgctgctctgttttgcctgccggaaacgggggctctctgcgacttgtacggtgactgtattacatagcttagg

SEQ ID NO: 461715 - DNA, 75 bp, synthetic construct
  source 1..75: mol_type = other DNA
ccggtgctgcttacggcgcttcagccggtagcatcctaaacggtatgctgaatgcctacagtcccgagcagtgga

SEQ ID NO: 461716 - DNA, 75 bp, synthetic construct
  source 1..75: mol_type = other DNA
acagcgcgatattatgtatgacttttgcttacctgaaaataatgattcaattttatttggttcgaaaatgctacg

SEQ ID NO: 461717 - DNA, 75 bp, synthetic construct
  source 1..75: mol_type = other DNA
gccgggcggctttacctttaaaacgattggcgggacgggcggcaccgttgatgcgggcggcgtcaacaccaccag

SEQ ID NO: 461718 - DNA, 75 bp, synthetic construct
  source 1..75: mol_type = other DNA
tctgggccgatttttttcccgcaaacacatcgaatcctgtcccttataaacatctgacgctgccgacgaatagag

SEQ ID NO: 461719 - DNA, 75 bp, synthetic construct
  source 1..75: mol_type = other DNA
ctcatcacggcttgatcatgcgcagcgccgcgaaatcctgcaaaaccgagcgcagccgctcgaacattttctaga

SEQ ID NO: 461720 - DNA, 75 bp, synthetic construct
  source 1..75: mol_type = other DNA
gcgagctggtcagcgttacagaacgagcatttagcgcgtcatggtcacagggtgcgcgttgaccatcgctcactg

SEQ ID NO: 461721 - DNA, 75 bp, synthetic construct
  source 1..75: mol_type = other DNA
acatgggatatctcattttcctccagcctgtcaccagcgaaaaattcgaacgcaaaccgatttactggatcctga

SEQ ID NO: 461722 - DNA, 75 bp, synthetic construct
  source 1..75: mol_type = other DNA
ttcttgtaaaagttgatagtttacctcatagttatggcgaaatttttcaggggcgtttttcattttttggacaaa

SEQ ID NO: 461723 - DNA, 75 bp, synthetic construct
  source 1..75: mol_type = other DNA
gaattatctgttctaagtaaagagaacagagaactgagggagaaaataactctgcttgagtcgaaagtttcggtt

SEQ ID NO: 461724 - DNA, 75 bp, synthetic construct
  source 1..75: mol_type = other DNA
aataagtgaagagataagagcacagctaggcattaaaaataaaaaggaattgcaatcggaaataaaacaaatatt

SEQ ID NO: 461725 - DNA, 75 bp, synthetic construct
  source 1..75: mol_type = other DNA
ggataatttcctcaaaaatggtgtgattggaggttgggctgcagaagctatagaaaaaaatccaccatgtaagaa

SEQ ID NO: 461726 - DNA, 75 bp, synthetic construct
  source 1..75: mol_type = other DNA
gttttttacgaggcaataaagttggcaggtggtgatacgtcaaaaattaaagccatgatggaacaattagatacc

SEQ ID NO: 461727 - DNA, 75 bp, synthetic construct
  source 1..75: mol_type = other DNA
tttccgttaccgctcccgacgtacccgacagattctctgcgacatcaacgactggctggcaccatcggaaaatca

SEQ ID NO: 461728 - DNA, 75 bp, synthetic construct
  source 1..75: mol_type = other DNA
gtttttgaactctgcatttaattttttatatttaaaaacattcgataagtttagctcatttccttttactttttt

SEQ ID NO: 461729 - DNA, 75 bp, synthetic construct
  source 1..75: mol_type = other DNA
ctaggcattaaaaataaaaaggaattgcaaacgaaaataaaacaaatatttactgattatttaaataataagaat

SEQ ID NO: 461730 - DNA, 75 bp, synthetic construct
  source 1..75: mol_type = other DNA
cggctggtatcagcgccgatgtttctgcacgctggtttccgcacattgatgcggcaatgaaagagtttggtatta

SEQ ID NO: 461731 - DNA, 75 bp, synthetic construct
  source 1..75: mol_type = other DNA
gcacaacatggtacgtgccgttgccgatccgtggccgggtgccttcagctatgttggcaatcagaaattcaccgt

SEQ ID NO: 461732 - DNA, 75 bp, synthetic construct
  source 1..75: mol_type = other DNA
cgtactgcagccgatggattttctcgacttccgtaagtgtgaggagtatctgctcagttttttgacctggaagcc

SEQ ID NO: 461733 - DNA, 75 bp, synthetic construct
  source 1..75: mol_type = other DNA
agagcattaagcccttacgactacacactgtattgcaggaagtgggtaaaaccaaatctgacttgtacgccacag

SEQ ID NO: 461734 - DNA, 75 bp, synthetic construct
  source 1..75: mol_type = other DNA
gcacgctgacggcaggcgctaacggcggcacgctgaaccagcccgcgacgcctggcagaggcgcggcggccaccg

SEQ ID NO: 461735 - DNA, 75 bp, synthetic construct
  source 1..75: mol_type = other DNA
ggactgtggtttacccactccagcaaaaccattgagctggtgtacgccagttttgaagtcgcccactatcttggc

SEQ ID NO: 461736 - DNA, 75 bp, synthetic construct
  source 1..75: mol_type = other DNA
caactatgcacttgctcatgggcatcattcacatggggcaccactgacagaaatagaacaaaaagcagcagaggg

SEQ ID NO: 461737 - DNA, 75 bp, synthetic construct
  source 1..75: mol_type = other DNA
tatcagtacgccagaattgctaacgcaagagcgacatgcggctcattctgctgcgtggtacttcacgttacgcgg

SEQ ID NO: 461738 - DNA, 75 bp, synthetic construct
  source 1..75: mol_type = other DNA
atgaaccaatcacaatttcagcaggcggctggtatcagcgccgggctttctgcgcgctggtttccgcacattgac

SEQ ID NO: 461739 - DNA, 75 bp, synthetic construct
  source 1..75: mol_type = other DNA
gcggcaatgaaagagtttggtattacagcagttaatgatcaggccatgttcattgcacaagtcgggcatgagtct

SEQ ID NO: 461740 - DNA, 75 bp, synthetic construct
  source 1..75: mol_type = other DNA
cggcaggtataagcgccagtctagccgtgcgctggtttcactatatcgatgctgcaatgaaggaattcggcataa

SEQ ID NO: 461741 - DNA, 75 bp, synthetic construct
  source 1..75: mol_type = other DNA
catgatctacggtgccgatattaaccgtgttacgcgcatcattaacggcggtctgaacggtattgaggatcgtaa

SEQ ID NO: 461742 - DNA, 75 bp, synthetic construct
  source 1..75: mol_type = other DNA
tgtggcgacattcggaaagaggatcacacagcagcaggctgatgcccttggcagaacatccggacatgcagctcg

SEQ ID NO: 461743 - DNA, 75 bp, synthetic construct
  source 1..75: mol_type = other DNA
ggtaaaaattgtcaaaacaactcgggataagcaagagaaaataatcacacaatttaaaataacgtttgatgggaa

SEQ ID NO: 461744 - DNA, 75 bp, synthetic construct
  source 1..75: mol_type = other DNA
ggtgcgtaaccaggtgctgttagaagtcacaaaagcacacttgcaggcgcttctgagcgacctgcagagcctgac

SEQ ID NO: 461745 - DNA, 75 bp, synthetic construct
  source 1..75: mol_type = other DNA
gcaggatttcagtacagtggagtacattgctacgaacgtcgggattctgcgaagtacaagaaattcgtgaaggat

SEQ ID NO: 461746 - DNA, 75 bp, synthetic construct
  source 1..75: mol_type = other DNA
atctggtgctggtggcggaagtgaatgacgattacgaccctaccaaagcgatcgactgtaataatgttccggtca

SEQ ID NO: 461747 - DNA, 75 bp, synthetic construct
  source 1..75: mol_type = other DNA
aaagctaccttcgccatgtgctggatgttatcgcagactggccggtcaaccgggtcagcgaactgctgccctggc

SEQ ID NO: 461748 - DNA, 75 bp, synthetic construct
  source 1..75: mol_type = other DNA
gcaggattttactattcggcatggtgtttctgctgttatctggttgtgataataaccaggaagaattaaaactgg

SEQ ID NO: 461749 - DNA, 75 bp, synthetic construct
  source 1..75: mol_type = other DNA
ccattaaaaggatatgcggactgttttgcagcagcctccacaggtattatccgccatggtgtacttactgcatta

SEQ ID NO: 461750 - DNA, 75 bp, synthetic construct
  source 1..75: mol_type = other DNA
cgatcttaagatgctcactgattgtcagcttgttgttattggtggcagtgtcggacttgcacatggctatatttc

SEQ ID NO: 461751 - DNA, 75 bp, synthetic construct
  source 1..75: mol_type = other DNA
tctgaaggatgcattttatttccagaattgtgatgactactcaaaatactttaccggggctgtcgacgggaaggc

SEQ ID NO: 461752 - DNA, 75 bp, synthetic construct
  source 1..75: mol_type = other DNA
caggctgtgggatcgatacgtcgatttaccgtgaagaatggaatggtacgaacgtcgtgtgtgaggtggttactg

SEQ ID NO: 461753 - DNA, 75 bp, synthetic construct
  source 1..75: mol_type = other DNA
cgctgcaagctgatttgattgctattgatgttgaaggaaatgaaaagtttagacgtcattatgaagcaaatatct

SEQ ID NO: 461754 - DNA, 75 bp, synthetic construct
  source 1..75: mol_type = other DNA
ttaattgtaataacaaatcagaacatgcaaaaaacactttgttgattgataataatcaaatacctatacatttaa

SEQ ID NO: 461755 - DNA, 75 bp, synthetic construct
  source 1..75: mol_type = other DNA
ctcagcccgcgtctggtgacgaataaagatatttcggatatctgtatcagcagcgatgagttcaaagccatgagc

SEQ ID NO: 461756 - DNA, 75 bp, synthetic construct
  source 1..75: mol_type = other DNA
tttgacctgccggaggagccaacaggccatggcgcgccttcatggctgactgagccgacgccacagattaacggg

SEQ ID NO: 461757 - DNA, 75 bp, synthetic construct
  source 1..75: mol_type = other DNA
tttgacctgccggacgagccaacaggccatgccgcgccttcatggctgactgagccgacgccacagattaacggg

SEQ ID NO: 461758 - DNA, 75 bp, synthetic construct
  source 1..75: mol_type = other DNA
tttgacctgccggatgagccaacaggccatgtcgcgccttcatggctgactgagccgacgccacagattaacggg

SEQ ID NO: 461759 - DNA, 75 bp, synthetic construct
  source 1..75: mol_type = other DNA
aagagccactttccgtcgttgacactgacgacatcttcctgctgaaacagcgcctggccgaacaggaagcgctga

SEQ ID NO: 461760 - DNA, 75 bp, synthetic construct
  source 1..75: mol_type = other DNA
atgaaacctggacagcgggcattcacggtaaaaacaacgtgacctgtatcgactgccatatgccaaaagtgcaga

SEQ ID NO: 461761 - DNA, 75 bp, synthetic construct
  source 1..75: mol_type = other DNA
tttgacctgccggaggagccaacaggcgatgccgcgccttcatggctgactgagccgacgccacagattaacggg

SEQ ID NO: 461762 - DNA, 75 bp, synthetic construct
  source 1..75: mol_type = other DNA
tcgaattaatgaaatgaagaaaaatgccattttaaatgatggttcacctgacagggaatctctatcaattgatat

SEQ ID NO: 461763 - DNA, 75 bp, synthetic construct
  source 1..75: mol_type = other DNA
gtaaaattacacaaggcttggttgataatagagatgaaagcttaacaattgagttaaaaggtgcaggaatactca

SEQ ID NO: 461764 - DNA, 75 bp, synthetic construct
  source 1..75: mol_type = other DNA
tttcagcaataaaattatatcgtgatgggaaactgatacagaccttaaatactgcttctataggcacctgtagca

SEQ ID NO: 461765 - DNA, 75 bp, synthetic construct
  source 1..75: mol_type = other DNA
tttgacctgccggatgagccaacaggctatgccgcgccttcatggctgactgagccgacgccacagattaacggg

SEQ ID NO: 461766 - DNA, 75 bp, synthetic construct
  source 1..75: mol_type = other DNA
tttgacctgccggaagagccaacaggccatgacgcgccttcatggctgactgagccgacgccacagattaacggg

SEQ ID NO: 461767 - DNA, 75 bp, synthetic construct
  source 1..75: mol_type = other DNA
tttgacctgccggaagagccaacaggcaatgccgcgccttcatggctgactgagccgacgccacagattaacggg

SEQ ID NO: 461768 - DNA, 75 bp, synthetic construct
  source 1..75: mol_type = other DNA
cgcgaaggcctcactctcgccagaaggtacgttatgcgtcagtttttttattggcgatgaggcgatatttactct

SEQ ID NO: 461769 - DNA, 75 bp, synthetic construct
  source 1..75: mol_type = other DNA
ctccaaatctaactgaaaagcttgaacaagcggaaaaatcatcatctttgtacacaaatccaatttctcagtcat

SEQ ID NO: 461770 - DNA, 75 bp, synthetic construct
  source 1..75: mol_type = other DNA
gacaatatcaacaccggcatcttcattcctgcaggcaaaacgttacacattcttggaagcctgcgcggcaacggc

SEQ ID NO: 461771 - DNA, 75 bp, synthetic construct
  source 1..75: mol_type = other DNA
ggttcgttaatcaaagaatattcagtcgtagcgttacaggggttaacgctggtgctgtttatcttctttatgtgg

SEQ ID NO: 461772 - DNA, 75 bp, synthetic construct
  source 1..75: mol_type = other DNA
agcccagataaatccatggatgaaactaaaaaaattatcataagtttcttaaaggaagatgcaaaagatgagtta

SEQ ID NO: 461773 - DNA, 75 bp, synthetic construct
  source 1..75: mol_type = other DNA
ttgaggatggtcaggttttgaagatccgcttcgatcaggggatgggctactggcgtatcaactttgcatcgcaat

SEQ ID NO: 461774 - DNA, 75 bp, synthetic construct
  source 1..75: mol_type = other DNA
taacttacccgctgatatcgcctccattaccgcagcaacgtcctgcgcacagaagctcttatgcgtccccaggta

SEQ ID NO: 461775 - DNA, 75 bp, synthetic construct
  source 1..75: mol_type = other DNA
agctgcgatggtacaacattgcgctgatgtcttttatcactgtctggggttttggcaacgttgttaataactacg

SEQ ID NO: 461776 - DNA, 75 bp, synthetic construct
  source 1..75: mol_type = other DNA
attggtgagattggtaaccaggtggcagatattgccagaacggaaggacagatagccggtgagaaagcgaagcgg

SEQ ID NO: 461777 - DNA, 75 bp, synthetic construct
  source 1..75: mol_type = other DNA
tgaaataagcgcttatgattgggcttatggtacttctagagaagagaaaaaaacattgcggataaaatgggaaga

SEQ ID NO: 461778 - DNA, 75 bp, synthetic construct
  source 1..75: mol_type = other DNA
aggcgatggttcgttaatcaaagaatattcggtcgtagcgttacaggggttaacgctggtgctgtttatcttctt

SEQ ID NO: 461779 - DNA, 75 bp, synthetic construct
  source 1..75: mol_type = other DNA
cttaactcggtagtgatgccgctgcgttatttatgggtatttgttgcatttattgcagtcgttcgcctggcgcag

SEQ ID NO: 461780 - DNA, 75 bp, synthetic construct
  source 1..75: mol_type = other DNA
tgattgcgctcggttgggcgatgaaaggcgacggttcgttaatcaaagaatattcagtcgtagcgttacaggggt

SEQ ID NO: 461781 - DNA, 75 bp, synthetic construct
  source 1..75: mol_type = other DNA
attaaatcaatttaacgttgagtatatagcagtacatgactccgacattccaaaatgcttaaagcaaggaagcgt

SEQ ID NO: 461782 - DNA, 75 bp, synthetic construct
  source 1..75: mol_type = other DNA
ctgaattttaccgcgacgctcaagcaggatggtaatcagcaaatccggggcggagatttcaaagcgacgggagtc

SEQ ID NO: 461783 - DNA, 75 bp, synthetic construct
  source 1..75: mol_type = other DNA
tacagaaatggtggtctgttctaccgttcttcaagagacggttatggttttgaggaagactgggcagaagtttat

SEQ ID NO: 461784 - DNA, 75 bp, synthetic construct
  source 1..75: mol_type = other DNA
taccgcgacgaaacttgcggcagtcccaaaaattaacggtgttaagtttgatggctcggcggatattaacctcac

SEQ ID NO: 461785 - DNA, 75 bp, synthetic construct
  source 1..75: mol_type = other DNA
gtgatgctaattatatttacacaaaagctgggaaatattcgattgttaatgcattaaacagtggctatgacgtaa

SEQ ID NO: 461786 - DNA, 75 bp, synthetic construct
  source 1..75: mol_type = other DNA
aagaaatggaagccatccagccgcctcagcgtgggtgagcgcgccaagcgccaggcggtgaagcgcggggctatc

SEQ ID NO: 461787 - DNA, 75 bp, synthetic construct
  source 1..75: mol_type = other DNA
cctatcagctacgaagcagccgacctgctggcaagccttcgcaaccgtttaaacgcattcgaacacatgaccgat

SEQ ID NO: 461788 - DNA, 75 bp, synthetic construct
  source 1..75: mol_type = other DNA
ctggcgtccttcagggttcacaaccttcagaaattggtgttgtcagattagtcatgttgggggtagcacggaagt

SEQ ID NO: 461789 - DNA, 75 bp, synthetic construct
  source 1..75: mol_type = other DNA
atgaaggcgcattacagaaatggtggtctgttctaccgttcttcaagagatggctatggttttgaggaagactgg

SEQ ID NO: 461790 - DNA, 75 bp, synthetic construct
  source 1..75: mol_type = other DNA
ctaaaagtaaaaaaccaatggtatttattcaaatacctcatttcgaaggactgttttttaaaaatttcaatccat

SEQ ID NO: 461791 - DNA, 75 bp, synthetic construct
  source 1..75: mol_type = other DNA
gaaagtaaaagatacatgtaggattgatgatactactgaaaatttcttggactgtgcaaacaaaatattaggagc

SEQ ID NO: 461792 - DNA, 75 bp, synthetic construct
  source 1..75: mol_type = other DNA
accgcaataaaatcgccatttatttgcactggtatcagaaaaaaggcatcgaggttccacaaacccagcaagggg

SEQ ID NO: 461793 - DNA, 75 bp, synthetic construct
  source 1..75: mol_type = other DNA
gctcgtctcggctttgttcagctttcagcgacaccaaatgcttttggtgctgtacctatgtttttggcgattcag

SEQ ID NO: 461794 - DNA, 75 bp, synthetic construct
  source 1..75: mol_type = other DNA
cttgatggggtcgtttgcgggagagggcgaaatcctacgctaaggctttggccaacgatattctccggtaagatt

SEQ ID NO: 461795 - DNA, 75 bp, synthetic construct
  source 1..75: mol_type = other DNA
cacgagaagctgcaaatttttcacaggaaaaacttgctcaactagttgatattgaatcagtaaacagtcgttcaa

SEQ ID NO: 461796 - DNA, 75 bp, synthetic construct
  source 1..75: mol_type = other DNA
accacgtttggtcgcatcgcaggtaaagaagccgcgcaggcagcacgcaaggaggcgcatcatgaggcagcttga

SEQ ID NO: 461797 - DNA, 75 bp, synthetic construct
  source 1..75: mol_type = other DNA
atacgccatcgccttcactattgcctgttcagtcgcaactcaaaatctatctcaatgatgagttgatggatgtat

SEQ ID NO: 461798 - DNA, 75 bp, synthetic construct
  source 1..75: mol_type = other DNA
cacagaaacaactggcgaagtatatccagcaagttggcgaccaggtaaataaagaactggaaaaagacctgaaag

SEQ ID NO: 461799 - DNA, 75 bp, synthetic construct
  source 1..75: mol_type = other DNA
aagaacgtctgcgccgcgtagcaccagaggaacatgaggcggcgttgttgggctggcgtaaaaatcgtgtagctg

SEQ ID NO: 461800 - DNA, 75 bp, synthetic construct
  source 1..75: mol_type = other DNA
gaagtcgaagttgagctaaaacgcatcaatgcagaattgaatttcctaggaaaaaaacgctcggagatgctttct

SEQ ID NO: 461801 - DNA, 75 bp, synthetic construct
  source 1..75: mol_type = other DNA
aactgggtttgataagtggttgttagatttgacaactacttctctttataatctcttatgcgatatgagtagtag

SEQ ID NO: 461802 - DNA, 75 bp, synthetic construct
  source 1..75: mol_type = other DNA
cactggggttgataaatggttgttagatttgacaacgacttctctttataatctcttatgcgatatgagtagtaa

SEQ ID NO: 461803 - DNA, 75 bp, synthetic construct
  source 1..75: mol_type = other DNA
atgaccttctttggcatttgcctgttatctactttcacttatcattttatagaattaccgtttatcaaaaaataa

SEQ ID NO: 461804 - DNA, 75 bp, synthetic construct
  source 1..75: mol_type = other DNA
agattaggcgcgattagctacagtttgtatctcacacagggattagtacttttcccagtctataactatctgaaa

SEQ ID NO: 461805 - DNA, 75 bp, synthetic construct
  source 1..75: mol_type = other DNA
ctcgatgcctttgatttccgtactcaggataaggatagtactaagcagttggtcgatgacatcgacgtaaaaatt

SEQ ID NO: 461806 - DNA, 75 bp, synthetic construct
  source 1..75: mol_type = other DNA
aaagcagtgataacccgactgaaagagtctggccatgtggttgcgatggccggagacggtgtgaatgatgccccg

SEQ ID NO: 461807 - DNA, 75 bp, synthetic construct
  source 1..75: mol_type = other DNA
acccccggcagcctgccgggaacgaagacgcagatgaccatccgctccaaaacatatatgggcagcgggtttaac

SEQ ID NO: 461808 - DNA, 75 bp, synthetic construct
  source 1..75: mol_type = other DNA
gtttctgtaatttatacgggggctaacgggatgccggcttgctccggaagatccaccctctggctgacaaaagcg

SEQ ID NO: 461809 - DNA, 75 bp, synthetic construct
  source 1..75: mol_type = other DNA
attactgaatgctcaaagagcacaagattgtttcgcttcatgggaagattatgccagtgcttatgttcgcgcccg

SEQ ID NO: 461810 - DNA, 75 bp, synthetic construct
  source 1..75: mol_type = other DNA
taaatagccaatctatttgcgaagataaagagttcgctggtttaatatgtaaggataatagtggcagatatttct

SEQ ID NO: 461811 - DNA, 75 bp, synthetic construct
  source 1..75: mol_type = other DNA
ccgtgagttttgtgtccagtacggcgaaactgattacgatttcctgtgccggatggcggcggaggaaggcatctt

SEQ ID NO: 461812 - DNA, 75 bp, synthetic construct
  source 1..75: mol_type = other DNA
acgggtattttcgccctcggattatttgtcgtattggttactggcggaattgatatctcttttgcagcagtagct

SEQ ID NO: 461813 - DNA, 75 bp, synthetic construct
  source 1..75: mol_type = other DNA
cggggcgtggcgcaaaaatgcgtactccgcatatcgtaccgctctcccgccaggcgattgcccttctgaaacaga

SEQ ID NO: 461814 - DNA, 75 bp, synthetic construct
  source 1..75: mol_type = other DNA
gttacggacgctggaccaacctgtaccggtacctggctacagagtgcggcgccaggcgcggccggcaggtcaggg

SEQ ID NO: 461815 - DNA, 75 bp, synthetic construct
  source 1..75: mol_type = other DNA
atgaccgaagctggctgatggctgcaaatcaggccagaccgcgccgacagggcaacaacagccatgttgactggc

SEQ ID NO: 461816 - DNA, 75 bp, synthetic construct
  source 1..75: mol_type = other DNA
tatctttatcaaaaatgatttgatactggattggctatgtcgcatatatgtcagtatatttgatgatgataaact

SEQ ID NO: 461817 - DNA, 75 bp, synthetic construct
  source 1..75: mol_type = other DNA
caagccggtgtcgatatcggaaacaccattattgccgatggttcagggctttcgcggcataacctgattgccccc

SEQ ID NO: 461818 - DNA, 75 bp, synthetic construct
  source 1..75: mol_type = other DNA
tcgttgcagggggtatataacctggcgggattcattaccacagcgagcgggcaacgaatggcgtttgtgcaatat

SEQ ID NO: 461819 - DNA, 75 bp, synthetic construct
  source 1..75: mol_type = other DNA
aaatcccacggaggaacagctgttggttgagcttacgccgactcggtttccccctcttatttgtacgatgtcggt

SEQ ID NO: 461820 - DNA, 75 bp, synthetic construct
  source 1..75: mol_type = other DNA
ttccctgcctttgcgacgctaagggcggagtgcctgtccgacttcacctgcaacgccgaaaaagcccgtgagaaa

SEQ ID NO: 461821 - DNA, 75 bp, synthetic construct
  source 1..75: mol_type = other DNA
actgaaggattaccagaatatgccagaacagattaacaacctttttgggccgcgcgccgaagctcctgtcagtca

SEQ ID NO: 461822 - DNA, 75 bp, synthetic construct
  source 1..75: mol_type = other DNA
gcgcataaggcggcattgcttggctgggatgaggccagcgaaacattcgaacagtggacccgtaaaggcacactg

SEQ ID NO: 461823 - DNA, 75 bp, synthetic construct
  source 1..75: mol_type = other DNA
ccatttggctttacgggcggtgatgcggaggacatgcgcacctatgccgacctgctcgataaagttgaggcggtt

SEQ ID NO: 461824 - DNA, 75 bp, synthetic construct
  source 1..75: mol_type = other DNA
aggcattaacgatctgtttgccatgtttggcgggcgctatcaggcgcttcaggcgcagtgtgtggccgatcctga

SEQ ID NO: 461825 - DNA, 75 bp, synthetic construct
  source 1..75: mol_type = other DNA
atggggcaggaagacctggaagcgatgctgaaagctgaaacctggctgagcggtgccgaagcggttgaaaaaggc

SEQ ID NO: 461826 - DNA, 75 bp, synthetic construct
  source 1..75: mol_type = other DNA
attttgctgtctcaataaacggtgtgaaagttgaacaagacggggcgcgtaatctgggggaaatgaaacatggcg

SEQ ID NO: 461827 - DNA, 75 bp, synthetic construct
  source 1..75: mol_type = other DNA
cacgattgaagtggcttatcttgacggtatcgatactccgtatctggaacagcagcagggctttaccgttgacgg

SEQ ID NO: 461828 - DNA, 75 bp, synthetic construct
  source 1..75: mol_type = other DNA
gaggcccgtcttgatgacagcagcccgacggattattacctggtggcagcgcaggggcgtgacacgattgaagtg

SEQ ID NO: 461829 - DNA, 75 bp, synthetic construct
  source 1..75: mol_type = other DNA
agtcgcaattgagtcacgggcaaaccagctgattaaatccgccagcgtaccgggcgcagacgcgaacagcgggat

SEQ ID NO: 461830 - DNA, 75 bp, synthetic construct
  source 1..75: mol_type = other DNA
tacaacgggatgaccctgcgtgaatatgcccgtatgtcactgactgaacggggtattggggtttccagttataac

SEQ ID NO: 461831 - DNA, 75 bp, synthetic construct
  source 1..75: mol_type = other DNA
ggcgtgacaacgaaagtgcgtattgacgctggtgttgcgccagttgatcaccgcggcctggtgaaatgtacggcg

SEQ ID NO: 461832 - DNA, 75 bp, synthetic construct
  source 1..75: mol_type = other DNA
gcgattcgctgaatattacccccgcatttgtcctggtccccgccgcgctggagtctgccgcacatcgcgccattc

SEQ ID NO: 461833 - DNA, 75 bp, synthetic construct
  source 1..75: mol_type = other DNA
ctgggtatcacaactggatatgaattacatcaacttgatgtaacaagtcttgaatctgttcaggaaatactagcc

SEQ ID NO: 461834 - DNA, 75 bp, synthetic construct
  source 1..75: mol_type = other DNA
tggttgtctggagattcagggggccagtctagctcataagacgccccagcgtcgccatagtgcgttcaccgaata

SEQ ID NO: 461835 - DNA, 75 bp, synthetic construct
  source 1..75: mol_type = other DNA
gacattttatttggcatatcagaagtatattccggtatctcatcgtaaaaaatattcttcttgcaaaaagatatt

SEQ ID NO: 461836 - DNA, 75 bp, synthetic construct
  source 1..75: mol_type = other DNA
ctttgttggcggcacctgatatcacgaccattcaggggagaagagatcataccattttattgttcctttataaca

SEQ ID NO: 461837 - DNA, 75 bp, synthetic construct
  source 1..75: mol_type = other DNA
atgacgggatccattgttttcttgctgtcagatcaatcaagatatgttacaggtcagaacattatcgttgatgat

SEQ ID NO: 461838 - DNA, 75 bp, synthetic construct
  source 1..75: mol_type = other DNA
gtctctttcgacaagattgcgcttcagaaagtggatgggcagaattatgcaaaatccacaaccgtggaagtcagt

SEQ ID NO: 461839 - DNA, 75 bp, synthetic construct
  source 1..75: mol_type = other DNA
ctgcggcgtttgctgttgctcatcaaaatggtattgacgatctgcgtctggcaatgttgcaggcgcaactggctc

SEQ ID NO: 461840 - DNA, 75 bp, synthetic construct
  source 1..75: mol_type = other DNA
gcaggttatctctgctgaagcgctgaaaacttttgctgccagtgttgaaggcaacaagcgcctgagcattcctgt

SEQ ID NO: 461841 - DNA, 75 bp, synthetic construct
  source 1..75: mol_type = other DNA
accacatctggtttctggagcatgatgcagccggacagggagtggagttactgaagaagggggggacgtgtgagc

SEQ ID NO: 461842 - DNA, 75 bp, synthetic construct
  source 1..75: mol_type = other DNA
ttcgattcaaggttatacgagtccttggggggatttgatgagagatattttatgtactgcgaagatattgatatt

SEQ ID NO: 461843 - DNA, 75 bp, synthetic construct
  source 1..75: mol_type = other DNA
atgatttgtataaatcaaatgcaatttctgaatatcttcgtgatgaactaaatataaataacattacatgccgag

SEQ ID NO: 461844 - DNA, 75 bp, synthetic construct
  source 1..75: mol_type = other DNA
ggcaaccggcaaattcaacgcgaaagcagaagacgcactcaaagaggcgcagaagtcaggcaggctgtcagaaga

SEQ ID NO: 461845 - DNA, 75 bp, synthetic construct
  source 1..75: mol_type = other DNA
gcgcgtttatcggataatgagcgaaaataacctgttgttacatgacaaaccttcatggccgcagcgggaacataa

SEQ ID NO: 461846 - DNA, 75 bp, synthetic construct
  source 1..75: mol_type = other DNA
gcgaaaatgagccgcctgtttgatctgcaatgtaacccacaaattgttaacggtgcgttgggcaggttaggcgcg

SEQ ID NO: 461847 - DNA, 75 bp, synthetic construct
  source 1..75: mol_type = other DNA
ggcgtggcgtgctcggtgtgtccgggcgggatgacttcgggcaacccggtaaatccgctgctgggggcgaaggtg

SEQ ID NO: 461848 - DNA, 75 bp, synthetic construct
  source 1..75: mol_type = other DNA
atcatcaacgaaaaacatattcgccggatgcttgccgggaaaatttcaaatcgcctgggccacggtatgggtttt

SEQ ID NO: 461849 - DNA, 75 bp, synthetic construct
  source 1..75: mol_type = other DNA
tggtagtcgttcattccgtgaagctgttcctggcttaatagtaataacatcggatttaagatatcaagagggtag

SEQ ID NO: 461850 - DNA, 75 bp, synthetic construct
  source 1..75: mol_type = other DNA
ctcgaggatatcttaaaagtcattgatattgcaaggtattgtccatctgcctgcaacaggcaagccgttaagtta

SEQ ID NO: 461851 - DNA, 75 bp, synthetic construct
  source 1..75: mol_type = other DNA
ttaaatctaaagaatattttcataggttgagtacagggcataaatttgttttgcattcgatggcgcatattttgt

SEQ ID NO: 461852 - DNA, 75 bp, synthetic construct
  source 1..75: mol_type = other DNA
aagccggttcatatggaaatgacgttcaatatatgatgcctctaatgaaaatcaattacatatatggctcaaatg

SEQ ID NO: 461853 - DNA, 75 bp, synthetic construct
  source 1..75: mol_type = other DNA
atgcttgacaacttaataggggcaccccccgggattccgctacggctctgccatcgcaatccccccgtttatctc

SEQ ID NO: 461854 - DNA, 75 bp, synthetic construct
  source 1..75: mol_type = other DNA
ctataagggcagcgggtttaatgaactgaagtttgacgatgcgacagggaaagaacaggtctacatccacgcgca

SEQ ID NO: 461855 - DNA, 75 bp, synthetic construct
  source 1..75: mol_type = other DNA
tccatggctgtattttcagctctgaccctgggtgttgcgacaaatgcgtctgctgtcaccacggttaatggtggt

SEQ ID NO: 461856 - DNA, 75 bp, synthetic construct
  source 1..75: mol_type = other DNA
taatgttataactagaaatggggagtttactgattttcaacgacctgaaattgaaacttttggtgagaatattgg

SEQ ID NO: 461857 - DNA, 75 bp, synthetic construct
  source 1..75: mol_type = other DNA
ttgaccagatgccggaatgtatgaaaggtgaagatccggtcactcacgacatcatcaacgaaaaacatattcgcc

SEQ ID NO: 461858 - DNA, 75 bp, synthetic construct
  source 1..75: mol_type = other DNA
cattaataacaaccatgatgcatatattttcttaagttccttatactttgttttagcttttatgttagtaggaat

SEQ ID NO: 461859 - DNA, 75 bp, synthetic construct
  source 1..75: mol_type = other DNA
agaaactaagaatggccttccctccacggttcagctattttatgaggaatctaaggataatgaacctttagcgaa

SEQ ID NO: 461860 - DNA, 75 bp, synthetic construct
  source 1..75: mol_type = other DNA
atctcaaagtgtgggtcaatgagtatattggagattgcactgatgaggaattaaacgatcgtgagtttattgcat

SEQ ID NO: 461861 - DNA, 75 bp, synthetic construct
  source 1..75: mol_type = other DNA
cacgtaaccgcctggacggaacgcgaagcgcgtaaccgttgcccgtacggttgtgttgctgtgttcgccgcccgt

SEQ ID NO: 461862 - DNA, 75 bp, synthetic construct
  source 1..75: mol_type = other DNA
ataacgtgcccacctgcagggagaaagcacgcgccaatattcagaagatgaaaaacatgattaacggattcaggg

SEQ ID NO: 461863 - DNA, 75 bp, synthetic construct
  source 1..75: mol_type = other DNA
tttccggtggcggttatcttaaccacactgaggaggctgccaacatggctactatccctacccttgtacattctc

SEQ ID NO: 461864 - DNA, 75 bp, synthetic construct
  source 1..75: mol_type = other DNA
gaacaccgaggtgctgaataaccgcaccacggatgtgataaacaaccatgctgagaccattggcaacaatcagat

SEQ ID NO: 461865 - DNA, 75 bp, synthetic construct
  source 1..75: mol_type = other DNA
gccttctactgaagcaatggataaaaaagcgttcgataaagcaatgaacgacgaagcagaacgcatcattaatat

SEQ ID NO: 461866 - DNA, 75 bp, synthetic construct
  source 1..75: mol_type = other DNA
taccaccatgaaaaccgcacacccggcagcctgccggggacgaagacgcagatgacgatccgctcgaaaacctat

SEQ ID NO: 461867 - DNA, 75 bp, synthetic construct
  source 1..75: mol_type = other DNA
atgatgacaacagcttaaaattattcgcttcgctgttgatttcactttcatattctagtgcctacgcagatttag

SEQ ID NO: 461868 - DNA, 75 bp, synthetic construct
  source 1..75: mol_type = other DNA
tgtccgcagccatttgtctgaccgtatccggtgcgcctgcatgggcgtctgagcagcagtccacgctgagcgcgg

SEQ ID NO: 461869 - DNA, 75 bp, synthetic construct
  source 1..75: mol_type = other DNA
agaagggcaattgacgctaattgatggaccttttgtaaatgcaatcaaaactgcagtcaataatcctacctcgaa

SEQ ID NO: 461870 - DNA, 75 bp, synthetic construct
  source 1..75: mol_type = other DNA
gaccaccggggcctgccgctggcgctcatcagcgaagaaggcaatacggtgtggagcgcggaatatgatgaatgg

SEQ ID NO: 461871 - DNA, 75 bp, synthetic construct
  source 1..75: mol_type = other DNA
gcgcatcagcggcccgcgacagacgcgggaatacggctacagcgccacgggcaggctggagagtatgcgcaccct

SEQ ID NO: 461872 - DNA, 75 bp, synthetic construct
  source 1..75: mol_type = other DNA
accggctgccggacccggagctgcacccggacagtacactcacagtgtggccggataaccgcatcgcggaggatg

SEQ ID NO: 461873 - DNA, 75 bp, synthetic construct
  source 1..75: mol_type = other DNA
tcagtacgtttgagcagttgcaccagagcaaaggcgaggtgtttgaacgtggggtgatcaacgtgtttaaagggc

SEQ ID NO: 461874 - DNA, 75 bp, synthetic construct
  source 1..75: mol_type = other DNA
ttgctggcttccaccatcatcttatgtaactacaccaacaacaccacgctggtggtcatgctgatggcgctggct

SEQ ID NO: 461875 - DNA, 75 bp, synthetic construct
  source 1..75: mol_type = other DNA
ctgccgatgtgaaaacgacgtggttaaaagaggatccatcattactcttatttgtcgatcaacccgatctttcgc

SEQ ID NO: 461876 - DNA, 75 bp, synthetic construct
  source 1..75: mol_type = other DNA
atcactttcaaacgtttggatctggtggagaagatgaatgatatcgtggcgaagcactttccgtcagcgttatca

SEQ ID NO: 461877 - DNA, 75 bp, synthetic construct
  source 1..75: mol_type = other DNA
gcgatttttaaccataacgtaacggctatcgccattgtgatgacgctgtttgtcggtggtttcttgctatcaacg

SEQ ID NO: 461878 - DNA, 75 bp, synthetic construct
  source 1..75: mol_type = other DNA
ataccatcacacttgccgatctgaccgatgacaatgccagcagcggtaacagtgttctggcggtcacgcagcaac

SEQ ID NO: 461879 - DNA, 75 bp, synthetic construct
  source 1..75: mol_type = other DNA
ccgttattctcagtgcctattgcgtgcaacagctaactgagatgtctactgtatgcgacaaacagatgtcctata

SEQ ID NO: 461880 - DNA, 75 bp, synthetic construct
  source 1..75: mol_type = other DNA
cttatcaacttacccggaagtgcgctcggttctgcttctacgatcattacaggccgaaggttgggggtagggtag

SEQ ID NO: 461881 - DNA, 75 bp, synthetic construct
  source 1..75: mol_type = other DNA
atgcggttttttttacgtcaggaaagcaggggagaatgctgctagttgggcaactggtctttctgctccaaatta

SEQ ID NO: 461882 - DNA, 75 bp, synthetic construct
  source 1..75: mol_type = other DNA
tatcatcaaccttggcttacagttctccatgtatatggtcattctgctgcagggtgtgcgcatgatggtgggcga

SEQ ID NO: 461883 - DNA, 75 bp, synthetic construct
  source 1..75: mol_type = other DNA
gctgtcgagcgggtcaaagacattcagatccacaaacagttgaatggaccactgtcgcagtttgggcaacgcttc

SEQ ID NO: 461884 - DNA, 75 bp, synthetic construct
  source 1..75: mol_type = other DNA
cgcacaaatccgtccttcttccgtagtgaccaaagactacacctttaaacgtcccggctgggcagggcgttttga

SEQ ID NO: 461885 - DNA, 75 bp, synthetic construct
  source 1..75: mol_type = other DNA
cccggacaacaagcaacatatatatttagaggtaaaaacaatccacaaaatagaatagcaataaggcttggtggc

SEQ ID NO: 461886 - DNA, 75 bp, synthetic construct
  source 1..75: mol_type = other DNA
atgaaatgcttcttattaaaagaaaactacagtctattgatgctattactattttcgttattaacacattcaacg

SEQ ID NO: 461887 - DNA, 75 bp, synthetic construct
  source 1..75: mol_type = other DNA
gtggagaacccggagacgggggaactgctgtggcagcatgagacgaaacacgcatacaacgagcaggggctggca

SEQ ID NO: 461888 - DNA, 75 bp, synthetic construct
  source 1..75: mol_type = other DNA
ggtggtggcgagcgatcttcacggcgaacagccgcaggcggtaccgggacgcagtggttcaggcaccacgctgga

SEQ ID NO: 461889 - DNA, 75 bp, synthetic construct
  source 1..75: mol_type = other DNA
gcaggttaatggtgattcactattgattaactggaactgtgcagcctcgaaagccccaccgaagactcctgatga

SEQ ID NO: 461890 - DNA, 75 bp, synthetic construct
  source 1..75: mol_type = other DNA
ggatatggctgccgcacatctgcatgcaatggcactggcacagttgcgcggtcatacactaccgttacgcactga

SEQ ID NO: 461891 - DNA, 75 bp, synthetic construct
  source 1..75: mol_type = other DNA
cgcgactaataccataattaatggcggtacacagaatatttataatcatggtattgctacgggaaccaatatcaa

SEQ ID NO: 461892 - DNA, 75 bp, synthetic construct
  source 1..75: mol_type = other DNA
caagagccgaatatctgcgggataaaacaatcaacgcgatcaccttcctgcaacagcggtggctctccgtttatc

SEQ ID NO: 461893 - DNA, 75 bp, synthetic construct
  source 1..75: mol_type = other DNA
gcttcgatgatgatcttgccgcacagacaacgcaggccagcaaccgtatccgcggccttctgacccagatacatc

SEQ ID NO: 461894 - DNA, 75 bp, synthetic construct
  source 1..75: mol_type = other DNA
aggaaattaccgccctttccttgatggtcaccaccaggatgtattagatagcatctctaaagaagtcgatgagct

SEQ ID NO: 461895 - DNA, 75 bp, synthetic construct
  source 1..75: mol_type = other DNA
tggatattctccgcgatattctcgccagtattagcgaagataagcgtatccaggtactccttatttcgtggtgtt

SEQ ID NO: 461896 - DNA, 75 bp, synthetic construct
  source 1..75: mol_type = other DNA
cgtagtacacgcagcattggtctgactgaagccggcagaatttactaccagggctgccgtcggatgctccatgaa

SEQ ID NO: 461897 - DNA, 75 bp, synthetic construct
  source 1..75: mol_type = other DNA
gtgtaaaatcagatcagtctacgtgctcagtaagtaacgggcgcatatccagcgaaaaaaagactacgtggtcct

SEQ ID NO: 461898 - DNA, 75 bp, synthetic construct
  source 1..75: mol_type = other DNA
cgggcaaggctggatgatgcatgcgcccggagtaaggggcaggagttaaccaggctactttgggcacttcgtgcc

SEQ ID NO: 461899 - DNA, 75 bp, synthetic construct
  source 1..75: mol_type = other DNA
gtttgcgatccgctttgccagtttcaataagggattactggaaaaccgtaactatattgacttgaactgctttat

SEQ ID NO: 461900 - DNA, 75 bp, synthetic construct
  source 1..75: mol_type = other DNA
tgccattcgttttgccagctttaataaagggttattggaaaatcgcaactatatcgatctcaactgctttatgca

SEQ ID NO: 461901 - DNA, 75 bp, synthetic construct
  source 1..75: mol_type = other DNA
tcttactccggaaacacttttcggctctaaatctcaggataaacatgcgcttttccccatttttactgcgagttg

SEQ ID NO: 461902 - DNA, 75 bp, synthetic construct
  source 1..75: mol_type = other DNA
caggtatcactgtcgcggaaattactgggtcaaacagcatcagtgtggcagaacatgtggtcatgatggtgcttt

SEQ ID NO: 461903 - DNA, 75 bp, synthetic construct
  source 1..75: mol_type = other DNA
gcgatgcgttgtgtctgaatgcgcgctttaccagccgtgaagaggccatccacgtgttgactcaacgtcttgctg

SEQ ID NO: 461904 - DNA, 75 bp, synthetic construct
  source 1..75: mol_type = other DNA
gaaggtcattatcacctggtatgagtgcgaaatcgtccggctgaaggtgaagtatggcgaaattacgccaccggg

SEQ ID NO: 461905 - DNA, 75 bp, synthetic construct
  source 1..75: mol_type = other DNA
ttgggtgaggttcgtggttatcgagcaaacgacccgaaccgccagacaaccattgcgttccagctgtgcccggat

SEQ ID NO: 461906 - DNA, 75 bp, synthetic construct
  source 1..75: mol_type = other DNA
atttccgatccttgcggttgatgaatatcaggatttgggcgttgcgctccaccgtatagtcaaacgcctggcttt

SEQ ID NO: 461907 - DNA, 75 bp, synthetic construct
  source 1..75: mol_type = other DNA
ctgtcagagaaattgcggcagttcagtctttccctgatgacttctttttctgcggtagtaagacgtctggatatc

SEQ ID NO: 461908 - DNA, 75 bp, synthetic construct
  source 1..75: mol_type = other DNA
ttaaatggttttattgatattgtgcgggagcagcacaatacccgcgaatttatcaaaggacgggcactgttgcgt

SEQ ID NO: 461909 - DNA, 75 bp, synthetic construct
  source 1..75: mol_type = other DNA
aaactttaaaagaagcatataaagctgtagcagaaacaaagtttggacataaaataacagaagaattagagtcat

SEQ ID NO: 461910 - DNA, 75 bp, synthetic construct
  source 1..75: mol_type = other DNA
atgattaaatataataaagctttcgatgaagtagagttgcttatgaatgaaatgcttggcaaattaaatatagca

SEQ ID NO: 461911 - DNA, 75 bp, synthetic construct
  source 1..75: mol_type = other DNA
aaaatttaaaaatactgtcttttatttataacgaaggatctcaagaggttatagacgatatgactcccgtaataa

SEQ ID NO: 461912 - DNA, 75 bp, synthetic construct
  source 1..75: mol_type = other DNA
gaactccattatatcctggtttgaagcaggtggacttgcagggggattactggcggggtacttgtccgattttat

SEQ ID NO: 461913 - DNA, 75 bp, synthetic construct
  source 1..75: mol_type = other DNA
gcgctgccggatgtggtgacctgtattgactgccagcagatgcgtgagcgcaggaggaagacatgtcctgggaag

SEQ ID NO: 461914 - DNA, 75 bp, synthetic construct
  source 1..75: mol_type = other DNA
cagcagtatgatgaggagtccggcctctattacaaccgccaccgctattatgacccgctgcaggggcggtatatc

SEQ ID NO: 461915 - DNA, 75 bp, synthetic construct
  source 1..75: mol_type = other DNA
ataaaatagctgcaatgattaacgcaggaacagatttatcagaacgtaagattgctgaacaatttgaagtttccc

SEQ ID NO: 461916 - DNA, 75 bp, synthetic construct
  source 1..75: mol_type = other DNA
aatggtttacctttcttcgctcatctgtcggaggagtgcggcactgcgcccgagactaaatggcataagtcgggt

SEQ ID NO: 461917 - DNA, 75 bp, synthetic construct
  source 1..75: mol_type = other DNA
gaatattatcttcgggtttatgaataatagtagtgacatctcattctccatttatgtgatttgtgcgctttctgg

SEQ ID NO: 461918 - DNA, 75 bp, synthetic construct
  source 1..75: mol_type = other DNA
gttactcgaacaaaatgctttatttttttgctcagcaaaaaattttgaagatccgttcgaaggtgaatttgcttg

SEQ ID NO: 461919 - DNA, 75 bp, synthetic construct
  source 1..75: mol_type = other DNA
cccaggaaaatatacctgcaatatttgataataaccgtactttctatactaagttagttggggagcgaactgctg

SEQ ID NO: 461920 - DNA, 75 bp, synthetic construct
  source 1..75: mol_type = other DNA
cggagcaactggcggtgcataacaaggccgtggcgctagcgaaggctgaaggcatcagttacgaagctgccgtta

SEQ ID NO: 461921 - DNA, 75 bp, synthetic construct
  source 1..75: mol_type = other DNA
aggtacgcgtcaaagaccgccacgccgccttgttgcgtcagatggcctttgaagtgaaccaagtttttaacttta

SEQ ID NO: 461922 - DNA, 75 bp, synthetic construct
  source 1..75: mol_type = other DNA
cacgtgatttaaatcaaacattagcacttctaaatataacgacaagaagtacaccacttcctcctactgaagcac

SEQ ID NO: 461923 - DNA, 75 bp, synthetic construct
  source 1..75: mol_type = other DNA
gggctataccgacgcacagatcggtagtcgtctggaagatttagcggacgacctcctcttaacttctaaatattg

SEQ ID NO: 461924 - DNA, 75 bp, synthetic construct
  source 1..75: mol_type = other DNA
aagaagaaccttgaggccagcaatttcactggtggtgtagcagaattcgctaaagatctggatacctttgccagc

SEQ ID NO: 461925 - DNA, 75 bp, synthetic construct
  source 1..75: mol_type = other DNA
atgtttgcaatgaagagtgcattccggtttttcaacagctgttacagtcatttcatgagtgctctggatgaggct

SEQ ID NO: 461926 - DNA, 75 bp, synthetic construct
  source 1..75: mol_type = other DNA
atcagagagatgattaaccgcggcgtgctgaagacggtcaccgaagaagaaattaaggggatcgtcagcgctggc

SEQ ID NO: 461927 - DNA, 75 bp, synthetic construct
  source 1..75: mol_type = other DNA
tggatataacatcaaatccactaatcgctctgtatttcgcttgttgcgacattagtaataatgaaaatacaaatg

SEQ ID NO: 461928 - DNA, 75 bp, synthetic construct
  source 1..75: mol_type = other DNA
aaaacacaaccgtccttaagcagttaagcctcctgaaagaggaacacaaggacgccacgatactgatgcatctgg

SEQ ID NO: 461929 - DNA, 75 bp, synthetic construct
  source 1..75: mol_type = other DNA
tgccgggctggaaagagagcgaactggaaattgaaaccgttggcggtcagctgaacatcagcggtaaacgtgaag

SEQ ID NO: 461930 - DNA, 75 bp, synthetic construct
  source 1..75: mol_type = other DNA
tcgccagttttactcgcgggtgctgttgggtattgggaatcctgcttttatccaaagtcggcaatacgtttcgta

SEQ ID NO: 461931 - DNA, 75 bp, synthetic construct
  source 1..75: mol_type = other DNA
aagcatcgtttcaccaacgatgtgcagatctccatcggtgatgcgcattcgggttatccggtaatgaacagcagc

SEQ ID NO: 461932 - DNA, 75 bp, synthetic construct
  source 1..75: mol_type = other DNA
ttttatgtcgatgagtttgtgcataatactgttgttctggaaaactatatatggagcattgagatgtgtttgttg

SEQ ID NO: 461933 - DNA, 75 bp, synthetic construct
  source 1..75: mol_type = other DNA
tccacattgatttacaaccttgatgatagggaagtctatagttttattagtgctgattatgttattttgctggct

SEQ ID NO: 461934 - DNA, 75 bp, synthetic construct
  source 1..75: mol_type = other DNA
ttttcaatcagggatgctgaaaatgcagttcccaaatgataatgaaaagcttagcgtatatttaaaaaataaaat

SEQ ID NO: 461935 - DNA, 75 bp, synthetic construct
  source 1..75: mol_type = other DNA
tcctgctcgttatgtgcgttcctatgcacctgcacagcaaagtgttgcggcagggagtgaatggaccgggatgca

SEQ ID NO: 461936 - DNA, 75 bp, synthetic construct
  source 1..75: mol_type = other DNA
ggtgaaagaactgacgggaacggtcactttccgccatttgctgcgcttctcgcaaaaagggcaattcgttctgcc

SEQ ID NO: 461937 - DNA, 75 bp, synthetic construct
  source 1..75: mol_type = other DNA
atgatgccggcaccgttcgtcttaaaatcggcgtggctaatgcaggtaacagcccacgcattcattatgctgaag

SEQ ID NO: 461938 - DNA, 75 bp, synthetic construct
  source 1..75: mol_type = other DNA
cccgtcttggatggcctgctacgtctgctcggtggtggactatccaggagcttgccgctcgactgggagagcctg

SEQ ID NO: 461939 - DNA, 75 bp, synthetic construct
  source 1..75: mol_type = other DNA
ggattcctattcgtgaatagacattatacagaagaaatagttagtgctcagtggatgagtttgatcaatcgagcc

SEQ ID NO: 461940 - DNA, 75 bp, synthetic construct
  source 1..75: mol_type = other DNA
tgcgctgcccggcccgctgccgtttattctttcccgcgcctacagcagctaccggaccagaacacccgcgccggt

SEQ ID NO: 461941 - DNA, 75 bp, synthetic construct
  source 1..75: mol_type = other DNA
atgaacatgccaacccgtactcctgttatgccattagcgcaaactcgtgaggaaataaatgctacggcggcatcg

SEQ ID NO: 461942 - DNA, 75 bp, synthetic construct
  source 1..75: mol_type = other DNA
atggttgatccgcaatacatcgcccgtggcgacttcaccttcgaagctggaagcaaagcaatgcaacagctgctt

SEQ ID NO: 461943 - DNA, 75 bp, synthetic construct
  source 1..75: mol_type = other DNA
ttgtttcttgatgatgtggataagtattcagttactcataaagatataacaaacattttaggtggtgatagtcaa

SEQ ID NO: 461944 - DNA, 75 bp, synthetic construct
  source 1..75: mol_type = other DNA
gttaagggcttaaccgagagcgaaatgctggaatgtttgattgatcctaaccatcagggtagtgactaccgaaac

SEQ ID NO: 461945 - DNA, 75 bp, synthetic construct
  source 1..75: mol_type = other DNA
tacttccactactacagcacccaagtccttgggcaaggaactatagctgatgtagtgacacgggctttttccaat

SEQ ID NO: 461946 - DNA, 75 bp, synthetic construct
  source 1..75: mol_type = other DNA
cacaaactcagacatacggtaacggaatttgatgagagcgggaaaagcgaaccaacggacttatttacctggtac

SEQ ID NO: 461947 - DNA, 75 bp, synthetic construct
  source 1..75: mol_type = other DNA
ggtattattccccctgaagccgccgcggaaatttccgccgcctgccagacgctgaaaatagactggccgcgcctc

SEQ ID NO: 461948 - DNA, 75 bp, synthetic construct
  source 1..75: mol_type = other DNA
ttgattcagaattgtattcctctctcttcacgcagccggagatgaaatcaatctggtccgatgataatcttcttc

SEQ ID NO: 461949 - DNA, 75 bp, synthetic construct
  source 1..75: mol_type = other DNA
caggtgctaatatatttcactttaaacttttactcaaaaaacaaaagaaacatcaagagatttgagcttttcaat

SEQ ID NO: 461950 - DNA, 75 bp, synthetic construct
  source 1..75: mol_type = other DNA
tcagccaccacttcctattgatattgaaataaatggacttggaggaacttggtatcttaaagttgaaaatacaga

SEQ ID NO: 461951 - DNA, 75 bp, synthetic construct
  source 1..75: mol_type = other DNA
atgaaaagagttttgttttttttgctgatgatatttgttagttttggtgttatagctgattgcgaaatacaagct

SEQ ID NO: 461952 - DNA, 75 bp, synthetic construct
  source 1..75: mol_type = other DNA
aaactgtggatgactggaaaacggaattaaaactggacatgattagcgatgaaaataaattacagctgacgcgct

SEQ ID NO: 461953 - DNA, 75 bp, synthetic construct
  source 1..75: mol_type = other DNA
gatggtgatcggtttcttcctcgcagtcatgacttattccgtggagtggtcgacggccattgtcgatagcttccg

SEQ ID NO: 461954 - DNA, 75 bp, synthetic construct
  source 1..75: mol_type = other DNA
caatggggcgctttttctttcatgtgatgggggccctggctgaaatggaacgagaactgattgttgaacgaacaa

SEQ ID NO: 461955 - DNA, 75 bp, synthetic construct
  source 1..75: mol_type = other DNA
taaaaagttattccagcgttttcggacccacctgctctatcacacgcagatcaacgccgtcttttacggcaagtc

SEQ ID NO: 461956 - DNA, 75 bp, synthetic construct
  source 1..75: mol_type = other DNA
gctaggaccggaaatgtcggcgcgctcaatgtgcccggcatggattctggcgttaactctcaatcggaggcgtaa

SEQ ID NO: 461957 - DNA, 75 bp, synthetic construct
  source 1..75: mol_type = other DNA
acggcaggtgtgtcgatgttcagcccaatcacatcggttgtagttgccgtatctgcattgatcgtcctgatgtgt

SEQ ID NO: 461958 - DNA, 75 bp, synthetic construct
  source 1..75: mol_type = other DNA
caaacaggccggaagagcggccaagggcggtgacgacgatacggatcagcaggccgtcgctcagcaacggcagat

SEQ ID NO: 461959 - DNA, 75 bp, synthetic construct
  source 1..75: mol_type = other DNA
ttatgatgcgtatggtgcgcagcagttctattttccgaatgttctgaagtatgacccggatcaactatcaaagtc

SEQ ID NO: 461960 - DNA, 75 bp, synthetic construct
  source 1..75: mol_type = other DNA
atgaaaacatggttttccattaaggctatggcagatgttgtacatgtgcgcatttatgacgagatcggcgggtac

SEQ ID NO: 461961 - DNA, 75 bp, synthetic construct
  source 1..75: mol_type = other DNA
tcaagaatataatagattcgccgacaatactactgacacgtttatctttacaattataccagacaataaccatgt

SEQ ID NO: 461962 - DNA, 75 bp, synthetic construct
  source 1..75: mol_type = other DNA
tcgacagtaacgataatctcattgtcgcgttgaaagacctgcacgctggagaatcgttctcgtgggatgacgaca

SEQ ID NO: 461963 - DNA, 75 bp, synthetic construct
  source 1..75: mol_type = other DNA
cacagtgggcgatcttgtctgggccgtactgaccagcaacccgaaaatgtctgatggtaaaccgttgttccatgc

SEQ ID NO: 461964 - DNA, 75 bp, synthetic construct
  source 1..75: mol_type = other DNA
cgtgattatgccgactggctggatcgcaatgaggcgctgatgctgtcagcctacatgaataaaaccggactcggg

SEQ ID NO: 461965 - DNA, 75 bp, synthetic construct
  source 1..75: mol_type = other DNA
tcaaacttccgggaagcccgccgcgttggtatgaatggcttctcaacgttaaacaaagtgccggaaggggcagaa

SEQ ID NO: 461966 - DNA, 75 bp, synthetic construct
  source 1..75: mol_type = other DNA
aaaaatgatgtctgatatttctctatttaggcagccgcatgttttgtttacgtgctcccctgaaccatctagtct

SEQ ID NO: 461967 - DNA, 75 bp, synthetic construct
  source 1..75: mol_type = other DNA
gcacacgctatggctatccatacgctcacaatggcgacttacctttggttgtatagcgacttcgggttgcagcca

SEQ ID NO: 461968 - DNA, 75 bp, synthetic construct
  source 1..75: mol_type = other DNA
aacagcgtaaagaagttctgatgaccattaaaactgagatcatccagcgactgaatattcaacgcgatgaagcgt

SEQ ID NO: 461969 - DNA, 75 bp, synthetic construct
  source 1..75: mol_type = other DNA
ggtctgcgcatgcttgatgggcgcattctcggtaattatccgctgcatacagcagacagcactaaccttgcctgt

SEQ ID NO: 461970 - DNA, 75 bp, synthetic construct
  source 1..75: mol_type = other DNA
atgaactacgaggaagggaacaacattcatactgaaattgaatttttttcactcactattttctttttaaaaaca

SEQ ID NO: 461971 - DNA, 75 bp, synthetic construct
  source 1..75: mol_type = other DNA
atgtgggtggtgttgagatcgacgactcatatattccagaagttttctattcgacagattttggtgatcgtgagg

SEQ ID NO: 461972 - DNA, 75 bp, synthetic construct
  source 1..75: mol_type = other DNA
atgccggaggcattgcgtcgttttgaggtaatggtggaggatgtggcacgcaacgctgaagccgcctctcagagc

SEQ ID NO: 461973 - DNA, 75 bp, synthetic construct
  source 1..75: mol_type = other DNA
atgagcttgaacaggaggaaaaatataattgacgaagtcaagaaaattgaacattataaaaatttaaacacagac

SEQ ID NO: 461974 - DNA, 75 bp, synthetic construct
  source 1..75: mol_type = other DNA
gctgacgccgggtacgatagtggttaatgccagcgcaacggaccccgccgggaacccggtttccatcgatcgtaa

SEQ ID NO: 461975 - DNA, 75 bp, synthetic construct
  source 1..75: mol_type = other DNA
cctcaacgttgatgaactaaatctcactctcgataacggaagcaagtgggttggtcaggctgacctgcccccacg

SEQ ID NO: 461976 - DNA, 75 bp, synthetic construct
  source 1..75: mol_type = other DNA
atcaacattccgccaacaggttacgtgaatcagggcgaaatgctgactgtcattgtgccacgcaacattgatttt

SEQ ID NO: 461977 - DNA, 75 bp, synthetic construct
  source 1..75: mol_type = other DNA
gactttgctgatggttctgtatcccgcataaaaaatcgtcgctttctgctttcggctggaacaacttttccatgc

SEQ ID NO: 461978 - DNA, 75 bp, synthetic construct
  source 1..75: mol_type = other DNA
atggacgaagtcaagaaaattgaacattataaaaatttaaacacagacacatccgagaattctgctgcggattta

SEQ ID NO: 461979 - DNA, 75 bp, synthetic construct
  source 1..75: mol_type = other DNA
aatgctacagccaacgcctggagggttcatatatctattatccgcaccgcaatgtgtcacccgccctacgagcgg

SEQ ID NO: 461980 - DNA, 75 bp, synthetic construct
  source 1..75: mol_type = other DNA
cagggggcgctaatcagagttttgcaatgctacagccaacgcctggagggttcatatatctattatccgcaccgc

SEQ ID NO: 461981 - DNA, 75 bp, synthetic construct
  source 1..75: mol_type = other DNA
tccatggcgtgaccggatcctgaacgttgtcgggctgcccgtgccggatgcgaccggcgggcgtctggaaattct

SEQ ID NO: 461982 - DNA, 75 bp, synthetic construct
  source 1..75: mol_type = other DNA
ctaaagaaagagatactgcgcgtatacgatgagaatcatcaggtatacggtgagcgtaaagtctggtgtcagttg

SEQ ID NO: 461983 - DNA, 75 bp, synthetic construct
  source 1..75: mol_type = other DNA
atgcagtgaactgcatattgccccgtcaacgtattaccactgtcagcaacagcgacatcatcctgataaacgcag

SEQ ID NO: 461984 - DNA, 75 bp, synthetic construct
  source 1..75: mol_type = other DNA
gcaatcgccagcagacaactcacttgcatcaggatatgcacagcttgccactcagcagaaggaaggactagatca

SEQ ID NO: 461985 - DNA, 75 bp, synthetic construct
  source 1..75: mol_type = other DNA
acgaactctgtgcaaaaagaataatatctctgcttcctgaatctgataaaaatacgtgtaaatggcgcgctaact

SEQ ID NO: 461986 - DNA, 75 bp, synthetic construct
  source 1..75: mol_type = other DNA
agcgagagtggttagccacaaatgaaccggaacgggcgacagtgaagatcatgattcaagggaaattctatcgct

SEQ ID NO: 461987 - DNA, 75 bp, synthetic construct
  source 1..75: mol_type = other DNA
agtttcgtcgctgggatatacccgcgaggtcagtggtgagcggcagtggctgatcgataaaaaccagtttctgca

SEQ ID NO: 461988 - DNA, 75 bp, synthetic construct
  source 1..75: mol_type = other DNA
atgattcaagggaaattctatcgcttctttgccctgtggccggatcgcatttatacgggaatacaggagttggac

SEQ ID NO: 461989 - DNA, 75 bp, synthetic construct
  source 1..75: mol_type = other DNA
tattgtgaatataatggcgtgaccgctgataaaaatatccgatttggagggcagacgaatactggagaacgacat

SEQ ID NO: 461990 - DNA, 75 bp, synthetic construct
  source 1..75: mol_type = other DNA
ttaaaacagaacgacaggtaaggttacgtatacggtttgataagtatgatggtagtgcaacaacttttcttggcg

SEQ ID NO: 461991 - DNA, 75 bp, synthetic construct
  source 1..75: mol_type = other DNA
tcgccgaaaaaaatgaaactaatggcagacaccatttctgcggtttatctcgatggatacgagggcaaagagtaa

SEQ ID NO: 461992 - DNA, 75 bp, synthetic construct
  source 1..75: mol_type = other DNA
aattaactatacctaaaggtggtggagggaattgggataatgaaaatataagacttttagctcagcgaatgggat

SEQ ID NO: 461993 - DNA, 75 bp, synthetic construct
  source 1..75: mol_type = other DNA
gctctcatttccaataggagcaatgatttgtgcaactacagtctatatatacatatttttgcgagatgtatcccc

SEQ ID NO: 461994 - DNA, 75 bp, synthetic construct
  source 1..75: mol_type = other DNA
acatatttttgcgagatgtatccccagcaaaaatagtaatatcctctatgatttcagtatatattggaagcttgg

SEQ ID NO: 461995 - DNA, 75 bp, synthetic construct
  source 1..75: mol_type = other DNA
cttaatagcaacagcggcagcggttcaatatacaggaatacaacagcctgtcatcatcctggtaataaagattgt

SEQ ID NO: 461996 - DNA, 75 bp, synthetic construct
  source 1..75: mol_type = other DNA
ctgtattctgtgtcattcaactgtttatatgcaacagtaaaatttcatatgctgacgatggcggatacctaaatg

SEQ ID NO: 461997 - DNA, 75 bp, synthetic construct
  source 1..75: mol_type = other DNA
gtgattcagaaaataaatattttagacagtagccagtcaggcgttaaaaatggggcggatagggttttggctgcg

SEQ ID NO: 461998 - DNA, 75 bp, synthetic construct
  source 1..75: mol_type = other DNA
ttttttatacatagttgttgtgtacagaaatgacagccctctaggagaacaacgggcaaatagatttatagaatt

SEQ ID NO: 461999 - DNA, 75 bp, synthetic construct
  source 1..75: mol_type = other DNA
gggaaactggtctcttttaaccagtttgcgattattttcgggcaacttttagtttactgcgtaaactattttatt

SEQ ID NO: 462000 - DNA, 75 bp, synthetic construct
  source 1..75: mol_type = other DNA
ttactgcgtaaactattttattgcccgttccggtgatgccagctggctgaatactgacggctggcgttatatgtt

SEQ ID NO: 462001 - DNA, 75 bp, synthetic construct
  source 1..75: mol_type = other DNA
gccgtgacgggcttacttgttcaggtcgcccgtgaaacagatgatcgcgttaccgcgctggaagaggaaaacaca

SEQ ID NO: 462002 - DNA, 75 bp, synthetic construct
  source 1..75: mol_type = other DNA
aggggatgagccgggatcgcagtgccatgtttggattgatgttctctgtcagtttgggggcgtcaaaagagcttt

SEQ ID NO: 462003 - DNA, 75 bp, synthetic construct
  source 1..75: mol_type = other DNA
ctgaaatgattattgcacgtgaaatgggagaaatctttagctacatgcctgtggaaataaacagttatatgaaat

SEQ ID NO: 462004 - DNA, 75 bp, synthetic construct
  source 1..75: mol_type = other DNA
aagtgcttctatttttattttactaaaaggatggagtagccatctattcattattactgtagctgaattattata

SEQ ID NO: 462005 - DNA, 75 bp, synthetic construct
  source 1..75: mol_type = other DNA
aaaaattccactacagaacatcgataacttcaaacacaacaaaagcctcagggatgttaaaaacgccatagaatt

SEQ ID NO: 462006 - DNA, 75 bp, synthetic construct
  source 1..75: mol_type = other DNA
cttacataccagaaaatacggacacagatgcatcctaccttatatctgaagatgggcaggactggtatgagtgtc

SEQ ID NO: 462007 - DNA, 75 bp, synthetic construct
  source 1..75: mol_type = other DNA
tgagttattaaaagaacatctgaataaaaatgaaatattatctaagaatgttgatgtttttggtccagttgagtt

SEQ ID NO: 462008 - DNA, 75 bp, synthetic construct
  source 1..75: mol_type = other DNA
tagattattgttcatattcaataaacaaaggaaccaaacttaaagctggtaaaaaaccacagaataaggatcagt

SEQ ID NO: 462009 - DNA, 75 bp, synthetic construct
  source 1..75: mol_type = other DNA
attattttaaaaatccattccagaccaactatagttttgatttttataaaagtcaaagtttagaatatgactttg

SEQ ID NO: 462010 - DNA, 75 bp, synthetic construct
  source 1..75: mol_type = other DNA
gctaatgctggtgactggtttattcagaaacgcgattatgatgatgccggaagcgttagtaacgcaattgcatat

SEQ ID NO: 462011 - DNA, 75 bp, synthetic construct
  source 1..75: mol_type = other DNA
attttatctcgcaacacctgatggacgatttgaggcgcttaataataaaggagaatatatttttatcagaaatag

SEQ ID NO: 462012 - DNA, 75 bp, synthetic construct
  source 1..75: mol_type = other DNA
ttaatagttttgaagagttgcctgtaaaaattgagtttgttcttggtaagaaaataattaatctttatgaaatag

SEQ ID NO: 462013 - DNA, 75 bp, synthetic construct
  source 1..75: mol_type = other DNA
gtgctggagctggcgcaactggccccaggtgaactgcgcactctgttacagccgtttatgggcggacaatggtaa

SEQ ID NO: 462014 - DNA, 75 bp, synthetic construct
  source 1..75: mol_type = other DNA
tgctatcaaatataacaatagaaaagagcaacctttcatatgggtattattttggttgtgtattatccaatatat

SEQ ID NO: 462015 - DNA, 75 bp, synthetic construct
  source 1..75: mol_type = other DNA
aagcgcgtgccttgaagcctcatctccaggttataaaattgacggattagggcttacttttaaagtatcaactct

SEQ ID NO: 462016 - DNA, 75 bp, synthetic construct
  source 1..75: mol_type = other DNA
agcgcgcatttggtgagtgggaaggaggagaacctgataaccgttatgcaggaaattatccaagaacatttatga

SEQ ID NO: 462017 - DNA, 75 bp, synthetic construct
  source 1..75: mol_type = other DNA
tgcacaacgctgaatcagtcatcagaccgcgaccttaaagacgatattctcgttatcagcgacgcgacgaaagca

SEQ ID NO: 462018 - DNA, 75 bp, synthetic construct
  source 1..75: mol_type = other DNA
gttcggaggccgcaattccggtttttggggaagaacaattgaaaatggaacgacgcaggaatggaagaaattact

SEQ ID NO: 462019 - DNA, 75 bp, synthetic construct
  source 1..75: mol_type = other DNA
gcatcaacaaaggccactgaagcctcaaaaagtgctgccgctgcagagtcctcaaaaagcgcggcggctaccagt

SEQ ID NO: 462020 - DNA, 75 bp, synthetic construct
  source 1..75: mol_type = other DNA
aaccttacgttacgcatgggtccgagaatataccaaaaatggaaaacggcattaccatctgatattgtgtttcaa

SEQ ID NO: 462021 - DNA, 75 bp, synthetic construct
  source 1..75: mol_type = other DNA
caatttgtggtttgttgtgaatattgtctgagtcaacaggaacaaaaagcattacggaatacatcgttgcgagcg

SEQ ID NO: 462022 - DNA, 75 bp, synthetic construct
  source 1..75: mol_type = other DNA
ctttatacttatcgctggaatccgacaacaggcccgcaatggacacgccacgcaagaaaagatgaggttatccga

SEQ ID NO: 462023 - DNA, 75 bp, synthetic construct
  source 1..75: mol_type = other DNA
gcgcttgttgacagcagggacaacaatatatccgacgatgagttctattctcttttcaaagagatctgccgtctc

SEQ ID NO: 462024 - DNA, 75 bp, synthetic construct
  source 1..75: mol_type = other DNA
ttccttccatacaaacacagagtagtaacagggcatcacaaggtagcgatgttgcttcacaaatcgcgcggataa

SEQ ID NO: 462025 - DNA, 75 bp, synthetic construct
  source 1..75: mol_type = other DNA
agttgaaggcagcagcaaagcggctgcatacgctacaggctggaacgcctgccgcgccgctatgcttcatgggaa

SEQ ID NO: 462026 - DNA, 75 bp, synthetic construct
  source 1..75: mol_type = other DNA
tgattaaagaaatcaaagagcgcataggcagcctagacgtgagagacaatattgaacgccgtgcttatgaaattg

SEQ ID NO: 462027 - DNA, 75 bp, synthetic construct
  source 1..75: mol_type = other DNA
ctcgccgaatgttatatatcactagcatttcatgggaagtatgaatttgaagacgcaattcacaaagcatcagag

SEQ ID NO: 462028 - DNA, 75 bp, synthetic construct
  source 1..75: mol_type = other DNA
gcagtatagagggtttgcgcgcccttgtcaccccgcgttgcgcattccaatcgccagtgtcgcggcgatattacg

SEQ ID NO: 462029 - DNA, 75 bp, synthetic construct
  source 1..75: mol_type = other DNA
tccccttcccgcccagccattagcgcattgccctggtctcgtaccacgtcccataacgcttcagcggcggtggaa

SEQ ID NO: 462030 - DNA, 75 bp, synthetic construct
  source 1..75: mol_type = other DNA
aaagacgttaccctggccctgggggagcgcgttggccatacggtggtgtacggcaccacgcgcgtcggtaagacc

SEQ ID NO: 462031 - DNA, 75 bp, synthetic construct
  source 1..75: mol_type = other DNA
cgggcaccaggacacggccgatgtcaatgcagaccaggacttcacctcaagcacccaggaccgcgtcgggacggt

SEQ ID NO: 462032 - DNA, 75 bp, synthetic construct
  source 1..75: mol_type = other DNA
cgcccgtatggaggaaccgcccggagacagttgtaacggtaaaaaatgaccctattttatggctgaacgacagcg

SEQ ID NO: 462033 - DNA, 75 bp, synthetic construct
  source 1..75: mol_type = other DNA
ttcctagtgaagttaagtttagattaaccctaaaatctctaacttctccgacagctgaatacaatgatggtgtgg

SEQ ID NO: 462034 - DNA, 75 bp, synthetic construct
  source 1..75: mol_type = other DNA
ggaaaggggcaaacaaacagggccatatagtaacaacagctctaccctctgtctccccaacaataaatttttcat

SEQ ID NO: 462035 - DNA, 75 bp, synthetic construct
  source 1..75: mol_type = other DNA
tctgcatggtattgagccggatgagcaggatgtgacgctggcactgggtgaacgtgtggggcacaccattgtcta

SEQ ID NO: 462036 - DNA, 75 bp, synthetic construct
  source 1..75: mol_type = other DNA
aaccgtatatcgaaaaggatatcgattcagcgcacaagtctataaaacaaaaataaatagcagtgagtcatataa

SEQ ID NO: 462037 - DNA, 75 bp, synthetic construct
  source 1..75: mol_type = other DNA
agcgtcgcatcaggcgttgatgtcggatgcggcgtaaacgccttatccgacctacaaaaatcacgctacatcagg

SEQ ID NO: 462038 - DNA, 75 bp, synthetic construct
  source 1..75: mol_type = other DNA
atgctcttatacagatatgtaataattaatgacttcgaaattaatgagggtaagtacttttttgcagtggttatt

SEQ ID NO: 462039 - DNA, 75 bp, synthetic construct
  source 1..75: mol_type = other DNA
ggtgatgtcaccacacctgtgttggtgaagccgtcggatggagaaggcacagtaatcagcgccaccagagacccg

SEQ ID NO: 462040 - DNA, 75 bp, synthetic construct
  source 1..75: mol_type = other DNA
caggaagggagcaggcatgtttttcaggtgatgaggcaggagaaggtggaactgattattgcggtacagccacat

SEQ ID NO: 462041 - DNA, 75 bp, synthetic construct
  source 1..75: mol_type = other DNA
cgttagtgttgcctgttcggatgggacaatagcgcctgccgaaatcaaacagcttgagaagatttattcaagttt

SEQ ID NO: 462042 - DNA, 75 bp, synthetic construct
  source 1..75: mol_type = other DNA
ctgacccaaaattccctgatgctgagttccgtaatctgttcaatgaagtcgctcggttaagatcgatattcattg

SEQ ID NO: 462043 - DNA, 75 bp, synthetic construct
  source 1..75: mol_type = other DNA
ttaaaactctggtagctcgcaatgactggcagcgtgaacaagaccatgaagttgtagagcgtcttgatcgtcagg

SEQ ID NO: 462044 - DNA, 75 bp, synthetic construct
  source 1..75: mol_type = other DNA
cacgcaagctaagtcatcggagaagtggagcaaacaggaaatagactcttacattgcgtcaataagagattatct

SEQ ID NO: 462045 - DNA, 75 bp, synthetic construct
  source 1..75: mol_type = other DNA
tttgcaggaaaaaatatcggagtgtgcctttactgtcgatattgaaaaacttcaatgtcctggtgatgcgcttca

SEQ ID NO: 462046 - DNA, 75 bp, synthetic construct
  source 1..75: mol_type = other DNA
tggttctggcagggcagtcaaatggcatgtcgtatggtgaaggtcttccgctgccggagacatatgaccgtccgg

SEQ ID NO: 462047 - DNA, 75 bp, synthetic construct
  source 1..75: mol_type = other DNA
aaatcacgctacatcaggctattactcagtcaggcatccacacattgccgggtggatatccccccggcaatcttc

SEQ ID NO: 462048 - DNA, 75 bp, synthetic construct
  source 1..75: mol_type = other DNA
catgtttggggctgggcttccaaaacctctaccctcgacggcatcaaaatcacttacaccgagggctttaactac

SEQ ID NO: 462049 - DNA, 75 bp, synthetic construct
  source 1..75: mol_type = other DNA
aacgcctggcaaagtggtggaagtattagtagtggattagttgtctggcccgatggtattaatatcactaaccag

SEQ ID NO: 462050 - DNA, 75 bp, synthetic construct
  source 1..75: mol_type = other DNA
aaatgaaaaatttgacgaaagatcagcaaccccattctgatgaccctgacttctgggatgtttggacaagaaagt

SEQ ID NO: 462051 - DNA, 75 bp, synthetic construct
  source 1..75: mol_type = other DNA
cgcctgcaccgggaaacgctgcgccgcttcggccgttatgaactcaccaccgcttatacccctgccgggcagtta

SEQ ID NO: 462052 - DNA, 75 bp, synthetic construct
  source 1..75: mol_type = other DNA
aaatacatccttctccgaatggcggcatcgtgaacatttatatgattatgcaatttcgtgtcgcttttattctaa

SEQ ID NO: 462053 - DNA, 75 bp, synthetic construct
  source 1..75: mol_type = other DNA
gtataagaatgaaagcccttataaagttgttacgacatcctacatgattaatggtgatgaaagtaaaaataaagg

SEQ ID NO: 462054 - DNA, 75 bp, synthetic construct
  source 1..75: mol_type = other DNA
agccgagagaaactatattcttgattatttctcaaaaggctcaccaataaattatcttgttgcatcttgtgtcaa

SEQ ID NO: 462055 - DNA, 75 bp, synthetic construct
  source 1..75: mol_type = other DNA
acaagcaaaactaacaatgattggtggtatggctggtgatgttggtagtattctttcgggtgttctaggtgaaag

SEQ ID NO: 462056 - DNA, 75 bp, synthetic construct
  source 1..75: mol_type = other DNA
acattaaattctctgatgttaaatgcttattatgatttcaggaatgattcatcattcaccccatatgtttcggct

SEQ ID NO: 462057 - DNA, 75 bp, synthetic construct
  source 1..75: mol_type = other DNA
gctgccagcaataaacagtcatgggactccagccagtggcgtcaacagtcgcgcttcgatcttacgttaagtcag

SEQ ID NO: 462058 - DNA, 75 bp, synthetic construct
  source 1..75: mol_type = other DNA
gatccccgagtcattgtcttaaatctggccagtaataacgggggggccggcgggtttaaggccggtagtcaatat

SEQ ID NO: 462059 - DNA, 75 bp, synthetic construct
  source 1..75: mol_type = other DNA
gatccctgtaactttgcttttggtagtagttctgaatcagaagtgaagaaattcaaggatggtaaatttcttcca

SEQ ID NO: 462060 - DNA, 75 bp, synthetic construct
  source 1..75: mol_type = other DNA
ctggtgatgtcgatctgaaaccttgcccgttctgcggaaatccggaagtacaactcattgaggtgaaatattttc

SEQ ID NO: 462061 - DNA, 75 bp, synthetic construct
  source 1..75: mol_type = other DNA
tttggtgatgtatctgttgcagatgtgtcaaatcagcataatcgtcgaaaggttatcattccggttacttgtggt

SEQ ID NO: 462062 - DNA, 75 bp, synthetic construct
  source 1..75: mol_type = other DNA
attgaccttcattcaggaaaaaacatcattaatgatggattttccttccgtaaggatattcggtccggaatatca

SEQ ID NO: 462063 - DNA, 75 bp, synthetic construct
  source 1..75: mol_type = other DNA
gttatgtggtacagattatgtcgcagtaatccagaatcaggaaaaatcggttaatcaaaaacaaaatacagacta

SEQ ID NO: 462064 - DNA, 75 bp, synthetic construct
  source 1..75: mol_type = other DNA
aaatggagccagaaagccattgataatctgaaaaagaacttttcttacaatgtggatatgtcaggagtacagcaa

SEQ ID NO: 462065 - DNA, 75 bp, synthetic construct
  source 1..75: mol_type = other DNA
ggcatgtacagaagtaagcttaacgattaacgaacatttagatcaaaatctcttagctgaaattattggtaaaat

SEQ ID NO: 462066 - DNA, 75 bp, synthetic construct
  source 1..75: mol_type = other DNA
ctggattatggggcactcaaggatattttttcccttctgtgcctctatctgaaattaaacacataaatagtgcgt

SEQ ID NO: 462067 - DNA, 75 bp, synthetic construct
  source 1..75: mol_type = other DNA
ccacatggaccctgaagggattcaatgctgtagccaatcagcagtcaactgaaaaagcggaaaaattcatgtcag

SEQ ID NO: 462068 - DNA, 75 bp, synthetic construct
  source 1..75: mol_type = other DNA
atgctgtgcttactgggattaatgggaagctgtgagctatttgcccatgatggcacggttaacattagcggatcg

SEQ ID NO: 462069 - DNA, 75 bp, synthetic construct
  source 1..75: mol_type = other DNA
tctggtttaccagtgaaggagtgatgttgaaacggataatctggattctgttcttattgggattaacgtggggct

SEQ ID NO: 462070 - DNA, 75 bp, synthetic construct
  source 1..75: mol_type = other DNA
tctgattttttcataaaagttgacacctcaattaatttttatgttacacgtcaaaatgattacaactacgtattc

SEQ ID NO: 462071 - DNA, 75 bp, synthetic construct
  source 1..75: mol_type = other DNA
tgtctggactgaacggctggcagaaaatgcttgttataatcacaatggttggcgcggccagcacatgtggttatc

SEQ ID NO: 462072 - DNA, 75 bp, synthetic construct
  source 1..75: mol_type = other DNA
tcatattaaaatcagttacttagaggtaattgaaaagggtgctgtttctataggtcagttcaacactattgtttc

SEQ ID NO: 462073 - DNA, 75 bp, synthetic construct
  source 1..75: mol_type = other DNA
attttctgatccgtagtgaagatgattttctaaactttctggaagaaatgaaagcccgagaggggcttgattcta

SEQ ID NO: 462074 - DNA, 75 bp, synthetic construct
  source 1..75: mol_type = other DNA
ctcgctcccggcatcaccagccagacacagttgtcacaactacgccttgacttgtcggtgcctcagagtcaaatg

SEQ ID NO: 462075 - DNA, 75 bp, synthetic construct
  source 1..75: mol_type = other DNA
tgcaagaacggcaaatccttctgcataccctcaaggaatctctccaggacatacgcctgacgtaggctggggagg

SEQ ID NO: 462076 - DNA, 75 bp, synthetic construct
  source 1..75: mol_type = other DNA
tgactggttcatggatacctggggtaaagatcacgctgtttccggcccaacagatataccggcgtgtgtgggcca

SEQ ID NO: 462077 - DNA, 75 bp, synthetic construct
  source 1..75: mol_type = other DNA
aatctaaaattaaaatagctgagaccttatttttcaatctcgataaagaacactataaaaatagccgtaaattac

SEQ ID NO: 462078 - DNA, 75 bp, synthetic construct
  source 1..75: mol_type = other DNA
gcgctcaaaggaaaacaagctgaagcctatgatgctattaaaattatgctttctcgtggtgagtcaggaaaaaac

SEQ ID NO: 462079 - DNA, 75 bp, synthetic construct
  source 1..75: mol_type = other DNA
gaccattatgaccggatggtgagcgcgcaggtgtatgagcgcagtgatgccagtgaagcaggttacacgctgacc

SEQ ID NO: 462080 - DNA, 75 bp, synthetic construct
  source 1..75: mol_type = other DNA
gccgggtgacgaccatcagcggcgagcatcagcaactgtgcagggaaagatcatcagaagttcactttttgtact

SEQ ID NO: 462081 - DNA, 75 bp, synthetic construct
  source 1..75: mol_type = other DNA
atatgggtattattttggttgtgtattatccaatatatcatgttttgaaagcgacttatcaaacaccatcttttc

SEQ ID NO: 462082 - DNA, 75 bp, synthetic construct
  source 1..75: mol_type = other DNA
ttggatgtttttgatgacagaacaagcgaatgtctttctgaagaaattaaaacatatcaagaatgctatgaaaaa

SEQ ID NO: 462083 - DNA, 75 bp, synthetic construct
  source 1..75: mol_type = other DNA
taatatcaatatacataaaatgtcgctatcaaatataacaatagaaaagagcgacctttcatatgggtattattt

SEQ ID NO: 462084 - DNA, 75 bp, synthetic construct
  source 1..75: mol_type = other DNA
atgttgtatatgctggtgggtgatagtattccttgtgattctaaaaaaggcaatatcgtatttcttcccgcttgg

SEQ ID NO: 462085 - DNA, 75 bp, synthetic construct
  source 1..75: mol_type = other DNA
cttaattttgtttgatgactttttcagaagccaggatttgcctaaaccatctccagtccttcatcatttttttca

SEQ ID NO: 462086 - DNA, 75 bp, synthetic construct
  source 1..75: mol_type = other DNA
gcggaattttaaaactagcaatgcggcatattcacaactatgtgaaaattatctttatttaaaagcgcgcccagt

SEQ ID NO: 462087 - DNA, 75 bp, synthetic construct
  source 1..75: mol_type = other DNA
ccatggcctggcgattaagggggttaaatgccacactacgcgacctgcttccccatagtctggcgattaaggggg

SEQ ID NO: 462088 - DNA, 75 bp, synthetic construct
  source 1..75: mol_type = other DNA
atatcagtatcctttaaatccactacaacaaattgaccctatgggattattgcagacttgggatgatgccagatc

SEQ ID NO: 462089 - DNA, 75 bp, synthetic construct
  source 1..75: mol_type = other DNA
gtatgccacggacccggcgggcaaccggctgccggacccggagctgcacccggacagtacactcacagtgtggcc

SEQ ID NO: 462090 - DNA, 75 bp, synthetic construct
  source 1..75: mol_type = other DNA
cgactcgcgttctgcaatccctgcaaagattaacctcttcgccggactaccacggcccgcagatttacttctcca

SEQ ID NO: 462091 - DNA, 75 bp, synthetic construct
  source 1..75: mol_type = other DNA
gcggcgtggccgcaacaaacgccagagtctcggtaatgcaaaacggtcatgaaatatatcagaccaccgtggctc

SEQ ID NO: 462092 - DNA, 75 bp, synthetic construct
  source 1..75: mol_type = other DNA
attagtcgccctcgcggctatgttccccccagcgagctggataccggagcatcgctggcgttcatgaattatatt

SEQ ID NO: 462093 - DNA, 75 bp, synthetic construct
  source 1..75: mol_type = other DNA
tggcggcgggagcgtgacctgacggggtggatgtcgctgtcgcgtaaaccggaggtgacgtggtatggctgggac

SEQ ID NO: 462094 - DNA, 75 bp, synthetic construct
  source 1..75: mol_type = other DNA
tgaatcttaaaggttggttattaaataatttggattatcgacttggactaatagcaggttaccaagagagtcgtt

SEQ ID NO: 462095 - DNA, 75 bp, synthetic construct
  source 1..75: mol_type = other DNA
gtatgctttattttgggttggcaagcagagcaatgttatatggagttgtagctttttcagcagtttactacggaa

SEQ ID NO: 462096 - DNA, 75 bp, synthetic construct
  source 1..75: mol_type = other DNA
acaaaccacacactttatatttttcagggttacatcaaaatgtagtcattgatcatattgcttttcgtgccgatt

SEQ ID NO: 462097 - DNA, 75 bp, synthetic construct
  source 1..75: mol_type = other DNA
cgctcacatggaacaatctccggaaaaccctcctggtccatcaggcatcagaaggccttttcgataatgataccg

SEQ ID NO: 462098 - DNA, 75 bp, synthetic construct
  source 1..75: mol_type = other DNA
ctaatttattattcatatatgaaaacaatgtaaccaatattcgaattgaagaactgaaagaacaccaagccgcct

SEQ ID NO: 462099 - DNA, 75 bp, synthetic construct
  source 1..75: mol_type = other DNA
aggattacaggacattcagcgaccatctttacgaaaatgataaaataaatcatcagagtgactatgacgattttt

SEQ ID NO: 462100 - DNA, 75 bp, synthetic construct
  source 1..75: mol_type = other DNA
tattttctacagttgcctatgcaagattttgccgaattaacttacaagaaaaaaatgcttttactaaggtgtttc

SEQ ID NO: 462101 - DNA, 75 bp, synthetic construct
  source 1..75: mol_type = other DNA
tttactactgttttgtttgtattcttttgttcagggttatcaatataatgtctatattcctattgtgttagcctt

SEQ ID NO: 462102 - DNA, 75 bp, synthetic construct
  source 1..75: mol_type = other DNA
aaagatcttaatcagtacaagaaatttataaatggagatattgcctttgttcagagaacactcccattagatcag

SEQ ID NO: 462103 - DNA, 75 bp, synthetic construct
  source 1..75: mol_type = other DNA
gaccatgccaacgctaacgccaacaccgctctgatgaacggcgtcaaactttccggtgctgtgacagaaaacaaa

SEQ ID NO: 462104 - DNA, 75 bp, synthetic construct
  source 1..75: mol_type = other DNA
accaacataaaaggcgatgtcgcacatgcccagtcaacggctgaccatgccaacgctaacgccaacaccgctctg

SEQ ID NO: 462105 - DNA, 75 bp, synthetic construct
  source 1..75: mol_type = other DNA
actcaaaatgtactacccgcaaatgttcgaacgacaccaaccgacgagggaagaatttttgcgcaagagagatat

SEQ ID NO: 462106 - DNA, 75 bp, synthetic construct
  source 1..75: mol_type = other DNA
gccggctgggacagtaatatagatcctgatcttctcagagcaatagcgaaagttgaatccggattaaatcatctt

SEQ ID NO: 462107 - DNA, 75 bp, synthetic construct
  source 1..75: mol_type = other DNA
tcgccgcagccagatgctgaaaaccactgttcaccctcggcgctacaaactttacttgggcgcgagttccggcat

SEQ ID NO: 462108 - DNA, 75 bp, synthetic construct
  source 1..75: mol_type = other DNA
gcatgaaaccagaagaacttattcgccactttggcagtgtagaaaaagcagcggctggggtaggtgtaacacccg

SEQ ID NO: 462109 - DNA, 75 bp, synthetic construct
  source 1..75: mol_type = other DNA
gttcttaatccacgaagacacttacaaagatcttaatcagtacaagaaatttataaatggagatattgcctttgt

SEQ ID NO: 462110 - DNA, 75 bp, synthetic construct
  source 1..75: mol_type = other DNA
ataaattgaaattagaaagagatagcttagaacttggtgaaatatgttcgaaagaaattgtttcagaattacaag

SEQ ID NO: 462111 - DNA, 75 bp, synthetic construct
  source 1..75: mol_type = other DNA
cgcttggtttaaactggtctaactccattctgggtggtttcaacatcagtggctataaaacatatagttacgacg

SEQ ID NO: 462112 - DNA, 75 bp, synthetic construct
  source 1..75: mol_type = other DNA
agatcttgcgctgttcacgcgccaactggcaacgctggtacaggcagcaatgccgctggaaacctgcttacaggc

SEQ ID NO: 462113 - DNA, 75 bp, synthetic construct
  source 1..75: mol_type = other DNA
atatgttgaccctgtagatttttcaagaggattagcttccaacttgaacttccttgctccaaatcaggatttaac

SEQ ID NO: 462114 - DNA, 75 bp, synthetic construct
  source 1..75: mol_type = other DNA
gcaagtatccatggctcgagattaggagttacactggtaaactacttgatttgaggcatcgtgacttactaatga

SEQ ID NO: 462115 - DNA, 75 bp, synthetic construct
  source 1..75: mol_type = other DNA
atttaaacaaatgcggatacaaagtatccgcaattccatcggagacggcagaggtcggatttttaactgtcgaac

SEQ ID NO: 462116 - DNA, 75 bp, synthetic construct
  source 1..75: mol_type = other DNA
cgagagttagttggaagggcagctcagaagatgcgattgagtatggttttgtactgagcgaaaggtattacgcgt

SEQ ID NO: 462117 - DNA, 75 bp, synthetic construct
  source 1..75: mol_type = other DNA
tccagcatttgtgtcatgtccaaaaacagtcgcattatggttaagtctaaacagtaaatatccttggttagagat

SEQ ID NO: 462118 - DNA, 75 bp, synthetic construct
  source 1..75: mol_type = other DNA
ttacattacttacacgtgccttaacggaccgagattggaatacccaggaactgctgagagagtttgaagcgggat

SEQ ID NO: 462119 - DNA, 75 bp, synthetic construct
  source 1..75: mol_type = other DNA
ctttcaacattcctgtttattgcagaaaaggcaggatatgacgttattgcaccagcagatgaagatgaggaataa

SEQ ID NO: 462120 - DNA, 75 bp, synthetic construct
  source 1..75: mol_type = other DNA
gctgccagcgggtagcagtaagactgtgcgctttgttgcaatggaaccagagcaaaaagaaaaaaaattatcgcg

SEQ ID NO: 462121 - DNA, 75 bp, synthetic construct
  source 1..75: mol_type = other DNA
cacggcttacgccgcttttattcgtgttcgctcctttttttgcacagtcaaatatgactgtttatcctatggctg

SEQ ID NO: 462122 - DNA, 75 bp, synthetic construct
  source 1..75: mol_type = other DNA
tcgccatttatggtgttaatgcagcagggcggccattcagctatgcaggagacaagaatcgccagcttacccgtt

SEQ ID NO: 462123 - DNA, 75 bp, synthetic construct
  source 1..75: mol_type = other DNA
ctcagctgtcgccagtctgggggcgtttccggcgtttgatgccatgcggcaggcgctgccgatggtgcagagtat

SEQ ID NO: 462124 - DNA, 75 bp, synthetic construct
  source 1..75: mol_type = other DNA
tctcctggatagggagcgccacgttcatgcagggggattacgggacgctgcagtcaaagatgccgcgggctgcgt

SEQ ID NO: 462125 - DNA, 75 bp, synthetic construct
  source 1..75: mol_type = other DNA
aaagtgaatggccgttaggtcttgcttggaataaacaattagatatttttctacgtaccgaatttatcaacagcg

SEQ ID NO: 462126 - DNA, 75 bp, synthetic construct
  source 1..75: mol_type = other DNA
atgggttatcttgtacagatggacaaaccatcgcacaaaaaaagtataaaaaagaatacggcaagaaaatcatag

SEQ ID NO: 462127 - DNA, 75 bp, synthetic construct
  source 1..75: mol_type = other DNA
aacgggtggcaatggccacttcggtagttctggcgatgatggcggtttccccggctcaggtggtgccggggggaa

SEQ ID NO: 462128 - DNA, 75 bp, synthetic construct
  source 1..75: mol_type = other DNA
acaccgctgatgctaatggtgaatacactaatggtaatgtcgctaatggtatttcaccgacaataattaatgctg

SEQ ID NO: 462129 - DNA, 75 bp, synthetic construct
  source 1..75: mol_type = other DNA
gaatataatatttatgtcaactccggatgaagaacagagtgcaacatttcttgataatcttcaatctatatttaa

SEQ ID NO: 462130 - DNA, 75 bp, synthetic construct
  source 1..75: mol_type = other DNA
gccaaaacacgtcaccaaattaacttatcgaattcgacctcattttccaaagatggctattcctccaacaatact

SEQ ID NO: 462131 - DNA, 75 bp, synthetic construct
  source 1..75: mol_type = other DNA
ggtgagttcggaatgacgcctgccagtcgatcgaaagtaagtacaaaaactccgggcgaagttgatcttattgct

SEQ ID NO: 462132 - DNA, 75 bp, synthetic construct
  source 1..75: mol_type = other DNA
gtttacgataattgcaaagtagagagcctaaattattttctacataatctaacgataactaaatatttaaagaaa

SEQ ID NO: 462133 - DNA, 75 bp, synthetic construct
  source 1..75: mol_type = other DNA
acggcacctttattttttagctctattttagctttgatttatctgtataagaaaaaaatactgatttatacgaat

SEQ ID NO: 462134 - DNA, 75 bp, synthetic construct
  source 1..75: mol_type = other DNA
gtataaaggagatactgtggacggatacacaacgtatactcctgtaggtgataaatctgttgaactccatatcca

SEQ ID NO: 462135 - DNA, 75 bp, synthetic construct
  source 1..75: mol_type = other DNA
gtctaaattattttttacataatcggacaataagagaatatttaaaaaaagctacgataatttatgttcactcag

SEQ ID NO: 462136 - DNA, 75 bp, synthetic construct
  source 1..75: mol_type = other DNA
aattatagagtgctggcacattttcaatctcaaaccgaagaatccaaagtaatattgataaatatttttaaaggt

SEQ ID NO: 462137 - DNA, 75 bp, synthetic construct
  source 1..75: mol_type = other DNA
agagcttcgtgaaaacaataaagcgagactacatcagtaccatgcccaaaccagacgggttaacggcagcaaaga

SEQ ID NO: 462138 - DNA, 75 bp, synthetic construct
  source 1..75: mol_type = other DNA
cgggatacgcgcaacgagcaggtcacactgaaccagatagtcgaccgcagaactgcttcgatgcgtagtgtcggg

SEQ ID NO: 462139 - DNA, 75 bp, synthetic construct
  source 1..75: mol_type = other DNA
ggatcggcgcaaactgttaatgctggcgctggcgttacaactggtgggtttctgcggctttatctggctgccgct

SEQ ID NO: 462140 - DNA, 75 bp, synthetic construct
  source 1..75: mol_type = other DNA
gcctgccgttgttgcgctctttgcctggtggtggcaaagcgcccgcgaggtcgcctcttcccacaagacaacaac

SEQ ID NO: 462141 - DNA, 75 bp, synthetic construct
  source 1..75: mol_type = other DNA
ctacgtaccgaatttatcaacagcgtgactgaaaataaccatacagaaatcgctgactctcaggttttaaagaga

SEQ ID NO: 462142 - DNA, 75 bp, synthetic construct
  source 1..75: mol_type = other DNA
gaaaaatcacaagctatttagctattctctcaagagaggttgagattagtgcctccctcaatcttttggatatca

SEQ ID NO: 462143 - DNA, 75 bp, synthetic construct
  source 1..75: mol_type = other DNA
acgtcgattacagttcgacctttgcgaacgttccggctcgcaaccgtatcttaaccaacctgaacattttccaac

SEQ ID NO: 462144 - DNA, 75 bp, synthetic construct
  source 1..75: mol_type = other DNA
cttcgggccgttgctaaagcaacgttatcctccctggtgcctgcggttataccgccacctcttccataccttcat

SEQ ID NO: 462145 - DNA, 75 bp, synthetic construct
  source 1..75: mol_type = other DNA
atcagctgcagcagcttatccgcctgccggggcagcagtatgatgaggagtccggcctgtattacaaccgccacc

SEQ ID NO: 462146 - DNA, 75 bp, synthetic construct
  source 1..75: mol_type = other DNA
gcgtgactacatcagtatcatgcccaaaccagacgggttaacggcagcaaagaaccttgcagaggcgttcgagca

SEQ ID NO: 462147 - DNA, 75 bp, synthetic construct
  source 1..75: mol_type = other DNA
cggtttcagcagcgcacgccactggtgatggggctgtggtccgcggctctgatgggcggcggtggacttggtgcc

SEQ ID NO: 462148 - DNA, 75 bp, synthetic construct
  source 1..75: mol_type = other DNA
tggttacccgctttctatattgagattggtgccagcgcgcagtacagcggttccttgctggcattgatgacgctt

SEQ ID NO: 462149 - DNA, 75 bp, synthetic construct
  source 1..75: mol_type = other DNA
gtgctgcgtagtatcagcggcaattacctgatggactgggcgtttcatgcgctgtgcgtcgttgggctgatgatc

SEQ ID NO: 462150 - DNA, 75 bp, synthetic construct
  source 1..75: mol_type = other DNA
cgccagcttatgaaagagcgttaagcaaagctgcaaatgccatcagaccgctgcttgccactgaggcaacacagc

SEQ ID NO: 462151 - DNA, 75 bp, synthetic construct
  source 1..75: mol_type = other DNA
acgtattacagggcggcgcaagtctgattaatgcaatcagtcaggggcttggtggccccaaggttttggatgacg

SEQ ID NO: 462152 - DNA, 75 bp, synthetic construct
  source 1..75: mol_type = other DNA
cgggctgactataaaacccgtgtgggtgtgaaagtgctgatgacgctgatgagaaacgggaaagcagttcctttt

SEQ ID NO: 462153 - DNA, 75 bp, synthetic construct
  source 1..75: mol_type = other DNA
atgccggagttaaccttgccgctcagggtgttctttccgcagcagcaaagggaatagggcgtggaataacggcta

SEQ ID NO: 462154 - DNA, 75 bp, synthetic construct
  source 1..75: mol_type = other DNA
tgagaatgccctgcagtacctgagggacgactttaacccgaaaacccttaagttcatcgaacaggcactgacgca

SEQ ID NO: 462155 - DNA, 75 bp, synthetic construct
  source 1..75: mol_type = other DNA
ggattgcacattccttaatgtttcaggggcgcatgctatagacttgtctcgcgtgagaaatgttaatattgaaaa

SEQ ID NO: 462156 - DNA, 75 bp, synthetic construct
  source 1..75: mol_type = other DNA
tatttgaaaataatattctcgataataaatcactgaaaaaatattttggtaactctccgttatcaagatggaaat

SEQ ID NO: 462157 - DNA, 75 bp, synthetic construct
  source 1..75: mol_type = other DNA
acggcaactctctttatgtagttaaccataatggcgaaccatacgttcccatgaaacctgtcgttgcggggatgg

SEQ ID NO: 462158 - DNA, 75 bp, synthetic construct
  source 1..75: mol_type = other DNA
aagcgatgggaaaagccacatccatagaacttgctgcgcgacttgatatcagtcgtgaaaaagtgctgaacgaac

SEQ ID NO: 462159 - DNA, 75 bp, synthetic construct
  source 1..75: mol_type = other DNA
acaatcagatgattgcggttaccaacaatcagatacagacggtgggcgttaaccagatagagacggtgggcagta

SEQ ID NO: 462160 - DNA, 75 bp, synthetic construct
  source 1..75: mol_type = other DNA
gattatgaatgcgtaaaaataagtgacttgattgccatgatggtggggcgcgatttaggaaatatctatccccgt

SEQ ID NO: 462161 - DNA, 75 bp, synthetic construct
  source 1..75: mol_type = other DNA
agggcaaattgcagaacaggctggtcgtggtctggtaaacataccatttgacgtattgcagggtggcgcaagtct

SEQ ID NO: 462162 - DNA, 75 bp, synthetic construct
  source 1..75: mol_type = other DNA
gctttaattgacgacgttaacgacgactttaacagcctgccgtccacgattcgctcgatgtttggtaacaacgtt

SEQ ID NO: 462163 - DNA, 75 bp, synthetic construct
  source 1..75: mol_type = other DNA
gacgctggccggtatcctcgccccgatggcggcgctaaaactcagcctgtcggtgctcggtattaagggcggcag

SEQ ID NO: 462164 - DNA, 75 bp, synthetic construct
  source 1..75: mol_type = other DNA
cgcataaccggcgttttacagtccatcggcgcatggatgaaggccaacccacagctaaccgccacgctggtgaaa

SEQ ID NO: 462165 - DNA, 75 bp, synthetic construct
  source 1..75: mol_type = other DNA
acatgacccgatcctcgacggcctgcgttccgccgtgcgctatgacaaaacctatttcgacaagatcgtcgcctc

SEQ ID NO: 462166 - DNA, 75 bp, synthetic construct
  source 1..75: mol_type = other DNA
agatgacaaacttagctggaaagcaagtgatgttttatactggttgtttctcagtaaagaaatggaatgtttcag

SEQ ID NO: 462167 - DNA, 75 bp, synthetic construct
  source 1..75: mol_type = other DNA
ttatatatatttttaatgaaaatgagcataaaactaagacatataatgcttggcagctttatgcccttctgattg

SEQ ID NO: 462168 - DNA, 75 bp, synthetic construct
  source 1..75: mol_type = other DNA
aatgctaaggcaaataatggctttgacttcactcctttgcattattcgatagggataggggattttgatatgatg

SEQ ID NO: 462169 - DNA, 75 bp, synthetic construct
  source 1..75: mol_type = other DNA
tttcacatatgtatatgaaaggcggggcaatcccgtggcaacgctatccttttgtcaccatgatttccgtcgagc

SEQ ID NO: 462170 - DNA, 75 bp, synthetic construct
  source 1..75: mol_type = other DNA
ggagcaatatgcaacgcgtagtaagctggtaagcaattattttgaccgttttggtgagtacaaccctgatgatgt

SEQ ID NO: 462171 - DNA, 75 bp, synthetic construct
  source 1..75: mol_type = other DNA
gggctacacgccagataaaatcgaaaaggcgatgccgcacatgttggatctggcgaaagcggcggggatggacac

SEQ ID NO: 462172 - DNA, 75 bp, synthetic construct
  source 1..75: mol_type = other DNA
gtggatgcgctgacgccggctcaggtaccggacgtgacggatgcgaacggtaacggcaaggcagacacagccgag

SEQ ID NO: 462173 - DNA, 75 bp, synthetic construct
  source 1..75: mol_type = other DNA
gtaaaaatagtagcaaaagatcttgtaggaaatgatagtaacgtcattcagggaggaatgttgaaaatcacaggt

SEQ ID NO: 462174 - DNA, 75 bp, synthetic construct
  source 1..75: mol_type = other DNA
ctcggattggatattacgtgttttgtgatcggaggtccaagaccaggtgattcattcagagtgggcgatgaggtg

SEQ ID NO: 462175 - DNA, 75 bp, synthetic construct
  source 1..75: mol_type = other DNA
attaagttctatgagcgaattggcaacgttgaacgcatgagtgatagtggagatgcagtgtatgtgcgcaaaaca

SEQ ID NO: 462176 - DNA, 75 bp, synthetic construct
  source 1..75: mol_type = other DNA
ggataccaccacagtgtatctggtgatgaaaggcaaaccggataaggcgtttcctgcggagccgcctgtccggag

SEQ ID NO: 462177 - DNA, 75 bp, synthetic construct
  source 1..75: mol_type = other DNA
ggccggagagcgctttcatcgctgaaccttccgtggcacgtaaggctgttcgtaccgcgaagaaggaggtcagcc

SEQ ID NO: 462178 - DNA, 75 bp, synthetic construct
  source 1..75: mol_type = other DNA
gctctttatttcggttgggatcgccgcaagtctggcaaaacaccatgagctggatccgctgaccgccggaatgct

SEQ ID NO: 462179 - DNA, 75 bp, synthetic construct
  source 1..75: mol_type = other DNA
ctccggtaatactgtgctttatctgtatggctatagccgcgttaatgtattacccgttcgtcaaagcatacgaga

SEQ ID NO: 462180 - DNA, 75 bp, synthetic construct
  source 1..75: mol_type = other DNA
gacagcaaattgaacgatttgaatctaacttgaacttcctcgaagaggagtttcttaaaacgcttttagacaaaa

SEQ ID NO: 462181 - DNA, 75 bp, synthetic construct
  source 1..75: mol_type = other DNA
tgggtagttgacgcatcctatgagtacaccaaattgggcgatgtgaaagttggcacctggatgacaggtattggt

SEQ ID NO: 462182 - DNA, 75 bp, synthetic construct
  source 1..75: mol_type = other DNA
tgacaaacttccctttagtaaggggcagaaattgaaattgcagtttattgatgaggatggacaccacgtccctga

SEQ ID NO: 462183 - DNA, 75 bp, synthetic construct
  source 1..75: mol_type = other DNA
gaaaagaaaatcccaaaaaattaataagagagatattttctagactcaatcagggggcagttaaactttctgacc

SEQ ID NO: 462184 - DNA, 75 bp, synthetic construct
  source 1..75: mol_type = other DNA
tcactatcaacaaagtggcggtcattgagtttaactatggccgaaaacttaatgccttaagtaaagtctttattg

SEQ ID NO: 462185 - DNA, 75 bp, synthetic construct
  source 1..75: mol_type = other DNA
gcagtgcctgtgaccaaaaagcgaactaaggtgagcttaggaacctatcctcaccttacacttgcgaaggcacga

SEQ ID NO: 462186 - DNA, 75 bp, synthetic construct
  source 1..75: mol_type = other DNA
attggttaaagatgctaaggaaggtgcgaataagcggggaaattcttctcggctgactcagtcatttcatttctt

SEQ ID NO: 462187 - DNA, 75 bp, synthetic construct
  source 1..75: mol_type = other DNA
aagctgtcaggaggtgaaccaacgctggtggagttcccaaaaccaagcgacaggtacacgaaatactatgttatc

SEQ ID NO: 462188 - DNA, 75 bp, synthetic construct
  source 1..75: mol_type = other DNA
tgtggaactggcgcacctgcccggtaaaactgctgccgtatctggcgtgggcgctgtcggtcgacaggtgggatg

SEQ ID NO: 462189 - DNA, 75 bp, synthetic construct
  source 1..75: mol_type = other DNA
gcgaacggcagacggtggagaacccggagacgggggaactgctgtggcagcatgagacgaaacacgcatacaacg

SEQ ID NO: 462190 - DNA, 75 bp, synthetic construct
  source 1..75: mol_type = other DNA
gagaaagaggcggggcgttgctgcggaatgcatgacgagctgtatctggcacgagtgctgggcgatgcgctggat

SEQ ID NO: 462191 - DNA, 75 bp, synthetic construct
  source 1..75: mol_type = other DNA
tatcatcgtcgctgtattttcgctctactttactcaggagcaaagtaaggaacagattaagcataatcatatctc

SEQ ID NO: 462192 - DNA, 75 bp, synthetic construct
  source 1..75: mol_type = other DNA
cgcccggcaccttccggcttgatattggtgtactggaaagcggtatcacagaggcaatgtatcaggaaatggaac

SEQ ID NO: 462193 - DNA, 75 bp, synthetic construct
  source 1..75: mol_type = other DNA
tataccgccggggaaattgtcgtcggtggggagttttatccggcttcggccattcatctgattgataacctgcga

SEQ ID NO: 462194 - DNA, 75 bp, synthetic construct
  source 1..75: mol_type = other DNA
caatgctcacacaggctacgccttacacaaccaaaggtcatgcacacgggcgttacagggtaatcgatggtgatg

SEQ ID NO: 462195 - DNA, 75 bp, synthetic construct
  source 1..75: mol_type = other DNA
agaagaaagcaacaaatgggtacgacagctatttaagaaattgcgcgagcgtctcaagtcaaaaactaaaagacc

SEQ ID NO: 462196 - DNA, 75 bp, synthetic construct
  source 1..75: mol_type = other DNA
gagaaatccggtgttcggttagatatcctcaggccgatagtagaggaacttgatgccatgttatctagttacagt

SEQ ID NO: 462197 - DNA, 75 bp, synthetic construct
  source 1..75: mol_type = other DNA
cgcacccgatgaaacaaccgcccgccgtatgctggcgcgtgattttgtgttgctttttgctggccgcgttccggc

SEQ ID NO: 462198 - DNA, 75 bp, synthetic construct
  source 1..75: mol_type = other DNA
accgttatactggttgtcgtatctggcaaagacgcgcgggaagtaccagaccggggaaggtgaccgggtacactc

SEQ ID NO: 462199 - DNA, 75 bp, synthetic construct
  source 1..75: mol_type = other DNA
gttatcactgaaatttggtgcaaactgacaggcggcaaagatacgctggtggaacttctcggcaaggataagcga

SEQ ID NO: 462200 - DNA, 75 bp, synthetic construct
  source 1..75: mol_type = other DNA
ttcagggaagcggagatcagtatctatgcgtcagcgatggattatgtggaggatgtggcctttgctgaatgtctg

SEQ ID NO: 462201 - DNA, 75 bp, synthetic construct
  source 1..75: mol_type = other DNA
ttggttctctataaagtgcctgaattcggcaaacctgcgaagtgctgtagcccgttgcatctgctgtactacgtt

SEQ ID NO: 462202 - DNA, 75 bp, synthetic construct
  source 1..75: mol_type = other DNA
gccataccagtgaaggccaccgcgtgtcggtccactacggctatgacgataaaggccgcctgaccggcgaacgcc

SEQ ID NO: 462203 - DNA, 75 bp, synthetic construct
  source 1..75: mol_type = other DNA
tggggcaaacctcacttggtcccatgcgcgtgttcccgaaagcgaagcacagagtggttggatgtcgcaattaac

SEQ ID NO: 462204 - DNA, 75 bp, synthetic construct
  source 1..75: mol_type = other DNA
cgccagagtctcggtaatgcaaaacggtcatgaaatatatcagaccaccgtggctcctggccctttcgagataaa

SEQ ID NO: 462205 - DNA, 75 bp, synthetic construct
  source 1..75: mol_type = other DNA
aattaaggaaattattgaaactgatggttgggctttatttgatgttaacttattactcaaattagatcccatggg

SEQ ID NO: 462206 - DNA, 75 bp, synthetic construct
  source 1..75: mol_type = other DNA
aatataagaaataaatctaatattggggaaggatttcaagagcaaagagagcagcttctgtttagctctatattc

SEQ ID NO: 462207 - DNA, 75 bp, synthetic construct
  source 1..75: mol_type = other DNA
acggcctgcaagctccggcacggatacagcaacgagctgccgttcggtggtttccccggtacatctcttatcagg

SEQ ID NO: 462208 - DNA, 75 bp, synthetic construct
  source 1..75: mol_type = other DNA
gaggggatcgaagcttcaacctcgggaagtagtgcccagccaaaactttcggttgctaacctcgacagttcgatc

SEQ ID NO: 462209 - DNA, 75 bp, synthetic construct
  source 1..75: mol_type = other DNA
atgagcagcgcatcggggctggataactttattcgcctcagcacggggtctgttgatgcaatgtatgagttattc

SEQ ID NO: 462210 - DNA, 75 bp, synthetic construct
  source 1..75: mol_type = other DNA
ccggaaatccgccgcaaacgtactggtgggaagggttttttgtaccatatcagcgcggcagggatgtcgctgaaa

SEQ ID NO: 462211 - DNA, 75 bp, synthetic construct
  source 1..75: mol_type = other DNA
gttttcctaaaatttgttcaagaattatccgagtctggtagtgatcttgtcattaaagataagtcatcgttagca

SEQ ID NO: 462212 - DNA, 75 bp, synthetic construct
  source 1..75: mol_type = other DNA
aaacgccgacagggacaaaatggacgtccactaacggtaaccatgcacactctgttcagattggtgctcataacc

SEQ ID NO: 462213 - DNA, 75 bp, synthetic construct
  source 1..75: mol_type = other DNA
tggattgttgttgtttttagcggctattgatgtagcgatagatattaaacaccggcaccgtaacaaagtttcttt

SEQ ID NO: 462214 - DNA, 75 bp, synthetic construct
  source 1..75: mol_type = other DNA
tgccgctgccgccggaataccgggtaggctaccgtcgcaatgaaggtgcctggcctatgggtgagcctcgcaagt

SEQ ID NO: 462215 - DNA, 75 bp, synthetic construct
  source 1..75: mol_type = other DNA
agcagagcaaagaggaaagattattctcccgcaagagcaaatccagcctcgagatctgggagcgtcctgtttcaa

SEQ ID NO: 462216 - DNA, 75 bp, synthetic construct
  source 1..75: mol_type = other DNA
gcctgtgctctggttgcctgtatcggtaatgcacatgattttaaaaatggacggcaactggcggcctggctgggg

SEQ ID NO: 462217 - DNA, 75 bp, synthetic construct
  source 1..75: mol_type = other DNA
ttgcacaaaggacgtaagccgcggatctcactcacgcgtgatacagaacataccttatggccattatatctagtt

SEQ ID NO: 462218 - DNA, 75 bp, synthetic construct
  source 1..75: mol_type = other DNA
tatcgtttcgatatcggcatctcttattatctggttcatttttgccagagtgttgttggtcgcctttcctgaagg

SEQ ID NO: 462219 - DNA, 75 bp, synthetic construct
  source 1..75: mol_type = other DNA
tttaaattacgactcagcattatcactggtgatcgccctgtactggttctgcgcattattcagctggaagcagtg

SEQ ID NO: 462220 - DNA, 75 bp, synthetic construct
  source 1..75: mol_type = other DNA
cggcaccaagacagtcagcacgtttaaccacggcacaaaatcaacaaataacacaggaaatcatacgcacagtgt

SEQ ID NO: 462221 - DNA, 75 bp, synthetic construct
  source 1..75: mol_type = other DNA
catctgattctgtgccatccggttatgccttaatgcaggggcaaagttttgataaaggctcttaccctaaacttg

SEQ ID NO: 462222 - DNA, 75 bp, synthetic construct
  source 1..75: mol_type = other DNA
gactggtttataagtcagcaggggcaacagttggtagaggatgtggggtatgtgccgctgggtgatgctgccaac

SEQ ID NO: 462223 - DNA, 75 bp, synthetic construct
  source 1..75: mol_type = other DNA
ggcgtttatccgtacatagtcgatgtatttatggtaacgcgtgaaaatcccacatcggaaacgcaaaaattggtg

SEQ ID NO: 462224 - DNA, 75 bp, synthetic construct
  source 1..75: mol_type = other DNA
aacgaatttcgtgatctgcttgttgagaaattcaaagacagcaaagtagaaacctttattggtactttcaccgcc

SEQ ID NO: 462225 - DNA, 75 bp, synthetic construct
  source 1..75: mol_type = other DNA
ctaatgtgtggggaaatcttctgccctggcctgcacatccggcaacgctggttccaacgcgtcgggcgggtgcgc

SEQ ID NO: 462226 - DNA, 75 bp, synthetic construct
  source 1..75: mol_type = other DNA
tttttggattgctcccttctgcatggcaagttccctatgctgcgcgaccgattctgtacagacgaactgaaaatt

SEQ ID NO: 462227 - DNA, 75 bp, synthetic construct
  source 1..75: mol_type = other DNA
tatcctgaaggtgtgcaaatagcattcactcaagaacaatataataaattaataagatacattaatattttcttt

SEQ ID NO: 462228 - DNA, 75 bp, synthetic construct
  source 1..75: mol_type = other DNA
aacagctctgataaaccttataaaaccagcagtaaggaaagtattaaaagtcaactttacagcgatcaaagaaat

SEQ ID NO: 462229 - DNA, 75 bp, synthetic construct
  source 1..75: mol_type = other DNA
caggaaaaacggcggaatataccaagaggttggcccacgcggcggtaagaaagacaattttgccaccgtcaagga

SEQ ID NO: 462230 - DNA, 75 bp, synthetic construct
  source 1..75: mol_type = other DNA
agacaatttctaatcgaaatgttataaaaatctttgagctccttcatcagggaagacatcccgagtccctgaaag

SEQ ID NO: 462231 - DNA, 75 bp, synthetic construct
  source 1..75: mol_type = other DNA
aaactactcattacgtcctgagccagctcttgaacgatgctgtactccacgtgccggaggtaaatgtgatgtact

SEQ ID NO: 462232 - DNA, 75 bp, synthetic construct
  source 1..75: mol_type = other DNA
ttggcattaatcatcaagcgatacaattttgtaaaattctcgataaaagctcaccgctgctggaattgcattaat

SEQ ID NO: 462233 - DNA, 75 bp, synthetic construct
  source 1..75: mol_type = other DNA
ttatccgtttgttatcttatcatcaggacgtgaaaaaaaatttgggaaaaacgatctaattgaattatccaggga

SEQ ID NO: 462234 - DNA, 75 bp, synthetic construct
  source 1..75: mol_type = other DNA
tgagcagtatcagcgcttattggcacgtctggattatctgacgaagctcgacactaaagcatcaggtcagcgtaa

SEQ ID NO: 462235 - DNA, 75 bp, synthetic construct
  source 1..75: mol_type = other DNA
agtgtcgaaagcaaagaagggtttatttcacaaagaacaataaacttaaatgaatatgaaactgcaattaacatc

SEQ ID NO: 462236 - DNA, 75 bp, synthetic construct
  source 1..75: mol_type = other DNA
aattaacaccgtcaataattgataattggatttcgttttccccctccgctgtgtggctgtatctctcgttttttt

SEQ ID NO: 462237 - DNA, 75 bp, synthetic construct
  source 1..75: mol_type = other DNA
gttcccagtcatttaaaggtaatatgtgaaaaagcaatttctcagggtaaagccgttctcttgtgtacagcgccg

SEQ ID NO: 462238 - DNA, 75 bp, synthetic construct
  source 1..75: mol_type = other DNA
ataagcgaactccagacagcaaaaagtaatactcaagccgggtcactccggctttttgatatgtcgctcgcagaa

SEQ ID NO: 462239 - DNA, 75 bp, synthetic construct
  source 1..75: mol_type = other DNA
caccaaaccagatcgtcgatatctgcccggtttgggtcgcgtcagatgttacataatccatcgtgacagcctcga

SEQ ID NO: 462240 - DNA, 75 bp, synthetic construct
  source 1..75: mol_type = other DNA
tatcagtccacaaagacaacccgccagccgaaaagctgccgccgttttactgggtacatcgggagtacgacaggg

SEQ ID NO: 462241 - DNA, 75 bp, synthetic construct
  source 1..75: mol_type = other DNA
aataaaaacacttttgaaaaaagtgtcgatactgggatggcttcgtgtaacaaagtctgatggtgcatcttattt

SEQ ID NO: 462242 - DNA, 75 bp, synthetic construct
  source 1..75: mol_type = other DNA
atgttaacccgcgttaaatatcccacgttggccagcatctgtctcacggaaagtcatactgccttacaaaaagag

SEQ ID NO: 462243 - DNA, 75 bp, synthetic construct
  source 1..75: mol_type = other DNA
tttaagccagctccaaacgcaaacattattttgggccaattttcttataaagactttacagatataaaccttgaa

SEQ ID NO: 462244 - DNA, 75 bp, synthetic construct
  source 1..75: mol_type = other DNA
cagcgtttaacgcatggcttgatcacctgactatcaattacgacaccattaaggagggctggcgcgattttaaat

SEQ ID NO: 462245 - DNA, 75 bp, synthetic construct
  source 1..75: mol_type = other DNA
tactcatgcatgcggtcatgaatatactttcgaatgggaacaagtagcatttgaatttaaaacattagaaaatgg

SEQ ID NO: 462246 - DNA, 75 bp, synthetic construct
  source 1..75: mol_type = other DNA
gtgacgctgaagggatactggaaaatgctttctggcaaattgcgctcaatgaggatggttctctgcaactggtag

SEQ ID NO: 462247 - DNA, 75 bp, synthetic construct
  source 1..75: mol_type = other DNA
atgtccttatcgactgaaatgccagagtgctgcctttgtgaacatttcacgctgacaggccggatagatgagcta

SEQ ID NO: 462248 - DNA, 75 bp, synthetic construct
  source 1..75: mol_type = other DNA
taaaaatgataagaatgcagcaaacaatgcgaaacagacgcaattagttaacggtactttcatctattggctgaa

SEQ ID NO: 462249 - DNA, 75 bp, synthetic construct
  source 1..75: mol_type = other DNA
agtaccttcggtagtgactcactggtggttgtatcttccacgccattgtataaagacgatttaatcaatgctgag

SEQ ID NO: 462250 - DNA, 75 bp, synthetic construct
  source 1..75: mol_type = other DNA
aatataatataaataaagtagaagaaccaataaccaaaccagagaaaaaacagacgcgtagacgtactggtatgg

SEQ ID NO: 462251 - DNA, 75 bp, synthetic construct
  source 1..75: mol_type = other DNA
actttggtcgcccggtagaagagttgagccttgaccagcaggcgctgttagttggcatggtgaaaggggcgtcca

SEQ ID NO: 462252 - DNA, 75 bp, synthetic construct
  source 1..75: mol_type = other DNA
ccttcggcttctgttatgaataatacaccatcaaatactgcaataccagacttaataactcacaataacttttat

SEQ ID NO: 462253 - DNA, 75 bp, synthetic construct
  source 1..75: mol_type = other DNA
atatccagatagtctgattaagtggtcataccatatgagtgatctcaaaaaaaatattgataaaaaaagcgtaaa

SEQ ID NO: 462254 - DNA, 75 bp, synthetic construct
  source 1..75: mol_type = other DNA
accctgagccatcacctgtcgtccctcatttccgtttccctggttcgccaggagcggcaggggaggacgcttttt

SEQ ID NO: 462255 - DNA, 75 bp, synthetic construct
  source 1..75: mol_type = other DNA
ttaaaaagcacaaaatttaaatttatttttgttgggaatgatttttataggaagggaggtggtgaagttgttttg

SEQ ID NO: 462256 - DNA, 75 bp, synthetic construct
  source 1..75: mol_type = other DNA
caaaaaataatcaccccgaaaagagatgtattgcagatactgaaatttataatgtgaggaatttcaaaaaaaata

SEQ ID NO: 462257 - DNA, 75 bp, synthetic construct
  source 1..75: mol_type = other DNA
tgaccgtagcaatgacaaacggtgattatcaggatgtcattctcggcgtttacgacagccagcaggaatgcagcc

SEQ ID NO: 462258 - DNA, 75 bp, synthetic construct
  source 1..75: mol_type = other DNA
caaaacgtgaagcagtgaaactaaaagtggacggcatgactgttcgcatgtggttacttgtaaaaaataccgatt

SEQ ID NO: 462259 - DNA, 75 bp, synthetic construct
  source 1..75: mol_type = other DNA
caggtgtactggtatctgatgggcgttgacctgtctcgctttaactggcagcgcgcccccgagacgaaagaacgc

SEQ ID NO: 462260 - DNA, 75 bp, synthetic construct
  source 1..75: mol_type = other DNA
ctgtgatggagcggggatcagaacgcgccctttgtaaccggctgacacgtaagcgccaggcagtggatacgccgg

SEQ ID NO: 462261 - DNA, 75 bp, synthetic construct
  source 1..75: mol_type = other DNA
tgaccgtttttctgacatcaggcgaaactcaggatgttgttaccggaatttataactccgaatctgaatgcaagg

SEQ ID NO: 462262 - DNA, 75 bp, synthetic construct
  source 1..75: mol_type = other DNA
tgacggtttttcttaatacaagcgagccagtcgatcttgttattggtatacatgactcaatgaaagaatgcatgg

SEQ ID NO: 462263 - DNA, 75 bp, synthetic construct
  source 1..75: mol_type = other DNA
atgttttctactttcaaaaaagcagctctgctggcagctattgcattacctttttcaactatggctgcgcctaca

SEQ ID NO: 462264 - DNA, 75 bp, synthetic construct
  source 1..75: mol_type = other DNA
cgctgttcagcgagccgcatccttcccgtgagttttgtgtccagtacggcgaaactgattacgatttcctgtgcc

SEQ ID NO: 462265 - DNA, 75 bp, synthetic construct
  source 1..75: mol_type = other DNA
catgaaggtgtgcccgccgctgtggcgcacagggctgcgccagaacttccgtatcttccagaatgaggacgtcga

SEQ ID NO: 462266 - DNA, 75 bp, synthetic construct
  source 1..75: mol_type = other DNA
cgaaaaagtggtctggggtgcctgttccgtcaactgtggtagccgctgtgcacttcgtctacatgttaaagataa

SEQ ID NO: 462267 - DNA, 75 bp, synthetic construct
  source 1..75: mol_type = other DNA
atgaccagaacgaacgcacgccgattggcggcaaaatcgttttccagcgttggcatgacaagcaaagccaatcgc

SEQ ID NO: 462268 - DNA, 75 bp, synthetic construct
  source 1..75: mol_type = other DNA
acctgggtggaaactgacaataccggcagcgatgagtacggcaaccatcaggtacgcgcctgtttgcgcggtcgc

SEQ ID NO: 462269 - DNA, 75 bp, synthetic construct
  source 1..75: mol_type = other DNA
agttagtccgtaaacgcctgcggcagtggtttgaaacgggagatgttccggatgcgctgtttcagctcagaaccg

SEQ ID NO: 462270 - DNA, 75 bp, synthetic construct
  source 1..75: mol_type = other DNA
ctttaggtgctctattttcctcagagcaatatgggctggttgtaaaattatatgccggaaataatgtgctggtga

SEQ ID NO: 462271 - DNA, 75 bp, synthetic construct
  source 1..75: mol_type = other DNA
atgttttctactttcaaaaaagcagctctgctggcagctatcgcattacctttttctaccatggctgcaccgaca

SEQ ID NO: 462272 - DNA, 75 bp, synthetic construct
  source 1..75: mol_type = other DNA
cggtcaaaccaattcagtagtattgatgccgaccgtagccatggctgacttcggtgcaactttagctgatggtca

SEQ ID NO: 462273 - DNA, 75 bp, synthetic construct
  source 1..75: mol_type = other DNA
gggagttataggaaaacacagaaccaataatcttcctcatgttgctgtagccggaggtgaagaaagagaaattaa

SEQ ID NO: 462274 - DNA, 75 bp, synthetic construct
  source 1..75: mol_type = other DNA
caccgtactggaaagcctgcagcgggaaggctttcagccattcttcgcctgccagacctgtgtgcgcgacccggg

SEQ ID NO: 462275 - DNA, 75 bp, synthetic construct
  source 1..75: mol_type = other DNA
cagtccaatgaagatattttaaggtctttgggggagctgttttcttcagaacaatatgggttagttgttaaatta

SEQ ID NO: 462276 - DNA, 75 bp, synthetic construct
  source 1..75: mol_type = other DNA
ggccctgacttcgccgcaactgaagagcattacgccagcctgtacggtgcgctaagcgacagcgactttatcgcc

SEQ ID NO: 462277 - DNA, 75 bp, synthetic construct
  source 1..75: mol_type = other DNA
ttagtgactggattaatagttttagggattttcttaggtgtaattaccaaaggtctagatctatatgcttggtgg

SEQ ID NO: 462278 - DNA, 75 bp, synthetic construct
  source 1..75: mol_type = other DNA
ctaactgcgctggacactgccctaaccattaacactcaaaaaataaacatgttaaatgattatatcattaaagcc

SEQ ID NO: 462279 - DNA, 75 bp, synthetic construct
  source 1..75: mol_type = other DNA
tacaggtggcgatttggacgtaaccatcaaagaagaagatggtagcgaacaacgattcacccaaccttatgcttc

SEQ ID NO: 462280 - DNA, 75 bp, synthetic construct
  source 1..75: mol_type = other DNA
gctgaaaaattgggccgcttgagcggtgatgtgaacctgatttgcaaactgcaccatagcacctgctcacgcccg

SEQ ID NO: 462281 - DNA, 75 bp, synthetic construct
  source 1..75: mol_type = other DNA
ctatacccatgctgacttaggcacaggcagcacaccattaagagtaacgatgacggcatcattattgggcatagc

SEQ ID NO: 462282 - DNA, 75 bp, synthetic construct
  source 1..75: mol_type = other DNA
gaactcaaaataaaataacactggagcaatttcagaatgacctggttaaagcagataaaaaatttgcaaattcat

SEQ ID NO: 462283 - DNA, 75 bp, synthetic construct
  source 1..75: mol_type = other DNA
ctcaacgtcagataccatcgtttttctggccttcctggtcagttccttcgtgctggtctggatcaccgtaacccg

SEQ ID NO: 462284 - DNA, 75 bp, synthetic construct
  source 1..75: mol_type = other DNA
ctcacctatctgggcgcgtgggtggctcagagtcaggcatcaaaacatatgtccatcaaacgagccagagaggtg

SEQ ID NO: 462285 - DNA, 75 bp, synthetic construct
  source 1..75: mol_type = other DNA
ctggccttcctggtcagttccttcgtactggtctggctcaccgttacccgccccgaaactcctggtgagctgtat

SEQ ID NO: 462286 - DNA, 75 bp, synthetic construct
  source 1..75: mol_type = other DNA
gcacccgcatgagcgcctgtgctttgaaatggtcttgtgtggcattcgaaaccattcgcggctcagatgtaatgg

SEQ ID NO: 462287 - DNA, 75 bp, synthetic construct
  source 1..75: mol_type = other DNA
agaacccgcatcatctgcagcagctcattcgcctgccgggtcagcagtatgatgaggagtccggcctgtattaca

SEQ ID NO: 462288 - DNA, 66 bp, synthetic construct
  source 1..66: mol_type = other DNA
acaaccgccaccgctattatgacccgctgcaggggaggtatatcactcaggatccgattgggctga

SEQ ID NO: 462289 - DNA, 75 bp, synthetic construct
  source 1..75: mol_type = other DNA
cgttccggattagtcattgctgatttagccggtgaaagtgaagatccacgttctgtttgtgaacattattattct

SEQ ID NO: 462290 - DNA, 75 bp, synthetic construct
  source 1..75: mol_type = other DNA
ggaaaaaatactaaaataaattttaaaactccgttaccattttatcatgatgttattgatatcactcctatttac

SEQ ID NO: 462291 - DNA, 75 bp, synthetic construct
  source 1..75: mol_type = other DNA
aaattgatatggggaagccaaacagggcgaagccacatcacacacttacgccattaaaacacctactacaagctg

SEQ ID NO: 462292 - DNA, 75 bp, synthetic construct
  source 1..75: mol_type = other DNA
ggccctaatcccccaggacagagagtctctattctggcttaatatgtatgaagtccctccggaaaaaaaaggaac

SEQ ID NO: 462293 - DNA, 75 bp, synthetic construct
  source 1..75: mol_type = other DNA
acccccagtcgctacaatggccaacgtaaggttgttggtatccccgactgggctaactatgttgttacggaaaac

SEQ ID NO: 462294 - DNA, 75 bp, synthetic construct
  source 1..75: mol_type = other DNA
ctacgcccgatgagtggttccacttcgatctggtgttggggatgacagacaggcttttacctgtggtgtccaatc

SEQ ID NO: 462295 - DNA, 75 bp, synthetic construct
  source 1..75: mol_type = other DNA
taaactcagaaaaaacaatgaaacctaaagccagcgggaaaaatgccattgctttaggaagtaattccagagcag

SEQ ID NO: 462296 - DNA, 75 bp, synthetic construct
  source 1..75: mol_type = other DNA
tgctcacccacatcgtccaggcgctgaaggaggggcagatccgctactgcgaatcgctcggcttcagcccgcagg

SEQ ID NO: 462297 - DNA, 75 bp, synthetic construct
  source 1..75: mol_type = other DNA
gatcctgaaaaccaaaaacaagccaatgctaagtaggtggttaactcatgtcagcgaaagcggctctgttgagct

SEQ ID NO: 462298 - DNA, 75 bp, synthetic construct
  source 1..75: mol_type = other DNA
ccagatcgattctgacaacaaactgggcgtaggttcagacgacaccgttgctgtgggtatcgtttaccagttcta

SEQ ID NO: 462299 - DNA, 75 bp, synthetic construct
  source 1..75: mol_type = other DNA
cgttatgccgcaggcagaaatggcgatattctggagcgaggttttaagcaatcgtccttgcttgacccaacatta

SEQ ID NO: 462300 - DNA, 75 bp, synthetic construct
  source 1..75: mol_type = other DNA
tactcctgctcacgccgctgcttttttcgctgctctgttttgcctgccggaaacggagactttctgcgactcgca

SEQ ID NO: 462301 - DNA, 75 bp, synthetic construct
  source 1..75: mol_type = other DNA
aatgcaacctccgggaccagtaacgcacagactgctctgggttttcaggtttcagtcggtgcctacagtgcagct

SEQ ID NO: 462302 - DNA, 75 bp, synthetic construct
  source 1..75: mol_type = other DNA
atttacctacagccacagatctatatggtaaaacaaaacatatgggtgaggtttattatggagggcacattacac

SEQ ID NO: 462303 - DNA, 75 bp, synthetic construct
  source 1..75: mol_type = other DNA
ctgaatttttgagagaaaaaattgaatttatacctcctaattgggatgaacttattaactacatgaattctgatt

SEQ ID NO: 462304 - DNA, 75 bp, synthetic construct
  source 1..75: mol_type = other DNA
caactagactgagggaggcaataggatttattcctccatcgtggtatgacttgattaagtttatgtttaatgact

SEQ ID NO: 462305 - DNA, 75 bp, synthetic construct
  source 1..75: mol_type = other DNA
accaccagaaaccggatctgcgtgatgagaaaagagtagtagatatgattttatataaaaaacataaaaccatac

SEQ ID NO: 462306 - DNA, 75 bp, synthetic construct
  source 1..75: mol_type = other DNA
tgcaggcgtttaataaatctgttcctgaggacattatggtatttagtctggcgggtactgttcatcttccgggga

SEQ ID NO: 462307 - DNA, 75 bp, synthetic construct
  source 1..75: mol_type = other DNA
ttgttcattaaaaatccggttgaaaacgggcttacccgtggtgaacaaatggaactggcacggattgcgctggca

SEQ ID NO: 462308 - DNA, 75 bp, synthetic construct
  source 1..75: mol_type = other DNA
gatacccgtgcgctggaagaggtcggtctgaccgaagcccaggcacaggagatgtaccgttatctggcgattgct

SEQ ID NO: 462309 - DNA, 75 bp, synthetic construct
  source 1..75: mol_type = other DNA
gggagtggagctataaatggggaagatttacccactttaaaaacatttattacaaccgaatcgaattatgatcca

SEQ ID NO: 462310 - DNA, 75 bp, synthetic construct
  source 1..75: mol_type = other DNA
tccattgcggaacgggatgcgcgtatacgccagggggaaatggggtacatcaaccgctcgcgtgcaacaggcgtc

SEQ ID NO: 462311 - DNA, 75 bp, synthetic construct
  source 1..75: mol_type = other DNA
tggctttagtcccggagtgttgccaggagtatctttattatctcgtcggcgttgatctggttttcctgtcgattt

SEQ ID NO: 462312 - DNA, 75 bp, synthetic construct
  source 1..75: mol_type = other DNA
tcagtaaatcgagtgatgttacaaaaaaaagaaaataacgttataaaaaatattgctattaatccgcttttaggc

SEQ ID NO: 462313 - DNA, 75 bp, synthetic construct
  source 1..75: mol_type = other DNA
atgagtttaatataaattacgccctatcaagaacaaacatattcacagatctaaaggaaaaaatacattacctta

SEQ ID NO: 462314 - DNA, 75 bp, synthetic construct
  source 1..75: mol_type = other DNA
caacctgtgatgcgactgttgctttcagtcgcgaggtgatttcttgctcagaaacgatgatggatgaacacatta

SEQ ID NO: 462315 - DNA, 75 bp, synthetic construct
  source 1..75: mol_type = other DNA
tgagttctatgtatatggatggatacattcagatgattaccctgaagttaatgcactaaaagaagaaataagagt

SEQ ID NO: 462316 - DNA, 75 bp, synthetic construct
  source 1..75: mol_type = other DNA
cagagcaaccacgaaggggtgctggtcgactggattcaggaagcgcgccagaacgcggccggattgataatcaac

SEQ ID NO: 462317 - DNA, 75 bp, synthetic construct
  source 1..75: mol_type = other DNA
acggtcctaacgccaacctgtacggactggataaaaacggcgcttacggcagcgaaagttttgtcagcatcggcg

SEQ ID NO: 462318 - DNA, 75 bp, synthetic construct
  source 1..75: mol_type = other DNA
atataatttggcacataccgcaaccaaacaccccctcaaatcacatgattcagataatctcctgttcaaaaaact

SEQ ID NO: 462319 - DNA, 75 bp, synthetic construct
  source 1..75: mol_type = other DNA
tcatattcaactcattgcgtgcactaggccatgataaagaaaattcacttaagcgtgtcattaatagttttaatt

SEQ ID NO: 462320 - DNA, 75 bp, synthetic construct
  source 1..75: mol_type = other DNA
ttccccataaatactggcggacactggatattagtttcgctacaaaaaatagttaatgaaaaaaataacacacaa

SEQ ID NO: 462321 - DNA, 75 bp, synthetic construct
  source 1..75: mol_type = other DNA
gtgaattaagaagccttgccaacagcgcaatatctttaaacaacgcagcgaacgaagtaatgaacatgtggcttc

SEQ ID NO: 462322 - DNA, 75 bp, synthetic construct
  source 1..75: mol_type = other DNA
ggcagttgacacgattattaatgccaacggcaaaatggatgtttatggaaaagatgttggtactgtacttaatag

SEQ ID NO: 462323 - DNA, 75 bp, synthetic construct
  source 1..75: mol_type = other DNA
attcaacgtgccggaaagttatagtttgttgaaaatgcccccagtgggatgcctgataagcgcacttaagaaagc

SEQ ID NO: 462324 - DNA, 75 bp, synthetic construct
  source 1..75: mol_type = other DNA
aagataaaggaacaatgtcagttttaacgaatgctaaagctgatgcgacccgaatagataatggcggggtcatgg

SEQ ID NO: 462325 - DNA, 75 bp, synthetic construct
  source 1..75: mol_type = other DNA
ttcaggcacttttactggactctgttcctcctcaggggagcagactgacgactttcggaaaatattgtaccactc

SEQ ID NO: 462326 - DNA, 75 bp, synthetic construct
  source 1..75: mol_type = other DNA
atgaacaataatgagcgcgtgattcatgaactgaatgaactcacacaaagcgcaatatcttacaacaatgccgta

SEQ ID NO: 462327 - DNA, 75 bp, synthetic construct
  source 1..75: mol_type = other DNA
cagcatcagtcttaaaaaccacctatgcaaaattgcactatcatacttagaaaataacaatgaagaattaataag

SEQ ID NO: 462328 - DNA, 75 bp, synthetic construct
  source 1..75: mol_type = other DNA
cgcctgcaaatctcgcccggagacagtacggcgataccgcccgttgatccggtttatgaatccgacagcgattta

SEQ ID NO: 462329 - DNA, 75 bp, synthetic construct
  source 1..75: mol_type = other DNA
tcaaagctttcgtgcagcaggcgatgagttaggcttatcctcgtccgccattagccatagtattaaaacactgga

SEQ ID NO: 462330 - DNA, 75 bp, synthetic construct
  source 1..75: mol_type = other DNA
tcggccttgcacaacaagatctcgacgaaggcaaatcacaaatcgctcacggcgaaccgtgcgtgaaaccgccaa

SEQ ID NO: 462331 - DNA, 75 bp, synthetic construct
  source 1..75: mol_type = other DNA
aatcgttggtttcagggttggagccggcgttacttcagtcgttcagaatggtgcttcgtataacacagaacagtc

SEQ ID NO: 462332 - DNA, 75 bp, synthetic construct
  source 1..75: mol_type = other DNA
cggtcgcctcctggacacccatgggcggcgtatttccatcacgctccctgctgtgatccccgatcaggtcatcat

SEQ ID NO: 462333 - DNA, 75 bp, synthetic construct
  source 1..75: mol_type = other DNA
cgaatgcgcgcacagcaggcgtttgaaggtctgtccgtcgctggcccgaccgccgcctacgaatatcacgcccgc

SEQ ID NO: 462334 - DNA, 75 bp, synthetic construct
  source 1..75: mol_type = other DNA
atcagttaaaaactcgaaaagaattttactcttatcttgatagtaagaggaaaaatggaaactctagatttagtt

SEQ ID NO: 462335 - DNA, 75 bp, synthetic construct
  source 1..75: mol_type = other DNA
aatcaaataatatcaaaggaaatgaaaagaagaggggtggaaatttatgatattaatggttgctttgaaaaagtc

SEQ ID NO: 462336 - DNA, 75 bp, synthetic construct
  source 1..75: mol_type = other DNA
agtaccaggaaacataattgtttactaccaattatgtttcctggtacttttgagaatgagtttgacaaaaaagaa

SEQ ID NO: 462337 - DNA, 75 bp, synthetic construct
  source 1..75: mol_type = other DNA
ggcatacgctgcagtaccgcacatatcacggaaaaggataacgcctggctgtactcgctgtcgcatcagaccagt

SEQ ID NO: 462338 - DNA, 75 bp, synthetic construct
  source 1..75: mol_type = other DNA
gatgtaccgttatctggcgattgctaactacgaagatcgctttgtggtgccgagtagtcatcgtgaactggcacg

SEQ ID NO: 462339 - DNA, 75 bp, synthetic construct
  source 1..75: mol_type = other DNA
tttgccatcaatacaaagaaatattcctgtcgttacccaacccgtagaaattttaccctccatccatagaaagcg

SEQ ID NO: 462340 - DNA, 75 bp, synthetic construct
  source 1..75: mol_type = other DNA
tattctgcgagagcatactcgccgaaaatccgtggcattgctaaaacacaagccgttgtggaaattaggcaacaa

SEQ ID NO: 462341 - DNA, 75 bp, synthetic construct
  source 1..75: mol_type = other DNA
tgcaaaaatggttacggcactgaatgtctataacgacggcggtaatgactccaacttattgatagtgttttatgt

SEQ ID NO: 462342 - DNA, 75 bp, synthetic construct
  source 1..75: mol_type = other DNA
cagtgttttccttgaaagaatattagatcctgtctgtatgtcattccttgaccgggtaatgactccaacttattg

SEQ ID NO: 462343 - DNA, 75 bp, synthetic construct
  source 1..75: mol_type = other DNA
ggaagacgtaaaaacctctgtaaacgtagaacagcctgcacctgaaacacaggaaccgttagaagcgacacactc

SEQ ID NO: 462344 - DNA, 75 bp, synthetic construct
  source 1..75: mol_type = other DNA
ctcggaggaaatcaaaaatacacaaaaagagaaagaatgattcaaaacttcataaatgataaatacaatttatca

SEQ ID NO: 462345 - DNA, 75 bp, synthetic construct
  source 1..75: mol_type = other DNA
tcaagcctgatgcggtatatctcggcatctacgaaggattagtgctggctggagttcatgaagtgcgtaacttct

SEQ ID NO: 462346 - DNA, 75 bp, synthetic construct
  source 1..75: mol_type = other DNA
caccaacaggcttaagacaggaccgtttgatctgtggctggagcgtaatgatagccaaaaggaaaatatctacta

SEQ ID NO: 462347 - DNA, 75 bp, synthetic construct
  source 1..75: mol_type = other DNA
aaccgtaacaaggccaccgtaacccgctacttgagcaatcgaaaagaccgcgatcaggtgcgatatgtggcaatg

SEQ ID NO: 462348 - DNA, 75 bp, synthetic construct
  source 1..75: mol_type = other DNA
atgaaaaatcctcttttatagatggtagtgcttatggcataaggtatactaaaaatttcaacactacaaatactg

SEQ ID NO: 462349 - DNA, 75 bp, synthetic construct
  source 1..75: mol_type = other DNA
tattctgcgagagcttactcgccgaaaatccgtggaattgctaaaacacaagccgttgtggaaattagacaaaat

SEQ ID NO: 462350 - DNA, 75 bp, synthetic construct
  source 1..75: mol_type = other DNA
ttcaaagaatatctatcttgagaaacaggcttttcacgatctgataatatctctaagagaaaaaagtgaaatata

SEQ ID NO: 462351 - DNA, 75 bp, synthetic construct
  source 1..75: mol_type = other DNA
tacgtaaattaaaaaaagtaccatgtggttatgataatattagtaaaacaatagcaaaacgaaatccttttaatc

SEQ ID NO: 462352 - DNA, 75 bp, synthetic construct
  source 1..75: mol_type = other DNA
caccgtaattatcgataagttccacgttgtcaggatggcgaacgagtctctggaacgcgctcgcaaggccatcag

SEQ ID NO: 462353 - DNA, 75 bp, synthetic construct
  source 1..75: mol_type = other DNA
ttatccggcacactgtcattgtgatactggaacagccggtgaatttccctatatttactacacagcaagaataaa

SEQ ID NO: 462354 - DNA, 75 bp, synthetic construct
  source 1..75: mol_type = other DNA
gtgtaatacagtggtattcgatggggaagaacttcacgcgagctattatcagtcgttattatctcaggtacggga

SEQ ID NO: 462355 - DNA, 75 bp, synthetic construct
  source 1..75: mol_type = other DNA
gatttagtttggtctataaaaggtgataagataaaagtatataataaaacaccaaattacatgaatttcaaagaa

SEQ ID NO: 462356 - DNA, 75 bp, synthetic construct
  source 1..75: mol_type = other DNA
aatgccagtccaggaagtgttggacaatggagcgagaaagtatcagggatgtcgtcagtttttaataaagccaaa

SEQ ID NO: 462357 - DNA, 75 bp, synthetic construct
  source 1..75: mol_type = other DNA
cgcatgacattactaataatggctcggatgagctagttgttatgctttgggcaaatgaaatatttaatcgttctg

SEQ ID NO: 462358 - DNA, 75 bp, synthetic construct
  source 1..75: mol_type = other DNA
taacttcaagaatgacaggatacaaataaaaatagatgaggttgggacaggattaaaaagggcattatacgctac

SEQ ID NO: 462359 - DNA, 75 bp, synthetic construct
  source 1..75: mol_type = other DNA
cccagaatttgttaactcttcacgcaacaaaaaatcaaaaacaaaattctatccaggaacaggatatcacctttc

SEQ ID NO: 462360 - DNA, 75 bp, synthetic construct
  source 1..75: mol_type = other DNA
gaaaactattctgtatttgagcaattatcaaaaaaaggaaaagtgcgaaaaatacaaaagccagttcacaaactg

SEQ ID NO: 462361 - DNA, 75 bp, synthetic construct
  source 1..75: mol_type = other DNA
actttattccatgggcgttatagaacagcggtataaagaaaaagtcagaacaataaagagtaatactgcattttg

SEQ ID NO: 462362 - DNA, 75 bp, synthetic construct
  source 1..75: mol_type = other DNA
ggtaatgaaatagaatggtcaaaagaccatggggtgttgaaagcatacaatcccacaccaaactatcaaaacata

SEQ ID NO: 462363 - DNA, 75 bp, synthetic construct
  source 1..75: mol_type = other DNA
tttgaatgagggacaaaatagcaaagtgcgtgtatatagtaaagatatttcctcattaccacaagatagagaatc

SEQ ID NO: 462364 - DNA, 75 bp, synthetic construct
  source 1..75: mol_type = other DNA
taacatttcacgagccctaataagcatcacgttcgatataccttttgacagtaccaacgacagaccaataacttt

SEQ ID NO: 462365 - DNA, 75 bp, synthetic construct
  source 1..75: mol_type = other DNA
tcagcgatcttatcgaggccaaaaaatttaatggctatacgctggtcagcggagaagactggcagaagcccacag

SEQ ID NO: 462366 - DNA, 75 bp, synthetic construct
  source 1..75: mol_type = other DNA
ctgtgtagtcgctggcggcgttattccaccgcaagattatgccttcctgcaagagcgtggcgtggcggcgattta

SEQ ID NO: 462367 - DNA, 75 bp, synthetic construct
  source 1..75: mol_type = other DNA
gatgggattgagtacatcaaagctgcactctctgctggtctgaaaattgacgactttgccccacgtctgtcgttc

SEQ ID NO: 462368 - DNA, 75 bp, synthetic construct
  source 1..75: mol_type = other DNA
atcgaagccggtttaccaaaacgaatgatcgaagaagcatccgcgcgcgagcagtcgcttatcgatcaaggcaag

SEQ ID NO: 462369 - DNA, 75 bp, synthetic construct
  source 1..75: mol_type = other DNA
tgagcagcaccagcgcttattggcacgtctggattatttgacgaagctcgacactaaagctgcaggccagcgtaa

SEQ ID NO: 462370 - DNA, 75 bp, synthetic construct
  source 1..75: mol_type = other DNA
gaaatcggcctccgagttcgatgccattgttgcgcaaacggagcagttccttgccgacaatggtcgtcgcccgcg

SEQ ID NO: 462371 - DNA, 75 bp, synthetic construct
  source 1..75: mol_type = other DNA
gaccgttatctggtgccaagccagtgtgttaccggcgtgattgcgcaaagctatcatcagtctgagaaatcggcc

SEQ ID NO: 462372 - DNA, 75 bp, synthetic construct
  source 1..75: mol_type = other DNA
aatattatatgcgtattcgaccttttgctttttatggtgtttctacgtgtaatacaaaagaacaggatacattat

SEQ ID NO: 462373 - DNA, 75 bp, synthetic construct
  source 1..75: mol_type = other DNA
taagcgtacaacaactatttatgctggcattagcgatgatagttattggttctttcggagtgtgtttatttgttt

SEQ ID NO: 462374 - DNA, 75 bp, synthetic construct
  source 1..75: mol_type = other DNA
tcaacttctttttcgaccacgatcttagccgttaccactcccgcgtcggcattggcgcggagtactggcgcgact

SEQ ID NO: 462375 - DNA, 75 bp, synthetic construct
  source 1..75: mol_type = other DNA
ctgaccgatcaaatcgtcaaacaagccagagccattatccaacagatcgacgaagccggtggcatggcgaaagcg

SEQ ID NO: 462376 - DNA, 75 bp, synthetic construct
  source 1..75: mol_type = other DNA
ggcaaagcgggcgtcgctatcgacaccgtggaagatatgaaagtcctgttcgaccagatcccgctggataaaatg

SEQ ID NO: 462377 - DNA, 75 bp, synthetic construct
  source 1..75: mol_type = other DNA
gtataccgcccaaccgtggaccatccgtcagtatgctggtttttcaacagcaaaagagtccaacgctttttatcg

SEQ ID NO: 462378 - DNA, 75 bp, synthetic construct
  source 1..75: mol_type = other DNA
tttccgtaacagcgttgacgtgatgaccactgaaacgacctgtttaagttctgtctggcaaaccgatgaagaagt

SEQ ID NO: 462379 - DNA, 75 bp, synthetic construct
  source 1..75: mol_type = other DNA
atttagaagggataataacacattatataataggaagtcttattataaatatttctctgataaagcatgtctgca

SEQ ID NO: 462380 - DNA, 75 bp, synthetic construct
  source 1..75: mol_type = other DNA
tacgatgtaacagcccccgtcaccatcccaggagacatcattatcgatgcttctactggagaatttaccttcaat

SEQ ID NO: 462381 - DNA, 75 bp, synthetic construct
  source 1..75: mol_type = other DNA
atgaattcatcgtttgtcgggtccatctccatctcttggcctattgccattcttgcgtcagtgtcatcagaggcg

SEQ ID NO: 462382 - DNA, 75 bp, synthetic construct
  source 1..75: mol_type = other DNA
cgattgcattctatgggggtaattgaacaacgttatagatcaaaggtgcttacattaaaagcaagtactgcactt

SEQ ID NO: 462383 - DNA, 75 bp, synthetic construct
  source 1..75: mol_type = other DNA
aaagtaaaagaaaactggcgaatttgctttgtgttagtcttgaagaattatactctttgagaaaagatgaaggaa

SEQ ID NO: 462384 - DNA, 75 bp, synthetic construct
  source 1..75: mol_type = other DNA
attgggcgatggatatatcacaggcgaagtttttaagtttctcctgcaaaggtatcccagcaaaattaattagac

SEQ ID NO: 462385 - DNA, 75 bp, synthetic construct
  source 1..75: mol_type = other DNA
aatgcaaatggtgttagaccctgccgtaaacacgtctctaagattgcaatgtattaacccgactgatatgtcagg

SEQ ID NO: 462386 - DNA, 75 bp, synthetic construct
  source 1..75: mol_type = other DNA
atataatttggcacatgccgcaaccaactccccccttaaaccagctggtccggataattcagatgatctcctgtt

SEQ ID NO: 462387 - DNA, 75 bp, synthetic construct
  source 1..75: mol_type = other DNA
gggataaaaatcgtcaattaaccacagatgaaatagcttgctatcttaaaaagatcgccgccaatgcaaaaaata

SEQ ID NO: 462388 - DNA, 75 bp, synthetic construct
  source 1..75: mol_type = other DNA
aacggttttaatggcacgtggtgtgccggaattagtatcaacagcaataccatgcaaatggttcttgatcctggt

SEQ ID NO: 462389 - DNA, 75 bp, synthetic construct
  source 1..75: mol_type = other DNA
cactatggcgcgttcttttaaagcggttgccaatggcaaaatttatatcggtaaaattgacacggaccccgtaaa

SEQ ID NO: 462390 - DNA, 75 bp, synthetic construct
  source 1..75: mol_type = other DNA
ggttatgataatacggttaatggcatagcaatgttgagcaagactatacccgcggtatcagatggttcaaagata

SEQ ID NO: 462391 - DNA, 75 bp, synthetic construct
  source 1..75: mol_type = other DNA
gatttatcaaccttaaaaaaagatgaaggcaattattctatttttgaacagttatctaaaaacggaaagccacgt

SEQ ID NO: 462392 - DNA, 75 bp, synthetic construct
  source 1..75: mol_type = other DNA
gcgccgtatgtggggccgcaggatgtggcgctggctatcattggcgcggtgttcaaaaacggttacgtcaaaaac

SEQ ID NO: 462393 - DNA, 75 bp, synthetic construct
  source 1..75: mol_type = other DNA
ctctatatggaaaatctgactgcggaagagcgtgagattatcaaggcgggtagtttgattaacttcaataaaaac

SEQ ID NO: 462394 - DNA, 75 bp, synthetic construct
  source 1..75: mol_type = other DNA
cggtcgcggccaggattattgccagcttaatccacaaccgatggcgtactacgatggttgcatcagcgttgattt

SEQ ID NO: 462395 - DNA, 75 bp, synthetic construct
  source 1..75: mol_type = other DNA
gacacctgggatatcgactatccgggcgtggttgcggtgcatctgaccggaaaaccagcgccgtatgtggggccg

SEQ ID NO: 462396 - DNA, 75 bp, synthetic construct
  source 1..75: mol_type = other DNA
agatggcggaagtgccaacctttgaagtgggggattacatttacatccctggcattaaagcggcgctggataatc

SEQ ID NO: 462397 - DNA, 75 bp, synthetic construct
  source 1..75: mol_type = other DNA
ttccttccggtgaaacctcttcttatcgttcaaatccgattggtctggcggagtttaccctgtcacgccgcgatc

SEQ ID NO: 462398 - DNA, 75 bp, synthetic construct
  source 1..75: mol_type = other DNA
tccggttggtctggccgagtttaccctgtcgcgccgcgatccgggctatgtcggcagaagtaaagcgaccgctga

SEQ ID NO: 462399 - DNA, 75 bp, synthetic construct
  source 1..75: mol_type = other DNA
aaagtgcagcaggggattatcgcgggctgttctggcggtaactacgaaaacgtcatcgcggcggcgaatgcactg

SEQ ID NO: 462400 - DNA, 75 bp, synthetic construct
  source 1..75: mol_type = other DNA
attcattagcctctcacgatattacctttgttggtattgtacagaccgctaaagcgtccggaatggaacgtttcc

SEQ ID NO: 462401 - DNA, 75 bp, synthetic construct
  source 1..75: mol_type = other DNA
gtgaaacctcttcatatcgttcaaatccgattggtctggcggagtttaccctgtcacgtcgcgatccaggctatg

SEQ ID NO: 462402 - DNA, 75 bp, synthetic construct
  source 1..75: mol_type = other DNA
atgaaatcgacacgctgaaccagaacctgaccgacattctgcgtgagattgaaattgagtccgaacgcgtggcgc

SEQ ID NO: 462403 - DNA, 75 bp, synthetic construct
  source 1..75: mol_type = other DNA
aaggttatgtgatccatgaagatgcgccggtaacggaaattacgctttacatggaaagcctgacggctgaagagc

SEQ ID NO: 462404 - DNA, 75 bp, synthetic construct
  source 1..75: mol_type = other DNA
ggcactgccagcatcaacaacagcagcctgagccggaacgtgacgtttattgcggatgtcaggacggcgcagatc

SEQ ID NO: 462405 - DNA, 75 bp, synthetic construct
  source 1..75: mol_type = other DNA
ggcaaccgtcttataccatccttccttttgtggaagtcgagtcgctgagtgttaatggtgcaaaattcagggcgg

SEQ ID NO: 462406 - DNA, 75 bp, synthetic construct
  source 1..75: mol_type = other DNA
aacggtgcagcggtcgcttcgacgatgaccacaaagccggacggcacggtggagatcagtgtcaccagtcagacc

SEQ ID NO: 462407 - DNA, 75 bp, synthetic construct
  source 1..75: mol_type = other DNA
atgctgaaaataatgacctctgctgtacccgccctcattctgtcacttgccgccttcagtgccggtgccgctcag

SEQ ID NO: 462408 - DNA, 75 bp, synthetic construct
  source 1..75: mol_type = other DNA
tggtgcgccagaccggtgtcaatattccttacgacggtggtgactgtaagggcgatgtgcaggccggttttgtgc

SEQ ID NO: 462409 - DNA, 75 bp, synthetic construct
  source 1..75: mol_type = other DNA
ccagggaaacgacatcaatacctccatgtgctcactgaccggtgtcagcgacgaccataaatttgccctgattca

SEQ ID NO: 462410 - DNA, 75 bp, synthetic construct
  source 1..75: mol_type = other DNA
ccagcatcaacagcagcagccagagccagagcgtgaagtttattgccgatgtcagcacggcgcagattgcggtgc

SEQ ID NO: 462411 - DNA, 75 bp, synthetic construct
  source 1..75: mol_type = other DNA
cacaaagccggatggcacggtggagatcagtgtcaccagtcagacggcgggcaccagtacagtcactgccagcat

SEQ ID NO: 462412 - DNA, 75 bp, synthetic construct
  source 1..75: mol_type = other DNA
acgttgcgggatgagtttggtaatcctgctttagggctgacatcagaagtcatcgagtcatatatcgataatttc

SEQ ID NO: 462413 - DNA, 75 bp, synthetic construct
  source 1..75: mol_type = other DNA
ccgacggtcaccacgcagccggacggcacggtggagatctctgtcaccagccagacggcgggcaccagtgcggtc

SEQ ID NO: 462414 - DNA, 75 bp, synthetic construct
  source 1..75: mol_type = other DNA
aggacgactcagtggctgacggtgcaatggcgaatatgctgcgggcgagggtcaccgatgcgttcggtaatgcgc

SEQ ID NO: 462415 - DNA, 75 bp, synthetic construct
  source 1..75: mol_type = other DNA
gcaacggttgccccaacggtgattacagagccggacggcacggcggagatcagtgtcaccagccagacggcggga

SEQ ID NO: 462416 - DNA, 75 bp, synthetic construct
  source 1..75: mol_type = other DNA
atcctggttgtacacacttacaaaatagaggtccaatacctcaaggggtatggagctggaatgttaatggtcctg

SEQ ID NO: 462417 - DNA, 75 bp, synthetic construct
  source 1..75: mol_type = other DNA
gcctttaatccaaaggttgctttggcactactggatgaacgggaaaggaaccagcaatacatcaaatcacgcgac

SEQ ID NO: 462418 - DNA, 75 bp, synthetic construct
  source 1..75: mol_type = other DNA
catcccacgagatttaaaggttaacgaaacaaacgctgaatatcttgtccgtaagttcggtgaacttgaatcaaa

SEQ ID NO: 462419 - DNA, 75 bp, synthetic construct
  source 1..75: mol_type = other DNA
ataaccaatacgtcaaccaaaaagtccgttttatccctgaataatactgctgactatatctatcacggcaacata

SEQ ID NO: 462420 - DNA, 75 bp, synthetic construct
  source 1..75: mol_type = other DNA
tttttctgtttccgggttttatatgccggcacatgtgcgtcaggcaccgtcaggtgtcgatctgtcagacgccga

SEQ ID NO: 462421 - DNA, 75 bp, synthetic construct
  source 1..75: mol_type = other DNA
gtattcaggacctggacagttcagttcgcggacgtcttgatgttgaggttattgaacagaacggacggaagaaaa

SEQ ID NO: 462422 - DNA, 75 bp, synthetic construct
  source 1..75: mol_type = other DNA
tgatgtctcatatcgcggttcagtcaatgccccgtcagcatctgccactatgaacaacacctggtggcaactaac

SEQ ID NO: 462423 - DNA, 75 bp, synthetic construct
  source 1..75: mol_type = other DNA
ttctgtatttagttcatttaatgatgatgaatggaatgtttttttcgatttcttaaaaacagagaattttctttg

SEQ ID NO: 462424 - DNA, 75 bp, synthetic construct
  source 1..75: mol_type = other DNA
aaatcgcgtatgttgccatttggtatggagattgcttcattaggggtgaaagatatcgtcctgcctggcgatatg

SEQ ID NO: 462425 - DNA, 75 bp, synthetic construct
  source 1..75: mol_type = other DNA
tatggcaatgctgttaatgtagctgaatttagcaaaggcattgcaccattaactctggaagtaaaagatgctaat

SEQ ID NO: 462426 - DNA, 75 bp, synthetic construct
  source 1..75: mol_type = other DNA
gtgagtgcaccggggaacagcagtaaggatgtttttaaaggaagtgaacaggaaataggtttcagcaatgtcaca

SEQ ID NO: 462427 - DNA, 75 bp, synthetic construct
  source 1..75: mol_type = other DNA
aggtcaccgcctacgatcttgaggaagtcgttatctataccgatagcgatggcgaaccagtgacctcgctggtac

SEQ ID NO: 462428 - DNA, 75 bp, synthetic construct
  source 1..75: mol_type = other DNA
tggaaggaatacgctgtttttatatcagcaagagtaagactaaagcagggatcagacacgttccgatacattcaa

SEQ ID NO: 462429 - DNA, 75 bp, synthetic construct
  source 1..75: mol_type = other DNA
cggataacggcgcaacggtcgcttcgacgatgaccacaaagccggatggcacggtggaaatcagtgtcaccagcc

SEQ ID NO: 462430 - DNA, 75 bp, synthetic construct
  source 1..75: mol_type = other DNA
cacaataagccgatcgttcacccgaaagtcaccacctttacccatctttcgcagttaccggaactgtggaaagcg

SEQ ID NO: 462431 - DNA, 75 bp, synthetic construct
  source 1..75: mol_type = other DNA
ttaatgaaccgttaaaaaaccaggaaatatccacaggtaatatcaatatcaattgcccattaaagatatttacaa

SEQ ID NO: 462432 - DNA, 75 bp, synthetic construct
  source 1..75: mol_type = other DNA
agatacctgggagactctttccaaacgctatggcaataatgtgagtaactggaacacctgcaatggccttaacgt

SEQ ID NO: 462433 - DNA, 75 bp, synthetic construct
  source 1..75: mol_type = other DNA
tcagcaaccgagctttctgttaagtcagtaacaacatcatcaccagttaaatccggtggaggtagggtagagata

SEQ ID NO: 462434 - DNA, 75 bp, synthetic construct
  source 1..75: mol_type = other DNA
attctggatacggcaacagggaatgccgccaaattcagcggttccagccttctgattaaagcactgagtgaacaa

SEQ ID NO: 462435 - DNA, 75 bp, synthetic construct
  source 1..75: mol_type = other DNA
cttatattggtgtctacaaaacaactggcacagggaaatatgactggttaacccctgaatcgatcggcgttaatg

SEQ ID NO: 462436 - DNA, 75 bp, synthetic construct
  source 1..75: mol_type = other DNA
atagaacaaaacgtcggtattggttatattccacatcatctggcattgccgttattgaacagaggtaaattgctt

SEQ ID NO: 462437 - DNA, 75 bp, synthetic construct
  source 1..75: mol_type = other DNA
taatccattacgatcttaatacaggtaatatgctgtatgataaagaaagtgaaagtttattcccaatagattttc

SEQ ID NO: 462438 - DNA, 75 bp, synthetic construct
  source 1..75: mol_type = other DNA
taaagacaaattttatcagtggaacgaatcgaatgattattatgtttcctgtgattgcgataaagacaatgtcag

SEQ ID NO: 462439 - DNA, 75 bp, synthetic construct
  source 1..75: mol_type = other DNA
gtgttggctgcgctggaagatacctgggagactctttccaaacgctatggcaataatgtgagtaactggaaaaca

SEQ ID NO: 462440 - DNA, 75 bp, synthetic construct
  source 1..75: mol_type = other DNA
aggccatgatccgcgattacccgttcctggtacgggaaaatgggactggaaagggctattgccttttgaaatgaa

SEQ ID NO: 462441 - DNA, 75 bp, synthetic construct
  source 1..75: mol_type = other DNA
acccatcagcgccaaccactattgccgtacaagagagtaactacccacttaaatttaatcagcaaaactcgcaaa

SEQ ID NO: 462442 - DNA, 75 bp, synthetic construct
  source 1..75: mol_type = other DNA
ctgaatgttgactacgccgccgtgacggggttacttgttcaggtcgcccgtgaaacagatggtcgcgttaccgcg

SEQ ID NO: 462443 - DNA, 75 bp, synthetic construct
  source 1..75: mol_type = other DNA
agtggggcagcagtaaacaatcagagagttattccatccacagcggtgctccggtgcaggcaaattctgctatca

SEQ ID NO: 462444 - DNA, 75 bp, synthetic construct
  source 1..75: mol_type = other DNA
agaggcggacggttcgacggcgaacacgctgcgtgcgagggtaaccgatgcattcggtaatgcgcttgccgggca

SEQ ID NO: 462445 - DNA, 75 bp, synthetic construct
  source 1..75: mol_type = other DNA
gaacgtgacatttatcgctgatgtcaggacggcgcagatcgcggatctggtggtcattaaggatggttcagaggc

SEQ ID NO: 462446 - DNA, 75 bp, synthetic construct
  source 1..75: mol_type = other DNA
cattcggtaatacgttgggcgggcagacggtcagcgtgttggcggataacggcgcaacggttgccccgacagtca

SEQ ID NO: 462447 - DNA, 75 bp, synthetic construct
  source 1..75: mol_type = other DNA
ccgatgtcaggacggcgaagatcgcggatctggtggtcacccgggataactcagtggctgacggcgcaatggcga

SEQ ID NO: 462448 - DNA, 75 bp, synthetic construct
  source 1..75: mol_type = other DNA
gatgcgttcggtaatgcgcttgccgggcagacggtcagcgtgttgggaggcaacggcgcaacggtgtctccgacg

SEQ ID NO: 462449 - DNA, 75 bp, synthetic construct
  source 1..75: mol_type = other DNA
atgaaattaagtgattttactaatctttctggtcaattcgtgaagccaagcggcgaggggttccttctgtccagc

SEQ ID NO: 462450 - DNA, 75 bp, synthetic construct
  source 1..75: mol_type = other DNA
gtaattctctcgcgtgggcgttgggttcatcagtcggcgtaagtaagatgctgtcgctaaaaaatttctttagcg

SEQ ID NO: 462451 - DNA, 75 bp, synthetic construct
  source 1..75: mol_type = other DNA
gaaactaatgctaaatccagtgaaacaaacgcggcgaaatctgcggcggacgcacttaattatcgcaaccatgct

SEQ ID NO: 462452 - DNA, 75 bp, synthetic construct
  source 1..75: mol_type = other DNA
gcacggtggagatctctgttaccagccagacggcgggagtcagtgcagtcacggcaaccatcaacagcagcagcc

SEQ ID NO: 462453 - DNA, 75 bp, synthetic construct
  source 1..75: mol_type = other DNA
gcagccggacggcacggtggagatttctgtcaccagtcagacggcgggagtcagaactgtcactgccagcatcaa

SEQ ID NO: 462454 - DNA, 75 bp, synthetic construct
  source 1..75: mol_type = other DNA
tgttggcggataacggcgcaacggtcgctccggtggtcaccacgcagccggacggtacggtggagatctctgtca

SEQ ID NO: 462455 - DNA, 75 bp, synthetic construct
  source 1..75: mol_type = other DNA
ctgtgtcgggtaagaacatgccaaaaatcggcaaggtcttggctgatgtccgtgatcagcttggtattccgtacc

SEQ ID NO: 462456 - DNA, 75 bp, synthetic construct
  source 1..75: mol_type = other DNA
catacagtgcagcagaaatgagaaagtttgtggagtgggcgctcaagcagcctgacggttggcagaagtggatca

SEQ ID NO: 462457 - DNA, 75 bp, synthetic construct
  source 1..75: mol_type = other DNA
agccggatttctacagacagcccctgccctcattggctgtatggccgaactgatggagtgttacgaccagcaggc

SEQ ID NO: 462458 - DNA, 75 bp, synthetic construct
  source 1..75: mol_type = other DNA
attgcagaaggagggcaggggaaaaccgaaaatgctacccgacaagtagtgatacaccctaagttgatcgaatgg

SEQ ID NO: 462459 - DNA, 75 bp, synthetic construct
  source 1..75: mol_type = other DNA
tgatgattatgggcagcggcgcttggtgcatagtttccggcatactatgatttctacttgtttagctggttgggt

SEQ ID NO: 462460 - DNA, 75 bp, synthetic construct
  source 1..75: mol_type = other DNA
tcagggattaccagacgctaccttcatacctttccattattatcagtttgctacgtaatagatggtttagactgg

SEQ ID NO: 462461 - DNA, 75 bp, synthetic construct
  source 1..75: mol_type = other DNA
ctcgaaagactcaaacgagacccgtttgtcccttatcaggggtatatgctgtcggccgccgaatatgccggacag

SEQ ID NO: 462462 - DNA, 75 bp, synthetic construct
  source 1..75: mol_type = other DNA
gggaaacggtaaaatcaactgagacgacgggtgcctacttcagtgaagcgatgtatgtccccttacacgtctaca

SEQ ID NO: 462463 - DNA, 75 bp, synthetic construct
  source 1..75: mol_type = other DNA
aaaatcatcccggattcatatccagtctgcctatcagctgaattccgggtatatgtttgcaggattaagcgccct

SEQ ID NO: 462464 - DNA, 75 bp, synthetic construct
  source 1..75: mol_type = other DNA
tatgccgtacagaacgattacatcgactcaaatccagcaagtgatatggccggtgcgctatcgacaaccaaagcg

SEQ ID NO: 462465 - DNA, 75 bp, synthetic construct
  source 1..75: mol_type = other DNA
ttaggagttgacgtaggcaaacaaaagttcgtacaggccattggagagcttcctgactttggcggatatctattt

SEQ ID NO: 462466 - DNA, 75 bp, synthetic construct
  source 1..75: mol_type = other DNA
cgtatcgttcattttggctttggcgcctttcaccgcgctcatcaggcgttactgaccgatcgtgtgctgaatgcc

SEQ ID NO: 462467 - DNA, 75 bp, synthetic construct
  source 1..75: mol_type = other DNA
ggtgatggaagtcgttgaaaacttgcctaagcgtgttgtacagccgtatcgctcaatgacgactcagcaattgat

SEQ ID NO: 462468 - DNA, 75 bp, synthetic construct
  source 1..75: mol_type = other DNA
aatcagtgttgttggccctggcatctgaaaaagggcaggcatgggttgccaatgcggtcactgaagaatatctgc

SEQ ID NO: 462469 - DNA, 75 bp, synthetic construct
  source 1..75: mol_type = other DNA
tcgtcgtctcgaactacttcacgaaaactttcgagagccaccagaaaaatggcggcgcgttgctgtgaaagatat

SEQ ID NO: 462470 - DNA, 75 bp, synthetic construct
  source 1..75: mol_type = other DNA
cgctgcccaacgatgagacgtttaccatcgattattaccgggtctttaaaaaagcggatacgcccgccgacccat

SEQ ID NO: 462471 - DNA, 75 bp, synthetic construct
  source 1..75: mol_type = other DNA
cagcagaacatctatcgccgttggttaaaaggtgaaacggaagcgcaaagggaaaaaattcagaagctgatccca

SEQ ID NO: 462472 - DNA, 75 bp, synthetic construct
  source 1..75: mol_type = other DNA
cggcaattgatgcacatgatgatgctgtacaggccgtttaccggaaagcgcatttcagccgcggtgggtcttccg

SEQ ID NO: 462473 - DNA, 75 bp, synthetic construct
  source 1..75: mol_type = other DNA
cggcaattgatgcgcatgatgatgcagtccaagccgtttaccggaaagacggggaatatgttcaaccagttgttg

SEQ ID NO: 462474 - DNA, 75 bp, synthetic construct
  source 1..75: mol_type = other DNA
tccgggtggatatcggggatgtgctttcgccgccgttgccctggattcaggtacagtccgggcgctacatgcagg

SEQ ID NO: 462475 - DNA, 75 bp, synthetic construct
  source 1..75: mol_type = other DNA
tataacaaaaaaattattgaacttaagaaaaagaccgggaaagaagttaccagtattcagtttaccgcacgggaa

SEQ ID NO: 462476 - DNA, 75 bp, synthetic construct
  source 1..75: mol_type = other DNA
cactaacattcttcatcttcagcagattgttggtcatgagaagagcgctgggattactaagcgttatttgcatac

SEQ ID NO: 462477 - DNA, 75 bp, synthetic construct
  source 1..75: mol_type = other DNA
gaacaattgaccaaaccggccaccacgctggagttcacaccagctgaagtggctgcacaacgtcaggcatggatt

SEQ ID NO: 462478 - DNA, 75 bp, synthetic construct
  source 1..75: mol_type = other DNA
tctggtatctacctctcgaaacattttcctgttcaacgccatattccattgatgaagcccgtcaaaaattaatca

SEQ ID NO: 462479 - DNA, 75 bp, synthetic construct
  source 1..75: mol_type = other DNA
caaaagaagtcctccatcttactggaatctcaaaatcaacacttcaccgcctcattgctaaggggaggttcccat

SEQ ID NO: 462480 - DNA, 75 bp, synthetic construct
  source 1..75: mol_type = other DNA
ttaactcgtttgccagggatcaaagggctaagtttcaagaaaaccgatttccggatcgacgaaaatggagaccag

SEQ ID NO: 462481 - DNA, 75 bp, synthetic construct
  source 1..75: mol_type = other DNA
aggaagaaatccgggcagaccgcgtgagcagtgaaagccgggtgtggcttgcgcagtgcgggctgacggtggagc

SEQ ID NO: 462482 - DNA, 75 bp, synthetic construct
  source 1..75: mol_type = other DNA
agtcggaaacgttaggcagggcaattcatgtgttctggcgtaaaggtttcagcaacacatcaataaaagaccttg

SEQ ID NO: 462483 - DNA, 75 bp, synthetic construct
  source 1..75: mol_type = other DNA
ttaactacaccacagttagcttctggatatttcaatgctggtttttactgataaatattgatgagtggaatctaa

SEQ ID NO: 462484 - DNA, 75 bp, synthetic construct
  source 1..75: mol_type = other DNA
tgctaaaaatcaattttaatttaacagacatcaatatccaactgccaacatgctttacgtctatccttttgggtg

SEQ ID NO: 462485 - DNA, 75 bp, synthetic construct
  source 1..75: mol_type = other DNA
ttagggcttagtactatgataataggtaacggccccgttcctgataatccttttgggcatgctgcggcggcaaat

SEQ ID NO: 462486 - DNA, 75 bp, synthetic construct
  source 1..75: mol_type = other DNA
tcagccataccgtctgccagggcagcagtacgatgaggagtcggggctggattataaccgtcaccggtactacga

SEQ ID NO: 462487 - DNA, 75 bp, synthetic construct
  source 1..75: mol_type = other DNA
tgcacctccgggcaaatttgctcatcagtagcggtgctaaaagagattcaggacggcattcccagtcacgtcacg

SEQ ID NO: 462488 - DNA, 75 bp, synthetic construct
  source 1..75: mol_type = other DNA
atgagcaaccaaggcgaataccccgaagataatcgggttgggaagcacgagccgcacgattttagtttgacccgt

SEQ ID NO: 462489 - DNA, 75 bp, synthetic construct
  source 1..75: mol_type = other DNA
gcatacagccatcaatccatgaaatcgcacgcaagctggtggataaggcgctgagctatcacggaggtgctttct

SEQ ID NO: 462490 - DNA, 75 bp, synthetic construct
  source 1..75: mol_type = other DNA
gaacgtatgaacatcgaaacggctaatacacaggcccagttatctaatttaggttctcttgctaacagtattggt

SEQ ID NO: 462491 - DNA, 75 bp, synthetic construct
  source 1..75: mol_type = other DNA
gctaaactggaagaagcaagatctaatgccgctcgtttacgtaatgaaatgttaaatgatattattggttatagt

SEQ ID NO: 462492 - DNA, 75 bp, synthetic construct
  source 1..75: mol_type = other DNA
gctaatgacaaagttgtatatcaatcaactatagattcttttttagccaaaaataaagaagatggagaacgtaat

SEQ ID NO: 462493 - DNA, 75 bp, synthetic construct
  source 1..75: mol_type = other DNA
ttctggatgcactggaaacctgtaacgcggataaacgggccattgaattactggaacagcgcaggctgcaacgac

SEQ ID NO: 462494 - DNA, 75 bp, synthetic construct
  source 1..75: mol_type = other DNA
tggcgatatagttgaacagggccagccgctggcgcagcttaaccgcactaaaacggaatccgacgttcaggaagc

SEQ ID NO: 462495 - DNA, 75 bp, synthetic construct
  source 1..75: mol_type = other DNA
accgctgtgatgctgctctgttttctcggctgggcgtggtacttccagcttgatgaagtcaccaccggcagcggc

SEQ ID NO: 462496 - DNA, 75 bp, synthetic construct
  source 1..75: mol_type = other DNA
atgctgtttctcgacggtgtgtatgtcgagcaatcccacggctcagcgcgtttccgctgggtcaaggcgccgacc

SEQ ID NO: 462497 - DNA, 75 bp, synthetic construct
  source 1..75: mol_type = other DNA
cgaattttagatgttttgacgagtttagtgttgattttgacccaagacttacagttctcattgctcgtaatggta

SEQ ID NO: 462498 - DNA, 75 bp, synthetic construct
  source 1..75: mol_type = other DNA
ttgaacaaagccaccaccgggctgacgcaggggattagcctggtcaaccgcgaactggcgatgacccagccactg

SEQ ID NO: 462499 - DNA, 75 bp, synthetic construct
  source 1..75: mol_type = other DNA
agccaatgcggaagtggaaacccagcgttcggtgatccgcgggcgggaagattctctcacccggctcaactttac

SEQ ID NO: 462500 - DNA, 75 bp, synthetic construct
  source 1..75: mol_type = other DNA
tcagcgatgatacggcgtttcacctctacaaccgccggaccgccgccgacgccctgttgtacgaactgctgccga

SEQ ID NO: 462501 - DNA, 75 bp, synthetic construct
  source 1..75: mol_type = other DNA
gaggaaaagtattcaaaaaaagaattctggaaaactacaaaaaaattgcagagcgagaactgtcatctcctgcgg

SEQ ID NO: 462502 - DNA, 75 bp, synthetic construct
  source 1..75: mol_type = other DNA
cggataaacgggccattgaattactggaacagcgcagactgcaacgactgaacaacgaggacaacaaccatgctg

SEQ ID NO: 462503 - DNA, 75 bp, synthetic construct
  source 1..75: mol_type = other DNA
ctgtattcgcggcaggataaaggaaaaccgggagatgactctcccggtccgtcttatcgctaatcccctgagcag

SEQ ID NO: 462504 - DNA, 75 bp, synthetic construct
  source 1..75: mol_type = other DNA
atgattggctatgtaccgaatgttgaacagtctacgcaagccctattaggtatgcagtttattatgattgctcta

SEQ ID NO: 462505 - DNA, 75 bp, synthetic construct
  source 1..75: mol_type = other DNA
tattttatgggccggagcctctattcttccggtattaagctgtggtgttcttctgttgatggcattagtgggcta

SEQ ID NO: 462506 - DNA, 75 bp, synthetic construct
  source 1..75: mol_type = other DNA
ctcctgcgaatggctgtgggtttcagagttcctacaccgagcagcgaattgcgcagctgtggattacttacggtg

SEQ ID NO: 462507 - DNA, 75 bp, synthetic construct
  source 1..75: mol_type = other DNA
ctgttctcctctgtcgatgatgggccagttatggtggtaagctcccagcgcttacatgatatgttgaatcctaca

SEQ ID NO: 462508 - DNA, 75 bp, synthetic construct
  source 1..75: mol_type = other DNA
cttcgataattgttatttttacgcttcgcacttcaccagagcagagtttctgtctgccaaagaaatatcatttat

SEQ ID NO: 462509 - DNA, 75 bp, synthetic construct
  source 1..75: mol_type = other DNA
tcgcagtaactcttttaccatcattactgttttatgcaatagattcaattttaatgcaggtattatataaagata

SEQ ID NO: 462510 - DNA, 75 bp, synthetic construct
  source 1..75: mol_type = other DNA
ttcagccgttttctaacaaccactgaccctcaaacaccaaaatcatcagtgccgtgggcgcagctgcagtctgcg

SEQ ID NO: 462511 - DNA, 75 bp, synthetic construct
  source 1..75: mol_type = other DNA
gtggattacttacggtaatgcggtattcagccgttttctaacaaccactgaccctcaaacaccaaaatcatcagt

SEQ ID NO: 462512 - DNA, 75 bp, synthetic construct
  source 1..75: mol_type = other DNA
tcccagcgcttacatgatatgttgaatcctacaaaagataccaattggaattccacgtatatctacaaatccaga

SEQ ID NO: 462513 - DNA, 75 bp, synthetic construct
  source 1..75: mol_type = other DNA
gcagacttatcgaccatatccagctcgtggtaaacgactttgccgcaagcaaagcgttttacactgctgttctgg

SEQ ID NO: 462514 - DNA, 75 bp, synthetic construct
  source 1..75: mol_type = other DNA
tctggatgtcggtataaaatcggatatgctggatatttcatcgtcatctggggtgaaaattgttactatcatggg

SEQ ID NO: 462515 - DNA, 75 bp, synthetic construct
  source 1..75: mol_type = other DNA
aaagagtggattcgtagtgatgatgtttcacctatatttatagaaactgaagataatttaagaacctttaacacg

SEQ ID NO: 462516 - DNA, 75 bp, synthetic construct
  source 1..75: mol_type = other DNA
catgagatgttgcctgttaatcttactccggaaacacttttcggctccaaatctcaggataaacatgcgcttttc

SEQ ID NO: 462517 - DNA, 75 bp, synthetic construct
  source 1..75: mol_type = other DNA
gacatgaaatgctgcctgttaatattactccggaaacactttttggctccacatctcatgatgaacatgcgcttt

SEQ ID NO: 462518 - DNA, 75 bp, synthetic construct
  source 1..75: mol_type = other DNA
tcattctgaaaaaccgttgcgcaattttaaaaggtgcaattgaagctgttcgcccaccttcagtttctgattggc

SEQ ID NO: 462519 - DNA, 75 bp, synthetic construct
  source 1..75: mol_type = other DNA
gcaaggtgggtggatttccacacggcaccggcgcccggcaaggtgggtggatttccacacggcaccggcgcccgg

SEQ ID NO: 462520 - DNA, 75 bp, synthetic construct
  source 1..75: mol_type = other DNA
cgtggattgtgcagctcagcgggtcgctggtcgtatggcgtagtgtcccccgtaaccggccgcgtgcggccgcta

SEQ ID NO: 462521 - DNA, 75 bp, synthetic construct
  source 1..75: mol_type = other DNA
cacatagttatccagaaatttatgctggagtagcattaacacttgcaggagtatgcagtaaagataaacaggcga

SEQ ID NO: 462522 - DNA, 75 bp, synthetic construct
  source 1..75: mol_type = other DNA
ggttttgcctccagcgcaccggtacacattgaagctattttgcagggaatggtgaaacagttaggttgccgccat

SEQ ID NO: 462523 - DNA, 75 bp, synthetic construct
  source 1..75: mol_type = other DNA
atcccatgcagtatgcaaaatctgtcattctgaacgttgaagaaatcgactgccagactgcgatcattcgtatgc

SEQ ID NO: 462524 - DNA, 75 bp, synthetic construct
  source 1..75: mol_type = other DNA
aggctggttaacgcgtaaggcgcgtcgccagggtagagacaacaaaaggagcctgggatgtacagcagactgtta

SEQ ID NO: 462525 - DNA, 75 bp, synthetic construct
  source 1..75: mol_type = other DNA
aaaatatcccacaatatttgcgttcacactggcagaaagagacggggtttgcctttccttccggtcacacgatgt

SEQ ID NO: 462526 - DNA, 75 bp, synthetic construct
  source 1..75: mol_type = other DNA
ccgaggcggtggcgcgtatctcgccgagaaccgcaacgttccataaagggcaactggtgtgggggagtgtggcag

SEQ ID NO: 462527 - DNA, 75 bp, synthetic construct
  source 1..75: mol_type = other DNA
agctctatattcgtcctaacgaacagaacctctcccgttcgctgtttctagccactggcgatgtattgccgctga

SEQ ID NO: 462528 - DNA, 75 bp, synthetic construct
  source 1..75: mol_type = other DNA
tctgtcacatcactattttcgtgcagaaggctctagccctccccaatcaatggcgacaggtataaataaggttcg

SEQ ID NO: 462529 - DNA, 75 bp, synthetic construct
  source 1..75: mol_type = other DNA
cagaaggatacaaagctatctcagatctgtcacatcactattttcgtgcagaaggctctagccctccccaatcaa

SEQ ID NO: 462530 - DNA, 75 bp, synthetic construct
  source 1..75: mol_type = other DNA
attacacggaacagcgattaacggttaactcgatctgcaatgtcggtccaaatacgcgcctcttcgagcaatctg

SEQ ID NO: 462531 - DNA, 75 bp, synthetic construct
  source 1..75: mol_type = other DNA
taaaaccaccagaaccgagacgcatactgttagcaaagatgaggctgcagacggtactgtgtcaatggttgttcc

SEQ ID NO: 462532 - DNA, 75 bp, synthetic construct
  source 1..75: mol_type = other DNA
ttgtcgcggatgtcaggacggcgcagatcgctgatctggtggtcattaaggacgactcagtggcagacggtgcaa

SEQ ID NO: 462533 - DNA, 75 bp, synthetic construct
  source 1..75: mol_type = other DNA
acggttgccccgacggtcaccacgcagtcagacggcacggtggagatcagtgtcaccagccagacggcggggagc

SEQ ID NO: 462534 - DNA, 75 bp, synthetic construct
  source 1..75: mol_type = other DNA
tcatcacaggcccggacggtacggtggcgatctctgtcaccagccagactgccggaatcagtgcggtcaccgcca

SEQ ID NO: 462535 - DNA, 75 bp, synthetic construct
  source 1..75: mol_type = other DNA
gaattagtgtggtcaccgccagcatcaacaacagcagccagagtcagaacgtgacatttgtcgcggatgtcagga

SEQ ID NO: 462536 - DNA, 75 bp, synthetic construct
  source 1..75: mol_type = other DNA
agacggtcagcgtgacggcaggcaacggcgcaacggtgtctccgacggtcatcacagggccggacggcacggtgg

SEQ ID NO: 462537 - DNA, 75 bp, synthetic construct
  source 1..75: mol_type = other DNA
tctggtggtcattaaggatggttcagaggcggacggttcgacggcgaacacgctgcgggcgagggtgaccgatgc

SEQ ID NO: 462538 - DNA, 75 bp, synthetic construct
  source 1..75: mol_type = other DNA
gtgacgtttgtcgccgatgtcaggacggcgcagatcgcggatctggtggtcattaaggacggttcagaggcagac

SEQ ID NO: 462539 - DNA, 75 bp, synthetic construct
  source 1..75: mol_type = other DNA
ctggttgatggtcgtctgatctataccgccagcgacctgaaagtcggtctgttccaggatacgtctgccttctga

SEQ ID NO: 462540 - DNA, 75 bp, synthetic construct
  source 1..75: mol_type = other DNA
gatgaaataggcgttcagcgggagacgaaaaacgagcaggtggtattacaccagataattgatcgccggacagca

SEQ ID NO: 462541 - DNA, 75 bp, synthetic construct
  source 1..75: mol_type = other DNA
aaatttaatcctgaaactggtatatcagagcttgggacaggaaagtcttctggcttgtgcgtagagtattattaa

SEQ ID NO: 462542 - DNA, 75 bp, synthetic construct
  source 1..75: mol_type = other DNA
gggatggctacgctgctggcgggtagcggtgtggtcgaggtgagcggtacagataaaaatgaaacgggtaactgg

SEQ ID NO: 462543 - DNA, 75 bp, synthetic construct
  source 1..75: mol_type = other DNA
ggatgtgcatcaaaatttactgcagggacaaaatgttacctttacggtcgtgaatggtgcggcggtttttgccga

SEQ ID NO: 462544 - DNA, 75 bp, synthetic construct
  source 1..75: mol_type = other DNA
gcgaatacgttgcgggtgagggtcaccgatgcgttcggtaatgcgcttgccgggcagacggtcagcgtgttggca

SEQ ID NO: 462545 - DNA, 75 bp, synthetic construct
  source 1..75: mol_type = other DNA
agggcagtaacccggctaaagcggggaataaagtggagtttgtggttgacggtcaggttccgggtgacaccaacg

SEQ ID NO: 462546 - DNA, 75 bp, synthetic construct
  source 1..75: mol_type = other DNA
gacggtgtgaatgccaaagaactgaaggatggcgtacaggcagaagtgacggttccggcaggcagtgctgaaggt

SEQ ID NO: 462547 - DNA, 75 bp, synthetic construct
  source 1..75: mol_type = other DNA
agactttccgtaaagaactggaaaacattttgctggacccggcattaagtgcagaactcagagcagaactatcag

SEQ ID NO: 462548 - DNA, 75 bp, synthetic construct
  source 1..75: mol_type = other DNA
gtttgcctttttgtgggggggggcagatcgcgttacggagatcgaccgactgcttgagcaaaagccacgcttaac

SEQ ID NO: 462549 - DNA, 75 bp, synthetic construct
  source 1..75: mol_type = other DNA
attaaagtatgtgagaaataacatcctcgacattcttaatttatataatgttgaattagctgccatacgcgttac

SEQ ID NO: 462550 - DNA, 75 bp, synthetic construct
  source 1..75: mol_type = other DNA
cgcccaaagttacatcttttgttgtatattgcactaatgagtctgcactcaaatgtgttgatgttattaaaatac

SEQ ID NO: 462551 - DNA, 75 bp, synthetic construct
  source 1..75: mol_type = other DNA
actatcaggatctgaagcatgcggtgctccgtgccaaaaatctgcgcagctggttcagtgttcatctttacggaa

SEQ ID NO: 462552 - DNA, 75 bp, synthetic construct
  source 1..75: mol_type = other DNA
atgaatgacgatatcaggagcatactgccggtcagtgccagccgggcagagcgggtggtggacagtaccgccggt

SEQ ID NO: 462553 - DNA, 75 bp, synthetic construct
  source 1..75: mol_type = other DNA
cggcgaatacgctgcaggcgagggtcaccgacgcgttcgggaatgcgcttgccggacagacggtcagcgtgttgg

SEQ ID NO: 462554 - DNA, 75 bp, synthetic construct
  source 1..75: mol_type = other DNA
ttgctggtgacgctgcgtattattcaggtgaaccgccccgggtttcctggagagtgttttatctgtgaactcagg

SEQ ID NO: 462555 - DNA, 75 bp, synthetic construct
  source 1..75: mol_type = other DNA
gccggatgatcatcatcgcccggaagggggtgatctcattgcgctagcaccaggggaatcaacaacttcagagat

SEQ ID NO: 462556 - DNA, 75 bp, synthetic construct
  source 1..75: mol_type = other DNA
ccatggctggcctgggaaatgtcggtggacacctggaatgaacactggacggaggcggaaaaaagagcggcgata

SEQ ID NO: 462557 - DNA, 75 bp, synthetic construct
  source 1..75: mol_type = other DNA
gacatcggcgtatcaggcgtcatcgtggggcgcaaaaatgagcgtggatacacgcgattatgcgttttcggcgag

SEQ ID NO: 462558 - DNA, 75 bp, synthetic construct
  source 1..75: mol_type = other DNA
tatgactggttcggaccgtgggaaaaaattatcgggaaatttgatatcaggaagaacgacaaagggaaagaatat

SEQ ID NO: 462559 - DNA, 75 bp, synthetic construct
  source 1..75: mol_type = other DNA
gcggaacgtgaaacaacaattattgagcaggatgccggggaaaactggatcagtgctttccgtgaacgtattgag

SEQ ID NO: 462560 - DNA, 75 bp, synthetic construct
  source 1..75: mol_type = other DNA
aacagactggcacaaagcggatattcttgcctctttaaagaaaaagaaaatcagcatggcgggattatcccgtga

SEQ ID NO: 462561 - DNA, 75 bp, synthetic construct
  source 1..75: mol_type = other DNA
ccaccagcgctgtgttcgacgtcttcgccgcattctggccattaagcgtgacatgacgaaatggtgtgagaagtg

SEQ ID NO: 462562 - DNA, 75 bp, synthetic construct
  source 1..75: mol_type = other DNA
accacccgcgcttttgaacgttcaggattccgacaacgccatcctgacaagcgttttatcttcaacgggaatgaa

SEQ ID NO: 462563 - DNA, 75 bp, synthetic construct
  source 1..75: mol_type = other DNA
ccctatatttccagacacctgttatcacttaacccattactggcttgctgccgtagatattcccgtggcgagcga

SEQ ID NO: 462564 - DNA, 75 bp, synthetic construct
  source 1..75: mol_type = other DNA
aatctcatgcagaaaatatatcatctggctggtaagttgccatatattggcatttgatttttcctgtggtgtcac

SEQ ID NO: 462565 - DNA, 75 bp, synthetic construct
  source 1..75: mol_type = other DNA
cttcttgagagtcagaagatattcaatcaatcagaactggatttattaactcacaaaataattccgaacacagaa

SEQ ID NO: 462566 - DNA, 75 bp, synthetic construct
  source 1..75: mol_type = other DNA
gcggtaatcaacggcaacgagcagcatggctggagctggaatccgcagcctgtcagtatgaagagaatttgctgc

SEQ ID NO: 462567 - DNA, 75 bp, synthetic construct
  source 1..75: mol_type = other DNA
atgactagtggtgatggatcttatggtatttctgttgatagtcaaaacaaagtattatatataagcgatagcgat

SEQ ID NO: 462568 - DNA, 75 bp, synthetic construct
  source 1..75: mol_type = other DNA
caaccgtctcgctggaagcgggttacggttttgccctgaataaatcctttggtctggaagcggcgaaatatacgt

SEQ ID NO: 462569 - DNA, 75 bp, synthetic construct
  source 1..75: mol_type = other DNA
tgaaggatgcggacggtgcagcgctaactcctgacgaactggtcggcatgatcgccgcgctggaaaaagcactgg

SEQ ID NO: 462570 - DNA, 75 bp, synthetic construct
  source 1..75: mol_type = other DNA
tgccgccgtcttaatgctatggtgcgctcaaaccgctgcttatagcgggcagtgtcataccactcaggggaatcc

SEQ ID NO: 462571 - DNA, 75 bp, synthetic construct
  source 1..75: mol_type = other DNA
gctgtggctcatttatgcaggcgttattattgtgctgatgattgcgggcctggtcacgcacgcgctgttacgtcg

SEQ ID NO: 462572 - DNA, 75 bp, synthetic construct
  source 1..75: mol_type = other DNA
ggtgacacgccggggcaaatatttcgcagtatggttgacggttatcaccgtcattgtaccgctccgcgcggggat

SEQ ID NO: 462573 - DNA, 75 bp, synthetic construct
  source 1..75: mol_type = other DNA
tcgtcaggcgacccggttttagtgtattacctgtctggcacgatcaattcacttggctcatgttccgtcaatgcc

SEQ ID NO: 462574 - DNA, 75 bp, synthetic construct
  source 1..75: mol_type = other DNA
ggtaatagcggtagcttttccctgaaaatattgcagcctttcattggctcggtcaccattcctcctatggcgctg

SEQ ID NO: 462575 - DNA, 75 bp, synthetic construct
  source 1..75: mol_type = other DNA
acttggctcatgttctgtcaattctggagagacaatagaggttgatttgggggatgtatttgctgccaatttccg

SEQ ID NO: 462576 - DNA, 75 bp, synthetic construct
  source 1..75: mol_type = other DNA
ctgcgtttcctgaagggcaaaaaactgaaggatgcggaaggcgccgcgctaactcctgatgaactggtcggaatg

SEQ ID NO: 462577 - DNA, 75 bp, synthetic construct
  source 1..75: mol_type = other DNA
gccactgaccacaaagacaaagcatccgggcatatagccaatacccgtatcgagggcggcgaggtggtctgcgac

SEQ ID NO: 462578 - DNA, 75 bp, synthetic construct
  source 1..75: mol_type = other DNA
aaactcaactggaaggcatgacgggggcaccatcgccgaacgatgaagatcctgccgctggtggtgacgacaagg

SEQ ID NO: 462579 - DNA, 75 bp, synthetic construct
  source 1..75: mol_type = other DNA
cggataagaggtataaataaagattttattggaatggatgtcacttctgtgtttcgcccagaaaaaatgacgaat

SEQ ID NO: 462580 - DNA, 75 bp, synthetic construct
  source 1..75: mol_type = other DNA
ttattggaatggatgtcacttctgtatttcgcccagaaaaaatgaccaatttgatcagtataaaaacaggttggt

SEQ ID NO: 462581 - DNA, 75 bp, synthetic construct
  source 1..75: mol_type = other DNA
ttgaagcccttaaagagataaataaaaagcaagatgcgcaaatagatttattaatacaagtcgctcaccaaagaa

SEQ ID NO: 462582 - DNA, 75 bp, synthetic construct
  source 1..75: mol_type = other DNA
accatgtttcgcgggctggagatcatcctacaagggcgcgacccgcgcgatgcgtgggcgttcgttgaacgtatc

SEQ ID NO: 462583 - DNA, 75 bp, synthetic construct
  source 1..75: mol_type = other DNA
aggatatgccaaacacgaaaaaaggctctgtgacgaagcaacaagcactcatcaggccgaaggttctggtaggta

SEQ ID NO: 462584 - DNA, 75 bp, synthetic construct
  source 1..75: mol_type = other DNA
ggctgacggtggggatcggcaatcaagcagtgattatcgagccaccgatcaccgtgtcattcaaggcgctggaaa

SEQ ID NO: 462585 - DNA, 75 bp, synthetic construct
  source 1..75: mol_type = other DNA
ataccgaatatgttttcaaccctgaaacacgacagaatgaaccgccccgggaatcctggagactaaactccctga

SEQ ID NO: 462586 - DNA, 75 bp, synthetic construct
  source 1..75: mol_type = other DNA
ttaaagcttacatgaacaatgcgggtaatatttatgcgtcaggtaatcttactgctggaacgataaaatccaatg

SEQ ID NO: 462587 - DNA, 75 bp, synthetic construct
  source 1..75: mol_type = other DNA
cccggcccgctgccgttcatcctctcccgcacctacagcagttaccggacaaaaacgcccgcgccggtggggagc

SEQ ID NO: 462588 - DNA, 75 bp, synthetic construct
  source 1..75: mol_type = other DNA
gcggacgctggcctttcaccgggcggcggagggtgatgtggacgggggtgacggacggcgcgggccgccgttttc

SEQ ID NO: 462589 - DNA, 75 bp, synthetic construct
  source 1..75: mol_type = other DNA
taaagatattagagcgacggaggatttcttaagaggctatagttcaggaaatgcagagaggatagtggatggatt

SEQ ID NO: 462590 - DNA, 75 bp, synthetic construct
  source 1..75: mol_type = other DNA
gccgatcgcgtgatgacgctggcttctcgcagccagcaggcaacgattccggggccggagtggcacctgaatgac

SEQ ID NO: 462591 - DNA, 75 bp, synthetic construct
  source 1..75: mol_type = other DNA
acattgaagctattttgcagggaatggtgaaacagttaggttgccgccattgtgatactgcatgtagtgaatgcc

SEQ ID NO: 462592 - DNA, 75 bp, synthetic construct
  source 1..75: mol_type = other DNA
atggataatcgccgtcaggtgttgcagcctgccgggtttgtcaccgatgcacacgctccggtaacgaacaatatt

SEQ ID NO: 462593 - DNA, 75 bp, synthetic construct
  source 1..75: mol_type = other DNA
ttatggtttttaacggagaaaggaatgtaccggcagacagtctgaaaccgcagcctctgattcttccggacagaa

SEQ ID NO: 462594 - DNA, 75 bp, synthetic construct
  source 1..75: mol_type = other DNA
acgtaacggtacgcctcgcccctgacctggtgcgccaggtcgaaagagagcaagccaaactggaacgcagaacag

SEQ ID NO: 462595 - DNA, 75 bp, synthetic construct
  source 1..75: mol_type = other DNA
cgggatcaatgtatagtcctcagtttggttatatatctggaacacttattgcggaatatgatgaacgtcgttgta

SEQ ID NO: 462596 - DNA, 75 bp, synthetic construct
  source 1..75: mol_type = other DNA
cactgttttttttatcatacctcttattttgagttttgtaacttgtcgttatattaatgctaaaaaggcggacta

SEQ ID NO: 462597 - DNA, 75 bp, synthetic construct
  source 1..75: mol_type = other DNA
atatcgcatcagaaatgatagagctgggaaacacggcgtcaccagggaccatcccgaaacgactggagcatcttc

SEQ ID NO: 462598 - DNA, 75 bp, synthetic construct
  source 1..75: mol_type = other DNA
tttttggtgatatcggcgcatcgttatttagtgcggcagggccgggtaatcgacctgctggtgtcatgccgcaaa

SEQ ID NO: 462599 - DNA, 75 bp, synthetic construct
  source 1..75: mol_type = other DNA
gtggggataaacgtctctctgatgaaatgccgttgtatgtcggtctgtatattggctcaacacatgcatcgccgg

SEQ ID NO: 462600 - DNA, 75 bp, synthetic construct
  source 1..75: mol_type = other DNA
tggcctcaatatacatctgaatcactacgaatcgctgctggggcgtgccagcatgatactggggtatgacatcac

SEQ ID NO: 462601 - DNA, 75 bp, synthetic construct
  source 1..75: mol_type = other DNA
tcgcgccagaaaaatagtttccacgtactggacagtcagaacaacggcgttaacgccaacggcactgcgaatgga

SEQ ID NO: 462602 - DNA, 75 bp, synthetic construct
  source 1..75: mol_type = other DNA
tctaaaatgtaagattttaccagcatatgcttataactatgagatggaaaatgatgcccccaaaaatactaattc

SEQ ID NO: 462603 - DNA, 75 bp, synthetic construct
  source 1..75: mol_type = other DNA
ttattgcggaatatgatgaacgtcgttgtagtggtagtaagaacgaacattgttatagtaatttcagaaggttat

SEQ ID NO: 462604 - DNA, 75 bp, synthetic construct
  source 1..75: mol_type = other DNA
ttattgcagaatataatgaggagcgttgtagtggtggtaggaatacacattgttatagtaatttaagaaggttat

SEQ ID NO: 462605 - DNA, 75 bp, synthetic construct
  source 1..75: mol_type = other DNA
aattgaatcatctgtaattaacaaaactaatgatgatgattatgatgataactatgattatttttcactttttat

SEQ ID NO: 462606 - DNA, 75 bp, synthetic construct
  source 1..75: mol_type = other DNA
aagtaccgttcctgctggtgggctgctttaaatatattaccagccagtttgaagtgcgtttttcagcgacgattt

SEQ ID NO: 462607 - DNA, 75 bp, synthetic construct
  source 1..75: mol_type = other DNA
taaacaacgatatcaacaagaattgatattgcgtggcaattatgcgtctgcgacagatcaattacgtgtttatat

SEQ ID NO: 462608 - DNA, 75 bp, synthetic construct
  source 1..75: mol_type = other DNA
aataatataaaatatcatatggtagatacatcggcgtggattaaaagaatagcatatgatttctatggctatcct

SEQ ID NO: 462609 - DNA, 75 bp, synthetic construct
  source 1..75: mol_type = other DNA
ttccttatacacgttcttttttaactggttttctatttttaaaatatatcaaccctattttattgtttattctag

SEQ ID NO: 462610 - DNA, 75 bp, synthetic construct
  source 1..75: mol_type = other DNA
aacaacgtcgactctcgactacgtggctgaaaagccagatcacccaaccacataagctgtgggatgcaatgccga

SEQ ID NO: 462611 - DNA, 75 bp, synthetic construct
  source 1..75: mol_type = other DNA
tccggatcgcccctatattgcgcatgccctgcatgattcacgtcatgttgatcacgttaccgataagaacggtac

SEQ ID NO: 462612 - DNA, 75 bp, synthetic construct
  source 1..75: mol_type = other DNA
cagcgcctgctggcagaagttggcattttttacttctttacgttgcacccggatgcgcagacagaggtgatccac

SEQ ID NO: 462613 - DNA, 75 bp, synthetic construct
  source 1..75: mol_type = other DNA
atgttttatccggggggggaaccctgaaccgctacaggctggatataccttcctgcccgtcatcactggatgttg

SEQ ID NO: 462614 - DNA, 75 bp, synthetic construct
  source 1..75: mol_type = other DNA
atgattactcgtatccctcgtagttctttctctgcaaatattaataatacagcccagacaaatgaacaccaaacc

SEQ ID NO: 462615 - DNA, 75 bp, synthetic construct
  source 1..75: mol_type = other DNA
ccggctggaaatgattggggaggtacttcgcttatgtaagaaacggaagcattggcgaggcttaaccttaatatt

SEQ ID NO: 462616 - DNA, 75 bp, synthetic construct
  source 1..75: mol_type = other DNA
cgctgctcacgcttgcctcgcaaagtcgatagactcatttcagagtacgagatagcgctgttcgataaacatgca

SEQ ID NO: 462617 - DNA, 75 bp, synthetic construct
  source 1..75: mol_type = other DNA
cgggttaccggataccggcttgatgtcattggccggatagtcggccttcaccgtagtgtgcctgctgttattgcc

SEQ ID NO: 462618 - DNA, 75 bp, synthetic construct
  source 1..75: mol_type = other DNA
gtggctaaactcgccacgctgtcagatggcacagtctttgagcctgtaaacagttttacagaaaaaccagaagac

SEQ ID NO: 462619 - DNA, 75 bp, synthetic construct
  source 1..75: mol_type = other DNA
gttaaaagaaatagccaaaaggaatgaggttttaacaataattggtaatgcgacctcaaaatactttagtgaaaa

SEQ ID NO: 462620 - DNA, 75 bp, synthetic construct
  source 1..75: mol_type = other DNA
accgactggcgcggctataccgttgtcccttatgccacttcttaccgggaaaatcgcattgcgctcgatgccgcg

SEQ ID NO: 462621 - DNA, 75 bp, synthetic construct
  source 1..75: mol_type = other DNA
agcttcaaaaatgtgggcattctgttcgattaatttcgcttacaccaccagttgatttgattgataagctaatca

SEQ ID NO: 462622 - DNA, 75 bp, synthetic construct
  source 1..75: mol_type = other DNA
ccggtgaagctaaaactgatgctcgtgacgctgccatcattgccgaagctgcccgtaccctgcctcacgtgcgta

SEQ ID NO: 462623 - DNA, 75 bp, synthetic construct
  source 1..75: mol_type = other DNA
gaccgtgacgacaaaggtcagggcatggaaagtatgccggtgcgctttgccagaccgtacggcggggataaatac

SEQ ID NO: 462624 - DNA, 75 bp, synthetic construct
  source 1..75: mol_type = other DNA
cgacggtacagaccgacaccacgcgtatccagacggtataccagccggggagcttcgcgccgctcatccgcatcg

SEQ ID NO: 462625 - DNA, 75 bp, synthetic construct
  source 1..75: mol_type = other DNA
cttgcttgtgtatcagcaaagaataatattatgaatcaatgttttaatggaggtgatttacggcatcagcttgaa

SEQ ID NO: 462626 - DNA, 75 bp, synthetic construct
  source 1..75: mol_type = other DNA
gttgatttgattgataagctaatcagtaatgacataccagttgtttcattgggtatgaaatcaaaattagcttta

SEQ ID NO: 462627 - DNA, 75 bp, synthetic construct
  source 1..75: mol_type = other DNA
caaacctccgaatggaagaatctcagcagctatttgcagcgggcggttattccactgaaaggcgaactgaccgtt

SEQ ID NO: 462628 - DNA, 75 bp, synthetic construct
  source 1..75: mol_type = other DNA
tacaatttgttttacaccaaacgtggcaaactgcaggtcaatatctcccagcaattaggcgagtacggttcgttt

SEQ ID NO: 462629 - DNA, 75 bp, synthetic construct
  source 1..75: mol_type = other DNA
atgctgccagacagcttgaaagggtttgcgccagtggtgcgtggtatcgccaaaagcaatgcacaggtaacgatt

SEQ ID NO: 462630 - DNA, 75 bp, synthetic construct
  source 1..75: mol_type = other DNA
aaaaagaattacgcctgggtgacctcaaataccagcgtcgataacgagggacatataacgcaaaacctgggttta

SEQ ID NO: 462631 - DNA, 75 bp, synthetic construct
  source 1..75: mol_type = other DNA
aaacctatgtttcgcctggtgcttttgaaattagtgatctctattccacgtcgtctagtggtgatttgctggttg

SEQ ID NO: 462632 - DNA, 75 bp, synthetic construct
  source 1..75: mol_type = other DNA
ttccacatggagtcgtagtagcgggcaaaccgcagaatggaagaatctcagcagctatttgcagcgggcggttat

SEQ ID NO: 462633 - DNA, 75 bp, synthetic construct
  source 1..75: mol_type = other DNA
atacacgccagttgcagatgaaagcagaggttgaggcgctgacagagctgaaggcgatccgcagttatgtcgtcg

SEQ ID NO: 462634 - DNA, 75 bp, synthetic construct
  source 1..75: mol_type = other DNA
tgactatttcgacgctgtcaggttcgctggacgctgatagtataactgggctaggctctgaccaggttacctctg

SEQ ID NO: 462635 - DNA, 75 bp, synthetic construct
  source 1..75: mol_type = other DNA
ggaaactggaaggttgaggtaaccgatactcttcctgatggtctgcatgactatacgattacagcgacaggtgca

SEQ ID NO: 462636 - DNA, 75 bp, synthetic construct
  source 1..75: mol_type = other DNA
ctggtgtcacaggtgataaaattaccagtgttaatacacctgtttttaccggtacaacagctcccggtgttttgg

SEQ ID NO: 462637 - DNA, 75 bp, synthetic construct
  source 1..75: mol_type = other DNA
ataatatataaagatcaggttgtgtatttattgatgttaacaataatgtcatattatattgtttgtggtcctgtt

SEQ ID NO: 462638 - DNA, 75 bp, synthetic construct
  source 1..75: mol_type = other DNA
ttgcgatatgccggggtgttcgccatatcctgacgccagttgcatgggttctttgtacagcgatggccgcttaca

SEQ ID NO: 462639 - DNA, 75 bp, synthetic construct
  source 1..75: mol_type = other DNA
tgagctggagcaggcaaatgcaaccattactgatatgcagcagcgccagcgtgatgttgctgcacttgatgccag

SEQ ID NO: 462640 - DNA, 75 bp, synthetic construct
  source 1..75: mol_type = other DNA
tctgtggataaaaatggacactggacgttccagttgcctcaggagctatctacagggaatacatataactatact

SEQ ID NO: 462641 - DNA, 75 bp, synthetic construct
  source 1..75: mol_type = other DNA
gccggtgctactgttgatattattattggcagccgaaaacacagtgtaatagtacctgataaccgtcagtggcaa

SEQ ID NO: 462642 - DNA, 75 bp, synthetic construct
  source 1..75: mol_type = other DNA
actttaactctggatttaaataaggatgttgtgggtcgacttgaatgggcggctccagtggctatcaccgttact

SEQ ID NO: 462643 - DNA, 75 bp, synthetic construct
  source 1..75: mol_type = other DNA
aagtgactctggattcacaagctccagctacaacgtctggtttagtcaatgaagacaatagtggtgatgtaatgg

SEQ ID NO: 462644 - DNA, 75 bp, synthetic construct
  source 1..75: mol_type = other DNA
gaggagggaggggggagttcttcttctggggcaatccaaacggagaacgtcaattccaggccacaagaaaatgag

SEQ ID NO: 462645 - DNA, 75 bp, synthetic construct
  source 1..75: mol_type = other DNA
actgatattgccgatgcacatgggaattggtctataaaaattacatacccgctatgggagggggtaaatgaatat

SEQ ID NO: 462646 - DNA, 75 bp, synthetic construct
  source 1..75: mol_type = other DNA
ctgctgaggcacatccggtaggctttaaatgggtggtcgaagcgcaaactaaaaacgacgcgaccgtggtggtgg

SEQ ID NO: 462647 - DNA, 75 bp, synthetic construct
  source 1..75: mol_type = other DNA
tgcaaagctagttaaagcgtatactttagacaagaaagcagctttaaaatcagcatcctggggtaagtttcagat

SEQ ID NO: 462648 - DNA, 75 bp, synthetic construct
  source 1..75: mol_type = other DNA
gttctgggtctcaatgcgcccggaatatctggagcctgacggagaatgttacgtgtgcctgccagactggatgca

SEQ ID NO: 462649 - DNA, 75 bp, synthetic construct
  source 1..75: mol_type = other DNA
tgaatctgtgtgtcccctccttcccttcggagcacatccactattcaaattttacacaaccacgtacgaacaaaa

SEQ ID NO: 462650 - DNA, 75 bp, synthetic construct
  source 1..75: mol_type = other DNA
actatccgcaaattattaccacggactataaagcccatatcgagctactgagtctcgatgagcatgtgccagatg

SEQ ID NO: 462651 - DNA, 75 bp, synthetic construct
  source 1..75: mol_type = other DNA
gagccgtttgctctggtgcaacgtcttcaggacggtaaacccgccggagaacttttctgggtctcgatgcgcccg

SEQ ID NO: 462652 - DNA, 75 bp, synthetic construct
  source 1..75: mol_type = other DNA
gtgcggatgcgtaaatattcccgccatgatgacagccgtgaaatcgcgcctgacgtacaggcaaacaaacacggc

SEQ ID NO: 462653 - DNA, 75 bp, synthetic construct
  source 1..75: mol_type = other DNA
attttaatgaattgatggttttggcaaaaaagctcggaattgaatcgaaaattaagatattagggcatataccta

SEQ ID NO: 462654 - DNA, 75 bp, synthetic construct
  source 1..75: mol_type = other DNA
aaactgaaatatatggtggttatcgatccactggccactgagtcttccaatttttggcagaatcatggcgagatg

SEQ ID NO: 462655 - DNA, 75 bp, synthetic construct
  source 1..75: mol_type = other DNA
gcttgacgaacagggtaatgccctgcgtgatgattcattgaatcacccacgctgcgtgtggaatttgttgaaaac

SEQ ID NO: 462656 - DNA, 75 bp, synthetic construct
  source 1..75: mol_type = other DNA
tttcagttgatgattttaaaaaaagtgaatacgccagtatattatcatcgccaagaagttattctcattttgata

SEQ ID NO: 462657 - DNA, 75 bp, synthetic construct
  source 1..75: mol_type = other DNA
gagaattcaattagatggattttagaattaagaagaaaagaaacaacgaaaatagatgtgtcactttttgaggag

SEQ ID NO: 462658 - DNA, 75 bp, synthetic construct
  source 1..75: mol_type = other DNA
gtgagttcttggagggtttgctatttattacgttcgttatttagtttaaaattttctaagtctggtgatattatc

SEQ ID NO: 462659 - DNA, 75 bp, synthetic construct
  source 1..75: mol_type = other DNA
ccatgatatactgtttcttgctaactgacacagaactaaccttgtcatcaaaaacatttgtattaatgtcaaaaa

SEQ ID NO: 462660 - DNA, 75 bp, synthetic construct
  source 1..75: mol_type = other DNA
cgccccaaaaaatattattcagtcttcttctcttactttccccattcgcattaatacttttcagttataataatg

SEQ ID NO: 462661 - DNA, 75 bp, synthetic construct
  source 1..75: mol_type = other DNA
tggagagctaatttgaatgagataaatacttatcaaaaagccatagaagaatccccgttttttgataaaaacggc

SEQ ID NO: 462662 - DNA, 75 bp, synthetic construct
  source 1..75: mol_type = other DNA
tatcagaagcgccaggcagctttaagtacaaaactggcaaaggacaacggcaagatcgacaagctacgtgaccaa

SEQ ID NO: 462663 - DNA, 75 bp, synthetic construct
  source 1..75: mol_type = other DNA
ttcggtgaacctcagacgcgagccaccaatgatggacaggaaatgtggtcctactccagcacgtcaggcgagagc

SEQ ID NO: 462664 - DNA, 75 bp, synthetic construct
  source 1..75: mol_type = other DNA
gctcgccgacttggcttctttttggagatgaagataagcaaccaggcgaaccgatcccagataatcagccagtca

SEQ ID NO: 462665 - DNA, 75 bp, synthetic construct
  source 1..75: mol_type = other DNA
atgctccgctgccaaaatgaaataaaaaaaatgaaaaaagctaatcttacaggtacgttggtttgctttgtcgca

SEQ ID NO: 462666 - DNA, 75 bp, synthetic construct
  source 1..75: mol_type = other DNA
tagtaaccgagaaaaaccgcagtgatgcttactacgctcacctaaaaaattattctgatatatttaaaacactgc

SEQ ID NO: 462667 - DNA, 75 bp, synthetic construct
  source 1..75: mol_type = other DNA
aagtcgttattaatggaaatacctctggaacaacccgagttaaagttaccaatgctggcggcagcggggcttata

SEQ ID NO: 462668 - DNA, 75 bp, synthetic construct
  source 1..75: mol_type = other DNA
gcaaggggaaatttgatggggcagttgattacctctgctccgatgaggctcgttttctggttatgcggggcgact

SEQ ID NO: 462669 - DNA, 75 bp, synthetic construct
  source 1..75: mol_type = other DNA
ggactgaaggggggatggaatttttatcagtatccgttgaatccggttcagtatatagaccctttgggattagat

SEQ ID NO: 462670 - DNA, 75 bp, synthetic construct
  source 1..75: mol_type = other DNA
tttcgctgctgaaattaaacggtaataaaaacaagcatcaggccaccattaaaagtattgttaaccatccgggac

SEQ ID NO: 462671 - DNA, 75 bp, synthetic construct
  source 1..75: mol_type = other DNA
gacaaacgacgtactactaagcatttcactgaggaagaccggaaaagattcaacaagaaccgtaactcacagact

SEQ ID NO: 462672 - DNA, 75 bp, synthetic construct
  source 1..75: mol_type = other DNA
gcgaacgaccattacgatctggtgattgtcgatacgccgccgatgctggcggtgagcgatgctgcggtcgtgggg

SEQ ID NO: 462673 - DNA, 75 bp, synthetic construct
  source 1..75: mol_type = other DNA
atgacgttgaagtacggtaataagagcgttccattcggtgcaattgtcacacacggagagaataaaaatggcagc

SEQ ID NO: 462674 - DNA, 75 bp, synthetic construct
  source 1..75: mol_type = other DNA
taaagataaatttaagtcagaagctgaggaatggagaactgatgcaataaataatcttttcacagaactcaccga

SEQ ID NO: 462675 - DNA, 75 bp, synthetic construct
  source 1..75: mol_type = other DNA
tggatatcctgcctacccggatggaaacagcactgccccgaaacgccagtcacaaggaggcatccagtggcatta

SEQ ID NO: 462676 - DNA, 75 bp, synthetic construct
  source 1..75: mol_type = other DNA
cgtcgctgacaccccggctcctgacggtgcgccggagatgaatgtggcagataacaccgctgcggaaccggcccc

SEQ ID NO: 462677 - DNA, 75 bp, synthetic construct
  source 1..75: mol_type = other DNA
tcaatctgccgatttatggtttagtgcagaacacttgggactggcagggattgcctactgtgcttctgaaatgat

SEQ ID NO: 462678 - DNA, 75 bp, synthetic construct
  source 1..75: mol_type = other DNA
tgccgatgacatcagtaaaaaaggcgcatacattgacgcctgggcgcaatatagctggtttaaaaactcggtgaa

SEQ ID NO: 462679 - DNA, 75 bp, synthetic construct
  source 1..75: mol_type = other DNA
taagaagaactggtatctgcttatttgtaaccaccgtagttgggcagatattgtcgtactgtgcgtgctgtttcg

SEQ ID NO: 462680 - DNA, 75 bp, synthetic construct
  source 1..75: mol_type = other DNA
gcctgatatattcacacctataaatttagggctatttaaaaactgccaagactggtctaatgattctttagggaa

SEQ ID NO: 462681 - DNA, 75 bp, synthetic construct
  source 1..75: mol_type = other DNA
aatcccaaatacagacaaggaaagcggtctctcgaacagttcaataaagaattaataaggcttagacggcaatgc

SEQ ID NO: 462682 - DNA, 75 bp, synthetic construct
  source 1..75: mol_type = other DNA
gtacttaaaaaagtgggtttaaacgtcgtagtacaggcacaaagacttcttttgcgtaatttcgttctgacttta

SEQ ID NO: 462683 - DNA, 75 bp, synthetic construct
  source 1..75: mol_type = other DNA
gcggcgaaatatacgtggatcttccagccacaggcacaggctatctggatgggcgtcgatcatcatgcgcacacc

SEQ ID NO: 462684 - DNA, 75 bp, synthetic construct
  source 1..75: mol_type = other DNA
ggcactgtcgtcaaggctgatggcacgcttgattataccaatgccagcgttacattaaccgatgttgatatcacc

SEQ ID NO: 462685 - DNA, 75 bp, synthetic construct
  source 1..75: mol_type = other DNA
atttccacaagtacctgatggaattaccctgatctccgtaaataataacctgatatcgcatattgactcatttcc

SEQ ID NO: 462686 - DNA, 75 bp, synthetic construct
  source 1..75: mol_type = other DNA
attactttttatggaatgcaatcctattaaagaggcatttttaatgccatggactttgacagggatttgctatga

SEQ ID NO: 462687 - DNA, 75 bp, synthetic construct
  source 1..75: mol_type = other DNA
gtgaagacagcaacttactgaatatgctgtctgaatttaagttattgagagagcaatgtttcaggtggggtaatt

SEQ ID NO: 462688 - DNA, 75 bp, synthetic construct
  source 1..75: mol_type = other DNA
ttatttaccaattgatagttttagacggttgttaaccggtgtgcctgatgataaaaacttattattgtacatgat

SEQ ID NO: 462689 - DNA, 75 bp, synthetic construct
  source 1..75: mol_type = other DNA
aaaataatatgaatcttgataatgttaaatctccattaataataaaagaatataaaaatgaaaaggcaatattaa

SEQ ID NO: 462690 - DNA, 75 bp, synthetic construct
  source 1..75: mol_type = other DNA
aaaaaataaaaaaactaaaacgtaaccctaaaggtttttttatcgattctaagcacaaacctttgaagttgttag

SEQ ID NO: 462691 - DNA, 75 bp, synthetic construct
  source 1..75: mol_type = other DNA
actcgtgaaattgagtataagcgctacaagagaatcctcacccctccaccaagcatagagttaaagattgtagag

SEQ ID NO: 462692 - DNA, 75 bp, synthetic construct
  source 1..75: mol_type = other DNA
aagacccatcggtatcaattgcaaacgagaaccgaccgcgcaacatcgcattcaatttcctggtgagggcaaagt

SEQ ID NO: 462693 - DNA, 75 bp, synthetic construct
  source 1..75: mol_type = other DNA
aagaatccgtttggtgatatcaaatcggatggcacggtgaaaacggctctcgaaaaccttgatttaacggacctg

SEQ ID NO: 462694 - DNA, 75 bp, synthetic construct
  source 1..75: mol_type = other DNA
gaaaataccaacaataccagacaccgctaaggtttttgattgtagtgagaataatataaaggaaattagatggtt

SEQ ID NO: 462695 - DNA, 75 bp, synthetic construct
  source 1..75: mol_type = other DNA
atgtttccattaaatgatctgtcgttaaaaactcagtcggttcaattaaataaaatcacatctaatactgagtct

SEQ ID NO: 462696 - DNA, 75 bp, synthetic construct
  source 1..75: mol_type = other DNA
tgtttttttgatgaattgcaaccaaaatataatgaattgctggagcaagatagagagaaattatattactttaca

SEQ ID NO: 462697 - DNA, 75 bp, synthetic construct
  source 1..75: mol_type = other DNA
cgtacattcaccgaacatctttataacattgacttgttcaaaatgcaaatggaagaaaataaaggttgcataccg

SEQ ID NO: 462698 - DNA, 75 bp, synthetic construct
  source 1..75: mol_type = other DNA
ttgggatcgagtaagaaattcgatgccagtatttataaaggaccgactgctgagttttattccactcttggtgtt

SEQ ID NO: 462699 - DNA, 75 bp, synthetic construct
  source 1..75: mol_type = other DNA
gtggcagttaatcaggaaacacctaagctctctatagcgcttaatggcattgtactcacatcgaatgatgagact

SEQ ID NO: 462700 - DNA, 75 bp, synthetic construct
  source 1..75: mol_type = other DNA
accaccggggcctgccgctggcgcttatcagtgaagacggcaatacggcgtggagcgcggaatatgatgaatggg

SEQ ID NO: 462701 - DNA, 75 bp, synthetic construct
  source 1..75: mol_type = other DNA
gtgaatgaggaggataacagctcagagggaaattcagaatcaacagaaacgcctacccccgtcctgcgccccgaa

SEQ ID NO: 462702 - DNA, 75 bp, synthetic construct
  source 1..75: mol_type = other DNA
cttttgttgaaatgaactggatccataacagtaaagattttgctgtctcaatgaacggtgtgaaagtcgaacaag

SEQ ID NO: 462703 - DNA, 75 bp, synthetic construct
  source 1..75: mol_type = other DNA
agtaaaagatattgataatgcgctagttataacaacgggtaatggaagttacggtgtatctgttgcaggagaggg

SEQ ID NO: 462704 - DNA, 75 bp, synthetic construct
  source 1..75: mol_type = other DNA
atgtttccattaaatgatctttcgttaaaaactcagccggttcaattaaataaagtcacatctaatactgaatct

SEQ ID NO: 462705 - DNA, 75 bp, synthetic construct
  source 1..75: mol_type = other DNA
cgatatcctgcgtaaccagctggcttttgaccctacaacaactactgcactacgtccttttaccagctgttgtgg

SEQ ID NO: 462706 - DNA, 75 bp, synthetic construct
  source 1..75: mol_type = other DNA
actccccgttaaagctaagctttacttagtacctgtattggcagaacaggaaatgcaggaggcaggtcagaaaca

SEQ ID NO: 462707 - DNA, 75 bp, synthetic construct
  source 1..75: mol_type = other DNA
gcgtggagcggggagtatgatgaatggggcaaccagctgaatgaggagaacccgcatcacctgcaccagccgtac

SEQ ID NO: 462708 - DNA, 75 bp, synthetic construct
  source 1..75: mol_type = other DNA
agcatgggatatattatctgatacttatgaagatatgaagagattaaatttaggtgggactgatcaatttttcca

SEQ ID NO: 462709 - DNA, 75 bp, synthetic construct
  source 1..75: mol_type = other DNA
atcttcacttggggtctttgccacctcttccatcctggattgaggtgctttatcttcgtcataatggccttgcca

SEQ ID NO: 462710 - DNA, 75 bp, synthetic construct
  source 1..75: mol_type = other DNA
atggtagtgtccgctattgccagtacacctcactgtgatgctgcaacacgtgaaggttcggcggaggttgttttg

SEQ ID NO: 462711 - DNA, 75 bp, synthetic construct
  source 1..75: mol_type = other DNA
attatttattttggcccaatactggctgaacgagtgatgccgttatcctttttccccagaacaattgcaactata

SEQ ID NO: 462712 - DNA, 75 bp, synthetic construct
  source 1..75: mol_type = other DNA
tatagaagcaatatgtattgtatatcgtagtgacgaagatgaacaaacagaaccatcggagttggaagttaaaag

SEQ ID NO: 462713 - DNA, 75 bp, synthetic construct
  source 1..75: mol_type = other DNA
accgacaccacgcgtatccagacggtataccagccggggagcttctcgccgctcatccgcatcgagacagagaac

SEQ ID NO: 462714 - DNA, 75 bp, synthetic construct
  source 1..75: mol_type = other DNA
gaggtgatggcattcttgcgttctgaaatcgaacgtagtaagggatacgggaatgctgtctccatcgtcctctct

SEQ ID NO: 462715 - DNA, 75 bp, synthetic construct
  source 1..75: mol_type = other DNA
aggcacagcggcaatgggcagaaagtctattatctaggtaccctattgctgcatcggaatgacgaaaaaaaagcc

SEQ ID NO: 462716 - DNA, 75 bp, synthetic construct
  source 1..75: mol_type = other DNA
cgctccggagaaagttcttcttgatcatgccagtgggggattctccagtacgaccaatggaataaagatccttat

SEQ ID NO: 462717 - DNA, 75 bp, synthetic construct
  source 1..75: mol_type = other DNA
tccacatgcttgcgctcacttttactggaaagagttgggacggcagctctcagtcagcggcagagtggttagaca

SEQ ID NO: 462718 - DNA, 75 bp, synthetic construct
  source 1..75: mol_type = other DNA
cgccagtggattgactttattgacggcggctatttccttatggaacacagtttacatggaaagagcggttgatgc

SEQ ID NO: 462719 - DNA, 75 bp, synthetic construct
  source 1..75: mol_type = other DNA
tgtcgaagaaatgcgaagtgaaaaacttagggaaatatactttactttaggtttgtctggggtgaaagacctttt

SEQ ID NO: 462720 - DNA, 75 bp, synthetic construct
  source 1..75: mol_type = other DNA
caatattacatgaacaggccgaattccgggttactggtatgacaccccaagattttgttaacaaaatagttcaga

SEQ ID NO: 462721 - DNA, 75 bp, synthetic construct
  source 1..75: mol_type = other DNA
gtggccgaagtttgtctgttttggctcgccagatatcaagtagcacggctgaatcacctgaatggaaagacagcc

SEQ ID NO: 462722 - DNA, 75 bp, synthetic construct
  source 1..75: mol_type = other DNA
agccgtaccggctgccggggcagcagtatgatgaggagtccggcctgtattacaaccgccaccgctattatgacc

SEQ ID NO: 462723 - DNA, 75 bp, synthetic construct
  source 1..75: mol_type = other DNA
aaaaagccagaggtttttatagaagcaatatgtattgtatatcgtagtgacgaagatgaacaaacagaaccatcg

SEQ ID NO: 462724 - DNA, 75 bp, synthetic construct
  source 1..75: mol_type = other DNA
ggagaggtcaggttatatcacggcgatggtcagtcttatatcaccctgaaaaaaggtggtcttatcgaagttaaa

SEQ ID NO: 462725 - DNA, 75 bp, synthetic construct
  source 1..75: mol_type = other DNA
gtttaacaccttgcaacttggcgagcgcgggaacattgtgcggatgcgtggagaggtgctactggctggtgtgcc

SEQ ID NO: 462726 - DNA, 75 bp, synthetic construct
  source 1..75: mol_type = other DNA
aactgagcgccaacggttatatcagggcatctggctggaaaaaatcgccggatattgaggattatcaggagcgtc

SEQ ID NO: 462727 - DNA, 75 bp, synthetic construct
  source 1..75: mol_type = other DNA
tgacggagaatgattaccagttcttgccgtcgaaagctgaccatttcgtgaacgggaaaatcacgcgtaaattca

SEQ ID NO: 462728 - DNA, 75 bp, synthetic construct
  source 1..75: mol_type = other DNA
tcaaacggtaacactgactctgcctgagggagtgagcagcaagacagggaatacggtaacaacgaatgcggcagg

SEQ ID NO: 462729 - DNA, 75 bp, synthetic construct
  source 1..75: mol_type = other DNA
tgacggcctcggctaagtattgcgatatcctgttgcccgacctgatgccaacagagcaagaagaccttatctctc

SEQ ID NO: 462730 - DNA, 75 bp, synthetic construct
  source 1..75: mol_type = other DNA
atttaagaattgaccgtgaaaatggtgcaatctcattattgctgagatggaaatataattggataaaaagatggg

SEQ ID NO: 462731 - DNA, 75 bp, synthetic construct
  source 1..75: mol_type = other DNA
cagacggtataccagccggggagcttcgcgccgctcatccgcatcgaaacagacaacggtgaacgggagaaagcg

SEQ ID NO: 462732 - DNA, 75 bp, synthetic construct
  source 1..75: mol_type = other DNA
gtagcgccggaagttgcacgctggtactacaaacggtactgcccgcgctgtggtttgccgatggtccttcgcgtg

SEQ ID NO: 462733 - DNA, 75 bp, synthetic construct
  source 1..75: mol_type = other DNA
gccacgtctgaaagcggcgtgacgcaacccagtgctccggctccccaaatcgtcatcgacagtcacgacgacaaa

SEQ ID NO: 462734 - DNA, 75 bp, synthetic construct
  source 1..75: mol_type = other DNA
ggttttgatggctgggacgatcccctgcggaaaacctatccactgcagttaacgggcttccattacaaagcgcgt

SEQ ID NO: 462735 - DNA, 75 bp, synthetic construct
  source 1..75: mol_type = other DNA
accggtatccataccattgaggtcattcatacaggtcatgatttcgacagcactgaaccgagacctgcattcgca

SEQ ID NO: 462736 - DNA, 75 bp, synthetic construct
  source 1..75: mol_type = other DNA
gccagttcgatgccctggtgtcgttcacgtataacctcggtgcgcggtcattgtcgacatcgactctcctgcgaa

SEQ ID NO: 462737 - DNA, 75 bp, synthetic construct
  source 1..75: mol_type = other DNA
ccctgatcaagcagttcgaaggctgcaagctcaccgcgtatcaggacagcgtcggagtgtggacgatcggctatg

SEQ ID NO: 462738 - DNA, 75 bp, synthetic construct
  source 1..75: mol_type = other DNA
ccctgatcaagcaattcgaaggctgcaaactcaccgcgtaccaggacagcgtcggtgtatggacgatcggctatg

SEQ ID NO: 462739 - DNA, 75 bp, synthetic construct
  source 1..75: mol_type = other DNA
gcaggatatagcccgcgccgcgctgtttctcggcagcgaactctcgtcttactccaccggcatcacgctcgacgt

SEQ ID NO: 462740 - DNA, 75 bp, synthetic construct
  source 1..75: mol_type = other DNA
gtatcgtctgcatctcttcggtgtctgcccagcgcggcggcggcatttttggcggaccccactacagcgcggcta

SEQ ID NO: 462741 - DNA, 75 bp, synthetic construct
  source 1..75: mol_type = other DNA
cctcggcgcccggtcactgtcgacatcgacccttctgcgaaaactcaacgccggtgattacgctggcgctgccga

SEQ ID NO: 462742 - DNA, 75 bp, synthetic construct
  source 1..75: mol_type = other DNA
ccacgctgatggctatacctggactgatggccgtcattgccatcagcctgatgcttaccgggcatcacgtctgga

SEQ ID NO: 462743 - DNA, 75 bp, synthetic construct
  source 1..75: mol_type = other DNA
atgagtagcgtgctgctcctttgcgctggcgtactgacctttgttaccgcacgccagaaggccggtgcgctttag

SEQ ID NO: 462744 - DNA, 75 bp, synthetic construct
  source 1..75: mol_type = other DNA
ttctggtcgatgtcagcggcaacggcgattcgtctggtgccgcagcatcaggttacgcgtgcgctggcgattttc

SEQ ID NO: 462745 - DNA, 75 bp, synthetic construct
  source 1..75: mol_type = other DNA
gtgagcgaaattgactatcaggcactgcgtgaaaaggcagagaaagcaacgtgtggggtgtggtcgctcgaatat

SEQ ID NO: 462746 - DNA, 75 bp, synthetic construct
  source 1..75: mol_type = other DNA
gagggtgctgactgggctacttctctggcgattgaagacggcgctgaccactacctgtgggatggtgatggtgtt

SEQ ID NO: 462747 - DNA, 75 bp, synthetic construct
  source 1..75: mol_type = other DNA
cgtgaactgcaaaacagtatcagcgattcggtaatccggttgcttgaagacaccatagagcgggaagggtattcg

SEQ ID NO: 462748 - DNA, 75 bp, synthetic construct
  source 1..75: mol_type = other DNA
gtaagcaaagttgcgaagcccgggagcgtgatttgtttgaatcatgggtaatgcattcaatttgtatctccaaat

SEQ ID NO: 462749 - DNA, 75 bp, synthetic construct
  source 1..75: mol_type = other DNA
cgaaaaataggcctcagttgtttagagaagcactacgttctgtttataatcaaacagtcaagcctgatgagataa

SEQ ID NO: 462750 - DNA, 75 bp, synthetic construct
  source 1..75: mol_type = other DNA
tgatgcagtggtggtcggattatctggatgtgtgccgcgaggggtatgtcgcgccgtacatttatgcgcggcagc

SEQ ID NO: 462751 - DNA, 75 bp, synthetic construct
  source 1..75: mol_type = other DNA
aaattgaaagcacgacgcaaatagacattatccgccagtcttatcttgctcgcttaccgttatgtcatcccgaaa

SEQ ID NO: 462752 - DNA, 75 bp, synthetic construct
  source 1..75: mol_type = other DNA
aatttctcacgccttcgtcacacacatcccgatgatttcccggtagagaagctcaccagcttcgcggtgatgcag

SEQ ID NO: 462753 - DNA, 75 bp, synthetic construct
  source 1..75: mol_type = other DNA
tagacaccatcttaattgggaacatgtattgcagtctcagaaaaataagttttcaaggaatcttgataggaataa

SEQ ID NO: 462754 - DNA, 75 bp, synthetic construct
  source 1..75: mol_type = other DNA
aaatcaacctctatacatgggcttaggaatatgttcaaacatacatttgatggatcgtttggacaaaattttgaa

SEQ ID NO: 462755 - DNA, 75 bp, synthetic construct
  source 1..75: mol_type = other DNA
gcttacctcagtgatggtgtgataaatgttttgcctcaccactctcttctgctccggcaacgtgatgtactccag

SEQ ID NO: 462756 - DNA, 75 bp, synthetic construct
  source 1..75: mol_type = other DNA
cagcaaagacctttaaccagcgcttccccgttgactcacagttccattattacctgatacctggtgtatcggagc

SEQ ID NO: 462757 - DNA, 75 bp, synthetic construct
  source 1..75: mol_type = other DNA
tacttgtatgtaaatctccgcgacaaaggagcacttaaaaaacattacattcacaggttagtggcggctgcattc

SEQ ID NO: 462758 - DNA, 75 bp, synthetic construct
  source 1..75: mol_type = other DNA
atgccgggtggggaattacaccaacagtcatccaggcattattgcggttgagcgaaaagcagcttctagaactgg

SEQ ID NO: 462759 - DNA, 75 bp, synthetic construct
  source 1..75: mol_type = other DNA
gcttatcttgacgatggcgtgataaatgtcatgcctcaccactctctttttctccagcaacgtgatgtactccaa

SEQ ID NO: 462760 - DNA, 75 bp, synthetic construct
  source 1..75: mol_type = other DNA
tggatgaaaaactcaaaattgttcctttactggaaaaagagaagcagcttagcttacgtcatcaggaagaattat

SEQ ID NO: 462761 - DNA, 75 bp, synthetic construct
  source 1..75: mol_type = other DNA
gaatatatacgccttgctcaaaaatatgatctcccggtagttagccatacttctaatgattatgaatccagccca

SEQ ID NO: 462762 - DNA, 75 bp, synthetic construct
  source 1..75: mol_type = other DNA
accgttataaactgaaacccaatggtacgtaccatattgaagatacgcaaccattaaatacagcgaagccccgca

SEQ ID NO: 462763 - DNA, 75 bp, synthetic construct
  source 1..75: mol_type = other DNA
tgagcgcgaagcccgcgcccagctgccgcgcgcacatctgatttttgtcgcccgtattcgtcagggggtgagtca

SEQ ID NO: 462764 - DNA, 75 bp, synthetic construct
  source 1..75: mol_type = other DNA
cgccagcgttaccccggcgtagaattgaaaatttcggagtttggtggtctgacggtacaacaagcggtgatgaac

SEQ ID NO: 462765 - DNA, 75 bp, synthetic construct
  source 1..75: mol_type = other DNA
gcacaccaagcgattttgataatgctgcagtaagcagcaatatcactggtttaggcattcagctcaaacaggcag

SEQ ID NO: 462766 - DNA, 75 bp, synthetic construct
  source 1..75: mol_type = other DNA
atgataattgatgcacacactcatattggtgattttgtgaaaatcagcatgccagaagatgtttttctggcatct

SEQ ID NO: 462767 - DNA, 75 bp, synthetic construct
  source 1..75: mol_type = other DNA
atggcgaagacgctcttcttattaacgttgtagcaggttcgtcacaacaggaaaatattctgtctgttaatgctg

SEQ ID NO: 462768 - DNA, 75 bp, synthetic construct
  source 1..75: mol_type = other DNA
gtcagtgccggagtcagtatctctttgatccacaaaccacccgttaccttggcacagtgcaaatccactataccc

SEQ ID NO: 462769 - DNA, 75 bp, synthetic construct
  source 1..75: mol_type = other DNA
cttattggcaatactgtccatgatcccacaatggttgaatccttctcctcattttacactcaacgggatcagtgg

SEQ ID NO: 462770 - DNA, 75 bp, synthetic construct
  source 1..75: mol_type = other DNA
aaaaggcataaaaaatcataaaggtgtatatgattattcaaatttgattcagtttgttgaaaaggataacaaaca

SEQ ID NO: 462771 - DNA, 75 bp, synthetic construct
  source 1..75: mol_type = other DNA
gctgataagatacctcataataataatgaacggtcaggttatataaaagccagtaatatagcatctgaaaaaaac

SEQ ID NO: 462772 - DNA, 75 bp, synthetic construct
  source 1..75: mol_type = other DNA
atgctgagtatcgcctgcgtcagaaaaatgcaaagataccgagtttcgaatgatatgataaagctaaataagcta

SEQ ID NO: 462773 - DNA, 75 bp, synthetic construct
  source 1..75: mol_type = other DNA
atatagttaacaatatttgtcatcaagcaaccttttataatatatcatgcccaattgtaaaaaatacattgaagt

SEQ ID NO: 462774 - DNA, 75 bp, synthetic construct
  source 1..75: mol_type = other DNA
agtcgaagcgttaaaattgctgtctgattttagtgtcctcgacactgataccaaaagaaaaagtaaagcattcga

SEQ ID NO: 462775 - DNA, 75 bp, synthetic construct
  source 1..75: mol_type = other DNA
cacatcagcgcctcaaccgtttttgaggttctttgcccgcttcaaagcctcttctctgtcatggccattacctgc

SEQ ID NO: 462776 - DNA, 75 bp, synthetic construct
  source 1..75: mol_type = other DNA
agacatggttcaggagtatatagagtcaggcaagcttattcaggtgttacaggagtggtgtccaacttttcctgg

SEQ ID NO: 462777 - DNA, 75 bp, synthetic construct
  source 1..75: mol_type = other DNA
ctgaactagggactcttactgttcctttgtcatatggtgcggcagttgcatctgttcttaagggcaatgctgatg

SEQ ID NO: 462778 - DNA, 75 bp, synthetic construct
  source 1..75: mol_type = other DNA
gctggcgcggggaacacttctgatacgtactgaggccggttgtgatacgcgatttatccccgctggcgcggggaa

SEQ ID NO: 462779 - DNA, 75 bp, synthetic construct
  source 1..75: mol_type = other DNA
ctattacacgctggccgggaattttattagcggtaccgatgttatcacggcacgctggcaaacatcagaatacgc

SEQ ID NO: 462780 - DNA, 75 bp, synthetic construct
  source 1..75: mol_type = other DNA
cctctggggttagaagtttttcctagaccattccccttgccaattccatggcccaaaagccctgcacagcagcaa

SEQ ID NO: 462781 - DNA, 75 bp, synthetic construct
  source 1..75: mol_type = other DNA
gttgaatccagttacgaatacagatcctctggggttagaagtttttcctagaccattccccttgccaattccatg

SEQ ID NO: 462782 - DNA, 75 bp, synthetic construct
  source 1..75: mol_type = other DNA
atccagttacgaatacagatcctctggggttagaagtttttcctagaccattccccttgccaattccatggccca

SEQ ID NO: 462783 - DNA, 75 bp, synthetic construct
  source 1..75: mol_type = other DNA
tccccccggcttgccgatgcaggtgaaacggtgttctggcgggtgaataaatcggcaaactacggagtactggat

SEQ ID NO: 462784 - DNA, 75 bp, synthetic construct
  source 1..75: mol_type = other DNA
taaaaagtaattaccaaattctccttagaaaagatgcctttttttatcaaccaataggaataaaaccattcattc

SEQ ID NO: 462785 - DNA, 75 bp, synthetic construct
  source 1..75: mol_type = other DNA
cattgataatgtcaaaaagattttatctttggatgtgagtttatttgtatatgacaattcagcaaataaacatgc

SEQ ID NO: 462786 - DNA, 75 bp, synthetic construct
  source 1..75: mol_type = other DNA
tattcatgggattcatttcggtaaatactgcatctgctgctgaggagattcatcatgcagatggcaaagtcgacg

SEQ ID NO: 462787 - DNA, 75 bp, synthetic construct
  source 1..75: mol_type = other DNA
ctaaacagaaaattaccacattaaaggaacaactcactatactaaacaaagattattctaaaaaaaccatcgctg

SEQ ID NO: 462788 - DNA, 75 bp, synthetic construct
  source 1..75: mol_type = other DNA
agtaggacatcatattgaggcctacccggaactggctcaaaagaataagattaacaatgggatcaatttatcttt

SEQ ID NO: 462789 - DNA, 75 bp, synthetic construct
  source 1..75: mol_type = other DNA
ataacctgtctgatagggagtgctacgggatatatatatggagccagaaagcctcatctgccatatatccattac

SEQ ID NO: 462790 - DNA, 75 bp, synthetic construct
  source 1..75: mol_type = other DNA
tattattgctgattgtcatttcgggcagtttattttccgcttgtcaatttgcttataaagatgcaaaaaataaaa

SEQ ID NO: 462791 - DNA, 63 bp, synthetic construct
  source 1..63: mol_type = other DNA
atgtgccccttcagaggagcgaaagctcctcctgccgtccacttcttcggggtttctccccgc

SEQ ID NO: 462792 - DNA, 75 bp, synthetic construct
  source 1..75: mol_type = other DNA
atattcgctaccttgaaacgcattatggcgtgaagaaaacccgcgaaatagcggcatacctgaacagaagtgcga

SEQ ID NO: 462793 - DNA, 75 bp, synthetic construct
  source 1..75: mol_type = other DNA
cacttatgttacgacgttaactataggctctgcagccggccaactggttatctggccgcgggtgaatggcaaaga

SEQ ID NO: 462794 - DNA, 75 bp, synthetic construct
  source 1..75: mol_type = other DNA
gaccggccttactccagatacaccgtcattaacgggtgcagccgctgcgggttcttcagtctcaggctggacgga

SEQ ID NO: 462795 - DNA, 75 bp, synthetic construct
  source 1..75: mol_type = other DNA
ccattggcaccatttcggagataaagccgggggtctacagcgccacggtttcttcgacccgtgccggaaacattg

SEQ ID NO: 462796 - DNA, 75 bp, synthetic construct
  source 1..75: mol_type = other DNA
cgcgatgatgcagcgctttgtatcggacgtgggcgggcgctttaactgccttatcagcgaggacatttacagcgc

SEQ ID NO: 462797 - DNA, 75 bp, synthetic construct
  source 1..75: mol_type = other DNA
aaaccgccgccgaactggaggcggaagcccgcgagcgggcgcgggcagagattgacggcgataaacccgccgcag

SEQ ID NO: 462798 - DNA, 75 bp, synthetic construct
  source 1..75: mol_type = other DNA
gctctgccacaggaagagaagaacaagatcacctcattcatcaacttcgtgtttgagcagaacaaaagcaagtaa

SEQ ID NO: 462799 - DNA, 75 bp, synthetic construct
  source 1..75: mol_type = other DNA
agtgcggtaaccaaaaatttactgccatttcttgcaaagagaatcgccggaattatagatcccccagaaaaagaa

SEQ ID NO: 462800 - DNA, 75 bp, synthetic construct
  source 1..75: mol_type = other DNA
cgggtcaactatgtctgatggtcactatggtgaagtggacatttcacctgaatcgttatcaaaaatgcaaagtat

SEQ ID NO: 462801 - DNA, 75 bp, synthetic construct
  source 1..75: mol_type = other DNA
tatcttacttgcattaatatccgtagcgacttgctggctgttatggaagtatagggccattctaactaatttagt

SEQ ID NO: 462802 - DNA, 75 bp, synthetic construct
  source 1..75: mol_type = other DNA
aactgctttaccaattcatatttctgtacttgcagtatatgaaaaagatatcaacccagaaataaaaataaatga

SEQ ID NO: 462803 - DNA, 75 bp, synthetic construct
  source 1..75: mol_type = other DNA
acaaatgaatcttgcccagaaaaccacaaagaaagatattacgaaatagcaaattatactatgcctgtgaaattt

SEQ ID NO: 462804 - DNA, 75 bp, synthetic construct
  source 1..75: mol_type = other DNA
gccggatctggaactggcgcgtcgctttgcacaagctatccacgcgaaatatccgggcaaactgctggcttataa

SEQ ID NO: 462805 - DNA, 75 bp, synthetic construct
  source 1..75: mol_type = other DNA
ggcctggcgtatgcgccatatgctgacctggtctggtgtgaaacctccacgccggatctggaactggcgcgtcgc

SEQ ID NO: 462806 - DNA, 75 bp, synthetic construct
  source 1..75: mol_type = other DNA
aaccaacggattttgcttctgcggtggattggctaaaaatctacaatctcccgggtaagcctgatattcaaatat

SEQ ID NO: 462807 - DNA, 75 bp, synthetic construct
  source 1..75: mol_type = other DNA
agcagccaatggtcacaatcttcgcttgccatttatatatgtaaaaagcggtttcaggaacgctgaatatatcgg

SEQ ID NO: 462808 - DNA, 75 bp, synthetic construct
  source 1..75: mol_type = other DNA
tgggcgaaggttacgatatggtattgcgcatcggtaacttagaggactcaaccttaattgcccgttgtctgggta

SEQ ID NO: 462809 - DNA, 75 bp, synthetic construct
  source 1..75: mol_type = other DNA
tgcattaatgtccattgcgacttgctggctgttatggaagtacagggctattctaactaatttaatcaggttaaa

SEQ ID NO: 462810 - DNA, 75 bp, synthetic construct
  source 1..75: mol_type = other DNA
gtatatgaaaaagatatcaatccagaaataaaaataaatgacattaagagatttattgttaatagctttgcaagc

SEQ ID NO: 462811 - DNA, 75 bp, synthetic construct
  source 1..75: mol_type = other DNA
agcgtttagagcaatctctcaaaattatggatggtattgtttcttcaagagtacatgttagttacgatgttgata

SEQ ID NO: 462812 - DNA, 75 bp, synthetic construct
  source 1..75: mol_type = other DNA
gcctttttgtatggcttgttgcatattgtatatttttcggtatccctcatctaaccatactttacttcccattgg

SEQ ID NO: 462813 - DNA, 75 bp, synthetic construct
  source 1..75: mol_type = other DNA
gggaaggattttataaagatctggacacagaggaagtggcatactgtgagaagtggcagctggatctggagtgga

SEQ ID NO: 462814 - DNA, 75 bp, synthetic construct
  source 1..75: mol_type = other DNA
cgatataaatgcagggtttattcggtttggtatgaccacttgtagagaaaaagcccattttcttgctcaaattat

SEQ ID NO: 462815 - DNA, 75 bp, synthetic construct
  source 1..75: mol_type = other DNA
gcagggaaatcacggcgttatgttgcacgtatctataacgttgggctatcaaccctatataaacgatttcctgtt

SEQ ID NO: 462816 - DNA, 75 bp, synthetic construct
  source 1..75: mol_type = other DNA
accgaaataccggcctcggcatcagcgacactgagcacatcagtcagagcatgcgcgacatactgctgacgccgg

SEQ ID NO: 462817 - DNA, 75 bp, synthetic construct
  source 1..75: mol_type = other DNA
acttaatccactggctcaatttattgaacaagccagagatgtaatgtattgggggcggattccagaaattagacc

SEQ ID NO: 462818 - DNA, 75 bp, synthetic construct
  source 1..75: mol_type = other DNA
aaatggcgatggccatggtttatctgcaacttacactattgacggtttctcatttgctggtgcttatgcaaactc

SEQ ID NO: 462819 - DNA, 75 bp, synthetic construct
  source 1..75: mol_type = other DNA
cgttgctccaagaactacataatatacctgaaggacctgaaggtgctgtcgattttgaagcatgggcgctcaaaa

SEQ ID NO: 462820 - DNA, 75 bp, synthetic construct
  source 1..75: mol_type = other DNA
ttccaatccctgtaagtcctgaaggaaccccgctccgctttattcgcagtgaggtgttggaatatttttatcgag

SEQ ID NO: 462821 - DNA, 75 bp, synthetic construct
  source 1..75: mol_type = other DNA
aatacatacgacagtttatttataagtttatcactacaatagtggcgcttacggatacggatgcggaaaaatata

SEQ ID NO: 462822 - DNA, 75 bp, synthetic construct
  source 1..75: mol_type = other DNA
tatttacattggagagaactgcctttttgggcacaacatatgctgtttcgattctgatcatagatataatgatct

SEQ ID NO: 462823 - DNA, 75 bp, synthetic construct
  source 1..75: mol_type = other DNA
ttatttctttctgctattgttgttttttgaaattaaagtatcgacaaaagttaattatcaatccatttaaagttt

SEQ ID NO: 462824 - DNA, 75 bp, synthetic construct
  source 1..75: mol_type = other DNA
gcgtttggtaataaagttgatgaaagcttaaccaggttgtcgagggtggttcagggttctttgtccattgaaaag

SEQ ID NO: 462825 - DNA, 75 bp, synthetic construct
  source 1..75: mol_type = other DNA
gtgaacaagttgaaagattattttactcaacagataaacctgtcaggtaaaagcgcagtcataaaaaatgacaat

SEQ ID NO: 462826 - DNA, 75 bp, synthetic construct
  source 1..75: mol_type = other DNA
ggtcttctctttttgtatacgataatgaaaagaataaatgggttattcttggtacattatttggtgaatatcatt

SEQ ID NO: 462827 - DNA, 75 bp, synthetic construct
  source 1..75: mol_type = other DNA
ctggagtttgagaaatccgcctttggtaagtacaacgttgataatgctgtcaacgctaacttccgttactcgttc

SEQ ID NO: 462828 - DNA, 75 bp, synthetic construct
  source 1..75: mol_type = other DNA
ctttgtggtgaaatcaggtgataattccctgacattttatattgagggtgaacaggtagaaagcagcctgtcctt

SEQ ID NO: 462829 - DNA, 75 bp, synthetic construct
  source 1..75: mol_type = other DNA
tttgcgtgacgaaatagcaagccaggaaggtccgttgaagggctgtgcactggtggtgattcacaatagtcgcct

SEQ ID NO: 462830 - DNA, 75 bp, synthetic construct
  source 1..75: mol_type = other DNA
gcacattcttaaaatatgcaatttatgggttcccgattttaccagtattgttcaaagcaaaagtggctgttggta

SEQ ID NO: 462831 - DNA, 75 bp, synthetic construct
  source 1..75: mol_type = other DNA
caccacttcacaaactttctttcacggtaaattactctgatgaggatgagatagacctgactaatgaatatgcac

SEQ ID NO: 462832 - DNA, 75 bp, synthetic construct
  source 1..75: mol_type = other DNA
aaggtgaagagcaaatttcactgggtgtacgtaacaccagtccggatgttccttatcttattcagtcatgggtga

SEQ ID NO: 462833 - DNA, 75 bp, synthetic construct
  source 1..75: mol_type = other DNA
tcagctggcaaatgatacagccacatcaattggtgccacattacatttcccaagaggtgtttacgtttgtactga

SEQ ID NO: 462834 - DNA, 75 bp, synthetic construct
  source 1..75: mol_type = other DNA
tcacaaagtgaagctcttgaaaaatacggggttatgtataaaggcaaaaaacaactaataggattcagagctgga

SEQ ID NO: 462835 - DNA, 75 bp, synthetic construct
  source 1..75: mol_type = other DNA
gttggtattaaaaataacaaattgaaaatagattttgaatcatatgataagccttttcatttagctgacattaga

SEQ ID NO: 462836 - DNA, 75 bp, synthetic construct
  source 1..75: mol_type = other DNA
atgaatgagtttaagcgttttgaagaccggctggccggactggctgaatcgctgtcaccgtctgggcgtcggcga

SEQ ID NO: 462837 - DNA, 75 bp, synthetic construct
  source 1..75: mol_type = other DNA
taaatgaggtcgccgctttatttggcgtcaccaggcggacaatattcagatggatgaataagatcccacaatggc

SEQ ID NO: 462838 - DNA, 75 bp, synthetic construct
  source 1..75: mol_type = other DNA
acgctagagatcctcggcgcagataacctggcgcacggacgctggggcgaacagaagctggtggtgcgactggcg

SEQ ID NO: 462839 - DNA, 75 bp, synthetic construct
  source 1..75: mol_type = other DNA
tatccgaacctgctgatatggccggcagccatgctgctgggggtggccatcaccgtgaccatggcatccttcaag

SEQ ID NO: 462840 - DNA, 75 bp, synthetic construct
  source 1..75: mol_type = other DNA
caatgtacttttgatgtagaaaataagaatgaccttccctccacggttcagctattttatgaggaatctaaggat

SEQ ID NO: 462841 - DNA, 75 bp, synthetic construct
  source 1..75: mol_type = other DNA
ccagtcggtttatccccgctggcgcggggaactctaccggtgtgaattacagcaccaccgccaccccggtttatc

SEQ ID NO: 462842 - DNA, 75 bp, synthetic construct
  source 1..75: mol_type = other DNA
tgttaatgccagtaatgatccgcagctgagacatatcgataaaattcttgtaaacaaaaacaggaattatgaaat

SEQ ID NO: 462843 - DNA, 75 bp, synthetic construct
  source 1..75: mol_type = other DNA
gcgcggggaactcgtgtgctcctgctggggtgttgctgcgatagccggtttatccccgctggcgcggggaactct

SEQ ID NO: 462844 - DNA, 75 bp, synthetic construct
  source 1..75: mol_type = other DNA
tggacactacgctctggcatcagtgtcgctcgcggtgcgcagatccatttagtgaccgtcaacgactatggcgta

SEQ ID NO: 462845 - DNA, 75 bp, synthetic construct
  source 1..75: mol_type = other DNA
accgcattgaagtgacgaatcccacgggctattacgtcgtgattcgcgccgctgaactgcttagtaatggtaaaa

SEQ ID NO: 462846 - DNA, 75 bp, synthetic construct
  source 1..75: mol_type = other DNA
ttttctatcgtcccagctcgattgtcggtaaatccagtgacgcgccaaaaaacctgacttaccaggtaaaacaga

SEQ ID NO: 462847 - DNA, 75 bp, synthetic construct
  source 1..75: mol_type = other DNA
gagcagttcaggtagcgccagtggaggaagtcaggggtttgcttcattctcgcgtgctggccgcatggcaagcca

SEQ ID NO: 462848 - DNA, 75 bp, synthetic construct
  source 1..75: mol_type = other DNA
atatcctattgaccaggccagtagtgcgcctaatgttttcaaaacattcttcagagcattaagcccttacgacta

SEQ ID NO: 462849 - DNA, 75 bp, synthetic construct
  source 1..75: mol_type = other DNA
ccatcttcaacaccatcgccgaggccaatcagcatgcaaaagagcagatcgcactggacgcatcgggagcctcgg

SEQ ID NO: 462850 - DNA, 75 bp, synthetic construct
  source 1..75: mol_type = other DNA
caattagtaaaactccggcaattgctgccggtttatccccgctggcgcggggaacacccggcgttgagcgccaga

SEQ ID NO: 462851 - DNA, 75 bp, synthetic construct
  source 1..75: mol_type = other DNA
acggacctcatctgccagcttgccgaatccctgctgctgacgcaggcaaaagacgtgcgcatcgccacttactac

SEQ ID NO: 462852 - DNA, 75 bp, synthetic construct
  source 1..75: mol_type = other DNA
tatccccgctggcgcggggaacacactactgtcggtagctgggaggatgaggagatcggtttgatcttacccagc

SEQ ID NO: 462853 - DNA, 75 bp, synthetic construct
  source 1..75: mol_type = other DNA
gtttatccccgctggcgcggggaacacactactgtcggtagctgggaggatgaggagatcggtttgatcttaccc

SEQ ID NO: 462854 - DNA, 75 bp, synthetic construct
  source 1..75: mol_type = other DNA
gatgcgctgggtcaggtggatatcgtcgctaactacaacggtcgccgcttccacggcgtcggcctggctaccgat

SEQ ID NO: 462855 - DNA, 75 bp, synthetic construct
  source 1..75: mol_type = other DNA
gtctggaaagttaggtatggcagactttggggtgttggggggcgtgaatcattacattcttattctttctgttga

SEQ ID NO: 462856 - DNA, 75 bp, synthetic construct
  source 1..75: mol_type = other DNA
ttcctgtggggaaggtatactgattaaaaatggaaatttgatcactggcggagatattgcttctgtgtatcaggg

SEQ ID NO: 462857 - DNA, 75 bp, synthetic construct
  source 1..75: mol_type = other DNA
gcgttactttgataccgcgccgctgtacggctctggcctttctgaaatccgcatgggcgaagcgctgtctcagta

SEQ ID NO: 462858 - DNA, 75 bp, synthetic construct
  source 1..75: mol_type = other DNA
gtaaacataacctattattaattaatgattttttaagccagtcacaatctaccaactttacagtatcacacaaac

SEQ ID NO: 462859 - DNA, 75 bp, synthetic construct
  source 1..75: mol_type = other DNA
ctggcgcggggaactcagggccgccgctaccccagaagtgccactccccggtttatccccgctggcgcggggaac

SEQ ID NO: 462860 - DNA, 75 bp, synthetic construct
  source 1..75: mol_type = other DNA
actctgaatgcgggcgatacactggtggtgtggaaactagatcgcctcgggcgaagcatgcgaaatttagtgctg

SEQ ID NO: 462861 - DNA, 75 bp, synthetic construct
  source 1..75: mol_type = other DNA
acaccgacgcacgttctacggcacacattcgcaagccggtttatccccgctggcgcggggaacactcagccaagt

SEQ ID NO: 462862 - DNA, 75 bp, synthetic construct
  source 1..75: mol_type = other DNA
tggcgcggggaactcgtgtgctcctgctggggtgttgctgcgatagccggtttatccccgctggcgcggggaact

SEQ ID NO: 462863 - DNA, 75 bp, synthetic construct
  source 1..75: mol_type = other DNA
gaacgtttctgaaccgcgtctgtttgaaaccctgctccgtcggattcgtttatggcaggcgtttatggagcgcga

SEQ ID NO: 462864 - DNA, 75 bp, synthetic construct
  source 1..75: mol_type = other DNA
agtaccgccgcgaggttctggccactgagggtgacgatattgaatatctgacggatatcgagcttcgtgaagcct

SEQ ID NO: 462865 - DNA, 75 bp, synthetic construct
  source 1..75: mol_type = other DNA
tatgagcaagggacgcagatggcactgcttgaactggctgacaagattaacaaccacgaagtagctatcatcgac

SEQ ID NO: 462866 - DNA, 75 bp, synthetic construct
  source 1..75: mol_type = other DNA
agcgtgattgagctaccggatattaccgctaatcgtcgcattgaggcgtcgggttactggttctaccgcaacgat

SEQ ID NO: 462867 - DNA, 75 bp, synthetic construct
  source 1..75: mol_type = other DNA
agactatcacttatttaagtgatactggttgtctggagattcagggggccagtctaataaccatcgattatctcc

SEQ ID NO: 462868 - DNA, 75 bp, synthetic construct
  source 1..75: mol_type = other DNA
agcaggattacctgatgacggcgattatgggcggggcgtcgaatattactcagcccaccagcgatgtgaatagct

SEQ ID NO: 462869 - DNA, 75 bp, synthetic construct
  source 1..75: mol_type = other DNA
gcattcgcctacatgtggactggttatataaaagttatcgccgttcactcgctgaactataaggactcgttcaaa

SEQ ID NO: 462870 - DNA, 75 bp, synthetic construct
  source 1..75: mol_type = other DNA
gtgcatctattgcatcaattgttgcagatactgaagatgatggaaaatacaatgctgatttcagaaaccctgaat

SEQ ID NO: 462871 - DNA, 75 bp, synthetic construct
  source 1..75: mol_type = other DNA
taatacgggtaataatctggttctgaccagcggacttaaagctgagaaaaaagagctgggtatctgctgggacat

SEQ ID NO: 462872 - DNA, 75 bp, synthetic construct
  source 1..75: mol_type = other DNA
gtatgctgcgcgaccatgagcagagattgaatgcagatcttccagttggcggctatgaggctaccgacctacagg

SEQ ID NO: 462873 - DNA, 75 bp, synthetic construct
  source 1..75: mol_type = other DNA
tacgagcaaggaacgcagatggctctacttgagatggctgacaagataaacaaccacgaagtcgccatcatcgac

SEQ ID NO: 462874 - DNA, 75 bp, synthetic construct
  source 1..75: mol_type = other DNA
tcgttaaggttatcgcggtccactcactgacctataaggactcattcaagccagccgaccggagccgctactggc

SEQ ID NO: 462875 - DNA, 75 bp, synthetic construct
  source 1..75: mol_type = other DNA
tccggcatgccatcaaaaaacgcaaggtgttcccgacggatgactcagtgaaaaaggtcgtgtggctggcaatcc

SEQ ID NO: 462876 - DNA, 75 bp, synthetic construct
  source 1..75: mol_type = other DNA
ggtctggaagtcggtctgcctgaccgtcagatgggtaactccgaagtaggccacgttaacctgggtgccggccgc

SEQ ID NO: 462877 - DNA, 75 bp, synthetic construct
  source 1..75: mol_type = other DNA
cggtgtgaaagtcgaacaagatggggcgagtaatttgggggaaattaaacttggcgtaaatggcaacctgaatcc

SEQ ID NO: 462878 - DNA, 75 bp, synthetic construct
  source 1..75: mol_type = other DNA
tagctggtttaaaaactcggtgaaaggggatgaattagcctatgaatcctatagcgcgaaaggtgcaaccgtctc

SEQ ID NO: 462879 - DNA, 75 bp, synthetic construct
  source 1..75: mol_type = other DNA
acgttatttttcgcaaaaaagtttacttacaacaaaattacacgattcgcatccattatctattgagatcgccaa

SEQ ID NO: 462880 - DNA, 75 bp, synthetic construct
  source 1..75: mol_type = other DNA
atggcggaaaattgtgcacgacacaatagctttgaatttgagcgaaaaagattctactttgtacctttggatgag

SEQ ID NO: 462881 - DNA, 75 bp, synthetic construct
  source 1..75: mol_type = other DNA
tcatcgacattacggatatgcgcgaatggcgtgaggagcgcgggcagggcgtagtgcataaaccgattcctggtt

SEQ ID NO: 462882 - DNA, 75 bp, synthetic construct
  source 1..75: mol_type = other DNA
gttattgcgtctttctgccaccgactgtagccagcgactgcgcctgtctgtttttccggcgctgaatctcagtac

SEQ ID NO: 462883 - DNA, 75 bp, synthetic construct
  source 1..75: mol_type = other DNA
ccggatgatcgcgttgctgatccagttaatgaaagataatgatgcgccgccagagcagtttcagcgcctggggtt

SEQ ID NO: 462884 - DNA, 75 bp, synthetic construct
  source 1..75: mol_type = other DNA
aatatcatagatgaactcttagatattgttgatatggctattatagcatctccagcaacgttacacgctggacat

SEQ ID NO: 462885 - DNA, 75 bp, synthetic construct
  source 1..75: mol_type = other DNA
ttcaaacccgatattgccgtaattgccaatattggccatgaatttcttcatgaaaatacctggtttcgcacacca

SEQ ID NO: 462886 - DNA, 75 bp, synthetic construct
  source 1..75: mol_type = other DNA
tgatctatgcagcaattacttacaccctaacttaccttactttataccgtcgtcaatatcccttactgcgcattg

SEQ ID NO: 462887 - DNA, 75 bp, synthetic construct
  source 1..75: mol_type = other DNA
tgcgtgaggacgaatttgtcacatcattaggggttttgaaagagattggttttaaggctggtttttctgcttttg

SEQ ID NO: 462888 - DNA, 75 bp, synthetic construct
  source 1..75: mol_type = other DNA
acgtaaaacttgtaagaacacaggtggacaaagtgaatatgaattcacgactgattatatcccttgtaacgaacc

SEQ ID NO: 462889 - DNA, 75 bp, synthetic construct
  source 1..75: mol_type = other DNA
tattcagtccttcaggaaaattactggtactgttttacaaggagattctcttcttagtggctctctgctttataa

SEQ ID NO: 462890 - DNA, 75 bp, synthetic construct
  source 1..75: mol_type = other DNA
tctcctgattgttgcgacattagggtatttttttctaagcttaatacaaatagtcgtcacttctgctaaagatgt

SEQ ID NO: 462891 - DNA, 75 bp, synthetic construct
  source 1..75: mol_type = other DNA
agtctggtggcaaaaagcgattttctcagcatactgcctgaagaaatgggctgcgatcccttgcacggacagggg

SEQ ID NO: 462892 - DNA, 75 bp, synthetic construct
  source 1..75: mol_type = other DNA
ccgcatcgcggaagatgcgcactatgtctaccgccacgatgaatacggcaggctggcggagaagacggaccgcat

SEQ ID NO: 462893 - DNA, 75 bp, synthetic construct
  source 1..75: mol_type = other DNA
accgtattacgtcacgctgttcaccctgaaggtcgatggccaggagattaaagaggcggatatggtgccgccgaa

SEQ ID NO: 462894 - DNA, 75 bp, synthetic construct
  source 1..75: mol_type = other DNA
tgatgcagggctatatgtctggagtgcatattgaacgtatcaacgaagttataacagccaccccagaggtaatga

SEQ ID NO: 462895 - DNA, 75 bp, synthetic construct
  source 1..75: mol_type = other DNA
cgcttacaaaacgtctgaaagcgctggaagaaaaagtagcccgtgatggtattgagctaactgacagccagatcg

SEQ ID NO: 462896 - DNA, 75 bp, synthetic construct
  source 1..75: mol_type = other DNA
gcaaaattgccaatgaagcaaaagtgaaaaaactcatccttagccacctggtaccaatcaccgttccggatgaaa

SEQ ID NO: 462897 - DNA, 75 bp, synthetic construct
  source 1..75: mol_type = other DNA
gaacgaaaggtggcccttctttattaaaagctgaccgtttgccgatggcaacggcacttattattggcaataaaa

SEQ ID NO: 462898 - DNA, 75 bp, synthetic construct
  source 1..75: mol_type = other DNA
cgtagtcgccgcgctcctaactttaagaaccgtaccgatgaggcaactgaacaggctgttgttgattacgccgtc

SEQ ID NO: 462899 - DNA, 75 bp, synthetic construct
  source 1..75: mol_type = other DNA
atgggcgtctcgcgtgatacgttttaccgttatcgcgaactggctgatgaaggtggggtggatgcactgattaat

SEQ ID NO: 462900 - DNA, 75 bp, synthetic construct
  source 1..75: mol_type = other DNA
tagagcagcatgattatcagctttatctggcaataaacgacatagaacacacgaaaacgaaggcgatgtccccgc

SEQ ID NO: 462901 - DNA, 75 bp, synthetic construct
  source 1..75: mol_type = other DNA
tgaaataaaaaatgtgaaagcatcgttgaaaaacacacttattgatgttaaaaaaagatgcatgccaactagtgg

SEQ ID NO: 462902 - DNA, 75 bp, synthetic construct
  source 1..75: mol_type = other DNA
ttcttcaggtgcggcaggatggaggttaacaacaatatcaggaaaacctttaacattctcaggtttatcaaagaa

SEQ ID NO: 462903 - DNA, 75 bp, synthetic construct
  source 1..75: mol_type = other DNA
agatttaaactcagctatgtcaacaaatacctctgagtttattaattggggggctggtacgtcgacgagaatttt

SEQ ID NO: 462904 - DNA, 75 bp, synthetic construct
  source 1..75: mol_type = other DNA
tggaaatgattgttactctcgcagttatgggggttgctatgttatctgtcattaaatataaagagaaagaagcag

SEQ ID NO: 462905 - DNA, 75 bp, synthetic construct
  source 1..75: mol_type = other DNA
tttgaatacaggtacgagtaaactatgtttgacacaagtagaaggtaaagatgaaaatgataaggatgcctctct

SEQ ID NO: 462906 - DNA, 75 bp, synthetic construct
  source 1..75: mol_type = other DNA
gatttaaaaatagaacgtatagattttgtgggtgctgatgcaacagttgccagtgcgatagagcgcgtggacttt

SEQ ID NO: 462907 - DNA, 75 bp, synthetic construct
  source 1..75: mol_type = other DNA
ttagtaaggattatataccttgtgaagaaccagctattttatcaaatagtgatttaaagatagatcgtattgatt

SEQ ID NO: 462908 - DNA, 75 bp, synthetic construct
  source 1..75: mol_type = other DNA
tggcgaaggaacttgcgctcgatcttaaagataacattaagcagcagattgccacgctaaatgactctcttgaaa

SEQ ID NO: 462909 - DNA, 75 bp, synthetic construct
  source 1..75: mol_type = other DNA
cagcttcaatccaagccagacagccattcaagctcttgatcaaagattcacccagttcaagcaaagtcataaacc

SEQ ID NO: 462910 - DNA, 75 bp, synthetic construct
  source 1..75: mol_type = other DNA
gacatttatgccttatacgccggtgatttgtcatggtggaagcaatacggttccaccataccgggagggaggttc

SEQ ID NO: 462911 - DNA, 75 bp, synthetic construct
  source 1..75: mol_type = other DNA
gaaaaaggcaattaccttgattctggcggtgctgctgggcggcatggttggcgcggggattgtgctggggcgtaa

SEQ ID NO: 462912 - DNA, 75 bp, synthetic construct
  source 1..75: mol_type = other DNA
ctgcgccgaaagtatcggatttacaggaaacgttgattggtcgcttcagttctgccttctctgcattagcagaaa

SEQ ID NO: 462913 - DNA, 75 bp, synthetic construct
  source 1..75: mol_type = other DNA
tacgctgaccaatgaacaatggcagcaggttaccgctgaactgcacgaccgcatgatggaaacggtctttttgct

SEQ ID NO: 462914 - DNA, 75 bp, synthetic construct
  source 1..75: mol_type = other DNA
tatttttataccatttgtttttgatgtgttgctgttttgtttttgatgcaatacacaaatttaacggcaaatata

SEQ ID NO: 462915 - DNA, 75 bp, synthetic construct
  source 1..75: mol_type = other DNA
ggccgccggacgggaaaacgggtgtggcggcgggagcgtgacctgacggggtggatgtcgctgtcgcgtaaaccg

SEQ ID NO: 462916 - DNA, 75 bp, synthetic construct
  source 1..75: mol_type = other DNA
aacgatggaacagcaacggaatttaaccgcttctcacaatttgcttctttttcatcgtctagtgcgccttcggtc

SEQ ID NO: 462917 - DNA, 75 bp, synthetic construct
  source 1..75: mol_type = other DNA
taactgttaatacaaaaacaaataaagtaatggatggtaattctcgtgtatacgagttgaaaaaaagagctgatg

SEQ ID NO: 462918 - DNA, 75 bp, synthetic construct
  source 1..75: mol_type = other DNA
ccggcggcagtgcaggaagtccgggaggatggggtccagaggatgaggaaaaggctcgcagtcgggggcgtggtt

SEQ ID NO: 462919 - DNA, 75 bp, synthetic construct
  source 1..75: mol_type = other DNA
actattggctcgcgtcctgatcttgctaaactaacagacagtgagttgttagagtctgttattaatcctaagtct

SEQ ID NO: 462920 - DNA, 75 bp, synthetic construct
  source 1..75: mol_type = other DNA
tcgttggttgtgagacaaatgaatcaggaatatcggcagcatatggcacaacgaagatctatactacagatacta

SEQ ID NO: 462921 - DNA, 75 bp, synthetic construct
  source 1..75: mol_type = other DNA
ccgccgcatatcgtcgaattcacgaaaacgcggaataaacaccatcgccagaaatgcaaacaggagcctgatggc

SEQ ID NO: 462922 - DNA, 75 bp, synthetic construct
  source 1..75: mol_type = other DNA
atgaagaagcctcacaaagttccactgagcaaagaatctttgcgagtcttggattcaatgaaagccatcagcggg

SEQ ID NO: 462923 - DNA, 75 bp, synthetic construct
  source 1..75: mol_type = other DNA
attacaggtgggttgatttccttacttctttttgtcctatttatttacataagtaaaattaaccgattgttacta

SEQ ID NO: 462924 - DNA, 75 bp, synthetic construct
  source 1..75: mol_type = other DNA
cgcagcatcgcgggctggaaatcaccacgccaggcatgacgctcacgcccaacagctacttcatcaactaccgca

SEQ ID NO: 462925 - DNA, 75 bp, synthetic construct
  source 1..75: mol_type = other DNA
gacaaaatgcgccgcctgatccgtcggctggactcagaaatggaacgcagcggcaacagccaggttttctatctc

SEQ ID NO: 462926 - DNA, 75 bp, synthetic construct
  source 1..75: mol_type = other DNA
cgcttgtctaatagtttcgaggttagctcacttccagatgcaaatgggaaaaatcacatcacggctgtaaaaggt

SEQ ID NO: 462927 - DNA, 75 bp, synthetic construct
  source 1..75: mol_type = other DNA
gacgtctggaaattgatgctcacaccttattcaccaccaggcggtggcagtgaaaagtattatctgcggtatctg

SEQ ID NO: 462928 - DNA, 75 bp, synthetic construct
  source 1..75: mol_type = other DNA
aggaaaatcttagtggtggaatgacggcattcaataaagccaaaaatccccctatgtctatccatttctgctggg

SEQ ID NO: 462929 - DNA, 75 bp, synthetic construct
  source 1..75: mol_type = other DNA
acctgtgaaaaataatggtgatgattctgttggcaatggttttattttgcgttctgatttacatcttttatacga

SEQ ID NO: 462930 - DNA, 75 bp, synthetic construct
  source 1..75: mol_type = other DNA
ttgataaaaaagtgtatgaaacctggataacgctggcgggagacgtctggagattgatgctcacaccttatacac

SEQ ID NO: 462931 - DNA, 75 bp, synthetic construct
  source 1..75: mol_type = other DNA
ttgataaaaaagtgtatgaaacctggataacgctggcgggagacgtctggatattgatgctcacaccttattcac

SEQ ID NO: 462932 - DNA, 75 bp, synthetic construct
  source 1..75: mol_type = other DNA
ttgataaaaaagtgtatgaaacctggataacgctggcgggagacgtctggaaattgatgctcacaccttatgcac

SEQ ID NO: 462933 - DNA, 75 bp, synthetic construct
  source 1..75: mol_type = other DNA
tacagaccggcaccacgcgtatccagacggtataccagccggggagcttcacgccgctcctgagaatcgaaacag

SEQ ID NO: 462934 - DNA, 75 bp, synthetic construct
  source 1..75: mol_type = other DNA
atccgccttcatattgtttgcggtgtccctgatgaacttattgatttcacgtttgaatggaaaggattgaaaaaa

SEQ ID NO: 462935 - DNA, 75 bp, synthetic construct
  source 1..75: mol_type = other DNA
cgccggatattatggcggcgcgaaaatccgccacaacaacgcctgcgcaggtatcgcgggttatcagtgacagcg

SEQ ID NO: 462936 - DNA, 75 bp, synthetic construct
  source 1..75: mol_type = other DNA
caacatatcatcaatgtttaaagtttttttcctcaagaacaagccagaaaggatgagggtatatgagaatatata

SEQ ID NO: 462937 - DNA, 75 bp, synthetic construct
  source 1..75: mol_type = other DNA
ataatatatcttgaaagagatcataatcaaggaacctatactaagaaagtagagtttggtttcggagcaaccata

SEQ ID NO: 462938 - DNA, 75 bp, synthetic construct
  source 1..75: mol_type = other DNA
aaatggactggctctcaactgcagggcagatacatttcaaataaccagcgcagctggagccagacgtttcagggg

SEQ ID NO: 462939 - DNA, 75 bp, synthetic construct
  source 1..75: mol_type = other DNA
ccatgcggatctatcatgtaaatggccatcctgacgcgcggcagttatttcactgttttgatgccgattgcctgt

SEQ ID NO: 462940 - DNA, 75 bp, synthetic construct
  source 1..75: mol_type = other DNA
tgagttatgttccagggcaaagattaactttaatagctgaaaaaacaaatacaggtagtgattgtggtagagaaa

SEQ ID NO: 462941 - DNA, 75 bp, synthetic construct
  source 1..75: mol_type = other DNA
atgtcgtcttttcttactgcggagaataatataaaggaatttatacttttattaccctataataaatcactggag

SEQ ID NO: 462942 - DNA, 75 bp, synthetic construct
  source 1..75: mol_type = other DNA
tataataaatcactggagatgtatgaacttaacgatcaaaagatccagtatttgactgcccctaatatcaatata

SEQ ID NO: 462943 - DNA, 75 bp, synthetic construct
  source 1..75: mol_type = other DNA
cattcctggcgattgactatgatttactcggaatcacttccgtaatagttaacggcgaaactcacgaagtaaaac

SEQ ID NO: 462944 - DNA, 75 bp, synthetic construct
  source 1..75: mol_type = other DNA
attcagtctggtaatcatccaaggaaagcttatcagaagggtgatgactccaattagtagaacatatattttcga

SEQ ID NO: 462945 - DNA, 75 bp, synthetic construct
  source 1..75: mol_type = other DNA
tcagaacacagtttttcaagagtacaaaaaggtgcccttttgatctgccctcattgcaacaaagtattccagaca

SEQ ID NO: 462946 - DNA, 75 bp, synthetic construct
  source 1..75: mol_type = other DNA
cgccagcaatgccgtattcaacgtgcaggcgctcgggcagctcacctcttttgctgaattgatggcgcagtctgc

SEQ ID NO: 462947 - DNA, 75 bp, synthetic construct
  source 1..75: mol_type = other DNA
agggcgacatgacgcagtatggcggtagcattgttcagggttcagccggggtgcgcatcggtgcccccaccggtg

SEQ ID NO: 462948 - DNA, 75 bp, synthetic construct
  source 1..75: mol_type = other DNA
ccttctgacgcgtgctgtgattatttcgctttttacctggcggcgtgccgggcgggatgatgatgcaccgcagat

SEQ ID NO: 462949 - DNA, 75 bp, synthetic construct
  source 1..75: mol_type = other DNA
ctgctgccgggggaggcggtgtacagccgcagcgagtcaatgtggctggttcgcggtggtaaggcagcgcagccg

SEQ ID NO: 462950 - DNA, 75 bp, synthetic construct
  source 1..75: mol_type = other DNA
tttcttactgcggagataacgtaaaggaatttatacttttattaccctataataaatcactggagatgtatgaac

SEQ ID NO: 462951 - DNA, 75 bp, synthetic construct
  source 1..75: mol_type = other DNA
gaaaaagctgcagatgagaccctgaagcgtatgggaattgcagatctgtcagaagagatgttcagaaaaagacca

SEQ ID NO: 462952 - DNA, 75 bp, synthetic construct
  source 1..75: mol_type = other DNA
aacgtatccggggtgatgggtaacgccacgcatgtggcggtgtactcatgctcttacctgaaaaagccgccggtg

SEQ ID NO: 462953 - DNA, 75 bp, synthetic construct
  source 1..75: mol_type = other DNA
agttgcgatatttgtccgtttttagtcgaagcaaataataaatatttaaattatttattcgctcgtggattgaaa

SEQ ID NO: 462954 - DNA, 75 bp, synthetic construct
  source 1..75: mol_type = other DNA
cgttacgggctcacctgagaaaattgttcaggacagcttatcccgttttgcgagcattgtgtctttttctctgga

SEQ ID NO: 462955 - DNA, 75 bp, synthetic construct
  source 1..75: mol_type = other DNA
agctcgcggaagcaaaatataaccttgagcagacgatagtgcgtgcgccgagcgatggttatgtgacccaggtgc

SEQ ID NO: 462956 - DNA, 75 bp, synthetic construct
  source 1..75: mol_type = other DNA
ttcctttgagtaaagaagctttgcgcatccttgaattaatgaaatcaataagtgggcatagagaatgggttttcc

SEQ ID NO: 462957 - DNA, 75 bp, synthetic construct
  source 1..75: mol_type = other DNA
agagataacactgagttaaattatgatgtctgtctttcattagaagttgttttgcaaaaaggcattgcctttatc

SEQ ID NO: 462958 - DNA, 75 bp, synthetic construct
  source 1..75: mol_type = other DNA
gctatgttaacccgacttggcgacgacatatttgggcagaaattccgcgcattatgggatgaagaaaaggtcgat

SEQ ID NO: 462959 - DNA, 75 bp, synthetic construct
  source 1..75: mol_type = other DNA
agaaccaaggaattcatcgattcaggagcaagcaaggttacacactggatgccgcttaattacccagatgattaa

SEQ ID NO: 462960 - DNA, 75 bp, synthetic construct
  source 1..75: mol_type = other DNA
tcaatgttgaacaccggctaccagaaagcaaagaagggatgtggtctaaagaggttatagctcttactgatactg

SEQ ID NO: 462961 - DNA, 75 bp, synthetic construct
  source 1..75: mol_type = other DNA
gcgttattctgttggtggagggattcccgccgtcacatgccgggaccatcaccgtgtatgaagattctcaacccg

SEQ ID NO: 462962 - DNA, 75 bp, synthetic construct
  source 1..75: mol_type = other DNA
gcaccctgaatattggcggcatggcctggcggcccggtaaaaaacagttaaccaaagcggtttcattagatgatg

SEQ ID NO: 462963 - DNA, 75 bp, synthetic construct
  source 1..75: mol_type = other DNA
cacccgaacggttcaggctggtttgcccaaaacctgtacctcgatgcggcgcaatatatccgccaggatattcag

SEQ ID NO: 462964 - DNA, 75 bp, synthetic construct
  source 1..75: mol_type = other DNA
ctcaagctgttgcagatactcgtagtggtgtttctaagagcactggtaaaccatatacgatatctgaacagtctg

SEQ ID NO: 462965 - DNA, 75 bp, synthetic construct
  source 1..75: mol_type = other DNA
gaacatctattgctcataaaggaatgctgctggcggcgaaaactatggcagcaaccacagtcaatctcttcattg

SEQ ID NO: 462966 - DNA, 75 bp, synthetic construct
  source 1..75: mol_type = other DNA
aagctttccactaatgaaatttaccgcagcctggaagattggatcggcaacagagaacaggtagcagtaaacaag

SEQ ID NO: 462967 - DNA, 75 bp, synthetic construct
  source 1..75: mol_type = other DNA
tctaaataaagaaattattgacatagatttccagagaaaatcagaaaagcttgatcaaatagctcatattcagcg

SEQ ID NO: 462968 - DNA, 75 bp, synthetic construct
  source 1..75: mol_type = other DNA
tgatataccgcactggacgacccatgattttaggcgttcactggtgacaaatttgtcgggggagggggtcgcgcc

SEQ ID NO: 462969 - DNA, 75 bp, synthetic construct
  source 1..75: mol_type = other DNA
gacacttcagaagctctctgagaccttgcagcaatcagtcttacgggcgcaggggacggacggtgccctggagct

SEQ ID NO: 462970 - DNA, 75 bp, synthetic construct
  source 1..75: mol_type = other DNA
aaatggcttgtgtctcagttcggtgtacccgagcatttggttgagccacccacattcgcgattaaggtgtttcat

SEQ ID NO: 462971 - DNA, 75 bp, synthetic construct
  source 1..75: mol_type = other DNA
tgccaaaaacaatcaaagaagccgtacaagagcagttcagtcgcatgggggaaagctactatgcgaacatcaagt

SEQ ID NO: 462972 - DNA, 75 bp, synthetic construct
  source 1..75: mol_type = other DNA
tactaattctctaatcagttctggattgctaaatgatcagcagaaagggtacttatcacaacagcaaaatcagcg

SEQ ID NO: 462973 - DNA, 75 bp, synthetic construct
  source 1..75: mol_type = other DNA
atgataagaaattcaatgaaatgttgaagaagcatgctaacagcgttacacaagcagtaagaagcagtcagagac

SEQ ID NO: 462974 - DNA, 75 bp, synthetic construct
  source 1..75: mol_type = other DNA
cggagagttgattgttacagctaactcaaaagtaaacataatcacagaggttgcaataccatttgccattgatgg

SEQ ID NO: 462975 - DNA, 75 bp, synthetic construct
  source 1..75: mol_type = other DNA
tcgactgggttatagatacatgggttcctaaactactcaagtgtacccgattacgtcgctcctctattactggat

SEQ ID NO: 462976 - DNA, 75 bp, synthetic construct
  source 1..75: mol_type = other DNA
gtccgatgttgcggttgctaccgctcctactggcggatgggttgatcaggcaaaagaagctgaagatgcagcgaa

SEQ ID NO: 462977 - DNA, 75 bp, synthetic construct
  source 1..75: mol_type = other DNA
gaatccgaacacccgtaccgaggtgagcaccctctgcatcagccagttccgctacagcgcacaaatccgcccttc

SEQ ID NO: 462978 - DNA, 75 bp, synthetic construct
  source 1..75: mol_type = other DNA
ctgccactgatgttcttgttgaattagtgaaaccaacaggtgccgggttatcaggttatagcgattctatccagt

SEQ ID NO: 462979 - DNA, 75 bp, synthetic construct
  source 1..75: mol_type = other DNA
aaggaaccaggggaagttttttgcagaagtgcatgaggatgcatttgataagttaactatgcttgttcagcaggt

SEQ ID NO: 462980 - DNA, 75 bp, synthetic construct
  source 1..75: mol_type = other DNA
caaagaatcctgttcatgattatggcgtcatcagagtctcactctctggtgagttaatagaccactctgttgtga

SEQ ID NO: 462981 - DNA, 75 bp, synthetic construct
  source 1..75: mol_type = other DNA
gagctggcagcggccgaacaggaatacctgcggcttctgtcaggagaaggcagaaacgtcagtcgcctggacgaa

SEQ ID NO: 462982 - DNA, 75 bp, synthetic construct
  source 1..75: mol_type = other DNA
gcttaatagtgacagttttacgttagctggtaataatacagcagtggaaaaaaataataataactataaagatct

SEQ ID NO: 462983 - DNA, 75 bp, synthetic construct
  source 1..75: mol_type = other DNA
ttactaatctgaacaatgcaggattcattattgaatcctccggtactgtacttgggctagaaatttattccgtag

SEQ ID NO: 462984 - DNA, 75 bp, synthetic construct
  source 1..75: mol_type = other DNA
cgggttgcatactcaacgatttcactcctaccggggtttcgcatttgaaccttttcgatgatactcagccccgga

SEQ ID NO: 462985 - DNA, 75 bp, synthetic construct
  source 1..75: mol_type = other DNA
agcatggccgggtgcgggtgaaattcaactgggaccgctataacccggccaatcaggacagttcgtgctggatac

SEQ ID NO: 462986 - DNA, 75 bp, synthetic construct
  source 1..75: mol_type = other DNA
aagcatcctcggcaccatactgcaggaaaatgacgtcacggagtggagcccgctgttcagtgagccgcatccttc

SEQ ID NO: 462987 - DNA, 75 bp, synthetic construct
  source 1..75: mol_type = other DNA
tcgctgggataacctggcaacactgcctaaagttgttcctgctggctcaacgcctgcatcatctgggggggtagg

SEQ ID NO: 462988 - DNA, 75 bp, synthetic construct
  source 1..75: mol_type = other DNA
ctattttttctttttgctatcatttttatagctttttatattgttaatgccagtaatgatccgcagctgagacat

SEQ ID NO: 462989 - DNA, 75 bp, synthetic construct
  source 1..75: mol_type = other DNA
cctgagcctgtgaaagtcgagaaaccagtcgtttctgttaaaaagaaagaagagaaaaaagcaaaaaatgatgat

SEQ ID NO: 462990 - DNA, 75 bp, synthetic construct
  source 1..75: mol_type = other DNA
gcgggtaaatctcagggtgaaattgtcaacgtaatggaaacattagcaagtgattcatctcatatgattagtact

SEQ ID NO: 462991 - DNA, 75 bp, synthetic construct
  source 1..75: mol_type = other DNA
ctgtgatctgcctgttcctgctgatatcgctggtgggttgctcgaatacacgtaccgtttacgtgccagcgccat

SEQ ID NO: 462992 - DNA, 75 bp, synthetic construct
  source 1..75: mol_type = other DNA
acagttgaagaagccctgactttgcttaaatcgcgcggctggctggtaatgccacgagatgaactggctggaaaa

SEQ ID NO: 462993 - DNA, 75 bp, synthetic construct
  source 1..75: mol_type = other DNA
ggtaaacatttttttaaggttatgggcgaggagcttaaaaatttgcgactgacagtaagtcagttacaaatttcg

SEQ ID NO: 462994 - DNA, 75 bp, synthetic construct
  source 1..75: mol_type = other DNA
gcagcttcggcgcagtcttccgggagtggattacctggctgatacggaaccgacaggaggcagaaaacactaccc

SEQ ID NO: 462995 - DNA, 75 bp, synthetic construct
  source 1..75: mol_type = other DNA
ggcagctatgagggcaaagagtaccgggtgcttcggtggatgaacaacggccgccccgccaccgtcgcggtaaac

SEQ ID NO: 462996 - DNA, 75 bp, synthetic construct
  source 1..75: mol_type = other DNA
cgcaaaaatgctcgaaaccgatcaggcgtgggaagtgttcgaaaaactggaagacagctacttcaacaagtacga

SEQ ID NO: 462997 - DNA, 75 bp, synthetic construct
  source 1..75: mol_type = other DNA
gaatctattatcagttcagaacgctggcgagtactaatgccagtccaggaagtgttggacaatggagcgagaaag

SEQ ID NO: 462998 - DNA, 75 bp, synthetic construct
  source 1..75: mol_type = other DNA
cacgagcattaaacctggatttaaaagccgttgggtttgccacaatgatcgttttctgtgcaggtggttgtggta

SEQ ID NO: 462999 - DNA, 75 bp, synthetic construct
  source 1..75: mol_type = other DNA
aagtgcctataaacatgggtattcttatccggaaagtacaaaaaactttatcaaagataaaaaatatccctatgg

SEQ ID NO: 463000 - DNA, 75 bp, synthetic construct
  source 1..75: mol_type = other DNA
atgtttaagccccgcctgctcaaaaagaaattaaaaaacgaaaataccagctatagccagattgtcacagagtgt

SEQ ID NO: 463001 - DNA, 75 bp, synthetic construct
  source 1..75: mol_type = other DNA
atccccctatgtctatccatttatgctgggagtcagtgattgataaaaaagtgtatgaaacctggataacgctgg

SEQ ID NO: 463002 - DNA, 75 bp, synthetic construct
  source 1..75: mol_type = other DNA
ttgtttttattatgtgtatgattcttaattttaacgtagcagcgaaagaaaaaatatcgttgcttgcaccctatg

SEQ ID NO: 463003 - DNA, 75 bp, synthetic construct
  source 1..75: mol_type = other DNA
gggccgatgatgcggctccgtttccgtgacacgtcgctggatatctgccagaaggtggacgtggtgggctacggc

SEQ ID NO: 463004 - DNA, 75 bp, synthetic construct
  source 1..75: mol_type = other DNA
gttcagcaccaccgtgaccgagacagtcggcctgaaaaacaaaaagccggtgctgttcttcagtctcgagatgcc

SEQ ID NO: 463005 - DNA, 75 bp, synthetic construct
  source 1..75: mol_type = other DNA
acggaggttcaagatttatcaattatacaatctgactattcgagactcaatataggggataggtacgataatcta

SEQ ID NO: 463006 - DNA, 75 bp, synthetic construct
  source 1..75: mol_type = other DNA
aaatgcgttgggatttttcctgttttccttgtctattgttccatttatttttacatgtatttgttatttatacca

SEQ ID NO: 463007 - DNA, 75 bp, synthetic construct
  source 1..75: mol_type = other DNA
ctctctcaacagaagcatggtataccaagaattggtcatgacgtatggataggtgcaaatgcggttatcaggcga

SEQ ID NO: 463008 - DNA, 75 bp, synthetic construct
  source 1..75: mol_type = other DNA
ctgcgatgaagacctgacaccgatgatcggagaatggaaggggtggcgacactgcgtagtctaccgtccgggcca

SEQ ID NO: 463009 - DNA, 75 bp, synthetic construct
  source 1..75: mol_type = other DNA
ctgaccatgaccgagtttcagctgatgctggcgcagaaataccctgatcagaagggtttcacgcgggatgagtac

SEQ ID NO: 463010 - DNA, 75 bp, synthetic construct
  source 1..75: mol_type = other DNA
ttttgtgttttatcagcttctgttttattcacgagatgtcaaatttgcatttttgaatctctttcgccacaagcg

SEQ ID NO: 463011 - DNA, 75 bp, synthetic construct
  source 1..75: mol_type = other DNA
cgagtccatccgcgcatatgtcgaagaagacacggcgtacaccgttgctgcaggcgatctgctgcgcgtcgttat

SEQ ID NO: 463012 - DNA, 75 bp, synthetic construct
  source 1..75: mol_type = other DNA
ggcttgcgatgccgggcggtttcaggtacgtctgcgtatcggcgggagtcagcagcgtttttataaagtgaaact

SEQ ID NO: 463013 - DNA, 75 bp, synthetic construct
  source 1..75: mol_type = other DNA
gctggcgacggatatttccacgctctccgggcaactggagtttactggcgtaatttcacattacgagagcgaaac

SEQ ID NO: 463014 - DNA, 75 bp, synthetic construct
  source 1..75: mol_type = other DNA
tcagtttattgaacgcaatcatttgccgctggtggtcaaagactggcgtgatgtttcactcttttatcaacaggt

SEQ ID NO: 463015 - DNA, 75 bp, synthetic construct
  source 1..75: mol_type = other DNA
ttttatatggcggatttattgattactctttctggatcctgaaagagcagacgattcgtaccaatattggtcatg

SEQ ID NO: 463016 - DNA, 75 bp, synthetic construct
  source 1..75: mol_type = other DNA
tggcatcacaatgacatttatcggcccttccccctctgttcaggacaaaccagcaagcactgacaataccaacgt

SEQ ID NO: 463017 - DNA, 75 bp, synthetic construct
  source 1..75: mol_type = other DNA
cccgcaaagaaatcatcaaagcccttgaatcagccgagggtgagtatgcaagcgcacttcgttgggtgattgggg

SEQ ID NO: 463018 - DNA, 75 bp, synthetic construct
  source 1..75: mol_type = other DNA
atggcgcgagtggcaaaacgaacgttttgacgttcgaacctgaaaacctgcacctggttaccgacaaaacgcacc

SEQ ID NO: 463019 - DNA, 75 bp, synthetic construct
  source 1..75: mol_type = other DNA
caccgcctgcggtcagaccggcgacggcaactgtcctgactgtggcgcggtaatgggcgacgcaacataccagga

SEQ ID NO: 463020 - DNA, 75 bp, synthetic construct
  source 1..75: mol_type = other DNA
accttgaaacaatgggaaaaaatcctgattccccgattatctcaataggtgcaatatttttcgatccgcaaaccg

SEQ ID NO: 463021 - DNA, 75 bp, synthetic construct
  source 1..75: mol_type = other DNA
tgacaaaagagtggatgaaagggaatcgtgtttcgcgtatcacccgcacggcttccggtgctaatgctggcggcg

SEQ ID NO: 463022 - DNA, 75 bp, synthetic construct
  source 1..75: mol_type = other DNA
caggtagcatcgcaccgtctctgttcggctgcatccagctggcaaaccgtgccggagcatcacgccccactctgg

SEQ ID NO: 463023 - DNA, 75 bp, synthetic construct
  source 1..75: mol_type = other DNA
tagaaacatacatctcttggcagttagagcaatttaaggataaatttttcccaaactgtgacgtcattgcgtact

SEQ ID NO: 463024 - DNA, 75 bp, synthetic construct
  source 1..75: mol_type = other DNA
atttaacgtgattatatctgttgatcggaatgatatacagggagaaagaaaaaaattcctgttacagctggaatg

SEQ ID NO: 463025 - DNA, 75 bp, synthetic construct
  source 1..75: mol_type = other DNA
atgcaatcagactggtggtggtaactgccctgattgtggcgcagtgatgggggacgcaacctaccaggagacatt

SEQ ID NO: 463026 - DNA, 75 bp, synthetic construct
  source 1..75: mol_type = other DNA
agacggctgccgccagaaacatactgcaggctctcagttgcgcctgtctcccggcgaaagtatctgcctgccgcc

SEQ ID NO: 463027 - DNA, 75 bp, synthetic construct
  source 1..75: mol_type = other DNA
cgcctctgttcagcatcgtctggctggcaaacagtgccggagcatcacgccccgctctggcagcaggtcagtcag

SEQ ID NO: 463028 - DNA, 75 bp, synthetic construct
  source 1..75: mol_type = other DNA
aacatcatggatcagggcgttcttgagccgattatcgtctggaaagacccggaaacagggctgtcttgtgtagtc

SEQ ID NO: 463029 - DNA, 75 bp, synthetic construct
  source 1..75: mol_type = other DNA
tgtgtcgttggaattctccggagaaaggatttgttccaccagcagagtttattcctgttgcagaaacttgcggtc

SEQ ID NO: 463030 - DNA, 75 bp, synthetic construct
  source 1..75: mol_type = other DNA
tcctgcgtgacaagctgtctccgtatgacaccgaagagatgcttgaggctatgcgtatttttctggaagaacagg

SEQ ID NO: 463031 - DNA, 75 bp, synthetic construct
  source 1..75: mol_type = other DNA
ataattatctttatgattcacattttgataattctcccttgaagagattaacgtttgatgattattctgtaaaac

SEQ ID NO: 463032 - DNA, 75 bp, synthetic construct
  source 1..75: mol_type = other DNA
tctgatgaaatctttggtgttttggtagtgaaattcggtgtaaccaaagttttgagtcaagttaaggttcgcaat

SEQ ID NO: 463033 - DNA, 75 bp, synthetic construct
  source 1..75: mol_type = other DNA
actttttagagagtgcattaattagttgggataatttacccgctgttgttctcaaggaattacagcaaaacacgc

SEQ ID NO: 463034 - DNA, 75 bp, synthetic construct
  source 1..75: mol_type = other DNA
agagctcgtgactcagtgcttattgatgaaggtatgaatgatttcaaggttttttctgacggggcgagtgagttt

SEQ ID NO: 463035 - DNA, 75 bp, synthetic construct
  source 1..75: mol_type = other DNA
tttgataacaaaagggacaagtggaatagtcaagaagtacaggatgaagtaaaggcattaaataagaagattgct

SEQ ID NO: 463036 - DNA, 75 bp, synthetic construct
  source 1..75: mol_type = other DNA
atggtagtgtccgctattgccagtacacctcagtattacgaagcaaaaaatgacaaagtaagaaaacgcctcggt

SEQ ID NO: 463037 - DNA, 75 bp, synthetic construct
  source 1..75: mol_type = other DNA
gtcaaaaaaacggaaaataaagtgcgacagactgaagataaacagcaccagaacagcgaaccggaggagcgaact

SEQ ID NO: 463038 - DNA, 75 bp, synthetic construct
  source 1..75: mol_type = other DNA
agctataagtaaagaacaaatacctgatttcttaaaaaaggtaagtgctatcaatatcgatgtaataaattttta

SEQ ID NO: 463039 - DNA, 75 bp, synthetic construct
  source 1..75: mol_type = other DNA
acgtttgataattattctgtaaaacttgcgacgctgattaaaaataaaattcctattattaatacaacaatcaat

SEQ ID NO: 463040 - DNA, 75 bp, synthetic construct
  source 1..75: mol_type = other DNA
gtttcttcagagagattaacgcttgataattatctttatgattcacattttgataattctcccttgaatagatta

SEQ ID NO: 463041 - DNA, 75 bp, synthetic construct
  source 1..75: mol_type = other DNA
tgcgtcagagtgctggcagagtcggtcgggatgttgccctgcaatctgtatcacctgaacggcagcctgaagcag

SEQ ID NO: 463042 - DNA, 75 bp, synthetic construct
  source 1..75: mol_type = other DNA
tattagtgatttagctggttgctcttatgagcaggtagaagaaatcttggcaccgttagcatccacttttggtgg

SEQ ID NO: 463043 - DNA, 75 bp, synthetic construct
  source 1..75: mol_type = other DNA
tcaggagtggtaaaactctttgacccgctgacacctgaaatactgcgagttctcatccatgagatgaaaggcggt

SEQ ID NO: 463044 - DNA, 75 bp, synthetic construct
  source 1..75: mol_type = other DNA
gtggcccgctgacggacgccgattttaacgctatcaggatgagcaagaggcaggcacaacacgcggctgacaggc

SEQ ID NO: 463045 - DNA, 75 bp, synthetic construct
  source 1..75: mol_type = other DNA
tatctttatttcttcctcttatggttaattggttttacaacaaaatcgccatcaggaaatataaaaagcttgaga

SEQ ID NO: 463046 - DNA, 75 bp, synthetic construct
  source 1..75: mol_type = other DNA
caaaatcacacctaatactttctattatacgcccatgacacaggatttcgctgaacacctgtacccggcgcttgt

SEQ ID NO: 463047 - DNA, 75 bp, synthetic construct
  source 1..75: mol_type = other DNA
atgaaagcgttactcaaatttttaaccatacaaatatcattcatcattctgagtattatcattccgcctgccata

SEQ ID NO: 463048 - DNA, 75 bp, synthetic construct
  source 1..75: mol_type = other DNA
tatggcccggaagttcgagaccgccatcatcgtcgtcacccatgacgaaaagatcatccccacattcaagcgcat

SEQ ID NO: 463049 - DNA, 75 bp, synthetic construct
  source 1..75: mol_type = other DNA
gtctacggtgaggacgtggtgatgccggaagggtttgctcgctccgagcaggagcaagtgggcaaatattactgc

SEQ ID NO: 463050 - DNA, 75 bp, synthetic construct
  source 1..75: mol_type = other DNA
ctacgaacagaagaccgattacgcaagttttgacgtgatgaacaaacagggaagcatgaaggacgtgctggactt

SEQ ID NO: 463051 - DNA, 75 bp, synthetic construct
  source 1..75: mol_type = other DNA
caacctggagcgttatttctccgacaacttccagtcaggcacgatcatggatgaaattctgaaactgaccggtgt

SEQ ID NO: 463052 - DNA, 75 bp, synthetic construct
  source 1..75: mol_type = other DNA
tacttacacagttcgttacttcgttattaacctttgtatccactttattagtatgccacatattaacgaaatcat

SEQ ID NO: 463053 - DNA, 75 bp, synthetic construct
  source 1..75: mol_type = other DNA
aatttaaagaaattgatgaaaaaatttctgatgatgaccttatttttggtatggctgtagttataaaagaaattc

SEQ ID NO: 463054 - DNA, 75 bp, synthetic construct
  source 1..75: mol_type = other DNA
aatttatcaccaaccgataaagaattagtaaaacaaagttttgacaggaaaaaccattatctgaaaactctaaaa

SEQ ID NO: 463055 - DNA, 75 bp, synthetic construct
  source 1..75: mol_type = other DNA
gacgagttcacccgcgacaacgttattgtccttcttcagaactacccgcgcgcgttcgacagcatcggtctggca

SEQ ID NO: 463056 - DNA, 75 bp, synthetic construct
  source 1..75: mol_type = other DNA
tcgctggataacatgattgcccaggggaacccgatgccggtgccttacggtgaaatgctggttggctcccggcga

SEQ ID NO: 463057 - DNA, 75 bp, synthetic construct
  source 1..75: mol_type = other DNA
cgcttacgctcaagctgctggaagcaaaaggtcagaaagtggcgctgaatgaggcgatgggcagcacgcaaagca

SEQ ID NO: 463058 - DNA, 75 bp, synthetic construct
  source 1..75: mol_type = other DNA
gtaactgggaagctgcactggcggcggcgcattacgggcttgataacctggtcattattaatgacaaaaataatc

SEQ ID NO: 463059 - DNA, 75 bp, synthetic construct
  source 1..75: mol_type = other DNA
gttgcctgattatggccgcctgtgccaccggcccttatgcgctggttctggtgcctgcgctgatgtatgccagct

SEQ ID NO: 463060 - DNA, 75 bp, synthetic construct
  source 1..75: mol_type = other DNA
gtgcctgtgaaccgccccgggtttcctggagagtgttttatctgtgaactcaggctgccagatcatcgtttccga

SEQ ID NO: 463061 - DNA, 75 bp, synthetic construct
  source 1..75: mol_type = other DNA
gatttaaccacacgcgaagaggtggaaaaccgtccggaagtgggtaatgactccaacttattgatagtgttttat

SEQ ID NO: 463062 - DNA, 75 bp, synthetic construct
  source 1..75: mol_type = other DNA
cctgataactgccgcattgttattcgccctggctgctacatcactcacgacaccgggatctacgacgcggcacaa

SEQ ID NO: 463063 - DNA, 75 bp, synthetic construct
  source 1..75: mol_type = other DNA
atggctgccagacgttgccagttccctgggctggccccggaagccggtatacgctgctgttcgaatcgtttgttc

SEQ ID NO: 463064 - DNA, 75 bp, synthetic construct
  source 1..75: mol_type = other DNA
cgttctatcatcaatatctttgtgtcccagatggtaaaggggactatacttgtggtggccaagaccaacggggag

SEQ ID NO: 463065 - DNA, 75 bp, synthetic construct
  source 1..75: mol_type = other DNA
taactcttatatttttactaatagctatcgtaatagcacctttaatagctccttttgtcacaggatatgtcaata

SEQ ID NO: 463066 - DNA, 75 bp, synthetic construct
  source 1..75: mol_type = other DNA
tgcagtaataacaaaggaattttctcaggtgcaatctatattaaaaatggcatgaaatgtaataatgaatatatt

SEQ ID NO: 463067 - DNA, 75 bp, synthetic construct
  source 1..75: mol_type = other DNA
cacaataataggacttgagtcacgaataaaaaatcgtgaattagaaaatgcagtgcgagattatattgcgaataa

SEQ ID NO: 463068 - DNA, 75 bp, synthetic construct
  source 1..75: mol_type = other DNA
aaggagttaatcaggcaagttgcagaagtacccgatatggatggcgataaattgctatctatgcttatcgaggct

SEQ ID NO: 463069 - DNA, 75 bp, synthetic construct
  source 1..75: mol_type = other DNA
ctccaagcgagaaaaaaaccattatgacagcccttaagaagttggctagcattaatcaaataaatgcaaatcaat

SEQ ID NO: 463070 - DNA, 75 bp, synthetic construct
  source 1..75: mol_type = other DNA
cggataacggcgcaacggttgctccgacgatgaccacaaagccggacgggacggtggagatctctgtcaccagcc

SEQ ID NO: 463071 - DNA, 75 bp, synthetic construct
  source 1..75: mol_type = other DNA
actcatcaacagtaacagccctgaagcgcgcactctgaaagcaatgcagatggagcgcgacggtaaagatccaca

SEQ ID NO: 463072 - DNA, 75 bp, synthetic construct
  source 1..75: mol_type = other DNA
ataagaagcgttgcttccgttcctgatatggatgaaacgaaattgcttgagatattgatcgaagcaaatacaatt

SEQ ID NO: 463073 - DNA, 75 bp, synthetic construct
  source 1..75: mol_type = other DNA
gctgaacattaaaaaatcgcttgaacacatgtatcagtcatacgggaaaaactggccagtggctttttatccgta

SEQ ID NO: 463074 - DNA, 75 bp, synthetic construct
  source 1..75: mol_type = other DNA
tgatgacgctggaagacccgcttacttatctgaataccgatatgggcgaccgtctgaaaatggataaatatatta

SEQ ID NO: 463075 - DNA, 75 bp, synthetic construct
  source 1..75: mol_type = other DNA
tccttttctgtcaaagagaatacgtcatacacattctcagcaatttatactggtggcgaataccctaatagcgga

SEQ ID NO: 463076 - DNA, 75 bp, synthetic construct
  source 1..75: mol_type = other DNA
aatagccaagaaaaatcctgcatttttaaaaaaggttagaaagcttaaagaggatggacttgaaactcttacttg

SEQ ID NO: 463077 - DNA, 75 bp, synthetic construct
  source 1..75: mol_type = other DNA
catgacgatttctcaattacgattcaagataatggtatcggaatgaccctagaggaatgtcagaataagtttctg

SEQ ID NO: 463078 - DNA, 75 bp, synthetic construct
  source 1..75: mol_type = other DNA
caaggctccgttacagtagatatatttaatcctgaaactggaactcttatttccgggagtgaaacatttcccggg

SEQ ID NO: 463079 - DNA, 75 bp, synthetic construct
  source 1..75: mol_type = other DNA
gtgatgtttatcgccgatgtcaggacggcgaagatcgctgatctggtggtcacccgggataactcagtggctgac

SEQ ID NO: 463080 - DNA, 75 bp, synthetic construct
  source 1..75: mol_type = other DNA
accgccagtatcaacaacagcagcctgagccggaacgtgacgtttgtcgccgatgtcaggacggcgaagatcgct

SEQ ID NO: 463081 - DNA, 75 bp, synthetic construct
  source 1..75: mol_type = other DNA
gccgggcagacggtcagcgtgttggcggacaacggcgcaacggtgtctccggcggtcaccacagaaccagacggc

SEQ ID NO: 463082 - DNA, 75 bp, synthetic construct
  source 1..75: mol_type = other DNA
agacggtcagcgtgttggcggataacggcgcaacggtcgcttcgacggtcaccacagggccggacggcacggtgg

SEQ ID NO: 463083 - DNA, 75 bp, synthetic construct
  source 1..75: mol_type = other DNA
ggttaccgatgctaacggcaatgtgcttgccgggcagacggtcagcatgatggcaggcaacggtgcaacggttgc

SEQ ID NO: 463084 - DNA, 75 bp, synthetic construct
  source 1..75: mol_type = other DNA
acggcacggtggagatcagtgtcaccagtcagaccgccggaatcagtgcggtcagcgtcagcatcaacaacagca

SEQ ID NO: 463085 - DNA, 75 bp, synthetic construct
  source 1..75: mol_type = other DNA
gacggtcaccacgcagtcggacggtacggtggagttcagtgtcaccagccagacggcaggaaccagtacagtcac

SEQ ID NO: 463086 - DNA, 75 bp, synthetic construct
  source 1..75: mol_type = other DNA
ccctgatcctgccgaacgttaaaactattccatataccctgggggcattggaatcgccatcaacggtcgcggcac

SEQ ID NO: 463087 - DNA, 75 bp, synthetic construct
  source 1..75: mol_type = other DNA
cggcgaagatcgcggatctggtggtcattaaggacggctcagtggcagatggcgcgatggcgaacacgctgcggg

SEQ ID NO: 463088 - DNA, 75 bp, synthetic construct
  source 1..75: mol_type = other DNA
ctctgttaccagccagacggcggggatcagtacagtcaccgccagcatcaacaacagcagccagagccgggatgt

SEQ ID NO: 463089 - DNA, 75 bp, synthetic construct
  source 1..75: mol_type = other DNA
caaaacggtatatatcgctggggagagcataacggtgactgttgtacttagtgatgctcagggtaactttattac

SEQ ID NO: 463090 - DNA, 75 bp, synthetic construct
  source 1..75: mol_type = other DNA
ccagcggtatacagggtattcaggtcgatagtaatggtatggtgactttagaatatattctaaagaacgaaatta

SEQ ID NO: 463091 - DNA, 75 bp, synthetic construct
  source 1..75: mol_type = other DNA
cagccagacggcgggcatcagtacagttaccgcaaccatcaacaacagcagtctgagccagaacgtgacgtttat

SEQ ID NO: 463092 - DNA, 75 bp, synthetic construct
  source 1..75: mol_type = other DNA
ttaagacgtaagatgcgaaaagcagccatggacagaaactacctcgcgtcagtccttgcggggggcgggctttcg

SEQ ID NO: 463093 - DNA, 75 bp, synthetic construct
  source 1..75: mol_type = other DNA
gctcaggctgcagcggagaaacttcttcctgaggcccgcgagaacgccagctacaggcaggatgttgaggacctg

SEQ ID NO: 463094 - DNA, 75 bp, synthetic construct
  source 1..75: mol_type = other DNA
ggtgcagggcggccagtctgcgctggtggcgttcgctcagcaggggtctcaactcgctggtgcattcggtcccgg

SEQ ID NO: 463095 - DNA, 75 bp, synthetic construct
  source 1..75: mol_type = other DNA
aaaaatgtaacgtggataatagggagtaatattggtggtgaattttctgcttgggatgaaggttatgacctcctg

SEQ ID NO: 463096 - DNA, 75 bp, synthetic construct
  source 1..75: mol_type = other DNA
tgcgcaaacgcgttgctgaaattcacagcactgcgccagtcgtcgaggaagatgaagaaaaacaggaaattgtgt

SEQ ID NO: 463097 - DNA, 75 bp, synthetic construct
  source 1..75: mol_type = other DNA
atcatggggcgcggcagtggcaattggtgtcggggctatggcgggagtcatggcgctggccggtaagcgtaagaa

SEQ ID NO: 463098 - DNA, 75 bp, synthetic construct
  source 1..75: mol_type = other DNA
cggcacagttgcgtgccggctcaaaagcgaccgatgaagagaagcagaagatcggcgagctgaccggtcgactgt

SEQ ID NO: 463099 - DNA, 75 bp, synthetic construct
  source 1..75: mol_type = other DNA
atagagcacgagctttatcacatctgccaagcgacagatgagtttggcgcgccgaagttcacgcaagaggggctg

SEQ ID NO: 463100 - DNA, 75 bp, synthetic construct
  source 1..75: mol_type = other DNA
tatccgttccgaatcatcggggtaacggttaaaccaaagaaagcaggtggtggctggaacatcgaagagttctga

SEQ ID NO: 463101 - DNA, 75 bp, synthetic construct
  source 1..75: mol_type = other DNA
ccgagggtgacctggcttcgcgcaatcaggctatcccccaacggcacaagattgaagttctcatcaatgagggga

SEQ ID NO: 463102 - DNA, 75 bp, synthetic construct
  source 1..75: mol_type = other DNA
agtaaaagaagaaataagccgaatattcacaggtaaagattatcaggttttattcgtaagtaacaatgataagtg

SEQ ID NO: 463103 - DNA, 75 bp, synthetic construct
  source 1..75: mol_type = other DNA
atgctacatgatcacctggcagaatgtctggagaaaaaaggactgtaccggagagcagctgaacgatgggcaaaa

SEQ ID NO: 463104 - DNA, 75 bp, synthetic construct
  source 1..75: mol_type = other DNA
atgaatggataagccgacaaatcctcagcgataccggaagtacccataaccctgaccacattcacctgatggatg

SEQ ID NO: 463105 - DNA, 75 bp, synthetic construct
  source 1..75: mol_type = other DNA
gacaacaaacagcttccgtacctggcgcaggcctggatagagaatgagaagcaggaaaaaatcaccgccggaccg

SEQ ID NO: 463106 - DNA, 75 bp, synthetic construct
  source 1..75: mol_type = other DNA
ttttatcaaaaaaagccgctctggcagaaaaaaacatggatttagtttctgcatttgaactttggaaacaagcat

SEQ ID NO: 463107 - DNA, 75 bp, synthetic construct
  source 1..75: mol_type = other DNA
gtcagatcttacagttaacagaaacactacagcagatcgggcgcattggtggcagctcatccgaagaagctgcaa

SEQ ID NO: 463108 - DNA, 75 bp, synthetic construct
  source 1..75: mol_type = other DNA
atgagtgggaatcttgggaccatatactatgaggtcgacgcccgtacagggaagctattaacagcagggaaacaa

SEQ ID NO: 463109 - DNA, 75 bp, synthetic construct
  source 1..75: mol_type = other DNA
cgcagtgctggttgccacatgggttcatgattatgcgcctgcaattcgcgggctggtgctggcttctccggcctt

SEQ ID NO: 463110 - DNA, 75 bp, synthetic construct
  source 1..75: mol_type = other DNA
cttacaatgaacatatccttgagggggggcgttcgctcagacctcaatttttgccacatcagccgaattgccctg

SEQ ID NO: 463111 - DNA, 75 bp, synthetic construct
  source 1..75: mol_type = other DNA
atgtttgtagtgaagttcttagcatgtctaatgatgtttctcagtcgaaaggttatgaccgggatgaatataaca

SEQ ID NO: 463112 - DNA, 75 bp, synthetic construct
  source 1..75: mol_type = other DNA
atcagaacgccagtcgtgaagaagcgatggtcgaggcgaagcggatgctggatcaggtacgcattcctgaggcac

SEQ ID NO: 463113 - DNA, 75 bp, synthetic construct
  source 1..75: mol_type = other DNA
tcaacaacgcacccgctattgaacaaagaagttcaggctttaaaaaaactggttgagtatccgtacttcgtaccc

SEQ ID NO: 463114 - DNA, 75 bp, synthetic construct
  source 1..75: mol_type = other DNA
aaaaaataaccagattatttgttggttcgctgttacttagtggagcattttcctcagaagcggcagtgtctttag

SEQ ID NO: 463115 - DNA, 75 bp, synthetic construct
  source 1..75: mol_type = other DNA
aacacgcagatgagctactcgccacacagtggaaacaattcgcggcgcagggcggcattaacggcctgattagtg

SEQ ID NO: 463116 - DNA, 75 bp, synthetic construct
  source 1..75: mol_type = other DNA
ggtcggtcgcggtattaaaacgctggctgattattgccgcgagctatccggctggtttaaaacgctgaaatctga

SEQ ID NO: 463117 - DNA, 75 bp, synthetic construct
  source 1..75: mol_type = other DNA
ttggtgtatatattgatgctgctaatattctaaagtctgagtttcctggcattagattccagctactgggtgctt

SEQ ID NO: 463118 - DNA, 75 bp, synthetic construct
  source 1..75: mol_type = other DNA
gcataacccgagaggaccactgccttttcctgctcgatgagccggatacccacttgaaccctatctggaagctgc

SEQ ID NO: 463119 - DNA, 75 bp, synthetic construct
  source 1..75: mol_type = other DNA
atggcgatgaatgatccccgtttcccagttgatgtattgaaggcgaggctgaaacgtgatcctttgctggcgtta

SEQ ID NO: 463120 - DNA, 75 bp, synthetic construct
  source 1..75: mol_type = other DNA
tccttcggtggaaaccccatcggaaggctcaaaattttttggtttgatatggataacgaattcatcagtggtttt

SEQ ID NO: 463121 - DNA, 75 bp, synthetic construct
  source 1..75: mol_type = other DNA
tacctggaaaaatttgaaagccagagaattcataaaacggttgatgaactggcgacaacgatcgataaagaattg

SEQ ID NO: 463122 - DNA, 75 bp, synthetic construct
  source 1..75: mol_type = other DNA
aatcgcttcctggacacgcattaccgccgcggctggaatgtcaacatatccagggtgatggataacgccacacat

SEQ ID NO: 463123 - DNA, 75 bp, synthetic construct
  source 1..75: mol_type = other DNA
agatgtggaacccgggatattcacggtaatccacacatgggggagtgaccagcagtggcatccgcacatccattt

SEQ ID NO: 463124 - DNA, 75 bp, synthetic construct
  source 1..75: mol_type = other DNA
ccaatatagaagacggcagacgacatcagcccttgcaactcatgacaaaggcagagaatttaaaattcaacaggc

SEQ ID NO: 463125 - DNA, 75 bp, synthetic construct
  source 1..75: mol_type = other DNA
attaagcactatgcttgctctattggtgtcactgccatagcattgacattcatgtcatgggtgctgttgatcatt

SEQ ID NO: 463126 - DNA, 75 bp, synthetic construct
  source 1..75: mol_type = other DNA
acttaggggttccgcgcccatttcctccaaaagttccaccatttgaattaaactgtatattaatcattgtgttag

SEQ ID NO: 463127 - DNA, 75 bp, synthetic construct
  source 1..75: mol_type = other DNA
atatgacccaaacgacggttttatcgatctcagtgatgaaatatatcggctaatgctgaaggtgaaagtggcgat

SEQ ID NO: 463128 - DNA, 75 bp, synthetic construct
  source 1..75: mol_type = other DNA
ttgccagtggcctgatactgacaggctgcgctggcatgaaaagcgagtttgactgcaatgccacagccagcaatg

SEQ ID NO: 463129 - DNA, 75 bp, synthetic construct
  source 1..75: mol_type = other DNA
catttggtgcaatgttagtaattttaggggggaacgggtttaatggcaatgtgatatcaaaaatctatggttcaa

SEQ ID NO: 463130 - DNA, 75 bp, synthetic construct
  source 1..75: mol_type = other DNA
caacttacttcttatttcgaaagacttattcgcgagcaaaccggtgaagcacaaaggatatcaatgtgtacttat

SEQ ID NO: 463131 - DNA, 75 bp, synthetic construct
  source 1..75: mol_type = other DNA
ccagcgaccagcgaccagcgaccagcgaccagcgaccagcgaccagcggaccagcgaccagcgaccagcgaccag

SEQ ID NO: 463132 - DNA, 75 bp, synthetic construct
  source 1..75: mol_type = other DNA
ggtggaaaacaataccgggataaaaactgactggcgtggatataccgtccttccctatgccacatcttaccggga

SEQ ID NO: 463133 - DNA, 75 bp, synthetic construct
  source 1..75: mol_type = other DNA
ttgacgcaaacggtaatgcgaccctgaacgttgacaaccctgaagtcaaagccgacatcattcggaagatgaaat

SEQ ID NO: 463134 - DNA, 75 bp, synthetic construct
  source 1..75: mol_type = other DNA
ccagcaggattactggcaggaggacggctacgaacgcacactgagcgcgggctggaacgggaatatcgacggtat

SEQ ID NO: 463135 - DNA, 75 bp, synthetic construct
  source 1..75: mol_type = other DNA
tactcggacgattatcagtctggcgccgcagggctcggttttggcctcggtgaactcggttcgctgtcagccgat

SEQ ID NO: 463136 - DNA, 75 bp, synthetic construct
  source 1..75: mol_type = other DNA
tactcggaggattaccagtccggggccgcagggctcggttttggcctcggtgaactcggttcgctgtcagccgat

SEQ ID NO: 463137 - DNA, 75 bp, synthetic construct
  source 1..75: mol_type = other DNA
ctatgaaacatttatggataatagccttggagcaactgtaggtttaatcattactggacttgggatctctataat

SEQ ID NO: 463138 - DNA, 75 bp, synthetic construct
  source 1..75: mol_type = other DNA
caccggtagctggcggcaagcatatggtttatggaacaatcttaggcatgattgtaggatggatttatattcaaa

SEQ ID NO: 463139 - DNA, 75 bp, synthetic construct
  source 1..75: mol_type = other DNA
ccttaatgatgttatggggcagataagaaatgtgaccacggtatttgcagcacttcgcggtgtgacggaggtgtg

SEQ ID NO: 463140 - DNA, 75 bp, synthetic construct
  source 1..75: mol_type = other DNA
aattagatgacagtttttattgcaatcaatattgcaatcttgaattcaaaccttttgaaattatcacgctacgat

SEQ ID NO: 463141 - DNA, 75 bp, synthetic construct
  source 1..75: mol_type = other DNA
atcgtaagattatatgagagttatggattagaaatttcagccatgctttcgtgggtatgtaattatcactacgtt

SEQ ID NO: 463142 - DNA, 75 bp, synthetic construct
  source 1..75: mol_type = other DNA
ggaaaatgaaacattagatgatcttgaagaacttatcagcaacgaaactggcgaagttcacaaattatcaatgtg

SEQ ID NO: 463143 - DNA, 75 bp, synthetic construct
  source 1..75: mol_type = other DNA
tgaggctggctgtacctggcagtggtcattgacctctgttcacgttccgttattggctggtccatgtcgccacgt

SEQ ID NO: 463144 - DNA, 75 bp, synthetic construct
  source 1..75: mol_type = other DNA
gacctgtatcgtaaagttcagtcatccggaaccagagatgtcagtcaggaaattcgtgagactgaagatttactg

SEQ ID NO: 463145 - DNA, 75 bp, synthetic construct
  source 1..75: mol_type = other DNA
acttccccctcttttcccgctgctaaaaaatgcctttggtcagacaaattgttctttgttagtagcttcaggtgt

SEQ ID NO: 463146 - DNA, 75 bp, synthetic construct
  source 1..75: mol_type = other DNA
cgcaagggatccgaatgaattacatcggtgtgcaggcgcaaccttcactccgctattttcatattgatcacttta

SEQ ID NO: 463147 - DNA, 75 bp, synthetic construct
  source 1..75: mol_type = other DNA
gtcaaaaggaagtgcttttggtgcggtgactctggctttgcttttaaataatgccccaagttctgtagcggtaac

SEQ ID NO: 463148 - DNA, 75 bp, synthetic construct
  source 1..75: mol_type = other DNA
gatgcgcaaggaagacgccatctacggtggcgaaatgagcgcccaccattacttccgtgatttcgcttactgcga

SEQ ID NO: 463149 - DNA, 75 bp, synthetic construct
  source 1..75: mol_type = other DNA
gcatgtaactagcgcttatcccatttctgaaaaacagaaaggtaaatcagtgaaatttttggtaatgactccaac

SEQ ID NO: 463150 - DNA, 75 bp, synthetic construct
  source 1..75: mol_type = other DNA
aaaatagtcagaaaacttataccatttggtcaaaccattcttcgcaaagtaactttctccaatatagagagttaa

SEQ ID NO: 463151 - DNA, 75 bp, synthetic construct
  source 1..75: mol_type = other DNA
gaaaaagcgagcgatttatgtttggaacttatcgatacgcaagatgatgatggctatattggaatttatgattca

SEQ ID NO: 463152 - DNA, 75 bp, synthetic construct
  source 1..75: mol_type = other DNA
tagatttactagatgaacactacccgcctatattttgtttatataaagatcctattagattaatacatttatatg

SEQ ID NO: 463153 - DNA, 75 bp, synthetic construct
  source 1..75: mol_type = other DNA
ctgcgttactacagcgaagagccttggtgtcgcatcgagatggaaggcatgggacgcggctgctggcccgatgag

SEQ ID NO: 463154 - DNA, 75 bp, synthetic construct
  source 1..75: mol_type = other DNA
gccccgcagcctgcgtctagcacgctggtactctgtgcccatcacttgtgcgtcgatatgcactcttggtattta

SEQ ID NO: 463155 - DNA, 75 bp, synthetic construct
  source 1..75: mol_type = other DNA
aggcagcacgggcgactcatatgacaatgcgatggcagaaagtatcaacgggttgtacaaagcggaggtgatcca

SEQ ID NO: 463156 - DNA, 75 bp, synthetic construct
  source 1..75: mol_type = other DNA
cagacgaacgaagaaaaacaatcgttaatgtaccacgcgcctaaagaatctcgtcccttctgccagcaccgttat

SEQ ID NO: 463157 - DNA, 75 bp, synthetic construct
  source 1..75: mol_type = other DNA
atctatctggtgcatacaatatgttttctgagttctggaatgttgctgtctcagctgcgcctaaggtggatgatt

SEQ ID NO: 463158 - DNA, 75 bp, synthetic construct
  source 1..75: mol_type = other DNA
aacgagaagcccttacaaacatgctcgcaaggaaaggtgttgagactgtgctacgcttgttagataaggaaactc

SEQ ID NO: 463159 - DNA, 75 bp, synthetic construct
  source 1..75: mol_type = other DNA
ggagataatgtaacaattaaaagtggtgtttatatttgggatggtgttattcttgaggataacgtatttataggg

SEQ ID NO: 463160 - DNA, 75 bp, synthetic construct
  source 1..75: mol_type = other DNA
gccaaagccgcagccgaagcgcagaaaaaagccgaggcagcagctgcggcgctgaagaagaaagcggaagcggca

SEQ ID NO: 463161 - DNA, 75 bp, synthetic construct
  source 1..75: mol_type = other DNA
ctggaaacgcaccaggcggttgagcatattcgtgaggtctacaatttagcttccagcctgcgggctgactttcgt

SEQ ID NO: 463162 - DNA, 75 bp, synthetic construct
  source 1..75: mol_type = other DNA
gtaagttcacccgctggtacatcaccctcattatctttatggcctgcctactgctcattatcaccaccctgggca

SEQ ID NO: 463163 - DNA, 75 bp, synthetic construct
  source 1..75: mol_type = other DNA
ggcgataatgtcactataaaatctggagtctatatatgggatggagtcataattgaagataatgtttttataggt

SEQ ID NO: 463164 - DNA, 75 bp, synthetic construct
  source 1..75: mol_type = other DNA
gaacactcagcaaattaaaacactagaaactctccgcgacaccctgcttcccaaactgatgagtggtgaagtacg

SEQ ID NO: 463165 - DNA, 75 bp, synthetic construct
  source 1..75: mol_type = other DNA
atttcggttgaggattatccactttggatgacccgcggctatccagaagtcaacgatgttgttttaaccaccgag

SEQ ID NO: 463166 - DNA, 75 bp, synthetic construct
  source 1..75: mol_type = other DNA
aagggtctggcaatattcagttatattaccgggtgctgtaattggtgatgagtgtaacatatgtgcacatacact

SEQ ID NO: 463167 - DNA, 75 bp, synthetic construct
  source 1..75: mol_type = other DNA
gctggctcagtcgttactaaagatgttcctgatgatgttattgttattggaaatccggctaaaataatacgatct

SEQ ID NO: 463168 - DNA, 75 bp, synthetic construct
  source 1..75: mol_type = other DNA
atgactatcacattacaggcagtaaacgagctcatcgccgctctggagagcgctggcgagctgtcgatcagagag

SEQ ID NO: 463169 - DNA, 75 bp, synthetic construct
  source 1..75: mol_type = other DNA
gataaaaatttatgataaaaataataaggaaatcaacgttaacggtggtgaactaccgacagatatgggtaaatc

SEQ ID NO: 463170 - DNA, 75 bp, synthetic construct
  source 1..75: mol_type = other DNA
tgtaactttttcagctgctcctgcgagccttactggagctcgcccagccccggggcaatttactgcaacagcgac

SEQ ID NO: 463171 - DNA, 75 bp, synthetic construct
  source 1..75: mol_type = other DNA
tacatttccggagtatcagtcgatttgtttacttaaccgccatgaccaaagccggcagtaatgtcggctttttac

SEQ ID NO: 463172 - DNA, 75 bp, synthetic construct
  source 1..75: mol_type = other DNA
cggatgggagtcagtcccagtgaatggcgaaaaacatttaacggaacgccggaaggcaatattccggcaggtaaa

SEQ ID NO: 463173 - DNA, 75 bp, synthetic construct
  source 1..75: mol_type = other DNA
caccccgcagggagaaaagcgacttctgacaggttcagcaaagcgcggggcatattacgccgtaaacgcgctgga

SEQ ID NO: 463174 - DNA, 75 bp, synthetic construct
  source 1..75: mol_type = other DNA
acaatctcaatcagcagtcgatgggctgtttgtttaatgaacgcatttgttataaaattatccgtaaagtctata

SEQ ID NO: 463175 - DNA, 75 bp, synthetic construct
  source 1..75: mol_type = other DNA
aaacaacgcagaaaccgcgcggggaatgggccgctcgccggagatatggccgggacggcgaattgtgctgacggg

SEQ ID NO: 463176 - DNA, 75 bp, synthetic construct
  source 1..75: mol_type = other DNA
gtggggcgcttatcgtctggaagtcaaagcgccgaatgaagcggtcagtagtgttcgtttctgggctggctatag

SEQ ID NO: 463177 - DNA, 75 bp, synthetic construct
  source 1..75: mol_type = other DNA
agaaggtaatgaaaagtccattgaggctctgaccaggatatcaccagtagcctggcaacacattttgctgaacgg

SEQ ID NO: 463178 - DNA, 75 bp, synthetic construct
  source 1..75: mol_type = other DNA
agtgacaacctggtggatgcgatgtttttccatatgaaacagcttgaggatgagagccgcagcgtggccagccaa

SEQ ID NO: 463179 - DNA, 75 bp, synthetic construct
  source 1..75: mol_type = other DNA
ttgaacagcaggcagccaacattgttcaccgggatgtaacccccggctttgttgccacggagctgattatctggc

SEQ ID NO: 463180 - DNA, 75 bp, synthetic construct
  source 1..75: mol_type = other DNA
tgcttttcccggcggttcatctggacgtgaacgtgctttatgttgaggacgagcggattatcacctcagccggta

SEQ ID NO: 463181 - DNA, 75 bp, synthetic construct
  source 1..75: mol_type = other DNA
tgaaataggcgctgcaattgcttatgtatttgctgagtttatcttacttattctcatacttagaatttataaagt

SEQ ID NO: 463182 - DNA, 75 bp, synthetic construct
  source 1..75: mol_type = other DNA
cggtccttctctggctgattacgcccctcgccttcgcgcaactgccgggtatcaccagccagccgctacctggcg

SEQ ID NO: 463183 - DNA, 75 bp, synthetic construct
  source 1..75: mol_type = other DNA
tcaaaaaaggtgatgatgcctaccgtgcagagtttaaagctaagtattcaactgcaatagagcgctgttaccaac

SEQ ID NO: 463184 - DNA, 75 bp, synthetic construct
  source 1..75: mol_type = other DNA
gctgattctggcttccgtctgggacgactctcctggcgacgaatggtttggcagtgccatgcgtaacagtgtgaa

SEQ ID NO: 463185 - DNA, 75 bp, synthetic construct
  source 1..75: mol_type = other DNA
ggcaactatcctgattgagaaagggattgaagataaaaaagccatcgaatggtcggcaaaaattgctgattatct

SEQ ID NO: 463186 - DNA, 75 bp, synthetic construct
  source 1..75: mol_type = other DNA
gatctatcggttaaatcagcacagctgctggaaggcgaattcctcggactttacggcgagaaagtaaacgtaaca

SEQ ID NO: 463187 - DNA, 75 bp, synthetic construct
  source 1..75: mol_type = other DNA
aattgctctcaacgatgaacagaacttattttgtaccattacttttaaaaacgttatcgatgaaaataaaacata

SEQ ID NO: 463188 - DNA, 75 bp, synthetic construct
  source 1..75: mol_type = other DNA
cccggaaagttgggatcgtggcattgatgctttttatacctcctataatttatagccagtatcgctcttatgaca

SEQ ID NO: 463189 - DNA, 75 bp, synthetic construct
  source 1..75: mol_type = other DNA
aaaagcatggcagcgtggtgcagaagtggtgggactttgtctcggtgcttacgtacttgcctattccggcttact

SEQ ID NO: 463190 - DNA, 75 bp, synthetic construct
  source 1..75: mol_type = other DNA
tactggcagatggcatcgacgttgctatccgcatcggccgtctgcaggactccgacctcgttgctcggcggctcg

SEQ ID NO: 463191 - DNA, 75 bp, synthetic construct
  source 1..75: mol_type = other DNA
ataacggatatgaatatccgccatgtctgtgtatgcttaagtattctggtttgcgctgaggtgatgagctgtatt

SEQ ID NO: 463192 - DNA, 75 bp, synthetic construct
  source 1..75: mol_type = other DNA
agttggagccagtgttgcatctttagcaggcgcagcaggaacggcaggggctgcgtcgatctcatccggaatggc

SEQ ID NO: 463193 - DNA, 75 bp, synthetic construct
  source 1..75: mol_type = other DNA
tcaaaccgcttcagcaggcgggcgtgtatctggctgtgatgaatcaggctggacgttacgattacagtaatcccg

SEQ ID NO: 463194 - DNA, 75 bp, synthetic construct
  source 1..75: mol_type = other DNA
atccccgtacgttatccccagacatttgcccaggccccctgtcttcgtccatttattaagctggagttgatggaa

SEQ ID NO: 463195 - DNA, 75 bp, synthetic construct
  source 1..75: mol_type = other DNA
gcactgctctggcagcatgagaccagacatgcgtacaacgcgcaggggctggcgaaccgctgtataccggacagc

SEQ ID NO: 463196 - DNA, 75 bp, synthetic construct
  source 1..75: mol_type = other DNA
tcgacagcagtctttcgctgttgctgctgatgccactgagagctgtgaggaccgtgtcgcgctcacatggaacaa

SEQ ID NO: 463197 - DNA, 75 bp, synthetic construct
  source 1..75: mol_type = other DNA
accgctcacaggcattgttccgtgagttgtatcccgcattaaaactgattcagtctggctattccggcatatgcc

SEQ ID NO: 463198 - DNA, 75 bp, synthetic construct
  source 1..75: mol_type = other DNA
cttataaatttgcaaacaagctactgattggtttgtttgcatgcatactatacagaataattatcatcgcaatta

SEQ ID NO: 463199 - DNA, 75 bp, synthetic construct
  source 1..75: mol_type = other DNA
gatttattatggtcgtttaatacaaccaataaaagtataaatgtttactctaaatgtattagtggtaaggcggtt

SEQ ID NO: 463200 - DNA, 75 bp, synthetic construct
  source 1..75: mol_type = other DNA
tgctagtgatgacattatggtatcgaatagaattgaactacaagttaatgctttaagaaaagaaccagaggccat

SEQ ID NO: 463201 - DNA, 75 bp, synthetic construct
  source 1..75: mol_type = other DNA
aacagtgcgtggtgcattaccgtttaccggaacaggaaaaccagccgtcagtgatcctggtgaaccaggaatgca

SEQ ID NO: 463202 - DNA, 75 bp, synthetic construct
  source 1..75: mol_type = other DNA
atgctgaaagcctggggcgtcaaaacggacgtcttcccggcactggcagcactgccgccggatcaaccactggat

SEQ ID NO: 463203 - DNA, 75 bp, synthetic construct
  source 1..75: mol_type = other DNA
atggcatttaaatcaaagcttcagaatggcgaagatttgaaagatgccaccctgcatcccgacgatgaatacggc

SEQ ID NO: 463204 - DNA, 75 bp, synthetic construct
  source 1..75: mol_type = other DNA
actggctccggtatgctggatagaatactgcgtattgcgactgaaatgatgacgaatgtggaagtaaacctgacg

SEQ ID NO: 463205 - DNA, 75 bp, synthetic construct
  source 1..75: mol_type = other DNA
cccgcagaggtctggttgttgccccggccggatgtgggaaaacacatctgataaccgaagtgctcagtgttgccc

SEQ ID NO: 463206 - DNA, 75 bp, synthetic construct
  source 1..75: mol_type = other DNA
tgaggagtccggcctgtattacaaccgccaccgctattatgacccgctgcaggggcggtatatcactcaggatcc

SEQ ID NO: 463207 - DNA, 75 bp, synthetic construct
  source 1..75: mol_type = other DNA
tagtaacgactctgaatacttacaggatgaatgacatcagtataaaacaagccaggttacagagtaagtctgact

SEQ ID NO: 463208 - DNA, 75 bp, synthetic construct
  source 1..75: mol_type = other DNA
ctatgttggtttttctcttggatggagcagggtactggaagcttacagaaatacaaaagaggatatatattctgc

SEQ ID NO: 463209 - DNA, 75 bp, synthetic construct
  source 1..75: mol_type = other DNA
tcatactcaactatgatgccaaagcctggcacagggatgtgaactatgattcacctgataatgaatcatattatt

SEQ ID NO: 463210 - DNA, 75 bp, synthetic construct
  source 1..75: mol_type = other DNA
gttcgaataagatataataagatactgagtgaaacaaatacatcttttaatcttgcaagttatcagtatgcatca

SEQ ID NO: 463211 - DNA, 75 bp, synthetic construct
  source 1..75: mol_type = other DNA
aggccagcagtaattatttctctggagcagttggtttaggttttaacttatataacttgggggctgtttctttag

SEQ ID NO: 463212 - DNA, 75 bp, synthetic construct
  source 1..75: mol_type = other DNA
ttacctggtgaatatcttgttactgtttctgttaatgacaaaagaaagaagcagggagattacaaactagacttt

SEQ ID NO: 463213 - DNA, 75 bp, synthetic construct
  source 1..75: mol_type = other DNA
gggctggcgccaaagcgggtgaggctgagcatccattgtgttgcatggcgactgtctgatctgctgtggtggatt

SEQ ID NO: 463214 - DNA, 75 bp, synthetic construct
  source 1..75: mol_type = other DNA
agttagagagcaatctggcggagctgcgtggcggcagcgattacgcgcaacgtaaaatcaagatagccgctgccc

SEQ ID NO: 463215 - DNA, 75 bp, synthetic construct
  source 1..75: mol_type = other DNA
tttataaatgaaataaaaatcgcctttgcaaatataaaaaacaaaggcatcaaggccaccatcagccaattatta

SEQ ID NO: 463216 - DNA, 75 bp, synthetic construct
  source 1..75: mol_type = other DNA
aaaaaaagtgattatatctttgattcggcatacgttaatggtagtgacgtaactcgctttaacgatggccagcaa

SEQ ID NO: 463217 - DNA, 75 bp, synthetic construct
  source 1..75: mol_type = other DNA
agtcacttgtgctttatgttccaaaccaatcgttaataaataacagtagcgagttggctcatgagtcacagtggg

SEQ ID NO: 463218 - DNA, 75 bp, synthetic construct
  source 1..75: mol_type = other DNA
tccggcttatgcgtctgactgaagacgtaccagatgtgagacaggaatccatctcttatttgtgctgtggtttca

SEQ ID NO: 463219 - DNA, 75 bp, synthetic construct
  source 1..75: mol_type = other DNA
ctccacaggagaaatcaatcctcaaagtgacatacctcatatatggcggacgatcggaatgaataatttatcatc

SEQ ID NO: 463220 - DNA, 75 bp, synthetic construct
  source 1..75: mol_type = other DNA
ttgttcgcgacgtatacaaaacggatgaatttattcctttgcatgcgccagtgtttaatggcaacgaaaaaaaat

SEQ ID NO: 463221 - DNA, 75 bp, synthetic construct
  source 1..75: mol_type = other DNA
cccatgttcaaaaactctttgtgtggagaattgacttactctgaatttattgaagcgcgtttagtaaatttacct

SEQ ID NO: 463222 - DNA, 75 bp, synthetic construct
  source 1..75: mol_type = other DNA
atgctgtcagtgatgctctggttgcgcgattacagaaagtcgtggtcggtgatcctgcgcaggaaggcgtgaaaa

SEQ ID NO: 463223 - DNA, 75 bp, synthetic construct
  source 1..75: mol_type = other DNA
atccttgttcaacactcaggttatagccgtagatacttacagttactcttctgtaaagagctgggcattccaata

SEQ ID NO: 463224 - DNA, 75 bp, synthetic construct
  source 1..75: mol_type = other DNA
gtcgatgatttcgaacgtaaaatggaatcttacaccggaacggcgagagcggttgcaacggttaacggaacagcc

SEQ ID NO: 463225 - DNA, 75 bp, synthetic construct
  source 1..75: mol_type = other DNA
aggttcgtgaaagaacctgaatatgctcagtcaaacttctggctgaatgccatcatttgtgaaaacatggatgcc

SEQ ID NO: 463226 - DNA, 75 bp, synthetic construct
  source 1..75: mol_type = other DNA
tttttctggacggatgccgataacaacgatatcccggttaccgcagatgaattgatcgcactgagcaatgctgca

SEQ ID NO: 463227 - DNA, 75 bp, synthetic construct
  source 1..75: mol_type = other DNA
attccgatgggacttggttaatatcaattgatggaaatttatcgtttcggaaagtgtatcgcatgcctgctggtc

SEQ ID NO: 463228 - DNA, 75 bp, synthetic construct
  source 1..75: mol_type = other DNA
ttctgaatttccagtattcggatcataattatggtgctgttttacaagccgcagcaatagaacaatttctgaaaa

SEQ ID NO: 463229 - DNA, 75 bp, synthetic construct
  source 1..75: mol_type = other DNA
agatgtcaccccggatcaaccggagtttgcgctgtttattcgtgaagttgtgcgtgagatgaccacaaaagccgg

SEQ ID NO: 463230 - DNA, 75 bp, synthetic construct
  source 1..75: mol_type = other DNA
ctcgcagactggacgggttcgtcaacgcaatttttccacgcgtcgcacacccaatggatattaaaggttactggc

SEQ ID NO: 463231 - DNA, 75 bp, synthetic construct
  source 1..75: mol_type = other DNA
tacactggaaatcttcttacatcggatgctctatcctattgcgcacaacatcgcctatgatctgtatcgccagca

SEQ ID NO: 463232 - DNA, 75 bp, synthetic construct
  source 1..75: mol_type = other DNA
tcgtcgatttccttcgggttaaccagaccataacccctcgtcaggttcagagcctgctgggatgcgactgcaaga

SEQ ID NO: 463233 - DNA, 75 bp, synthetic construct
  source 1..75: mol_type = other DNA
ctgactggtctgcaaacagtttatctgtacacggcagggcttctgtgtgatatcgtttttcatatcgaggggggg

SEQ ID NO: 463234 - DNA, 75 bp, synthetic construct
  source 1..75: mol_type = other DNA
ccattactggctaactcccctgcttagttacctactaaaccatggcggtgaaggtgcccaccgatacctgcaata

SEQ ID NO: 463235 - DNA, 75 bp, synthetic construct
  source 1..75: mol_type = other DNA
ggactgggccaacacctgtcgcgtcatcatgaaacagaatctatttcattaccaacaaatggaaaacaagcctct

SEQ ID NO: 463236 - DNA, 75 bp, synthetic construct
  source 1..75: mol_type = other DNA
attacctgctgaaaaccgagcgcgattttggtattcgcgttctcgaccgctatgcaatgtatctgaaatcactgc

SEQ ID NO: 463237 - DNA, 75 bp, synthetic construct
  source 1..75: mol_type = other DNA
tccgtccgttattggcatttaccagcgcccatcctctgcaatcgtcgatgtgattgccgacagcatccgcatcac

SEQ ID NO: 463238 - DNA, 75 bp, synthetic construct
  source 1..75: mol_type = other DNA
acatgggaaagctgggatctgaatctgtggggcggcaatgttcttaccggaattaaagtacaggatgtcggtaag

SEQ ID NO: 463239 - DNA, 75 bp, synthetic construct
  source 1..75: mol_type = other DNA
aacagtcttggtcccgctgacgttaatgccctggcgaaggatcagaatctcgccgacctggagaataagggaacc

SEQ ID NO: 463240 - DNA, 75 bp, synthetic construct
  source 1..75: mol_type = other DNA
aacgatttggtaccacagatcgcgtttatcgccgtgcagtaaaaactctggtagatgccggtctggttattcgta

SEQ ID NO: 463241 - DNA, 75 bp, synthetic construct
  source 1..75: mol_type = other DNA
cgcaagtccaagcgttagagcttattgctcaaaattcgaatttttcgagttaccatgaacttattcaggttgcaa

SEQ ID NO: 463242 - DNA, 75 bp, synthetic construct
  source 1..75: mol_type = other DNA
caacggaagatgccaccggcagccggaaaaccatgacgtggagccgttacggtcagttgctgagcttcaccgact

SEQ ID NO: 463243 - DNA, 75 bp, synthetic construct
  source 1..75: mol_type = other DNA
attttggtagtaggaatagcaccatgcacacagcgatgaaaaataaatatcacgccataaaacttgacaaattat

SEQ ID NO: 463244 - DNA, 75 bp, synthetic construct
  source 1..75: mol_type = other DNA
atggcttattaattttaagtatattatatcttgttggttgtggtacaggtacggttatttctaaggacggtgtga

SEQ ID NO: 463245 - DNA, 75 bp, synthetic construct
  source 1..75: mol_type = other DNA
cccgcacacttcccctttctcatatgatttatcgggacagtgagatcgaccaggagaaagctgaaaagctgattg

SEQ ID NO: 463246 - DNA, 75 bp, synthetic construct
  source 1..75: mol_type = other DNA
agctcaattccggacactacatgaaagatcgaaaactaaccaaacgccggatgagagtttcgaaatgctattgta

SEQ ID NO: 463247 - DNA, 75 bp, synthetic construct
  source 1..75: mol_type = other DNA
actgatgcagcaaatttattgaaacctgcccttgcccgaggtacattgcgtgttattgctgctacaacatggagt

SEQ ID NO: 463248 - DNA, 75 bp, synthetic construct
  source 1..75: mol_type = other DNA
ctaatatgattcctgagaatttagatgcattaatgactgttcttgatactcaaagtcagcaactctcactaaacc

SEQ ID NO: 463249 - DNA, 75 bp, synthetic construct
  source 1..75: mol_type = other DNA
tagaatggaagaaatatccattcttcttcaggatccgaaatacgatacccctaatatgattcctgagaatttaga

SEQ ID NO: 463250 - DNA, 75 bp, synthetic construct
  source 1..75: mol_type = other DNA
ttgttttgttagatcagatccgtggtataattgatgaccgctatccgttaactcagaatctaagaactaaaattg

SEQ ID NO: 463251 - DNA, 75 bp, synthetic construct
  source 1..75: mol_type = other DNA
agttacagctacagcgacaccggcaggctgaccggcgtccacaccacggcagcgaaccttgatatccgcatcccg

SEQ ID NO: 463252 - DNA, 75 bp, synthetic construct
  source 1..75: mol_type = other DNA
gccgttacggtcagttgctgagctttaccgactgttccggttatgtaacccgctatgaccatgaccgttttggtc

SEQ ID NO: 463253 - DNA, 75 bp, synthetic construct
  source 1..75: mol_type = other DNA
ttcaggaaggagtgtccgttaaactcaggctacctcatccgcaatatgatacagatatcgaatcccgggcaaacg

SEQ ID NO: 463254 - DNA, 75 bp, synthetic construct
  source 1..75: mol_type = other DNA
ttagcaagttaacaccatctgcaaaaaaacatcttgatatggctatcaatctcgctgtatccagacgtcattatg

SEQ ID NO: 463255 - DNA, 75 bp, synthetic construct
  source 1..75: mol_type = other DNA
gatcgttgtcggcatcgaaaaaagcttccatggcaacgcgatcaaggctgtggaaaaaatcgcccatcaaatcaa

SEQ ID NO: 463256 - DNA, 75 bp, synthetic construct
  source 1..75: mol_type = other DNA
atgaaaaaaaataatacacaacaaataaaatgcgtcatattcaactcattgcgtgcactaggccatgataaagaa

SEQ ID NO: 463257 - DNA, 75 bp, synthetic construct
  source 1..75: mol_type = other DNA
tttacggacgcttttacctgattaatttcgataacgtcaaagcagtctccacgtctgacagtaaagaatgtggcg

SEQ ID NO: 463258 - DNA, 75 bp, synthetic construct
  source 1..75: mol_type = other DNA
aactcacgctgcattgcgcactatgtattgccgaagcaaagcttacagcaagccgtcactgttatttcggcagtt

SEQ ID NO: 463259 - DNA, 75 bp, synthetic construct
  source 1..75: mol_type = other DNA
gtttatcggtataaccgtatcgcgcttgataccaatacgatggggaattccatcgatgttgaaaaaaatattagc

SEQ ID NO: 463260 - DNA, 75 bp, synthetic construct
  source 1..75: mol_type = other DNA
attgccatcggtcaagggaataaagctgacggcgcaaatgctatcgcgctgggtaatggtagtattacaggtggt

SEQ ID NO: 463261 - DNA, 75 bp, synthetic construct
  source 1..75: mol_type = other DNA
tagaggacaagtaaataaaaatagtgcggtctcacaaaatatggtgatgactactggtgatgtaattgcatcctc

SEQ ID NO: 463262 - DNA, 75 bp, synthetic construct
  source 1..75: mol_type = other DNA
tactcgcctttgccgcgtggagtggtaccggaaaaactacgcttttgaaaaaaactgatcccggcattatgcgcc

SEQ ID NO: 463263 - DNA, 75 bp, synthetic construct
  source 1..75: mol_type = other DNA
ctgtggcgtgaatattcgcccgtcacgtatgccagaaccgatgcactgttgttctggctgggtattgatttctcg

SEQ ID NO: 463264 - DNA, 75 bp, synthetic construct
  source 1..75: mol_type = other DNA
agtttggcgccacaattaccatgggaaattactattaattatgctgctatgatactaattacaacattggttaat

SEQ ID NO: 463265 - DNA, 75 bp, synthetic construct
  source 1..75: mol_type = other DNA
cgaagataccggtcttgctattggtgatcctgaagcctgggatccggctgtcaggggtaacactatttttctgcg

SEQ ID NO: 463266 - DNA, 75 bp, synthetic construct
  source 1..75: mol_type = other DNA
gattctatgttcactcgccttggtagttttaacttttatacattcaactcttcccccagtgactccagaaatcat

SEQ ID NO: 463267 - DNA, 75 bp, synthetic construct
  source 1..75: mol_type = other DNA
gattgcagtaggccgcaacagtgctgcggcaggcgtagacagcctcgcattaggtagacaatcacttgccagtgc

SEQ ID NO: 463268 - DNA, 75 bp, synthetic construct
  source 1..75: mol_type = other DNA
cactaacatcaccaacctgactgacgctgttgacagtctcggtgatgactctctgctgtggaacgctactgcggg

SEQ ID NO: 463269 - DNA, 75 bp, synthetic construct
  source 1..75: mol_type = other DNA
atgatctgtatggcagataagctcaatcagcttggcctgttcaaatggtttgccgtcacaacctcggcgctgttc

SEQ ID NO: 463270 - DNA, 75 bp, synthetic construct
  source 1..75: mol_type = other DNA
ctcctttcggtcaataatagcagaacaaaagaaagagccagaaatgacggtcagatattatatcagttctgctga

SEQ ID NO: 463271 - DNA, 75 bp, synthetic construct
  source 1..75: mol_type = other DNA
tgactgtatatatcaatactggcgagtcgcttgatgtaatcaccggcatgtacaactcaatgaaggaatgcatgg

SEQ ID NO: 463272 - DNA, 75 bp, synthetic construct
  source 1..75: mol_type = other DNA
aaatctgccaattcattaatcgggagcgtgtattaacgctcagtgtcgctgcggaagggatggtgtggtctgcaa

SEQ ID NO: 463273 - DNA, 75 bp, synthetic construct
  source 1..75: mol_type = other DNA
cactgcggttatgcattttgctggcgactgcgaaacggcattcgcattagcggtgaagtttgccctcgcccagct

SEQ ID NO: 463274 - DNA, 75 bp, synthetic construct
  source 1..75: mol_type = other DNA
tgactatcaacaggcacaagtcagcggattacagatatcattattacattacagtttactctgcatggtatcgcc

SEQ ID NO: 463275 - DNA, 75 bp, synthetic construct
  source 1..75: mol_type = other DNA
gccgctgggaattggtgcatttattgtaggactgtcttgtgcaattgcaactggctatctgaaagataatagcat

SEQ ID NO: 463276 - DNA, 75 bp, synthetic construct
  source 1..75: mol_type = other DNA
gggtcaaacaagcactggaaaaaaatcaaccaggaaagccagtacgggtgataaatcctgatgatgaatcgatac

SEQ ID NO: 463277 - DNA, 75 bp, synthetic construct
  source 1..75: mol_type = other DNA
cattaatgaagcgctgacgcggggggatttttcgctcgcgcctccgtatccgtttgtgcagctggccactctgaa

SEQ ID NO: 463278 - DNA, 75 bp, synthetic construct
  source 1..75: mol_type = other DNA
atgcgtgttattcgctggtttggttgcctcgggatggcagcatcaagtttagcgttttactacatgccgcaatac

SEQ ID NO: 463279 - DNA, 75 bp, synthetic construct
  source 1..75: mol_type = other DNA
agaagaaggctgcgttactggctgaagcgcaggataaaataagtctctggcagacagaattgcgactggacatca

SEQ ID NO: 463280 - DNA, 75 bp, synthetic construct
  source 1..75: mol_type = other DNA
ataataggaccaagtaaatttgatagtactgcagatgctgcgttagatgctttgaaagaaacgcagaatagatct

SEQ ID NO: 463281 - DNA, 75 bp, synthetic construct
  source 1..75: mol_type = other DNA
cagatacggatattgctaaagaaaaagagcagacagatgccttaaaacgtcaggctgatgaacttagaagagaac

SEQ ID NO: 463282 - DNA, 75 bp, synthetic construct
  source 1..75: mol_type = other DNA
atgctgatgtcagtattgccattaccggctacggcggaccggagggcggtgaagatggtacgccagcgggtaccg

SEQ ID NO: 463283 - DNA, 75 bp, synthetic construct
  source 1..75: mol_type = other DNA
aacaacccgttaagcaaaggtgttgtactcgctgatgaagtgggcttagggaaaactattgaagcaggcttagta

SEQ ID NO: 463284 - DNA, 75 bp, synthetic construct
  source 1..75: mol_type = other DNA
aatctgctcattgagtatctgcatcaaaggcttgtcattactgggatttctgtaataacgatttttattgtgtac

SEQ ID NO: 463285 - DNA, 75 bp, synthetic construct
  source 1..75: mol_type = other DNA
cgcacctacagcagctaccggactacgactcctgccccggtgggcgttttcggccccggctggaaagcgccttct

SEQ ID NO: 463286 - DNA, 75 bp, synthetic construct
  source 1..75: mol_type = other DNA
atgttgcatttattctggatgcgtttaaagaggtcgattatgagattccatcaaatcgaaatattctgaaggtca

SEQ ID NO: 463287 - DNA, 75 bp, synthetic construct
  source 1..75: mol_type = other DNA
gtcgagactaggcatcgaaaagcaagttaacgatcgtaatctcagcttcttcgagcaagaggtaaacaagttaga

SEQ ID NO: 463288 - DNA, 75 bp, synthetic construct
  source 1..75: mol_type = other DNA
actgcgtttctattatgtcctatcactatgctgcgagaatggaaacgcagctaatgctagagccatgggatattg

SEQ ID NO: 463289 - DNA, 75 bp, synthetic construct
  source 1..75: mol_type = other DNA
gaaatatgttccatcaattttttaagttccatttgttcaccttatttatgtaaggagtatttgatcatgtataag

SEQ ID NO: 463290 - DNA, 75 bp, synthetic construct
  source 1..75: mol_type = other DNA
agtggcagcagaaatggcaaccggtgccatagagcgtgcggatgctgatgtcagtattgatcttacccagcaata

SEQ ID NO: 463291 - DNA, 75 bp, synthetic construct
  source 1..75: mol_type = other DNA
tttacggcgcaggctttgtcacttttaccgatcaagccaaaatgaaaatccttggcgtcagtcagcaatctcttg

SEQ ID NO: 463292 - DNA, 75 bp, synthetic construct
  source 1..75: mol_type = other DNA
cgcacctacagcagctaccggactatgactcctgccccggtgggcgtattgggccccggctggaaagcgccttct

SEQ ID NO: 463293 - DNA, 75 bp, synthetic construct
  source 1..75: mol_type = other DNA
cgcacctacagcagctaccggactaagactcctgccccggtgggcgtctttggccccggctggaaagcgccttct

SEQ ID NO: 463294 - DNA, 75 bp, synthetic construct
  source 1..75: mol_type = other DNA
tgctattaatgaaggtaatggaaataaattctggaatgacaatattaacagttttgtcgatgaaatcagatgctt

SEQ ID NO: 463295 - DNA, 75 bp, synthetic construct
  source 1..75: mol_type = other DNA
gcgtcaccctgccccgcatgaaaccgtttattaccgcctgtttaggcggcgcagcgggcggtttgtttatcggcc

SEQ ID NO: 463296 - DNA, 75 bp, synthetic construct
  source 1..75: mol_type = other DNA
ataaagctgcggccaaatttaaatacggtccggtttgggcgagggcaggttacatcagccaactggtcaaacgct

SEQ ID NO: 463297 - DNA, 75 bp, synthetic construct
  source 1..75: mol_type = other DNA
agcgattgatgatgattataccgatccgactaaaagcacttatgcgcttggtttaaactggtctaactccattct

SEQ ID NO: 463298 - DNA, 75 bp, synthetic construct
  source 1..75: mol_type = other DNA
ctacaatctcccattttcacttgggctaacaaccagcctcactcgatctgatcgccattatcgcgaactgagatg

SEQ ID NO: 463299 - DNA, 75 bp, synthetic construct
  source 1..75: mol_type = other DNA
cattaacagacaattgtccaaagcctttattgaaggttgggaataaaccaatattagagataataattcagcgtt

SEQ ID NO: 463300 - DNA, 75 bp, synthetic construct
  source 1..75: mol_type = other DNA
attcatgagtattggcttgatatagggcgagtagatgattttaatcgggcgcaggtcgatattcattctttaggg

SEQ ID NO: 463301 - DNA, 75 bp, synthetic construct
  source 1..75: mol_type = other DNA
tgcagttcttgaagtgttgggaaaacgaggttttaaaaatgctaagattaaaaaaccttgtgtgactgctgatta

SEQ ID NO: 463302 - DNA, 75 bp, synthetic construct
  source 1..75: mol_type = other DNA
aatatgaggtttataaggattcaggtgttgaatggctaggggatattcctgcgtcttggagcttattagctaata

SEQ ID NO: 463303 - DNA, 75 bp, synthetic construct
  source 1..75: mol_type = other DNA
tttatatgccaatcaacctccaggcacacctgttgatttagatgctgtaataaaatcaggtaattttactaaagg

SEQ ID NO: 463304 - DNA, 75 bp, synthetic construct
  source 1..75: mol_type = other DNA
tgcgcaaaaaccttcatttctgcaaagttttgagccccttgatagtgaatatggttcaatttcagggttactgat

SEQ ID NO: 463305 - DNA, 75 bp, synthetic construct
  source 1..75: mol_type = other DNA
tattgttccctccaccctgtttaatcagcatgtagaaagcttccagggttatcgcttcgcgatagggcgggtaga

SEQ ID NO: 463306 - DNA, 75 bp, synthetic construct
  source 1..75: mol_type = other DNA
atatattgtcctacccgggtaccacaatcacaccattacctaaccaggaagcgttagatattatcgtttcaccac

SEQ ID NO: 463307 - DNA, 75 bp, synthetic construct
  source 1..75: mol_type = other DNA
agaatacaaaaccaccctgatcaacagcgccgtgacaggaaaaataaaaatcaccccagaaatggttgagcaata

SEQ ID NO: 463308 - DNA, 75 bp, synthetic construct
  source 1..75: mol_type = other DNA
gcgcttcacgctcaacctgagtggttgtcctgataccgttaccggggcgaacgtgaagtttgacgggacgtctga

SEQ ID NO: 463309 - DNA, 75 bp, synthetic construct
  source 1..75: mol_type = other DNA
cattacctaaccaggaagcgttagatattatcgtttcaccacaggcgatcattcccatagggttggatctcacaa

SEQ ID NO: 463310 - DNA, 75 bp, synthetic construct
  source 1..75: mol_type = other DNA
cctaccttcaacgtacctttacagatcttaaaacactcatgcgagcaggtgaagttaacctcaataatagcgtgt

SEQ ID NO: 463311 - DNA, 75 bp, synthetic construct
  source 1..75: mol_type = other DNA
gcgattgatgatgattataccgatccgactaaaagcacttatgcgcttggtttaaactggtctaactccattctg

SEQ ID NO: 463312 - DNA, 75 bp, synthetic construct
  source 1..75: mol_type = other DNA
agaaccaggtcgttcttttggtgacaaagtaaaagttaaagaattccgatgtgtgatgactgaagataaaaataa

SEQ ID NO: 463313 - DNA, 75 bp, synthetic construct
  source 1..75: mol_type = other DNA
ttgtgagaatcgtggatattggtagcctcacccaggccgccgaagtattgcatattgcgcagcctgcacttagtc

SEQ ID NO: 463314 - DNA, 75 bp, synthetic construct
  source 1..75: mol_type = other DNA
cgcccggacaattttacggcagtgtgaactggcacggttggcggtaaataatgctggtcagacgttaagcggtta

SEQ ID NO: 463315 - DNA, 75 bp, synthetic construct
  source 1..75: mol_type = other DNA
cagaacattaacgtccttgcaggaatgttaaaatccctgtccactttagttctgggggggtgtgtcgtatgggtt

SEQ ID NO: 463316 - DNA, 75 bp, synthetic construct
  source 1..75: mol_type = other DNA
agtctttatgccagtttgccatcttttgatcaggttcttggaacggtatctgataaggcaaaaattaaaattgag

SEQ ID NO: 463317 - DNA, 75 bp, synthetic construct
  source 1..75: mol_type = other DNA
cttgggtggatgcgtcgtgtgggtttttattgcgctatttgcgctttctgatgaactgtcaaaaatgacaggtta

SEQ ID NO: 463318 - DNA, 75 bp, synthetic construct
  source 1..75: mol_type = other DNA
aaccctacatttgaacgccagtttgaatggattgactcagaagtattcgaaatcgtaggaactcatcttggttac

SEQ ID NO: 463319 - DNA, 75 bp, synthetic construct
  source 1..75: mol_type = other DNA
aacagaaggtgaaggcgctgatctctatagtgttaattaatttctttttttgttcaaatagttactccgaagaaa

SEQ ID NO: 463320 - DNA, 75 bp, synthetic construct
  source 1..75: mol_type = other DNA
atatcgacggaaataacgaaattacctgcccacgctgcgctagtaacagcgtgtttattcgcgatgtcgccatgc

SEQ ID NO: 463321 - DNA, 75 bp, synthetic construct
  source 1..75: mol_type = other DNA
tcaacagatgttgagcagcaacgtgactggttgaaatattacgaaagcagtaaaggtcaagcatattttattatt

SEQ ID NO: 463322 - DNA, 75 bp, synthetic construct
  source 1..75: mol_type = other DNA
aggcgctgccggaagaactccgcttaagtccgcatcgttatctggcgacaaacagtccgcaggggccgtggtggc

SEQ ID NO: 463323 - DNA, 75 bp, synthetic construct
  source 1..75: mol_type = other DNA
taacgagcttgcagaacccgggaagtgggagccagaccaggtgctttatcttcaactggccattgatttactgaa

SEQ ID NO: 463324 - DNA, 75 bp, synthetic construct
  source 1..75: mol_type = other DNA
tggcaggacggtacggtatggctataacagccagcggcaggtgacgtcggtgacgtacccggacgggcttcgcag

SEQ ID NO: 463325 - DNA, 75 bp, synthetic construct
  source 1..75: mol_type = other DNA
caatagttgatggaattatacccattaaaaaacaatctgtagatgattatgaggaaatatatacaatttcttccg

SEQ ID NO: 463326 - DNA, 75 bp, synthetic construct
  source 1..75: mol_type = other DNA
caaagtgcaggatgaagccggtcatggtctgtatctctatagcgccgccgaaacactgggctgtgccagagaaga

SEQ ID NO: 463327 - DNA, 75 bp, synthetic construct
  source 1..75: mol_type = other DNA
gctgctggtgcggtaagaaataaacacaaaaattatgttatcttctcaagtttagtcaattcaattgatgtcaga

SEQ ID NO: 463328 - DNA, 75 bp, synthetic construct
  source 1..75: mol_type = other DNA
tgccgaaagcaatggcagaggtacgtctggaaacttatcaacagtacgcgcaaccggcggtcttcggggcgctgt

SEQ ID NO: 463329 - DNA, 75 bp, synthetic construct
  source 1..75: mol_type = other DNA
atggcaaaggctgcaacgaggcggacgatgctttcacattgatgcgtcgtcgtttccaccatttcaccttctacg

SEQ ID NO: 463330 - DNA, 75 bp, synthetic construct
  source 1..75: mol_type = other DNA
catgggatgagtgggatttcgataagtggatttggacagtacctaaagagcacagtaaaaacggcgaagaaatta

SEQ ID NO: 463331 - DNA, 75 bp, synthetic construct
  source 1..75: mol_type = other DNA
ttaaagcagatcttcaaatactgccgggtgcgccagtatgtgcggtgcaatgtgcttgatgatttgagccctggt

SEQ ID NO: 463332 - DNA, 75 bp, synthetic construct
  source 1..75: mol_type = other DNA
tccggccgacaaagcgcccccgtctggatgacgttaggcaagtatccagatatgacccttaaacaggccagagag

SEQ ID NO: 463333 - DNA, 75 bp, synthetic construct
  source 1..75: mol_type = other DNA
aatttgcattaaaaatgcttaatggtattaatggaaaaaccgtttgtatcgttatttttgttgaaagctccattg

SEQ ID NO: 463334 - DNA, 75 bp, synthetic construct
  source 1..75: mol_type = other DNA
tcagtatgtatatgcttccatacatccaacctattctattgatccgctgggcttaattgataaacctgctccagt

SEQ ID NO: 463335 - DNA, 75 bp, synthetic construct
  source 1..75: mol_type = other DNA
gaaagccgccgctggctggcatcgtgcggcctgacggtggagcagatgcaaaaccagatggacccggtgtacacg

SEQ ID NO: 463336 - DNA, 75 bp, synthetic construct
  source 1..75: mol_type = other DNA
gaactcatccgcatcagcagcccgcgccagacccggagttacagctacagcgacaccggcaggctgaccggcgtc

SEQ ID NO: 463337 - DNA, 75 bp, synthetic construct
  source 1..75: mol_type = other DNA
tttattcaaaattgtcttgctgtgataaccgaagtatcagaatgcatatcaaagcaacgtcctgatttccttgat

SEQ ID NO: 463338 - DNA, 75 bp, synthetic construct
  source 1..75: mol_type = other DNA
aagagggtgatgtttcaggtgttgagggtttggtccttgtggatgatgattttattcaaaattgtcttgctgtga

SEQ ID NO: 463339 - DNA, 75 bp, synthetic construct
  source 1..75: mol_type = other DNA
gcggcagaacgtaaggcggaagttgtgaaaggggccagtaatgtacagcagactgttagccatatgcctgatgac

SEQ ID NO: 463340 - DNA, 75 bp, synthetic construct
  source 1..75: mol_type = other DNA
tatgcactagacggaatgaatgttaatcagtttatgaatacaacaggggatgatcagcaatcaccggaacatcgt

SEQ ID NO: 463341 - DNA, 75 bp, synthetic construct
  source 1..75: mol_type = other DNA
aagatgtttcaatgcaggagtacagaatttgcattaaaaatgcttaatggtattaatggaaaaaccatttgtatc

SEQ ID NO: 463342 - DNA, 75 bp, synthetic construct
  source 1..75: mol_type = other DNA
agaaaataaaagtatgatgtatttatactcgtttgtattgattctttccttttccggtgtgattataactgactc

SEQ ID NO: 463343 - DNA, 75 bp, synthetic construct
  source 1..75: mol_type = other DNA
gccccggccacacgctggtgctcggcaccacccgcgtcggcaaaacccggctggcggaactgcttgccactcagg

SEQ ID NO: 463344 - DNA, 75 bp, synthetic construct
  source 1..75: mol_type = other DNA
cgtggtcaatatcgacgccctgtttatcgactatgcccgcatcgtactgccgcgccacaacgcacgggcgtggga

SEQ ID NO: 463345 - DNA, 75 bp, synthetic construct
  source 1..75: mol_type = other DNA
aaatccggctcaccgaaaccgaacatcagcgactgctcgatcgctgcgaccgcacccaccttgccgaatggctgc

SEQ ID NO: 463346 - DNA, 75 bp, synthetic construct
  source 1..75: mol_type = other DNA
taacaaatgggaataactttgaaatatattcaaataatgttttggattgtttgaatggtgtttttccagaaacgg

SEQ ID NO: 463347 - DNA, 75 bp, synthetic construct
  source 1..75: mol_type = other DNA
aactactgccccattggttcgatggaatcgggttatatcacagttggtgcctacaattactggtgtacatgatat

SEQ ID NO: 463348 - DNA, 75 bp, synthetic construct
  source 1..75: mol_type = other DNA
agcagcccataaccaatattccattaacggtgatggatgccattaacgcggccggcgggcttgctccagatgctg

SEQ ID NO: 463349 - DNA, 75 bp, synthetic construct
  source 1..75: mol_type = other DNA
tcctggagatatcttatttgtgccacgaaatgatgacttgaaagtatttgtcatgggggaagtaggaaaacaatc

SEQ ID NO: 463350 - DNA, 75 bp, synthetic construct
  source 1..75: mol_type = other DNA
atggtacttggtaccgaatttcagctacaaccgtatgatattgtatatgtaactaccgcgccgcttgttcgctgg

SEQ ID NO: 463351 - DNA, 75 bp, synthetic construct
  source 1..75: mol_type = other DNA
tggcgtcgcggacgacaccaataccgacctgctcaaaataaacagtggaaacggtacggcatctggagtaggcat

SEQ ID NO: 463352 - DNA, 75 bp, synthetic construct
  source 1..75: mol_type = other DNA
gttgatctacagacaaataacgccaaggatttctttcgcgttggcaccaccgggcccgcacagccattttctatt

SEQ ID NO: 463353 - DNA, 75 bp, synthetic construct
  source 1..75: mol_type = other DNA
cactacagctccgctggttcgttggaatcgagtgatttcacaactcgtaccgactattacgggggtacacgatat

SEQ ID NO: 463354 - DNA, 75 bp, synthetic construct
  source 1..75: mol_type = other DNA
cgtaacgatgatttaaaagtatttgtaatgggggaagtgggaaaacagagcacattgaaaatggatcgaagcggg

SEQ ID NO: 463355 - DNA, 75 bp, synthetic construct
  source 1..75: mol_type = other DNA
attggagaaatgtcgttctgacgcataacggtaaagatacaaaagtgtctctttatgcattaatgcaaaaaggag

SEQ ID NO: 463356 - DNA, 75 bp, synthetic construct
  source 1..75: mol_type = other DNA
atgctgaaggtatgtcacaagctttcagtgacgccactggtgtgtttgtcattcgtcagattaaaggtgatagtc

SEQ ID NO: 463357 - DNA, 75 bp, synthetic construct
  source 1..75: mol_type = other DNA
tccaggcgatattctttttgtgccgcgtaatgacgatctaaaagtatttgtcatgggcgaagtaggtaagcaaag

SEQ ID NO: 463358 - DNA, 75 bp, synthetic construct
  source 1..75: mol_type = other DNA
aatcgcgtgatttcgcaattggttccgacaattaccggagttcatgatattactgaaactggaaaatttattagg

SEQ ID NO: 463359 - DNA, 75 bp, synthetic construct
  source 1..75: mol_type = other DNA
ctagacaatttactgcgcggttacgaatatcgcattggagtgggtgatgtactgatggtcaccgtttgggatcac

SEQ ID NO: 463360 - DNA, 75 bp, synthetic construct
  source 1..75: mol_type = other DNA
ctgctggaaattctccggcaggcaaatatcaaaccggataaaaacaccaccgaccagattatgacggcgctgaaa

SEQ ID NO: 463361 - DNA, 75 bp, synthetic construct
  source 1..75: mol_type = other DNA
agagaaggctggcgctatttacttctcttcagctttcttattatgaaaaaaaatatccgggaaaaacaaatttct

SEQ ID NO: 463362 - DNA, 75 bp, synthetic construct
  source 1..75: mol_type = other DNA
ccggaattgactactcctgctgggcaataccgcagcgccagcgacacaggtaactgggtaaactccgatggcacc

SEQ ID NO: 463363 - DNA, 75 bp, synthetic construct
  source 1..75: mol_type = other DNA
ggctcacagggagcaaccggacttcagatgtacgaagcgtataacaacggctatcccattccatacggcaatgtg

SEQ ID NO: 463364 - DNA, 75 bp, synthetic construct
  source 1..75: mol_type = other DNA
tattttgtcaggtattaacgttcaggatactggcagaagttctgcggataacatcggcggcgtgtattacaaaca

SEQ ID NO: 463365 - DNA, 75 bp, synthetic construct
  source 1..75: mol_type = other DNA
gtgataccaccgatgcagtctggtctgaatgggcgcaggtgtttacatcaaaagacagcttcaacgcagcatccg

SEQ ID NO: 463366 - DNA, 75 bp, synthetic construct
  source 1..75: mol_type = other DNA
tacaggtggcgggaaaaacgcttagccaggtacggcaggatatagccagccgtttgacaacatatatcgaaagtc

SEQ ID NO: 463367 - DNA, 75 bp, synthetic construct
  source 1..75: mol_type = other DNA
tacgatgaagatggatcgcagtggaatgaccttagcagaagcactgggtaatgcggaaggtatttctcaagcatt

SEQ ID NO: 463368 - DNA, 75 bp, synthetic construct
  source 1..75: mol_type = other DNA
ctttatgccctcatgcaaaaaggggatttaaccgagaaccgattactttatcctggagatattctgtttgtacca

SEQ ID NO: 463369 - DNA, 75 bp, synthetic construct
  source 1..75: mol_type = other DNA
agaacgtggttgagcttccggacagcgactacgatctggataaattggttaatgtatatccgattactccagggc

SEQ ID NO: 463370 - DNA, 75 bp, synthetic construct
  source 1..75: mol_type = other DNA
cctcagagggaatggcgcaggcaacgagtgatgcaactggtgtctttgtgattcgccagttaaaaggcgataaga

SEQ ID NO: 463371 - DNA, 75 bp, synthetic construct
  source 1..75: mol_type = other DNA
atgactctcgcagaagcaattggaaatgcggaagggatgtcgcaagcgtttagtgatgcaactggcgtgttcgtg

SEQ ID NO: 463372 - DNA, 75 bp, synthetic construct
  source 1..75: mol_type = other DNA
tgtattcctggttcagataagaatgatgtaaaaatatttaaagttgcaagcatagatagcgcatctaaaaaagat

SEQ ID NO: 463373 - DNA, 75 bp, synthetic construct
  source 1..75: mol_type = other DNA
ctgggctgcgggtgggcgtgcagttgttgcactgaaactgacgagtacggtaagccgcaaaattatccttgatcc

SEQ ID NO: 463374 - DNA, 75 bp, synthetic construct
  source 1..75: mol_type = other DNA
tgcgcgtacaggtgagtttgatgattgccctttgacgttagacaaaaccaaggtaccaaaagctttgcactggat

SEQ ID NO: 463375 - DNA, 75 bp, synthetic construct
  source 1..75: mol_type = other DNA
gttgacctgctggttcaacagcaagtcagccgcgttgtggtccgtaacatcggggaacggatgctgggtaaatta

SEQ ID NO: 463376 - DNA, 75 bp, synthetic construct
  source 1..75: mol_type = other DNA
acgaccgggtagcaaatcattttaccaaagcgagtcaccttgtcctggtggatgagcgcggtgtggagctcagcc

SEQ ID NO: 463377 - DNA, 75 bp, synthetic construct
  source 1..75: mol_type = other DNA
gcgagttcctgttgcgctataaacttgtttggagtgaaacatggaaaatccgggagcaattagatactccggtac

SEQ ID NO: 463378 - DNA, 75 bp, synthetic construct
  source 1..75: mol_type = other DNA
cagtcatggattgatgatggcgataccagccagcctccagaaaaaattcacgtcccgttcgtgttgacgccaccg

SEQ ID NO: 463379 - DNA, 75 bp, synthetic construct
  source 1..75: mol_type = other DNA
cgttactgaggcctgctgtggagttcaatacggccgtggttgcggcaacggcggccggtgtctgtgtgacagccc

SEQ ID NO: 463380 - DNA, 75 bp, synthetic construct
  source 1..75: mol_type = other DNA
ataggtccagataaatttgattctatagatagcaccgcatatggcgccttaaataaaataaataaccaatctatt

SEQ ID NO: 463381 - DNA, 75 bp, synthetic construct
  source 1..75: mol_type = other DNA
gccattaccgctgaaagacgatgggtcggatacatcacggccagtgtttggcgtgatcacctacatcatcaacga

SEQ ID NO: 463382 - DNA, 75 bp, synthetic construct
  source 1..75: mol_type = other DNA
atctatagtcatgttactatttctgggaggggcggtttcaatcttttattttttaaaggtgatgggttttatttt

SEQ ID NO: 463383 - DNA, 75 bp, synthetic construct
  source 1..75: mol_type = other DNA
ggctgggttaagacgtaagatgggaaaaacagctatggacagagactacctcgcgtcagtctttgcggggagcca

SEQ ID NO: 463384 - DNA, 75 bp, synthetic construct
  source 1..75: mol_type = other DNA
gaccgtgttggtgatgctgtttttggggccgcacttgttgactccagacttaatggttctgacaaggaggcgcac

SEQ ID NO: 463385 - DNA, 75 bp, synthetic construct
  source 1..75: mol_type = other DNA
atttaagaaatagattgatggacaaatgtaagaatagcgaaaatgaggacatagtagaaatttatactgatttta

SEQ ID NO: 463386 - DNA, 75 bp, synthetic construct
  source 1..75: mol_type = other DNA
gatggagttcccgggcaaatgaatgttgtgcatatccgatttgacagcaactcccccgtgatggcagatgtgcag

SEQ ID NO: 463387 - DNA, 75 bp, synthetic construct
  source 1..75: mol_type = other DNA
aactcgaggcaaaaggcttttaccggagggcgtcggcgcgatggggtgaagtcatgcaactggtggagacagaca

SEQ ID NO: 463388 - DNA, 75 bp, synthetic construct
  source 1..75: mol_type = other DNA
gtggtgcaatgtctggtgcaggccggtttaattattcctgtcgcgcggctgcgtccggtgctaacgctcaaaaac

SEQ ID NO: 463389 - DNA, 75 bp, synthetic construct
  source 1..75: mol_type = other DNA
gtggcagtatgatggccacggctggctgagagaaatcagccacctgagcgaaggccaccgtgtggcggtccacta

SEQ ID NO: 463390 - DNA, 75 bp, synthetic construct
  source 1..75: mol_type = other DNA
cgttcctggctggaaagcaccctttgatatccgcttacagatacgcgataacgaactgatactcaatgataacgg

SEQ ID NO: 463391 - DNA, 75 bp, synthetic construct
  source 1..75: mol_type = other DNA
gtgtgcgagagattcgtactcgcgatgctgatgggatctatcgcgtcatgtatatcgcaaaatttgaagaagcgg

SEQ ID NO: 463392 - DNA, 75 bp, synthetic construct
  source 1..75: mol_type = other DNA
tggcttgatctggagtatgtttcttcaatctttagctgtatgtcccagtgtataagacaagaatgtaatgaagtt

SEQ ID NO: 463393 - DNA, 75 bp, synthetic construct
  source 1..75: mol_type = other DNA
ataatgcttgagcagcacgccattgcaataccgcattgtgaggcgattcatgctaaggaaggtgcgaacaagtcc

SEQ ID NO: 463394 - DNA, 75 bp, synthetic construct
  source 1..75: mol_type = other DNA
tagtggaagaagcaaagaaataaaaccgatagagaatgcgattgtagaaaaaataatggtaaaagatggctcttt

SEQ ID NO: 463395 - DNA, 75 bp, synthetic construct
  source 1..75: mol_type = other DNA
aaaaccggagtgcgtagtgttatcagctatcttcttagcccattaaaggaaactattaatgaaagtttacgtgaa

SEQ ID NO: 463396 - DNA, 75 bp, synthetic construct
  source 1..75: mol_type = other DNA
ggcggcgccggaatgcaggtgaccgcgtacacccagacgtcatcggatattgaagcgcgtattggtaatgcggcc

SEQ ID NO: 463397 - DNA, 75 bp, synthetic construct
  source 1..75: mol_type = other DNA
gccgttgtgacctcgttgaaaccgataatagttgtgtggagaactgtttaaaagggaagtttaaagaggtaaggc

SEQ ID NO: 463398 - DNA, 75 bp, synthetic construct
  source 1..75: mol_type = other DNA
gcggaagtaaaggcattggttatgaggcagcaaaagcgctgcgccagatggattacattgtgattattgtcgccc

SEQ ID NO: 463399 - DNA, 75 bp, synthetic construct
  source 1..75: mol_type = other DNA
ccctgctgcgtccggcggttgagctgaatactgctgtcgtggccggtatggcggcatatgtttgtgtacaggctc

SEQ ID NO: 463400 - DNA, 75 bp, synthetic construct
  source 1..75: mol_type = other DNA
ataacgcagtaggacgttttggtcgtgtttccgaagtggcgtcccgcgtggcggggcagttgtccggcgaaggga

SEQ ID NO: 463401 - DNA, 75 bp, synthetic construct
  source 1..75: mol_type = other DNA
gctgtcaccaccaacgacggtacgccgggcgctgccgaagatatcaaacctgaaaccctcaattcacttgaaagc

SEQ ID NO: 463402 - DNA, 75 bp, synthetic construct
  source 1..75: mol_type = other DNA
atgaattattgattctggataataaccacagagcggcatataccctgacaggcaaatgtccgcttcttgctcaaa

SEQ ID NO: 463403 - DNA, 75 bp, synthetic construct
  source 1..75: mol_type = other DNA
caattatagttggtttgacatggccgttaagtctttttcctgctgttataagtctgatgatacacaaatctgagc

SEQ ID NO: 463404 - DNA, 75 bp, synthetic construct
  source 1..75: mol_type = other DNA
atcggctcaaaagataagggtggtcattacgccaacctcgacgcgatggtcatggatgctttcgagtcgctggtc

SEQ ID NO: 463405 - DNA, 75 bp, synthetic construct
  source 1..75: mol_type = other DNA
gaaagaaagagaataccctgagaattattgatgccacaaacggacagatgccggaagacagggaaagtttgttct

SEQ ID NO: 463406 - DNA, 75 bp, synthetic construct
  source 1..75: mol_type = other DNA
tccgaagttaatgcatggcttgcggcccgcgtggaggaacgcaataacgtaatggcagaaattatcgccagagcg

SEQ ID NO: 463407 - DNA, 75 bp, synthetic construct
  source 1..75: mol_type = other DNA
cctcgagccggaagaacccgccaccactgaaccagtgagcgcggaagttttcgcggcggcaatggtcaaggcgat

SEQ ID NO: 463408 - DNA, 75 bp, synthetic construct
  source 1..75: mol_type = other DNA
atgcgtaaagacacccgttttaaatttaatcagtacctgagccgtatcgctgaactgaacggcatcgaggtcagc

SEQ ID NO: 463409 - DNA, 75 bp, synthetic construct
  source 1..75: mol_type = other DNA
tatcgaaattctcgagcaggaagaaaccgccaccaccgaaccggtcagcgcggcggtatttgctgctgagatggt

SEQ ID NO: 463410 - DNA, 75 bp, synthetic construct
  source 1..75: mol_type = other DNA
gggctgtactacaaccggaaccggtactacgatccgttgcaggggcggtatatcactcaggacccgatagggctg

SEQ ID NO: 463411 - DNA, 75 bp, synthetic construct
  source 1..75: mol_type = other DNA
tcaggcggacttatcgcctgtgaaccatgaccctatgattacgcaaatagttaccgaggcatatacccgccgcga

SEQ ID NO: 463412 - DNA, 75 bp, synthetic construct
  source 1..75: mol_type = other DNA
gcaatgctgatcgatatcctcgctacgatggcacgagtggactacgagacacgcagagcacgccaagcgcagggc

SEQ ID NO: 463413 - DNA, 75 bp, synthetic construct
  source 1..75: mol_type = other DNA
agcacatcatgaaagctgccgggataagccgggcaacgttctaccgcattaagcgtgagctggctgccagcgtct

SEQ ID NO: 463414 - DNA, 75 bp, synthetic construct
  source 1..75: mol_type = other DNA
ctgttgtcgccggattacaccaatatgcaggatccccgtccgatttttgactggcagcaggtgattcggaaaaaa

SEQ ID NO: 463415 - DNA, 75 bp, synthetic construct
  source 1..75: mol_type = other DNA
cttcagcagtccggcggtgaagacggtggcagtgtggtgttcccgccggtgctggtgcagatgctcgaccggctg

SEQ ID NO: 463416 - DNA, 75 bp, synthetic construct
  source 1..75: mol_type = other DNA
cacgagcggacgccgcagcaggagcgccagaaggccgccagagaggccgagcgcggccgtgaggcttggacgcta

SEQ ID NO: 463417 - DNA, 75 bp, synthetic construct
  source 1..75: mol_type = other DNA
cctcacgattttttagatggagtttattatttctttgaaaatttaacagacctatctaaaaatcaaattagtgat

SEQ ID NO: 463418 - DNA, 75 bp, synthetic construct
  source 1..75: mol_type = other DNA
gcggctatctatataggccgattatataaacgcctaagatactatctacctgaaagaattttattcactaaaaca

SEQ ID NO: 463419 - DNA, 75 bp, synthetic construct
  source 1..75: mol_type = other DNA
aagaaatgaccaatctgccgacgcttgttaatggttatatcctggcgtcggcagatcgcccagcagtcttatctg

SEQ ID NO: 463420 - DNA, 75 bp, synthetic construct
  source 1..75: mol_type = other DNA
gagcgcccgtgaaactgtccgcgctatgcttaccgttgggaataaaccagagcacatcatgaaagctgccgggat

SEQ ID NO: 463421 - DNA, 75 bp, synthetic construct
  source 1..75: mol_type = other DNA
cgaccgtgccgtgcctgcgctggagtctttcgttaatgagcgtggttggtctattgctgcgcgatacattgagaa

SEQ ID NO: 463422 - DNA, 75 bp, synthetic construct
  source 1..75: mol_type = other DNA
atgattaatgttcgtctgtacgcgagggcatccaccgctgagcagcacgccgaccgtgctgtgcctgcgctggag

SEQ ID NO: 463423 - DNA, 75 bp, synthetic construct
  source 1..75: mol_type = other DNA
gcattcagtgttatctctgtcattctgatgttagcgctatattacgctttccttaccatgccgcctttcccggcc

SEQ ID NO: 463424 - DNA, 75 bp, synthetic construct
  source 1..75: mol_type = other DNA
catccagcgactcactgtcatgggctccctattcagcacagacatggcatctaaaggggaaagaccagaaacttt

SEQ ID NO: 463425 - DNA, 75 bp, synthetic construct
  source 1..75: mol_type = other DNA
accctgagcacacagattaagggcgtcagtctgaatctgggctggtccggctcacggaattcgcagggagagaat

SEQ ID NO: 463426 - DNA, 75 bp, synthetic construct
  source 1..75: mol_type = other DNA
atgcagatgaaggctgaggtccgcgcgctgcaaacactggaggaaattcgcgggtaccggattggctggccggag

SEQ ID NO: 463427 - DNA, 75 bp, synthetic construct
  source 1..75: mol_type = other DNA
ctttgagcacaatggcaggaaatgggactacggcaaacagacacaggcgcgtcttgagccgtcagtggctgccgc

SEQ ID NO: 463428 - DNA, 75 bp, synthetic construct
  source 1..75: mol_type = other DNA
aaccagctgctgaaatttcgttgttcgatgcattcggacctaacgtgagcgagcgggtacaagccatcaaccgga

SEQ ID NO: 463429 - DNA, 75 bp, synthetic construct
  source 1..75: mol_type = other DNA
agggaagtcattctggacagcatatctaatcaataactatcttggagctggaccgcgatctaataacctcgttca

SEQ ID NO: 463430 - DNA, 75 bp, synthetic construct
  source 1..75: mol_type = other DNA
gttaatgacggatatacgtatgccgaagcaattgacagggtttatgaagaagagctagtacagttaggcatgaaa

SEQ ID NO: 463431 - DNA, 75 bp, synthetic construct
  source 1..75: mol_type = other DNA
aacttaaaagatataacttagggcacttcattcccgtggtcgacagaatggtggatgccccttattttttgctgg

SEQ ID NO: 463432 - DNA, 75 bp, synthetic construct
  source 1..75: mol_type = other DNA
tttatcgagaatggccggtgatgctaaaactgtgcgtaattggctaacggctgtagatgaaataacacttgagcg

SEQ ID NO: 463433 - DNA, 75 bp, synthetic construct
  source 1..75: mol_type = other DNA
accggtgaaggatgttgaatgcatcatattaaaacagccgcagatcttaattgtttttaaattcaatggttgccg

SEQ ID NO: 463434 - DNA, 75 bp, synthetic construct
  source 1..75: mol_type = other DNA
aatttctaccatatagctgaaaatattatatctaatatatacagaatagatatttacattattcatggcataatg

SEQ ID NO: 463435 - DNA, 75 bp, synthetic construct
  source 1..75: mol_type = other DNA
ttgggtgcgcttcgccgaaccatcaaagaagaaccggaatatgaccgcgtggctaactaccagtcctcaaacgat

SEQ ID NO: 463436 - DNA, 75 bp, synthetic construct
  source 1..75: mol_type = other DNA
gtaaatattggcgatgcgctaagtacgcatccggagaagaaaacgtttatggacgacctggagcaaagactgacg

SEQ ID NO: 463437 - DNA, 75 bp, synthetic construct
  source 1..75: mol_type = other DNA
caaatcttgcaataaatggcatttaattaactgtttccattttatcctgatggcctttttgtcaaagtatggata

SEQ ID NO: 463438 - DNA, 75 bp, synthetic construct
  source 1..75: mol_type = other DNA
ctgttatggcggcactagtatctgcattagttacggttttattattttttataaaaggtgtatgcacacctttat

SEQ ID NO: 463439 - DNA, 75 bp, synthetic construct
  source 1..75: mol_type = other DNA
ccgactggcagaaggcgctactgcgcgcctggtatcacgccgtactgcgcgaaaaaaatccgcagtgggcgcagg

SEQ ID NO: 463440 - DNA, 75 bp, synthetic construct
  source 1..75: mol_type = other DNA
aaatgtatagttgcagtatcatttattctgctatttttacggtaatttttcttttattacttgccggtttatata

SEQ ID NO: 463441 - DNA, 75 bp, synthetic construct
  source 1..75: mol_type = other DNA
atgtaatatataatgctggctatttgctatgtactcaaggtgttgcgtatcttgcaccgattatcgtgctgggtc

SEQ ID NO: 463442 - DNA, 75 bp, synthetic construct
  source 1..75: mol_type = other DNA
tttagatactttaccagatgtaaatataactcaagttaaacggtgttcgacactattaaaccatggtatacagta

SEQ ID NO: 463443 - DNA, 75 bp, synthetic construct
  source 1..75: mol_type = other DNA
atgctgaaaaaaattaacatttacggcgttaacgatcagaccggtgaaaaaatcggcctgggtgtgagtggcccg

SEQ ID NO: 463444 - DNA, 75 bp, synthetic construct
  source 1..75: mol_type = other DNA
gtggcatcattgttaattcaggaaaaactgtaaactggcaggttaacggcattgcggatgacagcctgcacaagc

SEQ ID NO: 463445 - DNA, 75 bp, synthetic construct
  source 1..75: mol_type = other DNA
ttcaaaaaaagaaataatttcccttacaggggggagtgtttctatacataactccctatacagaggtcagagaat

SEQ ID NO: 463446 - DNA, 75 bp, synthetic construct
  source 1..75: mol_type = other DNA
ttttgcatgagaataaacagtgtaagtatatcgaaacggtctatggtcgtggataccgttttactgtacctattg

SEQ ID NO: 463447 - DNA, 75 bp, synthetic construct
  source 1..75: mol_type = other DNA
ataataaatcacagggaccattagccagttatgggcagatgggtgacagcgggtcgccattatttgcttatgatt

SEQ ID NO: 463448 - DNA, 75 bp, synthetic construct
  source 1..75: mol_type = other DNA
ccagcgaggaagtagcgaaacttttcggggtatcaaagcgtaccgttactcgctgggtggatacgatacccggct

SEQ ID NO: 463449 - DNA, 75 bp, synthetic construct
  source 1..75: mol_type = other DNA
ggcagcatatgaccttgctaacgggaaatacactgcacaggacgccaccacaacgcgaaaaggccttgttcagct

SEQ ID NO: 463450 - DNA, 75 bp, synthetic construct
  source 1..75: mol_type = other DNA
tgtccgggatatccggcttggtggtgccgccacatacaaacctgcgaacaatggcatgacatggacacatcaggc

SEQ ID NO: 463451 - DNA, 75 bp, synthetic construct
  source 1..75: mol_type = other DNA
tcacagcaatattatggtgtgaacaactggcaaacatggaacttccagtgcccttcaggtcatgtattgtctggt

SEQ ID NO: 463452 - DNA, 75 bp, synthetic construct
  source 1..75: mol_type = other DNA
gatgtggagggggcgattgtctccggcagcgccagtggtgactggacactctcctgcgttcgtgggcaggtgaac

SEQ ID NO: 463453 - DNA, 75 bp, synthetic construct
  source 1..75: mol_type = other DNA
atttgctgtaaacggtcagatacaaccaagcaactggggtaacattgattcccgatatgtgaaagatgttcggct

SEQ ID NO: 463454 - DNA, 75 bp, synthetic construct
  source 1..75: mol_type = other DNA
aatactctggtatctcgcggtcgcgtaacggccctggaggcgaatgcacagggaacatccgggattcagctgtat

SEQ ID NO: 463455 - DNA, 75 bp, synthetic construct
  source 1..75: mol_type = other DNA
cagcgcgaaaaggtcttgtccagctcagtagcgccaccaacagtgattctgaaacgctggctgcaacaccaaaag

SEQ ID NO: 463456 - DNA, 75 bp, synthetic construct
  source 1..75: mol_type = other DNA
tatctttcgccgtgctgccagcctttcaggagaaatggcatcccgcgtcgttatttcaactggttgttataacgg

SEQ ID NO: 463457 - DNA, 75 bp, synthetic construct
  source 1..75: mol_type = other DNA
tattagcaccctaaaagacactgatatcaatgtttccgttagtgatgttcatgtgcttggcggaaaaggaaaacc

SEQ ID NO: 463458 - DNA, 75 bp, synthetic construct
  source 1..75: mol_type = other DNA
tccattgtaacaagccttaaagaagatgatgtatgcagcgttttttacgttgaaggcagggcttttcctgtgcgg

SEQ ID NO: 463459 - DNA, 75 bp, synthetic construct
  source 1..75: mol_type = other DNA
ttgctaacgggaaatacactgcacaggacgccaccaccgcgcgaaaaggccttgtccagctcagtagcgccacca

SEQ ID NO: 463460 - DNA, 75 bp, synthetic construct
  source 1..75: mol_type = other DNA
aatacccaaatcgcaagcacggcttatgtgatggccgcgattgccgcccttgtagattcgtcacctgatgcactg

SEQ ID NO: 463461 - DNA, 75 bp, synthetic construct
  source 1..75: mol_type = other DNA
tcgaaagcggcaccaaaagggttccgttgggttttctgccgttaccgcaaggtacgtgggaaatccgcaaaagtc

SEQ ID NO: 463462 - DNA, 75 bp, synthetic construct
  source 1..75: mol_type = other DNA
atgaaaagaggacctatatatacactatttcacagaacagataataaaaatattatggatatgcaattcctcatt

SEQ ID NO: 463463 - DNA, 75 bp, synthetic construct
  source 1..75: mol_type = other DNA
atggattacggcggattaagtctcgcggaagcctgcgagcgggtagtaatggaaaaactccctgcgcttggcggt

SEQ ID NO: 463464 - DNA, 75 bp, synthetic construct
  source 1..75: mol_type = other DNA
ttggccattctgggtagcaattgaatttttgaatagatttagttttaaacggaaaattcgttttaatttaatgct

SEQ ID NO: 463465 - DNA, 75 bp, synthetic construct
  source 1..75: mol_type = other DNA
ctgccgcagaagcagcaaaactttttggagtaaataaaaaaaccatccttcggtggatcgatagcattaagggtt

SEQ ID NO: 463466 - DNA, 75 bp, synthetic construct
  source 1..75: mol_type = other DNA
ctggctaacatcaataaggcaaagaacacgccgccgttcaaggtaagtgactttgcaccgcacatcaacgaagcg

SEQ ID NO: 463467 - DNA, 75 bp, synthetic construct
  source 1..75: mol_type = other DNA
tggtttgtatgccagtcaggaattcaccgggacatacaaagaaatttttgatttccatatttatgatgctatggg

SEQ ID NO: 463468 - DNA, 75 bp, synthetic construct
  source 1..75: mol_type = other DNA
aggcgataccgatgctaatgatgcgtcgaccaaagctaccattaagtggctgcgtaatggtcaggaaattagcgg

SEQ ID NO: 463469 - DNA, 75 bp, synthetic construct
  source 1..75: mol_type = other DNA
agatgaatatgatacagagaaggaaatatttcgtgcaaagaaggctgctgagcaatataagtttaaaagaaagga

SEQ ID NO: 463470 - DNA, 75 bp, synthetic construct
  source 1..75: mol_type = other DNA
tcactgcccacagctatcaagatattttaattcaacaccggaagttactatatcagccattacaaatggtgttga

SEQ ID NO: 463471 - DNA, 75 bp, synthetic construct
  source 1..75: mol_type = other DNA
tagagatctgttagttaaatttagtaataattgcgttaatgacgttgctaattattcatgggcaaaactagcaga

SEQ ID NO: 463472 - DNA, 75 bp, synthetic construct
  source 1..75: mol_type = other DNA
tgattgaatcagcacagagaggcgacataaaagcaatgtctgcgttgcttgccaccactcaggctgatgcccgtc

SEQ ID NO: 463473 - DNA, 75 bp, synthetic construct
  source 1..75: mol_type = other DNA
tggtgagtgatccactggggttgcagggaggggagcagacttaccggtatgtgccgaatcctttaagatggatag

SEQ ID NO: 463474 - DNA, 75 bp, synthetic construct
  source 1..75: mol_type = other DNA
ttccgactgcaacaggtgaagaaaaaccagccccatattatctatatccccgccaagcatcaggggcccctgcct

SEQ ID NO: 463475 - DNA, 75 bp, synthetic construct
  source 1..75: mol_type = other DNA
taataatctgatatcgcgtgttgactcatctccgtcaaaggctatgacaatttctatttatcgcaataaaatatg

SEQ ID NO: 463476 - DNA, 75 bp, synthetic construct
  source 1..75: mol_type = other DNA
cgccacggggatcgggatggtgcttattggtaacccgcgcggattgtttaaaggtggacgccgcacctttgatga

SEQ ID NO: 463477 - DNA, 75 bp, synthetic construct
  source 1..75: mol_type = other DNA
tgcgctggggattgattacacccgcgcgaacaaaggggcattatcccgcgccatccgccgtcgcctgacgggaac

SEQ ID NO: 463478 - DNA, 75 bp, synthetic construct
  source 1..75: mol_type = other DNA
gcgcactgtttcaggcggttcgtctgatgggctgtattaacgttattgtgggcgtaccgggtgtgggtaaaacgg

SEQ ID NO: 463479 - DNA, 75 bp, synthetic construct
  source 1..75: mol_type = other DNA
tcgggcaacagttaaacttaacggggcaaaccaggtagatgcagataatatcagctggggatatcggggtgggat

SEQ ID NO: 463480 - DNA, 75 bp, synthetic construct
  source 1..75: mol_type = other DNA
agctacctgttcgatttaagattttatgggtaaaatcaaacgaacattatttaatgaatattcacaaaaaatttc

SEQ ID NO: 463481 - DNA, 75 bp, synthetic construct
  source 1..75: mol_type = other DNA
gcgagagagggaaagaaagcgggaacaaaatggcgattgtcacggcgcgtcacgaaatgtcacgacgagtcacga

SEQ ID NO: 463482 - DNA, 75 bp, synthetic construct
  source 1..75: mol_type = other DNA
tcatctggacttcgttaagttgggggactcgtattgggcaatgggtcggccggcttatgggcattcctgttatca

SEQ ID NO: 463483 - DNA, 75 bp, synthetic construct
  source 1..75: mol_type = other DNA
ttttacgttggctggaaagcgaaccgcaagattcccataacgagcatgtcgttattaatggggagcccgcagaat

SEQ ID NO: 463484 - DNA, 75 bp, synthetic construct
  source 1..75: mol_type = other DNA
aacaaaagattttgtttattagatgattgtgttatttctatacgtccggcaagagctgaagatcgaatagaaaaa

SEQ ID NO: 463485 - DNA, 75 bp, synthetic construct
  source 1..75: mol_type = other DNA
tcgacgtggtcgttgggcgaattggcggtcgcgccttgcaaatgccactgaattatcaggtgctgtacaccgagc

SEQ ID NO: 463486 - DNA, 75 bp, synthetic construct
  source 1..75: mol_type = other DNA
cgcgctggtgcattttgccgtcagccagtatgacgtctttatgaccaccaaactcgcgggtgacagcaccttctt

SEQ ID NO: 463487 - DNA, 75 bp, synthetic construct
  source 1..75: mol_type = other DNA
tcagcggcaccagtgcgtcggcagtgacccgtgaaggtggatattacggaatgacgatggatccgggggagtatg

SEQ ID NO: 463488 - DNA, 75 bp, synthetic construct
  source 1..75: mol_type = other DNA
gcagcaggctatggagatggtccttcctctgcggcgggtggctttatgtatctcggcttaagtaaagttaccttt

SEQ ID NO: 463489 - DNA, 75 bp, synthetic construct
  source 1..75: mol_type = other DNA
ggcgctgttagccactggatggagggacgccgggaacctgattttaatacacttgccgcgctttgtgacctgttc

SEQ ID NO: 463490 - DNA, 75 bp, synthetic construct
  source 1..75: mol_type = other DNA
ctcaggttatggccagacattacccctgcagcaggatataaaggttacggagtctttctggcaatatggggtatg

SEQ ID NO: 463491 - DNA, 75 bp, synthetic construct
  source 1..75: mol_type = other DNA
caaaaaacaccctatttgaactataaaattgcgattgttgaaaatggttataaagagaaaacagaaatacatcgg

SEQ ID NO: 463492 - DNA, 75 bp, synthetic construct
  source 1..75: mol_type = other DNA
catccacacaaaaataaaatatcaattatgaataagatttatattgctcttaaaatgagaatatattcgaaattg

SEQ ID NO: 463493 - DNA, 75 bp, synthetic construct
  source 1..75: mol_type = other DNA
gggaaattggtgttaacgatattagaacgggaaaaggttttttttcccttcatccacacaaaaataaaatatcaa

SEQ ID NO: 463494 - DNA, 75 bp, synthetic construct
  source 1..75: mol_type = other DNA
agttggactacaccggctttagcagccattccgcgctctctgcggccttctggtctatcttcctgtggttgctca

SEQ ID NO: 463495 - DNA, 75 bp, synthetic construct
  source 1..75: mol_type = other DNA
caagcatccttcaggttatacgatagtaaataacactgcctttacaaataacactgccgaaggttatggcggggc

SEQ ID NO: 463496 - DNA, 75 bp, synthetic construct
  source 1..75: mol_type = other DNA
atgcagattgaaaacggtgaagttaccctgggccgcagcaactccctgatgaatgtcggcgatacgcattgctag

SEQ ID NO: 463497 - DNA, 75 bp, synthetic construct
  source 1..75: mol_type = other DNA
agcctttcaggcattacgcaggactggagtgtcgccgatgggcaatggctggttttttcggatatgaccaataac

SEQ ID NO: 463498 - DNA, 75 bp, synthetic construct
  source 1..75: mol_type = other DNA
tgcattggtaacgggcggcggtaccaataaaactaccatggcgggcttaggctctgacctcaacaatattcttac

SEQ ID NO: 463499 - DNA, 75 bp, synthetic construct
  source 1..75: mol_type = other DNA
agcgatgcgtcatcgggatataattattgcaaaaatagatttgtttattcaaagaattactcataatttatggac

SEQ ID NO: 463500 - DNA, 75 bp, synthetic construct
  source 1..75: mol_type = other DNA
acttgggctggaaacattgaaaaagcatctggcagcgccactcagccagaaaaaaatcgctgaatatattgcccg

SEQ ID NO: 463501 - DNA, 75 bp, synthetic construct
  source 1..75: mol_type = other DNA
aaaaggaccataaatttgcctgtctgaatgtcttccaaatcatcatcgatatgctcaatgaacgcggccttttcg

SEQ ID NO: 463502 - DNA, 75 bp, synthetic construct
  source 1..75: mol_type = other DNA
ctgggaaaggatactggtacgagagtgcaggcaaatgcggtatatgatctcggtcgatcagatcagaatggaagt

SEQ ID NO: 463503 - DNA, 75 bp, synthetic construct
  source 1..75: mol_type = other DNA
cgctttccgccatttcatcatcactgattggcgtggcgttttttgccagcactcccgctttgcgtttttccttta

SEQ ID NO: 463504 - DNA, 75 bp, synthetic construct
  source 1..75: mol_type = other DNA
atgggaccgccaataatacgaaaatcaatcctggcggagaacagcatataaaagaatttggtgtaagtagtaata

SEQ ID NO: 463505 - DNA, 75 bp, synthetic construct
  source 1..75: mol_type = other DNA
tttagttaacaaaatcaggggtaagaaagactttatgtatatttgcacgctttgctctgagagatcccctcataa

SEQ ID NO: 463506 - DNA, 75 bp, synthetic construct
  source 1..75: mol_type = other DNA
ctttgtctgccagaaagcgcctgggtctggcgcatgaagtccaggttagcgccgctgctcaattcctcccccgat

SEQ ID NO: 463507 - DNA, 75 bp, synthetic construct
  source 1..75: mol_type = other DNA
ctgagccagcaaatggtcacggagctacaccgttgggtgaaatatgattccgcgcgctttgactacgccctgcgc

SEQ ID NO: 463508 - DNA, 75 bp, synthetic construct
  source 1..75: mol_type = other DNA
ctttgattatcccgcgcagtgcgaactgcaggtacgggagcatttgaaatatctgctccggcatctggaaaagga

SEQ ID NO: 463509 - DNA, 75 bp, synthetic construct
  source 1..75: mol_type = other DNA
tctatccaggtgaatatagcggaagggatttgcatccttttggcatgatcgaatctaaaaactactatcgcgcct

SEQ ID NO: 463510 - DNA, 75 bp, synthetic construct
  source 1..75: mol_type = other DNA
atgaatatatcaaatgtgaatagcaacaaaacgacatctttacctgtagagctagatacactaaataacaaagat

SEQ ID NO: 463511 - DNA, 75 bp, synthetic construct
  source 1..75: mol_type = other DNA
gccagcccggcagcaggagatagccttacactggtaacaacgggcggcggtgatgctgcatttacgttgggcaat

SEQ ID NO: 463512 - DNA, 75 bp, synthetic construct
  source 1..75: mol_type = other DNA
tatacggttttgcctcgctgaagcacgagttgaagcagctggaatctgcaaggattattttcagcgaatgggatt

SEQ ID NO: 463513 - DNA, 75 bp, synthetic construct
  source 1..75: mol_type = other DNA
gtgttactggataacaaaactagcggtcatgttggtatcgaactgaaaaaacataccttttctggttccaagctc

SEQ ID NO: 463514 - DNA, 75 bp, synthetic construct
  source 1..75: mol_type = other DNA
ccgccatgggatagcggccatgtttattacctggagaaacttacaattttatttattaatcctgcgccacacgca

SEQ ID NO: 463515 - DNA, 75 bp, synthetic construct
  source 1..75: mol_type = other DNA
tgtattcaaacaagtagaccgtgaagaaagcctgattcacctcatgcgcgtcaacttgctcaagcgaatggaaag

SEQ ID NO: 463516 - DNA, 75 bp, synthetic construct
  source 1..75: mol_type = other DNA
gggccaattacgacctggtggtcatcgacgaatcccacaacttccgtaatacaccgagcaaggcggaaggtaaaa

SEQ ID NO: 463517 - DNA, 75 bp, synthetic construct
  source 1..75: mol_type = other DNA
gactcgaccgaaaggctactcgggcgaaatcaatctggagacagtgaactgggccaattacgacctggtggtcat

SEQ ID NO: 463518 - DNA, 75 bp, synthetic construct
  source 1..75: mol_type = other DNA
tggactggcacaatggttaacgtaacagtcagaggaaatgagggcattattgatgcaatggcgctggaattaaat

SEQ ID NO: 463519 - DNA, 75 bp, synthetic construct
  source 1..75: mol_type = other DNA
gaacaaatcgtctcggtcagtttgatatcaaagatggggttgctaacaatatgctgttggaaaacggcggaagtt

SEQ ID NO: 463520 - DNA, 75 bp, synthetic construct
  source 1..75: mol_type = other DNA
gcttactcgttgaaaccgaaggcattgccatcttcgccgttatcgaaaagggaggactactggaggttaaagatg

SEQ ID NO: 463521 - DNA, 75 bp, synthetic construct
  source 1..75: mol_type = other DNA
aatttccgcgatgtatgaaaccggaaaggatatgagcgctaaataccgggaaacttatcatggctgtcttagcaa

SEQ ID NO: 463522 - DNA, 75 bp, synthetic construct
  source 1..75: mol_type = other DNA
atgaaattcaccgactacagcgtgaaaaccggacatctgaccgcctactggacgccatctttcgctcaggatgtg

SEQ ID NO: 463523 - DNA, 75 bp, synthetic construct
  source 1..75: mol_type = other DNA
tggaaccagtggcgtttatcaggctggtataaggtcatcgtttaccccgacgttaagcgctgatgaatcccctaa

SEQ ID NO: 463524 - DNA, 75 bp, synthetic construct
  source 1..75: mol_type = other DNA
ttatattttttatcaggacaaaccacatctttgttattctatttttttaaaaaaaatattgagttcagtttttca

SEQ ID NO: 463525 - DNA, 75 bp, synthetic construct
  source 1..75: mol_type = other DNA
atgccatttgcccctatacatccatcggcaatgttgttaataatggccacaggccagactcaacagcttattaca

SEQ ID NO: 463526 - DNA, 75 bp, synthetic construct
  source 1..75: mol_type = other DNA
ttctctcgcttgataagttcatcagttcaggtcccgatgctcagacctgggctgataggtatgttcgcaactgtg

SEQ ID NO: 463527 - DNA, 75 bp, synthetic construct
  source 1..75: mol_type = other DNA
gtgataagtgaattgagtacatacgcacaaaattttactggacgcatacattcaggtattattgatccagtgtgg

SEQ ID NO: 463528 - DNA, 75 bp, synthetic construct
  source 1..75: mol_type = other DNA
catggacagaagggtactgctgcggctgaaagccattgacgccctgcagcgcaaggaatcagcccaggcgcttta

SEQ ID NO: 463529 - DNA, 75 bp, synthetic construct
  source 1..75: mol_type = other DNA
ttgcccctatacatccatcggcaatgttgttaataatggccacaggccagactcaacagcttattacattattca

SEQ ID NO: 463530 - DNA, 75 bp, synthetic construct
  source 1..75: mol_type = other DNA
tcttcaggctctattattcttctggatatgatggaagcggataaaaagcttatccattattgggtaatgactcca

SEQ ID NO: 463531 - DNA, 75 bp, synthetic construct
  source 1..75: mol_type = other DNA
aatgttggtattcaaaatgtctctaccgtctgcgtcgatccattaagatcgacgatggccgcgttgctgatgttc

SEQ ID NO: 463532 - DNA, 75 bp, synthetic construct
  source 1..75: mol_type = other DNA
cagctgttgcattcctgggtactactgtcaccagtaatgacgacacattagcgctgcagagttcagcggcaggct

SEQ ID NO: 463533 - DNA, 75 bp, synthetic construct
  source 1..75: mol_type = other DNA
acttcgccatcctcctgcagggagtcgcgttatcgcgagtaaggattttggcttcgctttagatattttcttttg

SEQ ID NO: 463534 - DNA, 75 bp, synthetic construct
  source 1..75: mol_type = other DNA
ggccgctaaaaatcatgacaacatgtcagctgttcatatagccattcatcataatcattataaaactgtagaaac

SEQ ID NO: 463535 - DNA, 75 bp, synthetic construct
  source 1..75: mol_type = other DNA
atcataataataatctgctggaaactgataaacactttgatcttcgactagctcaacaatttatattcaatcgtg

SEQ ID NO: 463536 - DNA, 75 bp, synthetic construct
  source 1..75: mol_type = other DNA
ggcgctgtatacctacatcgaaagtcttccacaggatccggcgcccatttcaatgaaacgcatgcgcgaccgtct

SEQ ID NO: 463537 - DNA, 75 bp, synthetic construct
  source 1..75: mol_type = other DNA
atgacgccgggagatgtggacctcactctgaactgggggcgaatcagcaatgtgcttccggagtatcggggagag

SEQ ID NO: 463538 - DNA, 75 bp, synthetic construct
  source 1..75: mol_type = other DNA
agaaaaacgccgtcgccggaagaaaaaactgcggacggagcgtgcggaagataatccatggataacatcaggagg

SEQ ID NO: 463539 - DNA, 75 bp, synthetic construct
  source 1..75: mol_type = other DNA
ggggatctggcttcgtgaaggtgaacgggcggcggcggacggcagtatcaccggaacgccacgaaactcccggat

SEQ ID NO: 463540 - DNA, 75 bp, synthetic construct
  source 1..75: mol_type = other DNA
gtgtgaacgtactggcgaaagacggttcgatgaaaattcaggttggtgcgaacgacggccagactatcacgattg

SEQ ID NO: 463541 - DNA, 75 bp, synthetic construct
  source 1..75: mol_type = other DNA
tgtatgtcttaatattgctcttggtggtgtcggtggttttgatggtggtgaacatcacccactgtacggaaagaa

SEQ ID NO: 463542 - DNA, 75 bp, synthetic construct
  source 1..75: mol_type = other DNA
tcaacgctgcttaatagccagtatcgggagttgattaacaacggtattcgactgacaggtcgtgttggatacacg

SEQ ID NO: 463543 - DNA, 75 bp, synthetic construct
  source 1..75: mol_type = other DNA
gtgattacagaagccggttatggcgactatttcggtcataacaccggtcatgctatcggcattgaagtccatgaa

SEQ ID NO: 463544 - DNA, 75 bp, synthetic construct
  source 1..75: mol_type = other DNA
cgtatcagttattcgctcttcggacgtttatcgaattcacccgcaaaaaatattcgaatttggcttcggatttgc

SEQ ID NO: 463545 - DNA, 75 bp, synthetic construct
  source 1..75: mol_type = other DNA
gggtaaaaagtgacactctggagctgtcgttcgttgaattcgttaaaatgtgtggatttgactcacggcgctcaa

SEQ ID NO: 463546 - DNA, 75 bp, synthetic construct
  source 1..75: mol_type = other DNA
cgcagtttggcgcacatctcaaaaaactcagactccagtcgggcctgtctcaggaagcattcgcggataagtgtg

SEQ ID NO: 463547 - DNA, 75 bp, synthetic construct
  source 1..75: mol_type = other DNA
aagagcagggccgttgtatcagcctggacgatatcctgtgtcgtgctgatgtggtgacggtggggattgacggcg

SEQ ID NO: 463548 - DNA, 75 bp, synthetic construct
  source 1..75: mol_type = other DNA
gtgattaccgaggcaggatttggcgactattttggtcacaacaccggtcatgctatcggtattgaagtacacgaa

SEQ ID NO: 463549 - DNA, 75 bp, synthetic construct
  source 1..75: mol_type = other DNA
ttcttttggatgaagtaaatctacgcgctttgaaaataataaaagcaggcaataaatggcctgcttttatgctgg

SEQ ID NO: 463550 - DNA, 75 bp, synthetic construct
  source 1..75: mol_type = other DNA
ctgtttacccttgcacagtctttcgaatgtgtagcattggacctgtttaatgatcatgctatagcgcaacgactt

SEQ ID NO: 463551 - DNA, 75 bp, synthetic construct
  source 1..75: mol_type = other DNA
cgttcgaccgggccattaatggcattattactggcgtaaaccagcccgtttcatgcgaaaacgaaaatttattgc

SEQ ID NO: 463552 - DNA, 75 bp, synthetic construct
  source 1..75: mol_type = other DNA
gtctatggatccagtcgcgcattcatctacgggctctacgttattatcgtaactggcggcaatactttgccggtt

SEQ ID NO: 463553 - DNA, 75 bp, synthetic construct
  source 1..75: mol_type = other DNA
gtcttcacggttactctaccacagtaaaccgaaaagtgtcattcaaagttttggttagttttttcggtgatgcga

SEQ ID NO: 463554 - DNA, 75 bp, synthetic construct
  source 1..75: mol_type = other DNA
cagctccggtgctatcgccctgctggtttatttagtcatcgccgtttcacagttgcggatgcgtaaaattctgcg

SEQ ID NO: 463555 - DNA, 75 bp, synthetic construct
  source 1..75: mol_type = other DNA
ccttccagttggcgctgaatgttgcaacgccgtttgtgctggtaggattaggactgatattcccgctgctggcgc

SEQ ID NO: 463556 - DNA, 75 bp, synthetic construct
  source 1..75: mol_type = other DNA
aaacatctctttctcggtatatgaccccagcagtagtcagtagtctgtcgaaaatgaaagagcttatttcagcat

SEQ ID NO: 463557 - DNA, 75 bp, synthetic construct
  source 1..75: mol_type = other DNA
atgtcgcatttattctggataggtttaaaaatatagattatgagatcccatcaaatcgagatattttgaaagtca

SEQ ID NO: 463558 - DNA, 75 bp, synthetic construct
  source 1..75: mol_type = other DNA
gttgatgttttttttaattccaagtctggtgagtatcattattttgatactattgttctggcgttgggatctaat

SEQ ID NO: 463559 - DNA, 75 bp, synthetic construct
  source 1..75: mol_type = other DNA
ttaatcaacctataccattaaataacagcaacttatacctgtctgatggcgcgctttgcgaagcggtaacgcgtg

SEQ ID NO: 463560 - DNA, 75 bp, synthetic construct
  source 1..75: mol_type = other DNA
tttttaatctgcgtaaaactaagcaacgcctgggctggtttaaccaggatgaagttgatatggtcgcccgggaac

SEQ ID NO: 463561 - DNA, 75 bp, synthetic construct
  source 1..75: mol_type = other DNA
ttcatctggcgcttttactcctgccagaaacgtcactatcacttcgttatcgcaccaacagaagatgaggcacgt

SEQ ID NO: 463562 - DNA, 75 bp, synthetic construct
  source 1..75: mol_type = other DNA
cttttgaactggcaggcaaatgccaacagaacagaacaaagaggcaacggacaaagctcaggaaaagatgatttt

SEQ ID NO: 463563 - DNA, 75 bp, synthetic construct
  source 1..75: mol_type = other DNA
atcatgggtgaggatggtaaacgctggcatccgtgccgttcgcaagatgaattgctggcagaactatcaacgaaa

SEQ ID NO: 463564 - DNA, 75 bp, synthetic construct
  source 1..75: mol_type = other DNA
cgtttcaggtcattgcaggtgattctcgtggtagtgggttcagcttcatgcgagaagatctggtcgtaaccaatt

SEQ ID NO: 463565 - DNA, 75 bp, synthetic construct
  source 1..75: mol_type = other DNA
gcaggaacccaccgaaatgattcaggcgacagcctgaacgtagcagggatcctcgtccttcagggcgtggaggat

SEQ ID NO: 463566 - DNA, 75 bp, synthetic construct
  source 1..75: mol_type = other DNA
tcttctcttatatcaatgctgtacttcagaagagagtaaccgtaacgttactattttttataatgataattgttt

SEQ ID NO: 463567 - DNA, 75 bp, synthetic construct
  source 1..75: mol_type = other DNA
aactcagccttttttatgagatgttatcgttaaaaatcaataattgttcgaagttaaaaaagctacatatcgaag

SEQ ID NO: 463568 - DNA, 75 bp, synthetic construct
  source 1..75: mol_type = other DNA
cagcctgccgctgtgagccgtgttcagtccattattgatgatctgcgcgatcagatagccctgcgggtgaccgaa

SEQ ID NO: 463569 - DNA, 75 bp, synthetic construct
  source 1..75: mol_type = other DNA
cagaagtgctgcagacggatagccgagtggttcctacaaagggggctgttgttaaggctggatttgaaacccgtt

SEQ ID NO: 463570 - DNA, 75 bp, synthetic construct
  source 1..75: mol_type = other DNA
tggtgtctctgtgggggggtggcctggcgtcagaacagattttcgcggatataccttagctgggtatgtgtcccc

SEQ ID NO: 463571 - DNA, 75 bp, synthetic construct
  source 1..75: mol_type = other DNA
tatagccgttatatgcgtcagatgagtgcggggatgtccggtggtatggttattcacagtgaaggtgtcactttg

SEQ ID NO: 463572 - DNA, 75 bp, synthetic construct
  source 1..75: mol_type = other DNA
tacctggagcttgtcgggagcctcttccagccggcgattctgtgcagcactcaccacgaagcgctgtccgtggcc

SEQ ID NO: 463573 - DNA, 75 bp, synthetic construct
  source 1..75: mol_type = other DNA
gaacgatgcagccttcccccgccagacacatgccgggaacccggcgctctacccgcaggtcaaaatggtctgcca

SEQ ID NO: 463574 - DNA, 75 bp, synthetic construct
  source 1..75: mol_type = other DNA
gatgcaaatcgtaacatctcttcagggagtaaggatttattgcaaagcgaaggtaaagcaagggagaaaaaagcc

SEQ ID NO: 463575 - DNA, 75 bp, synthetic construct
  source 1..75: mol_type = other DNA
ttgtaccgcaggatatagcacaattgctggttgatacattaaatataaccaacgaacgattaccgataggatcat

SEQ ID NO: 463576 - DNA, 75 bp, synthetic construct
  source 1..75: mol_type = other DNA
ggctatgccaacagcaagagtcacacgcattccagcctgaccgggtacagctctcgtgggcaaatcgacggctac

SEQ ID NO: 463577 - DNA, 75 bp, synthetic construct
  source 1..75: mol_type = other DNA
gaccaaaagcgacaaccagaactggtttttaaccagtgaaattcccgcaggaccgtataccccaccggaactgcc

SEQ ID NO: 463578 - DNA, 75 bp, synthetic construct
  source 1..75: mol_type = other DNA
gccttacattgaagcgaattggatcaacaacagcaaagtctacgccgtgaagatgaatggtcaaaccgtaggccg

SEQ ID NO: 463579 - DNA, 75 bp, synthetic construct
  source 1..75: mol_type = other DNA
aaattcgttatagagaatcacagttccatcatgccgactggaagcagactgtaagtacattgatgaataaaacgc

SEQ ID NO: 463580 - DNA, 75 bp, synthetic construct
  source 1..75: mol_type = other DNA
atccactatttatcccatacccaaagtgattcagaaaaaatcgaatgtatttatcgactggcatttgcaactctt

SEQ ID NO: 463581 - DNA, 75 bp, synthetic construct
  source 1..75: mol_type = other DNA
attcagccttgaagcaattcagggctaccgccgtcatcgactggctcgacgttgagatacgcaccgaacacccaa

SEQ ID NO: 463582 - DNA, 75 bp, synthetic construct
  source 1..75: mol_type = other DNA
aacagaatacgagcgccgacgcgccgccagcgcggaaccggtgaagcgcatcaccgtagcggatgcgattaacta

SEQ ID NO: 463583 - DNA, 75 bp, synthetic construct
  source 1..75: mol_type = other DNA
tgaacccctactacgccgatttgacgcgattgttaatcgtgtttggttgccgaacggcagaagccagacggtcac

SEQ ID NO: 463584 - DNA, 75 bp, synthetic construct
  source 1..75: mol_type = other DNA
tggcagtgctatcacaagcgcaccgatagaaagcagccgctgccgcttcgtcagcagcgtgcccgcgtggaggtg

SEQ ID NO: 463585 - DNA, 75 bp, synthetic construct
  source 1..75: mol_type = other DNA
gtgacttctggcacaaacaacagtcagttgaagcaacacgcgccctcacatatcggatgcaaacaagcctgttcg

SEQ ID NO: 463586 - DNA, 75 bp, synthetic construct
  source 1..75: mol_type = other DNA
taccgccgtcatcgactggctcgacgttgagatacacaccgaatgcccaacacagcaccaacacatccgcagagc

SEQ ID NO: 463587 - DNA, 75 bp, synthetic construct
  source 1..75: mol_type = other DNA
gatcgctggcatcttggcgtgatggcaggttacgctaatcagcacagtaatactcagagtaattcaaaggcttta

SEQ ID NO: 463588 - DNA, 75 bp, synthetic construct
  source 1..75: mol_type = other DNA
ataacagtgctgatgcttatgtgtttaatggcggcgtccccaacagcagtatgtggcgcaccgtcgttcccggat

SEQ ID NO: 463589 - DNA, 75 bp, synthetic construct
  source 1..75: mol_type = other DNA
tttatcagtcacgcaggaaactaaaagcgagaagaaatcagctactgatatcgtgaacgagctacgcagtaaggc

SEQ ID NO: 463590 - DNA, 75 bp, synthetic construct
  source 1..75: mol_type = other DNA
tgtatgcgtttaaggtgcagtttccgtccggtaagggctttaagttcctggcggaagtgcgtcagcacacctggt

SEQ ID NO: 463591 - DNA, 75 bp, synthetic construct
  source 1..75: mol_type = other DNA
aggatttaagcaaatttactggagatattacagcagacaactcaaacattatcataaacaataaattcgaaggtg

SEQ ID NO: 463592 - DNA, 75 bp, synthetic construct
  source 1..75: mol_type = other DNA
cgaaggtgacgctacctacagagctgctatcgacaaagcattaacccctgttgggttaaacggaatgtttgggta

SEQ ID NO: 463593 - DNA, 75 bp, synthetic construct
  source 1..75: mol_type = other DNA
cttggtggcgaacttatagtcccagccgcgggtaccgttgctgttattgggggtagccttttaggaggtgtaaca

SEQ ID NO: 463594 - DNA, 75 bp, synthetic construct
  source 1..75: mol_type = other DNA
tcgggggcgggcaagcggcggcaatggctgcggcctcgctacgccagcaagggttcaccggtgagctgcatctgt

SEQ ID NO: 463595 - DNA, 75 bp, synthetic construct
  source 1..75: mol_type = other DNA
tgaagtcagtgttatttttgatggtgaagacgcacaacgtgcattacaacagctgagcactgaaattgaaaacgg

SEQ ID NO: 463596 - DNA, 75 bp, synthetic construct
  source 1..75: mol_type = other DNA
cccttcgctatccgcaaaaagtgaaggatgaattcaagcgaattgctcaggaggaagggatgtctgagaacgcag

SEQ ID NO: 463597 - DNA, 75 bp, synthetic construct
  source 1..75: mol_type = other DNA
gacagttcccctgcagaatcaaagcaaataaaaatgcatataccttgacttttaattcaaataaaccgtttgcgc

SEQ ID NO: 463598 - DNA, 75 bp, synthetic construct
  source 1..75: mol_type = other DNA
tcccgttcgtccggtttagttggtcactatctcttattgagttttatccttgcctgggtgatgctgccaacttac

SEQ ID NO: 463599 - DNA, 75 bp, synthetic construct
  source 1..75: mol_type = other DNA
ggtgccggaactattggtctggaactggctgccagcgccacgcagcgcagcgcagcgcagcgcagcgcagatgta

SEQ ID NO: 463600 - DNA, 75 bp, synthetic construct
  source 1..75: mol_type = other DNA
agcatgtcagacggttgattgagacggtggaatacaccgataccgaaaccttcgggcaccgttttctttttcagc

SEQ ID NO: 463601 - DNA, 75 bp, synthetic construct
  source 1..75: mol_type = other DNA
ccaccgatgcagcaaccaaagccgaaaccaccgccgatcccctgaaagctctggacgaagccatcagctccatcg

SEQ ID NO: 463602 - DNA, 75 bp, synthetic construct
  source 1..75: mol_type = other DNA
gttactaccggaggtgcgcctacttatactgatgctgatggtaaattaacgacaaccaacaccgttgattatttc

SEQ ID NO: 463603 - DNA, 75 bp, synthetic construct
  source 1..75: mol_type = other DNA
attgcaggggtattttttggcttccttgcagtagtatctgctttttttacattatacatgaacttagatttaaaa

SEQ ID NO: 463604 - DNA, 75 bp, synthetic construct
  source 1..75: mol_type = other DNA
gctagcatcaaagacggcagtgctccgacttctgcaattactgcaaccattaataatggcttcggtgattccagt

SEQ ID NO: 463605 - DNA, 75 bp, synthetic construct
  source 1..75: mol_type = other DNA
tctgaccactgaagctactggtaaatccgaagcgaccacggatccgctgaaagcgctggacgatgctatcgcatc

SEQ ID NO: 463606 - DNA, 75 bp, synthetic construct
  source 1..75: mol_type = other DNA
cgccaacgacggtatctccgttgcgcagaccaccgaaggcgcgctgtccgaaatcaacaacaacttacagcgtat

SEQ ID NO: 463607 - DNA, 75 bp, synthetic construct
  source 1..75: mol_type = other DNA
cttgatgcttacagtcgaaatttttctaaacaaaaatatatgtatgagcccttcatgcctgaccatacatcattg

SEQ ID NO: 463608 - DNA, 75 bp, synthetic construct
  source 1..75: mol_type = other DNA
tatgtcgaaagcgcagatcatccagcaggcaggcaactccgtgctggcaaaagccaaccaggtaccgcagcaggt

SEQ ID NO: 463609 - DNA, 75 bp, synthetic construct
  source 1..75: mol_type = other DNA
agatcatccagcaggccggtaactccgtgctggcaaaagccaaccaggtaccacaacaggttctgtctctgctgc

SEQ ID NO: 463610 - DNA, 75 bp, synthetic construct
  source 1..75: mol_type = other DNA
atctggcaaaaattgatgcgaaaactctcggcctggacggttttaatatcgatggcgcgcagaaagcaactggca

SEQ ID NO: 463611 - DNA, 75 bp, synthetic construct
  source 1..75: mol_type = other DNA
accacaaaatattatttacaagatgacgggtctgtaactaatggttctggtaaagctgtgtatgctgatgcaaca

SEQ ID NO: 463612 - DNA, 75 bp, synthetic construct
  source 1..75: mol_type = other DNA
ttgcgaatactctgaaaccagcggctggcactactgcatcaggtgtttatactcgtagtactggtgatgtgaagt

SEQ ID NO: 463613 - DNA, 75 bp, synthetic construct
  source 1..75: mol_type = other DNA
ggcacgatgccgatcctgaacaaaccgggaaagcagaagcgactgagccggtaacatcaaaaaagcattcgaagg

SEQ ID NO: 463614 - DNA, 75 bp, synthetic construct
  source 1..75: mol_type = other DNA
atgcggatagaatgagcgagttattaaccgctttaacgtataaaaatggaaatcctaagtatgctttaacacaag

SEQ ID NO: 463615 - DNA, 75 bp, synthetic construct
  source 1..75: mol_type = other DNA
gctcggcattacccagggaatatggaagcactcccatgcaggtaaaaagcctcgccagtcccatgtgaaagccaa

SEQ ID NO: 463616 - DNA, 75 bp, synthetic construct
  source 1..75: mol_type = other DNA
aaataaatgagtcattgattatcaaccatggaattaaagtcacagcctttgaggataatatcaaaggcataatcg

SEQ ID NO: 463617 - DNA, 75 bp, synthetic construct
  source 1..75: mol_type = other DNA
tggcttatgttattataactgcattaccgttactaacgttgaagatttacaatcctgatgcgtcatttttgataa

SEQ ID NO: 463618 - DNA, 75 bp, synthetic construct
  source 1..75: mol_type = other DNA
gttctactccacctccgtggcgctgttcccatggctggaaggcaccattcgttatacggatgtgcgcacacgcaa

SEQ ID NO: 463619 - DNA, 75 bp, synthetic construct
  source 1..75: mol_type = other DNA
tttgctatggcataaagagcaggggatcacagcgatcgcgattgatctgagtcaggcgaaggcatgggagcgcgc

SEQ ID NO: 463620 - DNA, 75 bp, synthetic construct
  source 1..75: mol_type = other DNA
tggcgcgtgcgctggatgacgggctattactataaggtcattaaccagaacaatcgccgcgtcacaatcggcctg

SEQ ID NO: 463621 - DNA, 75 bp, synthetic construct
  source 1..75: mol_type = other DNA
gtggcgctggcgcagcttggagataccgcagcggcgcagcagacgtttaataagttgatcccgcaggcaaaatct

SEQ ID NO: 463622 - DNA, 75 bp, synthetic construct
  source 1..75: mol_type = other DNA
atgactttcctgaaacataaggcatcgtataaaactacccgcctcattgcacaacatggagattcttatcttcat

SEQ ID NO: 463623 - DNA, 75 bp, synthetic construct
  source 1..75: mol_type = other DNA
tgctttttgaaaggtgaaactactaaaacagtcaatggtattcctaaaaaagaagtatggcaaacacaccgcata

SEQ ID NO: 463624 - DNA, 75 bp, synthetic construct
  source 1..75: mol_type = other DNA
aggaactccgtagccaagtacagcaacaaagaatcgatgataaaatccccacctatgttaacgatgttaaatcag

SEQ ID NO: 463625 - DNA, 75 bp, synthetic construct
  source 1..75: mol_type = other DNA
aaaccatgccgcgttatccgctgatgaatctgatcccgaccgactggcaggaagaagctgcgcggcaatccaacg

SEQ ID NO: 463626 - DNA, 75 bp, synthetic construct
  source 1..75: mol_type = other DNA
aaaggttaatggcgatacagaaattggcatgagcgcaactgaggttgctaattttttgattaaaaataagatttt

SEQ ID NO: 463627 - DNA, 75 bp, synthetic construct
  source 1..75: mol_type = other DNA
ccgaccaggattactgtagggataacacatgcgtcaggttccggtaataaagatgcaacggaagcaattgtacgt

SEQ ID NO: 463628 - DNA, 75 bp, synthetic construct
  source 1..75: mol_type = other DNA
tgcttacgatcgtgagcatgtggtcatgttgtctgactggaccgatgaaagtaagcgtcgtctgagtaccgtctg

SEQ ID NO: 463629 - DNA, 75 bp, synthetic construct
  source 1..75: mol_type = other DNA
tacatggcgttagccgcaagaccgttacgatgtggaaaagccggggatggctgatcatgtccggcgatgatatcg

SEQ ID NO: 463630 - DNA, 75 bp, synthetic construct
  source 1..75: mol_type = other DNA
cggggtgtcatgtatcgctatcaggatgtgatgaagttctttaaatcgattggactactttctgacagcgataac

SEQ ID NO: 463631 - DNA, 75 bp, synthetic construct
  source 1..75: mol_type = other DNA
ctgcgcctcagcgatcccgacgcggcactcattatcagtcggggccagatgcaggaaggagacgaattagcctcc

SEQ ID NO: 463632 - DNA, 75 bp, synthetic construct
  source 1..75: mol_type = other DNA
cgggtaatccgaaaacagcagaacaatatcagatgacaaaacgatattcggtcacctggcttttttcagaagacg

SEQ ID NO: 463633 - DNA, 75 bp, synthetic construct
  source 1..75: mol_type = other DNA
agagggagaaatcaggcgtacgcctcttcgtcgtggtgtccgtactttatgggaggcagccagagaaacggaaaa

SEQ ID NO: 463634 - DNA, 75 bp, synthetic construct
  source 1..75: mol_type = other DNA
tttcgacgcagccgaccttgtcgtcaccgcgcggtacgctggttcacttcgcaaccggaacatgccagcaatact

SEQ ID NO: 463635 - DNA, 75 bp, synthetic construct
  source 1..75: mol_type = other DNA
cagccattccggtctgcaggaacaggagggggtatacggcataagcgctaacttaagggttgaaccatctgaaga

SEQ ID NO: 463636 - DNA, 75 bp, synthetic construct
  source 1..75: mol_type = other DNA
tcatcactgattaatctgcgcttatccttcgaccgatcacgctggtattttttgacaaccggcgcccatgaaaac

SEQ ID NO: 463637 - DNA, 75 bp, synthetic construct
  source 1..75: mol_type = other DNA
gtcacctggcttttttcagaagacggaaaaaactggtatgaagagctgaagaatttcgccagcgacacaataaaa

SEQ ID NO: 463638 - DNA, 75 bp, synthetic construct
  source 1..75: mol_type = other DNA
cgacccgataaacagaaaacgtctgcgccagaaaaaaagaaagctgaccggctgttgcctgcgcgggagccgccg

SEQ ID NO: 463639 - DNA, 75 bp, synthetic construct
  source 1..75: mol_type = other DNA
gcgcctgtggttcgtgggattgcaaaatccaacgccaccgtcatcattcgacagaacggctacgtaatttatcag

SEQ ID NO: 463640 - DNA, 75 bp, synthetic construct
  source 1..75: mol_type = other DNA
gtcagcgtatttaatccggcgctgctggaaatagaccatcaatccggagtcgatattcgccagtttaacaaagcg

SEQ ID NO: 463641 - DNA, 75 bp, synthetic construct
  source 1..75: mol_type = other DNA
ggaaaacctcaccatggggatgccggaagccagcgatgaagatatcgaacgcgcgttaacgctaagtggcgcgct

SEQ ID NO: 463642 - DNA, 75 bp, synthetic construct
  source 1..75: mol_type = other DNA
atcttttaagtatggaatatctatactcattgattttctatggttatataaatcactgacaaacaaattattatt

SEQ ID NO: 463643 - DNA, 75 bp, synthetic construct
  source 1..75: mol_type = other DNA
tgtgaacctttccgccagtgggtaatagaagataactttgttgccggacgtccggaatggggaaaaagcgggagc

SEQ ID NO: 463644 - DNA, 75 bp, synthetic construct
  source 1..75: mol_type = other DNA
gtggttcgtgggattgcaaagtccaacgccaccgtcatcattcggcagaatggctacgtgatttatcagtctgcc

SEQ ID NO: 463645 - DNA, 75 bp, synthetic construct
  source 1..75: mol_type = other DNA
tcgttacgatggttcccacccgtggtgcagtggttaaggccgaatttgttactcgtgttggttatcgtgtgcttt

SEQ ID NO: 463646 - DNA, 75 bp, synthetic construct
  source 1..75: mol_type = other DNA
ggctcatcctggcagtttgacagtgataaattgcagctgaatatatccattccccaaatctacatggacgcgatg

SEQ ID NO: 463647 - DNA, 75 bp, synthetic construct
  source 1..75: mol_type = other DNA
atctgcacgcttgctttattgccattaaaaaaacactgtcctcctttggcataaaagttgatgcgctcaaatcgt

SEQ ID NO: 463648 - DNA, 75 bp, synthetic construct
  source 1..75: mol_type = other DNA
gaatttgttacccacgtgggctatcgcgtactcttcaaagtggtgaatgcaaaaggtaagccagcaccttttggc

SEQ ID NO: 463649 - DNA, 75 bp, synthetic construct
  source 1..75: mol_type = other DNA
tggtctaccagaaaaaggacaggttacgttatcctggggagaaaacgcctcaacaaaatgcatcttcaattattc

SEQ ID NO: 463650 - DNA, 75 bp, synthetic construct
  source 1..75: mol_type = other DNA
gaaaaaggacaggttacgttatcctggggagaaaacgcctcaacaaaatgcatcttcaattattcactttcgaca

SEQ ID NO: 463651 - DNA, 75 bp, synthetic construct
  source 1..75: mol_type = other DNA
gatggtttgggagaggcaggccgctggtgccttgaatactggctgcgtccggatattaaattcaggctgaatggt

SEQ ID NO: 463652 - DNA, 75 bp, synthetic construct
  source 1..75: mol_type = other DNA
cagctgttccgtacacgcgggaaagtcggtgtggtgacgggctggaagtcattgttccaggctgaaaaagatgac

SEQ ID NO: 463653 - DNA, 75 bp, synthetic construct
  source 1..75: mol_type = other DNA
cgggattgccggaggcgctgaccagtccggggacaacggcgctgtgggaacaggctctggatgatattgcacagg

SEQ ID NO: 463654 - DNA, 75 bp, synthetic construct
  source 1..75: mol_type = other DNA
tttcagccggcaggaaaagcgcctgctgctgaagaacggcgggaagattgacttctgggtcaccaacgacaacaa

SEQ ID NO: 463655 - DNA, 75 bp, synthetic construct
  source 1..75: mol_type = other DNA
tgcggataaagatatttattctgaagccgtttctgaacttgatttattaggttgggaaagtgatgatataatagt

SEQ ID NO: 463656 - DNA, 75 bp, synthetic construct
  source 1..75: mol_type = other DNA
cgtaattggtagttgtaatttgggtgaattattagtaagtgtaaccgaagagggcctttctaggcttgaatctaa

SEQ ID NO: 463657 - DNA, 75 bp, synthetic construct
  source 1..75: mol_type = other DNA
gttaaaccgcagacgaaatcccagtttacggtgatcagccgcctgctgaagcgtgcgtctgaagtggtgatcgcc

SEQ ID NO: 463658 - DNA, 75 bp, synthetic construct
  source 1..75: mol_type = other DNA
tcctgctcgacgaacccagcgcctcgctggacgaaatggcagaagcgcatttaatcgaacatctgaaacagtgga

SEQ ID NO: 463659 - DNA, 75 bp, synthetic construct
  source 1..75: mol_type = other DNA
tctggcattacgatgcgtcagaccgtatcacccggcgcacggtgaacggcgacccggcggaacagtggcagtatg

SEQ ID NO: 463660 - DNA, 75 bp, synthetic construct
  source 1..75: mol_type = other DNA
cttacagcagttataacccgcgtggcaactggtcagtcagagggatgcgcaggggcgggagacccgttatgagta

SEQ ID NO: 463661 - DNA, 75 bp, synthetic construct
  source 1..75: mol_type = other DNA
ctgggatggccggtcaacaaaattgaatccgccctgaccagcaaagggaaggacgagcgcgccattatggcctct

SEQ ID NO: 463662 - DNA, 75 bp, synthetic construct
  source 1..75: mol_type = other DNA
ggattccgtccgttttcacccggctgaatgagctatccggccagtgcgtcgctgtaaatggcagcctcggcgttt

SEQ ID NO: 463663 - DNA, 75 bp, synthetic construct
  source 1..75: mol_type = other DNA
gatttttaccgcacaataccgccagtaccaggaaatctgggatgaaattagcgccgttctgcaaccgctgatcct

SEQ ID NO: 463664 - DNA, 75 bp, synthetic construct
  source 1..75: mol_type = other DNA
aaatcttgatttttctgatttaggaatatttgctattggagataatggtcacttatcggaatctgttggtacaag

SEQ ID NO: 463665 - DNA, 75 bp, synthetic construct
  source 1..75: mol_type = other DNA
ttctcgataaatacccaagaaattacgttgaatatggagagcacataaaggatatattcaaaaacttgattttcc

SEQ ID NO: 463666 - DNA, 75 bp, synthetic construct
  source 1..75: mol_type = other DNA
atacagccgagcctgaatgttaacccatccagccatcctgaatacaacgacaatcttagccgctcaaaagcccta

SEQ ID NO: 463667 - DNA, 75 bp, synthetic construct
  source 1..75: mol_type = other DNA
tgaccgcaatgtatggtatgccatggaatctgacaacatttgtaggattccaaggctctgaacattacaattctg

SEQ ID NO: 463668 - DNA, 75 bp, synthetic construct
  source 1..75: mol_type = other DNA
tgaacagcggtgacggtgatgcggtgaaaggggacgaggccggacgtcaggccaccgggaaggaaggtaagaaat

SEQ ID NO: 463669 - DNA, 75 bp, synthetic construct
  source 1..75: mol_type = other DNA
tcaggccatgctaagactgattgaggaaaccgttccggttcagcaaatctggcttgatacggctgagacaaaaga

SEQ ID NO: 463670 - DNA, 75 bp, synthetic construct
  source 1..75: mol_type = other DNA
ccatcgcgacagcaaaacgtcgttctcgcgtagttaaaagcaaagtggaaggtcgcgcacaaaatgctccgaaga

SEQ ID NO: 463671 - DNA, 75 bp, synthetic construct
  source 1..75: mol_type = other DNA
gacgagttttacggcagcgagttatcagtactcatcggatggttaccatacgctgccggacgtgctggacacctg

SEQ ID NO: 463672 - DNA, 75 bp, synthetic construct
  source 1..75: mol_type = other DNA
gtggacctgaccctgtttgaggaaggtgggcagttacccggcatttatccggttgacattatcctgaatggttcc

SEQ ID NO: 463673 - DNA, 75 bp, synthetic construct
  source 1..75: mol_type = other DNA
ctaattttgccaccagagttggaggacgagcgttaataacactgacacgatcagatggaactccagtcccatttg

SEQ ID NO: 463674 - DNA, 75 bp, synthetic construct
  source 1..75: mol_type = other DNA
tggtcaatgggcagactgggggcggtgtcggttgacggcattcattcccgcggtcagcagaagggacgggatacg

SEQ ID NO: 463675 - DNA, 75 bp, synthetic construct
  source 1..75: mol_type = other DNA
atgatgctgttgagcattcaccgctggggcagatgagtgtcatgtatggtctgccatgggggctgacggccttcg

SEQ ID NO: 463676 - DNA, 75 bp, synthetic construct
  source 1..75: mol_type = other DNA
aaaggtggcggaaagggggtggacctgacgttgtttgaagaaggagcccaactgcccggtatctatccggttgat

SEQ ID NO: 463677 - DNA, 75 bp, synthetic construct
  source 1..75: mol_type = other DNA
taagaatgctcttgctggtgccgcaggcgctgccaccggcgaggtggtgggaatgatagccacacagatgtacgg

SEQ ID NO: 463678 - DNA, 75 bp, synthetic construct
  source 1..75: mol_type = other DNA
gctttatgacggtatcaaaggacgcataaaaacccgtaacatccagaataacagacattcagttgaaaatattct

SEQ ID NO: 463679 - DNA, 75 bp, synthetic construct
  source 1..75: mol_type = other DNA
attgcaactagtacaaaatgaattgcctggttcaggttttgaacccgcgagcagtgaacgtgtatttcatctttg

SEQ ID NO: 463680 - DNA, 75 bp, synthetic construct
  source 1..75: mol_type = other DNA
ataatttctattcttaaacgactgaaacgagacccttcagttccctatgaaggttatatcatttcagaagcggat

SEQ ID NO: 463681 - DNA, 75 bp, synthetic construct
  source 1..75: mol_type = other DNA
ttttttagagagttaaggcgcgcaggcatcaaaggaattgacaatcatcgtgatgccatagcatggtgtatacaa

SEQ ID NO: 463682 - DNA, 75 bp, synthetic construct
  source 1..75: mol_type = other DNA
atagtaattttcgcgaatgtcagattatagactggccccctgaatcaccagacaaccaatatcacttatttaagt

SEQ ID NO: 463683 - DNA, 75 bp, synthetic construct
  source 1..75: mol_type = other DNA
tatcttcctgagaaagaaaatgaagacagaaaaaataaattaccggatgagcgagctttactcgctatagccgaa

SEQ ID NO: 463684 - DNA, 75 bp, synthetic construct
  source 1..75: mol_type = other DNA
cgcacctacagcagttaccggacaaaacgcccgcgccggtggggagcctcggccccggctggaaaatgcctgcgg

SEQ ID NO: 463685 - DNA, 75 bp, synthetic construct
  source 1..75: mol_type = other DNA
gacaatgatgcttcaaaagtacctcataagaatgaatggcaatatgctggtgtaaatagggcgttagcactgtgt

SEQ ID NO: 463686 - DNA, 75 bp, synthetic construct
  source 1..75: mol_type = other DNA
tagtcactctgattagtatgcgtcgaagtacacacctacggtgtaatggtgttcttttgtatcgggttgaagctc

SEQ ID NO: 463687 - DNA, 75 bp, synthetic construct
  source 1..75: mol_type = other DNA
ctgcgaaaggtggtggtgcgactattaagtggatacctgatgtcatgatccctgtcgcccaaaaagctatttcaa

SEQ ID NO: 463688 - DNA, 75 bp, synthetic construct
  source 1..75: mol_type = other DNA
attcccccttgccgaaaattggcagaagctcaggcatatggatgggaagattatggtgagatgaatgagcaacag

SEQ ID NO: 463689 - DNA, 75 bp, synthetic construct
  source 1..75: mol_type = other DNA
aagtgtatatgggcctcccgctccagaccgggcaggtgctgaaactcctcttgttcttactgatatgactggagg

SEQ ID NO: 463690 - DNA, 75 bp, synthetic construct
  source 1..75: mol_type = other DNA
aatcagcctggccgggaaaggggatgtggtttactgcgatccgccttacgaaccgatgccgggaacagccggatt

SEQ ID NO: 463691 - DNA, 75 bp, synthetic construct
  source 1..75: mol_type = other DNA
ttggtggtgggtcagtattcctgaacagcgaaaagcacgcagattacctgctggcggacgttaacccggacctga

SEQ ID NO: 463692 - DNA, 75 bp, synthetic construct
  source 1..75: mol_type = other DNA
ggcctgttattgcaagggcagtggctggatgcctccattcaactcactggtgcgttgggcgggggttacaaacgc

SEQ ID NO: 463693 - DNA, 75 bp, synthetic construct
  source 1..75: mol_type = other DNA
gtagccgcatttattatctatttcaaaacaattgcagagtttctaagccttccgccatcctggatcgaggtattt

SEQ ID NO: 463694 - DNA, 75 bp, synthetic construct
  source 1..75: mol_type = other DNA
aaattctttataaagagaatagagagaagcttcctgactcaaggatagacagaataatcgacaggggccctcact

SEQ ID NO: 463695 - DNA, 75 bp, synthetic construct
  source 1..75: mol_type = other DNA
atctgtaccgggagcatggttttaacctgcaattcatcaaagcgcgccgttcgatctcctgcaaaagcagtacgc

SEQ ID NO: 463696 - DNA, 75 bp, synthetic construct
  source 1..75: mol_type = other DNA
gttagtcgactcgaagcatcggatgttaaactagtgaccgtgaaacctgacgctacattaacagaagccatcaca

SEQ ID NO: 463697 - DNA, 75 bp, synthetic construct
  source 1..75: mol_type = other DNA
ttagaaagcttaggagttaaaaccgaacctgattttgatagtgtgccgctggatgcaaaaattactatctatgca

SEQ ID NO: 463698 - DNA, 75 bp, synthetic construct
  source 1..75: mol_type = other DNA
ttggcgctcttgattttcgccgttttatcgctgctggtggcgggtgaattgcgggcaggagtggtggtcggcgga

SEQ ID NO: 463699 - DNA, 75 bp, synthetic construct
  source 1..75: mol_type = other DNA
cgctttaacgcgggcatcattgctggttcccgcgtcagcgaagccagaatccccgcgctgcgtgagcgggccaat

SEQ ID NO: 463700 - DNA, 75 bp, synthetic construct
  source 1..75: mol_type = other DNA
cgtggagcgcggaatatgatgaatggggcaaccagcttaatgaggagaacccgcatcatgtgtatcagccgtacc

SEQ ID NO: 463701 - DNA, 75 bp, synthetic construct
  source 1..75: mol_type = other DNA
gcgctgtcgtgacgggaccggcaggcgaggaaatcttctgtgatgaacatggccgcgtgcgggtgaaatttaact

SEQ ID NO: 463702 - DNA, 75 bp, synthetic construct
  source 1..75: mol_type = other DNA
cgcgaaagaggccattttgcgtgaacagggcgagcccacagcgcgacgggtggtgttgcagatgaaaaataaggg

SEQ ID NO: 463703 - DNA, 75 bp, synthetic construct
  source 1..75: mol_type = other DNA
atggttgaggtaattaggtggtatcaaatctggcttattgagtttgtgttggatgttagttgggtgatgctgact

SEQ ID NO: 463704 - DNA, 75 bp, synthetic construct
  source 1..75: mol_type = other DNA
tgtaagagcgattctggaagctgagttattgtttatgtatttatctgagaatccagattcaactgaggagtggtc

SEQ ID NO: 463705 - DNA, 75 bp, synthetic construct
  source 1..75: mol_type = other DNA
aggtcgttccgttagcctgcatcgccagcaaattaaagagtggctggcgcgtcgggccaataacccattgccata

SEQ ID NO: 463706 - DNA, 75 bp, synthetic construct
  source 1..75: mol_type = other DNA
aagaaaatgagctggggagaaagttaactccagcagaagaaaaaaaactatataacaatgcaacagctattgaag

SEQ ID NO: 463707 - DNA, 75 bp, synthetic construct
  source 1..75: mol_type = other DNA
taccggcagcgatatgcagcgcggtatccaggctgcaacggctgcacttcagggcctggcgggcggcaatatggc

SEQ ID NO: 463708 - DNA, 75 bp, synthetic construct
  source 1..75: mol_type = other DNA
gtagcacgaagatggatgcgcaccgggatgaacttcttgccggggctatagaatttggcagcgattttattcctg

SEQ ID NO: 463709 - DNA, 75 bp, synthetic construct
  source 1..75: mol_type = other DNA
tatcatcttttaaaattacgactaatcaattaatacaaaaaacagcttgctgcacaactgaaaaaaacgaccacc

SEQ ID NO: 463710 - DNA, 75 bp, synthetic construct
  source 1..75: mol_type = other DNA
tagaagatatatcgaattaaaaagtatttacattaatggaagaagagtgtttaactttatgattgtttctttctg

SEQ ID NO: 463711 - DNA, 75 bp, synthetic construct
  source 1..75: mol_type = other DNA
ctctgcattcttatactatttttatttatattacttatacgtatacttgcaaatctagctctttttgataattta

SEQ ID NO: 463712 - DNA, 75 bp, synthetic construct
  source 1..75: mol_type = other DNA
ttttattagtgggatatttgcaacaaggtttgcaaatggcaggagtgccaaatcaggtgtccagcgccctttccg

SEQ ID NO: 463713 - DNA, 75 bp, synthetic construct
  source 1..75: mol_type = other DNA
gtcgtaaaattggtaatggatatcctccatatatcattgctgaattatcagcaaatcataatggtgatctagaac

SEQ ID NO: 463714 - DNA, 75 bp, synthetic construct
  source 1..75: mol_type = other DNA
acgaccccgtgagtctggtttctggctttgtcagctttgtagaggggcaattgacactggaaccacgggtgatga

SEQ ID NO: 463715 - DNA, 75 bp, synthetic construct
  source 1..75: mol_type = other DNA
cgttatattaatttctttaaatagaatctcctgtgccgagataatcgtcgatagagggattaaaagaggtataca

SEQ ID NO: 463716 - DNA, 75 bp, synthetic construct
  source 1..75: mol_type = other DNA
gtctggatcggttaggccgttcgctccccgatctggttcgcatcgtgggggagttggagcagcgcggtgttggct

SEQ ID NO: 463717 - DNA, 75 bp, synthetic construct
  source 1..75: mol_type = other DNA
ttcgcttcgccccgcgaatccgcgacctggccgacaaacgcctgtatgtccacggcgatgccaaacattatccga

SEQ ID NO: 463718 - DNA, 75 bp, synthetic construct
  source 1..75: mol_type = other DNA
ggatgttcaacgactcctttggggtcatcaacaacgcgatcctttcattcttcggcatcagtccgaaggcatggc

SEQ ID NO: 463719 - DNA, 75 bp, synthetic construct
  source 1..75: mol_type = other DNA
cagaggccaccggagccgccggataacttcggagacctgagaaaggcagtcgatcgcacttatgctgaaatgggt

SEQ ID NO: 463720 - DNA, 75 bp, synthetic construct
  source 1..75: mol_type = other DNA
tttagcaatctatatgttggcatcattgggtataattaatcctataggacaatatgtgaatcgcaacacttattt

SEQ ID NO: 463721 - DNA, 75 bp, synthetic construct
  source 1..75: mol_type = other DNA
ctcgtccatcagcatgaagcaacgttttctcaccgggctactgctcacctggacccaggaagtgcaatccatcgt

SEQ ID NO: 463722 - DNA, 75 bp, synthetic construct
  source 1..75: mol_type = other DNA
taaatttggcattcgaccatctttcggcatttaataaggacttatctgaagagtttaaaaatatcacgctcacag

SEQ ID NO: 463723 - DNA, 75 bp, synthetic construct
  source 1..75: mol_type = other DNA
caacagcggcaccattcgtaccccgggcgggaagacggtgctggctgccggtaaacgggtcacgctgcaactgga

SEQ ID NO: 463724 - DNA, 75 bp, synthetic construct
  source 1..75: mol_type = other DNA
atggtaatgctgatgccactaacgctaccatcaacggcagctcgaataccggaaccggaaccagcattcagggtt

SEQ ID NO: 463725 - DNA, 75 bp, synthetic construct
  source 1..75: mol_type = other DNA
gccattgcggcgaccatcaccatcctgctgtctgtttttgtcgtcggcctggcgctatggcagttccgcgccacc

SEQ ID NO: 463726 - DNA, 75 bp, synthetic construct
  source 1..75: mol_type = other DNA
atggaaaccgtatttgacgcactgaaagcactgaaaaaagcctcttcacaggtagtggcatcgcgccttggaatc

SEQ ID NO: 463727 - DNA, 75 bp, synthetic construct
  source 1..75: mol_type = other DNA
cgatttgccacctggcgcgaatgaagaaaatgcgggtagtggcagagtacgttgaaaacgaagagatccgcgagg

SEQ ID NO: 463728 - DNA, 75 bp, synthetic construct
  source 1..75: mol_type = other DNA
cacaggagcttaaggacaaacttattgacgaggctaaattcaacctcgaactgaggaatgcaattaaattgaaaa

SEQ ID NO: 463729 - DNA, 75 bp, synthetic construct
  source 1..75: mol_type = other DNA
ccagctgcggcaatatgtctctaagcatggttatgttccaccgcagcaagatacgcatactgaagcgagctggaa

SEQ ID NO: 463730 - DNA, 75 bp, synthetic construct
  source 1..75: mol_type = other DNA
aaaaatattcaccaaatgcctggatgctcaactactccaacccggcagccattgtcgcagaagccacgcgtcgtc

SEQ ID NO: 463731 - DNA, 75 bp, synthetic construct
  source 1..75: mol_type = other DNA
cggtagaacaactcaataaagacgataagcccttgttgcatatagtgatcaggggtggcaatatcagatgcctcg

SEQ ID NO: 463732 - DNA, 75 bp, synthetic construct
  source 1..75: mol_type = other DNA
aaatgaaagaaactatagattttttatcaagctctgaagaaactataaatatagagtatattgaaggaaccaatg

SEQ ID NO: 463733 - DNA, 75 bp, synthetic construct
  source 1..75: mol_type = other DNA
ctggggcaactgtatggcttctacggaaatccgaatctggacccggagaaaagcaaacagtgggaaggcgcgttt

SEQ ID NO: 463734 - DNA, 75 bp, synthetic construct
  source 1..75: mol_type = other DNA
aataccatatcattatcatgacctaaatatgggtgataaaaaatttataggtactattcatggattaagagaaat

SEQ ID NO: 463735 - DNA, 75 bp, synthetic construct
  source 1..75: mol_type = other DNA
acaaacagtccgcagcggccgtggtggctgctcggctggtgtgagcgggtgccggaagcggatgaggtgctgcct

SEQ ID NO: 463736 - DNA, 75 bp, synthetic construct
  source 1..75: mol_type = other DNA
gcgcggtgcctttttgaggtatcccgctgccaccagacagttgatgaaatgtttcaccataaggataaatggttt

SEQ ID NO: 463737 - DNA, 75 bp, synthetic construct
  source 1..75: mol_type = other DNA
taccagcagggcgacacctacggacgcgtttttattgtcggcttactcaatacgctactggtttctgcattgtgt

SEQ ID NO: 463738 - DNA, 75 bp, synthetic construct
  source 1..75: mol_type = other DNA
gagatacctatgctggcgctgacaacttcatgaacggtcgtgctaacagcgtagcaacctatcgtaacaatggtt

SEQ ID NO: 463739 - DNA, 75 bp, synthetic construct
  source 1..75: mol_type = other DNA
acacctactctttcattaaacaatgaaaataatataataatctccttaaattatttaaaagatactatcacaaaa

SEQ ID NO: 463740 - DNA, 75 bp, synthetic construct
  source 1..75: mol_type = other DNA
atgaacaagattgactatcaggcactgcgtgaagcggcagaaaaagcaacgtgtggtgtgtggtcgctcgaatat

SEQ ID NO: 463741 - DNA, 75 bp, synthetic construct
  source 1..75: mol_type = other DNA
acgaccgggtggttccggcgcaatcgtacccgacgctatgggtgctgttcgccggggtgatgatggcgatcctgt

SEQ ID NO: 463742 - DNA, 75 bp, synthetic construct
  source 1..75: mol_type = other DNA
tcaatacaatgcttaattgtgacgcattttatcatgaagatggcaaagttagtggaatcgctaagttagctgtaa

SEQ ID NO: 463743 - DNA, 75 bp, synthetic construct
  source 1..75: mol_type = other DNA
gtgagcatatcacctctgttcaggtggccaaattcagtgtgccacttcagccacttcagcgttcgtatacctgct

SEQ ID NO: 463744 - DNA, 75 bp, synthetic construct
  source 1..75: mol_type = other DNA
acatcaacagcaagcaacttggttttttataaacctacgcagctcggcccgactggggtaaaaatgtactggtca

SEQ ID NO: 463745 - DNA, 75 bp, synthetic construct
  source 1..75: mol_type = other DNA
ttgttttttggttatgcatattttctgttgaatatttgttgactggtttaatatcatatttactattaaaagagc

SEQ ID NO: 463746 - DNA, 75 bp, synthetic construct
  source 1..75: mol_type = other DNA
tcgaaattgatgttccggatcacgctaccgatagcgacatatcagattgggtagacgtcgagtacgggcagtgtg

SEQ ID NO: 463747 - DNA, 75 bp, synthetic construct
  source 1..75: mol_type = other DNA
gcgggaagagttgctcaccgacatggcgcggcagttggggatggggctacggctggtggagttttccactgattc

SEQ ID NO: 463748 - DNA, 75 bp, synthetic construct
  source 1..75: mol_type = other DNA
tattaaaagaaactttaaactattgtatatattcaagctttttagggggaaaaatgttgacgttagcgttttcaa

SEQ ID NO: 463749 - DNA, 75 bp, synthetic construct
  source 1..75: mol_type = other DNA
taaagggtgttttgcgcgacgggagcgtcacgagcgcgaaccagcaaaacatgccgcgctgttgggagtgcattg

SEQ ID NO: 463750 - DNA, 75 bp, synthetic construct
  source 1..75: mol_type = other DNA
atggctgaccaacaaacaatgctctatcagggtgtgctgatcccccgccccgtgttgaacgtggatctgcatgtc

SEQ ID NO: 463751 - DNA, 75 bp, synthetic construct
  source 1..75: mol_type = other DNA
ttttgatgtaattcaacttataaaccctcagccatttcaagaaattggatggctaataaatttgtatattattta

SEQ ID NO: 463752 - DNA, 75 bp, synthetic construct
  source 1..75: mol_type = other DNA
ccatcgtcaacccgtcgtatattgcgccggagttgatcattggttaccagcaggcgtccggtgcgttcgaaacca

SEQ ID NO: 463753 - DNA, 75 bp, synthetic construct
  source 1..75: mol_type = other DNA
cgcaaagcaatccgcaagttcattaacagcattgaatacatcctgcgtgacaagttgtcaccgtatgacaccgaa

SEQ ID NO: 463754 - DNA, 75 bp, synthetic construct
  source 1..75: mol_type = other DNA
aacagatgcggcgattattcaaaacgacgattagtattatgtcagcagagataaatgaggaaaatggatatattt

SEQ ID NO: 463755 - DNA, 75 bp, synthetic construct
  source 1..75: mol_type = other DNA
atgtatgaagacacggtaaaccgtgctaaccctatcgccgggcgcataaatatgagtaatctctgctcagaaatt

SEQ ID NO: 463756 - DNA, 75 bp, synthetic construct
  source 1..75: mol_type = other DNA
tggcagccgaaaacggcgaaagttggcgaactgtttgcccgcagcggtattacgttacctacccgtgagatgtgg

SEQ ID NO: 463757 - DNA, 75 bp, synthetic construct
  source 1..75: mol_type = other DNA
atgggtgacgcactagttgcagttaagcagccatatatcggctcaatagctttaactcaacatgataaaaatacc

SEQ ID NO: 463758 - DNA, 75 bp, synthetic construct
  source 1..75: mol_type = other DNA
tatatcgcgatttatgcacggcggtataacctccaccagggcgtttttagccttgatccgcgtacggtggcggaa

SEQ ID NO: 463759 - DNA, 75 bp, synthetic construct
  source 1..75: mol_type = other DNA
ataaatccatttcgagaacagatgcggcgattatttaaaactacggtcagtgttacgtttgcagagttaaatgag

SEQ ID NO: 463760 - DNA, 75 bp, synthetic construct
  source 1..75: mol_type = other DNA
gtgggggatttgcgggaatggctgaaagcggatatcaacagtgaagattctcgcgttaaagaacgtatcgcgcgg

SEQ ID NO: 463761 - DNA, 75 bp, synthetic construct
  source 1..75: mol_type = other DNA
gtttatccgtgtcaacggtacgctggtcggcggttgtattgggctaattttgtatttgctgtcgcagctcccggc

SEQ ID NO: 463762 - DNA, 75 bp, synthetic construct
  source 1..75: mol_type = other DNA
atgaaatccgcgtcaccgcccgccgcgtgctgaatggtgccgttgaaatcgttgtgtgggtgaacgcatccgcac

SEQ ID NO: 463763 - DNA, 75 bp, synthetic construct
  source 1..75: mol_type = other DNA
ttggtgaagctaccttttacaacatggctggtacatcagtagtttctgttggtgggaaagctcttcagtggagca

SEQ ID NO: 463764 - DNA, 75 bp, synthetic construct
  source 1..75: mol_type = other DNA
atggacttcaagaagttgcgcaaaattattaataaagatggcctctatgcagtgcgcgttgaaaatggggaaatt

SEQ ID NO: 463765 - DNA, 75 bp, synthetic construct
  source 1..75: mol_type = other DNA
cgtagctggatgatggtcaacggtgacaagcgcctgcggaaagaaagctcgcatctggcggttgttagcgatctg

SEQ ID NO: 463766 - DNA, 75 bp, synthetic construct
  source 1..75: mol_type = other DNA
acaatctcaagtatcccatcagaaagacggatattgattaacattaaccacgattttcctaacaatggtaatctt

SEQ ID NO: 463767 - DNA, 75 bp, synthetic construct
  source 1..75: mol_type = other DNA
tgaggatcttccgccacagattcgtcagccagtctgtaatgctggcgaggtaaaaacagcccctgtcggtgagcg

SEQ ID NO: 463768 - DNA, 75 bp, synthetic construct
  source 1..75: mol_type = other DNA
ttcagtaagcgggcaattagtaatgcggttgatgctttaaaaatatctgtacccgtaatgagagaacagagtgac

SEQ ID NO: 463769 - DNA, 75 bp, synthetic construct
  source 1..75: mol_type = other DNA
gtaatagtccgtaggctgttggtaaatttttcagatcccgaaaaagcaagaacattactgctcgaacaacgtgat

SEQ ID NO: 463770 - DNA, 75 bp, synthetic construct
  source 1..75: mol_type = other DNA
gaataaatttatcgcacagagttgctacgtgtttgatggcgagcaggatgaaatatctgatgcatatatctgcgc

SEQ ID NO: 463771 - DNA, 75 bp, synthetic construct
  source 1..75: mol_type = other DNA
aaagtgagaagaaagttctatcttattttgaaactgccagaaaacttggtgcttcagatattcatttcttaattt

SEQ ID NO: 463772 - DNA, 75 bp, synthetic construct
  source 1..75: mol_type = other DNA
agatactttagtgaacgacctgacttgttagaaaaatattataatgaaagattaattcgtttctcgataaaagac

SEQ ID NO: 463773 - DNA, 75 bp, synthetic construct
  source 1..75: mol_type = other DNA
ttgattatgacagtgcacgtaagaatgtaaaaatgccagaattgatattgactaaagctcttgcaattagtgaag

SEQ ID NO: 463774 - DNA, 75 bp, synthetic construct
  source 1..75: mol_type = other DNA
cattattagatcgtaattatcctacacagactgccggatgtttacaagtatatcaaactggtgcaaatggtattg

SEQ ID NO: 463775 - DNA, 75 bp, synthetic construct
  source 1..75: mol_type = other DNA
cccaaaagtgaccaggttattatgttgcaaaatcaatacgttcgtgaaatgcgaaaatatggcgtacgaggttta

SEQ ID NO: 463776 - DNA, 75 bp, synthetic construct
  source 1..75: mol_type = other DNA
atgggtaagctggaggctatgtataaccttccttctggtcttctgcgaagtgtcgctatcactgaatcagggggg

SEQ ID NO: 463777 - DNA, 75 bp, synthetic construct
  source 1..75: mol_type = other DNA
ttatcggttgatacagctcaccggggacattatcaactggtggaaatcactcggtaccgaaaccagacaagttat

SEQ ID NO: 463778 - DNA, 75 bp, synthetic construct
  source 1..75: mol_type = other DNA
cggcgagcaatttcaaattacgatccactacgtagatcaggaaggggaagtagatattctcattgttaatggtaa

SEQ ID NO: 463779 - DNA, 75 bp, synthetic construct
  source 1..75: mol_type = other DNA
gcccgcagacaccggctacccggacccgcgcggggaactggacccggaagccgaccccggcctgctgtatgcggg

SEQ ID NO: 463780 - DNA, 75 bp, synthetic construct
  source 1..75: mol_type = other DNA
tgccgggcgtgaatatgatgttgttactgacaagatcatagcgcaggtcaagaggacttatagctctatagataa

SEQ ID NO: 463781 - DNA, 75 bp, synthetic construct
  source 1..75: mol_type = other DNA
cacgcaaaaaaactgactacagataaaaaaaatttcagtgctggcctaggtcagataaacagccgtaacttccag

SEQ ID NO: 463782 - DNA, 75 bp, synthetic construct
  source 1..75: mol_type = other DNA
cgcgcggggaactggacccggaagccgaccccggcctgctgtatgcgggacagtggcaggatgcggaatcagggc

SEQ ID NO: 463783 - DNA, 75 bp, synthetic construct
  source 1..75: mol_type = other DNA
cccgcagacaccggctacccggacccgcgcggggaactggacccggaagccgaccccggcctgctgtatgcggga

SEQ ID NO: 463784 - DNA, 75 bp, synthetic construct
  source 1..75: mol_type = other DNA
cagtatgcgtatgacaaatccggcaggctgacgggtatcttcagcccggacggcatatcacagcgcaccggctat

SEQ ID NO: 463785 - DNA, 75 bp, synthetic construct
  source 1..75: mol_type = other DNA
acaaaaagtattcgctacctcatcgctatgacatggctaacgtaaatgacatgctcgatttaatctgcgctacag

SEQ ID NO: 463786 - DNA, 75 bp, synthetic construct
  source 1..75: mol_type = other DNA
agcatgaaatgttctataactggataggtgatggtaaacgatgtgtagcattccacgaagcgggacatgcagtag

SEQ ID NO: 463787 - DNA, 75 bp, synthetic construct
  source 1..75: mol_type = other DNA
gacaatgctggcacagggacacggccaggggaaaaagtcaggaagactggaagttattgacgttgatgatcagag

SEQ ID NO: 463788 - DNA, 75 bp, synthetic construct
  source 1..75: mol_type = other DNA
tttgctgtctcaatgaacggtgtgaaagtcgaacaagatggggcgagtaatttgggggaaattaaacttggcgta

SEQ ID NO: 463789 - DNA, 75 bp, synthetic construct
  source 1..75: mol_type = other DNA
tgaactgatgaagcgcccggtggatcagccggaacacggcaaactggtgcataaagcggtgctgcacggtaatta

SEQ ID NO: 463790 - DNA, 75 bp, synthetic construct
  source 1..75: mol_type = other DNA
ctgacaccgccggaggatattctggggcaggttacccgtgaatacgaacgaagaatacagaactgtccatctttc

SEQ ID NO: 463791 - DNA, 75 bp, synthetic construct
  source 1..75: mol_type = other DNA
gccacagcgtcttcagttacgatgcgctggaccggctggtacagcagggcggctttgacgggcggacgcaacgtt

SEQ ID NO: 463792 - DNA, 75 bp, synthetic construct
  source 1..75: mol_type = other DNA
tcaaagggtcttaaagaaaaaggaaagtatgataaaaaagatatgtatattaatactacaagtacaagctttgat

SEQ ID NO: 463793 - DNA, 75 bp, synthetic construct
  source 1..75: mol_type = other DNA
gtgagcaaagctgcattattcatctgccagaacgtctggaagacacgaccaaacgcctgattttaccttgtcatt

SEQ ID NO: 463794 - DNA, 75 bp, synthetic construct
  source 1..75: mol_type = other DNA
agataaacagactgcaattgaatcaattcgtgaaaaaatcaatctaatcgaaaagatcataacagcgatcagtcc

SEQ ID NO: 463795 - DNA, 75 bp, synthetic construct
  source 1..75: mol_type = other DNA
agtggaaccacaccaacgacgtggcctcgtccatcagcatgaagcaacgttttctcaccgggctgctgctcacct

SEQ ID NO: 463796 - DNA, 75 bp, synthetic construct
  source 1..75: mol_type = other DNA
ggaaaaaacctgggagttaatatctaatagaagaaaatcaccactgtgcaataaagaaatatggatagtaatggg

SEQ ID NO: 463797 - DNA, 75 bp, synthetic construct
  source 1..75: mol_type = other DNA
ccaggaaactattctatttgggataaagcatggccatcccataaagccaaacataaacttgagtctcgttttaga

SEQ ID NO: 463798 - DNA, 75 bp, synthetic construct
  source 1..75: mol_type = other DNA
ttgcctgtgaacagggctggaatgcagccggtcagcctgtcagtcagcgcgccggattttttccggaagaagcca

SEQ ID NO: 463799 - DNA, 75 bp, synthetic construct
  source 1..75: mol_type = other DNA
aagccagcagttcagccgggtacgacagccgcatccgtccgtggccccgcagtgggtgacacgaacgaatcatgc

SEQ ID NO: 463800 - DNA, 75 bp, synthetic construct
  source 1..75: mol_type = other DNA
ctaaagataatgagctatctatatataaagaacagttagataaattgaaaaaatcctttgcatggaaagcggtag

SEQ ID NO: 463801 - DNA, 75 bp, synthetic construct
  source 1..75: mol_type = other DNA
taattaacactgaccgtcagatagcaataacaacaaccgcaaaaataaacaatctaactgagttatctattgcct

SEQ ID NO: 463802 - DNA, 75 bp, synthetic construct
  source 1..75: mol_type = other DNA
atttggccaaaatactggctgaaaaatttaatgaaggtgactggcaggggctgtttgctgttacagattgtgaag

SEQ ID NO: 463803 - DNA, 75 bp, synthetic construct
  source 1..75: mol_type = other DNA
tacagaatttgtggatgcattgattatcactatatgttgtgctgtaaccgtaggtgtattgttctatctaatgaa

SEQ ID NO: 463804 - DNA, 75 bp, synthetic construct
  source 1..75: mol_type = other DNA
catatccaggcgctacgccgcatgggaatgacgctggccgaggtcggggcgattctggaacgttcggatctggcg

SEQ ID NO: 463805 - DNA, 75 bp, synthetic construct
  source 1..75: mol_type = other DNA
ggtaaacgtgatgaagagtgtctatatatttccacggagctggtttttttgctggagcagtttgccgaaggttgt

SEQ ID NO: 463806 - DNA, 75 bp, synthetic construct
  source 1..75: mol_type = other DNA
gggcttttacctgaaaatgaaaagattacctccgttgaggttgaagactggacaccggagcgtcgattctcagtt

SEQ ID NO: 463807 - DNA, 75 bp, synthetic construct
  source 1..75: mol_type = other DNA
aggctgccgccacaacggtgatcgccgccaaagaacgcgaggatttctccgccagcagtctggcgcaatacaaac

SEQ ID NO: 463808 - DNA, 75 bp, synthetic construct
  source 1..75: mol_type = other DNA
aagtctggaatataaatgatgtagattctggcaactatgccgcatttgtttacttgattcagtttgaaaattctg

SEQ ID NO: 463809 - DNA, 75 bp, synthetic construct
  source 1..75: mol_type = other DNA
ggctgcggcttcagaccattgcgcagatgaatattgctcttcagcagagtattaaaaataacggtcagtccgggg

SEQ ID NO: 463810 - DNA, 75 bp, synthetic construct
  source 1..75: mol_type = other DNA
ggttttcctgcaacccgcctcgatgccactgaatggtctgcccagcccgtgctctggagtgtgtggcggctggag

SEQ ID NO: 463811 - DNA, 75 bp, synthetic construct
  source 1..75: mol_type = other DNA
cgcgctgaactcctataacaacggacagatgattacagctcagaccggtgacatttttaatcccgcgaatggacc

SEQ ID NO: 463812 - DNA, 75 bp, synthetic construct
  source 1..75: mol_type = other DNA
tgccggggacgaagacgcagatgaccattcgttcgaaaacctataagggcagcgggtttaatgaactgaagtttg

SEQ ID NO: 463813 - DNA, 75 bp, synthetic construct
  source 1..75: mol_type = other DNA
gttaatcagatacagacggttggtgtcaaccaggtggaaacggtgggcagtaaccagattatcaaagtgggatca

SEQ ID NO: 463814 - DNA, 75 bp, synthetic construct
  source 1..75: mol_type = other DNA
cgacatggcacatgtcaggacaccggccatgtggaccgaagaaccgcgcaaacagcacggctatcgtgaaccgtt

SEQ ID NO: 463815 - DNA, 75 bp, synthetic construct
  source 1..75: mol_type = other DNA
gcggcaaacgctgctgctggcgcggctgctcatctctcaacccaatatcgtgctgctcgatgaacccagcgcctc

SEQ ID NO: 463816 - DNA, 75 bp, synthetic construct
  source 1..75: mol_type = other DNA
ggatctctggctaattatctgaatatgggggacagcggctcccccctgtttgcttatgattccctgcaaaaaaat

SEQ ID NO: 463817 - DNA, 75 bp, synthetic construct
  source 1..75: mol_type = other DNA
gcctaattgtagaaaacggtggaattgctgtctttgctgttatcgaaaagggagggctactggaaattaaagacc

SEQ ID NO: 463818 - DNA, 75 bp, synthetic construct
  source 1..75: mol_type = other DNA
gtgattggtaagcgggcggatctgcgtatttcggatcgcgtttttggtcacgcattacggctgaaaaacaacgtg

SEQ ID NO: 463819 - DNA, 75 bp, synthetic construct
  source 1..75: mol_type = other DNA
tcggcatcagcggcggaaatagtggcgcgcgtgaatcgacctataccattacgatagaacgcctaccggtgctgg

SEQ ID NO: 463820 - DNA, 75 bp, synthetic construct
  source 1..75: mol_type = other DNA
ggatatgacagttttacctcaagtaaatatgaagaaggtgcgacctggttactccagtgtctgaaaaatagtcag

SEQ ID NO: 463821 - DNA, 75 bp, synthetic construct
  source 1..75: mol_type = other DNA
tgaccaccggcgcactggtgggaacgacgatcctggcttcgcgcactattgcgccgctgtcgcagatttccggcg

SEQ ID NO: 463822 - DNA, 75 bp, synthetic construct
  source 1..75: mol_type = other DNA
caaaatcgtcgaactggcgctgctgcgaccactcagcgccatccctgatgcgcgggtagatgactatattcgccc

SEQ ID NO: 463823 - DNA, 75 bp, synthetic construct
  source 1..75: mol_type = other DNA
cgcccgctcagcgccatccccgacgcgcgcgtggatgactatattcgcccgtatcaggcgaactggttctggaat

SEQ ID NO: 463824 - DNA, 75 bp, synthetic construct
  source 1..75: mol_type = other DNA
gcctgtaaagtcatccttaaagagaaagcgccggacattgcgtttagttacaccaccgatcctgaagtggcattc

SEQ ID NO: 463825 - DNA, 75 bp, synthetic construct
  source 1..75: mol_type = other DNA
gcctgtaaagtcatccttaaagaaaaagcgccggacattgcgtttagttacaccaccgatcctgaagtggcgttc

SEQ ID NO: 463826 - DNA, 75 bp, synthetic construct
  source 1..75: mol_type = other DNA
caatagggatatactttaagccacatctttcacctattccattgatttctgtaagagaaactaatgaggtggcct

SEQ ID NO: 463827 - DNA, 75 bp, synthetic construct
  source 1..75: mol_type = other DNA
ggcacctcccataacaaaggccagggggaaaaggttaccggaaacagtcttgagcttcctttcggcgcgtatgtt

SEQ ID NO: 463828 - DNA, 75 bp, synthetic construct
  source 1..75: mol_type = other DNA
agtggcaggcaagaatcactgaagcccttacgacaacatttccatcagcacaatttattgtcacaactcacagcc

SEQ ID NO: 463829 - DNA, 75 bp, synthetic construct
  source 1..75: mol_type = other DNA
gagtgtatatcaattttaaaccctcagttttcttacaatcgcgtcgatcctaaatcttacgatatttttgtaaat

SEQ ID NO: 463830 - DNA, 75 bp, synthetic construct
  source 1..75: mol_type = other DNA
tactacaatcaattccgtgatgaagtatggcaacgtatgaaacaggccgctaaacagattcaggacgagattaac

SEQ ID NO: 463831 - DNA, 75 bp, synthetic construct
  source 1..75: mol_type = other DNA
tttcctgttctttgccgaacaggatggtaaaatggttgtggatcttgtagatcctcatggcctacatttggctga

SEQ ID NO: 463832 - DNA, 75 bp, synthetic construct
  source 1..75: mol_type = other DNA
gtcatcccgaactcactcgtcaattaaaattgataaagaccgttatctctccggcaatcctatcgaggtgacggt

SEQ ID NO: 463833 - DNA, 75 bp, synthetic construct
  source 1..75: mol_type = other DNA
gatgaggggcttgtcaccctctggcactacgatgcgtcggtccgcatcacgcaccggacggtgaacggcgacccg

SEQ ID NO: 463834 - DNA, 75 bp, synthetic construct
  source 1..75: mol_type = other DNA
acaacgagaacggcagccacagcgcttcagtacgatgcgctggaccggtggtacagcagggcggctttgacgggc

SEQ ID NO: 463835 - DNA, 75 bp, synthetic construct
  source 1..75: mol_type = other DNA
taatttccgcctgagaataggcgatcaagttgttgatgtaagaacatcttcgacggttcctaaaatgtggaataa

SEQ ID NO: 463836 - DNA, 75 bp, synthetic construct
  source 1..75: mol_type = other DNA
tcatttacgctaatggagagatttcaactaacaatggtactcaggtaaatattataggtggagagggctttgaca

SEQ ID NO: 463837 - DNA, 75 bp, synthetic construct
  source 1..75: mol_type = other DNA
gcattgccctctaatgtatcaggagacttatatcctcaaccgtccatatttggtgataaggtatcttctgtttct

SEQ ID NO: 463838 - DNA, 75 bp, synthetic construct
  source 1..75: mol_type = other DNA
tggaaaaatctatttccttaacacgcagaagtttggcaaaaaaagcctcctggtgcgcgggtttgatgataaagg

SEQ ID NO: 463839 - DNA, 75 bp, synthetic construct
  source 1..75: mol_type = other DNA
gtggatcactattgcaccgttcgtgacaatatgaacagcgagcaagcggcaaatatggcgcgtggatgggcctct

SEQ ID NO: 463840 - DNA, 75 bp, synthetic construct
  source 1..75: mol_type = other DNA
gtgcggctgagagccgcagagggaaagttgcgtccattttgagggaaacggagcaaaaaaccgccattcataccc

SEQ ID NO: 463841 - DNA, 75 bp, synthetic construct
  source 1..75: mol_type = other DNA
ccttgccgggcgccggtgccgtgtggaaatccgcccaccttgccgcgcgccggtgccgtgtgggaatccgcccac

SEQ ID NO: 463842 - DNA, 75 bp, synthetic construct
  source 1..75: mol_type = other DNA
gccagtccacgttccggtatgacccggtcgacaggctgacggagcagcgcggctttgacggccggacgcaacgtt

SEQ ID NO: 463843 - DNA, 75 bp, synthetic construct
  source 1..75: mol_type = other DNA
ttaaccgcattggatagtgttgatgtttggactaatgaggatcgaaaaagttggtcaattcagcaatatggtttt

SEQ ID NO: 463844 - DNA, 75 bp, synthetic construct
  source 1..75: mol_type = other DNA
ccagaggacttggtgtgctaagctgccaccatcaattccaaggaagtacacttttctctgaacaaagtggaacta

SEQ ID NO: 463845 - DNA, 75 bp, synthetic construct
  source 1..75: mol_type = other DNA
tcaacctgtcattgggaaatgcaaatgcgccctacgatggcaaacatatccgcggtattgcgtacttattagata

SEQ ID NO: 463846 - DNA, 75 bp, synthetic construct
  source 1..75: mol_type = other DNA
tcagatgttataaatggttatattaaagatttaaacgcagaaaaaaaatatgactttatattttttggaagatta

SEQ ID NO: 463847 - DNA, 75 bp, synthetic construct
  source 1..75: mol_type = other DNA
ttccgtccatttatggatgagaatgttaaatataattatgcaatggggttgataccttcctacctcgagaagatt

SEQ ID NO: 463848 - DNA, 75 bp, synthetic construct
  source 1..75: mol_type = other DNA
ttctctcctgatggtcactgtcgtccctttgacgcctcggctgagggcacctgggccggtaacggtctcggctga

SEQ ID NO: 463849 - DNA, 75 bp, synthetic construct
  source 1..75: mol_type = other DNA
gcagcaagatccgctatggtccatgttgcaggcgcagaaaaatcagcaggttgtcgcagtctacagaaacaactg

SEQ ID NO: 463850 - DNA, 75 bp, synthetic construct
  source 1..75: mol_type = other DNA
taatccgtgaggatgaatgtcgtaagttaactggagtgtgccgcactacacgttacgaactggagaaaaaagggc

SEQ ID NO: 463851 - DNA, 75 bp, synthetic construct
  source 1..75: mol_type = other DNA
tgttttcattttccggggccgcagcggcagtccggttaaacagcagtggtccaccggtgacgaactgtgcccctg

SEQ ID NO: 463852 - DNA, 75 bp, synthetic construct
  source 1..75: mol_type = other DNA
gaacaggcgcagctttatacacaaattcaggcgcagatccgtgaacaggaacgcgcacgagcacgtattggataa

SEQ ID NO: 463853 - DNA, 75 bp, synthetic construct
  source 1..75: mol_type = other DNA
tcctgattacctgttgcatgaggcaagcgttatcatcgatccagctcctgcactcaatgtactgacagtgggcag

SEQ ID NO: 463854 - DNA, 75 bp, synthetic construct
  source 1..75: mol_type = other DNA
cgattaccaaagcaccacttcaaaacgaccgacggacccgcagagtcaatatgccccgtattcgcaggggcgatt

SEQ ID NO: 463855 - DNA, 75 bp, synthetic construct
  source 1..75: mol_type = other DNA
ataaacatactctcaaggtaaatgcgcaggttgtgcctttatatggtgaattatctaaagctaagcatggtgtat

SEQ ID NO: 463856 - DNA, 75 bp, synthetic construct
  source 1..75: mol_type = other DNA
tcaggatctcgacagaccgtttgtgattttcaaaacgcatttgtcggcaatgattgcgacagtggttgtcgtact

SEQ ID NO: 463857 - DNA, 75 bp, synthetic construct
  source 1..75: mol_type = other DNA
agattcggtgtttgaatcttttgcattgaaccgggggggacgcgaggcttatgccgttgagtccgacaaagtgaa

SEQ ID NO: 463858 - DNA, 75 bp, synthetic construct
  source 1..75: mol_type = other DNA
atagtcacaatatggatggcttaatcagtaagctcaaattgagcaagactgaatccgataaactcaaagcacttc

SEQ ID NO: 463859 - DNA, 75 bp, synthetic construct
  source 1..75: mol_type = other DNA
tgctgatatttggggattctggattttccagatcggggggcggtgaaaatcgcgttaagcacctctcgcaatcta

SEQ ID NO: 463860 - DNA, 75 bp, synthetic construct
  source 1..75: mol_type = other DNA
aacggcgacgcatgggtcgaagttaaaggccagaaaatggcaccgccgcagatttctgctgaagtgctgaaaaaa

SEQ ID NO: 463861 - DNA, 75 bp, synthetic construct
  source 1..75: mol_type = other DNA
gatgattggcggccctgtcttcttctcgctgttagcgatggcgatttaccagaactattgcagtcgcatggcgaa

SEQ ID NO: 463862 - DNA, 75 bp, synthetic construct
  source 1..75: mol_type = other DNA
gttggcccgttatcgacaatctccttcgcctgccgggcagcaacctgcaggggagccagttgatgttgatgatgc

SEQ ID NO: 463863 - DNA, 75 bp, synthetic construct
  source 1..75: mol_type = other DNA
gatcaaggccgttgaaaaattcgactatcggcgtggattcaaattctctacctatgcctcctggtggatccgcca

SEQ ID NO: 463864 - DNA, 75 bp, synthetic construct
  source 1..75: mol_type = other DNA
gcgatgatacttttccggaaagtgacgcctgtggggaatttgcagcgagtgatgatctcgagccctggtttgacg

SEQ ID NO: 463865 - DNA, 75 bp, synthetic construct
  source 1..75: mol_type = other DNA
aatccaacgatggcggcagcagtcagggcttcggctatacggcgcgggcattacttgaacgacgtgttacttcca

SEQ ID NO: 463866 - DNA, 75 bp, synthetic construct
  source 1..75: mol_type = other DNA
cacggaaaactggtcgtgggagctgggggcgtctggctcgtggtcgcattcacgcaccaaaaccatgccgcgtta

SEQ ID NO: 463867 - DNA, 75 bp, synthetic construct
  source 1..75: mol_type = other DNA
agtgatggggccgggggtggcgatggagtgtctggaaactaccgacggcccaaccatttgggaagatcatttcta

SEQ ID NO: 463868 - DNA, 75 bp, synthetic construct
  source 1..75: mol_type = other DNA
gtcaagggtaccaaagcacaggcgaaagccatcagggaagaatgctggggggctcgaagacagcctgaagctcag

SEQ ID NO: 463869 - DNA, 75 bp, synthetic construct
  source 1..75: mol_type = other DNA
gatataactggttcaggcgttccttgggttaataaaaatatgtgttctggacttgtagtaaatgttaagagttct

SEQ ID NO: 463870 - DNA, 75 bp, synthetic construct
  source 1..75: mol_type = other DNA
gccgcgcgcgcacttcggcgtgaccagtaaccggtctgagttcggcccgcagaagccgaaagagttcggcggcgg

SEQ ID NO: 463871 - DNA, 75 bp, synthetic construct
  source 1..75: mol_type = other DNA
tcggatgcgggctacagtgatagcagccaggagcacatggtatacgcgctgtgcgccttgctggatgaaagcgtt

SEQ ID NO: 463872 - DNA, 75 bp, synthetic construct
  source 1..75: mol_type = other DNA
atggcgtcaaagattgatgaccttatcgccggaagattagagccgcgcaacctaattatcaacataccgcctggc

SEQ ID NO: 463873 - DNA, 75 bp, synthetic construct
  source 1..75: mol_type = other DNA
tgaccgtgattactaccgtagaaataggtatagactggccccctgaatctccagacaaccaatatcacttaaata

SEQ ID NO: 463874 - DNA, 75 bp, synthetic construct
  source 1..75: mol_type = other DNA
aagttattatctatcaacaacagaatgagcaattatatccagcacaggaacatcttcttttacaatgttcttgcc

SEQ ID NO: 463875 - DNA, 75 bp, synthetic construct
  source 1..75: mol_type = other DNA
atgattaacctgtcacttaccgaccttaaccgcgttcagtttcgtgagaaatttaccgggcagctactggtcaat

SEQ ID NO: 463876 - DNA, 75 bp, synthetic construct
  source 1..75: mol_type = other DNA
ccaagacaaaattctccgcctctacaatcaatcgcctgcaggatgccatcaacgattctgccaaggatcacattc

SEQ ID NO: 463877 - DNA, 75 bp, synthetic construct
  source 1..75: mol_type = other DNA
taatttcgtcgcggtgtcggcgttccctgtcagcgccccggtgatcccgccgttgaaagtctggcgcgcactcca

SEQ ID NO: 463878 - DNA, 75 bp, synthetic construct
  source 1..75: mol_type = other DNA
gcaggaaaccgtgtgcaaagttgtgccgctaatggtattccaagtacctaatacgcctgacccgaacgaggtggg

SEQ ID NO: 463879 - DNA, 75 bp, synthetic construct
  source 1..75: mol_type = other DNA
tttctttaataccagaattaattaataaaggaattaaagataacgaggaagaaagaataggtattgtattaggca

SEQ ID NO: 463880 - DNA, 75 bp, synthetic construct
  source 1..75: mol_type = other DNA
agacaacaatcacgaacagatagaactccttaacaaaagactatctgaaagtgtcccatgtatgccccataagaa

SEQ ID NO: 463881 - DNA, 75 bp, synthetic construct
  source 1..75: mol_type = other DNA
ctcacgccgtgtatatctgcagcggacagctgtcgccggcgtcccacgttatggtctggatggtcaccccaaagg

SEQ ID NO: 463882 - DNA, 75 bp, synthetic construct
  source 1..75: mol_type = other DNA
ggctctgtgcagtgtcctgcatcacctcacgccgtgtatatctgcagcggacagctgtcgccggcgtcccacgtt

SEQ ID NO: 463883 - DNA, 75 bp, synthetic construct
  source 1..75: mol_type = other DNA
cattcactctggcatctttaatgctggccggacatgcactggcagaagatggtgttgttcacttcgtcggtgaaa

SEQ ID NO: 463884 - DNA, 75 bp, synthetic construct
  source 1..75: mol_type = other DNA
aactgaaaacctggcagggggcatttgttgtaagccatagcaatgacagcggagtaaataaagtcattgcccgct

SEQ ID NO: 463885 - DNA, 75 bp, synthetic construct
  source 1..75: mol_type = other DNA
gcgtgtggcccggaatcattaatcagggctgcaggccaaattgattgccgcgtaattttctcaatccaccgtata

SEQ ID NO: 463886 - DNA, 75 bp, synthetic construct
  source 1..75: mol_type = other DNA
tttagaagtctttaatgcgctcaaacttgaacagactaaattaacattagtcacaatgactggtgatgatgccaa

SEQ ID NO: 463887 - DNA, 75 bp, synthetic construct
  source 1..75: mol_type = other DNA
atgacatcacttatagttacttcgttacgcaaaaccggtccttgccttagctctgtacttgtagaggaaatgctg

SEQ ID NO: 463888 - DNA, 75 bp, synthetic construct
  source 1..75: mol_type = other DNA
cgggataatacccgccacgccggaaaatctcttcgggaaagactttgctgatgcactctttcagctacgggatct

SEQ ID NO: 463889 - DNA, 75 bp, synthetic construct
  source 1..75: mol_type = other DNA
gaaaaacagattatcctggaagtcagttctggacggtctgcttcagtacaaaatggtcagggtcgttacgttacc

SEQ ID NO: 463890 - DNA, 75 bp, synthetic construct
  source 1..75: mol_type = other DNA
atactacgattgtgccggtgatatcgttcgcattaagtcgctggacttcgacagccagcgcgcagacgtggagat

SEQ ID NO: 463891 - DNA, 75 bp, synthetic construct
  source 1..75: mol_type = other DNA
cgccgtgacggcgcgctgaagtcgtcaattgctaaatgggtgcttggtatgatgtcggaagggaataaccgccag

SEQ ID NO: 463892 - DNA, 75 bp, synthetic construct
  source 1..75: mol_type = other DNA
tcaatttcatcggcaggtaatacagtaggagccaatatatggcccgcatcacagtgtgaaattgttatatttgcg

SEQ ID NO: 463893 - DNA, 75 bp, synthetic construct
  source 1..75: mol_type = other DNA
gctacagaaaccacccaatattatttgttggagcaggtttcagcatgagatacttatcaatttcttatagctggc

SEQ ID NO: 463894 - DNA, 75 bp, synthetic construct
  source 1..75: mol_type = other DNA
ccaaaggtgggctaatcaatctagatatgcacccaaggtcggtttggacaggttcctccctcagcgataatgtca

SEQ ID NO: 463895 - DNA, 75 bp, synthetic construct
  source 1..75: mol_type = other DNA
ctaaaggtaaattgcccacctatattctttcctgctttgcatctctggcaatgctgatggcgcattacgctttgc

SEQ ID NO: 463896 - DNA, 75 bp, synthetic construct
  source 1..75: mol_type = other DNA
atcggaccgtatcacacaccgcatggtgaacggcgaaccggcagagcagtggcggtataacgaccacggctggct

SEQ ID NO: 463897 - DNA, 75 bp, synthetic construct
  source 1..75: mol_type = other DNA
cactctcgcaggcgttgcctttggtgagcagacggtcactgcatcactggctaataatggtgccagcgacaacaa

SEQ ID NO: 463898 - DNA, 75 bp, synthetic construct
  source 1..75: mol_type = other DNA
agtggaggcataagtgataaaagaatgtgttgggaaggtgaatcatatagctttaatactaatcttgtcgggaat

SEQ ID NO: 463899 - DNA, 75 bp, synthetic construct
  source 1..75: mol_type = other DNA
agtaattctaatctcgacacgctggcgctgagccattcaactgtcgattttgccagccacgggtcaactgccggc

SEQ ID NO: 463900 - DNA, 75 bp, synthetic construct
  source 1..75: mol_type = other DNA
taaatcctcagtgaactatgacccctctgaacaacgtctggatatcaatgttccccaggcatgggtgatgaagaa

SEQ ID NO: 463901 - DNA, 75 bp, synthetic construct
  source 1..75: mol_type = other DNA
ccggagtggataaaaaacaacggcccgctgatatcacccgatgaatatactgaatatccggcagtcatggagata

SEQ ID NO: 463902 - DNA, 75 bp, synthetic construct
  source 1..75: mol_type = other DNA
gctcaactccacttaccagtttcggtaatggatatacgcagagtagagagtatctttggtaaaataaaggaaggt

SEQ ID NO: 463903 - DNA, 75 bp, synthetic construct
  source 1..75: mol_type = other DNA
tgcgtggggaaaagccatctgtaccacgcagggcggtctgacgcgcagtatggaatacgatgctgccggacgggt

SEQ ID NO: 463904 - DNA, 75 bp, synthetic construct
  source 1..75: mol_type = other DNA
gcggtcgctctggcgattaaagaggctgccgaacaggccgagcttgacagcattgacatgaccggcagcgccgat

SEQ ID NO: 463905 - DNA, 75 bp, synthetic construct
  source 1..75: mol_type = other DNA
ggtttaccgggcgaacgtggagcagctggcaccggtaatcatctcagttctgccgctggcgtaccgggatcgggt

SEQ ID NO: 463906 - DNA, 75 bp, synthetic construct
  source 1..75: mol_type = other DNA
tctttggcgataatgccacctggatcgcgccgaatatgggcaccgacgtggcactgatgttagggattgcgcata

SEQ ID NO: 463907 - DNA, 75 bp, synthetic construct
  source 1..75: mol_type = other DNA
attgagctaatttgtgggcagggagagagcgggacttgttccataaaactggagaaaacaggaaagataataata

SEQ ID NO: 463908 - DNA, 75 bp, synthetic construct
  source 1..75: mol_type = other DNA
agctttcaaagccctctgtaccgagcgacgttgcacataacgccagcgttctctgttcctacatttcatcaattc

SEQ ID NO: 463909 - DNA, 75 bp, synthetic construct
  source 1..75: mol_type = other DNA
tacgattatgattttgaggatgtgtttaatgttgatgtggaaatcgattattcacgtgcatctatagttattact

SEQ ID NO: 463910 - DNA, 75 bp, synthetic construct
  source 1..75: mol_type = other DNA
aaatgtgagtggtactggttttttcccgaaacttaaaacaaatccgaaccatgttatcgctggaaatacaattag

SEQ ID NO: 463911 - DNA, 75 bp, synthetic construct
  source 1..75: mol_type = other DNA
tgcttatctttcgaaaagcttttaaaaaaaaagaaagctatatttattaacaataatctatcttttcataagcgt

SEQ ID NO: 463912 - DNA, 75 bp, synthetic construct
  source 1..75: mol_type = other DNA
tgctgcgcagacctgaatattccattctttgtggatgcgggaaacaaaaagctggccttctggtttgtacgtgtt

SEQ ID NO: 463913 - DNA, 75 bp, synthetic construct
  source 1..75: mol_type = other DNA
aacgtaaactcgcctctcaaagaagcaaacttccccgctatgtcgtgaagcttcacgaagatgatttttttgacg

SEQ ID NO: 463914 - DNA, 75 bp, synthetic construct
  source 1..75: mol_type = other DNA
gaattcattaatggggttaaagtaatacgctgttcttcattgggaacttatttttctatgccgctatcaattact

SEQ ID NO: 463915 - DNA, 75 bp, synthetic construct
  source 1..75: mol_type = other DNA
cctctacttgctatgatttatcgcttctacgttcgcaattaagaatttttatacaaaatcttggttatgaaccta

SEQ ID NO: 463916 - DNA, 75 bp, synthetic construct
  source 1..75: mol_type = other DNA
aaggagccagacccgccagacgtctgaccgcgctggcacaggaactggttgatgacggtattcttgatggggcag

SEQ ID NO: 463917 - DNA, 75 bp, synthetic construct
  source 1..75: mol_type = other DNA
atggcgaataatatcgcaaccggcgcaattaacggtgcagaacccgccacgtttagtctgagcttcctcaactcc

SEQ ID NO: 463918 - DNA, 75 bp, synthetic construct
  source 1..75: mol_type = other DNA
tccagtgttcactggaagaggcactgaaagcgcggcaagatcagcaacgttattttgaacaattagcgtggcggc

SEQ ID NO: 463919 - DNA, 75 bp, synthetic construct
  source 1..75: mol_type = other DNA
ggtctcactatggggtcagaaaccgtattatggtggatgcgtcaggatgccgaagcgcgtagcgagctgcttaat

SEQ ID NO: 463920 - DNA, 75 bp, synthetic construct
  source 1..75: mol_type = other DNA
aaatctaaacttgacgattttaacaaacgtcttgcgctattcaattcctatttttctttatatactaaaaaatta

SEQ ID NO: 463921 - DNA, 75 bp, synthetic construct
  source 1..75: mol_type = other DNA
ctagatctacagaagttgtacttagaagcaactgatcggttaggtaacttaaacaaagagtttactgagctactt

SEQ ID NO: 463922 - DNA, 75 bp, synthetic construct
  source 1..75: mol_type = other DNA
taggtctttcactgtcagctatgagttcatactcactagctgcagcggggcccactctaaccaaagaactggcat

SEQ ID NO: 463923 - DNA, 75 bp, synthetic construct
  source 1..75: mol_type = other DNA
gggcagccaacgacaaagccattgcacagatgttggcatcaaaaaagtccggccccccccgccgccaggctgggc

SEQ ID NO: 463924 - DNA, 75 bp, synthetic construct
  source 1..75: mol_type = other DNA
agggagataaaggcgagaagggggagcaggggccaaagggtgataagggagacaccggtgcacaggggccgaagg

SEQ ID NO: 463925 - DNA, 75 bp, synthetic construct
  source 1..75: mol_type = other DNA
gctccgttgggcaaaattgacggcttggaggaataccacaagcgaatgattatcgaacgtgctcagctatgccag

SEQ ID NO: 463926 - DNA, 75 bp, synthetic construct
  source 1..75: mol_type = other DNA
agaccagtgcaagcagttggatttggaaattcagctcggaagcatgattgattatcgaaaagctcttgatgctcg

SEQ ID NO: 463927 - DNA, 75 bp, synthetic construct
  source 1..75: mol_type = other DNA
ctttagtggttagcaccagttatcaggtcgataaagtttcgaaagaagatgcatctgaaattgatgttgtagatg

SEQ ID NO: 463928 - DNA, 75 bp, synthetic construct
  source 1..75: mol_type = other DNA
ggctattcttaaagacaagttggagaatattgatcaagacttcataaataatagtgttgtgcttgagcttgggga

SEQ ID NO: 463929 - DNA, 75 bp, synthetic construct
  source 1..75: mol_type = other DNA
tgtcggcgtaagtggcggtactgtcgaacaagacatgttattagcgcaaaccgcactgaattgtttctctgaatt

SEQ ID NO: 463930 - DNA, 75 bp, synthetic construct
  source 1..75: mol_type = other DNA
ttcttggtgagcgtagcgatgttcctgcatgtttaaatgcttctgatattttttgccttcattcagtaacagaag

SEQ ID NO: 463931 - DNA, 75 bp, synthetic construct
  source 1..75: mol_type = other DNA
gaggataaaagaatatgactcaagagaaaaacttaacgaaagaaattctcagcaaacgtcaggacgagcgggagg

SEQ ID NO: 463932 - DNA, 75 bp, synthetic construct
  source 1..75: mol_type = other DNA
cgataaagatttaatcattgatgcaatcaccaaaggacaatcacaaagttatatttctgagaaatacggcttatc

SEQ ID NO: 463933 - DNA, 75 bp, synthetic construct
  source 1..75: mol_type = other DNA
cagaagatgctcttggaaaacaatttgtccaggccagagaagatcatcaggaatcgcagcagcagcgtgacgatt

SEQ ID NO: 463934 - DNA, 75 bp, synthetic construct
  source 1..75: mol_type = other DNA
tgcatctttaccactgtgaccaccggggactgccgcaggcgcttatcagcccggaaggggaaacggcgtggcgcg

SEQ ID NO: 463935 - DNA, 75 bp, synthetic construct
  source 1..75: mol_type = other DNA
tccttatgctcctcgacaaggctggaaaccaactatgggatgtacccgtgcacagaatgaagatgtagatgagtt

SEQ ID NO: 463936 - DNA, 75 bp, synthetic construct
  source 1..75: mol_type = other DNA
ggctacagagcaggcacaggctacagagcaggcacaggctacagaacaggcacaggctacagagcaggcacaggc

SEQ ID NO: 463937 - DNA, 75 bp, synthetic construct
  source 1..75: mol_type = other DNA
atgagttgggaaaagtattgaacattaggaatgacgctgatagacgtcaagctttacacgaactaagagataaat

SEQ ID NO: 463938 - DNA, 75 bp, synthetic construct
  source 1..75: mol_type = other DNA
tatacagtcatgttcacagttacgaacaaaggaaaagagaaagaaaaaaacgtaaccattacaataccaaaaagc

SEQ ID NO: 463939 - DNA, 75 bp, synthetic construct
  source 1..75: mol_type = other DNA
atgagatttaataatatcttttggaagatatctctaggagagtttgtttgtgtgatcaccactggtgttgtccct

SEQ ID NO: 463940 - DNA, 75 bp, synthetic construct
  source 1..75: mol_type = other DNA
caggatgatatcttaatcacacctgtaacaagagaagaaatcgcctttaaaggaattaaggacgctgttaatgac

SEQ ID NO: 463941 - DNA, 75 bp, synthetic construct
  source 1..75: mol_type = other DNA
tggttttgataccgttgtgcttatatctaaaactgtctcaactgatgaattatcctcttatccagaggatgaagt

SEQ ID NO: 463942 - DNA, 75 bp, synthetic construct
  source 1..75: mol_type = other DNA
ctgggacggcgaatggcgaaaagggtatggcggcgggagcgtgacctgacggggtggatgtcgctgtcgcgtaaa

SEQ ID NO: 463943 - DNA, 75 bp, synthetic construct
  source 1..75: mol_type = other DNA
gcctgagttcacagataaaacactctccaggaaaatcggggcggttcattgcgataaattaaatctcacccagga

SEQ ID NO: 463944 - DNA, 75 bp, synthetic construct
  source 1..75: mol_type = other DNA
tgataaagctgatattcgtaaaattgaggcagagaggagctggccattaagctgtaaagcggaaagaccgcagca

SEQ ID NO: 463945 - DNA, 75 bp, synthetic construct
  source 1..75: mol_type = other DNA
gtgataccgctaccggcaagtctgaccgctgaaaccccgcaaccagccattcccgatccgctgacctatggaggc

SEQ ID NO: 463946 - DNA, 75 bp, synthetic construct
  source 1..75: mol_type = other DNA
ttaagcgtctgttaaaaggagaggttgtaggttgtatcagttctcagccgcaggcaatcattggcgggctatgtg

SEQ ID NO: 463947 - DNA, 75 bp, synthetic construct
  source 1..75: mol_type = other DNA
aggctgataaacaaatcagcgggatgatgacattaggtcagatgtttcagttaatcacgattgacaacaataccg

SEQ ID NO: 463948 - DNA, 75 bp, synthetic construct
  source 1..75: mol_type = other DNA
ccgggtaaagttgtttttaacggacaggagatgagcgaagaagaatttatgtctcgtgtcggacgttttgttcat

SEQ ID NO: 463949 - DNA, 75 bp, synthetic construct
  source 1..75: mol_type = other DNA
ttttcgtcgttatccggtgccgcagaaatttgtggtttgttgtgaatattgcctgagtcagcaggaacaaaaggc

SEQ ID NO: 463950 - DNA, 75 bp, synthetic construct
  source 1..75: mol_type = other DNA
tctaaccttgaaaaattaggaagtttcatagcaaaagacgaagctgaaaattttcgagggattccattgttaatc

SEQ ID NO: 463951 - DNA, 75 bp, synthetic construct
  source 1..75: mol_type = other DNA
gctcagtcagaactaagaagcgagggggagtcaacaattaccattagctttcatatgtctaaatcgcgagacctg

SEQ ID NO: 463952 - DNA, 75 bp, synthetic construct
  source 1..75: mol_type = other DNA
gtggagttgagcgacggcactttatcgtggttagggaacgtcttgttctggatgccgctaccggaaccgccgcag

SEQ ID NO: 463953 - DNA, 75 bp, synthetic construct
  source 1..75: mol_type = other DNA
gttcacgacaccattgccagagttgtatcctgtatcagtcctgcaaaatttcacgagtgctttattaactggatg

SEQ ID NO: 463954 - DNA, 75 bp, synthetic construct
  source 1..75: mol_type = other DNA
cattcttatgacaagagtcgccgcaagggagcgattcatgtcattagtgcgttctcaacaatgcacagtctggtc

SEQ ID NO: 463955 - DNA, 75 bp, synthetic construct
  source 1..75: mol_type = other DNA
gatgaaaccgtggtcactgtcatcccaactctcggtgctattgccagagcaacatttaatgcacaaatcggcggg

SEQ ID NO: 463956 - DNA, 75 bp, synthetic construct
  source 1..75: mol_type = other DNA
tgattgcaatgcttctgtgtggggcatcgtttgcaagtgatgtgtattttttatgcaacacggaaaaaggaacaa

SEQ ID NO: 463957 - DNA, 75 bp, synthetic construct
  source 1..75: mol_type = other DNA
ctgataatgctcatcttgatgtgcaccattctgaagaggaactgggttatatcttcagcctacaggcgaagcgcg

SEQ ID NO: 463958 - DNA, 75 bp, synthetic construct
  source 1..75: mol_type = other DNA
tcaatatgaaaggtggagttggtaaaaccaccctctgcgtcggtattgctgactttttagccaacagcatgggaa

SEQ ID NO: 463959 - DNA, 75 bp, synthetic construct
  source 1..75: mol_type = other DNA
taaaagaaagttacgactatatctttatcgatagccccccaacaatctcattatttacagataccgcactccttg

SEQ ID NO: 463960 - DNA, 75 bp, synthetic construct
  source 1..75: mol_type = other DNA
tttctaaaatcttcaatactgatagcgatttttggataaaacttcaagaaaactatataaatcatacatgcaaat

SEQ ID NO: 463961 - DNA, 75 bp, synthetic construct
  source 1..75: mol_type = other DNA
ctgcagatggcgctgtggcggcgtaagaggccccggaacgttatcgttcacacggaccgtggaggccagtactgt

SEQ ID NO: 463962 - DNA, 75 bp, synthetic construct
  source 1..75: mol_type = other DNA
gatattgcgggccaactcccgcccaactgccagattcgctttcgggccattcacccttttactgtttttgaggag

SEQ ID NO: 463963 - DNA, 75 bp, synthetic construct
  source 1..75: mol_type = other DNA
cttttggatgtgggttgccgcgtttatcggcatggcgacctcgtttgccgaatgttcccttgcacaactttataa

SEQ ID NO: 463964 - DNA, 75 bp, synthetic construct
  source 1..75: mol_type = other DNA
gaatacctgaaacgaaaaacgaaaatgggtaaagataaaaactcggcttttagtgaactgcaaataaaaataaag

SEQ ID NO: 463965 - DNA, 75 bp, synthetic construct
  source 1..75: mol_type = other DNA
ttatattcatttattcgcgactatcgcacccgaaaacttcaccataatcattttgactctctggaaacaaaactg

SEQ ID NO: 463966 - DNA, 75 bp, synthetic construct
  source 1..75: mol_type = other DNA
ttcgagatatatatgacttcattttgatcgatagcccaccaaccatttcattatttactgatgcagctctcgttg

SEQ ID NO: 463967 - DNA, 75 bp, synthetic construct
  source 1..75: mol_type = other DNA
atacttagtaaatatgatcgagtgaaagagtatatagctgatcacttagaaaatacaaaaaccatcagacgaata

SEQ ID NO: 463968 - DNA, 75 bp, synthetic construct
  source 1..75: mol_type = other DNA
gccgggcgacccgctggaagcttatcaacaattacgctggacacggaattcgcagggtgtgcaactcactaaccc

SEQ ID NO: 463969 - DNA, 75 bp, synthetic construct
  source 1..75: mol_type = other DNA
gtgaatgaagataatatctacgccttgctttctcccctggcagaaggacgggtatatccctatgttgcgccatta

SEQ ID NO: 463970 - DNA, 75 bp, synthetic construct
  source 1..75: mol_type = other DNA
atggtgaaaataagagcctttcgttatcgttctgcttcactgctctgtctggtgttactgaccggatgccccgga

SEQ ID NO: 463971 - DNA, 75 bp, synthetic construct
  source 1..75: mol_type = other DNA
aggccctgttacagtcagtggacctgcgtttactgaggcgctggaacgatatatccgattacgaagccttgagtt

SEQ ID NO: 463972 - DNA, 75 bp, synthetic construct
  source 1..75: mol_type = other DNA
ttaggggataccaatgttttgattaaagcgcctggcgcaggcggtgtactgagagatcccctcataatttcccca

SEQ ID NO: 463973 - DNA, 75 bp, synthetic construct
  source 1..75: mol_type = other DNA
atgcttgaccacgcgacaggcatcgtcgttggtgaaacggcggtgattgaaaacgacgtatcgattctgcaatct

SEQ ID NO: 463974 - DNA, 75 bp, synthetic construct
  source 1..75: mol_type = other DNA
tcaaaccatcggcggcaaaattgccgacgcgctaaacgaagattttacttacgagctggaaatttttaatcgcga

SEQ ID NO: 463975 - DNA, 75 bp, synthetic construct
  source 1..75: mol_type = other DNA
aacgtattgacgcagattttgctgttgtcagtggtggggaaattcgagattccatagagagtggtaacatcacat

SEQ ID NO: 463976 - DNA, 75 bp, synthetic construct
  source 1..75: mol_type = other DNA
atattgatacgctttcaaaagccgatatgctgctggtcgaggatgcgattaaaatccatctggctttacccaggt

SEQ ID NO: 463977 - DNA, 75 bp, synthetic construct
  source 1..75: mol_type = other DNA
aatataacgcaggttattttagctcatattatatggatggcatgcctcagtattttcttgttaagatgtataact

SEQ ID NO: 463978 - DNA, 75 bp, synthetic construct
  source 1..75: mol_type = other DNA
cgtcgatgatgtttccgctgacgtgctgtgtggccaggcagagagcagggtttccgttcaggtcgatgtgtattc

SEQ ID NO: 463979 - DNA, 75 bp, synthetic construct
  source 1..75: mol_type = other DNA
gggggtcgggtataactacgaccgcgatcaacatgacgttaactggcagctgtctgcggtgtggtcgggcatgaa

SEQ ID NO: 463980 - DNA, 75 bp, synthetic construct
  source 1..75: mol_type = other DNA
gctcagtctgagttaagagatgagggggattcaattattactataaattttcatgtacctaaatcacgataccag

SEQ ID NO: 463981 - DNA, 75 bp, synthetic construct
  source 1..75: mol_type = other DNA
gtttaacctgtcgcagtgcgacggcctgccgcaggcgctgtccgagccgtttacccggcccgcaacgcctgtgga

SEQ ID NO: 463982 - DNA, 75 bp, synthetic construct
  source 1..75: mol_type = other DNA
agcctgtgggggaatgtaggtgtgcaactaggtgataaaggctatagcgatactcagggcatgctgggagtgaaa

SEQ ID NO: 463983 - DNA, 75 bp, synthetic construct
  source 1..75: mol_type = other DNA
ctacgccgtgaagatgaatggtcaaaccgtaagccgtgatggtgcgcgtaatctcggtgaagtacgtaccggggt

SEQ ID NO: 463984 - DNA, 75 bp, synthetic construct
  source 1..75: mol_type = other DNA
gcgcaaatcacctggatgggtgtgaaagattctgaccataatcggaaagacggaacacgcattgaaacggaaggc

SEQ ID NO: 463985 - DNA, 75 bp, synthetic construct
  source 1..75: mol_type = other DNA
tgctttctattatgtatatggaaggggatggcacagataaaaattacattttgtcatgggcgtgggggataattt

SEQ ID NO: 463986 - DNA, 75 bp, synthetic construct
  source 1..75: mol_type = other DNA
tttagccagcatggaacacatatctttggtgaaatgttggttacgggaagctggagcgcacaacgtgttagtaac

SEQ ID NO: 463987 - DNA, 75 bp, synthetic construct
  source 1..75: mol_type = other DNA
gccttacattgaagcgaactggatcaacaatagcaaagtctacgccgtgaagatgaatggtcaaaccgtaggccg

SEQ ID NO: 463988 - DNA, 75 bp, synthetic construct
  source 1..75: mol_type = other DNA
accggaaatcgtcactgggaatgccggggcatgtcgacggggatcgcggcctgcacttccaaattttctgcgatg

SEQ ID NO: 463989 - DNA, 75 bp, synthetic construct
  source 1..75: mol_type = other DNA
gggtcagtaaaggcaatatcagcgaatacatgaatgcccatcgtaatgatgacaatatcaaggaattaaaaacct

SEQ ID NO: 463990 - DNA, 75 bp, synthetic construct
  source 1..75: mol_type = other DNA
tggtgattgattacccattggcctgtgccatggatgatggttttgttaaagagcctgccgttgttactcagcgta

SEQ ID NO: 463991 - DNA, 75 bp, synthetic construct
  source 1..75: mol_type = other DNA
atcggcggcaacctggagaatggcggcacggttcaaatgaatagcgaaggggggaaaccggggaatgtactgacc

SEQ ID NO: 463992 - DNA, 75 bp, synthetic construct
  source 1..75: mol_type = other DNA
ggtgacggcaacgtacagacccgcctgggcgtgaaagcatacatcaacggtcacagtaagctggatgagggcaga

SEQ ID NO: 463993 - DNA, 75 bp, synthetic construct
  source 1..75: mol_type = other DNA
tagagtgtttatcatattccttgcgaaaagaaaaaatgattcgcaagtggaaattaacagaacgcttcaataatt

SEQ ID NO: 463994 - DNA, 75 bp, synthetic construct
  source 1..75: mol_type = other DNA
ttgaagaagcgttattactgtatcttcatcgggtatttcggccattattaactctcgctgctgcacaaactttta

SEQ ID NO: 463995 - DNA, 75 bp, synthetic construct
  source 1..75: mol_type = other DNA
agtcaaaatttgaaaccatctcaaaaatagaaattttttcttttggctctgctttaatcattgctatagcaatgg

SEQ ID NO: 463996 - DNA, 75 bp, synthetic construct
  source 1..75: mol_type = other DNA
ctttttggcgtggcgattcaggggctaattcagacttatatcaactttgacggtacgctgagttcctggtggacg

SEQ ID NO: 463997 - DNA, 75 bp, synthetic construct
  source 1..75: mol_type = other DNA
ttgcaggcagcggaacctgattacctggaaggcctgagcgaacccatcgggaaatttccgatgaccgatggctgg

SEQ ID NO: 463998 - DNA, 75 bp, synthetic construct
  source 1..75: mol_type = other DNA
ttatcagcgcgtagcgcctgctgctttagcgttcgttagtgaaaaaggtgaaacctcagtcggtgaactgcctgc

SEQ ID NO: 463999 - DNA, 75 bp, synthetic construct
  source 1..75: mol_type = other DNA
ctccaagtgataaaatcgagggtacgactatttctggtcatgcgatgaatcgtggtaaacccgacgaagtacata

SEQ ID NO: 464000 - DNA, 75 bp, synthetic construct
  source 1..75: mol_type = other DNA
aataaaatatctctgaaattatatatgggaatgcagctaaagcctggttcaaaaaaccaagaagaaggtattttg

SEQ ID NO: 464001 - DNA, 75 bp, synthetic construct
  source 1..75: mol_type = other DNA
ctgagtatgtgtctattgtcggtgcggttttagcttttgttggcacaattgtactcgcattttctctgggaaaag

SEQ ID NO: 464002 - DNA, 75 bp, synthetic construct
  source 1..75: mol_type = other DNA
agcgcaaagcacgacgcgagcgcttgcgcgagctcaaggtgcgaattgccgcaaaacccgcgtcagccgcccatg

SEQ ID NO: 464003 - DNA, 75 bp, synthetic construct
  source 1..75: mol_type = other DNA
atttgagttcgttatataagtatgggatggattttggaatgacttatatccgaaatgcactagattttgatgaga

SEQ ID NO: 464004 - DNA, 75 bp, synthetic construct
  source 1..75: mol_type = other DNA
tgagtcgcatggtgcgctgttgcagacagccgaacctgaatacctggacggcctgagcgaaccgatcgggaaatt

SEQ ID NO: 464005 - DNA, 75 bp, synthetic construct
  source 1..75: mol_type = other DNA
tagataatcacccgacaaaaatccccactcttccggccttttatcagccatcgctctggacgcgcccggtattaa

SEQ ID NO: 464006 - DNA, 75 bp, synthetic construct
  source 1..75: mol_type = other DNA
atgttttatcgccccgcacacctgaagggacgggtaaacgatgcgtggaaatcactggaatttaaacgtagtgat

SEQ ID NO: 464007 - DNA, 75 bp, synthetic construct
  source 1..75: mol_type = other DNA
aaacgcgatgtgccggagctattagaaaccttaaaagcgcagtttcctaagctcagcgattttgaacgtgacttt

SEQ ID NO: 464008 - DNA, 75 bp, synthetic construct
  source 1..75: mol_type = other DNA
ttgccgggcagacggtcagcgtgttggcaggcaacggtgccacgactgctccgacggtcaccacacagccggacg

SEQ ID NO: 464009 - DNA, 75 bp, synthetic construct
  source 1..75: mol_type = other DNA
cctggttgaagggggcgagtccttactgtctggtgataacgtaatagtggaaggagccgtacgttcaggaggatg

SEQ ID NO: 464010 - DNA, 75 bp, synthetic construct
  source 1..75: mol_type = other DNA
tgtataccacaacccgtatggcgacgattgccagtaccaatcagcacgccaacctgcaattgcagacgtggagtg

SEQ ID NO: 464011 - DNA, 75 bp, synthetic construct
  source 1..75: mol_type = other DNA
tgacgtgtggtttgaaacatcaccaggcgtaaccgtgaaaatcccattgcccaaaatgggcattatcccgccgaa

SEQ ID NO: 464012 - DNA, 75 bp, synthetic construct
  source 1..75: mol_type = other DNA
tatcgccgatgtcagaacggcgcagatcgcggatctggtggtcattaaggacggctcagtggctgacggcgcgac

SEQ ID NO: 464013 - DNA, 75 bp, synthetic construct
  source 1..75: mol_type = other DNA
cacaaagccggacggcacggtggagatcagtgtcaccagccagacggcggggatcagtacagtcaccgcaaccat

SEQ ID NO: 464014 - DNA, 75 bp, synthetic construct
  source 1..75: mol_type = other DNA
agccaggataacgcggtggcagacggtgcgacggcgaacacgctgcgggtgagggtgaccgacgcgttcggtaat

SEQ ID NO: 464015 - DNA, 75 bp, synthetic construct
  source 1..75: mol_type = other DNA
aactgatgattgagtatgccagttgtgatggctgcggtttgtgtatcgcagcatgttcgagcgatgcgctacgcg

SEQ ID NO: 464016 - DNA, 75 bp, synthetic construct
  source 1..75: mol_type = other DNA
ggacggatgtcggctgacaacgaacgctgtgatggttgtggcgaatgcgttgtccagtgccctcacaatgctgtg

SEQ ID NO: 464017 - DNA, 75 bp, synthetic construct
  source 1..75: mol_type = other DNA
aacgctccgggatgcgttcgataatctggtaaccggtgcagcttcacagttagccgctaatggtgtgcttacggt

SEQ ID NO: 464018 - DNA, 75 bp, synthetic construct
  source 1..75: mol_type = other DNA
taaagggaatgatgttgtatttaaattcaagattaaaaaatggtttactagtttaggtgctaccagtagtaatac

SEQ ID NO: 464019 - DNA, 75 bp, synthetic construct
  source 1..75: mol_type = other DNA
tggttgccagtctgaaattaaaaacatgggcagcggagattaagtcctcattatatggaatacaaccaggtgcag

SEQ ID NO: 464020 - DNA, 75 bp, synthetic construct
  source 1..75: mol_type = other DNA
tacggaacatcgcaaatcggtaaagtctacgacggggaattcgtcattgatgctcagctggataccgctgggctt

SEQ ID NO: 464021 - DNA, 75 bp, synthetic construct
  source 1..75: mol_type = other DNA
tgattatatgttcacaagttcacagagttgggtgtctgtcgatgcttcaggtaaagtttctttcacaaataccgg

SEQ ID NO: 464022 - DNA, 75 bp, synthetic construct
  source 1..75: mol_type = other DNA
ctagctgccaatgcgctctgtcatgctaaaaatgatggatataatcttcctggcatcacacatttgacgtctggc

SEQ ID NO: 464023 - DNA, 75 bp, synthetic construct
  source 1..75: mol_type = other DNA
tccagtcaggccccttcgtgaactttctcaagttgagcgatattgattacagccaaagaaattatggcgagtaca

SEQ ID NO: 464024 - DNA, 75 bp, synthetic construct
  source 1..75: mol_type = other DNA
gggtgcaggaatcaacttgggtgcgcgtattgattgctaaagatgctatcagcactggctgggattgcccacgtg

SEQ ID NO: 464025 - DNA, 75 bp, synthetic construct
  source 1..75: mol_type = other DNA
accgcctggtgttccacacgcggatacagcatggcgagccactggtcgagagccgctacctctacgacccgctgg

SEQ ID NO: 464026 - DNA, 75 bp, synthetic construct
  source 1..75: mol_type = other DNA
gcgccaggccgggtaatcgctactttacccgacgtattgataccgcagcagcgttgtaccacgccggaaaagtga

SEQ ID NO: 464027 - DNA, 75 bp, synthetic construct
  source 1..75: mol_type = other DNA
gccactattgagagtacggcggagggccgggcgggatacttcttcgattactgccagaccgccgagagagcattg

SEQ ID NO: 464028 - DNA, 75 bp, synthetic construct
  source 1..75: mol_type = other DNA
tggctgataaagactggcggctgaacaatctctactggatcactgacaaagagggtaagcccacgcgcttcagga

SEQ ID NO: 464029 - DNA, 75 bp, synthetic construct
  source 1..75: mol_type = other DNA
aggaggtattaaacctcataagaatattcatttaattcctataatatcgtcaaagctcaatgagataggggtgaa

SEQ ID NO: 464030 - DNA, 75 bp, synthetic construct
  source 1..75: mol_type = other DNA
aaccgcttcatgacttcacatcacacggtgctgacggcttccgttactttgcagtagcgaagaacaaccacaagc

SEQ ID NO: 464031 - DNA, 75 bp, synthetic construct
  source 1..75: mol_type = other DNA
ccgtcctgcgtcttcgatgaggagaaatgtgccgagggcatatctcacctcgaaggctaccgcaaggagtgggac

SEQ ID NO: 464032 - DNA, 75 bp, synthetic construct
  source 1..75: mol_type = other DNA
gccgggcgggttacttcttcgattactgccagacggcagagaaagcgctgctgcagggtaaaacgctatccgcgc

SEQ ID NO: 464033 - DNA, 75 bp, synthetic construct
  source 1..75: mol_type = other DNA
gaaattcctccgctgttaccagacagccgggaaggggacgttaaagaactggatagtttactgtaccagacggta

SEQ ID NO: 464034 - DNA, 75 bp, synthetic construct
  source 1..75: mol_type = other DNA
caagaagctgtcaccgaatttcatgatcactggtttgcagtgttcaaacctcaaaaacgccgttgccgttacggt

SEQ ID NO: 464035 - DNA, 75 bp, synthetic construct
  source 1..75: mol_type = other DNA
aagctggatacaaacacaaattagctgaatttaatggcagccagggaacgcgtaatgaatggtatgttcagccgc

SEQ ID NO: 464036 - DNA, 75 bp, synthetic construct
  source 1..75: mol_type = other DNA
atgccattaaatggagtcagtgctgcgatgcgcgaacgggtatcgcagcagttaaaagaaatagaacgtcgctat

SEQ ID NO: 464037 - DNA, 75 bp, synthetic construct
  source 1..75: mol_type = other DNA
attattgaaaggcgcgaacccgacgctgattgaatggctggactcaccggtggtctatcagcaagacgaagaaac

SEQ ID NO: 464038 - DNA, 75 bp, synthetic construct
  source 1..75: mol_type = other DNA
ggcgtgaaagtgctgtacgcctgcgaatcggggagtcgcggctggggatttgcttcgcccgacagcgattacgat

SEQ ID NO: 464039 - DNA, 75 bp, synthetic construct
  source 1..75: mol_type = other DNA
ttcactgcgtcacaacagcatcgacaacagaggaacggtcactggcctgaacggcctgaccctgaacagtacggg

SEQ ID NO: 464040 - DNA, 75 bp, synthetic construct
  source 1..75: mol_type = other DNA
cggagaattgctgcccttcacccgtatacctgacgatgatgttcgtcttattcgtgaattacgggatgctgaatc

SEQ ID NO: 464041 - DNA, 75 bp, synthetic construct
  source 1..75: mol_type = other DNA
acaataccttatactttctttcatttatataggcaagcatgggggttgtcattttttattttatatctatgcaat

SEQ ID NO: 464042 - DNA, 75 bp, synthetic construct
  source 1..75: mol_type = other DNA
gcctactcgctgatcagcctgctgattttcgtcaccccggcggagcacatcgcgctcatttttgccctcaacatc

SEQ ID NO: 464043 - DNA, 75 bp, synthetic construct
  source 1..75: mol_type = other DNA
cgttacgccaccagtcatccccgcgatgaaaatccggcatctcaatccccgccagatggtaagctcccggaacag

SEQ ID NO: 464044 - DNA, 75 bp, synthetic construct
  source 1..75: mol_type = other DNA
ttatttgcaaaagaaattgacgagttggggtatttctgtaatgttagcgttgagtttgttgatcgtgatgaatta

SEQ ID NO: 464045 - DNA, 75 bp, synthetic construct
  source 1..75: mol_type = other DNA
gttgggaatggcgcaaagcgctgggattgctgaaaggtgcgaatcccacgctaattgaatggctggattcaccgg

SEQ ID NO: 464046 - DNA, 75 bp, synthetic construct
  source 1..75: mol_type = other DNA
acaatgttaaatatagagtgataattaataatctttatggcagtgagtttcggataagaggtattaatgagaatt

SEQ ID NO: 464047 - DNA, 75 bp, synthetic construct
  source 1..75: mol_type = other DNA
aatcggtgaactgccgaatattcaggtctttggcgcagtaggggataaaaaatttacccgcatgggcgatgtgac

SEQ ID NO: 464048 - DNA, 75 bp, synthetic construct
  source 1..75: mol_type = other DNA
tcaacagctgttgcagtggtttcgtgcaggttgtggtacaggctcgcaattctgattaacgagctgtccaggtag

SEQ ID NO: 464049 - DNA, 75 bp, synthetic construct
  source 1..75: mol_type = other DNA
gtacggttttgatgactttcttcctgttatatcaggaacgacggaagggattgttctgtgtgaacaagtaaggga

SEQ ID NO: 464050 - DNA, 75 bp, synthetic construct
  source 1..75: mol_type = other DNA
atttttctataaaacgcttatgcaacgtgacggaaagctaatgcttactattgtcgaggagttctggatgcctgc

SEQ ID NO: 464051 - DNA, 75 bp, synthetic construct
  source 1..75: mol_type = other DNA
gtggtgtgcttgaagatattatgagtattccagatagttcacttagaaaacgtctcgggtatgaggttttaagct

SEQ ID NO: 464052 - DNA, 75 bp, synthetic construct
  source 1..75: mol_type = other DNA
agtgctgcaaatataagtaatcgagttgtgatgcatgattggctttttttattattgggccttcatttcggaatg

SEQ ID NO: 464053 - DNA, 75 bp, synthetic construct
  source 1..75: mol_type = other DNA
atgcgagaaagggtatcgcagcagttaaaagaaattgaacggcggtatgatgtgaaagtactgtacgcctgtgaa

SEQ ID NO: 464054 - DNA, 75 bp, synthetic construct
  source 1..75: mol_type = other DNA
tggagatgggattacatttaggtcaaatgtgtccgggctgtcatggcgttttcccaatggcataccataccactg

SEQ ID NO: 464055 - DNA, 75 bp, synthetic construct
  source 1..75: mol_type = other DNA
atgaaaaacccggcaaataaaagcaatgtaaaacgtatggcctggatcgtaaaatggatggatagcaaaggagac

SEQ ID NO: 464056 - DNA, 75 bp, synthetic construct
  source 1..75: mol_type = other DNA
ggcaagaacatttggtcatctaatatatgattataatagctacctaagttataggcagcatgataataacgttgt

SEQ ID NO: 464057 - DNA, 75 bp, synthetic construct
  source 1..75: mol_type = other DNA
gcctgtttgttttcgcaccaatgacctgggcgcaggactacaatattaaaaacggtttgccgtcagaaacctata

SEQ ID NO: 464058 - DNA, 75 bp, synthetic construct
  source 1..75: mol_type = other DNA
aagagcataaagtggatataaatatatggaatgaacactatgaatatttgaggaaattttttcttgacgatagat

SEQ ID NO: 464059 - DNA, 75 bp, synthetic construct
  source 1..75: mol_type = other DNA
tctgaaggagcatatttagaaccggatgaaatgcacaaatattctagtttagaaattattaaaaaagtttttcag

SEQ ID NO: 464060 - DNA, 75 bp, synthetic construct
  source 1..75: mol_type = other DNA
ccaatgttaactactatttatttaggcaaagaatattctttgtcaggagaatatcttcaaagtatgtttttacta

SEQ ID NO: 464061 - DNA, 75 bp, synthetic construct
  source 1..75: mol_type = other DNA
aagcacagcgctggcgcgtcagtattctcggcggcatgttgtgtgagacgttgaccatgattctggtaattgtct

SEQ ID NO: 464062 - DNA, 75 bp, synthetic construct
  source 1..75: mol_type = other DNA
ttcctttttattttcctcagttctactctactcaagagaacgatgaatggtgggggaaagggtttactgactggg

SEQ ID NO: 464063 - DNA, 75 bp, synthetic construct
  source 1..75: mol_type = other DNA
ctttttttaataataaagcaaaatgtgatggatttaatggcatacattttatcgcattacgagcatacagtattg

SEQ ID NO: 464064 - DNA, 75 bp, synthetic construct
  source 1..75: mol_type = other DNA
aaaacttttctatcgcccggatggattgaagggaaatccctctgaagccccgttagccctgaagtggttctggtc

SEQ ID NO: 464065 - DNA, 75 bp, synthetic construct
  source 1..75: mol_type = other DNA
gacgaacattcaaaagggaaaagcaccttttgcaaggaagaaagaccaagtaggtggtagggaacgctttgaatt

SEQ ID NO: 464066 - DNA, 75 bp, synthetic construct
  source 1..75: mol_type = other DNA
cgatgagtgttccggtggttgatgcaaaacctaccgaacgtccaggtgtttttacggcatcaattccaggtgcac

SEQ ID NO: 464067 - DNA, 75 bp, synthetic construct
  source 1..75: mol_type = other DNA
ccatttataaatcatgttataatcgaagggtgtgtttgtaaatcagattatgagttattgatgtcaaaggttttc

SEQ ID NO: 464068 - DNA, 75 bp, synthetic construct
  source 1..75: mol_type = other DNA
tctcaatggattttttctcactgaaaggtaaaaccgcaattgttaccggtgggaatagcggtttaggccaggcat

SEQ ID NO: 464069 - DNA, 75 bp, synthetic construct
  source 1..75: mol_type = other DNA
acgattcaaaaccagcgtgttccccgcgccagcggggataaaccgcagttgaagcgctttaaaaaattctggacg

SEQ ID NO: 464070 - DNA, 75 bp, synthetic construct
  source 1..75: mol_type = other DNA
cgatatcgtctctaaaatcggcattccaatgatcctcggtagcgtctgtatcggctttattgtgcttctgggtga

SEQ ID NO: 464071 - DNA, 75 bp, synthetic construct
  source 1..75: mol_type = other DNA
ggaagtttaaatcttgatactctcatttctcttctgcgcgcgctgaataaattgcaaaatctcgatgccatattg

SEQ ID NO: 464072 - DNA, 75 bp, synthetic construct
  source 1..75: mol_type = other DNA
atcattgaatatgaacatttatacaatgcaaatcacataatttttgccgatcttaaagatgatttttttcagccg

SEQ ID NO: 464073 - DNA, 75 bp, synthetic construct
  source 1..75: mol_type = other DNA
ttccgatcccggatataatcatgtacacgaatttgctcaggcagtgatgttggcagcaactgtacaggaaagggg

SEQ ID NO: 464074 - DNA, 75 bp, synthetic construct
  source 1..75: mol_type = other DNA
ttgttggcatgggaattatgagtggaactgtggctcatgcagctaacaatgaagtgactttcctggggactgtaa

SEQ ID NO: 464075 - DNA, 75 bp, synthetic construct
  source 1..75: mol_type = other DNA
tgtctcttgggcttcagctgctctgaatgctgatggttttggtgcaaccagcggcgcagcaacagatgctactgt

SEQ ID NO: 464076 - DNA, 75 bp, synthetic construct
  source 1..75: mol_type = other DNA
agctggcaggggaaatggcaaaaattggagtccgggtcgaggtcgccgatgccaaggagaaatcccttccagcct

SEQ ID NO: 464077 - DNA, 75 bp, synthetic construct
  source 1..75: mol_type = other DNA
acaggaaaaggttcaggcgattgtccgtaacctggtccgacaaaattgttccgcagacaataagaacatttgcag

SEQ ID NO: 464078 - DNA, 75 bp, synthetic construct
  source 1..75: mol_type = other DNA
tggtgatttaccggaggatcgtgaaagtatattttggattgtatccaattccttacctggaggaaacaaaggaga

SEQ ID NO: 464079 - DNA, 75 bp, synthetic construct
  source 1..75: mol_type = other DNA
ttggcgatagccgaaaaacacccggagatcggcgacgtacgcgggctgggagcgatgattgccatcgagctgttt

SEQ ID NO: 464080 - DNA, 75 bp, synthetic construct
  source 1..75: mol_type = other DNA
taccgctgaattagagcgaagcaaagcggaatttgaaaagaccaccgccgaggtagctaaattcaaacaggcggt

SEQ ID NO: 464081 - DNA, 75 bp, synthetic construct
  source 1..75: mol_type = other DNA
gtggttgggtatatgcctatactagtcctgttttcctccttaattacagcactactgattttaaattatatctta

SEQ ID NO: 464082 - DNA, 75 bp, synthetic construct
  source 1..75: mol_type = other DNA
atgtcatttctgttacccatccaactcttcaaaattcttgccgatgaaacccgtctgggcatcgttttactgctc

SEQ ID NO: 464083 - DNA, 75 bp, synthetic construct
  source 1..75: mol_type = other DNA
ttagcgagttagggctagagtatataaaagaattacttaacaaaaataatattgatgattaccatattattagtt

SEQ ID NO: 464084 - DNA, 75 bp, synthetic construct
  source 1..75: mol_type = other DNA
agaaaattttttttagcaaaaaaattttctttcaaacaggcaaaacacctttttcctctcaactaaaaatggtta

SEQ ID NO: 464085 - DNA, 75 bp, synthetic construct
  source 1..75: mol_type = other DNA
gggtttctgcgtggcagcgctggcgattaccggtgtgccgccgttcaacggcttcttcagtaaattcccgctgtt

SEQ ID NO: 464086 - DNA, 75 bp, synthetic construct
  source 1..75: mol_type = other DNA
gtggcggcatctggcagtaccggacgttcctggttctatggaatttgatctcaacaaaaactggcaactggcaac

SEQ ID NO: 464087 - DNA, 75 bp, synthetic construct
  source 1..75: mol_type = other DNA
tgctgaatacgcgggatgggttgacgacgaaaacaacgcagatcgacggtgcccaaagtattccgggcatgggtg

SEQ ID NO: 464088 - DNA, 75 bp, synthetic construct
  source 1..75: mol_type = other DNA
ctaaccaatattatgtatgtattccttaccacaacagcgattattactacaaaatctatgagtaaaaaagttttt

SEQ ID NO: 464089 - DNA, 75 bp, synthetic construct
  source 1..75: mol_type = other DNA
acttgacactacaatatcagaaaaaatagaaatatgtgcacgcaggatatttataaagatcatgaagaagaggaa

SEQ ID NO: 464090 - DNA, 75 bp, synthetic construct
  source 1..75: mol_type = other DNA
tgctggtgcatagtgacggagtgaccttctcgcaggaactgggcgaaacggtggcattggtcaaagcgccgggcg

SEQ ID NO: 464091 - DNA, 75 bp, synthetic construct
  source 1..75: mol_type = other DNA
gacagctacgtcaactattcgttaacgcaaaacaaccaccatgaaagcacgatgcaggtcggtctgaacggaacg

SEQ ID NO: 464092 - DNA, 75 bp, synthetic construct
  source 1..75: mol_type = other DNA
gcagaagtaccacgaagagcaggcccgcaaacacaatgtcgcgctggccagaacactgactgccgtcaatcgcaa

SEQ ID NO: 464093 - DNA, 75 bp, synthetic construct
  source 1..75: mol_type = other DNA
acaaccaccatcaccgacatacttaacaggcgaccgggcagtgaatatcagagctggaccattgccgttcgccca

SEQ ID NO: 464094 - DNA, 75 bp, synthetic construct
  source 1..75: mol_type = other DNA
agcgccagcgttttgacgaaatgatgcgccagcgcacgcccttactgaccctgaacaacattgccacggggccac

SEQ ID NO: 464095 - DNA, 75 bp, synthetic construct
  source 1..75: mol_type = other DNA
gagtttcacaatagtctgaaaaatagtcgtgaccgttttgattcctggcttagtgatgtgcgtgtcggctggctt

SEQ ID NO: 464096 - DNA, 75 bp, synthetic construct
  source 1..75: mol_type = other DNA
acgcatggaatcaaccaaatcaggtagttcatatccatcgtttaaggttatttataaaggttgtcgcttacatga

SEQ ID NO: 464097 - DNA, 75 bp, synthetic construct
  source 1..75: mol_type = other DNA
attataaaggggaattcaaaagtcgatcagtgtactgattactttgatgggaattgtcctcaagcatttcacgct

SEQ ID NO: 464098 - DNA, 75 bp, synthetic construct
  source 1..75: mol_type = other DNA
cttattctggtaatatgggaagcagagagtttgtaaaagtaaaaattgatgggaaggtaataaagggaaattcga

SEQ ID NO: 464099 - DNA, 75 bp, synthetic construct
  source 1..75: mol_type = other DNA
tctggttttgggatccgctttgtttttattgtgttcgcagtcatcgcgttaataggcggcctggttacctatttg

SEQ ID NO: 464100 - DNA, 75 bp, synthetic construct
  source 1..75: mol_type = other DNA
aaagttgatccttacagacttattaaataccatttccctggcccaggttctattaatgttgcttttagtgcctca

SEQ ID NO: 464101 - DNA, 75 bp, synthetic construct
  source 1..75: mol_type = other DNA
caaaaggcattattgatgagatggataattttatacccttgataagcttgctatgctcagaacttgaaaaaaaag

SEQ ID NO: 464102 - DNA, 75 bp, synthetic construct
  source 1..75: mol_type = other DNA
gataaaaaccacctcagcggcattaagctgggaaagcaccaacgaacggtataataaggacaaagaggcgggaaa

SEQ ID NO: 464103 - DNA, 75 bp, synthetic construct
  source 1..75: mol_type = other DNA
tatgctggcgggcaataacctggtgatgcagaaagacgccagcggcacggcgaacgccggggtgatcaatacctc

SEQ ID NO: 464104 - DNA, 75 bp, synthetic construct
  source 1..75: mol_type = other DNA
gctcactttatgattaatggaggaaatatacttacgctccagcgaattatggggcacgccacgatccagcaaact

SEQ ID NO: 464105 - DNA, 75 bp, synthetic construct
  source 1..75: mol_type = other DNA
aaaagtattctagagaacttttttaaacggggtgggaaaaaaattacaatagaaattgtgcgcagggaagccact

SEQ ID NO: 464106 - DNA, 75 bp, synthetic construct
  source 1..75: mol_type = other DNA
aatacgcaacttaaaatcttttacaggcctaaatctgtaactatgacacctgaagaagctatgcgtaaaataagt

SEQ ID NO: 464107 - DNA, 75 bp, synthetic construct
  source 1..75: mol_type = other DNA
cgtgaatttaataatactgcgcattcagaaaataaagcgtcttttgattctatttggcagcgtctgacaaaccat

SEQ ID NO: 464108 - DNA, 75 bp, synthetic construct
  source 1..75: mol_type = other DNA
tttcttttgacgtgactcatgcccgctcgcagtttgactacgacgataatgagagtggtcaatcgtatcgttttc

SEQ ID NO: 464109 - DNA, 75 bp, synthetic construct
  source 1..75: mol_type = other DNA
ttaccgaagggtaagggaaaactcaataatgacaagtaaaattagctctcgcaatataattggttatctggaagt

SEQ ID NO: 464110 - DNA, 75 bp, synthetic construct
  source 1..75: mol_type = other DNA
agttgcaaactgatacaattatccggcaaccgcctgaaatctcagcacagacggaaagcattgtggacaaaagtg

SEQ ID NO: 464111 - DNA, 75 bp, synthetic construct
  source 1..75: mol_type = other DNA
cgggtgtctggcttgatgatgatgctctggtgtggctcctctccgggcagaacggtatccgcgcggtgcgtggtg

SEQ ID NO: 464112 - DNA, 75 bp, synthetic construct
  source 1..75: mol_type = other DNA
acgacgtgaagcgcggtttgcgaaacggcgttgctccttacatacctgcggccttttgccgggatgccgggagcg

SEQ ID NO: 464113 - DNA, 75 bp, synthetic construct
  source 1..75: mol_type = other DNA
acgacgtgaagcgcggtttgcgaaacggcgttgctccttacataccagcggccttttgctgggatgcccggagcg

SEQ ID NO: 464114 - DNA, 75 bp, synthetic construct
  source 1..75: mol_type = other DNA
ttttgtgggctgttcatttaccctggacagtcagtgcggcaggttgtggctgtgtcagcccccggcgacaggggc

SEQ ID NO: 464115 - DNA, 75 bp, synthetic construct
  source 1..75: mol_type = other DNA
ccgtcacctttggcggcaaaacctataccgccacggttgccgccaatggtacctgggcgctgaacgtgcctgcgg

SEQ ID NO: 464116 - DNA, 75 bp, synthetic construct
  source 1..75: mol_type = other DNA
gcgcagcggcgcagcctggcagagacgctccagcaggaagggagtgagaacggccacggcgtggtgttcccggct

SEQ ID NO: 464117 - DNA, 75 bp, synthetic construct
  source 1..75: mol_type = other DNA
gtgctttttattttaataaaatggccgacactgtttcacactatggggtgataaatgacatccttagcagaacgg

SEQ ID NO: 464118 - DNA, 75 bp, synthetic construct
  source 1..75: mol_type = other DNA
aggacattgtcacggtacaacaggcatggggaccaaaagaaacccgtgacgttaaggcgttacgcttcaacggcg

SEQ ID NO: 464119 - DNA, 75 bp, synthetic construct
  source 1..75: mol_type = other DNA
ccgctatgacgatcctgtgtggcagttcatgtacccgcctgacggataccactgccggtgccgcattcgcgccag

SEQ ID NO: 464120 - DNA, 75 bp, synthetic construct
  source 1..75: mol_type = other DNA
cacggtgcagacgggcggtagctggagctacaccctcggcagcgccgatgtcaccgcgctggcggacggcaacgc

SEQ ID NO: 464121 - DNA, 75 bp, synthetic construct
  source 1..75: mol_type = other DNA
acgacgtgaagcgcggtttgcgaaacggcgttgctccttacatacctgcggccttttgcggggatgcccggagcg

SEQ ID NO: 464122 - DNA, 75 bp, synthetic construct
  source 1..75: mol_type = other DNA
ggcaatatcgaagaaaatctaactcacctggatgccttaagcgagcaattacgcaggcgctcaaacttgttacaa

SEQ ID NO: 464123 - DNA, 75 bp, synthetic construct
  source 1..75: mol_type = other DNA
gaaagcttggttcgaagagaatctggcagcagattttgcagaatcatgggatagccttgtctggatatgtgggaa

SEQ ID NO: 464124 - DNA, 75 bp, synthetic construct
  source 1..75: mol_type = other DNA
tgctgtatccccttaggtaccatattgaccatttggctttccgctcattgtccacacagtcagcttcacttcaat

SEQ ID NO: 464125 - DNA, 75 bp, synthetic construct
  source 1..75: mol_type = other DNA
aaatttctaggtaacgttgctggctatgtatctgttttcagcaaatacaggttgcttgaagatgacggccgccct

SEQ ID NO: 464126 - DNA, 75 bp, synthetic construct
  source 1..75: mol_type = other DNA
atcgcaagcgactgaaatggtgcataggcacgcggtgctgcatccattgaaattgggctcctgcatgagagacgt

SEQ ID NO: 464127 - DNA, 75 bp, synthetic construct
  source 1..75: mol_type = other DNA
accggaccaatttgacccagaaagcccgggaaacaatagcccttaaacacaaggacaggctcgatgatacagtca

SEQ ID NO: 464128 - DNA, 75 bp, synthetic construct
  source 1..75: mol_type = other DNA
cctaataaaaggactattgcaaggatcttaaaggaaacagatggtgatatttattttaattacagcaatgtaatt

SEQ ID NO: 464129 - DNA, 75 bp, synthetic construct
  source 1..75: mol_type = other DNA
gccttttgctgggatgccaggagcgcaggccacggcgcgacagaggcggcgcgaccggaacggtcgctgcaagcc

SEQ ID NO: 464130 - DNA, 75 bp, synthetic construct
  source 1..75: mol_type = other DNA
acgacgtgaagcgcggtttgcgaaacggcgttgctccttacataccggcggccttttgcagggatgcctggagcg

SEQ ID NO: 464131 - DNA, 75 bp, synthetic construct
  source 1..75: mol_type = other DNA
agaaagtgaatatggtgtaacaagtagcagcatgcacggatggacacgaagtgatttacttcacatttgccgcta

SEQ ID NO: 464132 - DNA, 75 bp, synthetic construct
  source 1..75: mol_type = other DNA
gaccgatttagccgtggacatcacttagttatcgtcaaagcaaaagttaaatatcttacaagaggcagtatcagt

SEQ ID NO: 464133 - DNA, 75 bp, synthetic construct
  source 1..75: mol_type = other DNA
ttacaatggcagttcaattgcattcatccttgaagctgatggtaaggctatgctctttttgggagattcacatga

SEQ ID NO: 464134 - DNA, 75 bp, synthetic construct
  source 1..75: mol_type = other DNA
catacagacaaatttatcgctgaactgcaggagaggcactggcatttcagccaggcggatgcaaattcatggatc

SEQ ID NO: 464135 - DNA, 75 bp, synthetic construct
  source 1..75: mol_type = other DNA
taaatatgacttattaattttaaaatctgttaatgaaatcaacattcatttgtccagcactccatactttcagcc

SEQ ID NO: 464136 - DNA, 75 bp, synthetic construct
  source 1..75: mol_type = other DNA
gtggtgcaaattgtcggcagtaccatcactgacgccggttcgataacgttaaccatcgacaatagtcaggccagc

SEQ ID NO: 464137 - DNA, 75 bp, synthetic construct
  source 1..75: mol_type = other DNA
tacagaaccgcgttacttaaagattctgatattacggaagaggcgcacaggcagcagactgaagcctgccgccgt

SEQ ID NO: 464138 - DNA, 75 bp, synthetic construct
  source 1..75: mol_type = other DNA
ataatcgatcatccgtttattgttcctggtttaatggcaaccgtgttatcgatactcttcgccgcgggattcgca

SEQ ID NO: 464139 - DNA, 75 bp, synthetic construct
  source 1..75: mol_type = other DNA
ttaccgcttcattgttaggtattgttgcctcgcctatctctgccgccgttattttcttttcaggcatcctggaaa

SEQ ID NO: 464140 - DNA, 75 bp, synthetic construct
  source 1..75: mol_type = other DNA
atgcaagctcatttaaaaatgcactaatggacgaatccaattttgaaaatgcaaatatgataggttcgtcattga

SEQ ID NO: 464141 - DNA, 75 bp, synthetic construct
  source 1..75: mol_type = other DNA
gcaggaaccgtcactggtggatgccgagctggactggcaggaaaatagcgggcaattgatcgtgctggcacggga

SEQ ID NO: 464142 - DNA, 75 bp, synthetic construct
  source 1..75: mol_type = other DNA
agaacttgattctgcttgtctggcgaaattgccgcagacggagcaatcgccagccgctccaaaaacactcgcgca

SEQ ID NO: 464143 - DNA, 75 bp, synthetic construct
  source 1..75: mol_type = other DNA
agctgtcagaaaaactatcgcggcgttgccgggggggtacgctgaagctgctgagtggctggatgtaacagagaa

SEQ ID NO: 464144 - DNA, 75 bp, synthetic construct
  source 1..75: mol_type = other DNA
aaaccaatcagttatcgacagaaaccgttttcgactcaatcaaggcaacaatgcctgtgcatccaggaactgtaa

SEQ ID NO: 464145 - DNA, 75 bp, synthetic construct
  source 1..75: mol_type = other DNA
ccttatgctggcgttattgcacaggaagtaatggaggcgataccagaagctgtgggatcgtttactcattatggt

SEQ ID NO: 464146 - DNA, 75 bp, synthetic construct
  source 1..75: mol_type = other DNA
cggcagatcaagaaactgagcatccgtgaaacggcagaggtgacaggctatagtacttcccaagtttgtcgcatt

SEQ ID NO: 464147 - DNA, 75 bp, synthetic construct
  source 1..75: mol_type = other DNA
cagagtgcgtatcagcgagaaaacagaagtcacctccagcacagtcgttttcccctctttttatggcggtgcgca

SEQ ID NO: 464148 - DNA, 75 bp, synthetic construct
  source 1..75: mol_type = other DNA
cttttgagggtccttactgggtaatgaccacgacgcggttactcaacagtaaccgtgtgatcacggatgtggata

SEQ ID NO: 464149 - DNA, 75 bp, synthetic construct
  source 1..75: mol_type = other DNA
ctgcaatatttctactctgtttttaaaaaagcatatgacacgacgccaaaagagtatcgcgatgtaaatagcgag

SEQ ID NO: 464150 - DNA, 75 bp, synthetic construct
  source 1..75: mol_type = other DNA
tgaaacggatgcagcgtattaccctgatgcactgaagaagctggaagcggcggcggatgaggctgtgcgcagggc

SEQ ID NO: 464151 - DNA, 75 bp, synthetic construct
  source 1..75: mol_type = other DNA
cactctgtcagggacatggcgttgccttggatatgtagggatgccgacagggaaatcactgtttatgcgtataaa

SEQ ID NO: 464152 - DNA, 75 bp, synthetic construct
  source 1..75: mol_type = other DNA
gggagcgggcatttttaccaactaacccgattgtttcgggtctgttcttaaactcgcgtaattcgtttttttcaa

SEQ ID NO: 464153 - DNA, 75 bp, synthetic construct
  source 1..75: mol_type = other DNA
ttacaatactgaaggtcatcagtgggacaacaatatcgttgttaataattccactgtaacttcaggttcgctctc

SEQ ID NO: 464154 - DNA, 75 bp, synthetic construct
  source 1..75: mol_type = other DNA
actgatcacgactatttgacgtatggtggctatgtatacgaccatgcggctgatggttattttgatactgtattt

SEQ ID NO: 464155 - DNA, 75 bp, synthetic construct
  source 1..75: mol_type = other DNA
ccgtctggcggccgggacagaccagcctgtgggggctggcactcagcctgcccgcagacaccggctacccggacc

SEQ ID NO: 464156 - DNA, 75 bp, synthetic construct
  source 1..75: mol_type = other DNA
cgtcgccttcattccgagatacaaagtggaagtttggctaataacatcaaaaaatcaaccgttattgttaaaaac

SEQ ID NO: 464157 - DNA, 75 bp, synthetic construct
  source 1..75: mol_type = other DNA
agcagatactgactggggcgttctggcaggtcctttctattcacctgaaatgggggccggagttggtcttgttca

SEQ ID NO: 464158 - DNA, 75 bp, synthetic construct
  source 1..75: mol_type = other DNA
gccgatctcatcatgctggcaaccgaacgccgcgatctcgggcttgatgatggctctttctggcttgtactggaa

SEQ ID NO: 464159 - DNA, 75 bp, synthetic construct
  source 1..75: mol_type = other DNA
ggtaaaaccttcgtctcctttgccgacagcaacgtgctggaattctccgctgaaagcctgtgccagctagggcat

SEQ ID NO: 464160 - DNA, 75 bp, synthetic construct
  source 1..75: mol_type = other DNA
ttgatgctcatccgcgcccgtgatggccacagtacctttgatgcggaatatcagaacgatcccgtcagcggcgaa

SEQ ID NO: 464161 - DNA, 75 bp, synthetic construct
  source 1..75: mol_type = other DNA
aatatcaaggtgaccgttgccggtagtggtaaaaagctgcgtggtctgcgccacggcccgtaccgtcctgacctg

SEQ ID NO: 464162 - DNA, 75 bp, synthetic construct
  source 1..75: mol_type = other DNA
aaaacctttttaatggtaaggaaggaataagcacctgtattaaacatctacttgagcttataaaaaaacgccata

SEQ ID NO: 464163 - DNA, 75 bp, synthetic construct
  source 1..75: mol_type = other DNA
aaataaagaaaagaaaacattaagaaataatatggtcagttcttctctttttaaggatgttgaaattgtttatga

SEQ ID NO: 464164 - DNA, 75 bp, synthetic construct
  source 1..75: mol_type = other DNA
cctgattgtggccctgtaatgggtaacgcgacctataacgaaatgctggcaacggctgcgacatgtggcgtggag

SEQ ID NO: 464165 - DNA, 75 bp, synthetic construct
  source 1..75: mol_type = other DNA
cccggacttagtgatcgatgcggcccgcgaactgttcaacagcaagaacagcccgcaggggtacaacgaagtccg

SEQ ID NO: 464166 - DNA, 75 bp, synthetic construct
  source 1..75: mol_type = other DNA
ctatttctatgaattatgagagagtatgtaaattaaaaaatagtacaggaattaaaggtcttatatataaaattg

SEQ ID NO: 464167 - DNA, 75 bp, synthetic construct
  source 1..75: mol_type = other DNA
tttatactttctaaaaaggataatcgaagaggataataatttacctctgatgccgatacaatattttaataatgc

SEQ ID NO: 464168 - DNA, 75 bp, synthetic construct
  source 1..75: mol_type = other DNA
tggctattgcgtgccagcttcagaaaatggggatgacgccggagcagattaagcaggctaccggactttccgatg

SEQ ID NO: 464169 - DNA, 75 bp, synthetic construct
  source 1..75: mol_type = other DNA
aaaacagttaaaaaaacttgttgaatctatgtctgaaagtcatgatttggttttaccccatcttattagaactgc

SEQ ID NO: 464170 - DNA, 75 bp, synthetic construct
  source 1..75: mol_type = other DNA
atagttccagatgataaagtatttagctcagttcatcgtgtctatttgccaaagtggaaatcatatttaaactgc

SEQ ID NO: 464171 - DNA, 75 bp, synthetic construct
  source 1..75: mol_type = other DNA
gacgaaatgacatttgatatacctgatgacggtgttttttctaatgttcatcgtgtttttcttccaaaataccgt

SEQ ID NO: 464172 - DNA, 75 bp, synthetic construct
  source 1..75: mol_type = other DNA
gccagtacggggaagaacgaacagagtggcgaactggtgacgcgggagtacagcgttcaggggccggtgatgctg

SEQ ID NO: 464173 - DNA, 75 bp, synthetic construct
  source 1..75: mol_type = other DNA
agcgggtgctctggccggagcttctgcaccggaactggcgcatctgctgaaatcaacagaaaaagacccggcagt

SEQ ID NO: 464174 - DNA, 75 bp, synthetic construct
  source 1..75: mol_type = other DNA
aggatgacaaaaccagaaagggatcgcgtggcgaaaattcgtttcgatttggctcaggagggcattaccccggaa

SEQ ID NO: 464175 - DNA, 75 bp, synthetic construct
  source 1..75: mol_type = other DNA
tgaggtaaacgaatacgaggaggatatcgagaaagtggtcggtatttatgcccctcatcttggggtgagccgcgt

SEQ ID NO: 464176 - DNA, 75 bp, synthetic construct
  source 1..75: mol_type = other DNA
cagatgaccacgaggcaggcatattctgccattgcccgcctgtttaacgatgagtggtggactcatcagcttaaa

SEQ ID NO: 464177 - DNA, 75 bp, synthetic construct
  source 1..75: mol_type = other DNA
aaacgataaaacagtattgcttgctgcaaatgaatcaatctacattcctctaggagcaacgtatagtcttgaaaa

SEQ ID NO: 464178 - DNA, 75 bp, synthetic construct
  source 1..75: mol_type = other DNA
agatgtctgtaaaggtgatattctaacttataacactaaaaacaattatatatattctgaatcagccctagtggc

SEQ ID NO: 464179 - DNA, 75 bp, synthetic construct
  source 1..75: mol_type = other DNA
agaatggctgaatggatgcagatgctgaaggaaaccgggttcgacatccgggcatatcgtgacgcggtggatcag

SEQ ID NO: 464180 - DNA, 75 bp, synthetic construct
  source 1..75: mol_type = other DNA
gtgcagttaccgaaagatgaagtgggctttattgccatgcatctggtcagtgcccaaatgagcggaaatatggag

SEQ ID NO: 464181 - DNA, 75 bp, synthetic construct
  source 1..75: mol_type = other DNA
aataaaatttcagttcagccttaattaccaggaagaaagcttgagttatcagcgactggttacacatctgaagtt

SEQ ID NO: 464182 - DNA, 75 bp, synthetic construct
  source 1..75: mol_type = other DNA
tgctgcagatggccgttgaaactcgggggcgcgttgccccctcgccacctccgccactacccaaaagcaccggtg

SEQ ID NO: 464183 - DNA, 75 bp, synthetic construct
  source 1..75: mol_type = other DNA
tggggatactgaataccgatgatatcagtacgtcttttatgctaccgaacccaatacggacaattcaatggtcgt

SEQ ID NO: 464184 - DNA, 75 bp, synthetic construct
  source 1..75: mol_type = other DNA
ttgccggcggggcatccgctgcagccagagctcgtcggttatcagaggatgtcagtattgttgtgtttgaacggg

SEQ ID NO: 464185 - DNA, 75 bp, synthetic construct
  source 1..75: mol_type = other DNA
acattttggggcatggttgggacactgtaacacatacgaactttgccgaattacgtatgatattattttttaacg

SEQ ID NO: 464186 - DNA, 75 bp, synthetic construct
  source 1..75: mol_type = other DNA
aaggccgcgcacccgctcatgtccgtgcgtggacacctgaagaagatgcgctgctgattgcgctttattcctcca

SEQ ID NO: 464187 - DNA, 75 bp, synthetic construct
  source 1..75: mol_type = other DNA
ataaattatgtccaatgcttggctgtatttgtagcgctgatctctattctaaagactagaactcaaaaatttgtt

SEQ ID NO: 464188 - DNA, 75 bp, synthetic construct
  source 1..75: mol_type = other DNA
gtttatctagtaccccgttaaatctaaagtatcctgaactaaaatataatcgtttgtgtgtcggtaaagtatttg

SEQ ID NO: 464189 - DNA, 75 bp, synthetic construct
  source 1..75: mol_type = other DNA
aagcagaaaatgtaatgaatttattttaccaagctgaagccatggtttatgttgaaggcccagatgatatttgct

SEQ ID NO: 464190 - DNA, 75 bp, synthetic construct
  source 1..75: mol_type = other DNA
aagaataccgctttcggaaagtttagacacattattagttatggggcagttatttgaaagtgaacatgacagaat

SEQ ID NO: 464191 - DNA, 75 bp, synthetic construct
  source 1..75: mol_type = other DNA
tgttgtagagacggtttatcttgctttatctgaccatgcacgcctgtttggatttaccgctgaagatattatgga

SEQ ID NO: 464192 - DNA, 75 bp, synthetic construct
  source 1..75: mol_type = other DNA
aaggataaaaatgttgtaacctcgattctgaacgccttacctaaactggccgcaacacatcatttagataacgaa

SEQ ID NO: 464193 - DNA, 75 bp, synthetic construct
  source 1..75: mol_type = other DNA
aagatattgcagagaagatacaaaaacagggaggtgattatttattcgcggtaaaaggaaaccaggggcggctaa

SEQ ID NO: 464194 - DNA, 75 bp, synthetic construct
  source 1..75: mol_type = other DNA
aagtacccgcagacgttcacttcccggacttttcaggtagtgagcagacttcatttcgggatctactggagcgtg

SEQ ID NO: 464195 - DNA, 75 bp, synthetic construct
  source 1..75: mol_type = other DNA
agaatatgaagcaaaatctcctgaactcatactttcacaaattgaaaaaggcactattgacaatataaaaattct

SEQ ID NO: 464196 - DNA, 75 bp, synthetic construct
  source 1..75: mol_type = other DNA
cgatatatcaggcaatccgatcaaagtttctgaagggatggaatttgtgcaatcaggtacaaacgtgccctatat

SEQ ID NO: 464197 - DNA, 75 bp, synthetic construct
  source 1..75: mol_type = other DNA
actaataagaatatggacaggggaattgaatctttggttagataaagtcacagtctgccaatacggaaacgctcc

SEQ ID NO: 464198 - DNA, 75 bp, synthetic construct
  source 1..75: mol_type = other DNA
cggtgacagatgcgcaggtcagttctctgccactggaccaggcaactgtcagcgtgacgaaacgtgtgacggatg

SEQ ID NO: 464199 - DNA, 75 bp, synthetic construct
  source 1..75: mol_type = other DNA
agctcctggtgccggaacactgggtatcgctgtctctggtgaggctttatctgcggcaatagcggatatctttgc

SEQ ID NO: 464200 - DNA, 75 bp, synthetic construct
  source 1..75: mol_type = other DNA
gtgacagacattaccaggagtgcgacttacccggtgctgattgacagcattgcggtggaagtgaacagcacagac

SEQ ID NO: 464201 - DNA, 75 bp, synthetic construct
  source 1..75: mol_type = other DNA
tgaccgacagaatgaaataaataatgcccaggcttctcttaatacggctattgaaagtcgtaaaccaaaagagaa

SEQ ID NO: 464202 - DNA, 75 bp, synthetic construct
  source 1..75: mol_type = other DNA
acgttctgacacctgagcaggtaaaacagcgtcaggaagaggagaaactccgtcagcaggagtgggacgccactc

SEQ ID NO: 464203 - DNA, 75 bp, synthetic construct
  source 1..75: mol_type = other DNA
cgttaacatccagtgaatcccggtttgtagctgtccccggatacagtgggggtggtgtacattttgacgccacag

SEQ ID NO: 464204 - DNA, 75 bp, synthetic construct
  source 1..75: mol_type = other DNA
gatatcaaccgcagcatcaaacacaccttcctcgactttggtgatgacgacttcaccaacggcaagccgcatcca

SEQ ID NO: 464205 - DNA, 75 bp, synthetic construct
  source 1..75: mol_type = other DNA
attacagataatgttgttgtaattggttatggtgcatgcggtgaaactcaaacgctaggttcatttaccgtttct

SEQ ID NO: 464206 - DNA, 75 bp, synthetic construct
  source 1..75: mol_type = other DNA
cttaaagaggcgcggactgttgcagaaatgcagaaacaatataagcatctgtttgcccatggtgagtatataaaa

SEQ ID NO: 464207 - DNA, 75 bp, synthetic construct
  source 1..75: mol_type = other DNA
tttatgacgcaatccgccgtaagccaggccattgccaccctagagcaagagcttggcgtagagatcctgagcggc

SEQ ID NO: 464208 - DNA, 75 bp, synthetic construct
  source 1..75: mol_type = other DNA
gaagataagtttatccgaaaaaatgccagaacgatgaccagcaggcgaatgggggaatgtctcgggcgacatcat

SEQ ID NO: 464209 - DNA, 75 bp, synthetic construct
  source 1..75: mol_type = other DNA
agtggacatgcacctgcatccaacatggcagcgtacaatcatccagcgtctgacgacaacattcccacattgcca

SEQ ID NO: 464210 - DNA, 75 bp, synthetic construct
  source 1..75: mol_type = other DNA
attgctgacggtcagactattgagttaacttttgataaggctgtaactgccagcactaagtggagtgctccgctg

SEQ ID NO: 464211 - DNA, 75 bp, synthetic construct
  source 1..75: mol_type = other DNA
gcggtggccgttttatccaacaacgatggcaacattgtggcccgcaattacctggcgaagaaagcgggcctcaaa

SEQ ID NO: 464212 - DNA, 75 bp, synthetic construct
  source 1..75: mol_type = other DNA
ggatagcggctgcaatgagccttgacgcgttcgggcgccagctgcgcgaggaagtcaggcgacacaccacgctgg

SEQ ID NO: 464213 - DNA, 75 bp, synthetic construct
  source 1..75: mol_type = other DNA
tcagaaagagctgccaggtatgtggctggccgaaaatgaaggtgcaaagttctggctgaatgtactgacggaact

SEQ ID NO: 464214 - DNA, 75 bp, synthetic construct
  source 1..75: mol_type = other DNA
tggtatcagcggcaaaaccgcctcagcaaaagtgcatttctacgccattaacgattttggtggcgcaattgaagg

SEQ ID NO: 464215 - DNA, 75 bp, synthetic construct
  source 1..75: mol_type = other DNA
tttaaaataggcagtgtctggacaagaggaaggtgtgttgctgaaattctgatggaggaaaaaatatttaatgtg

SEQ ID NO: 464216 - DNA, 75 bp, synthetic construct
  source 1..75: mol_type = other DNA
gaatacgaactctgctggcgcgcatacccactcactgtccggcactgctgcaagcgcaggtgcacacgcacatac

SEQ ID NO: 464217 - DNA, 75 bp, synthetic construct
  source 1..75: mol_type = other DNA
tgcaatcgcaaaattgatcgccgaaggtaaagcaaagaatgcaaatgaagcagttcagtacattataaacaaatt

SEQ ID NO: 464218 - DNA, 75 bp, synthetic construct
  source 1..75: mol_type = other DNA
agattttacatcaaagattgagagttcacgctatacatgggataacagattgaaaaacaggatgacgtttaacct

SEQ ID NO: 464219 - DNA, 75 bp, synthetic construct
  source 1..75: mol_type = other DNA
cggtctgccggacgatattgtactggcagaaacgtcagcacgtactgtaccctcccgtggcgcggtagtggttct

SEQ ID NO: 464220 - DNA, 75 bp, synthetic construct
  source 1..75: mol_type = other DNA
cacagtatatccgaaggcccgcatccagttatgcatcgtgcatatggtgcgcaacagcctgcgcttcgtgtcatg

SEQ ID NO: 464221 - DNA, 75 bp, synthetic construct
  source 1..75: mol_type = other DNA
ggcagggatatggcgctgactggcgggcagggggcgcaacaaacgctgagaagcccctgccagccccgcgagccg

SEQ ID NO: 464222 - DNA, 75 bp, synthetic construct
  source 1..75: mol_type = other DNA
atggatatggcgctgactggcgcgcaggcggcggcacaaacgctgataagcgcctgccagcaccgcgagccgcaa

SEQ ID NO: 464223 - DNA, 75 bp, synthetic construct
  source 1..75: mol_type = other DNA
aaaatggttgcaccgaaaagcgaagagattttcaccataagcggttcaggcgggaaagcaacgtcaggaaaggta

SEQ ID NO: 464224 - DNA, 75 bp, synthetic construct
  source 1..75: mol_type = other DNA
cgtgaaggttgcggtaaagattgtgttgcttgatggcgataacataacgatttcggttaatggttatcaggtcag

SEQ ID NO: 464225 - DNA, 75 bp, synthetic construct
  source 1..75: mol_type = other DNA
ataatagtgtcgctgaagaaattacctttgaagatatgggctataaaaatgtaataggtaatcaagtgtttgctc

SEQ ID NO: 464226 - DNA, 75 bp, synthetic construct
  source 1..75: mol_type = other DNA
aaataaaggcgtagcggcattcgctggcttcatcggttatgcggtaatgaacctcgcggtaaacttctggttgac

SEQ ID NO: 464227 - DNA, 75 bp, synthetic construct
  source 1..75: mol_type = other DNA
ggtttaccccgatatcactgcttacgacattcagaataacgctaatgagaatatgcagtacactgatggaactgt

SEQ ID NO: 464228 - DNA, 75 bp, synthetic construct
  source 1..75: mol_type = other DNA
ttccactgcggtgattgctgttgataatggtaccttcaccgaccaacgtgttaccgataaatctcagctttatgg

SEQ ID NO: 464229 - DNA, 75 bp, synthetic construct
  source 1..75: mol_type = other DNA
atgaacgagtagaaagttatgaaagacaaataattattgatgctctcaacttccaccagggtcgtataaacgacg

SEQ ID NO: 464230 - DNA, 75 bp, synthetic construct
  source 1..75: mol_type = other DNA
tgtgtcttcaggaaaagttatttacaaagccattaatgattatggtggcaatattgatggctccacatcgcttta

SEQ ID NO: 464231 - DNA, 75 bp, synthetic construct
  source 1..75: mol_type = other DNA
aacctctgctggaaaaactgcattgcgcgtcgcaaatccgacaccgtatcacgtctcattcagtagtggtgattt

SEQ ID NO: 464232 - DNA, 75 bp, synthetic construct
  source 1..75: mol_type = other DNA
caaaaagcagtgcggaaatggtggtaaaaggcgctccccattctgtgtctggcgcaacggttgattactcagcca

SEQ ID NO: 464233 - DNA, 75 bp, synthetic construct
  source 1..75: mol_type = other DNA
tttttggactttggacttataaaagccatgaaagtccatccttgcgtgatgcagattgtcgtattaatttccgct

SEQ ID NO: 464234 - DNA, 75 bp, synthetic construct
  source 1..75: mol_type = other DNA
ggtatcggcatcgtgtgcagcattttgctgatattccttattttttccttcctgaccggcggttcactggtttaa

SEQ ID NO: 464235 - DNA, 75 bp, synthetic construct
  source 1..75: mol_type = other DNA
gcgcgctggtttttggcggcgggacgctggctttccataccttgctttttggtatcggcatcgtgtgcagcattt

SEQ ID NO: 464236 - DNA, 75 bp, synthetic construct
  source 1..75: mol_type = other DNA
acatcgaagaagaagttgatatagaacgctttgatgcaatcactaataatatatgtattctattgatagaaatta

SEQ ID NO: 464237 - DNA, 75 bp, synthetic construct
  source 1..75: mol_type = other DNA
cattatctcgccgcttactggcgaattattgcatgtcacgccaaggcggctgcgatataccttggcaactgggct

SEQ ID NO: 464238 - DNA, 75 bp, synthetic construct
  source 1..75: mol_type = other DNA
gtcgtgatgcgggcagggaacgtcaggatatcgtcaccctggtgaaacgacagctgacgcgtgaaatcgcggaag

SEQ ID NO: 464239 - DNA, 75 bp, synthetic construct
  source 1..75: mol_type = other DNA
gcttgatgtgcgttttaacctcatgagcagcctgccggagctgcccggctatatgaggacgcttaatgtgagtaa

SEQ ID NO: 464240 - DNA, 75 bp, synthetic construct
  source 1..75: mol_type = other DNA
ggctggaggagcttgatgtgagaagaaacttgctggacagcctgccggtcctgcccgccgggctgaagcatcttt

SEQ ID NO: 464241 - DNA, 75 bp, synthetic construct
  source 1..75: mol_type = other DNA
ctccggaagtatatcgataaagtcccggactgggtggcccagataacggcatggcgtgcctgggccaaggtaaat

SEQ ID NO: 464242 - DNA, 75 bp, synthetic construct
  source 1..75: mol_type = other DNA
agggtgtactcgactctctggtgcgtgaattgctgaccgaagttaacgactacgatctgtgcatcaccgagtttg

SEQ ID NO: 464243 - DNA, 75 bp, synthetic construct
  source 1..75: mol_type = other DNA
ttctcgtgactgggcgacccgctgcgttcatgaagcccacatgcatgattacaattgttttatcactctgactta

SEQ ID NO: 464244 - DNA, 75 bp, synthetic construct
  source 1..75: mol_type = other DNA
ccgaggtaaacgttttgttaaaacagatatgctttctgaaggttatccatgtattcattatggagaaatgtatac

SEQ ID NO: 464245 - DNA, 75 bp, synthetic construct
  source 1..75: mol_type = other DNA
agccagcatctcctgcagctcacggtaactgatgccgtatttgcagtaccagcgtacggcccacagaatgatgtc

SEQ ID NO: 464246 - DNA, 75 bp, synthetic construct
  source 1..75: mol_type = other DNA
atacggatgttctttttaataactacttcaattattcagggcgagccagtcgaagagagttctggtggtattatc

SEQ ID NO: 464247 - DNA, 75 bp, synthetic construct
  source 1..75: mol_type = other DNA
tgatgttggttttgctgtcttttatggacaagaggctagtaccgacaaccagattactggtaataaatctattga

SEQ ID NO: 464248 - DNA, 75 bp, synthetic construct
  source 1..75: mol_type = other DNA
aaagaaagtatctctgttgatattgaaaatggctatgatgatctgctgagattattacgctttttgggtatatcg

SEQ ID NO: 464249 - DNA, 75 bp, synthetic construct
  source 1..75: mol_type = other DNA
ccgcatggtttcagttctcattgatcgagtaggcagcctggcggctgcggcttgtcatggcctgaaattaccgtt

SEQ ID NO: 464250 - DNA, 75 bp, synthetic construct
  source 1..75: mol_type = other DNA
aagagccgggaaataaatcggacaatatacgaccagaatcagcttcttataccgctaacctggctgcagcaaact

SEQ ID NO: 464251 - DNA, 75 bp, synthetic construct
  source 1..75: mol_type = other DNA
tttttaggtaaaaataaactggcgccagataatatatccctgtcaactgaacataaaacttctcttagttctccc

SEQ ID NO: 464252 - DNA, 75 bp, synthetic construct
  source 1..75: mol_type = other DNA
tgatgaacaggcagcagtaaataatgatattggtgcgatagacaaattattagagaaattaaaaaacattgaaac

SEQ ID NO: 464253 - DNA, 75 bp, synthetic construct
  source 1..75: mol_type = other DNA
cagtgcccacaccgtatggcttgtgcaaaatgttcgttctacctgcctaaatcatcatcagaagcgcaatatata

SEQ ID NO: 464254 - DNA, 75 bp, synthetic construct
  source 1..75: mol_type = other DNA
agccagttgaccctattatcggggaatatatcgaacaatgggaacttgttcgtaacccccaccccctccaggaag

SEQ ID NO: 464255 - DNA, 75 bp, synthetic construct
  source 1..75: mol_type = other DNA
ctgttcggcaaatgattgctgtatctatatgtgtattcgctattaaatatttattagaaaaaaaaatagtaaagt

SEQ ID NO: 464256 - DNA, 75 bp, synthetic construct
  source 1..75: mol_type = other DNA
gatttatattgatccaccgtataatactggaactgatagctttaaatataacgacagttttaaccactcaacgtg

SEQ ID NO: 464257 - DNA, 75 bp, synthetic construct
  source 1..75: mol_type = other DNA
ctcgattctcattatctggtggaaacttagtttcgttaaatgtagccttatatctacgaacgaaaggctttaagg

SEQ ID NO: 464258 - DNA, 75 bp, synthetic construct
  source 1..75: mol_type = other DNA
gagccttaagaaagaaccttgccactgctcaatctcttgaaaaagagcttgcaggttctaaattagggttaaata

SEQ ID NO: 464259 - DNA, 75 bp, synthetic construct
  source 1..75: mol_type = other DNA
agatagtcatggagaatattgggacgaaatattttcaggtaaagatgagaaaatagttaaaagtaaagataacaa

SEQ ID NO: 464260 - DNA, 75 bp, synthetic construct
  source 1..75: mol_type = other DNA
gcctgcgtgagaaatttggctatgcgctgttgtgggatgcgcactcgatcaaatccgtggtgccgcgcttgtttg

SEQ ID NO: 464261 - DNA, 75 bp, synthetic construct
  source 1..75: mol_type = other DNA
cgttatagcgttcttttaccttatgctaaacaaaggcacgtcactactgatcggttgattctggcgctcccgccg

SEQ ID NO: 464262 - DNA, 75 bp, synthetic construct
  source 1..75: mol_type = other DNA
acgagtagttggcatggttggtgatcgattacactatgagattggtggctgtgcgagaggcgatgacgaatgccc

SEQ ID NO: 464263 - DNA, 75 bp, synthetic construct
  source 1..75: mol_type = other DNA
tgtgggaactgaaaaaggctggtttcgttgataaaagcgtatacatctggcgtgtggctgataacaacgttcagc

SEQ ID NO: 464264 - DNA, 75 bp, synthetic construct
  source 1..75: mol_type = other DNA
ttgatggccaacaccaggatgtactagatagcatcttgaaagaagtcgatgagctgatagctgtgtcagatagtg

SEQ ID NO: 464265 - DNA, 75 bp, synthetic construct
  source 1..75: mol_type = other DNA
tttatttctcttttatttgtcaattgcatggtgctgatgtgaaaataaaacaaaacgaaagtatgatggggtcta

SEQ ID NO: 464266 - DNA, 75 bp, synthetic construct
  source 1..75: mol_type = other DNA
tgataattttgtcctttaacaacaaaggggtactagctaatgtagactatcctttccctgaggatactatcatta

SEQ ID NO: 464267 - DNA, 75 bp, synthetic construct
  source 1..75: mol_type = other DNA
aatattaaaacagaaactgtggcggacattgtgcagtcgctgccatcgtttactgaaacgcgagctgatgacctg

SEQ ID NO: 464268 - DNA, 75 bp, synthetic construct
  source 1..75: mol_type = other DNA
gttacgctgggttatatcggaacaaatggggtaacgatgttaccacaaacgcaaagcttaatggtaacccctttt

SEQ ID NO: 464269 - DNA, 75 bp, synthetic construct
  source 1..75: mol_type = other DNA
catccaccgttaaatcattacctctttttgaagatgcttatgaaaaagttgcctgtttctatgaaagtcttccgt

SEQ ID NO: 464270 - DNA, 75 bp, synthetic construct
  source 1..75: mol_type = other DNA
aagtcattgcattaaccaccttatccagaatgacaatctggagatacgttcaggctggcactttcccaaatagta

SEQ ID NO: 464271 - DNA, 75 bp, synthetic construct
  source 1..75: mol_type = other DNA
tgagggagtacgaagagctgggagaagttgtgtcggttaatggttactggtctgtttcagaacgacaaacgggcg

SEQ ID NO: 464272 - DNA, 75 bp, synthetic construct
  source 1..75: mol_type = other DNA
ctcagttcgacaccctgtcgggcaaagatttcactctgacgatacagtggcaggtattcgcagtattttcccgtt

SEQ ID NO: 464273 - DNA, 75 bp, synthetic construct
  source 1..75: mol_type = other DNA
atgacatcattaatttcttcacaaaaagtatcaaaacagcattttgttccacaatattacattaaacaattttat

SEQ ID NO: 464274 - DNA, 75 bp, synthetic construct
  source 1..75: mol_type = other DNA
taccgataagatgtttgatatgggggcatcagcaactaagtttgtctctcagtctattagacaaaccattctaaa

SEQ ID NO: 464275 - DNA, 75 bp, synthetic construct
  source 1..75: mol_type = other DNA
gtcgatttacgagaaaacaaacgaattttcaatgaatacaaaaagtctatcgatggacttttaacaggaaaagaa

SEQ ID NO: 464276 - DNA, 75 bp, synthetic construct
  source 1..75: mol_type = other DNA
ttaattgcgttagcgactaaccagtctataatattttttattacattattcatgctaagaaaacatgaagtaata

SEQ ID NO: 464277 - DNA, 75 bp, synthetic construct
  source 1..75: mol_type = other DNA
ttgattgctgcgcaaggagctataaataatggtgtagtaaaatacacggctgaatatggtaaagaaagtgaaaag

SEQ ID NO: 464278 - DNA, 75 bp, synthetic construct
  source 1..75: mol_type = other DNA
caataattatttataccattttttattgttaaatacagagactatttatatccttgcagggggcggagcacagcc

SEQ ID NO: 464279 - DNA, 75 bp, synthetic construct
  source 1..75: mol_type = other DNA
aatggtactctggaggaacaccaacagcagggaaaatagagtattacgaaaacgggaatattccgtggttaagaa

SEQ ID NO: 464280 - DNA, 75 bp, synthetic construct
  source 1..75: mol_type = other DNA
acacgctttaatatttcaaaatcaagatttaaaaaaatactagttcctatcatttgtcctaatgatccagaaaaa

SEQ ID NO: 464281 - DNA, 75 bp, synthetic construct
  source 1..75: mol_type = other DNA
gaacaactcgcacaggcgctggctgaacagccgggaatgacggtggaacaggcgaaaatgctactggcagcggca

SEQ ID NO: 464282 - DNA, 75 bp, synthetic construct
  source 1..75: mol_type = other DNA
gcgagcagattatgacactgcccgaggcgaaagggcgcgagcaacttgcacaggtgctggcagaacaaccgggaa

SEQ ID NO: 464283 - DNA, 75 bp, synthetic construct
  source 1..75: mol_type = other DNA
ccggttgccggttctgcaagtgtcggcgatcagattatggcgctgccggaggcgaaagggcgcaagcaacttgca

SEQ ID NO: 464284 - DNA, 75 bp, synthetic construct
  source 1..75: mol_type = other DNA
tatttgggttaattggtgtaacttatggatatgcaacaaattatataatatattttattgtgatgtttttaatct

SEQ ID NO: 464285 - DNA, 75 bp, synthetic construct
  source 1..75: mol_type = other DNA
taagcgtaatctcgacattttttagattactatctgctttagtaataaataaagctattgccacttttattggcc

SEQ ID NO: 464286 - DNA, 75 bp, synthetic construct
  source 1..75: mol_type = other DNA
tgacggtggcgcaggcgaaaacgttgctggcagccgcaccggcggcatcgcaaccgtcacaggaaacactttttg

SEQ ID NO: 464287 - DNA, 75 bp, synthetic construct
  source 1..75: mol_type = other DNA
atgaaatttatctgccatttcgcgccgaccaggcacaacgggaagcctcgcgctgccttaggtgcggcgagcaca

SEQ ID NO: 464288 - DNA, 75 bp, synthetic construct
  source 1..75: mol_type = other DNA
tggatggaatgcctgggacaatacagggggtgcataaacgagcaaagaaagaaggatggccgaagcgttcacaag

SEQ ID NO: 464289 - DNA, 75 bp, synthetic construct
  source 1..75: mol_type = other DNA
tttttcaggaaaatatacaaaaaccttattttgagggaattattaacaatttaaaaagattatgcccaaatatta

SEQ ID NO: 464290 - DNA, 75 bp, synthetic construct
  source 1..75: mol_type = other DNA
atgaaatattcctccatctttaattatccgacattgagttgggctgatatcggcgttatcggctggctggtggat

SEQ ID NO: 464291 - DNA, 75 bp, synthetic construct
  source 1..75: mol_type = other DNA
gtcgttccgggaatgctgggcaaagcaggttttcctcccgcagctgtgtttgtctggtcgcgggcttcggctcgt

SEQ ID NO: 464292 - DNA, 75 bp, synthetic construct
  source 1..75: mol_type = other DNA
gaaaactttcgcattgccgccggacttcaggagggtgaattttacgggatggtgtttcaggacagcgacgtcgcc

SEQ ID NO: 464293 - DNA, 75 bp, synthetic construct
  source 1..75: mol_type = other DNA
cttccaacagctcgatcgtggtagttatcgtcttgctgataatgaacagaatactcatgaactgacacgctggag

SEQ ID NO: 464294 - DNA, 75 bp, synthetic construct
  source 1..75: mol_type = other DNA
taccagcaggaaacatcggtattccgcatatgctggaaatcccccctgaatctgccgctgcattcaggcaaattt

SEQ ID NO: 464295 - DNA, 75 bp, synthetic construct
  source 1..75: mol_type = other DNA
ctggctgactttggctgggatctgtataccgcatggacagaagctggcgcacccgcaaaagaaaactgggcattt

SEQ ID NO: 464296 - DNA, 75 bp, synthetic construct
  source 1..75: mol_type = other DNA
atggaagtaatttacattgcagaaccaataatatccacaaacattaacaaactaattgctgttgaactattgagt

SEQ ID NO: 464297 - DNA, 75 bp, synthetic construct
  source 1..75: mol_type = other DNA
gtgctctcgaacttgaaacagaacctttttcattaatttatggcgaaacggggtatagcgacctgctgcctgtcg

SEQ ID NO: 464298 - DNA, 75 bp, synthetic construct
  source 1..75: mol_type = other DNA
ccttatcacctgttttcgcgtggcagaagacagcacttacagcgatgcgcaggatgagttattcacgctgccagc

SEQ ID NO: 464299 - DNA, 75 bp, synthetic construct
  source 1..75: mol_type = other DNA
agaggagcaagcccgacgtaagatgctgggggtgatgacttttggtgagattgttattgacgccagccacaccgc

SEQ ID NO: 464300 - DNA, 75 bp, synthetic construct
  source 1..75: mol_type = other DNA
atcatgacgattgctctgcaaacgtcggtaattggcatcatggccattggagtcacttttgtcattattaccgca

SEQ ID NO: 464301 - DNA, 75 bp, synthetic construct
  source 1..75: mol_type = other DNA
ctgtagttacaaattcattacggataattcaggcgttggcttgccgtgatcgagttcgaattattggtatcggtg

SEQ ID NO: 464302 - DNA, 75 bp, synthetic construct
  source 1..75: mol_type = other DNA
tgatatgcgcacatgtacaaaaacaaggtgctgtacgggtaacagaattatcacgattatttaaagcgtctcctg

SEQ ID NO: 464303 - DNA, 75 bp, synthetic construct
  source 1..75: mol_type = other DNA
ggaagcatgtaggcctgataagcgtagcgcatcaggcagttttgcctttgccatcagtctcaagggccgcgaaag

SEQ ID NO: 464304 - DNA, 75 bp, synthetic construct
  source 1..75: mol_type = other DNA
atgaactacgaggaagggaacaacattcatactgaaattgaatttttttcactcactattttctttttaaaaaac

SEQ ID NO: 464305 - DNA, 75 bp, synthetic construct
  source 1..75: mol_type = other DNA
ggaatatcgtagtggaaataacctgcaaagcacccccaagttcgtacaagcaagcttgatgcatggtctgaaagg

SEQ ID NO: 464306 - DNA, 75 bp, synthetic construct
  source 1..75: mol_type = other DNA
tgcagcatctgaacaaaagaccacaggcatcagcagataactggaaaactaaccgcgatatcgtgtcaagatttc

SEQ ID NO: 464307 - DNA, 75 bp, synthetic construct
  source 1..75: mol_type = other DNA
ttccctttacatgaaaaaattaaaattattcatttaatgaaagatagaaaggaaaatatttttcataccttatat

SEQ ID NO: 464308 - DNA, 75 bp, synthetic construct
  source 1..75: mol_type = other DNA
ttgaggaatacacatttgttcccgtaccaccatccaaatgccgtacagatgccgcttacgatgaccgtatgacag

SEQ ID NO: 464309 - DNA, 75 bp, synthetic construct
  source 1..75: mol_type = other DNA
tgctcccaccaccaagtttagtcactgacaatattgtaaaggaaaacctctatgatattggggcatttctggcgt

SEQ ID NO: 464310 - DNA, 75 bp, synthetic construct
  source 1..75: mol_type = other DNA
agcatcagtggttacctgatattttcactcagggcgtgttgtggaccgggcttattgtggcatgggggggactga

SEQ ID NO: 464311 - DNA, 75 bp, synthetic construct
  source 1..75: mol_type = other DNA
cttggcaacccatatcctaagattgccattagccgttttgcagttacaccagatctcatcggcacaccactttct

SEQ ID NO: 464312 - DNA, 75 bp, synthetic construct
  source 1..75: mol_type = other DNA
atgccccgcctgcggtggtggtgaccgtttcaccttcgacgataaggaggggcgaggaacgtttatttgtcgcaa

SEQ ID NO: 464313 - DNA, 75 bp, synthetic construct
  source 1..75: mol_type = other DNA
cgtcatccctgaaagagccggaaagcgaaaaagtgaaggtcgacgaaatccgctttaaggccatcgtcagcatgc

SEQ ID NO: 464314 - DNA, 75 bp, synthetic construct
  source 1..75: mol_type = other DNA
gatgcgcagattttatcgcagactgaactgcaagtgatgcatccggaacttttacctccggaggtttatgaaatt

SEQ ID NO: 464315 - DNA, 75 bp, synthetic construct
  source 1..75: mol_type = other DNA
accggcactcttcagcactcaccaatgatcatcgttaaagaattcggctattccagcccatacttctacggtggt

SEQ ID NO: 464316 - DNA, 75 bp, synthetic construct
  source 1..75: mol_type = other DNA
ttacttgtccctgcctatattaatcctgagaatggttatcgattttatacttctgaccaattaatgaaattccat

SEQ ID NO: 464317 - DNA, 75 bp, synthetic construct
  source 1..75: mol_type = other DNA
agcattccactatacaaatagagtcccttgtctgcaggaaagctgaatgtcatatcaataagacacaaaacagac

SEQ ID NO: 464318 - DNA, 75 bp, synthetic construct
  source 1..75: mol_type = other DNA
gcagcgacttgatctcgatatcgactcgttaaaggctaaccggcctgaacagccacgggatgaagagcccggcgg

SEQ ID NO: 464319 - DNA, 75 bp, synthetic construct
  source 1..75: mol_type = other DNA
ccgacggacggcaaaagtatcacccccgatgatgtgcgtccgatgcttgaacagatggtgaaggaggcggtaagc

SEQ ID NO: 464320 - DNA, 75 bp, synthetic construct
  source 1..75: mol_type = other DNA
ttcgaactttatctaaacgcagttttctacgaaatggatttcgtaatatgcagagattatgctcaacctgattat

SEQ ID NO: 464321 - DNA, 75 bp, synthetic construct
  source 1..75: mol_type = other DNA
ttctgcctgtaatatctatcggtaatgtttcaaagaacgaaaaacaaaaaaatctttgtccgcccgcagattgtg

SEQ ID NO: 464322 - DNA, 75 bp, synthetic construct
  source 1..75: mol_type = other DNA
atatcgtgccgcttagtcgtcaggcgatgaatttattagaccagctaaagcagattagtggtgataaggagctgc

SEQ ID NO: 464323 - DNA, 75 bp, synthetic construct
  source 1..75: mol_type = other DNA
ttgatgacgctaatcaagggccgaacgcctggccggaacgtttcattctggtggcagatgaactgtcagcgacaa

SEQ ID NO: 464324 - DNA, 75 bp, synthetic construct
  source 1..75: mol_type = other DNA
atggctgggttggataaacgggtcgctacgtatcacgaggcgcttgaaggacttaccaatgagatgacgattctg

SEQ ID NO: 464325 - DNA, 75 bp, synthetic construct
  source 1..75: mol_type = other DNA
tgggatttgacgattttctgcctgttatttcctgctcaatgaaagggattaaattgtgcgaaaaaatcagggagg

SEQ ID NO: 464326 - DNA, 75 bp, synthetic construct
  source 1..75: mol_type = other DNA
ggggtcagcgccgaggaaattgcgcatattctgggacatagctcccttactgttgccaagtattacattctggcg

SEQ ID NO: 464327 - DNA, 75 bp, synthetic construct
  source 1..75: mol_type = other DNA
ttcattggtgagtgtgaaaaggcaatccaatgggcaacaacaattgtcagtgaatggctaattactggtatgttt

SEQ ID NO: 464328 - DNA, 75 bp, synthetic construct
  source 1..75: mol_type = other DNA
taacaacggtgaattaatgacgctgatgcaacgggaaatggcagacgacaaccgccatttgcgcagcatggaagc

SEQ ID NO: 464329 - DNA, 75 bp, synthetic construct
  source 1..75: mol_type = other DNA
agaaattacaatctggtagatcttcgcaatgccactgttttgggtctatgttacgtcacaggtggccgtccagtt

SEQ ID NO: 464330 - DNA, 75 bp, synthetic construct
  source 1..75: mol_type = other DNA
cgtttggcaaaatatggtggctatgatgctcactggggaactggtcgactcagcacattggaaaggccatccagt

SEQ ID NO: 464331 - DNA, 75 bp, synthetic construct
  source 1..75: mol_type = other DNA
atttctggcgatccccccagaaattggggagttaattatgaactataccgtgagatacaagaaaaaccccgaaga

SEQ ID NO: 464332 - DNA, 75 bp, synthetic construct
  source 1..75: mol_type = other DNA
caattcagcagcgaggcctggaggtacacctgcgaacgcctgtcgtgccagtgcagaaaattccctgcgaagcag

SEQ ID NO: 464333 - DNA, 75 bp, synthetic construct
  source 1..75: mol_type = other DNA
agcgactattaatgctcattgctatcgtgagtggaatgtgtttttacgccagcgtactcatggcgacgactccgg

SEQ ID NO: 464334 - DNA, 75 bp, synthetic construct
  source 1..75: mol_type = other DNA
gagaaaatcccgttatccgcaacaaaaatttcagaaagcattaagaacagcaaattttatttcagttttgatact

SEQ ID NO: 464335 - DNA, 75 bp, synthetic construct
  source 1..75: mol_type = other DNA
tcaatagtcaccgaagcaatgaatgaagcacttcgtaaacttgagcaacgtgtattaaatacgctcaatgaattt

SEQ ID NO: 464336 - DNA, 75 bp, synthetic construct
  source 1..75: mol_type = other DNA
taggcggtggcgcagaattaatatgcgatacagtaaaaaaaacacacagattcgtgatgaacgttttttcaaaac

SEQ ID NO: 464337 - DNA, 75 bp, synthetic construct
  source 1..75: mol_type = other DNA
gccaacactccagcgttgatctctataactatgtcccatttcctattattaaatgtaatttcaaaggttgtggtt

SEQ ID NO: 464338 - DNA, 75 bp, synthetic construct
  source 1..75: mol_type = other DNA
caaacggcgattaaaaaggcaacggtcattatccacaaagttaaaggacgtacggtatatgcagttgataaggat

SEQ ID NO: 464339 - DNA, 75 bp, synthetic construct
  source 1..75: mol_type = other DNA
tcgacgttaatgcagatgctggtgctgaaatggggatcttcgaatcactgccagatggtattaattccagcaacg

SEQ ID NO: 464340 - DNA, 75 bp, synthetic construct
  source 1..75: mol_type = other DNA
tagcgcaggcaaaagaactgaaggatgatgcatgggttatccttgaagggagcatcgttaaaaaagtgggtgatg

SEQ ID NO: 464341 - DNA, 75 bp, synthetic construct
  source 1..75: mol_type = other DNA
aagagatacggcattatggcactgaagggcaagaattttggtcagcgagagaattggcaccgttactggattatc

SEQ ID NO: 464342 - DNA, 75 bp, synthetic construct
  source 1..75: mol_type = other DNA
acggcagcggtaagccggtgcgcgtggacatcactgcacaccccgccccggaccggatacaggtcagcgccctgc

SEQ ID NO: 464343 - DNA, 75 bp, synthetic construct
  source 1..75: mol_type = other DNA
ctattcagattatctataagcgtaagcaagttggtcgtcgctactgttttgtatgcagtaagttcgataagttta

SEQ ID NO: 464344 - DNA, 75 bp, synthetic construct
  source 1..75: mol_type = other DNA
taagtgggacacgctgagccttcagcgcgattccggccgccggaagaatgtcgcgagcgcccagggcatcgactt

SEQ ID NO: 464345 - DNA, 75 bp, synthetic construct
  source 1..75: mol_type = other DNA
cgcagaacgcaaaatcatcttttcacagaagcagggcatgatgaaaatcgtcggtgtaaacactgacctttcagc

SEQ ID NO: 464346 - DNA, 75 bp, synthetic construct
  source 1..75: mol_type = other DNA
aattcccaaataaaaccgaacaaccgggaggtcgtatggccgacctgtcgaacgggtataccaaggtcgctaacg

SEQ ID NO: 464347 - DNA, 75 bp, synthetic construct
  source 1..75: mol_type = other DNA
aacgacgtgcgcctgatgcgtgaactggacggccgcagccatcgtgaaatttgcgagctattccagtgggcgagc

SEQ ID NO: 464348 - DNA, 75 bp, synthetic construct
  source 1..75: mol_type = other DNA
tgatttacacccccaacttcaccaagtggggcactgcagccgaccagcagtgcgctgagtggatcctcgccctgc

SEQ ID NO: 464349 - DNA, 75 bp, synthetic construct
  source 1..75: mol_type = other DNA
cacaagcagggcgtgatgaaaattgtcggtataaatactgacctgaatgcctggattttggacaaaccgaaaacg

SEQ ID NO: 464350 - DNA, 75 bp, synthetic construct
  source 1..75: mol_type = other DNA
caaaaccggggtgtccgacagcctcatagccctgacgcttgccaccgttgctgcgttgctaacaggtggaggggc

SEQ ID NO: 464351 - DNA, 75 bp, synthetic construct
  source 1..75: mol_type = other DNA
gcatagagagagtgaaatggtttattcgaaatggtatccgaatggacgacgatatactcagacagcgttttgact

SEQ ID NO: 464352 - DNA, 75 bp, synthetic construct
  source 1..75: mol_type = other DNA
tgttttgcagctggaccagagagaacgtccatgattgtatcaaagcaggaatcgacattaattcattaaatgaag

SEQ ID NO: 464353 - DNA, 75 bp, synthetic construct
  source 1..75: mol_type = other DNA
tatttgacagcaaaactaaaaaagacgtccagaattgcattgctgcaggcattgacattaacacacttaatgaac

SEQ ID NO: 464354 - DNA, 75 bp, synthetic construct
  source 1..75: mol_type = other DNA
ataaaagtactgttacggagaagatcttctttgtctgttcggcaagagaaaaggtctgtacaacgttgagcgaga

SEQ ID NO: 464355 - DNA, 75 bp, synthetic construct
  source 1..75: mol_type = other DNA
atgactaccccggacgtttcaagggtgcccacgggcagaactttgcccgctggcagatggacggctggcgaaaca

SEQ ID NO: 464356 - DNA, 75 bp, synthetic construct
  source 1..75: mol_type = other DNA
cccgggaaaacctgctgcaggagcggctgcagcagatggagcgggatatggtccgtgacctgcagaaagagaaaa

SEQ ID NO: 464357 - DNA, 75 bp, synthetic construct
  source 1..75: mol_type = other DNA
atttggtcaggacgattattcgttaaacgtggcaaacctaactgacgatgcgtctgccgatgacgatgcagcgca

SEQ ID NO: 464358 - DNA, 75 bp, synthetic construct
  source 1..75: mol_type = other DNA
taacggcagtcaacaacaactgaactacgctctttcaggcagtttagttgcccattcgcagggtattacgttggg

SEQ ID NO: 464359 - DNA, 75 bp, synthetic construct
  source 1..75: mol_type = other DNA
tgcggcgtcgttaaaacgtaacgtggatcttgaaaatgccgtagtaaacgtggttcccaccaaaggggcattggt

SEQ ID NO: 464360 - DNA, 75 bp, synthetic construct
  source 1..75: mol_type = other DNA
gcttggctcaatggcactcttgggcgtcactctgatgctgtacgtttattcaaagacgcgatgagctctgggaat

SEQ ID NO: 464361 - DNA, 75 bp, synthetic construct
  source 1..75: mol_type = other DNA
aaacggttccgcagttgattaaacaatttgtcttcggcggcgaatgtgaaacgccggtgcgtaaggcgaagcacg

SEQ ID NO: 464362 - DNA, 75 bp, synthetic construct
  source 1..75: mol_type = other DNA
gagtaccgacggaaataactattacatcatcaaaggtaaagtaagctcagtacttctgttattaaaaatgctgca

SEQ ID NO: 464363 - DNA, 75 bp, synthetic construct
  source 1..75: mol_type = other DNA
gtacgacggcacacgccagaacctccgcctatgaagcaccatcggttaaacgctcatggtatcagtgccagaacc

SEQ ID NO: 464364 - DNA, 75 bp, synthetic construct
  source 1..75: mol_type = other DNA
aatgtccctgtaccgttcactgctgatggaatatcttacggtatggcgatggcaacaataagcgcatcaaccggg

SEQ ID NO: 464365 - DNA, 75 bp, synthetic construct
  source 1..75: mol_type = other DNA
gtaaaattgacactgacccggtaaatactgaaaaccagattcaggtttatgtagagaacgaagatggttctcacg

SEQ ID NO: 464366 - DNA, 75 bp, synthetic construct
  source 1..75: mol_type = other DNA
ctgcacatattcgcatggaatctcaggccgcctcagaagttgggattgttctgcgatgctctggtggttggatga

SEQ ID NO: 464367 - DNA, 75 bp, synthetic construct
  source 1..75: mol_type = other DNA
cctgcagatttgcttttccaacgattgggccgtttacatcgccatcatcgcaaatatcgtcccgctggttttgag

SEQ ID NO: 464368 - DNA, 75 bp, synthetic construct
  source 1..75: mol_type = other DNA
tcccgccccgcttttcgattcagccagaacctatttatttagctgacatgttacctgaccttacgatgttagagc

SEQ ID NO: 464369 - DNA, 75 bp, synthetic construct
  source 1..75: mol_type = other DNA
taaagaggatgcaccttccaacataaatgctctaagaacgtatttccaggaccgacagcaggatgcgagccgggt

SEQ ID NO: 464370 - DNA, 75 bp, synthetic construct
  source 1..75: mol_type = other DNA
tgccggggccaaccgtgttggcacagacggcagcgtgcaggcgcagcagggcgaaggcaacgctcccacggtggc

SEQ ID NO: 464371 - DNA, 75 bp, synthetic construct
  source 1..75: mol_type = other DNA
tcacacttctttgagaatagcttcctggtgaaagaagggctgattaaccctgaacgttttgtgccaatgtttggc

SEQ ID NO: 464372 - DNA, 75 bp, synthetic construct
  source 1..75: mol_type = other DNA
caaaaataaatataagaacgctaaattcatttattacgcatgggattctattaaaaactaccctcatattcaaga

SEQ ID NO: 464373 - DNA, 75 bp, synthetic construct
  source 1..75: mol_type = other DNA
tatgtggagaacgaagatggctctcacgttcctgtttctcaaccaatcatcattaacgctgctggctaccctgta

SEQ ID NO: 464374 - DNA, 75 bp, synthetic construct
  source 1..75: mol_type = other DNA
caaatccacctttttacatcacttaagcggtttgattaccggagataaatctgccagtagccatattgaaccgct

SEQ ID NO: 464375 - DNA, 75 bp, synthetic construct
  source 1..75: mol_type = other DNA
ggcagctaaccgcaggcagcggcaccacggcgttgagcggcagccagattgcgatgaacgccagcggcagcctgc

SEQ ID NO: 464376 - DNA, 75 bp, synthetic construct
  source 1..75: mol_type = other DNA
aacagaaacttctggatacttatggtctgcatacagatccagtggaaaataactccgcatatccactcattaact

SEQ ID NO: 464377 - DNA, 75 bp, synthetic construct
  source 1..75: mol_type = other DNA
tgaaacggacaaggacgggtatacagaagttttctctagaaccaatgatgcaaatgtagaaattaaactgttaac

SEQ ID NO: 464378 - DNA, 75 bp, synthetic construct
  source 1..75: mol_type = other DNA
agtcagtacatctatggacttgggagactgaagaagtcgcacgatcccagtgcacaagatgcgttcacggtagat

SEQ ID NO: 464379 - DNA, 75 bp, synthetic construct
  source 1..75: mol_type = other DNA
ttatgtggggatatcaggacagctacagaattcacatccagattctggcacgtaatgtactgaaaaaattgggtg

SEQ ID NO: 464380 - DNA, 75 bp, synthetic construct
  source 1..75: mol_type = other DNA
gtataccggacagcctgcccgccgtggaatggctggcctacggcagcggttacctggcaggcatgaagctcggcg

SEQ ID NO: 464381 - DNA, 75 bp, synthetic construct
  source 1..75: mol_type = other DNA
accgttacgacagcgacgggcgggtgacagaacagcttaacccggcaggcttaagctacacgtatcagtatgaga

SEQ ID NO: 464382 - DNA, 75 bp, synthetic construct
  source 1..75: mol_type = other DNA
atacgtccgcagaaagaagagaaaacgcagacagtgcaggagcctacagacaaaaaagggcagacgctgaatcgc

SEQ ID NO: 464383 - DNA, 75 bp, synthetic construct
  source 1..75: mol_type = other DNA
agcacatccccgctatacgcgatatctacgcccatcatgttcttcacggtaccgccagctttgaaactgaacctc

SEQ ID NO: 464384 - DNA, 75 bp, synthetic construct
  source 1..75: mol_type = other DNA
tcgccatcatcgcaaatatcgtcccgctggttttgagattcctctggcaaccgttttgctgcctgatggcgaagg

SEQ ID NO: 464385 - DNA, 75 bp, synthetic construct
  source 1..75: mol_type = other DNA
ctgttgatttatcattgcctggatgttgcagctgttgcagattgctggtgggatcaatcagtcgtactacaaaat

SEQ ID NO: 464386 - DNA, 75 bp, synthetic construct
  source 1..75: mol_type = other DNA
ggagggttatcgctggcagacgcagaagccttttatgaccgtaccgactggccgaatgttcgccgggtgctggaa

SEQ ID NO: 464387 - DNA, 75 bp, synthetic construct
  source 1..75: mol_type = other DNA
agtcatcacgcctgccgtacggagtgttatgccatgacggttcattattaccgtctgcgggattacgccctgcag

SEQ ID NO: 464388 - DNA, 75 bp, synthetic construct
  source 1..75: mol_type = other DNA
gtcagtggtatcgccgcacttgaaagacatgactcacttggtttttatctatggcagttattaatcgaagactgg

SEQ ID NO: 464389 - DNA, 75 bp, synthetic construct
  source 1..75: mol_type = other DNA
atgaaatccactcgtcctgttgccgtgattaccggagccgctcgcggtattggaaagggctgtgcgcaggagctt

SEQ ID NO: 464390 - DNA, 75 bp, synthetic construct
  source 1..75: mol_type = other DNA
gattgtggacttcctcaacggcgatccggaccagccgattattatggggcgtacctaccaccaggaaaaccgcac

SEQ ID NO: 464391 - DNA, 75 bp, synthetic construct
  source 1..75: mol_type = other DNA
ttgagatcccctggaatccgaacacccgtaccgaggtgagcaccctctgcatcagccagtttcgctacagcgcac

SEQ ID NO: 464392 - DNA, 75 bp, synthetic construct
  source 1..75: mol_type = other DNA
tacggcgattaaggaaattttgctggccgtggaggaaagcaaaattgcgctgacgccggatggcattcagctaca

SEQ ID NO: 464393 - DNA, 75 bp, synthetic construct
  source 1..75: mol_type = other DNA
gatctcgcgcctatagatttacttattcagcgtgcaggtagactccaacgtcatattcgcaatgcagaaggagat

SEQ ID NO: 464394 - DNA, 75 bp, synthetic construct
  source 1..75: mol_type = other DNA
agtgcctgattggtgctggtggccgtgaatacttcttccgcccatcgttccgtaacatgactcggatcggcgagc

SEQ ID NO: 464395 - DNA, 75 bp, synthetic construct
  source 1..75: mol_type = other DNA
tgaaatgagtgtcatattaaatggtggagattgggctataaatccatctgttgcaaatttaaccgtaccaagagc

SEQ ID NO: 464396 - DNA, 75 bp, synthetic construct
  source 1..75: mol_type = other DNA
aagtatttatgtcgtatatcgctgacaagattggtttgtcttcttatgtaccttcagttatagggacaagtagtt

SEQ ID NO: 464397 - DNA, 75 bp, synthetic construct
  source 1..75: mol_type = other DNA
tacagtatcatttatattttatattttacatgtcaggatgataatcaaaggctaaagataatagacagaactacc

SEQ ID NO: 464398 - DNA, 75 bp, synthetic construct
  source 1..75: mol_type = other DNA
ccattcagaacgatatcctcaaagagtacctctgccgcaatacctatatttacccgccaaaaccgtcaatgcgca

SEQ ID NO: 464399 - DNA, 75 bp, synthetic construct
  source 1..75: mol_type = other DNA
ttcctcaacggcgacccggaccagccgattattatggggcgtacctaccaccaggaaaaccgcacacccggcagc

SEQ ID NO: 464400 - DNA, 75 bp, synthetic construct
  source 1..75: mol_type = other DNA
ataacgtcaccttctcggtgggcaagacaatgaaggaaaacaccggacaaacagcagtttattctgccggtgagc

SEQ ID NO: 464401 - DNA, 75 bp, synthetic construct
  source 1..75: mol_type = other DNA
aggtgttctggatgagcttttcaacccggtttctgcaacttcgtaaggaacacggactgacccagccacagatgg

SEQ ID NO: 464402 - DNA, 75 bp, synthetic construct
  source 1..75: mol_type = other DNA
gcagcagttgctggatgaaaaccagcgtcagcgtgatgcgctggagcgcagtgcgccgctgactgtcatacagtc

SEQ ID NO: 464403 - DNA, 75 bp, synthetic construct
  source 1..75: mol_type = other DNA
cggcgcattaattgcttccacgacttccggaacacttatcgaaggaaccaacagttatggtgatgcttctacatc

SEQ ID NO: 464404 - DNA, 75 bp, synthetic construct
  source 1..75: mol_type = other DNA
tcacaacactaacaacattatcccgcatgactatctggcgctatatccaggctggcacgtttcctaattgcataa

SEQ ID NO: 464405 - DNA, 75 bp, synthetic construct
  source 1..75: mol_type = other DNA
tggattgtttacttactttcaattattctaatcatgatctttatgttaagaaagtatcgaagatttacagcagcc

SEQ ID NO: 464406 - DNA, 75 bp, synthetic construct
  source 1..75: mol_type = other DNA
tctgggtgccacatctgcgttaatgggggccgcttctctggtgattccttcagtgatcggcggaattggtagctt

SEQ ID NO: 464407 - DNA, 75 bp, synthetic construct
  source 1..75: mol_type = other DNA
atcctcaaactggcgagtcaataaccggtttttatggtttttcttggactacattcttgtttggtgcttttcctg

SEQ ID NO: 464408 - DNA, 75 bp, synthetic construct
  source 1..75: mol_type = other DNA
ctatgattaatcgactactagcaataggaacgccaggagaaactagcaatacctacccaagcgattcaataaaaa

SEQ ID NO: 464409 - DNA, 75 bp, synthetic construct
  source 1..75: mol_type = other DNA
taatggcaaaacctcatttcgaagtgccagcaataattaaacggatggctgatttaggaacagttaaccaagatg

SEQ ID NO: 464410 - DNA, 75 bp, synthetic construct
  source 1..75: mol_type = other DNA
cctgatggccaataccagccttacgcgggatcaggctatcgaggtgctcaccgcggttaaagacggccgcattcc

SEQ ID NO: 464411 - DNA, 75 bp, synthetic construct
  source 1..75: mol_type = other DNA
agagcgtgaacgcattgaagccgagcaacgagcacagcgcgaagcaaaagaggcagcagaacgagctgaaagaga

SEQ ID NO: 464412 - DNA, 75 bp, synthetic construct
  source 1..75: mol_type = other DNA
aagagaaagcacgtgcagagctggctgaacgccagcgcgtcgaagcggaacagcgtgcagctcgcgagaagcagg

SEQ ID NO: 464413 - DNA, 75 bp, synthetic construct
  source 1..75: mol_type = other DNA
cccttttaaagggtagatttcagtcgccaatacaacacatttttaaatacactttaacctggttcattattacac

SEQ ID NO: 464414 - DNA, 75 bp, synthetic construct
  source 1..75: mol_type = other DNA
acctatcgagtaaacggggatgatttcacctttaaaggtgccggtgttgatacaagaaacggcagcatcgttgag

SEQ ID NO: 464415 - DNA, 75 bp, synthetic construct
  source 1..75: mol_type = other DNA
cgatgaactgacaaccagtaacagtgcctttgtgatgcgaaccaatacacaacaggcagaccagttaattgttaa

SEQ ID NO: 464416 - DNA, 75 bp, synthetic construct
  source 1..75: mol_type = other DNA
aatgctgagaattcagtaaatcagaagaataaaaccacctataaatcgaataaccaggtttccgatttgtcccag

SEQ ID NO: 464417 - DNA, 75 bp, synthetic construct
  source 1..75: mol_type = other DNA
gtactcaagaaaaaataactaaagacaaagatattgtgttcacaaatgggggagatgtcctgtttaaggataatt

SEQ ID NO: 464418 - DNA, 75 bp, synthetic construct
  source 1..75: mol_type = other DNA
cagaaacggcaaatcaggtatttttattataaatcttccttcaacagggacaaacaacattagagccagtcatgg

SEQ ID NO: 464419 - DNA, 75 bp, synthetic construct
  source 1..75: mol_type = other DNA
cggcgcatgacattctggagccgcgcggcgaccgcgccgtcgcgaatgccgcccgcctgacggcgacggcaaaag

SEQ ID NO: 464420 - DNA, 75 bp, synthetic construct
  source 1..75: mol_type = other DNA
tttgccaaaaaaacgtaggttgatatttaagttaagtatatatccaggacctgggattggtgatttgaagattat

SEQ ID NO: 464421 - DNA, 75 bp, synthetic construct
  source 1..75: mol_type = other DNA
tagtcaaaacatttacgacaaatataactttgttatctttgaggaaactatcaattctgccagcaaagaaacgct

SEQ ID NO: 464422 - DNA, 75 bp, synthetic construct
  source 1..75: mol_type = other DNA
cgcgttcaccgcgcagcacggtgtgtgtaagtgtgttgggctgtaagggggggatcggtaacaccgagatagcct

SEQ ID NO: 464423 - DNA, 75 bp, synthetic construct
  source 1..75: mol_type = other DNA
ctgtactgcgtgatgcgtccggtgaaaaacgtatcaaaggtgaaaaagacggccgtatgctcatgaatgttggtc

SEQ ID NO: 464424 - DNA, 75 bp, synthetic construct
  source 1..75: mol_type = other DNA
gaatgaacctcaccatgaaggataaggactttaatccgctgattgggcgtaccggtgttgatgtgggtaaatcct

SEQ ID NO: 464425 - DNA, 75 bp, synthetic construct
  source 1..75: mol_type = other DNA
caagacatgaatacagctatttctctaattgtcaatggaggcggtttaaacgatcagcagataaattatcaaatt

SEQ ID NO: 464426 - DNA, 75 bp, synthetic construct
  source 1..75: mol_type = other DNA
aagctacgactcggagtattggcttcagtgatgtaacaccggttatcgagcaaaagaacgatacagacaaagcaa

SEQ ID NO: 464427 - DNA, 75 bp, synthetic construct
  source 1..75: mol_type = other DNA
tacgctcactttggtggcacaaactctgggtattgatagcgtccgggaaatcgacgaaaaagctaaccgcctgaa

SEQ ID NO: 464428 - DNA, 75 bp, synthetic construct
  source 1..75: mol_type = other DNA
aggtcaaaaaatagccatagaggctatgcataatctgattcgtgaaggatatttatgtcacttaaaaataattgg

SEQ ID NO: 464429 - DNA, 75 bp, synthetic construct
  source 1..75: mol_type = other DNA
aaaagattaagaattaaaacttatgttattaaatattatagtgggagatatagtcttgggagttataaaggtact

SEQ ID NO: 464430 - DNA, 75 bp, synthetic construct
  source 1..75: mol_type = other DNA
caacgtcagatgaaagaaaaacagcgccttgccgcaagctggtttgccaatggcgggggggatcccctttccctc

SEQ ID NO: 464431 - DNA, 75 bp, synthetic construct
  source 1..75: mol_type = other DNA
aaaaagccttcattaaagaagatggcgaagatgtaaaaattaaatggaaaactactgcgattgcttcaatcacct

SEQ ID NO: 464432 - DNA, 75 bp, synthetic construct
  source 1..75: mol_type = other DNA
catcaactgacgagttagcgcatctgcgagggctttctgcgtttctgccagtgaatattctacacacaatggggg

SEQ ID NO: 464433 - DNA, 75 bp, synthetic construct
  source 1..75: mol_type = other DNA
aggacactctaaaagcatattctgaaatggactggctgacggcgaaactgacttcagatgaaacttctccacaaa

SEQ ID NO: 464434 - DNA, 75 bp, synthetic construct
  source 1..75: mol_type = other DNA
gtgaaggattacttcctgaagatatcatggtgatttgtgccgatgattataattgtcggaattatttcaacaaag

SEQ ID NO: 464435 - DNA, 75 bp, synthetic construct
  source 1..75: mol_type = other DNA
atccagtagttactactgagaaacaactcatagacacaatttcttcatttgaaactgacttccctgaacgtttat

SEQ ID NO: 464436 - DNA, 75 bp, synthetic construct
  source 1..75: mol_type = other DNA
atggctgcaggtatgatagttgttgctagtgattctggtgctagtaaagagatcatcaatgatggtataaacggt

SEQ ID NO: 464437 - DNA, 75 bp, synthetic construct
  source 1..75: mol_type = other DNA
tgcagtccggcgttattgctgatgttgatgtgcttcgtaagcgagttcttgcttctcagccatcagtttcagtta

SEQ ID NO: 464438 - DNA, 75 bp, synthetic construct
  source 1..75: mol_type = other DNA
cgaaaagtgaactatctgaaatttataaatggtttgaactgcaaggttattctccggagcgttctcctcgtattt

SEQ ID NO: 464439 - DNA, 75 bp, synthetic construct
  source 1..75: mol_type = other DNA
caaagtcacccagagcggcagcgacaccatcgtgcagatcgaccgcgacggcacgggcggcacttttgcggcaac

SEQ ID NO: 464440 - DNA, 75 bp, synthetic construct
  source 1..75: mol_type = other DNA
gcgtcaccaatgctcagggtaacagcagcaccgccagccataacgtgcaggtcaataccgcgctaccgggcgtca

SEQ ID NO: 464441 - DNA, 75 bp, synthetic construct
  source 1..75: mol_type = other DNA
ccagcgatcagcctgcgggtacggcgatcaccgttacgctgaacggacaaaactacagcgccaccactgacgcct

SEQ ID NO: 464442 - DNA, 75 bp, synthetic construct
  source 1..75: mol_type = other DNA
gaccttaaacggcaaaacctacaccaccacggtacagaccggcggtagctggagctacaccctcggcagcgccga

SEQ ID NO: 464443 - DNA, 75 bp, synthetic construct
  source 1..75: mol_type = other DNA
cctggcagcgccagcaaaggtgtgaccgtcgataccaccgcgcccgtcatcagtttcaccaccgtggcgggcgat

SEQ ID NO: 464444 - DNA, 75 bp, synthetic construct
  source 1..75: mol_type = other DNA
ggcctgcgggaacgctgaatattaccgtgagcggcacgaacagtgctggaacgcaaaccagcattacccatccgt

SEQ ID NO: 464445 - DNA, 75 bp, synthetic construct
  source 1..75: mol_type = other DNA
acgtggcaggccagagcagcgccggaaatccggtcagcgtcagccatccgttcaccgtcgatttaacggcggtgg

SEQ ID NO: 464446 - DNA, 75 bp, synthetic construct
  source 1..75: mol_type = other DNA
tttattccggcgcagcagtttgccggattaagcgacggcagctacaccattagcgcgacggttagcgatcaggcc

SEQ ID NO: 464447 - DNA, 75 bp, synthetic construct
  source 1..75: mol_type = other DNA
cggggcgggtagtggcgctatgagcagcagcgtttctatgacctgggccgatttcgatggcgacggcgatatgga

SEQ ID NO: 464448 - DNA, 75 bp, synthetic construct
  source 1..75: mol_type = other DNA
ctcgacggcggcgcgacctggatcacgctcaccaccaacggcacgcagtggacctacactgacagccgcacgctg

SEQ ID NO: 464449 - DNA, 75 bp, synthetic construct
  source 1..75: mol_type = other DNA
gggcggcgctcggcgctaacgagttcgcgcaaatcagtaccgacaacggcgcaacctgggtgaacgtgaccgtcg

SEQ ID NO: 464450 - DNA, 75 bp, synthetic construct
  source 1..75: mol_type = other DNA
tcgggcagcggcaggggacattaagcagttcgcaggccaccgacgacactacgccgttgctgaacggcgtgctct

SEQ ID NO: 464451 - DNA, 75 bp, synthetic construct
  source 1..75: mol_type = other DNA
acacctataaatttagggctatttaaaaactgccaagactggtctaatgattctttagaaacatgtaagatgaag

SEQ ID NO: 464452 - DNA, 75 bp, synthetic construct
  source 1..75: mol_type = other DNA
gaaattttaacgcagttgcgttctagaggtgtcattcgcaccaagaataatcctgttggtgactatgctgaatgg

SEQ ID NO: 464453 - DNA, 75 bp, synthetic construct
  source 1..75: mol_type = other DNA
aaacgattaacggcgtgcgcagctatgccggtccgctgggcaaaagcgacagagcgctggtgtttggtgcatggg

SEQ ID NO: 464454 - DNA, 75 bp, synthetic construct
  source 1..75: mol_type = other DNA
cagcccggattattcgtccttctgcccgtggtgttgtttgtacgaatggcgctcaatgcgctcgatggtatgctg

SEQ ID NO: 464455 - DNA, 75 bp, synthetic construct
  source 1..75: mol_type = other DNA
tttggcgaaatcatcggcggaatagtcaggatcaccacagggctggaagattcagatccgaccacaaaagaacac

SEQ ID NO: 464456 - DNA, 75 bp, synthetic construct
  source 1..75: mol_type = other DNA
gcttagaaccattgaagaatattttaataatcgtttaacccttgatgggctagagcgtttggatcttcttaatgg

SEQ ID NO: 464457 - DNA, 75 bp, synthetic construct
  source 1..75: mol_type = other DNA
taattttctcgccagcctgaaatggcttagcgcaacgccgaaagtaggcaaattcaacgcgtcagctaatattga

SEQ ID NO: 464458 - DNA, 75 bp, synthetic construct
  source 1..75: mol_type = other DNA
tttggttctaatcaatttattactattccggttgaagaaacattacctgtggcacaatatgccgcggtatggtcg

SEQ ID NO: 464459 - DNA, 75 bp, synthetic construct
  source 1..75: mol_type = other DNA
gatatacaaaaattagatggcctaaaagtcctttgtaaggttattgaatgtaatgatgcggacaaagtaaaaaaa

SEQ ID NO: 464460 - DNA, 75 bp, synthetic construct
  source 1..75: mol_type = other DNA
gattatcaaagagtacatgatgcgataatcctacttcttagtcaggctcaaacgacattctctggtttgattttt

SEQ ID NO: 464461 - DNA, 75 bp, synthetic construct
  source 1..75: mol_type = other DNA
gactgttcgcgcggaattaggcacgcagctgaacgaactggagtcgctggattcattaggtagcgatcgcgcttt

SEQ ID NO: 464462 - DNA, 75 bp, synthetic construct
  source 1..75: mol_type = other DNA
atgtataaaaaagttttaattagtcttattggagtagggggagcgtttttttcttccatatctaatggggaagca

SEQ ID NO: 464463 - DNA, 75 bp, synthetic construct
  source 1..75: mol_type = other DNA
gcaggtaaaaagctcggcgggcaacggcaataacgccaatattagcaacggcacggtgacggttaacgcggcgat

SEQ ID NO: 464464 - DNA, 75 bp, synthetic construct
  source 1..75: mol_type = other DNA
acacaaaagatccattaactgagattggttttaaagtatttgggcctttacttttaggctatatatcatggatgt

SEQ ID NO: 464465 - DNA, 75 bp, synthetic construct
  source 1..75: mol_type = other DNA
aaaaatatgacacggtaagctttgatatatttgacacattagttagcaggagaatatatcgcccagcagatcttt

SEQ ID NO: 464466 - DNA, 75 bp, synthetic construct
  source 1..75: mol_type = other DNA
cacattgaaaccggccagtggttcaacctgtgatagcgcaggcgcgggagaagcatttgccaacgcctccgttgc

SEQ ID NO: 464467 - DNA, 75 bp, synthetic construct
  source 1..75: mol_type = other DNA
gtgataccctgataacactacagaaattctttgaagaagattgtacctctcatactggcatgtcacaaactgagg

SEQ ID NO: 464468 - DNA, 75 bp, synthetic construct
  source 1..75: mol_type = other DNA
tgttctgttttaacaaaagcctggatgtttaatacccgtctctatcgggttaatttcgatgaggctagcgtccag

SEQ ID NO: 464469 - DNA, 75 bp, synthetic construct
  source 1..75: mol_type = other DNA
tgcgaccatcgcggcctgccgctggtgcttatcagcacggaaggggcaacagaatggtgcgcagaatacgatgaa

SEQ ID NO: 464470 - DNA, 75 bp, synthetic construct
  source 1..75: mol_type = other DNA
aaagtgcctacctgatatacaaatttggttttttacataaaaactataagtattcatattttcaagttgataaaa

SEQ ID NO: 464471 - DNA, 75 bp, synthetic construct
  source 1..75: mol_type = other DNA
aaagcgcgtatctgatatacaaatttggtttttttcataaaaaatataaattttcctattttcaagttgataaaa

SEQ ID NO: 464472 - DNA, 75 bp, synthetic construct
  source 1..75: mol_type = other DNA
gacaatccgcagttcgtgttgttctatctgctttttcagcgtaatccagtcactgttactcagacgggtcaggcg

SEQ ID NO: 464473 - DNA, 75 bp, synthetic construct
  source 1..75: mol_type = other DNA
gcaacgggaaagcatttgctaacgcagcatcgaccaacaaagcggaagcggtagccgtcgaagtttgggactctg

SEQ ID NO: 464474 - DNA, 75 bp, synthetic construct
  source 1..75: mol_type = other DNA
ttctctttctctgggccgcctggggactgtcggatgcatggtccgggtggcgtaacggtgacgtcagggaatctg

SEQ ID NO: 464475 - DNA, 75 bp, synthetic construct
  source 1..75: mol_type = other DNA
ttcccggtggagtacggatgtgctgtcagccgtcacaacttaccgatgtcttcagggcgctcaaatatgctcagt

SEQ ID NO: 464476 - DNA, 75 bp, synthetic construct
  source 1..75: mol_type = other DNA
agttttaacaccgtggcgggcgatgatgtgattaacaacggcgaacacactcaggcgcagattatcagcggcacc

SEQ ID NO: 464477 - DNA, 75 bp, synthetic construct
  source 1..75: mol_type = other DNA
gagcgtcagcgtaccaactggcgatttagctaaccttaccgccagctcgtataccgttaacgcctcggtcagcga

SEQ ID NO: 464478 - DNA, 75 bp, synthetic construct
  source 1..75: mol_type = other DNA
gccagtacaccgtcagcgcctcggtaagcgataaagcgggtaacccggcgtccgctaaccacgggctggcggtgg

SEQ ID NO: 464479 - DNA, 75 bp, synthetic construct
  source 1..75: mol_type = other DNA
gcctgatggatatcgcccgtatcgcccagaccggacaatcgtatctttacactaacgttggtggtgccagcaact

SEQ ID NO: 464480 - DNA, 75 bp, synthetic construct
  source 1..75: mol_type = other DNA
ccttctttgccaccgcaggcaccgacacttacgacggctccggcggttgggtgtacagctccggcaccggaacgt

SEQ ID NO: 464481 - DNA, 75 bp, synthetic construct
  source 1..75: mol_type = other DNA
gcggcacttttgcggcaactaacgtggtcacgctgacgggcgtgcataccgacctcgccactttgctggcgaatc

SEQ ID NO: 464482 - DNA, 75 bp, synthetic construct
  source 1..75: mol_type = other DNA
tgtcgaagccgggcagacggtgaccgtcacctttggcggcaaaaattacaccaccacagtggaagctaacggtag

SEQ ID NO: 464483 - DNA, 75 bp, synthetic construct
  source 1..75: mol_type = other DNA
gcgataccacgctcacgttgacggggtcactggggacagggcttgccagcggcgaagtggcgcagattagcctcg

SEQ ID NO: 464484 - DNA, 75 bp, synthetic construct
  source 1..75: mol_type = other DNA
ggcgggcaacgttggcgcaaccagcagccagtcggtgctgatcgataccgttaacccggcgcaggtgctcaccat

SEQ ID NO: 464485 - DNA, 75 bp, synthetic construct
  source 1..75: mol_type = other DNA
aatcacaccattaccgtcgatctcagcgctccggcgatgggcattaatatcgattccctgcaagccgacactggc

SEQ ID NO: 464486 - DNA, 75 bp, synthetic construct
  source 1..75: mol_type = other DNA
ggcgggtaacggcaataacgccaatattagcaacggcacggtgacggttaacgcggcgattgattacacaccgac

SEQ ID NO: 464487 - DNA, 75 bp, synthetic construct
  source 1..75: mol_type = other DNA
gccgatggtcgcacgcttactgacggcacctggaactacacggtgcgggtggtggatctggcggggaacgttggg

SEQ ID NO: 464488 - DNA, 75 bp, synthetic construct
  source 1..75: mol_type = other DNA
gttgatgatgtcatcgcccgccacggtatttatggtaagaaccggcgcggtggtgtctaccgccagattatggct

SEQ ID NO: 464489 - DNA, 75 bp, synthetic construct
  source 1..75: mol_type = other DNA
gaggggcttatcaccctctggcactacgatgcgtcggaccgcatcacgcaccggacggtgaacggcgacccggca

SEQ ID NO: 464490 - DNA, 75 bp, synthetic construct
  source 1..75: mol_type = other DNA
gggaggctccattgaactgatggcgttttactttggactttccagtgtggatgtggcggcgcgccgtcgcattgc

SEQ ID NO: 464491 - DNA, 75 bp, synthetic construct
  source 1..75: mol_type = other DNA
cattcaaaaccactcgtagtggatgtatgtttaagataaatgggtttccaataactaataattttaattataaca

SEQ ID NO: 464492 - DNA, 75 bp, synthetic construct
  source 1..75: mol_type = other DNA
gccactggctatccacaggattgatgaatttagcggtcatggtgcacccagtgaagctgacatctgcttagtcat

SEQ ID NO: 464493 - DNA, 75 bp, synthetic construct
  source 1..75: mol_type = other DNA
ggccggttaacctcggtgaaagacgcacagggccgtgaaacgcggtatgaatacaacgccgcaggcgacctgact

SEQ ID NO: 464494 - DNA, 75 bp, synthetic construct
  source 1..75: mol_type = other DNA
acgatgcgtcggaccgcatcacgcaccggacggtgaacggcgacccggcagagcagtggcagtatgatgagcacg

SEQ ID NO: 464495 - DNA, 75 bp, synthetic construct
  source 1..75: mol_type = other DNA
ccttggttatgtatgggcaaggttatttcaactaatttaactgataagcttaagtatcattacaaaaagccattc

SEQ ID NO: 464496 - DNA, 75 bp, synthetic construct
  source 1..75: mol_type = other DNA
gtctttgatgagtttaaaaagaatgtaaaagatagatgctttaccactgcgataaagcatgtttttgagaataga

SEQ ID NO: 464497 - DNA, 75 bp, synthetic construct
  source 1..75: mol_type = other DNA
agcttggcgcagctatcgccagcagaatcaccgctgatgcaagtggcgcaggcgcagttaaagcatctgttaccc

SEQ ID NO: 464498 - DNA, 75 bp, synthetic construct
  source 1..75: mol_type = other DNA
tattttattaggctttttaataaacattatggtgttacaccaaagcagttttttacttattttaaaggaggataa

SEQ ID NO: 464499 - DNA, 75 bp, synthetic construct
  source 1..75: mol_type = other DNA
aagggggaggcccgtaatgcccttgcgcgagcggtctttatgcaccgtctgggtgaaataagggatcgtgggctg

SEQ ID NO: 464500 - DNA, 75 bp, synthetic construct
  source 1..75: mol_type = other DNA
aaaaaacttttcattaaaggtaaggcggatcaatatccggcacttcattctctgatatctccgacccgcattaat

SEQ ID NO: 464501 - DNA, 75 bp, synthetic construct
  source 1..75: mol_type = other DNA
tttatggcgaaaaccaactgcgtcgaatggctggagctgcacaccgcgcacgtcacgtatccctaaagccctgcg

SEQ ID NO: 464502 - DNA, 75 bp, synthetic construct
  source 1..75: mol_type = other DNA
tgactcgtctgatacccctccgcatcgtatccggctattggcctatggtgcgttccgcatatggggagtagtgct

SEQ ID NO: 464503 - DNA, 75 bp, synthetic construct
  source 1..75: mol_type = other DNA
aacaaagaaagctgccaatcaatatattaactctcaaataaacgaaagattgaaatcggcaataggtggtgggtc

SEQ ID NO: 464504 - DNA, 75 bp, synthetic construct
  source 1..75: mol_type = other DNA
aacaaagaaagctgccaatcaatatattggctctcaaataaacgaaagattgaaatcggcaataggtggtgggtc

SEQ ID NO: 464505 - DNA, 75 bp, synthetic construct
  source 1..75: mol_type = other DNA
cccgtccgactggagatgatgcggcccggtggctggttccaggcggtgattaatgagtggcttgagaagcgttct

SEQ ID NO: 464506 - DNA, 75 bp, synthetic construct
  source 1..75: mol_type = other DNA
gacgaaacatctgagcaccttacgcggatgatatggctgtgccttgcgaagcttcgcggcgtagctgccgtatat

SEQ ID NO: 464507 - DNA, 75 bp, synthetic construct
  source 1..75: mol_type = other DNA
acagataccgccgcgcaggatatcccgtacacgataaccgactttctcacgccaggggggaaacgagcatcgggc

SEQ ID NO: 464508 - DNA, 75 bp, synthetic construct
  source 1..75: mol_type = other DNA
cctgagtccgcatatttatctggcgacgaacagtccgcaggggccgtggtgggtactcggctggagtgagcgggt

SEQ ID NO: 464509 - DNA, 75 bp, synthetic construct
  source 1..75: mol_type = other DNA
gcgcactatgtttaccactatgatgaatacggcagactgacggagaagacggaccgtatcccgacgggtgtgata

SEQ ID NO: 464510 - DNA, 75 bp, synthetic construct
  source 1..75: mol_type = other DNA
ctgaaggtgaaaaaatcagccctgtccgcgtcgaaaatatgcttaaagagctgtcgtcagtctttcgcgtcgcag

SEQ ID NO: 464511 - DNA, 75 bp, synthetic construct
  source 1..75: mol_type = other DNA
gtacagttcgggattttcgggcagaaagaggcggatgtgatgcatgttaatggtgatacatccgggcgttcaggt

SEQ ID NO: 464512 - DNA, 75 bp, synthetic construct
  source 1..75: mol_type = other DNA
atggttgaatataatacatcggataacttcgttcttaagagtggtgttgaatttgaatttttgaaggatgcacgt

SEQ ID NO: 464513 - DNA, 75 bp, synthetic construct
  source 1..75: mol_type = other DNA
atacctttcgcatactgagttgtctggaggtgtagttgaagatcttcagggagggaaaataacttatcctaattc

SEQ ID NO: 464514 - DNA, 75 bp, synthetic construct
  source 1..75: mol_type = other DNA
tatatctggtgcaaggcactggcggagaaaacgaataagtgtgatgacagtaaatctgagcttacgctgacaacg

SEQ ID NO: 464515 - DNA, 75 bp, synthetic construct
  source 1..75: mol_type = other DNA
tctgtagatgcagtaagaacagttatggccgtgaatgcactgagtaatcagtttccatggttaaaagcatgcgtt

SEQ ID NO: 464516 - DNA, 75 bp, synthetic construct
  source 1..75: mol_type = other DNA
ccgcaagaccgagagcgcattattctgttgggtttccaaagtaagaaattagccaagtcatttaattggagtggc

SEQ ID NO: 464517 - DNA, 75 bp, synthetic construct
  source 1..75: mol_type = other DNA
attaaagctctcaagaaagaaaaaagactaattggcttcatcggtggcccaccatgccctgacttctccgttgca

SEQ ID NO: 464518 - DNA, 75 bp, synthetic construct
  source 1..75: mol_type = other DNA
gtgcagcggcgatttctacggctctcacaaaccttggtttgggagaagcggcagcactacatgttgggatacctg

SEQ ID NO: 464519 - DNA, 75 bp, synthetic construct
  source 1..75: mol_type = other DNA
gtaacctattttccgattgcatttccgaatagatgtctgcgggtatttgcgactcaggattacactcccggcagt

SEQ ID NO: 464520 - DNA, 75 bp, synthetic construct
  source 1..75: mol_type = other DNA
atgccatttgcttgttatttctgcattttcataaacgttggtttgggagaagcggcaaaaaggaatgtggggaca

SEQ ID NO: 464521 - DNA, 75 bp, synthetic construct
  source 1..75: mol_type = other DNA
aagtatagaattagatgaatgtaatgtgatatttcatgacgccgtgcgaccgtttgtttctcaaaaaatcatcga

SEQ ID NO: 464522 - DNA, 75 bp, synthetic construct
  source 1..75: mol_type = other DNA
gcggttgatgattatattccagagtaccgtgggagtaggatttcaagtttcagagagatattatttcttgataaa

SEQ ID NO: 464523 - DNA, 75 bp, synthetic construct
  source 1..75: mol_type = other DNA
cagtgcgtcaaatacggacttaggaacgaaaacgaccagttcatttgattacgggacaaaaacagtcagtacgtt

SEQ ID NO: 464524 - DNA, 75 bp, synthetic construct
  source 1..75: mol_type = other DNA
aatatagcaccacctcgttttgggtatgcagagtgcagtattgaagatgtagaacatgaaaaaattaagtcttct

SEQ ID NO: 464525 - DNA, 75 bp, synthetic construct
  source 1..75: mol_type = other DNA
ctctacgccggggcgaatcggcataccggccggcggctcggccaccttggtgtgccgggaggggacgcgctgggg

SEQ ID NO: 464526 - DNA, 75 bp, synthetic construct
  source 1..75: mol_type = other DNA
ctgccagggcagcagcatgatgaggaatcagggctgtactataaccgtcaccggtactacgatccgttgcagggg

SEQ ID NO: 464527 - DNA, 75 bp, synthetic construct
  source 1..75: mol_type = other DNA
ggggcgaatcagatacctgatatgggtagcttcacgctttctgtttcaggtactggatatcaaaaattaccatca

SEQ ID NO: 464528 - DNA, 75 bp, synthetic construct
  source 1..75: mol_type = other DNA
tgaccgcactggcaggccttgccactgcggcagacaaactaccgtattttacggggaatgatacagccagcctga

SEQ ID NO: 464529 - DNA, 75 bp, synthetic construct
  source 1..75: mol_type = other DNA
atgccggttatagcggaaccagtatgaagggcgggaaaggggctgctgggatttgtattattgaggagtttgcat

SEQ ID NO: 464530 - DNA, 75 bp, synthetic construct
  source 1..75: mol_type = other DNA
tttctccaaaaacagggaacgccgcttgcggcagcccgcagggcggaggcagggatagccgacgtaatggagtgg

SEQ ID NO: 464531 - DNA, 75 bp, synthetic construct
  source 1..75: mol_type = other DNA
tgttcgttttgatggtggtcacaaaagagatgactttttaatggacaaattagtggaatgggtaacattcagacc

SEQ ID NO: 464532 - DNA, 75 bp, synthetic construct
  source 1..75: mol_type = other DNA
gcggcgtctgaacgtctggaagtcaaaaaagcgctctttgcacagctggcggaagtttgcccgccacaaacgcta

SEQ ID NO: 464533 - DNA, 75 bp, synthetic construct
  source 1..75: mol_type = other DNA
caataattaccccgacacagaatagttatccggtcactatcggcgcaggtggggccggtggtgttagtgcgacga

SEQ ID NO: 464534 - DNA, 75 bp, synthetic construct
  source 1..75: mol_type = other DNA
aacgattttgacgcccgcaaaagcctggcgctgatgggggagcggatcaaggggcagattcagtcgtcaatcatc

SEQ ID NO: 464535 - DNA, 75 bp, synthetic construct
  source 1..75: mol_type = other DNA
atcttggtgtcagtgtaaaaactctggcacgatataggcaaaatgatcctacccacgtaatatggacacaggcct

SEQ ID NO: 464536 - DNA, 75 bp, synthetic construct
  source 1..75: mol_type = other DNA
gcggttaaaggcatcaaccgcgaacaactgcagacgatgattacggaatcaggcattgcgctggatattagctgt

SEQ ID NO: 464537 - DNA, 75 bp, synthetic construct
  source 1..75: mol_type = other DNA
atatggctcgactggcttaattggaagttgcgaaagacctgaatactctggtgaagcgttgctagttgcgcgtgt

SEQ ID NO: 464538 - DNA, 75 bp, synthetic construct
  source 1..75: mol_type = other DNA
tgtggttattcctgagcacacggtcaccattcccccccgtccgttcttccgtaagatgatcgaacataaaagtcc

SEQ ID NO: 464539 - DNA, 75 bp, synthetic construct
  source 1..75: mol_type = other DNA
agctgatggagcacctgcagtcgatcgcaaaggggctgtcctctggcgatgatttgaaggtgggcttccttgagg

SEQ ID NO: 464540 - DNA, 75 bp, synthetic construct
  source 1..75: mol_type = other DNA
tagtaacgaacgggtgattcgtgctgctggcggcgttggcgcattgtccgactggctattacgtcatgttacatc

SEQ ID NO: 464541 - DNA, 75 bp, synthetic construct
  source 1..75: mol_type = other DNA
ggtacgacgcgctggggaattacattcgcaacctgcgcgacccacgagacccgcaggatgctgccactaaaaatt

SEQ ID NO: 464542 - DNA, 75 bp, synthetic construct
  source 1..75: mol_type = other DNA
gcgcaaccagggtaagttcttcgctgaggtgcatgaagacgcattcgataaactgacgatgctgatccagcaggt

SEQ ID NO: 464543 - DNA, 75 bp, synthetic construct
  source 1..75: mol_type = other DNA
gaattacctgtcatacaaaaagagccaagggaatgttattgatataaataagaaaaggcatatcacagaaaaatc

SEQ ID NO: 464544 - DNA, 75 bp, synthetic construct
  source 1..75: mol_type = other DNA
atgactttgaaatatagaataaaaagattgaagaataagtatggtattagaagttgcattattattaatgagagc

SEQ ID NO: 464545 - DNA, 75 bp, synthetic construct
  source 1..75: mol_type = other DNA
tgtatttacaggtcagaggcgttttgctctagatgacttcttaagtacacatataaaaaaacgctcaaaaagatg

SEQ ID NO: 464546 - DNA, 75 bp, synthetic construct
  source 1..75: mol_type = other DNA
aaaccttatcttatgaaagataaactgtacagttttgcctttatagttttacttggtgtgttatttacacattcc

SEQ ID NO: 464547 - DNA, 75 bp, synthetic construct
  source 1..75: mol_type = other DNA
ttgactttaaagtcagggaagaaagaatgcatagttatttactcaataatccagaagctcttagagggaggtgaa

SEQ ID NO: 464548 - DNA, 75 bp, synthetic construct
  source 1..75: mol_type = other DNA
agcaggaatgggtttttgtacaaaattacactgctcatgtacaaaatgttgtgcttcctggagcgtggcgagtga

SEQ ID NO: 464549 - DNA, 75 bp, synthetic construct
  source 1..75: mol_type = other DNA
tcattttatgacatggatccaaccgtggagtgattttacatcaggtaagataagaattataacgaatgatggaac

SEQ ID NO: 464550 - DNA, 75 bp, synthetic construct
  source 1..75: mol_type = other DNA
ccatgaccgtcactgtacaaatgcttaatggtcatcaaagttgccacggcgggcagctattttcactggctgata

SEQ ID NO: 464551 - DNA, 75 bp, synthetic construct
  source 1..75: mol_type = other DNA
cgcactcgatttgacaggtatgttgaactgaatattcagcaagccgcaagaaaaggacgtcgagggtttgaacga

SEQ ID NO: 464552 - DNA, 75 bp, synthetic construct
  source 1..75: mol_type = other DNA
gtaacttgctcggtaaactattacgtaccgaggtttcgattattcgtagttaccgtgcattcctaatgttattgc

SEQ ID NO: 464553 - DNA, 75 bp, synthetic construct
  source 1..75: mol_type = other DNA
gttgcgccgtacaaaatcggcttcggcccgttccctggttcggtgtatcacgtaccttatccgtcagatttacac

SEQ ID NO: 464554 - DNA, 75 bp, synthetic construct
  source 1..75: mol_type = other DNA
tatgactatggcgttaactggaaaggtcgcgccgtacaaaatcggcttcggcccgttccctggttcggtgtatca

SEQ ID NO: 464555 - DNA, 69 bp, synthetic construct
  source 1..69: mol_type = other DNA
ctgattgaccagcgggtacaggcggtgatgttatccatgcgtcgtgacggaggaatgctgagtggatga

SEQ ID NO: 464556 - DNA, 75 bp, synthetic construct
  source 1..75: mol_type = other DNA
ggcaacgcgtcgtgtcagtatggctgataatgctgatgtgctggtttatatggggacccggcaggatattgagaa

SEQ ID NO: 464557 - DNA, 75 bp, synthetic construct
  source 1..75: mol_type = other DNA
ccggtgcggaagcggtggaaaacgcggtgaaaattgctcgcgcccataccggacgccctggcgtgattgcgttta

SEQ ID NO: 464558 - DNA, 75 bp, synthetic construct
  source 1..75: mol_type = other DNA
cgagggcggtttcaacgttgcgccaaaagagctggttgccgccattcgccgcctgtgcgacgagcacggtattgt

SEQ ID NO: 464559 - DNA, 75 bp, synthetic construct
  source 1..75: mol_type = other DNA
caagatgattactcttcagctgaaaaatttctcactcacttcaacaaaaaatgcaaaaaccagactttggcgttg

SEQ ID NO: 464560 - DNA, 75 bp, synthetic construct
  source 1..75: mol_type = other DNA
aaaatatgaagcccctcctcctggcgaataattctaatgaatattccgttttttttcgtcgatacagcataaaca

SEQ ID NO: 464561 - DNA, 75 bp, synthetic construct
  source 1..75: mol_type = other DNA
tggctgaaagctatggctttacggataaccctcgatacattgcggagaaaaataagatggaaactttactcaaaa

SEQ ID NO: 464562 - DNA, 75 bp, synthetic construct
  source 1..75: mol_type = other DNA
ttggcgcagttgcaattttgtgggtgctggcgattggttttaatcctgcgctaaggatttcgttaaagagctatt

SEQ ID NO: 464563 - DNA, 75 bp, synthetic construct
  source 1..75: mol_type = other DNA
gcagacagaacaatcacgctggtaatgcaatgcgatcagaacgctcatattcgtgttcagttgaataccgctaat

SEQ ID NO: 464564 - DNA, 75 bp, synthetic construct
  source 1..75: mol_type = other DNA
aaccctcgatacatcgcggagaaaaataagatggaagctttactcaaaaaagcatctccccataccgtacgctaa

SEQ ID NO: 464565 - DNA, 75 bp, synthetic construct
  source 1..75: mol_type = other DNA
ctatatggttcgcgatggatttgctgctcgtgctcgcgcctatgttgacgctggtggcaattttgtcaccactta

SEQ ID NO: 464566 - DNA, 75 bp, synthetic construct
  source 1..75: mol_type = other DNA
tggagatggaatattattaaaagcacttgaatgtagactaaaaaaaataaatataacaaatgtgaaattcactgg

SEQ ID NO: 464567 - DNA, 75 bp, synthetic construct
  source 1..75: mol_type = other DNA
atctcacgaccacaaatttggagattatctttgtaatcatcgtggggttgaattatcaaaaaaagggaagatcgt

SEQ ID NO: 464568 - DNA, 75 bp, synthetic construct
  source 1..75: mol_type = other DNA
ttcgagtctctacttcttaattgcgctggggggcaaggcaaaagtgcgaaatatgccaatcgtcttttgcaaatg

SEQ ID NO: 464569 - DNA, 75 bp, synthetic construct
  source 1..75: mol_type = other DNA
aagcgagaacccacagcgtgatattcctcgtacactgcgtggcaccgtggtgcggatcctgttgctgtatgtcgg

SEQ ID NO: 464570 - DNA, 75 bp, synthetic construct
  source 1..75: mol_type = other DNA
agcatcagtcatccgaccgacagcggcagcttttttgctggcgggctgcccggatttctcggcgcgatgctgatg

SEQ ID NO: 464571 - DNA, 75 bp, synthetic construct
  source 1..75: mol_type = other DNA
cgactgcaaaagagatggcaggagtggcgtcatgcggtaaacagaacattatggaaaccggcatcgtcaatttga

SEQ ID NO: 464572 - DNA, 75 bp, synthetic construct
  source 1..75: mol_type = other DNA
tgtggatgtcggtgttcccgatgcaagtaaaaacgtcgcagggacggttttaacggatgtcctgaactggtctaa

SEQ ID NO: 464573 - DNA, 75 bp, synthetic construct
  source 1..75: mol_type = other DNA
tcctcggcgtttaaaaacaggcaagggcaaatgcctgaaggtgcgacagagcaagaaattaacctcagcttcgat

SEQ ID NO: 464574 - DNA, 75 bp, synthetic construct
  source 1..75: mol_type = other DNA
ggatgtgccatttggtgaattcccctcctcggcgtttaaaaacaggcaagggcaaatgcctgaaggtgcgacaga

SEQ ID NO: 464575 - DNA, 75 bp, synthetic construct
  source 1..75: mol_type = other DNA
tcattgaagagaatattatttcaataaaaaaagaccatgaaaaagcaatagataaccttaaagacaaagaaagta

SEQ ID NO: 464576 - DNA, 75 bp, synthetic construct
  source 1..75: mol_type = other DNA
agataaacctaactcagacacaattgaaatgagccttgcatctaaaataaagatcgccgaactgcagcaactatt

SEQ ID NO: 464577 - DNA, 75 bp, synthetic construct
  source 1..75: mol_type = other DNA
gtgacctgcgtgacatcaatggtgaagctggcgcatgggcacgtatcatgagcggaaccggctctgccggtggtg

SEQ ID NO: 464578 - DNA, 75 bp, synthetic construct
  source 1..75: mol_type = other DNA
gctatttcccggcctggtttgcccgcctgcacccggcacataaaacaccggataacgccattctcgccagcagcc

SEQ ID NO: 464579 - DNA, 75 bp, synthetic construct
  source 1..75: mol_type = other DNA
aagccggtatatattcatcacggcgtcaattttggcgttatgatttgctctgaactccagaatagtaaagcgagg

SEQ ID NO: 464580 - DNA, 75 bp, synthetic construct
  source 1..75: mol_type = other DNA
taaattatctcaggaagcaattaaaataagagataatgaaaagaacgatttattgcttaagcagactgattttaa

SEQ ID NO: 464581 - DNA, 75 bp, synthetic construct
  source 1..75: mol_type = other DNA
ataagagataatgaaaagaacgatttattgcttaagcagactgatttaaaaaagaggctaatcaaaagacgaacc

SEQ ID NO: 464582 - DNA, 75 bp, synthetic construct
  source 1..75: mol_type = other DNA
gctcgggacggggtagaaaaggatatgctgaccgactcggtaaaaaatattactggatcgccttacatcgactac

SEQ ID NO: 464583 - DNA, 75 bp, synthetic construct
  source 1..75: mol_type = other DNA
atctatgtcacgcagcttaattgtatctgttgcattatactttttgatatatatatgtatggagaaaaaatctcg

SEQ ID NO: 464584 - DNA, 75 bp, synthetic construct
  source 1..75: mol_type = other DNA
gcaacgctggatatcgactcgttaagggcatttcagagcagggcaaaacgctggcctaaaggcggcgataaattc

SEQ ID NO: 464585 - DNA, 75 bp, synthetic construct
  source 1..75: mol_type = other DNA
gctttgtctggtgtaagtaagccaatgttttatgcggcaaaaagatttaacccgaaagaatttccacaggcgatt

SEQ ID NO: 464586 - DNA, 75 bp, synthetic construct
  source 1..75: mol_type = other DNA
gggactggatgacgcctcgcccgccagcatcagtcatccgaccgacaacggcagcttttttgctggcgggctgcc

SEQ ID NO: 464587 - DNA, 75 bp, synthetic construct
  source 1..75: mol_type = other DNA
gattgctttaagccagcccaccctgcaccggatagccctgcacgacggaacgctgaaatgtactgcacccatttt

SEQ ID NO: 464588 - DNA, 75 bp, synthetic construct
  source 1..75: mol_type = other DNA
gcaggaaaaccaacaaacgaacgcgaagtgcttgtagaggaaggtttaaaagcccgagcaggtgaaaatactaaa

SEQ ID NO: 464589 - DNA, 75 bp, synthetic construct
  source 1..75: mol_type = other DNA
cagtctcccaataacaaactctaccctggtgaaatacggaaaactgggatacatcgttccaaggccacaaaaaat

SEQ ID NO: 464590 - DNA, 75 bp, synthetic construct
  source 1..75: mol_type = other DNA
ctcaataagcctctgttcaaaaagatgtttcaggagcacgccgacctggacgctaaagacaaaaaggctctgaag

SEQ ID NO: 464591 - DNA, 75 bp, synthetic construct
  source 1..75: mol_type = other DNA
ctgcataccaaaggttcgcattttaactacacccagcgttatccgcgtagcttcgcgcagtggaagccggaatgt

SEQ ID NO: 464592 - DNA, 75 bp, synthetic construct
  source 1..75: mol_type = other DNA
ttgcttatcgtgagcagattggtgcggagccacgtaatcgtggcaagccggtagatgatatgttgctggtagacg

SEQ ID NO: 464593 - DNA, 75 bp, synthetic construct
  source 1..75: mol_type = other DNA
caatgttgccgcttcattctgattctaaacttagacaagaagcatttatagcaaatgcttatagactgttcagtt

SEQ ID NO: 464594 - DNA, 75 bp, synthetic construct
  source 1..75: mol_type = other DNA
cgttaaaaaataccggaagcatgacatattttacaggaagtgcagcgaataaagcattccatacactgacggttg

SEQ ID NO: 464595 - DNA, 75 bp, synthetic construct
  source 1..75: mol_type = other DNA
gagagctttatccggaagcacttaccgacagtagcggcctcgctgctacctacacggcagcgttcaaacacaatg

SEQ ID NO: 464596 - DNA, 75 bp, synthetic construct
  source 1..75: mol_type = other DNA
caataaaaatgtctttaaagccagtaaacaaaccattggtttcagtaatgtaacgccggttattacaacccagga

SEQ ID NO: 464597 - DNA, 75 bp, synthetic construct
  source 1..75: mol_type = other DNA
gtcgacaaaaaacatgagctggacggactggatttgtttaccggtttcactgtcacacacactgacagcagtgcc

SEQ ID NO: 464598 - DNA, 75 bp, synthetic construct
  source 1..75: mol_type = other DNA
gatgaatttttttcaagtagcgataaaaatcttgtaagaagtaaagataataatcttgaagcattttatctcgca

SEQ ID NO: 464599 - DNA, 75 bp, synthetic construct
  source 1..75: mol_type = other DNA
ggaaggcaggacggcggggacaggcaacggacgcgctgagacgtgcgcagcagccatcccgtgatgaatacgacc

SEQ ID NO: 464600 - DNA, 75 bp, synthetic construct
  source 1..75: mol_type = other DNA
acccaactaagagtgatgatgttataattacacatggcgatttttgctttagtaatatattatacgattttagaa

SEQ ID NO: 464601 - DNA, 75 bp, synthetic construct
  source 1..75: mol_type = other DNA
atgaaaagaacattactcataatagtgtggattattggcctgatgagtagcagtgcgatggcattaactctgaat

SEQ ID NO: 464602 - DNA, 75 bp, synthetic construct
  source 1..75: mol_type = other DNA
caccattgatgcttcagcatctgaagcacaacattaacaaatggtttaatgacgaactcagtcacccgggttgtt

SEQ ID NO: 464603 - DNA, 75 bp, synthetic construct
  source 1..75: mol_type = other DNA
ttgttaagctgggacagggaagggggtgtaagtggaaactggtaaaacaatccggtgaaaacttaccagcaaagc

SEQ ID NO: 464604 - DNA, 75 bp, synthetic construct
  source 1..75: mol_type = other DNA
tagcctggagaaccatagaatttattatgagttctgagcgggatctggttaattttcttggcgatatttctatgg

SEQ ID NO: 464605 - DNA, 75 bp, synthetic construct
  source 1..75: mol_type = other DNA
gccgtactcaatatggcagcaacattaccgttggtatttgatgctgagctaaacagtattcgcgagcggttgaac

SEQ ID NO: 464606 - DNA, 75 bp, synthetic construct
  source 1..75: mol_type = other DNA
tcgtgaagctgaaccgctttgaaagtaacgtagccggtaaaatgagcagcggtggagccgccaacggcagttatc

SEQ ID NO: 464607 - DNA, 75 bp, synthetic construct
  source 1..75: mol_type = other DNA
ttgtcgatatccgctcccgaggccgcgctgaccgttgctgccagtgtaccttcgaccaacggcgcagcacacaaa

SEQ ID NO: 464608 - DNA, 75 bp, synthetic construct
  source 1..75: mol_type = other DNA
ccaccgccagagaacgggcttcttcatcgtacgcaggacatgtgtcagagattttagtgtcggaggacggtaaac

SEQ ID NO: 464609 - DNA, 75 bp, synthetic construct
  source 1..75: mol_type = other DNA
aaaaatatcagacttatataataaccagaatatgagtaaagttgatatcaacagagagcttgaaatgatacagca

SEQ ID NO: 464610 - DNA, 75 bp, synthetic construct
  source 1..75: mol_type = other DNA
ccacttctcaacgccattcctaatgtggtgttttttattaaggatatgcaggcccgttatctgttagtcaatatg

SEQ ID NO: 464611 - DNA, 75 bp, synthetic construct
  source 1..75: mol_type = other DNA
attgatgatgcaattgcttgtatagatcaagcactgttacttgagcctaatatacataaagctgtagtaataaaa

SEQ ID NO: 464612 - DNA, 75 bp, synthetic construct
  source 1..75: mol_type = other DNA
tgataaccggcctttccggacaagcaacgacatcacgtattttttttgaacatgcgcagacacaaatattagata

SEQ ID NO: 464613 - DNA, 75 bp, synthetic construct
  source 1..75: mol_type = other DNA
gtatttctaattcacaaaatgtaaacatgacaggagttgagttacaggactgtgcatacgatggattgtatatta

SEQ ID NO: 464614 - DNA, 75 bp, synthetic construct
  source 1..75: mol_type = other DNA
acaacgaatacaccggtaacggtgttacgacatcatttccgtatacctttagggttttcaaggaatctgatctgg

SEQ ID NO: 464615 - DNA, 75 bp, synthetic construct
  source 1..75: mol_type = other DNA
tgccgaatgtgatgctgacacgtcttatccttcaaagtcggatgcgacgctggcgcgtcttatccgacctacggt

SEQ ID NO: 464616 - DNA, 75 bp, synthetic construct
  source 1..75: mol_type = other DNA
atgacggcgcaaatatcagcttacgggcggctggtggctgacccgcagttaaagaccaccagcaagggcacacaa

SEQ ID NO: 464617 - DNA, 75 bp, synthetic construct
  source 1..75: mol_type = other DNA
tttggcgtgaatgatgaaggggtgattaccggcgtgccggaagatggtaagcaacttaaccaggcaaatttaatc

SEQ ID NO: 464618 - DNA, 75 bp, synthetic construct
  source 1..75: mol_type = other DNA
tatcagagaattacactcactgcctggccgtaattcaggcataaccatgccgttaaccacccagaccaaaccgcc

SEQ ID NO: 464619 - DNA, 75 bp, synthetic construct
  source 1..75: mol_type = other DNA
aaatgaagttattaaaaaaaatacggatgatttgttactaaagattaaaactgattcaacacttaagcaaaaagc

SEQ ID NO: 464620 - DNA, 75 bp, synthetic construct
  source 1..75: mol_type = other DNA
tcatagcggctcgcgggggggggcagtctattttacagcggcatattgcctcgttctcgcatcatggtttgcctc

SEQ ID NO: 464621 - DNA, 75 bp, synthetic construct
  source 1..75: mol_type = other DNA
tccggcaggcgtcagcctgccaggggttttcgcgcgggctgacaggcggcctccaccgcctgccctgtatcacct

SEQ ID NO: 464622 - DNA, 75 bp, synthetic construct
  source 1..75: mol_type = other DNA
atgaaaactgacccagaactaagaatggaagtagagagacaattttcctggtgggtttttaaccatatgcgttga

SEQ ID NO: 464623 - DNA, 75 bp, synthetic construct
  source 1..75: mol_type = other DNA
ttcgatggtatacagctggtcaagacagtatcctggtatgataatgagtatggttttgtgactcaactggtcaga

SEQ ID NO: 464624 - DNA, 75 bp, synthetic construct
  source 1..75: mol_type = other DNA
gaccggtacggtcaacaaatcgccgttcaccgggaggaaggcatcagcacttacagcagttataacccgcgtggg

SEQ ID NO: 464625 - DNA, 75 bp, synthetic construct
  source 1..75: mol_type = other DNA
ttacggtgctgtcacacagtcaaggaacaatgattgcgctggcggcggcagccatcgaagcgccggatgcgctgt

SEQ ID NO: 464626 - DNA, 75 bp, synthetic construct
  source 1..75: mol_type = other DNA
ccggcacatctgcccgtgaggcggcaatccgcggcaacgcgtgccgaaacagcggcaaaacgggcagaggatatt

SEQ ID NO: 464627 - DNA, 75 bp, synthetic construct
  source 1..75: mol_type = other DNA
taattgcacaatcggattatgtgcgtcttaacaaaggaaaagaatataaaaaaactctggttaatggtagtttgc

SEQ ID NO: 464628 - DNA, 75 bp, synthetic construct
  source 1..75: mol_type = other DNA
ccagttcatttcaatcaaataatctttttatatgtagtggcatacaatattctgatgtttactatgtatcactat

SEQ ID NO: 464629 - DNA, 75 bp, synthetic construct
  source 1..75: mol_type = other DNA
gcaaaacaataaccatcaatcttggccgctatgagcgggtacaggaaaatattcaccgcagggagaccgatgaag

SEQ ID NO: 464630 - DNA, 75 bp, synthetic construct
  source 1..75: mol_type = other DNA
ttcattgaggggatccgtgctgaggtagctgaggaaaatcagggcataaaatacaagatagagaacggtattttc

SEQ ID NO: 464631 - DNA, 75 bp, synthetic construct
  source 1..75: mol_type = other DNA
ctgtagatattgcaggaagccagcttgctctggcaaagcgttgtggtcgcgcgcagtcaacaatttgcgactggc

SEQ ID NO: 464632 - DNA, 75 bp, synthetic construct
  source 1..75: mol_type = other DNA
acctggctgcgcgatgtgctgtcgtggatcctgccagcggtagccttctttggcgtctggttcttcctgttccgc

SEQ ID NO: 464633 - DNA, 75 bp, synthetic construct
  source 1..75: mol_type = other DNA
cactgacgcactgaacagagcaaaacaacagacaagccagcacgatgacccgtacggggataacataccgtttta

SEQ ID NO: 464634 - DNA, 75 bp, synthetic construct
  source 1..75: mol_type = other DNA
atgctctgtattcaggtcgcctttgcgggtaatgactccaacttattgatagtgttttatgttcagataatgccc

SEQ ID NO: 464635 - DNA, 75 bp, synthetic construct
  source 1..75: mol_type = other DNA
atgagtacctttggtattgcggctattattctttatgcccccagcggcgttattgccgataaattttcacaccgc

SEQ ID NO: 464636 - DNA, 75 bp, synthetic construct
  source 1..75: mol_type = other DNA
ctggatgcactgtatccaattgtttatatggactatattgtcgtgaaggttcgtcagaatggcagcgtgataaac

SEQ ID NO: 464637 - DNA, 75 bp, synthetic construct
  source 1..75: mol_type = other DNA
acttaatgctaatattgagttgggtaatgacccaataattggtatagaagcctatcccggtacagcggagatcca

SEQ ID NO: 464638 - DNA, 75 bp, synthetic construct
  source 1..75: mol_type = other DNA
aatgtatggggtggactcacctctgccgacgtcctggctggatgatattgcgcagcgccgtgaaggacatgaggc

SEQ ID NO: 464639 - DNA, 75 bp, synthetic construct
  source 1..75: mol_type = other DNA
gataaatattatccgctggattcgatttcccgtgatgtgaaggcgttcgttaaatctgttgaccgccattaccgg

SEQ ID NO: 464640 - DNA, 75 bp, synthetic construct
  source 1..75: mol_type = other DNA
gataaatattatccgctggattcgattgcccgtgatgtgaaggcgttcgttaagtctgttggccgccattactgg

SEQ ID NO: 464641 - DNA, 75 bp, synthetic construct
  source 1..75: mol_type = other DNA
attataatcgcgatagcgcaattgattctccggacgacgaaaaagccttttactggctgaagctggccgctgagc

SEQ ID NO: 464642 - DNA, 75 bp, synthetic construct
  source 1..75: mol_type = other DNA
ccttaggttttttatcagatcaacgtcgtataaatgttttactcagccgagccaagcataaattaattatcatag

SEQ ID NO: 464643 - DNA, 75 bp, synthetic construct
  source 1..75: mol_type = other DNA
ggcagcctgcactggtccctactctccgccatgaacctgaattatctgtcattactggatacggacgcgctgaag

SEQ ID NO: 464644 - DNA, 75 bp, synthetic construct
  source 1..75: mol_type = other DNA
agagttgttctctgattttaatttctatggcgctgcattgcgttccaacagcaatatgcgcccctgggatgaacg

SEQ ID NO: 464645 - DNA, 75 bp, synthetic construct
  source 1..75: mol_type = other DNA
gggcggtcacattgaaaccgggatgcgatttaccgatggtaactggaacctgacgccgtatgcatcgttaacggg

SEQ ID NO: 464646 - DNA, 75 bp, synthetic construct
  source 1..75: mol_type = other DNA
tcgtgccgttgcttttgtcgagagtgaagttgacgagtggattcaatcagttatcgaaacaagcagaattaaagt

SEQ ID NO: 464647 - DNA, 75 bp, synthetic construct
  source 1..75: mol_type = other DNA
aatatccaatgttttttataaaaatgagttatttactgatgctgaaaaaaaattgaaatatctttcaaaagactt

SEQ ID NO: 464648 - DNA, 75 bp, synthetic construct
  source 1..75: mol_type = other DNA
aaaattttaaagggtatcacggggaagataatgagttggaattcaatatccctgatggagaaacggaaggtagtg

SEQ ID NO: 464649 - DNA, 75 bp, synthetic construct
  source 1..75: mol_type = other DNA
aagccttcatcgttcaatcactcgcctgctacgagaccccggtaaaagtcattgagcttgtaaaggctgaatacg

SEQ ID NO: 464650 - DNA, 75 bp, synthetic construct
  source 1..75: mol_type = other DNA
ggctacgaaagcagagggaatgaaaaacatggcccttactgccgccctgatggagcaggcggccaaggaagttgg

SEQ ID NO: 464651 - DNA, 75 bp, synthetic construct
  source 1..75: mol_type = other DNA
tccagtaatatgaacgtctctcgttcagataatgaaacagaaattacatccagcgatctgacattgtctacggca

SEQ ID NO: 464652 - DNA, 75 bp, synthetic construct
  source 1..75: mol_type = other DNA
aatgggcaatgcacaggcagtgacgaccattccgttttggaactctatggaaggggaaatgggcaaagaggtgga

SEQ ID NO: 464653 - DNA, 75 bp, synthetic construct
  source 1..75: mol_type = other DNA
agatcctttcagatatggtgttgacgagttttctacgtaaaaagaaggccatcagtgatatacccggacgagtgg

SEQ ID NO: 464654 - DNA, 75 bp, synthetic construct
  source 1..75: mol_type = other DNA
tttatacttcactgattcatatctgaatggtgacgttaccaaatatactaacgaaaccttccgtactggatttgc

SEQ ID NO: 464655 - DNA, 75 bp, synthetic construct
  source 1..75: mol_type = other DNA
tcgccggagtatgcgaaaaagcatcccatcgccacccccgccgatctgctacaacagtcgcttatctcgtcaacc

SEQ ID NO: 464656 - DNA, 75 bp, synthetic construct
  source 1..75: mol_type = other DNA
catgctcttatgaaaacctgcagtttgccagagataatatcgatattgatatccgccacggtatcccggactggg

SEQ ID NO: 464657 - DNA, 75 bp, synthetic construct
  source 1..75: mol_type = other DNA
ataataatgttttacctgcatggaaagtaaagatgaatctgttgcagatggatgtgtcaggtttacaagttaaaa

SEQ ID NO: 464658 - DNA, 75 bp, synthetic construct
  source 1..75: mol_type = other DNA
agagggacgaaatcatacgcccattgagattattattggataaaaccggtaaagaaatgactcagatggctagac

SEQ ID NO: 464659 - DNA, 75 bp, synthetic construct
  source 1..75: mol_type = other DNA
gatgtaaaatggcgattaaacacactattccattttaagtgtgcctattgtgagacttttttctctgcttcttca

SEQ ID NO: 464660 - DNA, 75 bp, synthetic construct
  source 1..75: mol_type = other DNA
tggtgcaggtgctgccggatgagatggggatcgccattaacgcgcaccacttggtgatgccgcatatgaatgaac

SEQ ID NO: 464661 - DNA, 75 bp, synthetic construct
  source 1..75: mol_type = other DNA
gctggcgaccatcaatgtgttgctggagcagaacttaccggctcaggctgaacaaaaaggcgatatgttgctgga

SEQ ID NO: 464662 - DNA, 75 bp, synthetic construct
  source 1..75: mol_type = other DNA
gatttcaaatgttttttataacaacaaattagttaccgataaagataaagaaaggaagtatcttacagaagattt

SEQ ID NO: 464663 - DNA, 75 bp, synthetic construct
  source 1..75: mol_type = other DNA
ttgttaccggctgtgggggccgtcatcaccgcacaaaacggggccggaatggataaagcggcaaatggtgtgccg

SEQ ID NO: 464664 - DNA, 75 bp, synthetic construct
  source 1..75: mol_type = other DNA
cacccgttcgcaggctctgccatcactggacggccagacctcacgcagaaagaaacagcccggaaagaaatcaca

SEQ ID NO: 464665 - DNA, 75 bp, synthetic construct
  source 1..75: mol_type = other DNA
aactgctgcgtaaccgtaattacaaccagtcgcagcgcggcgtgacctgcaagaacggtgatacctggtatctga

SEQ ID NO: 464666 - DNA, 75 bp, synthetic construct
  source 1..75: mol_type = other DNA
accgtcggaaaatatccgcttatgactttgcaggaggcaagggataaagcatggactgcgaggaaagacatctcg

SEQ ID NO: 464667 - DNA, 75 bp, synthetic construct
  source 1..75: mol_type = other DNA
tttctcacctatccagtcactggaattaggtgcgtcgcgtattatgcagtggggtggaaaagggcggcctgaatc

SEQ ID NO: 464668 - DNA, 75 bp, synthetic construct
  source 1..75: mol_type = other DNA
atactagctctaataacgtgttgatttcagatcatttttattattttggtaataaagcgattgaagtagacttag

SEQ ID NO: 464669 - DNA, 75 bp, synthetic construct
  source 1..75: mol_type = other DNA
ttattaaagaaaactacagcattgacgttcttttgctgcctgaaaatcatccagaaatcgattatagtgaaaggc

SEQ ID NO: 464670 - DNA, 75 bp, synthetic construct
  source 1..75: mol_type = other DNA
tcttcacaccaggttttcatgatattgatgacaaccagttgaaaaaaatatgtgttgatagttttcctaagtcaa

SEQ ID NO: 464671 - DNA, 75 bp, synthetic construct
  source 1..75: mol_type = other DNA
tttctcagcagccagaacatcacaacagtaaccggtgctgataatccggcaggccgcattgcgtcagggcgtaat

SEQ ID NO: 464672 - DNA, 75 bp, synthetic construct
  source 1..75: mol_type = other DNA
atggcgagtattggacctatttgtctttgatgcctatgtcttcaattaacataaagtgtccaaactgcgagtctc

SEQ ID NO: 464673 - DNA, 75 bp, synthetic construct
  source 1..75: mol_type = other DNA
tttaaaggatgaggggtttaatgattattttgtcatgcttcaggatatgaataattatcgaagactagtaagatt

SEQ ID NO: 464674 - DNA, 75 bp, synthetic construct
  source 1..75: mol_type = other DNA
gcggtgtacctgctgctgctctgcgccgctggggtgatgtttaaagtcgtccccggcgggtttattcccacccag

SEQ ID NO: 464675 - DNA, 75 bp, synthetic construct
  source 1..75: mol_type = other DNA
ctacccggctgatcgatcgcctgtttggctggattttccgtccgtttaaccgctttttcctgcgcagctcgaacg

SEQ ID NO: 464676 - DNA, 75 bp, synthetic construct
  source 1..75: mol_type = other DNA
tatcccggcgccaacccgaaagtgattgccgagaccgtggcgacgccgctggaggaagcgatcaacggcgttgaa

SEQ ID NO: 464677 - DNA, 75 bp, synthetic construct
  source 1..75: mol_type = other DNA
aatacctgtcatgcttcggggccgcgtcgataatttgcttgaccgaaactacatcaaacaaaactacaaaattga

SEQ ID NO: 464678 - DNA, 75 bp, synthetic construct
  source 1..75: mol_type = other DNA
acgcgcggaggaatcgggcgtcactttgatttacacgccttttgcccgtgaagcgtttgttttcatcgtcaatgt

SEQ ID NO: 464679 - DNA, 75 bp, synthetic construct
  source 1..75: mol_type = other DNA
ggatcacggtgttctccgggatgctgggcgtgacgctcttcggtctgttcctgacgccggtgttttacgtgacgc

SEQ ID NO: 464680 - DNA, 75 bp, synthetic construct
  source 1..75: mol_type = other DNA
ttcagcccctaccgcccccaaaggaaaatggcgtagtgtatgtggcgtaacagaaagaatgccttacgctggggg

SEQ ID NO: 464681 - DNA, 75 bp, synthetic construct
  source 1..75: mol_type = other DNA
tcctgagagtcagtcgataaacaaggcattccctcatgctgatacattaaaaggaattcaactggggtggagtgg

SEQ ID NO: 464682 - DNA, 75 bp, synthetic construct
  source 1..75: mol_type = other DNA
tttctcacctttccagtcactggaactaggcgcgtcgcgcattatgcagtgggggggggaagggcggccgcaatc

SEQ ID NO: 464683 - DNA, 75 bp, synthetic construct
  source 1..75: mol_type = other DNA
tgacattgggcttgctttcctcactgggagcccaggcttacgcggccgggttagtagtaaatgataacgatctgc

SEQ ID NO: 464684 - DNA, 75 bp, synthetic construct
  source 1..75: mol_type = other DNA
tcgacctggccgctgagtcaggaagagatcgcccgggcactgaaaaaggccaaaccgtcttattcttctgaacaa

SEQ ID NO: 464685 - DNA, 75 bp, synthetic construct
  source 1..75: mol_type = other DNA
tgcgataaactggtacctggaagcacatgatacccgcactaatatgagtcggaccaattatagctaccgtcacca

SEQ ID NO: 464686 - DNA, 75 bp, synthetic construct
  source 1..75: mol_type = other DNA
ggggcggggaagggcgaccggaatccttcagcagtttctgggatggcttcactggccatgacaataccgggactg

SEQ ID NO: 464687 - DNA, 75 bp, synthetic construct
  source 1..75: mol_type = other DNA
tgctgttaactggtacctggaagcacatgacacgcgcaccaatatgagccgaaccaattacagttatacccatca

SEQ ID NO: 464688 - DNA, 75 bp, synthetic construct
  source 1..75: mol_type = other DNA
ggtggataagcgtttacagttttcgcaagctcgtaaaagcagtacagtgcaccgtaagaaaattacaagtatacc

SEQ ID NO: 464689 - DNA, 75 bp, synthetic construct
  source 1..75: mol_type = other DNA
ttgtcaactaacggatgcattcccattggttacaaactttgacaatgaacaaactaccccacaatcactagaaaa

SEQ ID NO: 464690 - DNA, 75 bp, synthetic construct
  source 1..75: mol_type = other DNA
gctatggttacagctacactcatcatatctataaggatggttactaccagcagggctatccgttgggggatgcga

SEQ ID NO: 464691 - DNA, 75 bp, synthetic construct
  source 1..75: mol_type = other DNA
tggctttaccgggaaagacaataccggaacggataacgagccggggaaccagttggccggatttgactttaagtt

SEQ ID NO: 464692 - DNA, 75 bp, synthetic construct
  source 1..75: mol_type = other DNA
actggccatgataataccgggacagataatgaaccgggtaaccaactggccggctttgactttaagtttaaactc

SEQ ID NO: 464693 - DNA, 75 bp, synthetic construct
  source 1..75: mol_type = other DNA
gggcaatcctgccagtggtcgggccgtattatctcaggaacaggacggcattaaatcgcaaacccacagcgccag

SEQ ID NO: 464694 - DNA, 75 bp, synthetic construct
  source 1..75: mol_type = other DNA
gggcaaacctgccagtggtcgggccgtattttctcaggaacaggacggcattaaatcgcaaacccacagcgccag

SEQ ID NO: 464695 - DNA, 75 bp, synthetic construct
  source 1..75: mol_type = other DNA
caccacccagaagccaacaaaacctctggaagcaagtctgggatatcgccagggatggagccgtagcctaggaca

SEQ ID NO: 464696 - DNA, 75 bp, synthetic construct
  source 1..75: mol_type = other DNA
gggcaaccctgccagtggtcgggccgtattttctcaggaacaggacggcattaaatcgcacacccacagcgccag

SEQ ID NO: 464697 - DNA, 75 bp, synthetic construct
  source 1..75: mol_type = other DNA
gggcaatcctgccagtggtcgggccgtattgtctcaggaacaggacggcattaaatcgcagacccacagcgccag

SEQ ID NO: 464698 - DNA, 75 bp, synthetic construct
  source 1..75: mol_type = other DNA
gggcaatcctgccagtggtcgggccgtattctctcaggaacaggacggcattaaatcgcacacccacagcgccag

SEQ ID NO: 464699 - DNA, 75 bp, synthetic construct
  source 1..75: mol_type = other DNA
acaccaacattttgacagatcatacagtcagtattgctcgcttgaacgccagatagccagacttgaaactgattt

SEQ ID NO: 464700 - DNA, 75 bp, synthetic construct
  source 1..75: mol_type = other DNA
tactctcaggcctgccttttacgacacttgcacaatccagtggatttgtgtcttctgacgtacaaccaggggcag

SEQ ID NO: 464701 - DNA, 75 bp, synthetic construct
  source 1..75: mol_type = other DNA
atgaatataccttgctggataatggcaaccatagctggagtctcgcagagaatcgcgtacaaatgcccccttcaa

SEQ ID NO: 464702 - DNA, 75 bp, synthetic construct
  source 1..75: mol_type = other DNA
ataatgcgagtaataggtgattttggtgttgatgtgtatgtgattagaaaatatggggacgtgcctaataaggaa

SEQ ID NO: 464703 - DNA, 75 bp, synthetic construct
  source 1..75: mol_type = other DNA
aatcattttacaataacataaaaagttccttgatcgagcgtttcacgacaccattatacgtatatgttatttcag

SEQ ID NO: 464704 - DNA, 75 bp, synthetic construct
  source 1..75: mol_type = other DNA
gggcaagcctgccagtggtcgggccgtattttctcaggaacaggacggcattaaatcgcagacccacagcgccag

SEQ ID NO: 464705 - DNA, 75 bp, synthetic construct
  source 1..75: mol_type = other DNA
tgctttcacctttagcggtacggctgacgccacacagactacagcattcgccaaccaggcttctaccgatgcagc

SEQ ID NO: 464706 - DNA, 75 bp, synthetic construct
  source 1..75: mol_type = other DNA
aggcagccgaatcagataaagaaaatgggggggccattgatgccgccaaggatgtaatggaatatgttataaagg

SEQ ID NO: 464707 - DNA, 75 bp, synthetic construct
  source 1..75: mol_type = other DNA
gctcgcaggctgcggtctgacgcagaccgtcacggacggcacgatcagcatcacgaaatccatcttctacaaaaa

SEQ ID NO: 464708 - DNA, 75 bp, synthetic construct
  source 1..75: mol_type = other DNA
ttacgctggcgtatgtattgattaacgcggttatcatgctggtgatgacgctggttgaacgtaaagttcgcctgc

SEQ ID NO: 464709 - DNA, 75 bp, synthetic construct
  source 1..75: mol_type = other DNA
ttaaccctgttaatttctttggtgacaagcacattatatgctaaattaagaaaaatagatgaaattgcaaataaa

SEQ ID NO: 464710 - DNA, 75 bp, synthetic construct
  source 1..75: mol_type = other DNA
gccatcacggacggctccgttacgtttaatggtaaagtcattgctccagcctgtacgttagttgctgcgacaaaa

SEQ ID NO: 464711 - DNA, 75 bp, synthetic construct
  source 1..75: mol_type = other DNA
gtattgtctcaggaacaggacggcattaaatcgcatacccacagcgccagcgcatccagtacggatttggggacg

SEQ ID NO: 464712 - DNA, 75 bp, synthetic construct
  source 1..75: mol_type = other DNA
gtattgtctcaggaacaggacggcattaaatcgcaaacccacagcgccagcgcatccagtactgatttggggacg

SEQ ID NO: 464713 - DNA, 75 bp, synthetic construct
  source 1..75: mol_type = other DNA
gtattttctcaggaacaggacggcattaaatcgcacacccacagcgccagcgcatccagtacagatttggggacg

SEQ ID NO: 464714 - DNA, 75 bp, synthetic construct
  source 1..75: mol_type = other DNA
agtgggcaaggaaacctagcgctacaaatcccagaccgtgatttcaaaccccagcgcatcgaaagcggtgttatt

SEQ ID NO: 464715 - DNA, 75 bp, synthetic construct
  source 1..75: mol_type = other DNA
atattgataatgatatcgactctataaacaatttctctcaaaaaagtaaatatcaaaaattatcaagtaatgctc

SEQ ID NO: 464716 - DNA, 75 bp, synthetic construct
  source 1..75: mol_type = other DNA
aatactgtgccttaactcctctcagcaaaattatttaaacaataaaggcttaatgaatactgaaattataccaca

SEQ ID NO: 464717 - DNA, 75 bp, synthetic construct
  source 1..75: mol_type = other DNA
gcgcaggccactctcgcaggcgttgcctttggtgagcagacggtcactgcatcactggctaataatggtgccagc

SEQ ID NO: 464718 - DNA, 75 bp, synthetic construct
  source 1..75: mol_type = other DNA
cgcaatatcatgaagcatgaagacccggtaaaaacccgtcgggttgatctcaatggtggcgaaaagttgtatgcc

SEQ ID NO: 464719 - DNA, 75 bp, synthetic construct
  source 1..75: mol_type = other DNA
ggttttgtcggcaacacctcatttgaagatttctctcacatgatggtatcaatggcacaaaaagcaacggtgccg

SEQ ID NO: 464720 - DNA, 75 bp, synthetic construct
  source 1..75: mol_type = other DNA
caccgtacaacacggagtatgtcgctcactgaggaagggcaacgttttctcgaagcagccaaaccagcactgacc

SEQ ID NO: 464721 - DNA, 75 bp, synthetic construct
  source 1..75: mol_type = other DNA
tatattcaaacattagacgaaaacttgattttttcaaaatgctacagagcagtaatagagcgtgccaaaagtgac

SEQ ID NO: 464722 - DNA, 75 bp, synthetic construct
  source 1..75: mol_type = other DNA
cggcatgtgctacatccgtggcaatgcgctggatctcgataactgggcgcaagaacccggtctggagaattggag

SEQ ID NO: 464723 - DNA, 75 bp, synthetic construct
  source 1..75: mol_type = other DNA
acgcacccgatgaaacaaccgcccgccgtatgctggcgcgtgattttgtgttgctgtttgctggccgcgttccgt

SEQ ID NO: 464724 - DNA, 75 bp, synthetic construct
  source 1..75: mol_type = other DNA
gcaacgaatgtttcaggagtcagggctggccctgcgctgtaatgatgacagttttatctggacctgcgaggttcg

SEQ ID NO: 464725 - DNA, 75 bp, synthetic construct
  source 1..75: mol_type = other DNA
gttcatcctgtgttcgaaaatttttgcaatgaaccaccgaaaaaagaaatagattgttacatccgtaaccgtgtg

SEQ ID NO: 464726 - DNA, 75 bp, synthetic construct
  source 1..75: mol_type = other DNA
aaagtctaggatgtccagcaggggtgattggtttggacttggctggtaatgaagatataacaccaccacctgaga

SEQ ID NO: 464727 - DNA, 75 bp, synthetic construct
  source 1..75: mol_type = other DNA
ttcaacgtgttacgcgttccggtgaggaatttatacagataccaaatataaattgttacacgacggctataatga

SEQ ID NO: 464728 - DNA, 75 bp, synthetic construct
  source 1..75: mol_type = other DNA
tgataagccgtgcccgtgcttacgcggatgaggcgctgggctggctcagtcaggatggcgtggcgtcatccgtgg

SEQ ID NO: 464729 - DNA, 75 bp, synthetic construct
  source 1..75: mol_type = other DNA
aaaagcggtgctgccacatccgtggtatgtcatgccatgcgtgtggggcatgctcgcctttcgctttccgtgaaa

SEQ ID NO: 464730 - DNA, 75 bp, synthetic construct
  source 1..75: mol_type = other DNA
agcatttcttggggttagaccaaagttttttgagttagttaattggaaagaatatatctgcgattactgtggtca

SEQ ID NO: 464731 - DNA, 75 bp, synthetic construct
  source 1..75: mol_type = other DNA
ggtgaaataaatgggttttcaacgaaagtaaataaaagtctgcttaacgatttgcctgaaaatatagtttttaca

SEQ ID NO: 464732 - DNA, 75 bp, synthetic construct
  source 1..75: mol_type = other DNA
taattgattatcttaagacaaacaaaattaacaaaaaaatatattttataggtgaaataaatgggttttcaacga

SEQ ID NO: 464733 - DNA, 75 bp, synthetic construct
  source 1..75: mol_type = other DNA
ctggaaaacatcttggacttattcctgtatattttattggctgtgaatctaattacccccctatactaaaagtta

SEQ ID NO: 464734 - DNA, 75 bp, synthetic construct
  source 1..75: mol_type = other DNA
taaccgtcccgccgcgcgtaatgcgctaaataatgcccttctgacgcaactggtaaatgaactggaagctgcggc

SEQ ID NO: 464735 - DNA, 75 bp, synthetic construct
  source 1..75: mol_type = other DNA
ctgaaccggcaggcgctgcactcgcgcggcgagaacggaagcgtacgcatggactcgttgctggtcattcagcgg

SEQ ID NO: 464736 - DNA, 75 bp, synthetic construct
  source 1..75: mol_type = other DNA
ctgccgatgtattccgttgccggtcaagtcagctatattccaacaacgccggaactggcgaagctgaagcaggtg

SEQ ID NO: 464737 - DNA, 75 bp, synthetic construct
  source 1..75: mol_type = other DNA
atagacatctagcctttaagaggtattctaattttactcaagagacgacgattaatcctgatttcaaaaacccca

SEQ ID NO: 464738 - DNA, 75 bp, synthetic construct
  source 1..75: mol_type = other DNA
ttaaaactggacatgattagcgatgaaaataaattacagctgacgcgctggatggcgtatatccgacagcttaaa

SEQ ID NO: 464739 - DNA, 75 bp, synthetic construct
  source 1..75: mol_type = other DNA
tatgcaactgattaatgtcaaacgatattacccggaagacaaaccctatggtgaggatgttcagtatttccagag

SEQ ID NO: 464740 - DNA, 75 bp, synthetic construct
  source 1..75: mol_type = other DNA
aaaaagttgctgcatacgatcccaaaaataatgttaatccaaatgtaatttggacagcttggtttcaaggaattg

SEQ ID NO: 464741 - DNA, 75 bp, synthetic construct
  source 1..75: mol_type = other DNA
gcatggccgatgatttggtcaattgcattctgcgcaaccagctccattctcttctgtctgtacgccagtcgaccg

SEQ ID NO: 464742 - DNA, 75 bp, synthetic construct
  source 1..75: mol_type = other DNA
tcattgcaaattctacagactgctcaatagaacacgcaatacaatacgtaccgatgacaagcggttcattaaatg

SEQ ID NO: 464743 - DNA, 75 bp, synthetic construct
  source 1..75: mol_type = other DNA
tgtgattgacacgctgaagtcagtcagaaggttgttcagtaatcaggtgaccgcctcctgcctgcgcctgtctgc

SEQ ID NO: 464744 - DNA, 75 bp, synthetic construct
  source 1..75: mol_type = other DNA
tgagaaaattcagcaggccttgcgggatatccgggagtatgtggacagttttgattacccgcgacttcaggctct

SEQ ID NO: 464745 - DNA, 75 bp, synthetic construct
  source 1..75: mol_type = other DNA
ggcggtagacctgtgcagactgacaacgaggacaatgaatgttaacgctggccatgaaagaacctcaaaatcccg

SEQ ID NO: 464746 - DNA, 75 bp, synthetic construct
  source 1..75: mol_type = other DNA
gcaaactgagcggctttgacatgggttacagcggtatccagtttggtggggataaacgtctctctgatgaaatgc

SEQ ID NO: 464747 - DNA, 75 bp, synthetic construct
  source 1..75: mol_type = other DNA
acaaacaacctgaaactgagaacctttggcgcatttgataacgaatggcatacgctggctttccgctttgccggg

SEQ ID NO: 464748 - DNA, 75 bp, synthetic construct
  source 1..75: mol_type = other DNA
accagactttctatctcaacgccatacgctgcattttttgtaacatccgtcagcatcagcactatgctgacgcat

SEQ ID NO: 464749 - DNA, 75 bp, synthetic construct
  source 1..75: mol_type = other DNA
tatgttttatattaagtttttttaataataacagttattttaaatattatattacactatgtataataatggttc

SEQ ID NO: 464750 - DNA, 75 bp, synthetic construct
  source 1..75: mol_type = other DNA
gtttactggtctaccgttactggaattctgttggtgatgagtggtgtcgcccttattacccttaaagttaagtaa

SEQ ID NO: 464751 - DNA, 75 bp, synthetic construct
  source 1..75: mol_type = other DNA
tcgtggaagttattcttgagcgtgtgaccaatatttcgatgggcagcgaactggataacgtcatggaatttgaag

SEQ ID NO: 464752 - DNA, 75 bp, synthetic construct
  source 1..75: mol_type = other DNA
cgtgcgaaacatgaactgcagctggtggttgatcagatgatagataaggcggcagagctggaaaagtatggcagc

SEQ ID NO: 464753 - DNA, 75 bp, synthetic construct
  source 1..75: mol_type = other DNA
atatgcacttgccataccgataaaaataaaattatttcaaaagttttcattattatcttcttctatattactcgg

SEQ ID NO: 464754 - DNA, 75 bp, synthetic construct
  source 1..75: mol_type = other DNA
agcactatatagctttgtgggctttttagcctttattattatagccgaattaatgcatccatatcagttaggatt

SEQ ID NO: 464755 - DNA, 75 bp, synthetic construct
  source 1..75: mol_type = other DNA
aacactaacagccactcaattcaccattgaaaactcgaacggtataggcctaaccatcaatgactatggcaccag

SEQ ID NO: 464756 - DNA, 75 bp, synthetic construct
  source 1..75: mol_type = other DNA
acagtattcatcgcctgacttatcgctggagtggaaacaactggaatgcaaccgtaagccccattatttacgacg

SEQ ID NO: 464757 - DNA, 75 bp, synthetic construct
  source 1..75: mol_type = other DNA
aaaacacactgccttatttcagtgcagagggccggattttactggcgcagctgtcagaaaaagcccgcgcattac

SEQ ID NO: 464758 - DNA, 75 bp, synthetic construct
  source 1..75: mol_type = other DNA
agagatggcgaaaaccagtattgaggcggatttctttgctgtttcacaacctgacctgttgtcgctgtatggcga

SEQ ID NO: 464759 - DNA, 75 bp, synthetic construct
  source 1..75: mol_type = other DNA
actatgcggcgtaataaaaacgcctgttcgacaaaaagtgacaggcgagtcacttattcgtaatttcacgattat

SEQ ID NO: 464760 - DNA, 75 bp, synthetic construct
  source 1..75: mol_type = other DNA
gtcaggcaggatgctgaagctgccagaaaggccgcatccgatgcggagcaggccagggatgagattgataccgca

SEQ ID NO: 464761 - DNA, 75 bp, synthetic construct
  source 1..75: mol_type = other DNA
tttgaagcacagaccggaagatatgatgtttatcttcggtcgtgtattgaaagagaatattgtgtcggtgatatt

SEQ ID NO: 464762 - DNA, 75 bp, synthetic construct
  source 1..75: mol_type = other DNA
cgactcctaatcctgaaccaacaccggctcccgctcagcctcccatagtcaaccccgatcctacgcctgaacccg

SEQ ID NO: 464763 - DNA, 75 bp, synthetic construct
  source 1..75: mol_type = other DNA
ctcagcctcccatagtcaaccccgatcctacgcctgaacccgatcctacgcctaaccccactcccacacctaaac

SEQ ID NO: 464764 - DNA, 75 bp, synthetic construct
  source 1..75: mol_type = other DNA
tggttcagacgcgacaatcaatttttctggcacggcagcgcaacgaaacagcatcttttccggcggttcttatgg

SEQ ID NO: 464765 - DNA, 75 bp, synthetic construct
  source 1..75: mol_type = other DNA
ctccctgacagctaaccgactcacagtagatgttgttggtcaaacctctgccatcggcattaatttaattggtga

SEQ ID NO: 464766 - DNA, 75 bp, synthetic construct
  source 1..75: mol_type = other DNA
tgaagactggcgctatccgcgagttttcaggggataccgaatatctgttgaacaactcccgggagaagtacagtt

SEQ ID NO: 464767 - DNA, 75 bp, synthetic construct
  source 1..75: mol_type = other DNA
tatctgtacgatgtgcgtaaaaatggcactaactgggagctttatgcttccgggacaattccggaaccgactcct

SEQ ID NO: 464768 - DNA, 75 bp, synthetic construct
  source 1..75: mol_type = other DNA
gcctgcacaaacacctgctgaccgcacgcgccgacctgcgccgtccgggacgcccgctgggcgcgttcctgctgg

SEQ ID NO: 464769 - DNA, 75 bp, synthetic construct
  source 1..75: mol_type = other DNA
gtgtgccactacaaactgcatattgccccgtcaacgtattaccactgtcagcaacagcgacatcatccggataaa

SEQ ID NO: 464770 - DNA, 75 bp, synthetic construct
  source 1..75: mol_type = other DNA
ctggagcgtgaaagattttttatagttggtagcgttgatagtcttgtatggcacggtaatccttccgtctgtact

SEQ ID NO: 464771 - DNA, 75 bp, synthetic construct
  source 1..75: mol_type = other DNA
ggtggaacagctttccggctttatgctgaaggcagcgctggcggaacaggccgtgctggagtgcgtcaaccggca

SEQ ID NO: 464772 - DNA, 75 bp, synthetic construct
  source 1..75: mol_type = other DNA
cgtgcggtcaatatcgctactcgttatcacgagtctgggacgaatcaaaaccatatgcccttttcatagggctaa

SEQ ID NO: 464773 - DNA, 75 bp, synthetic construct
  source 1..75: mol_type = other DNA
gcggtactgaaccggaccgtcgccggagtgattggcacggcgctgatggcagcaatggcgggcaggaaggtttac

SEQ ID NO: 464774 - DNA, 75 bp, synthetic construct
  source 1..75: mol_type = other DNA
agctgatatgtatttaatgtcaagatatgctaatggtattattgcgaatagcacatttagtttttggtctgcaat

SEQ ID NO: 464775 - DNA, 75 bp, synthetic construct
  source 1..75: mol_type = other DNA
actggatgagaacgtcggcgtgaaaaaactgattgagcaactggagcgacaaattcgcaacagtcagcctaccga

SEQ ID NO: 464776 - DNA, 75 bp, synthetic construct
  source 1..75: mol_type = other DNA
attccggctttagtatccttaaggaactcctcgccagttccaccagcgacgcgaagcagctgcatagcgtgaaca

SEQ ID NO: 464777 - DNA, 75 bp, synthetic construct
  source 1..75: mol_type = other DNA
ctcatggcccgactgtacgagaggcggcgaaacgcctgagcaccttacgcggatgatatggctatgccttgcgaa

SEQ ID NO: 464778 - DNA, 75 bp, synthetic construct
  source 1..75: mol_type = other DNA
gccagaaaaaagagctgtacaccaatgccatcagcccgtgggtattgcgctgcggtcgcctgaataaatgcaatg

SEQ ID NO: 464779 - DNA, 75 bp, synthetic construct
  source 1..75: mol_type = other DNA
atgcaaccacaacttcatcaggaaattacgcggcgactgctggccgacttttcctttaaagaacagggcgactgg

SEQ ID NO: 464780 - DNA, 75 bp, synthetic construct
  source 1..75: mol_type = other DNA
tgatgtacgtgatgctgtggcgcattgatgccggagattatgccggggcgctggagatcgggcgtcatgccctgc

SEQ ID NO: 464781 - DNA, 75 bp, synthetic construct
  source 1..75: mol_type = other DNA
aaaaagtccaaggtctgacttatgctcttgtggtacttgttggctgttttgcagtgattagtggagaaatgacca

SEQ ID NO: 464782 - DNA, 75 bp, synthetic construct
  source 1..75: mol_type = other DNA
tgcagacattttgaataacccatacctgacattcggtgtaacctataatggtgtggactatgaagatagcatgta

SEQ ID NO: 464783 - DNA, 75 bp, synthetic construct
  source 1..75: mol_type = other DNA
gccgatgcctacaataccgcagcaagaaattacattgccgacaacaatgcccgtctgcataacggcagtcttccg

SEQ ID NO: 464784 - DNA, 75 bp, synthetic construct
  source 1..75: mol_type = other DNA
aagaacagttctgcagagttaaatttgcaggataatgcagtgtcaaatgccaataatatttctcttgccactgaa

SEQ ID NO: 464785 - DNA, 75 bp, synthetic construct
  source 1..75: mol_type = other DNA
cccgcatccgcctgtcggcggcagacggcgcgttcacggcagacgtggaagatgctctggacgacgagtctgtca

SEQ ID NO: 464786 - DNA, 75 bp, synthetic construct
  source 1..75: mol_type = other DNA
cggtgcgttcacggcagacctggaagatgccctgcccgatgatgccgtcacaccgcagatagaggatgaaacggt

SEQ ID NO: 464787 - DNA, 75 bp, synthetic construct
  source 1..75: mol_type = other DNA
acattgaagcacttaaaatcatctatgagtcaaatcactcagcaattactgatgagattaagagtaaactgagta

SEQ ID NO: 464788 - DNA, 75 bp, synthetic construct
  source 1..75: mol_type = other DNA
acgctggactactctgattcaaaaattaatatcggtaatggatatgtcggtgtgggcgaaaaatctcatacatta

SEQ ID NO: 464789 - DNA, 75 bp, synthetic construct
  source 1..75: mol_type = other DNA
aacaaatgactggaaagggcagataaatgtttatgacggaacccgactggatgcaagggggaatgatgccgttga

SEQ ID NO: 464790 - DNA, 75 bp, synthetic construct
  source 1..75: mol_type = other DNA
aaataaagaaaggtggcgacattcttcttgttgaggttaatggggactcatcaggtagtttttaccttaactcac

SEQ ID NO: 464791 - DNA, 75 bp, synthetic construct
  source 1..75: mol_type = other DNA
gttctgtatttgatttcgggagctcacagaattcggcgattggcgaaggtgagagcagtcactcagttgttacag

SEQ ID NO: 464792 - DNA, 75 bp, synthetic construct
  source 1..75: mol_type = other DNA
gaatattgctgtgggtattgggagcgaatcaaatattactgtaagcgcgtctagtggaagcactatatcttcaga

SEQ ID NO: 464793 - DNA, 75 bp, synthetic construct
  source 1..75: mol_type = other DNA
gtgatgacagtaatggttcattgagtattaacaatggaagcaatgtttttgtcgtgtcatctcaagctgacaccc

SEQ ID NO: 464794 - DNA, 75 bp, synthetic construct
  source 1..75: mol_type = other DNA
tcgtaagcgttgaagtgatgtggcctgcacaaacgctgcttcttcccctgcaacaggcggtggaagcgctgacgc

SEQ ID NO: 464795 - DNA, 75 bp, synthetic construct
  source 1..75: mol_type = other DNA
ggcgtttccggtctggcggaaatggcgtttccggtctggcggaaaaaagcctgccgcagaaagcacaacaccgcc

SEQ ID NO: 464796 - DNA, 75 bp, synthetic construct
  source 1..75: mol_type = other DNA
ttaatgccttcactcaatggataggtgttccttacgttggcccggcggtggctccggctcaagcaattgcagcag

SEQ ID NO: 464797 - DNA, 75 bp, synthetic construct
  source 1..75: mol_type = other DNA
caggcatggcgcgaagcaacatcgccgcaggatgaacacgatatttttcagatacgactggatgaggcgcacgag

SEQ ID NO: 464798 - DNA, 75 bp, synthetic construct
  source 1..75: mol_type = other DNA
atgttaccccggacacaccgccagctagtcagcgttgaagtgatgtggcctgctcagacgctaccacttcccctg

SEQ ID NO: 464799 - DNA, 75 bp, synthetic construct
  source 1..75: mol_type = other DNA
caggcatggcgcgaaccagcatcgccacaggatgaacacgacatatttcagatacgactggatgaggcgcacgaa

SEQ ID NO: 464800 - DNA, 75 bp, synthetic construct
  source 1..75: mol_type = other DNA
ttccttaacaaacgagggaatcaaagtaaggaacaaaaagacgaattagaatttttaactaaacgtcttcaattt

SEQ ID NO: 464801 - DNA, 75 bp, synthetic construct
  source 1..75: mol_type = other DNA
gtttaggttgggtagacctgcagaacgtgaggcggatgatctcccgacaattggtgtatatggtatcggaatgaa

SEQ ID NO: 464802 - DNA, 75 bp, synthetic construct
  source 1..75: mol_type = other DNA
aggccatgctgccttatgtcgatcgcccgcttgatcgggatgtggcagacgacattcttggcagcattaatgcct

SEQ ID NO: 464803 - DNA, 75 bp, synthetic construct
  source 1..75: mol_type = other DNA
tgcccgaaacaggaacctggctcctgcagaaaggtgagcgcgttacgacagctaaaaccagcgcaaaactggatg

SEQ ID NO: 464804 - DNA, 75 bp, synthetic construct
  source 1..75: mol_type = other DNA
ctaaaaaaactttccgaaggtcaaaaagaccagttgcgaacagctgcaaagtttcttgattctaagaaggaagaa

SEQ ID NO: 464805 - DNA, 75 bp, synthetic construct
  source 1..75: mol_type = other DNA
gaaagggctcacctctctactttcggatcttggaattgagacttctaaagataatgatttttcgttgggcaaagg

SEQ ID NO: 464806 - DNA, 75 bp, synthetic construct
  source 1..75: mol_type = other DNA
gagaaaatcaaaccttttattattcgcattaaaaatcgaaaatgatgcattgcgtactaatatttccgaattgca

SEQ ID NO: 464807 - DNA, 75 bp, synthetic construct
  source 1..75: mol_type = other DNA
aatgccgcatataaactgaccagcacatacacccccgcaggccagttacagagccagcacctgaacagcctggtg

SEQ ID NO: 464808 - DNA, 75 bp, synthetic construct
  source 1..75: mol_type = other DNA
tgacggggtggatgtcgctgtcgcgtaaaccggagatgacgtggtacgggtgggacggcgaccggctgacgacgg

SEQ ID NO: 464809 - DNA, 75 bp, synthetic construct
  source 1..75: mol_type = other DNA
ctgcccggcccgctgccgttcattctctcccgcacctacagcagttaccggacaaaaacgcccgcgccggtgggg

SEQ ID NO: 464810 - DNA, 75 bp, synthetic construct
  source 1..75: mol_type = other DNA
gtgacgttgcgttcccgttcctcaacaacttaagcttctggtttactgttgttggcgtgattctggttaacgttt

SEQ ID NO: 464811 - DNA, 75 bp, synthetic construct
  source 1..75: mol_type = other DNA
agaaggtgttcagcggtgaaatgccggcacatatcctcccgaaaagtgccgttgagccatcagtcatcgcacagg

SEQ ID NO: 464812 - DNA, 75 bp, synthetic construct
  source 1..75: mol_type = other DNA
gacccggagctacacccggacagcacgctcacggcgtggccggataaccgcatcgcagaggatgcgcactatgtt

SEQ ID NO: 464813 - DNA, 75 bp, synthetic construct
  source 1..75: mol_type = other DNA
cttgagacagaacgtcgtgctaccacggttagaaaacctataacatttatcattgagcagccagaattgcattta

SEQ ID NO: 464814 - DNA, 75 bp, synthetic construct
  source 1..75: mol_type = other DNA
acttcaggagctttgtcaacaaaacgtttattgatttaaaaccaattacagtatttgttggtaagaacagcagtg

SEQ ID NO: 464815 - DNA, 75 bp, synthetic construct
  source 1..75: mol_type = other DNA
tctaaccggaaacagcaccgcatcagcagcagtgggagcacagagcgggaagaatgctgttgagaataactacct

SEQ ID NO: 464816 - DNA, 75 bp, synthetic construct
  source 1..75: mol_type = other DNA
gcacaccattgttgctcaatgcagtaagcaaacattacgcggaaaatatcgtcctgaaccaactggatttacata

SEQ ID NO: 464817 - DNA, 75 bp, synthetic construct
  source 1..75: mol_type = other DNA
acggatgatgagcggactcaccggtaccattacgacagtcagcaccggctggtgcactacacgcggacacaatat

SEQ ID NO: 464818 - DNA, 75 bp, synthetic construct
  source 1..75: mol_type = other DNA
gaaatacgcacaactaccaggaacttatcaggttgatatctggctgaataaaaagaaggtttcacaggtaatggt

SEQ ID NO: 464819 - DNA, 75 bp, synthetic construct
  source 1..75: mol_type = other DNA
actatgacttcggccccaaatcgccgacggaacttatcagcatgcgggtgagcgtcaacaacgaatacggcatta

SEQ ID NO: 464820 - DNA, 75 bp, synthetic construct
  source 1..75: mol_type = other DNA
tcaggaactagatgaaatttataaccaggtattacaggagagtttcacttctcgtcaggctgaaaagcgctattt

SEQ ID NO: 464821 - DNA, 75 bp, synthetic construct
  source 1..75: mol_type = other DNA
cgtcaagaatggaagacacaaagaaaatattgaatttcaggtagtaataaatttaagccctatttatttagataa

SEQ ID NO: 464822 - DNA, 75 bp, synthetic construct
  source 1..75: mol_type = other DNA
acctggaatgtaccaaagcgacagtggggaacccgggaggatttgacgtgtgcacagtggatctggggacgggtt

SEQ ID NO: 464823 - DNA, 75 bp, synthetic construct
  source 1..75: mol_type = other DNA
cagcaaaagttcgatttattcaacaaagcccttgccgaagcacaatactggaatcaccgtgcatggttatatcgc

SEQ ID NO: 464824 - DNA, 75 bp, synthetic construct
  source 1..75: mol_type = other DNA
attatggttatagcgaacatcaacaagatctacaaaatatttattttagcattgctatctgctaccaggcactaa

SEQ ID NO: 464825 - DNA, 75 bp, synthetic construct
  source 1..75: mol_type = other DNA
taccgaagaacatgactatatggatctcttactttggtgggatgattaccgagatgtcagcattgaggacattgc

SEQ ID NO: 464826 - DNA, 75 bp, synthetic construct
  source 1..75: mol_type = other DNA
caacgccactggagcgccgactggcgcaaacctgcagcgggatttctgatctgcaggtgtcactgcgtgacttgt

SEQ ID NO: 464827 - DNA, 75 bp, synthetic construct
  source 1..75: mol_type = other DNA
attcactggataaccgcggcactgtccagggtaaccatgtcacgattcgtcagaacagtgtcaccaacagtggca

SEQ ID NO: 464828 - DNA, 75 bp, synthetic construct
  source 1..75: mol_type = other DNA
tcaattcatcttcacttcatccctgaaatgtttgcaataaagagtacattccggcttttcaacagctgttgcagt

SEQ ID NO: 464829 - DNA, 75 bp, synthetic construct
  source 1..75: mol_type = other DNA
cggatgcgcatacctggaatgtaccgaagcgacagtggggtacccgtgaggatgtcgcctgtgcgcagtggattt

SEQ ID NO: 464830 - DNA, 75 bp, synthetic construct
  source 1..75: mol_type = other DNA
cgcctggggcgttcgcccgcgcagcgttgcgtgaatcatatttctgaaccggataccgaaattccgccgggtttc

SEQ ID NO: 464831 - DNA, 75 bp, synthetic construct
  source 1..75: mol_type = other DNA
taagcgatgccaaaccatgtagccgtcacatgatcggcatgtccatcaatctacagaccagcggcccgcattggg

SEQ ID NO: 464832 - DNA, 75 bp, synthetic construct
  source 1..75: mol_type = other DNA
caactgacactgaaaaatcctaccgcgtattatctgaccattgcctatctggggagaaatgaaaaaggcgttctc

SEQ ID NO: 464833 - DNA, 75 bp, synthetic construct
  source 1..75: mol_type = other DNA
gacggtttccgtcaactggcgcgggaatatcccgatctggtacaggaagcgcgtggtaaagggatgttgatggcg

SEQ ID NO: 464834 - DNA, 75 bp, synthetic construct
  source 1..75: mol_type = other DNA
acaggaagcgcgtggtaaagggatgttgatggcgattgagtttgttgataacgaaatcggctataactttgccag

SEQ ID NO: 464835 - DNA, 75 bp, synthetic construct
  source 1..75: mol_type = other DNA
aaagttattatcctggtgatgcatatgtatcattacttggtgtagttaatagtggtcaaacgtggaaatacaaat

SEQ ID NO: 464836 - DNA, 75 bp, synthetic construct
  source 1..75: mol_type = other DNA
taatgcagaggggcagctggtgtatcgcccgtattcagcgtttgctgccggactgcgtgcccgtattgactatga

SEQ ID NO: 464837 - DNA, 75 bp, synthetic construct
  source 1..75: mol_type = other DNA
gctgtcatcggcaaaatccgtcaccacgtatcagccacgtattgtgatcgcaccaggattcagtgaagacgatgc

SEQ ID NO: 464838 - DNA, 75 bp, synthetic construct
  source 1..75: mol_type = other DNA
ccatcgagctgacgacaggcacggtggcagtaaccacaatagagacagccattattggtgtggtgggaaccgcac

SEQ ID NO: 464839 - DNA, 75 bp, synthetic construct
  source 1..75: mol_type = other DNA
agccgggcggtgaaaaagctggagatgaaacttggcgttagcctgcttaatcggaccacgcggcaacttagcctg

SEQ ID NO: 464840 - DNA, 75 bp, synthetic construct
  source 1..75: mol_type = other DNA
cattgtgatttgcggtcattccaactgtggcgcgatgaccgccattgccagctgtcagtgcatggaccatatgcc

SEQ ID NO: 464841 - DNA, 75 bp, synthetic construct
  source 1..75: mol_type = other DNA
ggcgtttctgcttcggtggagtacgccgtcgctgcgcttcgggtatctgacattgtgatttgcggtcattccaac

SEQ ID NO: 464842 - DNA, 75 bp, synthetic construct
  source 1..75: mol_type = other DNA
cctatctttttcaatgatggactaattgaccttaatatagctggtaagaattatgttgcattccccgacctagtt

SEQ ID NO: 464843 - DNA, 75 bp, synthetic construct
  source 1..75: mol_type = other DNA
cagtgcgggcatattaatatgcaggggcgctattcatttacagtgccggaatcggtcagtaagggtgagctgaga

SEQ ID NO: 464844 - DNA, 75 bp, synthetic construct
  source 1..75: mol_type = other DNA
gtaaaaccgtatccgaagtacggcgtgatattgccaagcgtttagcccaatacattgaaagcccacaagtggatg

SEQ ID NO: 464845 - DNA, 75 bp, synthetic construct
  source 1..75: mol_type = other DNA
ccccgcaacaatcggcactgccactggatatcctgcccacccggatggaaacagcactgccccggaacgccagcc

SEQ ID NO: 464846 - DNA, 75 bp, synthetic construct
  source 1..75: mol_type = other DNA
cagaactgcgtgcgctcttgctggcaaccgcgcccgcaaaactggttgagcatacggaaaacgatgcttactggg

SEQ ID NO: 464847 - DNA, 75 bp, synthetic construct
  source 1..75: mol_type = other DNA
agccatcagttgcttgcaccagcagacaatatctccattgcgaaaaatgaactggcggttctgggggcgatttca

SEQ ID NO: 464848 - DNA, 75 bp, synthetic construct
  source 1..75: mol_type = other DNA
gcgaacttgatgatccttttgaatttaagactgatgatgaagtggaggatttcgaggacgaagaaaaggatggtg

SEQ ID NO: 464849 - DNA, 75 bp, synthetic construct
  source 1..75: mol_type = other DNA
tctgcggcgcactggtttggcaccgatgaagtgggacgcgatctgttcagccgcgtactggtcggcagtcagcaa

SEQ ID NO: 464850 - DNA, 75 bp, synthetic construct
  source 1..75: mol_type = other DNA
ccgtggctggcgacgcatgatcccaacgccattgatttaaccgcccgccttttgccgccttttgccgccttctgc

SEQ ID NO: 464851 - DNA, 75 bp, synthetic construct
  source 1..75: mol_type = other DNA
aaatgatgcttactggggagatggcggtaatggtcagggcaagaatcgcctgggctaccttttaatggagctgcg

SEQ ID NO: 464852 - DNA, 75 bp, synthetic construct
  source 1..75: mol_type = other DNA
cagtcgtgaaggcgggctggaggtgatgaccgggctgctggcggcgaatccgaagatcgacggcgtgtttgcgat

SEQ ID NO: 464853 - DNA, 75 bp, synthetic construct
  source 1..75: mol_type = other DNA
tgacgtagcggcagaaggtgccgacgccaccattacttccgataacacccaggcgggcgaaatggcctgtaaata

SEQ ID NO: 464854 - DNA, 75 bp, synthetic construct
  source 1..75: mol_type = other DNA
cgaagatcgacggcgtatttgcgattaacgatcccaccgcgatcggtgccgatctggcagcaaaacaggcgcaac

SEQ ID NO: 464855 - DNA, 75 bp, synthetic construct
  source 1..75: mol_type = other DNA
ttcgggtaacagcctgggaacctataataatttaaggccgcttatcattaacaatgccaatggtactgttacgat

SEQ ID NO: 464856 - DNA, 75 bp, synthetic construct
  source 1..75: mol_type = other DNA
ctcaacaaccatgtcttttattggtggtgcaggatggttcaagctggcaactgtaaccatgccacaggcaagttc

SEQ ID NO: 464857 - DNA, 75 bp, synthetic construct
  source 1..75: mol_type = other DNA
cgctctgtgcaggcgcgctgctggccgcagcaccgttcgcccacgcaaaagatctgaaatcgataggcgtaacgg

SEQ ID NO: 464858 - DNA, 75 bp, synthetic construct
  source 1..75: mol_type = other DNA
ccgggaacgtctctcccgggctgcggactccccggtccgcgaggcgtatgacagtgccggcatccacgccggtta

SEQ ID NO: 464859 - DNA, 75 bp, synthetic construct
  source 1..75: mol_type = other DNA
atgcaatacaaccatgacgaaacgaaagccaaagctgaatgggataaagtgacgaacaaacccaccagcctgacg

SEQ ID NO: 464860 - DNA, 75 bp, synthetic construct
  source 1..75: mol_type = other DNA
tgcacgacatgtcgatgttgttgtcatgaaaagtgataaaattgagagaataagagataatataattgaatctac

SEQ ID NO: 464861 - DNA, 75 bp, synthetic construct
  source 1..75: mol_type = other DNA
cctgggaagttaccgaagatgtagaagttgctaatctattgtctgcatttaacattgacgcgattgatatcgctc

SEQ ID NO: 464862 - DNA, 75 bp, synthetic construct
  source 1..75: mol_type = other DNA
cgcgattttttccacgcgtcgcacacccaatggatattaaaggttactggcagaaaactttaattcaggctcaaa

SEQ ID NO: 464863 - DNA, 75 bp, synthetic construct
  source 1..75: mol_type = other DNA
atatcggaaaggagagccagttttatgttggtggcgcgatgactgcgcatattgatgtggtgattgaggcgggag

SEQ ID NO: 464864 - DNA, 75 bp, synthetic construct
  source 1..75: mol_type = other DNA
taaggccaagaatttacgcagcggtctgagcaccattgacgtaaatacggatatcggaaaggagagccagtttta

SEQ ID NO: 464865 - DNA, 75 bp, synthetic construct
  source 1..75: mol_type = other DNA
agcctgaatgcgggggttaatactggtaacggtcagccatcgcagagtcagataagtgcttattacaaccacagc

SEQ ID NO: 464866 - DNA, 75 bp, synthetic construct
  source 1..75: mol_type = other DNA
acagccgcctctattgttatggtaacattaatgattggtgcagcggtaatttgttctgtcgcaataagtgaactt

SEQ ID NO: 464867 - DNA, 75 bp, synthetic construct
  source 1..75: mol_type = other DNA
ttcaaaatatgaccccacgctactggcaatctgcgctcttctggacgtctttggtgttaaacaaacgactattga

SEQ ID NO: 464868 - DNA, 75 bp, synthetic construct
  source 1..75: mol_type = other DNA
gcaggtacagcggacacacctgcagcactgacatgggatcagaagcaaatagatgcagcgacggcttacatgaaa

SEQ ID NO: 464869 - DNA, 75 bp, synthetic construct
  source 1..75: mol_type = other DNA
catcccgaagcggcctcgacacgggagaagatacattggcagttgttgcaacaaaaattgcagagctgatcactg

SEQ ID NO: 464870 - DNA, 75 bp, synthetic construct
  source 1..75: mol_type = other DNA
tgctgcctgtcccgcatgtcgtaatcgcagtggttatcgccgcagtagctacagttatgatagttacccttctta

SEQ ID NO: 464871 - DNA, 75 bp, synthetic construct
  source 1..75: mol_type = other DNA
aaggacaaaaaataacgcaagggggtttatcgtgtcgatattgttctgaatcagacaattgtagatacgcgcaac

SEQ ID NO: 464872 - DNA, 75 bp, synthetic construct
  source 1..75: mol_type = other DNA
gaccctgtaaaagaggcaatggcctggcggggaattgtgcgcggtggtgcgggaactgaagcggagtggatccgc

SEQ ID NO: 464873 - DNA, 75 bp, synthetic construct
  source 1..75: mol_type = other DNA
agttcagccgtccggtgtaccgcgcctggctggcaatggcgttgcttgacatggatatcccgcctgatatcgaca

SEQ ID NO: 464874 - DNA, 75 bp, synthetic construct
  source 1..75: mol_type = other DNA
agatctcggcattgtggtctgaatggtctgttcgccctgaggtcacggggatgttcacccgcccggaggctgaac

SEQ ID NO: 464875 - DNA, 75 bp, synthetic construct
  source 1..75: mol_type = other DNA
tttatattgctgattttgacggtgctatatggaagggtcgcaatgaacaatggacacaaattacgcatggtggaa

SEQ ID NO: 464876 - DNA, 75 bp, synthetic construct
  source 1..75: mol_type = other DNA
aaaatacgaacgccaatattcaggggttgattgacgagcaacgcaacgggcatcgttccggggagtcgccatctg

SEQ ID NO: 464877 - DNA, 75 bp, synthetic construct
  source 1..75: mol_type = other DNA
tagctcatttttgtacgacaaatgatgcaatgtttccaacttccattatattatctgctaatttagatgcgaatg

SEQ ID NO: 464878 - DNA, 75 bp, synthetic construct
  source 1..75: mol_type = other DNA
ttatcccgctaaactggtcaaaagcatcgatgacattaatgctgaaagagttttcaagcgtcatgcatgataagg

SEQ ID NO: 464879 - DNA, 75 bp, synthetic construct
  source 1..75: mol_type = other DNA
gctcgttttcttttgctctttttattatgataatatatcttcattcacttatataaggtcgaataaaaatattat

SEQ ID NO: 464880 - DNA, 75 bp, synthetic construct
  source 1..75: mol_type = other DNA
acaaggcaaaaaatgccgttcagcgtgatggcgacaccatgacaggaaagctgacgctgccccagacctccggat

SEQ ID NO: 464881 - DNA, 75 bp, synthetic construct
  source 1..75: mol_type = other DNA
ctagacgaatatatagctcctcaccttgaagaaggatccataggaaaaaaacattggatatgtttggtttattca

SEQ ID NO: 464882 - DNA, 75 bp, synthetic construct
  source 1..75: mol_type = other DNA
atggaatttaaagatattgatttaaaaaaaagacaacattatgtaccgcagttttacttatctcattggctcggt

SEQ ID NO: 464883 - DNA, 75 bp, synthetic construct
  source 1..75: mol_type = other DNA
aatgaggttatttactctttaattaaacttattccagaaatgggagatgtagacctagacacggaatcattacct

SEQ ID NO: 464884 - DNA, 75 bp, synthetic construct
  source 1..75: mol_type = other DNA
aagatcattgaacgatgcgaaggtattgagagaaacattactgcattagggaaattctttgaagaaacaattgtg

SEQ ID NO: 464885 - DNA, 75 bp, synthetic construct
  source 1..75: mol_type = other DNA
tcagattatgttatgatttttacgattttgtcgttttagctagtgatccttcagttatatttataaataaaaccg

SEQ ID NO: 464886 - DNA, 75 bp, synthetic construct
  source 1..75: mol_type = other DNA
ataaaggaattttacagtcgccattaaaaaacgccaagcaacttttattgattaatggcaaatatcatgaggcca

SEQ ID NO: 464887 - DNA, 75 bp, synthetic construct
  source 1..75: mol_type = other DNA
aagggattatgcattccaactattaatgaaaatgttttcttcaaatacgaaatttgttgttcatttaaaaggtgg

SEQ ID NO: 464888 - DNA, 75 bp, synthetic construct
  source 1..75: mol_type = other DNA
tttagtagttagaatgctaatgcaatttaatgtgagaagtagatatcttttttttgtaattatactagcgtactg

SEQ ID NO: 464889 - DNA, 75 bp, synthetic construct
  source 1..75: mol_type = other DNA
atcataacctgactcaggagcaggtgatggaagccgcattgaggagcgaacatcatgtcgaaaagcaatccgtct

SEQ ID NO: 464890 - DNA, 75 bp, synthetic construct
  source 1..75: mol_type = other DNA
ggatgggtggtgaccccacatgagattgacagtaaaacctaccccaacccaactgacggcttgcctgctgagttt

SEQ ID NO: 464891 - DNA, 75 bp, synthetic construct
  source 1..75: mol_type = other DNA
gccatcgcagcgtcgcctttgccaaaaccgtggttgcacctatcatggtgacaggtgtgggcgctgctttaatgt

SEQ ID NO: 464892 - DNA, 75 bp, synthetic construct
  source 1..75: mol_type = other DNA
cggattttaaaattaaaatcaatgacgcagtagagaaggcttcgtcaattgtgttatgtgctgtgcaaaaaaatc

SEQ ID NO: 464893 - DNA, 75 bp, synthetic construct
  source 1..75: mol_type = other DNA
agtgcaattaagcagaaagtttttttgggcagtgaaaaaccgttgtttgtaaagcataccgcaatgatgagggag

SEQ ID NO: 464894 - DNA, 75 bp, synthetic construct
  source 1..75: mol_type = other DNA
gctgccagcacctaagcaagcagaagtattcgccacaataaacttcaatcaacaaaaggttgataaaagtcttgc

SEQ ID NO: 464895 - DNA, 75 bp, synthetic construct
  source 1..75: mol_type = other DNA
cggcgtcacttggtgttcccttcggtcgcacgcaagtgacgccgcacagcttcaaactccacatgcacacgcaag

SEQ ID NO: 464896 - DNA, 75 bp, synthetic construct
  source 1..75: mol_type = other DNA
accatcatagctgttatggaagttccaaaagagcaagtttcaagctatggagtgattgcaggaaatttcgtagaa

SEQ ID NO: 464897 - DNA, 75 bp, synthetic construct
  source 1..75: mol_type = other DNA
tggtggcagttctgttgacaccactattcaaggcggaattcaggaagttggtgaggggggaagtgcaagtgctac

SEQ ID NO: 464898 - DNA, 75 bp, synthetic construct
  source 1..75: mol_type = other DNA
accgggaccatcattcgtggcggggagcagcgagtttccagcggcggcagtgccgttgacacaaccattgagggg

SEQ ID NO: 464899 - DNA, 75 bp, synthetic construct
  source 1..75: mol_type = other DNA
atggttaaaagcaaaactggcattacgagccggagatattccactggcaacgcgtcactatgctcgcgcagcccc

SEQ ID NO: 464900 - DNA, 75 bp, synthetic construct
  source 1..75: mol_type = other DNA
atggattttgacctcgctgataatgacttttttcggcatccccatactggcgcaatttttggcggcggttatttg

SEQ ID NO: 464901 - DNA, 75 bp, synthetic construct
  source 1..75: mol_type = other DNA
gttctcaatggcggaaatgtctccgggactcacattagcggaggtgagcagaacatttccagcggtggcagtgcc

SEQ ID NO: 464902 - DNA, 75 bp, synthetic construct
  source 1..75: mol_type = other DNA
agggggggctgcagaccattctcaatggcggaaatgtatcagggacactcattagcggaggagagcagcgagttt

SEQ ID NO: 464903 - DNA, 75 bp, synthetic construct
  source 1..75: mol_type = other DNA
ttatattaatttcagccttatgcatttttaatggattattgactcctggtgcatatgccgcaacagcgaatggat

SEQ ID NO: 464904 - DNA, 75 bp, synthetic construct
  source 1..75: mol_type = other DNA
cagtggaaattttggtggggccacatccggaacagtatgtctgggttttaaaattgttaaaaacacgcaaatcaa

SEQ ID NO: 464905 - DNA, 75 bp, synthetic construct
  source 1..75: mol_type = other DNA
ttactttcagataataccctcgagaaagacgaaaattctccggacaatggctttgaggtcggggaatataacaca

SEQ ID NO: 464906 - DNA, 75 bp, synthetic construct
  source 1..75: mol_type = other DNA
ggaaagcccttattatcatggagataaagttattatcccatcctgccgtattgccagtgagcaggcgattttggc

SEQ ID NO: 464907 - DNA, 75 bp, synthetic construct
  source 1..75: mol_type = other DNA
aaaaacggtaaagcttttgactgggcggcacattttggtcgtgattgcccagaaccggtattcaggaaggaactg

SEQ ID NO: 464908 - DNA, 75 bp, synthetic construct
  source 1..75: mol_type = other DNA
attgaattactcttgaatattgaagatggaaatgaaatcaattccgacaagaccaatgttgatgatctgcctcag

SEQ ID NO: 464909 - DNA, 75 bp, synthetic construct
  source 1..75: mol_type = other DNA
gtctccgggactcacattagcggaggtgagcagaacatttccagcggtggtagtgctgtagacaccaccattgag

SEQ ID NO: 464910 - DNA, 75 bp, synthetic construct
  source 1..75: mol_type = other DNA
gaaaaatggtgattatagggttacggcctctgtgagctctggttcccaggctaatcaacaggtgaattttatcgg

SEQ ID NO: 464911 - DNA, 75 bp, synthetic construct
  source 1..75: mol_type = other DNA
ttgcgtgccggtcactatgccgcagccggtttacgacgcgctggtcagtttctcttttaacgtaggcaccggcgc

SEQ ID NO: 464912 - DNA, 75 bp, synthetic construct
  source 1..75: mol_type = other DNA
acaggaaattgcactgaccacccggccaatcacaacaattgtcagtgactgcggcttcagttcttaccgacgttt

SEQ ID NO: 464913 - DNA, 75 bp, synthetic construct
  source 1..75: mol_type = other DNA
aagccgtattggcaccattgtttcgacctgggcactgccgatctttatcaataattacggtatcagtaacacgat

SEQ ID NO: 464914 - DNA, 75 bp, synthetic construct
  source 1..75: mol_type = other DNA
ctgattcctttgaacgtgccatttcaccctttgaagaaatggctgcgtatgaagcgttatgggccgaaaaagggg

SEQ ID NO: 464915 - DNA, 75 bp, synthetic construct
  source 1..75: mol_type = other DNA
aaagatccgtcgaatcatcctgtggcgggaataacggtgaacttcaccatgccacaggacgttgcggcaaacttt

SEQ ID NO: 464916 - DNA, 75 bp, synthetic construct
  source 1..75: mol_type = other DNA
tgtcgctgtcacggaaaccgcaagtgacctggtacggctgggacggcgaccggctgaccacgatacagaacgaca

SEQ ID NO: 464917 - DNA, 75 bp, synthetic construct
  source 1..75: mol_type = other DNA
ccggtgctggtgcagatgctcgaccggctggaaagtgaaatcctggctgcccgggtgagtgaggaaagccgccgc

SEQ ID NO: 464918 - DNA, 75 bp, synthetic construct
  source 1..75: mol_type = other DNA
tttccagcggtggcagtgccgtggacaccaccattgaggggggactgcagactgttttcggtggcggaagtgtct

SEQ ID NO: 464919 - DNA, 75 bp, synthetic construct
  source 1..75: mol_type = other DNA
gataactatgggttgaatctgacttatgccactttggcatcaatgattaaatacccaagagcttcaaattctgat

SEQ ID NO: 464920 - DNA, 75 bp, synthetic construct
  source 1..75: mol_type = other DNA
gttcaagggggttgataccaatatctgtttgcaacgtgatgttccggctctactcgctaccattggcttagtaca

SEQ ID NO: 464921 - DNA, 75 bp, synthetic construct
  source 1..75: mol_type = other DNA
tctcctgcagagcttaatgacatgagtatgcagatgttccgagtttttgctattgcggaattagttgatgctgtt

SEQ ID NO: 464922 - DNA, 75 bp, synthetic construct
  source 1..75: mol_type = other DNA
agaatctatattttaccagagaggaatatacgtatgattacgacctttcaaatgcaatatagacttaataacttc

SEQ ID NO: 464923 - DNA, 75 bp, synthetic construct
  source 1..75: mol_type = other DNA
ccttgcacgtttgttcagtcgtttcgccatgacaaagcaactacgtaaagccaaaaaggctgacgtggtggcaat

SEQ ID NO: 464924 - DNA, 75 bp, synthetic construct
  source 1..75: mol_type = other DNA
gggatttggtggattaactagcggtgcggtagttggtggaattacgcttgtttcggaaggcattgaatcgctaat

SEQ ID NO: 464925 - DNA, 75 bp, synthetic construct
  source 1..75: mol_type = other DNA
aggaattaaagcgcacgcagttttgctgaaccctgacaaactgaatcaattggtcaatgccggcatattactgaa

SEQ ID NO: 464926 - DNA, 75 bp, synthetic construct
  source 1..75: mol_type = other DNA
aaagaagtatcccatatgaatggcgggcagcagtttatttgggggtttgataaggttattcaagaaggcttaagt

SEQ ID NO: 464927 - DNA, 75 bp, synthetic construct
  source 1..75: mol_type = other DNA
actgcctgtcgctgtgggggaacgccagtaatacttcttctaatgatgagcgttcttcagaaaaatatgcggcgg

SEQ ID NO: 464928 - DNA, 75 bp, synthetic construct
  source 1..75: mol_type = other DNA
gcatgacagttacgcaattagtgaaaagagtcacggcagagaagaaacccgtcttcatattgtttgcgatgtccc

SEQ ID NO: 464929 - DNA, 75 bp, synthetic construct
  source 1..75: mol_type = other DNA
cctcaatattagcgatggcggtaagttcgtatcgcaaaatattacttttttgggcgataaagcaagcggtatcgg

SEQ ID NO: 464930 - DNA, 75 bp, synthetic construct
  source 1..75: mol_type = other DNA
atgctggacaggctggaggaagaaatccgggcaggccgcgtgagcagtgaaagccgggcgtggcttgcgcagtgc

SEQ ID NO: 464931 - DNA, 75 bp, synthetic construct
  source 1..75: mol_type = other DNA
acgacattgccgttacccaggcctgtgcgtttttattggaaagtctgggatatgaagtgtcttgctgggagcaag

SEQ ID NO: 464932 - DNA, 75 bp, synthetic construct
  source 1..75: mol_type = other DNA
atgtctcagccagcgaaagttttgctgctgtatgcccatccggaatctcaggactcggtggcaaaccgggtactg

SEQ ID NO: 464933 - DNA, 75 bp, synthetic construct
  source 1..75: mol_type = other DNA
tgaatttcaaattggtaatcaaggaactggggaagcgactattcgcgagggtgggctaattacggctgaaaatac

SEQ ID NO: 464934 - DNA, 75 bp, synthetic construct
  source 1..75: mol_type = other DNA
attttatgaaattccaggtcttccagtggttgattggcgcaacggatggccatgcaaaaaacttctccgtattta

SEQ ID NO: 464935 - DNA, 75 bp, synthetic construct
  source 1..75: mol_type = other DNA
ccatatcttcagagacaccaaataaaatagtctacaagggggaatcagtagatttaactaaggagccaaattcgg

SEQ ID NO: 464936 - DNA, 75 bp, synthetic construct
  source 1..75: mol_type = other DNA
aacccaaagccaaacagtgaatgcatgtacaacacagaagccattaatcactggatcgaacagcaagcatcaaaa

SEQ ID NO: 464937 - DNA, 75 bp, synthetic construct
  source 1..75: mol_type = other DNA
catctatttttattcgcggtacaaatgccagtcatgtgttggtgttaattgatggcgtacgcctgaatctggcgg

SEQ ID NO: 464938 - DNA, 75 bp, synthetic construct
  source 1..75: mol_type = other DNA
ggccacgttgcagtggggcggaccgtggggaacgacatggtatggtggtggacaatatgctgaatattaccgtgc

SEQ ID NO: 464939 - DNA, 75 bp, synthetic construct
  source 1..75: mol_type = other DNA
gccagctaaacgcgtttacggtggcgaagcggatgcagccgataaggcggaagcagccaataagaaggagaaggc

SEQ ID NO: 464940 - DNA, 75 bp, synthetic construct
  source 1..75: mol_type = other DNA
tcagcaattatagttaacattcttgatgtgatatctattaagaaaaaagctggtttttggatttttaaaactgta

SEQ ID NO: 464941 - DNA, 75 bp, synthetic construct
  source 1..75: mol_type = other DNA
ggtatgccatgggataacagcccatgcttttacaacctagaagaaattgatcgctggattgaacgtcaggcatca

SEQ ID NO: 464942 - DNA, 75 bp, synthetic construct
  source 1..75: mol_type = other DNA
ccagccattacccgccattccagggacggtaccaaacctcacccatttgcctgacggctgcgcttttcgcgatcg

SEQ ID NO: 464943 - DNA, 75 bp, synthetic construct
  source 1..75: mol_type = other DNA
tatatggcacaacagcaggtacgtattggaagaatattgcctgaatacacatcggatcttagcgttgctgatcgg

SEQ ID NO: 464944 - DNA, 75 bp, synthetic construct
  source 1..75: mol_type = other DNA
aactgtccgattcagacatcatattgtgtcgcggcacaaccggtattcaagctgaaaatatcgttgaatataaaa

SEQ ID NO: 464945 - DNA, 75 bp, synthetic construct
  source 1..75: mol_type = other DNA
acacaatattccaaagacattgcatggaaagctcaacaacgattgtgttcttgttaccgaagcctgacagcaaaa

SEQ ID NO: 464946 - DNA, 75 bp, synthetic construct
  source 1..75: mol_type = other DNA
ggaagaagccatgctgtacggttccatcgtgaccttccttggttggacactgtatggtctggtatcaccacgctt

SEQ ID NO: 464947 - DNA, 75 bp, synthetic construct
  source 1..75: mol_type = other DNA
tcggggacatatttcactgctgggagaagatgctcttaacgctcgggaaaagcagcttcgtcagtggcgcggcgc

SEQ ID NO: 464948 - DNA, 75 bp, synthetic construct
  source 1..75: mol_type = other DNA
tttaaattcctatcgatgaacggggcgcaaaaaggctataagagtcagacctatcctggcggtactcacacccca

SEQ ID NO: 464949 - DNA, 75 bp, synthetic construct
  source 1..75: mol_type = other DNA
cgcaaactggtgaataaaaacttccgccagtcgctgttcgccgcgcaagatgcgcaaagcatcctgacgctgctg

SEQ ID NO: 464950 - DNA, 75 bp, synthetic construct
  source 1..75: mol_type = other DNA
cgcaggaaattgaagcgttactcaccgcctttacgccggaagaagacgttcgcccactgctggcgctggagaata

SEQ ID NO: 464951 - DNA, 75 bp, synthetic construct
  source 1..75: mol_type = other DNA
tggctttcgctggctacccacgcatacccaacggctgtatctgtgtcgcctaccacagtgcgagcactggctgcg

SEQ ID NO: 464952 - DNA, 75 bp, synthetic construct
  source 1..75: mol_type = other DNA
atccgcccgctacaacgccgtcggacgctttggccgtatatcagaagtggccagccgcatcgccgggcagctctc

SEQ ID NO: 464953 - DNA, 75 bp, synthetic construct
  source 1..75: mol_type = other DNA
acagaatgcaacgacagcacagaaagggatagtacaactcagtagtgcgacaaacagcacttccgagtcactggc

SEQ ID NO: 464954 - DNA, 75 bp, synthetic construct
  source 1..75: mol_type = other DNA
cgactgtatctcctgcggtgtggataaattgatcgacgccaatggtggcccggtctggacggaagaaggctttgc

SEQ ID NO: 464955 - DNA, 75 bp, synthetic construct
  source 1..75: mol_type = other DNA
aaagctacgaacagaagcgtggcaactacaaagtgaaggcgtggccggcgctggtggatgagcgcgacagtgtgg

SEQ ID NO: 464956 - DNA, 75 bp, synthetic construct
  source 1..75: mol_type = other DNA
cgacattcacaaagaccctgtggcactgaacaaatacattactgaatacctgactacaaagggcgtgtttgaaga

SEQ ID NO: 464957 - DNA, 75 bp, synthetic construct
  source 1..75: mol_type = other DNA
ttaccaactactcgtttacaggttctgataaccgttaccgccagggcaatcgtagccaacgacagtacctgaagt

SEQ ID NO: 464958 - DNA, 75 bp, synthetic construct
  source 1..75: mol_type = other DNA
tggtgattgctctgattaaatcgttgccgaaaccggtacgccgtaattttgtacccgcgccaaactatgccgaag

SEQ ID NO: 464959 - DNA, 75 bp, synthetic construct
  source 1..75: mol_type = other DNA
ttgcgaagcaggtcgagcaaatccttacggcagtgttcaatatcaacaaacgtctgaaagggcgggtggatatga

SEQ ID NO: 464960 - DNA, 75 bp, synthetic construct
  source 1..75: mol_type = other DNA
cttaaactctttgttgcagaatctgttgatggctatgagggggcgatacatgaaatgagtcttggaggagccaac

SEQ ID NO: 464961 - DNA, 75 bp, synthetic construct
  source 1..75: mol_type = other DNA
gccagtaaagccactgctgaaaaaatgcaatttatgaacagtcgcttacccgtcgccactcaggttttaagtaaa

SEQ ID NO: 464962 - DNA, 75 bp, synthetic construct
  source 1..75: mol_type = other DNA
atggggttgaaagggggatggaatttatatcagtatcctttaaatccactacaacaaattgaccctatgggatta

SEQ ID NO: 464963 - DNA, 75 bp, synthetic construct
  source 1..75: mol_type = other DNA
atgactaatccaatcggtatgaataatctttctcaaagtttaaatatagcgacagcaacgggtgatgaagtcgtt

SEQ ID NO: 464964 - DNA, 75 bp, synthetic construct
  source 1..75: mol_type = other DNA
cctaaccgaggagaaagaaaaggatcatatccattcaatagcccttgccctaatggtactgagaaagtatcagct

SEQ ID NO: 464965 - DNA, 75 bp, synthetic construct
  source 1..75: mol_type = other DNA
cagcttatccgcctgccggggcagcagtatgatgaggagtccggcctgtattacaaccgccaccgctattatgac

SEQ ID NO: 464966 - DNA, 75 bp, synthetic construct
  source 1..75: mol_type = other DNA
tggtttaccatgacagtaatttgcgtcaggttgaaatgcttgactggaaatattttattggcgggcatggtaata

SEQ ID NO: 464967 - DNA, 75 bp, synthetic construct
  source 1..75: mol_type = other DNA
cgcaattacaccacttttatggaagcggaactggcgatactccaggacatgggataccagatcgatcgccgcaat

SEQ ID NO: 464968 - DNA, 75 bp, synthetic construct
  source 1..75: mol_type = other DNA
gttatccgtcggtccactggcagcactgaactatactgtgctggctcgtaatggtttcactgaaaatggtaaagc

SEQ ID NO: 464969 - DNA, 75 bp, synthetic construct
  source 1..75: mol_type = other DNA
ataacaacgatctgctgcacaaaatgattacccgtacggacagttatctgaattatgccaatacaaaatcaacaa

SEQ ID NO: 464970 - DNA, 75 bp, synthetic construct
  source 1..75: mol_type = other DNA
gcttttttataccacgactataagttcacttgattctgtgaatttgttattgacgattgggataataatatattc

SEQ ID NO: 464971 - DNA, 75 bp, synthetic construct
  source 1..75: mol_type = other DNA
aaggtattgaatccaaattaaatgacttgcttgttaagacaatcaaccagcctgattccattttgtttgagttgg

SEQ ID NO: 464972 - DNA, 75 bp, synthetic construct
  source 1..75: mol_type = other DNA
gcgcatggtcttgggattacaaatcaaacggaagaaagggggactggcgatgttgatgataattccatcccagtc

SEQ ID NO: 464973 - DNA, 75 bp, synthetic construct
  source 1..75: mol_type = other DNA
cattagtaaaagaccgatatgtaatattgagcccaataaaagtgaatgcgtctaattatggagctcctacaacta

SEQ ID NO: 464974 - DNA, 75 bp, synthetic construct
  source 1..75: mol_type = other DNA
cgtcttggttgttgaatgaatataaaaaaccagtcataaccaaagaagaaatctctttgcagatttacctttttt

SEQ ID NO: 464975 - DNA, 75 bp, synthetic construct
  source 1..75: mol_type = other DNA
aaagtaacgataagcatcatgcttacccccatttaattggcggtttctatgaggtcttttttgttaaaggtaacg

SEQ ID NO: 464976 - DNA, 75 bp, synthetic construct
  source 1..75: mol_type = other DNA
cccgcgtacatatggaaataatgtctcaagcgggaaaataatgagccgagtcaaaatcgtggtaatgtacaacta

SEQ ID NO: 464977 - DNA, 75 bp, synthetic construct
  source 1..75: mol_type = other DNA
acaacagttatgactttatcaacgatatatcaggtacgacggggaaatatggggccggggtgaatgctcagttga

SEQ ID NO: 464978 - DNA, 75 bp, synthetic construct
  source 1..75: mol_type = other DNA
ccgggtggagtctggggacgttatatggggtcagataaacgcatcagtggtgcagttggtgctggctatacgttg

SEQ ID NO: 464979 - DNA, 75 bp, synthetic construct
  source 1..75: mol_type = other DNA
aacgaaaaaatgggatgaactgacaaatgatgatttttactatgacatcaaacaaaaacaagttgatatcaagct

SEQ ID NO: 464980 - DNA, 75 bp, synthetic construct
  source 1..75: mol_type = other DNA
ccgctgaaagaattaaataatccagagcatgacagttacgcaatttgtgaaaagagtcacggcagagaagaaatc

SEQ ID NO: 464981 - DNA, 75 bp, synthetic construct
  source 1..75: mol_type = other DNA
ccggcctgtattacaaccgccaccgctattatgacccgctgcaggggcggtatatcactcaggatcagattgggc

SEQ ID NO: 464982 - DNA, 75 bp, synthetic construct
  source 1..75: mol_type = other DNA
gcctgctgtctgaccgcgattacacctggaacgacaacggcgaactcatccgcatcagcagcccgcgccagaccc

SEQ ID NO: 464983 - DNA, 75 bp, synthetic construct
  source 1..75: mol_type = other DNA
ctccgcatcttttcgatacgtcttaaggaactggatgagctgtatgagaagtacatgaaggggcggattcgctcg

SEQ ID NO: 464984 - DNA, 75 bp, synthetic construct
  source 1..75: mol_type = other DNA
cagaacatgttgcggatcgtatctctacggttgaaagaactcgatgaactgtacgccaagtacatgggacggcgg

SEQ ID NO: 464985 - DNA, 75 bp, synthetic construct
  source 1..75: mol_type = other DNA
aagacggtctcaaaccggacgaacagcgtttgctcgagctctaccgccagttaccggaagaagagcagcagaaca

SEQ ID NO: 464986 - DNA, 75 bp, synthetic construct
  source 1..75: mol_type = other DNA
tgtcagcgcctggattggcggtatctggtatcgcaaagatgtgctggcaaaagcggggcctgaggagccgaaaaa

SEQ ID NO: 464987 - DNA, 75 bp, synthetic construct
  source 1..75: mol_type = other DNA
atcaggcatgagctcagcgctgagttggatgatgtgtcactggtgaatgcccttagggagagactgaagctggat

SEQ ID NO: 464988 - DNA, 75 bp, synthetic construct
  source 1..75: mol_type = other DNA
acagcctgacttatctttccgacgtgacggttaatggcaatctgaccaatacgtccggtgctgtcagtatgcaaa

SEQ ID NO: 464989 - DNA, 75 bp, synthetic construct
  source 1..75: mol_type = other DNA
ttgtggtaattgttgatgagctggcacctgaattaattaaacgtaatgctattggatacaaaagcgcttcgcagt

SEQ ID NO: 464990 - DNA, 75 bp, synthetic construct
  source 1..75: mol_type = other DNA
tacctttatacgattactgtttaaaagttaaaaaagaatctttgaataccatggaacgaccttgtagtattcgat

SEQ ID NO: 464991 - DNA, 75 bp, synthetic construct
  source 1..75: mol_type = other DNA
atgaagtgtttgacagtgtaatgaataaactgaggggggattttatttttcttatcctgattattattttgtttg

SEQ ID NO: 464992 - DNA, 75 bp, synthetic construct
  source 1..75: mol_type = other DNA
cggctttcgctggctgcccacgcatacccagcggctgtatctgtgtcgcctgccacagtgtgagcactggctacg

SEQ ID NO: 464993 - DNA, 75 bp, synthetic construct
  source 1..75: mol_type = other DNA
atggatatagtcattcacgctataaaaaaatatagcttggaacgacaggttagagttgttaatcagtgtaatcaa

SEQ ID NO: 464994 - DNA, 75 bp, synthetic construct
  source 1..75: mol_type = other DNA
gtttgcccgggcctcgagtgttgtgctggttaatgaagccgcagttcctgcgttgctggcggacggtctggcaga

SEQ ID NO: 464995 - DNA, 75 bp, synthetic construct
  source 1..75: mol_type = other DNA
gggcacatcgttaaaaaattgggtgatgatcgttatgagtttcgcgacagtagcggaaccattgtcacggatatc

SEQ ID NO: 464996 - DNA, 75 bp, synthetic construct
  source 1..75: mol_type = other DNA
tcgtcgaaaacggctacgtcgaaacaattgatgtaagcactgttaaccctcaagttgtatttgatgcttacttta

SEQ ID NO: 464997 - DNA, 75 bp, synthetic construct
  source 1..75: mol_type = other DNA
caacacgctcttggtcgtcttcaagaactaattgaggatgagaaaatccacttgctcattactgatgtgacaagg

SEQ ID NO: 464998 - DNA, 75 bp, synthetic construct
  source 1..75: mol_type = other DNA
tgggataacaaaaaattcggagttagagcatgcaatcgatatcttgtcgagagtaaatgatcatgtcgagataat

SEQ ID NO: 464999 - DNA, 75 bp, synthetic construct
  source 1..75: mol_type = other DNA
tttagctgatatgtactttgcagcaaccggtaacaggccggagtggagcaactggttcggcttttcagatgctgt

SEQ ID NO: 465000 - DNA, 75 bp, synthetic construct
  source 1..75: mol_type = other DNA
gatgccgtagttgacagaattgctgatttagaagctaaacagccatcgccagtagtacctgaaggactgattaaa

SEQ ID NO: 465001 - DNA, 75 bp, synthetic construct
  source 1..75: mol_type = other DNA
taaaaaagaaactatatgttgggatagagaacttattatgtagaattacagataaaatcatatgcgtaagtaaat

SEQ ID NO: 465002 - DNA, 75 bp, synthetic construct
  source 1..75: mol_type = other DNA
ttagccactaccgtagcggcagtatgcaaagcggtctgcgaatgcacgatctctgcgccatcgcctggctggtgc

SEQ ID NO: 465003 - DNA, 75 bp, synthetic construct
  source 1..75: mol_type = other DNA
cgagcagcgtgaatattatgaaggtgttatctcggatgggggtaagcgcattgctgaactggagaaaagcgaaga

SEQ ID NO: 465004 - DNA, 75 bp, synthetic construct
  source 1..75: mol_type = other DNA
ctcaacgagcagcgtgagtattacgagggagtaatcgcggatggaagtaagcgcatagccgaacaggagaaaagc

SEQ ID NO: 465005 - DNA, 75 bp, synthetic construct
  source 1..75: mol_type = other DNA
ccaaaaaagaggatgtgctggatattgccggagcatggggtatcagtggagaggaagagctggacgccatgcagg

SEQ ID NO: 465006 - DNA, 75 bp, synthetic construct
  source 1..75: mol_type = other DNA
cgccacgagtgtagggatggtgcttatcggtaacccgaaaggactgttctcagaatcgcgtagtgacacgaataa

SEQ ID NO: 465007 - DNA, 75 bp, synthetic construct
  source 1..75: mol_type = other DNA
acaagttcaggcatggatgtggatttgccttagcagaaaaaggtattgatacgagactgatacaagattaccttg

SEQ ID NO: 465008 - DNA, 75 bp, synthetic construct
  source 1..75: mol_type = other DNA
tattgcatgctgccgaaacggtaaaaggtggtgtgggaaccgtcattaatagtttagtatcatatcaacgagaaa

SEQ ID NO: 465009 - DNA, 75 bp, synthetic construct
  source 1..75: mol_type = other DNA
catggtgccgaacctgtaagccaaacttacaagttgaaccagctatcgggcaactctccggtaactccggatggt

SEQ ID NO: 465010 - DNA, 75 bp, synthetic construct
  source 1..75: mol_type = other DNA
caggcatggatcgctgccagcggtgaaggtacgacgctgacaaaaaaacacattaatacggcctttaaagaggtt

SEQ ID NO: 465011 - DNA, 75 bp, synthetic construct
  source 1..75: mol_type = other DNA
ttaatctgggttgaatgccctcctgacactcagcgtggctatatatacaatagcggcgaatttacgcctccaccg

SEQ ID NO: 465012 - DNA, 75 bp, synthetic construct
  source 1..75: mol_type = other DNA
ttgagcatcgggataattattctgaccatcggcgttatggccccaatagccagcggaacgctgcccccgtccacg

SEQ ID NO: 465013 - DNA, 75 bp, synthetic construct
  source 1..75: mol_type = other DNA
atgccctacaccacagcgaaactccagctaccgatgcttttctggctgaaattcgtgcggaagcacgcaacgagg

SEQ ID NO: 465014 - DNA, 75 bp, synthetic construct
  source 1..75: mol_type = other DNA
tggttattttggaggccatgaaggcaacaggaaatatgccagccaccgatgcttttctggctgaagtacgggcgc

SEQ ID NO: 465015 - DNA, 75 bp, synthetic construct
  source 1..75: mol_type = other DNA
atttatgtgcaggataccggaagaagttcggcagataacattggtggtgtgtattacagaccgcttcagaaactg

SEQ ID NO: 465016 - DNA, 75 bp, synthetic construct
  source 1..75: mol_type = other DNA
atgacgccggaaaccgcatgtttgtctgctccgataccgattattgccgccaacagagcgaggcaaaaaaccaat

SEQ ID NO: 465017 - DNA, 75 bp, synthetic construct
  source 1..75: mol_type = other DNA
ggtgggcacgattttaggcgtggcgctgtttcacggtgtgccggtcggtccgcttattgccgcaggtctggtctc

SEQ ID NO: 465018 - DNA, 75 bp, synthetic construct
  source 1..75: mol_type = other DNA
cccgatgagtcgtgttcttgccgtacaggatgaacctcagtttattatggatgcgttttttgacttgaaatgtgt

SEQ ID NO: 465019 - DNA, 75 bp, synthetic construct
  source 1..75: mol_type = other DNA
ttcgttgagcattgttttgttattggtcttgttagtgttcgtgctgacctgacttatcagcaaggcattccccgc

SEQ ID NO: 465020 - DNA, 75 bp, synthetic construct
  source 1..75: mol_type = other DNA
atcgaggagaatccaccgatgaagcgcgtcctcgccgtacaggacgagcctcagttcatcatggatgcgttcttc

SEQ ID NO: 465021 - DNA, 75 bp, synthetic construct
  source 1..75: mol_type = other DNA
tgcagggcgtgtctgagtcatttatcaaagctctgcaacatactcagaccaagcatgcggacatcataaaaaaac

SEQ ID NO: 465022 - DNA, 75 bp, synthetic construct
  source 1..75: mol_type = other DNA
cgcctgatgcccgtgtacagcgtcccgagtatctcggctctggttcattcgacataaatattaatcctgttcttc

SEQ ID NO: 465023 - DNA, 75 bp, synthetic construct
  source 1..75: mol_type = other DNA
ccgttccgcgcttataacctgatttataacgagtggtatcgtgatgaaaacctgattaattccgccccgcttccg

SEQ ID NO: 465024 - DNA, 75 bp, synthetic construct
  source 1..75: mol_type = other DNA
atgccagacggttttactccagtagactttgatatcacttatgactgtggtgatacttcaaagattaaaaactcg

SEQ ID NO: 465025 - DNA, 75 bp, synthetic construct
  source 1..75: mol_type = other DNA
tgggcaggtgttccacggcaaactgactagtattttacctgtcgtgccaggtggttcgtatcaggcgcagggggt

SEQ ID NO: 465026 - DNA, 75 bp, synthetic construct
  source 1..75: mol_type = other DNA
acagtcttctggcgctggctgcatcaaaaattgccccattacaggatgctgttgatctggatattgcaacggaag

SEQ ID NO: 465027 - DNA, 75 bp, synthetic construct
  source 1..75: mol_type = other DNA
aaggctggttttgtcgctgtatttaattatgagtcagaaaaatggtcattggttgaggaccatcgagggaaaatt

SEQ ID NO: 465028 - DNA, 75 bp, synthetic construct
  source 1..75: mol_type = other DNA
gaaaaccatgaccacagacccggttacaggtgaggtgaataaggctgcaaatgtggctgctcatgccgtggtgaa

SEQ ID NO: 465029 - DNA, 75 bp, synthetic construct
  source 1..75: mol_type = other DNA
ggcgtggaattaatctacctagtttccccagcctatcgaatgagcaagttatttatatttgtgaatctattaacg

SEQ ID NO: 465030 - DNA, 75 bp, synthetic construct
  source 1..75: mol_type = other DNA
gatctttgggtgcaatcacccgatcctgaatgcggcgacctgttagtgaccgttccctccagaggaaaactgttt

SEQ ID NO: 465031 - DNA, 75 bp, synthetic construct
  source 1..75: mol_type = other DNA
tgcgcaagcatcgcatccgacattattgcggcactggagtttggcaacagcgccggatgcggcgcaagcgcctta

SEQ ID NO: 465032 - DNA, 75 bp, synthetic construct
  source 1..75: mol_type = other DNA
tggagtttggcaacagcgccggatgcggcgcgagcgccttatccggcctacgttttaatgccagcaaaaatggtg

SEQ ID NO: 465033 - DNA, 75 bp, synthetic construct
  source 1..75: mol_type = other DNA
actcccccgataacggtgaacgggtgcacagtttactgtgcgaccgtgaggcgttggccaggccgtcaggcatgg

SEQ ID NO: 465034 - DNA, 75 bp, synthetic construct
  source 1..75: mol_type = other DNA
aggccaccagatgccaggaatgcagcgagtttataatcattcccgttatctggatgctaaacgcaatgtgctgga

SEQ ID NO: 465035 - DNA, 75 bp, synthetic construct
  source 1..75: mol_type = other DNA
ccgggctgtgctataaccggttccggtactacgagccggaaaccgggatgtacctggtgagtgatccactggggt

SEQ ID NO: 465036 - DNA, 75 bp, synthetic construct
  source 1..75: mol_type = other DNA
ttgcagcgcacagggtgagcagtgggaataccgccacgacgccagcggcagacggacggaaaaacgctgcgaccg

SEQ ID NO: 465037 - DNA, 75 bp, synthetic construct
  source 1..75: mol_type = other DNA
ctggtgggagactcgggggcttcagcggtagccggcgcacagtcaggcaagacaacggttgagaataatgcgctc

SEQ ID NO: 465038 - DNA, 75 bp, synthetic construct
  source 1..75: mol_type = other DNA
tatgatctaaattgcgatattgaacctttaagcggggtaaccgctatgtttgttgccaactggaatttacttcca

SEQ ID NO: 465039 - DNA, 75 bp, synthetic construct
  source 1..75: mol_type = other DNA
cgcggtattaccagaccgcagccacgattaccgcaggtgttgccaatgccacagcaaccttcacgctgacctata

SEQ ID NO: 465040 - DNA, 75 bp, synthetic construct
  source 1..75: mol_type = other DNA
aacaaggtaacaacaccgttgaatttgccatcaactcatctgttaacggtcgggctagagttgataaggatggga

SEQ ID NO: 465041 - DNA, 75 bp, synthetic construct
  source 1..75: mol_type = other DNA
tcatatgaaaacaaaatagatgagatttcatctttgtcagagtcaaaggaacaccccatagatattcaagaaaaa

SEQ ID NO: 465042 - DNA, 75 bp, synthetic construct
  source 1..75: mol_type = other DNA
gaaattgatgcgccgccggaagaaattcgccaaatgcgcaatcaccggatcctccgctttatcgacgatatggct

SEQ ID NO: 465043 - DNA, 75 bp, synthetic construct
  source 1..75: mol_type = other DNA
aagttggcatgctggaacacgctacgaaatacccccatcaattatcaggcggacagcaacagcgcgtggccatcg

SEQ ID NO: 465044 - DNA, 75 bp, synthetic construct
  source 1..75: mol_type = other DNA
atttgcgcgtctttatgctggtggctcgtcgggctggttttgccgccgtggcggaagaactgggcgtttcaccgg

SEQ ID NO: 465045 - DNA, 75 bp, synthetic construct
  source 1..75: mol_type = other DNA
ctgaaaacatggtcgatcagccatttctcgacaaatattgtgttggttacgatgaaaaaacgctgcccgccaacg

SEQ ID NO: 465046 - DNA, 75 bp, synthetic construct
  source 1..75: mol_type = other DNA
gcaaaagttcgatttattcaacaaagccgatgaacgataataccctgtcgaataccgattctttaaacgatatcg

SEQ ID NO: 465047 - DNA, 75 bp, synthetic construct
  source 1..75: mol_type = other DNA
ttacgacaaaatactcaaagctgaacaggcccttgaccggaatattgcccgtatcgagtcaattgaacgctcatt

SEQ ID NO: 465048 - DNA, 75 bp, synthetic construct
  source 1..75: mol_type = other DNA
atttgaatgttaattactcaggaattggtcgctcacaaataagagattatcttaaaaaagaatgtggtattgttt

SEQ ID NO: 465049 - DNA, 75 bp, synthetic construct
  source 1..75: mol_type = other DNA
accggtgttccggcagacaaaatcatcaaactggctcgtgaaatcggcagtaccaaaccggcgtttatcagccag

SEQ ID NO: 465050 - DNA, 75 bp, synthetic construct
  source 1..75: mol_type = other DNA
ctgaaaatagtctttttctaattatcgaatggactcaattatccccaaaaaatacagtacgctttttatttctgg

SEQ ID NO: 465051 - DNA, 75 bp, synthetic construct
  source 1..75: mol_type = other DNA
tggatggtgaaaaattatcgcaatataaaacgaattataatgatgatgccataaagaatatattggatattaaag

SEQ ID NO: 465052 - DNA, 75 bp, synthetic construct
  source 1..75: mol_type = other DNA
gataatccagttttattgaaactggaggctcctggtcatgcaatggctgcctgggctattggtaacgataatgag

SEQ ID NO: 465053 - DNA, 75 bp, synthetic construct
  source 1..75: mol_type = other DNA
ttacccaggcgcgtcagctggcatcgcttaaacccgaagaacagcgggagaaagtcgctgaaatcgaagcggcaa

SEQ ID NO: 465054 - DNA, 75 bp, synthetic construct
  source 1..75: mol_type = other DNA
aaaattgggcaaagaaccgttactggttccgggagtccctaaacgtggctctgccattcgcatggcgcaggcgat

SEQ ID NO: 465055 - DNA, 75 bp, synthetic construct
  source 1..75: mol_type = other DNA
gaaagagggtaaagaaccgttactggttccggcagtcgctaaacgtggctccgccgttcgcatggcgcaggcgat

SEQ ID NO: 465056 - DNA, 75 bp, synthetic construct
  source 1..75: mol_type = other DNA
attataaatgattttagcagaagagatgagcggataaaaattataacttgcgaaaacaatggagttagctcagct

SEQ ID NO: 465057 - DNA, 75 bp, synthetic construct
  source 1..75: mol_type = other DNA
aaaaaaataaaattttccgcagtgtggacatctagttgtaatcttaaagcaaaaatcctatcgacattggtacta

SEQ ID NO: 465058 - DNA, 75 bp, synthetic construct
  source 1..75: mol_type = other DNA
aaatcctggctgaccgggtgagtgaggaaagccgccgctggctggcatcgtgcggcctgacggtggcgcagatgc

SEQ ID NO: 465059 - DNA, 75 bp, synthetic construct
  source 1..75: mol_type = other DNA
tgaagttattaacagtttaactatcgaggagcttaatgtattaaaaaataaggagcaacctgatgatggttttca

SEQ ID NO: 465060 - DNA, 75 bp, synthetic construct
  source 1..75: mol_type = other DNA
caacgtgcctgagctgctcccgataacacttgatgccgaagatgttgtccctacaactccccccggtcacaacct

SEQ ID NO: 465061 - DNA, 75 bp, synthetic construct
  source 1..75: mol_type = other DNA
agagaaaacaaatttttccgatgtctggctctgcagcattgaaagaaaaatatgcgatctatgtctgggggaaat

SEQ ID NO: 465062 - DNA, 75 bp, synthetic construct
  source 1..75: mol_type = other DNA
gatgagttcaaccgcgaaaacgttattgtccttctgcggaactatccacgcgcgttcgacagcatcggtctggca

SEQ ID NO: 465063 - DNA, 75 bp, synthetic construct
  source 1..75: mol_type = other DNA
aactccgggggcaacatcccgcaatcagtcccgggggaacgtggcgggaacagggctcgtcgccgtcacttccgc

SEQ ID NO: 465064 - DNA, 75 bp, synthetic construct
  source 1..75: mol_type = other DNA
atttttacgcccgtaaggtgatgagcatgtggcgttaccggataacgcggttactgtcccgaaaatacccggagc

SEQ ID NO: 465065 - DNA, 75 bp, synthetic construct
  source 1..75: mol_type = other DNA
atgtttttcaggaatgtctcgttggttgttttttgctttattattttaatattctttatctcctggttgaatatt

SEQ ID NO: 465066 - DNA, 75 bp, synthetic construct
  source 1..75: mol_type = other DNA
ccggtttatccccgctggcgcggggaactcccccggagactggcgcaacaatcccgaccacgcggtttatccccg

SEQ ID NO: 465067 - DNA, 75 bp, synthetic construct
  source 1..75: mol_type = other DNA
gccgtttcgcatcagcgattctgaatcatgggcgatgtatctggagttaaaacgcggggtgcgatatgagaaacg

SEQ ID NO: 465068 - DNA, 75 bp, synthetic construct
  source 1..75: mol_type = other DNA
atcataatttagatgtgaaatatgctggaatggacgaaggatggtgtcatgttagcgcagaaggaaaaaatggca

SEQ ID NO: 465069 - DNA, 75 bp, synthetic construct
  source 1..75: mol_type = other DNA
gtgctgctggaaaactatccggcggcaattaaggcaatcccagaaacctactaccgcgagctgatggggcagcgc

SEQ ID NO: 465070 - DNA, 75 bp, synthetic construct
  source 1..75: mol_type = other DNA
ccaaaccaacatttaaggccaatgtctcgatcccccgagccggcgatgaggatggcgtgctgaccttcacgttta

SEQ ID NO: 465071 - DNA, 75 bp, synthetic construct
  source 1..75: mol_type = other DNA
acgcagttgacgatatccgtcgcctgtatcgcgctttcgacacaactgtgcttcagcagttcgagccgaataccg

SEQ ID NO: 465072 - DNA, 75 bp, synthetic construct
  source 1..75: mol_type = other DNA
aacattcatcaccccagcaggcagtgagagtatttgccgaggcccttgaacaagccgttagggagaacactatag

SEQ ID NO: 465073 - DNA, 75 bp, synthetic construct
  source 1..75: mol_type = other DNA
agcctgacggatgccggtgagcggtattatgaacgttgcaaagttattcttgaggttcttgaggatgcgaaccgg

SEQ ID NO: 465074 - DNA, 75 bp, synthetic construct
  source 1..75: mol_type = other DNA
aattttgcgcgtggctgcgccgacaacctttggggcactgcatcttggtcgtgttgtatcgaattatctggctga

SEQ ID NO: 465075 - DNA, 75 bp, synthetic construct
  source 1..75: mol_type = other DNA
atgattattgttgcggcgatctacatcagcagtgcgctgtggtggacgcgcaagatgattgttcaaccactggcc

SEQ ID NO: 465076 - DNA, 75 bp, synthetic construct
  source 1..75: mol_type = other DNA
tgttcaaccactggccattatcggtagccattttgacagcattgctgcgggtaatctggcgcgtccgattgcggt

SEQ ID NO: 465077 - DNA, 75 bp, synthetic construct
  source 1..75: mol_type = other DNA
taccattcaaaaggcagcgtaaatggttacagtaccgggctgtatgctacctggtatgctgatgatgagactcat

SEQ ID NO: 465078 - DNA, 75 bp, synthetic construct
  source 1..75: mol_type = other DNA
attgaacaacagcaaacacctggttaggtggaaaaccgcgccgtatatccccgccctgaaggacggggttttacg

SEQ ID NO: 465079 - DNA, 75 bp, synthetic construct
  source 1..75: mol_type = other DNA
gattattcgcgacgtgcccttcctgccccacccgatctctcactgttagacccgctttgttatgccgcaacgacc

SEQ ID NO: 465080 - DNA, 75 bp, synthetic construct
  source 1..75: mol_type = other DNA
catgactcacaccatgcaggagatcgccaccagctcgcgccggagagcaggggcgtggttttgcggtagtggcag

SEQ ID NO: 465081 - DNA, 75 bp, synthetic construct
  source 1..75: mol_type = other DNA
ggatccgaatgacgaacctgcctctgaactgctcaaacgaattgcgcaggaaaaagctcaactggtgaaagaagg

SEQ ID NO: 465082 - DNA, 75 bp, synthetic construct
  source 1..75: mol_type = other DNA
taaccagtccatttgggcgctcacagatttaccgctttgataatggctcagcacaacccaacctatcagcaaata

SEQ ID NO: 465083 - DNA, 75 bp, synthetic construct
  source 1..75: mol_type = other DNA
caggttaccgcaattgctcccgaggtccgcgggaagacaatgctgtttgggcaatggctggaacagaaagagatc

SEQ ID NO: 465084 - DNA, 75 bp, synthetic construct
  source 1..75: mol_type = other DNA
atgcatgaggacttgcgccacagtaaagcctgtaaaacggtgttcgatattctcgccgcgggcttacagacatat

SEQ ID NO: 465085 - DNA, 75 bp, synthetic construct
  source 1..75: mol_type = other DNA
cagttgatacgaaaaacatacatttatatagcactattacttcacccggaatggtccccttctgcgaaagaagta

SEQ ID NO: 465086 - DNA, 75 bp, synthetic construct
  source 1..75: mol_type = other DNA
cattcgtgcgctgacggtgggtgtggcttaccagacgacggtaggcggcattatgaatacctcggtggcgttgtt

SEQ ID NO: 465087 - DNA, 75 bp, synthetic construct
  source 1..75: mol_type = other DNA
acggcaacagtactatcgatcgatggggttatggtgtcaccagtgctctttctccttatcatgaaaaccgtatcg

SEQ ID NO: 465088 - DNA, 75 bp, synthetic construct
  source 1..75: mol_type = other DNA
cgagctacttcatgaaaactttcgagagccaccagaaaaatggcggcgcgttgctgtgaaagatattgatgaatt

SEQ ID NO: 465089 - DNA, 75 bp, synthetic construct
  source 1..75: mol_type = other DNA
gcagccaatccagctaccgtcttggcgctgctggatgagctggaaagaaaccagcaatacatcaaacgccgtgac

SEQ ID NO: 465090 - DNA, 75 bp, synthetic construct
  source 1..75: mol_type = other DNA
gtattttttaatacatatataaatattaaaaaaagcaaacctagtagttacaatttcgaaaattttttagaagat

SEQ ID NO: 465091 - DNA, 75 bp, synthetic construct
  source 1..75: mol_type = other DNA
atgctgattatgactatgaccggattgtctgggttgatgaagatggcaatgaagccaataaactccaaagtcgtc

SEQ ID NO: 465092 - DNA, 75 bp, synthetic construct
  source 1..75: mol_type = other DNA
gagccgtactggcgcgatgtgggtacgctggaagcttactggaaagcgaacctcgatctggcctctgtggtgccg

SEQ ID NO: 465093 - DNA, 75 bp, synthetic construct
  source 1..75: mol_type = other DNA
atggtcacaatcttcgcttgccatttatatatgtaaaaagcggtttcaggaacgctgaatatatcggcataagaa

SEQ ID NO: 465094 - DNA, 75 bp, synthetic construct
  source 1..75: mol_type = other DNA
gacgaggtggtgttgttgtctattcgaatggcgttggtcattttaatataaaatgtcgacatggtgttaaaaaca

SEQ ID NO: 465095 - DNA, 75 bp, synthetic construct
  source 1..75: mol_type = other DNA
atttcaaagcctgcaaatcgacaagtgcatcgagtgttaattgtaaattcatcgtcgctaatgttcttaatgttg

SEQ ID NO: 465096 - DNA, 75 bp, synthetic construct
  source 1..75: mol_type = other DNA
ctctggcaattattctcatccggtagtgaccggaatacttccggagaatttaacagaaagatatcattcagagac

SEQ ID NO: 465097 - DNA, 75 bp, synthetic construct
  source 1..75: mol_type = other DNA
tgtggataaggttgatgtttcaaaatatttaagataccacggttatcaaggaatatttgagccagatgagttgcc

SEQ ID NO: 465098 - DNA, 75 bp, synthetic construct
  source 1..75: mol_type = other DNA
atatacatgttgtttgggttgcaggggctccaccagatagcataactaaatatgccaccgcttataaattggcat

SEQ ID NO: 465099 - DNA, 75 bp, synthetic construct
  source 1..75: mol_type = other DNA
tttctgtcaccattaatacaaaatgtttcaccttttggtgttaagttttctagtgataatggtgtattaacatca

SEQ ID NO: 465100 - DNA, 75 bp, synthetic construct
  source 1..75: mol_type = other DNA
ggtgttgccacaccatcatttttagttatcgataatcagggcgatcagcgcggcattctcgccaccaatgacatc

SEQ ID NO: 465101 - DNA, 75 bp, synthetic construct
  source 1..75: mol_type = other DNA
ggctggcgggggcggcggtaggtggtggtgcgcttggtgcactgctggcaagcggtggtgatggcgactcgaaaa

SEQ ID NO: 465102 - DNA, 75 bp, synthetic construct
  source 1..75: mol_type = other DNA
agtgtgacgatgtgctctacgagtactggactaaaggccatgtgattaacccgcgcaaagctaaaaaggcattgc

SEQ ID NO: 465103 - DNA, 75 bp, synthetic construct
  source 1..75: mol_type = other DNA
gacatcgtcagaaagtaaaaaaagatacaaccgggataaagcttacagcacaatccagaaagaaacttttggtta

SEQ ID NO: 465104 - DNA, 75 bp, synthetic construct
  source 1..75: mol_type = other DNA
atgtcagagaatactgtaactcacctaccgctcaagtcaaccacgaaggaaccggtgtccggtgcgccagcacag

SEQ ID NO: 465105 - DNA, 75 bp, synthetic construct
  source 1..75: mol_type = other DNA
ggtagatacctcagcacccgtggtcagtgttaataccgtagcgggcgacgatattcttaataatgctgagcaggc

SEQ ID NO: 465106 - DNA, 75 bp, synthetic construct
  source 1..75: mol_type = other DNA
tgttcggtatgttgatgtggttgactaatggtcacagtatttacgatttaccggattggtggattacgcagcgtt

SEQ ID NO: 465107 - DNA, 75 bp, synthetic construct
  source 1..75: mol_type = other DNA
tttggcatgatgattcatatggaacatcatcaattgatattactggcagtggagatctaatatcattaggtggtc

SEQ ID NO: 465108 - DNA, 75 bp, synthetic construct
  source 1..75: mol_type = other DNA
ctggacagactggaggaagaaatcctggcagaccgcgtgagcagtgaaagccgggcgtggcttgcgcagtgcggg

SEQ ID NO: 465109 - DNA, 75 bp, synthetic construct
  source 1..75: mol_type = other DNA
ccgattacgcggtaaaagtgccagatggtctggactcggcggcggccagcagcattacctgtgcggggggcacca

SEQ ID NO: 465110 - DNA, 75 bp, synthetic construct
  source 1..75: mol_type = other DNA
cagcgtctggggtaatgtgggcgtgcagctgggtgataatggctacaatgacaccgcaatgatggtgggcctgaa

SEQ ID NO: 465111 - DNA, 75 bp, synthetic construct
  source 1..75: mol_type = other DNA
accattactaaagcgtcagtgctttatctgcaccatgtcagcaaaggcagcgctcgcgacgggcaggccgatcag

SEQ ID NO: 465112 - DNA, 75 bp, synthetic construct
  source 1..75: mol_type = other DNA
gttatcaggtgttgagccaaatgccatactaaaaagcctcattgatgatgcttataaaagaataaaggaaaagaa

SEQ ID NO: 465113 - DNA, 75 bp, synthetic construct
  source 1..75: mol_type = other DNA
ggtcccatttattctcactccgccagtaagtcgtgtagcaggaggttctggccaacaactaaaaataaaaaatgc

SEQ ID NO: 465114 - DNA, 75 bp, synthetic construct
  source 1..75: mol_type = other DNA
tcaatatggagaacaaccgtcagttcggctttttccgtcttgatccgcgtctgatcaccatgatctcctcgccaa

SEQ ID NO: 465115 - DNA, 75 bp, synthetic construct
  source 1..75: mol_type = other DNA
attattcctaacgactacgccggtaacatgggatatctcattttcctccagcctgtcaccagcgaaaaattcgaa

SEQ ID NO: 465116 - DNA, 75 bp, synthetic construct
  source 1..75: mol_type = other DNA
aaatttatttttatatcaaaaaaacctttgtgggaaagttaattattcctgaaacaaagatatctacgttgtatg

SEQ ID NO: 465117 - DNA, 75 bp, synthetic construct
  source 1..75: mol_type = other DNA
aaatttaattcgattctgacaaagggttggcatcgggagcaatcactacgtaatggctatatttatcagctatat

SEQ ID NO: 465118 - DNA, 75 bp, synthetic construct
  source 1..75: mol_type = other DNA
accgacagaaaggtggattctcttgataaaaagatgggggatatgaaaacaaaactgactgcaggtatcgcaaca

SEQ ID NO: 465119 - DNA, 75 bp, synthetic construct
  source 1..75: mol_type = other DNA
cgtttaccctgcgcaatgcagcagcagcggtacaacaggcccgcgaaaaagtggtctggggtgcctgttccgtca

SEQ ID NO: 465120 - DNA, 75 bp, synthetic construct
  source 1..75: mol_type = other DNA
taaccactctgcgcccttcaccactggcgaagggaaacccgcagcacacgaatctggtcgagatcgaaaaaatat

SEQ ID NO: 465121 - DNA, 75 bp, synthetic construct
  source 1..75: mol_type = other DNA
aatttaagtatatcgctccatttggtgattccatcgataactatgttttttcaagtatggtttttgttgataact

SEQ ID NO: 465122 - DNA, 75 bp, synthetic construct
  source 1..75: mol_type = other DNA
acctgacgtctatcaaaagttcactgaaggtcgcacgcaggaacaatggttacaacatctgtacgccaaaatgct

SEQ ID NO: 465123 - DNA, 75 bp, synthetic construct
  source 1..75: mol_type = other DNA
agtacgcgcctgtttgcgtggtcgatccatccgccggcgtattaatcatcccgatcgcttgaattacccaatgaa

SEQ ID NO: 465124 - DNA, 75 bp, synthetic construct
  source 1..75: mol_type = other DNA
tccgtcaactgtggtagccgctgtgcacttcgtctacatgttaaagataatgaagtgacctgggtggaaactgac

SEQ ID NO: 465125 - DNA, 75 bp, synthetic construct
  source 1..75: mol_type = other DNA
ggcgggagcgtgacctgacggggtggatgtcgctgtcgcgtaaaccggaggtgacgtggtacgggtgggacggcg

SEQ ID NO: 465126 - DNA, 75 bp, synthetic construct
  source 1..75: mol_type = other DNA
cctcatggaatcagtatgctgatgccaataatctcaccccggaacagaagcaggcaggactggataaacttgcca

SEQ ID NO: 465127 - DNA, 75 bp, synthetic construct
  source 1..75: mol_type = other DNA
atccttctcacaagaagacaaattggcaaaaaaatataaaactggcataaacatatcactccctgaaggatgcat

SEQ ID NO: 465128 - DNA, 75 bp, synthetic construct
  source 1..75: mol_type = other DNA
cgtgattcggagttatgaacaatctgaaaaaaaatggattgagcaagaaactataactgtaagattcattgataa

SEQ ID NO: 465129 - DNA, 75 bp, synthetic construct
  source 1..75: mol_type = other DNA
atgttccagcagttacaggaaaagggtatcaacttccgcagtattaccgatggcgtggatctcaaaacagccagc

SEQ ID NO: 465130 - DNA, 75 bp, synthetic construct
  source 1..75: mol_type = other DNA
aagcggtaagaagtgaagctgcgcgtctggacatcgccgccgatacgctgcactttgagcaatttgctatcgaag

SEQ ID NO: 465131 - DNA, 75 bp, synthetic construct
  source 1..75: mol_type = other DNA
cttgaagttaaggccgatttttcagcaatacaaaacagtacactcgaaaaaataggcaccttcaatgtgtatctg

SEQ ID NO: 465132 - DNA, 75 bp, synthetic construct
  source 1..75: mol_type = other DNA
gttataacttagcgcgcatacacttaaaaagaactattttggcgctgccagaaagcaacgttattcatgccgggt

SEQ ID NO: 465133 - DNA, 75 bp, synthetic construct
  source 1..75: mol_type = other DNA
aaaaagaaccattttggcgctgccagaaagcaacgttattcatgctgggtatggtagctatgccgtgattggtga

SEQ ID NO: 465134 - DNA, 75 bp, synthetic construct
  source 1..75: mol_type = other DNA
tattcgtgatttatcatttcttgatgctcatcaggctgtctacgttcagcatcatgagggcaaagagcctttaga

SEQ ID NO: 465135 - DNA, 75 bp, synthetic construct
  source 1..75: mol_type = other DNA
aatcaatgagaaaaacgaactagcattgttcaatcttggaggcatttactggaattcgagaaattatgatgaagc

SEQ ID NO: 465136 - DNA, 75 bp, synthetic construct
  source 1..75: mol_type = other DNA
ttgttttaagccatccatttgcccaagacgtgctctcatcaatccgttcgctatctaataagattgataaaatta

SEQ ID NO: 465137 - DNA, 75 bp, synthetic construct
  source 1..75: mol_type = other DNA
tcactgattatgctgcgcaaagcgttcccggcgaaagccttatggctgacgggggcgatggtggcagtgtctggt

SEQ ID NO: 465138 - DNA, 75 bp, synthetic construct
  source 1..75: mol_type = other DNA
aatattctttctgctgcgcagtatgaatctgatttgaatagcgagcgaactttagctggtttggctattgccaga

SEQ ID NO: 465139 - DNA, 75 bp, synthetic construct
  source 1..75: mol_type = other DNA
atgtactacccaaataacagctaccttaatcgggttggtaataattacaagccttcacaggaagttttagacaaa

SEQ ID NO: 465140 - DNA, 75 bp, synthetic construct
  source 1..75: mol_type = other DNA
aacaatagatattgtaatctgtatgatgttgaatacttacttagtaaagatggtgccaactataaagtgctagaa

SEQ ID NO: 465141 - DNA, 75 bp, synthetic construct
  source 1..75: mol_type = other DNA
atgcataagttattcatcctgccggatgcattgtgtgagtttatccgggcattacctgtatcggatttaccggaa

SEQ ID NO: 465142 - DNA, 75 bp, synthetic construct
  source 1..75: mol_type = other DNA
accttgcagtggcgatcgagcattacaatgaaaaccatccgcatagtgcgttaggttatctctcaccaagggaat

SEQ ID NO: 465143 - DNA, 75 bp, synthetic construct
  source 1..75: mol_type = other DNA
cgtcactcgcgaagttttcgatgaaaaagcatgtcgccgtttccttgccgggaaggtagcgaataaattggggcg

SEQ ID NO: 465144 - DNA, 75 bp, synthetic construct
  source 1..75: mol_type = other DNA
accggcttattgaccaccctgccattattggcctttgcgctaatatcacctttggccgccccggtagcgcgacgt

SEQ ID NO: 465145 - DNA, 75 bp, synthetic construct
  source 1..75: mol_type = other DNA
atattgccaggctgttctgtggattaacccactgttggcagccatcgagaaggcgaataaccagttggctggtgt

SEQ ID NO: 465146 - DNA, 75 bp, synthetic construct
  source 1..75: mol_type = other DNA
gtgatagctaatcaggcattaaacttcaatcgttttaaccagatagcagaaaacgcaagccgattaaattctctg

SEQ ID NO: 465147 - DNA, 75 bp, synthetic construct
  source 1..75: mol_type = other DNA
aatttgcttgggctagtttttatgaggcttttgccaacgcgttactgacttggcgaaatcgtagagatgaattag

SEQ ID NO: 465148 - DNA, 75 bp, synthetic construct
  source 1..75: mol_type = other DNA
aatgatactataatcataaaagaacgttataaaatggatatccgttatatcgaatcagtcaatggttttacagta

SEQ ID NO: 465149 - DNA, 75 bp, synthetic construct
  source 1..75: mol_type = other DNA
ccgaaacccagcaaaagtttttgctctcgaaccgcgaatacgccctgttggaagctctgatgctgcgtccaggag

SEQ ID NO: 465150 - DNA, 75 bp, synthetic construct
  source 1..75: mol_type = other DNA
ctgcaatcaaaaatcaaactcggctccgtgctggtagccgaatttcgccaggtgaggaatcccgcattccatcgc

SEQ ID NO: 465151 - DNA, 75 bp, synthetic construct
  source 1..75: mol_type = other DNA
ctgcaatcaaaaatcaaactcggctccgtactggtggctgagttccggcaggtacgcaacccggcctttcaccgt

SEQ ID NO: 465152 - DNA, 75 bp, synthetic construct
  source 1..75: mol_type = other DNA
caccgaacaactggaagatacaagaagattagaagcaatagttggaagtgttctaaaatcatctttcgttatgat

SEQ ID NO: 465153 - DNA, 75 bp, synthetic construct
  source 1..75: mol_type = other DNA
acttacgacctgtacgggaaggggcacgcggttggacgtctggctgatgcgctaaatctggcactggtggaggtg

SEQ ID NO: 465154 - DNA, 75 bp, synthetic construct
  source 1..75: mol_type = other DNA
ccgtgctggtggccgagttccggcaggtgaggaatcccgcattccatcgccgtttctttgcgctcctgaatctcg

SEQ ID NO: 465155 - DNA, 75 bp, synthetic construct
  source 1..75: mol_type = other DNA
ggtgaggaatccagcattccatcgccgtttctttgcgctcctgaatctcgggtttgaatactgggaacccaccgg

SEQ ID NO: 465156 - DNA, 75 bp, synthetic construct
  source 1..75: mol_type = other DNA
aaatttcacaacagaataaagtcactgtgattttcacacataatcattgtctgtcaaaaatcgcaagaaaaatga

SEQ ID NO: 465157 - DNA, 75 bp, synthetic construct
  source 1..75: mol_type = other DNA
tttttctttggcgtgtctatattagttgcattcacgcggaaccttgtttctttgtatttcccaagaattcaacgc

SEQ ID NO: 465158 - DNA, 75 bp, synthetic construct
  source 1..75: mol_type = other DNA
ctgacacaaatagcaaaaaaaatgaaatggtggaagttaaagccagaatatcttgaaacactggttcttcatatc

SEQ ID NO: 465159 - DNA, 75 bp, synthetic construct
  source 1..75: mol_type = other DNA
ccgtgggcggaaatgcgctcattgccgatgacaagcgtaatagtattgatgaacagtatgcgtgtgtcactgatt

SEQ ID NO: 465160 - DNA, 75 bp, synthetic construct
  source 1..75: mol_type = other DNA
ggctgaaaagctggagcaaactcgcaataaggtacaggcctggcgcgatgcgtattataaaggtgattacagtat

SEQ ID NO: 465161 - DNA, 75 bp, synthetic construct
  source 1..75: mol_type = other DNA
ttacctcgagacgctggttctgcacagggacaataataacctgattcttgacgggcttttaataccacacaacct

SEQ ID NO: 465162 - DNA, 75 bp, synthetic construct
  source 1..75: mol_type = other DNA
cgaggctttctgatgtggtggcgcctggccaatgagatgtttatctctggaaaccaaaaacaaaggaaatgtgcg

SEQ ID NO: 465163 - DNA, 75 bp, synthetic construct
  source 1..75: mol_type = other DNA
ggcttgcgcagtgcgggctgacggtggagcggctggcggcacagatagagccggtttatttgcctgagcgaaaaa

SEQ ID NO: 465164 - DNA, 75 bp, synthetic construct
  source 1..75: mol_type = other DNA
aggcattggctggctaccagaatgaaagagcgtggggtcaatctggtggacgctcaaggcatcttaggtcatagc

SEQ ID NO: 465165 - DNA, 75 bp, synthetic construct
  source 1..75: mol_type = other DNA
gatgaagctgaccaaggatatcgactccaagcgcagagcgttcacagacgaggagctggagagacttctggtccg

SEQ ID NO: 465166 - DNA, 75 bp, synthetic construct
  source 1..75: mol_type = other DNA
tgcaaaagtttgtaacctatatgataaaaatgcaatgttaaagttagttatatctggttctccacatccattaag

SEQ ID NO: 465167 - DNA, 75 bp, synthetic construct
  source 1..75: mol_type = other DNA
tgaaatattacgtgaagctgccagacaaaacctgataacgaaagatattactataaatgggcagaaagttggtat

SEQ ID NO: 465168 - DNA, 75 bp, synthetic construct
  source 1..75: mol_type = other DNA
tccgggtagaggctgagtatcagttcacacgacataccgctcacacgacctctgaggctcgcaggtgggcgactc

SEQ ID NO: 465169 - DNA, 75 bp, synthetic construct
  source 1..75: mol_type = other DNA
gcattttttgcctgtcagtatgctggattagttgccgtaccattggcgattccaatgggcgtcggtcagcgggat

SEQ ID NO: 465170 - DNA, 75 bp, synthetic construct
  source 1..75: mol_type = other DNA
cactggtgatacctctggtctgattaagctgattgatggtggcgtaagccagcttactgatgataataaccatac

SEQ ID NO: 465171 - DNA, 75 bp, synthetic construct
  source 1..75: mol_type = other DNA
ttgagggccgcaaccctattgaacggatgaagctgaccaaggatatcgactccaagcgcagagcgttcacagacg

SEQ ID NO: 465172 - DNA, 75 bp, synthetic construct
  source 1..75: mol_type = other DNA
cagcagtcagtccattacgtatgacctgtacgggaaaggacatgcagtccagagactcgcagatgcattggctgt

SEQ ID NO: 465173 - DNA, 75 bp, synthetic construct
  source 1..75: mol_type = other DNA
aagctgattgatggtggcgtaagccagcttactgatgataataaccatactgattactcaactatatgcgactct

SEQ ID NO: 465174 - DNA, 75 bp, synthetic construct
  source 1..75: mol_type = other DNA
tgcctacagtcgaatgagtggttacaccgtcaagcctcctaccggagacaccaatgagcagacacaatttattga

SEQ ID NO: 465175 - DNA, 75 bp, synthetic construct
  source 1..75: mol_type = other DNA
tcaaaaatcaggttgttggacgtgacggtatgggcgtgcaggcaggggtggctatgctatcaataacgatatgga

SEQ ID NO: 465176 - DNA, 75 bp, synthetic construct
  source 1..75: mol_type = other DNA
agttgctgagcttcactgactgttccggttatgtaacccgctatgaccatgaccgttttggtcaggtgacggcgg

SEQ ID NO: 465177 - DNA, 75 bp, synthetic construct
  source 1..75: mol_type = other DNA
tttaaaagatattccatcaaaagccccattaagagatgattatataaataatagagatggtcaattatatgatct

SEQ ID NO: 465178 - DNA, 75 bp, synthetic construct
  source 1..75: mol_type = other DNA
ctccgcccgctacaacgctgtcggacgttttggccgcatctcggaagttgccagccgcatcgccgggcagctttc

SEQ ID NO: 465179 - DNA, 75 bp, synthetic construct
  source 1..75: mol_type = other DNA
gcatgacccgatcctcggcggcctgcgttctgccgtgcgctacgacaaaacctatttcgacaagatcgtcgcctc

SEQ ID NO: 465180 - DNA, 75 bp, synthetic construct
  source 1..75: mol_type = other DNA
tggttactcacagcgtaacgctggcggtaccgcctatgttccggacgcgtataatacggcattgacggggttggg

SEQ ID NO: 465181 - DNA, 75 bp, synthetic construct
  source 1..75: mol_type = other DNA
gactccttctccagtggcaaactgagcggctttgacatgggttacagcggtatccagtttggtggggataaacgt

SEQ ID NO: 465182 - DNA, 75 bp, synthetic construct
  source 1..75: mol_type = other DNA
gaaaatggtgatcctatcttcgcagaagaagatattgatggacgaattaatgttaactctattgattttgtaatc

SEQ ID NO: 465183 - DNA, 75 bp, synthetic construct
  source 1..75: mol_type = other DNA
aactacaaccagagctaaaaccatttgagatcgaaggcttcacgctctacatccaccgtccaaatggtcgcgatt

SEQ ID NO: 465184 - DNA, 75 bp, synthetic construct
  source 1..75: mol_type = other DNA
acataaattttatgagaaaaaccattggcattcaggctttgtttgatttattaaaagcgattgtaagtgacatca

SEQ ID NO: 465185 - DNA, 75 bp, synthetic construct
  source 1..75: mol_type = other DNA
ccgggagtgttgatgtggtaaataaagggactatcactattgacggttatgacagtgatgcacctgcactgaatg

SEQ ID NO: 465186 - DNA, 75 bp, synthetic construct
  source 1..75: mol_type = other DNA
cgccaggcatgggataacgtggtacggattgccggtggcatcaccgagaaaaacacgcctcgtaaccttcaggga

SEQ ID NO: 465187 - DNA, 75 bp, synthetic construct
  source 1..75: mol_type = other DNA
ctgggtgaagatgacggcctggtggcactgcatctacaggaatatgccgcagaatcgttcactcccgccgaagcg

SEQ ID NO: 465188 - DNA, 75 bp, synthetic construct
  source 1..75: mol_type = other DNA
ttaatttatcatctaaacatgaatccttacgtgttgttttaggtatgtgtgccttaggtgatgattgggttaatc

SEQ ID NO: 465189 - DNA, 75 bp, synthetic construct
  source 1..75: mol_type = other DNA
gccattctatttcaggaaggagtgtccgttaaactcaggctacctcatactgctcagaatcagcctgctgagact

SEQ ID NO: 465190 - DNA, 75 bp, synthetic construct
  source 1..75: mol_type = other DNA
ttttaggccatgaaatatgtggggagattgttgggctgggtaaaaatattgctgatcttaaaatggtcagcaagt

SEQ ID NO: 465191 - DNA, 75 bp, synthetic construct
  source 1..75: mol_type = other DNA
gcagccgatgggataaggcccgtctgcgtttcctgcagcagcacccactatgtgtgatgtgcgagcagcaggggc

SEQ ID NO: 465192 - DNA, 75 bp, synthetic construct
  source 1..75: mol_type = other DNA
ggtgtaaccggagaaaacggggaattttcctttagttggggggaaaccatctcctttggcatcgacacttttgag

SEQ ID NO: 465193 - DNA, 75 bp, synthetic construct
  source 1..75: mol_type = other DNA
tgctgattgatgatgatgatgatgtgctggacgcctacacacagttacttgaacagtcaggctatcgggtttttg

SEQ ID NO: 465194 - DNA, 75 bp, synthetic construct
  source 1..75: mol_type = other DNA
cggaacagggcttgtgctccagggcattggttttgccaccctaagcgcgtttaccgccctctggttcaacgagcg

SEQ ID NO: 465195 - DNA, 75 bp, synthetic construct
  source 1..75: mol_type = other DNA
cgcattatcttgcgatatttaacgaatggtaatctcagtatgggagagaaagcttttaaagaatgtcattatgaa

SEQ ID NO: 465196 - DNA, 75 bp, synthetic construct
  source 1..75: mol_type = other DNA
tggcaccaggcagtgggtgtttcatgaagacgaacgcgccgcgtttgttctttgtggataaggagtccggtgtga

SEQ ID NO: 465197 - DNA, 75 bp, synthetic construct
  source 1..75: mol_type = other DNA
gacgaagaaggcaaggtcattcccataccgggctcttctgagtgggagcaggagcgtgtcaacgagacggtaaag

SEQ ID NO: 465198 - DNA, 75 bp, synthetic construct
  source 1..75: mol_type = other DNA
ccctgcagttaggtccactcagtcattccaccattcgtaagcgtcaacggagcaccgtattgacgcttatttatt

SEQ ID NO: 465199 - DNA, 75 bp, synthetic construct
  source 1..75: mol_type = other DNA
tgataaatggttaaatcaatataatacattccttactgattatgactggttagataaaaaagatgaagaacaagc

SEQ ID NO: 465200 - DNA, 75 bp, synthetic construct
  source 1..75: mol_type = other DNA
gggagatacagaaccagatcgccggcggcacattcgattatgcgaaatacttccccacctccaaaaaactggagc

SEQ ID NO: 465201 - DNA, 75 bp, synthetic construct
  source 1..75: mol_type = other DNA
caggtacagggaatgggaaaacctgttccgctttgctttcaatacaggtctgcggagctcagaactgtgcgcgct

SEQ ID NO: 465202 - DNA, 75 bp, synthetic construct
  source 1..75: mol_type = other DNA
gtgataacagatgtctggaaatataggggcaaatccacgtttattcttgcttctactttcgaagatgacaaaaca

SEQ ID NO: 465203 - DNA, 75 bp, synthetic construct
  source 1..75: mol_type = other DNA
catcaacagaagcagaatggttttttgactcatggtatgcaaaatcagcagcaattgtttataaagaatcaagaa

SEQ ID NO: 465204 - DNA, 75 bp, synthetic construct
  source 1..75: mol_type = other DNA
atgtctggaaatataggggcaaatccagaagatgcccgattaaacacatcttccgttgcactggtgacctctgga

SEQ ID NO: 465205 - DNA, 75 bp, synthetic construct
  source 1..75: mol_type = other DNA
gcaggtattcgttacagaaacccatatcaaaccaggcatacattcgccaccagccatatcagccgaggagcaaac

SEQ ID NO: 465206 - DNA, 75 bp, synthetic construct
  source 1..75: mol_type = other DNA
ctggttatcacttttacatataaaggggttctgtgtcgggagcccctctccagaatggaagtaaacgcgcgcggt

SEQ ID NO: 465207 - DNA, 75 bp, synthetic construct
  source 1..75: mol_type = other DNA
tgctctggctccgtctgggtgatgagtctgtcaatgccagcattgacggtgcagcattccgcgtgggtgcaggtg

SEQ ID NO: 465208 - DNA, 75 bp, synthetic construct
  source 1..75: mol_type = other DNA
gctcggagctgtggctcatgactggaatattgtaaaattctgctccctgaacactctgaacaactggatcttgat

SEQ ID NO: 465209 - DNA, 75 bp, synthetic construct
  source 1..75: mol_type = other DNA
tcgccatatcagtcaaggggcgaacctattttggcttgctggacaaatgggacataaaggaccagaaatgctatt

SEQ ID NO: 465210 - DNA, 75 bp, synthetic construct
  source 1..75: mol_type = other DNA
ctgttttggcttgcagctcaaatggggcataaagggccggaaatgttatttcgtcattatggttcatatttaaag

SEQ ID NO: 465211 - DNA, 75 bp, synthetic construct
  source 1..75: mol_type = other DNA
cccaggttatctggaaaaagataaacattcagagaagccgatgcggctttacttaatgttatttatcctgcaaat

SEQ ID NO: 465212 - DNA, 75 bp, synthetic construct
  source 1..75: mol_type = other DNA
gatgtgccgcgcattgaattattcagccgcagcggggcgccaggctggcatcactggggaaatcagtgcgctacc

SEQ ID NO: 465213 - DNA, 75 bp, synthetic construct
  source 1..75: mol_type = other DNA
ttcaccactggtgaaacttcctgacttctgtactctcgccgatcccaacgccgcatatgatgtacaattcgtata

SEQ ID NO: 465214 - DNA, 75 bp, synthetic construct
  source 1..75: mol_type = other DNA
cgatattgatattctttttcccgctcacaggtattgggcaatcctggaatgaaaaggcgggggagttattttttg

SEQ ID NO: 465215 - DNA, 75 bp, synthetic construct
  source 1..75: mol_type = other DNA
agacactgaaggccggatgctctggcgggcatggaactttgaaccggatgccggtgaaggtcttaaccgctatat

SEQ ID NO: 465216 - DNA, 75 bp, synthetic construct
  source 1..75: mol_type = other DNA
tcactgggggaatcagtgcgccaccgccgcggtggaactgcttcccggctgcgccatcgatgttgtgaaaacgga

SEQ ID NO: 465217 - DNA, 75 bp, synthetic construct
  source 1..75: mol_type = other DNA
tagctacccgcggcgccgggctggaacgtaagcacgccgggattaagcaggtggtgtacagcccactcggcgcgc

SEQ ID NO: 465218 - DNA, 75 bp, synthetic construct
  source 1..75: mol_type = other DNA
aaattattgaaagctataagcaaaatacaaaataatgataagataaaaaaaattgcaatagagttaggctacagt

SEQ ID NO: 465219 - DNA, 75 bp, synthetic construct
  source 1..75: mol_type = other DNA
gtaaatcaactggagacaataaaagaaaaattaggaggggttttactgacagaaataaccactcgccatatcgcc

SEQ ID NO: 465220 - DNA, 75 bp, synthetic construct
  source 1..75: mol_type = other DNA
agattccggagcgtgggaagaagatgcccgattaaacacatcttccgttgcactggtgacctctggactggaacg

SEQ ID NO: 465221 - DNA, 75 bp, synthetic construct
  source 1..75: mol_type = other DNA
ataagcctttccactcggtcatcaatggtgaaaactaccatgttctcaaagcattgacctatacccatcgaggta

SEQ ID NO: 465222 - DNA, 75 bp, synthetic construct
  source 1..75: mol_type = other DNA
gttgctggacgcggctgatgtcgagactcagactgtagcgcttgacgaccttgtagttatagctgaatttcgtga

SEQ ID NO: 465223 - DNA, 75 bp, synthetic construct
  source 1..75: mol_type = other DNA
gctggcggccatgaaggcaataacgcttggcgtcacgcacctgtggatcggcacagtgaagtcagatgaaacgca

SEQ ID NO: 465224 - DNA, 75 bp, synthetic construct
  source 1..75: mol_type = other DNA
cagccagacggcagcgaagaccagcgaaacgaatgccaaaaccagcgaaactgcggcgaaaaacagtcaggatgc

SEQ ID NO: 465225 - DNA, 75 bp, synthetic construct
  source 1..75: mol_type = other DNA
accggacttctgaggcagggcagttaccaggccgtcagtcacatcacacagggacggcattcacgtcctgaccgc

SEQ ID NO: 465226 - DNA, 75 bp, synthetic construct
  source 1..75: mol_type = other DNA
ctggtgcagtcaaggtgctttttgatggagtaactgagagtacgctaaatgccaaaatatccctagatacagtgc

SEQ ID NO: 465227 - DNA, 75 bp, synthetic construct
  source 1..75: mol_type = other DNA
tattttacttcgtcttcatggaaggataatgcttttattattcgaggaaaggacgccaaatatgatatttccgtc

SEQ ID NO: 465228 - DNA, 75 bp, synthetic construct
  source 1..75: mol_type = other DNA
catatacggtggtaaacctgctcccgatgttataaatacactgcataaaatggctgaatcgggagatatcgacgc

SEQ ID NO: 465229 - DNA, 75 bp, synthetic construct
  source 1..75: mol_type = other DNA
gatacatggtcaactagctgaaattctattgcctatttctatcgtaggacatgaaggtttttctgaaccattttg

SEQ ID NO: 465230 - DNA, 75 bp, synthetic construct
  source 1..75: mol_type = other DNA
cttatggacgtgtaaaaattcagttcccgtgggaagatgctccaacaggagagaaatcatcctgttgggtgcgag

SEQ ID NO: 465231 - DNA, 75 bp, synthetic construct
  source 1..75: mol_type = other DNA
atttctattacccccgattacagacaagcctggaaagtggtgcataaattgtcagatattctactgttgactatt

SEQ ID NO: 465232 - DNA, 75 bp, synthetic construct
  source 1..75: mol_type = other DNA
tgcccgtaaatcagtccaccgttaacgctttaattagcaattgccttggagctatcaatcagggggcgactgagt

SEQ ID NO: 465233 - DNA, 75 bp, synthetic construct
  source 1..75: mol_type = other DNA
attttgcagtgatgcgctatatgccgcattacacaaggcacagcgaaagtgatgtaaaagtgaagaaagctaaca

SEQ ID NO: 465234 - DNA, 75 bp, synthetic construct
  source 1..75: mol_type = other DNA
tatgcaggaataattacgcctgaatctggtacagtcaaggtgctttttgatggagtaactgagagcactctgaat

SEQ ID NO: 465235 - DNA, 75 bp, synthetic construct
  source 1..75: mol_type = other DNA
aattagcaaatatatttaataaaaaacataaacaacacatggatgatcgttttatccatctaattagaagcaatg

SEQ ID NO: 465236 - DNA, 75 bp, synthetic construct
  source 1..75: mol_type = other DNA
tgacaatggcaattaatctgttaaaagctgccgctgaccatggagatattgatgcagccttagttttaggtcaac

SEQ ID NO: 465237 - DNA, 75 bp, synthetic construct
  source 1..75: mol_type = other DNA
ttaacgagtttcagcgcaatattgtaaatctagatagctctcagactgatcgagccagagccagtagagattggt

SEQ ID NO: 465238 - DNA, 75 bp, synthetic construct
  source 1..75: mol_type = other DNA
tttctgcctgaagacaaagctgcagcacgagattttctccttgaaatcaagccactgtttccgcgaatagagatc

SEQ ID NO: 465239 - DNA, 75 bp, synthetic construct
  source 1..75: mol_type = other DNA
gtatctcgttgggaagagctttagccaatagtggaagaattaacgagcgccgtatctttcaattaattcgggctg

SEQ ID NO: 465240 - DNA, 75 bp, synthetic construct
  source 1..75: mol_type = other DNA
tctctctgttagagttattgctggttttaggtattgtaagtgcattgataatttcagcatttattatatatccga

SEQ ID NO: 465241 - DNA, 75 bp, synthetic construct
  source 1..75: mol_type = other DNA
gcaaatcaccattaatctttaatgttaaagattatcaggaaaatggtctgttcacgcatggattccgtggtaata

SEQ ID NO: 465242 - DNA, 75 bp, synthetic construct
  source 1..75: mol_type = other DNA
caggtgcaacatacattaataaatcaggtgtattaaccgttgctgaagttgacgaaccgcgatttgaacgagaag

SEQ ID NO: 465243 - DNA, 75 bp, synthetic construct
  source 1..75: mol_type = other DNA
ctggtatatctctgcaaccgtcgtacttgcagactggacagggtcgtcaacgcgattttttccacgcgtcgcaca

SEQ ID NO: 465244 - DNA, 75 bp, synthetic construct
  source 1..75: mol_type = other DNA
taccccaaactggcaaaagcctaccccgcgaataaattaccggatttacgcggagaatttatccgtggctgggat

SEQ ID NO: 465245 - DNA, 75 bp, synthetic construct
  source 1..75: mol_type = other DNA
gatgttgatcaaaactttgatgctttagactgccatatactgcgagaatatttaattttattgttttatgattaa

SEQ ID NO: 465246 - DNA, 75 bp, synthetic construct
  source 1..75: mol_type = other DNA
gcgctgtatgccattttgacatacatttgtcattgtgatgttccgccgattaagaagggggaaagccatgaatga

SEQ ID NO: 465247 - DNA, 75 bp, synthetic construct
  source 1..75: mol_type = other DNA
taacatcttataatcgccctttgctgttgcgcagagcaatattgtcagtatttaatcaaacttattcaaaaatag

SEQ ID NO: 465248 - DNA, 75 bp, synthetic construct
  source 1..75: mol_type = other DNA
cgcattcaaatcacgaaggatttggtcgccctgttattgaaggtcgtatgtgtgggaaaaatgtattagcaacta

SEQ ID NO: 465249 - DNA, 75 bp, synthetic construct
  source 1..75: mol_type = other DNA
ttgtatctagaacaacgcaaagaatagggaaaaacgtatcttggttaaaaaaatgtggagtatatctattcccca

SEQ ID NO: 465250 - DNA, 75 bp, synthetic construct
  source 1..75: mol_type = other DNA
acatcgaaaaagtaaagagtatcactcaccttccagccgcagaatttgtaaaaataataatgcgaaaagatgttt

SEQ ID NO: 465251 - DNA, 75 bp, synthetic construct
  source 1..75: mol_type = other DNA
aaaaatcgctttttacctaggtcatgaaactgtcgcaaagtggtatggtgattatgctgtaagatacagcataaa

SEQ ID NO: 465252 - DNA, 75 bp, synthetic construct
  source 1..75: mol_type = other DNA
cgtcacccatgtacaaaaaattacagacaccctgtcgaaagatatttcttgctgtctgatgctggagtgtgacga

SEQ ID NO: 465253 - DNA, 75 bp, synthetic construct
  source 1..75: mol_type = other DNA
tgtaaagttgaattcatataactatattgcagatgatatagagcaagtaatcgataaaggaagcaaagttcaatt

SEQ ID NO: 465254 - DNA, 75 bp, synthetic construct
  source 1..75: mol_type = other DNA
gtgtttcacattctcaggcggtattatggttgattgtcttttggctgggttttagctggactacatccattatta

SEQ ID NO: 465255 - DNA, 75 bp, synthetic construct
  source 1..75: mol_type = other DNA
tgcgttgggggataattttggttatgtcgggtatgtatttgtactggcgttttttaccaacctgctgctggtatt

SEQ ID NO: 465256 - DNA, 75 bp, synthetic construct
  source 1..75: mol_type = other DNA
ttcatcaggtgaacgtcagttgttatatattctgattaaaacagctaatacttcattggatgaatctgtcttgtt

SEQ ID NO: 465257 - DNA, 75 bp, synthetic construct
  source 1..75: mol_type = other DNA
acgccgaatctgctgaatcagaactttacgcccacagcacctaatcaggtctgggtcgcagattcagttgtctag

SEQ ID NO: 465258 - DNA, 75 bp, synthetic construct
  source 1..75: mol_type = other DNA
gaatcgaaattcatgctattaaataaatttattactacttttcaagaaagaaattttactgaattattatttgga

SEQ ID NO: 465259 - DNA, 75 bp, synthetic construct
  source 1..75: mol_type = other DNA
cagcccaccactgacaaagacgacgtctggatcgccgtcatcaccaaagaagaagctcgcaaggaatcacccggg

SEQ ID NO: 465260 - DNA, 75 bp, synthetic construct
  source 1..75: mol_type = other DNA
agaggcttacaccggtcttttgaagcatctgttcgccgtcctggataacgaagtggcaagcagccggcaatttgg

SEQ ID NO: 465261 - DNA, 75 bp, synthetic construct
  source 1..75: mol_type = other DNA
accagatagacccagaattgcagacttttatcgataaaatcgctgcaaaataccagccaatccctgaagtactac

SEQ ID NO: 465262 - DNA, 75 bp, synthetic construct
  source 1..75: mol_type = other DNA
ccggtgaaaattttcttctccgaaatcccggaaggcatctttggtaagaaaaccgtcgaactgaacgaaaacggc

SEQ ID NO: 465263 - DNA, 75 bp, synthetic construct
  source 1..75: mol_type = other DNA
attttccgcacatcgtcaaccacgtttgacaacggtcgggtaaaaatgacgccggatgtgggctggtcatataac

SEQ ID NO: 465264 - DNA, 75 bp, synthetic construct
  source 1..75: mol_type = other DNA
cacaagcactggaagaggcggcacaggctcgcctgcgtattcgtaagggttacgacaaacccaccgccgggatgg

SEQ ID NO: 465265 - DNA, 75 bp, synthetic construct
  source 1..75: mol_type = other DNA
gctcttcttagtggcgctttcccgaagacagcgaccatcatgcttactgactgggaaaatacgctcggattacct

SEQ ID NO: 465266 - DNA, 75 bp, synthetic construct
  source 1..75: mol_type = other DNA
cgcgatgaaatcctggaaaggtatcacgtttggaatgcgtgatatcacagccagtgacaaaccaattgaaagtaa

SEQ ID NO: 465267 - DNA, 75 bp, synthetic construct
  source 1..75: mol_type = other DNA
cgcgatgaagtcctggaaaggtatcacgtttgggatgcgcgacatcaccgccaacgacaaaccaacagaaagcaa

SEQ ID NO: 465268 - DNA, 75 bp, synthetic construct
  source 1..75: mol_type = other DNA
tctggagcggtttaatacgcctggcacgcgcgtcaaacgtagcgttaacgtgcaaagtgacggacaaaaagtgac

SEQ ID NO: 465269 - DNA, 75 bp, synthetic construct
  source 1..75: mol_type = other DNA
tggtctaatgattctttagaaacatgtaagatgaagtgctccggaaataacattggacgtcttattagatttgta

SEQ ID NO: 465270 - DNA, 75 bp, synthetic construct
  source 1..75: mol_type = other DNA
ccatcagcatgtggaatgttaagcaggaaagcctgcgcgccaggctacaccgggaaattattgaacgtgattatc

SEQ ID NO: 465271 - DNA, 75 bp, synthetic construct
  source 1..75: mol_type = other DNA
gaaacaggcattctttacggctcgctcccggaggaattccggcgtattccagaaggagaaaaacacactgcatca

SEQ ID NO: 465272 - DNA, 75 bp, synthetic construct
  source 1..75: mol_type = other DNA
accttaaagcgctacaggcactaatcccgtcaggaagagcctggacacgagataaaaatgcagtgcagacggcag

SEQ ID NO: 465273 - DNA, 75 bp, synthetic construct
  source 1..75: mol_type = other DNA
ttcgccggtttgaaatataacgagttaggatcatttgactatgccgtaactacggtgttgcttatgatgccgcag

SEQ ID NO: 465274 - DNA, 75 bp, synthetic construct
  source 1..75: mol_type = other DNA
aatggcatggcaaaaggcgaagcccgcaaaaaagcagctaaccggctaaatcagctggaagccctgaaggctgca

SEQ ID NO: 465275 - DNA, 75 bp, synthetic construct
  source 1..75: mol_type = other DNA
aaaaatattttatttttgttatgcattgttattatttatatggtttttatgttgtttaactctagaattaatgtt

SEQ ID NO: 465276 - DNA, 75 bp, synthetic construct
  source 1..75: mol_type = other DNA
tgcatcactggctaataatggtgccagcgacaacaaaactgtgcattttattggcgacacagcggcggcaaaaat

SEQ ID NO: 465277 - DNA, 75 bp, synthetic construct
  source 1..75: mol_type = other DNA
tacggttaccgcaacgctgggtaataacaataccagtgattcgcagccggtaacgtttgtggcggacaaaacctc

SEQ ID NO: 465278 - DNA, 75 bp, synthetic construct
  source 1..75: mol_type = other DNA
cggcaagctgtacggccgcggcacagcggacatgaaaggctttatcgcctgcatgctggcggcagtgccgcattt

SEQ ID NO: 465279 - DNA, 75 bp, synthetic construct
  source 1..75: mol_type = other DNA
cactgggcagttccacaagggcaaagtgcccacgatactttctggattatgtttctctgcaacctgaaactctgc

SEQ ID NO: 465280 - DNA, 75 bp, synthetic construct
  source 1..75: mol_type = other DNA
actcattcgtcgtcagcacgaccgagggcgcaaccatgacggcaagcgtcactgacgctaacggcaacccggtag

SEQ ID NO: 465281 - DNA, 75 bp, synthetic construct
  source 1..75: mol_type = other DNA
gcgtattatcagttgaataatgacaactttgctccaggaaaaacggcggctgattatgagttttcaagctctggc

SEQ ID NO: 465282 - DNA, 75 bp, synthetic construct
  source 1..75: mol_type = other DNA
gaaacattcaagtaaaaattgataatgaagagcacaaaataagcaacgccaccagttctatccgggaattaaaaa

SEQ ID NO: 465283 - DNA, 75 bp, synthetic construct
  source 1..75: mol_type = other DNA
gaatgctcagtttgccattaatgaaattgaaaggataaataaaaaatatgttacagatgataatgcaaataaaaa

SEQ ID NO: 465284 - DNA, 75 bp, synthetic construct
  source 1..75: mol_type = other DNA
ttggattcttcccaatatgactctctaagatctgagtataaaaacattcaattggctgtaagagaaacgagggat

SEQ ID NO: 465285 - DNA, 75 bp, synthetic construct
  source 1..75: mol_type = other DNA
gacagccgtgaaaaattcacccctgcgcagaacatgattttttcgcgtaaaagtgcagaactggcatcacgtcag

SEQ ID NO: 465286 - DNA, 75 bp, synthetic construct
  source 1..75: mol_type = other DNA
cactgttttaggcgtggcgctgtttcgcggcgtaccggttggcccgcttattgccgcgggtctggtttcgctgat

SEQ ID NO: 465287 - DNA, 75 bp, synthetic construct
  source 1..75: mol_type = other DNA
aactggtcgccgggctgctggtgggcactgttttaggcgtggcgctgtttcgcggcgtaccggttggcccgctta

SEQ ID NO: 465288 - DNA, 75 bp, synthetic construct
  source 1..75: mol_type = other DNA
tcaacttctttttcgaccacgaccttagccgttaccactcccgcgccggcattggcgcagagtactggcgcgact

SEQ ID NO: 465289 - DNA, 75 bp, synthetic construct
  source 1..75: mol_type = other DNA
acccggccatgcggggcatggccttgtgggttttcagttatgtggcctcagcgtcgtgtgcgggctgtgccgtgc

SEQ ID NO: 465290 - DNA, 75 bp, synthetic construct
  source 1..75: mol_type = other DNA
atgaaatccgcagcatggcggatgcactggcaaaaatcaggggctgatgatggcggggaaaatccccgctttttt

SEQ ID NO: 465291 - DNA, 75 bp, synthetic construct
  source 1..75: mol_type = other DNA
ggtgaatggctttacggtagggacatgggaaggcaccgccgacaccgatcgcattgatatccgcgagttgttaca

SEQ ID NO: 465292 - DNA, 75 bp, synthetic construct
  source 1..75: mol_type = other DNA
aggcgatacaggccgcaacggcagcggtacagggactggccggcggtaatctgagtgcaccctggcaggtggtgc

SEQ ID NO: 465293 - DNA, 75 bp, synthetic construct
  source 1..75: mol_type = other DNA
tgtgagcatttttctcttatgttccttttttattttgttacacaatattccaatgagtgaagtatttgattctgt

SEQ ID NO: 465294 - DNA, 75 bp, synthetic construct
  source 1..75: mol_type = other DNA
gcttacatacgcgttgacggtgtacgccatcaccttggcttattcacatccgaagcggcggcacgtgctgcgtac

SEQ ID NO: 465295 - DNA, 75 bp, synthetic construct
  source 1..75: mol_type = other DNA
agtgactaagacgtttactgacaacgtcgggatcgattggggaacaacgggtacttctcctggctcgttccgctt

SEQ ID NO: 465296 - DNA, 75 bp, synthetic construct
  source 1..75: mol_type = other DNA
cctgatttccaaagaacatcgacatgggcacgttttctcaatctcgacggaatcagcaattctcacgatcgcaaa

SEQ ID NO: 465297 - DNA, 75 bp, synthetic construct
  source 1..75: mol_type = other DNA
aaggagcaaaaacagcaactgaatactgcagtcagcatcgacaacgtgaaaccaggagtcactactgactggaaa

SEQ ID NO: 465298 - DNA, 75 bp, synthetic construct
  source 1..75: mol_type = other DNA
tttcaccttaatggatattaaagatgaaatggttatacaattagctaacgatttagcaaagatacaaaacaaagt

SEQ ID NO: 465299 - DNA, 75 bp, synthetic construct
  source 1..75: mol_type = other DNA
aacaattaacgccggattgttagttgatgtctgttacgccagtaaaagaccgcttgttttaactgttccgcgtgc

SEQ ID NO: 465300 - DNA, 75 bp, synthetic construct
  source 1..75: mol_type = other DNA
tggaaatcgcgaatctggttggagtgagaggtaaggtcagtgttggggatcttaccgaatattttggagtatccg

SEQ ID NO: 465301 - DNA, 75 bp, synthetic construct
  source 1..75: mol_type = other DNA
gcaaactagattccctcacaacgcataccggcagggctccagatagtgactttgaggttgctgtaatggaagcac

SEQ ID NO: 465302 - DNA, 75 bp, synthetic construct
  source 1..75: mol_type = other DNA
cggtatatcactcaggatccgattgggctgaaggggggatggaatttttatcagtatccgttgaatccagttacg

SEQ ID NO: 465303 - DNA, 75 bp, synthetic construct
  source 1..75: mol_type = other DNA
cgcctggtgttccacacgcggatacagcatggcgagccactggtcgagagccgctacctctacgacccgctggga

SEQ ID NO: 465304 - DNA, 75 bp, synthetic construct
  source 1..75: mol_type = other DNA
aagattacgacaaaaaactgattgaattacaacgtcagcggattgcagcaaaaattgcttgccgaaatataccag

SEQ ID NO: 465305 - DNA, 75 bp, synthetic construct
  source 1..75: mol_type = other DNA
aaatagtttcgaaatggaatgaacagattaaaaatgctgagttatatgcgctagaaacaaagttagagcggagtc

SEQ ID NO: 465306 - DNA, 75 bp, synthetic construct
  source 1..75: mol_type = other DNA
tttatgcgcaattaaacgatttcaaaaatgctttgccagatggtattgcttcgtatatcgatgattcgcaagctg

SEQ ID NO: 465307 - DNA, 75 bp, synthetic construct
  source 1..75: mol_type = other DNA
acttaaaaagcgctttcatgacaagctcacgtctaatttctttgcaggcgatcatgtatgcgcgggcgcagtgga

SEQ ID NO: 465308 - DNA, 75 bp, synthetic construct
  source 1..75: mol_type = other DNA
acgcgcgaatgaagcgcccagcgagcacgggcggtttaagccacaagcggcttgatgatccaggggttattgaga

SEQ ID NO: 465309 - DNA, 75 bp, synthetic construct
  source 1..75: mol_type = other DNA
gagacaccaaagcctatcagcatacatcccgtgaaaaacgagcactgatgctccgtgaagacatcaaaaaaggtt

SEQ ID NO: 465310 - DNA, 75 bp, synthetic construct
  source 1..75: mol_type = other DNA
gtggagcggctggcggcacagatagagccggtttatttgcctgagcgaaaaatacatctttatcactgtgaccac

SEQ ID NO: 465311 - DNA, 75 bp, synthetic construct
  source 1..75: mol_type = other DNA
gcgggcaaccggctgccggacccggagctgcacccggacagtacactcacagtgtggccggataaccgcatcgcg

SEQ ID NO: 465312 - DNA, 75 bp, synthetic construct
  source 1..75: mol_type = other DNA
aaccggaggtgacgtggtacggctgggacggcgaccacctgacgacggtgcagaccgacagcacacgtatccaga

SEQ ID NO: 465313 - DNA, 75 bp, synthetic construct
  source 1..75: mol_type = other DNA
ttgtgtcatcaataatacttttaccccttagttttttttcatttgcaaatgaacaagtgtttggaaatgttgaaa

SEQ ID NO: 465314 - DNA, 75 bp, synthetic construct
  source 1..75: mol_type = other DNA
cggtgacttctccaatgtaattcttagctcatggggtggcctaactgttgatcgcgacgatactactttacgtgc

SEQ ID NO: 465315 - DNA, 75 bp, synthetic construct
  source 1..75: mol_type = other DNA
gttgattgatgccgatggcgttgccgatgttccggtggaaggtaacggggctgctgtttataccaatatgtttgg

SEQ ID NO: 465316 - DNA, 75 bp, synthetic construct
  source 1..75: mol_type = other DNA
tggcagccatccaccgtttggcgcagaagtaaaaaatgataacgagcagacagtgggccttgtcgatgatgacgg

SEQ ID NO: 465317 - DNA, 75 bp, synthetic construct
  source 1..75: mol_type = other DNA
tttcgaaacattttatttggcatgttaaaagtgtattcagatttatgtttgctaaaaacgggttaattaggaata

SEQ ID NO: 465318 - DNA, 75 bp, synthetic construct
  source 1..75: mol_type = other DNA
atatatctatagtttcccataatcacggtgagttaataaagaatttagattgtattaagaatttatctcaagagt

SEQ ID NO: 465319 - DNA, 75 bp, synthetic construct
  source 1..75: mol_type = other DNA
tcactaaatagtagtaatgaaaccagtgaagaggaaagactcatggaagaacaagaaggcatggaagaaacccgc

SEQ ID NO: 465320 - DNA, 75 bp, synthetic construct
  source 1..75: mol_type = other DNA
aatggttttgatgtgacatctattcaaagctcagattttaatcatggtggaactcgtaacgaagcaattaatcaa

SEQ ID NO: 465321 - DNA, 75 bp, synthetic construct
  source 1..75: mol_type = other DNA
atggcatcagataatagatacagtattaacttcacgctatctgttttagaaaaaacagaagcaagcaaattaata

SEQ ID NO: 465322 - DNA, 75 bp, synthetic construct
  source 1..75: mol_type = other DNA
agtgggctgaggaaaatagtaagaataaagataatacagataaagtagctctggacatacaagtttctgttaaaa

SEQ ID NO: 465323 - DNA, 75 bp, synthetic construct
  source 1..75: mol_type = other DNA
gcagccatattttatagaaaaaatagtcgaggcgtttaaagatagtaacgttgcatgtgcttacgggcgacagct

SEQ ID NO: 465324 - DNA, 75 bp, synthetic construct
  source 1..75: mol_type = other DNA
ggttataagttagggcttatttataaaaaactccccaagaaactagtcatacgtcttagtatgcataggcgttat

SEQ ID NO: 465325 - DNA, 75 bp, synthetic construct
  source 1..75: mol_type = other DNA
acactaataatagttatacatcttcaattcgagatgtaccgtcaatgggcttaaaaacagtttttatatcgaatt

SEQ ID NO: 465326 - DNA, 75 bp, synthetic construct
  source 1..75: mol_type = other DNA
tgccaaagcattgtttgttctcaggttccacagaaaatatcaatcagcaccgaatcagcgcagtttcattaccgc

SEQ ID NO: 465327 - DNA, 75 bp, synthetic construct
  source 1..75: mol_type = other DNA
ttgacctttaaagttgattatatcgctacgggtaaagccacttcaggtaatgttaatgcggtaacaaacttccat

SEQ ID NO: 465328 - DNA, 75 bp, synthetic construct
  source 1..75: mol_type = other DNA
ttataactgtgatatgtacaacttcaagtgttatggcggctgatgataatgccatcacggatggctcggttacgt

SEQ ID NO: 465329 - DNA, 75 bp, synthetic construct
  source 1..75: mol_type = other DNA
ttgttcgctggtagctgcgaccaaagattcagtagtcacattgccaaatgtcagcgccaccaagttgcaaactaa

SEQ ID NO: 465330 - DNA, 75 bp, synthetic construct
  source 1..75: mol_type = other DNA
cgtgcaatgaatatgtatccgcacgatgtcattatgcaggaagctaacaaatgtgtccggctggcgctaaaaaat

SEQ ID NO: 465331 - DNA, 75 bp, synthetic construct
  source 1..75: mol_type = other DNA
tacgcagacggcgtactacacaggaaaagatcgctattgttcagcagagccttcgggtaggcagcctgacggctg

SEQ ID NO: 465332 - DNA, 75 bp, synthetic construct
  source 1..75: mol_type = other DNA
atgagatcttatttgatcttgcggcttgctgggccaatgcaagcctgggggcagccgacctttgaaggaacgcga

SEQ ID NO: 465333 - DNA, 75 bp, synthetic construct
  source 1..75: mol_type = other DNA
cattcatacggtacatggctgctgaaccactgctaacggacggttacgacttagttcgactaaatagacggttca

SEQ ID NO: 465334 - DNA, 75 bp, synthetic construct
  source 1..75: mol_type = other DNA
tggaggcagaacgcgatgcgttgcggaaggaagtcgcccgactgaatcaggaaatacgccgtcggcagatggaac

SEQ ID NO: 465335 - DNA, 75 bp, synthetic construct
  source 1..75: mol_type = other DNA
aacgataaagcgtgactacatcagtatcatgcccaaaccagacgggttaacggcagcaaagaatcttgcagaggc

SEQ ID NO: 465336 - DNA, 75 bp, synthetic construct
  source 1..75: mol_type = other DNA
cattatatttgatgacatctagatacgaagggtttccgatggtacttttagaggcgcaggaatatggtatacctg

SEQ ID NO: 465337 - DNA, 75 bp, synthetic construct
  source 1..75: mol_type = other DNA
tttaaaaataataggtggcggtgaggaagaacacagtttaaagacatattgccaaaatcatgatattagcaatat

SEQ ID NO: 465338 - DNA, 75 bp, synthetic construct
  source 1..75: mol_type = other DNA
gagacataagccggtcgggggggacagaaagagttacatgtaaattagctaattatcttacattaaatggctttg

SEQ ID NO: 465339 - DNA, 75 bp, synthetic construct
  source 1..75: mol_type = other DNA
cgggaaatgaaccgatatccacaggaggtgattatgcaggaagccaataaatgtgtccgtctggctcttaaagca

SEQ ID NO: 465340 - DNA, 75 bp, synthetic construct
  source 1..75: mol_type = other DNA
tgccaccgctggcaagcttatcggggcagtgctttcaagttcagagcagacgctggctaactttaccgctgtgac

SEQ ID NO: 465341 - DNA, 75 bp, synthetic construct
  source 1..75: mol_type = other DNA
attgaaagcgtcgccaccgactttggcacgagtgccgaagaatacaaagcagcaaacctgtatttccagcaatcg

SEQ ID NO: 465342 - DNA, 75 bp, synthetic construct
  source 1..75: mol_type = other DNA
tcaagtttaagcaggagccgggtgtcgggtatgaaacactgacagtcagccaggcatcggcacttgatgcaaaaa

SEQ ID NO: 465343 - DNA, 75 bp, synthetic construct
  source 1..75: mol_type = other DNA
tggccgcgcattcacggtgaatttcaccggcagcaataccacgatcacactgaagtttaaaaccgagcctggtat

SEQ ID NO: 465344 - DNA, 75 bp, synthetic construct
  source 1..75: mol_type = other DNA
gggcgttacccggttaatgaccaacgtcgaagcgtcactcgaccaggcggttaataacggcctggtggctccggg

SEQ ID NO: 465345 - DNA, 75 bp, synthetic construct
  source 1..75: mol_type = other DNA
ggcgcaaagtcagcgatcggtattccaacggcggacggaacgggtactgacctggctccactactgggcattgat

SEQ ID NO: 465346 - DNA, 75 bp, synthetic construct
  source 1..75: mol_type = other DNA
ggcgcaggttttcttcagccagtcgccgaagccgacgcaggtttatgttggccgctgggcgaagacgctgacctc

SEQ ID NO: 465347 - DNA, 75 bp, synthetic construct
  source 1..75: mol_type = other DNA
gttcttccactgtcattccggtgcaggagcgcgttcgcctttatgcgtccgttgaggacattggcgaagacttcg

SEQ ID NO: 465348 - DNA, 75 bp, synthetic construct
  source 1..75: mol_type = other DNA
cagcgaacaggccacgcctgagacgctggagcaggctgtgaatgccatgctcgattatacttcatggtatgggct

SEQ ID NO: 465349 - DNA, 75 bp, synthetic construct
  source 1..75: mol_type = other DNA
aacggcagcaacaccaccattaccctgaagttcaaacaggagccgggaatcacgtatgaaaccctgaccaccaat

SEQ ID NO: 465350 - DNA, 75 bp, synthetic construct
  source 1..75: mol_type = other DNA
acgtgattgaggttgctaaactcatcgaagcgtccagtctgagccgcattttcggggtaacatctgccgacgccg

SEQ ID NO: 465351 - DNA, 75 bp, synthetic construct
  source 1..75: mol_type = other DNA
ggatatagagatttaagcaagcatttatttggaatgtatttttcgttcgacctttgcttatacataacagtcgtt

SEQ ID NO: 465352 - DNA, 75 bp, synthetic construct
  source 1..75: mol_type = other DNA
gtttcatagcaataatattggtagttctactgcatgccagcgccgggcctgttggggccaaactcgcgcctgact

SEQ ID NO: 465353 - DNA, 75 bp, synthetic construct
  source 1..75: mol_type = other DNA
tttaataaatataatataaaaagttttaggactgattatttttgggataaagtggagaagcaacctcatgagtat

SEQ ID NO: 465354 - DNA, 75 bp, synthetic construct
  source 1..75: mol_type = other DNA
tgctaggttatagtaacacatcatccttcattattatgtttgaaaaactctcgggtacaacccccgaaaagtacc

SEQ ID NO: 465355 - DNA, 75 bp, synthetic construct
  source 1..75: mol_type = other DNA
aaaatgcaaataaacttgtaactctaatttccgaatatgcatttggaatttatcttatacatcctattattatat

SEQ ID NO: 465356 - DNA, 75 bp, synthetic construct
  source 1..75: mol_type = other DNA
ttattggatgccaacgcatggatttgcggtataacgtgatgatatttttaattctattctatgggaattctgtac

SEQ ID NO: 465357 - DNA, 75 bp, synthetic construct
  source 1..75: mol_type = other DNA
ggtacagcacctgctgtatgcgtcatcaagttcagtttattgtcaacgacggatgaaaagtgatccacttatatc

SEQ ID NO: 465358 - DNA, 75 bp, synthetic construct
  source 1..75: mol_type = other DNA
aagaacgaagaaaagtgttgggtgtggcgcgtcagcaaattcgttctcagcgtaaagccaatcagattaaaagtg

SEQ ID NO: 465359 - DNA, 75 bp, synthetic construct
  source 1..75: mol_type = other DNA
ttatcccaacgacggaaatgaaaaaatattgtagtgaaatatgtgccgaaaaagaccagatggcacacgaacttt

SEQ ID NO: 465360 - DNA, 75 bp, synthetic construct
  source 1..75: mol_type = other DNA
caaacagaagtgcagaacattatataatgttctcatatggtgtatcattacgactatctaattacctttttaaca

SEQ ID NO: 465361 - DNA, 75 bp, synthetic construct
  source 1..75: mol_type = other DNA
tgaagcaaactgggaaggccgctttacgctggaggatctgaacattcacggtaagcgagcgttgggcatggatgt

SEQ ID NO: 465362 - DNA, 75 bp, synthetic construct
  source 1..75: mol_type = other DNA
ctgctgcgccaatgtgcgagaaaaatcgggcttatgcacacaaagtcaaaatggcgctggaaaaaggcgcatcac

SEQ ID NO: 465363 - DNA, 75 bp, synthetic construct
  source 1..75: mol_type = other DNA
tgatcagctaatttgtatttctgaaagtgtagctaatgaagtaagaaactggattgatgcacaggagacagatgt

SEQ ID NO: 465364 - DNA, 75 bp, synthetic construct
  source 1..75: mol_type = other DNA
aacgcctgctgacggccatggaccgcgcgcatccgctgcgcgacgcgctcaaacgctacagcaatcgcctgtcgg

SEQ ID NO: 465365 - DNA, 75 bp, synthetic construct
  source 1..75: mol_type = other DNA
gcaagatggatggttttgttcctatggagccttgtgaatgtggtgcattccggatggaaggtcattgcagtaact

SEQ ID NO: 465366 - DNA, 75 bp, synthetic construct
  source 1..75: mol_type = other DNA
gctgaacaaaaagctcttctggctgcagaatatcagcgacgagtttttggccgagctatacgctcgttcacgcgc

SEQ ID NO: 465367 - DNA, 75 bp, synthetic construct
  source 1..75: mol_type = other DNA
ctcacacgggcattccattaccgtaaatgctactggcaataccgaaaacaccgtcaaaaacatcgcatttaacta

SEQ ID NO: 465368 - DNA, 75 bp, synthetic construct
  source 1..75: mol_type = other DNA
accctaagaaccgtacagactgccacttatttttcaggtggcaaaacaccggttatcccggagatgtcaacttgt

SEQ ID NO: 465369 - DNA, 75 bp, synthetic construct
  source 1..75: mol_type = other DNA
agcggatcctcatcgcgatggacaaaaagctgacgttacgcgatgaacccaggcgttatatcaaccggctgtcgg

SEQ ID NO: 465370 - DNA, 75 bp, synthetic construct
  source 1..75: mol_type = other DNA
catgcccagacgctggccgcctttgaggaactatggtgcgagggcaaaaactacaacttgtttattgtcggtaaa

SEQ ID NO: 465371 - DNA, 75 bp, synthetic construct
  source 1..75: mol_type = other DNA
tgttgagggaggagtcagttttaatgaagtcaacgtcggtaatatgcatcataattccgaacggaaacaaattga

SEQ ID NO: 465372 - DNA, 75 bp, synthetic construct
  source 1..75: mol_type = other DNA
agatgttccccaatctcgactggttctctgctgtttcctacaacatgatgggcgttcccaccgagatgttcacac

SEQ ID NO: 465373 - DNA, 75 bp, synthetic construct
  source 1..75: mol_type = other DNA
tatgcgtgtgccacgatctgatcccgctgttaaataaagagcgttatctcggcgacccgaatttccgcgagtttt

SEQ ID NO: 465374 - DNA, 75 bp, synthetic construct
  source 1..75: mol_type = other DNA
atgatgcagaaaatcgatgcgctgagcgaagtcgaccgtcttggtctggcatgggcggttgcgcgcaatagcttt

SEQ ID NO: 465375 - DNA, 75 bp, synthetic construct
  source 1..75: mol_type = other DNA
aatattaatgatgttaaaatggcctatcgggacctgctgacggatgaagatatgttcatcttctcagccgtcgcg

SEQ ID NO: 465376 - DNA, 75 bp, synthetic construct
  source 1..75: mol_type = other DNA
atggcgggtggtgttgcaggtgggaatactgcgggtgtggctaccggagctgctgcagggaagaatgttgttgag

SEQ ID NO: 465377 - DNA, 75 bp, synthetic construct
  source 1..75: mol_type = other DNA
aatgaaagcgatttgaatgacgtgttgatgccagcatcattaagtgatgataaaattatcaaacatatggcgcgc

SEQ ID NO: 465378 - DNA, 75 bp, synthetic construct
  source 1..75: mol_type = other DNA
aatgatggggaaagacagatacttgatgtgctttaccccgctcaggcagttgcatcctacggtgaatcgatcaac

SEQ ID NO: 465379 - DNA, 75 bp, synthetic construct
  source 1..75: mol_type = other DNA
tttgccaaccctgtcgttgctgcggctacggaagataacgattttgatatgcgtgatgtgcgccgtaaaaaaatg

SEQ ID NO: 465380 - DNA, 75 bp, synthetic construct
  source 1..75: mol_type = other DNA
atccacaagattgccatttgcgaaaatttttcaggggaaaatgtatcgatttatgaaaggaaactgaaactggca

SEQ ID NO: 465381 - DNA, 75 bp, synthetic construct
  source 1..75: mol_type = other DNA
atgatttcggaagtggattagctgacctgaaaaaactttataaagtaagacctgatagcattaaaattgattcag

SEQ ID NO: 465382 - DNA, 75 bp, synthetic construct
  source 1..75: mol_type = other DNA
ggtaaaatttctggggcaatcagaacccggtaaaccttttattggtgacgatggtgatatcagcgataactactt

SEQ ID NO: 465383 - DNA, 75 bp, synthetic construct
  source 1..75: mol_type = other DNA
tttcttagagagagtaatttactgaatgcgtttattcggacgtgcaaaaaaagagatgataacagttacggaaat

SEQ ID NO: 465384 - DNA, 75 bp, synthetic construct
  source 1..75: mol_type = other DNA
gctgttagtgacgcaaatgaaattttgaacgtcttagaattagatattgatgattcacaaaaagaaaagctatca

SEQ ID NO: 465385 - DNA, 75 bp, synthetic construct
  source 1..75: mol_type = other DNA
ctttaataaatggattaaattaactggaaaagataagaatcaatattatctatgggccgcaaaaaaagtacaagt

SEQ ID NO: 465386 - DNA, 75 bp, synthetic construct
  source 1..75: mol_type = other DNA
ttttcttttgagtttgatgattttaaagttgcatgggatttcaaatatccaaaaaaaagaattatccggttctgg

SEQ ID NO: 465387 - DNA, 75 bp, synthetic construct
  source 1..75: mol_type = other DNA
tcagccaccgggcctgacgggctggaaatacgccgggaatacgatgaatggggtaaccagctgaatgaagagaac

SEQ ID NO: 465388 - DNA, 75 bp, synthetic construct
  source 1..75: mol_type = other DNA
tcatttaagctaggtagtacacgtagtgttattttagaaacacaaccaaatgtctgtatggaaccacataattta

SEQ ID NO: 465389 - DNA, 75 bp, synthetic construct
  source 1..75: mol_type = other DNA
ccatcaatttttgtacctgttgctgaagaaataggattaattaaagaactgggtgattttgttctcgaaacagct

SEQ ID NO: 465390 - DNA, 75 bp, synthetic construct
  source 1..75: mol_type = other DNA
taaagaagttgatcataaaatttcttttgatacttttattgatagaattttcaaatcagaaacaggagattgggt

SEQ ID NO: 465391 - DNA, 75 bp, synthetic construct
  source 1..75: mol_type = other DNA
ttcctgccgagcgcgaacctctgccaggcgtaaaattctcacaccggggctccaagatgcgaacaccacatcttg

SEQ ID NO: 465392 - DNA, 75 bp, synthetic construct
  source 1..75: mol_type = other DNA
aaaatgaaaagtctggcggaggaccaatagctcctaatggtgcatggcatatgccaagaacaggggattcgccga

SEQ ID NO: 465393 - DNA, 75 bp, synthetic construct
  source 1..75: mol_type = other DNA
gatgttctgttgagtggcgctgcaaacacacaaaaaacaacgggcaggaacagcagcagtggcggtggcgtgggt

SEQ ID NO: 465394 - DNA, 75 bp, synthetic construct
  source 1..75: mol_type = other DNA
gcacttcaagtttatctacgagttaatgggggcagaaaggatcctattctccgtcgattatccctatcagaccct

SEQ ID NO: 465395 - DNA, 75 bp, synthetic construct
  source 1..75: mol_type = other DNA
tttgcctcgaagaaaattatctcgacagcgagttagggcgagcgtgtatgcctgttgcgcttgagcaggcacctt

SEQ ID NO: 465396 - DNA, 75 bp, synthetic construct
  source 1..75: mol_type = other DNA
atggagtataatattgaggttgtccctgcgatacatagcaatttaaaattactttttatagaatgttatcctatt

SEQ ID NO: 465397 - DNA, 75 bp, synthetic construct
  source 1..75: mol_type = other DNA
attcatggaacaaaataaaaggataatggtaggtaatgaaaaatcaatgttacatcttattgtccgtgagtcatc

SEQ ID NO: 465398 - DNA, 75 bp, synthetic construct
  source 1..75: mol_type = other DNA
atctgcctggagatcaccgaatcagcagtaaaagatataaatgatagcttttacaataatataaatattttaaaa

SEQ ID NO: 465399 - DNA, 75 bp, synthetic construct
  source 1..75: mol_type = other DNA
ctcgctttaggcccttatccgcttttgacgcttgcacaggcaagacgcatgcgtgaagaggcacaattattgctg

SEQ ID NO: 465400 - DNA, 75 bp, synthetic construct
  source 1..75: mol_type = other DNA
tggaggagctgaaagccagaatactcgctgactcggattggctgacggcgtctgagttatcggcaaaagcgggtt

SEQ ID NO: 465401 - DNA, 75 bp, synthetic construct
  source 1..75: mol_type = other DNA
ggggctggctatctggtttggctcggctaatcgcaggttgagaggtgggaggccgaaagacctgctgatttcgaa

SEQ ID NO: 465402 - DNA, 75 bp, synthetic construct
  source 1..75: mol_type = other DNA
aagactccgttcccggcgttaatgccaaagggaatcaggacacctctggtaatgcggctacagcgaccaaattgc

SEQ ID NO: 465403 - DNA, 75 bp, synthetic construct
  source 1..75: mol_type = other DNA
ctgccatatccgcattggttggttcatcaccagaagctcttgataccctgaatgagcttgccgcagcacttggca

SEQ ID NO: 465404 - DNA, 75 bp, synthetic construct
  source 1..75: mol_type = other DNA
agaagtgtttgacctagcaaagcaaaaacaaccagcagatgatacgctcaccgctctggcaggacttgcgacggc

SEQ ID NO: 465405 - DNA, 75 bp, synthetic construct
  source 1..75: mol_type = other DNA
tgattgtgaagattgcccaactctattacgaacaggatatgacgcaggcgcaaatcgcgcgcgaactgggtattt

SEQ ID NO: 465406 - DNA, 75 bp, synthetic construct
  source 1..75: mol_type = other DNA
cctttacggtaagattgcgtgaccatctggcgacatttacacgccaccggactaaaccggtatgggggatcacgg

SEQ ID NO: 465407 - DNA, 75 bp, synthetic construct
  source 1..75: mol_type = other DNA
gtcgctgggacaaagccagactctcatttctgaattctaatcctctatgtgtcatgtgtcgtcgccagggcaggg

SEQ ID NO: 465408 - DNA, 75 bp, synthetic construct
  source 1..75: mol_type = other DNA
aggatttgcccgcagcgagcaggagcaagtgggcaaatattactgcgatcgcgcaatggctaaaaagtttgtgct

SEQ ID NO: 465409 - DNA, 75 bp, synthetic construct
  source 1..75: mol_type = other DNA
catcgcggccaactgaattgatccagttccgtcagccaaatattgctgatgcgatgcgtttcaactcgatcgata

SEQ ID NO: 465410 - DNA, 75 bp, synthetic construct
  source 1..75: mol_type = other DNA
tgccagggcatggggtatcagtggtgaggccgagctggccgtcatgcaggctatcgctgaaaagccgggagcgtt

SEQ ID NO: 465411 - DNA, 75 bp, synthetic construct
  source 1..75: mol_type = other DNA
attaatatgacaggtggcgcggcctcaaggattacagcgagagtcagaaaggacgaagctaccggatggattttt

SEQ ID NO: 465412 - DNA, 75 bp, synthetic construct
  source 1..75: mol_type = other DNA
agccgtaccggctgccggggcagcagtatgataaggagtcggggctgtactacaaccggaaccggtactacgatc

SEQ ID NO: 465413 - DNA, 75 bp, synthetic construct
  source 1..75: mol_type = other DNA
gatggaaacattgcgtggagcggggagtatgatgagtggggcaaccagctgaatgaagagaacccgcatcccctg

SEQ ID NO: 465414 - DNA, 75 bp, synthetic construct
  source 1..75: mol_type = other DNA
tgttactgaaaacaccggacgtaaaactccgggtgttgatggcgaaatatggcaacatcccgaatccaagtggtc

SEQ ID NO: 465415 - DNA, 75 bp, synthetic construct
  source 1..75: mol_type = other DNA
gatacaacacttgctgtttcggaaggtggtaaaatctctgcgccgactattagtttaagcaccaactctgagtta

SEQ ID NO: 465416 - DNA, 75 bp, synthetic construct
  source 1..75: mol_type = other DNA
agtttaagcaccaactctgagttagcgttaggtgcacaggaaggaagtgctgcgaaggctgcagggattattgat

SEQ ID NO: 465417 - DNA, 75 bp, synthetic construct
  source 1..75: mol_type = other DNA
ggggaatcacgaattctccttcgatgagtttgcttatacagactggtttcagggggcactggcattccagaacac

SEQ ID NO: 465418 - DNA, 75 bp, synthetic construct
  source 1..75: mol_type = other DNA
gaatccagcagtggctgaccttaccgacacaattgccggtgccaatagtggcatgtggactcgattgggaaccat

SEQ ID NO: 465419 - DNA, 75 bp, synthetic construct
  source 1..75: mol_type = other DNA
ggcacgctggatatcgcgggcgataacagcagcctgacggcgaatatgaatattgctaactcagctcatgtcctg

SEQ ID NO: 465420 - DNA, 75 bp, synthetic construct
  source 1..75: mol_type = other DNA
ctgcagagaggcgggatcactgcgggtcagggaagccaggtaacagtgggtaagggcgctcactccattagcact

SEQ ID NO: 465421 - DNA, 75 bp, synthetic construct
  source 1..75: mol_type = other DNA
atggcatcggtactggtgttgcttatggcaccagcagccatattaacaattttgcgttttgttgcgctgttgcca

SEQ ID NO: 465422 - DNA, 75 bp, synthetic construct
  source 1..75: mol_type = other DNA
atacggcggactatctcaagaccgaggatgatattgcggcctatctcgatgccgtgatggaggacggcgaccccg

SEQ ID NO: 465423 - DNA, 75 bp, synthetic construct
  source 1..75: mol_type = other DNA
tggagacgtggcccgtgcccgtgcccgcaacctgagagggccggacaagactctgccgggcggcggcaaacagtc

SEQ ID NO: 465424 - DNA, 75 bp, synthetic construct
  source 1..75: mol_type = other DNA
tgaccggcaataactatgcattcagcggatatattgatgtcgcttctggtgctgtcgcggttatttctgaagaca

SEQ ID NO: 465425 - DNA, 75 bp, synthetic construct
  source 1..75: mol_type = other DNA
tgtcgcttccgatgctgtcgctgttatttctgaagataagaacatcggccgtgcagaactggatgttgatggcaa

SEQ ID NO: 465426 - DNA, 75 bp, synthetic construct
  source 1..75: mol_type = other DNA
atggcactcatgaatctggtatacttaccgttacacattggggctgattctggattcgacgggatttgcgaaacc

SEQ ID NO: 465427 - DNA, 75 bp, synthetic construct
  source 1..75: mol_type = other DNA
aattttgtccgtaggttaaaaatgcaaaaagataacgtgatgatcaccggcgatgcgctgctggattttggcgac

SEQ ID NO: 465428 - DNA, 75 bp, synthetic construct
  source 1..75: mol_type = other DNA
cggcagaagcctgtattttgagcacctgtttcccggtgaggacggttacagccgcagcgagtcactctggctggt

SEQ ID NO: 465429 - DNA, 75 bp, synthetic construct
  source 1..75: mol_type = other DNA
agaccgatctgggttcgaaaacgaccagttcatttaattatggaaccaaaacaaccagcacaggcgggagacacg

SEQ ID NO: 465430 - DNA, 75 bp, synthetic construct
  source 1..75: mol_type = other DNA
gggcgcacttcagaaagcacagaacggtaaagacatcccgaataaagcaacttttctgacgaacattggcgttac

SEQ ID NO: 465431 - DNA, 75 bp, synthetic construct
  source 1..75: mol_type = other DNA
gcactgaagggtggcaatcaggaagagatagcgaaggcacggaagctcttctgggataagggtaactggcaaccc

SEQ ID NO: 465432 - DNA, 75 bp, synthetic construct
  source 1..75: mol_type = other DNA
gtcgttgaaaagggtggcgagtggctaataaaaaataacgattcctcaattgaatttcaaattggtaatcaaggg

SEQ ID NO: 465433 - DNA, 75 bp, synthetic construct
  source 1..75: mol_type = other DNA
ggcggcgatttggcgcagtggagtagcaacgcgcaggatcgctggcatcttggcgtgatggcaggttacgctaat

SEQ ID NO: 465434 - DNA, 75 bp, synthetic construct
  source 1..75: mol_type = other DNA
ccgatgctggacgctgctggggcgacattgcttgggatactggaagtaatcaggcgttttgatggtgtatctgtc

SEQ ID NO: 465435 - DNA, 75 bp, synthetic construct
  source 1..75: mol_type = other DNA
ggcttgataacatgaccaacattcccgacggtatggactggggcgtcattgatggtaacctgataaacatcgctg

SEQ ID NO: 465436 - DNA, 75 bp, synthetic construct
  source 1..75: mol_type = other DNA
aaatttcacaaaagaataaagtcactgtgatttttacacataatcattgcctgtcaaaaattgcaagaaaaatga

SEQ ID NO: 465437 - DNA, 75 bp, synthetic construct
  source 1..75: mol_type = other DNA
ctcgacattcttaatttatataatgttgaattagctgctatacgcgttactgaatcaaactctgataatcttagc

SEQ ID NO: 465438 - DNA, 75 bp, synthetic construct
  source 1..75: mol_type = other DNA
caacgaagcagcgaatggagaagcgtggcaccgtcatcggttgtgatgagagcggaatgcccctggatcctaact

SEQ ID NO: 465439 - DNA, 75 bp, synthetic construct
  source 1..75: mol_type = other DNA
gaactatccggcaatgctgctacagcaacaaagctgaaaacggcaaggacaattaacggcgtaaaatttgacggc

SEQ ID NO: 465440 - DNA, 75 bp, synthetic construct
  source 1..75: mol_type = other DNA
ggggggtgagcagacttaccggtatgtgcctaatccgctggggtatgttgatccgttagggttggctgtatgtcc

SEQ ID NO: 465441 - DNA, 75 bp, synthetic construct
  source 1..75: mol_type = other DNA
tatgccgtcaaaaattaggttatcatacggtctttaaacacactccatatcaaataaataaaaattggttttgcc

SEQ ID NO: 465442 - DNA, 75 bp, synthetic construct
  source 1..75: mol_type = other DNA
agcgcacgcagtatgaagtgtatgactaccccggacgtttcaagggtgcccacgggcagaactttgcccgctggc

SEQ ID NO: 465443 - DNA, 75 bp, synthetic construct
  source 1..75: mol_type = other DNA
atgaatgccgtgccggtgctgaaaacgtggcaggagtccgatccagatcgcttctcggttgctgtatccatcgac

SEQ ID NO: 465444 - DNA, 75 bp, synthetic construct
  source 1..75: mol_type = other DNA
acctacgctttgtcagcgaaccagataacggtatctacgacgccatgaacaaaggtattgaaatggcgcaaggca

SEQ ID NO: 465445 - DNA, 75 bp, synthetic construct
  source 1..75: mol_type = other DNA
ttatcgccagcaggatacgcgtagcggcccggtaagtgtctatcggcgtaaagagatccatcaggagggtaatgt

SEQ ID NO: 465446 - DNA, 75 bp, synthetic construct
  source 1..75: mol_type = other DNA
ctgctatcgcccgatctcttggcccatgtttcgccgctcggatgggaacacatcaatctcaccggagaatatcgc

SEQ ID NO: 465447 - DNA, 75 bp, synthetic construct
  source 1..75: mol_type = other DNA
ccattcgccagcaaagccgaagccagtaccttgcagcaacgtttgcaaaccgaagcccaattacagtcatttatt

SEQ ID NO: 465448 - DNA, 75 bp, synthetic construct
  source 1..75: mol_type = other DNA
ggtttaaatataaaagtcttgcatacaaatggaagaaccggggcatgcaatgctagaaatataggaatagaagcg

SEQ ID NO: 465449 - DNA, 75 bp, synthetic construct
  source 1..75: mol_type = other DNA
gtatttaacggctttgagctgataagccagcagttcagccgggtacggcagccgcatccgtccgtcgccccgctg

SEQ ID NO: 465450 - DNA, 75 bp, synthetic construct
  source 1..75: mol_type = other DNA
ggagtttagtctccaggatttccggggcggttcaccagtcccgtgttcagcaatcagcacagcaggcagaaggta

SEQ ID NO: 465451 - DNA, 75 bp, synthetic construct
  source 1..75: mol_type = other DNA
tttgaatggaaagggctgaagaaattatgcgtggcagtctcctttcggtctataatagcagaacaaaagaaagag

SEQ ID NO: 465452 - DNA, 75 bp, synthetic construct
  source 1..75: mol_type = other DNA
tttgaggaaaaatttccgctgaaagaattaaataatccagagcatgacagttacgcaattagtgaaaagagtcac

SEQ ID NO: 465453 - DNA, 75 bp, synthetic construct
  source 1..75: mol_type = other DNA
cggcctaaactcacaaattggttgaaacagtcagttaatgaaaaaatgccaatgagtgaaacgctaaaagagctt

SEQ ID NO: 465454 - DNA, 75 bp, synthetic construct
  source 1..75: mol_type = other DNA
ccattgatctctccagccacaatgcaaacccggcttctcaggcattcctggccgcagccggtaatgtgggcctgc

SEQ ID NO: 465455 - DNA, 75 bp, synthetic construct
  source 1..75: mol_type = other DNA
ctacctgttggctgtgttggttatctttggcggactggtgttcaacattggcaacatcgcgggcgccggtttagg

SEQ ID NO: 465456 - DNA, 75 bp, synthetic construct
  source 1..75: mol_type = other DNA
gatgataatgctgcaaaagcattgacaaaatggtggaacgatacagcatcacaaagaatatttgactctctaata

SEQ ID NO: 465457 - DNA, 75 bp, synthetic construct
  source 1..75: mol_type = other DNA
gcgggagcgaagaacaagcgcggtacggtggcaatggcccgcacacaagcgccgcacagtgctaccagccagttt

SEQ ID NO: 465458 - DNA, 75 bp, synthetic construct
  source 1..75: mol_type = other DNA
gtgattcaaggcggcggctacaagtctgaaatggtggaattagccaccaacgagccggttcagaacgaagcgaag

SEQ ID NO: 465459 - DNA, 75 bp, synthetic construct
  source 1..75: mol_type = other DNA
ttcattacgaacataccctgatggcactggaagcgggctgccatgtgatgtgcgaaaaaccgcccgccatgacgc

SEQ ID NO: 465460 - DNA, 75 bp, synthetic construct
  source 1..75: mol_type = other DNA
atgaaaggcattcttttccgtgcgaaagacgcaatcaaggcgaaattcggcgctcgctggctgccagcgaaggca

SEQ ID NO: 465461 - DNA, 75 bp, synthetic construct
  source 1..75: mol_type = other DNA
cgcaattatcatttccggcattgtgacggcgctgcataaccgtctgttcgataaaaaactgccggtgtttctcgg

SEQ ID NO: 465462 - DNA, 75 bp, synthetic construct
  source 1..75: mol_type = other DNA
ttcgcgttcggtattctggcttctatcctgattgactttgtcgtacagcaaaatatctggcgcgtggtaaccctg

SEQ ID NO: 465463 - DNA, 75 bp, synthetic construct
  source 1..75: mol_type = other DNA
aatacagttatttgcatagcattaatggttcgctgattgaggctgcactggatgatgtgtctgtgggggaaattt

SEQ ID NO: 465464 - DNA, 75 bp, synthetic construct
  source 1..75: mol_type = other DNA
cgatgttctcagaagcgtcagtcgggtgttcagccaggtgacggcgcctccccaccaggcacggtccgtggaaat

SEQ ID NO: 465465 - DNA, 75 bp, synthetic construct
  source 1..75: mol_type = other DNA
tgaatccataccaaaccagtcacaagggattgcaggtatggtatttggcggacaaaacaataaaatagccataat

SEQ ID NO: 465466 - DNA, 75 bp, synthetic construct
  source 1..75: mol_type = other DNA
gaattacagaaggttttgtccaggaacaatttagacagttcggtattacgtctcctttgagcccccattttgtga

SEQ ID NO: 465467 - DNA, 75 bp, synthetic construct
  source 1..75: mol_type = other DNA
ggcagtcatttacagttgtagcagaaggtgctgttagcctgttgagcagaaaccaggggatgcaactgttagcag

SEQ ID NO: 465468 - DNA, 75 bp, synthetic construct
  source 1..75: mol_type = other DNA
tctagagctaatgttgaacgaataaaagaaggtatgggatttgcccccctctctatcgatccatccggaatgtag

SEQ ID NO: 465469 - DNA, 75 bp, synthetic construct
  source 1..75: mol_type = other DNA
ctacccgtgttgcactggttcctgttcttgcggcagagccaaccggtatagacaaactcaaacagctcgcaggtt

SEQ ID NO: 465470 - DNA, 75 bp, synthetic construct
  source 1..75: mol_type = other DNA
tggaaagtgaaatcctggctgaccgggtgagtgaggaaagccgccgctggctggcatcgtgcggcctgactgtgg

SEQ ID NO: 465471 - DNA, 75 bp, synthetic construct
  source 1..75: mol_type = other DNA
taacgatggtcatctgacccgcggggctcataaccgccggcaggcatccgtcgccgcgctggataacacactgcg

SEQ ID NO: 465472 - DNA, 75 bp, synthetic construct
  source 1..75: mol_type = other DNA
cgaacgacgttgactacacacacctctcggcatgccgtgtttatgatatggcactcaaggaatacaaccagtgtt

SEQ ID NO: 465473 - DNA, 75 bp, synthetic construct
  source 1..75: mol_type = other DNA
taaagagttcatgagagagaaagcacatgagataatgaagaacatcaagaccagaaactcagaactatcatcaga

SEQ ID NO: 465474 - DNA, 75 bp, synthetic construct
  source 1..75: mol_type = other DNA
aaattggtaaacgaactattaaccaccgtccttactaaagaggaaacaaatgacaaaacagaaatcaacacccgc

SEQ ID NO: 465475 - DNA, 75 bp, synthetic construct
  source 1..75: mol_type = other DNA
attgacccaagctctgacacttgcccgaaatttgcaggcggcagtaaaaggagcaaaagctacgccatcggatat

SEQ ID NO: 465476 - DNA, 75 bp, synthetic construct
  source 1..75: mol_type = other DNA
aggtgcttcagcgccggaactggcgcatctgctgaaatcaacagaaaaagacccggcagtaaacgccattgctca

SEQ ID NO: 465477 - DNA, 75 bp, synthetic construct
  source 1..75: mol_type = other DNA
gactgcggtatggattagaaatagccataccaatgagcgctttctggtcaattcgtggattgaaaacagcagcgg

SEQ ID NO: 465478 - DNA, 75 bp, synthetic construct
  source 1..75: mol_type = other DNA
ccatgaaaaaatattctgaccgttctgattgggttttgttcttgagggtatacaaaaatgcagttctttttattg

SEQ ID NO: 465479 - DNA, 75 bp, synthetic construct
  source 1..75: mol_type = other DNA
caagccgtgacgaacgaacagggtaaggctaccgtcacttataccaatacccgctcctcgatagaatcaggagcg

SEQ ID NO: 465480 - DNA, 75 bp, synthetic construct
  source 1..75: mol_type = other DNA
ggtcaaagatcagttcgacaatgaggtgaacaatcttccggtaacattcagcacagcttcttcaggcctcaccct

SEQ ID NO: 465481 - DNA, 75 bp, synthetic construct
  source 1..75: mol_type = other DNA
caatactaacgacagtggtgttgctgaagttacccttaagggcacggttttgggtgttcatacagtcgaagccac

SEQ ID NO: 465482 - DNA, 75 bp, synthetic construct
  source 1..75: mol_type = other DNA
ctatcaggccatccgatcaatgtttctgaagggatggaatttgtgcaatcaggtaccaacgtgccctatgtgcaa

SEQ ID NO: 465483 - DNA, 75 bp, synthetic construct
  source 1..75: mol_type = other DNA
aattggtggtgaattttattgcggatacgctcacagcgcaggttaatctgaacgttaccgagaacaactttatcg

SEQ ID NO: 465484 - DNA, 75 bp, synthetic construct
  source 1..75: mol_type = other DNA
tttcaccatgccacaagacgtcgcggcaaactttacccttgaaaataacggtattaccgtcacccaggccaatgg

SEQ ID NO: 465485 - DNA, 75 bp, synthetic construct
  source 1..75: mol_type = other DNA
cgcaaacagtagatataacgctggtggcaggcccggcagacgcctcgcagtccgtccttaaaaacaaccggtcat

SEQ ID NO: 465486 - DNA, 75 bp, synthetic construct
  source 1..75: mol_type = other DNA
gcatcaagtcaacttatcggcgtcaatgacccatcgggagcaactctgactgtaaggttaactcatgcaaacggg

SEQ ID NO: 465487 - DNA, 75 bp, synthetic construct
  source 1..75: mol_type = other DNA
ggggagcgtcacggtaagcgcagaaacgagctatggtggggcgcaaacagtagatataacgctggtggcaggccc

SEQ ID NO: 465488 - DNA, 75 bp, synthetic construct
  source 1..75: mol_type = other DNA
ccgcaacgctgagtaataacaataccagtgattcgcagccggtaacgtttgtggcggacaaaacctcggctcagg

SEQ ID NO: 465489 - DNA, 75 bp, synthetic construct
  source 1..75: mol_type = other DNA
aatcgcctccctgaccggcacgttagcgggcacgcatatgatcacggctcgtctggctaacagcaatgtcagcga

SEQ ID NO: 465490 - DNA, 75 bp, synthetic construct
  source 1..75: mol_type = other DNA
ggacgttgcggcaaactttacccttgaaaataacggtattgccatcactcaggccaatggcgaagcgcatgtcac

SEQ ID NO: 465491 - DNA, 75 bp, synthetic construct
  source 1..75: mol_type = other DNA
cactcgcgcagaagacaaaataatgagcggtacagtatcagtcaatggtactgaaccgccccgggaatcctggag

SEQ ID NO: 465492 - DNA, 75 bp, synthetic construct
  source 1..75: mol_type = other DNA
tttctcagggggcgggttccctgacgttccgtgataattacacagtaacaacctctaacggaagtacctggaccg

SEQ ID NO: 465493 - DNA, 75 bp, synthetic construct
  source 1..75: mol_type = other DNA
agctggtgtgctgacacagggaagcaccacatatgccatgcacgggcagcagggaaatgacctgaatgctggtaa

SEQ ID NO: 465494 - DNA, 75 bp, synthetic construct
  source 1..75: mol_type = other DNA
gaggttgcccctactgcggtgacggcgcagggggcagtggctgacgcatatctggataaggagcgctatcctgtt

SEQ ID NO: 465495 - DNA, 75 bp, synthetic construct
  source 1..75: mol_type = other DNA
cggattatgtgccaatgcttacgattattttgaatcaaccggtgcagacagtgaagccgcattagaacaattaca

SEQ ID NO: 465496 - DNA, 75 bp, synthetic construct
  source 1..75: mol_type = other DNA
ccgcgaaattacctcagtcttcaaagaaatgtacgatgcagacgtctctccggcgctgatatcgaaagtaaccga

SEQ ID NO: 465497 - DNA, 75 bp, synthetic construct
  source 1..75: mol_type = other DNA
taggtttctggatgactctttgttacctgaaaacgatttccgcaacaggaggagaaatttttcaggcaatattgc

SEQ ID NO: 465498 - DNA, 75 bp, synthetic construct
  source 1..75: mol_type = other DNA
attggcgacacagcggcggcaaaaattatcgagttgacgcctgtgccagacagcataatcgccggtaccccgcag

SEQ ID NO: 465499 - DNA, 75 bp, synthetic construct
  source 1..75: mol_type = other DNA
gatgttgatgctaccggtaaagtgacatttaaaaatgtcggcagcaattgggaaaggattacggcgacgccaaaa

SEQ ID NO: 465500 - DNA, 75 bp, synthetic construct
  source 1..75: mol_type = other DNA
atatcaggcaatccgatcaatgtttctgaagggatggaatttgtgcagtcagataccaacgtgccctatgtgcaa

SEQ ID NO: 465501 - DNA, 75 bp, synthetic construct
  source 1..75: mol_type = other DNA
cgttagtgaatacgctgatgggccagaagatccagatggaagcggacctgcggaacttgctgacgtatctgcgtg

SEQ ID NO: 465502 - DNA, 75 bp, synthetic construct
  source 1..75: mol_type = other DNA
tggcatctctgttctccttactgttaggtggtgttcagtatacggagaaaaaaaaataaaaaaagacttgaagtg

SEQ ID NO: 465503 - DNA, 75 bp, synthetic construct
  source 1..75: mol_type = other DNA
atggcgtcgataacgcaacgctaactgcaacggttaaagatcagttcgacaatgaggtgaacaatcttccggtaa

SEQ ID NO: 465504 - DNA, 75 bp, synthetic construct
  source 1..75: mol_type = other DNA
gagatattccgaaccagtatcgttttttcaaaatgtttaccaatctggcactggttattgatcagttaaccgatg

SEQ ID NO: 465505 - DNA, 75 bp, synthetic construct
  source 1..75: mol_type = other DNA
gtgacaggcaaagatacccttcttctggactatcctccttctggtaaccagatacatttccatgttttccctgac

SEQ ID NO: 465506 - DNA, 75 bp, synthetic construct
  source 1..75: mol_type = other DNA
tctggcagtatatcgttaaaggtgcgattctgttgctggcagtatggatggactccgcaaccaaacgccgttctt

SEQ ID NO: 465507 - DNA, 75 bp, synthetic construct
  source 1..75: mol_type = other DNA
ccggcaatattggtgaaaagcaggggctggaaaacgttattgaagctgccgatcgcctgcgcgatgaaccgctga

SEQ ID NO: 465508 - DNA, 75 bp, synthetic construct
  source 1..75: mol_type = other DNA
cagcagtttctttccactgatggcgcaacgttgctggaagccggatcgcattatcggcgtagtgccaacgctgtt

SEQ ID NO: 465509 - DNA, 75 bp, synthetic construct
  source 1..75: mol_type = other DNA
acgcggtgattaccgcagaagcccacacagaactggggcagctttgcgccacctttccaggtattgcggtttgcg

SEQ ID NO: 465510 - DNA, 75 bp, synthetic construct
  source 1..75: mol_type = other DNA
caaaacgtataaaaccacagcctcagagcgggcagattttgatacaccattgctgaaaggcagtaatgaagtcgc

SEQ ID NO: 465511 - DNA, 75 bp, synthetic construct
  source 1..75: mol_type = other DNA
atgtggaacaaaattgactctcgtattaacacggcgttaaaccgtatcagaaaggccttcaggggcgttttaata

SEQ ID NO: 465512 - DNA, 75 bp, synthetic construct
  source 1..75: mol_type = other DNA
gttaacggtactacttatctcaaaactgccatgattcaggcggcgagtattggtactggttatattgctgatgcc

SEQ ID NO: 465513 - DNA, 75 bp, synthetic construct
  source 1..75: mol_type = other DNA
atgagtatgatggatgtaccgaccttctggcagtatatcgttaaaggtgcgattctgttgctggcagtatggatg

SEQ ID NO: 465514 - DNA, 75 bp, synthetic construct
  source 1..75: mol_type = other DNA
gtgagccactaccagaaacagattaatgcctataagcaggagctgctgaccaaaacgggcattcgagatgttcag

SEQ ID NO: 465515 - DNA, 75 bp, synthetic construct
  source 1..75: mol_type = other DNA
tgacggcaagtctacgctgaacaccatgcgtgagacttatgacggtcacgaccacgaccacggcggtgatgcagg

SEQ ID NO: 465516 - DNA, 75 bp, synthetic construct
  source 1..75: mol_type = other DNA
atggccttaacgttccgggcaaataatttctttggtgtaccgcaggccgcagcggaagaaacgcgtcatcaggcg

SEQ ID NO: 465517 - DNA, 75 bp, synthetic construct
  source 1..75: mol_type = other DNA
taaaagacttattcacaaataaccccattgaattagaagatctttcctcaggcgaaaaacaaataatttctttga

SEQ ID NO: 465518 - DNA, 75 bp, synthetic construct
  source 1..75: mol_type = other DNA
acggtgtctgcgcagcagtgcctgtcatcaggatcctgtcactctttcgaccgacagattatggcatacagttga

SEQ ID NO: 465519 - DNA, 75 bp, synthetic construct
  source 1..75: mol_type = other DNA
actgctgacgtagatgcgatggggactttacgtctgttggaagcgattcgtatttgtgggctagagaaaaaaaca

SEQ ID NO: 465520 - DNA, 75 bp, synthetic construct
  source 1..75: mol_type = other DNA
ttacacgagagtgtcttgataaggttttggctcatatcgaatatctaaatgatatgtggggagggattctcgagc

SEQ ID NO: 465521 - DNA, 75 bp, synthetic construct
  source 1..75: mol_type = other DNA
gctaattttatctcattacagataaacggttcacgaactggcttggccgcatcaattacaggatttactcaaaca

SEQ ID NO: 465522 - DNA, 75 bp, synthetic construct
  source 1..75: mol_type = other DNA
ttacatacagaagacggttccgcaattgaggttggtctggcgtcatcccaacaaaataaacatacagaactcgca

SEQ ID NO: 465523 - DNA, 75 bp, synthetic construct
  source 1..75: mol_type = other DNA
caaactctctgacgatccgatttatcgcaagcgtctggaagagggcctggttgaactgcgcggtgaaaagcagat

SEQ ID NO: 465524 - DNA, 75 bp, synthetic construct
  source 1..75: mol_type = other DNA
atcgttatcggggatttatctggagcagtgttaaacgtgattttcaggcgcgttatcaaactagtatgctgggcg

SEQ ID NO: 465525 - DNA, 75 bp, synthetic construct
  source 1..75: mol_type = other DNA
ttaaccgcctgccgggcattgtgtttgataccagtgaagcgggtgatattacggcactgtctgacgccattccga

SEQ ID NO: 465526 - DNA, 75 bp, synthetic construct
  source 1..75: mol_type = other DNA
ttgcaaccgtctttacaggcgtttaatcaatattgggatcgcgttgccaatggatatggtctgaacggagccgct

SEQ ID NO: 465527 - DNA, 75 bp, synthetic construct
  source 1..75: mol_type = other DNA
atggaatcatccggtcttacaaaaataaaatatgatattgataaagcaacaaatggaatctttttaagaaaagtt

SEQ ID NO: 465528 - DNA, 75 bp, synthetic construct
  source 1..75: mol_type = other DNA
cactgggaattcaatttttttacccgaaaaatctgccggcactggtgacaatggtgtatctggaggacggggata

SEQ ID NO: 465529 - DNA, 75 bp, synthetic construct
  source 1..75: mol_type = other DNA
agcaagcgctttggtctgtggggcaacgtggtacagcaggtgggcgataagggttacagcgacacgtccgcgatg

SEQ ID NO: 465530 - DNA, 75 bp, synthetic construct
  source 1..75: mol_type = other DNA
cggcctttactgaagatccgggggctgatgggcacattttccccctttcagagaacggttccttcatgcccgtcg

SEQ ID NO: 465531 - DNA, 75 bp, synthetic construct
  source 1..75: mol_type = other DNA
ccttgacgacatccgggagtttattccctccgtctgcagcatcgaaataccctacgttgacaatgcgattcgtca

SEQ ID NO: 465532 - DNA, 75 bp, synthetic construct
  source 1..75: mol_type = other DNA
caatcaactcatccataacctggtcgaagaaagtcagctcacgctcggagaaacgctcagtgcctgggagctctg

SEQ ID NO: 465533 - DNA, 75 bp, synthetic construct
  source 1..75: mol_type = other DNA
ttactgcaaagcaatttttctgtaggtctaattctgggggcgctctttttttggcctggggtatctggcgggatg

SEQ ID NO: 465534 - DNA, 75 bp, synthetic construct
  source 1..75: mol_type = other DNA
gcggtatcgctggctaagcgtggtcacaaggtccacctgaccacatccgatccggcggcacatctgtcttacact

SEQ ID NO: 465535 - DNA, 75 bp, synthetic construct
  source 1..75: mol_type = other DNA
tggtcggtctggaagccctgcgggaattatttacagagagcaaagccgcaccggcactccctgctaccacgctga

SEQ ID NO: 465536 - DNA, 75 bp, synthetic construct
  source 1..75: mol_type = other DNA
gaaccctgatgccgctgcaaacctcgggcctctggtagggctggagaaacaacagcaccagtactccgatgcggt

SEQ ID NO: 465537 - DNA, 75 bp, synthetic construct
  source 1..75: mol_type = other DNA
ggctcgctaccaaaccttcaggtcagccgtattgacccgaaagtagagacagaacgctatcgtcgctttgttctg

SEQ ID NO: 465538 - DNA, 75 bp, synthetic construct
  source 1..75: mol_type = other DNA
gtttgctggtgaaaatgatccactggcgcaaagtattttggcgcgggaggaaaaagcgctacttgctatgccaga

SEQ ID NO: 465539 - DNA, 75 bp, synthetic construct
  source 1..75: mol_type = other DNA
ccattttgtcattatggacaccgcgccaacgggtcacacacttctgctactggatgctacgggagcctatcaccg

SEQ ID NO: 465540 - DNA, 75 bp, synthetic construct
  source 1..75: mol_type = other DNA
tcattttatcgactcggtgatcgacagattccgcgataagaaagcaattgtgttctacgcggcggatcacggtga

SEQ ID NO: 465541 - DNA, 75 bp, synthetic construct
  source 1..75: mol_type = other DNA
tggccccggactacggcgatctcaacgacccgcgcccggttttcgactggcagcaggccattcgccagcgggcga

SEQ ID NO: 465542 - DNA, 75 bp, synthetic construct
  source 1..75: mol_type = other DNA
atgtatctgagcaaatcagaaggtggtagcccgattctggtaaaagaagatgcagcaaaatcgttgcaatctact

SEQ ID NO: 465543 - DNA, 75 bp, synthetic construct
  source 1..75: mol_type = other DNA
agactatcacttatttaagtgatactggttgtctggagattcagggggccagtctacttaactcattgggttcat

SEQ ID NO: 465544 - DNA, 75 bp, synthetic construct
  source 1..75: mol_type = other DNA
accgcttgacatggattcaatagggggcgcagcaggtaattctaaagtttactctatttggaccaagattttcga

SEQ ID NO: 465545 - DNA, 75 bp, synthetic construct
  source 1..75: mol_type = other DNA
ataggcgagaaatttgaattatccgagggcacggtgagttttatttatcaccgtcgtcggactgccggggacgct

SEQ ID NO: 465546 - DNA, 75 bp, synthetic construct
  source 1..75: mol_type = other DNA
aaggccgtgcacccgctcatgttcgtgcatggacacctgaagaagatgcgctgctgattgcgctttatccatcca

SEQ ID NO: 465547 - DNA, 75 bp, synthetic construct
  source 1..75: mol_type = other DNA
aattattcaatggctgtatgcaatctcactggcagtaagaaagtccgcgagatgcggcatgcaacattgaacagt

SEQ ID NO: 465548 - DNA, 75 bp, synthetic construct
  source 1..75: mol_type = other DNA
aaaaaccagaaggtaaacatctgattgtgttgcataccaaagggtcgcactacaactatacgcagcgttatccgc

SEQ ID NO: 465549 - DNA, 75 bp, synthetic construct
  source 1..75: mol_type = other DNA
tcttaatggcatctcgatggttatcgaactggcaggaacagttctggcaaccttcttctttttacgcttaatttc

SEQ ID NO: 465550 - DNA, 75 bp, synthetic construct
  source 1..75: mol_type = other DNA
taaaagcactggatgccgcaatcgctaaagtcgacaaattccgctcctccctcggtgccgttcaaaaccgtctgg

SEQ ID NO: 465551 - DNA, 75 bp, synthetic construct
  source 1..75: mol_type = other DNA
tgacgctaaagtgacggtggcgccaacgcagcaccctattaccgatcgacaactgcacgatatgttagtgcgtgt

SEQ ID NO: 465552 - DNA, 75 bp, synthetic construct
  source 1..75: mol_type = other DNA
gtgcccgagtgagccattaacgacttatgatatctcctggagtgacagccgcgttgaacacacaaagattttgaa

SEQ ID NO: 465553 - DNA, 75 bp, synthetic construct
  source 1..75: mol_type = other DNA
cacagaacaaccgtattatttatcaagaaaatgttcctcctggcccatttgctattactaatttattcaatacat

SEQ ID NO: 465554 - DNA, 75 bp, synthetic construct
  source 1..75: mol_type = other DNA
agctggaacaggccattatctccctactgggacagcactcaagtgcggaaggccaaccctgctaccctcattttg

SEQ ID NO: 465555 - DNA, 75 bp, synthetic construct
  source 1..75: mol_type = other DNA
cctttggctaaaaaacagtcttaacgtggtttattttccgaattccaaactgaccccagatacagcatgtgctgg

SEQ ID NO: 465556 - DNA, 75 bp, synthetic construct
  source 1..75: mol_type = other DNA
cgcactgcgccagatatttgacgctgaagatgtcccgttgcaacaggcggcggaactcccgccctcctatattaa

SEQ ID NO: 465557 - DNA, 75 bp, synthetic construct
  source 1..75: mol_type = other DNA
ttgctgcggatgcttttcttgaaatactttattctcttaaaaataaatattgtattaaactattaagcgctcagg

SEQ ID NO: 465558 - DNA, 75 bp, synthetic construct
  source 1..75: mol_type = other DNA
aacgttaacctttcccaatttgaaactgatggccaattacccgtaggtaaatactcattaaacgctcttattaat

SEQ ID NO: 465559 - DNA, 75 bp, synthetic construct
  source 1..75: mol_type = other DNA
gggcctatgccaatagtgcaaccataccaaatagtgaaactggttgtggcgttattccattggcaggagctgtta

SEQ ID NO: 465560 - DNA, 75 bp, synthetic construct
  source 1..75: mol_type = other DNA
aaaatccaagagaaaaatgagtcaatcatttctttatcaatggtttctttggtttgaaccaaaatggtgttacct

SEQ ID NO: 465561 - DNA, 75 bp, synthetic construct
  source 1..75: mol_type = other DNA
tcaacaatttctaatacaatgattgacaaggctatatcaaaaggtgttaaacgagaaaatactattttttttcct

SEQ ID NO: 465562 - DNA, 75 bp, synthetic construct
  source 1..75: mol_type = other DNA
ttttcgcgttgttaattttagcaacgctgataaaccgttttctgctatggcggttaccggagagaaaagggggta

SEQ ID NO: 465563 - DNA, 75 bp, synthetic construct
  source 1..75: mol_type = other DNA
tgttgaagtggggatggagaggtttaacgctcaacattatcctgttatttcagtgaagttaattaaaactgaaaa

SEQ ID NO: 465564 - DNA, 75 bp, synthetic construct
  source 1..75: mol_type = other DNA
ctctgccgatattactttgactgcggctaaccttaatgcttatacgaaaacagaggtaacaaaccttctaagttc

SEQ ID NO: 465565 - DNA, 75 bp, synthetic construct
  source 1..75: mol_type = other DNA
atgatcccacgattaaaggcgggcgcttaatcgttgaaaaagatgggattaccgtccttgccgctatcgaaaagg

SEQ ID NO: 465566 - DNA, 75 bp, synthetic construct
  source 1..75: mol_type = other DNA
ccgtcgtcagttgggggctcgttctgtcggttggttgctgtctgaggttaatgattggcttgaacgtcaacccaa

SEQ ID NO: 465567 - DNA, 75 bp, synthetic construct
  source 1..75: mol_type = other DNA
aatggtgccgagtggctggccctgtttcagaaaggtgcggcggagagtgtcggtggtgcagcgagtttcccacaa

SEQ ID NO: 465568 - DNA, 75 bp, synthetic construct
  source 1..75: mol_type = other DNA
gcgtgaactcaaacaatcatacagttactcaaactggtaacagtgttacaaatggaagtattgttggcggtaatc

SEQ ID NO: 465569 - DNA, 75 bp, synthetic construct
  source 1..75: mol_type = other DNA
acagtagtgcctcaaaggaagatgaaaactatcgtatcttctcgttactggaaaacgccgaagaagaaaagaacg

SEQ ID NO: 465570 - DNA, 75 bp, synthetic construct
  source 1..75: mol_type = other DNA
tgatgtctggcattaccctgacggacataaagagctccggcttaatggcgtatcaattccctactccacctatga

SEQ ID NO: 465571 - DNA, 75 bp, synthetic construct
  source 1..75: mol_type = other DNA
cgcgtgatcgcagtggggtctgtgcgacagcagcacgtgaaggtgtaccacaggccagacaggtggtcgatgcca

SEQ ID NO: 465572 - DNA, 75 bp, synthetic construct
  source 1..75: mol_type = other DNA
gaaaatctaaccgaaaaggagcaaacgtgccttttgatgggcattaagcgcctttccgaatttgcagcatcaatg

SEQ ID NO: 465573 - DNA, 75 bp, synthetic construct
  source 1..75: mol_type = other DNA
gcggtgccaaaccacaattatcaatatctcgaacgcatcattgacgcggtccgtggcggactctctcaactggag

SEQ ID NO: 465574 - DNA, 75 bp, synthetic construct
  source 1..75: mol_type = other DNA
ccgcagctatgggctgttgttagtcattgttatgctgggtgccagtcttgccggcaccgtaatcagtagtgagat

SEQ ID NO: 465575 - DNA, 75 bp, synthetic construct
  source 1..75: mol_type = other DNA
cgttctcaccacgttacccgccaggacattgcctcaaataacgatgctgcccgacaggctatcgaacaatttggg

SEQ ID NO: 465576 - DNA, 75 bp, synthetic construct
  source 1..75: mol_type = other DNA
atcagcttattctgcgtgtcttccaggctcaccattacggtctgatgtcgttgaaagagcgcaaagcctggttac

SEQ ID NO: 465577 - DNA, 75 bp, synthetic construct
  source 1..75: mol_type = other DNA
atgttgatggataagacagaacaacagccaggtcgccgccagttcttagagcaacgggcgcggctgcaagcaagt

SEQ ID NO: 465578 - DNA, 75 bp, synthetic construct
  source 1..75: mol_type = other DNA
actactcgccggaattgaccggtatcgggaaatacaccggcgagatggtcgagtggatggcgagccagggacatg

SEQ ID NO: 465579 - DNA, 75 bp, synthetic construct
  source 1..75: mol_type = other DNA
aaagattttttcccttcaataaaatttactgattttgagtacgcattcactcgttatcgagatcgcattgaattt

SEQ ID NO: 465580 - DNA, 75 bp, synthetic construct
  source 1..75: mol_type = other DNA
aaattaattcaatattggttaatgaataatgttttttcgaagctcccaatgcataatgctgcatatgcatttgtt

SEQ ID NO: 465581 - DNA, 75 bp, synthetic construct
  source 1..75: mol_type = other DNA
ctcagacattgatgactaagggatttgcttctgaagtaatgcgatcacctgagccgccaaaaaaatgggatatag

SEQ ID NO: 465582 - DNA, 75 bp, synthetic construct
  source 1..75: mol_type = other DNA
cgtgactggaaacctgcattgctggatatggctggcctacgtgccgatattctttctcctgtcaaagaaaccggc

SEQ ID NO: 465583 - DNA, 75 bp, synthetic construct
  source 1..75: mol_type = other DNA
tgcctttaataaaaggggtatgctttatttctgacctaactttaccaattgggttccctacatctccatttattg

SEQ ID NO: 465584 - DNA, 75 bp, synthetic construct
  source 1..75: mol_type = other DNA
tggtggctgaatgtcagcgtctgaaagtgccggaacgtgaaaattgtgaagtgtgccgcagtaacgatatggtcg

SEQ ID NO: 465585 - DNA, 75 bp, synthetic construct
  source 1..75: mol_type = other DNA
gtcgcgatttgctacctatacgccgtttttcaatctcaactattttgctttagcagcgaaagagcatcaggtgat

SEQ ID NO: 465586 - DNA, 75 bp, synthetic construct
  source 1..75: mol_type = other DNA
actcggcgtagagctggaaacccgtgtactgataaacggttgccaggtactgatgggggcaggaaaagaaagtga

SEQ ID NO: 465587 - DNA, 75 bp, synthetic construct
  source 1..75: mol_type = other DNA
cggcaggaatcattgaggcccttcaggccacaatctagagcagtggcactgctggccgatggtcaaggcggcgcc

SEQ ID NO: 465588 - DNA, 75 bp, synthetic construct
  source 1..75: mol_type = other DNA
caagtttagacgtattaatctatcttcaatcaacaaaatggcagtttctttttcaatcgtttttattagtgtttt

SEQ ID NO: 465589 - DNA, 75 bp, synthetic construct
  source 1..75: mol_type = other DNA
cacgtcttatgtatcgcatccgtgaactgccggtgctccaggatgaggcccacagggcaattgcatatgccgccg

SEQ ID NO: 465590 - DNA, 75 bp, synthetic construct
  source 1..75: mol_type = other DNA
gttccggcccccggtgcactccccgtcaatgacccggcgttcgtcatggtctgccctctgaatccgcagggtgcc

SEQ ID NO: 465591 - DNA, 75 bp, synthetic construct
  source 1..75: mol_type = other DNA
cctggtttgaaggtaaaaagcaggcaacagcattaacctggtggtccgtcggttcatggggaggctctggtttct

SEQ ID NO: 465592 - DNA, 75 bp, synthetic construct
  source 1..75: mol_type = other DNA
gcagttggcgcgtgataacgcgagcgtggaagtcggggccaaccatagctggatcggtgccctgaaaaataaaac

SEQ ID NO: 465593 - DNA, 75 bp, synthetic construct
  source 1..75: mol_type = other DNA
cacggaacttggtcaactttgccagatgaatccgggaattgccacctgcgtggagccggagtctgtacctgcgtt

SEQ ID NO: 465594 - DNA, 75 bp, synthetic construct
  source 1..75: mol_type = other DNA
ccaaactgcagtttgcgtgacaccagagcaattaacattattaggatttactgatgaatttattgaaaaaactca

SEQ ID NO: 465595 - DNA, 75 bp, synthetic construct
  source 1..75: mol_type = other DNA
tattgaaaaatgtttgctaatgcctcgtcacaacgatgtagcgatcaaatatgcaaatgcctcacttgatatgaa

SEQ ID NO: 465596 - DNA, 75 bp, synthetic construct
  source 1..75: mol_type = other DNA
ttcgctcatcaaaaccaagggtgtttctgatgttgtcattaaaggtctcgttttaactacacatcctacattaag

SEQ ID NO: 465597 - DNA, 75 bp, synthetic construct
  source 1..75: mol_type = other DNA
tcctgattttatacctgatggaattgtctatgttcaacgcaatagaataataaattgtaagcgcgatggggtatt

SEQ ID NO: 465598 - DNA, 75 bp, synthetic construct
  source 1..75: mol_type = other DNA
tgaagttgccaaaatgctgggaatgtatagcccttatctatgtgcttttgcctttttatcccttcttttttggct

SEQ ID NO: 465599 - DNA, 75 bp, synthetic construct
  source 1..75: mol_type = other DNA
ggagtgcaccacagcagaacgctcaggcgcaaccgcagcctcagccgccgtctgaacccgagtataacttcgatg

SEQ ID NO: 465600 - DNA, 75 bp, synthetic construct
  source 1..75: mol_type = other DNA
ccggcacgcagattaacggtgacgaggccacggcgaataacagcggcaaaaccatcgttgacggtaaagacgcca

SEQ ID NO: 465601 - DNA, 75 bp, synthetic construct
  source 1..75: mol_type = other DNA
tgctgttggaaaacggcggaagtttgcgagttgaagaaaatgacttcgcttataatactgatcttacccagcaat

SEQ ID NO: 465602 - DNA, 75 bp, synthetic construct
  source 1..75: mol_type = other DNA
ctttcccaatttgaaactgatggccaattacccgtaggtaaatactcattaaacgctctggtaatgactccaact

SEQ ID NO: 465603 - DNA, 75 bp, synthetic construct
  source 1..75: mol_type = other DNA
tctagaacaaggtcaacgtggttttaccctacaagctggtgaactagcacaagctcgtgcaaataccactactgt

SEQ ID NO: 465604 - DNA, 75 bp, synthetic construct
  source 1..75: mol_type = other DNA
aacgggataaagagtcgcctgacgctgggtgaggattacacgccgtcagacatttttgacagtgtgcctttccgg

SEQ ID NO: 465605 - DNA, 75 bp, synthetic construct
  source 1..75: mol_type = other DNA
caccctgttacaacaccgtccggtcgaggcctaccgtcaggtcgggcattcctatgactgcggcgagaagctggg

SEQ ID NO: 465606 - DNA, 75 bp, synthetic construct
  source 1..75: mol_type = other DNA
gccgcgcagatggaggatgcatacatcccggagcggaggctgcatctttaccactgcgaccaccggggactgccg

SEQ ID NO: 465607 - DNA, 75 bp, synthetic construct
  source 1..75: mol_type = other DNA
acggaaggggcaacagaatggtgcgcagaatatgatgaatggggcaacctgctgaatgaagagaacccgcatcag

SEQ ID NO: 465608 - DNA, 75 bp, synthetic construct
  source 1..75: mol_type = other DNA
gacacgcagggccatgaaacgcggtatgaatacaacatcgccggtgacctgaccgccgtcattgccccggacggc

SEQ ID NO: 465609 - DNA, 75 bp, synthetic construct
  source 1..75: mol_type = other DNA
actgttccggctaccagacccgttatgaccatgaccgcttcgggcagatgacggcggtgcaccgcgaggaagggc

SEQ ID NO: 465610 - DNA, 75 bp, synthetic construct
  source 1..75: mol_type = other DNA
atgaaaacacgtgatggtgaaccagggttatttgctgcaatggaaaataatcacccgttgtgtgtcacacggttc

SEQ ID NO: 465611 - DNA, 75 bp, synthetic construct
  source 1..75: mol_type = other DNA
gagcgggaactgcgtgcgggagcggtgagtgcggagagtgaggcatggcttgcgcagtgcgggctgacggtggag

SEQ ID NO: 465612 - DNA, 75 bp, synthetic construct
  source 1..75: mol_type = other DNA
acgagctttatactcgccatgccctgaacgatggcaatgtagtcttaactggcaaccttttctacaacgactaca

SEQ ID NO: 465613 - DNA, 75 bp, synthetic construct
  source 1..75: mol_type = other DNA
tcacggaccggcagtacagctacagcggcgaggatgaactgctgaagacgcggcacagccggcggggggaaacgg

SEQ ID NO: 465614 - DNA, 75 bp, synthetic construct
  source 1..75: mol_type = other DNA
gcctggtactggatagcagaatatatgcgtcatctgctgtggcagcacggaagagttggagacagagcagtacat

SEQ ID NO: 465615 - DNA, 75 bp, synthetic construct
  source 1..75: mol_type = other DNA
acatcgccatgagcaagggtaatgaagacgtcgtgttatcttatatatcgacgctgaatatttttgcaaaaaaat

SEQ ID NO: 465616 - DNA, 75 bp, synthetic construct
  source 1..75: mol_type = other DNA
acgatctgacgtcactggcgcgggacgtagccactggcgtactggcccgttcaatggatctggacatctataacc

SEQ ID NO: 465617 - DNA, 75 bp, synthetic construct
  source 1..75: mol_type = other DNA
gatgaacgcaacgcactgattgacgccaatagtgctcactggggagctttgaaggaatggctgctagccttgtcg

SEQ ID NO: 465618 - DNA, 75 bp, synthetic construct
  source 1..75: mol_type = other DNA
tatgcgtgccgtcagtgtgcttaacctgggtactattgatgaaccaggtcacgcagataacaccgccactctcaa

SEQ ID NO: 465619 - DNA, 75 bp, synthetic construct
  source 1..75: mol_type = other DNA
gctgatggaaccagtgttggggctggtcttggtgattttctttgtggagtaagaatcgcggcggaagcacaaaaa

SEQ ID NO: 465620 - DNA, 75 bp, synthetic construct
  source 1..75: mol_type = other DNA
aagccgcttcggtaccgcaagaatcacgctgggcgtggatgaagattttagcctgaagaactcccagttcgattt

SEQ ID NO: 465621 - DNA, 75 bp, synthetic construct
  source 1..75: mol_type = other DNA
agaaggaaattgctgaatggctggaggactgggccgacttcctgagcgcatttgatgccgacgggaatgtgttgt

SEQ ID NO: 465622 - DNA, 75 bp, synthetic construct
  source 1..75: mol_type = other DNA
atgccagtggcatttgaatttaaatgcgttccgtttgaaggtctgaaagaacgtccgtttaaattacgcctcagt

SEQ ID NO: 465623 - DNA, 75 bp, synthetic construct
  source 1..75: mol_type = other DNA
cgtagagcattttcgacctaagaaggaagctaaggctctggataccaccctacgtgatggttattggtggctagc

SEQ ID NO: 465624 - DNA, 75 bp, synthetic construct
  source 1..75: mol_type = other DNA
caggacacgcagccgctggatgctcagtcacaggtaaattctgttgatgcgaaatatcaggaactgcgggcagaa

SEQ ID NO: 465625 - DNA, 75 bp, synthetic construct
  source 1..75: mol_type = other DNA
gctggctacgatgaagatgactttaaaaaacctgtttgcgtcaatttgcccgttgttgatgaccttccaccagaa

SEQ ID NO: 465626 - DNA, 75 bp, synthetic construct
  source 1..75: mol_type = other DNA
aacgaattccgcgatttgctgatcagcaagttcgaaggtgaatcagtggaaactttcatcggtaactttaaagcc

SEQ ID NO: 465627 - DNA, 75 bp, synthetic construct
  source 1..75: mol_type = other DNA
gagtattgaagccagcagcaaagacgtaatgccggtagcgttcgaattcaaatgtgtgccgtatgaaggtttagg

SEQ ID NO: 465628 - DNA, 75 bp, synthetic construct
  source 1..75: mol_type = other DNA
tcatcagttcacctcttctgtggttgcccgcaaaatggacgcctggacatttattttattggttcaaaagaggaa

SEQ ID NO: 465629 - DNA, 75 bp, synthetic construct
  source 1..75: mol_type = other DNA
tatatcctggggcgcaacgcgattgcaggcatcgtggtgatgaccagtaaagatccgaccttcgactgggaatcc

SEQ ID NO: 465630 - DNA, 75 bp, synthetic construct
  source 1..75: mol_type = other DNA
tgattggcaaaatctggccgggatttttaactctcggtggtgatttcactctgttagggctttcgctgcccggct

SEQ ID NO: 465631 - DNA, 75 bp, synthetic construct
  source 1..75: mol_type = other DNA
cctcgttctttgcggtactggttattctgatgacgaccatttccactaacgccaccggtaatattattccggccg

SEQ ID NO: 465632 - DNA, 75 bp, synthetic construct
  source 1..75: mol_type = other DNA
ttggtccggtcattggtgtgatgatggcgcattattttgtggtgatgcgtgggcaaattaatcttgatgagctgt

SEQ ID NO: 465633 - DNA, 75 bp, synthetic construct
  source 1..75: mol_type = other DNA
ggtaacggtctgcagtacaaagctgccctgcatggtggttctgttgcaggtgatttccagtctgccgccaaattt

SEQ ID NO: 465634 - DNA, 75 bp, synthetic construct
  source 1..75: mol_type = other DNA
agcgcagaagaaaaaccaacaggtgtggtggaatgggctgtagaggtattcaatcagcatcaaaccccggtggcg

SEQ ID NO: 465635 - DNA, 75 bp, synthetic construct
  source 1..75: mol_type = other DNA
caatgtcagtcattgccgccaactttggtcttatagcgagcccagtaagtgcggtcgttacaggaacgattgcgg

SEQ ID NO: 465636 - DNA, 75 bp, synthetic construct
  source 1..75: mol_type = other DNA
cggtaagtttattcactttatggaaccgttatcgcgtgtttcatggtttgtcggcgtcatcgtcgcctttgcggc

SEQ ID NO: 465637 - DNA, 75 bp, synthetic construct
  source 1..75: mol_type = other DNA
gtacgcgactattcgccagaaatgctcgatgaattactggcaaccggagcggttatctggtcgggacaaaaaaaa

SEQ ID NO: 465638 - DNA, 75 bp, synthetic construct
  source 1..75: mol_type = other DNA
atgagtacagtatattatccttgtggtatcagaagaattgttgcggttcttttagtcatcctgtcggcaagtgcg

SEQ ID NO: 465639 - DNA, 75 bp, synthetic construct
  source 1..75: mol_type = other DNA
attaaaaaaaacgtacagcagcagaaaaaacaggagaacaaaaagtcacaggttaattaatcccgatattgaaca

SEQ ID NO: 465640 - DNA, 75 bp, synthetic construct
  source 1..75: mol_type = other DNA
gttatcagattgccgccattgcaccgacaaaactgacctataaaaacggcgtactgattgccagtattatcagtt

SEQ ID NO: 465641 - DNA, 75 bp, synthetic construct
  source 1..75: mol_type = other DNA
gactacattccgagcggtattcagaaagcagaaaacggtggcttcctgttcctggtggtgattaacgcggtagtt

SEQ ID NO: 465642 - DNA, 75 bp, synthetic construct
  source 1..75: mol_type = other DNA
ttcgaaacagtcttcacattcctactgtatggagattactcggaatagttcatagttttcagcccgatgcaatcg

SEQ ID NO: 465643 - DNA, 75 bp, synthetic construct
  source 1..75: mol_type = other DNA
cgctgctgtgcgcccttacttctccggcgttcgccgccgatggccagaatgccgacccgaatgacccgtgcgcga

SEQ ID NO: 465644 - DNA, 75 bp, synthetic construct
  source 1..75: mol_type = other DNA
ctgtattacaaccgccaccgctattatgacccgctgcaggggaggtatatcactcaggatccgattgggctgaag

SEQ ID NO: 465645 - DNA, 75 bp, synthetic construct
  source 1..75: mol_type = other DNA
tgcacactggcagcatttcattgacgcgttcgcccggagcctcgcgtcagtcatcaatattctggatcctcaagt

SEQ ID NO: 465646 - DNA, 75 bp, synthetic construct
  source 1..75: mol_type = other DNA
atggcacccggccacggctgagtttttctctggacgggcgttccttgacctacaacgaactggcgtttgggccgc

SEQ ID NO: 465647 - DNA, 75 bp, synthetic construct
  source 1..75: mol_type = other DNA
cgtgacgatgagccccagcaggatacgattgtggtcaccggagagaaagttgcaaggacactcggcaatatcagc

SEQ ID NO: 465648 - DNA, 75 bp, synthetic construct
  source 1..75: mol_type = other DNA
ccgatgtataaaagttttatgtcaatcaggaaaaagaataaacatggttttttacccgatcacacggcagatgcc

SEQ ID NO: 465649 - DNA, 75 bp, synthetic construct
  source 1..75: mol_type = other DNA
gcgaaaaacggtgacgatatcccggataaggtgaagtttctgaacaccgtgggggcagccagagtatacgggcgg

SEQ ID NO: 465650 - DNA, 75 bp, synthetic construct
  source 1..75: mol_type = other DNA
cccggataaggtgaagtttctgaacaccgtgggagcagccagagtatacgggcgggacattcatacggagaccgg

SEQ ID NO: 465651 - DNA, 75 bp, synthetic construct
  source 1..75: mol_type = other DNA
accgggatgcacgatagagctgaaagcgcgacgcacaacggagacggtgattgtcaccacggtggcgtatggtct

SEQ ID NO: 465652 - DNA, 75 bp, synthetic construct
  source 1..75: mol_type = other DNA
ttcgtcatcgccaggatgtgtttctcaatggtcagcgcattgcagacgttgatgctgacacctttcacatcattc

SEQ ID NO: 465653 - DNA, 75 bp, synthetic construct
  source 1..75: mol_type = other DNA
gtacgccaacggtcgatgttgccagctttaaggctctgggccgcttcgccgtcgataaatacagtctctattttg

SEQ ID NO: 465654 - DNA, 75 bp, synthetic construct
  source 1..75: mol_type = other DNA
ccagcgtcctgccagaactgagtcgccatgtccggaacaaaccgttgagcaggatgatggcatagtcattaagac

SEQ ID NO: 465655 - DNA, 75 bp, synthetic construct
  source 1..75: mol_type = other DNA
gtgcaggatcgctattatcaactcggcgtaacttacaatggcgttgattatgacgccaaccagggaaaaagccgc

SEQ ID NO: 465656 - DNA, 75 bp, synthetic construct
  source 1..75: mol_type = other DNA
ttgttatttgtctgctatttctgccgctgaggtctgcgctggcgctggactgttattttggtgcatcgggtggtc

SEQ ID NO: 465657 - DNA, 75 bp, synthetic construct
  source 1..75: mol_type = other DNA
ctggatgaaaacgcctcgccttataccttcaataaatatgctgaatacgccgatttcaccagcgatatgctgatc

SEQ ID NO: 465658 - DNA, 75 bp, synthetic construct
  source 1..75: mol_type = other DNA
gatggcctttttgcgttggtgaaaaaaatgccgggtgcgacgctggcgcgtcttatccagcttacgcaggcacga

SEQ ID NO: 465659 - DNA, 75 bp, synthetic construct
  source 1..75: mol_type = other DNA
ccccgtttgctggtgaaaagtcgatggattaccgcaagcgtgcattaattggtgcacagaagctggctaaaaaat

SEQ ID NO: 465660 - DNA, 75 bp, synthetic construct
  source 1..75: mol_type = other DNA
agagcctttattctcatatattaataacataatgactcatactatcgtttacgcaagccccgtgattgccgttat

SEQ ID NO: 465661 - DNA, 75 bp, synthetic construct
  source 1..75: mol_type = other DNA
taggagcagcacagagagttaatgatgattgtgaaaactacataaaaagtcagataaaaatattatctcgtcaag

SEQ ID NO: 465662 - DNA, 75 bp, synthetic construct
  source 1..75: mol_type = other DNA
tattgtttggctattatcacaatatatgtttctgtagcttctttaggaatgaacggtgtagttgtcagagaggtc

SEQ ID NO: 465663 - DNA, 75 bp, synthetic construct
  source 1..75: mol_type = other DNA
tcgtccattgcaggtacccccatcgaggctgggcccttcgatacagtggtgctttttaaaattaactataactga

SEQ ID NO: 465664 - DNA, 75 bp, synthetic construct
  source 1..75: mol_type = other DNA
tacaggtgtcgatacctcggaattagcaagattatttaaccttttctctgcagcggtttatcttactaacggtgg

SEQ ID NO: 465665 - DNA, 75 bp, synthetic construct
  source 1..75: mol_type = other DNA
tgtcaaaagtgcgctggcatttttaatattaattatttattttgccccaatactggctgaacgagtaatgccgtt

SEQ ID NO: 465666 - DNA, 75 bp, synthetic construct
  source 1..75: mol_type = other DNA
tctatcttcttgccctgtttcgtttttctttgctctttccgggctggataccggaagtccgtttgcgggagtcgg

SEQ ID NO: 465667 - DNA, 75 bp, synthetic construct
  source 1..75: mol_type = other DNA
cccagagcaaccgttatgttctgcaactggggggagatcttgcactgtggggcaggagtaacacagaccgctggc

SEQ ID NO: 465668 - DNA, 75 bp, synthetic construct
  source 1..75: mol_type = other DNA
ctggggcacaacgcccaaaacacgctaacaataaatggtgattataccagtaagaatggtcacatctatttttca

SEQ ID NO: 465669 - DNA, 75 bp, synthetic construct
  source 1..75: mol_type = other DNA
ctttaatggcgatatcagagcagatgaaaagagctctgccaacctttctttagagaattcacgctggacgggaag

SEQ ID NO: 465670 - DNA, 75 bp, synthetic construct
  source 1..75: mol_type = other DNA
gtgtgacggcctctgttgagggtgggtatacctttgaagcgggaacttttagcggcagcgaagggacgctgaata

SEQ ID NO: 465671 - DNA, 75 bp, synthetic construct
  source 1..75: mol_type = other DNA
aggtgggatcagtcagggcgaactgacaggtggcggaaacctgaatgttacagggggaacactggctatcgaggg

SEQ ID NO: 465672 - DNA, 75 bp, synthetic construct
  source 1..75: mol_type = other DNA
agcctcaggcacaggttgtctggatgggtgtaaaagcggatgaacgccgtgaaagcaacggtacccgtgttgaga

SEQ ID NO: 465673 - DNA, 75 bp, synthetic construct
  source 1..75: mol_type = other DNA
gatgtcgctgtcgcgtaaaccggaggagacatggtacggctgggacggcgacaggctgacgacggtacagaccga

SEQ ID NO: 465674 - DNA, 75 bp, synthetic construct
  source 1..75: mol_type = other DNA
gcaaaccgcgtcacgccggacagcctgccgccggtggagtggctgacctacggcagcggttacctggcgggcatg

SEQ ID NO: 465675 - DNA, 75 bp, synthetic construct
  source 1..75: mol_type = other DNA
tggtagaacagggcggctttgacgggcggacgcaacgttatcattatgacctgaccggaaaactcacgcagagtg

SEQ ID NO: 465676 - DNA, 75 bp, synthetic construct
  source 1..75: mol_type = other DNA
ttccgctattacatggggttcgccaattgccccgtttgttattcccctgaccattctgattaacgtggcggtgat

SEQ ID NO: 465677 - DNA, 75 bp, synthetic construct
  source 1..75: mol_type = other DNA
atgcccagccgcctggatgttgaagtaaacggctttaacggtggtgttctgaacggtgttccttctgcatatcac

SEQ ID NO: 465678 - DNA, 75 bp, synthetic construct
  source 1..75: mol_type = other DNA
aaggtcagccagctaaagaaagaatcatggatcttaaaaataacactgtcggtattgcttgtggcgatttttctg

SEQ ID NO: 465679 - DNA, 75 bp, synthetic construct
  source 1..75: mol_type = other DNA
gccagaagcagcaccgtcgccagttagaagtttgtgaggatatttgtcagcaaatccgcaatggctctacggcga

SEQ ID NO: 465680 - DNA, 75 bp, synthetic construct
  source 1..75: mol_type = other DNA
gtttatgcgtgactttattgttcatggtgaagtaaatgaggatgctttgataaattcccggcttaaatttgctat

SEQ ID NO: 465681 - DNA, 75 bp, synthetic construct
  source 1..75: mol_type = other DNA
ctcgatgctcaaaaatagcaatattacatcaacggatattattgagtttattgaatgtcagtggtgcatcatgga

SEQ ID NO: 465682 - DNA, 75 bp, synthetic construct
  source 1..75: mol_type = other DNA
gtagcatggtgatgaatgaaggggtatcaggtagatgtggagtctcacagattttcggtatcataatgctcaata

SEQ ID NO: 465683 - DNA, 75 bp, synthetic construct
  source 1..75: mol_type = other DNA
caagaaagatgttgccgagataaaaaacacagtttcaaaagttgatacgacagtgaattcactggacaaaaatat

SEQ ID NO: 465684 - DNA, 75 bp, synthetic construct
  source 1..75: mol_type = other DNA
tttacaactgacaactatgcgttttattttaaaaataaaaatgagctatcttttatcgtcaatgatatattaaat

SEQ ID NO: 465685 - DNA, 75 bp, synthetic construct
  source 1..75: mol_type = other DNA
ttgtgctcagcgcggtcaaagcgccataagcagaagatcccattaatcaaatctctgtattataatctgcgtggg

SEQ ID NO: 465686 - DNA, 75 bp, synthetic construct
  source 1..75: mol_type = other DNA
gttgttggttccggaacgatgctgacaatttatggcttacctattgagatgttacagcaaagtgtaaatctcaac

SEQ ID NO: 465687 - DNA, 75 bp, synthetic construct
  source 1..75: mol_type = other DNA
atgaaagagattgatttattatatgaaaatatttatcagcttttaattaaaccttacctactcgatctttctagc

SEQ ID NO: 465688 - DNA, 75 bp, synthetic construct
  source 1..75: mol_type = other DNA
agcggcggcagtgtaacttctaccacaatttaccgtggtggggagcagagtattcacaatgcaggtcttgcgacc

SEQ ID NO: 465689 - DNA, 75 bp, synthetic construct
  source 1..75: mol_type = other DNA
cggatgaccgttgcggaaggtagattggtaaccgatgtaagaccgggtaatttccgctctcccacgactttcacg

SEQ ID NO: 465690 - DNA, 75 bp, synthetic construct
  source 1..75: mol_type = other DNA
aagccttgtttacctacgttaaagagcggaagtacaccttttgtacgccggggcatatgggcggcaccgcatatc

SEQ ID NO: 465691 - DNA, 75 bp, synthetic construct
  source 1..75: mol_type = other DNA
ccgtaccgtccggataacccggaaggcgctacgcatcaactccagctgttcggcggtatcctagcccagatagct

SEQ ID NO: 465692 - DNA, 75 bp, synthetic construct
  source 1..75: mol_type = other DNA
agccctcatcagacacagtggacaagaaaatctctgatgctaaattggcgattctcttaggtgtccctgcgatta

SEQ ID NO: 465693 - DNA, 75 bp, synthetic construct
  source 1..75: mol_type = other DNA
ttttgcatttgtgagcccgtccgctactttgggacatggcagtgtagttttagccggtgcggttgtaggagcaaa

SEQ ID NO: 465694 - DNA, 75 bp, synthetic construct
  source 1..75: mol_type = other DNA
atgattaagaaatacagcgaacacgggagcaaggctggcgaagcaatcgccattgacgaggattgcctgataaca

SEQ ID NO: 465695 - DNA, 75 bp, synthetic construct
  source 1..75: mol_type = other DNA
tttctctttagcggtgtcgataccgatataatgaagttcatgttccatagtgaaaccaaccttgcaaatacggat

SEQ ID NO: 465696 - DNA, 75 bp, synthetic construct
  source 1..75: mol_type = other DNA
gaaattcgttataatccagtcatatattaataaattacttggcaactctaaagttcttcattggttcttagaaaa

SEQ ID NO: 465697 - DNA, 75 bp, synthetic construct
  source 1..75: mol_type = other DNA
gtgctgttgagtcgtcggtaattgcacaggttgtcatcagcaaatataccgaccatctgcccctgtatcgccagc

SEQ ID NO: 465698 - DNA, 75 bp, synthetic construct
  source 1..75: mol_type = other DNA
cggcatttctgcaagcgggaacagtggggggatatagtgcaacagtggaagagcatgtcatatgtcctccaggta

SEQ ID NO: 465699 - DNA, 75 bp, synthetic construct
  source 1..75: mol_type = other DNA
tatgggactgggttacctgggtttcttcatccatcagcgttggtgttggtgtgatgacgtggaatgaaaagctgg

SEQ ID NO: 465700 - DNA, 75 bp, synthetic construct
  source 1..75: mol_type = other DNA
aaagaattatttggcatttagcctgaatactcgattcttgactgagaaatttcgttatccagagtcatctgatga

SEQ ID NO: 465701 - DNA, 75 bp, synthetic construct
  source 1..75: mol_type = other DNA
tattctgaacatggctttgaaaatatttgtaagtcgatgttgttgcggaaaactagttttttaaagtttagttta

SEQ ID NO: 465702 - DNA, 75 bp, synthetic construct
  source 1..75: mol_type = other DNA
tacaccggcgtgatcgcatgggataacttcccgttccgcaaatactcaccggggctggtttacgcgctggtcatg

SEQ ID NO: 465703 - DNA, 75 bp, synthetic construct
  source 1..75: mol_type = other DNA
agtccggacatcacgttcatgacaatgaaaccgagttgatttacgtcaagaaaggggttgcaaggtttaccatcg

SEQ ID NO: 465704 - DNA, 75 bp, synthetic construct
  source 1..75: mol_type = other DNA
ttgggaatattatctgagtaaagataatactaactggtatctaaaatctgatactacgcaaccaggtaatccgga

SEQ ID NO: 465705 - DNA, 75 bp, synthetic construct
  source 1..75: mol_type = other DNA
tttaaactttatcaataaaaaaattgactccgttgaaaaattgcttcaaatcatatcaacagacaaaattgaatt

SEQ ID NO: 465706 - DNA, 75 bp, synthetic construct
  source 1..75: mol_type = other DNA
cggagagcttatcccggcctcagaagtcagccgggagtttgcctcaatggcaaaagctgtcgttcaggtactgga

SEQ ID NO: 465707 - DNA, 75 bp, synthetic construct
  source 1..75: mol_type = other DNA
cgcaaagcgcctggtgatgtggaatgtttttgccagcgttattacgctggccgctgcagccattgcgtttatcac

SEQ ID NO: 465708 - DNA, 75 bp, synthetic construct
  source 1..75: mol_type = other DNA
agaaatccaatgagatcacagctatccctgaacttcttaacatgctggatattaaaggaaaaatcatcaaaaccg

SEQ ID NO: 465709 - DNA, 75 bp, synthetic construct
  source 1..75: mol_type = other DNA
ctaatacccgcagtacggttttatcagtgaataaatttcctatgacgaaacagaaaacagactgggttgtggtcg

SEQ ID NO: 465710 - DNA, 75 bp, synthetic construct
  source 1..75: mol_type = other DNA
ccggatatggcgggaaatggtggcccggggatttacaggcagtgaaaccatcgtcagggatgcggttgccaaaat

SEQ ID NO: 465711 - DNA, 75 bp, synthetic construct
  source 1..75: mol_type = other DNA
cgcatggaaggacgcatggaaggacgcatggaaggagcgcttgaaaaagccctggctattgcgtgccagcttcag

SEQ ID NO: 465712 - DNA, 75 bp, synthetic construct
  source 1..75: mol_type = other DNA
gggattctgtatcaccggaatttatgcgggcgctggctgagcgtctgccgcagcatgaggataaactgatgacta

SEQ ID NO: 465713 - DNA, 75 bp, synthetic construct
  source 1..75: mol_type = other DNA
actgttacctcttttgagacgacgctgggatgtgacgccggcaatcatcctggcagtggagtaccttttacgtgt

SEQ ID NO: 465714 - DNA, 75 bp, synthetic construct
  source 1..75: mol_type = other DNA
gatgttccggtggaaggtaacggggctgctgtttataccaatatgtttggtaaagccgtcgtttctgacgtcaat

SEQ ID NO: 465715 - DNA, 75 bp, synthetic construct
  source 1..75: mol_type = other DNA
aatccgctcaggctgggtgccggagcacagggacaatttggatatgaaatcacaaaaggcctttcagccgttaat

SEQ ID NO: 465716 - DNA, 75 bp, synthetic construct
  source 1..75: mol_type = other DNA
atgaaaaacagagtgaggctgatattatcagcgctgacaggcggagttatgttgttatcggcaccggtaatggca

SEQ ID NO: 465717 - DNA, 75 bp, synthetic construct
  source 1..75: mol_type = other DNA
aaggccggataaattctatgttgagtactctataaatggcggaaggccggtatctgaaacgtttaaaaatgtacc

SEQ ID NO: 465718 - DNA, 75 bp, synthetic construct
  source 1..75: mol_type = other DNA
gcaaaaaatcaactggcaaaaaaagggtgacaaaaccattccatgcatcaatgattcactggtcgataaatttgg

SEQ ID NO: 465719 - DNA, 75 bp, synthetic construct
  source 1..75: mol_type = other DNA
gtttaccgggatgaagaagacatcgatcctgaagttgatggttacgatatttcagcctggcagccagaatcgcca

SEQ ID NO: 465720 - DNA, 75 bp, synthetic construct
  source 1..75: mol_type = other DNA
attatccagattgttatatacagataatgacgaagaaagcgaagtaagattgcctaatcaaataaaagataccga

SEQ ID NO: 465721 - DNA, 75 bp, synthetic construct
  source 1..75: mol_type = other DNA
tcgggcaactctccggtaactccggatggttggataacctgtagtgagcgaatgccggacgacaggcaggaggtg

SEQ ID NO: 465722 - DNA, 75 bp, synthetic construct
  source 1..75: mol_type = other DNA
gaaggtgttgccggggtcctgatggattataacctgtttgccagcaactaccgcccacaggacggcagcagcagc

SEQ ID NO: 465723 - DNA, 75 bp, synthetic construct
  source 1..75: mol_type = other DNA
atttcagttcccgacctgaaatgctcttcaatttcgatcaagccaatcagcaactgaatattagtattccgcaag

SEQ ID NO: 465724 - DNA, 75 bp, synthetic construct
  source 1..75: mol_type = other DNA
atcgatagaccttctcggtgtaggatacattaatgcaccttttgaataccatgctaacaggcctactggaggttc

SEQ ID NO: 465725 - DNA, 75 bp, synthetic construct
  source 1..75: mol_type = other DNA
cttttatgaggagcacgcgcaaaaaagtaccgaccagagcctggtcctgtgcgataccgtgcgttatctgccgga

SEQ ID NO: 465726 - DNA, 75 bp, synthetic construct
  source 1..75: mol_type = other DNA
ataagccggaaccgaataccatttataaggtcgatggaaataaaacattccagactgatgcattgggaagaacta

SEQ ID NO: 465727 - DNA, 75 bp, synthetic construct
  source 1..75: mol_type = other DNA
gccgcacaactgggtggaaacaatgcggcttccggtgctgcaggggcattcagtggtgaacttgctgcccggtat

SEQ ID NO: 465728 - DNA, 75 bp, synthetic construct
  source 1..75: mol_type = other DNA
aattgtgctgggcttaatatcaattttggctctgatggtttcaatagtatcatgctggctaatcaaaagaatgaa

SEQ ID NO: 465729 - DNA, 75 bp, synthetic construct
  source 1..75: mol_type = other DNA
gggtaaaagtgccagcggtaaaccactaccggtgatcactatcacacgtaaggatggcgacagtcaccgctttac

SEQ ID NO: 465730 - DNA, 75 bp, synthetic construct
  source 1..75: mol_type = other DNA
attcattcggcagggacagggtaaaagcgccagcggtaaaccactgccggtgatcactatcacacgtaaggacgg

SEQ ID NO: 465731 - DNA, 75 bp, synthetic construct
  source 1..75: mol_type = other DNA
aaaaaaggcaactctctcgctattgtaattaaaaataaaaacggaaatgattacttatctctcggttactacgat

SEQ ID NO: 465732 - DNA, 75 bp, synthetic construct
  source 1..75: mol_type = other DNA
cacatcctgagaatcactatcaggcattattgcaggaaattatggcattaagtggcctggatccgaaaggcgtgg

SEQ ID NO: 465733 - DNA, 75 bp, synthetic construct
  source 1..75: mol_type = other DNA
ggactcacattagcggaggtgagcagagcatttccagcggtggtagtgctgtagacaccaccattgaggtgggac

SEQ ID NO: 465734 - DNA, 75 bp, synthetic construct
  source 1..75: mol_type = other DNA
gctcatttccagtggtggctctgccatcaacaccaccattaaagggggattccaggaggttagcgatggtggcag

SEQ ID NO: 465735 - DNA, 75 bp, synthetic construct
  source 1..75: mol_type = other DNA
aatgtggcattacatgattggttgctatatgcttttgcgcgtagtaatacttatcaatggtatatcgacgggcag

SEQ ID NO: 465736 - DNA, 75 bp, synthetic construct
  source 1..75: mol_type = other DNA
tctgcgctctctgacaatggcgaacacttttctgcgaaggcggagtatctggagtcgccgaccattgatgagcgg

SEQ ID NO: 465737 - DNA, 75 bp, synthetic construct
  source 1..75: mol_type = other DNA
aaaatgctttaggttacgtcagtaccacgccggttagcctgggactgagtgcccaatatggcctaacctcgggtc

SEQ ID NO: 465738 - DNA, 75 bp, synthetic construct
  source 1..75: mol_type = other DNA
ttgaaggttctgacaaacctgctgcccctgacgctggatctcggcggtgaaaaacgcaatgtcttctccggtatt

SEQ ID NO: 465739 - DNA, 75 bp, synthetic construct
  source 1..75: mol_type = other DNA
gaggtgataaaaatttacgccggttactggttcagtgtgcccgctcattcatgatgcagcttgaacgccagcatg

SEQ ID NO: 465740 - DNA, 75 bp, synthetic construct
  source 1..75: mol_type = other DNA
taatttatggctaaggtgcattgctaatggtgccatatgttctaatattgataatacgctggtccttgcacgaac

SEQ ID NO: 465741 - DNA, 75 bp, synthetic construct
  source 1..75: mol_type = other DNA
tcaccgatccgccgtttggagccaacattaactatagcgaaatgaatatgttgtgggagtcctggttaatgtcct

SEQ ID NO: 465742 - DNA, 75 bp, synthetic construct
  source 1..75: mol_type = other DNA
atgccccaaatgaaataagtggcatcaatcttgatgactttttcggatctgattattacagcgtatcgagagatt

SEQ ID NO: 465743 - DNA, 75 bp, synthetic construct
  source 1..75: mol_type = other DNA
cgccacagcaggcaccaaatccgcgtgaatacttcggcaatgagatcactgatagttttaccagacagtacttcg

SEQ ID NO: 465744 - DNA, 75 bp, synthetic construct
  source 1..75: mol_type = other DNA
ctgtacttaaagaactattctggaaagcagtagacgaatttaactttccgcaagaggagcttaataggttaaagc

SEQ ID NO: 465745 - DNA, 75 bp, synthetic construct
  source 1..75: mol_type = other DNA
cgctactattggtggagtatttctatttttcttagcacccatcatttcggttcattggttaaaggttacaacaat

SEQ ID NO: 465746 - DNA, 75 bp, synthetic construct
  source 1..75: mol_type = other DNA
cttttcgcctatcattcccccttagaaagtaaaactattgaaaatgtcatagtatcatcaaaatactcctcaaat

SEQ ID NO: 465747 - DNA, 75 bp, synthetic construct
  source 1..75: mol_type = other DNA
aaaaggttcacgtcaagatttgaatgacgggctagtcgacgatatagacaatgttgcccgttctttattagatac

SEQ ID NO: 465748 - DNA, 75 bp, synthetic construct
  source 1..75: mol_type = other DNA
tatattgaagataacattgaaccggttcctggcacgaatatcagcgctttgattatctcagcgactccggcggga

SEQ ID NO: 465749 - DNA, 75 bp, synthetic construct
  source 1..75: mol_type = other DNA
cctggcgaaccagcggcgagcttaatattcctttgaatgtgatggttgatcaaacgctgaccgttggtgcagagt

SEQ ID NO: 465750 - DNA, 75 bp, synthetic construct
  source 1..75: mol_type = other DNA
tgcagtgctggatgctggttttaccattgaaaggatcgatattttcgacaagcagcatggtacgtttaagcaatt

SEQ ID NO: 465751 - DNA, 75 bp, synthetic construct
  source 1..75: mol_type = other DNA
actctggctgaaaatattcaaaattgtggttggtgaaaatgaaaattaccttaaagatgtgatgatgcagctgga

SEQ ID NO: 465752 - DNA, 75 bp, synthetic construct
  source 1..75: mol_type = other DNA
gaacatggcagatcgccggaaaatgctcgcggtaatgggaacaaacagttccctcggcgtgtatctggcaaacgt

SEQ ID NO: 465753 - DNA, 75 bp, synthetic construct
  source 1..75: mol_type = other DNA
aacccaaacaattcgaatgttagtctcttctttgcagggaggtgtatgggtccaccacatattgcaatttttatt

SEQ ID NO: 465754 - DNA, 75 bp, synthetic construct
  source 1..75: mol_type = other DNA
tctgcggtcatggtttccgcacactggcctgtagtgccttaattgagtcaggtttgtggtctgaagatgcggtag

SEQ ID NO: 465755 - DNA, 75 bp, synthetic construct
  source 1..75: mol_type = other DNA
gtgggggaaatcggcccagctaccgatgcaagcgtggctaccggacgcaatggaagcgccaacaccgatcagcgc

SEQ ID NO: 465756 - DNA, 75 bp, synthetic construct
  source 1..75: mol_type = other DNA
aaccgagcgaggccgtcgccgatgccgcaccgctgccagggtcaatgcgcctggtgttgattgtactgattgtga

SEQ ID NO: 465757 - DNA, 75 bp, synthetic construct
  source 1..75: mol_type = other DNA
gctatgatgcgggtaaataaatctcagctcgattctgagcttcttattgaagaaccggttgctccttatatatct

SEQ ID NO: 465758 - DNA, 75 bp, synthetic construct
  source 1..75: mol_type = other DNA
tatatctccatcagatatctctgctaagctacatcatttagtggatatacctcataaattagatgagcttgagtc

SEQ ID NO: 465759 - DNA, 75 bp, synthetic construct
  source 1..75: mol_type = other DNA
gatttcatcagccagtatcctggtgttgatagcacccgtattggtttgttggggatttgcgggggaggagggtat

SEQ ID NO: 465760 - DNA, 75 bp, synthetic construct
  source 1..75: mol_type = other DNA
ccggtggacttacttttgaaaacgactcaatcctcgcctggattcggaatactgactgggcaaagattggtttta

SEQ ID NO: 465761 - DNA, 75 bp, synthetic construct
  source 1..75: mol_type = other DNA
agcggataacgttgacggtgtgtattaccgaccgctgcaaaaactgattaatggtacctggtataacgtggcgag

SEQ ID NO: 465762 - DNA, 75 bp, synthetic construct
  source 1..75: mol_type = other DNA
ccgcaagaatccgtttggcgatatcaaatcggatggcacggtgaaaacggctctcgaaaaccttggtttacagga

SEQ ID NO: 465763 - DNA, 75 bp, synthetic construct
  source 1..75: mol_type = other DNA
gctaaagcgaccattgctgccgttatcgaatacctcggtttgcaggaaacggtaaacagggccaggaacgcggtg

SEQ ID NO: 465764 - DNA, 75 bp, synthetic construct
  source 1..75: mol_type = other DNA
aaccgaaagatgccactctgacggcgctggcggggcttgctactgcggcagacagctttccgtattttacgggga

SEQ ID NO: 465765 - DNA, 75 bp, synthetic construct
  source 1..75: mol_type = other DNA
acgataccgggtttaaacaaaatggcgatggtctgcttgatgtttatgcaaatggtcagcgagtattccgttttc

SEQ ID NO: 465766 - DNA, 75 bp, synthetic construct
  source 1..75: mol_type = other DNA
tttgtgcgcgtgagctgggatgaagccctcgacatgttctatgaagaactggaacgcgtgcagaaaactcaccgg

SEQ ID NO: 465767 - DNA, 75 bp, synthetic construct
  source 1..75: mol_type = other DNA
atactttgcctatggcagcaaaaaaactcggctgcacggtggatgatattctacatcttggggcaaccaatagac

SEQ ID NO: 465768 - DNA, 75 bp, synthetic construct
  source 1..75: mol_type = other DNA
tcatttcggcatgattgacgcattgatgatccgcaggtttttgccgcgttgtttggcgcagcggaagcgtggttg

SEQ ID NO: 465769 - DNA, 75 bp, synthetic construct
  source 1..75: mol_type = other DNA
tgcaggcggcaatgggttttatcaacatcgagcagaaccgcatcatcaaaatcttctcggtggtatccgtggtat

SEQ ID NO: 465770 - DNA, 75 bp, synthetic construct
  source 1..75: mol_type = other DNA
gcccaatgcttaagcattcaagttcgcggaaattaagccagacgctggtagaagcgctttgccaacactttcctc

SEQ ID NO: 465771 - DNA, 75 bp, synthetic construct
  source 1..75: mol_type = other DNA
atgttgttgattcgagagggattaaaggtcgcggttattgcggtcgatcccagcagcccggcactggcggtagca

SEQ ID NO: 465772 - DNA, 75 bp, synthetic construct
  source 1..75: mol_type = other DNA
tgttgaggataccgacacagggatattcagactgcccggttggtatgcaaattatttaaagggattttttgcaat

SEQ ID NO: 465773 - DNA, 75 bp, synthetic construct
  source 1..75: mol_type = other DNA
tgtcgatattgttgacggtcgttttgatgccgggatacgcctgggtgaaattgtagataatgatatggttgcagt

SEQ ID NO: 465774 - DNA, 75 bp, synthetic construct
  source 1..75: mol_type = other DNA
tgtcgatattgttgatggtcgttttgatgccgggatacgcctgggtgaaattgtggataaagatatggttgcagt

SEQ ID NO: 465775 - DNA, 75 bp, synthetic construct
  source 1..75: mol_type = other DNA
tgtcgatattgttgaaggtcgttttgatgccgggatacgcctgggtgaaattgttgataaagatatggttgcagt

SEQ ID NO: 465776 - DNA, 75 bp, synthetic construct
  source 1..75: mol_type = other DNA
catcgagcagaaccgcatcatcaaaattttctcggtggtatccgtcgtgttcctgccgccaacgctggttgcctc

SEQ ID NO: 465777 - DNA, 75 bp, synthetic construct
  source 1..75: mol_type = other DNA
tcaaaactggattgggcttcttccagaaaaaagaacaaagcaaacaggaactggacgcacagaacagtcacgagc

SEQ ID NO: 465778 - DNA, 75 bp, synthetic construct
  source 1..75: mol_type = other DNA
tatcctggtgttgatagcacccgtattggtttgttggggatttgcgggggaggagggtattcacttgctaccgcc

SEQ ID NO: 465779 - DNA, 75 bp, synthetic construct
  source 1..75: mol_type = other DNA
gttgttgcagagcttggtgatgattcaggctggcattttttcagccagaggaatacagataacagcatcacgttc

SEQ ID NO: 465780 - DNA, 75 bp, synthetic construct
  source 1..75: mol_type = other DNA
tacaagaaatcactcttgagaaaaacagaattaattatattctgtcagtgtatgaaaaaattatcagaagaaagg

SEQ ID NO: 465781 - DNA, 75 bp, synthetic construct
  source 1..75: mol_type = other DNA
aaataaacacactactaaaagaatataatctcaagcaaaaagatgcagaaatagaaaataagcatctacagtatc

SEQ ID NO: 465782 - DNA, 75 bp, synthetic construct
  source 1..75: mol_type = other DNA
ggtgtccatgcttctagctctgttgcgagagcaaggcgaatgtcctcagtcgacattgaacgacactgagcaata

SEQ ID NO: 465783 - DNA, 75 bp, synthetic construct
  source 1..75: mol_type = other DNA
taaagaaaaaggctatcaggtatcgttcgttagtgaatggttcaaccggagatgcaaaactcatattaacaaaaa

SEQ ID NO: 465784 - DNA, 75 bp, synthetic construct
  source 1..75: mol_type = other DNA
tcagcacaaacaaaaagaagcagatatagaaaacaaacgtttgcagtacttctttgaacagggctcggtgtctga

SEQ ID NO: 465785 - DNA, 75 bp, synthetic construct
  source 1..75: mol_type = other DNA
gataataactattctttcttgcctgaactctctctttctacagggcaatcggcatataataaatcagggtttaaa

SEQ ID NO: 465786 - DNA, 75 bp, synthetic construct
  source 1..75: mol_type = other DNA
ctggtgatcctctgggggcataacccaacggaaaccatattcggtcacaccaattactattttcaaaaaatgaag

SEQ ID NO: 465787 - DNA, 75 bp, synthetic construct
  source 1..75: mol_type = other DNA
gatcgtggtgtgagcattatcccggtggaaataaccccccgtatcatccctggcgtagttgctatgcaggcgggg

SEQ ID NO: 465788 - DNA, 75 bp, synthetic construct
  source 1..75: mol_type = other DNA
atcaaaggtggctgggcggcaggttacggcggtagttctaatcgtaaattctgcgttggaccagatatgccagaa

SEQ ID NO: 465789 - DNA, 75 bp, synthetic construct
  source 1..75: mol_type = other DNA
gtgactaatgatccgatgacgctggtgcgctggctgacggcgggtgccgggatcgcctacgtgccgctgatgtgg

SEQ ID NO: 465790 - DNA, 75 bp, synthetic construct
  source 1..75: mol_type = other DNA
acaactcagttgaaagaaatattaaacaatggatgattaaccgatattttataatcgataaggactgggctgttg

SEQ ID NO: 465791 - DNA, 75 bp, synthetic construct
  source 1..75: mol_type = other DNA
tatcggacatactctcaacagtaacacagaatattcacgccatggcgaaaactgtgaatactggattgatgtaac

SEQ ID NO: 465792 - DNA, 75 bp, synthetic construct
  source 1..75: mol_type = other DNA
ctatgatttttatttataattcatctgcggttgcatatgtttgtcctcttgatttgtattttaacaaaactatcg

SEQ ID NO: 465793 - DNA, 75 bp, synthetic construct
  source 1..75: mol_type = other DNA
ccgctttttatcgtaataaacaataccacttgcccggtgataccgcagacagattgaattatcagaaaatggctc

SEQ ID NO: 465794 - DNA, 75 bp, synthetic construct
  source 1..75: mol_type = other DNA
tcgcaagaaaaccagtgggctgggccatgtcgttctcgccggacagcaggctcaccatgaaagcgctggaaatgg

SEQ ID NO: 465795 - DNA, 75 bp, synthetic construct
  source 1..75: mol_type = other DNA
gaaatctcaataataacagaaattggtttcatactatttatgtgcctgtaaatagtattggaagtagtgcaggga

SEQ ID NO: 465796 - DNA, 75 bp, synthetic construct
  source 1..75: mol_type = other DNA
tgtttacttaaccgccatgaccaaagccggcagcaatgtcggctttttacgtccatatattccactcatccgtaa

SEQ ID NO: 465797 - DNA, 75 bp, synthetic construct
  source 1..75: mol_type = other DNA
atgaaaaaaatattatcagggttgattctgctgctttgctgtccttatggtttcgccgctaatggtgatggcgtt

SEQ ID NO: 465798 - DNA, 75 bp, synthetic construct
  source 1..75: mol_type = other DNA
ttttgataagaacgaccgtccagtgaatgtggatgggggcaacttacccgctgatatgggtgctattagtcgatt

SEQ ID NO: 465799 - DNA, 75 bp, synthetic construct
  source 1..75: mol_type = other DNA
gagaagagaaattcactcgctactaaatttttataaggttaaacaagataatgccaaaatggaaagcaaacgatt

SEQ ID NO: 465800 - DNA, 75 bp, synthetic construct
  source 1..75: mol_type = other DNA
aatgaaatagaaagaaatttaataaaaaaggaaaatgaaattgagatatataaaatgcacatgttttatattgat

SEQ ID NO: 465801 - DNA, 75 bp, synthetic construct
  source 1..75: mol_type = other DNA
tataaaaaatataaaaatgactatatgaatgcaaatcaagcgttcaatgaaggactgatcgcaaagaatgaactt

SEQ ID NO: 465802 - DNA, 75 bp, synthetic construct
  source 1..75: mol_type = other DNA
aacgattatataaaagtattttcctatgatgacgaggggaataaagctttaggttttgccatgcaaattgctcag

SEQ ID NO: 465803 - DNA, 75 bp, synthetic construct
  source 1..75: mol_type = other DNA
aagatgactaccgaaatgttaaagattttttttaactactatgttgatgagattcaaacttctttttaccgcaca

SEQ ID NO: 465804 - DNA, 75 bp, synthetic construct
  source 1..75: mol_type = other DNA
cagggtggcaaacgggtatggcggcgtgaacgggacctgacgggctggatgtcgctggtcacggaaaccggaagt

SEQ ID NO: 465805 - DNA, 75 bp, synthetic construct
  source 1..75: mol_type = other DNA
tgccaggcgtgtatggcattttgatcccaggcagtttattgcacatttcaggaaatgtgggtggttaggagaaaa

SEQ ID NO: 465806 - DNA, 75 bp, synthetic construct
  source 1..75: mol_type = other DNA
aataatgttgttggtgatggtgcaagatttaaaggcagaggtaccatacatctaactggtcgtgagaattataga

SEQ ID NO: 465807 - DNA, 75 bp, synthetic construct
  source 1..75: mol_type = other DNA
tatggcaaaacaataaatattagtgacatttttatctcaaaagaagagataaaaatagtaatgaacggcggcaga

SEQ ID NO: 465808 - DNA, 75 bp, synthetic construct
  source 1..75: mol_type = other DNA
aatacacagtagacgcgaaaactggagctttattgacagcagggaaacaagctgacgacgcattcgatcgcattg

SEQ ID NO: 465809 - DNA, 75 bp, synthetic construct
  source 1..75: mol_type = other DNA
tgacgcatgagcagcgttgcaggtatgccaccagctgcgccatcggattaagtcgatggtggggatctctaccga

SEQ ID NO: 465810 - DNA, 75 bp, synthetic construct
  source 1..75: mol_type = other DNA
tgacgcatgagcagcgttgccaggtgtgccaccagctgcgccatcggattaagtcgatggtggggatctctaccg

SEQ ID NO: 465811 - DNA, 75 bp, synthetic construct
  source 1..75: mol_type = other DNA
ctttaatatgacatttaactttagtccaaactcgttgaatgaaatgtatttttcgatccacacggacacggttaa

SEQ ID NO: 465812 - DNA, 75 bp, synthetic construct
  source 1..75: mol_type = other DNA
atggggtaaccagctgagtgaggataacccgcaccagctgcagcagctcatccgcctgccgggtcagcagtatga

SEQ ID NO: 465813 - DNA, 75 bp, synthetic construct
  source 1..75: mol_type = other DNA
acgtgaaaaacatgcggcgatggttagcaaaactggagaaagacgagactatacgcattgacggcgatgacgtag

SEQ ID NO: 465814 - DNA, 75 bp, synthetic construct
  source 1..75: mol_type = other DNA
gacttttacaggtatttaatacaagcattgatatagagaatctatcaaatgacgtcacagattgttatgtgcgac

SEQ ID NO: 465815 - DNA, 75 bp, synthetic construct
  source 1..75: mol_type = other DNA
ttataaaaacgcatttaatagtgtatcagcatcagattattattatgaaaatgatgaaggcgtattcatcagagc

SEQ ID NO: 465816 - DNA, 75 bp, synthetic construct
  source 1..75: mol_type = other DNA
cattctcagtaatagagccagtagaagtttgtgataatgttaggcggggtaagtattctggtcaaacgcttgagc

SEQ ID NO: 465817 - DNA, 75 bp, synthetic construct
  source 1..75: mol_type = other DNA
atggtggcaaactttatagggtcggtgagcgcggagtaccggagctatttacatccactggcgggaaacagtaca

SEQ ID NO: 465818 - DNA, 75 bp, synthetic construct
  source 1..75: mol_type = other DNA
tgtttgaacgggaatgcgatatgccgctgctggaagcgcggcatctcgcccttctgcttctcggccttgatgctt

SEQ ID NO: 465819 - DNA, 75 bp, synthetic construct
  source 1..75: mol_type = other DNA
ggggagacagtttccgggagcgccccattggctcccgtctctggctgttaagccgtgaaaagacgctgtcctccg

SEQ ID NO: 465820 - DNA, 75 bp, synthetic construct
  source 1..75: mol_type = other DNA
ggcggtaatcgctgcatgcagtaacggacaggcagccagcgcggcttgtgcaggtgaaagactgagggttattgc

SEQ ID NO: 465821 - DNA, 75 bp, synthetic construct
  source 1..75: mol_type = other DNA
tcgtggaaatgttgcagacacagggataactgatcgtgtcaatgacataataaatgacagattctggagtgatgg

SEQ ID NO: 465822 - DNA, 75 bp, synthetic construct
  source 1..75: mol_type = other DNA
tcaacagaaaaatacccggcagtaaacgccattgctcacgccattctgggcggtgcagcagcggcaatgcagggt

SEQ ID NO: 465823 - DNA, 75 bp, synthetic construct
  source 1..75: mol_type = other DNA
gaatgtttgccggtgatggtggcttcgacattacagtgggcagacatacccaactggatggtgcggtgattgcct

SEQ ID NO: 465824 - DNA, 75 bp, synthetic construct
  source 1..75: mol_type = other DNA
ctaaccaaaacatcacgcgctattagcggcaacttacgcgccggattccagcaggctggctatcagattcaggac

SEQ ID NO: 465825 - DNA, 75 bp, synthetic construct
  source 1..75: mol_type = other DNA
ggcaatcaaggattacgaagataaacaaaatcgacttgaacaagagaaagaagcgaaacgccaggcactggcagc

SEQ ID NO: 465826 - DNA, 75 bp, synthetic construct
  source 1..75: mol_type = other DNA
ggtggcggaatcacgatgaacaatacgttcaacatccaggctaacaacggctggacagaggaagactcaaaagcg

SEQ ID NO: 465827 - DNA, 75 bp, synthetic construct
  source 1..75: mol_type = other DNA
gcctgtttaatgaactacagcaggcattgattaaagccgctattgagcttcaacagttcggggatattagcgaag

SEQ ID NO: 465828 - DNA, 75 bp, synthetic construct
  source 1..75: mol_type = other DNA
aaaagaggctctctttgatatgtgccaggagttaatggcagtcgctaaagcgcccacggcagacagtatatcagc

SEQ ID NO: 465829 - DNA, 75 bp, synthetic construct
  source 1..75: mol_type = other DNA
gcaataagattggcggcgcagagcgacaagcagcaaaacttaacacgcagctaacaaaaacatcgcgggctatta

SEQ ID NO: 465830 - DNA, 75 bp, synthetic construct
  source 1..75: mol_type = other DNA
cgtagctgggcgatgacgcacagtatcagcggtagcggtgatgtgacaaaactgggtaccgggatcctgactctt

SEQ ID NO: 465831 - DNA, 75 bp, synthetic construct
  source 1..75: mol_type = other DNA
cagatacgggataacaatatgatgccaaagccattgtgtgaggcgatgtgttgtgctcccgtatacagcctgctt

SEQ ID NO: 465832 - DNA, 75 bp, synthetic construct
  source 1..75: mol_type = other DNA
cgtcttttgttcagagtacgagtccggcggatcaaagctatgatagtagcatagggccatataatggtccgaata

SEQ ID NO: 465833 - DNA, 75 bp, synthetic construct
  source 1..75: mol_type = other DNA
tcctcatcacacttttcagccgaagtaaaaagccggttaggaaaaacaccgagagaactatgtaaaaagttatga

SEQ ID NO: 465834 - DNA, 75 bp, synthetic construct
  source 1..75: mol_type = other DNA
gtatgcaggttggcgatttctcgaccggggtagatcttaatgacaacaataacagcgtgacgctggcggcaaaag

SEQ ID NO: 465835 - DNA, 75 bp, synthetic construct
  source 1..75: mol_type = other DNA
atactttgacaggaaccgatgatgcaaaaggtgccggagtacttattgaagggttacccaacagcaaaaattcac

SEQ ID NO: 465836 - DNA, 75 bp, synthetic construct
  source 1..75: mol_type = other DNA
tgattttctggtcagccctgttttatcacctgcctctgcttgcgcatctggaaggcaaattgttcagcggccggg

SEQ ID NO: 465837 - DNA, 75 bp, synthetic construct
  source 1..75: mol_type = other DNA
gtgttctgctgctgatcttaatgaataccggggtgcaggccaagacacagatcgccaggctttatgttcctgcgg

SEQ ID NO: 465838 - DNA, 75 bp, synthetic construct
  source 1..75: mol_type = other DNA
actggttgtctttgcataaacggctggccagtgatggtctgtatatcacgatgcaggaaggggaactggtggtga

SEQ ID NO: 465839 - DNA, 75 bp, synthetic construct
  source 1..75: mol_type = other DNA
ggtctggatctgatcctttctggcgataccggtagcagcacgatttcactgttaaaaaacaaagcgttgccggta

SEQ ID NO: 465840 - DNA, 75 bp, synthetic construct
  source 1..75: mol_type = other DNA
cgcaggtgttgcagaaagagaacatcatgagttttttgccgatgcaataccctttacatccgagatggtactatt

SEQ ID NO: 465841 - DNA, 75 bp, synthetic construct
  source 1..75: mol_type = other DNA
tcctggaatgaaaatacggtcgtgcataacaaaatagtcaggatgcaatcaacaggtgctgtgattgaacaaacg

SEQ ID NO: 465842 - DNA, 75 bp, synthetic construct
  source 1..75: mol_type = other DNA
gataaagaacttcatgatatgaagttgcgggtggatacaaccgcacagcagcccatagattccacctgccggttc

SEQ ID NO: 465843 - DNA, 75 bp, synthetic construct
  source 1..75: mol_type = other DNA
cagatattttgagcattgtaattgtattagcagtggaacattggattatcgcatctctcatagttggtttgatta

SEQ ID NO: 465844 - DNA, 75 bp, synthetic construct
  source 1..75: mol_type = other DNA
gcttgttgccgcgtctgcgtggcgtattgcacaccctgccgttgccaggcgtgggtttctgcgtggcagcgctgg

SEQ ID NO: 465845 - DNA, 75 bp, synthetic construct
  source 1..75: mol_type = other DNA
cgcgtgagtacgctgattctgtttgtggtggtgtttctcggtttgctggtcacgatctactccacgggttatctg

SEQ ID NO: 465846 - DNA, 75 bp, synthetic construct
  source 1..75: mol_type = other DNA
acaccttatccagtgaaagcacttatccagatggctaaggatattaccactggtcttggtggatatatccaggac

SEQ ID NO: 465847 - DNA, 75 bp, synthetic construct
  source 1..75: mol_type = other DNA
gctatggatttatcggaggaaatgcctccggtaaggggatagttaatatttcaacggacagtctctggaatttaa

SEQ ID NO: 465848 - DNA, 75 bp, synthetic construct
  source 1..75: mol_type = other DNA
ggtccattcattttgtaattggatttagtaaaacatgttacagaagtcttgttgatattgaagttggtgatgttt

SEQ ID NO: 465849 - DNA, 75 bp, synthetic construct
  source 1..75: mol_type = other DNA
tttatggcggcatcctgtttgccgcgtgggggaaatcggcccagctaccgatgcaagcgtggctaccggatgcaa

SEQ ID NO: 465850 - DNA, 75 bp, synthetic construct
  source 1..75: mol_type = other DNA
gtacggcaacgtgctggcaagcggcgttggcgtgggtacactgaccctgttacagagcgacagcctcgacagtta

SEQ ID NO: 465851 - DNA, 75 bp, synthetic construct
  source 1..75: mol_type = other DNA
ttcgcatattatctggccggctttccctggtatgaggggaatatcctgtttgcctttgcagtggcggcacaggtg

SEQ ID NO: 465852 - DNA, 75 bp, synthetic construct
  source 1..75: mol_type = other DNA
catgcctgctggccgtgattccggcacttaaccttgccaccagtgatgcggcggctgtaaccggccttgtgatga

SEQ ID NO: 465853 - DNA, 75 bp, synthetic construct
  source 1..75: mol_type = other DNA
aacatagctaaaaacactcgtaatttaaggctcggggtccatgcatattgctcatggacttacctgaatggctca

SEQ ID NO: 465854 - DNA, 75 bp, synthetic construct
  source 1..75: mol_type = other DNA
ataacaatccgggaaaccttaattttgctggtcaggcaggggcttctcttgaacgcccgggcgggcgatttgcca

SEQ ID NO: 465855 - DNA, 75 bp, synthetic construct
  source 1..75: mol_type = other DNA
tgccagtgcgaagtcatcctgggattacacgaaacaaaatattggagattcattgcgctggcttggcattgatac

SEQ ID NO: 465856 - DNA, 75 bp, synthetic construct
  source 1..75: mol_type = other DNA
taacgttaaacagaacaaagtgaacgttgacggcacgctgaaaggcaacagttatatgcagtggatgatcccagg

SEQ ID NO: 465857 - DNA, 75 bp, synthetic construct
  source 1..75: mol_type = other DNA
tgagaagcagtatcaggcggatgatctgaaactgaaacttaccggcaaaatgaccgattacacgctctctatgcg

SEQ ID NO: 465858 - DNA, 75 bp, synthetic construct
  source 1..75: mol_type = other DNA
ttgatgaagagtcacataagcgattatcagagcaagatggttcgtatatacagtttaactgtgacctaccatata

SEQ ID NO: 465859 - DNA, 75 bp, synthetic construct
  source 1..75: mol_type = other DNA
tataccaccgtcagggtgctttcgactgccggcagcaactccgtttttggtcgtctggtcaataccgttactggc

SEQ ID NO: 465860 - DNA, 75 bp, synthetic construct
  source 1..75: mol_type = other DNA
cagtaacgatccgcaaagtgctattttaagttcaattcctggagtagaacttacaaataatgtagcaacaatctt

SEQ ID NO: 465861 - DNA, 75 bp, synthetic construct
  source 1..75: mol_type = other DNA
caccggactttacgaaactgacatataaaatcgcaactgtatattctagtacaggaactacatcctatcaggcaa

SEQ ID NO: 465862 - DNA, 75 bp, synthetic construct
  source 1..75: mol_type = other DNA
tctgacataattaattataaacccaatgataacaaagtgtcttatttgtttggatatatcaataaactattctca

SEQ ID NO: 465863 - DNA, 75 bp, synthetic construct
  source 1..75: mol_type = other DNA
atcgaaagggagtgtttacattttattaaagttttcggaacggaacggataagacttgtcttgcagttttcaact

SEQ ID NO: 465864 - DNA, 75 bp, synthetic construct
  source 1..75: mol_type = other DNA
agctcaccgggtaccgaaccctcgtccttgccctcgggcgatacgggatcagtgaacaacaaatcggaagcatga

SEQ ID NO: 465865 - DNA, 75 bp, synthetic construct
  source 1..75: mol_type = other DNA
tcgaaagtaacggcttttccactttgcaagaattgagagattatgcagttcacctacttcagcaggaggattata

SEQ ID NO: 465866 - DNA, 75 bp, synthetic construct
  source 1..75: mol_type = other DNA
agaattagctgaattagagggtaaaaacaaaaatatggagtgcatagttattgtgccgattgagaagattttcat

SEQ ID NO: 465867 - DNA, 75 bp, synthetic construct
  source 1..75: mol_type = other DNA
tattcatgtgcaaagatccctaaattgatagatggagtgtctgataaggaaatctatgctcggtttgttaacgaa

SEQ ID NO: 465868 - DNA, 75 bp, synthetic construct
  source 1..75: mol_type = other DNA
gaaactgagcgcagggagcagctgaaatcctacctgaccacctacggctgggttgccctgggggcctggtaccag

SEQ ID NO: 465869 - DNA, 75 bp, synthetic construct
  source 1..75: mol_type = other DNA
aggctgtacctttaccccatgaagaagtgcttcgctacatggtatgtaaaatctgtgataaccggtcggaagaat

SEQ ID NO: 465870 - DNA, 75 bp, synthetic construct
  source 1..75: mol_type = other DNA
gcgcgtagtcgggaatgccaagtaagaatccctggcgtatgtaatggcaaccctgaaacgtctgtactggcacat

SEQ ID NO: 465871 - DNA, 75 bp, synthetic construct
  source 1..75: mol_type = other DNA
attcccggctggctatcagtatactgtagcctgcaaggtgtcggtggggcatcgaatgtcgccggcgttccttcg

SEQ ID NO: 465872 - DNA, 75 bp, synthetic construct
  source 1..75: mol_type = other DNA
ggcggcgcagcaccttacacctacgtttggaagaaaggcagcaccgctattccgggcaaaaccgcatcgacgttc

SEQ ID NO: 465873 - DNA, 75 bp, synthetic construct
  source 1..75: mol_type = other DNA
ggcggtctggttccataacccacgcggcaaagccgatcgtttctactcagccaaagtatcgttccagcgcgtacc

SEQ ID NO: 465874 - DNA, 75 bp, synthetic construct
  source 1..75: mol_type = other DNA
cttgcgagatggggcaaatcctgaaggacaaaactgtatcccgctcatcgtccgcatggccagcgttctggtcag

SEQ ID NO: 465875 - DNA, 75 bp, synthetic construct
  source 1..75: mol_type = other DNA
tccttaaagccgagaatacatacgtttgtccagttactaacgttactacccaaaaattaacagtatgggagaatc

SEQ ID NO: 465876 - DNA, 75 bp, synthetic construct
  source 1..75: mol_type = other DNA
cagtattcccagcactaagagcggcagtacaggcaggtgaaatcatcaagtataacaacctaacactatcggctg

SEQ ID NO: 465877 - DNA, 75 bp, synthetic construct
  source 1..75: mol_type = other DNA
gatctaaccgaagccttccagtttgccgccgaaggcaaagtggtgccgaaagtcgccctgcgtccgttagcggac

SEQ ID NO: 465878 - DNA, 75 bp, synthetic construct
  source 1..75: mol_type = other DNA
gatacctttggcagcttggttcttgagattgaaagccagctcccgcgtttcgttccaggagtggaggccacgcct

SEQ ID NO: 465879 - DNA, 75 bp, synthetic construct
  source 1..75: mol_type = other DNA
ctgggatctcacgcctcgtcgccgagaaagaaatgaattacttaacgccctgaaacctttcacaaaagcgtctga

SEQ ID NO: 465880 - DNA, 75 bp, synthetic construct
  source 1..75: mol_type = other DNA
tctcactaaaccgggtaatatggttgtacctatcagtactaacacattagctgtgggtgagtgggtacagttttc

SEQ ID NO: 465881 - DNA, 75 bp, synthetic construct
  source 1..75: mol_type = other DNA
aatcaaccggtctagaggtaactaatggttctatctactctagaggtgttgctcttaatcgtatttatggtatct

SEQ ID NO: 465882 - DNA, 75 bp, synthetic construct
  source 1..75: mol_type = other DNA
gcttcctggccttccaccgcttcgactgcgtactggaagataccggcgcgattaaggcgctggtgggtaaaccgg

SEQ ID NO: 465883 - DNA, 75 bp, synthetic construct
  source 1..75: mol_type = other DNA
gattggtactggaaaaaaattcattttcctgggggatttcaaccgctttatcattcgccgcgttacttatatgga

SEQ ID NO: 465884 - DNA, 75 bp, synthetic construct
  source 1..75: mol_type = other DNA
tgcgtatccgtcagattcaggaagcgttgcagtatgcgaatcaggcgcaggtgacaaagccgcagattcagcaga

SEQ ID NO: 465885 - DNA, 75 bp, synthetic construct
  source 1..75: mol_type = other DNA
taggtgcatggcgactgcgtgcctcgggcaactacaactggatgaccgattctggcagtaattatgattttaaaa

SEQ ID NO: 465886 - DNA, 75 bp, synthetic construct
  source 1..75: mol_type = other DNA
ttagtacgaagttacagcgtaaaataccggtatccttgatcatcagcggtgaaaaccccggcgccattgcagagc

SEQ ID NO: 465887 - DNA, 75 bp, synthetic construct
  source 1..75: mol_type = other DNA
ggttagtgcagaagatttgttgagtgctcatagggtacctccacaaatgatgggaattatgcctaacaatgttgg

SEQ ID NO: 465888 - DNA, 75 bp, synthetic construct
  source 1..75: mol_type = other DNA
cccgccgcgtcggatcgaaatttatgctactgctgcccccatgaatgcggaaaagcagtccggcgacgtgctgaa

SEQ ID NO: 465889 - DNA, 75 bp, synthetic construct
  source 1..75: mol_type = other DNA
gggctggctgaactgcgatataccgataatggtgcagccacaaagcggtccgatgaactgatgataacgctgttc

SEQ ID NO: 465890 - DNA, 75 bp, synthetic construct
  source 1..75: mol_type = other DNA
ggcgtggcctggaaagtccgtattgatgcaggtgtggccgctctggattatcgcggtatggtcaaatcaggcggg

SEQ ID NO: 465891 - DNA, 75 bp, synthetic construct
  source 1..75: mol_type = other DNA
ttgcagtatgcgaatcaggcgcaggtgacaaagccacaggttcagcagactgaagatgtgacacaagatacgttg

SEQ ID NO: 465892 - DNA, 75 bp, synthetic construct
  source 1..75: mol_type = other DNA
atgacggaccggcaatgaccaacccgtatacccagtcagaaaaggatacggcagagaagcaggcgaaagcacgaa

SEQ ID NO: 465893 - DNA, 75 bp, synthetic construct
  source 1..75: mol_type = other DNA
gccaccgaggcgcattgaaatttatgccaccgcagcgcccatgaatgcccggaagcaacccggtgacgtcaccag

SEQ ID NO: 465894 - DNA, 75 bp, synthetic construct
  source 1..75: mol_type = other DNA
gccaacggaactaacgcttaaactaagtcagcaactcaatgcccccttctatgcgcttcccgatttaggtcattt

SEQ ID NO: 465895 - DNA, 75 bp, synthetic construct
  source 1..75: mol_type = other DNA
ggagaaaactttcattaacgaacagtctcctttgaagttgtcaatatctaaatatattgagaatgcacataaaaa

SEQ ID NO: 465896 - DNA, 75 bp, synthetic construct
  source 1..75: mol_type = other DNA
acaggcggtaagtctggggtgtctggttcatttcgaagcgatgacgggaaaacaatcacagttaccaacggtatt

SEQ ID NO: 465897 - DNA, 75 bp, synthetic construct
  source 1..75: mol_type = other DNA
gctacgccacgtgatcagtgtaatcaacacctggcctgccaaccgcgtgaaagagttgttgccctggaatgtcac

SEQ ID NO: 465898 - DNA, 75 bp, synthetic construct
  source 1..75: mol_type = other DNA
tcggtatcagccggatgggtcacagcggcgcaatctcttattttgtgcagcaggcagcccgcgccggattcattg

SEQ ID NO: 465899 - DNA, 75 bp, synthetic construct
  source 1..75: mol_type = other DNA
gcggcaccaaccgcgaaccggagtttcgtcttgaggaaaccgggccatgctcggcaattttacatgccgacaatg

SEQ ID NO: 465900 - DNA, 75 bp, synthetic construct
  source 1..75: mol_type = other DNA
tcgaaaaatgaatgaccttcctgaaagccccataggaaataacctcgaagcactagcaccaggcattagaaaaac

SEQ ID NO: 465901 - DNA, 75 bp, synthetic construct
  source 1..75: mol_type = other DNA
tataataggaaaatatgtgcatcataaaaatagttactctagtggcttcttatctttcgatgataagaaaaattc

SEQ ID NO: 465902 - DNA, 75 bp, synthetic construct
  source 1..75: mol_type = other DNA
aaatttataagcaattcggcaattctgtttgcgtaaaagtcatagaagctgtagcaggaaatatgattgccgctc

SEQ ID NO: 465903 - DNA, 75 bp, synthetic construct
  source 1..75: mol_type = other DNA
caaaaaaaaccgctcctgggaagagcggctggcaagaagaaacaatatgaacaattaattaacgatgggaataat

SEQ ID NO: 465904 - DNA, 75 bp, synthetic construct
  source 1..75: mol_type = other DNA
ggaaccccttcaactacagcaccgattgctaaaggcaatataatgcctccatacaatggaaaaggcgtaacctgg

SEQ ID NO: 465905 - DNA, 75 bp, synthetic construct
  source 1..75: mol_type = other DNA
ttcaaccaatctctgggaacgggctctttgtcgcatgatggcatttcttttgaaatgcatggaaaaaaagggaat

SEQ ID NO: 465906 - DNA, 75 bp, synthetic construct
  source 1..75: mol_type = other DNA
aatgaatagccatggttctgaaaactctgagttcaaggataaatatactcacttacaattagggatggatacaaa

SEQ ID NO: 465907 - DNA, 75 bp, synthetic construct
  source 1..75: mol_type = other DNA
ttattcaatgaggcggaaatagctcatgccataaaatatgttgagggattgagagaaaaattcatgatgggacta

SEQ ID NO: 465908 - DNA, 75 bp, synthetic construct
  source 1..75: mol_type = other DNA
aaatccagaacataaaaaaataagattaaaaacaactaattcaacagaaggccacaagatgagtcgtggaggttt

SEQ ID NO: 465909 - DNA, 75 bp, synthetic construct
  source 1..75: mol_type = other DNA
ttcaccacgtcttgtactacgaaaagaaaagagaagaaacggtattgtaaattgttatctttccaagacggtaag

SEQ ID NO: 465910 - DNA, 75 bp, synthetic construct
  source 1..75: mol_type = other DNA
actggttaggtgagatgctagctaaagcactcatcgtgaaggggataccaaaacagaagcatatcgcccacatag

SEQ ID NO: 465911 - DNA, 75 bp, synthetic construct
  source 1..75: mol_type = other DNA
tgcacatttaaaaaatggaactaatttatatgcagccagttttggtaaggctgttgaacgtagggttgcacagtt

SEQ ID NO: 465912 - DNA, 75 bp, synthetic construct
  source 1..75: mol_type = other DNA
ctgcgaccggaagaaaatccgcttcacgtacctgtgggacggcgacagtattgcggaaatccgggaataccgcga

SEQ ID NO: 465913 - DNA, 75 bp, synthetic construct
  source 1..75: mol_type = other DNA
gtgtttacgaagagggttacccagattttgtggcatacaatgatatgacgattgcgacccagcaacttattgatg

SEQ ID NO: 465914 - DNA, 75 bp, synthetic construct
  source 1..75: mol_type = other DNA
ttgcttctgaatttatgcccgtcagcctgctcacgccgattgcccgtgacctgggcgtgacggaggggctggcag

SEQ ID NO: 465915 - DNA, 75 bp, synthetic construct
  source 1..75: mol_type = other DNA
tagccaatacaattacggcgttaccggcggcgtggttatccatcctcatggtgtgacgctctcgcaatatctggg

SEQ ID NO: 465916 - DNA, 75 bp, synthetic construct
  source 1..75: mol_type = other DNA
tctgggaacatatgttttataaaaatcttcatgaagatcaaattattattgaactaaaagaaaaagatgatgggt

SEQ ID NO: 465917 - DNA, 75 bp, synthetic construct
  source 1..75: mol_type = other DNA
gtgttatgcttaaacccgaaaattttaatggcggtctaaattctaaatgctttaggttactaattgagcaagggt

SEQ ID NO: 465918 - DNA, 75 bp, synthetic construct
  source 1..75: mol_type = other DNA
cctataacaacactgaatatttagaggaaacaatcaaaagtgttttttcacaggagattgataaagaatattata

SEQ ID NO: 465919 - DNA, 75 bp, synthetic construct
  source 1..75: mol_type = other DNA
aaacaacgccccacagtgctggaacacatgcagggcgtctaaccacaaacactatagagaggtaaatttatggtt

SEQ ID NO: 465920 - DNA, 75 bp, synthetic construct
  source 1..75: mol_type = other DNA
tggcgcttcgcattgtaccgcctgcatggtatgcgccgtgggaacgcgagcgcatatgcacggccattttgcgta

SEQ ID NO: 465921 - DNA, 75 bp, synthetic construct
  source 1..75: mol_type = other DNA
accgcctgcaccgggaaacgctgcgcagcttcggtcgttatgaactcaccaccgcttacaccccagggaaagatc

SEQ ID NO: 465922 - DNA, 75 bp, synthetic construct
  source 1..75: mol_type = other DNA
tgacaaaactgggtaccgggatcctgactcttaacaacgattccgcggcgtatcagggtacgacggatatcgtgg

SEQ ID NO: 465923 - DNA, 75 bp, synthetic construct
  source 1..75: mol_type = other DNA
tccccaaccggttgttgctcatcttcggcatgttgtcggttgccgtggcggcattttttcattctggtacagcgg

SEQ ID NO: 465924 - DNA, 75 bp, synthetic construct
  source 1..75: mol_type = other DNA
gatgagtcacagacggtaaataaattatgggaacgcctgcgggataaccacggcattgatgccacgcgtctgcgg

SEQ ID NO: 465925 - DNA, 75 bp, synthetic construct
  source 1..75: mol_type = other DNA
atcgcttcaccgtatccgccagtttcagcccatcggacagccgcccatatcggtttaccgcgagctgcgcaaact

SEQ ID NO: 465926 - DNA, 75 bp, synthetic construct
  source 1..75: mol_type = other DNA
aatcaagcctatttctttcttgagcaaattttaaccaaacctaatcaaaaagaaattgcttctcgttcattttat

SEQ ID NO: 465927 - DNA, 75 bp, synthetic construct
  source 1..75: mol_type = other DNA
aacagaaaaaagatccgaagtaaaagatttcggacgtaaactaaacataactgtattagatggcaactttttaag

SEQ ID NO: 465928 - DNA, 75 bp, synthetic construct
  source 1..75: mol_type = other DNA
taatggaagaattactaagagattatttcatgcaagcagggtattatgttgtcagaggtgtaccttttgtttatg

SEQ ID NO: 465929 - DNA, 75 bp, synthetic construct
  source 1..75: mol_type = other DNA
cagcgcgctcagcgtcaacgagcagaaaaacctgggtgatgcttccgttatcaataatggcctgctcaccatctc

SEQ ID NO: 465930 - DNA, 75 bp, synthetic construct
  source 1..75: mol_type = other DNA
caccgcccatgttgctagctttatcgctgatccatcgactatcgccgccaccaacagtgatttaagtaccttaaa

SEQ ID NO: 465931 - DNA, 75 bp, synthetic construct
  source 1..75: mol_type = other DNA
aatcaagcttatttctttcttgagcaaatcttaacgaagccaaatcaaaaggaaattgctgctcgttcattttat

SEQ ID NO: 465932 - DNA, 75 bp, synthetic construct
  source 1..75: mol_type = other DNA
tagcgctgagattaatgccctgcttgacacactgaaaggagattatcggcttgtggcattgctttgcctcagtac

SEQ ID NO: 465933 - DNA, 75 bp, synthetic construct
  source 1..75: mol_type = other DNA
atggcactccagtggagggtcaggtcatcaactttagcgtaacgccagaaggtgcgacgttaagtggcggaaaag

SEQ ID NO: 465934 - DNA, 75 bp, synthetic construct
  source 1..75: mol_type = other DNA
ttacgcaagctttaccgctacaaaagccggggtttatcaagtgacggcaaccctcgaaaatggcgattcgataca

SEQ ID NO: 465935 - DNA, 75 bp, synthetic construct
  source 1..75: mol_type = other DNA
gagcagtctcttatgtttggcaagaatccgcatcatggccgttacggtttgttcccttttatagccgaccctgca

SEQ ID NO: 465936 - DNA, 75 bp, synthetic construct
  source 1..75: mol_type = other DNA
ttgctacaggcactttttgatacagtctccgcaggcgacactaccaatctgtatattgaggtgaaggataattac

SEQ ID NO: 465937 - DNA, 75 bp, synthetic construct
  source 1..75: mol_type = other DNA
accaatgagtctggcatcgcgcaggccactctcgcaggcgttgcctttggtgagcagacggtcactgcatcactg

SEQ ID NO: 465938 - DNA, 75 bp, synthetic construct
  source 1..75: mol_type = other DNA
tcgggtcactgtacagtgaatgtggagatatggggcaacaccagcaactcctgcgctttcatcttccatcgaatt

SEQ ID NO: 465939 - DNA, 75 bp, synthetic construct
  source 1..75: mol_type = other DNA
tgccgtcgattttacctggcaacctggcagcgcaatgcagaaacagcttgacccgaatgaagtcgctgcacggcg

SEQ ID NO: 465940 - DNA, 75 bp, synthetic construct
  source 1..75: mol_type = other DNA
cttcggatttaagataccaatcaatcaatttattcaaagaaagacttgcgagcaagataaaagaaacatatttaa

SEQ ID NO: 465941 - DNA, 75 bp, synthetic construct
  source 1..75: mol_type = other DNA
caagcggggatgacaacgataatcagccatattattatatccagatggggggttcgtgtttgtcggataaaagta

SEQ ID NO: 465942 - DNA, 75 bp, synthetic construct
  source 1..75: mol_type = other DNA
acgtaatctggcaattagattacctctcaggcttgttccggtttcattattgtcattactttactcgactatttt

SEQ ID NO: 465943 - DNA, 75 bp, synthetic construct
  source 1..75: mol_type = other DNA
tggttgaaagcgtacagaaagggctgaaatcgcgtggctatcgtggtcaggggcgcatcatggccgacagtagcg

SEQ ID NO: 465944 - DNA, 75 bp, synthetic construct
  source 1..75: mol_type = other DNA
gtcgaagccaccgcactggaagctgccggtggcaaagtggtcacaacgggtaaagatattctggttaccctgccg

SEQ ID NO: 465945 - DNA, 75 bp, synthetic construct
  source 1..75: mol_type = other DNA
atatctatttaccctttgttgtagttgatctggttatatccagcgttctgttaacgttaggtatgatgatgatga

SEQ ID NO: 465946 - DNA, 75 bp, synthetic construct
  source 1..75: mol_type = other DNA
attcatatttactgttattcacttttgcattatcaatatattatacactccaaatcgattatgattacattgtat

SEQ ID NO: 465947 - DNA, 75 bp, synthetic construct
  source 1..75: mol_type = other DNA
aatgatgtctatcgcacagtatttaagtagaccgaccagatatatactttattcatatttactgttattcacttt

SEQ ID NO: 465948 - DNA, 75 bp, synthetic construct
  source 1..75: mol_type = other DNA
gacccgactcccgatccaacgccgacacccgttccggagaaacgcatcacgccttctacggcagctgtactcaat

SEQ ID NO: 465949 - DNA, 75 bp, synthetic construct
  source 1..75: mol_type = other DNA
tattattgaaacacatagtgatgcattagttagacggattagattaagaattgttgatgaatcaagcgaacttac

SEQ ID NO: 465950 - DNA, 75 bp, synthetic construct
  source 1..75: mol_type = other DNA
tttagccgggctacctcagaaaacttacgcagatttatatatgaatgcccattgaagagaatcaaagattgccta

SEQ ID NO: 465951 - DNA, 75 bp, synthetic construct
  source 1..75: mol_type = other DNA
tcctcgcagatcggtttgcataaatcgttgagggtcgggctgggttatgacgtcaaagtcggaaataacgttacc

SEQ ID NO: 465952 - DNA, 75 bp, synthetic construct
  source 1..75: mol_type = other DNA
agatatgcgaaactcaagaggaaccgggtgtgtttaataaaattgaaaaatttatggtgaaattcttacctatcg

SEQ ID NO: 465953 - DNA, 75 bp, synthetic construct
  source 1..75: mol_type = other DNA
agcaacagcatcaactggatgttgaattaataaataccaaaccaaaatcgagaacagaggctaaggctcagttgg

SEQ ID NO: 465954 - DNA, 75 bp, synthetic construct
  source 1..75: mol_type = other DNA
gattgaactacggtccgctgaatggtcagaaattgattttgataatgccctgtggacaatccctgaaagccgcat

SEQ ID NO: 465955 - DNA, 75 bp, synthetic construct
  source 1..75: mol_type = other DNA
tccgaacccgaacccgaacccaaatccgaacccaaatccgaacccaaatccaaatccaaatccaaatccaaatcc

SEQ ID NO: 465956 - DNA, 75 bp, synthetic construct
  source 1..75: mol_type = other DNA
cggacgatttcttggacggtttatacggacatcaatccgaccgcatgacgatactcgatgggactacgcccgcca

SEQ ID NO: 465957 - DNA, 75 bp, synthetic construct
  source 1..75: mol_type = other DNA
gattaacaccacactggatggctatcagacagttttcaatggtggcaacgcaacaggcaccacaattaatggcgg

SEQ ID NO: 465958 - DNA, 75 bp, synthetic construct
  source 1..75: mol_type = other DNA
gcgtttcacgataaatgcgaaaactttagctttcgcgcttcaaatgaaacagcagtattaattactgctttttat

SEQ ID NO: 465959 - DNA, 75 bp, synthetic construct
  source 1..75: mol_type = other DNA
gctgtacgtcggcggtaagctgttccagtcgattttcctttgcaccacgtttgtgaacacgttagcgtctggcct

SEQ ID NO: 465960 - DNA, 75 bp, synthetic construct
  source 1..75: mol_type = other DNA
tttccttggtttcgatgcggtgaccacactttcggaagagacaccagacgccgcacgcgtgatcccgaaagccat

SEQ ID NO: 465961 - DNA, 75 bp, synthetic construct
  source 1..75: mol_type = other DNA
cagggaccgaaaggggatacaggagccgcaggcccggcggggccacagggaccgaaaggagatacaggagccgca

SEQ ID NO: 465962 - DNA, 75 bp, synthetic construct
  source 1..75: mol_type = other DNA
ctgggtctggtgtgggcctcgctgggtggggcgtatctgtggtatctggtacgtcgttatcgcaaagtaccgctg

SEQ ID NO: 465963 - DNA, 75 bp, synthetic construct
  source 1..75: mol_type = other DNA
gcgttgtcggcgctgttctttgatttagtcaccgctacagcattgattaacttcggcgcgttggtggcatttacc

SEQ ID NO: 465964 - DNA, 75 bp, synthetic construct
  source 1..75: mol_type = other DNA
atggattgcagtcacccgccgcgcgcggatgcaccgcgtaatcactgtgatttaaataccgtgcttgcgctgaat

SEQ ID NO: 465965 - DNA, 75 bp, synthetic construct
  source 1..75: mol_type = other DNA
aaatattcttgtgttgcaaaaaatactggggcatagcgatataaaaatgactatgcgttatgcgcattttgctcc

SEQ ID NO: 465966 - DNA, 75 bp, synthetic construct
  source 1..75: mol_type = other DNA
aatgtctttatcagcaggtgattccgcatttaataccaccattgatggcggagagcaatacgtatccagtggtgg

SEQ ID NO: 465967 - DNA, 75 bp, synthetic construct
  source 1..75: mol_type = other DNA
tcgccgcacaacccggcaaaacgaaactgcgtaaatcgctgaagctgtggcaggtggtgatgatggggcttgcct

SEQ ID NO: 465968 - DNA, 75 bp, synthetic construct
  source 1..75: mol_type = other DNA
tggtgagcatcaccggcgtaaatatcggccgtctttttcgcgaaggcttcagcaattacgaccctattggtgcgc

SEQ ID NO: 465969 - DNA, 75 bp, synthetic construct
  source 1..75: mol_type = other DNA
tcgatcataactggcagcaggcgttaaccaaaacctccagcgagcggcgggtagcgatggatatcgaactcggcg

SEQ ID NO: 465970 - DNA, 75 bp, synthetic construct
  source 1..75: mol_type = other DNA
cgaaggttctggcgtcgatctgaacaatgacggcaggatcgacctggttcagcacacctacaacctgaacaacta

SEQ ID NO: 465971 - DNA, 75 bp, synthetic construct
  source 1..75: mol_type = other DNA
gtctggagagcgggatttagtgttccgtgagcgtttgttgtcagtcacatcagcgatcaaaaacaaattgaaaaa

SEQ ID NO: 465972 - DNA, 75 bp, synthetic construct
  source 1..75: mol_type = other DNA
atgctaggtacacatagttccgcaaagctaggaatgacaaagaagaacaaaacaaacgaaaagaagaacaaaaca

SEQ ID NO: 465973 - DNA, 75 bp, synthetic construct
  source 1..75: mol_type = other DNA
gatagctctcgttggtggtatcgttacctatctgttagggctatggaatgcagagatgcagttaaatgaaaaagg

SEQ ID NO: 465974 - DNA, 75 bp, synthetic construct
  source 1..75: mol_type = other DNA
aacattaaccaatagtgttctggcaagggcggagattcttaacattataatctctgccgttgagggagaaatcga

SEQ ID NO: 465975 - DNA, 75 bp, synthetic construct
  source 1..75: mol_type = other DNA
tgtatttatcgagccagtgcattaggactattgacccaggaacaggcaagaactggctatatgcatcttaattct

SEQ ID NO: 465976 - DNA, 75 bp, synthetic construct
  source 1..75: mol_type = other DNA
attgatttcactgatattctaggtgaagcactttctaagaatgatagcgaccagtatcaaaacctcgtaatgaga

SEQ ID NO: 465977 - DNA, 75 bp, synthetic construct
  source 1..75: mol_type = other DNA
aaagaagatgtcccacctgggcagacgcttgtctcgacgtactcaatgcaggtagtgcgtaagaacggaatgaag

SEQ ID NO: 465978 - DNA, 75 bp, synthetic construct
  source 1..75: mol_type = other DNA
caatgacctcttcaggcaataactgggtcgtcaccactcaggacttcctcggtcaacagccgcaaaatgattttg

SEQ ID NO: 465979 - DNA, 75 bp, synthetic construct
  source 1..75: mol_type = other DNA
caggggaatgggacgtttgtctgggggcagaacaccaccaataccttcctgagcggggcgggtagtggcgctatg

SEQ ID NO: 465980 - DNA, 75 bp, synthetic construct
  source 1..75: mol_type = other DNA
aaaaactaaagtgggaattacatccaaacaaacaaaagcattaatcaaagatcaagagctgacttttgttgcatt

SEQ ID NO: 465981 - DNA, 75 bp, synthetic construct
  source 1..75: mol_type = other DNA
cgggacttataatcgctgacacttatcctccgatgagtgaaatatacaagcaagaagccagagaacttgataaga

SEQ ID NO: 465982 - DNA, 75 bp, synthetic construct
  source 1..75: mol_type = other DNA
cagaggattataagaccggtaaaactattcgtcgtgcgttgccggatactgcggtcaggcttctgcaagagcatc

SEQ ID NO: 465983 - DNA, 75 bp, synthetic construct
  source 1..75: mol_type = other DNA
tttgccagcttcccgacgatgctggaaggcattgctgccttagatcggcaggtaatgctatacctgaaacgcggc

SEQ ID NO: 465984 - DNA, 75 bp, synthetic construct
  source 1..75: mol_type = other DNA
ctcagtagaaggcctgctccgtgccgacagcgcagggcgtgcggcgtactacaccaccgcactgcaaaacggatg

SEQ ID NO: 465985 - DNA, 75 bp, synthetic construct
  source 1..75: mol_type = other DNA
gtcaggcacgtcgacctgccggccgttatatttatgaagagttacgccggcagatcctgacgctgcaactcaggc

SEQ ID NO: 465986 - DNA, 75 bp, synthetic construct
  source 1..75: mol_type = other DNA
cgctcctacggcggcgagctggacggcgaacctgcggaggtgctgcgccagctcccttcggtctgggtgaccttc

SEQ ID NO: 465987 - DNA, 75 bp, synthetic construct
  source 1..75: mol_type = other DNA
tgtgtgggcgcacaacgtgatcaggggattgctgttgtggtggaagaccgccgctaccgcccgacaaatcttgaa

SEQ ID NO: 465988 - DNA, 75 bp, synthetic construct
  source 1..75: mol_type = other DNA
cagcctgacggttcgcgtaaagcggcaaccgaccacccggcttattctgtactgtgtcgccgtcccaattcagaa

SEQ ID NO: 465989 - DNA, 75 bp, synthetic construct
  source 1..75: mol_type = other DNA
gatagtgccggtcgcgcggcatactataccagcgcgcttcaaaatggctggatgtcccgtaatgacgttcgtcgt

SEQ ID NO: 465990 - DNA, 75 bp, synthetic construct
  source 1..75: mol_type = other DNA
ggctgagcatgctatttacgatatgtttgatagactggagcaaaaaggaattctttttgtcgatacaacagagac

SEQ ID NO: 465991 - DNA, 75 bp, synthetic construct
  source 1..75: mol_type = other DNA
tcgtgggtaccaccatggatgtgcgaggcccctttgatccggaaagcaacgaattgctggtctgggagatcgaaa

SEQ ID NO: 465992 - DNA, 75 bp, synthetic construct
  source 1..75: mol_type = other DNA
gctgatcaacagggaaaaccgattttcgatcttaccaattcacaggctcctttgctcgactatactccaacttct

SEQ ID NO: 465993 - DNA, 75 bp, synthetic construct
  source 1..75: mol_type = other DNA
gtggggcaacgtggtacagcaggtgggcgataagggttacagcgacacgtccgcgatgctggggggtaaatacag

SEQ ID NO: 465994 - DNA, 75 bp, synthetic construct
  source 1..75: mol_type = other DNA
caacgtacagacccgcctgggcgtgaaagcatacatcaacggtcacagtaagctggatgagggcagagaccgtac

SEQ ID NO: 465995 - DNA, 75 bp, synthetic construct
  source 1..75: mol_type = other DNA
gccaccatcaagacccagtcgattaccgcaccgttactactagtcgacagtggtcagcaggatgtgggggttctg

SEQ ID NO: 465996 - DNA, 75 bp, synthetic construct
  source 1..75: mol_type = other DNA
cattaataacggggaacagcaagtttccagcagtggtagtgctgtaggcaccaccattaatgggggactgcagac

SEQ ID NO: 465997 - DNA, 75 bp, synthetic construct
  source 1..75: mol_type = other DNA
atgaatatgtatcaatactgtcggatgttcgttgtaatagcggaaatattgttactggcaaccacagcttccagt

SEQ ID NO: 465998 - DNA, 75 bp, synthetic construct
  source 1..75: mol_type = other DNA
tcaatgttatcaatcacttatttctatacagccaagaataaaaagtgagaaccccatactctacaagcatctcac

SEQ ID NO: 465999 - DNA, 75 bp, synthetic construct
  source 1..75: mol_type = other DNA
ctgcatataagtacaagcctgttaaaaaagaaactcagagaggagaacacaagtttttgcagaataaagaaccag

SEQ ID NO: 466000 - DNA, 75 bp, synthetic construct
  source 1..75: mol_type = other DNA
cctgtttaaaaccaccgtatcgtgggggacaaaacttgcggttatgggcgttgccgggccgttcggctttggcat

SEQ ID NO: 466001 - DNA, 75 bp, synthetic construct
  source 1..75: mol_type = other DNA
gaacggcgattacatctggcgcgaccgtttacaggcgggtgatcctgatacgttgctggggcttccggtggagta

SEQ ID NO: 466002 - DNA, 75 bp, synthetic construct
  source 1..75: mol_type = other DNA
gcaaacccgatgacaaatcagtatacgggtgagttttataaacaggatgatgtatataaaaattaccatatgcct

SEQ ID NO: 466003 - DNA, 75 bp, synthetic construct
  source 1..75: mol_type = other DNA
tcctgctgatcgacgatcacccgatgttgcgaactggcgtaaaacagcttatcagtatggcaccagatatcactg

SEQ ID NO: 466004 - DNA, 75 bp, synthetic construct
  source 1..75: mol_type = other DNA
aagtctgtcagtcctatcaggtaaatatttcagcagatcaaaaccttcagtgtgaagttgtggatgtatccggca

SEQ ID NO: 466005 - DNA, 75 bp, synthetic construct
  source 1..75: mol_type = other DNA
cagcgaaggaaaacatgaaagagggggtaaacacgtcagcggtgcaaaattcaggagtaaagacaccgactccga

SEQ ID NO: 466006 - DNA, 75 bp, synthetic construct
  source 1..75: mol_type = other DNA
tgagtgtcaaaatgttatggtcaaaatttcgggaataggtttaaaaggaatcccatggacaatggagaataattt

SEQ ID NO: 466007 - DNA, 75 bp, synthetic construct
  source 1..75: mol_type = other DNA
gctgattgtcgaagtgattgacggaacgctttcgccgctcgcgcaggcattgatgcaaaccggtttgctgcccgc

SEQ ID NO: 466008 - DNA, 75 bp, synthetic construct
  source 1..75: mol_type = other DNA
ccatcataaagtcagggttgattatgaagtcactattgaaaacagaagaaagatagacctgttgatgacatcttc

SEQ ID NO: 466009 - DNA, 75 bp, synthetic construct
  source 1..75: mol_type = other DNA
ctacaggtaatgccaataaggataccgggaatgataatggctgggatattggtggtggttgtgaaggctcacggg

SEQ ID NO: 466010 - DNA, 75 bp, synthetic construct
  source 1..75: mol_type = other DNA
gatgatggaatgataattgtgacacctagtggtaagcgttggaaaaggataacccattatatagcacctgatttt

SEQ ID NO: 466011 - DNA, 75 bp, synthetic construct
  source 1..75: mol_type = other DNA
aatgaatttttctcaattattgatattaattctaagcaactaattagctcatttgagtatcctgccgcttcattt

SEQ ID NO: 466012 - DNA, 75 bp, synthetic construct
  source 1..75: mol_type = other DNA
aattaatttccacagataaacatagtggcgcttatgtagtagtttgtaaagctttagttacgaaggctagtgtgt

SEQ ID NO: 466013 - DNA, 75 bp, synthetic construct
  source 1..75: mol_type = other DNA
tgatactatgcgggacctttgttgggactacgcacgcagcggtggataaacacgcaacaggcacctacacactaa

SEQ ID NO: 466014 - DNA, 75 bp, synthetic construct
  source 1..75: mol_type = other DNA
aagggactattcgactgcgcgtcattggcgaccaaacctcggccaaggcgcaagcctacactttagtcctcaacg

SEQ ID NO: 466015 - DNA, 75 bp, synthetic construct
  source 1..75: mol_type = other DNA
ggaaatgccacgagttggtatgggaaaaacctcgtattgctatgggaaacgcccctggtttaaattcgtgtttta

SEQ ID NO: 466016 - DNA, 75 bp, synthetic construct
  source 1..75: mol_type = other DNA
gaagatccagttcatttcgagacttttttaaacacagccaaacttttcgattacgtatttactactgatattgat

SEQ ID NO: 466017 - DNA, 75 bp, synthetic construct
  source 1..75: mol_type = other DNA
catgctcagtatctcgataagcgcagagaaatgatgcagtggtgggcggactggattgatgaaaaggtggagtga

SEQ ID NO: 466018 - DNA, 75 bp, synthetic construct
  source 1..75: mol_type = other DNA
gattacatcaatttatagaagagactcctgagctcgaactactaattcaggatggcaaagaagggagtagtttct

SEQ ID NO: 466019 - DNA, 75 bp, synthetic construct
  source 1..75: mol_type = other DNA
cgattttactcaatgcgttgttaagcagaaggttggttgacgttccaccgccagaagttgttcatcaggagccat

SEQ ID NO: 466020 - DNA, 75 bp, synthetic construct
  source 1..75: mol_type = other DNA
agcgccgcagatggtcagtcagacccttttatggcgatgattggctgggcagaaaaagcgatttcaaaagctatt

SEQ ID NO: 466021 - DNA, 75 bp, synthetic construct
  source 1..75: mol_type = other DNA
agagcaccatcgaaacaaggataaagaaaataaagaaaagtgtattgatgaaataagtttaaaaaaattgaaatt

SEQ ID NO: 466022 - DNA, 75 bp, synthetic construct
  source 1..75: mol_type = other DNA
cgctcgtgaccggctatcttcccatatcttcttctgggacatgctggagatgcgacagctcaagcgcatgttcga

SEQ ID NO: 466023 - DNA, 75 bp, synthetic construct
  source 1..75: mol_type = other DNA
gcggccggacggcgttgggaagccgacaaataccaggatctgatcgacacctcagatgatgggaaagttgtgttc

SEQ ID NO: 466024 - DNA, 75 bp, synthetic construct
  source 1..75: mol_type = other DNA
taaccttagtttccttcgcaaactgttcgtttgccgaacaaatcaaacaagaagcaactttaagtttaaatgtta

SEQ ID NO: 466025 - DNA, 75 bp, synthetic construct
  source 1..75: mol_type = other DNA
aaacacagcaacctgattgaagcaggactgacaacaccgggacttagtgcagcacgtcacctgatgcgcacacag

SEQ ID NO: 466026 - DNA, 75 bp, synthetic construct
  source 1..75: mol_type = other DNA
tatcgtcgaaaacccgaaaaagctgaagttcctgccaaacgtggaagccgcgctgttaccgcagatgtataacaa

SEQ ID NO: 466027 - DNA, 75 bp, synthetic construct
  source 1..75: mol_type = other DNA
cgctatccaacgagaatgaatacgtggatctcgacgaaccgtggcgtcggcgacttggactgggtttccaggatg

SEQ ID NO: 466028 - DNA, 75 bp, synthetic construct
  source 1..75: mol_type = other DNA
cagggaaaccgttcttcgctgctgcaggcgtggattgatgatggcgatacgtcgttaccaccagaaaaaatttag

SEQ ID NO: 466029 - DNA, 75 bp, synthetic construct
  source 1..75: mol_type = other DNA
acatcgaaccgaagatggaatcactgctgtcgaccgaacccaatttcgagaacgatgtctgtgaaacccattcgt

SEQ ID NO: 466030 - DNA, 75 bp, synthetic construct
  source 1..75: mol_type = other DNA
atgttgaaggggcgacgtgcattaaatggctttctggtaaaaagcccacggactttaactgagttcacaatgata

SEQ ID NO: 466031 - DNA, 75 bp, synthetic construct
  source 1..75: mol_type = other DNA
gcgcagcacatcctgaatttctacaaatttgtgccccatgtaaaaggggcgctggcaggccagcccattgaactg

SEQ ID NO: 466032 - DNA, 75 bp, synthetic construct
  source 1..75: mol_type = other DNA
cttttggatatttcatgctgttggtagcattattgacaaccagcgtggggcaacgcttagtagttcaattgatcc

SEQ ID NO: 466033 - DNA, 75 bp, synthetic construct
  source 1..75: mol_type = other DNA
gtgctggggatgactcctttcgggcctgcagagcgggaagccgtgatgaacattttggggtggccgcttcttctc

SEQ ID NO: 466034 - DNA, 75 bp, synthetic construct
  source 1..75: mol_type = other DNA
tgcttgtgatcaaacaaatcggctatgaaggtctggaaagcggtcacggattcaggcatgaattcagcacgatta

SEQ ID NO: 466035 - DNA, 75 bp, synthetic construct
  source 1..75: mol_type = other DNA
ctgtttccgggccgcgctgctgggtaggatttgatccttcgcgtggcgtggattgttccgccgtgtacggagtgc

SEQ ID NO: 466036 - DNA, 75 bp, synthetic construct
  source 1..75: mol_type = other DNA
gttttatttgagaacgcaaacagggagatggattattacaacataaggaaggagtttaattactcaactgaaatt

SEQ ID NO: 466037 - DNA, 75 bp, synthetic construct
  source 1..75: mol_type = other DNA
cttatttccggcctgatacacaatcagattcatggctcggatattactgccattgatgctatggcagtagaaatt

SEQ ID NO: 466038 - DNA, 75 bp, synthetic construct
  source 1..75: mol_type = other DNA
aggcgacagagtcaatgtctattatccgccagggcatccagaagaggccgaaataaacaatccctgggttaattt

SEQ ID NO: 466039 - DNA, 75 bp, synthetic construct
  source 1..75: mol_type = other DNA
aagggaaagacaaatcagctgatggggataccaggacggacattacccgcatggatgacaaggagttgcacgatt

SEQ ID NO: 466040 - DNA, 75 bp, synthetic construct
  source 1..75: mol_type = other DNA
aatgcaggccttgctaccgggaccatcattcgtggcggggagcagcgagtttccagtggcggcagtgccgttgac

SEQ ID NO: 466041 - DNA, 75 bp, synthetic construct
  source 1..75: mol_type = other DNA
aaaatggttcgtggtatcccgtcgttgcctttcgaccgacgcctgattacacgctaattttcaattcgagtatcg

SEQ ID NO: 466042 - DNA, 75 bp, synthetic construct
  source 1..75: mol_type = other DNA
tgtcactcttattccattctttggcatattaacaccactgaatcctatcatactactatacagagaacgcatatt

SEQ ID NO: 466043 - DNA, 75 bp, synthetic construct
  source 1..75: mol_type = other DNA
ttatatataaaaggctcagggaactttctgttccctgttttttttatttacagttttttttatttttttctgtat

SEQ ID NO: 466044 - DNA, 75 bp, synthetic construct
  source 1..75: mol_type = other DNA
atgggtatacgtatcgaagtcggcgacaaatgggtaattaccagtgaccaatatcaattcatcctgaatgaaaag

SEQ ID NO: 466045 - DNA, 75 bp, synthetic construct
  source 1..75: mol_type = other DNA
ccaatatccgctgaatccagtgcaacacgttgatccattaggccttagtactatgataataggtaatggccccgt

SEQ ID NO: 466046 - DNA, 75 bp, synthetic construct
  source 1..75: mol_type = other DNA
aaaaaaaataatacatgaggggcgagcattagttatatttaatatttctgccgctgttttattaaatcttgacaa

SEQ ID NO: 466047 - DNA, 75 bp, synthetic construct
  source 1..75: mol_type = other DNA
aactatccactataggtatagaacgcttttatcctgtagttaaaattgctggagctggtgcaataagtatagctg

SEQ ID NO: 466048 - DNA, 75 bp, synthetic construct
  source 1..75: mol_type = other DNA
cttgggatgatgccagatctggagcatgtacggggggagtttgtggtgttctttcacgtataataggaccaagta

SEQ ID NO: 466049 - DNA, 75 bp, synthetic construct
  source 1..75: mol_type = other DNA
gtcgggaactgaatgagcagtatccggcagatacgcccctgatgctggttgtctggtcgccggcagatatcgaag

SEQ ID NO: 466050 - DNA, 75 bp, synthetic construct
  source 1..75: mol_type = other DNA
gccgggagctggcagcaaagtatccgggagatgcgccgctgatgctggttatctggtccccggaagaaattcagg

SEQ ID NO: 466051 - DNA, 75 bp, synthetic construct
  source 1..75: mol_type = other DNA
tttacaaccatgcgcagtatctcgataaacgcagggaaatgatgcaatggtgggcggactggcttgatgaaaagg

SEQ ID NO: 466052 - DNA, 75 bp, synthetic construct
  source 1..75: mol_type = other DNA
tcagcgttgatccatcagtgatgaagggccgcaagatgcacgtcgtgccgatgtccgggcaggttgaggagctat

SEQ ID NO: 466053 - DNA, 75 bp, synthetic construct
  source 1..75: mol_type = other DNA
ctgaggaaaaaattgcgaaacaaaatgcgaagaccattgaggagaagaatagtgaaaaaaacaagaaagaaacaa

SEQ ID NO: 466054 - DNA, 75 bp, synthetic construct
  source 1..75: mol_type = other DNA
ccatcctgtgcgaagagcgtctggcgctggcgcattatcgcccgacagcaatcatcaagggcaccttctctgctg

SEQ ID NO: 466055 - DNA, 75 bp, synthetic construct
  source 1..75: mol_type = other DNA
ttcagcaagcagaccgcgaacgtgaagactatcgcgcactgggtgcaggcatcacgtcaggtgatggacgatgcg

SEQ ID NO: 466056 - DNA, 75 bp, synthetic construct
  source 1..75: mol_type = other DNA
ctcacgctatttatcaggtgaccgagtctgagttcagcgcttccggtatcgtcctgaacccgcgcgactggcaca

SEQ ID NO: 466057 - DNA, 75 bp, synthetic construct
  source 1..75: mol_type = other DNA
tccagtggtggctctgccatcaacaccaccattaaagggggattccaggaggttagcgatggtggcagagctatt

SEQ ID NO: 466058 - DNA, 75 bp, synthetic construct
  source 1..75: mol_type = other DNA
aatcatcgattatcatatccagagcgccggggttgattttcctccctcactgacgggcaatcagcagaccgattt

SEQ ID NO: 466059 - DNA, 75 bp, synthetic construct
  source 1..75: mol_type = other DNA
agcactgcgaccgcgccattttcctcaaaaatggtgacatctgcatggacggcaccgcccgcgacgtgaccaacc

SEQ ID NO: 466060 - DNA, 75 bp, synthetic construct
  source 1..75: mol_type = other DNA
aaaactggattctcaatctatgttgaaccaacggattttgcttctgcggtggattggctaaaaatctacaatctc

SEQ ID NO: 466061 - DNA, 75 bp, synthetic construct
  source 1..75: mol_type = other DNA
cagcgtgccgaacccaggtgctgcggatgatttcctgtcggtgattaacccggaatcgctggtgatcaaacaggg

SEQ ID NO: 466062 - DNA, 75 bp, synthetic construct
  source 1..75: mol_type = other DNA
caaaaagtgctgccgccgcagagtcttcaaaaagcgcggcagccaccagtgccggtgcagcgaaaacgtcggaaa

SEQ ID NO: 466063 - DNA, 75 bp, synthetic construct
  source 1..75: mol_type = other DNA
gccacgaatgcttcagaggcggcgacctcagcccgcgatgcggaggcctcaaaagacgcggcaaaatcatcagaa

SEQ ID NO: 466064 - DNA, 75 bp, synthetic construct
  source 1..75: mol_type = other DNA
gccacgaatgcttcagaggcggccacctcagcccgggatgcggaggcctcaaaagacgcggcaaaatcatcagaa

SEQ ID NO: 466065 - DNA, 75 bp, synthetic construct
  source 1..75: mol_type = other DNA
gtgcagcttcctcggcaacggcggcagcaaattccgctacggcggcaaaaacgtccgagacgaaagccaggtcat

SEQ ID NO: 466066 - DNA, 75 bp, synthetic construct
  source 1..75: mol_type = other DNA
gtgcagcttcctcggcaacggcggcagtaaattccgccacggcggcaaaaacgtccgagacgaaggccaggtcat

SEQ ID NO: 466067 - DNA, 75 bp, synthetic construct
  source 1..75: mol_type = other DNA
gccacgaaagcttcagaggcggctacctcagcccgagatgcggaggcctcaaaagacgcggcaaaatcatcagaa

SEQ ID NO: 466068 - DNA, 75 bp, synthetic construct
  source 1..75: mol_type = other DNA
gccacgaaagcttcagaggcggcaacctcagcccgtgatgcggaggcctcaaaagacgcggcaaaatcatcagaa

SEQ ID NO: 466069 - DNA, 75 bp, synthetic construct
  source 1..75: mol_type = other DNA
cagtacgagcggcaccttaactttatccatctccatcgtgaagcaccgggccatagcgtgatgttcccggacgcg

SEQ ID NO: 466070 - DNA, 75 bp, synthetic construct
  source 1..75: mol_type = other DNA
aagaatttttttccaggtgggagagaatccatttgcaacgcaattaaagaaaataacggggattgaaagtaaaga

SEQ ID NO: 466071 - DNA, 75 bp, synthetic construct
  source 1..75: mol_type = other DNA
caatcacaaagttatatttctgagaaatacggtttatcacgcagtcaatactacaagattaaagcgtctgtgtaa

SEQ ID NO: 466072 - DNA, 75 bp, synthetic construct
  source 1..75: mol_type = other DNA
ccgtcgttatacgaagtggtgatagtgatttatcaaagaaagcttatatttatattgatggtcttccatttaaag

SEQ ID NO: 466073 - DNA, 75 bp, synthetic construct
  source 1..75: mol_type = other DNA
taataccagtcaggaatcctggcttattaacagtaaaatcaatcgcccaacgcgttgggccgggggtgaagcgtc

SEQ ID NO: 466074 - DNA, 75 bp, synthetic construct
  source 1..75: mol_type = other DNA
caagtactacaggcacattgcgcttactgagaacggaaagtgacatgttgcctgtggatcgcgaaacgctatttg

SEQ ID NO: 466075 - DNA, 75 bp, synthetic construct
  source 1..75: mol_type = other DNA
ttctcacggtgacatctgttattacagcaaaatcaatgagcaaaaaaatgttccaatacaggagtaccgagtttg

SEQ ID NO: 466076 - DNA, 75 bp, synthetic construct
  source 1..75: mol_type = other DNA
gcaggaaaccgtgcgcgaagtagtgccgctaatggtattccaggtacctaatacgcctgacccgaatgaggtggg

SEQ ID NO: 466077 - DNA, 75 bp, synthetic construct
  source 1..75: mol_type = other DNA
tgaaacctaacccggctgcttcagctgaagtatgggaagcatttgaagcgctaccttcgcaaacccgaccacaga

SEQ ID NO: 466078 - DNA, 75 bp, synthetic construct
  source 1..75: mol_type = other DNA
gacgcatattacgcaattgttggggcgtatggtgcgtactccattggcgagacgtattccgggtaatgagcgttt

SEQ ID NO: 466079 - DNA, 75 bp, synthetic construct
  source 1..75: mol_type = other DNA
gttatttttgtcgaaagtctcattgtcgcattaatttcaatatctgtatcgttattgatgtcatttgttatttta

SEQ ID NO: 466080 - DNA, 75 bp, synthetic construct
  source 1..75: mol_type = other DNA
ctgataatgtcaaaatagagaaccagaccggaattcataccgactggcgtggctatgccatattaccatttgcga

SEQ ID NO: 466081 - DNA, 75 bp, synthetic construct
  source 1..75: mol_type = other DNA
ctcagctaaagtgcaggaatcgggacttatcaaggacgatatcattctgggtgtgcctgatgaagctggtgactt

SEQ ID NO: 466082 - DNA, 75 bp, synthetic construct
  source 1..75: mol_type = other DNA
taaacaagacaaactaaatatgatttcagaccaaacagccgaaagacttgatgcaggccaagaggttagaaactt

SEQ ID NO: 466083 - DNA, 75 bp, synthetic construct
  source 1..75: mol_type = other DNA
ggagcgcagcgccatgcgctttatcagcgcgctgaccatggagagcatcatcaaccatatttcggtgctcaaccc

SEQ ID NO: 466084 - DNA, 75 bp, synthetic construct
  source 1..75: mol_type = other DNA
ggctggtggagttttccgccgattcgcttaacccgtggcggttgccgttgatcgcggtatttgataatcagcaga

SEQ ID NO: 466085 - DNA, 75 bp, synthetic construct
  source 1..75: mol_type = other DNA
tcctgcttgacgaacccagcgcctcgctggatgaaatggcggaagcgcatttaatcgaacaactgaaacagtgga

SEQ ID NO: 466086 - DNA, 75 bp, synthetic construct
  source 1..75: mol_type = other DNA
tattgacatctggaacttacttcgtaaatgcaacgatagagatgaattcaaactgcacaataaatggcgaaacaa

SEQ ID NO: 466087 - DNA, 75 bp, synthetic construct
  source 1..75: mol_type = other DNA
ctataaccaccacagccagttaacgtcagccaccgggccagacgggctggaattgcgccgggaatatgatgagta

SEQ ID NO: 466088 - DNA, 75 bp, synthetic construct
  source 1..75: mol_type = other DNA
gggggggaaacaggccggcactggcgcgaatatttaccctcaccccggccctctccctgaaagggcgaggggaaa

SEQ ID NO: 466089 - DNA, 75 bp, synthetic construct
  source 1..75: mol_type = other DNA
cgcgaaagaggccattttgcgtgaacagggcgaacccacggcgcgacgggtggtgttgcaggagaagaataaggg

SEQ ID NO: 466090 - DNA, 75 bp, synthetic construct
  source 1..75: mol_type = other DNA
acgctacgctggtggaagccgtgcagtcgattgaagacattaaactgctgcgcgccgaacagcgttttcagaatc

SEQ ID NO: 466091 - DNA, 75 bp, synthetic construct
  source 1..75: mol_type = other DNA
aagcctggctggaggcgatgatcgccgtggcgcgctattatcgccttgatttttctcaggagaacgtgcgcgcaa

SEQ ID NO: 466092 - DNA, 75 bp, synthetic construct
  source 1..75: mol_type = other DNA
gtcgattgaagatattaaactgctgcgcgccgaacagcgttttcagaatcagtggaatcacaccaacgacgtggc

SEQ ID NO: 466093 - DNA, 75 bp, synthetic construct
  source 1..75: mol_type = other DNA
gtcgattgaagacattaaactgctgcgcgccgaacagcgttttcagaatcagtggaaccacaccaacgacgtggc

SEQ ID NO: 466094 - DNA, 75 bp, synthetic construct
  source 1..75: mol_type = other DNA
gctgattacttccaccaccatcggcgcggtggcggatctgccgttcttcctgctgtttgtctttattttgtggat

SEQ ID NO: 466095 - DNA, 75 bp, synthetic construct
  source 1..75: mol_type = other DNA
gattaagccgggtaatggtattgagcaagcaactcactggatgccgctaccagaacctccgctggaggcgaagta

SEQ ID NO: 466096 - DNA, 75 bp, synthetic construct
  source 1..75: mol_type = other DNA
gcctggccagttaatctggtcggtggtgagctggaaacaggaaaatttcagggcacagccaccattaccgtcatc

SEQ ID NO: 466097 - DNA, 75 bp, synthetic construct
  source 1..75: mol_type = other DNA
cagaatgttgagttgtatgatgcaccttttgagcctgggtatttaaatgtattgcgcacatttaattggttgggc

SEQ ID NO: 466098 - DNA, 75 bp, synthetic construct
  source 1..75: mol_type = other DNA
gaaaataaataacctgataaaaaattgtaataatatatataatcttggagaggtcgattccgacgaactccaatc

SEQ ID NO: 466099 - DNA, 75 bp, synthetic construct
  source 1..75: mol_type = other DNA
aaatatatagaacaaccagtgcatgcacgtaagaagtttggttttgtacaaactaagagtactggtaagaactat

SEQ ID NO: 466100 - DNA, 75 bp, synthetic construct
  source 1..75: mol_type = other DNA
gcacctttcggcgcggagatgcaatgattaagccgggtaatggtattgagcaagcaactcactggatgccgctac

SEQ ID NO: 466101 - DNA, 75 bp, synthetic construct
  source 1..75: mol_type = other DNA
gcgctgctgggtatggtgacatttgccgcagtgccggcactgcaggcccgtctgattggtgtcgctgagcaacat

SEQ ID NO: 466102 - DNA, 75 bp, synthetic construct
  source 1..75: mol_type = other DNA
cgtgcggcggatgtggaagaagtggcgaatctggcggtttatctcgcgtcaccgctttcctcggcaaccacaggg

SEQ ID NO: 466103 - DNA, 75 bp, synthetic construct
  source 1..75: mol_type = other DNA
tctggcgaaacgactggcggggaccggtgtgaccgtcaacgccattctgccagggccaacctttaccgatggcct

SEQ ID NO: 466104 - DNA, 75 bp, synthetic construct
  source 1..75: mol_type = other DNA
tgctttttattagttcctttacgaataatagaacaatatttaaaatcaccttttttatgactgcatgctattgca

SEQ ID NO: 466105 - DNA, 75 bp, synthetic construct
  source 1..75: mol_type = other DNA
ccgctacctgaaaagctggatatcagcgaagtggcgaaagctgcagatgccacgctgaggcgaatggggattgcc

SEQ ID NO: 466106 - DNA, 75 bp, synthetic construct
  source 1..75: mol_type = other DNA
ttgcctggcgcagatatcgtccccgccgctacctgaaaagctggatatcagcgaagtggcgaaagctgcagatgc

SEQ ID NO: 466107 - DNA, 75 bp, synthetic construct
  source 1..75: mol_type = other DNA
tatcaactggcggcatcatcggtgacggtggttggccgggagtggtttggcggcgtgtgcagcgaaagccatatt

SEQ ID NO: 466108 - DNA, 75 bp, synthetic construct
  source 1..75: mol_type = other DNA
atttagattcacttgaccgtatcagacaagtattagccgttgccatatttttgtattcaataaaatttatagaaa

SEQ ID NO: 466109 - DNA, 75 bp, synthetic construct
  source 1..75: mol_type = other DNA
aatgccggtggggacacagctggttatggatcatgctattcctgcgggggacagagggctactgacgctaatttc

SEQ ID NO: 466110 - DNA, 75 bp, synthetic construct
  source 1..75: mol_type = other DNA
atgctggcagaaaagctgggagccgaagtgggctacagtcgggcgcgagtgatgaacggtggcgttgatgctgaa

SEQ ID NO: 466111 - DNA, 75 bp, synthetic construct
  source 1..75: mol_type = other DNA
ctaaccccgaacaacgccgtaaccttcttgaggagtacggcttcaagtttgatcgccggattcgtgaagatgaat

SEQ ID NO: 466112 - DNA, 75 bp, synthetic construct
  source 1..75: mol_type = other DNA
tgaagtggtcctgttcgataaagatgatcggcaaagtaatcctcatgccataaccgctggacttaactatacccc

SEQ ID NO: 466113 - DNA, 75 bp, synthetic construct
  source 1..75: mol_type = other DNA
gctaactattaccagtataactcttccgggacgagtaacgaacagacttatctgggattaaaagctggattcaat

SEQ ID NO: 466114 - DNA, 75 bp, synthetic construct
  source 1..75: mol_type = other DNA
tctgaatgatgccgaaaactacacggtaattcgtgaagcattcaacgcgcagcggctggatgcggtcgagcgcgc

SEQ ID NO: 466115 - DNA, 75 bp, synthetic construct
  source 1..75: mol_type = other DNA
aatgctcgccgggctatatcctgcaaaggcagcacccgcgaaacagcgagtgatgtcgtagccactttgggggtg

SEQ ID NO: 466116 - DNA, 75 bp, synthetic construct
  source 1..75: mol_type = other DNA
gcgaaatggtacgagtttcgcgctatcagcgccgggctggacaatcacagcggtatcgcccgggcgtccattgcc

SEQ ID NO: 466117 - DNA, 75 bp, synthetic construct
  source 1..75: mol_type = other DNA
ccagtagaacattgagctatggtatgcaacgaaatcaggataacaagatttcgcatactgcttcgtggtatgact

SEQ ID NO: 466118 - DNA, 75 bp, synthetic construct
  source 1..75: mol_type = other DNA
gtgaaaaagacaatagcgatggttctaataatgcattttataaatatgacattagttacaggaacttgtatgtag

SEQ ID NO: 466119 - DNA, 75 bp, synthetic construct
  source 1..75: mol_type = other DNA
atatagaaaaggatttattctggtttattattgatgtctcacctattcgaagtaagaagatgatttgcgcattgc

SEQ ID NO: 466120 - DNA, 75 bp, synthetic construct
  source 1..75: mol_type = other DNA
tcgcggtggtcagcggctcaacctccggcattgggcagggtatcgccgccggactggcaaaagcaggcgcaacgg

SEQ ID NO: 466121 - DNA, 75 bp, synthetic construct
  source 1..75: mol_type = other DNA
tttaatagacatcattctgatgtcgacgcggtgttgattaatggtgatcttactgaatatggtcatggaagtgaa

SEQ ID NO: 466122 - DNA, 75 bp, synthetic construct
  source 1..75: mol_type = other DNA
atgagtgtatttgatagccagttttctaatggttctgctatcattttttctacccctcataatggagataatcag

SEQ ID NO: 466123 - DNA, 75 bp, synthetic construct
  source 1..75: mol_type = other DNA
cggttcagtaccacggagcgcagcaattgcgggagaagattgccagagcagtgaacaactcaattagatcagaaa

SEQ ID NO: 466124 - DNA, 75 bp, synthetic construct
  source 1..75: mol_type = other DNA
ccgggttatgcgccgcatttgtcggtttgattgttgcctcgcagctgcaaactgctcacccaatgaccggcaata

SEQ ID NO: 466125 - DNA, 75 bp, synthetic construct
  source 1..75: mol_type = other DNA
ctgattatgcatataagatagaccaagctgtaggggaagagttgtttcaatactcaaaaatatttcaaggagaag

SEQ ID NO: 466126 - DNA, 75 bp, synthetic construct
  source 1..75: mol_type = other DNA
atatttctgctgagacctctaaaggtaatatcaaaaaacaatatgagatgtttaatagacatcattctgatgtcg

SEQ ID NO: 466127 - DNA, 75 bp, synthetic construct
  source 1..75: mol_type = other DNA
cgggatggctgtactagttgtcattcttttggtatgggcattcaaaacagggtggttcaagagaaacaaaatatg

SEQ ID NO: 466128 - DNA, 75 bp, synthetic construct
  source 1..75: mol_type = other DNA
tcgccgcagaccggtgaccgggcgaagcccgcgaaccggcgaggaagcgcaatgtatctgtagttacagtgagca

SEQ ID NO: 466129 - DNA, 75 bp, synthetic construct
  source 1..75: mol_type = other DNA
ttgctctttctggccccactctgcaggtcttacgcacccgccagtcgcccgatggttgcgagggtggcagttact

SEQ ID NO: 466130 - DNA, 75 bp, synthetic construct
  source 1..75: mol_type = other DNA
ttaaagggatgcttatgacattagatatccggataggtacggatatcgttgttattaaatctagtttgttgttat

SEQ ID NO: 466131 - DNA, 75 bp, synthetic construct
  source 1..75: mol_type = other DNA
cggcaatcagtcgcaaggactatgaagatcgccgcagacgacaaaagcagggtattgaaaaggccaagagagaga

SEQ ID NO: 466132 - DNA, 75 bp, synthetic construct
  source 1..75: mol_type = other DNA
tctgattggtgtcgctgagcaacatgctcctcatgcgcatggtgttgctgccggcctgaatattgcgggcttcaa

SEQ ID NO: 466133 - DNA, 75 bp, synthetic construct
  source 1..75: mol_type = other DNA
ttgaagtaattacaagagtgctctgggcttctatagtaatatatggcatttacggaaatgcactcttatatttta

SEQ ID NO: 466134 - DNA, 75 bp, synthetic construct
  source 1..75: mol_type = other DNA
gcaggtcttacgtacccgccagtcgcccgatggctgcgagggaggcagttactactatctggtggatatggagga

SEQ ID NO: 466135 - DNA, 75 bp, synthetic construct
  source 1..75: mol_type = other DNA
ctaacgattgggtttgtgaaagcgttcttatcgcggttaccgggctcaagcccggtaccatcctccgggccagaa

SEQ ID NO: 466136 - DNA, 75 bp, synthetic construct
  source 1..75: mol_type = other DNA
tcattatttggataatattggtacgtcaaacaccccccattgggtatgttccgactccgaagcatgcaaggagcg

SEQ ID NO: 466137 - DNA, 75 bp, synthetic construct
  source 1..75: mol_type = other DNA
gccctggcctccagtgttgtgctggttaatgaagccacagttcctgcgttgctggcggacggtctggcagaaaaa

SEQ ID NO: 466138 - DNA, 75 bp, synthetic construct
  source 1..75: mol_type = other DNA
atggtgactatcatgcgtgtatgggcatatctaagagcatcgacgaaagagcaagatgcggatcgggcattgaaa

SEQ ID NO: 466139 - DNA, 75 bp, synthetic construct
  source 1..75: mol_type = other DNA
tgccaataaaaaagcctgagttcgatgagggacgaactcaggcttttcttaagttttacagtaacacgccgcggc

SEQ ID NO: 466140 - DNA, 75 bp, synthetic construct
  source 1..75: mol_type = other DNA
ccacatataatagagcggacacattagaaagatgttatcgaagcatcctacttcagaaacgaatagacatagaat

SEQ ID NO: 466141 - DNA, 75 bp, synthetic construct
  source 1..75: mol_type = other DNA
tataaccggattgttttattgcgcggtacttacccggaatcgctcaaatgcaaacgtcccagatttaaacatgat

SEQ ID NO: 466142 - DNA, 75 bp, synthetic construct
  source 1..75: mol_type = other DNA
aaagagataagttgtcattttattataatgaattttctgtccgatttcctaatgttgtcctatatccgtcatgct

SEQ ID NO: 466143 - DNA, 75 bp, synthetic construct
  source 1..75: mol_type = other DNA
tcaaggcgtgatagaagaattattttcatatgtattgatgtttggctccgttattgtttttgtatggctcattat

SEQ ID NO: 466144 - DNA, 75 bp, synthetic construct
  source 1..75: mol_type = other DNA
aaaggtatctgtacccctgataatggcgtatttcacagtacgcttgatttctcgggatatcttattaccgcgaac

SEQ ID NO: 466145 - DNA, 75 bp, synthetic construct
  source 1..75: mol_type = other DNA
atttttcatctgttgttggaagtgcggtaacaacacataaattactaaaacggtcactattgagtgtgaaaacct

SEQ ID NO: 466146 - DNA, 75 bp, synthetic construct
  source 1..75: mol_type = other DNA
cacaatcgggcgcgatatattggcgtaagcatgaaaaaatacggagagttgctgcccttcacccgtatacctgac

SEQ ID NO: 466147 - DNA, 75 bp, synthetic construct
  source 1..75: mol_type = other DNA
taatggttctcattttttccagcttctggaaggtccggaagaacaggttaaaatgatatatcgggctatatgcta

SEQ ID NO: 466148 - DNA, 75 bp, synthetic construct
  source 1..75: mol_type = other DNA
cattacattcactggcatttggttattcgggacagcacccgctgggtacgctggatggatgttttgacaccggtt

SEQ ID NO: 466149 - DNA, 75 bp, synthetic construct
  source 1..75: mol_type = other DNA
gcgcgggagacgtgaccaacagcggtcggcttcaggggcagaacatcgccttagacggcagcagcctgaacaaca

SEQ ID NO: 466150 - DNA, 75 bp, synthetic construct
  source 1..75: mol_type = other DNA
gtaaactggaaattataagaaatattatacgagataccatgttaggtaatctggcccttgctgtacttatctttg

SEQ ID NO: 466151 - DNA, 75 bp, synthetic construct
  source 1..75: mol_type = other DNA
tttttgaacttgatgacaacttccatcaactcctgacgcagattgccgactgtcaactggcgtgggataccattg

SEQ ID NO: 466152 - DNA, 75 bp, synthetic construct
  source 1..75: mol_type = other DNA
tatggctggattatctggacacactggaactggttgatacctccagtgcgccagatattgaatggcctacgcctc

SEQ ID NO: 466153 - DNA, 75 bp, synthetic construct
  source 1..75: mol_type = other DNA
aagtagtgtagcacttgcagctcctaaaggtatctgtacccctgataatggcgtatttcacagtacgcttgattt

SEQ ID NO: 466154 - DNA, 75 bp, synthetic construct
  source 1..75: mol_type = other DNA
ggttgccggagagaacgcgcgttttggtttgccggaaatcactctcggcatcatgccaggcgcaggaggaacgca

SEQ ID NO: 466155 - DNA, 75 bp, synthetic construct
  source 1..75: mol_type = other DNA
gttaccccattattaaaatgggtaccagaaaaccgtgaagatgacgtcagaaaggcgtttgacgaaacaatgagt

SEQ ID NO: 466156 - DNA, 75 bp, synthetic construct
  source 1..75: mol_type = other DNA
ccgatgaacggctggctgtcgaaatccttctgtcgaccggggcgcgatggggcgaggtagcggcactggagcagc

SEQ ID NO: 466157 - DNA, 75 bp, synthetic construct
  source 1..75: mol_type = other DNA
cttctcagggctcaatggccgccctgccagtgaccatcgactatcccacagcactggccttacggcagatggcgc

SEQ ID NO: 466158 - DNA, 75 bp, synthetic construct
  source 1..75: mol_type = other DNA
cagttattcaccttgctggcggcaacagaagatcgtcatgaaggcatctccgctttttatcgccgcattaccaac

SEQ ID NO: 466159 - DNA, 75 bp, synthetic construct
  source 1..75: mol_type = other DNA
gcaacccgactgttaccaggaacggcgcggactatgcgccgcatggatcgcatcagcggacgcagcgatgacatg

SEQ ID NO: 466160 - DNA, 75 bp, synthetic construct
  source 1..75: mol_type = other DNA
tcaggacaatgcctacgatatgcatgcttcatttgccgccagcagcgatcttgggtatttgcaagtcagcggtag

SEQ ID NO: 466161 - DNA, 75 bp, synthetic construct
  source 1..75: mol_type = other DNA
gaaatcaaagtgaacggtggcgaactgccgactgatatggggaaatcaacggtctacggagagaaatccgggagt

SEQ ID NO: 466162 - DNA, 75 bp, synthetic construct
  source 1..75: mol_type = other DNA
tgctatagatattcttggggttgggtatgtgaatgcaccttttgaatatcatgctaacaacccgtctggtaatac

SEQ ID NO: 466163 - DNA, 75 bp, synthetic construct
  source 1..75: mol_type = other DNA
aagtactgggtaggtcaaagcgtctcaccgaatgacaaggttcgcattgaaggagagattgacaaagactggaac

SEQ ID NO: 466164 - DNA, 75 bp, synthetic construct
  source 1..75: mol_type = other DNA
tacctccagctatctttccccggttggaatgtagattgcgaatataaccgggatggtgtagaacctaaacggctc

SEQ ID NO: 466165 - DNA, 75 bp, synthetic construct
  source 1..75: mol_type = other DNA
gccctggataaacagaatgtcgctcaggccttaagtgtcgtccccggcgtggtgctgcaaaagtcaggcagccgc

SEQ ID NO: 466166 - DNA, 75 bp, synthetic construct
  source 1..75: mol_type = other DNA
aaaaccgtacagctggaaagcgtgggcggcagcatcaacaacatcacccaaacgcagcagtggagcgtgggtgac

SEQ ID NO: 466167 - DNA, 75 bp, synthetic construct
  source 1..75: mol_type = other DNA
cgcgcggggaactggacgcggaagccgaccccggcctgctgtatgcaggacagtggcaggatgcggaatccgggc

SEQ ID NO: 466168 - DNA, 75 bp, synthetic construct
  source 1..75: mol_type = other DNA
tggttttgaagatcaatccatcgacactggacgatttgtactgtctcgtatcaataatgaaaattatcagtttca

SEQ ID NO: 466169 - DNA, 75 bp, synthetic construct
  source 1..75: mol_type = other DNA
tagtggattagttgtctggcccggtggtattaatatcactaaccagttatccgatacatttgcaattctggatgc

SEQ ID NO: 466170 - DNA, 75 bp, synthetic construct
  source 1..75: mol_type = other DNA
cgtttgatacagcccattttgccgaagaaatggcgagaatgtatgacaaaagctacaccgacgcgattaacgtaa

SEQ ID NO: 466171 - DNA, 75 bp, synthetic construct
  source 1..75: mol_type = other DNA
ctctcggagagacttttcagacatcctgcggtaaacgaaggtgcagaggtttttgtctccctcaagttacttatt

SEQ ID NO: 466172 - DNA, 75 bp, synthetic construct
  source 1..75: mol_type = other DNA
atcagcaagtcgcttatattcgcattactgatcacggattatttgctggtgattttgtcaacttctcaaactctg

SEQ ID NO: 466173 - DNA, 75 bp, synthetic construct
  source 1..75: mol_type = other DNA
gttacaatggacgcaggaaaatcttggaataatgcacagtcagcgaaagaattgcagagagcagaaaatgaattg

SEQ ID NO: 466174 - DNA, 75 bp, synthetic construct
  source 1..75: mol_type = other DNA
cacgacctctttttacgctactgaatccagtagcgacaattcaatggttgtaacatcaaacccgaatgtagggat

SEQ ID NO: 466175 - DNA, 75 bp, synthetic construct
  source 1..75: mol_type = other DNA
actgtcaactgatatgggagcaacaagcgtttatggcgagaaagctggcagcgtgacgttttctgctgcgcctgc

SEQ ID NO: 466176 - DNA, 75 bp, synthetic construct
  source 1..75: mol_type = other DNA
ggatggcgtcttaaattatgaatatatttcaatcctttacattacaggtttagtcctgacaattgtgggcctgag

SEQ ID NO: 466177 - DNA, 75 bp, synthetic construct
  source 1..75: mol_type = other DNA
atgacaaacatgatctcatatcagggacttgttcgcaccttccttaatgcaccttttgaataccatgctaacagg

SEQ ID NO: 466178 - DNA, 75 bp, synthetic construct
  source 1..75: mol_type = other DNA
gcctttaaggtcatcgaaacggtgcgcccgaagctggcctgcagcggtgtgcttgttggttccgccctgaataca

SEQ ID NO: 466179 - DNA, 75 bp, synthetic construct
  source 1..75: mol_type = other DNA
tcttttttgatacgatttgtgaagttaaccgaaaaaaagttatcacggggaaggctgaaatttacttgccagaat

SEQ ID NO: 466180 - DNA, 75 bp, synthetic construct
  source 1..75: mol_type = other DNA
atgaataaagccgtattaaataacgaactcattgccataaaagcgggagacataaccgtttataattatgatggt

SEQ ID NO: 466181 - DNA, 75 bp, synthetic construct
  source 1..75: mol_type = other DNA
ccatcagtttgtctgctggtgaagtggcccaccggttaatcgtcccttcatcggatattgacctaggggagaccg

SEQ ID NO: 466182 - DNA, 75 bp, synthetic construct
  source 1..75: mol_type = other DNA
accgcgcaggttggtacaaccactatggacgtgtctgggtgctgaaaacggctccgggcgcaggtaacgtcttta

SEQ ID NO: 466183 - DNA, 75 bp, synthetic construct
  source 1..75: mol_type = other DNA
atcgcagcagcatgccgaaagcgatgcggtgacgggcagcaccctgaacgcgggcaacaacctttccatcactgc

SEQ ID NO: 466184 - DNA, 75 bp, synthetic construct
  source 1..75: mol_type = other DNA
cgggctgattagcggcaacgctaacctgaaggcgggcaaggaagcgaagggcatcatcaacgaagtgaccggcgg

SEQ ID NO: 466185 - DNA, 75 bp, synthetic construct
  source 1..75: mol_type = other DNA
gacgcgacgtgaacctgctggcggaagagtccgtgaccggcagcagctcgcactcgaaaaagaaaaccgttatcg

SEQ ID NO: 466186 - DNA, 75 bp, synthetic construct
  source 1..75: mol_type = other DNA
gatctcatcccggagtacgtgattatggaatgtgacaagctcatcgccctgccaccggcagcaaaccagagctcg

SEQ ID NO: 466187 - DNA, 75 bp, synthetic construct
  source 1..75: mol_type = other DNA
tatcgcgagcctgccgctgcgggctcgggctaccccaaaatggctcctgagaaaattcagcaggccttgcgggat

SEQ ID NO: 466188 - DNA, 75 bp, synthetic construct
  source 1..75: mol_type = other DNA
cagcagactgtgaggagatcattaagctcatctatcttcgtcgctactttgaaatcgttgacgaacgtggtgatg

SEQ ID NO: 466189 - DNA, 75 bp, synthetic construct
  source 1..75: mol_type = other DNA
cccaaatcggtggcgtgccagcacatggcgtgattgaagaagcgcagaaggctatgcaagatattattaaaaacc

SEQ ID NO: 466190 - DNA, 75 bp, synthetic construct
  source 1..75: mol_type = other DNA
atcaagtacttcaagatttggttttgactatacatcacagctacatgcattcttttggtggagcaccactggcaa

SEQ ID NO: 466191 - DNA, 75 bp, synthetic construct
  source 1..75: mol_type = other DNA
tggcagtttatacttcagaaactcaaccccactattatcggagagtgtgaaaaagctatccaatgggcgaatgag

SEQ ID NO: 466192 - DNA, 75 bp, synthetic construct
  source 1..75: mol_type = other DNA
aatgaaaaaagccatagaggaattacaggaccccggcgaaatcatggcatacccggtgggatggaaaacagatac

SEQ ID NO: 466193 - DNA, 75 bp, synthetic construct
  source 1..75: mol_type = other DNA
ctgcaaaatctttgatcaatctaaactatcgcggcgttgagattggtgatctcatttacgatactctcattcgat

SEQ ID NO: 466194 - DNA, 75 bp, synthetic construct
  source 1..75: mol_type = other DNA
gtaacctgcacgccggtgccaatctccgcaaactggaggttggttcggtggtggatgttgacgacgcaacggctg

SEQ ID NO: 466195 - DNA, 75 bp, synthetic construct
  source 1..75: mol_type = other DNA
agcggtggggaattccatgtttgcggatttggtctcggtagccgggcatatttataaattcgggactcaggatgg

SEQ ID NO: 466196 - DNA, 75 bp, synthetic construct
  source 1..75: mol_type = other DNA
tttgccggtttttccgcattgcgggcacatcagggattccgggtattacgttaccgccggaatctccggcgtctg

SEQ ID NO: 466197 - DNA, 75 bp, synthetic construct
  source 1..75: mol_type = other DNA
tgaaaacggaacataccgtcccccgtctggggcagcttttgcgcaaggactctccgctgaatccggtacgccccc

SEQ ID NO: 466198 - DNA, 75 bp, synthetic construct
  source 1..75: mol_type = other DNA
attttacgccgccagagctgcaaaccatgccatcatttgtcggctttgaacgcacagaaaatcacgataattttg

SEQ ID NO: 466199 - DNA, 75 bp, synthetic construct
  source 1..75: mol_type = other DNA
tgcccctgaagaatttttgaagaaagctaaaggcatagcggctgtaagcataaccagccagctttatcaaagaag

SEQ ID NO: 466200 - DNA, 75 bp, synthetic construct
  source 1..75: mol_type = other DNA
attgttagaggcaaaggagcgtgaaggggtcaaaaagtcattaatagctgaatatgaaatgcagaaggaaacggc

SEQ ID NO: 466201 - DNA, 75 bp, synthetic construct
  source 1..75: mol_type = other DNA
aaatcgccgatggtgaagcaaaagacaaggctcacgccgacgcactggcagcagaaaccaaacgcgctgacgaag

SEQ ID NO: 466202 - DNA, 75 bp, synthetic construct
  source 1..75: mol_type = other DNA
gtaatctgcacgccggtgccaacctccgcaagctggaggttggttccgtggtagaggtagacgatgaaacggcaa

SEQ ID NO: 466203 - DNA, 75 bp, synthetic construct
  source 1..75: mol_type = other DNA
aaatggaccattcccacagcggccctgggtaatgactccaacttattgatagtgttttatgttcagataatgccc

SEQ ID NO: 466204 - DNA, 75 bp, synthetic construct
  source 1..75: mol_type = other DNA
gattgtttttgatccgaaaggggatgcggatttattgcgccggatgtgggcggaagcgcatcgtgcggggcgcag

SEQ ID NO: 466205 - DNA, 75 bp, synthetic construct
  source 1..75: mol_type = other DNA
gaccgtagtggcaaacaggtgcgcagctttacttacgatgataaataccggggccggatggtggcgcaccgtcac

SEQ ID NO: 466206 - DNA, 75 bp, synthetic construct
  source 1..75: mol_type = other DNA
gtggcacccgaactgcttcgacaggtcagcgggattggcaacaacctgaaccagattgcccgccgtctgaaccag

SEQ ID NO: 466207 - DNA, 75 bp, synthetic construct
  source 1..75: mol_type = other DNA
tcagcgggatcggtaacaacctgaaccagattgctcgccgcctgaaccagtctgattccctgacgccttctgaac

SEQ ID NO: 466208 - DNA, 75 bp, synthetic construct
  source 1..75: mol_type = other DNA
agaaaatgccgagaaaatcaaaaacaaacgcaatgcagtgctcgtcgtagatggtaaggctgtggttgccagcct

SEQ ID NO: 466209 - DNA, 75 bp, synthetic construct
  source 1..75: mol_type = other DNA
tcttcggtgaacacaccacacaacgtttcggccaacatcaggtgccttatattgaaccgcagcgggtgcaggaat

SEQ ID NO: 466210 - DNA, 75 bp, synthetic construct
  source 1..75: mol_type = other DNA
ctgaccaccgtcattgccccggacggcagcagaaacgggacacagtacgatgcgtggggaaaagccatctgtacc

SEQ ID NO: 466211 - DNA, 75 bp, synthetic construct
  source 1..75: mol_type = other DNA
gcagcgagcatactatgcccggctttgcccgcttgctcagcgccgatcgctggctgaacccggtgcgcccgctgc

SEQ ID NO: 466212 - DNA, 75 bp, synthetic construct
  source 1..75: mol_type = other DNA
atatgcagggccgcgatcctcacgtggtggcactggagcagtacctcaacgcggagaagttctacgatccgatcc

SEQ ID NO: 466213 - DNA, 75 bp, synthetic construct
  source 1..75: mol_type = other DNA
tgaggacggagcactcagctccggggctgggaaaattgctgcgtacggattcgcccctgaacccggttcgcccat

SEQ ID NO: 466214 - DNA, 75 bp, synthetic construct
  source 1..75: mol_type = other DNA
ggaagtcgctgcggccgtcggcaactccatgttcagcgatctggtatccgtcgccggacacatctacaaattcgg

SEQ ID NO: 466215 - DNA, 75 bp, synthetic construct
  source 1..75: mol_type = other DNA
cttcgccagccacgaaccgaaggcatgggaggtcatcgtccagctcgaaggccggatcaacgacaagaacacccc

SEQ ID NO: 466216 - DNA, 75 bp, synthetic construct
  source 1..75: mol_type = other DNA
ggacagctttccggcgaagccaactcggcggcctttcgcgagtttgcctggcgctttgtgaatatcatcgcccgc

SEQ ID NO: 466217 - DNA, 75 bp, synthetic construct
  source 1..75: mol_type = other DNA
ccgtgaaagatgttgttaaagagcgtctgaaaaatcctttatggggttacatagctctttcatggtgtggcttta

SEQ ID NO: 466218 - DNA, 75 bp, synthetic construct
  source 1..75: mol_type = other DNA
cccgcaaagtcgtcaaatttctggttgaggatggttttaccatcgtttcaggactggctgaaggcgtggatacca

SEQ ID NO: 466219 - DNA, 75 bp, synthetic construct
  source 1..75: mol_type = other DNA
tgtatcctggcgtgaagcagtcagacctcagtgaagagcagaagcagacgataagtacgctggcaactgtgtcag

SEQ ID NO: 466220 - DNA, 75 bp, synthetic construct
  source 1..75: mol_type = other DNA
ggtgctctggccggagcttctgcaccggaactggcgcatctgctgaaatcaacagaaaaagacccggcagtaaac

SEQ ID NO: 466221 - DNA, 75 bp, synthetic construct
  source 1..75: mol_type = other DNA
gatcgaattattgtcatgaatgaggggaaaattgtgatggatggtccacgcgatcagattttgagtcaatcaaat

SEQ ID NO: 466222 - DNA, 75 bp, synthetic construct
  source 1..75: mol_type = other DNA
tgtacaagataaaaaagaaggtcttgatcatcttgtacttgagggtggcttaggtttctctggtggacaacggca

SEQ ID NO: 466223 - DNA, 75 bp, synthetic construct
  source 1..75: mol_type = other DNA
gtgaacgccagtgaaaagctcacccacagcgggaaaagcagcgccccgtcgctcagcctcagtgcgccggaactg

SEQ ID NO: 466224 - DNA, 75 bp, synthetic construct
  source 1..75: mol_type = other DNA
ccgaggtagacccgctggagctgcatcgcgcggtggtgaatattgctgagaaaatgaaagcgacagataacacgc

SEQ ID NO: 466225 - DNA, 75 bp, synthetic construct
  source 1..75: mol_type = other DNA
gccgtagtagggttggccattgcgtttttaatcccgcaaaaatggaccagtaaagccgtgatcacgccggccgag

SEQ ID NO: 466226 - DNA, 75 bp, synthetic construct
  source 1..75: mol_type = other DNA
cgctatggctgcaaacctgcaacaacctctgaacaccctgcctcagggcgctgcgcttagcgccaacggcaatac

SEQ ID NO: 466227 - DNA, 75 bp, synthetic construct
  source 1..75: mol_type = other DNA
gagcggcagctcatcttcttcaaattcaaatacgcctgcatccaatacgccggctaatggcggttcggctacacc

SEQ ID NO: 466228 - DNA, 75 bp, synthetic construct
  source 1..75: mol_type = other DNA
gacaactttccgcgccgacggaccagaaactcccgaagaagaaaagggttactggtttcatgcttatcaacccga

SEQ ID NO: 466229 - DNA, 75 bp, synthetic construct
  source 1..75: mol_type = other DNA
accgccccgacggcgggagacgcgcagacggttctggaaggttacatcaactatatctcccgcattgttgagcag

SEQ ID NO: 466230 - DNA, 75 bp, synthetic construct
  source 1..75: mol_type = other DNA
tagatgttgatttagctgagtatcaaatacttaaaagctctaagagaatagaatactttgtgtcagaatttacat

SEQ ID NO: 466231 - DNA, 75 bp, synthetic construct
  source 1..75: mol_type = other DNA
tgataaacactttgatcttcgactagctcaacaatttatattcaatcgtgttctggaacttggttgggatccgga

SEQ ID NO: 466232 - DNA, 75 bp, synthetic construct
  source 1..75: mol_type = other DNA
gatgttagtgtcacttcgattaattatttgtgggaagaggagttcgacaaatcaaaaatagaaactttgaatttt

SEQ ID NO: 466233 - DNA, 75 bp, synthetic construct
  source 1..75: mol_type = other DNA
gctttattaactggatgcgtgattgccattcatcaaatgataaagacgtcattgcaattgatggaaaaacgctcc

SEQ ID NO: 466234 - DNA, 75 bp, synthetic construct
  source 1..75: mol_type = other DNA
ggttcaatctgtagttaatgattatgttgctgataaaaccttcctcagcgccttgattgacgcaggattattgac

SEQ ID NO: 466235 - DNA, 75 bp, synthetic construct
  source 1..75: mol_type = other DNA
gatgttagtgtcacttcgattaattatttgtggggagaggagttcgacaaatcaaaaatagaagctttgaatttt

SEQ ID NO: 466236 - DNA, 75 bp, synthetic construct
  source 1..75: mol_type = other DNA
ctgccggagttcagcaataatcttaaattactagaagcctttattgatagcttgatatggcgcgatattaaggct

SEQ ID NO: 466237 - DNA, 75 bp, synthetic construct
  source 1..75: mol_type = other DNA
aaatcttcagggatatccgattgctgataaattcattccgtcactacatgacctggggaatgtgaaaatgacggc

SEQ ID NO: 466238 - DNA, 75 bp, synthetic construct
  source 1..75: mol_type = other DNA
aatcagggacaacgtccgctttggactggagtttgagaaatccgcctttggtaagtacaacgttgataatgcagt

SEQ ID NO: 466239 - DNA, 75 bp, synthetic construct
  source 1..75: mol_type = other DNA
atttaaaagataatgttaatcagggggccggatatcttcagtttgctgatgattatacagtaacaacgagcaatg

SEQ ID NO: 466240 - DNA, 75 bp, synthetic construct
  source 1..75: mol_type = other DNA
aaatctacatcggctacaaaattcaaactcatcactgaagcacgagtgaagttaaataatgattctgttggggat

SEQ ID NO: 466241 - DNA, 75 bp, synthetic construct
  source 1..75: mol_type = other DNA
tgaagtcagtgttatttttgatggtaaagacgcacaaagcgcattacaaaagctgagcgctgaaattgaaaacgg

SEQ ID NO: 466242 - DNA, 75 bp, synthetic construct
  source 1..75: mol_type = other DNA
tggggatacagaggtggtactcttgacttaaatgggaataatattacatttacccggatacaagcctccgattat

SEQ ID NO: 466243 - DNA, 75 bp, synthetic construct
  source 1..75: mol_type = other DNA
gcattcacgttaaatcaggattcactcagagagacacataagcgcctgatgaacaggcggctttctcagtcagca

SEQ ID NO: 466244 - DNA, 75 bp, synthetic construct
  source 1..75: mol_type = other DNA
gcaaaactagtaataaatttaatgagtctggttataaaaccacgctcttccatacctttaaagtcaataccagta

SEQ ID NO: 466245 - DNA, 75 bp, synthetic construct
  source 1..75: mol_type = other DNA
actctataatcttttctgtgacaaaattcataatggtgacattccaacatttggaaagccgagggttattgattg

SEQ ID NO: 466246 - DNA, 75 bp, synthetic construct
  source 1..75: mol_type = other DNA
cgacgtttttcgcttactggctggccgtggggctggcgtatttcggggctatgtcccccgaaaagctggcgctct

SEQ ID NO: 466247 - DNA, 75 bp, synthetic construct
  source 1..75: mol_type = other DNA
taactttgaccaaaacaggaacatggactccgacatatgcggcagcacagagcgcagatatttgtagcgtctcgt

SEQ ID NO: 466248 - DNA, 75 bp, synthetic construct
  source 1..75: mol_type = other DNA
atggagcggaatttttgccggaaaaatgcaggctgactatggcagtgcaggtatcggctatatcggatttggcta

SEQ ID NO: 466249 - DNA, 75 bp, synthetic construct
  source 1..75: mol_type = other DNA
gcaatagttaagcgattaccagaaggatggagtactgttaatgtactcagagtacttcgagataaaagagtagtt

SEQ ID NO: 466250 - DNA, 75 bp, synthetic construct
  source 1..75: mol_type = other DNA
gagagtgttttgttgaaggtgcgaaaacgcaggtaacagtcaactactacgagcgtgatcccaaagctcgccatg

SEQ ID NO: 466251 - DNA, 75 bp, synthetic construct
  source 1..75: mol_type = other DNA
gattttgagcgtaaattaaacaagcgatatcttcgtaaagaaggtgttgtttggtatgcagacttcttacctaat

SEQ ID NO: 466252 - DNA, 75 bp, synthetic construct
  source 1..75: mol_type = other DNA
ccagacttacagaagcgttgatagcacctatggccgcacagatagatccaataaagcttggtgaacatcagcgcg

SEQ ID NO: 466253 - DNA, 75 bp, synthetic construct
  source 1..75: mol_type = other DNA
catgaccgttttggctaatgatcattttgcaaataaaacccaaaactttgaagctgttgtacagtatcagttcga

SEQ ID NO: 466254 - DNA, 75 bp, synthetic construct
  source 1..75: mol_type = other DNA
ggggagcatggcgtctcattttacttctggcaggtattgtcataccggtttacgggtacagtcatgaactgtcag

SEQ ID NO: 466255 - DNA, 75 bp, synthetic construct
  source 1..75: mol_type = other DNA
agtcagttgctggaaatcgctcagggatatccggattttccggtcattctcgaaaccctacgcgaatgtctgcaa

SEQ ID NO: 466256 - DNA, 75 bp, synthetic construct
  source 1..75: mol_type = other DNA
tgttatttagataaatatggcgatgcaaatatcaatcattattatagaaacttagaaataaaaaactcacaaccc

SEQ ID NO: 466257 - DNA, 75 bp, synthetic construct
  source 1..75: mol_type = other DNA
atgcgggtgtcgaaccgggcattaaagataattactggtcggtctccgatcgcatggcgcagttgcagagccaca

SEQ ID NO: 466258 - DNA, 75 bp, synthetic construct
  source 1..75: mol_type = other DNA
aggcatgcgaccagcttacccgctgggtgtatgtcaatggcactaaaaacaaagggctggaaaaccgccgcgcgc

SEQ ID NO: 466259 - DNA, 75 bp, synthetic construct
  source 1..75: mol_type = other DNA
tgaatattgcactttgtcaccttaacgaggtaaaaaaatattcagaagagttccagccacgtaacggagagtttg

SEQ ID NO: 466260 - DNA, 75 bp, synthetic construct
  source 1..75: mol_type = other DNA
aaactctgaataatgtttgtggtagtgataaagattataaaaaatcagcatcattacttattaaacacatatgca

SEQ ID NO: 466261 - DNA, 75 bp, synthetic construct
  source 1..75: mol_type = other DNA
aaaagcaaggtcattgttaaatgtcgattcacaaagtgattttgataaagcattccaagttaaaaaaggatggtt

SEQ ID NO: 466262 - DNA, 75 bp, synthetic construct
  source 1..75: mol_type = other DNA
gctgtaatgtttgtattcgcagcgataacatccaacggtttgaatgaaagaggcctgattactgcgggatgctct

SEQ ID NO: 466263 - DNA, 75 bp, synthetic construct
  source 1..75: mol_type = other DNA
tgccaacgatccggctaatgtgtggggaaatcttctgccctggcctgcacatccggcaacgctggttccaacgcg

SEQ ID NO: 466264 - DNA, 75 bp, synthetic construct
  source 1..75: mol_type = other DNA
atgcgtcgcctgaacggtggcgaaattcaaatatccgatgtaacgaccactacgccctcgcctttcgccacaagt

SEQ ID NO: 466265 - DNA, 75 bp, synthetic construct
  source 1..75: mol_type = other DNA
ctgatacagatatcatatctggagaagagagatttcgattaaattataatggtgttattgcactgttagttgaag

SEQ ID NO: 466266 - DNA, 75 bp, synthetic construct
  source 1..75: mol_type = other DNA
aaacagaagtcacctccagtacagtcgttttcccctctttttatggcggtgcgcagggggaaaatgcagcccctg

SEQ ID NO: 466267 - DNA, 75 bp, synthetic construct
  source 1..75: mol_type = other DNA
taattcgaaaaaagaaaacacggacactgataatgtccgtgtggcaatgccatgtaagtcagcgatgaatatggc

SEQ ID NO: 466268 - DNA, 75 bp, synthetic construct
  source 1..75: mol_type = other DNA
ttctaatgataacaacacaatggatattgtgttgaaaacagggataaaatgcgaagacagaagatatgtttacgt

SEQ ID NO: 466269 - DNA, 75 bp, synthetic construct
  source 1..75: mol_type = other DNA
cagcgtattaacgagataatgatttatgccgtaaacactggtctgattgatgcaaacccagcatcaggtgttgga

SEQ ID NO: 466270 - DNA, 75 bp, synthetic construct
  source 1..75: mol_type = other DNA
aaaagtcggtgaagcgattgaacgtctgaaattgattttgaatcacggtattgatgttataactctttgcgacaa

SEQ ID NO: 466271 - DNA, 75 bp, synthetic construct
  source 1..75: mol_type = other DNA
ggcatataaggagtattacgcgctacatattacggaaaccaattctttcttataaaaactatagaaaattacatc

SEQ ID NO: 466272 - DNA, 75 bp, synthetic construct
  source 1..75: mol_type = other DNA
tcaacttccacagttaatgcaaacaatgcgtacggcaagtatcagtgtgtccacgcggtgtctgttcatgtggca

SEQ ID NO: 466273 - DNA, 75 bp, synthetic construct
  source 1..75: mol_type = other DNA
ggtcgagaatttatctttcccagtcgcatcaaaccaacccagccaatgaacagccaaacagtgaatgcagcactc

SEQ ID NO: 466274 - DNA, 75 bp, synthetic construct
  source 1..75: mol_type = other DNA
cgacgcgttgtcttattgagtggcagctcctgacccttgtgcgcccttccgaggcttccggtgctcggtgggcag

SEQ ID NO: 466275 - DNA, 75 bp, synthetic construct
  source 1..75: mol_type = other DNA
aatcgaaagaagagcaggacaaggttaacgtcgacctagctgccagtggcgtagcgtacaaagagcgcatgaaca

SEQ ID NO: 466276 - DNA, 75 bp, synthetic construct
  source 1..75: mol_type = other DNA
attgatggaaaaacgctccggcactcttatgacaagagtcgccgcaggggagcgattcatgtcattagtgcgttc

SEQ ID NO: 466277 - DNA, 75 bp, synthetic construct
  source 1..75: mol_type = other DNA
aaaagtgcttttagtggtaagcacttgaaaggtggcttaggtgactttttaaccgctatcgagaaagggcttgtt

SEQ ID NO: 466278 - DNA, 75 bp, synthetic construct
  source 1..75: mol_type = other DNA
gcttaaaggtgatgacgtatatattaatggcgatggtgaaacgagtcgtgatttttgttatatagataatgttat

SEQ ID NO: 466279 - DNA, 75 bp, synthetic construct
  source 1..75: mol_type = other DNA
ggtacgcgaactcaacggcgagtccagcatatccctggaagaagtaccaccggcaaaacagcagattgtctgtag

SEQ ID NO: 466280 - DNA, 75 bp, synthetic construct
  source 1..75: mol_type = other DNA
aaaataaattattatcagatgccatattaaatcttgacaatgacaacattattgtttgcgaaaggcatgaccgcg

SEQ ID NO: 466281 - DNA, 75 bp, synthetic construct
  source 1..75: mol_type = other DNA
atggcttttgagaaacctaaaaagcaaaacatgccgacgctccggccagaggaattatcgaagctgatgcgttct

SEQ ID NO: 466282 - DNA, 75 bp, synthetic construct
  source 1..75: mol_type = other DNA
gacggaaggcggtcttacgcgcagcatggggtatgacgctgccgggcgcatcaccgtgctgaccaacgagaacgg

SEQ ID NO: 466283 - DNA, 75 bp, synthetic construct
  source 1..75: mol_type = other DNA
tttttcgatgctggcagccagacgcgtacagcaacattacagaagctggcgcgaattggccgggcattttttgct

SEQ ID NO: 466284 - DNA, 75 bp, synthetic construct
  source 1..75: mol_type = other DNA
aagaaatgagtttgttatgatgattcgtgaactgtgtcaaaaaataagtgaaatatatccaaatggaattgaatt

SEQ ID NO: 466285 - DNA, 75 bp, synthetic construct
  source 1..75: mol_type = other DNA
gggaaagttaccgttaagggatgtgattttgtgctctccccccacttatggttgcaaatcgacggcttcacggtg

SEQ ID NO: 466286 - DNA, 75 bp, synthetic construct
  source 1..75: mol_type = other DNA
ggtgtgctggagatatccgccgccgttcggctgcgtcaagaaatcaagggtgaaatctggcttgccttcagtgga

SEQ ID NO: 466287 - DNA, 75 bp, synthetic construct
  source 1..75: mol_type = other DNA
ccagtgcggatgagcccaccaaaacactgtgttcattgaccgaaaattggtggattattgcgttgcgcggtgtct

SEQ ID NO: 466288 - DNA, 75 bp, synthetic construct
  source 1..75: mol_type = other DNA
attgagttagacagcattttctcaacagtagctgctaaatggttccagattaaaagcagaagtgtcacagaggat

SEQ ID NO: 466289 - DNA, 75 bp, synthetic construct
  source 1..75: mol_type = other DNA
ggaatgatccaaagcacgccatgaatagtcagacagcaaatgcagcgctgaaacgtattggctatggaggaaaac

SEQ ID NO: 466290 - DNA, 75 bp, synthetic construct
  source 1..75: mol_type = other DNA
attgcaatcattggtacagtatggcgatatgacccaaaactatctaatgatcccaggtgatacactttatgtacc

SEQ ID NO: 466291 - DNA, 75 bp, synthetic construct
  source 1..75: mol_type = other DNA
gtgtatgcaaatgatgatattgagaatttacagcaatttatggaagtgcaacgtaaaatgataatcgcgcagtta

SEQ ID NO: 466292 - DNA, 75 bp, synthetic construct
  source 1..75: mol_type = other DNA
atgaactggagtttaattattttctcccggtaacggctcagtctggggttgaatcagtgccttttacagatgaat

SEQ ID NO: 466293 - DNA, 75 bp, synthetic construct
  source 1..75: mol_type = other DNA
aattcggaaacgaaaattgttattaataaaggtatatacgcatcgtggaaatttgttggtacgattcaaaactat

SEQ ID NO: 466294 - DNA, 75 bp, synthetic construct
  source 1..75: mol_type = other DNA
cacgaacgttcccatgcttatcacccttccgtcccgcccgccgctcagcgcaatcggctgttgctgaatgcgatt

SEQ ID NO: 466295 - DNA, 75 bp, synthetic construct
  source 1..75: mol_type = other DNA
cagacccgcaatatgttgttgatgtgacggtcggttctaatcacagccgtggcacggcgatcgacctgacgcttc

SEQ ID NO: 466296 - DNA, 75 bp, synthetic construct
  source 1..75: mol_type = other DNA
cgatgcgtatcgcccacaacaagcacaggcgatgttgtggcaagcctgcccagacccgcaatatgttgttgatgt

SEQ ID NO: 466297 - DNA, 75 bp, synthetic construct
  source 1..75: mol_type = other DNA
attaccccaggcagcgagttaccctctgctcgctgatcaattctcttgttttatatcccctggcacacagcacgt

SEQ ID NO: 466298 - DNA, 75 bp, synthetic construct
  source 1..75: mol_type = other DNA
ttgaaatacgcctgcgctgataacatcacaggtaaagctatttatcagcaagcgcgttgtctgttacacaaggat

SEQ ID NO: 466299 - DNA, 75 bp, synthetic construct
  source 1..75: mol_type = other DNA
ttgctcgcgctcgtccttgccacaactttcccggttgcgcacgccgccgtaccgaaagatatgctggtgattggt

SEQ ID NO: 466300 - DNA, 75 bp, synthetic construct
  source 1..75: mol_type = other DNA
taataacatgtattgcagttgtcgctggaaatatgatgggaagtggtattgcgcttcttcctgcaagtctggcga

SEQ ID NO: 466301 - DNA, 75 bp, synthetic construct
  source 1..75: mol_type = other DNA
ttttcgctgttttcgcgatgccgggtatggtgtatgccgagtcgccttttagctcgttacaatcggcgaaagaga

SEQ ID NO: 466302 - DNA, 75 bp, synthetic construct
  source 1..75: mol_type = other DNA
agaataaagaatatggtgggctaatatgtaagaagcaaggtgaatatttccctatgaatccgataagttcaaatg

SEQ ID NO: 466303 - DNA, 75 bp, synthetic construct
  source 1..75: mol_type = other DNA
atttattcctacgtaagcattatcggccatttcagcttcctggtgttcgccacctacttgctgatcctcttcccg

SEQ ID NO: 466304 - DNA, 75 bp, synthetic construct
  source 1..75: mol_type = other DNA
ctgacactgaaatcaaaagcaccaagccagccgataaagaaatcaacttgttcgacggggatggtttgattctac

SEQ ID NO: 466305 - DNA, 75 bp, synthetic construct
  source 1..75: mol_type = other DNA
cccgattacagacaagcctggaaagtggaacataaattgtcggatattctactgttgactatttgtgccgttatt

SEQ ID NO: 466306 - DNA, 75 bp, synthetic construct
  source 1..75: mol_type = other DNA
aataaaatctgtatgtcctgagtttgatggtactcctgactggggaatccgtattatttatgataataaattatg

SEQ ID NO: 466307 - DNA, 75 bp, synthetic construct
  source 1..75: mol_type = other DNA
tggctgttatactcgcacggccatggatgaaatgtacaatcatttatctgtatgtctggctcataatattaatga

SEQ ID NO: 466308 - DNA, 75 bp, synthetic construct
  source 1..75: mol_type = other DNA
taggaatttatttttactttaaattcaaaaagaaaggggttgaagaaacggttgttgagggagatatcaccgttg

SEQ ID NO: 466309 - DNA, 75 bp, synthetic construct
  source 1..75: mol_type = other DNA
aacactttcgtaagtgtacccggagttgtagggcagacagggtctggaagaacagtttatactgccacaggtaat

SEQ ID NO: 466310 - DNA, 75 bp, synthetic construct
  source 1..75: mol_type = other DNA
tcggttttgatgaaaactccatgccggaaggcgtaccagccaacgaatcgttggttgcctacctttttggcgcaa

SEQ ID NO: 466311 - DNA, 75 bp, synthetic construct
  source 1..75: mol_type = other DNA
aagatgtcatattaatgctaaatgaagtcagagcctcgcaatttaaaatttatcatgatcttgtcttgttggttg

SEQ ID NO: 466312 - DNA, 75 bp, synthetic construct
  source 1..75: mol_type = other DNA
attcgtcgttttatcaaaaaacttattgaatctagttatcgagacctcgaagtactttcgtacggggaactaacg

SEQ ID NO: 466313 - DNA, 75 bp, synthetic construct
  source 1..75: mol_type = other DNA
tggccattgatatccagacagcccgcgaacacaccctgcgcgaactgggtaaacgcttcgaggttatgtatggta

SEQ ID NO: 466314 - DNA, 75 bp, synthetic construct
  source 1..75: mol_type = other DNA
attatatattggttcagagattcatgtagagctgttaattacataaaaaataaacaatttgaattaaatgaataa

SEQ ID NO: 466315 - DNA, 75 bp, synthetic construct
  source 1..75: mol_type = other DNA
aatggtagatgtgtctgttaaaccattcaggagaatatttgttgataaaagccaactcccagaaattgcaaagca

SEQ ID NO: 466316 - DNA, 75 bp, synthetic construct
  source 1..75: mol_type = other DNA
tacgggctgaatctcataggtgaatatgccgaaatatcaaatttacgggatgtagcaccatctgtaggtgataag

SEQ ID NO: 466317 - DNA, 75 bp, synthetic construct
  source 1..75: mol_type = other DNA
tcaaacgcaataggcgagcccgttccggataagtgtttagtgaaacagagtgaatggaggggcagataccaggcg

SEQ ID NO: 466318 - DNA, 75 bp, synthetic construct
  source 1..75: mol_type = other DNA
aaagttacgcgcgcgttccaggcggcagcggtgccggatgagatgattgctgtcttccctgttgccagcgatctc

SEQ ID NO: 466319 - DNA, 75 bp, synthetic construct
  source 1..75: mol_type = other DNA
ctcttggagcaatggctgtggtcgctgggccaatgggatatgaccttctcgctaatgatgggcgtgccgggaagg

SEQ ID NO: 466320 - DNA, 75 bp, synthetic construct
  source 1..75: mol_type = other DNA
atgtcttttttggaagaagcaaaaaaacgaatcgcgctaatggcgcagctaaatgagagcgcaccggaaccagat

SEQ ID NO: 466321 - DNA, 75 bp, synthetic construct
  source 1..75: mol_type = other DNA
ttgtgtacgtgatgaacgaatttccggagagtggaacaccgatatagtaatggatattaatgcggtctgttttct

SEQ ID NO: 466322 - DNA, 75 bp, synthetic construct
  source 1..75: mol_type = other DNA
tcaatataccgatatccaggatggcccctgtcatttttatggtttgtttggtgccccattttttgaagcgtcgtt

SEQ ID NO: 466323 - DNA, 75 bp, synthetic construct
  source 1..75: mol_type = other DNA
cagataatcaaacttatgattcgtttaggaaagacattgaaaatcatattatcacaaataccgaaccagaaagcg

SEQ ID NO: 466324 - DNA, 75 bp, synthetic construct
  source 1..75: mol_type = other DNA
gacacaggagtccataataattgggtgaaggaccaaagatatgaaaaaaaattattagaggcaggaatatcctct

SEQ ID NO: 466325 - DNA, 75 bp, synthetic construct
  source 1..75: mol_type = other DNA
caggagttaatgaccgtcttgctagacaatcttgaacgccgtttcgctggtaaacagcaagcagaacaacaggta

SEQ ID NO: 466326 - DNA, 75 bp, synthetic construct
  source 1..75: mol_type = other DNA
tgtaatgacaacgtttcgcggctattcttgagtggtctaggttcaagattagcccccgttatgttgtcaggtata

SEQ ID NO: 466327 - DNA, 75 bp, synthetic construct
  source 1..75: mol_type = other DNA
cgctatatggaacagtaaatacaacaaaatccagcgatggcaccattaaagcagcatcaccagtggcccgtattg

SEQ ID NO: 466328 - DNA, 75 bp, synthetic construct
  source 1..75: mol_type = other DNA
gcattgtatgactatcttgttcttggtgattcgagaaaagttatctgcgagcgatacaatgtaaataatggatat

SEQ ID NO: 466329 - DNA, 75 bp, synthetic construct
  source 1..75: mol_type = other DNA
taaacaagacttccctgactgtcgattttggcgtaaaaatagccaatgttgaacacgcaagtgaatatgaaaaag

SEQ ID NO: 466330 - DNA, 75 bp, synthetic construct
  source 1..75: mol_type = other DNA
gcgcgtcgcaatgggtatcaatggcagaaaacgcattcaagataaattctcgagtgtgatgatcattaataaaac

SEQ ID NO: 466331 - DNA, 75 bp, synthetic construct
  source 1..75: mol_type = other DNA
attcggattggtattttgatttgcattggaccgatcgtgcaattgccgccagagatgccggttatgagattcaca

SEQ ID NO: 466332 - DNA, 75 bp, synthetic construct
  source 1..75: mol_type = other DNA
tagtagtcgataaattattaggagatgattcaatacctgtcagattaagaatcaagaaagatttttttgatagtg

SEQ ID NO: 466333 - DNA, 75 bp, synthetic construct
  source 1..75: mol_type = other DNA
ggtggagtactaaagagcaagactcaggagactccctaagacgacaaacaaacctcattgatgctttctactcta

SEQ ID NO: 466334 - DNA, 75 bp, synthetic construct
  source 1..75: mol_type = other DNA
aaggggcaacgtcattcaaaatcctgtcgacaacgggggataatagactacacggggttgctgaaatctataaat

SEQ ID NO: 466335 - DNA, 75 bp, synthetic construct
  source 1..75: mol_type = other DNA
gttctttctcgcaaggctgacgagcaaggggcaacgtcattcaaaatcctgtcgacaacgggggataatagacta

SEQ ID NO: 466336 - DNA, 75 bp, synthetic construct
  source 1..75: mol_type = other DNA
acaccacgcgtatccagacggtataccagccggggagcttcgcgccgctcatccgcatcgaaacagacaacggtg

SEQ ID NO: 466337 - DNA, 75 bp, synthetic construct
  source 1..75: mol_type = other DNA
ctgaaccagtcactctcttcgcttttttccctggatctctctctggtcagccagcagtttctctcccttgaattc

SEQ ID NO: 466338 - DNA, 75 bp, synthetic construct
  source 1..75: mol_type = other DNA
atgtctattaagtctaattttttagtgatgtttattagttttgagatatttggtattatttattgtgagattgct

SEQ ID NO: 466339 - DNA, 75 bp, synthetic construct
  source 1..75: mol_type = other DNA
aaagcaagatttttgaagcagataagaagtttaactcggtttttgacactgaatatcagccgggagaaacatgta

SEQ ID NO: 466340 - DNA, 75 bp, synthetic construct
  source 1..75: mol_type = other DNA
aaaaagccagttaacattggaggttattaacgaaatcggaagcaatttcaactttactatgcaaaaaacaaaata

SEQ ID NO: 466341 - DNA, 75 bp, synthetic construct
  source 1..75: mol_type = other DNA
cccgcatcacctgcaccagccgtaccgtctgccagggcagcaacacgatgaggagtcggggctgtattataaccg

SEQ ID NO: 466342 - DNA, 75 bp, synthetic construct
  source 1..75: mol_type = other DNA
tgccgcatctgcagctcaggaaattaaccatgcagatgggaaagaaaagataggtgtagtctcagccagcaatgc

SEQ ID NO: 466343 - DNA, 75 bp, synthetic construct
  source 1..75: mol_type = other DNA
gcacttatggggatggttgatcagcgggtgcagggcaatctgttaaatatgcgacgtgatgggggaatgttaagt

SEQ ID NO: 466344 - DNA, 75 bp, synthetic construct
  source 1..75: mol_type = other DNA
tcagacgctactgaatattgtacgggatttgttgcccggggggcgggttggtctgacgctgtgccggtacgaaga

SEQ ID NO: 466345 - DNA, 75 bp, synthetic construct
  source 1..75: mol_type = other DNA
gaaagtagcgccggaaatccgataagcattacgcatccggtaacggtggatctcacgccagcggcgatcacaatc

SEQ ID NO: 466346 - DNA, 75 bp, synthetic construct
  source 1..75: mol_type = other DNA
ccgctgaaatcgctgtggcgcagaccatcagcgggcaggtcacgggaactgcggctgcggggaatacggtaattg

SEQ ID NO: 466347 - DNA, 75 bp, synthetic construct
  source 1..75: mol_type = other DNA
tgacggtggttatcaatagcgtcacctacggcgcaacggtactcgccgatggcacctggagtgtcggtgttcctg

SEQ ID NO: 466348 - DNA, 75 bp, synthetic construct
  source 1..75: mol_type = other DNA
aacggtactcgccgatggcacctggagcgtcggcgttccggcagcggacgtggctgactggcctgcggggacggt

SEQ ID NO: 466349 - DNA, 75 bp, synthetic construct
  source 1..75: mol_type = other DNA
tgcaggcgctgggtaacggtgaactgaccatcagcgcctcggtgactaattccgcaaataatactggcaccgcaa

SEQ ID NO: 466350 - DNA, 75 bp, synthetic construct
  source 1..75: mol_type = other DNA
gcgcactgggcgaggcggtttattcgattagcgccagcgccaccgacagcgcgggtaacagcggtagtactaccc

SEQ ID NO: 466351 - DNA, 75 bp, synthetic construct
  source 1..75: mol_type = other DNA
ctatggcgatgaaggtgcgctgctgcgcatcgacatgtccgagtacggggaacgccatgccgtggcacgcctggt

SEQ ID NO: 466352 - DNA, 75 bp, synthetic construct
  source 1..75: mol_type = other DNA
cagaccatgatgattttgcgcggcctgcgcgacaccttcgaggcgcaccacaaggtcagcatcaccgaggatgcg

SEQ ID NO: 466353 - DNA, 75 bp, synthetic construct
  source 1..75: mol_type = other DNA
ggacatcatccagcgacggctgaaggcgcgtggggcggctggcgaggagtacgaaaagaccaaggccgaggtcat

SEQ ID NO: 466354 - DNA, 75 bp, synthetic construct
  source 1..75: mol_type = other DNA
ggcgctggtgatcaccgggagcagcagcggattaacggcgggaacggcgttaacggtcgagattaacaacgttac

SEQ ID NO: 466355 - DNA, 75 bp, synthetic construct
  source 1..75: mol_type = other DNA
tctgcctgacggcgcggtggcgattaccgcttctgtgacggatctcagcggcaataccggcaacacctcccgcac

SEQ ID NO: 466356 - DNA, 75 bp, synthetic construct
  source 1..75: mol_type = other DNA
aatcacgctggtcggtgtttctccgttgatcaccattaacaccgtctccggcgatgacattatcagtggcgcaga

SEQ ID NO: 466357 - DNA, 75 bp, synthetic construct
  source 1..75: mol_type = other DNA
aactggagcctgggcgttccggcttctgttgtcagtggtctggtagacggcagttatcccatcaacgtttcagtg

SEQ ID NO: 466358 - DNA, 75 bp, synthetic construct
  source 1..75: mol_type = other DNA
tcactgataaaaaattgctgcctaaaatgagagtaatgcatgatgctcttcttgattttggcaacaatgcgattc

SEQ ID NO: 466359 - DNA, 75 bp, synthetic construct
  source 1..75: mol_type = other DNA
ttacagcaacaccaagctttgggcttcattttgacaatcatgatgtaatagctgttcaaattgagggaataaaaa

SEQ ID NO: 466360 - DNA, 75 bp, synthetic construct
  source 1..75: mol_type = other DNA
cacggtcaccgactccgcaggcaacagcggcacggcctcgcacagtgtcaccgtggcgctcggcgctccggtgct

SEQ ID NO: 466361 - DNA, 75 bp, synthetic construct
  source 1..75: mol_type = other DNA
gttttgatcaaagcaaatatgacagcatcgtctggaacccaatcacttattatccggtaccgaaccgtcgaccca

SEQ ID NO: 466362 - DNA, 75 bp, synthetic construct
  source 1..75: mol_type = other DNA
acgtgatgtgccatttaacagtggtgtttttatggatatggtcagttgcatcagccgggaacttgctcaccatga

SEQ ID NO: 466363 - DNA, 75 bp, synthetic construct
  source 1..75: mol_type = other DNA
gtgttccgccagtccggcgacaactggcagcacccaaacgcccgccagggccaacgccaattgaattgctgaaac

SEQ ID NO: 466364 - DNA, 75 bp, synthetic construct
  source 1..75: mol_type = other DNA
ggcgctgggtaacggtgaactgaccatcagcgcctcgttgaccaattccgcaaataataccggcaccgcgacgca

SEQ ID NO: 466365 - DNA, 75 bp, synthetic construct
  source 1..75: mol_type = other DNA
cgggaacggcgttaacggtcgagattaacaacgttacttatggcgcgacggtattagccgacggcacgtggagcc

SEQ ID NO: 466366 - DNA, 75 bp, synthetic construct
  source 1..75: mol_type = other DNA
aacccacgcctacagcgtcgatgccacggccccgacgcttgccattaacaccatcgccaccgacgatattctgaa

SEQ ID NO: 466367 - DNA, 75 bp, synthetic construct
  source 1..75: mol_type = other DNA
ggcaacgggcgcgacgaccggtaacacggtttccgtgaccattggcacgactacctataccaccgtgctggacgc

SEQ ID NO: 466368 - DNA, 75 bp, synthetic construct
  source 1..75: mol_type = other DNA
gacgatattcttaacgccgccgaagcgggatcggcgctgaccatcagcggcaccaccacggcggaagccgggcag

SEQ ID NO: 466369 - DNA, 75 bp, synthetic construct
  source 1..75: mol_type = other DNA
cgggcgcggcgttgacggtggttatcaatagcgtcacctacggcgcaacggttttagcggatggtagctggagcg

SEQ ID NO: 466370 - DNA, 75 bp, synthetic construct
  source 1..75: mol_type = other DNA
tgcaaattatgtaactcaggtatcccaatacaacaatcgcattcctgataatgtcttcttggtcgttggtgacga

SEQ ID NO: 466371 - DNA, 75 bp, synthetic construct
  source 1..75: mol_type = other DNA
attatcgtatttcgctggaacaaggtacgccgggctttgaactgccgctggagggtgaagtacgcgcggcgatta

SEQ ID NO: 466372 - DNA, 75 bp, synthetic construct
  source 1..75: mol_type = other DNA
atttctttactcttcttagcggtaattttaaagctgactggcgttgggatgtctctaaagagacgtttcctaagg

SEQ ID NO: 466373 - DNA, 75 bp, synthetic construct
  source 1..75: mol_type = other DNA
ggtatccaggccgcgacagctgtgcttcaggggctggcggggggtaatttagcgggtgctctggccggaacttcg

SEQ ID NO: 466374 - DNA, 75 bp, synthetic construct
  source 1..75: mol_type = other DNA
aagcggagcactaacctttgaggctgtggcaagagattggcatgcatcctgtagtaaaaaatggtcggcgtccca

SEQ ID NO: 466375 - DNA, 75 bp, synthetic construct
  source 1..75: mol_type = other DNA
ggaacgttttttctggacagatgcggataatcatgatgtggcggtagacgctgatgaactgaaggcgctgggtgt

SEQ ID NO: 466376 - DNA, 75 bp, synthetic construct
  source 1..75: mol_type = other DNA
ccgactatttgcaacagtgccctattaagtcatgtagctggttttatttcaattgaacgttttcaaagtctagct

SEQ ID NO: 466377 - DNA, 75 bp, synthetic construct
  source 1..75: mol_type = other DNA
gataacacactcaaatatcaacttcgttataagtccacaaaggcgggagcaacgggcggtaatgcgacggcggtt

SEQ ID NO: 466378 - DNA, 75 bp, synthetic construct
  source 1..75: mol_type = other DNA
cctgttaggtaatagcaggcaaccaacggcagaagcatgggtaacaattattgaggcttcccctttcattaaggc

SEQ ID NO: 466379 - DNA, 75 bp, synthetic construct
  source 1..75: mol_type = other DNA
ggaagccggattactggcatcaacaggaagtacaggcgactcgtatgacaatgcgatggcggagagcatcaatgg

SEQ ID NO: 466380 - DNA, 75 bp, synthetic construct
  source 1..75: mol_type = other DNA
atgaagaaaaaaacgatatttcagtgcgttatcttgttctttagccttcttaatatccatgtcgggatggctggg

SEQ ID NO: 466381 - DNA, 75 bp, synthetic construct
  source 1..75: mol_type = other DNA
tttcattggcagaggctcgtaagaggcgcgatgccgcaaagaaactggtatctgatggtatcgatccctctcaaa

SEQ ID NO: 466382 - DNA, 75 bp, synthetic construct
  source 1..75: mol_type = other DNA
gggtaaccctggcagcgccagcaaaggtgtgaccgtcgataccaccgcgcccgtcatcagctttaacaccgtggc

SEQ ID NO: 466383 - DNA, 75 bp, synthetic construct
  source 1..75: mol_type = other DNA
cctacactgcaagcgtcgcggcgaatggttcctggagcacctcggttccggcggcagatatggcggccctgcgtg

SEQ ID NO: 466384 - DNA, 75 bp, synthetic construct
  source 1..75: mol_type = other DNA
acgctgctgcctatacttgggctacccacctttttagcagtattgctgactcgtgggatactaaaattccttaca

SEQ ID NO: 466385 - DNA, 75 bp, synthetic construct
  source 1..75: mol_type = other DNA
tcactaatctttattttagtgccttttattggcttcttgttttatgtgattattaaatttatgaactcaacacag

SEQ ID NO: 466386 - DNA, 75 bp, synthetic construct
  source 1..75: mol_type = other DNA
caccagtgcggcaggcaacaccgccagcagccaggcgaatttactggtcgatagcggcctaccgggcgtcaccat

SEQ ID NO: 466387 - DNA, 75 bp, synthetic construct
  source 1..75: mol_type = other DNA
gcggcaccgccacgggcgcggtcgcgggcgaccgcctggtggtgaccatcgccgggcagcagtatgtcaccagca

SEQ ID NO: 466388 - DNA, 75 bp, synthetic construct
  source 1..75: mol_type = other DNA
aagtttcagactacggcagctaataaacttgaagttggtacaatgattcagtttgctaaccataaaaaactatat

SEQ ID NO: 466389 - DNA, 75 bp, synthetic construct
  source 1..75: mol_type = other DNA
atgattgaacttcattgttgtgaaaatagaacaatcatgatcgactggaatgattactactactttgccctgatt

SEQ ID NO: 466390 - DNA, 75 bp, synthetic construct
  source 1..75: mol_type = other DNA
gggcgaaaggggatgcccgccattgcgcgatattttatggatgagttaaccacgcggcttgccaacggggtctga

SEQ ID NO: 466391 - DNA, 75 bp, synthetic construct
  source 1..75: mol_type = other DNA
tttctgccggtccccggacagagcacaaaggaagtcgccgccggctccgctttacccggccatgcggggcatggc

SEQ ID NO: 466392 - DNA, 75 bp, synthetic construct
  source 1..75: mol_type = other DNA
gcttcgccgctgcggtcacccggtccctccttcccgtctgccgtgattttccggtcgttcacccgctcagatttc

SEQ ID NO: 466393 - DNA, 75 bp, synthetic construct
  source 1..75: mol_type = other DNA
acgtaaagctggctttcccactctggaaaggcgtgctgaccctgctattcggcgccatcatctggtttatcccgc

SEQ ID NO: 466394 - DNA, 75 bp, synthetic construct
  source 1..75: mol_type = other DNA
cgacagaatctgttggtatcggtgcaggtgttgacgcttcagttatgactctggcttgtagaacgtggcaagaat

SEQ ID NO: 466395 - DNA, 75 bp, synthetic construct
  source 1..75: mol_type = other DNA
gcatttcatcacgatcccacaggtcattttcgccaaatctgcgatatcaccttgcagcacaagccgctatgccac

SEQ ID NO: 466396 - DNA, 75 bp, synthetic construct
  source 1..75: mol_type = other DNA
ttagtgcagtcaccgtggatgaactactcaagcaaggccttcggataccgaactatcaacgcccatacagttggg

SEQ ID NO: 466397 - DNA, 75 bp, synthetic construct
  source 1..75: mol_type = other DNA
tgcttgtggggacagatgtcaccgtcagactgtctgaacatgtttcagtcaggggcggtctgggtgtgggatatg

SEQ ID NO: 466398 - DNA, 75 bp, synthetic construct
  source 1..75: mol_type = other DNA
ctgggcgggacgccgctggtcgagtatacgcgggacaggctgcaccgtgagacggtgcgcagcttcggcagcagg

SEQ ID NO: 466399 - DNA, 75 bp, synthetic construct
  source 1..75: mol_type = other DNA
tgtccgcagtagtctggctggttgccgctggtacgccagcgagcgcagcagagcatcagtccactctaagcgccg

SEQ ID NO: 466400 - DNA, 75 bp, synthetic construct
  source 1..75: mol_type = other DNA
cctggcctgaatctcaggccatttttttgtccaaaacttatctgtacatggatatggatgaactgtgcacaacgt

SEQ ID NO: 466401 - DNA, 75 bp, synthetic construct
  source 1..75: mol_type = other DNA
ccttgtggttgtcagtcttgacctcccaacgagccatatggctcttgcaacacatgctggcgatgactttaccct

SEQ ID NO: 466402 - DNA, 75 bp, synthetic construct
  source 1..75: mol_type = other DNA
atgccagaacaggacgtccataacaatgacctgcgtccggaggctggcacatacaccacaaacctcgttgctgcg

SEQ ID NO: 466403 - DNA, 75 bp, synthetic construct
  source 1..75: mol_type = other DNA
aagccgccgctggctggcatcgtgcggcctgacggtggagcagatacaaaaccagatggacccggtgtacacgcc

SEQ ID NO: 466404 - DNA, 75 bp, synthetic construct
  source 1..75: mol_type = other DNA
gtaaagttaatccagaagccgacaaattaacagatgaacataagtcaggtgtaaatcctggtggtaactgtagtc

SEQ ID NO: 466405 - DNA, 75 bp, synthetic construct
  source 1..75: mol_type = other DNA
ctcagagatagacccacaagggttaaatccgttaattcttagtgttgtagcactgatgagttgcggtttgttttc

SEQ ID NO: 466406 - DNA, 75 bp, synthetic construct
  source 1..75: mol_type = other DNA
ggagggtaccgttaatgttttgggtggcacctggcgattgtatgatagcggaaataatgcaaggcctttaaatgt

SEQ ID NO: 466407 - DNA, 75 bp, synthetic construct
  source 1..75: mol_type = other DNA
ttacgaaacattcttcgctctggtgtagatgtagtcaccttgtccgatggtgaacattacacaaaggaaagctta

SEQ ID NO: 466408 - DNA, 75 bp, synthetic construct
  source 1..75: mol_type = other DNA
tcaccaaaaggttcggcagcacggtgacgctgcaccaggtcaatctcgatattgaagatggcgagtttgccgttt

SEQ ID NO: 466409 - DNA, 75 bp, synthetic construct
  source 1..75: mol_type = other DNA
ggcttttgatgatcgccactgcatggtgtttgacgagcaggatgggcgggtgagtgccgacatcgatgaagcggt

SEQ ID NO: 466410 - DNA, 75 bp, synthetic construct
  source 1..75: mol_type = other DNA
gtactcaaagaaatagttatagatgctgctaaacgtcgctgtaaagtgacttttcacaatggtagagcaatcacc

SEQ ID NO: 466411 - DNA, 75 bp, synthetic construct
  source 1..75: mol_type = other DNA
ggttacttcacacctaaaggctgtgaggagatagctggttattatcctgcaattatagatgaaacaacattctac

SEQ ID NO: 466412 - DNA, 75 bp, synthetic construct
  source 1..75: mol_type = other DNA
tctgggagattgttcggactcttaatgatgaaggtcaccagacgcttaaccagcacaaagcgggttcatttggtc

SEQ ID NO: 466413 - DNA, 75 bp, synthetic construct
  source 1..75: mol_type = other DNA
tattaccaccggaggtatagttaaagcgcgtgatacacagatagtggatttgcccctatatttccagacatctgt

SEQ ID NO: 466414 - DNA, 75 bp, synthetic construct
  source 1..75: mol_type = other DNA
tcagcatcaccacggggggaatgtgggaggtcaataagaatgtctataccaccattggtgttgcgggcgtcggaa

SEQ ID NO: 466415 - DNA, 75 bp, synthetic construct
  source 1..75: mol_type = other DNA
cgatgccatatctcttgatacatggaaaaaaacagttaaacgtttttacgatacgctggtggtgcagtttgatat

SEQ ID NO: 466416 - DNA, 75 bp, synthetic construct
  source 1..75: mol_type = other DNA
taataaaaaataatgattcctcaattgaatttcaaattggtaatcaaggagctggggaggcgactattcgcgagg

SEQ ID NO: 466417 - DNA, 75 bp, synthetic construct
  source 1..75: mol_type = other DNA
ggttatgacggccacggcgaaatgaatatcagtaatgaggggcttgttgtcagcaacggaggaagctcactcggt

SEQ ID NO: 466418 - DNA, 75 bp, synthetic construct
  source 1..75: mol_type = other DNA
cagtcaggctaatggccaacaatgatgcaacactattgctattttatattggcctgtacttaatcatttttttca

SEQ ID NO: 466419 - DNA, 75 bp, synthetic construct
  source 1..75: mol_type = other DNA
tttacggtccgggctggaaagaagacctgggattcagtctggtgaatgagacgcaactgttgttcagtattccct

SEQ ID NO: 466420 - DNA, 75 bp, synthetic construct
  source 1..75: mol_type = other DNA
gcttaattatattgatgatgaagattatcgccgccgcatcctgacccaactcaacaggggagaaagccgacatgc

SEQ ID NO: 466421 - DNA, 75 bp, synthetic construct
  source 1..75: mol_type = other DNA
tcgtatggttgtcaaagggatcgagctagatattattccttttggtggtgttgctgaaggaaatcaaattgcctg

SEQ ID NO: 466422 - DNA, 75 bp, synthetic construct
  source 1..75: mol_type = other DNA
tgtattccggtagaaaaagaggatgaggcttacattaccacactgaacggcgatacggtgcgttgcatctgtcgc

SEQ ID NO: 466423 - DNA, 75 bp, synthetic construct
  source 1..75: mol_type = other DNA
gaacagaaaaaacattaaaacaaaaggtggcttttgctcagcttgaacttaatcgtcttaagtctctggaaaaat

SEQ ID NO: 466424 - DNA, 75 bp, synthetic construct
  source 1..75: mol_type = other DNA
gttttgacactgacgtatcgtctggctcagaaagaaggggagttgttgcctaagtttggtccccatgacttacgg

SEQ ID NO: 466425 - DNA, 75 bp, synthetic construct
  source 1..75: mol_type = other DNA
cggagcatattgatgctgttctggtggaagaggattatctgggggatgagggatgcttcagtgagcgggtatgcg

SEQ ID NO: 466426 - DNA, 75 bp, synthetic construct
  source 1..75: mol_type = other DNA
tcctgcagacagcacggtcagatatgctgttgagggtaaaaaaatcattattactgaggcctacagcgacggttc

SEQ ID NO: 466427 - DNA, 75 bp, synthetic construct
  source 1..75: mol_type = other DNA
tgatgattaaatgtgaacacaacattcttattgttggtaatacttactcccgagttgataatttttttaaggggt

SEQ ID NO: 466428 - DNA, 75 bp, synthetic construct
  source 1..75: mol_type = other DNA
atccgatctcttcagctactgaaacgttactgagtcagatcaaccgtatttgcaccgctcaggggatcccgtttt

SEQ ID NO: 466429 - DNA, 75 bp, synthetic construct
  source 1..75: mol_type = other DNA
aggggctgttcagacgcctgggcctgccggagaccctgattgcccgcgaccgcgaggagtatatcacggcggtac

SEQ ID NO: 466430 - DNA, 75 bp, synthetic construct
  source 1..75: mol_type = other DNA
cgcaacaacaacatcgttctggaatatcgcaaaaaagaactggtccgcctgaccctgacagaccccgtgacaggg

SEQ ID NO: 466431 - DNA, 75 bp, synthetic construct
  source 1..75: mol_type = other DNA
ggtcagaatttaagagatgctagttcaaaaattatcctgagtgccgatgctgaggttgggattgttgttatggcc

SEQ ID NO: 466432 - DNA, 75 bp, synthetic construct
  source 1..75: mol_type = other DNA
aatgatcagtcaacgcgattcttttaatgacaatattttatcaaaagaaatgtctaacggaaaaaacgcactgaa

SEQ ID NO: 466433 - DNA, 75 bp, synthetic construct
  source 1..75: mol_type = other DNA
tagtgctgttgctttatttccatttataacatcccacagtcatcatgatccattaaaactaaatcaggatcttgt

SEQ ID NO: 466434 - DNA, 75 bp, synthetic construct
  source 1..75: mol_type = other DNA
gacgctcaggaagagttagtcttgaggactggttcctatgcgaaattcgctggcgagattatttccaaatcggcg

SEQ ID NO: 466435 - DNA, 75 bp, synthetic construct
  source 1..75: mol_type = other DNA
tccttactgctttaggcatcgggagtgcaaatgcagcgtctggtgattttattggttcagcgcaacagactatta

SEQ ID NO: 466436 - DNA, 75 bp, synthetic construct
  source 1..75: mol_type = other DNA
gaagccaggcccatggatgctgatgaagaacccggctggcaatattcagtgctgttcgaaggtcagggggaaatg

SEQ ID NO: 466437 - DNA, 75 bp, synthetic construct
  source 1..75: mol_type = other DNA
attaattagccaaaacgaatcatctaatgagcatgttttatccaaagaaatgtctgctgggaaaaatgcactaaa

SEQ ID NO: 466438 - DNA, 75 bp, synthetic construct
  source 1..75: mol_type = other DNA
atggacagtcacaaataatagcgacaacacattcaccttatttgattgatttgtcgagaaaaccccgacaggtac

SEQ ID NO: 466439 - DNA, 75 bp, synthetic construct
  source 1..75: mol_type = other DNA
cgacgggatccggcttaaactgacgtaccacgccagcggctatcggcgaacgggccgatcactcatgcaggaagc

SEQ ID NO: 466440 - DNA, 75 bp, synthetic construct
  source 1..75: mol_type = other DNA
accgacgatgaccgcctggcacacagccccgcagaccggatgtatacagggaaagatcatcagaagtacactttt

SEQ ID NO: 466441 - DNA, 75 bp, synthetic construct
  source 1..75: mol_type = other DNA
gtgccgcaaagtgagtataaacatgacatgctcacgtcagttgttgacgatgcaaaaatgtatctgcgacgtttc

SEQ ID NO: 466442 - DNA, 75 bp, synthetic construct
  source 1..75: mol_type = other DNA
cctgctggttggagtgacagagggcggtacgcatacgggatgttctggcaatatcaggatgcagaacgggcgatt

SEQ ID NO: 466443 - DNA, 75 bp, synthetic construct
  source 1..75: mol_type = other DNA
cataccggcgcggcggcggctgggaaggtggtcgaagcattcggtcacttcctcgttggtggcaatttcgctatc

SEQ ID NO: 466444 - DNA, 75 bp, synthetic construct
  source 1..75: mol_type = other DNA
tcgagatgaattgcgcgagttgcttaatgcccgtgaatccggcggcatcatctttaccaccgtgcagaagtttgc

SEQ ID NO: 466445 - DNA, 75 bp, synthetic construct
  source 1..75: mol_type = other DNA
gataacaatatcaagtcattttatttaggtacgcccagtggtaattttaaagcaatagataaccacgggaaggaa

SEQ ID NO: 466446 - DNA, 75 bp, synthetic construct
  source 1..75: mol_type = other DNA
tgtaagaagtaaagataataatcttgaagcattttatctcgcaacacctgatggacgatttgaggcgcttaataa

SEQ ID NO: 466447 - DNA, 75 bp, synthetic construct
  source 1..75: mol_type = other DNA
gggctgtactataaccgtcaccggtactacgatccgttgcaggggcggtatattactcaggacccgatggggttg

SEQ ID NO: 466448 - DNA, 75 bp, synthetic construct
  source 1..75: mol_type = other DNA
gtgcctttgactgagtcagccattgagatactcgaaaagttgaaagctgagaatcatagtcagagtccttacatc

SEQ ID NO: 466449 - DNA, 75 bp, synthetic construct
  source 1..75: mol_type = other DNA
ctgacataggtaaaggacggttggctgccaagctgaagcaaaaagcacctgggcttgcgccgccggagtatattg

SEQ ID NO: 466450 - DNA, 75 bp, synthetic construct
  source 1..75: mol_type = other DNA
cttcaccgattaattttgctactgatcgtaccgatgcagaaagctctgcggtaacactttcatccattagcccaa

SEQ ID NO: 466451 - DNA, 75 bp, synthetic construct
  source 1..75: mol_type = other DNA
cccttcctacgggccggaacccggtggcgtttctgcttcggtggagtatgccgtcgctgcgcttcgggtatctga

SEQ ID NO: 466452 - DNA, 75 bp, synthetic construct
  source 1..75: mol_type = other DNA
tgattgcccctccgcacagggggattcaccatgcagaagtatttttaataaacagcaaacaaaaaaatcaagcat

SEQ ID NO: 466453 - DNA, 75 bp, synthetic construct
  source 1..75: mol_type = other DNA
ccaacattatcctgctggtgaaatccatcatcaccatcactaaaagcaggatcacaacagcaagcagacacagtt

SEQ ID NO: 466454 - DNA, 75 bp, synthetic construct
  source 1..75: mol_type = other DNA
gctgttatcaccctgacggacagcaatgccggttttatggatcgcgtcagcgccggcgcatcgcttctgtttccc

SEQ ID NO: 466455 - DNA, 75 bp, synthetic construct
  source 1..75: mol_type = other DNA
cctgacggacagcaatgccggttttatggatcgcgtcagcgccggcgcatcgcttctgtttcccgccggtccggt

SEQ ID NO: 466456 - DNA, 75 bp, synthetic construct
  source 1..75: mol_type = other DNA
tgacggcgcaacccgccagtttgtgccataccgctacgccaaccgaccgcagcgtaaccttatttttaaaccatc

SEQ ID NO: 466457 - DNA, 75 bp, synthetic construct
  source 1..75: mol_type = other DNA
acgatttgaggcgcttaataataaaggagaatatatttttatcagaaatagtgtcccgggattgagttcagtatg

SEQ ID NO: 466458 - DNA, 75 bp, synthetic construct
  source 1..75: mol_type = other DNA
gcctgtacaacatcgaagagattatgcgatggatcgaaaaccagaaacaaccaggtgccaaaaatgcaagttccg

SEQ ID NO: 466459 - DNA, 75 bp, synthetic construct
  source 1..75: mol_type = other DNA
gaaggcagtctggaatatgctactgatgtaataatacaccttcaacagattgatattaaatgggatggtaatgct

SEQ ID NO: 466460 - DNA, 75 bp, synthetic construct
  source 1..75: mol_type = other DNA
tggcctaacaaattgcaacctggaaaatataaaaacatggggagtaatagcgttaacattattattaataatacc

SEQ ID NO: 466461 - DNA, 75 bp, synthetic construct
  source 1..75: mol_type = other DNA
atctttcggcgggcatgagcccagcaggcagcttccgttatcccaccattgcgatacagctcgttgaacccggcg

SEQ ID NO: 466462 - DNA, 75 bp, synthetic construct
  source 1..75: mol_type = other DNA
atcaagggtatgaaaaaattggatatgctgcatttataaacgttcttggaaaatgtataacaatcccattgctat

SEQ ID NO: 466463 - DNA, 75 bp, synthetic construct
  source 1..75: mol_type = other DNA
gcagagcggtggcggtacgacgaacgcggctggctgacagacatcagccatatcagcgaagggcaccgggtgacg

SEQ ID NO: 466464 - DNA, 75 bp, synthetic construct
  source 1..75: mol_type = other DNA
gctcccagttcaggcgagaaagcctgggtgccaggttcgaaaaatcaaatatcggggaggtattccagaaatttg

SEQ ID NO: 466465 - DNA, 75 bp, synthetic construct
  source 1..75: mol_type = other DNA
tcggtcgcgtaaatgattttatccttttccgctacgatcccaacgatgcgtatatcagccaggtcgataacatca

SEQ ID NO: 466466 - DNA, 75 bp, synthetic construct
  source 1..75: mol_type = other DNA
aacaggtcaccattacggtgaaaatcaatctgctgcctgacgttgtacattatctttattatcaacatgatggct

SEQ ID NO: 466467 - DNA, 75 bp, synthetic construct
  source 1..75: mol_type = other DNA
atggccaccgccacatccagcacatcttccgcttcacgcgtatcgtgtttcacatcctcaatctcgcgtaacgcg

SEQ ID NO: 466468 - DNA, 75 bp, synthetic construct
  source 1..75: mol_type = other DNA
tgatcagcctgccgctggcggcgaaggatctgggtgtgcagggtgatctctggccggtgcaggagcagagcatgc

SEQ ID NO: 466469 - DNA, 75 bp, synthetic construct
  source 1..75: mol_type = other DNA
cgcttcgggctgacatatatcccggcagtggtgcgtcagaacgggaattcgctgcttgtcacgtctgcagcgatg

SEQ ID NO: 466470 - DNA, 75 bp, synthetic construct
  source 1..75: mol_type = other DNA
ggtgccatttatgccatggtcgccgggcttgttgaacatttccggatggagccaccggactggaagcgttttatt

SEQ ID NO: 466471 - DNA, 75 bp, synthetic construct
  source 1..75: mol_type = other DNA
ttttcaataatgcgacattgactacaaaatcagcatttaatacagcatcatcaagcgtacgttccgctggcaaaa

SEQ ID NO: 466472 - DNA, 75 bp, synthetic construct
  source 1..75: mol_type = other DNA
aaaaatcttgggaagctacacgatacgagcaggtgtaatagaaaacggaaacgcatcaaccatcactcgcccgta

SEQ ID NO: 466473 - DNA, 75 bp, synthetic construct
  source 1..75: mol_type = other DNA
ctgaacatgcagagcaccatatgaaagacaaccgctgggtgcctggctggatgtgtgcaccacatccacagacag

SEQ ID NO: 466474 - DNA, 75 bp, synthetic construct
  source 1..75: mol_type = other DNA
tggctttgaatatcaccagggaagtgaagtcattatcgccgccagcgattttttcctgtttttaggtaaacgaga

SEQ ID NO: 466475 - DNA, 75 bp, synthetic construct
  source 1..75: mol_type = other DNA
gaatatcgcagccggactacatgtaccagcggttgtaatgattatgccgatgcattttgccacgacgctagcgcg

SEQ ID NO: 466476 - DNA, 75 bp, synthetic construct
  source 1..75: mol_type = other DNA
ttgacaaaaaagataaaaaatatcaatcacgaacaggcagagcaaaaagctctcgataatgtcccgccgctctat

SEQ ID NO: 466477 - DNA, 75 bp, synthetic construct
  source 1..75: mol_type = other DNA
atgtggctggcgccggacgaatggcagggcagtgccgaaccggaacagttgcaggtactttctgctcatccggcg

SEQ ID NO: 466478 - DNA, 75 bp, synthetic construct
  source 1..75: mol_type = other DNA
tggatttaaccgctgacggtatttgtaaaaacggcgcagtgaacgtgctgaccaaagatctccccagctcgcggc

SEQ ID NO: 466479 - DNA, 75 bp, synthetic construct
  source 1..75: mol_type = other DNA
tgattttgaaagacaattttgcttaattgcaaaagaattatgtgtaaataaagaattatatactgaattatcgat

SEQ ID NO: 466480 - DNA, 75 bp, synthetic construct
  source 1..75: mol_type = other DNA
tccaggcggcgctgatacatcaacctgaaaaaacagtggcactgatggtctggcgattgtgctgttgtgtttttg

SEQ ID NO: 466481 - DNA, 75 bp, synthetic construct
  source 1..75: mol_type = other DNA
ctggctggatgtgtacaccacgtccacaggcagagacggaaaccatggagtaccgtgacaaccaggccgatgccg

SEQ ID NO: 466482 - DNA, 75 bp, synthetic construct
  source 1..75: mol_type = other DNA
gccgcattcatggcgctgatggcagaaaaagcccgtcttgcggccctgttaccggagggatggtcacgggacatg

SEQ ID NO: 466483 - DNA, 75 bp, synthetic construct
  source 1..75: mol_type = other DNA
ctgatgctgccggggaaaggcgtaacgaaaaaacagcctccgttaccggaaagcaaggaggctgaatgcagttta

SEQ ID NO: 466484 - DNA, 75 bp, synthetic construct
  source 1..75: mol_type = other DNA
ctgctgctcgatagtctgacccgctggacgcgcgtgccgacgtcgggcgttgtgctgtttgggattgcgctggtg

SEQ ID NO: 466485 - DNA, 75 bp, synthetic construct
  source 1..75: mol_type = other DNA
ggcaccgctgtccgatccggcaagtaatgggggggatcaatactccgtttatggatctgccgcccatttatgcca

SEQ ID NO: 466486 - DNA, 75 bp, synthetic construct
  source 1..75: mol_type = other DNA
ctgattaccacgggcgatccgctttcaggcattgcggctgtccggccatcggcaccgctgtccgatccggcaagt

SEQ ID NO: 466487 - DNA, 75 bp, synthetic construct
  source 1..75: mol_type = other DNA
tgagtattacgctaaccgcgatgatgacgcggaaaaagtgaccatccgcaaagcaggaagaaaatcccatctgga

SEQ ID NO: 466488 - DNA, 75 bp, synthetic construct
  source 1..75: mol_type = other DNA
gaaaacctataccagactgcagggtggaccgtttgtggcacgaagagatctggtcattcgcacatggtatcagcg

SEQ ID NO: 466489 - DNA, 75 bp, synthetic construct
  source 1..75: mol_type = other DNA
gaggaactggctgaaaactggacgcgtattagcgagcatttcgacacactatttaccaccgaagccagcgtggat

SEQ ID NO: 466490 - DNA, 75 bp, synthetic construct
  source 1..75: mol_type = other DNA
taccacctaactctcgacacagccaaagaactggcgatggttgagcgtaacgaaaaaggccgccagatacgccga

SEQ ID NO: 466491 - DNA, 75 bp, synthetic construct
  source 1..75: mol_type = other DNA
ctgatgctgccggggaaaggcgtaacgaaaaaacagcctccgttaccggagagcaagaaggctgaatgcagttta

SEQ ID NO: 466492 - DNA, 75 bp, synthetic construct
  source 1..75: mol_type = other DNA
ctgatgctgccggggaaaggcgtaacgaaaaaacagcctccgttaccggacagcaagcaggctgaatgaagttta

SEQ ID NO: 466493 - DNA, 75 bp, synthetic construct
  source 1..75: mol_type = other DNA
cctacgaggagcaacttttggtaaaactgcctttgtaatcccctatgaaacaggagctattgcctcatcactaat

SEQ ID NO: 466494 - DNA, 75 bp, synthetic construct
  source 1..75: mol_type = other DNA
ttccggctgaaaaaactattcctgccaactgggcttacccgcttggggtactcgtcccttcgccggaattgcccc

SEQ ID NO: 466495 - DNA, 75 bp, synthetic construct
  source 1..75: mol_type = other DNA
attcacagacgaggaaatcatcctcctctgctacatgcaggtacagatggagaaagcacaggacatcagcaaacg

SEQ ID NO: 466496 - DNA, 75 bp, synthetic construct
  source 1..75: mol_type = other DNA
gggtggtgaaagagacggacccggcaggccgggtgacacagacgcagtggaacggcagttttgctgaaatcacgc

SEQ ID NO: 466497 - DNA, 75 bp, synthetic construct
  source 1..75: mol_type = other DNA
gtaagagctgccgttatgggtttagaaaagctgactaaagcagaaatatcaaaattaattgagaaagccaagctt

SEQ ID NO: 466498 - DNA, 75 bp, synthetic construct
  source 1..75: mol_type = other DNA
cactctggataaatggattaaagaatcaggagcacaaccaccaagacctgataaatattcttcgtttgaacttgt

SEQ ID NO: 466499 - DNA, 75 bp, synthetic construct
  source 1..75: mol_type = other DNA
aacggtgaagcgttgctggaagaggcgttacgcttaggggcagatgtagtgggggcgattccgcattttgaattt

SEQ ID NO: 466500 - DNA, 75 bp, synthetic construct
  source 1..75: mol_type = other DNA
tttgttaaattagttcccaatcttaaagcattaaccccagcagaacagttggctaaggtaataaaacaagtagga

SEQ ID NO: 466501 - DNA, 75 bp, synthetic construct
  source 1..75: mol_type = other DNA
aacttttgaagggcgggcgtcccggtaacctggtggaatatcgttacgacgataacgggcaactgactggcgtgg

SEQ ID NO: 466502 - DNA, 75 bp, synthetic construct
  source 1..75: mol_type = other DNA
aaataatagtgccatatgcgatttttaagattttgttattaattgcggtcgtacctttctttctgtgtacatccc

SEQ ID NO: 466503 - DNA, 75 bp, synthetic construct
  source 1..75: mol_type = other DNA
gcaccgaaagtaatagcggcgcgtcacgtgttgatctggcgacactaaaagctatcgaaggtaactctaccacgc

SEQ ID NO: 466504 - DNA, 75 bp, synthetic construct
  source 1..75: mol_type = other DNA
atgaaagggaaatctgcattaacgcttctgcttgctggtatattttcgtgctgcacatgccaggcgataggggca

SEQ ID NO: 466505 - DNA, 75 bp, synthetic construct
  source 1..75: mol_type = other DNA
acagcaaatggatactagaaaagaatctttttttcagattgaaaacttgccaccaggcgcaattagtgcgttaaa

SEQ ID NO: 466506 - DNA, 75 bp, synthetic construct
  source 1..75: mol_type = other DNA
ttaggattgcggagaataacaactgccgttctcatcgcgtaatctccggatatcgacccataacgggcaatgata

SEQ ID NO: 466507 - DNA, 75 bp, synthetic construct
  source 1..75: mol_type = other DNA
cacatatgcgccggaaaaatttcaaagggtgaagtacaccgcagcacaacatggaaatttgacggcgagcttatg

SEQ ID NO: 466508 - DNA, 75 bp, synthetic construct
  source 1..75: mol_type = other DNA
atggataattggcgttagaatgattataaatctttgcgacgttatttttccgtatcagcagccattccttatacg

SEQ ID NO: 466509 - DNA, 75 bp, synthetic construct
  source 1..75: mol_type = other DNA
atgaaaattattgaggcacggttaagcgcacttacaaataaccagacaaagtcattgaagcttaaaccggtcgcg

SEQ ID NO: 466510 - DNA, 75 bp, synthetic construct
  source 1..75: mol_type = other DNA
gcgggccaatggcctgttattgcaagggcagtggctggatgcttccattcaactcactggtgcgttgggcggggg

SEQ ID NO: 466511 - DNA, 75 bp, synthetic construct
  source 1..75: mol_type = other DNA
gagtcatcgctaagcaccattgatgcggcaaaagcggcattttatcctgacatcaacctgatggccttcctgcaa

SEQ ID NO: 466512 - DNA, 75 bp, synthetic construct
  source 1..75: mol_type = other DNA
acggtgtatttcacgggaaggtgtgccggtaacggacaacgatggcgcgactgtcgcaactggcggggaacctgt

SEQ ID NO: 466513 - DNA, 75 bp, synthetic construct
  source 1..75: mol_type = other DNA
ccggtacggtcaacaaatcgccgttcaccgggaggaaggtctcagtatttatagtctctatgacagccgcggcag

SEQ ID NO: 466514 - DNA, 75 bp, synthetic construct
  source 1..75: mol_type = other DNA
agagacctcgcgcaacggtaacattacgcgctggttttatgactcccccccgcagtagcctgcccggcgcggtgg

SEQ ID NO: 466515 - DNA, 75 bp, synthetic construct
  source 1..75: mol_type = other DNA
aagatcaaaagaaatagattggggtatggtttttctcctgaagagagttgttgtcataaaatttcaattcctcct

SEQ ID NO: 466516 - DNA, 75 bp, synthetic construct
  source 1..75: mol_type = other DNA
ggagtaatctatctatttctcgcggaaagcggaatatgaatgggaaaaaaggcgaggcgatcattggtgatggat

SEQ ID NO: 466517 - DNA, 75 bp, synthetic construct
  source 1..75: mol_type = other DNA
gcgctgagtatatttatacttccttttatttggtatctgatcaacaggaaatctttattgatcgctgcggaagaa

SEQ ID NO: 466518 - DNA, 75 bp, synthetic construct
  source 1..75: mol_type = other DNA
agcggcaaaacggggggtgggaacaggggaaaatcagataccggacatggcttcatttagtggggtgagggattt

SEQ ID NO: 466519 - DNA, 75 bp, synthetic construct
  source 1..75: mol_type = other DNA
acgcttgctgaacttcacaacagctttatagctgaactgaatgaaaacggctggcctgaaatggcgctggcgcac

SEQ ID NO: 466520 - DNA, 75 bp, synthetic construct
  source 1..75: mol_type = other DNA
gacgccggagagtacgacgataagccagatatcggatacgccattcattttgccgttgctgatggcggggcgcgt

SEQ ID NO: 466521 - DNA, 75 bp, synthetic construct
  source 1..75: mol_type = other DNA
tttactacgcgaagctaaagccaatgaactggatgaacctctttcaacaacgaggttgaaccacctcatagataa

SEQ ID NO: 466522 - DNA, 75 bp, synthetic construct
  source 1..75: mol_type = other DNA
aagacttttagccagtcaaatatcgactgtcttcgggcgttacgtgctgatagcatcagcaagcgcagaattgcg

SEQ ID NO: 466523 - DNA, 75 bp, synthetic construct
  source 1..75: mol_type = other DNA
ttaagcagggaggaactattgattggaaaggaacgacctggactgcgactggcgatgctactgaggaaggaaatg

SEQ ID NO: 466524 - DNA, 75 bp, synthetic construct
  source 1..75: mol_type = other DNA
tgtaaattgattgaaagcctcatgactaaatacagctgttatgagcacagccagtcgacggaaatgccagcttct

SEQ ID NO: 466525 - DNA, 75 bp, synthetic construct
  source 1..75: mol_type = other DNA
atacagccaatatcacgaataagacggcaaccaaaggtgctgaactcagtgcctcagatttgaaagccttagcaa

SEQ ID NO: 466526 - DNA, 75 bp, synthetic construct
  source 1..75: mol_type = other DNA
aatggtacaaactctgactccgacctgaattcaattcaggatgaaattacacaacgccttagtgaaattgatcgt

SEQ ID NO: 466527 - DNA, 75 bp, synthetic construct
  source 1..75: mol_type = other DNA
cgcctaataagccacaaaaatgggaaatatcatatctgacatctggcaaaatagatgatatagagagcgggcgtg

SEQ ID NO: 466528 - DNA, 75 bp, synthetic construct
  source 1..75: mol_type = other DNA
gccagctttatgcaggctggtaccgctgaggtgttgagtgttgcagcagctgacccagagccgacctggcgtacc

SEQ ID NO: 466529 - DNA, 75 bp, synthetic construct
  source 1..75: mol_type = other DNA
aaaagtatcaggtggcggagccgagggtttcctgaagaacgccagccgccagatcgcggttgagttcagcaaaga

SEQ ID NO: 466530 - DNA, 75 bp, synthetic construct
  source 1..75: mol_type = other DNA
tcccggtatgggagccgcaactaaccgtcgctgactgggataacgaccgcctctcgtccaccttcggccagccgt

SEQ ID NO: 466531 - DNA, 75 bp, synthetic construct
  source 1..75: mol_type = other DNA
gaatgaaaaattccctatgcaaaacgtcagaatacatgcgactgaatatgggaaatggcagacaaacgtccatct

SEQ ID NO: 466532 - DNA, 75 bp, synthetic construct
  source 1..75: mol_type = other DNA
gcgctgaaagcaagccatcctgcaggcgataaactgcatattgtgcagtgcgatctcgcctgcccccagagcgtg

SEQ ID NO: 466533 - DNA, 75 bp, synthetic construct
  source 1..75: mol_type = other DNA
gaagcaaacggcgtgggataagcgtgtcaacaagctactgaaacgctgctgggagcagattaaaggcgcagaccg

SEQ ID NO: 466534 - DNA, 75 bp, synthetic construct
  source 1..75: mol_type = other DNA
caacaattaccattaagggaagcaggcgtactgctaaatgtaaaagcagatacagttgttgaattttataaaaaa

SEQ ID NO: 466535 - DNA, 75 bp, synthetic construct
  source 1..75: mol_type = other DNA
ctcgggtttaacagggtagtggagaatttcaactacagcatcgccgggcttgctgattttgttcgttacggcagg

SEQ ID NO: 466536 - DNA, 75 bp, synthetic construct
  source 1..75: mol_type = other DNA
atctaaagagagcgcctcaaactcatacattaaattaatgtcatcactatcagatcatgtcactgttcttacgcc

SEQ ID NO: 466537 - DNA, 75 bp, synthetic construct
  source 1..75: mol_type = other DNA
ctctgccctctacagggatttatattgaaaagggttttggaaatcagctttctaacataacatcggtaggatatg

SEQ ID NO: 466538 - DNA, 75 bp, synthetic construct
  source 1..75: mol_type = other DNA
cagagtgaagatgaggggcttatcaccctctggcattacgatgcgtcggaccgtatcacccggcgcacggtgaac

SEQ ID NO: 466539 - DNA, 75 bp, synthetic construct
  source 1..75: mol_type = other DNA
ggcgggaggtgctgtacacggaaggcgagggtggcctgaagcgggtggtgaagaaggagcatgccgacgggagca

SEQ ID NO: 466540 - DNA, 75 bp, synthetic construct
  source 1..75: mol_type = other DNA
agattataaacggcggacaaaacgggattaataaccggcgcgctcgcttcctgaaagcaaaatcggtactggtgg

SEQ ID NO: 466541 - DNA, 75 bp, synthetic construct
  source 1..75: mol_type = other DNA
cagagaagccgatgcggctttacttaatgttatttatcctgcaaatctttcaaagataaacaccagaagaaaaga

SEQ ID NO: 466542 - DNA, 75 bp, synthetic construct
  source 1..75: mol_type = other DNA
acaaaagttgaaaataaagcagcgacactatctgatcttgatctgaacgctgccaagaaaacaggaagcacgtta

SEQ ID NO: 466543 - DNA, 75 bp, synthetic construct
  source 1..75: mol_type = other DNA
gattctgcaaccggtaaatacatggaagccactgtagccattaccggtacggcggcggcggtaactgttggtgca

SEQ ID NO: 466544 - DNA, 75 bp, synthetic construct
  source 1..75: mol_type = other DNA
cgcgccaacattcgcgtggctgtgcggtacatcgaagcgtggatctctggcaacggctgtgtgccgatttatggc

SEQ ID NO: 466545 - DNA, 75 bp, synthetic construct
  source 1..75: mol_type = other DNA
ggaaaacgaatcacccggatgcgattcaaattctgatcctcggtgtaattggcaagaaaaagggcactgttgcaa

SEQ ID NO: 466546 - DNA, 75 bp, synthetic construct
  source 1..75: mol_type = other DNA
attttcgcgcttatctggcaatgttgctggcaaataatggggtgcgtggtgtaagccggatacttcttgaattta

SEQ ID NO: 466547 - DNA, 75 bp, synthetic construct
  source 1..75: mol_type = other DNA
tggcgctgacaatgccggttcccgcaactgtgactgccaccatacctttcatcttaaaaacactcaccggtgtgg

SEQ ID NO: 466548 - DNA, 75 bp, synthetic construct
  source 1..75: mol_type = other DNA
ttaacctactgtatttaaagaaaaatttgataaccattgatgctatgggctgtcaggtaatgactccaacttatt

SEQ ID NO: 466549 - DNA, 75 bp, synthetic construct
  source 1..75: mol_type = other DNA
cgtaacgcctgaattttgtgattttgaattcgaatggaagggattaaaaaagctttgtgtagcattgtcattcag

SEQ ID NO: 466550 - DNA, 75 bp, synthetic construct
  source 1..75: mol_type = other DNA
ccgccggacaacgggggcagacccggtatcgggtaaccgtgacagcgaacgggtatggctgtctgcggtgaagac

SEQ ID NO: 466551 - DNA, 75 bp, synthetic construct
  source 1..75: mol_type = other DNA
cgattttacagatacttaaaaataataaatcctttgaatttattaattgtactatatgaaagagtaaaaaaataa

SEQ ID NO: 466552 - DNA, 75 bp, synthetic construct
  source 1..75: mol_type = other DNA
aatcgctccagagttacggggtaaaacaatgctttttgggcattggcttcagcaacgtgaaattcctgatcctta

SEQ ID NO: 466553 - DNA, 75 bp, synthetic construct
  source 1..75: mol_type = other DNA
accatcactggaataactaaaacgcttttatcgctggttgcgaccacggtatccagcaatgcacgggttaatcgc

SEQ ID NO: 466554 - DNA, 75 bp, synthetic construct
  source 1..75: mol_type = other DNA
ttaataaaaacgccatgcacgatgagaaaacgtttaaaaaccttggtactgctttagataaagcatcccatgcaa

SEQ ID NO: 466555 - DNA, 75 bp, synthetic construct
  source 1..75: mol_type = other DNA
ggtattgatagtgttgattacttcgctgttgttctatcgcctgattcaataaatgcgccttgggtcgtcaatgaa

SEQ ID NO: 466556 - DNA, 75 bp, synthetic construct
  source 1..75: mol_type = other DNA
gaagatgatttgcagcgctatattgacgtcacccgtggtgaaatattcttttcacgtggtgtaatcctagtggaa

SEQ ID NO: 466557 - DNA, 75 bp, synthetic construct
  source 1..75: mol_type = other DNA
aagttggcgcaattcacccttgaggccgcttattgaagaactttccgcatctctggacgaggaggatcgtgagga

SEQ ID NO: 466558 - DNA, 75 bp, synthetic construct
  source 1..75: mol_type = other DNA
agcgctggcaccctcggtgtcggaggatgtatgcccggattacattcgtgaagcactggagtatatctgcgatgc

SEQ ID NO: 466559 - DNA, 75 bp, synthetic construct
  source 1..75: mol_type = other DNA
tggaccaggcgaattacctggcgaagatgaaaaaaatgctcaggcatattttgaccgtgaatatgagcctattga

SEQ ID NO: 466560 - DNA, 75 bp, synthetic construct
  source 1..75: mol_type = other DNA
tgaagcactatttgagcttgagcgtgaatattacccacggctaaaagaacagcgtattcgacttgatattgctta

SEQ ID NO: 466561 - DNA, 75 bp, synthetic construct
  source 1..75: mol_type = other DNA
cgctaccggcggagctggcggtgatgctgggaaggctggagcgggagctgcgtgcgggagcggtgagtgcggaga

SEQ ID NO: 466562 - DNA, 75 bp, synthetic construct
  source 1..75: mol_type = other DNA
gcgggtggtgaagaaggagcatgcggacgggagcatcacccgcagcgagtatgatgaggcggggaggctggcgga

SEQ ID NO: 466563 - DNA, 75 bp, synthetic construct
  source 1..75: mol_type = other DNA
aacagatgaagagattcttcagttagctgaagctaatttgactaagcattattccggtaaactggataagttaaa

SEQ ID NO: 466564 - DNA, 75 bp, synthetic construct
  source 1..75: mol_type = other DNA
gatagcatgaaagaacttgttagtgaatatgaatcacagaagaagattgctatgcaggctgatattgagcagctt

SEQ ID NO: 466565 - DNA, 75 bp, synthetic construct
  source 1..75: mol_type = other DNA
agcgtattcgacttgatattgcttacgatgctgttaagaacttcgaagaaacctcgaaaccttcagaatatgata

SEQ ID NO: 466566 - DNA, 75 bp, synthetic construct
  source 1..75: mol_type = other DNA
ccaagtaccgacgccagatttttgaccatgacgcgacagaaaaactacgcacttacttttcaaatgtatgtgctt

SEQ ID NO: 466567 - DNA, 75 bp, synthetic construct
  source 1..75: mol_type = other DNA
atgaagcgttaatcctgcaatgcggaatcacactcatcagcgattttgatcagtatgatggcgggaagatgctct

SEQ ID NO: 466568 - DNA, 75 bp, synthetic construct
  source 1..75: mol_type = other DNA
cgcattctgaaagactacctgatggaaacaaccggaaacgtgccggagaaattacggcaacagaaaggtgagtga

SEQ ID NO: 466569 - DNA, 75 bp, synthetic construct
  source 1..75: mol_type = other DNA
gtgcggcgaaaactttaggtgagtgtaccagaggagctcatagtggactgcctttttatcgggtggatggaccgt

SEQ ID NO: 466570 - DNA, 75 bp, synthetic construct
  source 1..75: mol_type = other DNA
ccgcatcccggaaggggtgatacggatgcacgacgagcggacccaccactacgacagccagcaccgtctggtgtt

SEQ ID NO: 466571 - DNA, 75 bp, synthetic construct
  source 1..75: mol_type = other DNA
cggctgccggacccggaactgcatccggacagcacgctcacggcgtggccggataaccgcatcgcggaagatgcg

SEQ ID NO: 466572 - DNA, 75 bp, synthetic construct
  source 1..75: mol_type = other DNA
aaaaatgtcgaagataactggcgtgtgcgctggatgacgggctattactataaggtcatcaaccagaacaatcgc

SEQ ID NO: 466573 - DNA, 75 bp, synthetic construct
  source 1..75: mol_type = other DNA
cgtttcaatcaacacgagactgaagattcgtaaacgaatcgacatgaaagaaatcaacaaaattctgttgatttt

SEQ ID NO: 466574 - DNA, 75 bp, synthetic construct
  source 1..75: mol_type = other DNA
caacagggactgaattcgccggtgttgcccaactgaaagacagaaccttcactctggaacgcgacaacaccgctg

SEQ ID NO: 466575 - DNA, 75 bp, synthetic construct
  source 1..75: mol_type = other DNA
tggtgtgctgattttggtattgtttatactcgttatgcggatgatataacattttcaaccgctagaaaaaatatt

SEQ ID NO: 466576 - DNA, 75 bp, synthetic construct
  source 1..75: mol_type = other DNA
gatgctgatgatctggcattttatacaggctatgtgtttgatgcccgcagggagaagatctcttaccttgatgga

SEQ ID NO: 466577 - DNA, 75 bp, synthetic construct
  source 1..75: mol_type = other DNA
ttagttgctatgatttttatatgaaaatattacatgttgtaccacagttaaagcatggtggtgtcgaaactgctg

SEQ ID NO: 466578 - DNA, 75 bp, synthetic construct
  source 1..75: mol_type = other DNA
atgtcaaatacataccagaaaagaaaggcaagtaaagagtatggtttatataataaatgtaagaaactaaatgat

SEQ ID NO: 466579 - DNA, 75 bp, synthetic construct
  source 1..75: mol_type = other DNA
ttttgctgttggctggatgtacgaacaaacacacagataacgcattccagatggactatcccgttgatgccgctc

SEQ ID NO: 466580 - DNA, 75 bp, synthetic construct
  source 1..75: mol_type = other DNA
ggaaagtttcactcagcttgggcgagtattaaataaatttgaaaatctcgaaaataataggaatgataaatatat

SEQ ID NO: 466581 - DNA, 75 bp, synthetic construct
  source 1..75: mol_type = other DNA
acggtggcctgatcactaaagaagatagcggtcgaacgcacaccgataagcggcgattatcgcgggtatcaggtt

SEQ ID NO: 466582 - DNA, 75 bp, synthetic construct
  source 1..75: mol_type = other DNA
gtaatgcgtgcgctaaaactgccgataacctgccccgcattctggaagactacctgatggaaacaaccggaaacg

SEQ ID NO: 466583 - DNA, 75 bp, synthetic construct
  source 1..75: mol_type = other DNA
atataatggttagcattccaaaaaataagaaaaaacaattctacgaacgagttgagcattattgtagtttatatt

SEQ ID NO: 466584 - DNA, 75 bp, synthetic construct
  source 1..75: mol_type = other DNA
acaggcctagagaaataaatgaccctttaactattgagcatttgcaagataaactaattttgtcgaaaaataaaa

SEQ ID NO: 466585 - DNA, 75 bp, synthetic construct
  source 1..75: mol_type = other DNA
ttcggtgagtcttagttactcttttaaccaagggaaagacaccaccgaagactttaaaccacagaatgtggggtt

SEQ ID NO: 466586 - DNA, 75 bp, synthetic construct
  source 1..75: mol_type = other DNA
cccagattcaaaaatatataaagcatcgcgtacggtcatgcgactttcttcgcttgaggggcgccaggcattgca

SEQ ID NO: 466587 - DNA, 75 bp, synthetic construct
  source 1..75: mol_type = other DNA
ttctctgtatggagtttgaagttttcctgaaggaaagaataaaggaggtggaaaaaagtgacctcccctgggatg

SEQ ID NO: 466588 - DNA, 75 bp, synthetic construct
  source 1..75: mol_type = other DNA
tgaagaggatgttgttgcctgtggctgtcctgaaggaagtaatatagttttaccattgactaaattgacacaaat

SEQ ID NO: 466589 - DNA, 75 bp, synthetic construct
  source 1..75: mol_type = other DNA
agcgatcaggtactggaaactgccagccgcctgcgtgaaagcggcaaagaggcagaagcggaagcgatgctgcgc

SEQ ID NO: 466590 - DNA, 75 bp, synthetic construct
  source 1..75: mol_type = other DNA
gcgctggcgcatatcaacagcctgccgcgcgcgcagtggaacagcaatattcaggaactggcaaaccgcctgcaa

SEQ ID NO: 466591 - DNA, 75 bp, synthetic construct
  source 1..75: mol_type = other DNA
cgacaaatggaacagtttgctgaaagtgaaccgttattggctggcgatccaacagggcgatgccgcactgaaagc

SEQ ID NO: 466592 - DNA, 75 bp, synthetic construct
  source 1..75: mol_type = other DNA
gcaaccggcgaaacacttcctgctaatgcaacagagaaacaacgtcaggaatatcttgcgaaactgcgtgacacg

SEQ ID NO: 466593 - DNA, 75 bp, synthetic construct
  source 1..75: mol_type = other DNA
ggccccggacagtccgtatctgattacggtgaacccgaaactggatggtctcggaaaggtggacagcagtctgtt

SEQ ID NO: 466594 - DNA, 75 bp, synthetic construct
  source 1..75: mol_type = other DNA
ggtctcgccggatgtgacagaagccagtggcacctctccggcaggtcagtaccgtgcggttatcagcgctgccgg

SEQ ID NO: 466595 - DNA, 75 bp, synthetic construct
  source 1..75: mol_type = other DNA
attgtgtttataccattcccgatcaatttaaaaaacaacaaaaatctaacagaaagaagttcatcacaacacttg

SEQ ID NO: 466596 - DNA, 75 bp, synthetic construct
  source 1..75: mol_type = other DNA
ctgtatcctggcgtgaagcagtcagacctcagtgaagagcagaagcagacgataagtacgctggcaactgtgtca

SEQ ID NO: 466597 - DNA, 75 bp, synthetic construct
  source 1..75: mol_type = other DNA
cgggctcacgttatatcaacggcacaggctctgacctggcgcagatgaaatacctgatggacagcgcggcagcac

SEQ ID NO: 466598 - DNA, 75 bp, synthetic construct
  source 1..75: mol_type = other DNA
gatgcatgatgctcgtgatggggttcactggaaaaacagctgccgcagtaaaggagtgctacatcaatgccttta

SEQ ID NO: 466599 - DNA, 75 bp, synthetic construct
  source 1..75: mol_type = other DNA
cgacctgtgaagttacctggcgcattggtatcagttgtacagtattgtataaatggaaagctgaaattatcggca

SEQ ID NO: 466600 - DNA, 75 bp, synthetic construct
  source 1..75: mol_type = other DNA
gatcgaatacattggcgataatcagtttgtcattagcgatgagcgcgattacgccatttatgtgatttcactgac

SEQ ID NO: 466601 - DNA, 75 bp, synthetic construct
  source 1..75: mol_type = other DNA
ctggacgccaccctcaacgtggaataacggtattcctggcttcctgatggattacaacctgtttgccagcactta

SEQ ID NO: 466602 - DNA, 75 bp, synthetic construct
  source 1..75: mol_type = other DNA
gaactggctgaaaactgggcgcgtattagcgaacatttcgacacactatttaccaccgaagccagcgtggatgca

SEQ ID NO: 466603 - DNA, 75 bp, synthetic construct
  source 1..75: mol_type = other DNA
atctacaagaattgaagaaaatctatctatttctttaggtagtgcaataccaaatattagcacagcacaaataaa

SEQ ID NO: 466604 - DNA, 75 bp, synthetic construct
  source 1..75: mol_type = other DNA
aaaacccttaaacctcgtaatataattggtatagccaaggcgcttaaatgtgatccggactggctgatgaacggc

SEQ ID NO: 466605 - DNA, 75 bp, synthetic construct
  source 1..75: mol_type = other DNA
aaaatgatcttcgttttgaagaacgtccaaaaccgataatcattgagccaacagatgcgttaattcgcttaacaa

SEQ ID NO: 466606 - DNA, 75 bp, synthetic construct
  source 1..75: mol_type = other DNA
ccagagttaagttacttatttccctatgcgaccaactggaacaacaatccctgaccagtctggacgcacatcagc

SEQ ID NO: 466607 - DNA, 75 bp, synthetic construct
  source 1..75: mol_type = other DNA
ttatcatgatgaaaaaccagatggagccggaatacacgccgctgcgtaaaattcacctgtaccactgcgaccacc

SEQ ID NO: 466608 - DNA, 75 bp, synthetic construct
  source 1..75: mol_type = other DNA
tgatgttgcctctattcccggcgttggccctgcgcgtaaagcggcgttacggtcttttggtattgaaacagccgc

SEQ ID NO: 466609 - DNA, 75 bp, synthetic construct
  source 1..75: mol_type = other DNA
acggacgatgctcgaaaaaatgaaggacgaaattcttgggttaccggaagaggagaaacgcgctctggcagcact

SEQ ID NO: 466610 - DNA, 75 bp, synthetic construct
  source 1..75: mol_type = other DNA
cgggcctcaacgccggggcatggcgtctgcgcagcgattatcagcttagccagtccgatagcggcgacaaccgtg

SEQ ID NO: 466611 - DNA, 75 bp, synthetic construct
  source 1..75: mol_type = other DNA
atgagcgctacctatttcacgctattaaccactaccggcgaatccgcactggcgaccgccaccgcacagggttca

SEQ ID NO: 466612 - DNA, 75 bp, synthetic construct
  source 1..75: mol_type = other DNA
gggataactacaaattcagaaccagtacagacggtgtccatactcacacagtagccatcggcgctcatactcatt

SEQ ID NO: 466613 - DNA, 75 bp, synthetic construct
  source 1..75: mol_type = other DNA
caagcaaggtgcgagaaaactggcgtggttaaaaaacagcgggaatatgtcgaatccattctatctcgcccaacc

SEQ ID NO: 466614 - DNA, 75 bp, synthetic construct
  source 1..75: mol_type = other DNA
gaacgccatttaacactgaagctacgcgaagccaaatcagcgatgagtgactatatcaccaacacactggacgca

SEQ ID NO: 466615 - DNA, 75 bp, synthetic construct
  source 1..75: mol_type = other DNA
tgattgttgttatcgcaatagcgatcttcgtatgggtgggcgtgctgtttagccagtttcctgatgctatgcggt

SEQ ID NO: 466616 - DNA, 75 bp, synthetic construct
  source 1..75: mol_type = other DNA
gcatcagcgaaacactggccgccacgcccaaagccgtgaaagcagcctacgatctggctaatggaaaatataccg

SEQ ID NO: 466617 - DNA, 75 bp, synthetic construct
  source 1..75: mol_type = other DNA
aaagcgtttgaaatgatgttaagcgctattgaagaaaggcccgtaaaaaaaacggtcaaagtagaaatgaaatta

SEQ ID NO: 466618 - DNA, 75 bp, synthetic construct
  source 1..75: mol_type = other DNA
ttcgcgatcgttttggcgctgtaccgccagaaatcaatatcggcactttcgatgaacatcccatgctgggatttc

SEQ ID NO: 466619 - DNA, 75 bp, synthetic construct
  source 1..75: mol_type = other DNA
ttgcagaaaattaaattacggaaacagggggaatcgtaatggaaatcctaaatcaaaccgtcgcaagttccgtca

SEQ ID NO: 466620 - DNA, 75 bp, synthetic construct
  source 1..75: mol_type = other DNA
ccggtggtaagtgcaaatgatctgcaacttcctgaaccgttcaccttcgatgttgccggtttcaccatcaccttc

SEQ ID NO: 466621 - DNA, 75 bp, synthetic construct
  source 1..75: mol_type = other DNA
cgagcgcagcaacctatattccaccgcagcaactcccgagtagttgtctggaaactttgtcgcttctggtgcaga

SEQ ID NO: 466622 - DNA, 75 bp, synthetic construct
  source 1..75: mol_type = other DNA
gaagatgaaatgtacatctatcattttgtttcgacaacacgtgatacaccgacagacccagcaggtaagttcgca

SEQ ID NO: 466623 - DNA, 75 bp, synthetic construct
  source 1..75: mol_type = other DNA
ttctcttattctcagacacgagaaaggagagcctgtgattaataacctgacccattgctttgaagaaacagcctg

SEQ ID NO: 466624 - DNA, 75 bp, synthetic construct
  source 1..75: mol_type = other DNA
gtattgctgccgacaattgcagaagcacaactgaatgcgggcatggaaagtaccggtaattttaatgtccgcgtc

SEQ ID NO: 466625 - DNA, 75 bp, synthetic construct
  source 1..75: mol_type = other DNA
atgaccgacacctattttgcgccagcaggttcactcctcgcgacaacggtcgtacctcccactaactacacatca

SEQ ID NO: 466626 - DNA, 75 bp, synthetic construct
  source 1..75: mol_type = other DNA
gaaaaaggcgaaccagtttttacagatgatgaaaatgcacagaatttaattttagttaatgatattgataaagtt

SEQ ID NO: 466627 - DNA, 75 bp, synthetic construct
  source 1..75: mol_type = other DNA
acgttttattcgggtgattgatagaaacacgcttcagttcagagatgatgaaaacgatctgtatatccgtacaaa

SEQ ID NO: 466628 - DNA, 75 bp, synthetic construct
  source 1..75: mol_type = other DNA
gatggcgcagggaattcaaacgcgtatagtaaaccaggtgcgtatgcgatagccgctggtgatgataaaacagaa

SEQ ID NO: 466629 - DNA, 75 bp, synthetic construct
  source 1..75: mol_type = other DNA
actccagctatagttactcttttatcgcccggttgaagaaactgccaaatcagacagtcagtgcgggaaaagtgc

SEQ ID NO: 466630 - DNA, 75 bp, synthetic construct
  source 1..75: mol_type = other DNA
aatgggcagcagaaagagtgcagtatattcgcggcttaaagtcgccgaatgagcaacagaaactcatgctggtac

SEQ ID NO: 466631 - DNA, 75 bp, synthetic construct
  source 1..75: mol_type = other DNA
ccaggtatcacaatgacgaggtaaggcacagaagggaggttgtaacgtaccgatataaaaaccgccgtacagcag

SEQ ID NO: 466632 - DNA, 75 bp, synthetic construct
  source 1..75: mol_type = other DNA
gcaatgacgtccagttcagccatccaaaggctgggtaagatcagtcaggcgaaccgcgaaaaccatcaggtactg

SEQ ID NO: 466633 - DNA, 75 bp, synthetic construct
  source 1..75: mol_type = other DNA
accaaaattaaagatctgcgtaaagggctgaatcatattccaattgaagataaaaaattccttcatcaatacatg

SEQ ID NO: 466634 - DNA, 75 bp, synthetic construct
  source 1..75: mol_type = other DNA
aagaaaacactatctcacctatgcttttaacggtgatagagaaattttacgcttatacaaatgcagagccagcag

SEQ ID NO: 466635 - DNA, 75 bp, synthetic construct
  source 1..75: mol_type = other DNA
gaaaccttattactcggtaagcagtttgggtgcaagatggaatgcagcagtaaaacgtgctggtattcgccgccg

SEQ ID NO: 466636 - DNA, 75 bp, synthetic construct
  source 1..75: mol_type = other DNA
atggaggcgaaacggcaggtgagggggcaggtggaaggaagtgatgtctggttgcatcaacaacaggctgcgctg

SEQ ID NO: 466637 - DNA, 75 bp, synthetic construct
  source 1..75: mol_type = other DNA
caacggatagtcgatgacctgaaaggaaccagcgccagcacgacgcaaaaaggcctggtgcaactctgtagtgac

SEQ ID NO: 466638 - DNA, 75 bp, synthetic construct
  source 1..75: mol_type = other DNA
cgcaaaaagtcacgctgataatgccgccggaaacgcacaacagactgcgcaggatgtgacagcaactaaaacggc

SEQ ID NO: 466639 - DNA, 75 bp, synthetic construct
  source 1..75: mol_type = other DNA
tttaaggcgcagaccggaaaatactgcgtatatctgaaacaggactggcgcgacgagtactgtgttggcgatatt

SEQ ID NO: 466640 - DNA, 75 bp, synthetic construct
  source 1..75: mol_type = other DNA
aacataaatatactcacttaactttttttctctcattactttttttcatgatatttgaatctcgagaagatatta

SEQ ID NO: 466641 - DNA, 75 bp, synthetic construct
  source 1..75: mol_type = other DNA
acacggatttggaatgtcagatacaacagggttgccagtaaaaagctggacggttctttttttaaactggttagc

SEQ ID NO: 466642 - DNA, 75 bp, synthetic construct
  source 1..75: mol_type = other DNA
gcgtattgtggatattctagataagtttgatgcaatcgcagcttccatcaccgaaggtcttccgcgtgaaatcga

SEQ ID NO: 466643 - DNA, 75 bp, synthetic construct
  source 1..75: mol_type = other DNA
taatgtatattatgttaaattacctgtgaagatcctttacttcaccattcacatccacacacagataaatcaata

SEQ ID NO: 466644 - DNA, 75 bp, synthetic construct
  source 1..75: mol_type = other DNA
atctatttcaggttcagttatgaataacggattgaactggagtgtttcaaacgattggagtggttctgagttaca

SEQ ID NO: 466645 - DNA, 75 bp, synthetic construct
  source 1..75: mol_type = other DNA
gctcttacgccgtgtttaaattatgcgagtgtccagtaagatataattgccaatgtgaatttaatgaaattggtg

SEQ ID NO: 466646 - DNA, 75 bp, synthetic construct
  source 1..75: mol_type = other DNA
tgatagatggcgcaggcatccctatgtccggatgccacataattctgaaatcccgggtaaacacctcagaagtgg

SEQ ID NO: 466647 - DNA, 75 bp, synthetic construct
  source 1..75: mol_type = other DNA
aactccctacaaatctgtatgtaggggcactaatggggagtgaaagacaaatattagcgaatggattgcaaattg

SEQ ID NO: 466648 - DNA, 75 bp, synthetic construct
  source 1..75: mol_type = other DNA
gttttatgcctctctaaaaatagatatctctaaaactttggctgagagagagagttatctatataatttgattga

SEQ ID NO: 466649 - DNA, 75 bp, synthetic construct
  source 1..75: mol_type = other DNA
catcaatggtgaagctggcgcatgggcacgtatcatgagcggaaccggctctgccggtggtggtttcagtgacaa

SEQ ID NO: 466650 - DNA, 75 bp, synthetic construct
  source 1..75: mol_type = other DNA
tgtttatgggcggcccgttactgggttacctgttgttgagtctggctggcgtcgatggctgggcgatgcgtctgc

SEQ ID NO: 466651 - DNA, 75 bp, synthetic construct
  source 1..75: mol_type = other DNA
tagcgcaccgcgaaatggtcaaacggttgaaatgcacctccagatgatcaaatacgccgaccacctgaaaaacgt

SEQ ID NO: 466652 - DNA, 75 bp, synthetic construct
  source 1..75: mol_type = other DNA
attattctttcatggagacgctaattctagcagtacataaactggtcatcaaagatgttgtccagtacactgata

SEQ ID NO: 466653 - DNA, 75 bp, synthetic construct
  source 1..75: mol_type = other DNA
tatgcgttcaacttctactgcttccgataaactggttgtaaataacaaattggaaggtacaaacaataatcttat

SEQ ID NO: 466654 - DNA, 75 bp, synthetic construct
  source 1..75: mol_type = other DNA
tcatgtcactgatgacacctggattgagccgcaggcggaacttgtttatggggccgtatccggtaaacagttctc

SEQ ID NO: 466655 - DNA, 75 bp, synthetic construct
  source 1..75: mol_type = other DNA
gcgagaggaggtttttttatgctctcgtcaacgccaccacttgcgcagcattcgctttttattatcgaaactaag

SEQ ID NO: 466656 - DNA, 75 bp, synthetic construct
  source 1..75: mol_type = other DNA
tacggagatctagtcgagttttctgagcatccttggaaaaattacgctgaccaatttcaatgggggttagataac

SEQ ID NO: 466657 - DNA, 75 bp, synthetic construct
  source 1..75: mol_type = other DNA
cactaaatcttttacggatttggcggaacgggcaaggccgtatagaacaaagatggatggatgaacatatagttg

SEQ ID NO: 466658 - DNA, 75 bp, synthetic construct
  source 1..75: mol_type = other DNA
ggcgtttacccgggcaacccgtgaattactggtgacctgttaccgtgaaaacagtatcagtcgtcaccttgagga

SEQ ID NO: 466659 - DNA, 75 bp, synthetic construct
  source 1..75: mol_type = other DNA
gctgcccgccaaatgagcgtgctgggggagatgacctccggttttgcccatgaactcaatcagccgttgtctgct

SEQ ID NO: 466660 - DNA, 75 bp, synthetic construct
  source 1..75: mol_type = other DNA
ggaggggacattcagcgagtccacgggggccagtcaggattcggcacgctggggggtgggcaagccgttatatca

SEQ ID NO: 466661 - DNA, 75 bp, synthetic construct
  source 1..75: mol_type = other DNA
atggatttaaaaaataaatattttggtaagacaaaagaagaagcagctaagaaaaaaattgatataaagaaagaa

SEQ ID NO: 466662 - DNA, 75 bp, synthetic construct
  source 1..75: mol_type = other DNA
actaaacccacgctatccactgatccccatcaatggggattgcgaaattattggtgttgtcgttgagatgcgtat

SEQ ID NO: 466663 - DNA, 75 bp, synthetic construct
  source 1..75: mol_type = other DNA
agaagccccacaatggtaggcttagagcttacattgctggattatttgatgcagacagaaacaagaggtgggttg

SEQ ID NO: 466664 - DNA, 75 bp, synthetic construct
  source 1..75: mol_type = other DNA
gcgtagtgcgctggggcattatgggagcaactacggcgttgccgtggttgatagtggtgcaaattctgcattgcg

SEQ ID NO: 466665 - DNA, 75 bp, synthetic construct
  source 1..75: mol_type = other DNA
aacatgtattgctcaccagatagcggaaaccggttcggcaaccttgctggtggaaagcgataagtatatggcccg

SEQ ID NO: 466666 - DNA, 75 bp, synthetic construct
  source 1..75: mol_type = other DNA
acacttgccagcgccgcaaatatcgccgtggcgttactgaatgatcaaccacttccgactatcgagaccgaaatt

SEQ ID NO: 466667 - DNA, 75 bp, synthetic construct
  source 1..75: mol_type = other DNA
ttgcccgagaacgtcagcgcatcgtaatgggacctgactgtggaaccgccattgttaacggcattccgttaggct

SEQ ID NO: 466668 - DNA, 75 bp, synthetic construct
  source 1..75: mol_type = other DNA
tacaatagtattatgaacgcaatggaaaaaagggggattctgatgaaatacacaggattttatgcagctaatgct

SEQ ID NO: 466669 - DNA, 75 bp, synthetic construct
  source 1..75: mol_type = other DNA
gtccctgaaatctggccgacagaggccaaactccgtggctccggtctggcgaatgcggtagggcgaatcagtggt

SEQ ID NO: 466670 - DNA, 75 bp, synthetic construct
  source 1..75: mol_type = other DNA
gcaaagcaaacctatcaggaagcggaaacaaaatataatcttgcgaagtttgttattaactatgagtcatacgac

SEQ ID NO: 466671 - DNA, 75 bp, synthetic construct
  source 1..75: mol_type = other DNA
aagtcgcgcccgacgagctgcgttaggcagtttcgctggtgccgtcgtcgactggtatgatttttttactctatg

SEQ ID NO: 466672 - DNA, 75 bp, synthetic construct
  source 1..75: mol_type = other DNA
taatcattccatacttaattgtgttgttccttttgctgctcattagaaaagtcgagcctcgaaggatagaaaata

SEQ ID NO: 466673 - DNA, 75 bp, synthetic construct
  source 1..75: mol_type = other DNA
cttattgcttcaaattatctacaataaaacatccagcaatattaaatattgtctgttacaggcgtgttttatgaa

SEQ ID NO: 466674 - DNA, 75 bp, synthetic construct
  source 1..75: mol_type = other DNA
attagatataaggagttggatgcactcatttctgatataagcagtgatcgtgaaaaattaaacgtattatctaaa

SEQ ID NO: 466675 - DNA, 75 bp, synthetic construct
  source 1..75: mol_type = other DNA
ataaaaaaaaccaccctcgaaacataataactattattggcagtaatggtaacgggaaaagtaggacgttaagta

SEQ ID NO: 466676 - DNA, 75 bp, synthetic construct
  source 1..75: mol_type = other DNA
acaagcaccgaggtcggactgaaaacagtttcagcctctctggcagataaacctactgaagtcatctcgcgatta

SEQ ID NO: 466677 - DNA, 75 bp, synthetic construct
  source 1..75: mol_type = other DNA
tattatcagttgaataatgacaactttgccccaggaaaaacggcggctgattatgagttttcaagctctgcctcc

SEQ ID NO: 466678 - DNA, 75 bp, synthetic construct
  source 1..75: mol_type = other DNA
cgcactcgtattgtgtttaacgctaatgataaagctaccagtctgcgcgtggataatcgtagcgataaactcccc

SEQ ID NO: 466679 - DNA, 75 bp, synthetic construct
  source 1..75: mol_type = other DNA
agaataaaccacctaatggtttttatcctagaaataaggtgtgcaaggaatgcactaaaaaacgagtaactgaat

SEQ ID NO: 466680 - DNA, 75 bp, synthetic construct
  source 1..75: mol_type = other DNA
cttttgaagaaattgagggcttatatagagattctttttcaattgaaatgctttcacttataagaggcatgatga

SEQ ID NO: 466681 - DNA, 75 bp, synthetic construct
  source 1..75: mol_type = other DNA
taagggcactgttttgggtgttcatacagccgaagccatactgcttaacggtaaaagcgatacgaaaatcgtcaa

SEQ ID NO: 466682 - DNA, 75 bp, synthetic construct
  source 1..75: mol_type = other DNA
gcatggctacgaagaagagaactggagaagaaataaatgaccgacaaatcttatgcgggatgggtattaaactac

SEQ ID NO: 466683 - DNA, 75 bp, synthetic construct
  source 1..75: mol_type = other DNA
agccttgcaggcagccgttatgatctggtggatcgcaacaacaacatcgttctggaatatcgcaaaaaagaactg

SEQ ID NO: 466684 - DNA, 75 bp, synthetic construct
  source 1..75: mol_type = other DNA
tgacctaccgacaactacattcccttcgcaggggttcaccggggcgtattatcagttgaataatgacaactttgc

SEQ ID NO: 466685 - DNA, 75 bp, synthetic construct
  source 1..75: mol_type = other DNA
gtcaacggcattttgtggctgtcgctgatggttatctttttaaaagataaacagatgggaaattcgcacgaaggg

SEQ ID NO: 466686 - DNA, 75 bp, synthetic construct
  source 1..75: mol_type = other DNA
gcagagccgatattctcggatgagcaggaagggccggatgatactgatgcgttgctggcaatgatgggtttcgct

SEQ ID NO: 466687 - DNA, 75 bp, synthetic construct
  source 1..75: mol_type = other DNA
agttcaatccggatgctcctgatgagcgttgggtaacggacataacctacagtgtgcccggagttcagggcgggc

SEQ ID NO: 466688 - DNA, 75 bp, synthetic construct
  source 1..75: mol_type = other DNA
caagtgctgatgcaattaggaaaaaagcatgggtgccaacattgcgaaaagcaggtattcgttacagaaacccat

SEQ ID NO: 466689 - DNA, 75 bp, synthetic construct
  source 1..75: mol_type = other DNA
atttttaaataaaattaacgagttacggaataaagcacccaaaaacgaagagactaaacacgaagaacacacgcc

SEQ ID NO: 466690 - DNA, 75 bp, synthetic construct
  source 1..75: mol_type = other DNA
ggctatataccaggatcggcagaaagggagtgtaacgagtatcagctattgttcaggccgtacaacatgaaataa

SEQ ID NO: 466691 - DNA, 75 bp, synthetic construct
  source 1..75: mol_type = other DNA
actttgtgcgaatgctggatcgctacatagttgagtggagggagattttggagcagaaatcgagcagtgaaaccg

SEQ ID NO: 466692 - DNA, 75 bp, synthetic construct
  source 1..75: mol_type = other DNA
ctgaatcctgaaagtccagattcgtttgcgcatttcgagcctgttaaatttagaaacttcgcggcggtgtctctg

SEQ ID NO: 466693 - DNA, 75 bp, synthetic construct
  source 1..75: mol_type = other DNA
tctaccatcgaatgatagccagtatgactcgatacaagagtctagaaagcgaatcatcgcgtggattgagaaagg

SEQ ID NO: 466694 - DNA, 75 bp, synthetic construct
  source 1..75: mol_type = other DNA
aactggcacgaattgctctggcagcgctggaagccgagccgataggtttccgttgcaggcgcaatgataaccttg

SEQ ID NO: 466695 - DNA, 75 bp, synthetic construct
  source 1..75: mol_type = other DNA
gtgccgtacatgcaagccaggcttacaagttgccacaaacgcagtttaaacaggttgctgacctctacgaaatgc

SEQ ID NO: 466696 - DNA, 75 bp, synthetic construct
  source 1..75: mol_type = other DNA
ggtgaggagttcttcgaaacgcagagccgcaatgtaacccactggatgccgctaccagaaccgccgcaggaggcg

SEQ ID NO: 466697 - DNA, 75 bp, synthetic construct
  source 1..75: mol_type = other DNA
tgatccctgaaaactgtcagcgctgcgaggacgaagaaagtattacggctaaagccgtaatacctccccatccag

SEQ ID NO: 466698 - DNA, 75 bp, synthetic construct
  source 1..75: mol_type = other DNA
tagattcagaagaacatgtatcaaccagcaaagcggttgttgatgcctgggttgaagaatggaatcaggttgaca

SEQ ID NO: 466699 - DNA, 75 bp, synthetic construct
  source 1..75: mol_type = other DNA
ccagtgatgcaaagtatggtggtaatatttatgagagcaatatcaataaggcattgcagaattttaacatcacta

SEQ ID NO: 466700 - DNA, 75 bp, synthetic construct
  source 1..75: mol_type = other DNA
ccgactctcggcatcggtgatatgaacaatctctataaatggctgttgaatcttaactcggtgatgcttccaatt

SEQ ID NO: 466701 - DNA, 75 bp, synthetic construct
  source 1..75: mol_type = other DNA
aggcgacggttcgctaatcaaagaatattcagtcgtagcgttacaggggttaacgctggtgctgtttatcttctt

SEQ ID NO: 466702 - DNA, 75 bp, synthetic construct
  source 1..75: mol_type = other DNA
tatcagttgaataatgacaactttgcaccaggaaaaacggcggctgattatgcgttttcaagcactgcctcctgg

SEQ ID NO: 466703 - DNA, 75 bp, synthetic construct
  source 1..75: mol_type = other DNA
atggatacaacaagtttaattagctcaatttctgtaccaagattatctttctatgaaacatttcttgggtgcgct

SEQ ID NO: 466704 - DNA, 75 bp, synthetic construct
  source 1..75: mol_type = other DNA
gaatgttgtccgttatgtactgatagttgctgtgcggtcgcaggttgatctgctgcagcttctgtacaggaaagg

SEQ ID NO: 466705 - DNA, 75 bp, synthetic construct
  source 1..75: mol_type = other DNA
ctggtacgcccgttaatggctattttctgaccctggtgctggtggcaattctgattatgctgccgactctcggca

SEQ ID NO: 466706 - DNA, 75 bp, synthetic construct
  source 1..75: mol_type = other DNA
gggcgcaaccatgactgcaagcgtcactgacgctaacggcaacccggtagaaggcataaaagttaatttccgcgg

SEQ ID NO: 466707 - DNA, 75 bp, synthetic construct
  source 1..75: mol_type = other DNA
acggcaatttttacgcaagctttaccgctacaaaagccggggtttatcaagtgacggcaaccctcgaaaatggcg

SEQ ID NO: 466708 - DNA, 75 bp, synthetic construct
  source 1..75: mol_type = other DNA
ggtggtgaactttactgcggatacgctcactgcgcaggttaatcttaacgttaccgaggacaactttatcgccaa

SEQ ID NO: 466709 - DNA, 75 bp, synthetic construct
  source 1..75: mol_type = other DNA
tactggtgccagcgacaacaaaactgtgcattttattggcgacacagcggcggcaaaaattatcgagttgacgcc

SEQ ID NO: 466710 - DNA, 75 bp, synthetic construct
  source 1..75: mol_type = other DNA
gtgaaagatccttttgataacgtagtaatagatctaccggtcacctttagtactaacccggctgatacacaactt

SEQ ID NO: 466711 - DNA, 75 bp, synthetic construct
  source 1..75: mol_type = other DNA
aatcggcccaaagcgttgccgaacgtttcggtatttcggtggctgagttacgcaaactcaaccagtttcgtacgt

SEQ ID NO: 466712 - DNA, 75 bp, synthetic construct
  source 1..75: mol_type = other DNA
aagggatggaaacggctgccattaattacatggtagcttccgttaaacatatacatcaggaacacccatgccaac

SEQ ID NO: 466713 - DNA, 75 bp, synthetic construct
  source 1..75: mol_type = other DNA
ggcggttcacaccgataactatggtgaagacagttacaacgaaggcttatcattgaaacgggcgaatgtcgtggc

SEQ ID NO: 466714 - DNA, 75 bp, synthetic construct
  source 1..75: mol_type = other DNA
ttgttaaagcaattctttatattattttattttattttttttttttttttttttttttttttttttgcattggcg

SEQ ID NO: 466715 - DNA, 75 bp, synthetic construct
  source 1..75: mol_type = other DNA
gagatatcatatctttattatcagattggggagagatgctattccttctcatactgtattgtctcggcagtatga

SEQ ID NO: 466716 - DNA, 75 bp, synthetic construct
  source 1..75: mol_type = other DNA
gaaatcatgatagctacagaagctgcagctgaaggggtgaacctgcaattttgttcgctactgatcaattacgat

SEQ ID NO: 466717 - DNA, 75 bp, synthetic construct
  source 1..75: mol_type = other DNA
attgtgcgcgttgcgctggacggatatagacttcatcggcaacaccgcgcatgttcaaactgcaagcgtagtcgg

SEQ ID NO: 466718 - DNA, 75 bp, synthetic construct
  source 1..75: mol_type = other DNA
gccgcagattatgcggaatatgtggcagaggcgcgttacagaagaaaatttcctgaggatgtaagccatgcgtga

SEQ ID NO: 466719 - DNA, 75 bp, synthetic construct
  source 1..75: mol_type = other DNA
atggccaataaaactgaaaagccaacacaaaagaaactccaggatgcttctaaaaaagggcaaattctaaaaagt

SEQ ID NO: 466720 - DNA, 75 bp, synthetic construct
  source 1..75: mol_type = other DNA
ctcaaacaactaggtcaactggcgttacctgctttgctgcaagaagttaaaaatgcagacaaagcatggaatgcc

SEQ ID NO: 466721 - DNA, 75 bp, synthetic construct
  source 1..75: mol_type = other DNA
ttccgaaagcagccaaaaaagcacgactacaactcttacgtgaaggggtagtggagaaaaactttatcgccatag

SEQ ID NO: 466722 - DNA, 75 bp, synthetic construct
  source 1..75: mol_type = other DNA
ttgttaaagcaattctttatattattttatttttttttttttttttttttttttttttttgcattggcgatcaaa

SEQ ID NO: 466723 - DNA, 75 bp, synthetic construct
  source 1..75: mol_type = other DNA
aaatggataaacaagaagttaaaagagaatacaaggagcaagaaggaaatccagaaattaagtctaaacgcagag

SEQ ID NO: 466724 - DNA, 75 bp, synthetic construct
  source 1..75: mol_type = other DNA
ttaaaaaccgtaaaagaatttgttaaagcaattctttatattattttattttatttttttttttttttttttttt

SEQ ID NO: 466725 - DNA, 75 bp, synthetic construct
  source 1..75: mol_type = other DNA
cgctgaaaggtaaaaaagcgggcacgcatacggttaccgcaacgctgggtaataacaataccagtgattcgcagc

SEQ ID NO: 466726 - DNA, 75 bp, synthetic construct
  source 1..75: mol_type = other DNA
atcaaaccaggcatacattcgccaccagccatatcagccggggagcaaacctgttttggcttgcggctcaaatgg

SEQ ID NO: 466727 - DNA, 75 bp, synthetic construct
  source 1..75: mol_type = other DNA
ttgaaaattccgatttttccatcggtcgtaatgccaatgtaatgggagacattcaggctagcaagtcagacatta

SEQ ID NO: 466728 - DNA, 75 bp, synthetic construct
  source 1..75: mol_type = other DNA
catgcaaaatacagaagcagatgctgtaaaacaaagcgggtatacttataaaaccagcaatgaagtctcggattt

SEQ ID NO: 466729 - DNA, 75 bp, synthetic construct
  source 1..75: mol_type = other DNA
aaaggtattgatatctccggtgagctgactatgatgggaatccctgaacagaatagtaaaactgtaacgccgggt

SEQ ID NO: 466730 - DNA, 75 bp, synthetic construct
  source 1..75: mol_type = other DNA
aaaatgccgtagtgcgttagcctcacttcacatttgccctgcaagtgaattaacaccagcaaccctgaaagcgtg

SEQ ID NO: 466731 - DNA, 75 bp, synthetic construct
  source 1..75: mol_type = other DNA
caggttcagcttctggtggatacagtgacaactacacccatgtgcagattggtgtggataaaaaacatgagctgg

SEQ ID NO: 466732 - DNA, 75 bp, synthetic construct
  source 1..75: mol_type = other DNA
acagccatattacaggagggctaatcgctgtttctgaattatccggcagagtatcatccagagcatcgggtaaga

SEQ ID NO: 466733 - DNA, 75 bp, synthetic construct
  source 1..75: mol_type = other DNA
ctttttgattttagctaccggctggagtgctataccccagcgccgaaacgccagtatggctattttgttctgcca

SEQ ID NO: 466734 - DNA, 75 bp, synthetic construct
  source 1..75: mol_type = other DNA
atatgatttttggctgttttgaagaattcgggcgcgatgaggggttaaggcgtttgcgggatattctgctgacct

SEQ ID NO: 466735 - DNA, 75 bp, synthetic construct
  source 1..75: mol_type = other DNA
ctggcatacatcacaccccgacttcgcagtatcccgacttgacaaatttgttgttgagaccagaggagtgactga

SEQ ID NO: 466736 - DNA, 75 bp, synthetic construct
  source 1..75: mol_type = other DNA
aggccagtaaatcaaacattactattggtgacactacagcatatattgatttgcatgctggtaaaaatattaccg

SEQ ID NO: 466737 - DNA, 75 bp, synthetic construct
  source 1..75: mol_type = other DNA
gggggatttataattacgccaatggcaaaaaccacgcagcatacagtaaatggaaccagacaaccattgacaacc

SEQ ID NO: 466738 - DNA, 75 bp, synthetic construct
  source 1..75: mol_type = other DNA
gattcaaagccagaaaacgaccttaaaaacaattcgcaaccagttatctttcctgcggtcagcacttgatgaagc

SEQ ID NO: 466739 - DNA, 75 bp, synthetic construct
  source 1..75: mol_type = other DNA
tcgttctgcaaacatcgaaagcggaaatcattgggaatggcgtggatgagacaactctgacagcaacagtgaaag

SEQ ID NO: 466740 - DNA, 75 bp, synthetic construct
  source 1..75: mol_type = other DNA
aagagtgagcagttggtggtgaactttattgcggatacgctcactgcgcaggttaatcttaacgttaccgaggac

SEQ ID NO: 466741 - DNA, 75 bp, synthetic construct
  source 1..75: mol_type = other DNA
ttttacgcaagctttaccgctacaaaagccggggtttatcaagtgacggcaaccctcgaaaatggcgattcgatg

SEQ ID NO: 466742 - DNA, 75 bp, synthetic construct
  source 1..75: mol_type = other DNA
gctggatttatcatcgacgccaacccgcagtcagcgaaaattgcgacattatctgccagcaataatggtgtgctc

SEQ ID NO: 466743 - DNA, 75 bp, synthetic construct
  source 1..75: mol_type = other DNA
ttgcacttggtcttttaggtggctttgatgtctcatatcgcggttcagtcaatgccccgtcagcatctgccacta

SEQ ID NO: 466744 - DNA, 75 bp, synthetic construct
  source 1..75: mol_type = other DNA
cggcagcttcattcccttcgcagggatttaccggggcatattatcagttgaataatgacaactttgcaccaggaa

SEQ ID NO: 466745 - DNA, 75 bp, synthetic construct
  source 1..75: mol_type = other DNA
tgctagctttatcgctgatccatcgactatcgccgccaccaacagtgatttaagtaccttaaaggcaacggttga

SEQ ID NO: 466746 - DNA, 75 bp, synthetic construct
  source 1..75: mol_type = other DNA
ccgatcattacaacccgggaaaccgatgacaaaataacatggtcactgacaggctataacacggttgcaaacaag

SEQ ID NO: 466747 - DNA, 75 bp, synthetic construct
  source 1..75: mol_type = other DNA
cagcacgtacaaacaaactgactggaatacttcacatcctgattttgcagtatcccgacttgacaagtttgttgt

SEQ ID NO: 466748 - DNA, 75 bp, synthetic construct
  source 1..75: mol_type = other DNA
cttaacgttaccgaggacaactttatcgctaataacgtcgggatgaccaggctgcaggcaacagtgactgatgga

SEQ ID NO: 466749 - DNA, 75 bp, synthetic construct
  source 1..75: mol_type = other DNA
tggtcgaaggggtcaatgtaaacttcgtcttaaaaagcggctctgccacattgacgtcattaacagcggtgaccg

SEQ ID NO: 466750 - DNA, 75 bp, synthetic construct
  source 1..75: mol_type = other DNA
aaggtctcactgtgtacttcgccttaaaaagcggctctgccacattaacgtcattaacagcggtgacagatcaaa

SEQ ID NO: 466751 - DNA, 75 bp, synthetic construct
  source 1..75: mol_type = other DNA
attgtaaaaggattggagctcaattaacttacagtgatgatgtgtctgtttctgatatatttcagaatatcaata

SEQ ID NO: 466752 - DNA, 75 bp, synthetic construct
  source 1..75: mol_type = other DNA
gttagcatttttacaaaacttaattaaacgtcataaagatgcgatattctttattgccacacacgatcagaggct

SEQ ID NO: 466753 - DNA, 75 bp, synthetic construct
  source 1..75: mol_type = other DNA
gatgccgcgtctttaaatctctctgcgggagaaagacagaagcttatgatagctatgattctggagaagaaacca

SEQ ID NO: 466754 - DNA, 75 bp, synthetic construct
  source 1..75: mol_type = other DNA
gtgggcaagaaagaacaaggatcattatctctcccaagaggagtgaccattcgccagcataaaactggcgatacc

SEQ ID NO: 466755 - DNA, 75 bp, synthetic construct
  source 1..75: mol_type = other DNA
ttaaatcacatgggtactggcagtgataagtcggatgcgctcggcgtgccctattataatcaacacgctatgtag

SEQ ID NO: 466756 - DNA, 75 bp, synthetic construct
  source 1..75: mol_type = other DNA
atgttgcgtgacagaaaacttaattctgcaatcatagatatggcaccagagttgaaaggaatcgtcagatatggt

SEQ ID NO: 466757 - DNA, 75 bp, synthetic construct
  source 1..75: mol_type = other DNA
ttatggcttgcatggtctccacacctgcgctggcatggagcaatggagattttaatggctcagttgatatcggcg

SEQ ID NO: 466758 - DNA, 75 bp, synthetic construct
  source 1..75: mol_type = other DNA
ggaacaaaagtactgtttcatcaaaaaatagcgtggccctcgggagtaattctgtagcaagtgaggataacaccg

SEQ ID NO: 466759 - DNA, 75 bp, synthetic construct
  source 1..75: mol_type = other DNA
acaacattaaccatcaatggcagaattagttcccctacatgcagtatggatgttgttaataatcatcttcagcaa

SEQ ID NO: 466760 - DNA, 75 bp, synthetic construct
  source 1..75: mol_type = other DNA
gaattatatttcgcattaatgaatgtattgcagatgttccccctgaaaaaatggttgatgactggacaaggtaat

SEQ ID NO: 466761 - DNA, 75 bp, synthetic construct
  source 1..75: mol_type = other DNA
accggtaaaaggcgtcacgacagagttggttgctgcgggtaatgggaacaaacggcaaatcgttttaaatcgcta

SEQ ID NO: 466762 - DNA, 75 bp, synthetic construct
  source 1..75: mol_type = other DNA
gttctgaatgcgtggatgaatggctgatttatcgtgatccgaacggagatatctcagatggcaatataccggagc

SEQ ID NO: 466763 - DNA, 75 bp, synthetic construct
  source 1..75: mol_type = other DNA
aagtgcaggcaaacgcaaaattgcctgatgcgctacgcttatcaggcctacaaaactcatgcaatgtattgaatt

SEQ ID NO: 466764 - DNA, 75 bp, synthetic construct
  source 1..75: mol_type = other DNA
gtgccgtgtggaaatccgcccaccttgccgggcgccggtgctgtgtggaaatccgcccaccctttccgggcgccg

SEQ ID NO: 466765 - DNA, 75 bp, synthetic construct
  source 1..75: mol_type = other DNA
aatcactgaaagcatgatgatggaacacgatacggagatctttaaacgcatccagatcctgcgggatatgggcgt

SEQ ID NO: 466766 - DNA, 75 bp, synthetic construct
  source 1..75: mol_type = other DNA
ggtatctccagcgaatggtggcacttcgaattaccccaggcagcgagttaccctctgctcgctgatcaattctct

SEQ ID NO: 466767 - DNA, 75 bp, synthetic construct
  source 1..75: mol_type = other DNA
cgccggtgccgtgtgggaatcagcccaccttaccgggcgccggtgccgtgtggaaatccgcccaccttgccgggc

SEQ ID NO: 466768 - DNA, 75 bp, synthetic construct
  source 1..75: mol_type = other DNA
aatccgcccaccttgccgggcgccggtgctgtgtggaaatcggcccaccttgccgcgcgccggtgctgtgtggaa

SEQ ID NO: 466769 - DNA, 75 bp, synthetic construct
  source 1..75: mol_type = other DNA
atttatgtcagacgggattttgcttatcaattattgagaacagaaattttcctgaatcatcaatactatacttag

SEQ ID NO: 466770 - DNA, 75 bp, synthetic construct
  source 1..75: mol_type = other DNA
atctggacccgttttgcgctatcgaaagtgagcgccgaggggaaagtttattacctggcgctggtacgggatgcc

SEQ ID NO: 466771 - DNA, 75 bp, synthetic construct
  source 1..75: mol_type = other DNA
gcccaccttgccgggcgccgctgccgcgtgggaatcggcccaccttgccgcgcgccggtgctgtgtgggaatcag

SEQ ID NO: 466772 - DNA, 75 bp, synthetic construct
  source 1..75: mol_type = other DNA
caacaagcacttgtcagcaatttgagaacacgggaaaaaatttatctgttttaccgcccataagccaccgagacg

SEQ ID NO: 466773 - DNA, 75 bp, synthetic construct
  source 1..75: mol_type = other DNA
atgaccggtctgccaaatcgcaataacctgcacaattacctcgatgacctggtcgacaaagccgtctctccggtg

SEQ ID NO: 466774 - DNA, 75 bp, synthetic construct
  source 1..75: mol_type = other DNA
gcaacatcctcgccgccatgtgcagcagcccgccgtttcacgaaatgggggaaatcatttgccgtaatattgaag

SEQ ID NO: 466775 - DNA, 75 bp, synthetic construct
  source 1..75: mol_type = other DNA
atcggtagatgattttggtacgggcttttccggattatcccgcttagtcagtcttccggtaacggaaatcaaaat

SEQ ID NO: 466776 - DNA, 75 bp, synthetic construct
  source 1..75: mol_type = other DNA
tattgataacaaaattagtgagtcatcactcttgccatcgttatatttctctgtaggtttaactcctaaaaatgg

SEQ ID NO: 466777 - DNA, 75 bp, synthetic construct
  source 1..75: mol_type = other DNA
cgatcagatccagcgtcagtttatccagcagtcgaaaatttcctcgccggaaaaaatccgcaatatggtcagtgt

SEQ ID NO: 466778 - DNA, 75 bp, synthetic construct
  source 1..75: mol_type = other DNA
gtgtatgatcatcatgatctgaccaaaacatttaaaacactgttaccggaagtcaaacgggcgctgcataccgta

SEQ ID NO: 466779 - DNA, 75 bp, synthetic construct
  source 1..75: mol_type = other DNA
gcgtaaccgttgcccgtccggttgtgtcgctgtattcgccgcccgtattcgtcagggggtgcgccatgtgcaata

SEQ ID NO: 466780 - DNA, 75 bp, synthetic construct
  source 1..75: mol_type = other DNA
tcatgacagtattgatataaatgacactattgacttcttcttttttcagaataagtactatgcgctaaacattaa

SEQ ID NO: 466781 - DNA, 75 bp, synthetic construct
  source 1..75: mol_type = other DNA
agcaagaaccgtattagacggggagtgtgttattcagtcggcagtgctacgcgccaggggagcagttcgccgacc

SEQ ID NO: 466782 - DNA, 75 bp, synthetic construct
  source 1..75: mol_type = other DNA
cttgcagtctcctcgttggtattcagttctgcgtcgtttgccgctgatcttgaagacaatagtaagcgtgcagca

SEQ ID NO: 466783 - DNA, 75 bp, synthetic construct
  source 1..75: mol_type = other DNA
gtcttggcaagggattgcctggcgtctttaaaacccagtgcgccattgcccgcccggaagaccgcgccaccctga

SEQ ID NO: 466784 - DNA, 75 bp, synthetic construct
  source 1..75: mol_type = other DNA
ggagcctacctggcgcgttatccgaactaccgctacctgtttggcccggtctccatttccggtggcttaccgcct

SEQ ID NO: 466785 - DNA, 75 bp, synthetic construct
  source 1..75: mol_type = other DNA
ttccaaattcatttatcacttcttccttaccaagtattttttcggaaaaagataattcgaaagcaattgttaaag

SEQ ID NO: 466786 - DNA, 75 bp, synthetic construct
  source 1..75: mol_type = other DNA
gcgtagccgttgcccgtccggttgtgttgctgtattcgctgcaaaaatccgccagggagaaacctatgcacaata

SEQ ID NO: 466787 - DNA, 75 bp, synthetic construct
  source 1..75: mol_type = other DNA
atgacaagccgcagccgtcaggttgcctactctgaacatatttgcgcattcctgcgtgagcttgttaagcattct

SEQ ID NO: 466788 - DNA, 75 bp, synthetic construct
  source 1..75: mol_type = other DNA
cctactcgataaaacattctttatgttttaattttttatcctcacagatattgagtaattatatttataatgata

SEQ ID NO: 466789 - DNA, 75 bp, synthetic construct
  source 1..75: mol_type = other DNA
ataactcaacgccattaataataaaccttggaattgttaatacacaaggtatgccagtgccactagatattttca

SEQ ID NO: 466790 - DNA, 75 bp, synthetic construct
  source 1..75: mol_type = other DNA
attgggtatgagggaactaaggcagatatatatggaaaacattcggtcaatggatttactgttggagttggttat

SEQ ID NO: 466791 - DNA, 75 bp, synthetic construct
  source 1..75: mol_type = other DNA
gtggagtcctggctattttgccagtagctgcggaggtgcgccaatatccgtcatccgccaatacattgaacaaca

SEQ ID NO: 466792 - DNA, 75 bp, synthetic construct
  source 1..75: mol_type = other DNA
atgatactttggtctgtgaaaaaagaaaccgatatccgtcgaggaaggcattgtgttttcctgaggcatgttcac

SEQ ID NO: 466793 - DNA, 75 bp, synthetic construct
  source 1..75: mol_type = other DNA
gtgcaccactggcgtggcaggtatggggcggtagctttcatatggatcgctggtcggaaaacgggaaaaaagacg

SEQ ID NO: 466794 - DNA, 75 bp, synthetic construct
  source 1..75: mol_type = other DNA
agcgatgaacaacgcaagcatacccgtttagcagcggagttagccgggttaaatgcggtaggtgatgctgccaac

SEQ ID NO: 466795 - DNA, 75 bp, synthetic construct
  source 1..75: mol_type = other DNA
gtagcgtctgtggacgccactgccactcaggtgggggtggatattctcaaggagggcgggaatgccgttgatgcc

SEQ ID NO: 466796 - DNA, 75 bp, synthetic construct
  source 1..75: mol_type = other DNA
cagagtgattgtggccgcacctacaatccgatctatcaggtggacaatggcagtactacatgccatatacgagag

SEQ ID NO: 466797 - DNA, 75 bp, synthetic construct
  source 1..75: mol_type = other DNA
aatcagggcgctgtagattcaatctgtcaatgcaacacccctttcaattatctctttcggtgttttgaacttcag

SEQ ID NO: 466798 - DNA, 75 bp, synthetic construct
  source 1..75: mol_type = other DNA
ttctgacgggtgcgtcaatcagcgccgccgctgacgatgtactttctgacgccgatgctgtttcctggcgtgcgc

SEQ ID NO: 466799 - DNA, 75 bp, synthetic construct
  source 1..75: mol_type = other DNA
atgatactttggtctttgaaaaaagaaaccgatatccgacgaggaaggcattgtgttttcctgaggcatgttcac

SEQ ID NO: 466800 - DNA, 75 bp, synthetic construct
  source 1..75: mol_type = other DNA
atgatactttggtctatgaaaaaagaaaccgatatccgccgtggaaggcattgtgttttcctgaggcatgttcac

SEQ ID NO: 466801 - DNA, 75 bp, synthetic construct
  source 1..75: mol_type = other DNA
acttacttttcaaatgtatgtgctgattttgaagctgaactggttgaaatggatggcgaaccagatcacgtccat

SEQ ID NO: 466802 - DNA, 75 bp, synthetic construct
  source 1..75: mol_type = other DNA
gtgagactgcttactttttgagagccaagctgggcgacgtcagggcatgggatgatttattagcggatatgcgac

SEQ ID NO: 466803 - DNA, 75 bp, synthetic construct
  source 1..75: mol_type = other DNA
caagctgggcgatgtcagggcatgggatgatttattagcggatatgcggcgcgggagggctagctatcacgctga

SEQ ID NO: 466804 - DNA, 75 bp, synthetic construct
  source 1..75: mol_type = other DNA
cctgccacacggtacggcggttaacgtaccggaacaggctcccgccaccgcacgtcaacgaatcaacctgtggga

SEQ ID NO: 466805 - DNA, 75 bp, synthetic construct
  source 1..75: mol_type = other DNA
taaaactaactcttttgataatacagcaatatcgttagtaactaattctatcgacgatatgatcaatagcattta

SEQ ID NO: 466806 - DNA, 75 bp, synthetic construct
  source 1..75: mol_type = other DNA
ttgtaagtgaaacactaaatactaaattaaatgaaaaacaaaaaaacaagctccctatttttttgaatacatatc

SEQ ID NO: 466807 - DNA, 75 bp, synthetic construct
  source 1..75: mol_type = other DNA
gcccattgaagctaaacgacatcctgatactacgataactgaaactatcaaaatccctaccaagaaagctaagaa

SEQ ID NO: 466808 - DNA, 75 bp, synthetic construct
  source 1..75: mol_type = other DNA
tgacggcgaaaatccaggagctgaccgacaaactcaaaaagcctgacagcgagaaaaaaacggcggacagcgata

SEQ ID NO: 466809 - DNA, 75 bp, synthetic construct
  source 1..75: mol_type = other DNA
tatcactatgctcttctaaaaacaatagaagataaatcgacaagtcctatgcttccagtagtaattgactcgcct

SEQ ID NO: 466810 - DNA, 75 bp, synthetic construct
  source 1..75: mol_type = other DNA
tacagtgtaggggccaaaatatttctactgctctgggctgcaggagtgggaggcacgctgtacagcctgtactga

SEQ ID NO: 466811 - DNA, 75 bp, synthetic construct
  source 1..75: mol_type = other DNA
caaacatgccagccgaaaacatgaatcaggggcgccttttttgcgggtcctcctggtggggtgggtatgaacacg

SEQ ID NO: 466812 - DNA, 75 bp, synthetic construct
  source 1..75: mol_type = other DNA
caggatctgtctgttgcgcactcctgcacctcagagttgctggcacacctgaagcagtatcatgaaatagatgaa

SEQ ID NO: 466813 - DNA, 75 bp, synthetic construct
  source 1..75: mol_type = other DNA
tatgaagagaagggccgtaaggtgcgctacgacttcaccctgccgggtggcgtcagtgacaacggcggactggac

SEQ ID NO: 466814 - DNA, 75 bp, synthetic construct
  source 1..75: mol_type = other DNA
caattttataaaagaacccctaaaaaatatcatacacataatcatagggcaatataaattctggaatgactctcg

SEQ ID NO: 466815 - DNA, 75 bp, synthetic construct
  source 1..75: mol_type = other DNA
aggtgccatgcagggtgggtatatcgatgttttgatcactgatttccccaccgccagaatgctgattgcggatta

SEQ ID NO: 466816 - DNA, 75 bp, synthetic construct
  source 1..75: mol_type = other DNA
ccgaatgtggtggcactggcgggcggcaaagacaaagttgccgccatcaaaggcgccatgcagggtggttatatt

SEQ ID NO: 466817 - DNA, 75 bp, synthetic construct
  source 1..75: mol_type = other DNA
gggcaaaaaagaagttatcgacaacgaccgcgaagactggaagcgtgaggtgtactggcaatagcggacactacc

SEQ ID NO: 466818 - DNA, 75 bp, synthetic construct
  source 1..75: mol_type = other DNA
tcaacttctttttcgaccacgaccttagccgttatcactcccgcgtcggcattggcgcggagtactggcgcgact

SEQ ID NO: 466819 - DNA, 75 bp, synthetic construct
  source 1..75: mol_type = other DNA
ggatgagacaactctgacagcaacagtgaaagatccttttgataacgtggttaaaaatctgtcagtagtcttccg

SEQ ID NO: 466820 - DNA, 75 bp, synthetic construct
  source 1..75: mol_type = other DNA
caaagacgtaggcgttgtactggaatcagccattgatgccacaggcaaccgtgatacagcagccacggcgactga

SEQ ID NO: 466821 - DNA, 75 bp, synthetic construct
  source 1..75: mol_type = other DNA
tcggtattcagaataagggcatgatagccgcctctatcgctgcatcaggctctcagggggattcgattggcggac

SEQ ID NO: 466822 - DNA, 75 bp, synthetic construct
  source 1..75: mol_type = other DNA
gcagacagaccgcgccctgaaacgagtgatcattctttgtttggtgtcatcgttgattttctgcgtggcaccaac

SEQ ID NO: 466823 - DNA, 75 bp, synthetic construct
  source 1..75: mol_type = other DNA
aaggcagcaaaagatttaccaacggaaccaatattaaaatatgcagtatcaaggacatttgaagtaaatgttact

SEQ ID NO: 466824 - DNA, 75 bp, synthetic construct
  source 1..75: mol_type = other DNA
aacatgagtcctggcttaaccactccgagaagttaaaactcatcaaacagttaaaggagaatggtgtgctgttag

SEQ ID NO: 466825 - DNA, 75 bp, synthetic construct
  source 1..75: mol_type = other DNA
atgaatatttgctctaataaattgtgttttttagctaccgatgttacattgaacctgacctcttgcgccttgtgg

SEQ ID NO: 466826 - DNA, 75 bp, synthetic construct
  source 1..75: mol_type = other DNA
cattatggcgcttaaggcgacgaacacggatgtacaaagcatcaccatcaggggtaacaaacctgtcatccgcgt

SEQ ID NO: 466827 - DNA, 75 bp, synthetic construct
  source 1..75: mol_type = other DNA
tgtggctgattataaaaagaatggtgggatcaccagcgcgaatcctgcctgggatatgtttagcgcggctttgtt

SEQ ID NO: 466828 - DNA, 75 bp, synthetic construct
  source 1..75: mol_type = other DNA
tgataaaatctcctgcaaatggtgttgtgattaaaagaataatttctgatggattgaaagaaatagtttctctaa

SEQ ID NO: 466829 - DNA, 75 bp, synthetic construct
  source 1..75: mol_type = other DNA
cactggcgttgctggatatccgcgtgaccgaccatctcattgtgggaggcgacaaagcctggtctttcgctgaac

SEQ ID NO: 466830 - DNA, 75 bp, synthetic construct
  source 1..75: mol_type = other DNA
gtgtgacccgtcggatatgcttatcgtccagatgacggaagaaaaagcgcgtgaacactccaaaaaacgtctggc

SEQ ID NO: 466831 - DNA, 75 bp, synthetic construct
  source 1..75: mol_type = other DNA
attatgaaccctccaacgttcttattctgaccggtcgtgcctccaccattaataaactgattgaagtcataaagc

SEQ ID NO: 466832 - DNA, 75 bp, synthetic construct
  source 1..75: mol_type = other DNA
gttgcctgttggcggcgctacttataccttccgtcgggcatactgagaacgaacaatacggggctaatttcaata

SEQ ID NO: 466833 - DNA, 75 bp, synthetic construct
  source 1..75: mol_type = other DNA
accttgttatgggaatccgcccaccttgccgggcgccggtgccgtgtgggaatccgcccaccttgccgggcgccg

SEQ ID NO: 466834 - DNA, 75 bp, synthetic construct
  source 1..75: mol_type = other DNA
aaatccgcccaccctttccgggcgccggagccgtgtgggaatccgcccaccttgccgggcgccggtgccgtgtgg

SEQ ID NO: 466835 - DNA, 75 bp, synthetic construct
  source 1..75: mol_type = other DNA
tgtggaaatccgcccaccttgccgggcgccggtgctgtgtggaatccgcccaccttgccgggcgccggtgccgtg

SEQ ID NO: 466836 - DNA, 75 bp, synthetic construct
  source 1..75: mol_type = other DNA
ggattgttctttccggcacagcaaaagtaactttaaacgataaaacagtattgcttgctgcaaatgaatcaatct

SEQ ID NO: 466837 - DNA, 60 bp, synthetic construct
  source 1..60: mol_type = other DNA
atgctcgtcacatatagattgcctcttacggaccgaaaggtcaaggagaagcaggctatg

SEQ ID NO: 466838 - DNA, 75 bp, synthetic construct
  source 1..75: mol_type = other DNA
ccgtagaataaaacctacagggacgagagaatattatgtcacagatctgactgataaacgggcatttatgtttct

SEQ ID NO: 466839 - DNA, 75 bp, synthetic construct
  source 1..75: mol_type = other DNA
aaaggtgtctggttacgtgagggagagataattgacaggaccggaaatatcacaggcgaaggacgccgttcacgt

SEQ ID NO: 466840 - DNA, 75 bp, synthetic construct
  source 1..75: mol_type = other DNA
ggcagatggggcataaggggccggaaatgctgttccgcaattacggtaaatacctggctgaatacgacgggaaaa

SEQ ID NO: 466841 - DNA, 75 bp, synthetic construct
  source 1..75: mol_type = other DNA
taatgatattggtaacacagtaatttcttataaagacaagggtgaaagcgtaaaagagaaagattcgccagggat

SEQ ID NO: 466842 - DNA, 75 bp, synthetic construct
  source 1..75: mol_type = other DNA
aggagattatattagtgcacgctctcgttatgaaaaatatttcattaaccataatgattcatgggcgacatataa

SEQ ID NO: 466843 - DNA, 75 bp, synthetic construct
  source 1..75: mol_type = other DNA
tctggcctggccatattgatgatcctgaagcgactttcagagattataatcctgattctgagaaccccaaggttg

SEQ ID NO: 466844 - DNA, 75 bp, synthetic construct
  source 1..75: mol_type = other DNA
agatgtgctgcgcgagagcgtcggtaagtcggtcgttaaccttattcacggcgtgcgtgatatggcggcgatccg

SEQ ID NO: 466845 - DNA, 75 bp, synthetic construct
  source 1..75: mol_type = other DNA
cctataagttctggcgccagtgtcgtcgggatggtctgggtaaacgcgtttatctggttaagggggacagtacaa

SEQ ID NO: 466846 - DNA, 75 bp, synthetic construct
  source 1..75: mol_type = other DNA
cagattatcggctacggcgaaaacggtgaacgctggctggtggaccgctataacatccgcctgtcactgcgctgt

SEQ ID NO: 466847 - DNA, 75 bp, synthetic construct
  source 1..75: mol_type = other DNA
tgtctgtgatccgtcagattttttactggtgcagatgacccaggataaagcgcaggagcattccaaaaaacgtct

SEQ ID NO: 466848 - DNA, 75 bp, synthetic construct
  source 1..75: mol_type = other DNA
ctggcaattactggtcaccgatgtactggagaaaacgtatccgctccagtccgatccggcccgcagaatgcctgt

SEQ ID NO: 466849 - DNA, 75 bp, synthetic construct
  source 1..75: mol_type = other DNA
cgctttcctgaagatatcgacggggaaggtgatgcattttccctgggttcgaaacgtaccactacgtttatgtcc

SEQ ID NO: 466850 - DNA, 75 bp, synthetic construct
  source 1..75: mol_type = other DNA
caggtgactggctacggtgagcagggtgagagatggctggtcgatcgctacaacatccgccagtctctgcgggca

SEQ ID NO: 466851 - DNA, 75 bp, synthetic construct
  source 1..75: mol_type = other DNA
gatgttgataatccagaatcatcgacagaatctgttggtatcggtgcaggtgttgacgcttcagttatgactctg

SEQ ID NO: 466852 - DNA, 75 bp, synthetic construct
  source 1..75: mol_type = other DNA
cagcttgactgtgactatacgtggaacgataacggacaactggtgcgcatcagcggcccgcaggagtgccgggag

SEQ ID NO: 466853 - DNA, 75 bp, synthetic construct
  source 1..75: mol_type = other DNA
cgcgggaccggctgcaccgcgagacggcccgtagcttcggcggggcgggcagtacagcggggtacgaacaggcca

SEQ ID NO: 466854 - DNA, 75 bp, synthetic construct
  source 1..75: mol_type = other DNA
tttatcgatcttcgcaatgcggtaggcgatcgctttgtgctgtttgccgggctggacgatgtcgtggttgagagc

SEQ ID NO: 466855 - DNA, 75 bp, synthetic construct
  source 1..75: mol_type = other DNA
ataccagccggggagcttcacgccgctcatccggatcgaaacagagaacggcgagcgggagaaagcgcagcgccg

SEQ ID NO: 466856 - DNA, 75 bp, synthetic construct
  source 1..75: mol_type = other DNA
tggcggcgggagcgtgacctgacggggtggatgtcgctgtcgcgtaaaccggaggagacatggtacggctgggac

SEQ ID NO: 466857 - DNA, 75 bp, synthetic construct
  source 1..75: mol_type = other DNA
tctattgaattttaggaaccctgtaaaaggttttgaaatagtatgtttgtgggctattttgctgaatacagtgct

SEQ ID NO: 466858 - DNA, 75 bp, synthetic construct
  source 1..75: mol_type = other DNA
agaatatttagagctggagcatcagacgatataaaacaaaacatgtttaatacaggaaacgcattctttgatata

SEQ ID NO: 466859 - DNA, 75 bp, synthetic construct
  source 1..75: mol_type = other DNA
tagagttcgctatttatcactaaccttactttttgcattcgttttttctttgattattggtttgccatcgattta

SEQ ID NO: 466860 - DNA, 75 bp, synthetic construct
  source 1..75: mol_type = other DNA
tttgttttctctggttccgggactccagtaaataactatgtgtatggtggtaatattcagagtctgtatgttttc

SEQ ID NO: 466861 - DNA, 75 bp, synthetic construct
  source 1..75: mol_type = other DNA
tctgaataatattaacatagaacctgacgaagtgataaatgctgttggtatttatggaactgatggagttggtcc

SEQ ID NO: 466862 - DNA, 75 bp, synthetic construct
  source 1..75: mol_type = other DNA
aggtcaggctcacctgttgatgttcagataacagatctgataacaggtaatgcaacaatagacttaagcttttct

SEQ ID NO: 466863 - DNA, 75 bp, synthetic construct
  source 1..75: mol_type = other DNA
cggcgtgacgacaagccctgaagatgccaacgagacgtactgttacatgctggacaggatggttaatcacttcct

SEQ ID NO: 466864 - DNA, 75 bp, synthetic construct
  source 1..75: mol_type = other DNA
ttttttcctggtccggtttcccggattgcaggcatgccagacactgcgccgtcaggcgctgtttttttcatccct

SEQ ID NO: 466865 - DNA, 75 bp, synthetic construct
  source 1..75: mol_type = other DNA
gatttaatagtatgactattgctggggttatggctcatgactgctatgatagaagtattcatattactggagcag

SEQ ID NO: 466866 - DNA, 75 bp, synthetic construct
  source 1..75: mol_type = other DNA
aaagccataccatcggtaataaccgcgccaaaagcgtgggcgttgaccagcaggaaaccattggtcaggacaaga

SEQ ID NO: 466867 - DNA, 75 bp, synthetic construct
  source 1..75: mol_type = other DNA
gcggcgaagtgagcgtcgagatggagttaccaaagttacgttggttgaagacgcatctaccgcaaacctggcagg

SEQ ID NO: 466868 - DNA, 75 bp, synthetic construct
  source 1..75: mol_type = other DNA
tggtgaaaatcagctcgcgcggctttatcttgcgactttacaggcaatagcctttggcaccagacatattattga

SEQ ID NO: 466869 - DNA, 75 bp, synthetic construct
  source 1..75: mol_type = other DNA
cagtgcaaagcgacatggcagctggtggatggtcaggtccagatggtgccggaggataaatatattcacgaagcc

SEQ ID NO: 466870 - DNA, 75 bp, synthetic construct
  source 1..75: mol_type = other DNA
gcgtggtatatggacctgctttgcctggctaaagggagtaaaagtttactcactcctgatacgatagcgaaaata

SEQ ID NO: 466871 - DNA, 75 bp, synthetic construct
  source 1..75: mol_type = other DNA
ttccggcattcaccattccgctgtttcaaagtgcgcatgtctacctcgcaacaaccagagaacagtttcagcacg

SEQ ID NO: 466872 - DNA, 75 bp, synthetic construct
  source 1..75: mol_type = other DNA
agagggaatccgtggtatatggatctcatgtgtatggccagaggggcgcgtgatttacaatcgaatacggcccta

SEQ ID NO: 466873 - DNA, 75 bp, synthetic construct
  source 1..75: mol_type = other DNA
gtgggcagatcactgaccagaacacggacggaaatattacgctcagcggcaccacatcacagcctgccagcatcg

SEQ ID NO: 466874 - DNA, 75 bp, synthetic construct
  source 1..75: mol_type = other DNA
aggggccaggcgtggtacatggacatgatgtgtgaagcgcgtggagcgcaggatcttcgttctgcatcgtcttcg

SEQ ID NO: 466875 - DNA, 75 bp, synthetic construct
  source 1..75: mol_type = other DNA
ttaatagtcatacctataaaaatgaacgctggcatttttttatagttgaggaagaactacttattggaaaatatc

SEQ ID NO: 466876 - DNA, 75 bp, synthetic construct
  source 1..75: mol_type = other DNA
gcggtagaacgtaaggtggaagtcatgaaaggggccagtgatgtacagcagactgttagccatatgtctgatgac

SEQ ID NO: 466877 - DNA, 75 bp, synthetic construct
  source 1..75: mol_type = other DNA
ttggaccgacaattatcaatcttgactttccagctccggaacaggatatcctgccgggagttcggtggggaagaa

SEQ ID NO: 466878 - DNA, 75 bp, synthetic construct
  source 1..75: mol_type = other DNA
ccacggctgagacacctcaagcatgcacgtccctgggcttatacgctgttgtttactccggtatctgaaacggaa

SEQ ID NO: 466879 - DNA, 75 bp, synthetic construct
  source 1..75: mol_type = other DNA
gggctgtttaaggatataatattatttttcttggcattttctatttttgttattattcttgactttgtgattgag

SEQ ID NO: 466880 - DNA, 75 bp, synthetic construct
  source 1..75: mol_type = other DNA
gcgctatctgggcagacatggctaatatcatttgggcgagcggccttcaagttactgccgcatggtacgtagtta

SEQ ID NO: 466881 - DNA, 75 bp, synthetic construct
  source 1..75: mol_type = other DNA
ccgcaccactcatgcaaaccttcaggtctccgttgttctggcctaccaggggatgttcgaggctcgcggtgtgcc

SEQ ID NO: 466882 - DNA, 75 bp, synthetic construct
  source 1..75: mol_type = other DNA
ggatgccggcagcttttatctttcccgctcacgtcttgaggcggcatttgattatcaggggaggttgctgcatcc

SEQ ID NO: 466883 - DNA, 75 bp, synthetic construct
  source 1..75: mol_type = other DNA
atgattgcccagggtaacccgatgccggtgccttatggtgaaatgctggttggttcacgacggatatcccaggac

SEQ ID NO: 466884 - DNA, 75 bp, synthetic construct
  source 1..75: mol_type = other DNA
taggtaaatatgatcttttctgtatggaacaatcttcttatggtgtgtgggtatgttctgtataccattattctt

SEQ ID NO: 466885 - DNA, 75 bp, synthetic construct
  source 1..75: mol_type = other DNA
gtttctgacagacttcatgcatcaaaacatactgttgatattatcctgaaaaaaataattaaaaaagaaaatgta

SEQ ID NO: 466886 - DNA, 75 bp, synthetic construct
  source 1..75: mol_type = other DNA
aaatcaatcaggcagtttctaatggtttggcacttattgcagatgcctttcttggtaaagccaagattagtggag

SEQ ID NO: 466887 - DNA, 75 bp, synthetic construct
  source 1..75: mol_type = other DNA
tggcggcttctgcgccgggcattttgctggcaggcctggcggtatttattctgatgagccgcaaatcacagatgc

SEQ ID NO: 466888 - DNA, 75 bp, synthetic construct
  source 1..75: mol_type = other DNA
atggcattcgaacatgaaagcaaaaccccacaggatgtattggtttataccgatagcccgatctttcataagcgc

SEQ ID NO: 466889 - DNA, 75 bp, synthetic construct
  source 1..75: mol_type = other DNA
gcactggcatttctttatcgttgaagatgatcttcttttaggtaaaaataatgagaggaattatctgatacagaa

SEQ ID NO: 466890 - DNA, 75 bp, synthetic construct
  source 1..75: mol_type = other DNA
ggtctggctggattgctgggatcaggacgtaccgaaaccgccgaagtgatcttcggtatcaaacctgctgacagc

SEQ ID NO: 466891 - DNA, 75 bp, synthetic construct
  source 1..75: mol_type = other DNA
attttatcttcgctggctgttggattcttaatgtacaacgcaatagaaaataaattcagaaagataaaaataaat

SEQ ID NO: 466892 - DNA, 75 bp, synthetic construct
  source 1..75: mol_type = other DNA
caataaaatcatctttgcggcgtgatcctgatgttctgatggttggtgagatccgtgatcccgtatcatcaaatg

SEQ ID NO: 466893 - DNA, 75 bp, synthetic construct
  source 1..75: mol_type = other DNA
gaggacctccttttaggaaaaaataatgaaaattattatttaatacaaaaaaatacagatgagatacttcccggg

SEQ ID NO: 466894 - DNA, 75 bp, synthetic construct
  source 1..75: mol_type = other DNA
caataaaatcatctttacgacgtgatccggatgttctaatggttggtgaaatacgtgatccggtttcatcaaatg

SEQ ID NO: 466895 - DNA, 75 bp, synthetic construct
  source 1..75: mol_type = other DNA
attgttagtgatattaaaaaggaaaattctcttgcttctggttatgtacaggctaaaaactacagagaaggaaaa

SEQ ID NO: 466896 - DNA, 75 bp, synthetic construct
  source 1..75: mol_type = other DNA
tcagcaacttcaggcgctttttacctgcaatccggaacttcacaacaagttatggggttatattccctttcttta

SEQ ID NO: 466897 - DNA, 75 bp, synthetic construct
  source 1..75: mol_type = other DNA
ctccagtccagccatgttcagaatcagccattcccgtgcagcacgggtggaggtgaaggccacgccgggttcatg

SEQ ID NO: 466898 - DNA, 75 bp, synthetic construct
  source 1..75: mol_type = other DNA
ggcctctgattatcggagcagcatatttagtaaaaaagagccttgtgccatgggttctggttattattagtattg

SEQ ID NO: 466899 - DNA, 75 bp, synthetic construct
  source 1..75: mol_type = other DNA
ctggggtactgacgggctgtgaggtgcttgtccgctgggaacatccacaaacgggaattatcccaccggatcagt

SEQ ID NO: 466900 - DNA, 75 bp, synthetic construct
  source 1..75: mol_type = other DNA
ggccgagtttttgaatagacgtgaacttgataaagtgcgtactggttataagaatgcgataataaattcgcgtgg

SEQ ID NO: 466901 - DNA, 75 bp, synthetic construct
  source 1..75: mol_type = other DNA
aagcggtgctgaataaactcgccgatttaatggaagcccacgccgaagaactggcgctgctggaaaccctcgaca

SEQ ID NO: 466902 - DNA, 75 bp, synthetic construct
  source 1..75: mol_type = other DNA
aaggcgaaagcaaagggcaactgctgctggatggtcgtaacgctgaactgactgcggccatcggcccgaccatct

SEQ ID NO: 466903 - DNA, 75 bp, synthetic construct
  source 1..75: mol_type = other DNA
ggcgcggcgcgcgccattcgctggtacgccgaagcgatcgacaaagtgtatggcgaagtggcgaccaccagtagc

SEQ ID NO: 466904 - DNA, 75 bp, synthetic construct
  source 1..75: mol_type = other DNA
atcgcgcgcggcaagagcgccgatatcgaccgtgcggtgagcgcagcacgcagcgtatttgaacgcggcgactgg

SEQ ID NO: 466905 - DNA, 75 bp, synthetic construct
  source 1..75: mol_type = other DNA
tgccaacgacagccagtatggcctcggcgcggcggtgtggacgcgcgatctctcccgcgcgcaccgcatgagccg

SEQ ID NO: 466906 - DNA, 75 bp, synthetic construct
  source 1..75: mol_type = other DNA
gaacgtggtgacgggttttggtcatgaagcgggccaggcgctgtcgcgccataacgatatcgacgttatcgcctt

SEQ ID NO: 466907 - DNA, 75 bp, synthetic construct
  source 1..75: mol_type = other DNA
caggtgtgcatcgccggaacgcgtttgttgctggaagagagcatcgccgatgaattcttagccctgttaaaacag

SEQ ID NO: 466908 - DNA, 75 bp, synthetic construct
  source 1..75: mol_type = other DNA
gcagagcggcaacggtcgcgacaaatccctgcatgcccttgaaaaattcaccgaactgaaaaccatctggataag

SEQ ID NO: 466909 - DNA, 75 bp, synthetic construct
  source 1..75: mol_type = other DNA
agtgccctcattgtggcgggctgaaatgcaaccactgcgatatgggcgatgacacagcgtgcatgaattgtgaag

SEQ ID NO: 466910 - DNA, 75 bp, synthetic construct
  source 1..75: mol_type = other DNA
ccggtaaaccgattcgtcacagcctgcgtgatgatattcccggcgcggcgcgcgccattcgctggtacgccgaag

SEQ ID NO: 466911 - DNA, 75 bp, synthetic construct
  source 1..75: mol_type = other DNA
gcttgccaacgacagccagtacggccttggcgcggcggtatggacgcgcgacctctcccgcgcgcaccgcatgag

SEQ ID NO: 466912 - DNA, 75 bp, synthetic construct
  source 1..75: mol_type = other DNA
gaacgtggtgacgggttttggtcatgaagcggggcaggcgctgtcgcgtcataacgatatcgatgccatcgcctt

SEQ ID NO: 466913 - DNA, 75 bp, synthetic construct
  source 1..75: mol_type = other DNA
cagctactccgccaacacctatacattatcgaaccctttcgaggcgcaggtcgtttccgctttgacccttttgta

SEQ ID NO: 466914 - DNA, 75 bp, synthetic construct
  source 1..75: mol_type = other DNA
aaaaggcgacacgaaaatcgatctgaaacgtttttccagtcagggctatgtcgagccgggtaaatataatttaac

SEQ ID NO: 466915 - DNA, 75 bp, synthetic construct
  source 1..75: mol_type = other DNA
tgcgggtgcttccctgctgcattgcgctggcaatgtcggggtgttatgtcaatgcctgggctgaagatgaaattc

SEQ ID NO: 466916 - DNA, 75 bp, synthetic construct
  source 1..75: mol_type = other DNA
aataaagatggcaataaagttgatttctacggcaagatggttggcgaacgcatctggtcaaatactgatgataat

SEQ ID NO: 466917 - DNA, 75 bp, synthetic construct
  source 1..75: mol_type = other DNA
ggtaaaacttcagtagctgaacgcacaccgctacgcgatgcagtaaacatgttggtaggaaagaaaggacttcgc

SEQ ID NO: 466918 - DNA, 75 bp, synthetic construct
  source 1..75: mol_type = other DNA
tatcagagattattgcacgcatcgaaatgtatggacacggtgctggatatacggcagatgaggtgttggagcttg

SEQ ID NO: 466919 - DNA, 75 bp, synthetic construct
  source 1..75: mol_type = other DNA
cctggccaactggaaggtattgatattaaggctgatttaagccagtccgcgttattaatctccctgccacaggcc

SEQ ID NO: 466920 - DNA, 75 bp, synthetic construct
  source 1..75: mol_type = other DNA
cggacacggacacagggactggcgggattctgcgaaggtgcggaactgctggcggcaatggtaagccacgactag

SEQ ID NO: 466921 - DNA, 75 bp, synthetic construct
  source 1..75: mol_type = other DNA
gggaaaccgttgctgcacatatgacgcgcatatttcagagcctggttgacgccagaaagaaacctcttttcatcg

SEQ ID NO: 466922 - DNA, 75 bp, synthetic construct
  source 1..75: mol_type = other DNA
tggtgctcgttgcgaagtcgtcagtgtgcatcatccagtttttactaaaaccattggcacgattgtaaaaatcgt

SEQ ID NO: 466923 - DNA, 75 bp, synthetic construct
  source 1..75: mol_type = other DNA
tttggataggtactcgagtcgttattctgcgcggtgttaagatcggtgatggtgcaattgttgctgcgggtgctg

SEQ ID NO: 466924 - DNA, 75 bp, synthetic construct
  source 1..75: mol_type = other DNA
gcttcacgcttatttcggtctttacgctgcgggacaaatccagcagccagcctacggagacgctaactgaaaatt

SEQ ID NO: 466925 - DNA, 75 bp, synthetic construct
  source 1..75: mol_type = other DNA
gccaacagacgcgagttgccgaaaatttcgcagggaaggactacgggcagactgaaatcccatcatgggcgaggg

SEQ ID NO: 466926 - DNA, 75 bp, synthetic construct
  source 1..75: mol_type = other DNA
agttgcaagttgccagtaaaatcaaatatagtacctaccataatatttgtgggtacttgcggtgatgataggaaa

SEQ ID NO: 466927 - DNA, 75 bp, synthetic construct
  source 1..75: mol_type = other DNA
tcggtaaaattgacactgacccagtaaatccagaaaaccagattcaggtttatgtggagaacgaagacggctctc

SEQ ID NO: 466928 - DNA, 75 bp, synthetic construct
  source 1..75: mol_type = other DNA
cccgattcgaaatacgcgatgagcttttgccggtaattgatatccagagcggaattattgtcagacttatcgctg

SEQ ID NO: 466929 - DNA, 75 bp, synthetic construct
  source 1..75: mol_type = other DNA
cactaaaacatcataatgatactgagtatggtgacattattttgccaacatcattcggcatatccgtatgtgctg

SEQ ID NO: 466930 - DNA, 75 bp, synthetic construct
  source 1..75: mol_type = other DNA
ttcgtgcatttattggtgagatagcggaacgcgcaccacaagaaaaggagaaactgatgaccattgctgacagat

SEQ ID NO: 466931 - DNA, 75 bp, synthetic construct
  source 1..75: mol_type = other DNA
gacatgcttctggataacggtaaaatctggacacttaacatcaatataaaagcacaaagatattcaccttcaatt

SEQ ID NO: 466932 - DNA, 75 bp, synthetic construct
  source 1..75: mol_type = other DNA
tctttcagaattagataccattggtcaggccctttatcttctggctctgctccaattgtaatgttcaggattaga

SEQ ID NO: 466933 - DNA, 75 bp, synthetic construct
  source 1..75: mol_type = other DNA
gcgaaacggcgttgccccttacatcccggcggccttttgccgggatgccgggagcgcaggccacggcgcgacaga

SEQ ID NO: 466934 - DNA, 75 bp, synthetic construct
  source 1..75: mol_type = other DNA
ggaaagcggcgctgagacgagctggtattgatgatttcagatttcatgacttgagacacacctgggcaagttggc

SEQ ID NO: 466935 - DNA, 75 bp, synthetic construct
  source 1..75: mol_type = other DNA
aacatggtcgggtaagagttaaatttttgtgggatcgctatcacaaagcgaatgaagacagttcatgctggatac

SEQ ID NO: 466936 - DNA, 75 bp, synthetic construct
  source 1..75: mol_type = other DNA
atacaacaatggtatggccagtagatgaccaaggggttgagcggcgctggtactatgggcgagatcgtgttattc

SEQ ID NO: 466937 - DNA, 75 bp, synthetic construct
  source 1..75: mol_type = other DNA
agcataccgcctgggcggcgatgaattcgctatggtgctctatgatgtacagtcggaatctgaagtgcagcagat

SEQ ID NO: 466938 - DNA, 75 bp, synthetic construct
  source 1..75: mol_type = other DNA
aaggtgtggatgccgttcgtcaagagctggctcgcttacagcaagagggctaccgctacgcggtgcttgatgcgc

SEQ ID NO: 466939 - DNA, 75 bp, synthetic construct
  source 1..75: mol_type = other DNA
aaaacaagagaaaagttgagcttttactctagccacaaacaccctaaatctggattaccatacaaagtaagacat

SEQ ID NO: 466940 - DNA, 75 bp, synthetic construct
  source 1..75: mol_type = other DNA
agttagtgataatgttccaaatgatcgggagtcactgttttggttaaatgtgcaggagatacctccaaagccttt

SEQ ID NO: 466941 - DNA, 75 bp, synthetic construct
  source 1..75: mol_type = other DNA
tgaatcccagcctatcgcgctgacccgcctcagccatagccagtgcgaactgctggccagcgatgaaatgcgacg

SEQ ID NO: 466942 - DNA, 75 bp, synthetic construct
  source 1..75: mol_type = other DNA
cgaggatatatatgttaatacagaatattatatttcgcgtgtgcgttggctgaaggatgaatttgcgcgaagaat

SEQ ID NO: 466943 - DNA, 75 bp, synthetic construct
  source 1..75: mol_type = other DNA
ttgaaagatatgaagattttcacttcgataaggatgtggggcaacttgcataccatgcaaaagtgactttaaact

SEQ ID NO: 466944 - DNA, 75 bp, synthetic construct
  source 1..75: mol_type = other DNA
ccgcacaagaactgatggcaatcatagaaaaacgcgaatatgaactaagcaaagccaaaagagcgtttgccttaa

SEQ ID NO: 466945 - DNA, 75 bp, synthetic construct
  source 1..75: mol_type = other DNA
agaaaccagcgcctttatcgaacgcgtggcagatatcagtcagcatatggccgcgctggcgctggaacaggaaaa

SEQ ID NO: 466946 - DNA, 75 bp, synthetic construct
  source 1..75: mol_type = other DNA
acgcatttaaatctgattggtaccagcatcccccatgcactgaagaacaggccgaatggctcattcagtgttacc

SEQ ID NO: 466947 - DNA, 75 bp, synthetic construct
  source 1..75: mol_type = other DNA
atattgggatcgcgttgccaatggatatggtctgaacggagccgctgcgcaattcagcttgtctgatgtagaccc

SEQ ID NO: 466948 - DNA, 75 bp, synthetic construct
  source 1..75: mol_type = other DNA
ccggattcggcatgttgtctgacatggcagcaaaatgatatgtcgcctgcgttaacctggctgcttgagtatctc

SEQ ID NO: 466949 - DNA, 75 bp, synthetic construct
  source 1..75: mol_type = other DNA
tttattatgccctttttgtgcattgcctgaaaatataaatgatcttatatatgcgttgagcctaaattactcaga

SEQ ID NO: 466950 - DNA, 75 bp, synthetic construct
  source 1..75: mol_type = other DNA
catgcgcgatcgcaaacaggtggcggagatcccgctggcagagctttccgttccggcgatcatgaacgccattgc

SEQ ID NO: 466951 - DNA, 75 bp, synthetic construct
  source 1..75: mol_type = other DNA
tatgtctgaatattgaatgcggcgtttcgagcagcatttcatcgaaagtttcatggttttcccgatgctctctct

SEQ ID NO: 466952 - DNA, 75 bp, synthetic construct
  source 1..75: mol_type = other DNA
gtagtaatacatgatgtaagtactctttctgatatgaagatagtacatcgcaaacagcattaccaacaagagttg

SEQ ID NO: 466953 - DNA, 75 bp, synthetic construct
  source 1..75: mol_type = other DNA
ggacttgccggtgttctccgtggtaaaaaggtccgtacgaccatcagccggaaagccgttgtcgcaggcgaccgc

SEQ ID NO: 466954 - DNA, 75 bp, synthetic construct
  source 1..75: mol_type = other DNA
ctgggccatatcccaccggcagaagcagaaaaagcttattatgcttccatcggaaatgatgatctggcagcctga

SEQ ID NO: 466955 - DNA, 75 bp, synthetic construct
  source 1..75: mol_type = other DNA
acgctacagccgaataattataaaattgcatcaacaaaaggaaattggaaatcatccctcatgatcagagcagga

SEQ ID NO: 466956 - DNA, 75 bp, synthetic construct
  source 1..75: mol_type = other DNA
agggggtaatgtgagatatcatcctcagatgctattaactccagaggaagggagatgcatcggtttatctgagtt

SEQ ID NO: 466957 - DNA, 75 bp, synthetic construct
  source 1..75: mol_type = other DNA
tgccggatacatcgtggggggggcgggtctcatcgtctatggaaacgacattcgtgctggatgcgctggagcagg

SEQ ID NO: 466958 - DNA, 75 bp, synthetic construct
  source 1..75: mol_type = other DNA
gttgtttttcttgacttatttacagagttgtttgttgggataataagtttaatttgtgtcgcttaccagttggta

SEQ ID NO: 466959 - DNA, 75 bp, synthetic construct
  source 1..75: mol_type = other DNA
atacaaaaaatttactataaagaaaaagtctggaggagagcgggagatctttgctcctgatgaaaaactgaaaga

SEQ ID NO: 466960 - DNA, 75 bp, synthetic construct
  source 1..75: mol_type = other DNA
atggatcgtcaataaaaaagatgcccaagttattgagaattgccatagtgttatagattataaatataatcctct

SEQ ID NO: 466961 - DNA, 75 bp, synthetic construct
  source 1..75: mol_type = other DNA
gagcaggcgttgtgggcccgtcggccgtccggcacaatccaccacagtgataaaggttctcagtatgtatcgctg

SEQ ID NO: 466962 - DNA, 75 bp, synthetic construct
  source 1..75: mol_type = other DNA
ttgatttcgtagaagataacttgcgattcaaatatgtgcaacttggcaaggcatatattgacttattgcgccaag

SEQ ID NO: 466963 - DNA, 75 bp, synthetic construct
  source 1..75: mol_type = other DNA
ttcactatcttttattttggatcgatcgtataaaccctgattttgatcatcaatttattacacaaagttgcgccg

SEQ ID NO: 466964 - DNA, 75 bp, synthetic construct
  source 1..75: mol_type = other DNA
gccgttaaattatattatcattacagtcgtaaatatatgctttattataatgatagggaagagaagtaaatgtga

SEQ ID NO: 466965 - DNA, 75 bp, synthetic construct
  source 1..75: mol_type = other DNA
ttccggcggatgcgacggaagaacagcggcaggcatatctggcaaaactgcgtgatacgccggaatacaaaaagg

SEQ ID NO: 466966 - DNA, 75 bp, synthetic construct
  source 1..75: mol_type = other DNA
aacctgagccgtgaccctgcgcacgctaatgacagtatcagcccgatatttgacaaggagaaagagcagaggcgt

SEQ ID NO: 466967 - DNA, 75 bp, synthetic construct
  source 1..75: mol_type = other DNA
gaaaacgaaagtgtgatgggatctacagcaatgacctatgatttaagtgaagaaaagctgatgaaactgaaggta

SEQ ID NO: 466968 - DNA, 75 bp, synthetic construct
  source 1..75: mol_type = other DNA
aaaaaccaacatagcatttttacatccccttgctagcggaagacaagagatcgagcgggattacgaccgattact

SEQ ID NO: 466969 - DNA, 75 bp, synthetic construct
  source 1..75: mol_type = other DNA
ttattggtgcgcactatgactctgccagcagttatgaaaacgatgaattgacctatacacctggcgcggatgata

SEQ ID NO: 466970 - DNA, 75 bp, synthetic construct
  source 1..75: mol_type = other DNA
aacgacgggaaccagctgacggcggtggtgtacccggacgggctggagagccgccgggaatatgatgaaccgggc

SEQ ID NO: 466971 - DNA, 75 bp, synthetic construct
  source 1..75: mol_type = other DNA
ttaccgaagatatgattccaattaaagcagagaattctagcatctattcttattatgatgggtggcttggtgtcg

SEQ ID NO: 466972 - DNA, 75 bp, synthetic construct
  source 1..75: mol_type = other DNA
ttccaagtatgcggaaataaaaaacgattactttaatgctttaactgaaataggtattgaaacttggaagcagat

SEQ ID NO: 466973 - DNA, 75 bp, synthetic construct
  source 1..75: mol_type = other DNA
tgagaagacgccattaaaggtaacatataccactgaagaagatggtcgcttgctgtttaattttcttgataaaaa

SEQ ID NO: 466974 - DNA, 75 bp, synthetic construct
  source 1..75: mol_type = other DNA
gccactcccctgccggacgggtggagaaatttgaatacgccgccgcacacggtcagttaagccgttacacggcgg

SEQ ID NO: 466975 - DNA, 75 bp, synthetic construct
  source 1..75: mol_type = other DNA
ccttggctctgtcgatgatgtattgagcggcagcgccacggcggcgattgaaacccagtcttccgaggaactcca

SEQ ID NO: 466976 - DNA, 75 bp, synthetic construct
  source 1..75: mol_type = other DNA
gagctaatgtgaatgagtcgaaaattaatttcgaacagataagagggcagtttaacaatttaagaaatacctggt

SEQ ID NO: 466977 - DNA, 75 bp, synthetic construct
  source 1..75: mol_type = other DNA
aaaccgaagaggtaatcaaggcgctggaactgggccgggcctgcggtgcactcactgcggcgttcaccaaacgcg

SEQ ID NO: 466978 - DNA, 75 bp, synthetic construct
  source 1..75: mol_type = other DNA
acgacgagcggacccaccactaccactacgacagccagcaccgcctggtgttccacacgcggatacagcatggcg

SEQ ID NO: 466979 - DNA, 75 bp, synthetic construct
  source 1..75: mol_type = other DNA
cagcacgctcacggcgtggccggataaccgcatcgcagaggatgcgcactatgtttaccactatgatgaatacgg

SEQ ID NO: 466980 - DNA, 75 bp, synthetic construct
  source 1..75: mol_type = other DNA
tggcgcggggcggagtggcggcgcagcacagttcgcagccgctaagcgcgctctggcaggtgctgccggaagatg

SEQ ID NO: 466981 - DNA, 75 bp, synthetic construct
  source 1..75: mol_type = other DNA
ttgattttcttgataaaagttcaaaagcagcttttatgatcgctaagagtaaatatttagattatagcgaaaggg

SEQ ID NO: 466982 - DNA, 75 bp, synthetic construct
  source 1..75: mol_type = other DNA
attaattcacatgatccttatactaaggagcagctacaaaaggaattgaattccagtcaagaaaacttaaagtat

SEQ ID NO: 466983 - DNA, 75 bp, synthetic construct
  source 1..75: mol_type = other DNA
gtcgacgagcgactgcctctagagataccagagggtctacctaacttccaagctcctatcaccagtgattttgac

SEQ ID NO: 466984 - DNA, 75 bp, synthetic construct
  source 1..75: mol_type = other DNA
gtcggcaagcacgcgacaattatcggcgagatcaccgctgtctcgggtactgaagtctatatgattgaagctgat

SEQ ID NO: 466985 - DNA, 75 bp, synthetic construct
  source 1..75: mol_type = other DNA
gcccgccataccgggcaactggctcaaccgggtgagctgcgcccctatcatctgggcgattaccgggcactgcag

SEQ ID NO: 466986 - DNA, 75 bp, synthetic construct
  source 1..75: mol_type = other DNA
ttcaggatgaagccacacaacagctaaagctccttctggtgaaagcccggggggattttgttcaggggctggttc

SEQ ID NO: 466987 - DNA, 75 bp, synthetic construct
  source 1..75: mol_type = other DNA
cggcagaatcggcgtccgctgcccgggaaagtgaaaggaaatcgcagaattatgaggtgcagtctcagaaaaatg

SEQ ID NO: 466988 - DNA, 75 bp, synthetic construct
  source 1..75: mol_type = other DNA
agtggtgaaaagggagagaaaggggaccggggcgataccgggcctcagggagaaaaaggtgagaaaggcgataaa

SEQ ID NO: 466989 - DNA, 75 bp, synthetic construct
  source 1..75: mol_type = other DNA
aatgttcagcatgtggcagacagtgttgtggctgtaagccagtctgtggagctacaggccgggcaggtgcagcaa

SEQ ID NO: 466990 - DNA, 75 bp, synthetic construct
  source 1..75: mol_type = other DNA
ttcataaagatgaatttaataacaatttcgaaattgaccttggagggagaaatttaattattactggtaataatg

SEQ ID NO: 466991 - DNA, 75 bp, synthetic construct
  source 1..75: mol_type = other DNA
catcaattgagcggtttaatgatttcgaagaggttgttagacgctttttacagcgaatgtttaatgcagatgctt

SEQ ID NO: 466992 - DNA, 75 bp, synthetic construct
  source 1..75: mol_type = other DNA
aacactgaatgtgcatcctgtatgtgaaatccggtcatgtggagcagtaagcaatgacagacatgcatgttatat

SEQ ID NO: 466993 - DNA, 75 bp, synthetic construct
  source 1..75: mol_type = other DNA
gggtattagtgctattatcggcatcgtcagtccggttggtgatttgggatgtttctcgattgctcagctcgcaca

SEQ ID NO: 466994 - DNA, 75 bp, synthetic construct
  source 1..75: mol_type = other DNA
tcgcttttccgatcttcaggtttacgccatttccggctgggagttctgcgataacaccccgtatcgcctcgacga

SEQ ID NO: 466995 - DNA, 75 bp, synthetic construct
  source 1..75: mol_type = other DNA
tttttggtccttgggtgagtcaattaaagcttatacctctattagtgaggatagtttagataaaaaacttgcaga

SEQ ID NO: 466996 - DNA, 75 bp, synthetic construct
  source 1..75: mol_type = other DNA
ctcgcctatctgctggcaacgctggagaaagccagacggggcgagttcaatcagcttcggcgcaggcgcagatag

SEQ ID NO: 466997 - DNA, 75 bp, synthetic construct
  source 1..75: mol_type = other DNA
tccgagatgaatgtcgagcctcatgttactgagcgaatgctcggtcatgaacttggcgggataatgtccgtatac

SEQ ID NO: 466998 - DNA, 75 bp, synthetic construct
  source 1..75: mol_type = other DNA
tggacgtggaagttaggggacgccattacggtggccagtaatgctgcagatatgaatgcagaaaaaacttcgctg

SEQ ID NO: 466999 - DNA, 75 bp, synthetic construct
  source 1..75: mol_type = other DNA
cacgataacgacgatcggctgctggcgctattattactaaatacctttactccccgtgcgcaactcgcctcggcg

SEQ ID NO: 467000 - DNA, 75 bp, synthetic construct
  source 1..75: mol_type = other DNA
gggcgcggatacaccatccctgctgaagatggcgaatgcagccagatgctgatgcaggcaatggactttctggaa

SEQ ID NO: 467001 - DNA, 75 bp, synthetic construct
  source 1..75: mol_type = other DNA
cgggagatgcttcagtcctgggcggattttgttgatgcgcagattgagactggaaggaaggttatcattggacaa

SEQ ID NO: 467002 - DNA, 75 bp, synthetic construct
  source 1..75: mol_type = other DNA
gttcggatcacgtcgcgctactgacgcgcaacgtgcttaaacgtatgctggcctatgcgatttccaggggaatca

SEQ ID NO: 467003 - DNA, 75 bp, synthetic construct
  source 1..75: mol_type = other DNA
ccgaagagcttcctcactttcttagagatcttgcaggctataccgggagtgttattaccaagactgcaactcaaa

SEQ ID NO: 467004 - DNA, 75 bp, synthetic construct
  source 1..75: mol_type = other DNA
agggaactatcgttatgtttttccagggcggaacgatccgaataggccaatgagcgaagcgagtataaatcaagc

SEQ ID NO: 467005 - DNA, 75 bp, synthetic construct
  source 1..75: mol_type = other DNA
atgcctttaaacgatatgcagattcgccgcgctaagcctgaagctaaagcctatacatttggagatgggctaggg

SEQ ID NO: 467006 - DNA, 75 bp, synthetic construct
  source 1..75: mol_type = other DNA
ccacgcacagtatctcgatggtcgccgtgaaatgatgcaatggtatgctgactacattgattcacttcctgagca

SEQ ID NO: 467007 - DNA, 75 bp, synthetic construct
  source 1..75: mol_type = other DNA
ggctgttttacgcgtatgacaggatacggaggacggttgtggcgcacgtcttcggtgaacacactctggccacac

SEQ ID NO: 467008 - DNA, 75 bp, synthetic construct
  source 1..75: mol_type = other DNA
aggcaaatgatgcagtggtatgcggattacattggtgagctggggaaaggcgggggtgtggtagagggtgcattt

SEQ ID NO: 467009 - DNA, 75 bp, synthetic construct
  source 1..75: mol_type = other DNA
tgaggatgacgggatgcgcgtggtgctcagcgaagagtcccggctacgcgctggggaagatgcgcagttcgccgg

SEQ ID NO: 467010 - DNA, 75 bp, synthetic construct
  source 1..75: mol_type = other DNA
cagcgatagagataaacaacctcaataaaaatggtaaagatgaggttatttataaagaaatagcggataatatat

SEQ ID NO: 467011 - DNA, 75 bp, synthetic construct
  source 1..75: mol_type = other DNA
attcgctcacccaaagcttttttagagtttctggtatgggtatttacgttggggcatgtgaattttaacgaaatc

SEQ ID NO: 467012 - DNA, 75 bp, synthetic construct
  source 1..75: mol_type = other DNA
gagatgcaattagctcatgtagataaaaacagtattcgtggcacatataatcatgctcagtatcttgagcaaaga

SEQ ID NO: 467013 - DNA, 75 bp, synthetic construct
  source 1..75: mol_type = other DNA
tatgggaaatccccgcagaacgaatgaaaatgcgcagaccccatattatccctctatcaacacaagtcgttgatc

SEQ ID NO: 467014 - DNA, 75 bp, synthetic construct
  source 1..75: mol_type = other DNA
ccagtatccgggaagcaatgaccgcaggaacagacgaaccggaagatctgaacaaatccgctgaagaagcattgg

SEQ ID NO: 467015 - DNA, 75 bp, synthetic construct
  source 1..75: mol_type = other DNA
atgtcatttggtagctacgatttggtaagccttgcagaagcacgtgaaaagcgtgacaccgcccgtaagcaagtt

SEQ ID NO: 467016 - DNA, 75 bp, synthetic construct
  source 1..75: mol_type = other DNA
tggtattgttgggcgctatcgagccaatgatcatcctgtgcgctcgtgagttccagaactctatcaacgattcgg

SEQ ID NO: 467017 - DNA, 75 bp, synthetic construct
  source 1..75: mol_type = other DNA
gcagggctttaactcagcgtggattgaaacgcagcttgcgcatgttgataagaacgccattcgcggaacatacaa

SEQ ID NO: 467018 - DNA, 75 bp, synthetic construct
  source 1..75: mol_type = other DNA
taaagaaagaagagaaagtggcccagcaaatgagtttgaaaaacactttcgaggccgttgctcgcgagtggcatc

SEQ ID NO: 467019 - DNA, 75 bp, synthetic construct
  source 1..75: mol_type = other DNA
taaaagcggcaacacctttgaagatatcgcccgtaagtgggtagcgggcaatatccgctggaatgaagcccatgc

SEQ ID NO: 467020 - DNA, 75 bp, synthetic construct
  source 1..75: mol_type = other DNA
gggcttttatgtattttattcggttgtcgaaaattgtcagacacagcaaaaggtgcgcggagtgagtatgaaaga

SEQ ID NO: 467021 - DNA, 75 bp, synthetic construct
  source 1..75: mol_type = other DNA
tcactcgtcgtttagaccaattacatcgcagtgcgggggcactatttggcgtttttttgtttgtgatcctattta

SEQ ID NO: 467022 - DNA, 75 bp, synthetic construct
  source 1..75: mol_type = other DNA
agacgaaagccgatcgctggtcactgcgctaccgcgatgaaataatcgacacctttgagaaagatatcttcccct

SEQ ID NO: 467023 - DNA, 75 bp, synthetic construct
  source 1..75: mol_type = other DNA
ggaagaaatgatgttaacaggcctatcagcgatgcaagcgtcaatatggttttgaagaagattggctatgacaaa

SEQ ID NO: 467024 - DNA, 75 bp, synthetic construct
  source 1..75: mol_type = other DNA
agagggattcgatagtgcatggatcgagacacaacttgcccatgtggataagaatagcattcgtggtatttataa

SEQ ID NO: 467025 - DNA, 75 bp, synthetic construct
  source 1..75: mol_type = other DNA
ccgccaacgctgtggtgaggtgttccgctatgcaattgtcacaggtagggccgactacaaccccgctcccgatct

SEQ ID NO: 467026 - DNA, 75 bp, synthetic construct
  source 1..75: mol_type = other DNA
acctttgagaaagacatttttccctacattggcaagcgcccgattgccgaaatcaagccaatggagttactggaa

SEQ ID NO: 467027 - DNA, 75 bp, synthetic construct
  source 1..75: mol_type = other DNA
acgcagtgaagctaggaaaatcctcgctgcaagatgcgatccgggtgagacaaaaaaagaagaaaaaatcgcgct

SEQ ID NO: 467028 - DNA, 75 bp, synthetic construct
  source 1..75: mol_type = other DNA
ctcatgttgagagcgggttccgttgggttgacggattgtggagtgttagaccctatctggcctttaccggcttta

SEQ ID NO: 467029 - DNA, 75 bp, synthetic construct
  source 1..75: mol_type = other DNA
aaaaataatatcgggagacaatctcattaacgttgtcatccctaaattatcgactaaacatttctctacagaaga

SEQ ID NO: 467030 - DNA, 75 bp, synthetic construct
  source 1..75: mol_type = other DNA
ggaattatttcagcatgttcgggtgttgaataattcccctgatattgcaagggctattcaggcaatggatatcga

SEQ ID NO: 467031 - DNA, 75 bp, synthetic construct
  source 1..75: mol_type = other DNA
ctcatcttggtaaaggtcttgtgccgggtagtgcagttggtgtgaggctcgcttttgatggttatgcttcacgaa

SEQ ID NO: 467032 - DNA, 75 bp, synthetic construct
  source 1..75: mol_type = other DNA
aacggcgctcgtaacattttagcggcggggcacgccgttcttgcctgtggagagatggtgcagtcaggccgctcg

SEQ ID NO: 467033 - DNA, 75 bp, synthetic construct
  source 1..75: mol_type = other DNA
ttcattgacacaggaacctatcaggcagctatgcgagcctgggtaagcggggtgctgaatgccttccctgagtga

SEQ ID NO: 467034 - DNA, 75 bp, synthetic construct
  source 1..75: mol_type = other DNA
aagattacaaggatatatggacgctatctaaaaaaaatatggagcaaccttacagatgatgaaatcaagatattt

SEQ ID NO: 467035 - DNA, 75 bp, synthetic construct
  source 1..75: mol_type = other DNA
gctatgtccagatattttacttgttttaggtgatagatatgagctgttgccaatcgtttctgctgcaaatattgc

SEQ ID NO: 467036 - DNA, 75 bp, synthetic construct
  source 1..75: mol_type = other DNA
tttaggtgatgagcctgctgaggcgagctttacagcattgctggacgcgcttgataaatttcccgagcttcaggt

SEQ ID NO: 467037 - DNA, 75 bp, synthetic construct
  source 1..75: mol_type = other DNA
tgcattatcccggctgaaacctgatgttttggtcattcttggcgatcgttttgaagctcttgcggcggcgcaaac

SEQ ID NO: 467038 - DNA, 75 bp, synthetic construct
  source 1..75: mol_type = other DNA
aaaagctggcaaaaaggtcagcaattagttctggtgccaaatccgcattactccggcaataaaccgaactttaag

SEQ ID NO: 467039 - DNA, 75 bp, synthetic construct
  source 1..75: mol_type = other DNA
cgccacattgcgtgctgtcaccctccgacacaatggtagggaaatcacactgccatgcgacaaattagctattgg

SEQ ID NO: 467040 - DNA, 75 bp, synthetic construct
  source 1..75: mol_type = other DNA
gttggtttagataatttatctcgaatgacttttttatctcgtgaggatttcgaaaaggctattaaccataaatta

SEQ ID NO: 467041 - DNA, 75 bp, synthetic construct
  source 1..75: mol_type = other DNA
ggtttgtggttggtggcttttttggggacggtttatattttgctattagtaaaatctatgagagtcgttttaacg

SEQ ID NO: 467042 - DNA, 75 bp, synthetic construct
  source 1..75: mol_type = other DNA
catttcgacagggctgaaaatctccggtgccagtacggcagaggcgggctcggtgatcacccagttcagtcaggc

SEQ ID NO: 467043 - DNA, 75 bp, synthetic construct
  source 1..75: mol_type = other DNA
acggaggggatttcaggactggtgaataacatcacggagatgctgaacggaaacaaagtggaatggcgcaactgg

SEQ ID NO: 467044 - DNA, 75 bp, synthetic construct
  source 1..75: mol_type = other DNA
aaattaaactcagtattgaagactgcatatgatgcggcaaagctaattgctgctaacaaagatgaagttaggata

SEQ ID NO: 467045 - DNA, 75 bp, synthetic construct
  source 1..75: mol_type = other DNA
aaaagaggcaattctgtcattgtcggaaggtaaggtgatccatgccggatacggaagctatgccgttattgaggt

SEQ ID NO: 467046 - DNA, 75 bp, synthetic construct
  source 1..75: mol_type = other DNA
gtcaaggagagaccgtcaggtaagccagttagctttttcaagatagctcacaatctcctgcgcgggaagccatta

SEQ ID NO: 467047 - DNA, 75 bp, synthetic construct
  source 1..75: mol_type = other DNA
cggtggccaatgcaaaaggcggggtgtatacctcggcaaacctgagtgcgtacagcaacagtattgtggatacgc

SEQ ID NO: 467048 - DNA, 75 bp, synthetic construct
  source 1..75: mol_type = other DNA
tactcgttagttacaatccagatattaatagattaagtgaggttcttaatagtattcattctcaagtagatcatc

SEQ ID NO: 467049 - DNA, 75 bp, synthetic construct
  source 1..75: mol_type = other DNA
tttttaatattgctaggatattaacatctatcatatattccgatcaaaaagtgaaaacaataaaatcggcttttt

SEQ ID NO: 467050 - DNA, 75 bp, synthetic construct
  source 1..75: mol_type = other DNA
tgtcgcggcggtgacctggcccgctggcaggggtatgaggccgggaaaaatgcctcactgcatcatggtgtgggg

SEQ ID NO: 467051 - DNA, 75 bp, synthetic construct
  source 1..75: mol_type = other DNA
tacagagatgtatgaccggctgaacaaggtttccagacagtctacagcagtgtccccaccaaaatatgcaggacc

SEQ ID NO: 467052 - DNA, 75 bp, synthetic construct
  source 1..75: mol_type = other DNA
gtaaaaactggcgctacgggtcttttgtcgttagttggtggtttgccaggaattttaatgttgggtgctggggcg

SEQ ID NO: 467053 - DNA, 75 bp, synthetic construct
  source 1..75: mol_type = other DNA
ttacatttaatccggatttgactattttcggagaaatacttgaaagaatagcctctcaagtagattctgtattat

SEQ ID NO: 467054 - DNA, 75 bp, synthetic construct
  source 1..75: mol_type = other DNA
gattgatatgttgaaaaaccagttaagcaacaaaagcgatattgtagacaaaccagttaatcaacaaatcgagac

SEQ ID NO: 467055 - DNA, 75 bp, synthetic construct
  source 1..75: mol_type = other DNA
aaagaaaacaaatatatagagttagaaatgcaatctcaaatctctcacatgtttattttttaaaggcaaaaaata

SEQ ID NO: 467056 - DNA, 75 bp, synthetic construct
  source 1..75: mol_type = other DNA
gctcatgcaaatggacgcttagcgccgtaacacttggcattgaatatattgatgccactcaccttggtaaggatc

SEQ ID NO: 467057 - DNA, 75 bp, synthetic construct
  source 1..75: mol_type = other DNA
agatgcggctggcgcagggtattcagaaacagacgctgcataacgaaacggcggctatccgtaaaatcctgacgc

SEQ ID NO: 467058 - DNA, 75 bp, synthetic construct
  source 1..75: mol_type = other DNA
acagcttgagcaatggcttaaggagcaaggcggatacaaggggactatcgacgatttggcgttacatgcattcgg

SEQ ID NO: 467059 - DNA, 75 bp, synthetic construct
  source 1..75: mol_type = other DNA
taggcatgaacaagcgcgctcgcaagatgacgcggcaagatgtcgctgaggcaatgggcttcaaaggcaaaggcg

SEQ ID NO: 467060 - DNA, 75 bp, synthetic construct
  source 1..75: mol_type = other DNA
ttgttaccttggtcccaacataatgaaaggtaacgataaatccctttacttggaacctgggtggaatgctaacct

SEQ ID NO: 467061 - DNA, 75 bp, synthetic construct
  source 1..75: mol_type = other DNA
ttgggcgttgatcttagaaaggcttaccttcccggcgttgacatgaggaattgttaccttggtaaaaaaacaata

SEQ ID NO: 467062 - DNA, 75 bp, synthetic construct
  source 1..75: mol_type = other DNA
ttgttaccttggtaaaaaaacaatgaaaggtaaagatgaaatcctttatgagcaacctgggtggaatgctaacct

SEQ ID NO: 467063 - DNA, 75 bp, synthetic construct
  source 1..75: mol_type = other DNA
agcgggttacagggaaaaggggcagttattccctgtaaattcaggaactcctcagggggggaataatttctcctg

SEQ ID NO: 467064 - DNA, 75 bp, synthetic construct
  source 1..75: mol_type = other DNA
atgagcaaattaacccgtcttgaaaagtatcacctgaactatgtgtctcagcgtcaggcttcaaaggttgtcgcc

SEQ ID NO: 467065 - DNA, 75 bp, synthetic construct
  source 1..75: mol_type = other DNA
gtgaaaaagttaagccgacttgaaaaatatcacatgaacaaggtttcaatgcgcagcccttcaaaggttgttgcc

SEQ ID NO: 467066 - DNA, 75 bp, synthetic construct
  source 1..75: mol_type = other DNA
tttgtccggggtgttgtggcacaggctggacagcacccgccacgataaccagacgctgcgccgtgaattacagac

SEQ ID NO: 467067 - DNA, 75 bp, synthetic construct
  source 1..75: mol_type = other DNA
accgctggtcgagtacacgcgggaccggctgcaccgtgagacggtgcgcagcttcggcagcatggcaggcagtaa

SEQ ID NO: 467068 - DNA, 75 bp, synthetic construct
  source 1..75: mol_type = other DNA
agcttcagataggaacgtttgaattcctttcacaaaatacatcacatactgaacgtgaacattcccactttgatc

SEQ ID NO: 467069 - DNA, 75 bp, synthetic construct
  source 1..75: mol_type = other DNA
tgttttgtttggtgccttgttgtttattggctaaacaacaaacaacggtaggctgttttagcgctgggaaaacaa

SEQ ID NO: 467070 - DNA, 75 bp, synthetic construct
  source 1..75: mol_type = other DNA
catccgtctttcggcggtgtggctgatgcacgacccggcatacccggagagcctgcccggtgcgccactggtgcg

SEQ ID NO: 467071 - DNA, 75 bp, synthetic construct
  source 1..75: mol_type = other DNA
cattttacagacgatgacgggataccgtattcagaaacacgctacattgccttttttgaggacggcacacaagcg

SEQ ID NO: 467072 - DNA, 75 bp, synthetic construct
  source 1..75: mol_type = other DNA
cagcgccacagggcagcttgtccacagtgaagacgagggacttatcaccctctggcactacgatgcgtcggaccg

SEQ ID NO: 467073 - DNA, 75 bp, synthetic construct
  source 1..75: mol_type = other DNA
caaattttgatccattgattgaagaggcattgtttagagtaaatagaaattgtaatgtacataatcttattgtag

SEQ ID NO: 467074 - DNA, 75 bp, synthetic construct
  source 1..75: mol_type = other DNA
caaggcatcagtccgggaacaggagatccgaaggaaagaaatttatgaacgaagaccagaaccgggcggtggcgc

SEQ ID NO: 467075 - DNA, 75 bp, synthetic construct
  source 1..75: mol_type = other DNA
caggttgcgggaactcgaaaaacgcacccgtgccatcggtggtgatcctgcccgaaactgatacagaactgacag

SEQ ID NO: 467076 - DNA, 75 bp, synthetic construct
  source 1..75: mol_type = other DNA
tgctaaggagttgaatgagcaacagtttgatatcagtggaggaggtgatgatatgaaatatttatcaatcagact

SEQ ID NO: 467077 - DNA, 75 bp, synthetic construct
  source 1..75: mol_type = other DNA
ttctcggatgctttattctaatatttctcatttggatattcttgataaatttagggctgcgtattttttggctac

SEQ ID NO: 467078 - DNA, 75 bp, synthetic construct
  source 1..75: mol_type = other DNA
attacagcctttatctttagatgatataaaggagtatattaaagttggcactgatattactgaaataaaaagaga

SEQ ID NO: 467079 - DNA, 75 bp, synthetic construct
  source 1..75: mol_type = other DNA
acaatttaaaagtggtcgaaaaagccgataacgcggcgcaagtcaaagacgcgttaacgaagatgcgcgccgcag

SEQ ID NO: 467080 - DNA, 75 bp, synthetic construct
  source 1..75: mol_type = other DNA
acaatatagaaaatgatatagccaataaaatagatcttgataaagtgaatttcatgcatgaactctatactggat

SEQ ID NO: 467081 - DNA, 75 bp, synthetic construct
  source 1..75: mol_type = other DNA
ggaaaaagaagccctggcatctttaaaatattgtaactttaaaaaggtgatattcactggtaacatatcttacga

SEQ ID NO: 467082 - DNA, 75 bp, synthetic construct
  source 1..75: mol_type = other DNA
gatgcacggttacgatgcgcccatctacaccaacgtgacctatcccattacggtcaatccgccgtttgttcccac

SEQ ID NO: 467083 - DNA, 75 bp, synthetic construct
  source 1..75: mol_type = other DNA
catgaaaaatttaatggaaattaattcatgggtagaagaatttaataattatggcaaggatgcggaaagtcatta

SEQ ID NO: 467084 - DNA, 75 bp, synthetic construct
  source 1..75: mol_type = other DNA
acaatatagaaaaagatatagccaatgaaatagatattgataaagtgaatttcatgcataacctcggtgatgctg

SEQ ID NO: 467085 - DNA, 75 bp, synthetic construct
  source 1..75: mol_type = other DNA
atttcaaaaaggatggaggtaaacttaatctggataaacacatttcaaaccttatctacgttaatctttttccta

SEQ ID NO: 467086 - DNA, 75 bp, synthetic construct
  source 1..75: mol_type = other DNA
gtcaaaactggtgtggaaggtcaaataaatccccatctgaacctgtgggggaatgtgagagttcaagttggtgat

SEQ ID NO: 467087 - DNA, 75 bp, synthetic construct
  source 1..75: mol_type = other DNA
ggtggctgaacactacgggcatatcgccgtattcacacttgatgaaatccatctgattcatcctttgcaggagac

SEQ ID NO: 467088 - DNA, 75 bp, synthetic construct
  source 1..75: mol_type = other DNA
ccattaccgggcgcaggcgggtgactctgattgccgaggggcagccctgtgagcggctggctccctgccggttac

SEQ ID NO: 467089 - DNA, 75 bp, synthetic construct
  source 1..75: mol_type = other DNA
ttaaagaacttgtcaatgatgaagagtttttacggatattagatgaagaaagcctaaatgaagtagtaaatataa

SEQ ID NO: 467090 - DNA, 75 bp, synthetic construct
  source 1..75: mol_type = other DNA
ggaatggattgcatcttttttttaatgaattaagctctagaagaactacattattgcatcatgcttcaaaagagc

SEQ ID NO: 467091 - DNA, 75 bp, synthetic construct
  source 1..75: mol_type = other DNA
ttaaggtactggatgacggcatcacgaagctgaatgaagcgcaaaaatccctgctggtaagctcgcaaagtttca

SEQ ID NO: 467092 - DNA, 75 bp, synthetic construct
  source 1..75: mol_type = other DNA
atttaaaaataaatcgttctgctatttcaaacagcaaaacatttcacttccactttaattttaatgatttgcggg

SEQ ID NO: 467093 - DNA, 75 bp, synthetic construct
  source 1..75: mol_type = other DNA
agtaaatccacgcaagacgagtcgtggggtttatgataaagttttcataatcaatgaaaggaagataaacaggta

SEQ ID NO: 467094 - DNA, 75 bp, synthetic construct
  source 1..75: mol_type = other DNA
atgttcagcctcaggcccagcttgtctggatgggggttaaagctgatgaactctatgaaagtaacggtactctta

SEQ ID NO: 467095 - DNA, 75 bp, synthetic construct
  source 1..75: mol_type = other DNA
tatgagcaatatcgtggtaatggacttggaagtaatatactggcagaaatacttgcatttccaaatgaggtcgct

SEQ ID NO: 467096 - DNA, 75 bp, synthetic construct
  source 1..75: mol_type = other DNA
aataactttggcccagctacgaatgagttatttgatgaaaagatggatatctttcaaactataaatgacgaaatg

SEQ ID NO: 467097 - DNA, 75 bp, synthetic construct
  source 1..75: mol_type = other DNA
gatccgagtcgcgatggtgcccgggggccggggcatgtgctgaatggcgacaatacagacgaaaacaaacagccg

SEQ ID NO: 467098 - DNA, 75 bp, synthetic construct
  source 1..75: mol_type = other DNA
tggtggcctcagcgctcggcacgcttatcgccccggcagcaacgaatgctgaaactgccacccgcgccagtgtgg

SEQ ID NO: 467099 - DNA, 75 bp, synthetic construct
  source 1..75: mol_type = other DNA
gcaaaaagcacagcggattgaggcattcaaaggtgccgggaagggattgttccggcgtggtctggggattgccgg

SEQ ID NO: 467100 - DNA, 75 bp, synthetic construct
  source 1..75: mol_type = other DNA
tgatcatgattaatggagaggaagagtcatccattaagttatctaacccggcggggcgtctgctttatgaactta

SEQ ID NO: 467101 - DNA, 75 bp, synthetic construct
  source 1..75: mol_type = other DNA
tttcaaagcgggggattttgccgggctcagcgatatggcgcagttcgacaaaattgttgaacgggcgctcagcct

SEQ ID NO: 467102 - DNA, 75 bp, synthetic construct
  source 1..75: mol_type = other DNA
gcccggacagagcgaacagggtattgcggacgccattgccggaatgacgaaaaacaacccagccttcagtggtaa

SEQ ID NO: 467103 - DNA, 75 bp, synthetic construct
  source 1..75: mol_type = other DNA
gatccttttgccagtgcgggggcatggcaggctgccgtgcaggccattcctgttgagggcggacagttcggcgca

SEQ ID NO: 467104 - DNA, 75 bp, synthetic construct
  source 1..75: mol_type = other DNA
gtttctggcggtcgatggctgggatgcgaaaagcaatgcagacgggcagatgacggtggtgttgtctgccgcgtt

SEQ ID NO: 467105 - DNA, 75 bp, synthetic construct
  source 1..75: mol_type = other DNA
ttcactttttagtgctttttcaccatttgctttcatcatctgtgctttaatttgttgtgaaaatatggtggataa

SEQ ID NO: 467106 - DNA, 75 bp, synthetic construct
  source 1..75: mol_type = other DNA
aattaaatggatggactgcaaaaggattgccggacaaagttagccgaactataaaaaatgcgcgagtaaatgttg

SEQ ID NO: 467107 - DNA, 75 bp, synthetic construct
  source 1..75: mol_type = other DNA
cggcaaaagccattgctcacgctattctgggcggcgcagtggcggcaatacagggtaacagtgtagccgcgggag

SEQ ID NO: 467108 - DNA, 75 bp, synthetic construct
  source 1..75: mol_type = other DNA
ccaggcggcaacggctgcgcttcagggcctggcgggcggcaatatggcaggcgcgctggcaggtgcttcagcgcc

SEQ ID NO: 467109 - DNA, 75 bp, synthetic construct
  source 1..75: mol_type = other DNA
gcggattataaagtcagtcacagtgggatcagtctgagcggtggtggcagcttcggggataaatttcagggtaac

SEQ ID NO: 467110 - DNA, 75 bp, synthetic construct
  source 1..75: mol_type = other DNA
ctaaccgcaccatcatgcaggcttgcatgaccgataacgatgtcgtggtcgttgaccgtaattgccataaatcca

SEQ ID NO: 467111 - DNA, 75 bp, synthetic construct
  source 1..75: mol_type = other DNA
ccccacctggccacgcagttcggtatccgcagcatcccgacgctcgccctgttccagggtgggcgggagatcgcc

SEQ ID NO: 467112 - DNA, 75 bp, synthetic construct
  source 1..75: mol_type = other DNA
tacaacgggatgaccctgcgtgaatatgcccgtatgtcactgactgaacgtggtattggtgtttccagttataac

SEQ ID NO: 467113 - DNA, 75 bp, synthetic construct
  source 1..75: mol_type = other DNA
tacaacttcaataattttggtgcaatttaccttctgactgaaggtggcccgacaaatccggaatatagatttgct

SEQ ID NO: 467114 - DNA, 75 bp, synthetic construct
  source 1..75: mol_type = other DNA
tttttaccttcagttttggatttattttggctttagcactggctaaaaaaatatacatttcgcaaaagtctggcg

SEQ ID NO: 467115 - DNA, 75 bp, synthetic construct
  source 1..75: mol_type = other DNA
attgtgcatacattaataggtttgttcacattaggtgatgtcgcgcaaattcgaaaagggttgactgttattcag

SEQ ID NO: 467116 - DNA, 75 bp, synthetic construct
  source 1..75: mol_type = other DNA
ggctgccggcggcagttttacctttggctccatgaccggctcaggttacatcgctgcctcccgggataagatgaa

SEQ ID NO: 467117 - DNA, 75 bp, synthetic construct
  source 1..75: mol_type = other DNA
cgatcgtctgctctgtttactgacgttactgctggtgctgattctggttaccgtttcaggcgtcagtgtatttgt

SEQ ID NO: 467118 - DNA, 75 bp, synthetic construct
  source 1..75: mol_type = other DNA
accccttcggttattaccggaagaccgatcgtctgctctgtttactgacgttactgctggtgctgattctggtta

SEQ ID NO: 467119 - DNA, 75 bp, synthetic construct
  source 1..75: mol_type = other DNA
atgattaatcgtactaaactggagcacatcctcgaatatgccaggcagcagaggcatattggtcagcattgtaaa

SEQ ID NO: 467120 - DNA, 75 bp, synthetic construct
  source 1..75: mol_type = other DNA
atatctctattatccccgattacagacaaggcagggaagcggagcataaattgtcaatatactactttatgctat

SEQ ID NO: 467121 - DNA, 75 bp, synthetic construct
  source 1..75: mol_type = other DNA
gttccacagggctgcagtacttatttataagaattcatcccgaaaaaacaaaatacctcaagctataattgaaca

SEQ ID NO: 467122 - DNA, 75 bp, synthetic construct
  source 1..75: mol_type = other DNA
cgatacccaacagatgatcgattttattaacagatttaatacgaataaagggctgattgataaaaataacaattt

SEQ ID NO: 467123 - DNA, 75 bp, synthetic construct
  source 1..75: mol_type = other DNA
ggtgcactgcgttacctgcattacacgcagcgtaaacgtgaagaggcgctgctgcattaccgtcatctgctgttt

SEQ ID NO: 467124 - DNA, 75 bp, synthetic construct
  source 1..75: mol_type = other DNA
ccaccctaaaatggttccgataattacactttcaatgttgccctatgatgtactgagtgagatatacaaaaaaaa

SEQ ID NO: 467125 - DNA, 75 bp, synthetic construct
  source 1..75: mol_type = other DNA
aacagctgggagcagaacggcggcaatgaggggcaactcaatgttgaactctcgtgcgatctttatgtggtggtt

SEQ ID NO: 467126 - DNA, 75 bp, synthetic construct
  source 1..75: mol_type = other DNA
gagaacatacgccgcaatgaccagaaggtgaaaggcacgtaccgctttatcagccagccggtgaaggaggtgatt

SEQ ID NO: 467127 - DNA, 75 bp, synthetic construct
  source 1..75: mol_type = other DNA
cataaaaccggaaccactggtactggacgagcgtttttaccgcaaggcgatgcaaagaatcagcttttacgcgct

SEQ ID NO: 467128 - DNA, 75 bp, synthetic construct
  source 1..75: mol_type = other DNA
tgagagcgtcagacgccacctggcgaacaaaagagtacagctcagctctgacaccagtatctggcacaaagtgat

SEQ ID NO: 467129 - DNA, 75 bp, synthetic construct
  source 1..75: mol_type = other DNA
gcgctgacaacggtcaataacgctcagcgtgaagcgtatggctatcaggttcaggcagaaaactacaaagcccag

SEQ ID NO: 467130 - DNA, 75 bp, synthetic construct
  source 1..75: mol_type = other DNA
atcccgtcgattaacgaaggctacagcttcgatgacgtcgatgggcaggaagtcccgggtgcgaaccagggcgaa

SEQ ID NO: 467131 - DNA, 75 bp, synthetic construct
  source 1..75: mol_type = other DNA
aactgttgaagatgatcgcccgtcgtcccggcgctctccgttctctgtctcacatccttccgctggcggggattt

SEQ ID NO: 467132 - DNA, 75 bp, synthetic construct
  source 1..75: mol_type = other DNA
ttccggctactgaaccgtcgatatgaaaaagcgagcatcgtactgacgtcaaacaaagggttcgcagactgggga

SEQ ID NO: 467133 - DNA, 75 bp, synthetic construct
  source 1..75: mol_type = other DNA
cagccattacgattacgcctggctggttccaactgcagtggttgatgaattgataaatagcgaagatccggagtt

SEQ ID NO: 467134 - DNA, 75 bp, synthetic construct
  source 1..75: mol_type = other DNA
agaacactctcgatatcagcggcaacactgcccattgtgcagtctgcgataaaaatttcactgttcagccacttt

SEQ ID NO: 467135 - DNA, 75 bp, synthetic construct
  source 1..75: mol_type = other DNA
gctattaacttccagcgcacagataactcgagtgatgcctctatcctgaaggttgaggagatccactcggtcaac

SEQ ID NO: 467136 - DNA, 75 bp, synthetic construct
  source 1..75: mol_type = other DNA
gatattattcgcgccatgtcggcgggggggaaatcagcgggccaggttttacatcattacggcgcgtttggtttt

SEQ ID NO: 467137 - DNA, 75 bp, synthetic construct
  source 1..75: mol_type = other DNA
gtgataatgtcgttgataaatatcttcattccggcgtgatgtaccccggcggcaacgctctgaattacgcggtgt

SEQ ID NO: 467138 - DNA, 75 bp, synthetic construct
  source 1..75: mol_type = other DNA
tgatttaatgctttctttgctaaaagaagcggccaaaaaaatgattaacacctgtaatgagtatcagaaaagaca

SEQ ID NO: 467139 - DNA, 75 bp, synthetic construct
  source 1..75: mol_type = other DNA
cagttctattttccgaatgtgctgaagtatgatccagatcagttctccatagatttccctcagcaactttctcaa

SEQ ID NO: 467140 - DNA, 75 bp, synthetic construct
  source 1..75: mol_type = other DNA
ttggtaaaattgacactgacccggtaaatccagaaaaccagattcaggtttatgtggagaacgaagacggttctc

SEQ ID NO: 467141 - DNA, 75 bp, synthetic construct
  source 1..75: mol_type = other DNA
tgttgccagcaataaaaatggggtgctgcgcgagcatcctttgaaactatcacaagatgatctccattatatttc

SEQ ID NO: 467142 - DNA, 75 bp, synthetic construct
  source 1..75: mol_type = other DNA
ttaaccgcacaacaagcggtgttgttgagtaaagataaatcgctgaaagttcgtcaagcattagcccggacgctt

SEQ ID NO: 467143 - DNA, 75 bp, synthetic construct
  source 1..75: mol_type = other DNA
tccggcgaactcatattgacgcgtttttcgggcgctcgtcatcggcggcgcataggaacgatcgtgctctggcga

SEQ ID NO: 467144 - DNA, 75 bp, synthetic construct
  source 1..75: mol_type = other DNA
ttaaatttaatgatgagcaaacggcaagaagatcaagagcaagcctacgaagtacagctggcgctgattgataat

SEQ ID NO: 467145 - DNA, 75 bp, synthetic construct
  source 1..75: mol_type = other DNA
tcagggaatgaatgctcaggcacagggggctgctgctcagtcggctgctaaatcatcgatgaccagcactttgtt

SEQ ID NO: 467146 - DNA, 75 bp, synthetic construct
  source 1..75: mol_type = other DNA
cggtatttacgatatcatcaccaatcttcgcgataattatggcaatcctcgttgttttatttctgaaaatgggat

SEQ ID NO: 467147 - DNA, 75 bp, synthetic construct
  source 1..75: mol_type = other DNA
aaagcagggaaacggttgcagcctatgaaacctacgccaaagtttgttttgaactgtttggtgatagagttaagc

SEQ ID NO: 467148 - DNA, 75 bp, synthetic construct
  source 1..75: mol_type = other DNA
agttatttgataataaagatttaccctccggaattatcaacaaactcgatcaacagtatcgttttaactccgact

SEQ ID NO: 467149 - DNA, 75 bp, synthetic construct
  source 1..75: mol_type = other DNA
tctgtatggtcgtattttttatgactggcaatgcatgtgccacagagtggatcagtagcgaggaccttatcacct

SEQ ID NO: 467150 - DNA, 75 bp, synthetic construct
  source 1..75: mol_type = other DNA
tgatcataactttgaagtgatgaagggaattagtgcgcgaggcattattgtttccgataaagcaacgcaatttga

SEQ ID NO: 467151 - DNA, 75 bp, synthetic construct
  source 1..75: mol_type = other DNA
gaactggcgacgataaaagataaatcagatgatgaatggtggcgtgcattgctgcaaagtcgcaatgatcatttg

SEQ ID NO: 467152 - DNA, 75 bp, synthetic construct
  source 1..75: mol_type = other DNA
gattgctgaaaagtcacaatgatcatttgcggcagacggcgttgcgcaatgtacataccccagcctctttgttaa

SEQ ID NO: 467153 - DNA, 75 bp, synthetic construct
  source 1..75: mol_type = other DNA
tgcaactgttacagcaccccgatgaccagacgcgtgaatcgatggcgcagtcctggcccgctcaacagatgcatt

SEQ ID NO: 467154 - DNA, 75 bp, synthetic construct
  source 1..75: mol_type = other DNA
gcataaagtcggtgattatcctatagctgaggattattattcccgagcaattagcataccgatgtactctgctct

SEQ ID NO: 467155 - DNA, 75 bp, synthetic construct
  source 1..75: mol_type = other DNA
aggatatctcaggcgaagatattagtgctgtagtggacgtactgaaatcagattttttgactcaagggccatatg

SEQ ID NO: 467156 - DNA, 75 bp, synthetic construct
  source 1..75: mol_type = other DNA
atgtggaaaatattggtgcgcgcatcaaaagcgcccgtaaaaaactgggcttaacagaagcagacctggcacgca

SEQ ID NO: 467157 - DNA, 75 bp, synthetic construct
  source 1..75: mol_type = other DNA
acagagcaagccatcacagcccttgagcatcttcaaacctctgtagcgcgtttggtggagcgtgacggcagcacc

SEQ ID NO: 467158 - DNA, 75 bp, synthetic construct
  source 1..75: mol_type = other DNA
tatcctgtaaccgttaaaaattctgcacagcggaaaactttgtttgattatctgcggaataaaaatatcggggtt

SEQ ID NO: 467159 - DNA, 75 bp, synthetic construct
  source 1..75: mol_type = other DNA
aggatgtttctgatgaagatatccatgctgtggtggatgtactgaagtccgattttttgacgcaaggaccatgtg

SEQ ID NO: 467160 - DNA, 75 bp, synthetic construct
  source 1..75: mol_type = other DNA
tatttatcctgcggcacatgacgatgctgaacatgccgctaatattgtatggcaacacgcagaaatgttgaaagt

SEQ ID NO: 467161 - DNA, 75 bp, synthetic construct
  source 1..75: mol_type = other DNA
caattccacaacctgactttgaattagtatctttactagtgggtatgagcccagaagaagcaaagcaaagatatt

SEQ ID NO: 467162 - DNA, 75 bp, synthetic construct
  source 1..75: mol_type = other DNA
gtagaacatgcagcaaaaacgatattgttaccagcaatgcgcacattcctgaaatcgcatcctgaaatcgcatcc

SEQ ID NO: 467163 - DNA, 75 bp, synthetic construct
  source 1..75: mol_type = other DNA
cttatccccctggcaaacgtcattgggtgcgatccgctttctttgctggatgaaaaagatagcgcgtctgttatt

SEQ ID NO: 467164 - DNA, 75 bp, synthetic construct
  source 1..75: mol_type = other DNA
atgcttatcccactggcaaatgttcttggttgcgacccgatgtggttattgactggtagcaatgctgcaaaggag

SEQ ID NO: 467165 - DNA, 75 bp, synthetic construct
  source 1..75: mol_type = other DNA
gtgctgacagaagacacgtttcttagtggttatgaggcttatttttccggtctggatttagaacatccggaagcc

SEQ ID NO: 467166 - DNA, 75 bp, synthetic construct
  source 1..75: mol_type = other DNA
ggttattgggtcgggtggctcattaacgttacgtgatttacagggcgacgaggtggaagcggacaaaacgttaca

SEQ ID NO: 467167 - DNA, 75 bp, synthetic construct
  source 1..75: mol_type = other DNA
ctgttggtggctgctaatggttttatttctgctcctgttagaagacttctaatgcctgtgttttctagaggggtt

SEQ ID NO: 467168 - DNA, 75 bp, synthetic construct
  source 1..75: mol_type = other DNA
attcgtggattgaaaacagcagcggtgtaaaagaaaagtcattcatccagaacagagactcacgatctgccgcca

SEQ ID NO: 467169 - DNA, 75 bp, synthetic construct
  source 1..75: mol_type = other DNA
agcggggttttgcgaaactggaaggagctacgcaaaacgcagctgaaaaaaaagcacgcttcgtacaaagtgtac

SEQ ID NO: 467170 - DNA, 75 bp, synthetic construct
  source 1..75: mol_type = other DNA
atgttgcgccaacgctggtggttaatcccgatgctaaattgcgcttaactcgtgaagaggtgtttggtccggtgg

SEQ ID NO: 467171 - DNA, 75 bp, synthetic construct
  source 1..75: mol_type = other DNA
cataccaatgagcgctttctggtcaattcatggattgaaaacagcagcggtgtaaaagaaaagtcattcatcatt

SEQ ID NO: 467172 - DNA, 75 bp, synthetic construct
  source 1..75: mol_type = other DNA
tgctcattatattttatttaatcatttcggccagcgctcatgctgccggagggatcgcattaggtgccacgcgta

SEQ ID NO: 467173 - DNA, 75 bp, synthetic construct
  source 1..75: mol_type = other DNA
taacgcacgacagcgtcggaactggcaaaaaatgccgcgacaacggcgcaggcgggcggtgttcaggtcagtacc

SEQ ID NO: 467174 - DNA, 75 bp, synthetic construct
  source 1..75: mol_type = other DNA
tactgcgaccctccgtatgacggtgcattttctacttaccacactgacggatttaccgaggatgatcagtatcat

SEQ ID NO: 467175 - DNA, 75 bp, synthetic construct
  source 1..75: mol_type = other DNA
gatgttaatcctgatctgataaatctgtatcaagcaattaaagatgatgttaacggatttattcacttggctgag

SEQ ID NO: 467176 - DNA, 75 bp, synthetic construct
  source 1..75: mol_type = other DNA
atgcgctggcggaaccgtcgttacttgaacaactttctgccgaaactcgatggcatttatcttcctagtagtccc

SEQ ID NO: 467177 - DNA, 75 bp, synthetic construct
  source 1..75: mol_type = other DNA
acaggaactggtggtggcaaccggtggttcgttgcatcgcaagctgtgcgaacagcctgaattgctggaacatcg

SEQ ID NO: 467178 - DNA, 75 bp, synthetic construct
  source 1..75: mol_type = other DNA
acagacacttaaccaacgctgattttttcaacattaataagccaccgggcatggaattaggtggtggaggtcaag

SEQ ID NO: 467179 - DNA, 75 bp, synthetic construct
  source 1..75: mol_type = other DNA
agaagaacgattgggattgcggcttctgacgcgaaccacgcgcagcgttgttccaactgaagcgggcgagcatct

SEQ ID NO: 467180 - DNA, 75 bp, synthetic construct
  source 1..75: mol_type = other DNA
ctgacccgcgcaatcgacgggatacacgcgcggctaaattcacgcgtgacgcggggaaaactgactgctgaaacc

SEQ ID NO: 467181 - DNA, 75 bp, synthetic construct
  source 1..75: mol_type = other DNA
ttaaacgagttaagtgttgacaacgatgatgctcatgcggaaatcatccaaaaaatggaactgctaactcactaa

SEQ ID NO: 467182 - DNA, 75 bp, synthetic construct
  source 1..75: mol_type = other DNA
ttactcgactggaggagccgccattaagatttgttgaagaagctacccattcatcgcctataatggaaatgttat

SEQ ID NO: 467183 - DNA, 75 bp, synthetic construct
  source 1..75: mol_type = other DNA
cccggatgacagcgcactggctattgaagtaattaacaatagtggcactcttgaacccactggtctgaaaattcc

SEQ ID NO: 467184 - DNA, 75 bp, synthetic construct
  source 1..75: mol_type = other DNA
ctgccagtcatggacaccaggttttactgtatgacatttctgctgaagcgctgacccgcgcaatcgacgggatac

SEQ ID NO: 467185 - DNA, 75 bp, synthetic construct
  source 1..75: mol_type = other DNA
tgggctggcaacggcagcggaagttgtcgagcagttgtgtgaactgacattgagttggggtaagcagccagtgcg

SEQ ID NO: 467186 - DNA, 75 bp, synthetic construct
  source 1..75: mol_type = other DNA
atgtataactatgtacgtgaatttgcagacccgacactcgcggccctgtcggttatatatattgtcgtgacagca

SEQ ID NO: 467187 - DNA, 75 bp, synthetic construct
  source 1..75: mol_type = other DNA
tcgccgctgcgggtagtgtggacaatcaccgtgccgctgattttaccaggcctgtttggcggatggctttttgcc

SEQ ID NO: 467188 - DNA, 75 bp, synthetic construct
  source 1..75: mol_type = other DNA
tcgctgcgctggtttgaacgcgcggtgagctacgatgatttccgtcacggtttctcgtcagggctgattgtcacc

SEQ ID NO: 467189 - DNA, 75 bp, synthetic construct
  source 1..75: mol_type = other DNA
ctaaagatggactcacgatccctagtttgcataaattgtgggaaaactctcgctcacgtaagcgtttgaatacga

SEQ ID NO: 467190 - DNA, 75 bp, synthetic construct
  source 1..75: mol_type = other DNA
tatctaatagacctgaggtgctttacagcattccgttctataaggatttgcctccccttcctttaaaaattgatt

SEQ ID NO: 467191 - DNA, 75 bp, synthetic construct
  source 1..75: mol_type = other DNA
ggttatatatattgtcgtgacagcaacgatgttaattatcgccaataagtttttaggcctcgggaaagttttaaa

SEQ ID NO: 467192 - DNA, 75 bp, synthetic construct
  source 1..75: mol_type = other DNA
aggtcagcaggttcgtgtaaccaatacatccagtaatgaaaccttgccacgcgttgatgatgataaggttatctg

SEQ ID NO: 467193 - DNA, 75 bp, synthetic construct
  source 1..75: mol_type = other DNA
tcgggtccttcaaatctacgcggctaccggcgtaactccacacgagctgcgccctgatctctatccaaatcccac

SEQ ID NO: 467194 - DNA, 75 bp, synthetic construct
  source 1..75: mol_type = other DNA
tccttttgtcgttttctattgtattaagttatttatttttttaagaaatggttatctcaatttttttacttggga

SEQ ID NO: 467195 - DNA, 75 bp, synthetic construct
  source 1..75: mol_type = other DNA
gatcagccttatttgtatatgcttgttgttagtttattttcattgttttttgttttttttgcttttatctcgtct

SEQ ID NO: 467196 - DNA, 75 bp, synthetic construct
  source 1..75: mol_type = other DNA
cagcttaccattgattatggtttgaccgatgtcgtttctgaacgttttgatgcaggcgtcctgaggtgtactggc

SEQ ID NO: 467197 - DNA, 75 bp, synthetic construct
  source 1..75: mol_type = other DNA
aggtgttcgttaccgatgcgaagatcgacgatgccgtattgtctaagagctacagcgttaaattaaatgtcgccg

SEQ ID NO: 467198 - DNA, 75 bp, synthetic construct
  source 1..75: mol_type = other DNA
tggcagctctatctggggcgttgtatttactgcggacgttgtgaagaagtgtgcccgaccagagccatccagctt

SEQ ID NO: 467199 - DNA, 75 bp, synthetic construct
  source 1..75: mol_type = other DNA
tgaaataaatcaagagcaagaaaaagcaattcatttactaaaacagaaagaaagattaagtggcatacaagattt

SEQ ID NO: 467200 - DNA, 75 bp, synthetic construct
  source 1..75: mol_type = other DNA
tcatttatcacttccaattaaaaaaccagaaaatgattcactttactttagtacaaacagaactaaagcctcata

SEQ ID NO: 467201 - DNA, 75 bp, synthetic construct
  source 1..75: mol_type = other DNA
gccataaacggcagcaacagcgacggaacggaagatgtctgtggaatgcaaatcaatagctcacactacggaaag

SEQ ID NO: 467202 - DNA, 75 bp, synthetic construct
  source 1..75: mol_type = other DNA
taacgcacgacaggcgtcggaactggcaaaaatgccgcgacaacggcgcaggcgggcggtgttcaggtcagtacc

SEQ ID NO: 467203 - DNA, 75 bp, synthetic construct
  source 1..75: mol_type = other DNA
gtacactagaagatgccgtaaatatgattcatgataatgattgtgttattcttggcggatttattggtgcagttg

SEQ ID NO: 467204 - DNA, 75 bp, synthetic construct
  source 1..75: mol_type = other DNA
agcctacgatatttttgatgaagttttatcataccctactgtctatagacatctaagaagaatatccattccact

SEQ ID NO: 467205 - DNA, 75 bp, synthetic construct
  source 1..75: mol_type = other DNA
atcccctttgaaaatatgataatcgatttatctgcactgaaaaaagatgttctggtatcgctaaaacagtgttgc

SEQ ID NO: 467206 - DNA, 75 bp, synthetic construct
  source 1..75: mol_type = other DNA
aatcatgaaacgtctggacgatgtttgcggcaaagcaggatggcgcaatgaataccgcgatattcccaacaacgg

SEQ ID NO: 467207 - DNA, 75 bp, synthetic construct
  source 1..75: mol_type = other DNA
aaggtaaaagtgaatggtcaaaatatccatttgagtaaggaagaggaagtggctgtttctgtaatggctccgttt

SEQ ID NO: 467208 - DNA, 75 bp, synthetic construct
  source 1..75: mol_type = other DNA
aatacacttaatgatgtagttcaaaatatcaggacttggctaaaagaaaatcaaaatatggtgaaagctattaag

SEQ ID NO: 467209 - DNA, 75 bp, synthetic construct
  source 1..75: mol_type = other DNA
cttaatctggataaagctcttttaaattttatccacgatgatattttccaaaatattaaaactcattataatata

SEQ ID NO: 467210 - DNA, 75 bp, synthetic construct
  source 1..75: mol_type = other DNA
atgcttaaattaaatgataatgatgaaaaagtcaaaatcaaaaatgatataaagaaaatagataaaaaattgaag

SEQ ID NO: 467211 - DNA, 75 bp, synthetic construct
  source 1..75: mol_type = other DNA
caaacgacaatgatgcctttacgctgacggcaacggttaaggatcaatacggcaaccttctgcctggcgctgtgg

SEQ ID NO: 467212 - DNA, 75 bp, synthetic construct
  source 1..75: mol_type = other DNA
ttcatggtcactcaacatcgcaatatcgccttggcgaattttatcttcatggtagcgacggtaaaccactggatt

SEQ ID NO: 467213 - DNA, 75 bp, synthetic construct
  source 1..75: mol_type = other DNA
gaccgaaaaaggtgacggttcctatgttgctacgttgactacaggcggaaagacgggcgagcttcgtgtcatgcc

SEQ ID NO: 467214 - DNA, 75 bp, synthetic construct
  source 1..75: mol_type = other DNA
ggatagcggggttgctttaccggcagaccgtgaatccctgttctggttaagtgtgcaggaaattccaccgaagcc

SEQ ID NO: 467215 - DNA, 75 bp, synthetic construct
  source 1..75: mol_type = other DNA
cgttgaggataaaaatggtaaccctgttccagggagcctggtgacctttaatctgccccggggtgtcaagccgct

SEQ ID NO: 467216 - DNA, 75 bp, synthetic construct
  source 1..75: mol_type = other DNA
aagttacgctgaatttaccgcagggtgtgaccagcaagacggggaatacagtaacaaccaatgcggcaggtaaag

SEQ ID NO: 467217 - DNA, 75 bp, synthetic construct
  source 1..75: mol_type = other DNA
ttctttgacattgaacaatatttattggggggcattgatagaaataataattatattaatgaaaatttcacttat

SEQ ID NO: 467218 - DNA, 75 bp, synthetic construct
  source 1..75: mol_type = other DNA
tcatccaccagcagacctggtatctggtggctgaacacgaagggcatatcgccttattcacacttgatgaaatcc

SEQ ID NO: 467219 - DNA, 75 bp, synthetic construct
  source 1..75: mol_type = other DNA
aacgcactgctgatgtgcgatgagtctccatgcgtgatagcaccagccagtccggttccttcgccttcagatgca

SEQ ID NO: 467220 - DNA, 75 bp, synthetic construct
  source 1..75: mol_type = other DNA
atgaaaaaacaaaaaatacttattattgaatcacgcagcgatcaggatatttatgatgagagatacgagggaaat

SEQ ID NO: 467221 - DNA, 75 bp, synthetic construct
  source 1..75: mol_type = other DNA
accgcagcgggctggccggactttttccaggccttgaccgccgtctggtgaacgctctgctgatgtgcgatgagt

SEQ ID NO: 467222 - DNA, 75 bp, synthetic construct
  source 1..75: mol_type = other DNA
gcgcagcgttgttatcaacccggcagcagggaggagccctatgcccgttattgccattatcgccattgttgtcat

SEQ ID NO: 467223 - DNA, 75 bp, synthetic construct
  source 1..75: mol_type = other DNA
gtgcctgacgtgcttatctttgcccaccgcagcgggctggccggactttttcccggccttgaccgccgtctggtg

SEQ ID NO: 467224 - DNA, 75 bp, synthetic construct
  source 1..75: mol_type = other DNA
aaatctttttttaacggtgaaaaactttaaggcagaagaaaaaaataaaccaagagaaatatatagaaaaaccag

SEQ ID NO: 467225 - DNA, 75 bp, synthetic construct
  source 1..75: mol_type = other DNA
atcccccttgaaaatatgacaatcgatttatctgtactggaaaaagatgctctgtcatcgctaaaacaatgttac

SEQ ID NO: 467226 - DNA, 75 bp, synthetic construct
  source 1..75: mol_type = other DNA
aaaaagtcaaaatcgaaaatgatataaagaaaatagataaaaaaattgaagaaatagataatgcaatccgggatc

SEQ ID NO: 467227 - DNA, 75 bp, synthetic construct
  source 1..75: mol_type = other DNA
tcattatttttcaaattctccttggaagaaccataaaagaaatctagctccatcatcaagtgagattaggttaaa

SEQ ID NO: 467228 - DNA, 75 bp, synthetic construct
  source 1..75: mol_type = other DNA
aatgctaaagcagttacaggattctgcaacaaaattaattttatcgtgcaatgaataccagaaacgccatggaaa

SEQ ID NO: 467229 - DNA, 75 bp, synthetic construct
  source 1..75: mol_type = other DNA
tgatttggggcggaagattcttaatttaaatgataatgataaaaaaggtaaagataaaatccaaaatgagataga

SEQ ID NO: 467230 - DNA, 75 bp, synthetic construct
  source 1..75: mol_type = other DNA
gattaattgcagcaggaattcctcgccagaaggtagcgatcatctatgatgttggtgtatcgacactgtataaga

SEQ ID NO: 467231 - DNA, 75 bp, synthetic construct
  source 1..75: mol_type = other DNA
cgtggctatcagagattgctaactttcgcggtcatgctgctggttacagggctgctatagaagcagcaccacaac

SEQ ID NO: 467232 - DNA, 75 bp, synthetic construct
  source 1..75: mol_type = other DNA
caggtgactggttgtacgacgacccaatcgatcttgccagggcgattcgcaaaggtccggatatgcctactgttc

SEQ ID NO: 467233 - DNA, 75 bp, synthetic construct
  source 1..75: mol_type = other DNA
cgtgcagcatttgaaaccttcatggagaaacgcttcaaagactgtatcgaccgtcgcctggtgaagaatggtgat

SEQ ID NO: 467234 - DNA, 75 bp, synthetic construct
  source 1..75: mol_type = other DNA
acatttgccaccgccctgacaaacattgaaaaatatcctgattacatttttggcgctagtcagtaccaacttttt

SEQ ID NO: 467235 - DNA, 75 bp, synthetic construct
  source 1..75: mol_type = other DNA
tctgtcgatgtccgacagacttttgataatggaaacaacatgcagcgataatgtgcatgctgttttgcaggtgga

SEQ ID NO: 467236 - DNA, 75 bp, synthetic construct
  source 1..75: mol_type = other DNA
cacttactgatcgcgggttgaattgggtacacggtacacagtatggatggattgttcgtgctggaatgcgaggga

SEQ ID NO: 467237 - DNA, 75 bp, synthetic construct
  source 1..75: mol_type = other DNA
cataagctgccggaaattcgccagattgccgatcgaattagcgtgatgcgcgacggaaccatcgccttaagcggc

SEQ ID NO: 467238 - DNA, 75 bp, synthetic construct
  source 1..75: mol_type = other DNA
gttcgcgaatttatattgaagcgccgttgtttgacacgctggttagtggatttgagcaggcggtaaaatcgttgc

SEQ ID NO: 467239 - DNA, 75 bp, synthetic construct
  source 1..75: mol_type = other DNA
ttaacctggtgcgagtagcggatggagaagaggcgttacaactggcaaacgacacggaatatggcttaactgcca

SEQ ID NO: 467240 - DNA, 75 bp, synthetic construct
  source 1..75: mol_type = other DNA
ttgcgtgctgcctttgccaacgtcactatccaaccagagccgatagtgccggatgaaatcgggccaaacgatagt

SEQ ID NO: 467241 - DNA, 75 bp, synthetic construct
  source 1..75: mol_type = other DNA
agcgtggaaggtgacgtttactcaagttgaccaggaatctaatacgttcactgctatatatttttacaaagcgga

SEQ ID NO: 467242 - DNA, 75 bp, synthetic construct
  source 1..75: mol_type = other DNA
atataacagcattaagagcagagattcgtgctaaagaaaaagacttagacaatccattgctaaaagctcttctgg

SEQ ID NO: 467243 - DNA, 75 bp, synthetic construct
  source 1..75: mol_type = other DNA
atgagtctggcggatgaggtggcggagctgcgccgccgggtggcggatatggtccggcgcggtgtggtggtggag

SEQ ID NO: 467244 - DNA, 75 bp, synthetic construct
  source 1..75: mol_type = other DNA
caatatcagactctcatagtatcagaggaagtttaacgacaaagttaatttcgtcaatgaaagtcgcgtctccaa

SEQ ID NO: 467245 - DNA, 75 bp, synthetic construct
  source 1..75: mol_type = other DNA
tcttttttttcgaaaatcaattcgtgaaaacggtgtgccttatgctgtaccaatttcattggcttttctgcttac

SEQ ID NO: 467246 - DNA, 75 bp, synthetic construct
  source 1..75: mol_type = other DNA
cggcaattgatgcgcatgatgacgcagtccaggccgtttaccgtaaagcgcatttcagcggcggcgggtcttccg

SEQ ID NO: 467247 - DNA, 75 bp, synthetic construct
  source 1..75: mol_type = other DNA
gctccgaccgtcaaaacgacgacggaactcaccttcaccgtgaaggatgcgtacggggaacccggtcaccgggct

SEQ ID NO: 467248 - DNA, 75 bp, synthetic construct
  source 1..75: mol_type = other DNA
aagatggggggttaacattgtttcgaataaaaataataaatgtgaaatttattttgatggttttggtgaatgtgg

SEQ ID NO: 467249 - DNA, 75 bp, synthetic construct
  source 1..75: mol_type = other DNA
agattttaaaccgcttccggcggaaatccgttcgcttttcccaagtgaatttgaagaaacggagttgggttgggt

SEQ ID NO: 467250 - DNA, 75 bp, synthetic construct
  source 1..75: mol_type = other DNA
ctggtgtgaaagtgggtgagcgtgtagattatgctctattctgccaaggtgttcccgttatgtttattgaggcca

SEQ ID NO: 467251 - DNA, 75 bp, synthetic construct
  source 1..75: mol_type = other DNA
acctgcttattcgcaccttccctagcatttcagtattacctgaataaaatgcattataccattcttttcttatta

SEQ ID NO: 467252 - DNA, 75 bp, synthetic construct
  source 1..75: mol_type = other DNA
atgcagtccgggcgttacatgcaggtcagtaattacccggcaccaggagatgcggtcacggtgatatcggaggcg

SEQ ID NO: 467253 - DNA, 75 bp, synthetic construct
  source 1..75: mol_type = other DNA
ttcctgaagaacggcgtcattcagggctttgttgttcaggatgcataccagattggctatcaagggatcaaaacg

SEQ ID NO: 467254 - DNA, 75 bp, synthetic construct
  source 1..75: mol_type = other DNA
ggaaggcttcatggagcgtatgaaagaaaaatatcctgacattaaagtcttacccgttcagtacagcgatggtga

SEQ ID NO: 467255 - DNA, 75 bp, synthetic construct
  source 1..75: mol_type = other DNA
gaaaaatatcctgacattaaagtcttacccgttcagtacagcgatggtgacccgcaaaaagcgatggataaaact

SEQ ID NO: 467256 - DNA, 75 bp, synthetic construct
  source 1..75: mol_type = other DNA
caacgatactaggatctgatgaaatagatttaggtcgcgttatcggtgagctaattgatcatcgtaagcttatta

SEQ ID NO: 467257 - DNA, 75 bp, synthetic construct
  source 1..75: mol_type = other DNA
gtttacgaacaagtctccatttcgctatgttagaagcgaaaaataaagtacttatgatatctggggcaagcccga

SEQ ID NO: 467258 - DNA, 75 bp, synthetic construct
  source 1..75: mol_type = other DNA
atattgacattagtactttatacattcctcagaataatggaaccaagactccggaaataattcttactattaaag

SEQ ID NO: 467259 - DNA, 75 bp, synthetic construct
  source 1..75: mol_type = other DNA
tgttactgatcaagggaaagatacaggtatattgacactttctttgacaggagatgatccggtcctaattgagcg

SEQ ID NO: 467260 - DNA, 75 bp, synthetic construct
  source 1..75: mol_type = other DNA
tacgtactagcctgcattttgcaatgatggaagcaaaaaataatgttttaatgatttcaggtgctagcccgaacg

SEQ ID NO: 467261 - DNA, 75 bp, synthetic construct
  source 1..75: mol_type = other DNA
ttaactatggaggcaaaatctatcctcgatcagattgtaaatgtagacaatcaattaaactctctaacttttagg

SEQ ID NO: 467262 - DNA, 75 bp, synthetic construct
  source 1..75: mol_type = other DNA
gtcgggactccgttatatggtcagggtatatcattattagtgagtaaaatagatgccgaaaagggaagtcaattt

SEQ ID NO: 467263 - DNA, 75 bp, synthetic construct
  source 1..75: mol_type = other DNA
gtgtggatcactattgcaccgttcgtgacaccagtgagcaagaaaagaaccaaaatgagccttgggacatatcct

SEQ ID NO: 467264 - DNA, 75 bp, synthetic construct
  source 1..75: mol_type = other DNA
gtaagcctaaaaaacagaatatgccagcattacccccttccgagttaccccgcttcctgatggtgttaaacaatg

SEQ ID NO: 467265 - DNA, 75 bp, synthetic construct
  source 1..75: mol_type = other DNA
attaacaagagcttcaagtggagactttgattatataactcgtggtaaaaatccaccgaatcctgctgagttact

SEQ ID NO: 467266 - DNA, 75 bp, synthetic construct
  source 1..75: mol_type = other DNA
gcgacgcctatttaccaatctaatgctttaatacaagttgagcaaaagcaagggaacgcgatactaagtagcctt

SEQ ID NO: 467267 - DNA, 75 bp, synthetic construct
  source 1..75: mol_type = other DNA
tcaaacatttgagtctgcaaattttgactttataacaagaggggttgtgccacctaaccctgccgagttattgat

SEQ ID NO: 467268 - DNA, 75 bp, synthetic construct
  source 1..75: mol_type = other DNA
cccttcagggtcttgtcattctgatataaaaaacacatttgattctctattaacaacttttctcattgtttatct

SEQ ID NO: 467269 - DNA, 75 bp, synthetic construct
  source 1..75: mol_type = other DNA
atgcgtcagagagagcttgcagccacagctaaggccttcatgttggataggcctgaagtctcactacaggagctt

SEQ ID NO: 467270 - DNA, 75 bp, synthetic construct
  source 1..75: mol_type = other DNA
cggcaaaaccattacggaacgacaggcagcagaagggcttatctccaacgtgctgcgtgtggagcggtcactgga

SEQ ID NO: 467271 - DNA, 75 bp, synthetic construct
  source 1..75: mol_type = other DNA
cggcaaaaccatcacggaacgacaggcagcggaagggctgatctccaacgtgctgcgtgtggagcgggcgttgga

SEQ ID NO: 467272 - DNA, 75 bp, synthetic construct
  source 1..75: mol_type = other DNA
aacatttaacctggaacagaacgccgagtttctggcgaagggcggagtgatagcgggtcagggaagccagataac

SEQ ID NO: 467273 - DNA, 75 bp, synthetic construct
  source 1..75: mol_type = other DNA
ttggtaacacgtcaggcgtcattcctggcaaaaccattacggaacgacaggcagcagaaggactgatttccaacg

SEQ ID NO: 467274 - DNA, 75 bp, synthetic construct
  source 1..75: mol_type = other DNA
cgtttgccttcaacgtggggacgggcaatgcctgcagttccacgctggtgaaattgctcaaccagcggcgctggg

SEQ ID NO: 467275 - DNA, 75 bp, synthetic construct
  source 1..75: mol_type = other DNA
gtgggcgggtacagtgacaggcaggctgttgcggtgggcatgggatatcgctttaacgagcaggctgcggcaaag

SEQ ID NO: 467276 - DNA, 75 bp, synthetic construct
  source 1..75: mol_type = other DNA
tttaccagaaacatatcgagccggatattgatattgtaaaactacgaaatgagatcccagattatttgaggtgtg

SEQ ID NO: 467277 - DNA, 75 bp, synthetic construct
  source 1..75: mol_type = other DNA
acatgtttgccgggctcagcgggctgtcactggctgcatttatagtgattggtgggctattttcatctgccggcg

SEQ ID NO: 467278 - DNA, 75 bp, synthetic construct
  source 1..75: mol_type = other DNA
gcaggcatgtaaccagctaccgcgctggatttacgttaacggtgtgaaaaataaaggtctggagaaccgccgcgc

SEQ ID NO: 467279 - DNA, 75 bp, synthetic construct
  source 1..75: mol_type = other DNA
gcctgcctgacggttaagcccccgcaacatgtctacgatgcgctggtgagtattggtttcaatgtggggaccggc

SEQ ID NO: 467280 - DNA, 75 bp, synthetic construct
  source 1..75: mol_type = other DNA
gaaactgattgccgattacgagggatgtcgtttgcagccgtatcagtgcagcgcaggtgtctggactgacgggat

SEQ ID NO: 467281 - DNA, 75 bp, synthetic construct
  source 1..75: mol_type = other DNA
gttcacattatgatatcgttgttttggatacacctccaattctcgcagtaacagatgccgcaataataggtaaat

SEQ ID NO: 467282 - DNA, 75 bp, synthetic construct
  source 1..75: mol_type = other DNA
cgctcacagttaaaaaattagattttattaattttaaaggaagtgattatcctgacttagttattactgtaattg

SEQ ID NO: 467283 - DNA, 75 bp, synthetic construct
  source 1..75: mol_type = other DNA
tatatatgcagttattaaataggcaacaagaattaagcattgccaagtcgagtgcaattggtaatgtgagaatta

SEQ ID NO: 467284 - DNA, 75 bp, synthetic construct
  source 1..75: mol_type = other DNA
ttagaggattacgcacaagcctgcactttgcaatgatggaggctagaaacaatattttaatgatatcaggtgcaa

SEQ ID NO: 467285 - DNA, 75 bp, synthetic construct
  source 1..75: mol_type = other DNA
ggctgggacggcgacaggctgacgacggtacagaccgacaccacgcgtatccagacggtataccagccggggagc

SEQ ID NO: 467286 - DNA, 75 bp, synthetic construct
  source 1..75: mol_type = other DNA
gatttgacaatggaagcaaagtcagtattagatcaaattgttaatgtggataaccagcttaatgagatcacattc

SEQ ID NO: 467287 - DNA, 75 bp, synthetic construct
  source 1..75: mol_type = other DNA
ctaatcatagttgttgggttctttctgggtgtatttatctctgtcttatttgttttattaagggtgtatttgcga

SEQ ID NO: 467288 - DNA, 75 bp, synthetic construct
  source 1..75: mol_type = other DNA
ggtatctcacaagatcatgcagaagatatctggcgaagcctggagagaaatatctttcccggcttgggtaatgtt

SEQ ID NO: 467289 - DNA, 75 bp, synthetic construct
  source 1..75: mol_type = other DNA
gaagaagaattggtatttcaggtatgcagtgccggtgaccaaaaagcgaactaaggtgagcttaggaacatatcc

SEQ ID NO: 467290 - DNA, 75 bp, synthetic construct
  source 1..75: mol_type = other DNA
atctggccgaaagagtggttctcatgcagtggtggagtaactatgttcaagctcaaaggctgaaagccgttgcag

SEQ ID NO: 467291 - DNA, 75 bp, synthetic construct
  source 1..75: mol_type = other DNA
agtaactgatcagggaaaagacactggaatattaacattaacattgagaggtgaagaccctaagcatttagaaca

SEQ ID NO: 467292 - DNA, 75 bp, synthetic construct
  source 1..75: mol_type = other DNA
ggcgtttcatattgccggttttgagccagaaattgtcactcgggtaaatgatattttctcgatgattaacttggt

SEQ ID NO: 467293 - DNA, 75 bp, synthetic construct
  source 1..75: mol_type = other DNA
ccagtatcaaagctccactcaatcacatgcatgaacaaacagctaatgcggccataatccgtatgggtttcggag

SEQ ID NO: 467294 - DNA, 75 bp, synthetic construct
  source 1..75: mol_type = other DNA
tctaagtatttcggagcaaggcaaagatacaggcatgttagaattaacattgataggtgcgaatccaaccttaat

SEQ ID NO: 467295 - DNA, 75 bp, synthetic construct
  source 1..75: mol_type = other DNA
gtgcttttgggtatagtggctggctcaatgttatctattggcttggttttattaaaagtctttttaagacgtgga

SEQ ID NO: 467296 - DNA, 75 bp, synthetic construct
  source 1..75: mol_type = other DNA
ccgaaaagggaaatgataatttcgatttaggcaaactccttggcgagttgatcgatcatcgaaaattgataattt

SEQ ID NO: 467297 - DNA, 75 bp, synthetic construct
  source 1..75: mol_type = other DNA
atagttttatcgggaatattaataggtatcatattttcagtcataattgtattgttgcgtgtgtttttaagacgt

SEQ ID NO: 467298 - DNA, 75 bp, synthetic construct
  source 1..75: mol_type = other DNA
gttattgcgcaaacaggtaagaaggttctctatattgatgtagatatgcgtaaagggtacacacatagactattc

SEQ ID NO: 467299 - DNA, 75 bp, synthetic construct
  source 1..75: mol_type = other DNA
atgtgaacgatgcgagtgaaatcgatttatctagattagttggagagctaatcgatcatcgaaaattaattatat

SEQ ID NO: 467300 - DNA, 75 bp, synthetic construct
  source 1..75: mol_type = other DNA
tttgaatggtgtagttaaaaaagccagcagttattatagctatggctacacacattacggatattcttataaaga

SEQ ID NO: 467301 - DNA, 75 bp, synthetic construct
  source 1..75: mol_type = other DNA
attatattaggagttcttctcggtggcttaatctctgttggtgtcgttttactaagagtatcatttagaagagga

SEQ ID NO: 467302 - DNA, 75 bp, synthetic construct
  source 1..75: mol_type = other DNA
gactcagcgcagatgaaattgacattggtcgtctgtatggtgaattaattgaccatcgtaaattgattctaagta

SEQ ID NO: 467303 - DNA, 75 bp, synthetic construct
  source 1..75: mol_type = other DNA
gtttacgtacaagtctgcattttgcaatgatggagtctaaaaataatgtgttgatgatatcaggtgcaagcccta

SEQ ID NO: 467304 - DNA, 75 bp, synthetic construct
  source 1..75: mol_type = other DNA
gcaaaatattattcagaaaatccctgtaggagactttgatttcataccaagaggcattgttccacctaatcctgc

SEQ ID NO: 467305 - DNA, 75 bp, synthetic construct
  source 1..75: mol_type = other DNA
aaataaagggctcgggtgaactggatttaggtcgccttttaggtgaattaattgatcacagaaagcttattatat

SEQ ID NO: 467306 - DNA, 75 bp, synthetic construct
  source 1..75: mol_type = other DNA
gctaagtctgtacttgatcagattgtaaatgttgacaatcaactcaatgagttaacattccgcgagtcagaaata

SEQ ID NO: 467307 - DNA, 75 bp, synthetic construct
  source 1..75: mol_type = other DNA
agtgaaggcgagttcatcggttcgctgttttctctgtttacgaagtttggcattaaggatgaagacggctcgctg

SEQ ID NO: 467308 - DNA, 75 bp, synthetic construct
  source 1..75: mol_type = other DNA
cagtcaatcacttacgacctgtacgggaaaggacacgctgttggtaggctggctgaggtgctgaagacagcttta

SEQ ID NO: 467309 - DNA, 75 bp, synthetic construct
  source 1..75: mol_type = other DNA
atggcattaacagatctcaaagtcagaacagccaagccagcgaataagcaatataagctgactgatggtggcggt

SEQ ID NO: 467310 - DNA, 75 bp, synthetic construct
  source 1..75: mol_type = other DNA
tcatgctgctcggtaccggtacgctcgccgggattatcgccaactcggaactgaaagatgtgctcattcatggac

SEQ ID NO: 467311 - DNA, 75 bp, synthetic construct
  source 1..75: mol_type = other DNA
atcgcgcaatccccgcaatcctcggggtccgggtaaccgtggaggaaaggcaggtaaaggcgctggcatcattgc

SEQ ID NO: 467312 - DNA, 75 bp, synthetic construct
  source 1..75: mol_type = other DNA
aggcaaaggtgcagaaaatctgcaacgttatattaaagtcgtcggtgatggtaaaggcatcatgaaagatgccgc

SEQ ID NO: 467313 - DNA, 75 bp, synthetic construct
  source 1..75: mol_type = other DNA
agataattataatggtaaagaactgactcgcctcgcactaaaactgaatatccatgttttccttcgggcaagcga

SEQ ID NO: 467314 - DNA, 75 bp, synthetic construct
  source 1..75: mol_type = other DNA
gatgcagtggtggtcagattatcttagtctgaaccagaaggaatatattgctccttacatctatgcccggcggtc

SEQ ID NO: 467315 - DNA, 75 bp, synthetic construct
  source 1..75: mol_type = other DNA
ggaggccataaatacttttgagctcgttgcccgtcaatggcataagagcaataaaaaatggtccgaaactcacag

SEQ ID NO: 467316 - DNA, 75 bp, synthetic construct
  source 1..75: mol_type = other DNA
gacatgcagcctgatgagggtcctctcttcgggatgactccgagcgcctactctagctggtttaactcaagggtc

SEQ ID NO: 467317 - DNA, 75 bp, synthetic construct
  source 1..75: mol_type = other DNA
ttggcgcttggtgtttatcccgaagtgtctttagcagaagctcgtcgtagaagagaagaagcaaggcaactcatt

SEQ ID NO: 467318 - DNA, 75 bp, synthetic construct
  source 1..75: mol_type = other DNA
attgaagagctgaagactcgcgatctgcttgcacctattaaagttgtcgaagcaacaggccgtcttgaagttgct

SEQ ID NO: 467319 - DNA, 75 bp, synthetic construct
  source 1..75: mol_type = other DNA
ctaatggtcactggcgcgcaaggcattaccaatgccgtgctgcgcattctcgcagcaggtgtactggccggcgtg

SEQ ID NO: 467320 - DNA, 75 bp, synthetic construct
  source 1..75: mol_type = other DNA
tccgcgctttcctgctgcgcattcgtgccctcgaaatgaagggagaaagcgccccgcagtccgtggccactggcg

SEQ ID NO: 467321 - DNA, 75 bp, synthetic construct
  source 1..75: mol_type = other DNA
ggcataaggttagcgcttgaagtcctgaccgcagcacagcagagggtagacactggtgatacctctggtctgatt

SEQ ID NO: 467322 - DNA, 75 bp, synthetic construct
  source 1..75: mol_type = other DNA
accgggatatcacaaaactcaacactccggacctgcttatcccagttcgcgctgcagaggctaaacagatttatg

SEQ ID NO: 467323 - DNA, 75 bp, synthetic construct
  source 1..75: mol_type = other DNA
atgataaggccagtaccatgctgtccgcctgtacatcaggagataagtacgtcggcacgcattttacggtgttct

SEQ ID NO: 467324 - DNA, 75 bp, synthetic construct
  source 1..75: mol_type = other DNA
cactcaccggcgtggacatgaaactctacaaaagccccgccctcagaatggcgcgggctaaagagctggtacaga

SEQ ID NO: 467325 - DNA, 75 bp, synthetic construct
  source 1..75: mol_type = other DNA
ttacgcagccctgcgaagagaatgatgctcgccagaaagctggctgaaaatggcgagacagaagcggaggggtaa

SEQ ID NO: 467326 - DNA, 75 bp, synthetic construct
  source 1..75: mol_type = other DNA
actgaccacatctacgtcactaccggttctttggcttatgaacaactgaaagttctgagtgaagaggtaggaact

SEQ ID NO: 467327 - DNA, 75 bp, synthetic construct
  source 1..75: mol_type = other DNA
gccatgtgcaaacatatgaacttcacctatgcaccaagccagactcaatactggaatcacggttacagcaccgaa

SEQ ID NO: 467328 - DNA, 75 bp, synthetic construct
  source 1..75: mol_type = other DNA
ggtttcattctgaagttggaagtaacaggacatcaaaagccgaaattaagaaggtgattcctactataagtgcat

SEQ ID NO: 467329 - DNA, 75 bp, synthetic construct
  source 1..75: mol_type = other DNA
cgccccgctctgaatctttcacgcctgcctgaacttctgtcgcgtattgacggttataaaggccagcctgtcacc

SEQ ID NO: 467330 - DNA, 75 bp, synthetic construct
  source 1..75: mol_type = other DNA
cccgctctgggtggctggctgtcagggactctatgctggcttctgaggtgagaccatcgacaatcaacaagctgc

SEQ ID NO: 467331 - DNA, 75 bp, synthetic construct
  source 1..75: mol_type = other DNA
acacacggctcacacgacctctgaggcccgtagatgggcgtctctggtgtctgtggtcactggcgctcggtctgc

SEQ ID NO: 467332 - DNA, 75 bp, synthetic construct
  source 1..75: mol_type = other DNA
aagactttttcacatttatcgctcagatatttaatcctaagacggattctgataaaatattcgcggctgtacagt

SEQ ID NO: 467333 - DNA, 75 bp, synthetic construct
  source 1..75: mol_type = other DNA
gtggctgtgtcattgaggtgatgggaacgtatgaggctgccatagtccgggtcaccattggcgaatacggtgcaa

SEQ ID NO: 467334 - DNA, 75 bp, synthetic construct
  source 1..75: mol_type = other DNA
atagagacggtgggcagtaaccagatcattaacgtgggttctgttcaggtggaaacgattggacttgttcgtgcg

SEQ ID NO: 467335 - DNA, 75 bp, synthetic construct
  source 1..75: mol_type = other DNA
atgttcagacattaaacgctgctaacaaccagttgaaaaatataaatcttgatttcctgacttttcttccatcta

SEQ ID NO: 467336 - DNA, 75 bp, synthetic construct
  source 1..75: mol_type = other DNA
acgcaaattcagccatacaaatcaaaccagcaaactgggttatgattgttccaacaaacttaattagcgaaattc

SEQ ID NO: 467337 - DNA, 75 bp, synthetic construct
  source 1..75: mol_type = other DNA
gccatcaacgacaagatgaatcatgagccgctggccgtggtcaacagcattctgttatcggatgcctcgtttttg

SEQ ID NO: 467338 - DNA, 75 bp, synthetic construct
  source 1..75: mol_type = other DNA
ggagttgtccgtacgcccggggtggacatactcgtctttcgttaccatgaggagcgggtgttctgtacgctttac

SEQ ID NO: 467339 - DNA, 75 bp, synthetic construct
  source 1..75: mol_type = other DNA
ctggctgaagagccaccataaaatggatgacggtaaatcccgcgagttccagccgtttgtagaagtgaactggct

SEQ ID NO: 467340 - DNA, 75 bp, synthetic construct
  source 1..75: mol_type = other DNA
caactggtatttgaccagtgggaataattcaccggatccgcagccgaatccagagccgacgccgactccaaagcc

SEQ ID NO: 467341 - DNA, 75 bp, synthetic construct
  source 1..75: mol_type = other DNA
gctatggcctgacgcagcttgatttacagggcctgtatattggctatggcctgacgcagcttgatttacaggcta

SEQ ID NO: 467342 - DNA, 75 bp, synthetic construct
  source 1..75: mol_type = other DNA
tacaatgaggcgataagagaggaaccgatagactttctggacagaacgttttcctccagctcatggcctttttag

SEQ ID NO: 467343 - DNA, 75 bp, synthetic construct
  source 1..75: mol_type = other DNA
attatgcattctatggatatatcgatgtggctactgatgctgtcgctgttatttctgaagacagaaacatcggtc

SEQ ID NO: 467344 - DNA, 75 bp, synthetic construct
  source 1..75: mol_type = other DNA
aggcagcagggattattgatgccgaaaaaattgagtttgtgtgggcagatacatctgacaagaaaatcaccttaa

SEQ ID NO: 467345 - DNA, 75 bp, synthetic construct
  source 1..75: mol_type = other DNA
gtctcactggtctggattatcctcaccatcatctgggctttcagagccagagcggctctgcaacaatatgcactg

SEQ ID NO: 467346 - DNA, 75 bp, synthetic construct
  source 1..75: mol_type = other DNA
gcaagttagaggattaacgtttacctcaatgagcgattttattaagaagcaaccttatttattagtaaatgaaaa

SEQ ID NO: 467347 - DNA, 75 bp, synthetic construct
  source 1..75: mol_type = other DNA
tgggaacataacgataataaaaatatatttttagaatgttttaagctgtgctcacaagaaatcattacaaacgca

SEQ ID NO: 467348 - DNA, 75 bp, synthetic construct
  source 1..75: mol_type = other DNA
acaagttcgtggacttgcattcaattcattgatcgattttacgaaagagcatcccttcgttattactaataaaat

SEQ ID NO: 467349 - DNA, 75 bp, synthetic construct
  source 1..75: mol_type = other DNA
cgaagagcaataccccgtccatcgcgcaacaaacgcgcgaagtgctggagaaaatcgacgaattacttgcggcag

SEQ ID NO: 467350 - DNA, 75 bp, synthetic construct
  source 1..75: mol_type = other DNA
acgacgtatgggttagctggctgccagagggacatagcccggctcgcgctaccgtacaggctgagatggcccgcc

SEQ ID NO: 467351 - DNA, 75 bp, synthetic construct
  source 1..75: mol_type = other DNA
gaaagttattgtcagagcctaatgttgatatagtctggattcctgttgagcaggctattttcaaagagtgggaaa

SEQ ID NO: 467352 - DNA, 75 bp, synthetic construct
  source 1..75: mol_type = other DNA
tgaattgatattggttggttgctttggacttctatctacatttcctttctatagtaaagaggaaaggcgatcatt

SEQ ID NO: 467353 - DNA, 75 bp, synthetic construct
  source 1..75: mol_type = other DNA
attaatatgtatcgtaacgcttccactgattatcaatttgggcacactgccaatattatcgatcaatattgcagt

SEQ ID NO: 467354 - DNA, 75 bp, synthetic construct
  source 1..75: mol_type = other DNA
atgctatcagttccgttatttcatgctgcaaaagaattgtttccccatgtattaaaaatcgtcaagattaagtca

SEQ ID NO: 467355 - DNA, 75 bp, synthetic construct
  source 1..75: mol_type = other DNA
acggcagcgtggcactgattgttgatgtctccgccttgcaggcgataaaccgcgaacaacgtatggcgaacaccg

SEQ ID NO: 467356 - DNA, 75 bp, synthetic construct
  source 1..75: mol_type = other DNA
atgcgtatatcattgatcatgactctccatatggatatatgacattaaccgatcactttgataatgctattccac

SEQ ID NO: 467357 - DNA, 75 bp, synthetic construct
  source 1..75: mol_type = other DNA
ttaacccataccgcccgccacacagtgtggcattggaacggatgaaacaggccagtgtgtccccggcagaatcag

SEQ ID NO: 467358 - DNA, 75 bp, synthetic construct
  source 1..75: mol_type = other DNA
ccgaacaaaacgggaagaatacctgttgatgagtggagatgagttcatggaaaggttctcctggcatgtggcgga

SEQ ID NO: 467359 - DNA, 75 bp, synthetic construct
  source 1..75: mol_type = other DNA
tccccgttttgccgatatttttcagcagggaaaccgatggcttaactggctggagaagcagccggtgcagatgag

SEQ ID NO: 467360 - DNA, 75 bp, synthetic construct
  source 1..75: mol_type = other DNA
aggtcaaagtgaccaaatcgaagaagtcaaaatgcgccgttccatcaggtcaaaatgacacgatggaagaggtca

SEQ ID NO: 467361 - DNA, 75 bp, synthetic construct
  source 1..75: mol_type = other DNA
caggttaactaccccgaacttaatttaaaaaaaagattgcgtatcgattctgattctatctttatcagttttaat

SEQ ID NO: 467362 - DNA, 75 bp, synthetic construct
  source 1..75: mol_type = other DNA
aacacaattcaagtcatttatattgcaggttaactaccccgaacttaatttaaataaaagattgcgtatcgattc

SEQ ID NO: 467363 - DNA, 75 bp, synthetic construct
  source 1..75: mol_type = other DNA
aaaagccgaagcactcacagtgagcgaagcatttgattattgggaaaagaactattgcattcccgaaggattaag

SEQ ID NO: 467364 - DNA, 75 bp, synthetic construct
  source 1..75: mol_type = other DNA
acggacgaaatcggccaggcaactgcccaagagatgcaaaaacattcgctggtgttgtggcccttccacggtgtg

SEQ ID NO: 467365 - DNA, 75 bp, synthetic construct
  source 1..75: mol_type = other DNA
tgattgggatacgcctttaccctgggagacggaagaaacacctgtttcatcaagtgaaaaggtagctaatgataa

SEQ ID NO: 467366 - DNA, 75 bp, synthetic construct
  source 1..75: mol_type = other DNA
gaaagaacgtttccctcaatggttcactggtagcgataagccagcggcacagagtttgtatgatggtgctgttac

SEQ ID NO: 467367 - DNA, 75 bp, synthetic construct
  source 1..75: mol_type = other DNA
tgctgaaacttcctgacagatggcgggtaaattttgtcagagggaatactcaagctccaaggtattcaggaaaaa

SEQ ID NO: 467368 - DNA, 75 bp, synthetic construct
  source 1..75: mol_type = other DNA
aaatgaactatgctctgatattaaaattggctacatgtcagcctataaacgttctgctgtaactatattcggaca

SEQ ID NO: 467369 - DNA, 75 bp, synthetic construct
  source 1..75: mol_type = other DNA
tgctgaaacttcctgaccgatggcgggtaaaatttgtcagagggaatactcaagctccaatgtattcaggaaaaa

SEQ ID NO: 467370 - DNA, 75 bp, synthetic construct
  source 1..75: mol_type = other DNA
acgccgcttattccagagtagagagagcgtaaaagcaggaacctcgagtgggacatcggcaaattgcaacccata

SEQ ID NO: 467371 - DNA, 75 bp, synthetic construct
  source 1..75: mol_type = other DNA
tgggggtccggtattttgatccccgtgacggacgcacgcgtgaagttaaagtggatgtagagtccactgataagc

SEQ ID NO: 467372 - DNA, 75 bp, synthetic construct
  source 1..75: mol_type = other DNA
gttgacgtggagtcaacagataagcggcatccgtttacccagcctgaccagggcaccgcaaaacactgtgcagag

SEQ ID NO: 467373 - DNA, 75 bp, synthetic construct
  source 1..75: mol_type = other DNA
atttcagcctgacagcagaaggtaaggatatcacgaaggccataaagcggggactggcggagctgcgttacaccg

SEQ ID NO: 467374 - DNA, 75 bp, synthetic construct
  source 1..75: mol_type = other DNA
agtaccggagccagggactggcaaaacagatgcttactcctctgtttacctccttaaaagagaaaaagttttcca

SEQ ID NO: 467375 - DNA, 75 bp, synthetic construct
  source 1..75: mol_type = other DNA
taaaaaaacatttattccaggcgcagtatcggcagctacatataataacatcagctatggttttcctgtaagttt

SEQ ID NO: 467376 - DNA, 75 bp, synthetic construct
  source 1..75: mol_type = other DNA
agtgagacgatggcgctgccaccaaaaggcgcggtattaacgctgggactgggattcaacggaaatctggtgaat

SEQ ID NO: 467377 - DNA, 75 bp, synthetic construct
  source 1..75: mol_type = other DNA
atttatccacgaaaaaggctaatgacggcaccagcacagataatgattgaatattttcaacaagagatacaacga

SEQ ID NO: 467378 - DNA, 75 bp, synthetic construct
  source 1..75: mol_type = other DNA
gcctttaacggcggcattgtgggaattggtaagttgctgattaactggtcgccggcaggcctgctctataaagcc

SEQ ID NO: 467379 - DNA, 75 bp, synthetic construct
  source 1..75: mol_type = other DNA
ccccggcaggatgttatcgctcgacgaaggtggaattaccgaaggtattgcgttcagactgccggaatcgactct

SEQ ID NO: 467380 - DNA, 75 bp, synthetic construct
  source 1..75: mol_type = other DNA
gatcctcttgatgattttatgaaactaaaaataattaacgatgataatgatgctaatattattctcgagttttat

SEQ ID NO: 467381 - DNA, 75 bp, synthetic construct
  source 1..75: mol_type = other DNA
accgattcggtagtttgtattatgaatcttgttctctatgatgactatataacggttctctccagagcaaggtta

SEQ ID NO: 467382 - DNA, 75 bp, synthetic construct
  source 1..75: mol_type = other DNA
gtacatcaatcgatgaacttgcaactgcaagatgggtattcccggaaactcaaatgggatactatcattacatat

SEQ ID NO: 467383 - DNA, 75 bp, synthetic construct
  source 1..75: mol_type = other DNA
ccgccaacaacaccctgaatggtttagcgatactaagaaacctgctgttcaaaatctttatgatggtgctgtggg

SEQ ID NO: 467384 - DNA, 75 bp, synthetic construct
  source 1..75: mol_type = other DNA
gactattaacaatggccacggtcggttctgcatctgtatcagcggcttcaggggactcaatcggaagcggtaatc

SEQ ID NO: 467385 - DNA, 75 bp, synthetic construct
  source 1..75: mol_type = other DNA
ctgggcggaacgccactggtcgagtacacgcgggaccggctgcaccgggagacggtgcgcagcttcggcggggag

SEQ ID NO: 467386 - DNA, 75 bp, synthetic construct
  source 1..75: mol_type = other DNA
accaagggttagaccgtcagaagttgcagcttcatttacttgttggcgtagctctttactgattctgatttggaa

SEQ ID NO: 467387 - DNA, 75 bp, synthetic construct
  source 1..75: mol_type = other DNA
atcgctatcatgtgttgcaatcttttcctatgccacaattggcgagtagtcgcgaaataagaatattactgcctg

SEQ ID NO: 467388 - DNA, 75 bp, synthetic construct
  source 1..75: mol_type = other DNA
tttcaatgcctggcttcaggttgaaccgggcgtcacgattgtaccaggcgagttctccgccagtatgaccgccac

SEQ ID NO: 467389 - DNA, 75 bp, synthetic construct
  source 1..75: mol_type = other DNA
gaaattgattactgagcataaccgcgctcatgcggttttttcgtgtcatgagcattgctacgcccaaattatggt

SEQ ID NO: 467390 - DNA, 75 bp, synthetic construct
  source 1..75: mol_type = other DNA
cgtatacctgcatttgcgtgaaatccatcaaatctggaaaagccagctttaccccatgcttaaggccgttgaatc

SEQ ID NO: 467391 - DNA, 75 bp, synthetic construct
  source 1..75: mol_type = other DNA
cccaaccctctctcaacctgaaattgcgatcgttgatggtcaggctgttacatcttctttggctgttgctgactt

SEQ ID NO: 467392 - DNA, 75 bp, synthetic construct
  source 1..75: mol_type = other DNA
aagaaacggatctggtttccggtgatggcgagaaaaaagccaaaggtttcctgactttcccgcgcactacggata

SEQ ID NO: 467393 - DNA, 75 bp, synthetic construct
  source 1..75: mol_type = other DNA
atgatatattaccctgaggataatgttcgacagattggagagtttatttccactaataatgataataaactagtt

SEQ ID NO: 467394 - DNA, 75 bp, synthetic construct
  source 1..75: mol_type = other DNA
tcataaccttccatgaatggaaagaagtctgcaaaagcgaaacaacaccatcctttaaagatagtgtaagcaatg

SEQ ID NO: 467395 - DNA, 75 bp, synthetic construct
  source 1..75: mol_type = other DNA
gcgatcatccaggtggatgtatgccgactaccaacactggaaattcagtcatctctcccctcaaagaaaagcatc

SEQ ID NO: 467396 - DNA, 75 bp, synthetic construct
  source 1..75: mol_type = other DNA
caaatcttcaatcaggatttgatacccctcggattcaaatgtggtatgattacattgttaattttgattataaaa

SEQ ID NO: 467397 - DNA, 75 bp, synthetic construct
  source 1..75: mol_type = other DNA
ctattctgattagcatctctggatgtgctcagaaaatagatccccaaattgccgcacaagctcaacaaccagttt

SEQ ID NO: 467398 - DNA, 75 bp, synthetic construct
  source 1..75: mol_type = other DNA
ctggacattctcgcgccagtacggacgacggttggtatttgcttgaaggtgctgacccagggagccaggaggcgt

SEQ ID NO: 467399 - DNA, 75 bp, synthetic construct
  source 1..75: mol_type = other DNA
agatcaagcaaactcttgcatatggtgatctgagtgtagcgatgggtaatctcatgaatggcgttgataacagca

SEQ ID NO: 467400 - DNA, 75 bp, synthetic construct
  source 1..75: mol_type = other DNA
tctggaggctctgacctcgtgaacaacaccaaagtgatcacagaatcagccggtttgcttggagagggcttaggc

SEQ ID NO: 467401 - DNA, 75 bp, synthetic construct
  source 1..75: mol_type = other DNA
gatagtgctatgtctcttggtggtggtacgccagcgtacacggtgaatcctacattcaatctaaatcttgaggca

SEQ ID NO: 467402 - DNA, 75 bp, synthetic construct
  source 1..75: mol_type = other DNA
tggaaaaatttgaaagccagagaattcataaaacggttgatgaactggcggcaacgattgataaagaattgaatt

SEQ ID NO: 467403 - DNA, 75 bp, synthetic construct
  source 1..75: mol_type = other DNA
gcaacgattgataaagaattgaatcaagggattggcgatacggatacccgacctaatatgcggtttgtcagcatc

SEQ ID NO: 467404 - DNA, 75 bp, synthetic construct
  source 1..75: mol_type = other DNA
taaccgagctgtcgcagcgcgtcatgatgtcaaaaagcaccgtttatcgctttttacagaccatgaaaccgagct

SEQ ID NO: 467405 - DNA, 75 bp, synthetic construct
  source 1..75: mol_type = other DNA
gttgccatcggcgggggaagtacaactgacagagagtatagtgtatcttttgggacgggtaatactaatcgacaa

SEQ ID NO: 467406 - DNA, 75 bp, synthetic construct
  source 1..75: mol_type = other DNA
ggtagccattggttcatttagtaaagtaaacggtgattcagctatagcaaatggtgcgggtagtgaggcagtcgc

SEQ ID NO: 467407 - DNA, 75 bp, synthetic construct
  source 1..75: mol_type = other DNA
tttgccaaagcacgggatctggctgggataattccaccagcaggaaaaactccgccaacatttcatgaacaccgc

SEQ ID NO: 467408 - DNA, 75 bp, synthetic construct
  source 1..75: mol_type = other DNA
accttgttaacggatgcctatgatgggcaatcggaactgattacgtctttattgtctgataaatggaaaattatt

SEQ ID NO: 467409 - DNA, 75 bp, synthetic construct
  source 1..75: mol_type = other DNA
ggacttaacttatatgcagatatgttattttctgtaaaatcaattatcccagcattactagctttttccagtact

SEQ ID NO: 467410 - DNA, 75 bp, synthetic construct
  source 1..75: mol_type = other DNA
tagttggtgtaatataatttttattaaggtaagcggaaaaacaaccaaaaaaaacgcaagatgttatttttttat

SEQ ID NO: 467411 - DNA, 75 bp, synthetic construct
  source 1..75: mol_type = other DNA
tgaaattgcagaggaacagcagcaaatcgcacaggacagtatttttacaacggtcgccgctaactggttccagct

SEQ ID NO: 467412 - DNA, 75 bp, synthetic construct
  source 1..75: mol_type = other DNA
caacgcattaacgagataatgatcttcgctgtaaatacagggctgatcgatgccaatccagcttccggggttgga

SEQ ID NO: 467413 - DNA, 75 bp, synthetic construct
  source 1..75: mol_type = other DNA
tggacagcatgtatgaggctgtaaccggtgcgcccccggagtggagcagcgcatttggttttacggatgcgatta

SEQ ID NO: 467414 - DNA, 75 bp, synthetic construct
  source 1..75: mol_type = other DNA
tcggaaaaactcatctggccatagctcttggcgtgaaagcggtggatgcaggacatcgggtactgtttatgccac

SEQ ID NO: 467415 - DNA, 75 bp, synthetic construct
  source 1..75: mol_type = other DNA
agtataagtaatgaactgcggagagtattatctgcaattactgcattgaatttctatcaaggcgatgttccttct

SEQ ID NO: 467416 - DNA, 75 bp, synthetic construct
  source 1..75: mol_type = other DNA
ggaacagcaggggctgactgtgaaagatttggaacccgcaattgggaaaaaaaatcgggtttatgaggtgttgaa

SEQ ID NO: 467417 - DNA, 75 bp, synthetic construct
  source 1..75: mol_type = other DNA
ctgtaattttttgttctcattctgctttagcaggcagcactgattggcagccatcagtagggccaggacaatgta

SEQ ID NO: 467418 - DNA, 75 bp, synthetic construct
  source 1..75: mol_type = other DNA
aaaggttttcctgagttagaattgtatttggttgaaaaagaggttgataatccaactgcaatcaggaatcggtta

SEQ ID NO: 467419 - DNA, 75 bp, synthetic construct
  source 1..75: mol_type = other DNA
tcgagctgctatctcgtttacatgttgtgtgctatgtaacgaatacggaatgttcaccaatgatcgcgctggaat

SEQ ID NO: 467420 - DNA, 75 bp, synthetic construct
  source 1..75: mol_type = other DNA
agatcgatcttgagaataaactctggacgatccctgcaggacgaatgaaagccaagcgagaacatattgttcctc

SEQ ID NO: 467421 - DNA, 75 bp, synthetic construct
  source 1..75: mol_type = other DNA
ttctgcagaagatgttcagtggggaaggccccggctggcttcagacaatgacactcagtggttattcaggggtga

SEQ ID NO: 467422 - DNA, 75 bp, synthetic construct
  source 1..75: mol_type = other DNA
agtttctggtgctgcttcccggtgccgatgaaccagaggcgcacgcctgcgtgcagacgatttacaccggcgtac

SEQ ID NO: 467423 - DNA, 75 bp, synthetic construct
  source 1..75: mol_type = other DNA
aaagccttgttcgacccgctcaccggcctgcgtaatcgtcatcatctggaagataccctgcaaacccaaacggca

SEQ ID NO: 467424 - DNA, 75 bp, synthetic construct
  source 1..75: mol_type = other DNA
ctgacactgaaatcaaaagcaccaaacctgccgagaaagaggttaacctttttgacggcgatggtttgctgttgc

SEQ ID NO: 467425 - DNA, 75 bp, synthetic construct
  source 1..75: mol_type = other DNA
cgcggtggcgctgaagatgggtgcaaccaaaaaagacttcgacaataccgtcgccattcacccaacggcggcaga

SEQ ID NO: 467426 - DNA, 75 bp, synthetic construct
  source 1..75: mol_type = other DNA
caccggtggcagttgcagcgggtcgccgtctctctgaacgcctgtttaataacaagccggatgagcatctggatt

SEQ ID NO: 467427 - DNA, 75 bp, synthetic construct
  source 1..75: mol_type = other DNA
tggaaaaagacgtactccctgctattggcgagatccccgttcagcaaatcaaagcccgaacactagttgaagcac

SEQ ID NO: 467428 - DNA, 75 bp, synthetic construct
  source 1..75: mol_type = other DNA
tggaaaaagacgtatttcctgctatcggggagacccctgtccagcaaatcaaagcccgaacactggttgaagccc

SEQ ID NO: 467429 - DNA, 75 bp, synthetic construct
  source 1..75: mol_type = other DNA
tggaaaaagacatattcccagccattggagagattcccgtccaacaaatcaaagcccgtacgctagtcgaagctc

SEQ ID NO: 467430 - DNA, 75 bp, synthetic construct
  source 1..75: mol_type = other DNA
gatatcgaaaccgatatctgggcccagtctgatttagcacgactgtacgtcattaaaaaagatcctcaggttctc

SEQ ID NO: 467431 - DNA, 75 bp, synthetic construct
  source 1..75: mol_type = other DNA
tcagtttatcttactcagcgtaaagaattgatggaatggtggggggaacaatgtgtttcgcaattctcatctatt

SEQ ID NO: 467432 - DNA, 75 bp, synthetic construct
  source 1..75: mol_type = other DNA
ttccttgtctctggctgtaaggacggaatgttaaaaatgttattagagctaggactaaatggtagcaatgagtca

SEQ ID NO: 467433 - DNA, 75 bp, synthetic construct
  source 1..75: mol_type = other DNA
gatctggaaccggcaattggtaagtcaaaccgtgtttacgaagtgcttaatgggacacgaaatttgacgttacct

SEQ ID NO: 467434 - DNA, 75 bp, synthetic construct
  source 1..75: mol_type = other DNA
gcaaacgcctgtccggagatgcgcatttgcgccagtcagtcagcgatattctgaataccccgatcggcagcaggg

SEQ ID NO: 467435 - DNA, 75 bp, synthetic construct
  source 1..75: mol_type = other DNA
acttttcagtctgcttgataacccacaggatgatttcacgcgggtgagaattgtccgtgaaacggtaaccgccct

SEQ ID NO: 467436 - DNA, 75 bp, synthetic construct
  source 1..75: mol_type = other DNA
gtgcctttgctttaacgggggcattgcgtggaaactcatcgtttgcggattcaaatggaatgccggttttaagtc

SEQ ID NO: 467437 - DNA, 75 bp, synthetic construct
  source 1..75: mol_type = other DNA
tggagtcattacctgctgtattttccttcttttttactttcaccatatttatggtctttacctgtttatgtgtac

SEQ ID NO: 467438 - DNA, 75 bp, synthetic construct
  source 1..75: mol_type = other DNA
atgcttttttttaaagttagggaaggtgcgaataagcaggtcatttcttccccagctgactcgctgattaaaatt

SEQ ID NO: 467439 - DNA, 75 bp, synthetic construct
  source 1..75: mol_type = other DNA
ggacattgctggcacaaatacagagaacagattgcctgtcgtaacaggaggaatacgggtttatgggcggaagtt

SEQ ID NO: 467440 - DNA, 75 bp, synthetic construct
  source 1..75: mol_type = other DNA
tttatttgcgagcgagttttaagattctgacctgttggcgaaagggctatttgccaaaaaatgaggaatgggctt

SEQ ID NO: 467441 - DNA, 75 bp, synthetic construct
  source 1..75: mol_type = other DNA
aaattgaagaaactgataaagtagtaaaatatgaatttggacctacatcttctgactattgtagatctgattacg

SEQ ID NO: 467442 - DNA, 75 bp, synthetic construct
  source 1..75: mol_type = other DNA
agccgcgatcccagaaacgctggcaccattatttactgcggcgggttatcaggctgaaccgttataccagtttga

SEQ ID NO: 467443 - DNA, 75 bp, synthetic construct
  source 1..75: mol_type = other DNA
atgttgagtaaagagttgttgcttgtttgtgtgtcatgcctgatgctgagcgcctgttctgttgatgaaattgct

SEQ ID NO: 467444 - DNA, 75 bp, synthetic construct
  source 1..75: mol_type = other DNA
cgtcgcaaaaaagactggcaagtgacagccttcagcaattaatgaggaatattaaagatgtggctgagggaacaa

SEQ ID NO: 467445 - DNA, 75 bp, synthetic construct
  source 1..75: mol_type = other DNA
attgccagcctgaacgatcaaatctcgcgcctgacaggcgtgggggcaggggcgtcacctaacaatctgctggat

SEQ ID NO: 467446 - DNA, 75 bp, synthetic construct
  source 1..75: mol_type = other DNA
atgtgccgcgagatcggattacctctgtttccgggttttagtgccgaggccagagaaactctcctccactaccgt

SEQ ID NO: 467447 - DNA, 75 bp, synthetic construct
  source 1..75: mol_type = other DNA
ccgttgacggacttcaggggaaaaacgagtatttttagtcatcctgtttacctctttctcaggaagtttagtctc

SEQ ID NO: 467448 - DNA, 75 bp, synthetic construct
  source 1..75: mol_type = other DNA
gcaatgaaagatgcctatcaaagagacggtgtgtatcctcagtatgtagatcccttgagcctaaccgcagataat

SEQ ID NO: 467449 - DNA, 75 bp, synthetic construct
  source 1..75: mol_type = other DNA
atactcaaggtaatatttcttttgaagagtggaatggtgataaaatatctgagcttatccagcagcatttgttga

SEQ ID NO: 467450 - DNA, 75 bp, synthetic construct
  source 1..75: mol_type = other DNA
ccggtcgaaacctttatgaaagtggctgcgcaaatcagccaggggtggcccgaagagatgaaagcgttacgtatg

SEQ ID NO: 467451 - DNA, 75 bp, synthetic construct
  source 1..75: mol_type = other DNA
tcacgaggttcttgatgaaaggctgcgagagagggcgctggtgccgctcaatcgtatgctggattttgcggctac

SEQ ID NO: 467452 - DNA, 75 bp, synthetic construct
  source 1..75: mol_type = other DNA
gacagtggttatgcgcttgttccagcagtaacgccctatcgctacaaccgtatatctcttgatccacaaggaatg

SEQ ID NO: 467453 - DNA, 75 bp, synthetic construct
  source 1..75: mol_type = other DNA
cgtttatgctaatgggggaatgggatggtcagcagctgacgccctgtagcgcctggcttgccggtagcgtgattt

SEQ ID NO: 467454 - DNA, 75 bp, synthetic construct
  source 1..75: mol_type = other DNA
tggcgcatcaccgctacgggcgcggattgtggagccgtttacccgcggtgaaagattcccgcttgcagaattacc

SEQ ID NO: 467455 - DNA, 75 bp, synthetic construct
  source 1..75: mol_type = other DNA
aagccctggcgcccgatgacgcctcggttaaagcggctcgtggcctggttgcccccgcaaaatggccgacgctgg

SEQ ID NO: 467456 - DNA, 75 bp, synthetic construct
  source 1..75: mol_type = other DNA
gtggtaactataggacaaccggataaaataagagagtttaacatcgagtatgccgactcagtaacactcatggcg

SEQ ID NO: 467457 - DNA, 75 bp, synthetic construct
  source 1..75: mol_type = other DNA
tacaggtgtacgagagttatgggtacgagcaatacccactggcaatgtggggcgaattgatggaactatgactat

SEQ ID NO: 467458 - DNA, 75 bp, synthetic construct
  source 1..75: mol_type = other DNA
aagtgactaatcctgaattattagagaataagtttgatgtgcttttgcactccccgccacaaacaagttcttttt

SEQ ID NO: 467459 - DNA, 75 bp, synthetic construct
  source 1..75: mol_type = other DNA
gctgaatgaagagaacccgcatcagctgcagcagcttatccggctgccggggcagcagtatgatgaggagtccgg

SEQ ID NO: 467460 - DNA, 75 bp, synthetic construct
  source 1..75: mol_type = other DNA
aggtaaagatgagaaaatagttaaaagtaaagataacaatatcaagtcattttatttaggtacgcccagtggtaa

SEQ ID NO: 467461 - DNA, 75 bp, synthetic construct
  source 1..75: mol_type = other DNA
gtgaaaagtgcagacgtgattgccattctgaaacagcatggctgggagcatattcgcacccgtggtagtcatcat

SEQ ID NO: 467462 - DNA, 75 bp, synthetic construct
  source 1..75: mol_type = other DNA
ccacgggccaatggggaaaagtgacagggcattagtcatgggtggactgggaggactcatcgcattctgtccaca

SEQ ID NO: 467463 - DNA, 75 bp, synthetic construct
  source 1..75: mol_type = other DNA
aatgtgcattgcaggtgaatccggcaggatacataaaatatcgtgggcaacagcagaccatcacggaagatgaat

SEQ ID NO: 467464 - DNA, 75 bp, synthetic construct
  source 1..75: mol_type = other DNA
atgctcagaaactatcatgcaactctggctggattaatgctgctcagccacagtgccaacgccgtacaggctgac

SEQ ID NO: 467465 - DNA, 75 bp, synthetic construct
  source 1..75: mol_type = other DNA
ttcactgataaatctgaatcatgaaaactcgttatataatacaacattgaaactagaaggaaatgccagtgtcaa

SEQ ID NO: 467466 - DNA, 75 bp, synthetic construct
  source 1..75: mol_type = other DNA
cccctccgctcagggggattcatcatgcaggatttttttaacaaatgctcagccagacaggcaactgtcaactga

SEQ ID NO: 467467 - DNA, 75 bp, synthetic construct
  source 1..75: mol_type = other DNA
gctgcgtgttatgggttatgacacaaaggtcgatgtttgtggtcatggtttcaggactatggcatgtagctcgtt

SEQ ID NO: 467468 - DNA, 75 bp, synthetic construct
  source 1..75: mol_type = other DNA
ataaccgaacgcattcagcgcggagagttgaatgcatcaacgctggtatggcaacagggaatgacagaatggcag

SEQ ID NO: 467469 - DNA, 75 bp, synthetic construct
  source 1..75: mol_type = other DNA
taatcccccgcccacaaggcgttttttacttttttgagaaaaccgaattacgccccatttctgaccaggcatttt

SEQ ID NO: 467470 - DNA, 75 bp, synthetic construct
  source 1..75: mol_type = other DNA
tctggttgagcagcacagtgaggagctggcgcaactggaaaccctggagcaaggcaagtcaattgccatttcccg

SEQ ID NO: 467471 - DNA, 75 bp, synthetic construct
  source 1..75: mol_type = other DNA
atgaggcccgtaaacgtgagaacctgccgccccttgccggcggtgatgcactgtatcttcagcagcagaactaca

SEQ ID NO: 467472 - DNA, 75 bp, synthetic construct
  source 1..75: mol_type = other DNA
aaatacccagaggagcactatttgcgtatcttaactctcaaatagcatatcgcatcagaaagggatatcagatag

SEQ ID NO: 467473 - DNA, 75 bp, synthetic construct
  source 1..75: mol_type = other DNA
atgccaatactacatacatttatgctttatttttgcacgtgtgtgtgtctgctttatctcctcagcggaggttac

SEQ ID NO: 467474 - DNA, 75 bp, synthetic construct
  source 1..75: mol_type = other DNA
agaagcggtaccagaaagctggctggagcgcgatcttcctgacgccgatactgtcatagtcccctcaaactggca

SEQ ID NO: 467475 - DNA, 75 bp, synthetic construct
  source 1..75: mol_type = other DNA
gctgaaattgacctgtttaaccattatgaaactaaatcaactgataagtatgttttatttaaaccgcttggcgat

SEQ ID NO: 467476 - DNA, 75 bp, synthetic construct
  source 1..75: mol_type = other DNA
ggcgaactgtgcaggccacagctgatggttatgagaattttattgcccgcgtagggatgcagacacctaaccagc

SEQ ID NO: 467477 - DNA, 75 bp, synthetic construct
  source 1..75: mol_type = other DNA
tgcctacaaaaaatttgatgatgctatagatgcagaggacgaagcagttgccctagtcgagcgcacaattgagga

SEQ ID NO: 467478 - DNA, 75 bp, synthetic construct
  source 1..75: mol_type = other DNA
aagcggctgtttgcggtgagtatcacctcgtccggcaatcccccgacgttttccctgacgccggagggcaggctg

SEQ ID NO: 467479 - DNA, 75 bp, synthetic construct
  source 1..75: mol_type = other DNA
aaactgcatctggctcaggggctatgggaactgatagataacagccagcttgcagatgagatggcggagatgaag

SEQ ID NO: 467480 - DNA, 75 bp, synthetic construct
  source 1..75: mol_type = other DNA
gaacgatgtgttcctgaagcggctgtttgcggcgagtatcacgtcatccggcaaccccccgacgttttccctgac

SEQ ID NO: 467481 - DNA, 75 bp, synthetic construct
  source 1..75: mol_type = other DNA
acaatccgggccggtgagcgcactgcattatctgacggaaaatcatctgaactgggacagtgagatatggcttta

SEQ ID NO: 467482 - DNA, 75 bp, synthetic construct
  source 1..75: mol_type = other DNA
acgacagaggtatgtattttaattacgaagatattgctagtaataacatcgcctttagttggcaagatgttatgt

SEQ ID NO: 467483 - DNA, 75 bp, synthetic construct
  source 1..75: mol_type = other DNA
tggaaccctacagagaattacttgaattctatcatgctgcatatatcgaactgggacggaaaatccgtaaatact

SEQ ID NO: 467484 - DNA, 75 bp, synthetic construct
  source 1..75: mol_type = other DNA
aaatttaaggtagaaggtgaccggtcagcttttgattctgcaattgaatatttgaaacaagatgatgagatgaaa

SEQ ID NO: 467485 - DNA, 75 bp, synthetic construct
  source 1..75: mol_type = other DNA
tgttactgacgacgctgctcaatgcctcatgggcattggccgtcgatatttcggttaactttaccgcgacaatca

SEQ ID NO: 467486 - DNA, 75 bp, synthetic construct
  source 1..75: mol_type = other DNA
caacaggctaccagcaaatccacgacggtattattcacctggtcgatagcgcccggacggaaacggtacgtagcg

SEQ ID NO: 467487 - DNA, 75 bp, synthetic construct
  source 1..75: mol_type = other DNA
ccccttctggggccgttttttgttttcccaaaacaacttttccataaaccggcagcattgtccttcatcatattt

SEQ ID NO: 467488 - DNA, 75 bp, synthetic construct
  source 1..75: mol_type = other DNA
agatgagacgttatctcgcgatcgcctgcgcgctcgtcagcttattcaccgatacaatcattccctggcggaaga

SEQ ID NO: 467489 - DNA, 75 bp, synthetic construct
  source 1..75: mol_type = other DNA
aaataatatcctggatgatattggtggttataaagaaagaaatatattaatgctgcaagctataaaaaaatcata

SEQ ID NO: 467490 - DNA, 75 bp, synthetic construct
  source 1..75: mol_type = other DNA
aatgccgcaatgaaaagggatgtacccgttttgttcacagagcctgcagaagctgaagcaataaaactattttcc

SEQ ID NO: 467491 - DNA, 75 bp, synthetic construct
  source 1..75: mol_type = other DNA
tccttgcctcattcgcgggaagtgaagctgcactcctggatgcagctgagcaatatctggagcgtatcgctgata

SEQ ID NO: 467492 - DNA, 75 bp, synthetic construct
  source 1..75: mol_type = other DNA
tttgttcgatggttgctgccggagaaaaatccgggcatctcgacgtggtgcttaatcgcctggcagattacaccg

SEQ ID NO: 467493 - DNA, 75 bp, synthetic construct
  source 1..75: mol_type = other DNA
atgtcagcaaatcggcatgctggtcaccattgcttctggtattgcggggggacttgccggcaacagtacggcgtc

SEQ ID NO: 467494 - DNA, 75 bp, synthetic construct
  source 1..75: mol_type = other DNA
gctaaccagttgttgggtgccggtagcgcttacatgagcagccagattgaaggccaggatagcacgtcgtcagtg

SEQ ID NO: 467495 - DNA, 75 bp, synthetic construct
  source 1..75: mol_type = other DNA
aaacagtttgacccagaatggtatggttccgacgtggttgctggttatttcgcacaagcaaaatcgcttatcgat

SEQ ID NO: 467496 - DNA, 75 bp, synthetic construct
  source 1..75: mol_type = other DNA
atgccgttatccgtgcggtgaatggctttcaggtagccgctggcatggtacgtcagtttaagccggatcccgtcg

SEQ ID NO: 467497 - DNA, 75 bp, synthetic construct
  source 1..75: mol_type = other DNA
ggcagtagcagtggcaccaaaacggttgatttcggcagtgtttcaatctctgaagtattcacgaaaaccaaaata

SEQ ID NO: 467498 - DNA, 75 bp, synthetic construct
  source 1..75: mol_type = other DNA
attgggtttgtccgtggcttattctggcaaccagcgcatattgaattatgcgatcccattgggattggtaaatgt

SEQ ID NO: 467499 - DNA, 75 bp, synthetic construct
  source 1..75: mol_type = other DNA
cgatcccattgggattggaaaatgttcttgctgtggacaggaaagcaatttgcgttataccggttttcttaagga

SEQ ID NO: 467500 - DNA, 75 bp, synthetic construct
  source 1..75: mol_type = other DNA
gccattgtgtccgggcagggcggtgcagccgggcagcgtgagcgggtggctgaactggtcatgatggcccgggag

SEQ ID NO: 467501 - DNA, 75 bp, synthetic construct
  source 1..75: mol_type = other DNA
gtgtgtaatgccggcgcctttgttatcggtttctcagcagctggcggcattttacagctcggtgtttcggtcatg

SEQ ID NO: 467502 - DNA, 75 bp, synthetic construct
  source 1..75: mol_type = other DNA
tttgttttttcatcgagaatagttatggtagtgaccatcttaagattatctctttgaatgaagttacgtttaaag

SEQ ID NO: 467503 - DNA, 75 bp, synthetic construct
  source 1..75: mol_type = other DNA
accctactcccgaaactcatctccggcgatctatccctggaagatcttccggatctcagcaccgatacagaagct

SEQ ID NO: 467504 - DNA, 75 bp, synthetic construct
  source 1..75: mol_type = other DNA
gtaaagttcgtagttcttatttgctttcatgtattatgcaaaaaaataaaaatgttggtcttattcttcatgctc

SEQ ID NO: 467505 - DNA, 75 bp, synthetic construct
  source 1..75: mol_type = other DNA
ttaagccggatcccgtcggtgtgactgacacacgtgatccggtactggctgtcgcgctcaaacgtgatgcggttg

SEQ ID NO: 467506 - DNA, 75 bp, synthetic construct
  source 1..75: mol_type = other DNA
ccttaatcacgcagaacatccctttatgcagaccaaaggtgtcaaagcaaatgatgtgactccaatggaaaaact

SEQ ID NO: 467507 - DNA, 75 bp, synthetic construct
  source 1..75: mol_type = other DNA
aatgaatcacatacggaaaaccaacctacctggattaagcctgtcaagcccaatgaatctgtgccagcttcgtca

SEQ ID NO: 467508 - DNA, 75 bp, synthetic construct
  source 1..75: mol_type = other DNA
agttgccaacacgggcgcagggactgatatcgaaggatacaacaagctctctcacttcactattacccggagggg

SEQ ID NO: 467509 - DNA, 75 bp, synthetic construct
  source 1..75: mol_type = other DNA
gatcagtcagggtgaactgacaggtggcggaaacctgaatgttacagggggaacgctggctatcgaggggcttaa

SEQ ID NO: 467510 - DNA, 75 bp, synthetic construct
  source 1..75: mol_type = other DNA
cagttgcagtgatactggcgctgttgtcaggttgtagtggcagcgtttataacaaagaaaaaaactgcgaatatg

SEQ ID NO: 467511 - DNA, 75 bp, synthetic construct
  source 1..75: mol_type = other DNA
ccttcgacgagacagaaataaaattcaccggtgacggtaaacaggggatttttgaaggctacgcctctgttttta

SEQ ID NO: 467512 - DNA, 75 bp, synthetic construct
  source 1..75: mol_type = other DNA
aaacgaggattatctctggcgaaacaagttatgaacaagggcgtaaagaaatattggattactaccttagaataa

SEQ ID NO: 467513 - DNA, 75 bp, synthetic construct
  source 1..75: mol_type = other DNA
aagacttgagggaatggatcctagtggagtacctcgttatgaatgtttgaaaacgaggattatctctggcgaaac

SEQ ID NO: 467514 - DNA, 75 bp, synthetic construct
  source 1..75: mol_type = other DNA
atgtctggaaatataggggcaaatccaatcggaggaaatgcctccggtaagggaatagttaatatttcaacggat

SEQ ID NO: 467515 - DNA, 75 bp, synthetic construct
  source 1..75: mol_type = other DNA
cgtcagtggcaaagccagttaccggggattgcagataattgcccggtgatagtccgcttgctgggcgatatgtcg

SEQ ID NO: 467516 - DNA, 75 bp, synthetic construct
  source 1..75: mol_type = other DNA
tatcagtctggtgctgtggttacttgataccgaactcgagggaaaatttaaagttaatatgaactcggtgatgaa

SEQ ID NO: 467517 - DNA, 75 bp, synthetic construct
  source 1..75: mol_type = other DNA
cgcacccaccggtaccattacgacagtcagcaccggctggtgcactacacgcggacacaatatgcagagccgctg

SEQ ID NO: 467518 - DNA, 75 bp, synthetic construct
  source 1..75: mol_type = other DNA
atgcagctaagaattaccagtcgaaaaaaactcacctctctattatgcgctcttgggctaatttccatcgttgca

SEQ ID NO: 467519 - DNA, 75 bp, synthetic construct
  source 1..75: mol_type = other DNA
agtcacaataaaatctatatgtgaagaattacaaaaagagggggatgtaacaaatatcaattacaccgagaatgg

SEQ ID NO: 467520 - DNA, 75 bp, synthetic construct
  source 1..75: mol_type = other DNA
gtggaagaaaaagcagcgccaacgggtaaagcctatgttgtacaactgggcgcactgaaaaatgccgataaagtg

SEQ ID NO: 467521 - DNA, 75 bp, synthetic construct
  source 1..75: mol_type = other DNA
ctcataaaggaaattttatagtatccgaaaaaggtttaagactaattgacctttcaggtaaaaaaacaaccgctg

SEQ ID NO: 467522 - DNA, 75 bp, synthetic construct
  source 1..75: mol_type = other DNA
ttattccgcgcaggacagcgatattttaacggccatcggattcaggcctgatgcggcctcgcgggatgataatcg

SEQ ID NO: 467523 - DNA, 75 bp, synthetic construct
  source 1..75: mol_type = other DNA
acgcgccttcgcgggatgataatcgtgaaaaattcacccctgtacagaacatgatttatacccgccggcgtgcag

SEQ ID NO: 467524 - DNA, 75 bp, synthetic construct
  source 1..75: mol_type = other DNA
tattagttgtatcaaaatattatccggagttaatcagacaagttaatgaagatattgatagaggcaatgtatcgc

SEQ ID NO: 467525 - DNA, 75 bp, synthetic construct
  source 1..75: mol_type = other DNA
cagcgtaatctggcagtggaactgctggaaaaactgctcaatgacggcattcatgcccgttcgggcaataacgtg

SEQ ID NO: 467526 - DNA, 75 bp, synthetic construct
  source 1..75: mol_type = other DNA
ccggcacttaactcacgcagcaacatcgtggtgatttccgatgaagcgcaccgtagccagtatggcctgagcgcc

SEQ ID NO: 467527 - DNA, 75 bp, synthetic construct
  source 1..75: mol_type = other DNA
gtgaaccaggtcgccattcagggaataaagcaggttcgtcgtccggatatcattggctatatcaacggtctgccg

SEQ ID NO: 467528 - DNA, 75 bp, synthetic construct
  source 1..75: mol_type = other DNA
aggggttgctagaagcttttgagtgttctgataaaccagaaacagatatacaaaaattgcatgatctcggattta

SEQ ID NO: 467529 - DNA, 75 bp, synthetic construct
  source 1..75: mol_type = other DNA
gtatgggcacgctgatgacagtttcgaaggagctgtttaaccgagctctagctaagcaacttgataaaatgttcg

SEQ ID NO: 467530 - DNA, 75 bp, synthetic construct
  source 1..75: mol_type = other DNA
aaggtttgctcgaggctttcgaggcatcggattcacctgataccgatattattcgattaaaggatttagggttca

SEQ ID NO: 467531 - DNA, 75 bp, synthetic construct
  source 1..75: mol_type = other DNA
cgcgatgccatatcattattttctgtatgcgttaaagcgtgattctttcttagtaaggataaatatttttacgtt

SEQ ID NO: 467532 - DNA, 75 bp, synthetic construct
  source 1..75: mol_type = other DNA
gatgtatgaagacgtggacggtgtgctgcgtatcggttcacctgatgatacagctaatactattcttcccgattt

SEQ ID NO: 467533 - DNA, 75 bp, synthetic construct
  source 1..75: mol_type = other DNA
tggcttccggggcgattacgttcgaacaggtggggccagagcttcctgcaaaagttgtcgaactttcttatcaga

SEQ ID NO: 467534 - DNA, 75 bp, synthetic construct
  source 1..75: mol_type = other DNA
ggtataattcctctcaatcttattgaagttagttcaggagattatttaggtgaggatgatattgttcgtcaaaaa

SEQ ID NO: 467535 - DNA, 75 bp, synthetic construct
  source 1..75: mol_type = other DNA
gacattaatggcagcaattatgagcaaaccgtgccgtattccattacctgcgatacggcggttcgcgacccatta

SEQ ID NO: 467536 - DNA, 75 bp, synthetic construct
  source 1..75: mol_type = other DNA
gtgaaaaaactctcattacttttactctgcatctgtggcggcgtggctctggcagcaaatgaagacatcaccttt

SEQ ID NO: 467537 - DNA, 75 bp, synthetic construct
  source 1..75: mol_type = other DNA
gatcccgagtggaatatgacactcacctggacgggtacgcagaccgcctacaatgactcggctatcgaaacagac

SEQ ID NO: 467538 - DNA, 75 bp, synthetic construct
  source 1..75: mol_type = other DNA
gggcagccaaaccccttatgatgattccgccattgaaacggacgttagcggcctggggattgagctacagcaaaa

SEQ ID NO: 467539 - DNA, 75 bp, synthetic construct
  source 1..75: mol_type = other DNA
tttacggttttgctggcctgtcgcaggccgcggttaacgacgttacttttcacggcacgctggtttcgccgcccg

SEQ ID NO: 467540 - DNA, 75 bp, synthetic construct
  source 1..75: mol_type = other DNA
ccggtgttaacggctgtgccagtaaaaaagagtggtgtcgttctgccagaggcggactttgaggcctgggccacg

SEQ ID NO: 467541 - DNA, 75 bp, synthetic construct
  source 1..75: mol_type = other DNA
tatggcggtttgcccaagaatcagaatggtgctttaaaatatgcggaagtagtttcgaagttcaatgaaattgac

SEQ ID NO: 467542 - DNA, 75 bp, synthetic construct
  source 1..75: mol_type = other DNA
tgcagtggatgagcttaacctgatcacccagaaaaatgccgagctggtggaagagagtgcgcaggtgtcggcgat

SEQ ID NO: 467543 - DNA, 75 bp, synthetic construct
  source 1..75: mol_type = other DNA
aacgggatcagattctggcttcgtgcgctgcgcaacattggtgtgatcgatatcgacgatgaaagccattatcta

SEQ ID NO: 467544 - DNA, 75 bp, synthetic construct
  source 1..75: mol_type = other DNA
tttgtaccattagcgagggaaagaccattgaagtggaatttcgcgatcttatcatcgacagcatcaacggggatt

SEQ ID NO: 467545 - DNA, 75 bp, synthetic construct
  source 1..75: mol_type = other DNA
aggccgttccggttaaagcgagtgacgctgttttaaacgacggcacgttttcagcgtacgcaacattacgggtgg

SEQ ID NO: 467546 - DNA, 75 bp, synthetic construct
  source 1..75: mol_type = other DNA
accgatcataatgagctaatttgttcgagctttattgaacacattgccaacacattaaatttaggagtggtgtag

SEQ ID NO: 467547 - DNA, 75 bp, synthetic construct
  source 1..75: mol_type = other DNA
tggacaagcctaccctgactgatgccactgatattactccgctgtctgttacggcgcgacttgccgctgtcatgc

SEQ ID NO: 467548 - DNA, 75 bp, synthetic construct
  source 1..75: mol_type = other DNA
ggatgcaattgaacactccggtttgtcagaggacgaaatccgcatagcgattgaagatgctaagcgaaaaaagca

SEQ ID NO: 467549 - DNA, 75 bp, synthetic construct
  source 1..75: mol_type = other DNA
caaaaaggttgtgcccggacctgctgacggggctatctacaacaccggtgatgacgaattatctattgcccagaa

SEQ ID NO: 467550 - DNA, 75 bp, synthetic construct
  source 1..75: mol_type = other DNA
aactgaacatcatgcccggtatctgcaaaaaggttgtgccgggcccagctgacggtgccatctacaacactggcg

SEQ ID NO: 467551 - DNA, 75 bp, synthetic construct
  source 1..75: mol_type = other DNA
ttgctgaggaaaaagaacggcttgcgctggtcaataaacagcttgcaccaaaagcggctgtatgtgacgcgattg

SEQ ID NO: 467552 - DNA, 75 bp, synthetic construct
  source 1..75: mol_type = other DNA
ccagaaccatcgtactgaaagaacccagtcgcttcattccgcaatctattgaagaactttccggcatacgtgtgg

SEQ ID NO: 467553 - DNA, 75 bp, synthetic construct
  source 1..75: mol_type = other DNA
ccgactcaccattcatccgtgatattgctcgacgccgtccatccatccaggacacccactcggatggcccgcaga

SEQ ID NO: 467554 - DNA, 75 bp, synthetic construct
  source 1..75: mol_type = other DNA
ctttgtctaattcgtcagattctgaccagacggttcaggctgtacgcttacgtaacaacacataaaattactaaa

SEQ ID NO: 467555 - DNA, 75 bp, synthetic construct
  source 1..75: mol_type = other DNA
aaaacgtggaagaaacgctcaaccatcggggcattcatcggtaaacccggcgaggattaccaatgccgatgcctg

SEQ ID NO: 467556 - DNA, 75 bp, synthetic construct
  source 1..75: mol_type = other DNA
gggttcgtcgcgcgcgcgaactttcagaacaaagaacagacgcagcgcactttcttccaggcttttggaatcgac

SEQ ID NO: 467557 - DNA, 75 bp, synthetic construct
  source 1..75: mol_type = other DNA
tgcctgagaagccagcattttacgtttttgactattgccgtggctggataagccgcattccggtgctcgttcgtg

SEQ ID NO: 467558 - DNA, 75 bp, synthetic construct
  source 1..75: mol_type = other DNA
gggtgaagaaacgcttcattgagccagcgccgcgcggtaccgtgcagcgtgaccggcaaatggtgttcaaccccc

SEQ ID NO: 467559 - DNA, 75 bp, synthetic construct
  source 1..75: mol_type = other DNA
gatcccgagtggaatatgacactctcatggacggggactgccacctcctacaacgactctgctattgagacggat

SEQ ID NO: 467560 - DNA, 75 bp, synthetic construct
  source 1..75: mol_type = other DNA
aatacaaccaacgggcgttttttatttcgcctggctacgggcaaacaggtcgtcgagcttctcttcgtactggta

SEQ ID NO: 467561 - DNA, 75 bp, synthetic construct
  source 1..75: mol_type = other DNA
caagatataaatttataagagcgctaattgaagagattaaggtgtttcgtaaaattaaaaatatcaaaataatag

SEQ ID NO: 467562 - DNA, 75 bp, synthetic construct
  source 1..75: mol_type = other DNA
attaccccttcaatatcaaatgataaaatagatctccattttccttcagcattaaagattacaaatgtatcaaga

SEQ ID NO: 467563 - DNA, 75 bp, synthetic construct
  source 1..75: mol_type = other DNA
aagatggtttttttttaaaacaatgggcctgcttgagttatcagataaattagtcaatcaacctcagctaaatat

SEQ ID NO: 467564 - DNA, 75 bp, synthetic construct
  source 1..75: mol_type = other DNA
atgattaaaaaattgtcagtgttaacacttttgttgttcgtgtcaggattgcttttggccggatgctatgttatt

SEQ ID NO: 467565 - DNA, 75 bp, synthetic construct
  source 1..75: mol_type = other DNA
gcgtcttaactacaacggcataattgcattgttagtcgaaggctttaaaacacttcgtcatgagattaaagaact

SEQ ID NO: 467566 - DNA, 75 bp, synthetic construct
  source 1..75: mol_type = other DNA
ggacctcaggggccgaagggcgacccgggggagacacaaatacggttccgtatggggccgggaaacattattgag

SEQ ID NO: 467567 - DNA, 75 bp, synthetic construct
  source 1..75: mol_type = other DNA
ggtgctcagggggctgtagggcccgctggtccgcgtggtgagaagggcgaacagggggagcgaggaccgcaggga

SEQ ID NO: 467568 - DNA, 75 bp, synthetic construct
  source 1..75: mol_type = other DNA
tctggttttcaggaggaaaaatatgagtcatatatacttgatataaaatggacctctcaacaactaaccgaatta

SEQ ID NO: 467569 - DNA, 75 bp, synthetic construct
  source 1..75: mol_type = other DNA
cgttttcggtgttatttccaaaagcaaactatggcttacaaggaagccaaccctctgatgttcgtgcgcataatc

SEQ ID NO: 467570 - DNA, 75 bp, synthetic construct
  source 1..75: mol_type = other DNA
cgacaacatttgacggtaaagaggctgatgtgatggcgcaaccagcaactgaattattgttgcgaactttaactt

SEQ ID NO: 467571 - DNA, 75 bp, synthetic construct
  source 1..75: mol_type = other DNA
tggtttaaaccggatgtaatgaacattttaagcagcagaagaggtggagggttaaggttttattctcgaactaca

SEQ ID NO: 467572 - DNA, 75 bp, synthetic construct
  source 1..75: mol_type = other DNA
ttgcagctttgcacatcgataaagcattgcctaatcaactataccctcctaaggtcaccataaactacccttacg

SEQ ID NO: 467573 - DNA, 75 bp, synthetic construct
  source 1..75: mol_type = other DNA
gtaaaaatagcattgaagatcatgttttttatcttaattatttttccagacatatggtgacggaaagaaatattc

SEQ ID NO: 467574 - DNA, 75 bp, synthetic construct
  source 1..75: mol_type = other DNA
atggttttcactcgctcgaatttacgaagacattaaaaaattaaaggaatataaaaccaaccatgacaactatat

SEQ ID NO: 467575 - DNA, 75 bp, synthetic construct
  source 1..75: mol_type = other DNA
attgctatcaactgtgccgcgattccggagcagcttctggaaagcgaactgttcggttatgttaaaggcgcattt

SEQ ID NO: 467576 - DNA, 75 bp, synthetic construct
  source 1..75: mol_type = other DNA
gaagcaagttgctgatgaactgggcatcggcattgctacgctctatcgcaagattaagaaatatgagttgttaaa

SEQ ID NO: 467577 - DNA, 75 bp, synthetic construct
  source 1..75: mol_type = other DNA
gtgtcaatgacataataaatgacagattctggagtgatgggaaaaaacccgacagatgtgacgtacttcaggaac

SEQ ID NO: 467578 - DNA, 75 bp, synthetic construct
  source 1..75: mol_type = other DNA
cagcgtcagtgacagcgagtcacatgtgggctcagacaacgtggcatgggcatgggataaactgcgcaccggtaa

SEQ ID NO: 467579 - DNA, 75 bp, synthetic construct
  source 1..75: mol_type = other DNA
gccgctttcagcctgattgggtggagaaatattgcctggtggcagacttgtcggagattgaagccggggcgttgt

SEQ ID NO: 467580 - DNA, 75 bp, synthetic construct
  source 1..75: mol_type = other DNA
aacaagccggggtcgggcaaattggtgccgggatcaccactgcgccgatggcctgttttgtcgccgctgtacgtg

SEQ ID NO: 467581 - DNA, 75 bp, synthetic construct
  source 1..75: mol_type = other DNA
ttcacctataccattgatttctgtgagagaaactaatgaggtagcattagccgtaaggaaatatgcaaaggaaat

SEQ ID NO: 467582 - DNA, 75 bp, synthetic construct
  source 1..75: mol_type = other DNA
ctgtttgaggtaaaagcccgacaactgaaactgctgcgcctgcgggcgcaccgctatgcggataaagccctgctg

SEQ ID NO: 467583 - DNA, 75 bp, synthetic construct
  source 1..75: mol_type = other DNA
tctggctggatatccagtggtatctgcatcaggcgctgactaaggcgggcgcaccgtgggacaggtggacagccg

SEQ ID NO: 467584 - DNA, 75 bp, synthetic construct
  source 1..75: mol_type = other DNA
agggcggctgaagccggacaaaaagcgactgatgccactgaggctgcgacccgtgcagtcacagcagcggggaat

SEQ ID NO: 467585 - DNA, 75 bp, synthetic construct
  source 1..75: mol_type = other DNA
tcggctttttactggcactgtttatcggcttacgcagccgcaaaaaaacgcggcatcactcgctaaaggaaaatg

SEQ ID NO: 467586 - DNA, 75 bp, synthetic construct
  source 1..75: mol_type = other DNA
tgctcagcaagaacaaaatatttaattgcagaaagaaatcactttataagccctataagtattcagtctaggatt

SEQ ID NO: 467587 - DNA, 75 bp, synthetic construct
  source 1..75: mol_type = other DNA
ggggaacggcaataaagggtactggactaataatccgacttccattactccatggatgaatatgctgacgggagg

SEQ ID NO: 467588 - DNA, 75 bp, synthetic construct
  source 1..75: mol_type = other DNA
cggtgaaagaatttggcctgtgggatgtggttcagcaaggcaaaatttcagtgtatgtcgcggatgcattattga

SEQ ID NO: 467589 - DNA, 75 bp, synthetic construct
  source 1..75: mol_type = other DNA
gtgtatgtcgcggatgcattattgaaaaaaggatcaatgaaaacgggcgacaagctggatatccagggcgtaggt

SEQ ID NO: 467590 - DNA, 75 bp, synthetic construct
  source 1..75: mol_type = other DNA
agtgcgggcagtattgcgacctttactattccgttgattacggctcatctgtcccaaagaagtattgccgatatt

SEQ ID NO: 467591 - DNA, 75 bp, synthetic construct
  source 1..75: mol_type = other DNA
atctgtgccggaaggtgtgtggtgtgaccggaatcgaaaagtgtactgtagtggtcaagtaatattggccacggt

SEQ ID NO: 467592 - DNA, 75 bp, synthetic construct
  source 1..75: mol_type = other DNA
taataggctcttacagtgaagacggttctaccgcttttattgtggaagccacagcaaggcccgatgactcccttg

SEQ ID NO: 467593 - DNA, 75 bp, synthetic construct
  source 1..75: mol_type = other DNA
acaatctcgtgaacattgcggtcagcaaggacggggggaatgcccgtggcgatgctgactgtgccctgtttcacg

SEQ ID NO: 467594 - DNA, 75 bp, synthetic construct
  source 1..75: mol_type = other DNA
tacagggttttgccgccctgttccagtcactcaacagacaggatcgcgatgcgattctgggcgtcacgttcaccc

SEQ ID NO: 467595 - DNA, 75 bp, synthetic construct
  source 1..75: mol_type = other DNA
ctcttctgaagaaagcgcgtgccatgtttgccgcccgtgagttcattctcagcgacagtgctgaccgctggacac

SEQ ID NO: 467596 - DNA, 75 bp, synthetic construct
  source 1..75: mol_type = other DNA
tcatcagcagcatccgcaggtaaaagtacgcattatggaagggcaactggtgtcgatgattaatgaattgcgtca

SEQ ID NO: 467597 - DNA, 75 bp, synthetic construct
  source 1..75: mol_type = other DNA
ttgtatgtcttccgatagatatttttcttgaaaaagaaaagatttcactagcacctggaaccattatgttggttg

SEQ ID NO: 467598 - DNA, 75 bp, synthetic construct
  source 1..75: mol_type = other DNA
gaactgctgacagatttccggcagatacagaacaatgtggcggatgaccttgccacgattcgtcgtctgaacgaa

SEQ ID NO: 467599 - DNA, 75 bp, synthetic construct
  source 1..75: mol_type = other DNA
agataatgtttgacaaaagaacttcccctccgcgttgcagtaacgtagctttcatcgatacactgcttatcactc

SEQ ID NO: 467600 - DNA, 75 bp, synthetic construct
  source 1..75: mol_type = other DNA
gtatggatggtgctggtgatgaaatatggcgaaattaccaggacagctaatcacacagccggagaaatccggctt

SEQ ID NO: 467601 - DNA, 75 bp, synthetic construct
  source 1..75: mol_type = other DNA
attaatggcaatttgacggtgaccggaaacggctcatttaacgatgttcagatccgttcggataaacgcaacaag

SEQ ID NO: 467602 - DNA, 75 bp, synthetic construct
  source 1..75: mol_type = other DNA
gtccggcaggtgcgccggggccaaaaggtgacaaaggcgatccgggggtggctggaccagcaggtccggcaggtg

SEQ ID NO: 467603 - DNA, 75 bp, synthetic construct
  source 1..75: mol_type = other DNA
atttaaacccgccgcatatattgatctgatgccagaaggaatgcaaggaggaaagaactcgatgtttaactttat

SEQ ID NO: 467604 - DNA, 75 bp, synthetic construct
  source 1..75: mol_type = other DNA
cggcattataaaaagaatcgtcctttaattaatgaatctatatggaatggacaacccgaagggctggcttgctca

SEQ ID NO: 467605 - DNA, 75 bp, synthetic construct
  source 1..75: mol_type = other DNA
ttgctggtgagtgagggtgtcaacgtgatcccgcgtttaccgctgatccctggtttcacactcagccgggagaat

SEQ ID NO: 467606 - DNA, 75 bp, synthetic construct
  source 1..75: mol_type = other DNA
acaagaaatttttatcgggcaggggttgcaaaataactccctgagtatttcgcattgccgtacccacgccattgc

SEQ ID NO: 467607 - DNA, 75 bp, synthetic construct
  source 1..75: mol_type = other DNA
aaagaatcatgttatatctaattttacttgggagcacacagctcagcaaactcttgaaggttacaaacttgcact

SEQ ID NO: 467608 - DNA, 75 bp, synthetic construct
  source 1..75: mol_type = other DNA
gggaggcgatacagtacaattgcttaaaaccaaacaatatcttgagcgattggggctaatcgtcgatatttataa

SEQ ID NO: 467609 - DNA, 75 bp, synthetic construct
  source 1..75: mol_type = other DNA
gggatggatgttatatatgccccacatactcttacctgaattaatccctgaagccgcaaaaatagtaccggtttt

SEQ ID NO: 467610 - DNA, 75 bp, synthetic construct
  source 1..75: mol_type = other DNA
agaaaaatataagaagtgtcctcggtaattcatccataaactctgggataaagaaaacattaagtgaaaagccgg

SEQ ID NO: 467611 - DNA, 75 bp, synthetic construct
  source 1..75: mol_type = other DNA
agaaaaaaaagatctaatcaaggtgagcattagatttatcagtgcagcaaaagaagattttttaacctctgtcac

SEQ ID NO: 467612 - DNA, 75 bp, synthetic construct
  source 1..75: mol_type = other DNA
ttgaaatgagagatgaatcagtcaaaggtgctgtattatttagcatttccaacgaaaccactccagaaaaaatat

SEQ ID NO: 467613 - DNA, 75 bp, synthetic construct
  source 1..75: mol_type = other DNA
ttttttctggagtattttcggcgtggtgctggaagacgcaacacaccaggcggggccggaatttgcacagaaagc

SEQ ID NO: 467614 - DNA, 75 bp, synthetic construct
  source 1..75: mol_type = other DNA
aatctatttcaagttagtatattttccagccttgctgtgtacttgcttctagggaagataattttagataatcaa

SEQ ID NO: 467615 - DNA, 75 bp, synthetic construct
  source 1..75: mol_type = other DNA
aaatattcgatccatccagagatgtttatcgttattcctctttcttttatcgtgttcttaatttcattagccatc

SEQ ID NO: 467616 - DNA, 75 bp, synthetic construct
  source 1..75: mol_type = other DNA
atggcgcgattacaattaaaaaaccgtaaaaataaaggtctgatatttttaataagttttattgtgatgggagga

SEQ ID NO: 467617 - DNA, 75 bp, synthetic construct
  source 1..75: mol_type = other DNA
ctgccgctcgtgacagctaccgctttaaattgatggcaaccctaaccgatgtcgcagagaaaacggcgaccacct

SEQ ID NO: 467618 - DNA, 75 bp, synthetic construct
  source 1..75: mol_type = other DNA
caacgcggggccgtcccgacaaacggactccagcggcaggcttgataacaacgtttcgtatggcataaccctgac

SEQ ID NO: 467619 - DNA, 75 bp, synthetic construct
  source 1..75: mol_type = other DNA
tactcatcagtaaagtactgaagccaatttatgccgcatggctgaaaaatgaaatgctacataataatacattaa

SEQ ID NO: 467620 - DNA, 75 bp, synthetic construct
  source 1..75: mol_type = other DNA
catgttttcagttggttaacgcaatgtaatcaggcatttcccctggcagagtgttcagaagaaaatccagttcca

SEQ ID NO: 467621 - DNA, 75 bp, synthetic construct
  source 1..75: mol_type = other DNA
cgggctgaactcatcttctgatgaattacaggcccagacgcgtattgccggaatgcgctcgacgctggagcaata

SEQ ID NO: 467622 - DNA, 75 bp, synthetic construct
  source 1..75: mol_type = other DNA
gcactgaaatttttgctggcgaccttgttaatcacccctctggcacgctacgcaaaacagccgttattgatacgc

SEQ ID NO: 467623 - DNA, 75 bp, synthetic construct
  source 1..75: mol_type = other DNA
attttttttgctgttttttctttattccaaatgataggggggataacagacttttatcgttcatggagaggagta

SEQ ID NO: 467624 - DNA, 75 bp, synthetic construct
  source 1..75: mol_type = other DNA
tactggttaggtactatagagagagattgttttgtacttacctgtgaaacaccactaataagtgttattgatggg

SEQ ID NO: 467625 - DNA, 75 bp, synthetic construct
  source 1..75: mol_type = other DNA
gatgctgtgagttatctacatgccgaacaacgtgtatataaacaacatgatgatgattggttttgtggacaagaa

SEQ ID NO: 467626 - DNA, 75 bp, synthetic construct
  source 1..75: mol_type = other DNA
ggtgattcgttaacggctgtttatgaaaagtccgcaaaatatattttggacgaaaagataaaaacagaatatgtt

SEQ ID NO: 467627 - DNA, 75 bp, synthetic construct
  source 1..75: mol_type = other DNA
caatggtgatacctccggtctgattaagctagttagtggtggtgatgataataaccctacagattactcaactat

SEQ ID NO: 467628 - DNA, 75 bp, synthetic construct
  source 1..75: mol_type = other DNA
ggtgcgggcggagatcaccaatcccccggccaataaaaccctgtctgaccgcggtcaccatacggcgtctgagct

SEQ ID NO: 467629 - DNA, 75 bp, synthetic construct
  source 1..75: mol_type = other DNA
gcgcgaccgcgacccgactgctgaccgagaacgggaaggcatatcagcttacccgcggcggcggcaccatccgtg

SEQ ID NO: 467630 - DNA, 75 bp, synthetic construct
  source 1..75: mol_type = other DNA
tgggatcattgaactcagtggtgttctgtatttcgttgaaatgaaatggtatcgcaatccggtgggtaagcctga

SEQ ID NO: 467631 - DNA, 75 bp, synthetic construct
  source 1..75: mol_type = other DNA
agcacgcatacaacgagcaggggctggcaaaccgcgtcacgccggacagcctgccgccggtggagtggctgacgt

SEQ ID NO: 467632 - DNA, 75 bp, synthetic construct
  source 1..75: mol_type = other DNA
ctacgactggataacccgctggggaccgttactgcaggtggaaataaattcgcgacggtgagcgcgtttctggcg

SEQ ID NO: 467633 - DNA, 75 bp, synthetic construct
  source 1..75: mol_type = other DNA
tactggttaggcacgattgagcgtgattgcttcgtgttcatactggaaacgccgctaagttcagtactggaaggt

SEQ ID NO: 467634 - DNA, 75 bp, synthetic construct
  source 1..75: mol_type = other DNA
tcgactggtatcgcggcgaatcacccagcactggctgaggtttgtgaatttcttgccattgagccgcacggccag

SEQ ID NO: 467635 - DNA, 75 bp, synthetic construct
  source 1..75: mol_type = other DNA
tccgggctcttccgcacttcagctgtatccgcgaagtcctgtctcctgggccctctgaggaggagccgggcaaca

SEQ ID NO: 467636 - DNA, 75 bp, synthetic construct
  source 1..75: mol_type = other DNA
gtggggtaaagggaaaatcagagcttaaatttgaatccagtttctgggacgacgtcgataaattagcacaacagt

SEQ ID NO: 467637 - DNA, 75 bp, synthetic construct
  source 1..75: mol_type = other DNA
taatccggatagcggacagaaagagaccggaaagtctgcgctggtaagtaaaatgaccggcctctacaactccac

SEQ ID NO: 467638 - DNA, 75 bp, synthetic construct
  source 1..75: mol_type = other DNA
gtgatgatgacgctgaagatgacggtgacgacccggatgcggctgaagacgatgacgattccgaagatgacggcg

SEQ ID NO: 467639 - DNA, 75 bp, synthetic construct
  source 1..75: mol_type = other DNA
atggacgatgccacggatagcgctgaccggatgaaagaggcattatcctcaattgatgctgtgatcggcaaatcc

SEQ ID NO: 467640 - DNA, 75 bp, synthetic construct
  source 1..75: mol_type = other DNA
atctgctatccattgtgggggctttaccatacagccagaccgttatcggacaacgattaacggcgatgtggttca

SEQ ID NO: 467641 - DNA, 75 bp, synthetic construct
  source 1..75: mol_type = other DNA
gggaagaatgttttacaaagtggtacttttataaccagaaataatgtgcctgtacctgtaaacctgacacagaca

SEQ ID NO: 467642 - DNA, 75 bp, synthetic construct
  source 1..75: mol_type = other DNA
gcaatgatgttatgctgtgcgtggataaattaaaagacattgtatttaattttaataacaaaaccattatttctg

SEQ ID NO: 467643 - DNA, 75 bp, synthetic construct
  source 1..75: mol_type = other DNA
ttgttatggcatgcaataaaaactataaccaacatgaagtggcagactgtttaaccctgtcttaccgtgaggtta

SEQ ID NO: 467644 - DNA, 75 bp, synthetic construct
  source 1..75: mol_type = other DNA
cagcaagaagcaagttgctgatgaactgggcatcggcattgctacgctctatcgcaagattaagaaatatgagtt

SEQ ID NO: 467645 - DNA, 75 bp, synthetic construct
  source 1..75: mol_type = other DNA
tacaataatatatcttgattcgagtttgctgggttgtattgctaaatggtgtaagaatgaagttcctcaagcaaa

SEQ ID NO: 467646 - DNA, 75 bp, synthetic construct
  source 1..75: mol_type = other DNA
tataatcgaaaagtcattgcgtcatcattctctttgatcggatatgaagattcattaaataattcagatgtctgt

SEQ ID NO: 467647 - DNA, 75 bp, synthetic construct
  source 1..75: mol_type = other DNA
ttttgaaaatatcacatccagacggaatttagccttcatcctgaaaaataaaaaaatccttaccacaagtgagct

SEQ ID NO: 467648 - DNA, 75 bp, synthetic construct
  source 1..75: mol_type = other DNA
caaaacggttggaccgaacaggatagcaaggcattgcagcagacgattgagaatacagcgatgcggttgatgcag

SEQ ID NO: 467649 - DNA, 75 bp, synthetic construct
  source 1..75: mol_type = other DNA
gtagattctgatggtatttatgctgggaagaaaaaagttaaaggtgtttctgatggcgatatttccaatatcagt

SEQ ID NO: 467650 - DNA, 75 bp, synthetic construct
  source 1..75: mol_type = other DNA
ataatttctgtaggagacaaaggagaagaacgtagaattcaaaatgttgctgctggtcttatatcaccagagagt

SEQ ID NO: 467651 - DNA, 75 bp, synthetic construct
  source 1..75: mol_type = other DNA
gcgattactcagtatatatgcaatcaataaatattggtgagggttatcatggtaatttagccataggtaaagata

SEQ ID NO: 467652 - DNA, 75 bp, synthetic construct
  source 1..75: mol_type = other DNA
atgcggtgacagtcctcaataccacttttatcccgaaaaaacgtctcagccagttaaccacacagtcgggcttta

SEQ ID NO: 467653 - DNA, 75 bp, synthetic construct
  source 1..75: mol_type = other DNA
tatgggttgatatttataaagaagcacagcatgcagggggaagttcctcctggatggaatcctccggaggctacc

SEQ ID NO: 467654 - DNA, 75 bp, synthetic construct
  source 1..75: mol_type = other DNA
aggaattggtgacatcactgctggctgagaaggtccagacactgaaacaatccagctttaaggacttgtcagcgt

SEQ ID NO: 467655 - DNA, 75 bp, synthetic construct
  source 1..75: mol_type = other DNA
cagctaaggcattcctactggacaagcctgaagtcacgctacaggagcttacagcgcacctccggtctatggctg

SEQ ID NO: 467656 - DNA, 75 bp, synthetic construct
  source 1..75: mol_type = other DNA
tccgctcttccgactcctggtacgtcagccagctgcagacgatggtggccacactgaaaatccccatggaacggc

SEQ ID NO: 467657 - DNA, 75 bp, synthetic construct
  source 1..75: mol_type = other DNA
acgaacgtgatgcagatattaaggaaactcttaggtgtttaaagaatgatagttatttcttatatctttgctata

SEQ ID NO: 467658 - DNA, 75 bp, synthetic construct
  source 1..75: mol_type = other DNA
caccagaactggctgaactactgaggaaggagttgggtgatggtattttaatacttttgaattgtgaaactccaa

SEQ ID NO: 467659 - DNA, 75 bp, synthetic construct
  source 1..75: mol_type = other DNA
tatagaacctaaattttattgggaaaaatattacccaccccagatgatggtttatcaatttacaaaaaaaatcaa

SEQ ID NO: 467660 - DNA, 75 bp, synthetic construct
  source 1..75: mol_type = other DNA
ctgaaaatggtcgttgggtcattgacgatattgtcagcaatcatggcagcgtcttacaagcagttaatagcgaga

SEQ ID NO: 467661 - DNA, 75 bp, synthetic construct
  source 1..75: mol_type = other DNA
cgtgagcagggttcgtcctctcttatggccatgacctttctttgccctaagtatggattcagtgatcgctttgcg

SEQ ID NO: 467662 - DNA, 75 bp, synthetic construct
  source 1..75: mol_type = other DNA
ctatgaaaaggcgctgccgctgctgattgaaaaagctcgccactgtgggattgcggcgctggcgatcaaccgttg

SEQ ID NO: 467663 - DNA, 75 bp, synthetic construct
  source 1..75: mol_type = other DNA
gctctagacttttatatttggggggaggagtataggggaggttgtagggaagcgatcatcgtttattttatcggt

SEQ ID NO: 467664 - DNA, 75 bp, synthetic construct
  source 1..75: mol_type = other DNA
tgggtgagttgctgatctgcaactcggctatgaaacttaataatcgaacagcatgtaaattcatttctgtgtatt

SEQ ID NO: 467665 - DNA, 75 bp, synthetic construct
  source 1..75: mol_type = other DNA
gtgatatatataaaatcacttcaagtgattttcagactgccacatctgaaaaaaaaatttatcgacataatgaac

SEQ ID NO: 467666 - DNA, 75 bp, synthetic construct
  source 1..75: mol_type = other DNA
taaatcctgattcagtaaaaataaatgctaatagatatgtttatgattgtgtaattcgaaattgcgcttttatag

SEQ ID NO: 467667 - DNA, 75 bp, synthetic construct
  source 1..75: mol_type = other DNA
cagtacaccggaaggaagctggttgacagttatatctggaaaacgtcctatggggcaattttctgtggatagttt

SEQ ID NO: 467668 - DNA, 75 bp, synthetic construct
  source 1..75: mol_type = other DNA
cagcacctttgaactgattaatgccgctcctgctgaggtgtatagctatagctatgaatcttctcgtggtgatgc

SEQ ID NO: 467669 - DNA, 75 bp, synthetic construct
  source 1..75: mol_type = other DNA
ggtgacagcgttcactattccaggaactaacattgatgttgttaaactggtagatccgctacaccttgcacatat

SEQ ID NO: 467670 - DNA, 75 bp, synthetic construct
  source 1..75: mol_type = other DNA
aagtggccttgccagtaccgggaatgcgccagcgaatggctgcggggaaagcagaaattatccgtaaaactgttg

SEQ ID NO: 467671 - DNA, 75 bp, synthetic construct
  source 1..75: mol_type = other DNA
gatagttggtttatcataccaatttctccagggcgattagagttgattgaaagaaaaagaatatgtatccgtgat

SEQ ID NO: 467672 - DNA, 75 bp, synthetic construct
  source 1..75: mol_type = other DNA
atcttgctccactgttcgaattaaacgactcacgcaattacctactgtctactctggattttactgatcctgtgc

SEQ ID NO: 467673 - DNA, 75 bp, synthetic construct
  source 1..75: mol_type = other DNA
ggaagaagatggtcgggtgaacaatttccaggtttcggcagcatcgacgcctttccttacgcgccaggggcaggt

SEQ ID NO: 467674 - DNA, 75 bp, synthetic construct
  source 1..75: mol_type = other DNA
cgccgggcatatgatgaaccgggcaggctggtatcggagacatcgcgctgtggggacgtcatccggtatgcttat

SEQ ID NO: 467675 - DNA, 75 bp, synthetic construct
  source 1..75: mol_type = other DNA
atgaagagaacccgtattacctgtatcagccataccgtctgccagggcagcagtacgatgaggagtcggggctgg

SEQ ID NO: 467676 - DNA, 75 bp, synthetic construct
  source 1..75: mol_type = other DNA
gatttcagttcccgacctgaaatgctcttcaatttcgatcaagccaatcagcaactgaatattagtattccgcaa

SEQ ID NO: 467677 - DNA, 75 bp, synthetic construct
  source 1..75: mol_type = other DNA
caagaccccattgggctggcggggggatggaacctgtataattacccactgaatccgataataaggatggatcct

SEQ ID NO: 467678 - DNA, 75 bp, synthetic construct
  source 1..75: mol_type = other DNA
caacggcgacctggtgcgcatcagcggcccgcgacagacgcgggaatacggctacagcgccacgggcaggctgga

SEQ ID NO: 467679 - DNA, 75 bp, synthetic construct
  source 1..75: mol_type = other DNA
ctgacgacggtacagaccgacaccacgcgtatccagacggtatacgagccgggaagcttcgcgccgctcatccgc

SEQ ID NO: 467680 - DNA, 75 bp, synthetic construct
  source 1..75: mol_type = other DNA
atctggggtgatagccagcgttgctcgatccatcttcctgaacatatggaagacaccgcaaatcgcctgatttta

SEQ ID NO: 467681 - DNA, 75 bp, synthetic construct
  source 1..75: mol_type = other DNA
tcaatacaacccattacgaagataaagatcgcgacaaccagatttacctgtcgatttcgctccccttcggtaacg

SEQ ID NO: 467682 - DNA, 75 bp, synthetic construct
  source 1..75: mol_type = other DNA
cgaccgccaacatcacagcaggttttaatgttgatattggtgactggagagatatctcgatttcgacgtcattca

SEQ ID NO: 467683 - DNA, 75 bp, synthetic construct
  source 1..75: mol_type = other DNA
aactaccgcccacaggacggcagcagcagcactaacctgaacgcctacggtaccaccggaattaacgccgggtca

SEQ ID NO: 467684 - DNA, 75 bp, synthetic construct
  source 1..75: mol_type = other DNA
actatcaacatctgagttcggcgggcgaatgggatctttctggcacctatgccgccaatgattacagctctgtca

SEQ ID NO: 467685 - DNA, 75 bp, synthetic construct
  source 1..75: mol_type = other DNA
aaagatatctcaatctcaacgtcgttcaatacgacccactacgaagacaaagatcgcgacaaccagatttacttg

SEQ ID NO: 467686 - DNA, 75 bp, synthetic construct
  source 1..75: mol_type = other DNA
cggtgcgggagagagcatcagccgtgacaacgaataccgtgagctgtaccgcgaactcatgccacaactcgatat

SEQ ID NO: 467687 - DNA, 75 bp, synthetic construct
  source 1..75: mol_type = other DNA
accgttccgcatatgagctttgtctggggcgaggataacgttaatttcctgcgcgcccgttacgccgcgttgcaa

SEQ ID NO: 467688 - DNA, 75 bp, synthetic construct
  source 1..75: mol_type = other DNA
caaaaagagactgcatccattcataaccttcagggtatcgacgctgttcgcattctggtatcgcgccatagtgct

SEQ ID NO: 467689 - DNA, 75 bp, synthetic construct
  source 1..75: mol_type = other DNA
atgtcagccatttgaaattacctcattactctgactttgatgctgatttagcgcgtttacgccgagttcaggcta

SEQ ID NO: 467690 - DNA, 75 bp, synthetic construct
  source 1..75: mol_type = other DNA
gtgcctggaaggccagattacgcgagggggtgccaccagaggccatgctggatggcgtgaggcgttacgcaagat

SEQ ID NO: 467691 - DNA, 75 bp, synthetic construct
  source 1..75: mol_type = other DNA
ctacgcgattaaggcgatcgaagctttacatcctaaggctttcatcttcgaaaacgtgaagggcttacttcgaaa

SEQ ID NO: 467692 - DNA, 75 bp, synthetic construct
  source 1..75: mol_type = other DNA
gggagaagcaatgaggcagatcggcaacgctgtacctgtcttactggcccaacggatagggcagcatttacataa

SEQ ID NO: 467693 - DNA, 75 bp, synthetic construct
  source 1..75: mol_type = other DNA
agttatgcgtaccgaactcggcgatgataattccgcgaccgataaattaattgtaaaaggcaacacgtctggtca

SEQ ID NO: 467694 - DNA, 75 bp, synthetic construct
  source 1..75: mol_type = other DNA
tattagtaaaggcaccctgcgcgccggtatcaacgatacctttagtccaaactccagttatgtcgtctccagtgg

SEQ ID NO: 467695 - DNA, 75 bp, synthetic construct
  source 1..75: mol_type = other DNA
catccgttgccgcacggtatgtgatggtaggcgatcaggggacaggtaaactcgaaatcactcatggcggtcgtc

SEQ ID NO: 467696 - DNA, 75 bp, synthetic construct
  source 1..75: mol_type = other DNA
accgacggagtcgctgcatccggctatgtcagccatttgaaattacctcattactctgactttgatgctgattta

SEQ ID NO: 467697 - DNA, 75 bp, synthetic construct
  source 1..75: mol_type = other DNA
tggcggcgatcttgcgcaatggagcagtaacgcactcgatcgctggcatctcggcctgatggctggctatgccaa

SEQ ID NO: 467698 - DNA, 75 bp, synthetic construct
  source 1..75: mol_type = other DNA
agggacaataaaattagaaaataacactcatctgacacttagccatgcgtcgcctaaccaacgtgatatttattt

SEQ ID NO: 467699 - DNA, 75 bp, synthetic construct
  source 1..75: mol_type = other DNA
atgatgattgacccgcgcacacctgaggggcgcatgactctccgttaccgtggctaccggactgaggtcatcctg

SEQ ID NO: 467700 - DNA, 75 bp, synthetic construct
  source 1..75: mol_type = other DNA
cccgtacttgactggccattaatggccaggatgttgacctggtggggaaagcgcgaacgccagcaacttctggaa

SEQ ID NO: 467701 - DNA, 75 bp, synthetic construct
  source 1..75: mol_type = other DNA
gaatcgatatggcgtgttttccctggtttgcagaaaaaacattattaccgctggaatcggtctcccctgagctcc

SEQ ID NO: 467702 - DNA, 75 bp, synthetic construct
  source 1..75: mol_type = other DNA
gcgatgcggttaaacagtttgagtgtggaaatatcgctatgctgattatgtatctcaatttgtttaacgatgttg

SEQ ID NO: 467703 - DNA, 75 bp, synthetic construct
  source 1..75: mol_type = other DNA
cggccggtacggcgcaacaagacgtgacccggcagacactatctgagctggccgccgccatgagcgatgcaccgg

SEQ ID NO: 467704 - DNA, 75 bp, synthetic construct
  source 1..75: mol_type = other DNA
gcatcagttttttctctctggcaatggggctggcaatggtggtcgggccgtggattggcctgaatatggcgcgct

SEQ ID NO: 467705 - DNA, 75 bp, synthetic construct
  source 1..75: mol_type = other DNA
tattagggtgcttcatggtattaccttcggggttatcactacggtaaaaggaacgatttccgcgcggctgatccc

SEQ ID NO: 467706 - DNA, 75 bp, synthetic construct
  source 1..75: mol_type = other DNA
acgcaacgaatggccgcccgttttattcccgtaatgagcttattgtcacgaacggtgcaatagtgatccacaccc

SEQ ID NO: 467707 - DNA, 75 bp, synthetic construct
  source 1..75: mol_type = other DNA
gctatgttggtggaccgtgatttgaacaatcagttacgccgagcgtttgcgaagtctagcgcagctagtgaactg

SEQ ID NO: 467708 - DNA, 75 bp, synthetic construct
  source 1..75: mol_type = other DNA
gtctggacccggaagatgagacccgccagcaccaatcacgagacgaactaatagcgcaactggtcgctatgaaac

SEQ ID NO: 467709 - DNA, 75 bp, synthetic construct
  source 1..75: mol_type = other DNA
cctatcttgaatctgttgagttccaggcggtgctggaaaaagtaaaaaggaatgaaatgtcgctgtctgatcttg

SEQ ID NO: 467710 - DNA, 75 bp, synthetic construct
  source 1..75: mol_type = other DNA
aattatcccttgagtgataaaatggaacatgcagtatcttttatgtttacaaataacaacgggcatgatgtgcat

SEQ ID NO: 467711 - DNA, 75 bp, synthetic construct
  source 1..75: mol_type = other DNA
gctctatagcagaaaagtaaataaagtttattggcgatataagcatccagtgaccgggaagtttcattctttggg

SEQ ID NO: 467712 - DNA, 75 bp, synthetic construct
  source 1..75: mol_type = other DNA
cgcgctacggattggggctgtgccaacttgggatggcagacttttccgctgtggcatcgcattttcaattgtcgc

SEQ ID NO: 467713 - DNA, 75 bp, synthetic construct
  source 1..75: mol_type = other DNA
tgaaacgatggacatcatcagtctgggtggagcgaccgagtgcgccatctggtcggtctactacccgataggtga

SEQ ID NO: 467714 - DNA, 75 bp, synthetic construct
  source 1..75: mol_type = other DNA
ctgatgcagatgctgtgcgaataccacagcggcgatcggatgagttatccgacgttgcgtctggcactgttgagc

SEQ ID NO: 467715 - DNA, 75 bp, synthetic construct
  source 1..75: mol_type = other DNA
cagacggcctgcatgatgtgcaggccatgaccgacaccatcagcgacaaaattgatgcgctggaaaatgccgttt

SEQ ID NO: 467716 - DNA, 75 bp, synthetic construct
  source 1..75: mol_type = other DNA
gggagttgcatttcaactgggacgcggtcgagcaactgtttgataccacgctgctggatcagatgtttggtgctt

SEQ ID NO: 467717 - DNA, 75 bp, synthetic construct
  source 1..75: mol_type = other DNA
tgactatatggtgccgagtgatctgatgttagcgaccgattttccgttaaccgctaacggcaagctagatcggca

SEQ ID NO: 467718 - DNA, 75 bp, synthetic construct
  source 1..75: mol_type = other DNA
cattaaccgtgacttaagcgaagcgctcgaacggcaggtgatgacactgtccgggcaggggtataccgccacggc

SEQ ID NO: 467719 - DNA, 75 bp, synthetic construct
  source 1..75: mol_type = other DNA
tgtttctccgagaggttatatcatgtgttctacgaagtaaaaaagtagatagttatataaatgaaaacaaaaaaa

SEQ ID NO: 467720 - DNA, 75 bp, synthetic construct
  source 1..75: mol_type = other DNA
cttggcaaaaactcgcgtcttgatgtgatgattaatcataatatttcaagtagaattaaaaagatagaaaaactg

SEQ ID NO: 467721 - DNA, 75 bp, synthetic construct
  source 1..75: mol_type = other DNA
cgggaaaaagatccgcgtcattggcagacagttatggcacacggtcatgtaagcgtctggaatgcagtgcccgca

SEQ ID NO: 467722 - DNA, 75 bp, synthetic construct
  source 1..75: mol_type = other DNA
agctttgacctgtcggtttacgatgcctttgcgccttttatggtgggtgcagcgctggtactgccggaagcagga

SEQ ID NO: 467723 - DNA, 75 bp, synthetic construct
  source 1..75: mol_type = other DNA
tgaaatttgatttggtacgaaaattcaagataccaagtaataaaattatggttgttcttaatgggttatttttaa

SEQ ID NO: 467724 - DNA, 75 bp, synthetic construct
  source 1..75: mol_type = other DNA
aagttctgccgatgtgcagcggatcaaccgggatttgagtgatgccctggaacaacaggtgctggatttgtccgc

SEQ ID NO: 467725 - DNA, 75 bp, synthetic construct
  source 1..75: mol_type = other DNA
ttgtaatgcgtcaggatgaagtagttgtcagtctttcgcttcttcgggaagcccgtaaacttgcgggcattgatg

SEQ ID NO: 467726 - DNA, 75 bp, synthetic construct
  source 1..75: mol_type = other DNA
ggttatatcagtaataaagatctaataacggatgacataactaaactgggctacatgcgccattgtggccatatg

SEQ ID NO: 467727 - DNA, 75 bp, synthetic construct
  source 1..75: mol_type = other DNA
tgctaaagacgccgcgagcaaaaaagccgcactggaagcgctgacagcctccggtgatattcgcctggctatcaa

SEQ ID NO: 467728 - DNA, 75 bp, synthetic construct
  source 1..75: mol_type = other DNA
aaaccgcactcatgcggtgatggggatggaagacgcgggtaaatccgtctggcggaactacccgaagcagcctgg

SEQ ID NO: 467729 - DNA, 75 bp, synthetic construct
  source 1..75: mol_type = other DNA
agttatgcgtttacccatgttgaaaacaacatatttatcaaaccgaaaggggaagttcccagcgatactaacctt

SEQ ID NO: 467730 - DNA, 75 bp, synthetic construct
  source 1..75: mol_type = other DNA
gtggcaagagcgatgttacggtttgttactgttacagctgaagctttacgttttcggcaaatacagaggggattt

SEQ ID NO: 467731 - DNA, 75 bp, synthetic construct
  source 1..75: mol_type = other DNA
cgaagcgcgtagccgttgcccgtcaggttgtgttgctgtatttgccgcccgtattcgtcaggaggtgcgccatga

SEQ ID NO: 467732 - DNA, 75 bp, synthetic construct
  source 1..75: mol_type = other DNA
gcaaatgatatcagagcaaagcttaaacacagttttccgggttcttatggtcaaaaatttgacatcgagataaat

SEQ ID NO: 467733 - DNA, 75 bp, synthetic construct
  source 1..75: mol_type = other DNA
cagacggtctgcatgatgtacaggccatgaccgacaccatcagcgataaaattgatgcgctggagaatgccgttt

SEQ ID NO: 467734 - DNA, 75 bp, synthetic construct
  source 1..75: mol_type = other DNA
taacgcaaggtgacgtaatcgtgaattacgcctccagcctgtttgaccgcaccgaagtcaccgccccaagcctcc

SEQ ID NO: 467735 - DNA, 75 bp, synthetic construct
  source 1..75: mol_type = other DNA
attaccgcagcgatcattgcttatcctgccacctgggtagtgcaggacatttatttaaaaaccctttctgaaagc

SEQ ID NO: 467736 - DNA, 75 bp, synthetic construct
  source 1..75: mol_type = other DNA
cctggtatctgcctgtttttcactttgcgcgatgcattccagcttattttcatgtttgcagaattttcactgtcc

SEQ ID NO: 467737 - DNA, 75 bp, synthetic construct
  source 1..75: mol_type = other DNA
tagcgacgcggcgcgggaagtgctgcaaaaatccggcggtaaaaccgtcagcgaagaagaggtgctgcaactggt

SEQ ID NO: 467738 - DNA, 75 bp, synthetic construct
  source 1..75: mol_type = other DNA
cggatcataaagcttcacttgaacctgatgaactggccgcaatggtaaaagcgatcaggcaaatagaaatagcgc

SEQ ID NO: 467739 - DNA, 75 bp, synthetic construct
  source 1..75: mol_type = other DNA
ggcgtttggattacctgtggggtattccgatcacagtgaagggataatgattcctgtggccgctgttgcacgtgg

SEQ ID NO: 467740 - DNA, 75 bp, synthetic construct
  source 1..75: mol_type = other DNA
cgtgcgtactcgtctgaggttggtcaaaaagcgcttaaggaaaaggttatcgttcttcattgcactacggaatat

SEQ ID NO: 467741 - DNA, 75 bp, synthetic construct
  source 1..75: mol_type = other DNA
ccgcgagacggagttggcggaggggcggggctgtatttcctgcggaactaaaacggcgttcgcctggcatgctgg

SEQ ID NO: 467742 - DNA, 75 bp, synthetic construct
  source 1..75: mol_type = other DNA
tcgcgagaatgagttggcagaggggcggggctgcatttcctgtggaactaaaacggcgttcgcctggcatgctgg

SEQ ID NO: 467743 - DNA, 75 bp, synthetic construct
  source 1..75: mol_type = other DNA
ttctgataagtatttgcctgatccgtcaggcaacagttttttgttaatgtgccagcagacagcaaacccgaagat

SEQ ID NO: 467744 - DNA, 75 bp, synthetic construct
  source 1..75: mol_type = other DNA
cccaacccgacaggtagccaatacctggcttgactgggtgtcgggtgcgtcggtgcgtcaggggttgccagcgag

SEQ ID NO: 467745 - DNA, 75 bp, synthetic construct
  source 1..75: mol_type = other DNA
tcggaccgcatcacgcaccggacggtgaacggcgacccggcagagcagtggcagtatgatgagcacgggtggtta

SEQ ID NO: 467746 - DNA, 75 bp, synthetic construct
  source 1..75: mol_type = other DNA
tcttcatctcaaaatctttaatgcttctgcatctgggattgaagcagacaaactaatcgagactctgattcatga

SEQ ID NO: 467747 - DNA, 75 bp, synthetic construct
  source 1..75: mol_type = other DNA
attttctttattacagcgaggaagagcttaggttgttagaagggcacaacttcgaaagcgtttcagcgattgttg

SEQ ID NO: 467748 - DNA, 75 bp, synthetic construct
  source 1..75: mol_type = other DNA
atcttattgatataatgaaatattattatgcggccgcagataagtctggtttctttgaatttacattggcacaag

SEQ ID NO: 467749 - DNA, 75 bp, synthetic construct
  source 1..75: mol_type = other DNA
aagcgctgaatgacgccgtcccgcagcttctgaataaccccgagatgatgcgtatctttgccgatgaggggaata

SEQ ID NO: 467750 - DNA, 75 bp, synthetic construct
  source 1..75: mol_type = other DNA
atatcgcggcagttgacccgcatacccagtacgcgacgaaagccagtccgacattcaccggcacaccaacagcac

SEQ ID NO: 467751 - DNA, 75 bp, synthetic construct
  source 1..75: mol_type = other DNA
gatttttggcaacacaaagccccacaaaaatactctgcctttgagttggcttttgaattgggtcaccgggttatt

SEQ ID NO: 467752 - DNA, 75 bp, synthetic construct
  source 1..75: mol_type = other DNA
ctgaaaactacggtcagcaaaatcgaccagttgcgtaaagatatcgactcaattgtggcagagattgaaggtgac

SEQ ID NO: 467753 - DNA, 75 bp, synthetic construct
  source 1..75: mol_type = other DNA
aacgggacgttccggttatgacgacactgctcgaaaacgcatgttttcatacatccttaccgggcacgatgatgg

SEQ ID NO: 467754 - DNA, 75 bp, synthetic construct
  source 1..75: mol_type = other DNA
gcggggatcaaagaggcgaagcttcgcaagaatgctcgtggcgaaacgcaacgtttctcgattcgaacgctcgct

SEQ ID NO: 467755 - DNA, 75 bp, synthetic construct
  source 1..75: mol_type = other DNA
tggtttgcgggtgaacatgcaatggatggagagcgcagagcccttatcccgctgccctcaaaaaatagtgctatt

SEQ ID NO: 467756 - DNA, 75 bp, synthetic construct
  source 1..75: mol_type = other DNA
caggcatcgcaagccaagttgatgtacttcgcgaaaaaattttagatgctgtactccttttgccaaccccgactg

SEQ ID NO: 467757 - DNA, 75 bp, synthetic construct
  source 1..75: mol_type = other DNA
ttcgcttctggttcgggatggttcaggctaccaggtggatatattgttcagtttggcacttttgcaggaaacacg

SEQ ID NO: 467758 - DNA, 75 bp, synthetic construct
  source 1..75: mol_type = other DNA
tcgcgaaatgctgctggcagccggtcacggttgcatctcttgcggaaccaagaccgcctttgcctggcatgccgg

SEQ ID NO: 467759 - DNA, 75 bp, synthetic construct
  source 1..75: mol_type = other DNA
cgaccgaagcactggggcccggataccgctaccagatcgatgccaccatcgccgatatctatctggtttcagaac

SEQ ID NO: 467760 - DNA, 75 bp, synthetic construct
  source 1..75: mol_type = other DNA
ccggcaaatgcgctgactatccagaccgacgaccagcaaaattcgcgcacctggcagctctatctggggcgttgt

SEQ ID NO: 467761 - DNA, 75 bp, synthetic construct
  source 1..75: mol_type = other DNA
aactgagcattacggggcatttggacaatttgtcagccttcccgccacgagtccattgcgagaagtgcaggatgt

SEQ ID NO: 467762 - DNA, 75 bp, synthetic construct
  source 1..75: mol_type = other DNA
atggagcttcatttgtcacagaaccaaatataacagaacgaatagttagtaaagcaagtaatagtgatagaatag

SEQ ID NO: 467763 - DNA, 75 bp, synthetic construct
  source 1..75: mol_type = other DNA
gatcggcctcgagcgtgaggcatacagcatcgagaataaggctgaaacgaaagaggtcacccataacgtcatgct

SEQ ID NO: 467764 - DNA, 75 bp, synthetic construct
  source 1..75: mol_type = other DNA
tcgagacggcgtaccgggccggagtgatgtccctccgagaaattgcttcacagcacggtattagcgaaggcgcta

SEQ ID NO: 467765 - DNA, 75 bp, synthetic construct
  source 1..75: mol_type = other DNA
gtaagctggcaatggcgttatccagtacgcttgattccatccctttatccatgcagcgacagtttcctgatttaa

SEQ ID NO: 467766 - DNA, 75 bp, synthetic construct
  source 1..75: mol_type = other DNA
tgggtccgtgaagcgttggcgatattaggcaatgaggatggttgcagtgtactggaacgacaacctttgtcgtgg

SEQ ID NO: 467767 - DNA, 75 bp, synthetic construct
  source 1..75: mol_type = other DNA
ccagaagcatggaataacacgggtagtgtgtctgttgagtcgttcgacagtgataaggggtttaactatggaagg

SEQ ID NO: 467768 - DNA, 75 bp, synthetic construct
  source 1..75: mol_type = other DNA
cgttatcaccacgacctgaccggtaaacttatccgcagcgaggatgaggggctggtcacccactggcactatgac

SEQ ID NO: 467769 - DNA, 75 bp, synthetic construct
  source 1..75: mol_type = other DNA
aagaccgcatcaccatcaccgacagtctggaccgccgtgaagtgctgcacacgcagggcgaaggcgggctgaagc

SEQ ID NO: 467770 - DNA, 75 bp, synthetic construct
  source 1..75: mol_type = other DNA
gcgaaaagcagtcaggatgcagcagccgaaagcgagagtgctgcagctggttctgcaagtgcggcggctgcttct

SEQ ID NO: 467771 - DNA, 75 bp, synthetic construct
  source 1..75: mol_type = other DNA
ggagcatcgcggcgacattaagcgcgcccggcagataaccaacgccctgtttgatgagttgggcgcggagtgcgc

SEQ ID NO: 467772 - DNA, 75 bp, synthetic construct
  source 1..75: mol_type = other DNA
agaacgggcgtgaccggctgaacgagctttaccatgccatcatcagcatgcccgagcgcgtgaagtcgatgaaag

SEQ ID NO: 467773 - DNA, 75 bp, synthetic construct
  source 1..75: mol_type = other DNA
gtgaaagagcgcgctgacgatctggtacgcaaagccgaggtacgcaagcaggtacgcagcgaaacggtactttct

SEQ ID NO: 467774 - DNA, 75 bp, synthetic construct
  source 1..75: mol_type = other DNA
gggcgccaaaagaaagggaagtgctcaaccttgttgaactggtacgcactgccatggcgcgttatatctgccata

SEQ ID NO: 467775 - DNA, 75 bp, synthetic construct
  source 1..75: mol_type = other DNA
aacggagttttatttaacaataatatcaatgatatatctagagccattgatgaggtgaggaataattacgaacaa

SEQ ID NO: 467776 - DNA, 75 bp, synthetic construct
  source 1..75: mol_type = other DNA
actgtcagacaacggcgacgctgtagtgattaaccgtggtcgttgtggcgtggaagttattctgacgccgaagaa

SEQ ID NO: 467777 - DNA, 75 bp, synthetic construct
  source 1..75: mol_type = other DNA
gacgccgtagtgattaaccgtggtcgtgctggcgtagaagttatcctgacgctgaagaacacggtgaaggctgcg

SEQ ID NO: 467778 - DNA, 75 bp, synthetic construct
  source 1..75: mol_type = other DNA
gtcagtatgcatcgccgcgatggaacatttaaaaagtaaggcaacggtccctatacaaaacggaccgttgccagc

SEQ ID NO: 467779 - DNA, 75 bp, synthetic construct
  source 1..75: mol_type = other DNA
taataatctttatggtagtgaaattcggataagaggtataaataaagattttattggaatggatgtcacttctgt

SEQ ID NO: 467780 - DNA, 75 bp, synthetic construct
  source 1..75: mol_type = other DNA
ctaatgatatcagtgataaattcgacattaataaacataaggattattattaccaactgattgataatctttgtt

SEQ ID NO: 467781 - DNA, 75 bp, synthetic construct
  source 1..75: mol_type = other DNA
tatcatgatatggtattacttgtagagtattctgatgaggttttttcggcactcttgaaaaagccagtgatagtg

SEQ ID NO: 467782 - DNA, 75 bp, synthetic construct
  source 1..75: mol_type = other DNA
tacgtagccacccagaattaattattttagggttaatggtgatgattatcgccatgcttatcattccattaccaa

SEQ ID NO: 467783 - DNA, 75 bp, synthetic construct
  source 1..75: mol_type = other DNA
taaggatctggtattgctgacgtctgcagatattcgccgttttgtcaggaagtttatcgaaggaaaatttcccga

SEQ ID NO: 467784 - DNA, 75 bp, synthetic construct
  source 1..75: mol_type = other DNA
cgtgtggcacaggcgtgggcaggcaccggctttggtaacctggcgataccgcgtgtgggtcaggaggtcattgtg

SEQ ID NO: 467785 - DNA, 75 bp, synthetic construct
  source 1..75: mol_type = other DNA
accagattatcaaagtgggatcaaaccaggttgaaaaggtggggatcattcgtgcgctgacggtgggtgtggctt

SEQ ID NO: 467786 - DNA, 75 bp, synthetic construct
  source 1..75: mol_type = other DNA
aactggttgtatcatcatggcgcaaacggggtaattatatatcaccccatcataaattgtcttacgtgcaatgaa

SEQ ID NO: 467787 - DNA, 75 bp, synthetic construct
  source 1..75: mol_type = other DNA
gagatcatgggtcttgtggttggtcacgaagacgacgcctcccctattgaccgccttttcagcgttctcaagttc

SEQ ID NO: 467788 - DNA, 75 bp, synthetic construct
  source 1..75: mol_type = other DNA
gaaaactttgcaacgtcttttaatcagaaatgtcttgattttttattttcttcctcagggaaagaagatgtgtta

SEQ ID NO: 467789 - DNA, 75 bp, synthetic construct
  source 1..75: mol_type = other DNA
atggttatgaaacatgagggagaggaagaatcgggcggagccttacatatgagatcccgccagattaaggagagt

SEQ ID NO: 467790 - DNA, 75 bp, synthetic construct
  source 1..75: mol_type = other DNA
aactgcaatcgcagaggaatatcaccagcagggtgcggaagcactacatcgagttgtaattcgcctgtcttggcg

SEQ ID NO: 467791 - DNA, 75 bp, synthetic construct
  source 1..75: mol_type = other DNA
atgcttacggataccaggttaagggccatcgccaacaagccatacgacggtccaagcgagatagctgatcgtgat

SEQ ID NO: 467792 - DNA, 75 bp, synthetic construct
  source 1..75: mol_type = other DNA
cgacaaatatgattatcttgatgaacaaaaggaggcactaaataagtttgcggattatgtattatctttggctga

SEQ ID NO: 467793 - DNA, 75 bp, synthetic construct
  source 1..75: mol_type = other DNA
tacagatgatatatctgatttaaaaaataacaatgatattacagctgaaaacaataatatatataaagcagcaaa

SEQ ID NO: 467794 - DNA, 75 bp, synthetic construct
  source 1..75: mol_type = other DNA
agagggtgcgcgttcaattccccgacctgagcgtgaagcgttagcaaaagctaatgctgttatttatagcgacag

SEQ ID NO: 467795 - DNA, 75 bp, synthetic construct
  source 1..75: mol_type = other DNA
tacggtcgcggcatgtacgaacacagcgacctcgccatgcggattcataacgctggcctcacgacgtgggcttac

SEQ ID NO: 467796 - DNA, 75 bp, synthetic construct
  source 1..75: mol_type = other DNA
tcaagccaaaaaatcgagtaacacaacactcgccgaaccaccgccgttattagccaacaatcaacaacggcgcat

SEQ ID NO: 467797 - DNA, 75 bp, synthetic construct
  source 1..75: mol_type = other DNA
gcggtatgaatataacgccgccggtgacctgaccaccgtccttgccccggacggcagcagaaacgggacacagta

SEQ ID NO: 467798 - DNA, 75 bp, synthetic construct
  source 1..75: mol_type = other DNA
cagctggatcagcaactgctgcggctaacagccagaaagcagcgaagacgagcgaaactaacgcaaagtccagcc

SEQ ID NO: 467799 - DNA, 75 bp, synthetic construct
  source 1..75: mol_type = other DNA
atgatagatatatttctgcggtgttcaagatgttaagtgaagttaatttttgtaatttcaactcatttatttctg

SEQ ID NO: 467800 - DNA, 75 bp, synthetic construct
  source 1..75: mol_type = other DNA
cagaccatgcggtagctatatcgtcgatgatatggactccataatgtgggaggggatttttagaaaggtagctaa

SEQ ID NO: 467801 - DNA, 75 bp, synthetic construct
  source 1..75: mol_type = other DNA
atgagcgccctggcgcagacccgcgagcaaggctacgccctggacagcgaagagaacgagcagggcgtgcgctgc

SEQ ID NO: 467802 - DNA, 75 bp, synthetic construct
  source 1..75: mol_type = other DNA
gtcccggcggaccgggcagaccacccatctggggatcctggacgggcgtgaaggggtctatatcgagaagattga

SEQ ID NO: 467803 - DNA, 75 bp, synthetic construct
  source 1..75: mol_type = other DNA
gtggaacgccttcgcgctgcgcaagagcgtttaaacagagtgcaacgcgccagtgcggaaaacctggcgaagcag

SEQ ID NO: 467804 - DNA, 75 bp, synthetic construct
  source 1..75: mol_type = other DNA
ctttgccctgatgactgccttcttcggcgtttacctcgggttcaaagaggctgtacagggactggcgatgaacgc

SEQ ID NO: 467805 - DNA, 75 bp, synthetic construct
  source 1..75: mol_type = other DNA
tgttcattatcttgctgaaaaagagcgcgctgataagttgcaggcgactttggatatggtgagcgagactcaacg

SEQ ID NO: 467806 - DNA, 75 bp, synthetic construct
  source 1..75: mol_type = other DNA
ttccacccatctcctccgacgaagccagcgaaaaatatctctttgcgatggcaaacttgctgcgctggcatccta

SEQ ID NO: 467807 - DNA, 75 bp, synthetic construct
  source 1..75: mol_type = other DNA
aaggcactggagtttaaaaacgccgtgtctgatgttgctggtggtgcgtggcagaaaaccaaagatttctttacc

SEQ ID NO: 467808 - DNA, 75 bp, synthetic construct
  source 1..75: mol_type = other DNA
ctaaatcagatattgatgaagctgattatattcaccggatgcagaacaagcgagctaacaaacgcaaaacgcgag

SEQ ID NO: 467809 - DNA, 75 bp, synthetic construct
  source 1..75: mol_type = other DNA
gcattgagtaagaacagaaacgagtttaaacgcggtttatccgccgttagcgttgatttattgcgtgaggctatg

SEQ ID NO: 467810 - DNA, 75 bp, synthetic construct
  source 1..75: mol_type = other DNA
agcattgtggcgggagaaacacgaggacagaacgcatcagtcctgcgatgtaaattgtggatggtttagcccact

SEQ ID NO: 467811 - DNA, 75 bp, synthetic construct
  source 1..75: mol_type = other DNA
actggcgttggtgctgccgtagctggcctggcgctggcaggttatcagatttaccgccattgggctggtgtgaag

SEQ ID NO: 467812 - DNA, 75 bp, synthetic construct
  source 1..75: mol_type = other DNA
tggttattggttccagtgcactggtggcactgcgtgtggcgacgttcgccgctggctttgcgttcacgttcctga

SEQ ID NO: 467813 - DNA, 75 bp, synthetic construct
  source 1..75: mol_type = other DNA
aattacggtgatgatattactctggacagagataccgccgtggctacggtgcagattactgtcagcagaaaatgc

SEQ ID NO: 467814 - DNA, 75 bp, synthetic construct
  source 1..75: mol_type = other DNA
attttttagtatctcatatgattaatcaccaaaatattgtttatagatatgaacttctcaaacaaagaaaatata

SEQ ID NO: 467815 - DNA, 75 bp, synthetic construct
  source 1..75: mol_type = other DNA
tccttggaagcctgtgcggcaacggcagagggcgttttgtcttacaggatggcagccaggtgacagggaaggagg

SEQ ID NO: 467816 - DNA, 75 bp, synthetic construct
  source 1..75: mol_type = other DNA
cggcgcggctgttgtcggtatcgagaacaccgcttacggcaaagtgatagcgtccagcggcgataccgtgtcttc

SEQ ID NO: 467817 - DNA, 75 bp, synthetic construct
  source 1..75: mol_type = other DNA
cggcttttcaccgcagaagctgatcccgtcgccgaccgtcatcgtcggcggcagcgagcaggtgatcaccccgac

SEQ ID NO: 467818 - DNA, 75 bp, synthetic construct
  source 1..75: mol_type = other DNA
agataagtaataaagaaaaagggttttttgtctatgaggagcagtggttctcactgctggaaaaggtgagtgctt

SEQ ID NO: 467819 - DNA, 75 bp, synthetic construct
  source 1..75: mol_type = other DNA
ttggcccggtgacgcagatctatatcggcggcaaaaacaaacgggtcatgcgtaacctgaccatcgataacctga

SEQ ID NO: 467820 - DNA, 75 bp, synthetic construct
  source 1..75: mol_type = other DNA
cagcggcatcatcgaagaacgcggcgaaaacctcagaaacgaatgcagctaacagcgcacaggtggcagcggcct

SEQ ID NO: 467821 - DNA, 75 bp, synthetic construct
  source 1..75: mol_type = other DNA
taacattgagatgaagcgtgcgtcgctggagttacacaacaaaccgcaacatctttttatgcgtaatatcaaagt

SEQ ID NO: 467822 - DNA, 75 bp, synthetic construct
  source 1..75: mol_type = other DNA
cttacgccagggatttcataaccagattatcggtgccaacatcaccaactgtaaatttagtgatttacagggcga

SEQ ID NO: 467823 - DNA, 75 bp, synthetic construct
  source 1..75: mol_type = other DNA
tcagtaagaaagcaggtattgataacgcgacagtcgctatttacggttgtgacaatttcgtgattgataatattg

SEQ ID NO: 467824 - DNA, 75 bp, synthetic construct
  source 1..75: mol_type = other DNA
cgcggtatccaaatctccgccgggaatgccgtctcctttgtggcactgactaacattgagatgaagcgtgcctcg

SEQ ID NO: 467825 - DNA, 75 bp, synthetic construct
  source 1..75: mol_type = other DNA
atcgttatctggaacgtggtctgatgtctgtgcttgaggattatgacgtcatcattgccagagagtttttcacgc

SEQ ID NO: 467826 - DNA, 75 bp, synthetic construct
  source 1..75: mol_type = other DNA
gcgtgatttctacctactatctggacgacggtatttctaccaataccaacgccaatagtctgactagactggccc

SEQ ID NO: 467827 - DNA, 75 bp, synthetic construct
  source 1..75: mol_type = other DNA
cgtcactatgagtgctttgcagtctgtccttcaggcgcattctaacttagggggcacgtttatcgtcgccacccc

SEQ ID NO: 467828 - DNA, 75 bp, synthetic construct
  source 1..75: mol_type = other DNA
caaagctcgcagagcagaacttattgccgagcgacgcagtaatgaagcactggcgcgaaaaattgcgctaaagct

SEQ ID NO: 467829 - DNA, 75 bp, synthetic construct
  source 1..75: mol_type = other DNA
ccataatctcaaggtttaatcttgctacaacagaaggtagtttatcagttaatataagagaagagcagtataaat

SEQ ID NO: 467830 - DNA, 75 bp, synthetic construct
  source 1..75: mol_type = other DNA
ctctaatggatataggaatgaaaacctagatctatccttttacgtaaacaatgctattttattttcactaattcc

SEQ ID NO: 467831 - DNA, 75 bp, synthetic construct
  source 1..75: mol_type = other DNA
ataatgaactgcttgagaatgtggcattgacccattctgtccgtcctggggacgtagtgatcattggaatgggat

SEQ ID NO: 467832 - DNA, 75 bp, synthetic construct
  source 1..75: mol_type = other DNA
gtcatgtttgattcaaaactcaaccgggaagatccggtaagagactatctgcaaatcgatcaccaaaatttagca

SEQ ID NO: 467833 - DNA, 75 bp, synthetic construct
  source 1..75: mol_type = other DNA
cgaagcctaccgtatcttccagcagaatgtttgccagacattaatgaacgacgatcagcaacttccttcgttact

SEQ ID NO: 467834 - DNA, 75 bp, synthetic construct
  source 1..75: mol_type = other DNA
ttcgacatcttccattaccacaaagtgtcagagaagccattaccgcagcaagaaaacaggccggtacgttttacg

SEQ ID NO: 467835 - DNA, 75 bp, synthetic construct
  source 1..75: mol_type = other DNA
gatccggcgcggttactggcgggtgaccgcgccagcgatgctatcgtggaaaatattcgccagcaactgggactg

SEQ ID NO: 467836 - DNA, 75 bp, synthetic construct
  source 1..75: mol_type = other DNA
tcagaaggtattacatatactatacaatatgttcgagatattgatattgttagagtgtccttgcttagttacaac

SEQ ID NO: 467837 - DNA, 75 bp, synthetic construct
  source 1..75: mol_type = other DNA
cgtgacacgtcagctaatataaacagtgtgaacgcttttctatcaagtgtacccgtttctaatggttttgttggc

SEQ ID NO: 467838 - DNA, 75 bp, synthetic construct
  source 1..75: mol_type = other DNA
caagccttcagcgaagggcaaacggtcgtcgtgcctgctggattcgtttgtgacaatatcaacaccggcatcttc

SEQ ID NO: 467839 - DNA, 75 bp, synthetic construct
  source 1..75: mol_type = other DNA
atgtctaaacttaattctattacactggctatcctgtcggtgttggcaacttcgtctgcatgggcggaagatgaa

SEQ ID NO: 467840 - DNA, 75 bp, synthetic construct
  source 1..75: mol_type = other DNA
tagcagactttttgagatgatagagattaccgacaatgaaactaaaaagaatacaactgcttttttaattagcag

SEQ ID NO: 467841 - DNA, 75 bp, synthetic construct
  source 1..75: mol_type = other DNA
gacgtatttcataaagaaagtattttgtttttttcacaattatttataaaaaatatcaaacttttcgatataaat

SEQ ID NO: 467842 - DNA, 75 bp, synthetic construct
  source 1..75: mol_type = other DNA
ccgatgccgggtatctacgctatggatgtttatctgaataatcaatggcgtggccactatgatattgatattaaa

SEQ ID NO: 467843 - DNA, 75 bp, synthetic construct
  source 1..75: mol_type = other DNA
aaaccctggtatttcgtctcccaacgccctgatggctctccgttgccgtttggttatgaggttgaagatgaaagc

SEQ ID NO: 467844 - DNA, 75 bp, synthetic construct
  source 1..75: mol_type = other DNA
ctaaacagaattttactcctgtggtacgcggcgttgcccagagtaacgcactcgtcaccatagaacaaaatggtt

SEQ ID NO: 467845 - DNA, 75 bp, synthetic construct
  source 1..75: mol_type = other DNA
atgaaacttacacataaaaaaactgaaaatcatcatgttaatctgaaagccgcagcgattttgattttttttcag

SEQ ID NO: 467846 - DNA, 75 bp, synthetic construct
  source 1..75: mol_type = other DNA
tacatcgttcgctcagaaaaaaagctgatcttgagcctgttctggaacagcttgctgatgaaggtaaagtccagt

SEQ ID NO: 467847 - DNA, 75 bp, synthetic construct
  source 1..75: mol_type = other DNA
tcatattataattcgcttcggttgcctattacacctccttcaccagataatattttagttattaagcgaggggat

SEQ ID NO: 467848 - DNA, 75 bp, synthetic construct
  source 1..75: mol_type = other DNA
aatatcaaccaatgttattaacaataattcaaattgcaagaagaaataatttcattgccattttagatacactag

SEQ ID NO: 467849 - DNA, 75 bp, synthetic construct
  source 1..75: mol_type = other DNA
ggttgaaggtgtgtatggcgctcaaacagtagctggcagtggtgaattacgtctgaatggtacaataccaggaca

SEQ ID NO: 467850 - DNA, 75 bp, synthetic construct
  source 1..75: mol_type = other DNA
aacatagagcaatgaaaggtataccgcattatcacgggggaggtagcgctatcagtcgcgtccctttgagagaat

SEQ ID NO: 467851 - DNA, 75 bp, synthetic construct
  source 1..75: mol_type = other DNA
taaaaaatctatacaaatggctggagatgattggggcaaaatgctctacaaaaataatatgtctccatgaggaag

SEQ ID NO: 467852 - DNA, 75 bp, synthetic construct
  source 1..75: mol_type = other DNA
cctgccggcagtcaggagatggatatctacgtaaacggcagctggaagggacgttataccgtcatctacggcgag

SEQ ID NO: 467853 - DNA, 75 bp, synthetic construct
  source 1..75: mol_type = other DNA
gtctgctggcagtctgcacgcttctgctttcgcataaatcaggggccgtctcgtttgatccctccctgcttgctg

SEQ ID NO: 467854 - DNA, 75 bp, synthetic construct
  source 1..75: mol_type = other DNA
cacaccaccgcgaaagtgaccgtcagccagttgggccgcgtcatctacgaaacccaggtcccggcggggccgttc

SEQ ID NO: 467855 - DNA, 75 bp, synthetic construct
  source 1..75: mol_type = other DNA
gttctgaaaattgggcacaacgtcgatataggcgcaaattcatgcatcatttcaaaccagatcattattggtaat

SEQ ID NO: 467856 - DNA, 75 bp, synthetic construct
  source 1..75: mol_type = other DNA
tggcaggcaccgtttatcaagtcggatcgcgaagacgactacaaagtggcctgggcgttctttgcacaagataag

SEQ ID NO: 467857 - DNA, 75 bp, synthetic construct
  source 1..75: mol_type = other DNA
tgtgcgcggtaaagaagggttatttctgaccaaactggaacaaaaagtagagatcctggatcccgcaaaaacgca

SEQ ID NO: 467858 - DNA, 75 bp, synthetic construct
  source 1..75: mol_type = other DNA
tacgctctatctcagagacctggaaaaatacggtatcactgcagaggacgtgtctcagccaggttgttattccta

SEQ ID NO: 467859 - DNA, 75 bp, synthetic construct
  source 1..75: mol_type = other DNA
gcaataaagtatcaaatccccgccaacttaatgctggccgtcgcagaacaggaaggagggaaaccgggcctggaa

SEQ ID NO: 467860 - DNA, 75 bp, synthetic construct
  source 1..75: mol_type = other DNA
aaagcgacacactcgctacagaaccgcccaaaaatgacggaacaacagtaacaccgactacaccgaatcaactta

SEQ ID NO: 467861 - DNA, 75 bp, synthetic construct
  source 1..75: mol_type = other DNA
gcgaactcggcgcaagcatcggcagcaagccagacagcagctaaagcaagtgaggatgcagccagagagtatgca

SEQ ID NO: 467862 - DNA, 75 bp, synthetic construct
  source 1..75: mol_type = other DNA
gtggataccgtttaacgattcactggatatgcttgctggcttttcgcctggttataagcaaataactgtaggtga

SEQ ID NO: 467863 - DNA, 75 bp, synthetic construct
  source 1..75: mol_type = other DNA
aggcgtggaccatcatcaagcccctgttacctcctgaacccgccacaccacgggccggacgcccatgggctgagc

SEQ ID NO: 467864 - DNA, 75 bp, synthetic construct
  source 1..75: mol_type = other DNA
aacccgctacgggggagacttacccgaaatctgatttattcaacaaagccgatccggcatttaccgctgactacc

SEQ ID NO: 467865 - DNA, 75 bp, synthetic construct
  source 1..75: mol_type = other DNA
cgggctcttcaccaatgacctgggcgtcgcaaattgcctggtggcgattccgattgcgattctggttaacgtggc

SEQ ID NO: 467866 - DNA, 75 bp, synthetic construct
  source 1..75: mol_type = other DNA
actgttatcggaggctgccatcatggctacagtcccaacttccccatacctcaaaatcgaagtcgtcaacggcaa

SEQ ID NO: 467867 - DNA, 75 bp, synthetic construct
  source 1..75: mol_type = other DNA
ggttgttcgtgcccgaattgtagccaatgagcgcggagatattacagtcggtggtgaaactgtcagtattgtgta

SEQ ID NO: 467868 - DNA, 75 bp, synthetic construct
  source 1..75: mol_type = other DNA
acccgagaaccaataacggcatcaatgattataagtcctgataaatgtgtttatgatcctatcaagggaaacttc

SEQ ID NO: 467869 - DNA, 75 bp, synthetic construct
  source 1..75: mol_type = other DNA
cgaaacacttccgttgccccagacaacgtagttcaacagtatccgtccggccaacacaccttcccgacaccgccg

SEQ ID NO: 467870 - DNA, 75 bp, synthetic construct
  source 1..75: mol_type = other DNA
cggtattgtctatatctcccaccgcatgaaagaaatcttcgagatttgcgatgacgttaccgtttttcgtgacgg

SEQ ID NO: 467871 - DNA, 75 bp, synthetic construct
  source 1..75: mol_type = other DNA
actggtatctatactcgcgatgccggtacgcttttatggttggggaaagaaacgacatttaccgggccgaaatct

SEQ ID NO: 467872 - DNA, 75 bp, synthetic construct
  source 1..75: mol_type = other DNA
tatatggaagtaaaatatgttgtgaaattaaagatcctgcacagtcttttcccgcaagatttataaatggagtta

SEQ ID NO: 467873 - DNA, 75 bp, synthetic construct
  source 1..75: mol_type = other DNA
atgatcatttcaagaccaaatattgattctgcaattccgggacgttacactgttcaggcaccttataaagcgggt

SEQ ID NO: 467874 - DNA, 75 bp, synthetic construct
  source 1..75: mol_type = other DNA
ataaaacactctccaggaaacccggggcggttcaaccggatcagctacctcagttaatgcagacgatgcgaacag

SEQ ID NO: 467875 - DNA, 75 bp, synthetic construct
  source 1..75: mol_type = other DNA
ccatgttcgtaaaactgcgcaccgcccgttacctgaaagccagcgcggatgcctccggtgtgacagtaggttact

SEQ ID NO: 467876 - DNA, 75 bp, synthetic construct
  source 1..75: mol_type = other DNA
tatgcaggaataattacgcctgaacctggtgcagtcaaggtgctttttgatggagtaactgagagtacgctaaat

SEQ ID NO: 467877 - DNA, 75 bp, synthetic construct
  source 1..75: mol_type = other DNA
aacgttgctgatgcattcattatggccttcgcgccaatcgatacatcgctggatatctgggaacagctggggaga

SEQ ID NO: 467878 - DNA, 75 bp, synthetic construct
  source 1..75: mol_type = other DNA
ggggatcagggatttagccattacgaaatgaaaagttaccttgagagactgtcactctcatggaaaaagacaagt

SEQ ID NO: 467879 - DNA, 75 bp, synthetic construct
  source 1..75: mol_type = other DNA
gaaaacagcctgcatccgcagatgctgcccgcgctggcgagcttaatcgccgaggccagccgctactcgcaaatt

SEQ ID NO: 467880 - DNA, 75 bp, synthetic construct
  source 1..75: mol_type = other DNA
cagggcttcacattcagcgaacaatcccgcaatgaaatcgagtgggcaaagcgctgggggaacagcaatgcgaaa

SEQ ID NO: 467881 - DNA, 75 bp, synthetic construct
  source 1..75: mol_type = other DNA
cctctattccagtgacacaatttcgcctaattaattacataaataaattatttaattctgaccatctattactat

SEQ ID NO: 467882 - DNA, 75 bp, synthetic construct
  source 1..75: mol_type = other DNA
cacaatgacataatggggggcgggggaatgtcatatgcctatgaatatgatgtaaaatataatatatgtcatttg

SEQ ID NO: 467883 - DNA, 75 bp, synthetic construct
  source 1..75: mol_type = other DNA
atatttcagtcactgggatacgatttggaacagccgaggagttggttgatcgcagttatggaaagaaaacattta

SEQ ID NO: 467884 - DNA, 75 bp, synthetic construct
  source 1..75: mol_type = other DNA
cataaaaatgatggcttccacagtgatggttcttaccatattacatttcatggggacaataattcaaagcctaaa

SEQ ID NO: 467885 - DNA, 75 bp, synthetic construct
  source 1..75: mol_type = other DNA
aggttgataaaaatacgatttacagtactggcttaatgttccagaaagaaccgatttctgtttccctaaaaatgg

SEQ ID NO: 467886 - DNA, 75 bp, synthetic construct
  source 1..75: mol_type = other DNA
actaccgctcgattcgcgaaatgtcgctggagctggaacagctcaacatcgtctttggcccaaacggcaccggaa

SEQ ID NO: 467887 - DNA, 75 bp, synthetic construct
  source 1..75: mol_type = other DNA
cgaggatatccttgctgaaagctaaagcgatagtttctgggtatagaaaaactcagagtgatatagtggtttgct

SEQ ID NO: 467888 - DNA, 75 bp, synthetic construct
  source 1..75: mol_type = other DNA
cgccagcagaggccaaccgaatttatccgtattcgctgggcgctggaatattaccaggccggtgacgccgataac

SEQ ID NO: 467889 - DNA, 75 bp, synthetic construct
  source 1..75: mol_type = other DNA
agtttaacaactgtgtagtacgtggtacagtctatgcatctggtggatcatttacgggtgccgttacggcaacca

SEQ ID NO: 467890 - DNA, 75 bp, synthetic construct
  source 1..75: mol_type = other DNA
atgatttaattcagtatctgaacatcattaaagcattaaaaaaatatccaccgatgtctgaatacagaggtgaat

SEQ ID NO: 467891 - DNA, 75 bp, synthetic construct
  source 1..75: mol_type = other DNA
tccattggttaaagctcagaaatttaagtctgcccataccgaacttcgcaggctggaaaaaaagagagaatctct

SEQ ID NO: 467892 - DNA, 75 bp, synthetic construct
  source 1..75: mol_type = other DNA
acttcatcacatcacaacttaacaataaaaatactaatgaacaaaagaaaagctatcttttatcaaaaggtatta

SEQ ID NO: 467893 - DNA, 75 bp, synthetic construct
  source 1..75: mol_type = other DNA
gaggagcggacgcagctctttacaatagaagtaaagatgagttcaaggaaaaatttggacgttatttagatgaag

SEQ ID NO: 467894 - DNA, 75 bp, synthetic construct
  source 1..75: mol_type = other DNA
ttactggcaggatgtgaatccatcaccctgcccttagatgtagcgcaacaaatgctcaacacccctgcggtagag

SEQ ID NO: 467895 - DNA, 75 bp, synthetic construct
  source 1..75: mol_type = other DNA
cgacaccgtgcatacccacatagcctggcttgctgaacagggactggtgcgcaagcgcacgctcattaacggtta

SEQ ID NO: 467896 - DNA, 75 bp, synthetic construct
  source 1..75: mol_type = other DNA
gtaagcgcacgctcgttaacggttatttcatcgccgaactgaccggccggggtcaggatgtggcggaaggccgcg

SEQ ID NO: 467897 - DNA, 75 bp, synthetic construct
  source 1..75: mol_type = other DNA
atttgcccctggaatcgcggctttgatttcaacgaaagaaaacgaaacgcgcattcaacctaatgctacatgtcc

SEQ ID NO: 467898 - DNA, 75 bp, synthetic construct
  source 1..75: mol_type = other DNA
ggcaccagcgaatacttgagcgcaaaggcgacgcgtaccgtttatcgcgataaaacaaaaaaattcgccgggagt

SEQ ID NO: 467899 - DNA, 75 bp, synthetic construct
  source 1..75: mol_type = other DNA
tacagcatcgttcatattgatacacaccgggggaaaaactggagcgttcgggcaagttacaacaattggggcgat

SEQ ID NO: 467900 - DNA, 75 bp, synthetic construct
  source 1..75: mol_type = other DNA
agtattccttcgcaggatatttctaaaggcaagctacgtttccaggttaatgccgggaagatagaaaaaacgatt

SEQ ID NO: 467901 - DNA, 75 bp, synthetic construct
  source 1..75: mol_type = other DNA
tgagaaacgtggtcgggtcaccatctacgccccaaccggcataattacctatttatccaaacatgtaatcgataa

SEQ ID NO: 467902 - DNA, 75 bp, synthetic construct
  source 1..75: mol_type = other DNA
ctcaattatgaaattctgagagtagaaacattaaactccgatggtgaaggtaatggccaaaaaatggcagcagaa

SEQ ID NO: 467903 - DNA, 75 bp, synthetic construct
  source 1..75: mol_type = other DNA
tggtgctgggcgatgccatgattgtgaatctggcgcagtcgacgggatatcgcttaaccaaaggttttgcgctac

SEQ ID NO: 467904 - DNA, 75 bp, synthetic construct
  source 1..75: mol_type = other DNA
gggcgtgcagggagcggatgcgccagtcgttgcgcagaacggctcttcgcgcgatgtgaagctgacctttgcgca

SEQ ID NO: 467905 - DNA, 75 bp, synthetic construct
  source 1..75: mol_type = other DNA
attttccggcagaagtcatccatgcatggcaaacgctgaaacatgatgcggtgctcatcgaggcgatggaaagtc

SEQ ID NO: 467906 - DNA, 75 bp, synthetic construct
  source 1..75: mol_type = other DNA
cttcaggagtatttctgttaccccgatgcgtttctcttttttgatctttgtggttgtccggctttgcctgacgga

SEQ ID NO: 467907 - DNA, 75 bp, synthetic construct
  source 1..75: mol_type = other DNA
ggcgattttaatataaagctcactaatggtgattataggttgatagttgatggaggtgccgcgaatataaaatca

SEQ ID NO: 467908 - DNA, 75 bp, synthetic construct
  source 1..75: mol_type = other DNA
cgatgccggtgatatcgctggcgcgctggaaattgccccgtacgcgctgaaatacggcctcacctctgaccaccg

SEQ ID NO: 467909 - DNA, 75 bp, synthetic construct
  source 1..75: mol_type = other DNA
gtccgggattctttgtgtgtgatctgttgttgggtttcactctgagtttgcagcacgtgcagcccttccttacga

SEQ ID NO: 467910 - DNA, 75 bp, synthetic construct
  source 1..75: mol_type = other DNA
tcagcagtccggcggcgaagacggtggcagtgtggtgttcccgccggtgctggtgcagatgctcgaccggctgga

SEQ ID NO: 467911 - DNA, 75 bp, synthetic construct
  source 1..75: mol_type = other DNA
atggcaacccccgcacagcgtcacgcgatgcgggtctcggctgtcagggcatcgcagcgggataacgccccgctg

SEQ ID NO: 467912 - DNA, 75 bp, synthetic construct
  source 1..75: mol_type = other DNA
tgatgacggtgatgctctggcgtctggatgcgggggatatcaccggcgctgtcgagattgcgcgctatgccctgc

SEQ ID NO: 467913 - DNA, 75 bp, synthetic construct
  source 1..75: mol_type = other DNA
cgtgatgccggtatgaatgcagaggcgctggcgcagtttcagcgcgcgatgcagctcgaccgcaatgccggtgtg

SEQ ID NO: 467914 - DNA, 75 bp, synthetic construct
  source 1..75: mol_type = other DNA
ttcgctatatcacgctgaacagaccagaactacctgaaacaaaagaggaaaatcagatatcagtgagagcagaaa

SEQ ID NO: 467915 - DNA, 75 bp, synthetic construct
  source 1..75: mol_type = other DNA
ctgttaacgcttccacaggacaataaccacccgacagggcgtcctgtaaactggtttcatcagaaaaaaaacaac

SEQ ID NO: 467916 - DNA, 75 bp, synthetic construct
  source 1..75: mol_type = other DNA
aaacgcgccatatatctaacaggtgagttatctgttggtgtattttttatgctgtctgcttttttatttttcaaa

SEQ ID NO: 467917 - DNA, 75 bp, synthetic construct
  source 1..75: mol_type = other DNA
agaaagcgatgattgtcggcgatcccctgcaaatcgaacctatcaggaatctgtcagaaaatctgcaaacgcaac

SEQ ID NO: 467918 - DNA, 75 bp, synthetic construct
  source 1..75: mol_type = other DNA
tttgaggctcttcaggtatgggttattcagcattcaaatcgtaagctggaaactgcgtttaacgccctggtagct

SEQ ID NO: 467919 - DNA, 75 bp, synthetic construct
  source 1..75: mol_type = other DNA
cagcgttaaagtctactacggttactaccatcaacgtctggaccgtgcagaggataatgatgaaactctgatttc

SEQ ID NO: 467920 - DNA, 75 bp, synthetic construct
  source 1..75: mol_type = other DNA
ggcaaggctggtgctgacgaaggacggaagcatatttcttaatggtacgcacattcatctggaaggggagtcgga

SEQ ID NO: 467921 - DNA, 75 bp, synthetic construct
  source 1..75: mol_type = other DNA
ttctataatcccaagtgaaggattggttattaactcaaaaaaaacttgtattagtgggcctcgtagtcagaggaa

SEQ ID NO: 467922 - DNA, 75 bp, synthetic construct
  source 1..75: mol_type = other DNA
gtagctaaggctatgaactgtagtgtcgaacaggtggataaagaactcgttatggggatattgctttcagcatct

SEQ ID NO: 467923 - DNA, 75 bp, synthetic construct
  source 1..75: mol_type = other DNA
ttcacgattcatgcgaatttacccacctgtagttgttcttttatttataatatatattgcaacatttatcatgaa

SEQ ID NO: 467924 - DNA, 75 bp, synthetic construct
  source 1..75: mol_type = other DNA
caagagaacaggttatttttgcgctgaatccaccggatatacgtcataaagggcaactggagccatttggtgatt

SEQ ID NO: 467925 - DNA, 75 bp, synthetic construct
  source 1..75: mol_type = other DNA
gagaacatgacaacagcgcggacaatgcagggatatgctgttcggttatgccatgcctgtgataatcgccattat

SEQ ID NO: 467926 - DNA, 75 bp, synthetic construct
  source 1..75: mol_type = other DNA
accagcagaacctctatgggtcacaactatcctgtttacgggaatccagaaaaagaaattatgacctacctggtt

SEQ ID NO: 467927 - DNA, 75 bp, synthetic construct
  source 1..75: mol_type = other DNA
gaacgttctgggcggtcaaagagatttccgtaaatgagattctgcgtgttttaggccttgaaggctattctaatg

SEQ ID NO: 467928 - DNA, 75 bp, synthetic construct
  source 1..75: mol_type = other DNA
gggattgatgggcccaagcgtggatcactcacgcgtcagtgagtggagcgcgtgtctcaataatgacctggagcg

SEQ ID NO: 467929 - DNA, 75 bp, synthetic construct
  source 1..75: mol_type = other DNA
tgaacgctggacgcttaccgagagcatcaaactggcacacgcctgcgcgcgggcaagcctgttatgcgccaatgc

SEQ ID NO: 467930 - DNA, 75 bp, synthetic construct
  source 1..75: mol_type = other DNA
acgatgttctgaaaaagatccgcattttggattgttctccagagttttgtgcccgcaattttgcggagacatcaa

SEQ ID NO: 467931 - DNA, 75 bp, synthetic construct
  source 1..75: mol_type = other DNA
gagggtactcaaacagaccttgtatctgatgctgatattcggaatctttttggcagaattgctgcgatctctgaa

SEQ ID NO: 467932 - DNA, 75 bp, synthetic construct
  source 1..75: mol_type = other DNA
gcatcgccttacaaccagagttaacgctgaaaagcattgcaggtgaattgtgttccgttcctcacgaactaagcg

SEQ ID NO: 467933 - DNA, 75 bp, synthetic construct
  source 1..75: mol_type = other DNA
aaataatcaacataaatttgaaccaaatatttgtagagcgaacacatttcgcttttcttctgagcgcttcgatac

SEQ ID NO: 467934 - DNA, 75 bp, synthetic construct
  source 1..75: mol_type = other DNA
ggtaaggggggggcactggaaactattcgccctcttggtgttgataaacccactggattattctttcagaaacaa

SEQ ID NO: 467935 - DNA, 75 bp, synthetic construct
  source 1..75: mol_type = other DNA
gttcatttgattccagtagatggcaaagtctacgcggttggtgttgggcgaactttacatggcaatgagttgcct

SEQ ID NO: 467936 - DNA, 75 bp, synthetic construct
  source 1..75: mol_type = other DNA
tacctcagggatttatagatgaaactggtggcgtagtagttgaaaaccatattaatattgtatattcaaacggat

SEQ ID NO: 467937 - DNA, 75 bp, synthetic construct
  source 1..75: mol_type = other DNA
aaagatttcgcgaagagtttaatttttatgtaacaacaaaatggttggattttaatacctcaaaaagtattgagt

SEQ ID NO: 467938 - DNA, 75 bp, synthetic construct
  source 1..75: mol_type = other DNA
tttatttcaagaaggattaaaaaagtttacggacgagaagcagatgtaatttatccacctgtagatataaataga

SEQ ID NO: 467939 - DNA, 75 bp, synthetic construct
  source 1..75: mol_type = other DNA
aaccaagaaaagaaaaaaccatcaagcaaaaaatagcctcagcgcagatgcgtttgaatcgtctcaagaccaaag

SEQ ID NO: 467940 - DNA, 75 bp, synthetic construct
  source 1..75: mol_type = other DNA
ctcggatacgaatatattatgacgccggttgccaccaccattatcagtatggtgctgttcgccttctccacctag

SEQ ID NO: 467941 - DNA, 75 bp, synthetic construct
  source 1..75: mol_type = other DNA
gcgcgaaccaatgccatttctgattggcgagaaggacaaggccaagctcattcgcaacggacaggcgcttcttga

SEQ ID NO: 467942 - DNA, 75 bp, synthetic construct
  source 1..75: mol_type = other DNA
aactgttctggcggcccgcgtctttgcgtaaaaagatgggagatcgcgttgagttgcaaatgaaagcaacacagc

SEQ ID NO: 467943 - DNA, 75 bp, synthetic construct
  source 1..75: mol_type = other DNA
tgcatccgctcagcttcctaccgaccgtgaaacgttattttattataatctacgggaaattcccccggcaccgga

SEQ ID NO: 467944 - DNA, 75 bp, synthetic construct
  source 1..75: mol_type = other DNA
tggctgacaaggcattcaccctgcagtttgccgggaaaatgctgtccctttctgcaggagatgtgcttctgattg

SEQ ID NO: 467945 - DNA, 75 bp, synthetic construct
  source 1..75: mol_type = other DNA
aaataaaaccacaatccatacagcaacatccagaaaaaaatcaacttaactggatgctcgaattaaataaatgga

SEQ ID NO: 467946 - DNA, 75 bp, synthetic construct
  source 1..75: mol_type = other DNA
caaaagtctgacggaaaccgggacactgttccagctggcgtcatatcgctattcaacgccggacttcaggacgtt

SEQ ID NO: 467947 - DNA, 75 bp, synthetic construct
  source 1..75: mol_type = other DNA
tattcttcgatggatttagcctcttcatcaacaaacagctctggtgattttcttcgattgaatacaggggctaac

SEQ ID NO: 467948 - DNA, 75 bp, synthetic construct
  source 1..75: mol_type = other DNA
caaaagcgtattcaatggcgctggtagcaagtagcgtcgcatctgaagaaaacgcaattgccctggggcgtagca

SEQ ID NO: 467949 - DNA, 75 bp, synthetic construct
  source 1..75: mol_type = other DNA
gcactggcaacaggtaatgaacctggtacacctgttggcacaggatctggctgggttgctataggccaggaatca

SEQ ID NO: 467950 - DNA, 75 bp, synthetic construct
  source 1..75: mol_type = other DNA
ccggatacatgaatcgagcttggtataaattcaaaggttctgccgcccatcatattgttgcctgggatgaccccc

SEQ ID NO: 467951 - DNA, 75 bp, synthetic construct
  source 1..75: mol_type = other DNA
gcctatctgggaaaaaataaaaacggcgtgttgcctggttttcaaagtacaatgattgctcccttcagtagtact

SEQ ID NO: 467952 - DNA, 75 bp, synthetic construct
  source 1..75: mol_type = other DNA
gataagaaaaagctagctcttggctatacacgagttgtagcgccgatggatggtatagttatcgccgtcgtcact

SEQ ID NO: 467953 - DNA, 75 bp, synthetic construct
  source 1..75: mol_type = other DNA
cattgttcaatactgataataaaatagaaaataaaaatacaattcgtaataaatataaaataaaagaaagtgata

SEQ ID NO: 467954 - DNA, 75 bp, synthetic construct
  source 1..75: mol_type = other DNA
gatagaccgtaaagaggcgagggaactattcaaccatgttgagagtcctacagattttgcagccaacctgtacga

SEQ ID NO: 467955 - DNA, 75 bp, synthetic construct
  source 1..75: mol_type = other DNA
caaatcaaggtgaggatacatcaggtctgcgaattattacgctgttaattgatggcgaccggaatgagttgtcga

SEQ ID NO: 467956 - DNA, 75 bp, synthetic construct
  source 1..75: mol_type = other DNA
gggctgattgcaagtttaccgccctgtgttatcgggatggaggcgtgctccggggctcattactgggcagactgt

SEQ ID NO: 467957 - DNA, 75 bp, synthetic construct
  source 1..75: mol_type = other DNA
atgactataacttgcgaatccgctaccggcattgcgattaccgctcgtgatacacgaatggatagtatgaccacc

SEQ ID NO: 467958 - DNA, 75 bp, synthetic construct
  source 1..75: mol_type = other DNA
ccctaccgcctattacctgacgattgcctatcttgggcaaaatgataaaggtgtgatccccggttttaaatcggt

SEQ ID NO: 467959 - DNA, 75 bp, synthetic construct
  source 1..75: mol_type = other DNA
agggcaacgaacttaccctgaaaaaccctaccgcctattacctgacgattgcctatcttgggcaaaatgataaag

SEQ ID NO: 467960 - DNA, 75 bp, synthetic construct
  source 1..75: mol_type = other DNA
ggatgactacggcgccctacgcatgacccacttatcctgtcagacaatttgcacgctgacaccggaagaggtgaa

SEQ ID NO: 467961 - DNA, 75 bp, synthetic construct
  source 1..75: mol_type = other DNA
aaaaagcctttctcaattaaatatcaaaaagaaaaataacgccatctcaataaacaacgaaacagccaactggat

SEQ ID NO: 467962 - DNA, 75 bp, synthetic construct
  source 1..75: mol_type = other DNA
actaactctacttatgatggtctgttttataataccgactggatcaaagaacatctggatgtaaaatctattcat

SEQ ID NO: 467963 - DNA, 75 bp, synthetic construct
  source 1..75: mol_type = other DNA
gtaatgagctggtcaaagatattctgccagggatctgggccgaatcgccagctttttacaacaatatgagaattc

SEQ ID NO: 467964 - DNA, 75 bp, synthetic construct
  source 1..75: mol_type = other DNA
tcttttcgtataaataaaattgaaaagaaaaaatcttccgaaatagaggtttcaggaaaattattatgcgcaatt

SEQ ID NO: 467965 - DNA, 75 bp, synthetic construct
  source 1..75: mol_type = other DNA
tattatcctcactgatacttgcgttttcagcagcttatttcccaataattgtttttataagcattgatgaccacg

SEQ ID NO: 467966 - DNA, 75 bp, synthetic construct
  source 1..75: mol_type = other DNA
cgttgttggtaacggattttcattgagtcattttaagtcacaatttaatccttcagtagtgaaaaaatcacaaga

SEQ ID NO: 467967 - DNA, 75 bp, synthetic construct
  source 1..75: mol_type = other DNA
gccagtagtacctgaagaaaaaccaatgcctaacgctctaagcatgcttgaaagagagatcacacaactgattgg

SEQ ID NO: 467968 - DNA, 75 bp, synthetic construct
  source 1..75: mol_type = other DNA
tgccgggtaagcagatggcgattgacgccgaccttaacgctggattgattggtgaagatgaggcgaaaaaacgcc

SEQ ID NO: 467969 - DNA, 75 bp, synthetic construct
  source 1..75: mol_type = other DNA
ccaactcaggccatgattaaagcgtggctatcagagattgctaactttcgcggtcatgctgctggttacagggct

SEQ ID NO: 467970 - DNA, 75 bp, synthetic construct
  source 1..75: mol_type = other DNA
gcgagatgtacagccgcgtcagccgcgatccgttctggtgccgtaacgtgctcagcccgtcgaagttgcgggaaa

SEQ ID NO: 467971 - DNA, 75 bp, synthetic construct
  source 1..75: mol_type = other DNA
agcggacacgggaaacccctcgccgcggagaagggaaaaccaatttcgatcttacagagaatacaacagagatta

SEQ ID NO: 467972 - DNA, 75 bp, synthetic construct
  source 1..75: mol_type = other DNA
atgcgacgctgtgcgtcttatcaggcctacaaacggaacataaccgtaggtcggataaggcgtttacgccgcatc

SEQ ID NO: 467973 - DNA, 75 bp, synthetic construct
  source 1..75: mol_type = other DNA
atcggaactagttttagcccctcatcgatattttatttgatagatcaactgtcaaacttgagaactaaatctgtg

SEQ ID NO: 467974 - DNA, 75 bp, synthetic construct
  source 1..75: mol_type = other DNA
atcacttgagtttgtaattatacgtgaagtaggtgatattgttgcgatttatgatagtcgcggtagaaaatacaa

SEQ ID NO: 467975 - DNA, 75 bp, synthetic construct
  source 1..75: mol_type = other DNA
ttttcgggaaactgtaaaacccaatttcgcggaggagggaaagccttcaccgcggacacgggaaaccactcgccg

SEQ ID NO: 467976 - DNA, 75 bp, synthetic construct
  source 1..75: mol_type = other DNA
atgatgaagcccttcactttcagcatcattgtttccctgctactggcggccaccgttatcggcgcgctgattgaa

SEQ ID NO: 467977 - DNA, 75 bp, synthetic construct
  source 1..75: mol_type = other DNA
caggacatgtttttaaattatttggccaaaagaaacttgaatgttgatgaggacaaacttttcaaaagactaatt

SEQ ID NO: 467978 - DNA, 75 bp, synthetic construct
  source 1..75: mol_type = other DNA
gacgatgggatacatctaagggattattatcgcaaacagaatatgatgtaataagtaatatattagtagaaattg

SEQ ID NO: 467979 - DNA, 75 bp, synthetic construct
  source 1..75: mol_type = other DNA
gttatgattcaaatcatcccatgcctgccgggagtggccgggccgaaagttataacgcagtactgccgcagatag

SEQ ID NO: 467980 - DNA, 75 bp, synthetic construct
  source 1..75: mol_type = other DNA
caccttactgcccctgatgccagaattattaaacgaagaggtgtatgcaaatgtcattgatgcttatgacagcgc

SEQ ID NO: 467981 - DNA, 75 bp, synthetic construct
  source 1..75: mol_type = other DNA
cgaacaaagtcttcaggcgaaagaatcagtactgccggtgaatcaattacgttacatgcaatcctcgctgtgtgc

SEQ ID NO: 467982 - DNA, 75 bp, synthetic construct
  source 1..75: mol_type = other DNA
actggccctctccgtgctggcagaagtcgcctctgtacgtctccatcaggaggattcatgcctgcccccatcgtc

SEQ ID NO: 467983 - DNA, 75 bp, synthetic construct
  source 1..75: mol_type = other DNA
ggggcggtgttgcatgcctggtgatggtccctcttatcctgttacatagcggcagcaaagcgccgactcagtccc

SEQ ID NO: 467984 - DNA, 75 bp, synthetic construct
  source 1..75: mol_type = other DNA
gcgctggcatcgctggaagcagatccagttaaacgagttaactcagatcagatgcgccgagtctgcttagaagct

SEQ ID NO: 467985 - DNA, 75 bp, synthetic construct
  source 1..75: mol_type = other DNA
ttaatagtataacaaatagtctatattttgttaaggttagtgaattggaagtattttctgaaatttcctttgaga

SEQ ID NO: 467986 - DNA, 75 bp, synthetic construct
  source 1..75: mol_type = other DNA
gacaaaataatggaggcttcgatggtggtgcaatactcccaacaaaactctgtgaaatatttgtaacatccggaa

SEQ ID NO: 467987 - DNA, 75 bp, synthetic construct
  source 1..75: mol_type = other DNA
tggaatcgcgtgatttcccagttggtaccaacaataactggtgtccatgatatgactgaaaccggcaagtttatt

SEQ ID NO: 467988 - DNA, 75 bp, synthetic construct
  source 1..75: mol_type = other DNA
ctatcttcttatggctgcttagcgcccgtttttcggcgggtgtgcaaaaagcagccgtcgccgccggctatgctt

SEQ ID NO: 467989 - DNA, 75 bp, synthetic construct
  source 1..75: mol_type = other DNA
caacgtttttatgatactagcggtaatatatattctcgttatcaaactaatgcgtcgccttggtcagactgggta

SEQ ID NO: 467990 - DNA, 75 bp, synthetic construct
  source 1..75: mol_type = other DNA
cagaggccaccggagccgccggataattacggagacctgaaaaaggcggtcgatcgcacttatgccgaaatgggt

SEQ ID NO: 467991 - DNA, 75 bp, synthetic construct
  source 1..75: mol_type = other DNA
acgtggaatataccaggcaggtattaaagcctcattcagcagtacgttaagcgggcatcttggggtggggtatag

SEQ ID NO: 467992 - DNA, 75 bp, synthetic construct
  source 1..75: mol_type = other DNA
taatccctcggattacggtaactttgattcccgctatgtgagagatatcagacttggcacacgtgttgtccagac

SEQ ID NO: 467993 - DNA, 75 bp, synthetic construct
  source 1..75: mol_type = other DNA
tgatgccgacagcgatactgattcctacatgtggtttgaaacaggcgacaacggcaatgaatatttcaaatggag

SEQ ID NO: 467994 - DNA, 75 bp, synthetic construct
  source 1..75: mol_type = other DNA
tgttcaggatacagggtccaactctgccgataatatagcgggcgtttattacagacccgttcaaaagtatataaa

SEQ ID NO: 467995 - DNA, 75 bp, synthetic construct
  source 1..75: mol_type = other DNA
aaagagtggcgtattcgcctgggcgataaggttgttggcgttcgcaataataacttcgctccgggcgccggtgcg

SEQ ID NO: 467996 - DNA, 75 bp, synthetic construct
  source 1..75: mol_type = other DNA
acatggctggaccataccggctgaacgtaccctgcgtcgtaagctggaacgtgaagttgatccgcgtattgtcgt

SEQ ID NO: 467997 - DNA, 75 bp, synthetic construct
  source 1..75: mol_type = other DNA
gcaggcacgtatccggtcacaaaaagcgccggacgggaccgaatggacaccacgcagacgccgcgtaacccggat

SEQ ID NO: 467998 - DNA, 75 bp, synthetic construct
  source 1..75: mol_type = other DNA
gccgacacccgttccggagaaacgcattacgccttctacggcagccgtactcaatatggcagtaacattaccgtt

SEQ ID NO: 467999 - DNA, 75 bp, synthetic construct
  source 1..75: mol_type = other DNA
tgaaacctctcacagaaattatatttaaagatgagtttgctgcggtcattcctgacaatgatagtactcaggcgg

SEQ ID NO: 468000 - DNA, 75 bp, synthetic construct
  source 1..75: mol_type = other DNA
tacagcatcaatgcccaaacccgacacgaagaaaatggcggtgatgacagcaacgatatcagtggcaacggtacg

SEQ ID NO: 468001 - DNA, 75 bp, synthetic construct
  source 1..75: mol_type = other DNA
tgggaaatgcagggaggggatgacaaggtttatatccgtccggttcagaagaatatcaacggtacctggtataat

SEQ ID NO: 468002 - DNA, 75 bp, synthetic construct
  source 1..75: mol_type = other DNA
ttcccgtatgtgctgatgaatccgcgtctgatcctcgcagtcatcctcggcggtatgactggcgtgttcacgctg

SEQ ID NO: 468003 - DNA, 75 bp, synthetic construct
  source 1..75: mol_type = other DNA
gcaaaaactgcctgacgggcagcgcgaaatattgcaatcaagaatgccgcaggatctgccgccggtactggctga

SEQ ID NO: 468004 - DNA, 75 bp, synthetic construct
  source 1..75: mol_type = other DNA
tcgttcaaccaccactgctatcaatgcggtcattatcgcattcggtgccttctacttattgtttgtttctgactc

SEQ ID NO: 468005 - DNA, 75 bp, synthetic construct
  source 1..75: mol_type = other DNA
accacttaatgatcgagaggttttgacaaaaaaaataagtacattgattagttcacgtgaaagcaatacgacttt

SEQ ID NO: 468006 - DNA, 75 bp, synthetic construct
  source 1..75: mol_type = other DNA
cccggtgaaatacaccccgctcaagcagtggatcgcccatggtgaaaagggtaagtacgtcgttcgccgcgttga

SEQ ID NO: 468007 - DNA, 75 bp, synthetic construct
  source 1..75: mol_type = other DNA
gccagccgccatctgattattgctgaaattgttcacggcaaagttggcagaccacaacgcatataccacagtggg

SEQ ID NO: 468008 - DNA, 75 bp, synthetic construct
  source 1..75: mol_type = other DNA
agaagatccagcgcatccgcgttacattcagaccgtttggggcctgggctacgtctttgtaccggacggctctaa

SEQ ID NO: 468009 - DNA, 75 bp, synthetic construct
  source 1..75: mol_type = other DNA
atactccgcaatggaacgctccatcgacgtgcagatttcgcgtctacgccgcatggtggaagaagatccggcgca

SEQ ID NO: 468010 - DNA, 75 bp, synthetic construct
  source 1..75: mol_type = other DNA
ctgcaagtgttgtcggttctgtcttatctgtatctatcttttcgataattaaaaatagtgttaaattacaagatt

SEQ ID NO: 468011 - DNA, 75 bp, synthetic construct
  source 1..75: mol_type = other DNA
gccatttacattggcttcagtagcaatacctatatttatgcaaagtgatacaattatgctcatgcatataacaaa

SEQ ID NO: 468012 - DNA, 75 bp, synthetic construct
  source 1..75: mol_type = other DNA
tttgcagcagcaaatattgtatataattcaatgtatgtaatattgctatgggtaacggcgaatatatcgtttagt

SEQ ID NO: 468013 - DNA, 75 bp, synthetic construct
  source 1..75: mol_type = other DNA
ttgaacatcgcctacctcttaaacgctatcgcttacgatgctacgctatcgaaaatgttcttttgactgattcat

SEQ ID NO: 468014 - DNA, 75 bp, synthetic construct
  source 1..75: mol_type = other DNA
ttcgggcaccccctatcgctttctcttagcgaagacgctgcattaattttggaaggagaggacgacgaacgagtc

SEQ ID NO: 468015 - DNA, 75 bp, synthetic construct
  source 1..75: mol_type = other DNA
gatcaggcgtgggaagtgttcgaaaaactggaagactgttatttcaaccagaaacagccaccagcggcacaaaac

SEQ ID NO: 468016 - DNA, 75 bp, synthetic construct
  source 1..75: mol_type = other DNA
gatatatcactcaggatccgattgggctgaaagggggatggaatttttatcagtatccgttgaatccgatctcaa

SEQ ID NO: 468017 - DNA, 75 bp, synthetic construct
  source 1..75: mol_type = other DNA
ccccgttctgcgccccgaggctggaagttacgtcgccaacctggcagccgctaacactctttttgttatgcgtct

SEQ ID NO: 468018 - DNA, 75 bp, synthetic construct
  source 1..75: mol_type = other DNA
gctgatttaaaaatgaatggtggttccataacaactaatggcactaatagctatggtgcttatgctaatggggaa

SEQ ID NO: 468019 - DNA, 75 bp, synthetic construct
  source 1..75: mol_type = other DNA
cactgaatggatacggacgcaaatcgctggatatactcggcgaaacccgtgctacatctgccacggcattgattg

SEQ ID NO: 468020 - DNA, 75 bp, synthetic construct
  source 1..75: mol_type = other DNA
attattcaaaaactcgaacttttatgggattgtcaaagcggttgggttgatcattctggcaaacttatcgccttc

SEQ ID NO: 468021 - DNA, 75 bp, synthetic construct
  source 1..75: mol_type = other DNA
aacaaattatgcattccctgaccacaattcagatatcaaaggttgggttaggaccgatgattttccaccttatga

SEQ ID NO: 468022 - DNA, 75 bp, synthetic construct
  source 1..75: mol_type = other DNA
cgagtcgggtggggcatattcagcgggacttttaagccaggttaatgattctgaaaagatggtaaataacacccg

SEQ ID NO: 468023 - DNA, 75 bp, synthetic construct
  source 1..75: mol_type = other DNA
aactgagaccacacctgaatcctttttaaatgcattggcacatgaaggcctcattatcctttctgttgtagatga

SEQ ID NO: 468024 - DNA, 75 bp, synthetic construct
  source 1..75: mol_type = other DNA
tacacttggcctgtaaaacgctaaagggcgaaggccgtgacagtctggatatttctttgccgggttttacctctc

SEQ ID NO: 468025 - DNA, 75 bp, synthetic construct
  source 1..75: mol_type = other DNA
aagaggtaaggccgcgttattctgtattgcctgatatattcacacctataaatttagggctatttaaaaactgcc

SEQ ID NO: 468026 - DNA, 75 bp, synthetic construct
  source 1..75: mol_type = other DNA
caaggtgaagcggggctaaaagtaggtggcatcacattgggcacccgagtcgctcagatcacagtaggcctggaa

SEQ ID NO: 468027 - DNA, 75 bp, synthetic construct
  source 1..75: mol_type = other DNA
ctggcgctcatcagcacggaaggggcaacagcgtggtgcgcagaatatgatgaatggggcaacctgctgaatgaa

SEQ ID NO: 468028 - DNA, 75 bp, synthetic construct
  source 1..75: mol_type = other DNA
ctgcggggattatcccggacatgcgaggccagacgattaagggtaaaccgaacggtcgcgcggtactctcgtatg

SEQ ID NO: 468029 - DNA, 75 bp, synthetic construct
  source 1..75: mol_type = other DNA
ggcgtgactatcttgctgaactaaatgagcaaggtcaggcttatgcgcagtttgtcgccagcactgccgaatgtt

SEQ ID NO: 468030 - DNA, 75 bp, synthetic construct
  source 1..75: mol_type = other DNA
gcgcattcatctacgggctctacgttattatagtaactggcggcaatactttgccggttatacctttggtcggca

SEQ ID NO: 468031 - DNA, 75 bp, synthetic construct
  source 1..75: mol_type = other DNA
aatacgcaatgaatgctgtttaccttcgcattcatcacccaaaatgtatttaggtacatgcttttttgacctttc

SEQ ID NO: 468032 - DNA, 75 bp, synthetic construct
  source 1..75: mol_type = other DNA
atttgcagaagaactggatgagctgcaaaaaaacgatactcatccgcgcccggaaaactgggctatttctccgtg

SEQ ID NO: 468033 - DNA, 75 bp, synthetic construct
  source 1..75: mol_type = other DNA
tcgatcttcagagctaacgttacaggtcagaagcattcctacactgcactgaacacgccagagaccccatctgct

SEQ ID NO: 468034 - DNA, 75 bp, synthetic construct
  source 1..75: mol_type = other DNA
atggcattgacaaataaccggaaggcgtttatctcctccctgtcgctcagcgctctggaaatcaaaattcttccc

SEQ ID NO: 468035 - DNA, 75 bp, synthetic construct
  source 1..75: mol_type = other DNA
tttgatgcgggttatctggtcgcgaaaacaggcacccagtattttgtcactaaaggtactggataccttgccggt

SEQ ID NO: 468036 - DNA, 75 bp, synthetic construct
  source 1..75: mol_type = other DNA
ggacgctacgacagcgcagaaagggattattcaactgagcagcgccaccgacagcgagtcggaagccgtcgccgc

SEQ ID NO: 468037 - DNA, 75 bp, synthetic construct
  source 1..75: mol_type = other DNA
attgggctgaaggggggatggaacctgtatacatatccgctgagcccggtgaatagcatggatccattaggatta

SEQ ID NO: 468038 - DNA, 75 bp, synthetic construct
  source 1..75: mol_type = other DNA
aaggtctgtataaaggcggccttggtcgttatgtaaatggcgaatttgacgccagttttgttgctgaatggtgcg

SEQ ID NO: 468039 - DNA, 75 bp, synthetic construct
  source 1..75: mol_type = other DNA
tttgagagaataccgggtcagcctcttttttatgcttctgaagattttatccaaggagagttatttaaaattaca

SEQ ID NO: 468040 - DNA, 75 bp, synthetic construct
  source 1..75: mol_type = other DNA
agcagaaatactggttcgcctgcgccacgtttgataactgggaaggctggaatgagcaacaggtacagtttttac

SEQ ID NO: 468041 - DNA, 75 bp, synthetic construct
  source 1..75: mol_type = other DNA
agtcgtggtctccccccaaaaaaactgctgaatgaaatgattgagcaggcgtaccaggactttgtggcaaatgag

SEQ ID NO: 468042 - DNA, 75 bp, synthetic construct
  source 1..75: mol_type = other DNA
ttaggaatgaaatccgttaatgactatactcttaatattcttggccaaaatgtttcaagagtcacaacggggaaa

SEQ ID NO: 468043 - DNA, 75 bp, synthetic construct
  source 1..75: mol_type = other DNA
cacagccgtataccgaaaatgaactgagcgattctgtccggacggccatcattgacgatcggtggaagggtttac

SEQ ID NO: 468044 - DNA, 75 bp, synthetic construct
  source 1..75: mol_type = other DNA
cacaaccttatactgaggaacaactgctaaacgccatccagaccgccattactgatgatcggtggtcagggaaga

SEQ ID NO: 468045 - DNA, 75 bp, synthetic construct
  source 1..75: mol_type = other DNA
gaaggcaagagagattgaagaagggatttgggatctgggagccatgtgggcaaaacacatgcttattaaagggaa

SEQ ID NO: 468046 - DNA, 75 bp, synthetic construct
  source 1..75: mol_type = other DNA
cccagcaatagctttagcagcaatgatctctgagtctttttcttcttcagaagatcccttacttttagtattagc

SEQ ID NO: 468047 - DNA, 75 bp, synthetic construct
  source 1..75: mol_type = other DNA
gcctggaagcgatgtcggtaattcctatgacagcggtactggttcaacaggtgagggagtcaccaaagcggcttg

SEQ ID NO: 468048 - DNA, 75 bp, synthetic construct
  source 1..75: mol_type = other DNA
caaacagcttgaaagtattgcccgtagtcgtggtctccgcccaaaaaaactgctgaatgaaatgattgagcaggc

SEQ ID NO: 468049 - DNA, 75 bp, synthetic construct
  source 1..75: mol_type = other DNA
caaacatcttgaaagtattgcccgcagtcgtggtctccacccaaaaaaactgctgaatgaaatgattgagcaggc

SEQ ID NO: 468050 - DNA, 75 bp, synthetic construct
  source 1..75: mol_type = other DNA
caaacaacttgaaagtattgcccgcagtcgtggtctcctcccaaaaaaactgctgaatgaaatgattgagcaggc

SEQ ID NO: 468051 - DNA, 75 bp, synthetic construct
  source 1..75: mol_type = other DNA
agctaataaaattgagttatcaccgtcaggaataacaatcactggaactctgttaaaattagaaggtaaagctac

SEQ ID NO: 468052 - DNA, 75 bp, synthetic construct
  source 1..75: mol_type = other DNA
tgcccggcttaacaacgggacttttagcgtcaatgagctatacggctcggcaaacaagccgtcgaaatcggatgt

SEQ ID NO: 468053 - DNA, 75 bp, synthetic construct
  source 1..75: mol_type = other DNA
agaatctcacagcggctaaaaaagtcaaaagcgtaaccgcagaatttgcaaacacaagcactagctccgatgata

SEQ ID NO: 468054 - DNA, 75 bp, synthetic construct
  source 1..75: mol_type = other DNA
agctaaagagtatagaacatttcgccttgataggattcagggggatgttatttgtagagatacaggggaagttat

SEQ ID NO: 468055 - DNA, 75 bp, synthetic construct
  source 1..75: mol_type = other DNA
acaggtagcacagccacatttttcagtcacggatctggcatattctctcggtgtagcgatacgtgggcagcgtta

SEQ ID NO: 468056 - DNA, 75 bp, synthetic construct
  source 1..75: mol_type = other DNA
aggtggtgcaaatatcaccaacaagcctgacggtgtaaccggtaactttttgctccgtgtagagtcgactcgcaa

SEQ ID NO: 468057 - DNA, 75 bp, synthetic construct
  source 1..75: mol_type = other DNA
tgaccaaaaatatctcggcatatacggtgacggtgatttgtattttggtggttattctgaccacacaaaaaacag

SEQ ID NO: 468058 - DNA, 75 bp, synthetic construct
  source 1..75: mol_type = other DNA
tagtgcaaaattaagtgtgattactaatatttataccaaagagtctgatgttggaaataaattttcaaagggatt

SEQ ID NO: 468059 - DNA, 75 bp, synthetic construct
  source 1..75: mol_type = other DNA
ctatttttatcgcggttgctgaagagcgtaatttcaccacagccgcagcccgactgggagttacacgctcggcgg

SEQ ID NO: 468060 - DNA, 75 bp, synthetic construct
  source 1..75: mol_type = other DNA
tgcctctccctcctatctcgcagccaacagcacacctgttcatccgcgtgaacttgtgaatcataagtgtatcgg

SEQ ID NO: 468061 - DNA, 75 bp, synthetic construct
  source 1..75: mol_type = other DNA
ttcttaaccttatcagcaactgaaaacatggaatttgatagccctatgcaggtgactacacagaacatgcaatta

SEQ ID NO: 468062 - DNA, 75 bp, synthetic construct
  source 1..75: mol_type = other DNA
cgataacactacggtaagcatcaaaggatctcagcatacgcctttggttttaacgagcaacaacacaattaaaaa

SEQ ID NO: 468063 - DNA, 75 bp, synthetic construct
  source 1..75: mol_type = other DNA
ggataacagcgcacaggcggcagcagactcacaaactgcatcggcaaactccgcgacagcagccaaaaaatcaga

SEQ ID NO: 468064 - DNA, 75 bp, synthetic construct
  source 1..75: mol_type = other DNA
ctctggttgctgaactgggtgatttttcgcgattttccaatcccaaacagctcatggcttttctgggactggtgc

SEQ ID NO: 468065 - DNA, 75 bp, synthetic construct
  source 1..75: mol_type = other DNA
ttgccaggttactgcgggctggtgaacttacccctgtctggatccctgacctgactcatgaagctatgcgggatc

SEQ ID NO: 468066 - DNA, 75 bp, synthetic construct
  source 1..75: mol_type = other DNA
aggttattgccccttcccggataccaaaatcaccgacagacagaatcaaaaatgatcatcgggacgcaatttctc

SEQ ID NO: 468067 - DNA, 75 bp, synthetic construct
  source 1..75: mol_type = other DNA
gctcgtgaagcattaatgggcgttatgggtgacaaatacgtcgtggcgcttaaccttgccccggcaacgccgcgc

SEQ ID NO: 468068 - DNA, 75 bp, synthetic construct
  source 1..75: mol_type = other DNA
aggaaatatctcgcctgttacctgagtggtctctgtgcaatctggtctgccagttgcaggctcttaaaggtgttg

SEQ ID NO: 468069 - DNA, 75 bp, synthetic construct
  source 1..75: mol_type = other DNA
cattacggcggtggctcgtgagttgactggatttatgtgggatattgcacttgctgcccaatcatcattcagtca

SEQ ID NO: 468070 - DNA, 75 bp, synthetic construct
  source 1..75: mol_type = other DNA
aatgatcatcgggacgcaatttctcttgccaggttactgcgggctggagaacttacccctgtctggatccctgac

SEQ ID NO: 468071 - DNA, 75 bp, synthetic construct
  source 1..75: mol_type = other DNA
tctttcgttgattaccaaacaggcacactggaatatgcgcggcgctaacttcattgccgtacatgaaatgctgga

SEQ ID NO: 468072 - DNA, 75 bp, synthetic construct
  source 1..75: mol_type = other DNA
cgaagccgcctggtcttatcgtacacctgcaaaagttggtgcatggcttatatattaccgaccggactctgtaac

SEQ ID NO: 468073 - DNA, 75 bp, synthetic construct
  source 1..75: mol_type = other DNA
cgaattctgagcatgctattgcgaacagacaaacgttatgcaggaagcactggaccggcaaacatcgaacctggt

SEQ ID NO: 468074 - DNA, 75 bp, synthetic construct
  source 1..75: mol_type = other DNA
aacgatgcagtcacattttgtacaggctttttttacccgttccgcccggactacctttctggcaccggtcccccg

SEQ ID NO: 468075 - DNA, 75 bp, synthetic construct
  source 1..75: mol_type = other DNA
atggcgcgattacaattaaaaaatcgtaaaaataaatgcctgatatttttaataagttttattgtgatgggagaa

SEQ ID NO: 468076 - DNA, 75 bp, synthetic construct
  source 1..75: mol_type = other DNA
acagaacatcaacatcctgcgtaaccgtgtaaaccagcttggtgtggcggagcctgtagtacaacgtcagggcgc

SEQ ID NO: 468077 - DNA, 75 bp, synthetic construct
  source 1..75: mol_type = other DNA
aggaaagtggatgtttaaggatggagctgtggttaaacggatttatacggcagacgaacagcaacaacaggccga

SEQ ID NO: 468078 - DNA, 75 bp, synthetic construct
  source 1..75: mol_type = other DNA
gtcgttgaggttccagatattacagccaaccgccgcgctgatgattccggtaaggcgaatacctgtaataaacct

SEQ ID NO: 468079 - DNA, 75 bp, synthetic construct
  source 1..75: mol_type = other DNA
aaggctttagtgtcgttgagattccagatataacagccaatcgtcgtgccgatgattcagggaagtggatgttta

SEQ ID NO: 468080 - DNA, 75 bp, synthetic construct
  source 1..75: mol_type = other DNA
tacggcgtggaaaaaacgaaagcgcaatactggccgacgctcagtattcagggcggcaaaacgcgctaccagacc

SEQ ID NO: 468081 - DNA, 75 bp, synthetic construct
  source 1..75: mol_type = other DNA
gagtcatgggaacgctacagcgttctggtcaaccgtgtggatacagcaaagcccgaatggccacaaaagcctgaa

SEQ ID NO: 468082 - DNA, 75 bp, synthetic construct
  source 1..75: mol_type = other DNA
gacggatgaggaacgcgcacgactggagtcatgggaacgctacagcgttctggtcagccgtgtggatacagcaaa

SEQ ID NO: 468083 - DNA, 75 bp, synthetic construct
  source 1..75: mol_type = other DNA
aacgcttaatcccgaaggctttagtgtcgttgagattccagatataacagccaatcgtcgtgccgatgattcagg

SEQ ID NO: 468084 - DNA, 75 bp, synthetic construct
  source 1..75: mol_type = other DNA
tcggagactccacacatgcggatgccatcctagatcgactggttcatggcagtatcaagatcgaacttaaaggag

SEQ ID NO: 468085 - DNA, 75 bp, synthetic construct
  source 1..75: mol_type = other DNA
ggcatcccatataccaccgttcgtaaagaaagcaactacggcctgagcatcaccttccgtgactctaatgcgcgt

SEQ ID NO: 468086 - DNA, 75 bp, synthetic construct
  source 1..75: mol_type = other DNA
gtgattaagcggatttatacggcggacgaacagcagcaactgacagaattacagaaggcaactttgctttccgaa

SEQ ID NO: 468087 - DNA, 75 bp, synthetic construct
  source 1..75: mol_type = other DNA
gctgaatcagtcatccagccgctggaacgcgctgtcaggctgaatatggcgacggatgaggagcgcgcacgactg

SEQ ID NO: 468088 - DNA, 75 bp, synthetic construct
  source 1..75: mol_type = other DNA
aacagacgaggaacgcacacgactggaagcatgggaacgttacagtgttctggtcaaccgtgtggatacggcaaa

SEQ ID NO: 468089 - DNA, 75 bp, synthetic construct
  source 1..75: mol_type = other DNA
aatgtgccgtgtgctccgggtggtccgcagcggctggtatatgtggtgtcagcggcggacaaggataagtcctcg

SEQ ID NO: 468090 - DNA, 75 bp, synthetic construct
  source 1..75: mol_type = other DNA
acggctctggtggaagggctcgccctgcgtattgcggaaggtaacgtaccggaatcactcagacccgtcaccctg

SEQ ID NO: 468091 - DNA, 75 bp, synthetic construct
  source 1..75: mol_type = other DNA
ggtatcgggacgcgatacggaaatccgtcagatggtggatattctctcccgccgccgcaagaataacccgattct

SEQ ID NO: 468092 - DNA, 75 bp, synthetic construct
  source 1..75: mol_type = other DNA
cagtatcagcaggaaaagcggcttgcgcagcagattatgacgttgcgtcaggaagggacagacagcactgaactg

SEQ ID NO: 468093 - DNA, 75 bp, synthetic construct
  source 1..75: mol_type = other DNA
cctgctggtcggtcccagtggtgtgggaaaaaccgaaacggcactggcgctggcagacgtgatgtacggcggcga

SEQ ID NO: 468094 - DNA, 75 bp, synthetic construct
  source 1..75: mol_type = other DNA
acacatcacctgcagcaggcactgcacgacattcagcagaatcagcccctgctcagtgtggatgttgacgtacgc

SEQ ID NO: 468095 - DNA, 75 bp, synthetic construct
  source 1..75: mol_type = other DNA
gaagatattgccgttggtcatcagaatcacggcgaacgtctgtctgccattgagcaggaagagaatgtgctgatg

SEQ ID NO: 468096 - DNA, 75 bp, synthetic construct
  source 1..75: mol_type = other DNA
cacgactctgccggggatctttatttatacttttatggccagcgaccttgttactgaaggcataacattatcatt

SEQ ID NO: 468097 - DNA, 75 bp, synthetic construct
  source 1..75: mol_type = other DNA
ggaaaaaccggacgccacggacgcagacctgcatgaactgctgtaccccctgctgcgcgagcacttccagcctgc

SEQ ID NO: 468098 - DNA, 75 bp, synthetic construct
  source 1..75: mol_type = other DNA
caacagcaactgcgaacgcatcagggctttgcaccgctgctggcgctggatgtggacgcccgcgccgtcgccact

SEQ ID NO: 468099 - DNA, 75 bp, synthetic construct
  source 1..75: mol_type = other DNA
gacctgcatgaactgctgtatcccctgctgcgcgagcacttccagcctgcactgatggcgcgttttcagacggtg

SEQ ID NO: 468100 - DNA, 75 bp, synthetic construct
  source 1..75: mol_type = other DNA
taaaccagcccagctacggcttggctgggatgaggaagacgggattgtactggagttcgctacggaagagatgca

SEQ ID NO: 468101 - DNA, 75 bp, synthetic construct
  source 1..75: mol_type = other DNA
acactggacctcggtctgttacaggctggcgcgggtgttaaaggtgaatttgaacagcggctgaaaaatgtcatc

SEQ ID NO: 468102 - DNA, 75 bp, synthetic construct
  source 1..75: mol_type = other DNA
gaaaccgcaggcgctgactctggcatggagtgacgaggatggcattgttctggtatttgatgcacaggcagaggg

SEQ ID NO: 468103 - DNA, 75 bp, synthetic construct
  source 1..75: mol_type = other DNA
gaacggtaaggtcgtcgccaaaccgtgcacagtttccaccaccaatgccacggttgatctcggcgatctttattc

SEQ ID NO: 468104 - DNA, 75 bp, synthetic construct
  source 1..75: mol_type = other DNA
gtcacccttacacccgtcagtacgatcttgacctgctggcagaactccgccgtgacaaccaggcaatgcgcgtga

SEQ ID NO: 468105 - DNA, 75 bp, synthetic construct
  source 1..75: mol_type = other DNA
gcgaatcagtttgtaccggagtgctatcacctgccgatcacctgcaacgaagcgggcgcgctctatcaaaacgcg

SEQ ID NO: 468106 - DNA, 75 bp, synthetic construct
  source 1..75: mol_type = other DNA
taatcagagcccgtgcagcagctaaacgagacagcagagttgtccgacagcgaattctgagcatgctattgcgaa

SEQ ID NO: 468107 - DNA, 75 bp, synthetic construct
  source 1..75: mol_type = other DNA
atgaaatggcgcaaacgtgggtatttattggcggcaatgttggcgctcgcaagtgcgacgatacaggcagccgat

SEQ ID NO: 468108 - DNA, 75 bp, synthetic construct
  source 1..75: mol_type = other DNA
cagagcattgacagtaaacggtggcgccacgcaaggaaccattcaggcagtgattaacatcacttatacctacag

SEQ ID NO: 468109 - DNA, 75 bp, synthetic construct
  source 1..75: mol_type = other DNA
tgcctccacagtacctgtcgtacttactgaaaacaccgttatgtccgaagtcccggtggtaaaaaaaacgccccc

SEQ ID NO: 468110 - DNA, 75 bp, synthetic construct
  source 1..75: mol_type = other DNA
agccggataataaaatcccggcccccgcacaggaaccagagcagataaataacaccgtccgacagtctgtgttgt

SEQ ID NO: 468111 - DNA, 75 bp, synthetic construct
  source 1..75: mol_type = other DNA
ccaacctgctgaagcctgcgctggcgcggggtgaactgcgcaccattgccgccaccacctggtctgagtacaaac

SEQ ID NO: 468112 - DNA, 75 bp, synthetic construct
  source 1..75: mol_type = other DNA
tcaagaacttcactgaggctgcgttaactgcgaaacgtgtatctgcatcgtcaatggcttttattaccaataata

SEQ ID NO: 468113 - DNA, 75 bp, synthetic construct
  source 1..75: mol_type = other DNA
ctgcgggtttaacagcagagaagtttgcgacagtgattcgaaatcactggcacgtgaaaaataagctgcactggc

SEQ ID NO: 468114 - DNA, 75 bp, synthetic construct
  source 1..75: mol_type = other DNA
actgaaaacaccgttatgtccgaagtcccggtggtaaaaaacgtccccggcggcctaattttccttatgcgttta

SEQ ID NO: 468115 - DNA, 75 bp, synthetic construct
  source 1..75: mol_type = other DNA
gggactgagggcaaaggcctcccggaagttcagcccggtcagctaccgcacacacggcctgcctgtgtcagaaaa

SEQ ID NO: 468116 - DNA, 75 bp, synthetic construct
  source 1..75: mol_type = other DNA
aataatgcgggcaacggtgtttaattatatcgaatgtgattacaatcgctggcgacggcacagttggtgtggcgg

SEQ ID NO: 468117 - DNA, 75 bp, synthetic construct
  source 1..75: mol_type = other DNA
agcatatgacctttacaaactaagttacaattacttcccgtatgatgactattcagttatttatcgtatgggtca

SEQ ID NO: 468118 - DNA, 75 bp, synthetic construct
  source 1..75: mol_type = other DNA
ggcgtaagaggccccggaacgttatcgttcacacggaccgtggaggccagtactgttcagcagattatcaggcgc

SEQ ID NO: 468119 - DNA, 75 bp, synthetic construct
  source 1..75: mol_type = other DNA
agcaatgtgccgcgtgctccgggtggcccgcagcggctggtatacgtggtgtcagcggcggacaaggataagcac

SEQ ID NO: 468120 - DNA, 75 bp, synthetic construct
  source 1..75: mol_type = other DNA
tatcaggcgctgctgaagcgacacaacctgcgtggcagtatgagtgcgaaaggctactgttatgacaatgccttt

SEQ ID NO: 468121 - DNA, 75 bp, synthetic construct
  source 1..75: mol_type = other DNA
gtggataacctgcaaaggaaagctaccaggaagaattactggttctctgaagactcctccggaatcacaacctta

SEQ ID NO: 468122 - DNA, 75 bp, synthetic construct
  source 1..75: mol_type = other DNA
tgaaagggatccgcaattttgagaataaagttacggtaactttagcgttacgggacaaaaaacgctttgacggcg

SEQ ID NO: 468123 - DNA, 75 bp, synthetic construct
  source 1..75: mol_type = other DNA
gatgacctgctgacagaaaaacgcctccgttcagaggcgctgtacactataaaaattaacagctcagataacacg

SEQ ID NO: 468124 - DNA, 75 bp, synthetic construct
  source 1..75: mol_type = other DNA
atgtcagattggggctaaaaatatcgataacgcaatgcaatgtttctatcacattattaacaattgtgaggatga

SEQ ID NO: 468125 - DNA, 75 bp, synthetic construct
  source 1..75: mol_type = other DNA
cgccagcggcccgaaccagaagtgggcgggtgacatcacgtacttgcgtaccgatgagggctggttgtatctcgc

SEQ ID NO: 468126 - DNA, 75 bp, synthetic construct
  source 1..75: mol_type = other DNA
gttgaaggtgccgcgctggagttttatgaggcagcagccagaaggagcatcagacaggtcttcctggatgttgct

SEQ ID NO: 468127 - DNA, 75 bp, synthetic construct
  source 1..75: mol_type = other DNA
attacactcgctggcgacagcacagttggtgtggcggcctcagtccggaacaatttgaaaaccagaacctcgctt

SEQ ID NO: 468128 - DNA, 75 bp, synthetic construct
  source 1..75: mol_type = other DNA
gaaagcctgaccgttgatacccttcccgccacaccagagcactttatttccgaaccagattccttgtgcgaatac

SEQ ID NO: 468129 - DNA, 75 bp, synthetic construct
  source 1..75: mol_type = other DNA
atggctacaatcctcatctctgactgcgatttactcgatctattgtccgctcccttcaatgccaccacggatttc

SEQ ID NO: 468130 - DNA, 75 bp, synthetic construct
  source 1..75: mol_type = other DNA
tgtgaactggtctggtatttcaccgaaggactcaaagccccgcgctggctgcgcaccgccgacggcgtgaaattt

SEQ ID NO: 468131 - DNA, 75 bp, synthetic construct
  source 1..75: mol_type = other DNA
aagtgaaattacagaatgtggaaattaagtatgattcgaaaaaagatcctgatggctgccatcccctgtttgtta

SEQ ID NO: 468132 - DNA, 75 bp, synthetic construct
  source 1..75: mol_type = other DNA
ggagaaaacactgaccgggctgctgtgtgagctggtctggtatttcactgaggggctgaaagccccgcgctggct

SEQ ID NO: 468133 - DNA, 75 bp, synthetic construct
  source 1..75: mol_type = other DNA
tgtgagctggtctggtatttcacggaaggactcaaagccccgcgctggctgcgtactgctgacggtgtaaaattt

SEQ ID NO: 468134 - DNA, 75 bp, synthetic construct
  source 1..75: mol_type = other DNA
attatatcgaatgtgattacattcgttggcggcggcacagttggtgtggcggtctcactcaggaacaatttgaaa

SEQ ID NO: 468135 - DNA, 75 bp, synthetic construct
  source 1..75: mol_type = other DNA
gtaagaggccccggaacgttatcgttcacacgggaccgtggaggccagtactgttcagcagattatcaggcgcaa

SEQ ID NO: 468136 - DNA, 75 bp, synthetic construct
  source 1..75: mol_type = other DNA
attacaatcggtggcggcggcacagttggtgtggcggcctcagtccggaacaatttgaaaacaagaacctcgctt

SEQ ID NO: 468137 - DNA, 75 bp, synthetic construct
  source 1..75: mol_type = other DNA
attatatcgaatgtgattacattcggtggcggcggcacagttggtgtggcggtctcactctggaacaatttgaaa

SEQ ID NO: 468138 - DNA, 75 bp, synthetic construct
  source 1..75: mol_type = other DNA
attatatcgaatgtgattacattcgctggcggcggcacagttggtgtggcggtctcagtctggaacaatttgaaa

SEQ ID NO: 468139 - DNA, 75 bp, synthetic construct
  source 1..75: mol_type = other DNA
attatatcgaatgtgattacattcgctggcggcggcacagttggtgtggcggtctcattcaggaacaatttgaaa

SEQ ID NO: 468140 - DNA, 75 bp, synthetic construct
  source 1..75: mol_type = other DNA
acagtcagtgtcaccggtcagctcgctggtgttttaccgcctcgtcagtgccattaccgcatgccagcgggtact

SEQ ID NO: 468141 - DNA, 75 bp, synthetic construct
  source 1..75: mol_type = other DNA
gacggatgaggaacgcgcacgactggagtcatgggaacgctatagtgttctggtcagccgtgtggatacggcaaa

SEQ ID NO: 468142 - DNA, 75 bp, synthetic construct
  source 1..75: mol_type = other DNA
atgatgcacttaaagaacataaaagcgggtaacgctaaaacactggaacagtatgagttaacaaagaagcacgga

SEQ ID NO: 468143 - DNA, 75 bp, synthetic construct
  source 1..75: mol_type = other DNA
gtatcaactgacaaaaaattttgatgttatctggttgttttcagaggacggaagaaactggtatgaagaagtgag

SEQ ID NO: 468144 - DNA, 75 bp, synthetic construct
  source 1..75: mol_type = other DNA
ttgcctgttttatttttgcgctggtcatttacgctatccacgcttgcggtttattcgatctgctcaccgatttac

SEQ ID NO: 468145 - DNA, 75 bp, synthetic construct
  source 1..75: mol_type = other DNA
ccaatgaaggcattacgctgcgctttattttacaactctgtctggcgggcctggcgctgtttattctcgtccagc

SEQ ID NO: 468146 - DNA, 75 bp, synthetic construct
  source 1..75: mol_type = other DNA
atgaacagcaacaacaggcagaatcacaaaaggccgcgttactttccgaagcggaaaacgttattcagccactgg

SEQ ID NO: 468147 - DNA, 75 bp, synthetic construct
  source 1..75: mol_type = other DNA
cgggtaacgctaaaacactggaacagtacgaattaacaaagaattttgacgttatctggttgtggtccgaagacg

SEQ ID NO: 468148 - DNA, 75 bp, synthetic construct
  source 1..75: mol_type = other DNA
atggcgcgattccagtttaaaaaccgtaaaaataatggacttattttttttataagttttatggtgatgggagaa

SEQ ID NO: 468149 - DNA, 75 bp, synthetic construct
  source 1..75: mol_type = other DNA
ataccagttaaccaaaaaagctggagtggtctggctttatactgaagatggtaaaaactggtacgaagaacaaaa

SEQ ID NO: 468150 - DNA, 75 bp, synthetic construct
  source 1..75: mol_type = other DNA
atgcagcatttgataaatataacggtgggtaatccaaaaacggttgaacaatatcaattgacaaaggactttgat

SEQ ID NO: 468151 - DNA, 75 bp, synthetic construct
  source 1..75: mol_type = other DNA
attgcagcagcaggcagaaaatcggaaagccagacttcttgcagatgctgaatccgtgattttgccgctggagcg

SEQ ID NO: 468152 - DNA, 75 bp, synthetic construct
  source 1..75: mol_type = other DNA
cagttaaccacacaggcgggctttatccgggctcttccgcacttcagctgtatccgcgaagtcctgtctcctggg

SEQ ID NO: 468153 - DNA, 75 bp, synthetic construct
  source 1..75: mol_type = other DNA
tataccgtgatggccagcgacctcgccagtgaaggcgttacgctgctctttacattaaaactctgtctggctggc

SEQ ID NO: 468154 - DNA, 75 bp, synthetic construct
  source 1..75: mol_type = other DNA
gttgtctggttttttacagaagatggtaagaactggtacgaagaacaaaagtattttgctgatgacacgataaaa

SEQ ID NO: 468155 - DNA, 75 bp, synthetic construct
  source 1..75: mol_type = other DNA
acataaggcagctctgctttccgaagctgaatccgtgattttgccgctggagcgcgcggtcaggctgaatatggc

SEQ ID NO: 468156 - DNA, 75 bp, synthetic construct
  source 1..75: mol_type = other DNA
gcatgggaacgctacagtgttctggtcagccgtgtggatcctgcaaatcctgaatggccggaaatgccgcaataa

SEQ ID NO: 468157 - DNA, 75 bp, synthetic construct
  source 1..75: mol_type = other DNA
gacgagctgttgccagaaacgcgcccctgttcaaaggcgcggtataccataaaaattaacagttctgataactcg

SEQ ID NO: 468158 - DNA, 75 bp, synthetic construct
  source 1..75: mol_type = other DNA
tttcatttgacggctgctggtacctcaccggtgaacttaacgggtatatcaccgtgcatcctctggcgaccatcc

SEQ ID NO: 468159 - DNA, 75 bp, synthetic construct
  source 1..75: mol_type = other DNA
gaaaaaactggtatgaggaagtgaaaaactttcagccagacacaataaagattgtttacgatgaaaataatatta

SEQ ID NO: 468160 - DNA, 75 bp, synthetic construct
  source 1..75: mol_type = other DNA
gaagcctgggaacgctacagcgttctggtcagccgtgtggatacggcaaatcccgaatggccacaaaagcctgag

SEQ ID NO: 468161 - DNA, 75 bp, synthetic construct
  source 1..75: mol_type = other DNA
atggcacatggtataacgtcgcacaggtgtaatttatgcagcatattaaaaaatattactgcgggtaatcccaaa

SEQ ID NO: 468162 - DNA, 75 bp, synthetic construct
  source 1..75: mol_type = other DNA
aaaatggcctacgacgagaacggtattattcgttgcattgagaaagatgtgtcaatgctcaaccctgatggcttg

SEQ ID NO: 468163 - DNA, 75 bp, synthetic construct
  source 1..75: mol_type = other DNA
tcggaaagccagacttcttgcagatgctgaatccgtgattttgccgctggagctcgctgtcaggttgaacatggc

SEQ ID NO: 468164 - DNA, 75 bp, synthetic construct
  source 1..75: mol_type = other DNA
gttgttgaggtggcagatataacggcgaaccgccgtgcagacgattcggggcagtggatgtatctggacggtcag

SEQ ID NO: 468165 - DNA, 75 bp, synthetic construct
  source 1..75: mol_type = other DNA
agctatcagaccagatggattaagtgttgttgaagtgccggatattaccgctaaccgacgggcggacatttcagg

SEQ ID NO: 468166 - DNA, 75 bp, synthetic construct
  source 1..75: mol_type = other DNA
ccatggggtgggcattgcgcctacaaaaacgctggctaaaagtgcacagtgggcaacaaagcaatggccacagtt

SEQ ID NO: 468167 - DNA, 75 bp, synthetic construct
  source 1..75: mol_type = other DNA
caggtaaagagctgggcaggactcaccatgggggtgggcattgcgcctacaaaaacgctggccaaaagtgcacag

SEQ ID NO: 468168 - DNA, 75 bp, synthetic construct
  source 1..75: mol_type = other DNA
atggagtaaacccgacgacgctgcgcaatggctgactcgggtggttggcgagcagaccattaacgtcgccccgga

SEQ ID NO: 468169 - DNA, 75 bp, synthetic construct
  source 1..75: mol_type = other DNA
atgaagccaatacaattaatatattcaatactaatctatttatttatccatcttggtgcttcggcatccgacaaa

SEQ ID NO: 468170 - DNA, 75 bp, synthetic construct
  source 1..75: mol_type = other DNA
cgttttgcaacgccttgcccgttacaccctggacaccgtgcatctggggatcgttgaaggcgacgaagtgctgta

SEQ ID NO: 468171 - DNA, 75 bp, synthetic construct
  source 1..75: mol_type = other DNA
ctggacaccgtgcatctggggatcgttgaaggcgacgaagtgctgtatctggagaagatcaacagtcagcgcggg

SEQ ID NO: 468172 - DNA, 75 bp, synthetic construct
  source 1..75: mol_type = other DNA
cgagcatcgcagatggtgtgatgaacttgatagcagtttcccctactttgcggaagggaacacctgccctgagtg

SEQ ID NO: 468173 - DNA, 75 bp, synthetic construct
  source 1..75: mol_type = other DNA
tgttcgctgcgtttcttttacgtctattactataagaagcacaaacgaacatttgactacgatttctatcggtct

SEQ ID NO: 468174 - DNA, 75 bp, synthetic construct
  source 1..75: mol_type = other DNA
ccattcgattcaggatttcaacaataccgtaactaccttatccaccggttaatgtttaactatggcttacgtgtt

SEQ ID NO: 468175 - DNA, 75 bp, synthetic construct
  source 1..75: mol_type = other DNA
acggcttccagcaactgatgggcgaggttatcgaaagcgcaaccagtgcggtagccagtctgcccgcaatggtta

SEQ ID NO: 468176 - DNA, 75 bp, synthetic construct
  source 1..75: mol_type = other DNA
aacgtcaaagaggcgcaggagagcctgggcaaaaccaccatccaactggacgaggaactggaccagcttaagctg

SEQ ID NO: 468177 - DNA, 75 bp, synthetic construct
  source 1..75: mol_type = other DNA
ggcgcttttgaaatcgacgacggcgaattacacggtgaatcgccgggtgatcgaacgttaaccattccttgtaaa

SEQ ID NO: 468178 - DNA, 75 bp, synthetic construct
  source 1..75: mol_type = other DNA
atacgacggtccggcactggaaacgcatgaaatgaacgtgcgagaccttgctcctgcccttctatcactatcaga

SEQ ID NO: 468179 - DNA, 75 bp, synthetic construct
  source 1..75: mol_type = other DNA
atgggcatggcgggtaatgtgacttttgtacacaacggcaaggcttatgttactggcggtgttaaccagaacatc

SEQ ID NO: 468180 - DNA, 75 bp, synthetic construct
  source 1..75: mol_type = other DNA
ttagagcgttatcgtgatgaagtgctgacgctcaagacaccttttaacatcgtattgaatatgattaatgatgca

SEQ ID NO: 468181 - DNA, 75 bp, synthetic construct
  source 1..75: mol_type = other DNA
ttatggggttcaagccaggtatgggcatcgccgttgagccaggggaggggatgggcggtttttcggtgatcccag

SEQ ID NO: 468182 - DNA, 75 bp, synthetic construct
  source 1..75: mol_type = other DNA
ataatatctgatttagaatcattaaacattaatgaagtattcaggaaaaagttcttagcatattactttcttgag

SEQ ID NO: 468183 - DNA, 75 bp, synthetic construct
  source 1..75: mol_type = other DNA
tccttggaacaagtgttaatattagcaaaaagttttcagcagattgggaaatacacagaagcatacaagacactc

SEQ ID NO: 468184 - DNA, 75 bp, synthetic construct
  source 1..75: mol_type = other DNA
tgtaggtttagaagcaataatacacaataaacctgttatcataacaggaaaaagtgattattgttatgcagctgc

SEQ ID NO: 468185 - DNA, 75 bp, synthetic construct
  source 1..75: mol_type = other DNA
gggaaggctcggcgctgcccgttggtgtacctgttccatggccctcagccacaccaccaacggggtggctgaaat

SEQ ID NO: 468186 - DNA, 75 bp, synthetic construct
  source 1..75: mol_type = other DNA
ccaacagcttcattgacagcgaaaggcatcactcagctcagtagtgccactaacagcacgtctgaagtgctggcc

SEQ ID NO: 468187 - DNA, 75 bp, synthetic construct
  source 1..75: mol_type = other DNA
gcaaaagggattagttcagctcagtagtgccactaacagcacgtctgaagtgctggccgccacaccgaaagctgt

SEQ ID NO: 468188 - DNA, 75 bp, synthetic construct
  source 1..75: mol_type = other DNA
agcagccggaaaggcaccatccagtcatacacatccctggaatcagatcactggtgtgccaacagcttcattgac

SEQ ID NO: 468189 - DNA, 75 bp, synthetic construct
  source 1..75: mol_type = other DNA
ttgttaatggaagctgggcagcgtggagtcaggttgttgtttccggatggggtcaggatgtaagtgttaagtctc

SEQ ID NO: 468190 - DNA, 75 bp, synthetic construct
  source 1..75: mol_type = other DNA
tcagtggatattggtgaattctaccaggtaactattcggcaccgtaaggatatttctcttgcacttagtgaaggc

SEQ ID NO: 468191 - DNA, 75 bp, synthetic construct
  source 1..75: mol_type = other DNA
gcttccccagaaacaaacatttcgcaaagaaaaacctccaacttgctagaagataatgtctatgacgaagacttc

SEQ ID NO: 468192 - DNA, 75 bp, synthetic construct
  source 1..75: mol_type = other DNA
tggtgtattacagtcaaatattcccgtgaaagttcgttatgcattggaaaagacagctttagataaatccgtctc

SEQ ID NO: 468193 - DNA, 75 bp, synthetic construct
  source 1..75: mol_type = other DNA
atggtgcgtaaccttaagagtagtgacgatttttcccgtgaactgtcatttctttttcaccggtctataaagatt

SEQ ID NO: 468194 - DNA, 75 bp, synthetic construct
  source 1..75: mol_type = other DNA
atgattgcttgtgtgctggtgtttatcgccatgcaaatcctcggcgatcaggaagtgatgttatggctggcctgg

SEQ ID NO: 468195 - DNA, 75 bp, synthetic construct
  source 1..75: mol_type = other DNA
tgcatggcaactgtattatattcttaaagccaatggatattcactcttatcactgtgaaggtttagtctgggaac

SEQ ID NO: 468196 - DNA, 75 bp, synthetic construct
  source 1..75: mol_type = other DNA
acggtggaacaactgaaaatgacggctgaaattgtctgttcggtgttccgtgtcccggcctacaagattggtgtg

SEQ ID NO: 468197 - DNA, 75 bp, synthetic construct
  source 1..75: mol_type = other DNA
cgctgctgagaatggacagcgaacggcgcatgaaaacgctgggtgagtcggtgaaaaatacgcttctcacgccca

SEQ ID NO: 468198 - DNA, 75 bp, synthetic construct
  source 1..75: mol_type = other DNA
acattgtggatgattggcggccctgtcttcttctcgctgttagcgatggcgatttaccagaactattgcagtagc

SEQ ID NO: 468199 - DNA, 75 bp, synthetic construct
  source 1..75: mol_type = other DNA
agggattatttttgccgctattgttatttcaattggttattcgctggcaatatttttatggggcgtcagtactaa

SEQ ID NO: 468200 - DNA, 75 bp, synthetic construct
  source 1..75: mol_type = other DNA
aggttatttccgttggaaaaaatccgcaaataccttcccgtgtccatgtatgggatgcgatttgccagcagcacc

SEQ ID NO: 468201 - DNA, 75 bp, synthetic construct
  source 1..75: mol_type = other DNA
gcagagattagagcttactacccgctaggaattgacggaggtaaacaaaagttcgtccaggtcactggcgaactt

SEQ ID NO: 468202 - DNA, 75 bp, synthetic construct
  source 1..75: mol_type = other DNA
cgttttctactttcctctatggtagcgatatgacccagcactggcgcattgctgggcttgagcctacgcaggtgg

SEQ ID NO: 468203 - DNA, 75 bp, synthetic construct
  source 1..75: mol_type = other DNA
ccgcattactgcggtgggcggtattgcagtaatgtgtctgaatttagggaaggtgcgaataagcggggaaattct

SEQ ID NO: 468204 - DNA, 75 bp, synthetic construct
  source 1..75: mol_type = other DNA
ctataccggcaagacgccgaaagaatattacctcgatgcgcgtctggatctggcgctatcgctattaaagcaaca

SEQ ID NO: 468205 - DNA, 75 bp, synthetic construct
  source 1..75: mol_type = other DNA
catctgctggagcagtgttcgcgacatgaaaacaaagccattcgcgccactgcgcaaggcattctgtacgacatt

SEQ ID NO: 468206 - DNA, 75 bp, synthetic construct
  source 1..75: mol_type = other DNA
gcttctgtacgtactgtatctacagatattcgtaatagtactaccgcgcgcgcgaacagctcaccgccgaactgg

SEQ ID NO: 468207 - DNA, 75 bp, synthetic construct
  source 1..75: mol_type = other DNA
cagaggtattaacattgttgctgaaaaatttacctctattaattacactatggccaaaaacatacccctcttact

SEQ ID NO: 468208 - DNA, 75 bp, synthetic construct
  source 1..75: mol_type = other DNA
atgtcgtcgcgtgtcagaactgagattaaattgctggcgctgctggcctacgtgccaatccggtacgtgggggac

SEQ ID NO: 468209 - DNA, 75 bp, synthetic construct
  source 1..75: mol_type = other DNA
tctaaccaccacggagcgttgctacaggctggtgcaacaccggtttatctggaaaccgcacgtaacccgtatggt

SEQ ID NO: 468210 - DNA, 75 bp, synthetic construct
  source 1..75: mol_type = other DNA
gctggctcagcctgtgccataaggcgcgggatcgggtatccgggcgtatcctggggaatgtctatgcgctgcacg

SEQ ID NO: 468211 - DNA, 75 bp, synthetic construct
  source 1..75: mol_type = other DNA
ctgctgagaatggacagcgaacggcgcatgaaaacgctgggggatgcggtgaaaaatacgcttctcacgcccaat

SEQ ID NO: 468212 - DNA, 75 bp, synthetic construct
  source 1..75: mol_type = other DNA
gatgatgtgcgtccgatgcttgagcagatggtgaaagaggccgtaagccatatccctgctccgcgtgatggtcgt

SEQ ID NO: 468213 - DNA, 75 bp, synthetic construct
  source 1..75: mol_type = other DNA
agtgcctgcagacgctgattgagtccattgaactgttactggatgaggcgctggaaacaggggaaaacgagagca

SEQ ID NO: 468214 - DNA, 75 bp, synthetic construct
  source 1..75: mol_type = other DNA
ctgatttatcagtccattttccgatggaatctgatactcggttggctgattgtgttttcaccatacctaattgct

SEQ ID NO: 468215 - DNA, 75 bp, synthetic construct
  source 1..75: mol_type = other DNA
cttgttcggcttgtggcggaagaaccggatccggaaatgcgcaatatcctgaccgcgcttaatacagcggccagt

SEQ ID NO: 468216 - DNA, 75 bp, synthetic construct
  source 1..75: mol_type = other DNA
gattaacccggccttcccggaagaactccaaccacgagatcgtacccggctatccagcaaactccaggttaaccg

SEQ ID NO: 468217 - DNA, 75 bp, synthetic construct
  source 1..75: mol_type = other DNA
tgatccacgtgcatgggatgtggcaagtctgatggattttgcggtgccggcggtggcgtgtctgctggtctggct

SEQ ID NO: 468218 - DNA, 75 bp, synthetic construct
  source 1..75: mol_type = other DNA
gtacattcttcattgcgcgggaacacacccaggcagaatatcgctggattgaaatgttcgggcatggcaagcgga

SEQ ID NO: 468219 - DNA, 75 bp, synthetic construct
  source 1..75: mol_type = other DNA
tgtgctgtggctgcgcagatactggttggtctttttaccggaaactgggcttacggagcgatagccggttgtacg

SEQ ID NO: 468220 - DNA, 75 bp, synthetic construct
  source 1..75: mol_type = other DNA
tgggtttacggggcgatagccggttgtacgttcttcattgcgcgtgaacacacccaggcagaatatcgctggatt

SEQ ID NO: 468221 - DNA, 75 bp, synthetic construct
  source 1..75: mol_type = other DNA
acatgccgtggtggggcggttttgatccacgcgcatgggatgtggcaagcctgatggattttgctgtgccgatgg

SEQ ID NO: 468222 - DNA, 75 bp, synthetic construct
  source 1..75: mol_type = other DNA
atggatataacacctttccttcatgctctttgtgctgtggctgcgcagctactgattggtttttttaccgggaac

SEQ ID NO: 468223 - DNA, 75 bp, synthetic construct
  source 1..75: mol_type = other DNA
gaacgattttttccaaaaaatgatgatgaataaaagaaatttgacttcgttcaaatatcagagtttttatgattt

SEQ ID NO: 468224 - DNA, 75 bp, synthetic construct
  source 1..75: mol_type = other DNA
gaatatgccaatatggttgaggatatcagagaaaaggtatccattgagatggaacgattttttcctgaaatagat

SEQ ID NO: 468225 - DNA, 75 bp, synthetic construct
  source 1..75: mol_type = other DNA
tcatgtatcaggaaatccaaagtttgaatatgcaaatatggtcgaagatatcagggagaaggtgtcatctgagct

SEQ ID NO: 468226 - DNA, 75 bp, synthetic construct
  source 1..75: mol_type = other DNA
actggttggtctttttaccggaaactgggcttacggggcgatagccggttgtacgttcttcattgctcgtgaaca

SEQ ID NO: 468227 - DNA, 75 bp, synthetic construct
  source 1..75: mol_type = other DNA
atggatatcacgtcgatacttcatgcgctttgtgccgtggcggtgcaggtactggctgggctttttaccggaaac

SEQ ID NO: 468228 - DNA, 75 bp, synthetic construct
  source 1..75: mol_type = other DNA
gaaatgttcgggcatggcaagcgtatgaatatgccgtggtggggcggttttgatccacgcgcgtgggatgtggca

SEQ ID NO: 468229 - DNA, 75 bp, synthetic construct
  source 1..75: mol_type = other DNA
gggccgcactgtccagcgcgaaggccgtctggcccgcgatatccgcaaaagccgcgccaacaccggctacatctt

SEQ ID NO: 468230 - DNA, 75 bp, synthetic construct
  source 1..75: mol_type = other DNA
gatgtgctgaatctgttttatcaggtatttgaccggggctttatgcgtgacggcgaggggcgtgaaattgacttc

SEQ ID NO: 468231 - DNA, 75 bp, synthetic construct
  source 1..75: mol_type = other DNA
cgcagcttgcgccgtccctgaatgccctgctgaaacaggcctggatggtggcctcattacagggagaagaacata

SEQ ID NO: 468232 - DNA, 75 bp, synthetic construct
  source 1..75: mol_type = other DNA
actgctggagcagggggaaggagaccttaccgtgctgggcaggcgttatgactgggatatggacgcgatatggca

SEQ ID NO: 468233 - DNA, 75 bp, synthetic construct
  source 1..75: mol_type = other DNA
gctttatgcgcgacggcgaagggcgggaaattgacttccgcaacaccgtgattctgatgacggctaatctcggca

SEQ ID NO: 468234 - DNA, 75 bp, synthetic construct
  source 1..75: mol_type = other DNA
ccgctatgcacagcaccacggcgtacatatgctggacagcgccattcagaccgccgtgcgcctgtcgcgccgcta

SEQ ID NO: 468235 - DNA, 75 bp, synthetic construct
  source 1..75: mol_type = other DNA
ctgaaaggctctcctccaggctacgtcggctacgggcaggggggcatcctcaccgaagcggtgcgcaagcgcccg

SEQ ID NO: 468236 - DNA, 75 bp, synthetic construct
  source 1..75: mol_type = other DNA
aaaatcgtcaacgactacaccggcgaaggctggaacgaccaggttgatgatgagcttggtaattttgactatctg

SEQ ID NO: 468237 - DNA, 75 bp, synthetic construct
  source 1..75: mol_type = other DNA
aaggctggaatgaccaggttgatgatgagttaggtaatttcgactatctgatgggcgaaaatatcgattttcgca

SEQ ID NO: 468238 - DNA, 75 bp, synthetic construct
  source 1..75: mol_type = other DNA
gtgattttctggggaaccggcaagagagcgtagtaaccgacgaaaacggcgaagcgaccttcttttgcaacggcg

SEQ ID NO: 468239 - DNA, 75 bp, synthetic construct
  source 1..75: mol_type = other DNA
gaagatgtcggcggtgacgggcaaacctatccgatagatatgccaataatcgaacaacttgatgagttaattctc

SEQ ID NO: 468240 - DNA, 75 bp, synthetic construct
  source 1..75: mol_type = other DNA
gacgaaaacggcgaagcaaccttcttttgcaacggcggcagcgtcagcgtgtgggttatcgaagaggtgatttaa

SEQ ID NO: 468241 - DNA, 75 bp, synthetic construct
  source 1..75: mol_type = other DNA
tagtcgttatgtcaaacggtgacgatggcgaaaaaattattcgtctgggggaaaattacgcgaataagaactggc

SEQ ID NO: 468242 - DNA, 75 bp, synthetic construct
  source 1..75: mol_type = other DNA
ttttggttcttactgcaaaacaccttgaaaaccaatcttcacagaagcagacaaagctatttctggaaaatctat

SEQ ID NO: 468243 - DNA, 75 bp, synthetic construct
  source 1..75: mol_type = other DNA
tatttttttacaacaagacataaagacgtttaaagtacatcttcacatggaaaatgagagaagagacgcttggaa

SEQ ID NO: 468244 - DNA, 75 bp, synthetic construct
  source 1..75: mol_type = other DNA
agacataaagacagtagtagagaaagttgtgggtacgagcctgatgtttatgggagtaaaaaaattcggcaccaa

SEQ ID NO: 468245 - DNA, 75 bp, synthetic construct
  source 1..75: mol_type = other DNA
gtacctgggttgctaaactagagaagatagaagatatattttctgatgttgataaattaaagaaaaattctggat

SEQ ID NO: 468246 - DNA, 75 bp, synthetic construct
  source 1..75: mol_type = other DNA
attaagtgagcctagtttatatagtgaagtagaaatagcaaatgccaacaaactgttaacaagcttggctaaact

SEQ ID NO: 468247 - DNA, 75 bp, synthetic construct
  source 1..75: mol_type = other DNA
gagaaaattaaagaactatatagtgtattaaaagaaagcgagttttctgacagggtcaaagtaaaagaaataaat

SEQ ID NO: 468248 - DNA, 75 bp, synthetic construct
  source 1..75: mol_type = other DNA
ttgataatggaattcagaagacaatcactttataaactgctaaatggacaacatgataaaacgaagagaaggttc

SEQ ID NO: 468249 - DNA, 75 bp, synthetic construct
  source 1..75: mol_type = other DNA
gtccggtgatccgcaacagcggcgcggggctgaatgtacgggctgacaaagctgaagccaataaatgcgacctgt

SEQ ID NO: 468250 - DNA, 75 bp, synthetic construct
  source 1..75: mol_type = other DNA
tgaaacaggtggacgatagcgcattggacctgctgtctcagttgatcgacgaagccctggaacaggcaatgctgg

SEQ ID NO: 468251 - DNA, 75 bp, synthetic construct
  source 1..75: mol_type = other DNA
gccgagtttttcttctatgactgccactggtccgaaacattggaagaggacattgaggttctcatgtcgcaggct

SEQ ID NO: 468252 - DNA, 75 bp, synthetic construct
  source 1..75: mol_type = other DNA
caaaggactggcggaggattcatttgtagggaatcttaaagtgattgaaggggcaaaaggtgttcattatgactg

SEQ ID NO: 468253 - DNA, 75 bp, synthetic construct
  source 1..75: mol_type = other DNA
gatgcacgcgctgattgatatttctgttattgctgacagggcgcataaacacgcagccagagaatcagaatgcat

SEQ ID NO: 468254 - DNA, 75 bp, synthetic construct
  source 1..75: mol_type = other DNA
taacgtctgcccgaatggtgctatcagccgtgataaagggtttgttcatgtgatgcaggaacgttgtattggttg

SEQ ID NO: 468255 - DNA, 75 bp, synthetic construct
  source 1..75: mol_type = other DNA
aaaacaagataaaaacatattctctgaatgatgaattaagtaatatctttggtcaaggtaattttcatattcatg

SEQ ID NO: 468256 - DNA, 75 bp, synthetic construct
  source 1..75: mol_type = other DNA
ttttaggtattgagtctcttagccctcatgtttccggaaaaccgaagtttgaatatgccaatatggttgaagata

SEQ ID NO: 468257 - DNA, 75 bp, synthetic construct
  source 1..75: mol_type = other DNA
cgttaaaggtggtgggccatggtccactctacgacgagctggtggccaactacccggatgtcgaatttttaggct

SEQ ID NO: 468258 - DNA, 75 bp, synthetic construct
  source 1..75: mol_type = other DNA
gaaaattttgatgtggttgttgatttaaatagaaatagttcccaaactgtggctgtttataatgggggcagggat

SEQ ID NO: 468259 - DNA, 75 bp, synthetic construct
  source 1..75: mol_type = other DNA
tcgtagtgacatgaacattaaaaagttagttaagctgatgaaaaaaaatataaatagcttaagtaacgagcaaaa

SEQ ID NO: 468260 - DNA, 75 bp, synthetic construct
  source 1..75: mol_type = other DNA
gaagcttttatgggcacaatgccagattatggcatgaaaccgtgataaaatactccggtagtgagccaagatatc

SEQ ID NO: 468261 - DNA, 75 bp, synthetic construct
  source 1..75: mol_type = other DNA
ttttaatataataggcgctcctggagcaaaaaacatactatcatttagtcaattatcaaaaaattttgatgtttt

SEQ ID NO: 468262 - DNA, 75 bp, synthetic construct
  source 1..75: mol_type = other DNA
atgcattaacgttcggtgtggataccactactattttagataaattatataataaattattcggtatcgaagaga

SEQ ID NO: 468263 - DNA, 75 bp, synthetic construct
  source 1..75: mol_type = other DNA
cggttaactgattttaatacagccagtgttgctcattatttaaaagacaaaaacataaataatattctgataacc

SEQ ID NO: 468264 - DNA, 75 bp, synthetic construct
  source 1..75: mol_type = other DNA
cgagatacaggcaacatagcacaacaacattcagataatattaattctcttgattatcatcgaggagataaaaag

SEQ ID NO: 468265 - DNA, 75 bp, synthetic construct
  source 1..75: mol_type = other DNA
atgatatttctattcgagctaaatatcgagctcttgaatggagaaacttttatgggcacaatgccagattatggc

SEQ ID NO: 468266 - DNA, 75 bp, synthetic construct
  source 1..75: mol_type = other DNA
aaaacataattcatgacggttatgattttgaggatatcgaaagaattgttaagtattcgctcattagcaaagagt

SEQ ID NO: 468267 - DNA, 75 bp, synthetic construct
  source 1..75: mol_type = other DNA
tggtactggattactaagtaagcttcaagttcaagaagaattggttttgggaatcttaagtgctattcaccagag

SEQ ID NO: 468268 - DNA, 75 bp, synthetic construct
  source 1..75: mol_type = other DNA
aaagagcgatttcagctcgccagcgcgccgaaaaacagaatagcgcaggcggcagtcaaaatgatccacgaaggg

SEQ ID NO: 468269 - DNA, 75 bp, synthetic construct
  source 1..75: mol_type = other DNA
tgcggctggtatttgtcgatggacgttacgtgtcagcactgagcgatgcgactgaaggcagcgggtatgaagtga

SEQ ID NO: 468270 - DNA, 75 bp, synthetic construct
  source 1..75: mol_type = other DNA
cgttgcagcagacgattgagaatacagcgatgcgactgatgcagagagaatcaaccaggcccggaggaatgctcc

SEQ ID NO: 468271 - DNA, 75 bp, synthetic construct
  source 1..75: mol_type = other DNA
cgcctggctgtggtggaaatggttgtcgcggcgggtgcgcgaacaaaagcacagcgatagtcatttaaaccagcg

SEQ ID NO: 468272 - DNA, 75 bp, synthetic construct
  source 1..75: mol_type = other DNA
ttcattcgctgaaagtggaatgtatccatggagaacaactttatcagccgggaaataatgcgggcaacggtgttt

SEQ ID NO: 468273 - DNA, 75 bp, synthetic construct
  source 1..75: mol_type = other DNA
ccatggagaacactttatcagccgggaaataatgcgggcaacggtgtttaattatatcgaatgtgatggtgatgc

SEQ ID NO: 468274 - DNA, 75 bp, synthetic construct
  source 1..75: mol_type = other DNA
atcaatgctgaaaacgggcaggcattctataacgatggcagcgggactatcgttaattacggaaccatctgtact

SEQ ID NO: 468275 - DNA, 75 bp, synthetic construct
  source 1..75: mol_type = other DNA
tggtgatattccgctcattaaggttgatggtcattcgtcggtttatctgggaggagactcctcagtcagcggtca

SEQ ID NO: 468276 - DNA, 75 bp, synthetic construct
  source 1..75: mol_type = other DNA
gacggtggtcgatgctgggacggcggttatcgttaatggcgatcgtacaatcttaaataacactggcgactccac

SEQ ID NO: 468277 - DNA, 75 bp, synthetic construct
  source 1..75: mol_type = other DNA
tgaaccaggacggcttactggatgtgagcggcggcggtcacggcattgatatcactggtgatagcgccactgtaa

SEQ ID NO: 468278 - DNA, 75 bp, synthetic construct
  source 1..75: mol_type = other DNA
aatctggaagtaaatgaaaatgatgatgatacgctggggccaaataaattggtcggcatggctgtttacaatggt

SEQ ID NO: 468279 - DNA, 75 bp, synthetic construct
  source 1..75: mol_type = other DNA
atgaaaattcgctgggtgtttctctcagtggtgatgcgtcgacgttcattaacaggggggatatttccgtcagta

SEQ ID NO: 468280 - DNA, 75 bp, synthetic construct
  source 1..75: mol_type = other DNA
cgcatattttctggctgagtctcggtggtttgctgctggcggccgagatgctgggcggcaatggttatctgctgt

SEQ ID NO: 468281 - DNA, 75 bp, synthetic construct
  source 1..75: mol_type = other DNA
ggcgggtttgtgacgaccaaagcgctggcaaactacggcaatgaaacgctgaatagcaatgtggctgccaaagcg

SEQ ID NO: 468282 - DNA, 75 bp, synthetic construct
  source 1..75: mol_type = other DNA
tcgagtatgatgggaatggaggcctacggtaaaggcactgttcttaacagcgaaagcggcgttattgacatgtac

SEQ ID NO: 468283 - DNA, 75 bp, synthetic construct
  source 1..75: mol_type = other DNA
ggcaacaccaccgttgacggcaaggattccaccggcaccgagatcgcaggtaataacgccaccgttactcaggaa

SEQ ID NO: 468284 - DNA, 75 bp, synthetic construct
  source 1..75: mol_type = other DNA
aatggcttgatcatcaaacgattcatattgactgggcatggagatatttgtgcaggcataattccggaaacgatt

SEQ ID NO: 468285 - DNA, 75 bp, synthetic construct
  source 1..75: mol_type = other DNA
tggtggtggtttcaacagcctggcgacaatgggtgtgaaatacagcagccaggaaagtgcgttgcaggtagatgc

SEQ ID NO: 468286 - DNA, 75 bp, synthetic construct
  source 1..75: mol_type = other DNA
catcgggcaagggctggaaaacagcggcttactcgattctgacaccattagcgcagccgcgaatgtctataaccg

SEQ ID NO: 468287 - DNA, 75 bp, synthetic construct
  source 1..75: mol_type = other DNA
gtactgactcggttggtgtgtccatcaatggcgacagtgcgacgttgaccaatacgggcgatattgacgtcagca

SEQ ID NO: 468288 - DNA, 75 bp, synthetic construct
  source 1..75: mol_type = other DNA
gcactaacggtactgggttaattggtatcaaggggaatggcagtgatacgacaattaataacgcacaaagcggtg

SEQ ID NO: 468289 - DNA, 75 bp, synthetic construct
  source 1..75: mol_type = other DNA
gaacagcttgagaatttaccggcagaatgtagagatcttaaagacagtgccgttttaccatgggctgccgctggt

SEQ ID NO: 468290 - DNA, 75 bp, synthetic construct
  source 1..75: mol_type = other DNA
ccaggagagtgcattgcagttagatgccttccactggaaagaagacggcatcagtgataaaggtgtgatgctaaa

SEQ ID NO: 468291 - DNA, 75 bp, synthetic construct
  source 1..75: mol_type = other DNA
cgcagctactttggtaagacacctcttgttagtgtcgatggacaatccaaagtttatctgaacggtgattctact

SEQ ID NO: 468292 - DNA, 75 bp, synthetic construct
  source 1..75: mol_type = other DNA
actgcgagtatttcgggcgctggaagccaacgtttcaacattgacgatggtcagagtggcggtggtttcaacagc

SEQ ID NO: 468293 - DNA, 75 bp, synthetic construct
  source 1..75: mol_type = other DNA
gggtagatgaaaacgacaccactaccttacgcaacgatatcggcagcggcaatgcgagaaagtatggtgtcggca

SEQ ID NO: 468294 - DNA, 75 bp, synthetic construct
  source 1..75: mol_type = other DNA
ttaatatgggtgatatttccgccaacaatggcagtgcagaaaaaaatgccaccggtgtgaagattgcgggtgata

SEQ ID NO: 468295 - DNA, 75 bp, synthetic construct
  source 1..75: mol_type = other DNA
cgaaaattaccggtaacgatgcactggttaaacaatcaggcgatctttatgtaagcggtggcgcacgtggaatta

SEQ ID NO: 468296 - DNA, 75 bp, synthetic construct
  source 1..75: mol_type = other DNA
aaagaggcgggtacggttgctgatggaactacaggggaccatttccaggttaacgatgccaccatcaccgataag

SEQ ID NO: 468297 - DNA, 75 bp, synthetic construct
  source 1..75: mol_type = other DNA
gcctgaaacatcagatgtccttcgacaatggcatgaactggaataacgccttgcgttacgacgttcacaaccttg

SEQ ID NO: 468298 - DNA, 75 bp, synthetic construct
  source 1..75: mol_type = other DNA
tgaatatcgccggggatatgacggttgacggtgagaatgcggtagggacaaaagttgctgggcacaatgcaacaa

SEQ ID NO: 468299 - DNA, 75 bp, synthetic construct
  source 1..75: mol_type = other DNA
accattcgtctatagcggcggcgatgtgcttactgatgttggtgagtccaaaacactcgataaaaatattgtggt

SEQ ID NO: 468300 - DNA, 75 bp, synthetic construct
  source 1..75: mol_type = other DNA
tggccgattttaattcttcaacaatctctcaatcctcttcacaacaagagcaaaaaagtgatgaagagaccaaaa

SEQ ID NO: 468301 - DNA, 75 bp, synthetic construct
  source 1..75: mol_type = other DNA
agatggccgattttaattcttcaatagtcactcaatcctcttcacaacaagagcaaaaagtgatgaagagaccaa

SEQ ID NO: 468302 - DNA, 75 bp, synthetic construct
  source 1..75: mol_type = other DNA
cacatattttctggctcagtctcggcgggttgctgctggcagccgagatgttgggcggcaatggttatctgttgt

SEQ ID NO: 468303 - DNA, 75 bp, synthetic construct
  source 1..75: mol_type = other DNA
gtaccaccggacgatggcggcgacaccccggtaccgccggacgatggcggcgacaccccggtaccgccggacgat

SEQ ID NO: 468304 - DNA, 75 bp, synthetic construct
  source 1..75: mol_type = other DNA
gccgttgttgaagggttgggccagaaatacagaatcacagaaagtgaagctatggcgctttataacgctatggca

SEQ ID NO: 468305 - DNA, 75 bp, synthetic construct
  source 1..75: mol_type = other DNA
atggacccgtatgtggtggaagaagatccgggcgttaaatcggtgcgcaatatctacgactactataagcaacac

SEQ ID NO: 468306 - DNA, 75 bp, synthetic construct
  source 1..75: mol_type = other DNA
aaggcgggccgaacctgagctacgcgaagagccagcgtacggcaagcctggcaggcgcaggcagtcagcacttta

SEQ ID NO: 468307 - DNA, 75 bp, synthetic construct
  source 1..75: mol_type = other DNA
gtaacggcaccattgtcagtaacaaaggcaatattaccgtagtggatgataaatccattggcgtattgctggatg

SEQ ID NO: 468308 - DNA, 75 bp, synthetic construct
  source 1..75: mol_type = other DNA
tgaacgtaggcaccacggcggagcttaacagtgcgcttaagcaaatcagcggcagtcaggcgaccaccgtattcc

SEQ ID NO: 468309 - DNA, 75 bp, synthetic construct
  source 1..75: mol_type = other DNA
tttggcctgcaatatcagatgtcctttgagaatggcgtgaactggaataacgccctgcgttatgacgttcataac

SEQ ID NO: 468310 - DNA, 75 bp, synthetic construct
  source 1..75: mol_type = other DNA
gcgttcaacgtggtggcaaaaggagatccgcgcgcggaactgggcaacgacacgcaatacgacatgctggcgctg

SEQ ID NO: 468311 - DNA, 75 bp, synthetic construct
  source 1..75: mol_type = other DNA
tacagggcagcaacctcactgacgcgaacgccatcacgtccactactgtgatgtggaatgcgcaaggaagtacgg

SEQ ID NO: 468312 - DNA, 75 bp, synthetic construct
  source 1..75: mol_type = other DNA
tcttcagcaaaaggtactgccattaatgccggagaaattaacgtcgatagttttatcccgactctggatgataat

SEQ ID NO: 468313 - DNA, 75 bp, synthetic construct
  source 1..75: mol_type = other DNA
aatgacgtcgcgaaagcactggatgcgggttacaccaacaacgagctgtataccagcctgaacgtcggcacgact

SEQ ID NO: 468314 - DNA, 75 bp, synthetic construct
  source 1..75: mol_type = other DNA
gtgtaaaactgcgtcacacactggaaggtggctatcaggagcgcaatgccggagactttaacctgagcatgaaca

SEQ ID NO: 468315 - DNA, 75 bp, synthetic construct
  source 1..75: mol_type = other DNA
aaggtggctatcaggagcgcaatgccggagactttaacctgaatatgaacagtggcagcgaaacggcggtggaca

SEQ ID NO: 468316 - DNA, 75 bp, synthetic construct
  source 1..75: mol_type = other DNA
cgctgaatggcggtactgtaatgaccgtggaaggcgataatattgttctgaacaatgacgggaaaaccactgcga

SEQ ID NO: 468317 - DNA, 75 bp, synthetic construct
  source 1..75: mol_type = other DNA
gacagcaacacggcagtcttcgaaggcgttaacaaagtgggcggaatcatctggagctacgacggcgaaggcaaa

SEQ ID NO: 468318 - DNA, 75 bp, synthetic construct
  source 1..75: mol_type = other DNA
tctttggcctgaaacatcagatgtccttcgacaatggcatgaactggaacaacgcattgcgttatgacgttcaca

SEQ ID NO: 468319 - DNA, 75 bp, synthetic construct
  source 1..75: mol_type = other DNA
atggtggctggcgctgcattgcacattacgggatttctccgcgttaaggattcattaagatcgctacgtatactt

SEQ ID NO: 468320 - DNA, 75 bp, synthetic construct
  source 1..75: mol_type = other DNA
atactcaatattattaatcgcaatgcaataaaacatcggatgagttgcgaaggcagtctgtctgatatgatcgct

SEQ ID NO: 468321 - DNA, 75 bp, synthetic construct
  source 1..75: mol_type = other DNA
atgcgcagaaaagagtcaaacgttagcagtttgccggaactcaccaattttgaggtaagctattctctggttacc

SEQ ID NO: 468322 - DNA, 75 bp, synthetic construct
  source 1..75: mol_type = other DNA
acaagcgtggaacacatctacgccgcaggcgactgcaccgaccagccgcagttcgtctatgtggcggcagcggcc

SEQ ID NO: 468323 - DNA, 75 bp, synthetic construct
  source 1..75: mol_type = other DNA
acagtgtcacattcgacgaagacaaaggcacgctgcaaattcgcaatgccacctttacctacagcaaaaacagtg

SEQ ID NO: 468324 - DNA, 75 bp, synthetic construct
  source 1..75: mol_type = other DNA
atgatttttacccctgaacaattacgtaaacaggcacaggaaatgttgcgacaggcggaacaactggaaaaaacg

SEQ ID NO: 468325 - DNA, 75 bp, synthetic construct
  source 1..75: mol_type = other DNA
ttctatgaaaatcgctcaacgatcaccgatgtggagaaactggaaacgccaatgagtttcagatggcttgctggc

SEQ ID NO: 468326 - DNA, 75 bp, synthetic construct
  source 1..75: mol_type = other DNA
gcgaggttatcggtgaaatgtcactaaccaaaggcagccggggtttgtcacataacatcaaacaggctgaaggga

SEQ ID NO: 468327 - DNA, 75 bp, synthetic construct
  source 1..75: mol_type = other DNA
ctcgcgcactccaggaagtaaccctggttggcgaggttatcggtgaaatgtcactaaccaaaggcagtcgaggtt

SEQ ID NO: 468328 - DNA, 75 bp, synthetic construct
  source 1..75: mol_type = other DNA
attgtatcccttgtggtttttactagcgcattttttggtgctgccgttgtcgcacagttaatcttgaagtttcag

SEQ ID NO: 468329 - DNA, 75 bp, synthetic construct
  source 1..75: mol_type = other DNA
attaatcaatatcagcacaactattcagttcacaccaaatgagaatgcgcctttagatgcgcggaaatctggagg

SEQ ID NO: 468330 - DNA, 75 bp, synthetic construct
  source 1..75: mol_type = other DNA
ttgaaaaagcgcatcacctttatcgtttttctttgcgccatcgtggcggtaagcctgttttttgtgcaatcctgc

SEQ ID NO: 468331 - DNA, 75 bp, synthetic construct
  source 1..75: mol_type = other DNA
tggtgattttgctggtggcatcggtgccgtgcgcggcgctgaacgcggtgccattccacagcagggcatcgtctt

SEQ ID NO: 468332 - DNA, 75 bp, synthetic construct
  source 1..75: mol_type = other DNA
ttcatctctgcgtggaagaaccggcgatcaccgccggttttctgcgttttttagcgggggaagcccgcaaggccg

SEQ ID NO: 468333 - DNA, 75 bp, synthetic construct
  source 1..75: mol_type = other DNA
atggtgcaatctccaatatatttccggaaccaattcatatccctgcaatgtctgacgctgtcgaagactcaacaa

SEQ ID NO: 468334 - DNA, 75 bp, synthetic construct
  source 1..75: mol_type = other DNA
agcaaatgcgattcaggtttgtaaggattctaatggaaccatagcaaggaagaccatatctgaaaaaatcgaaga

SEQ ID NO: 468335 - DNA, 75 bp, synthetic construct
  source 1..75: mol_type = other DNA
tcatattatgataattatgcaataaagcttgattattatggcgagaataataaattcgaaaccagtattgatctt

SEQ ID NO: 468336 - DNA, 75 bp, synthetic construct
  source 1..75: mol_type = other DNA
tgcagcagaggctgcatatagaacttgcggacggttgccatttaaacctgagctttatgaaaaatctaatggata

SEQ ID NO: 468337 - DNA, 75 bp, synthetic construct
  source 1..75: mol_type = other DNA
ggtgcctggcatacggaaggttcgatggtgaaagtcacggcggatgacgttgagctgattcattttccgttttaa

SEQ ID NO: 468338 - DNA, 75 bp, synthetic construct
  source 1..75: mol_type = other DNA
gaatgtgcagcttttcaaatgccattctcaagcgttcttccccctccggtaacagtgcatgggtagctggttgca

SEQ ID NO: 468339 - DNA, 75 bp, synthetic construct
  source 1..75: mol_type = other DNA
cgattgattacttcaatgttcaggacaagatggctggtcgtgatattgaccgaggcaggctggcagagacaatcc

SEQ ID NO: 468340 - DNA, 75 bp, synthetic construct
  source 1..75: mol_type = other DNA
tgcctagcatggcaccgcaaaatgataatgctcctcgttcttccgttcctcagcctgtgcagtatcagcagcagt

SEQ ID NO: 468341 - DNA, 75 bp, synthetic construct
  source 1..75: mol_type = other DNA
cagcttggtgtcgggatggttcgctacccagcaggtaaaaaatatttatttggtaggtggcgcgagcagcttcag

SEQ ID NO: 468342 - DNA, 75 bp, synthetic construct
  source 1..75: mol_type = other DNA
agacggcgtggtggtggattacctgaccgccagccgggtagtagcacgtctcaaacaaattcttgaacagaaaca

SEQ ID NO: 468343 - DNA, 75 bp, synthetic construct
  source 1..75: mol_type = other DNA
gactggaatgtaactccccatgaactaaacccgtatgactaccctgacatggaagatggtattccgcttcatgta

SEQ ID NO: 468344 - DNA, 75 bp, synthetic construct
  source 1..75: mol_type = other DNA
aaaatcccgctgcaagactccccaaccaattgcggttttgaagggttggcttattctcgccaggatcacactttc

SEQ ID NO: 468345 - DNA, 75 bp, synthetic construct
  source 1..75: mol_type = other DNA
gggcgatttttcaacgggcatggcgcttagcggcgacaacaacagcgtgacgctggcggcgaaagatatcaatgt

SEQ ID NO: 468346 - DNA, 75 bp, synthetic construct
  source 1..75: mol_type = other DNA
tgcgggggctatacttggcgcattagtgccttatatcttcgctaaaaactcgcagaagaaagaggaaatgaaata

SEQ ID NO: 468347 - DNA, 75 bp, synthetic construct
  source 1..75: mol_type = other DNA
atgaaatcgaaccgtcaggcacgtcatattcttggactggaccataaaatttctaaccagcgcaaaatagttacc

SEQ ID NO: 468348 - DNA, 75 bp, synthetic construct
  source 1..75: mol_type = other DNA
cggcgagctggatgtgagcggcggcggtcacggtattgatatcaccggcgacagcgcaacggtggacaacaaagg

SEQ ID NO: 468349 - DNA, 75 bp, synthetic construct
  source 1..75: mol_type = other DNA
gaaccaggacggcgagctggatgtgagcggcggcggtcacggtattgatatcaccggcgacagcgcaacggtgga

SEQ ID NO: 468350 - DNA, 75 bp, synthetic construct
  source 1..75: mol_type = other DNA
ttgttaacgtaacccgcaccggcgattcactcgcgcaagttaaccgtggcaccattactgcgatcaacggctaca

SEQ ID NO: 468351 - DNA, 75 bp, synthetic construct
  source 1..75: mol_type = other DNA
gggctgggatgtcgacaccgatgccaatacggtagaaattaccggcgtgaataaccttggcggtatgacgtggtg

SEQ ID NO: 468352 - DNA, 75 bp, synthetic construct
  source 1..75: mol_type = other DNA
cagatgacggtggcgacgtcactccaccaaaagagcccaaaatcttcaataacagtgtcacattcgacgaagaca

SEQ ID NO: 468353 - DNA, 75 bp, synthetic construct
  source 1..75: mol_type = other DNA
tacagataagtgccctgatttctccggaagccaggaatgcactccggaaaatggcaaaaaagaataatctgacgc

SEQ ID NO: 468354 - DNA, 75 bp, synthetic construct
  source 1..75: mol_type = other DNA
caacctcgatggtggtatcaatatttccggcgatagtggcggacattttatcaaaggcgtgcaggtaaccgggaa

SEQ ID NO: 468355 - DNA, 75 bp, synthetic construct
  source 1..75: mol_type = other DNA
gatggcggcaacacaccggatgatggtggcaataccccagacgatggcggcaacgtcaccccgcccaaagagcct

SEQ ID NO: 468356 - DNA, 75 bp, synthetic construct
  source 1..75: mol_type = other DNA
gcggtgtggataacatcgtttcctctactgttgtctggaacgctaaaggcagcaccgatgccagcggcaacgttg

SEQ ID NO: 468357 - DNA, 75 bp, synthetic construct
  source 1..75: mol_type = other DNA
attgatatcaccggcgacagcgcaacggtggacaacaaaggcggcatgaccgttgcggatgcggactccatcggt

SEQ ID NO: 468358 - DNA, 75 bp, synthetic construct
  source 1..75: mol_type = other DNA
tttggcacgttaaaagtataatgatttttttatcaaaaacttatatgtcaaaatattttagagggcaatcaaatg

SEQ ID NO: 468359 - DNA, 75 bp, synthetic construct
  source 1..75: mol_type = other DNA
cattcatcttgctcgttttaataaccggaaaatgctttccaagcatttcttttggcacgttaaaagtataatgat

SEQ ID NO: 468360 - DNA, 75 bp, synthetic construct
  source 1..75: mol_type = other DNA
caaagaaataactaccctttgtcatgcatatgcccataataaagaaaaacaccctctagggtacaaaggtagtgc

SEQ ID NO: 468361 - DNA, 75 bp, synthetic construct
  source 1..75: mol_type = other DNA
ccggcgtgaagatgaatggctgcccattcgccctggcaccgatggcgcactggcctgtgcgattgcctgggtact

SEQ ID NO: 468362 - DNA, 75 bp, synthetic construct
  source 1..75: mol_type = other DNA
aacgacattccaacggcgagcaaacgtcccgcgctattgccatgctttccgttctcaccggtaacgtcggcataa

SEQ ID NO: 468363 - DNA, 75 bp, synthetic construct
  source 1..75: mol_type = other DNA
ggttacgatgaaaaaacgctgccagctaacgctccacgtaacgcgcattataaatgcctatattctgggcgaagg

SEQ ID NO: 468364 - DNA, 75 bp, synthetic construct
  source 1..75: mol_type = other DNA
gataaactcattaccgacgcaggcatttctccagcgtttcgtcaggcgctggaagagaaagggatcgacgtgatc

SEQ ID NO: 468365 - DNA, 75 bp, synthetic construct
  source 1..75: mol_type = other DNA
atcgatctcaatgcgggcgtaaccaccttcaacgaggtctataccgtcagtaaggcgatgtgtaatgccgcgcgc

SEQ ID NO: 468366 - DNA, 75 bp, synthetic construct
  source 1..75: mol_type = other DNA
atcgatccggcgtttcgtcaggcgctggaagagaaagggatcgatgtgatcataaccggagagagcaatgagtga

SEQ ID NO: 468367 - DNA, 75 bp, synthetic construct
  source 1..75: mol_type = other DNA
cccttgcggcgaggatgtaattttcattcgcggtaaatgggaagggtatcttgacgagagtttttacgatgaatt

SEQ ID NO: 468368 - DNA, 75 bp, synthetic construct
  source 1..75: mol_type = other DNA
gggatatagttatcgacagtcagcacccttgcggcgaggatgtaattttcattcgcggtaaatgggaagggtatc

SEQ ID NO: 468369 - DNA, 75 bp, synthetic construct
  source 1..75: mol_type = other DNA
gtcaatgcgctatccgaactggataacgaacaaactatcctgatgccaggcggaacatttcgcaaaaaatcggcc

SEQ ID NO: 468370 - DNA, 75 bp, synthetic construct
  source 1..75: mol_type = other DNA
gcaccgtaaccgcagtaagctacgcgttgagacacggaacctataataacgtgggtgaagctctgtcaggaatcg

SEQ ID NO: 468371 - DNA, 75 bp, synthetic construct
  source 1..75: mol_type = other DNA
gcgtacgcagaactcgctctcgacggcggtaaaagtctcgaaccgactccattgaccagttactggattgctatt

SEQ ID NO: 468372 - DNA, 75 bp, synthetic construct
  source 1..75: mol_type = other DNA
ccaatcacccatctgcaaaccgtcgccccgcatcatgcatattattactctgggatcagcgacattctgacgctc

SEQ ID NO: 468373 - DNA, 75 bp, synthetic construct
  source 1..75: mol_type = other DNA
atcgccagcaatacggctaacattgcgaccaacaccgccaatattaatactctcaatacgtcgatcgacaccctt

SEQ ID NO: 468374 - DNA, 75 bp, synthetic construct
  source 1..75: mol_type = other DNA
gcctgaacacgtctgtggatgctcttgaacaggatgctatgctctggaacggcactgcattcaacgccgctcatg

SEQ ID NO: 468375 - DNA, 75 bp, synthetic construct
  source 1..75: mol_type = other DNA
cagtactgctgtgggttatgacgctatagctgaaggccaatatagctctgccatcgggtcaaaaccccatgcgat

SEQ ID NO: 468376 - DNA, 75 bp, synthetic construct
  source 1..75: mol_type = other DNA
gtcaccgctggcgaactctctgataccagcaccgacgccgtcaacggttctcagctgaaagcgaccaaggacgat

SEQ ID NO: 468377 - DNA, 75 bp, synthetic construct
  source 1..75: mol_type = other DNA
gcaaccagcaccgatgtagtaaacggctctcaattgtacgacctgcagcaggatgctctgttgtggaacggcact

SEQ ID NO: 468378 - DNA, 75 bp, synthetic construct
  source 1..75: mol_type = other DNA
gtaatttaccggaacgttttacgctcaagattgttaatgaaattagcccggcgtccaacaccgcgctggaagggc

SEQ ID NO: 468379 - DNA, 75 bp, synthetic construct
  source 1..75: mol_type = other DNA
atctggttcgcgttaccggttatatggtgcgtttgtcggatttagaaaaatatcgcgccgaaggttcacgcacca

SEQ ID NO: 468380 - DNA, 75 bp, synthetic construct
  source 1..75: mol_type = other DNA
acaccacctggctgggcgaagaagccgcacgcaacactcgtattctggaacgccagccgcgcgtgataagccatg

SEQ ID NO: 468381 - DNA, 75 bp, synthetic construct
  source 1..75: mol_type = other DNA
gcgctggatgagggtgtaatctgcgatatgtttgaaggtcatgcgccgtacaaaccgcgctatgtcttacccgat

SEQ ID NO: 468382 - DNA, 75 bp, synthetic construct
  source 1..75: mol_type = other DNA
agagataccggtgcacgatgacggaactagcccggatgcgatatttggggtgatcacctacatcatcaacgatgc

SEQ ID NO: 468383 - DNA, 75 bp, synthetic construct
  source 1..75: mol_type = other DNA
accgctggacggttcgtggttttgacggggagcgaacgctgaatgccagtaacggctggtatatccgcaacgacc

SEQ ID NO: 468384 - DNA, 75 bp, synthetic construct
  source 1..75: mol_type = other DNA
taatatcagcaacctgaccggcgatgttgctaacaacaccaccaatatcactaatctgacgaatgacgttgccgc

SEQ ID NO: 468385 - DNA, 75 bp, synthetic construct
  source 1..75: mol_type = other DNA
tactgatgccaccagcaaaatcaccaacgtcaccgctggcgacctgacggctggcagcaccgacgcggttaacgg

SEQ ID NO: 468386 - DNA, 75 bp, synthetic construct
  source 1..75: mol_type = other DNA
agaaatgcggatgctgaaaaccaccggggaacagggtccgattttcactgtaatctgaatgcagttgaatatctc

SEQ ID NO: 468387 - DNA, 75 bp, synthetic construct
  source 1..75: mol_type = other DNA
agcgtatcaactacgcgaagctattgatgctgggtgctctaaagccgatttactaaaggttatcgcttcaattta

SEQ ID NO: 468388 - DNA, 75 bp, synthetic construct
  source 1..75: mol_type = other DNA
gtgcgcatcagcggcccgcgacagacgcgggaatacggctacagtgccacgggcaggctggagagcgtgcgcacc

SEQ ID NO: 468389 - DNA, 75 bp, synthetic construct
  source 1..75: mol_type = other DNA
caaattacagactgaaaaatggtatttatggcaatgttggcgacgccttagcggatctaaacacgaatacgatac

SEQ ID NO: 468390 - DNA, 75 bp, synthetic construct
  source 1..75: mol_type = other DNA
actcaggtagtactgttaagatgatcgctgggaataatattgatattgctcagaatgataatgatgtgactatta

SEQ ID NO: 468391 - DNA, 75 bp, synthetic construct
  source 1..75: mol_type = other DNA
gccactaacaccaccaacatctctaacctgactgagacggtgactaatcttggtgaggatgcgctgaaatgggat

SEQ ID NO: 468392 - DNA, 75 bp, synthetic construct
  source 1..75: mol_type = other DNA
acctgacgaattccgttggtgaccttaaggatgatgccctgctgtggaatgatgctaaaaatgcattcagtgcag

SEQ ID NO: 468393 - DNA, 75 bp, synthetic construct
  source 1..75: mol_type = other DNA
atctttcaattaaacgatataaagatgcaaatactggtcagcctgttaattattattatcttgaaggcaaggatg

SEQ ID NO: 468394 - DNA, 75 bp, synthetic construct
  source 1..75: mol_type = other DNA
gcaaatattgccaccaataccaccaatatcaccaacctgacggattccgttggtgaccttcaggctgatgatcct

SEQ ID NO: 468395 - DNA, 75 bp, synthetic construct
  source 1..75: mol_type = other DNA
tgattttgatgtactgcgcgataccttcactacccgctctggtcgtgaagtggcgctggagttgtatgtcgatcg

SEQ ID NO: 468396 - DNA, 75 bp, synthetic construct
  source 1..75: mol_type = other DNA
tgatgacagcctggcattaggcagattatcacttgccagtgcagcgaacgctattgcgatgggggcagacagtag

SEQ ID NO: 468397 - DNA, 75 bp, synthetic construct
  source 1..75: mol_type = other DNA
gcaaaattgttaatatggctgctggtgccataagcaacaccagtaccgatgccatcaacggctcacagctttata

SEQ ID NO: 468398 - DNA, 75 bp, synthetic construct
  source 1..75: mol_type = other DNA
gtgatgactctctgctgtggaatgatgcagcgaaagcattcagcgccgcgcacggtactgatgccaccagcaaaa

SEQ ID NO: 468399 - DNA, 75 bp, synthetic construct
  source 1..75: mol_type = other DNA
agcacagcgagagtaaatcgtggattatgggttgatatttataaagaagcacagcatgcaggggatgaggtgtac

SEQ ID NO: 468400 - DNA, 75 bp, synthetic construct
  source 1..75: mol_type = other DNA
gcaaggccttaggaattatgagtatcgccctcggtgcaacggctaatgcgtcgaaagaatatgcaatggcgctgg

SEQ ID NO: 468401 - DNA, 75 bp, synthetic construct
  source 1..75: mol_type = other DNA
acaacactattgctctgggcaatcaaagtcaggcagtagcggctggcgcaattgccatcggtcaagggaataaag

SEQ ID NO: 468402 - DNA, 75 bp, synthetic construct
  source 1..75: mol_type = other DNA
taacagtcgcggctcatatcaggttaactattgcatgtggctaatgtggtggacgctggcgcgaccagccgaagt

SEQ ID NO: 468403 - DNA, 75 bp, synthetic construct
  source 1..75: mol_type = other DNA
gcagcaccttttcccgggcagagacaatccgctaggtccaatgacatcgcactcactgcgccagctacttaaaag

SEQ ID NO: 468404 - DNA, 75 bp, synthetic construct
  source 1..75: mol_type = other DNA
cagttgccgctgaagcccgtcgcaccatttcatcagtttttgagttggcagtcgcgacgcttagagctgatagcg

SEQ ID NO: 468405 - DNA, 75 bp, synthetic construct
  source 1..75: mol_type = other DNA
cgatattttttcagctcagtcaggctgctgaattccaggacgtcccactcttccccggtgttttttttcttcccg

SEQ ID NO: 468406 - DNA, 75 bp, synthetic construct
  source 1..75: mol_type = other DNA
actaacggccggcaaattcactgcgggtatcagtctggatgttgatgccaatacaccgtacccgatccgctcaaa

SEQ ID NO: 468407 - DNA, 75 bp, synthetic construct
  source 1..75: mol_type = other DNA
gatcttggtaacgcactgtggaccattccggcaaggcgtatgaaagctcgtagggaacatgttattccccttcct

SEQ ID NO: 468408 - DNA, 75 bp, synthetic construct
  source 1..75: mol_type = other DNA
accaatgtcaaagccggtgacctgacagctggcagcactgacgccgttaacggctcccagctcaaaaccaccaac

SEQ ID NO: 468409 - DNA, 75 bp, synthetic construct
  source 1..75: mol_type = other DNA
gcggcgaataccgcgctggaagggctttatcagtcaggcgatgcgctttgcacccagtgtgaagccgaaggtttc

SEQ ID NO: 468410 - DNA, 75 bp, synthetic construct
  source 1..75: mol_type = other DNA
gcaatgatttttcccgctgggatgcggcgcaaagtctgctggcaacgtacatcaaactgaatgtcgcccgtcatc

SEQ ID NO: 468411 - DNA, 75 bp, synthetic construct
  source 1..75: mol_type = other DNA
gacttttgtttttgataacgtctacttccagccggtgcctgcgctgctgtgtgaattttccgcgccggtgaaact

SEQ ID NO: 468412 - DNA, 75 bp, synthetic construct
  source 1..75: mol_type = other DNA
aaatatcccttcctgctttccaacggtaaccgcgttgcgcaaggcgaactggaaaacggacgtcattgggtacag

SEQ ID NO: 468413 - DNA, 75 bp, synthetic construct
  source 1..75: mol_type = other DNA
atcctgcaagccaccagcccggcggcgaatgtgctggagacggtacgtggtctgttgcagcatcgctcatttacc

SEQ ID NO: 468414 - DNA, 75 bp, synthetic construct
  source 1..75: mol_type = other DNA
ttgcagtttgcggaagacgccagcccgatggcgcacccaatccgcccggacatggtcattgagatgaacaacttc

SEQ ID NO: 468415 - DNA, 75 bp, synthetic construct
  source 1..75: mol_type = other DNA
acaataatgtgggtgatgcgcttttaggaatcgacaatgacactctgcactgggacaaaaccaataaagcattta

SEQ ID NO: 468416 - DNA, 75 bp, synthetic construct
  source 1..75: mol_type = other DNA
gctaatagcactggctcactggcaataggtgctgacagtagcagttcgaacgataacgccatcgcgatagggaac

SEQ ID NO: 468417 - DNA, 75 bp, synthetic construct
  source 1..75: mol_type = other DNA
aagagtcgaggatggcgctgactatgccgccagtctaggatacaaggccaaagcagcaggtatgtatagtctggc

SEQ ID NO: 468418 - DNA, 75 bp, synthetic construct
  source 1..75: mol_type = other DNA
gcgcggaagtgattcgcatgatccacaccctgcttggcgaagaaaacttccagaaagggatgcagctctatttcg

SEQ ID NO: 468419 - DNA, 75 bp, synthetic construct
  source 1..75: mol_type = other DNA
cgcgatcaggaattcagctctgaccttggttcccgcgcggtaaaccgtatcaataatgtgcgcaccatgcgcgga

SEQ ID NO: 468420 - DNA, 75 bp, synthetic construct
  source 1..75: mol_type = other DNA
attcaatcgccctgggtagtaacagcactgcatctggtgagggctccgttgcgctgggagagaatagttttgctg

SEQ ID NO: 468421 - DNA, 75 bp, synthetic construct
  source 1..75: mol_type = other DNA
ctacagtcaatgcgctgaggatatttaattcatcttttggtgctatttttcgccgttctgaagaaaacctgtata

SEQ ID NO: 468422 - DNA, 75 bp, synthetic construct
  source 1..75: mol_type = other DNA
aggctcagggcgttcgcagacctgccgcatggtcatcatcgtcagcactgtggcctcagtggagctgaccattga

SEQ ID NO: 468423 - DNA, 75 bp, synthetic construct
  source 1..75: mol_type = other DNA
atggcgatgatgaagccatcttcaggccaatacaaaaatacatcaatggcacatggtataacgtcgcacaggtgt

SEQ ID NO: 468424 - DNA, 75 bp, synthetic construct
  source 1..75: mol_type = other DNA
aattgatggcgcgtggtggtcgttatgaaaaagccggacacgcaattaccggattaagaatcattggtgaagtag

SEQ ID NO: 468425 - DNA, 75 bp, synthetic construct
  source 1..75: mol_type = other DNA
aaataagcaatttggcatctacatgattaataactcaaggacagccaatggcaccgatggtcaggcgtacatgga

SEQ ID NO: 468426 - DNA, 75 bp, synthetic construct
  source 1..75: mol_type = other DNA
ggcgggatattctggctaaatcgaccgttgccgccgttatcgaatatctcggtttacaggaaacggtaaaccgag

SEQ ID NO: 468427 - DNA, 75 bp, synthetic construct
  source 1..75: mol_type = other DNA
tgccgataatatagcgggcgtttattacagacccgttcaaaagtatataaatggcacctggtataatgtagcgag

SEQ ID NO: 468428 - DNA, 75 bp, synthetic construct
  source 1..75: mol_type = other DNA
ctatggcaattttgattccagatatgtgaaagatgttcgacttggttcacagcaatattatggagtgaacaactg

SEQ ID NO: 468429 - DNA, 75 bp, synthetic construct
  source 1..75: mol_type = other DNA
ttggacgtaatgcggtatccactgatggtgctcaggctttgctccgtcaggaccatgccgaccgcaaatttatga

SEQ ID NO: 468430 - DNA, 75 bp, synthetic construct
  source 1..75: mol_type = other DNA
ggtttgagacaggcgacaacggcaatgaatatttcaaatggagaagcaaacaaagcaccacaacaaaagacctga

SEQ ID NO: 468431 - DNA, 75 bp, synthetic construct
  source 1..75: mol_type = other DNA
gcagcacagcgtaaactaaaagaagaccaggaagcgctaaatgcagcaatggaagctggcaaaatcagcacagaa

SEQ ID NO: 468432 - DNA, 75 bp, synthetic construct
  source 1..75: mol_type = other DNA
ttgattgccgtggcgaacatggccgaaagttataagcctgcccttgccgaaggctcagggcgttcgcagacctgc

SEQ ID NO: 468433 - DNA, 75 bp, synthetic construct
  source 1..75: mol_type = other DNA
aagccacgcagtgaaatgggtgtgacttgtgttggtcgccagaaaatgaaattaggcagcaaaccactgtatgag

SEQ ID NO: 468434 - DNA, 75 bp, synthetic construct
  source 1..75: mol_type = other DNA
atgaaaatcaccccgactatgccaggcaatcgcccaacaaccgcaacggcaggctccagccaggcgcgcaaaagc

SEQ ID NO: 468435 - DNA, 75 bp, synthetic construct
  source 1..75: mol_type = other DNA
acactgtacgcttatgcaacgggtaacgaaatctatctgctgcatgcatttgtgaaaaagacgcaaaagacacca

SEQ ID NO: 468436 - DNA, 75 bp, synthetic construct
  source 1..75: mol_type = other DNA
acgggcgaggtcatatgcgcgtcggtgacagttcatggcctgtcagcgccagcgaggatctcggtgcaggtacgc

SEQ ID NO: 468437 - DNA, 75 bp, synthetic construct
  source 1..75: mol_type = other DNA
cgggttgttgctggcagccgagatgctgggcggaaatggttatttgttgtggagcggcgtggccgcggtgattac

SEQ ID NO: 468438 - DNA, 75 bp, synthetic construct
  source 1..75: mol_type = other DNA
tggaccaccgttatcatctacgccgcgctgctgcacgatctgggtaaactcatcaccgatattgaagtggaaaat

SEQ ID NO: 468439 - DNA, 75 bp, synthetic construct
  source 1..75: mol_type = other DNA
tcgctacccacacaatgatagttgcaaaagtcacggcagaagccgccaaaatcatcgaagaacagggtgcggaac

SEQ ID NO: 468440 - DNA, 75 bp, synthetic construct
  source 1..75: mol_type = other DNA
acaaatctccgcctgatagagcgctctcaagttgcattcattgatgacgcccgacacaccgtatttaacgcatag

SEQ ID NO: 468441 - DNA, 75 bp, synthetic construct
  source 1..75: mol_type = other DNA
gaaagaaattgccagggagcgtaagaaacgttttgcagtgaaaacagggagcacttttgttaagtggcttggctg

SEQ ID NO: 468442 - DNA, 75 bp, synthetic construct
  source 1..75: mol_type = other DNA
ttgtcattgatactttagccgaaagggctggtggacataccaagtacatcaaccaacgtgatgagaattacctat

SEQ ID NO: 468443 - DNA, 75 bp, synthetic construct
  source 1..75: mol_type = other DNA
tttgatgttagcgacgcaacgatagaaaggtacctaaccagcaacattgatgaattaaagaacaacggatacatc

SEQ ID NO: 468444 - DNA, 75 bp, synthetic construct
  source 1..75: mol_type = other DNA
atgacgagacataaacaggaaatcgcatgggcattgcagaatgagaatttttcggaagagaaaatttgccatatt

SEQ ID NO: 468445 - DNA, 75 bp, synthetic construct
  source 1..75: mol_type = other DNA
caacggcaatgaatatttcaaatggagaagccgccagagcaccacaacaaaagacctgatgacgctgaaatggga

SEQ ID NO: 468446 - DNA, 75 bp, synthetic construct
  source 1..75: mol_type = other DNA
tgccccttgaaaaaactcttgaggcagtactggcttatgaacgcctgcattcaggtgaaaaagaggccaataaaa

SEQ ID NO: 468447 - DNA, 75 bp, synthetic construct
  source 1..75: mol_type = other DNA
aaaaccaggttacatagcgaactgagcaaaatcacaacctcaggtaaaccagagattaaagtcgccatcaatacc

SEQ ID NO: 468448 - DNA, 75 bp, synthetic construct
  source 1..75: mol_type = other DNA
atggcgacccgcaccgggctggcgaaccactggtttgatttaatggatattaacgcaggcactatcgctaccggc

SEQ ID NO: 468449 - DNA, 75 bp, synthetic construct
  source 1..75: mol_type = other DNA
gagtattggtggtggtaacaatattttttcatcgggtgcatccggcacgttaatgctgggtgatatgtactgtgg

SEQ ID NO: 468450 - DNA, 75 bp, synthetic construct
  source 1..75: mol_type = other DNA
tgtctcacagagttttatggcccagccaggcggagaaacgcctttcacaaagggtgaactgactttcacagcgga

SEQ ID NO: 468451 - DNA, 75 bp, synthetic construct
  source 1..75: mol_type = other DNA
tgtcccttgagaaggctcttgatgcagtcctggcttatgaacgtctgcattcgggtgaaaaagaggccgacaaaa

SEQ ID NO: 468452 - DNA, 75 bp, synthetic construct
  source 1..75: mol_type = other DNA
cagtgccaaaataacaaaaatggcggatgtggcagaaatcctcattatagatactgccggatatgacagcacgga

SEQ ID NO: 468453 - DNA, 75 bp, synthetic construct
  source 1..75: mol_type = other DNA
gttcagaactgcactaaaagttgcagacattgtgattgtcccgatcgacccgcttgcccaggtggaagcagacag

SEQ ID NO: 468454 - DNA, 75 bp, synthetic construct
  source 1..75: mol_type = other DNA
acgactcagctctcattcatgatgacaatacagtgagtttgggattccaacaggtaaggctgcatccattgattt

SEQ ID NO: 468455 - DNA, 75 bp, synthetic construct
  source 1..75: mol_type = other DNA
agtgggctggaagttgtttcactttattctcgacgtcgccagcgggaagaagaaaactttctcggatcaatgggg

SEQ ID NO: 468456 - DNA, 75 bp, synthetic construct
  source 1..75: mol_type = other DNA
caccacttcagcaggcatttaaagatcgcaaaaacaattatcacacgccagaaggtcgtgcctatacagcagtgc

SEQ ID NO: 468457 - DNA, 75 bp, synthetic construct
  source 1..75: mol_type = other DNA
tgtggggaggggattagcgtggtggactttcatgcgactattgtttttcatgagttgctccatgttttccacaat

SEQ ID NO: 468458 - DNA, 75 bp, synthetic construct
  source 1..75: mol_type = other DNA
tgtctcacagagttttatgacccaaccaggagggagcactcccttcgctaagggtgaactgacttttacagcgga

SEQ ID NO: 468459 - DNA, 75 bp, synthetic construct
  source 1..75: mol_type = other DNA
aacgccgaaagcggttaaggccgcatatgaccttgctaacgggaaatataccgcacaggacgctaccacagcgca

SEQ ID NO: 468460 - DNA, 75 bp, synthetic construct
  source 1..75: mol_type = other DNA
aatggcgataccttgtccggtggacttacttttgaaaacgactcaatccttgcctggattcgaaatactgactgg

SEQ ID NO: 468461 - DNA, 75 bp, synthetic construct
  source 1..75: mol_type = other DNA
actcagttaagcagcgcaaccaacagcacgtctgaaacgctggcagcgacaccaaaagcggttaaggcggtaatg

SEQ ID NO: 468462 - DNA, 75 bp, synthetic construct
  source 1..75: mol_type = other DNA
gccgtgttgacccaatccagcaggtgatgaacgaatggaatgttcgcaagcaaatgatgctcgatttaggcgtca

SEQ ID NO: 468463 - DNA, 75 bp, synthetic construct
  source 1..75: mol_type = other DNA
accatgactaaagcgcttgcgggtaagcaaccgaaagatgccaccctgacggcgctggccgggcttgctactgcg

SEQ ID NO: 468464 - DNA, 75 bp, synthetic construct
  source 1..75: mol_type = other DNA
tgatgaatcttaaatgggatgctttgtctgttcttgttaaagcccttttcagcagtgaagtaaaaatatcgacag

SEQ ID NO: 468465 - DNA, 75 bp, synthetic construct
  source 1..75: mol_type = other DNA
atctcagaactggtcgcataactatggggcatggtctggatgttacaggagatatatttgcaaaccgttttttaa

SEQ ID NO: 468466 - DNA, 75 bp, synthetic construct
  source 1..75: mol_type = other DNA
ggtattgtcggtgaagttgatggcgatgatccggcagtattcagaccaatacaaaaatacatcaatggcacatgg

SEQ ID NO: 468467 - DNA, 75 bp, synthetic construct
  source 1..75: mol_type = other DNA
cgtggcactcaggccgtaaatactgtagaaagaacggggctgatttttacgacaccctcatatgtcacactgtac

SEQ ID NO: 468468 - DNA, 75 bp, synthetic construct
  source 1..75: mol_type = other DNA
ccaaaaattagctcaggcagccgcgccagatggtaagcctgtccgcctgacacatatggccgtgggtgacggcgg

SEQ ID NO: 468469 - DNA, 75 bp, synthetic construct
  source 1..75: mol_type = other DNA
ggcggtgatttcgtttttaaaacagatgggggatttgcgctgggaagtggtgcgcaagttgcgtctaatggcgat

SEQ ID NO: 468470 - DNA, 75 bp, synthetic construct
  source 1..75: mol_type = other DNA
gatatgtgaaagatgttcgacttggttcacagcaatattatggagtgaacaactggcaaacatggaattttcagt

SEQ ID NO: 468471 - DNA, 75 bp, synthetic construct
  source 1..75: mol_type = other DNA
atgcctggagaaagcgaaaaacagtgacgatatcccggataaggtgaagtttctgaacaccgtgggaacagccag

SEQ ID NO: 468472 - DNA, 75 bp, synthetic construct
  source 1..75: mol_type = other DNA
gtggatcactattgcaccgttcgtgacactactgaagcaaataccattattgctgaacaacgtacccgacaaata

SEQ ID NO: 468473 - DNA, 75 bp, synthetic construct
  source 1..75: mol_type = other DNA
gtaccagatcgatcccgcgacctatcaggcaagttatgacagcgcgaaaggcgaactggcgaaaagtgaagccgc

SEQ ID NO: 468474 - DNA, 75 bp, synthetic construct
  source 1..75: mol_type = other DNA
aacttaatgagcagatgaaccaggaactgtactcttcactgctttatcagcaaatgagcgcctggtgcagctatc

SEQ ID NO: 468475 - DNA, 75 bp, synthetic construct
  source 1..75: mol_type = other DNA
gaacgctgaataaatttctgatggacctggaagacgcacagtattacccgaaagcccttgcagagctggaagcgg

SEQ ID NO: 468476 - DNA, 75 bp, synthetic construct
  source 1..75: mol_type = other DNA
aaggtcatcacggatgtcggaccgggaaaacttaatctgggtggctgtgtcattgaggtgatggggaagtatgag

SEQ ID NO: 468477 - DNA, 75 bp, synthetic construct
  source 1..75: mol_type = other DNA
aacaaggcgttagccgcacaccgcgtggtgatgcaaccgtgctgattgttaacgataaaagtcaggtggaagcgc

SEQ ID NO: 468478 - DNA, 75 bp, synthetic construct
  source 1..75: mol_type = other DNA
gctggtcaccaatggtcaaacgaccgaactggccactattcaacaactcgatccaatctacgttgacgttaccca

SEQ ID NO: 468479 - DNA, 75 bp, synthetic construct
  source 1..75: mol_type = other DNA
gatgataagctgaaattaaagctatcttttgttttatccttaccaatagatggggtgaacaaagacatattagac

SEQ ID NO: 468480 - DNA, 75 bp, synthetic construct
  source 1..75: mol_type = other DNA
cgtgccgtcttccctaacccgcaacatacgcttttgccgggtatgtttgtgcgcgcacggattgatgaaggcgtc

SEQ ID NO: 468481 - DNA, 75 bp, synthetic construct
  source 1..75: mol_type = other DNA
aagcaccggctccataaccctacgtgctgtcttccctaacccgcaacatacgcttttgccgggtatgtttgtgcg

SEQ ID NO: 468482 - DNA, 75 bp, synthetic construct
  source 1..75: mol_type = other DNA
gaactggcgactgtccagcaactcgatcctatctacgtcgatgtgacccaatcaagcaatgatttcatgagactg

SEQ ID NO: 468483 - DNA, 75 bp, synthetic construct
  source 1..75: mol_type = other DNA
tccctgcactccgttcgtttccctgttgcttttccgagtgctgtactgaatgttcaggtatctgcagtgggagac

SEQ ID NO: 468484 - DNA, 75 bp, synthetic construct
  source 1..75: mol_type = other DNA
gcgaacaggacagcctgcaactgaccgaactgcacccgagcgattacccgttgctgcgttctgaatttcagaaag

SEQ ID NO: 468485 - DNA, 75 bp, synthetic construct
  source 1..75: mol_type = other DNA
ccgttgattgcccgtcagttactgcgtgaacaggacagcctgcaactgaccgagctgcacccgagcgattacccg

SEQ ID NO: 468486 - DNA, 75 bp, synthetic construct
  source 1..75: mol_type = other DNA
ctgccgtggctgcacagcaaactggttccggcaggcactggtcacgctaccgtcagctggatcgtgccggagtaa

SEQ ID NO: 468487 - DNA, 75 bp, synthetic construct
  source 1..75: mol_type = other DNA
gtaaagagctgttggaagcggtaaaacgctataacgaacagcaaaaagagctgctgcgcgaacaaatcagcacga

SEQ ID NO: 468488 - DNA, 75 bp, synthetic construct
  source 1..75: mol_type = other DNA
cagcagatgaataacgtgctgccatggctgcacagcaaactggttccggctggcaccgggcatgccaccgtaagc

SEQ ID NO: 468489 - DNA, 75 bp, synthetic construct
  source 1..75: mol_type = other DNA
cgcaggggccgggcgttatcagttaggcagcgaacatgccgagcgtaccggcgaatatctcgaaggtatcgcccg

SEQ ID NO: 468490 - DNA, 75 bp, synthetic construct
  source 1..75: mol_type = other DNA
ggttgtgggtatcaggctgggtaataaacagacttatgcgccgcaaacagacggcactacatgggtagtggattt

SEQ ID NO: 468491 - DNA, 75 bp, synthetic construct
  source 1..75: mol_type = other DNA
ggaggtggtgttcccggtccgaaaggagataaaggggacacggggccagcaggtccggctgggccggggggcgtt

SEQ ID NO: 468492 - DNA, 75 bp, synthetic construct
  source 1..75: mol_type = other DNA
gggcatttgaccatacctgctggataatgaaggcatcactgccagcggcgatgaataaggccatcactgatgtcg

SEQ ID NO: 468493 - DNA, 75 bp, synthetic construct
  source 1..75: mol_type = other DNA
ataaacgttttgctacgggcgtctatgcgctgtggtatccggtggtattgcgccagcaaatcaagcgcatgatcc

SEQ ID NO: 468494 - DNA, 75 bp, synthetic construct
  source 1..75: mol_type = other DNA
tctgatcgatacgcaagtttgcgagtttattcagaatacaccagccttccataacacgccgatgcttctggaagc

SEQ ID NO: 468495 - DNA, 75 bp, synthetic construct
  source 1..75: mol_type = other DNA
ctatccgttttcctgtcgcttttccggttgctgctctgaatgctcaggtgtctgcagtgggagaccccaacgtca

SEQ ID NO: 468496 - DNA, 75 bp, synthetic construct
  source 1..75: mol_type = other DNA
aatcagcgatactttttggaataaaaatcatattgtcactacagccaatgttttagcgtcacgtgatgaagaatt

SEQ ID NO: 468497 - DNA, 75 bp, synthetic construct
  source 1..75: mol_type = other DNA
tggagtggcgcgaggaagcctataccctcgatgaactggctgattatctcgatttgagcgcctcagagcgtcgta

SEQ ID NO: 468498 - DNA, 75 bp, synthetic construct
  source 1..75: mol_type = other DNA
acggtatctgaaaattcaggaggagcggctcagcaataaagagataaaaattaatacgcttaaatcaagaaggac

SEQ ID NO: 468499 - DNA, 75 bp, synthetic construct
  source 1..75: mol_type = other DNA
gccgccactgaactgaatcgtctgctggcgcagcaggaagctgcccagtcgtttgccctgatagatatggtcagc

SEQ ID NO: 468500 - DNA, 75 bp, synthetic construct
  source 1..75: mol_type = other DNA
ggggtggtgtttccttggtcagcaaatatttttcttctacatgtttttaaatggatgtcatctcctacagatatt

SEQ ID NO: 468501 - DNA, 75 bp, synthetic construct
  source 1..75: mol_type = other DNA
atgcaggtacattcaattttgttggagcgggtaaaagaaaggatggtgaacctgaagttattttaattggggcga

SEQ ID NO: 468502 - DNA, 75 bp, synthetic construct
  source 1..75: mol_type = other DNA
gcggcccaatacgattaacggctgctgggatggtgctgactggctcctctgccgggatggtcgctggcggccagt

SEQ ID NO: 468503 - DNA, 75 bp, synthetic construct
  source 1..75: mol_type = other DNA
cctgcaacttttcacgagcagcgctctctggcagaacgtctgtatgaagaccagggagtaaatactcaaaaactg

SEQ ID NO: 468504 - DNA, 75 bp, synthetic construct
  source 1..75: mol_type = other DNA
attgctactgaagcgaacgcaagacttgccgagcagcgctcaagacaggttctggctattagcgatcggattgcc

SEQ ID NO: 468505 - DNA, 75 bp, synthetic construct
  source 1..75: mol_type = other DNA
agcgcccgcaacgccgctggaaatcatttccgtcgcacgcttaaccgaaaaaaaggcctgcatgtggcgatcgaa

SEQ ID NO: 468506 - DNA, 75 bp, synthetic construct
  source 1..75: mol_type = other DNA
ggcgatcaggttggcgagaacagccttagcgtctccttcaaactcgcgatcgatagtactggcatttccgtagag

SEQ ID NO: 468507 - DNA, 75 bp, synthetic construct
  source 1..75: mol_type = other DNA
cccgctacattccatgagcaaagatcattgtctgaacgtctttacaaagaccagggaattgatacacaaaaattg

SEQ ID NO: 468508 - DNA, 75 bp, synthetic construct
  source 1..75: mol_type = other DNA
gaaaattcaggaggaaagattcgcgtcaggcgatatcaaagagaatacgtataaacaaaaagcaaagccagttgc

SEQ ID NO: 468509 - DNA, 75 bp, synthetic construct
  source 1..75: mol_type = other DNA
cctcaatttcgggacgttacactgttcaggcaccttataaagcgggtgccgggcgtggaaacccggaattcacca

SEQ ID NO: 468510 - DNA, 75 bp, synthetic construct
  source 1..75: mol_type = other DNA
ctttgcatagcggaataccagaactggtggaggccgataaatctggctggctggtgccggaaaatgacgcctatg

SEQ ID NO: 468511 - DNA, 75 bp, synthetic construct
  source 1..75: mol_type = other DNA
agcgcccgcaacgccgctggaaatcatctccgtcgcacgcttaaccgaaaaaaaggcctgcatgtggcgattgaa

SEQ ID NO: 468512 - DNA, 75 bp, synthetic construct
  source 1..75: mol_type = other DNA
aatttccgctgtcgtcggaaaccttcgtcctcaatcaaattaccgcgtttattgatatgggatttgaggtggaga

SEQ ID NO: 468513 - DNA, 75 bp, synthetic construct
  source 1..75: mol_type = other DNA
tatcaggtgtgctctcaccacagtttattgctagagagggaatggatccactatcacaatcttgggtagagaacc

SEQ ID NO: 468514 - DNA, 75 bp, synthetic construct
  source 1..75: mol_type = other DNA
ttcaggggaggctgctgagtgaatgggcggagaatctggaatcggacaggctggcgcggatagtgaacgccgttc

SEQ ID NO: 468515 - DNA, 75 bp, synthetic construct
  source 1..75: mol_type = other DNA
gtgatgaatcgatcgcacattcagtctggttaagccgctacgccaccggcgtggcaaaccggatggtgaagttgc

SEQ ID NO: 468516 - DNA, 75 bp, synthetic construct
  source 1..75: mol_type = other DNA
atatcagcaactgtttcgccgtggcgacctgatgctaccgataagcgatctgtgggccggaaggctgcaaaaaat

SEQ ID NO: 468517 - DNA, 75 bp, synthetic construct
  source 1..75: mol_type = other DNA
cgcgctttagcccgcgtcccgtgaaagcgcccgcaacaccgctggagattatttccgtcgcacgcttaaccgaga

SEQ ID NO: 468518 - DNA, 75 bp, synthetic construct
  source 1..75: mol_type = other DNA
actgaacacaattttgtgttaagtgaatacaccgacgcatcaggccgcaaacttccctgctaccaaatcacccgc

SEQ ID NO: 468519 - DNA, 75 bp, synthetic construct
  source 1..75: mol_type = other DNA
cgcaccgcggtgaatcacatggccgccacggcgcgtcaggaattcgcccaggcaaatagcgatatcgtgaaggcc

SEQ ID NO: 468520 - DNA, 75 bp, synthetic construct
  source 1..75: mol_type = other DNA
aagaattgcagatagcgtcaggcgagctgagtagcgccacacgcgcctcaatggacggccaagtaccagcgcata

SEQ ID NO: 468521 - DNA, 75 bp, synthetic construct
  source 1..75: mol_type = other DNA
tttgcggccaggtcgcaacaccattttatgccgatgtctttatcgctcattttggccctgcgggggtaaccgcag

SEQ ID NO: 468522 - DNA, 75 bp, synthetic construct
  source 1..75: mol_type = other DNA
aaattgcccctcagtttgtacactggcgaccagctaacgaagatgatgctcctgaagctatttccagcaatggcc

SEQ ID NO: 468523 - DNA, 75 bp, synthetic construct
  source 1..75: mol_type = other DNA
cacgactacagcggcggcaaacctttatcttaatcctgaccctgcaatttcgtctgtactgcggtcaacatcgtc

SEQ ID NO: 468524 - DNA, 75 bp, synthetic construct
  source 1..75: mol_type = other DNA
ccgccggtagtggtggatgaaaccgccgacctcgcccgtgccgctcagtccatcgtcaaaggcgcttctttcgat

SEQ ID NO: 468525 - DNA, 75 bp, synthetic construct
  source 1..75: mol_type = other DNA
ggcatccgacgcaggccgtaaaggcggtcagcatagcggcggtaattttaaaaatgatccgcaacgcgcatccga

SEQ ID NO: 468526 - DNA, 75 bp, synthetic construct
  source 1..75: mol_type = other DNA
tccgaaagcgtgattagcgacaccgatgatctgcaacccattatcgacagcctgcaagctcagattgccgacaaa

SEQ ID NO: 468527 - DNA, 75 bp, synthetic construct
  source 1..75: mol_type = other DNA
atgatctgattaaatatctactctggacgaccatcccatcaacgattattagcctgctgttttttacctggctgg

SEQ ID NO: 468528 - DNA, 75 bp, synthetic construct
  source 1..75: mol_type = other DNA
aactgatgcgtctgatggaaggccagtatgcggtgaaactgaccgcagagcaggcgcagcagcttcagcccgtac

SEQ ID NO: 468529 - DNA, 75 bp, synthetic construct
  source 1..75: mol_type = other DNA
gtacaggtcgcaatgcgaaaatgacaggcgtgactgggggttctatggattgattgccgaggaagtaggagaaat

SEQ ID NO: 468530 - DNA, 75 bp, synthetic construct
  source 1..75: mol_type = other DNA
gtacaggtcgcaatgcgaaaatgacaggcgtgactggggtttctagggattgattgccgaggaagtcggagaaat

SEQ ID NO: 468531 - DNA, 75 bp, synthetic construct
  source 1..75: mol_type = other DNA
gaacttgccgtcagtgaaacgggtatgggccgcgtagaagataaatttgccaaaaacgtcgctcaggcacgcggt

SEQ ID NO: 468532 - DNA, 75 bp, synthetic construct
  source 1..75: mol_type = other DNA
aaacacaccaataaacgtctgatagccgcaggtgcaggcaacccgccggtagtggtggatgaaaccgccgacctc

SEQ ID NO: 468533 - DNA, 75 bp, synthetic construct
  source 1..75: mol_type = other DNA
tggtgaaggtgtaaccagcgcgcgcacgtttgtccgtctgcgtcgctgtgtattagtcgatgcgtttcgcattgt

SEQ ID NO: 468534 - DNA, 75 bp, synthetic construct
  source 1..75: mol_type = other DNA
ccaaaacgcatggacattctgatggcaatgactggtgccggagaaatgtccatccgaaaaattgcagccctggtt

SEQ ID NO: 468535 - DNA, 75 bp, synthetic construct
  source 1..75: mol_type = other DNA
tcaaaaaatcccagaacaacttcagcttccagaatcaacactatctatcaactaccctctatcgtggttttcaga

SEQ ID NO: 468536 - DNA, 75 bp, synthetic construct
  source 1..75: mol_type = other DNA
aagactgctatttcagtcaaaaaatcccagaacaacttcagcttccagaatcaacactatctatcaactaccctc

SEQ ID NO: 468537 - DNA, 75 bp, synthetic construct
  source 1..75: mol_type = other DNA
tggttcatgatgaactgccaaaatacctgctggcccctgaagtgagcgccctgctccattacgtgccggatctgc

SEQ ID NO: 468538 - DNA, 75 bp, synthetic construct
  source 1..75: mol_type = other DNA
gcatttactatctcctgatgctgaccaatatgaatacgaatcacatatagatgacttacatttgacgcttggcgt

SEQ ID NO: 468539 - DNA, 75 bp, synthetic construct
  source 1..75: mol_type = other DNA
tttgatgatcaaaaaaatgaatattttattgtgacaccaccacttcatagaattgagcctaatgatgagattcaa

SEQ ID NO: 468540 - DNA, 75 bp, synthetic construct
  source 1..75: mol_type = other DNA
ctggacgtttctgtgctcttcgatatgccaagcccaactatgcgcatcctcaacgagctacacagcaagggctat

SEQ ID NO: 468541 - DNA, 75 bp, synthetic construct
  source 1..75: mol_type = other DNA
accgaagcgatcgtgatgatcggtgagatcggcggtagcgctgaagaagaagcagcggcgtacatcaaagagcac

SEQ ID NO: 468542 - DNA, 75 bp, synthetic construct
  source 1..75: mol_type = other DNA
tacggtcatggttaatgcgggaatacagcgacgatactgcgcatgatgtgtcagacttgaatacccttatcgaat

SEQ ID NO: 468543 - DNA, 75 bp, synthetic construct
  source 1..75: mol_type = other DNA
tcgtatgatcggcccgaactgcccaggcgttatcaccccgggtgaatgcaaaatcggtatccagcctggtcacat

SEQ ID NO: 468544 - DNA, 75 bp, synthetic construct
  source 1..75: mol_type = other DNA
ggcgttatcaccccgggggaatgcaaaatcggtatccagccgggtcacattcacaaaccaggtaaagtgggtatc

SEQ ID NO: 468545 - DNA, 75 bp, synthetic construct
  source 1..75: mol_type = other DNA
tacggtcatggttaatgcgggaatacggcgacgatacagcgcataatgtgtcaggcttgaatacctttatcgaat

SEQ ID NO: 468546 - DNA, 75 bp, synthetic construct
  source 1..75: mol_type = other DNA
agcagcggcgtacatcaaggagcacgttaccaagccagttgtgggttacatcgctggtgtgactgcgccgaaagg

SEQ ID NO: 468547 - DNA, 75 bp, synthetic construct
  source 1..75: mol_type = other DNA
gtacaggtcgcaatgcgaaaatgacaggcgtgactggggtttctacggattgattgccgaggaagtgggagaaat

SEQ ID NO: 468548 - DNA, 75 bp, synthetic construct
  source 1..75: mol_type = other DNA
aacggtgacatgaataacttcttcaataagctgggctttgcgtccaataccagccagccgcaggtctggcaggga

SEQ ID NO: 468549 - DNA, 75 bp, synthetic construct
  source 1..75: mol_type = other DNA
tgctcattactgaattattaacccggttaatgtggatatctaaacaatggttataccataaaaggcctttgactg

SEQ ID NO: 468550 - DNA, 75 bp, synthetic construct
  source 1..75: mol_type = other DNA
ggaatgcgctgggaagaatcggcctctgtgcagccgaagaagcagaatgcatctgatactcaaaaggaagataaa

SEQ ID NO: 468551 - DNA, 75 bp, synthetic construct
  source 1..75: mol_type = other DNA
cgcagggcatcatcggcggcctgtggccgaagaacaccgtacagtcacagaaaatctgtcaggacattgccggtg

SEQ ID NO: 468552 - DNA, 75 bp, synthetic construct
  source 1..75: mol_type = other DNA
acaatgcccgccgtatggcgctgagcatggcggtgctgactcaggtgcgcgtctcggttgagcgctacaagctcg

SEQ ID NO: 468553 - DNA, 75 bp, synthetic construct
  source 1..75: mol_type = other DNA
gtggttgacagacaaatgagttacatgcgccagcaggtctctgcccgcatgatgacccgctaccagaataactat

SEQ ID NO: 468554 - DNA, 75 bp, synthetic construct
  source 1..75: mol_type = other DNA
ctccttaccgataacaatgcccggtgatgttgagcaggcgatgaaaacgctgcaaacctttcctggaatcgggcg

SEQ ID NO: 468555 - DNA, 75 bp, synthetic construct
  source 1..75: mol_type = other DNA
atgtataccctgaactggcagccgccgtatgactggtcgtggatgttgggatttcttgccactcgtgcggtgagt

SEQ ID NO: 468556 - DNA, 75 bp, synthetic construct
  source 1..75: mol_type = other DNA
tcgtaagcgtacagcgagggccgtattgacggggatgtgttattcagctggcagtgctatgcgccacggaagcag

SEQ ID NO: 468557 - DNA, 75 bp, synthetic construct
  source 1..75: mol_type = other DNA
tcaaatgctgcaaaaagaaaagatgatgaaaggagagaacagactcatgcaccagtcgcaaagtcagcgcctcgg

SEQ ID NO: 468558 - DNA, 75 bp, synthetic construct
  source 1..75: mol_type = other DNA
ttacaaaaacacaattgcaaatgaaaaacagcctcagcatttacaagcggcctcagatgaggtaaaaaacaaaac

SEQ ID NO: 468559 - DNA, 75 bp, synthetic construct
  source 1..75: mol_type = other DNA
gctgtgttgatgcttttgaacagggcgtgcgtgccattttaggccaactggtgagcgtggcgatggcggcaaaat

SEQ ID NO: 468560 - DNA, 75 bp, synthetic construct
  source 1..75: mol_type = other DNA
cattaacagtatgaacctcagttcctgccaggtggcacaggggcttgtaggtggcctgtttcctcagacgcagga

SEQ ID NO: 468561 - DNA, 75 bp, synthetic construct
  source 1..75: mol_type = other DNA
aagctgaaaaacaaactggaagtgaatgctctcgaaagcggtaattatggtggagatttttacccgctgactggc

SEQ ID NO: 468562 - DNA, 75 bp, synthetic construct
  source 1..75: mol_type = other DNA
gtttacaggaacgcctgccgttaacgacagcttcacgctgaaaccagtaagtgacgccatcgtcaacatggatgt

SEQ ID NO: 468563 - DNA, 75 bp, synthetic construct
  source 1..75: mol_type = other DNA
tcgccgatacgtggcacaaatcccgggctttcaatgctgtggaacggcttcgacgctggagaaagccaaagagat

SEQ ID NO: 468564 - DNA, 75 bp, synthetic construct
  source 1..75: mol_type = other DNA
gtacaggtcgcaatgcgaaaatgacaggcgtgactggggattctacggattgattgccgaggaagttggagaaat

SEQ ID NO: 468565 - DNA, 75 bp, synthetic construct
  source 1..75: mol_type = other DNA
tccagaagctgactgaaagagttgatgaacttgagtcagaattaaagttgttatcaacttcccgaagcgatatcg

SEQ ID NO: 468566 - DNA, 75 bp, synthetic construct
  source 1..75: mol_type = other DNA
catatccaaaagctgacagaaagagttgatgaacttgagtcagaattaaagttgttattaacttcccgaagcgat

SEQ ID NO: 468567 - DNA, 75 bp, synthetic construct
  source 1..75: mol_type = other DNA
ttctttgtgccgccttactgacggtcacacctgctgcgtcagcggatgtgaacagcgacatgaaccagttcttca

SEQ ID NO: 468568 - DNA, 75 bp, synthetic construct
  source 1..75: mol_type = other DNA
ctgactgggccgcgtcccgtcagggctgcacggtcggaggacagtcatcgtctgttcgtgacaaggccagtgaca

SEQ ID NO: 468569 - DNA, 75 bp, synthetic construct
  source 1..75: mol_type = other DNA
ctaccagaaatacaccagctatctgccgaatgacgtcaacacccgttcggtcagcgcgctggcagaagccgccgc

SEQ ID NO: 468570 - DNA, 75 bp, synthetic construct
  source 1..75: mol_type = other DNA
accaggccgagcttgatcagctaatccacggcagcagctccaacgagcaggatcctcgtcgcttgccaaaaggct

SEQ ID NO: 468571 - DNA, 75 bp, synthetic construct
  source 1..75: mol_type = other DNA
ctatgtcctgagctgcgacgtagcggattcagcccaggaggtcgttaacaaacgactgaaggcatgtgccggaaa

SEQ ID NO: 468572 - DNA, 75 bp, synthetic construct
  source 1..75: mol_type = other DNA
agattgcggcgtttcagtcacaggtgcaggtacagcaggatgcgctgctggttgtcgatcgtcagatgagctaca

SEQ ID NO: 468573 - DNA, 75 bp, synthetic construct
  source 1..75: mol_type = other DNA
ggtccggtgttgacccgtccagtggtcgctttaacgcggtaatgaatgcgaaccagagtgatcaggtaaccgggc

SEQ ID NO: 468574 - DNA, 75 bp, synthetic construct
  source 1..75: mol_type = other DNA
ggcgctggtctgggggcggttggggcttatgcaatgcataaggctggcggtagcggaagtggaggttctaaaacg

SEQ ID NO: 468575 - DNA, 75 bp, synthetic construct
  source 1..75: mol_type = other DNA
ttgctggcaccacaaatctggggtatcagaaacagtttggcgaagcacggaaggagctggcgggtaatcttgctc

SEQ ID NO: 468576 - DNA, 75 bp, synthetic construct
  source 1..75: mol_type = other DNA
cgacaatgaccagtattgagatcgcggaactggtaggtaagcgtcatgataatgtgaagcgtaccattgaagtat

SEQ ID NO: 468577 - DNA, 75 bp, synthetic construct
  source 1..75: mol_type = other DNA
ttttaaagttcaatacattaagcgcaatggtgataataccactgattgctttattgctcgtgcagggggtacaca

SEQ ID NO: 468578 - DNA, 75 bp, synthetic construct
  source 1..75: mol_type = other DNA
gcaaatagcacaggaagaggtggcctggaaagggtggcaggattacaaaaatattctccgtccggcagaagataa

SEQ ID NO: 468579 - DNA, 75 bp, synthetic construct
  source 1..75: mol_type = other DNA
tgcggaaaaccaggaatgcttccgtctcattcgccaacataccgtcacacccatcgcagtggtgaagtcttcaac

SEQ ID NO: 468580 - DNA, 75 bp, synthetic construct
  source 1..75: mol_type = other DNA
gacggtattacgggccttggggatgccaccctcaatggacgtgagctttccgtggcctcttatttgcaggatcac

SEQ ID NO: 468581 - DNA, 75 bp, synthetic construct
  source 1..75: mol_type = other DNA
tgccgatatgccagggggaacagcaaattcagcatggtacatgcaaacaaagtacggggctgattactggaatgc

SEQ ID NO: 468582 - DNA, 75 bp, synthetic construct
  source 1..75: mol_type = other DNA
tggctgacagcagtctggcaaaagccaaatcggatgcacaggcggcgtttacgaaacaacaggggcgagcttctc

SEQ ID NO: 468583 - DNA, 75 bp, synthetic construct
  source 1..75: mol_type = other DNA
cagttgcttctcgcatgacggcgtcggtgggcagtatccagaactttgccagcttcatctgcgcctcttttgcgc

SEQ ID NO: 468584 - DNA, 75 bp, synthetic construct
  source 1..75: mol_type = other DNA
cagcatctgggactgcggtaatgactccaacttattgatagtgttttatgttcagataatgcccgatgactttgt

SEQ ID NO: 468585 - DNA, 75 bp, synthetic construct
  source 1..75: mol_type = other DNA
tcctcaaattgaggaaattgaaaataaacaatcagttggccctcgtcgattttccaaggcttacatctttgaagg

SEQ ID NO: 468586 - DNA, 75 bp, synthetic construct
  source 1..75: mol_type = other DNA
cagggacccgccgcaacgacggagagcgcgtgcgcgaaacggcgttgccccttacatcccggcggccttttgccg

SEQ ID NO: 468587 - DNA, 75 bp, synthetic construct
  source 1..75: mol_type = other DNA
gtttttgcctgcttctgggcaaaaagttttgcgggatgtacatttcacccctggactggcggagacgtctttgcc

SEQ ID NO: 468588 - DNA, 75 bp, synthetic construct
  source 1..75: mol_type = other DNA
agtgaaattcaaaggcaatgcctcagttctcccggcggataacacgctggcaacggttacctttaaaatcaccga

SEQ ID NO: 468589 - DNA, 75 bp, synthetic construct
  source 1..75: mol_type = other DNA
aggaatgagagcagcaggaaaaagaagagcagtagcaggaacaacaacatcatcagtaacagacaaatgacaggc

SEQ ID NO: 468590 - DNA, 75 bp, synthetic construct
  source 1..75: mol_type = other DNA
tcagcgccaccggcgcgcggtctttttcctgcacgggcagacgggcatttatcctcccgcctgccctgtgtcatc

SEQ ID NO: 468591 - DNA, 75 bp, synthetic construct
  source 1..75: mol_type = other DNA
tgtctttgcccccggcgacaggggcttaaacaggtgtatggcaccggacacaacaacgggcagggacccgccgca

SEQ ID NO: 468592 - DNA, 75 bp, synthetic construct
  source 1..75: mol_type = other DNA
aattcaaaggcaatgcctcagttctcccggcggataacacgctggcaacggttacctttaaaatcgccgaataaa

SEQ ID NO: 468593 - DNA, 75 bp, synthetic construct
  source 1..75: mol_type = other DNA
tcagcgcggccccttccagcgccactggcgcgcggtcttttcccggcgcgggcagacaggcatttatcctcccgc

SEQ ID NO: 468594 - DNA, 75 bp, synthetic construct
  source 1..75: mol_type = other DNA
tcttgagcatgaacgccggatcaacgccgttaatgcccaggtagccgaagtatcggcacaagtgtccaaagtcgc

SEQ ID NO: 468595 - DNA, 75 bp, synthetic construct
  source 1..75: mol_type = other DNA
gtgaaatttaccggcaatgcgcaggtattaccgccagataacacgctggcaacggtgacctttaaaatcgctgaa

SEQ ID NO: 468596 - DNA, 75 bp, synthetic construct
  source 1..75: mol_type = other DNA
tggggcggcttgctgtcgtggaccagttcgatggccggcgcggcgctgtgcttttttatcgccagagtgatgggc

SEQ ID NO: 468597 - DNA, 75 bp, synthetic construct
  source 1..75: mol_type = other DNA
gtataaccctcatcatcctgttgttcgctatgctgctggcatgggcgctcttcccggcgtccatgagtttatcaa

SEQ ID NO: 468598 - DNA, 75 bp, synthetic construct
  source 1..75: mol_type = other DNA
actggtctgcctgaaaatattcagcttccccttataacgacatcaggcgcgttattaggtgacaataatgttgaa

SEQ ID NO: 468599 - DNA, 75 bp, synthetic construct
  source 1..75: mol_type = other DNA
gtgtctcgttgtttcacgttgtgtccgttctaaaaaatcgcaaaaaaaattatatttctctggctattggcagtg

SEQ ID NO: 468600 - DNA, 75 bp, synthetic construct
  source 1..75: mol_type = other DNA
atcattgttgatgaaggagtaaaacccgccgtcgaacgggtttacaccatcaaaaatacaatcgattattattaa

SEQ ID NO: 468601 - DNA, 75 bp, synthetic construct
  source 1..75: mol_type = other DNA
tcggttttttagcatgtacactgtctaaaacgaatgataaaaaaagaagaaagttcgtatatttatacatactag

SEQ ID NO: 468602 - DNA, 75 bp, synthetic construct
  source 1..75: mol_type = other DNA
gtctctttttcctgttcagtctgagctgacatacgccgattacaggcaactggctgaattaagtgaacgactgag

SEQ ID NO: 468603 - DNA, 75 bp, synthetic construct
  source 1..75: mol_type = other DNA
cagcagctttgctatgcaaggttggattacgtgtacttgtaacggatgatgagcttactgtttctgaagctcagc

SEQ ID NO: 468604 - DNA, 75 bp, synthetic construct
  source 1..75: mol_type = other DNA
gtgtctcgttgtttcacgttgtgtccgttctgaaaaatcgcgaaaaaaattatatttctctggctattggcagtg

SEQ ID NO: 468605 - DNA, 75 bp, synthetic construct
  source 1..75: mol_type = other DNA
tgatttttaatgatgcgatggtcagggccatcctcgaaggaaggaagacgcagactcgccgacctgtaaaaaatg

SEQ ID NO: 468606 - DNA, 75 bp, synthetic construct
  source 1..75: mol_type = other DNA
tgaagtgaaaacaatcacacatccgcacttcggcgataaaccggtaaaggtgttcgctataaaggtaaatatcag

SEQ ID NO: 468607 - DNA, 75 bp, synthetic construct
  source 1..75: mol_type = other DNA
tttgaaccgccaagtagtatcacgggggttacggctgaaggtccccctttagacgatggtatttatcatcattag

SEQ ID NO: 468608 - DNA, 75 bp, synthetic construct
  source 1..75: mol_type = other DNA
gtgcaccggtatcgctggatatcgctgaactgaagcgtcgcttgtgccgggaaatcccggaagtccgcaatgtgc

SEQ ID NO: 468609 - DNA, 75 bp, synthetic construct
  source 1..75: mol_type = other DNA
cggtgcccccatttgttaaacaaagcaaagatcaactgctcattacactgtggctgacgagcgaagacccaccgc

SEQ ID NO: 468610 - DNA, 75 bp, synthetic construct
  source 1..75: mol_type = other DNA
ttcgcgtattttgctggaaattaccgacgtgcgtgtggagcggctgcatgacatgagcgaggcagatgctaaagc

SEQ ID NO: 468611 - DNA, 75 bp, synthetic construct
  source 1..75: mol_type = other DNA
tctcgctgaaatggggacaggtcaggccatacaacctcctcagccggaagttatagaggatgaggaaaagcagcg

SEQ ID NO: 468612 - DNA, 75 bp, synthetic construct
  source 1..75: mol_type = other DNA
cgcattacatctataacgagatgaaagagctacagcgacagaaaggcatactggaaagcggtgccggacttgggg

SEQ ID NO: 468613 - DNA, 75 bp, synthetic construct
  source 1..75: mol_type = other DNA
gaagtaaaatcattctcttctcagtacaaccgaaaacttgttggtaagatgaatgtttccgacctgactctttcc

SEQ ID NO: 468614 - DNA, 75 bp, synthetic construct
  source 1..75: mol_type = other DNA
gaagttaaatccttctcttctcagtataaccgtaagctggtagggaaactgaacgttcctgatctgactctgacc

SEQ ID NO: 468615 - DNA, 75 bp, synthetic construct
  source 1..75: mol_type = other DNA
caggccaaacagctggtggaagggcttggatatgatgttgattatcgcgaactgcgcgcgtgtgattacggcgcg

SEQ ID NO: 468616 - DNA, 75 bp, synthetic construct
  source 1..75: mol_type = other DNA
cgcggttttatttaaatgtaccttttgaagaaaaggagttagctaaacaaaaaggggcgcaatgggatcaagaac

SEQ ID NO: 468617 - DNA, 75 bp, synthetic construct
  source 1..75: mol_type = other DNA
cgcggttttatttaaatgttccgtttgaagaaaaggatttggctaaacaaaaaggggcgcaatgggaccaagaac

SEQ ID NO: 468618 - DNA, 75 bp, synthetic construct
  source 1..75: mol_type = other DNA
aacaggcgatcaccaacgtgccactgaccattctcgacgccatcaacgccgcaggtggcctgaccgacaccgctg

SEQ ID NO: 468619 - DNA, 75 bp, synthetic construct
  source 1..75: mol_type = other DNA
acgtcgctggtgatggcgacagaattccgcctgcaaccttatgacgtggtgtatgtcaccaccgccccggtttcc

SEQ ID NO: 468620 - DNA, 75 bp, synthetic construct
  source 1..75: mol_type = other DNA
cttgatccgcggcttcctggtttacttactgtgttgctggacagggatttcagtgcggaccagctggtcgggtta

SEQ ID NO: 468621 - DNA, 75 bp, synthetic construct
  source 1..75: mol_type = other DNA
cagcaaaagtggaatacgacgggctttcagacagccaaccactgcgtgtcgataccaataaccatacggtcacca

SEQ ID NO: 468622 - DNA, 75 bp, synthetic construct
  source 1..75: mol_type = other DNA
ggaaaaaaggactggctgcactgtgtttactggccgttgcagggcttagtggctgcgatcaaaaagagaatgcgg

SEQ ID NO: 468623 - DNA, 75 bp, synthetic construct
  source 1..75: mol_type = other DNA
ggaaaaaaggactggctgcactctgcttactggctgttgctgggcttagcggctgcgatcaaaaagagaatgcgg

SEQ ID NO: 468624 - DNA, 75 bp, synthetic construct
  source 1..75: mol_type = other DNA
gccagccagaccttacgcggcattcatcgtaaaaatacctggcaggcgctcaacctcaaacgctatggcgcagag

SEQ ID NO: 468625 - DNA, 75 bp, synthetic construct
  source 1..75: mol_type = other DNA
tccggtggcgctaatggaagcgatggcggtcggcattccggtggtttctactctgcatagcggaattcctgaact

SEQ ID NO: 468626 - DNA, 75 bp, synthetic construct
  source 1..75: mol_type = other DNA
gcaggtagcccgctgcggtaacgccgtgccgccgccattcgctgaggcgctggtgcggtcaaacctgccggagtt

SEQ ID NO: 468627 - DNA, 75 bp, synthetic construct
  source 1..75: mol_type = other DNA
tctaaagcagagttagttcataaactagctactctccatgcagaaatcgcatggatccacccctttcaagatggt

SEQ ID NO: 468628 - DNA, 75 bp, synthetic construct
  source 1..75: mol_type = other DNA
tgtggacgggcggtaaatggattgaaggattaccggcacaacttaagcaactctccgccccggttttcctcggta

SEQ ID NO: 468629 - DNA, 75 bp, synthetic construct
  source 1..75: mol_type = other DNA
gatttgatgctaccgataagcgatctgtgggccggaaggctgcaaaaaatgggctgcccgagggaaaaaattgcc

SEQ ID NO: 468630 - DNA, 75 bp, synthetic construct
  source 1..75: mol_type = other DNA
gaaaacactgcgcagccagtgcctttcacaccgaacaacgctcgtcctctaacgctggaagacgatcgtttgagc

SEQ ID NO: 468631 - DNA, 75 bp, synthetic construct
  source 1..75: mol_type = other DNA
cgcagaaaaaccatccgtcgatcatcatctggtcgctgggcaacgaatccggctatggctgtaacatccgcgcga

SEQ ID NO: 468632 - DNA, 75 bp, synthetic construct
  source 1..75: mol_type = other DNA
tgctggaaaatctcgccgcctcccctgtcgtaacgacgctggaatataccctgtttgatggcgaacgcgtggtgc

SEQ ID NO: 468633 - DNA, 75 bp, synthetic construct
  source 1..75: mol_type = other DNA
cgcaaaccatgcaaaccgcaagaggcaagcagctggcgcagcacaacgcgcaatttttagtcgagtttatggcga

SEQ ID NO: 468634 - DNA, 75 bp, synthetic construct
  source 1..75: mol_type = other DNA
cgcagcatcgcccacttgatgataaacgttacgcgctggatcattttcagactaagttgctgaagctaccgcaca

SEQ ID NO: 468635 - DNA, 75 bp, synthetic construct
  source 1..75: mol_type = other DNA
accgactttgacgaagcctattgcgatgccacgctttcctgcgaagtggtgctggaaaatctcgccgcctcccct

SEQ ID NO: 468636 - DNA, 75 bp, synthetic construct
  source 1..75: mol_type = other DNA
ttatgaatttgatatggaaaagctagatggagatgtgcgaaataaacgtgcgtaccattatgctgtaagacgcgc

SEQ ID NO: 468637 - DNA, 75 bp, synthetic construct
  source 1..75: mol_type = other DNA
tatgccggagggggagcgccttcacctgaggaacgcgaaagccaactcgagaccctacaactcctcgacagcatg

SEQ ID NO: 468638 - DNA, 75 bp, synthetic construct
  source 1..75: mol_type = other DNA
aaactattgggccacaaaacaatgaaaatgactgacagatacaatgatgaccgcggtaaagagtggatcattgtt

SEQ ID NO: 468639 - DNA, 75 bp, synthetic construct
  source 1..75: mol_type = other DNA
tcttcatgtcgtacaagaaaagacagggagcaaaatcgcaattccgctttctcttcgcctcaatgcgattaactg

SEQ ID NO: 468640 - DNA, 75 bp, synthetic construct
  source 1..75: mol_type = other DNA
cctgcgcacgctcatcgaacaatatcaactggaagatgtggtagagatgccgggctttaaaccgagccacgaagt

SEQ ID NO: 468641 - DNA, 75 bp, synthetic construct
  source 1..75: mol_type = other DNA
tcgcggaacctgattttgtctgccatttgcggccaggtcgcaacaccgtttcatgccgatgtctttatcgctcat

SEQ ID NO: 468642 - DNA, 75 bp, synthetic construct
  source 1..75: mol_type = other DNA
ttagaaaacggtcacgttgttactgcacacatctccggtaaaatgcgcaaaaactacatccgcatcctgacgggc

SEQ ID NO: 468643 - DNA, 75 bp, synthetic construct
  source 1..75: mol_type = other DNA
ctctacgtttgaatgctatcaattggagcctacgagatgtagtagctcgctgccgtgactacgcagtgagcccat

SEQ ID NO: 468644 - DNA, 75 bp, synthetic construct
  source 1..75: mol_type = other DNA
attaccaaacggtaatggcatacaaagtttctgaagtcatcgatgcaatcgcaatccgcgctactggcattcgca

SEQ ID NO: 468645 - DNA, 75 bp, synthetic construct
  source 1..75: mol_type = other DNA
cgtaccattatgctgtaagacgcgcaatacacgacagtaacagaaatctgattgcccttatttcaagggcaatca

SEQ ID NO: 468646 - DNA, 75 bp, synthetic construct
  source 1..75: mol_type = other DNA
ctcttcgcctgaatgcgatcaactggagcctgagggacgttgtagcgcgctgccgtgattacgctgtgagcccgt

SEQ ID NO: 468647 - DNA, 75 bp, synthetic construct
  source 1..75: mol_type = other DNA
aggaattgactggggtgatggctcacccgcaacattccatgaacaaagatcgttatctgaacgcctgtacaagga

SEQ ID NO: 468648 - DNA, 75 bp, synthetic construct
  source 1..75: mol_type = other DNA
cttggtcataaaacacaacagcagaccgatcgttaccatgatgatcgaggcaaaggatggagcaaagtagcattg

SEQ ID NO: 468649 - DNA, 75 bp, synthetic construct
  source 1..75: mol_type = other DNA
cgcgtgatgcagtgggcggactccacctacgtggaagaccaggatatgtggtggtcggcggggattttccgcgat

SEQ ID NO: 468650 - DNA, 75 bp, synthetic construct
  source 1..75: mol_type = other DNA
gcgcctgctggcgtggctgaaatatgctgatgaacgtctgcaatttacccgaggtttgtgtgccgatgatgagcc

SEQ ID NO: 468651 - DNA, 75 bp, synthetic construct
  source 1..75: mol_type = other DNA
acgctgcaggcaacgattcaggatggcgtgatctggttatcggatgataagaataatctggaagtgaacttaacc

SEQ ID NO: 468652 - DNA, 75 bp, synthetic construct
  source 1..75: mol_type = other DNA
tggggctgccggatgagcggcggattaagaaagcctgcacccaggccgcagaagtggcgctgtttgcctataata

SEQ ID NO: 468653 - DNA, 75 bp, synthetic construct
  source 1..75: mol_type = other DNA
cgcgttttacccgccgtccggtcaaggtgccgggtaaaccgctgcagattatctccgttgcccgactgaccgaga

SEQ ID NO: 468654 - DNA, 75 bp, synthetic construct
  source 1..75: mol_type = other DNA
aatttccgctgtcgtcggaaaccttcgttctcaaccaaatcactgcgtttattgatatgggctttgaggtggaga

SEQ ID NO: 468655 - DNA, 75 bp, synthetic construct
  source 1..75: mol_type = other DNA
gaaggcgatgctcgacgacgcggatgtcttcctgttgccttcggtaacgggtgcggacggcgatatggaaggcat

SEQ ID NO: 468656 - DNA, 75 bp, synthetic construct
  source 1..75: mol_type = other DNA
gacggagagcgcgtgcgcgaaacggcgttgcgccttacatcccggcgtcgttttgccgggatgccaggagcgcag

SEQ ID NO: 468657 - DNA, 75 bp, synthetic construct
  source 1..75: mol_type = other DNA
tgccgtgttgtcagattacgaagatgccagtgctccagcaatagctgcttataagaaagcaggatttgcgacgag

SEQ ID NO: 468658 - DNA, 75 bp, synthetic construct
  source 1..75: mol_type = other DNA
agaacagtagcagtagcagtagcagtagcaggaacaacaacatcatcagtaacagacaaatgacaggtctgaaaa

SEQ ID NO: 468659 - DNA, 75 bp, synthetic construct
  source 1..75: mol_type = other DNA
agattatcccgtcgacagcagatgaagatgagttgctggagcactgccggttctggggcgtgcgccgcaaacagg

SEQ ID NO: 468660 - DNA, 75 bp, synthetic construct
  source 1..75: mol_type = other DNA
atggcttattcaccaccgacattatcatcgctgattgcccgtacagaacagaatattgaacagcgcctgccgggt

SEQ ID NO: 468661 - DNA, 75 bp, synthetic construct
  source 1..75: mol_type = other DNA
gttattggtataataatggtggtaaagaccacgggagaatttattcattttattcgtcatgaaatcaacggtaat

SEQ ID NO: 468662 - DNA, 75 bp, synthetic construct
  source 1..75: mol_type = other DNA
gctgcgggtgatgattgcgcaataccagcttgaagatgtgattgaaatgccgggatttaaacccagccatgaagt

SEQ ID NO: 468663 - DNA, 75 bp, synthetic construct
  source 1..75: mol_type = other DNA
acgcagaggtgcgcgccgaaggtgaaacgctcgcgacgcagcagattaaactgcgcgacgttgcgccgaacagcg

SEQ ID NO: 468664 - DNA, 75 bp, synthetic construct
  source 1..75: mol_type = other DNA
ttctgtcttgatggtttgatctattccgatcagacgccggggccgggactgaaagagtacaaacaggttatcgcg

SEQ ID NO: 468665 - DNA, 75 bp, synthetic construct
  source 1..75: mol_type = other DNA
taccgactttgacgaagcctattgcgacgccacactttcctgcgaagtggtgctggaaaatctcgctgcctcccc

SEQ ID NO: 468666 - DNA, 75 bp, synthetic construct
  source 1..75: mol_type = other DNA
gctacagcgaagccggacaccctatcgccacttatcagttcccgctgaaggaaaacaccgcacagccggtgcctt

SEQ ID NO: 468667 - DNA, 75 bp, synthetic construct
  source 1..75: mol_type = other DNA
cggcgagcgttacggcgactatccgcacatcattccgtgcatcggtttcaccatgggaattaacggcgaatacga

SEQ ID NO: 468668 - DNA, 75 bp, synthetic construct
  source 1..75: mol_type = other DNA
ctacggctttacgttgctgccggtttctggcggagaagctaccgcgcaaagcctggcgtcgtatgagttcggcgc

SEQ ID NO: 468669 - DNA, 75 bp, synthetic construct
  source 1..75: mol_type = other DNA
atgaaggttggtttcttcttgctgaaattcccattgtcgtctgaaacgtttgtgcttaaccagattgtggccttt

SEQ ID NO: 468670 - DNA, 75 bp, synthetic construct
  source 1..75: mol_type = other DNA
ccgagcatagcggtattccggaactgatagacgccaacgcctccggctggctggtggcggagaacgacgccccgg

SEQ ID NO: 468671 - DNA, 75 bp, synthetic construct
  source 1..75: mol_type = other DNA
caatacaatttgcaggcgaaaacgcgctggctacaggaggagcctgaggggaaactggcgaagttacgtcaccgt

SEQ ID NO: 468672 - DNA, 75 bp, synthetic construct
  source 1..75: mol_type = other DNA
cgacgttctgatgggagatgggacgcctgccaatggcaatacaaaactggggaccgtcagggattcatatgagga

SEQ ID NO: 468673 - DNA, 75 bp, synthetic construct
  source 1..75: mol_type = other DNA
gtgattcgtctggcaggttcgctcaccgcgcgagcaacgcgtctggcccatgaagcgcaactggatgtcgcgccg

SEQ ID NO: 468674 - DNA, 75 bp, synthetic construct
  source 1..75: mol_type = other DNA
tacgggcgcgaagtttcgtcatcgcgcagtcagcacgctgcgcgggttacatcgcccggcaacgtggcaggctct

SEQ ID NO: 468675 - DNA, 75 bp, synthetic construct
  source 1..75: mol_type = other DNA
ttgggtcgatacgccagcggataaacaagtaaaatttggcgatgagttggtcgatcgagaatattttgccacgtg

SEQ ID NO: 468676 - DNA, 75 bp, synthetic construct
  source 1..75: mol_type = other DNA
ctattcaccgctgaaagccatcatccaggggacgccgaaagcattgtggccggaaccgatgacgcgcctgaatgc

SEQ ID NO: 468677 - DNA, 75 bp, synthetic construct
  source 1..75: mol_type = other DNA
aacggaaaatccagaaaagaactttgccaaaggtattgtttttgccgctattgttatttcaatcggttattcgct

SEQ ID NO: 468678 - DNA, 75 bp, synthetic construct
  source 1..75: mol_type = other DNA
aacgctggaagccgtctggatccaggggaaattacggatgtgggggcgttggtcgtatataggtggtggcaaacc

SEQ ID NO: 468679 - DNA, 75 bp, synthetic construct
  source 1..75: mol_type = other DNA
atgctgcttttgatggcatattgttccacgatgatgctttgctttcagattatgaagatgccagtgcaccggcta

SEQ ID NO: 468680 - DNA, 75 bp, synthetic construct
  source 1..75: mol_type = other DNA
gtaaacatctatgcgtggatgccggtattaagctgggatttagatcccacattaacgcgagtaaaatacttacca

SEQ ID NO: 468681 - DNA, 75 bp, synthetic construct
  source 1..75: mol_type = other DNA
gctggcgcattgtactgatgcagaggcgttatgtgttgatcgggttataagtgaggtgctggcagaacatccggg

SEQ ID NO: 468682 - DNA, 75 bp, synthetic construct
  source 1..75: mol_type = other DNA
ccatcaatgaagccctgcgcagaatgaaaaaagcgggaatggataaaattgagctggcgatatattttcgtgaga

SEQ ID NO: 468683 - DNA, 75 bp, synthetic construct
  source 1..75: mol_type = other DNA
ggaaaactacgtatgtgggggcgctggtcgtatattggcggcggtaggtcagggaatatgttcaatcagttgctg

SEQ ID NO: 468684 - DNA, 75 bp, synthetic construct
  source 1..75: mol_type = other DNA
ttttatatattttctgcattgttattctttattccattcgccttaatgatggctgaaatgggagctgcttatcgc

SEQ ID NO: 468685 - DNA, 75 bp, synthetic construct
  source 1..75: mol_type = other DNA
acggcgggtggcacgatggcggatgtgaccttcaacagcatctttattaccgactggaaaaattacgccgcgatt

SEQ ID NO: 468686 - DNA, 75 bp, synthetic construct
  source 1..75: mol_type = other DNA
ggaaaactacgtatgtgggggcgctggtcgtatattggcggcggcaggtcagggaatatgttcaaccagttgctg

SEQ ID NO: 468687 - DNA, 75 bp, synthetic construct
  source 1..75: mol_type = other DNA
gctggtgcactgttctgatacagaggctttgttgatcgataaggttattggtgaggtgcttggtaaacatcccgg

SEQ ID NO: 468688 - DNA, 75 bp, synthetic construct
  source 1..75: mol_type = other DNA
ttccggctcaggaaccggtacaccaccaccatcggaaaatgatcctaagcagcaaaatgaaaaacctgtagataa

SEQ ID NO: 468689 - DNA, 75 bp, synthetic construct
  source 1..75: mol_type = other DNA
cgaagagttgagtacggcacagcagaagcaactgatccgtgactgtgctgccagcccggcaacctgccagcagaa

SEQ ID NO: 468690 - DNA, 75 bp, synthetic construct
  source 1..75: mol_type = other DNA
tggtctcggacaggtggacagccatttgtttgccggactgtatgagcttcttggagcgaagccgggtcaggcgcc

SEQ ID NO: 468691 - DNA, 75 bp, synthetic construct
  source 1..75: mol_type = other DNA
aaaaatcagttgggaatggatgccagtaaaaatgctttaaaatactctgaatcgtcttttggtccggggtattta

SEQ ID NO: 468692 - DNA, 75 bp, synthetic construct
  source 1..75: mol_type = other DNA
aaaaacagtcgcaacggcaggtcagaaagtcatgaaagccacgcagcagtgtccacggtgacggcgggcgataac

SEQ ID NO: 468693 - DNA, 75 bp, synthetic construct
  source 1..75: mol_type = other DNA
aggacggaatattgctggcgaaaggtcatgcgggactcgatgccggtacgctgaataacagtggcgccgttcagg

SEQ ID NO: 468694 - DNA, 75 bp, synthetic construct
  source 1..75: mol_type = other DNA
tatgaaggacgggggatgactaagcgcaaaatggctgaattgctaaatgatgcacaccctgagtggtgttttcgg

SEQ ID NO: 468695 - DNA, 75 bp, synthetic construct
  source 1..75: mol_type = other DNA
gttaactcactgcactgatgcagaggcactaaaaattgatagtgttataggtgaagttctggcggatcatccagg

SEQ ID NO: 468696 - DNA, 75 bp, synthetic construct
  source 1..75: mol_type = other DNA
acttgtgaaaagcgtatctctaattggttggctattgctgaatttgctttatatgcacctatgcgtaatgccttt

SEQ ID NO: 468697 - DNA, 75 bp, synthetic construct
  source 1..75: mol_type = other DNA
acaatatgctgaacgtgatagccactgaaacagcagctaatacggcagcagcaatagctggtgctacaggtaatg

SEQ ID NO: 468698 - DNA, 75 bp, synthetic construct
  source 1..75: mol_type = other DNA
gatgtcactgtggggaatcacactcagctcaatggtgcggtaattgcgtccacggcaacggatgacaaaaacagc

SEQ ID NO: 468699 - DNA, 75 bp, synthetic construct
  source 1..75: mol_type = other DNA
gtgccagcgcaagactgaaagttattgcgtcgaaagaagggtacgaagatggcccttataactcgaaatacagcc

SEQ ID NO: 468700 - DNA, 75 bp, synthetic construct
  source 1..75: mol_type = other DNA
attgccaacattcaaaccgccgtgaccgcagcgcgaacggcagggatgctgatcatctggtttcaaaatggctgg

SEQ ID NO: 468701 - DNA, 75 bp, synthetic construct
  source 1..75: mol_type = other DNA
gtgagcacagaagaagccagagaaatgatacagcggtaccgtgaagcggaaatgaccgtactggaggggaagtct

SEQ ID NO: 468702 - DNA, 75 bp, synthetic construct
  source 1..75: mol_type = other DNA
tactgatgagcacgtaccgttatatatacgaaggctggaatactatcgactgctttatcgaccaaagcagacaga

SEQ ID NO: 468703 - DNA, 75 bp, synthetic construct
  source 1..75: mol_type = other DNA
tcgatacgtggattttgatcccacttaatctgatttacctgcgcaccctggcgtttattctggtgattgctgtgg

SEQ ID NO: 468704 - DNA, 75 bp, synthetic construct
  source 1..75: mol_type = other DNA
agctaccggcttctggccgctatatcgcttcgatccgcgtcgtgccgatgaaggcaaactgccgctggcgctgga

SEQ ID NO: 468705 - DNA, 75 bp, synthetic construct
  source 1..75: mol_type = other DNA
gagattaaagccatcaatatgatgtctcgcctggaacatgtcgaagaagagaaaatcaattacgatttcttcctc

SEQ ID NO: 468706 - DNA, 75 bp, synthetic construct
  source 1..75: mol_type = other DNA
gacggcaaaaaagatccgcaacggagacaaattgaaaaattaattgccaccttacacgccagcctacaacaacgc

SEQ ID NO: 468707 - DNA, 75 bp, synthetic construct
  source 1..75: mol_type = other DNA
ttgatgagaaaattaaaaacaacgggaaataattgtagcgtattgctgaaattttcaacgagaaatgttatgagt

SEQ ID NO: 468708 - DNA, 75 bp, synthetic construct
  source 1..75: mol_type = other DNA
gagagaaggcccgagcgtaaacgtctgctggtgagtctcggcactgtcaaaccgatggttgacggccttgatcta

SEQ ID NO: 468709 - DNA, 75 bp, synthetic construct
  source 1..75: mol_type = other DNA
ctttcgtatttctgcttgcaatgtcagatttttttatcattgctgatgccagaaatcgttttttactttatataa

SEQ ID NO: 468710 - DNA, 75 bp, synthetic construct
  source 1..75: mol_type = other DNA
agctggaaaccgcgatgggcatggggctggcaacaacgtttgtgatgacgctggcgtctatttgcgcctggctta

SEQ ID NO: 468711 - DNA, 75 bp, synthetic construct
  source 1..75: mol_type = other DNA
atgactgactacctgttactgtttgtcggaactgtactggtcaataactttgtactggtcaagtttctcggtctc

SEQ ID NO: 468712 - DNA, 75 bp, synthetic construct
  source 1..75: mol_type = other DNA
cgatgcagtacgtcccgtataacggtggcgcggtgtgggaaccatggtgggagagaaggcccgagcgtaaacgtc

SEQ ID NO: 468713 - DNA, 75 bp, synthetic construct
  source 1..75: mol_type = other DNA
ggctattgcacttggaacgcacaagattgatccagtctttcttctcaatgaaataaaatctgcattagcgataaa

SEQ ID NO: 468714 - DNA, 75 bp, synthetic construct
  source 1..75: mol_type = other DNA
atgacaactcagcacgctactgaacggatgattcaggaatatgtccccggtaaacaggttacgctggcgcatgtc

SEQ ID NO: 468715 - DNA, 75 bp, synthetic construct
  source 1..75: mol_type = other DNA
tctaaaggtcgtaaacacatccgaattactcaggacgctttagatactttgaaggcacttaacagctttaaaatt

SEQ ID NO: 468716 - DNA, 75 bp, synthetic construct
  source 1..75: mol_type = other DNA
tttgaaggcacttaacagctttaagattgatattgcccgactattgagtcttaagattcacaagctatcgatgga

SEQ ID NO: 468717 - DNA, 75 bp, synthetic construct
  source 1..75: mol_type = other DNA
tggctgatggcgtggtgtatgtctccggtacgctggcttttgatcaacataacaacgtgctgtttgccgatgacc

SEQ ID NO: 468718 - DNA, 75 bp, synthetic construct
  source 1..75: mol_type = other DNA
ggtcgtatattggtggcggtaagacgggaaatatattcaagcagttgctggcatcccaaaaaatgacaaaaacag

SEQ ID NO: 468719 - DNA, 75 bp, synthetic construct
  source 1..75: mol_type = other DNA
atatgcacttagccaggttacacgcacgctgggcgaaatgatgcactttaccgcctgttccattacacggacctg

SEQ ID NO: 468720 - DNA, 75 bp, synthetic construct
  source 1..75: mol_type = other DNA
tatggcaaaacgccgctggaactggcgcgggaacggggctttgaagagattgcgcagttactgattgccgcaggc

SEQ ID NO: 468721 - DNA, 75 bp, synthetic construct
  source 1..75: mol_type = other DNA
gagaaaacacataaaaagcagcctcagccctggtatttgaaaaaacaaatcacttttcccccaaaatatccgaaa

SEQ ID NO: 468722 - DNA, 75 bp, synthetic construct
  source 1..75: mol_type = other DNA
tggtatctggggatggtttttcatttgaatgtgatattagtgatataaaacctatagctaaggttcataccgtaa

SEQ ID NO: 468723 - DNA, 75 bp, synthetic construct
  source 1..75: mol_type = other DNA
gaagggactaaacaactttaaaattgatattgcccgtctaatgagtatcaaaattcacaaattagcgatggaggt

SEQ ID NO: 468724 - DNA, 75 bp, synthetic construct
  source 1..75: mol_type = other DNA
gaaggcacttaacagctttaaaattgatattgcccgtctaatgagtctcaagattcacaaactgtctctggaggt

SEQ ID NO: 468725 - DNA, 75 bp, synthetic construct
  source 1..75: mol_type = other DNA
tgccagcccgcatctgaccgataaatatggcaaaacgccgctggaactggcgcgggaacggggctttgaagagat

SEQ ID NO: 468726 - DNA, 75 bp, synthetic construct
  source 1..75: mol_type = other DNA
cgcatggggcgcgactacgacatgacgcagattttcacgggtacattagtggaagccgatcctttccacgccgtg

SEQ ID NO: 468727 - DNA, 75 bp, synthetic construct
  source 1..75: mol_type = other DNA
gtaagcacgtcgacgtcaacgcgttcaaagaacgcctggatgttaatgtgaatgtgacaattgctgatcgcatag

SEQ ID NO: 468728 - DNA, 75 bp, synthetic construct
  source 1..75: mol_type = other DNA
aagaaccggtcgatccgcgcaaagcggccgtcgaagcggctattgcccgcgttcaggccaaaaaagccgcccagc

SEQ ID NO: 468729 - DNA, 75 bp, synthetic construct
  source 1..75: mol_type = other DNA
aaaagcagagccgctttattgcctggacctttatgaacgacgagcagcgccgccgttttgtcaatcgccagcgtt

SEQ ID NO: 468730 - DNA, 75 bp, synthetic construct
  source 1..75: mol_type = other DNA
aactgcactgcacgagatataaagagcgtgaggatgttatggatcagattattcaggaaggcggtctggaatatg

SEQ ID NO: 468731 - DNA, 75 bp, synthetic construct
  source 1..75: mol_type = other DNA
acgatcgaggtgtgtaaccatgttcaggcttgttgtcctgcgcgcgcgtattgctcgtgaaattgctgtacccaa

SEQ ID NO: 468732 - DNA, 75 bp, synthetic construct
  source 1..75: mol_type = other DNA
ctgacgcctgccctgcagatcttttgccgcaacagttgtactggttcagcaaaggtcagcaacacgataaagcca

SEQ ID NO: 468733 - DNA, 75 bp, synthetic construct
  source 1..75: mol_type = other DNA
tatcggcgtattaatgcaaaacgtcggcactgcttatgcagtgaaacgtgccgttattgatggcgagccgattac

SEQ ID NO: 468734 - DNA, 75 bp, synthetic construct
  source 1..75: mol_type = other DNA
gattatcgctctcgcagtcgcgaagagttaatcgagcgcattcatcagtttggtgttgccgggctgggcggtgca

SEQ ID NO: 468735 - DNA, 75 bp, synthetic construct
  source 1..75: mol_type = other DNA
gatccgcgcaaagccgccgtcgaagccgctattgcccgagccaaagcgcgcaaactggaacagcaacaggctaat

SEQ ID NO: 468736 - DNA, 75 bp, synthetic construct
  source 1..75: mol_type = other DNA
tatcgctctcgcagtcgcgaagagttaatcgagcgcattcatcagtttggtgttgccgggctgggtggtgcggga

SEQ ID NO: 468737 - DNA, 75 bp, synthetic construct
  source 1..75: mol_type = other DNA
aagtgccgcacggcggtcgctcatcggatattggcgtattaatgcaaaatattggtacggcttacgcggtgaaac

SEQ ID NO: 468738 - DNA, 75 bp, synthetic construct
  source 1..75: mol_type = other DNA
ctctgcccaccagtaccgggccgggcggattatattcatcaccttgccgatttactggcagaagcaacaggatca

SEQ ID NO: 468739 - DNA, 75 bp, synthetic construct
  source 1..75: mol_type = other DNA
cgcgatcaggaattcagctctgaccttggttcccgcgcggtaaaccgtatcaacaacgtgcgcaccatgcgcgga

SEQ ID NO: 468740 - DNA, 75 bp, synthetic construct
  source 1..75: mol_type = other DNA
tccgattgtcgactgcgcccgtgcggtgctggacgggcatatcgtattaacccgcaaactggcggaagcggggca

SEQ ID NO: 468741 - DNA, 75 bp, synthetic construct
  source 1..75: mol_type = other DNA
gatgatatgttcgagacgatgtacgcagaagaaggtattggcctggcggcaacccaggttgatatccatcaacgt

SEQ ID NO: 468742 - DNA, 75 bp, synthetic construct
  source 1..75: mol_type = other DNA
tcgttacgggttcagttaacggaaaccgtgatgaattaattgatacaactcaggcaaggccaattcagtattgca

SEQ ID NO: 468743 - DNA, 75 bp, synthetic construct
  source 1..75: mol_type = other DNA
taagtcgcccgttcgctggttcacgaagcacacaaggcgttaggcgggctggatattatggcgctggtagccggg

SEQ ID NO: 468744 - DNA, 75 bp, synthetic construct
  source 1..75: mol_type = other DNA
ttccagccggtgcctgcgctgttgtgcgaattctctgcgccagtgaaactggaatataagtggagcgatcagcaa

SEQ ID NO: 468745 - DNA, 75 bp, synthetic construct
  source 1..75: mol_type = other DNA
attgtatctcaaccggagcatatgcatttaacatgggatataatcaaaaaaaataaatggaagaaagttattaaa

SEQ ID NO: 468746 - DNA, 75 bp, synthetic construct
  source 1..75: mol_type = other DNA
atgttgatgttgctaatattgagaatgtagaaaatttccttaacgaagtaaatgaaaaattaggaaccatagatt

SEQ ID NO: 468747 - DNA, 75 bp, synthetic construct
  source 1..75: mol_type = other DNA
atgttgatattgctaatatcaagaatatagaacacttccttaataatgttaatgaaaagttgggatcaatagatt

SEQ ID NO: 468748 - DNA, 75 bp, synthetic construct
  source 1..75: mol_type = other DNA
tcaatgctcagcgatttagttttacttgtgattgtggtgttgtacgctcaatggtacctggtgtacgtgtagcaa

SEQ ID NO: 468749 - DNA, 75 bp, synthetic construct
  source 1..75: mol_type = other DNA
aagatttggcggtacacttccgaaacaatttacaaaattagcaggtaaggctgtaattgagtacacagtagaagc

SEQ ID NO: 468750 - DNA, 75 bp, synthetic construct
  source 1..75: mol_type = other DNA
gcttatcaaaaagcaataaaagaacagagattcacatttacttgtgactgtggtgttgttagatcaatgataccg

SEQ ID NO: 468751 - DNA, 75 bp, synthetic construct
  source 1..75: mol_type = other DNA
gtctgatgcaggattgcgctgctcaggtcgtagaaggcattcgcattcttgcgcatatcctacagccgcgcgaaa

SEQ ID NO: 468752 - DNA, 75 bp, synthetic construct
  source 1..75: mol_type = other DNA
cagggagtcagggattgataaatcagagctggaagcattcttgcgagagatgatcgctggcagacagaagagctg

SEQ ID NO: 468753 - DNA, 75 bp, synthetic construct
  source 1..75: mol_type = other DNA
cagaaagagaacatggcgctggtgttgatcactcatgacctggcgctggtggcagaagcggcacataaaatcatc

SEQ ID NO: 468754 - DNA, 75 bp, synthetic construct
  source 1..75: mol_type = other DNA
tggacgtgaccattcaggcgcaaatcatcgaactgctgctggagctgcagcagaaagagaacatggcgctggtgt

SEQ ID NO: 468755 - DNA, 75 bp, synthetic construct
  source 1..75: mol_type = other DNA
tgtatcttaatcgcgccccgtttggtggcacgttgcaggggattggtgcggcaagctgggcttatcttggaaaat

SEQ ID NO: 468756 - DNA, 75 bp, synthetic construct
  source 1..75: mol_type = other DNA
tctggactggcagaccggacggcacgcccgttgttggtcagtttggctttgccagcgccgtaccattgttgaatc

SEQ ID NO: 468757 - DNA, 75 bp, synthetic construct
  source 1..75: mol_type = other DNA
atgcctcgcttgttaaccaaacgcggctgctggataacgctggcagctgcgccatttctcctttttcttgcagcg

SEQ ID NO: 468758 - DNA, 75 bp, synthetic construct
  source 1..75: mol_type = other DNA
ctggagatattggcggttctataggatctgagctaggtggaaaagtaacagataaagtatctgaggaactcaaga

SEQ ID NO: 468759 - DNA, 75 bp, synthetic construct
  source 1..75: mol_type = other DNA
cctgtagtgataatccttccggtgaagcctgtaagcgggggcaggctgaaaataaagcttatgctgccgcattag

SEQ ID NO: 468760 - DNA, 75 bp, synthetic construct
  source 1..75: mol_type = other DNA
accaacgctataaacggagatgatcctcttactggggcgattacaaatggagcgggggccgggtttggatatggg

SEQ ID NO: 468761 - DNA, 75 bp, synthetic construct
  source 1..75: mol_type = other DNA
gaaaaaagcgggaatagagaaacctgagctggaagcgtttttgcgggatatgatcaacggcaagcaaaaaagctg

SEQ ID NO: 468762 - DNA, 75 bp, synthetic construct
  source 1..75: mol_type = other DNA
gaactgtataagctgctcggcatgagccccggagcggccccgcgcgagacgggcagccagtacactgacatgaat

SEQ ID NO: 468763 - DNA, 75 bp, synthetic construct
  source 1..75: mol_type = other DNA
acatcggtgcttcaattactaataagttagaagctcaatacatcaaaaatcaactgggaatggacgccagtaaat

SEQ ID NO: 468764 - DNA, 75 bp, synthetic construct
  source 1..75: mol_type = other DNA
cctgcatttgatggataaaggcgattatcaattgctggtgatggatgaggtggggcaaatcgcgacagtatattt

SEQ ID NO: 468765 - DNA, 75 bp, synthetic construct
  source 1..75: mol_type = other DNA
aagagttaatcgagcgcattcatcagtttggtgttgccgggctgggtggtgcaggattcccgacaggcgttaaat

SEQ ID NO: 468766 - DNA, 75 bp, synthetic construct
  source 1..75: mol_type = other DNA
atgcggaaccagaacaacaggtcgatccgcgacaaagccgccgtcgaagccgctatcgcccgcgccaaagcgcgc

SEQ ID NO: 468767 - DNA, 75 bp, synthetic construct
  source 1..75: mol_type = other DNA
ggcgaagcaatcgctcgcccgggcaacgtctgggcacggctggggacgccagtgcgtcatttattgaatgatgcc

SEQ ID NO: 468768 - DNA, 75 bp, synthetic construct
  source 1..75: mol_type = other DNA
agctggaacagcaacaacaggctaatgcggaaccagaagaacaggttgatccacgcaaagctgccgtcgaagcgg

SEQ ID NO: 468769 - DNA, 75 bp, synthetic construct
  source 1..75: mol_type = other DNA
tccgcgcaaagccgcgtgctattgcccgcgctcaggccaaaaaagccgcccagcagaaggttgtaaacgaggact

SEQ ID NO: 468770 - DNA, 75 bp, synthetic construct
  source 1..75: mol_type = other DNA
gcccgcgccaaagcacgcaagctggaacagcaacaggctaatgcggagccagaagaacagattgatccgcgcaaa

SEQ ID NO: 468771 - DNA, 75 bp, synthetic construct
  source 1..75: mol_type = other DNA
gttttagcggtatcgaccatatcgaaaaccctgatgaagatggcatttttaaaattgttaacgactataccggag

SEQ ID NO: 468772 - DNA, 75 bp, synthetic construct
  source 1..75: mol_type = other DNA
atgggcgagaatatcgatttccgcaatcatgccgtgacggaagagattaaatactgggcgcgctgggtgatggaa

SEQ ID NO: 468773 - DNA, 75 bp, synthetic construct
  source 1..75: mol_type = other DNA
tgaccagatggacgtgatcgatatcctgaacgatgacggcacactgaagcctatccgcgagtggccaaagatatg

SEQ ID NO: 468774 - DNA, 75 bp, synthetic construct
  source 1..75: mol_type = other DNA
taggcagtggaaatatagatatttttttatctatcccgtcactccccactcgtggcggtaaagtggtcgggacac

SEQ ID NO: 468775 - DNA, 75 bp, synthetic construct
  source 1..75: mol_type = other DNA
aatagttcagtcaaaatatattaaaaatgccgacggttctataaccacaagagaattcggaagattcaaagacgc

SEQ ID NO: 468776 - DNA, 75 bp, synthetic construct
  source 1..75: mol_type = other DNA
gagcgtagtgacagacgaaaacggcgaagcgaccttcttttgcaacggcggcagcgtcagcgtgtgggttatcga

SEQ ID NO: 468777 - DNA, 75 bp, synthetic construct
  source 1..75: mol_type = other DNA
aaaggcagcgagaaaggtaacggtactgagtggactgaaaccacaatagatagcggtaaaaccgtcaccatcaac

SEQ ID NO: 468778 - DNA, 75 bp, synthetic construct
  source 1..75: mol_type = other DNA
taatctgtctgttgtcgcaaccggcaaaaacaggggcgataaccgcggagatattgtgattgcaggaagccagct

SEQ ID NO: 468779 - DNA, 75 bp, synthetic construct
  source 1..75: mol_type = other DNA
atggccaccgcaaccggtgacccgaatgcgacgggagtcagcctgtcgcttaccacccagaaatcgaaatcacaa

SEQ ID NO: 468780 - DNA, 75 bp, synthetic construct
  source 1..75: mol_type = other DNA
caaaagatccaaacaatgctaaaaggatggaagtattagaaaaacaaatccataatattgagcgttctcaagata

SEQ ID NO: 468781 - DNA, 75 bp, synthetic construct
  source 1..75: mol_type = other DNA
tcttgcgaaactgcgtgacacgcaggcttacaggaatgaaatggcgaagtatggcactggtagtgaaattcagcg

SEQ ID NO: 468782 - DNA, 75 bp, synthetic construct
  source 1..75: mol_type = other DNA
gtgattgcctccactgccacaccggataaaaaccacctggataccggaacgctggggttcagtgaccttcacaac

SEQ ID NO: 468783 - DNA, 75 bp, synthetic construct
  source 1..75: mol_type = other DNA
tgctgttgagaataactcactcagtgatggctggaacaatatcctgccatcaggaacacaggattacggacaggc

SEQ ID NO: 468784 - DNA, 75 bp, synthetic construct
  source 1..75: mol_type = other DNA
ggtcccgaaactgtatctgtcgccggaagatatcaccctgcataacggcagcgttatcagcgggaacaacgtgca

SEQ ID NO: 468785 - DNA, 75 bp, synthetic construct
  source 1..75: mol_type = other DNA
ggcacggtgtctgtaaaaggcaacagtctgaagaccacgaccactgcgcagacgcagggcaacagtgtcagcgtg

SEQ ID NO: 468786 - DNA, 75 bp, synthetic construct
  source 1..75: mol_type = other DNA
aacgctcagcaacagtggctccctgctcagtggcggtcccctgaccgtgaatacccgcgactttaaccagagtgg

SEQ ID NO: 468787 - DNA, 75 bp, synthetic construct
  source 1..75: mol_type = other DNA
agcaggcagcaaagtcacctcgaacggtgaaatggcgctcagtgcactgaatttaagcaacagcggacaatggat

SEQ ID NO: 468788 - DNA, 75 bp, synthetic construct
  source 1..75: mol_type = other DNA
tgcgaccattaaaggcactgattcactttcgctggatgcagggaaaaacattgatattaccggggcaacggtctc

SEQ ID NO: 468789 - DNA, 75 bp, synthetic construct
  source 1..75: mol_type = other DNA
aagtctgagacgaaatatcagcacgatatcgtctccggctcaaccctcagcgccggtaacaatgtctccgtcact

SEQ ID NO: 468790 - DNA, 75 bp, synthetic construct
  source 1..75: mol_type = other DNA
atgctggaattaatgataacgatgcagcgaaagccattgctcatgccattctcggcggtgtgactgcggctcttc

SEQ ID NO: 468791 - DNA, 75 bp, synthetic construct
  source 1..75: mol_type = other DNA
ccatcggctccactgccggtaatgtccgtattaccgcgggcaaacaggctcatatcagcggttcggatgtgattg

SEQ ID NO: 468792 - DNA, 75 bp, synthetic construct
  source 1..75: mol_type = other DNA
accaaccaggccagtggtgtgcttctcagccagaacgtatcagcgctttccgcacccgtgctgaccaatgacggc

SEQ ID NO: 468793 - DNA, 75 bp, synthetic construct
  source 1..75: mol_type = other DNA
gcaccggaactggcgcatctgctgaaatcaacagaaaaagacccggcagtaaacgccattgctcacgccattctg

SEQ ID NO: 468794 - DNA, 75 bp, synthetic construct
  source 1..75: mol_type = other DNA
gagcgtcagcagccggagcgatatcgttctcagcaatggaacgcttaacagcgacatggacctcagcctgaccgc

SEQ ID NO: 468795 - DNA, 75 bp, synthetic construct
  source 1..75: mol_type = other DNA
ttgaaggccgcgaaggaagcaaccggcgaaacacttcctgctaatgcaacagagaaacaacgtcaggaatatctt

SEQ ID NO: 468796 - DNA, 75 bp, synthetic construct
  source 1..75: mol_type = other DNA
agacgctgaccgtcacgaccccggactggactgacaccattacccgtctgacgatcggcagtggtacggacctgg

SEQ ID NO: 468797 - DNA, 75 bp, synthetic construct
  source 1..75: mol_type = other DNA
gataccgggaatgataatagctgggataccggtggtggttgtgaaggctcacgggaacagtgtgctgtacgtgat

SEQ ID NO: 468798 - DNA, 75 bp, synthetic construct
  source 1..75: mol_type = other DNA
ggtgaactatgccatggtgcagtttggggtcgatagggcgacggcacaggcatacgttgaaacttatgatggaat

SEQ ID NO: 468799 - DNA, 75 bp, synthetic construct
  source 1..75: mol_type = other DNA
tgagccagaactcgctgacgctgagcgcaggagatgtgaccaacagcggccggattcaggggcggaacatcactc

SEQ ID NO: 468800 - DNA, 75 bp, synthetic construct
  source 1..75: mol_type = other DNA
ctgtagtgataatccttccggtgaagcctgtaagcgggggcaggctgaaaataaagcttatgctgccgcattagc

SEQ ID NO: 468801 - DNA, 75 bp, synthetic construct
  source 1..75: mol_type = other DNA
cgctaatgacagtatcagcccgatatttgacaaggagaaagagcagaggcgtctgcagacagtggggcttatcag

SEQ ID NO: 468802 - DNA, 75 bp, synthetic construct
  source 1..75: mol_type = other DNA
tggttgacccggggcatgaccgtcgtactgtggacgaaaaatttgagcagaagaaaagcgggctgacggttgccc

SEQ ID NO: 468803 - DNA, 75 bp, synthetic construct
  source 1..75: mol_type = other DNA
gatccgcgtcggcgcgttgcaggattccagcctgttttcccgccgtctgggcgcgatgccaatggtggtgtgcgc

SEQ ID NO: 468804 - DNA, 75 bp, synthetic construct
  source 1..75: mol_type = other DNA
cgcgaaaagctatctcacacaatacggcataccggaaaaacccgccgatttaagtagtcattcatggcttgaata

SEQ ID NO: 468805 - DNA, 75 bp, synthetic construct
  source 1..75: mol_type = other DNA
gattgatgttagtttttttgactatgcagcaacaaatatagcaagcgcatttcttataattggaattacatcgat

SEQ ID NO: 468806 - DNA, 75 bp, synthetic construct
  source 1..75: mol_type = other DNA
actatggcacaaaatgttctcgccgggctgacagcaaaaatgctgaaagagtacccaggcctgagcgtgaatctg

SEQ ID NO: 468807 - DNA, 75 bp, synthetic construct
  source 1..75: mol_type = other DNA
cccgccgtctgggcgcgatgccaatggtggtgtgcgccgcgaaaagctatctcacacaatacggcataccggaaa

SEQ ID NO: 468808 - DNA, 75 bp, synthetic construct
  source 1..75: mol_type = other DNA
gttaccggaattcctgcccccgacctgattgccgacggtctggatgtggtgatccgcgtcggcgcgttgcaggat

SEQ ID NO: 468809 - DNA, 75 bp, synthetic construct
  source 1..75: mol_type = other DNA
gaaagcgacatcgtaccgggagagcagaccgccaccagcatactgaaacagcgcacaaaaatcttgcgccgctgc

SEQ ID NO: 468810 - DNA, 75 bp, synthetic construct
  source 1..75: mol_type = other DNA
aaatgaaaggctaaataggaaagttcaatcaaacataactaatacaaattcaataggtgattacaaatattcacc

SEQ ID NO: 468811 - DNA, 75 bp, synthetic construct
  source 1..75: mol_type = other DNA
caacgaagtagagctagatcattatccgatttaataatgatatctaaattcaaagcagaattagaaaggatcatg

SEQ ID NO: 468812 - DNA, 75 bp, synthetic construct
  source 1..75: mol_type = other DNA
gctgtttatcgcgctgccgctgattggtatcgtgatgatgtataaccgtggcaatccctggtttgcgttcggtgt

SEQ ID NO: 468813 - DNA, 75 bp, synthetic construct
  source 1..75: mol_type = other DNA
gactacgagttctcaactgatgaactggccaacgaagttaacatctcacgcgtttcttgtcgcaagtatctgatt

SEQ ID NO: 468814 - DNA, 75 bp, synthetic construct
  source 1..75: mol_type = other DNA
ttactcaacttggtaaaagaatgtatggtgagcaccatatatgtcctaccaaaatctctgaacttttatatttaa

SEQ ID NO: 468815 - DNA, 75 bp, synthetic construct
  source 1..75: mol_type = other DNA
agcagtggtgagggcaacaagtccgggattctcccgcagagcttcaccgcgcaggcggatagcttctgcttcagc

SEQ ID NO: 468816 - DNA, 75 bp, synthetic construct
  source 1..75: mol_type = other DNA
ccataccagtgaaggccaccgcgtgtcggtccactacggctatgacgataaaggccgcctgaccagtgagcgcca

SEQ ID NO: 468817 - DNA, 75 bp, synthetic construct
  source 1..75: mol_type = other DNA
agcaggacaccagtaagtacgacagtaaacagaccagcgtggctgccggcggcagttttacctttggctccatga

SEQ ID NO: 468818 - DNA, 75 bp, synthetic construct
  source 1..75: mol_type = other DNA
tatttattttagtttttatcagtgggtttattctcttcactgtctattcttacactgcagaaaaaatgatatata

SEQ ID NO: 468819 - DNA, 75 bp, synthetic construct
  source 1..75: mol_type = other DNA
tcagagtgccagcaccatcggctccactgccggtaatgtcagtattaccgcgggcaaacaggctcatatcagcgg

SEQ ID NO: 468820 - DNA, 75 bp, synthetic construct
  source 1..75: mol_type = other DNA
acagatacgtcctggcgctttaaggaaacgaagaaatccggtctgacgggtaccggcggtattggtttcaccatt

SEQ ID NO: 468821 - DNA, 75 bp, synthetic construct
  source 1..75: mol_type = other DNA
gggagagctggcagccagagcgattgccggaatgctgtatcctggcgtgaagcagtcagacctcagtgaagagca

SEQ ID NO: 468822 - DNA, 75 bp, synthetic construct
  source 1..75: mol_type = other DNA
ctgccggtggtggttttgacgcatgggccgttccgactgaaaagggagccacccggaaatttctgactggcacaa

SEQ ID NO: 468823 - DNA, 75 bp, synthetic construct
  source 1..75: mol_type = other DNA
ttaccgccctgggcgatgcccgcctgaccgggaaagtgctgggtaaccagggattaatcagcgcgaagacgctgg

SEQ ID NO: 468824 - DNA, 75 bp, synthetic construct
  source 1..75: mol_type = other DNA
gcgttattttttgtcggttatctgatgtatcgatttgcatatgcatatatttacgatgaatgggatgattatcag

SEQ ID NO: 468825 - DNA, 75 bp, synthetic construct
  source 1..75: mol_type = other DNA
ggcacaatgccggaattaatgataacgatgctgcgaaagccattgctcacgctattctgggtggcgcagtggcgg

SEQ ID NO: 468826 - DNA, 75 bp, synthetic construct
  source 1..75: mol_type = other DNA
caacatcactgtccgggccgggcgcgacgttaatctgctggcggaagagtccgtgaccggcagcagttcatactc

SEQ ID NO: 468827 - DNA, 75 bp, synthetic construct
  source 1..75: mol_type = other DNA
gtcactgccgttttttccagtgatatcagtaatacatccacaacctcaaatgcaggacggatcacaaataccctt

SEQ ID NO: 468828 - DNA, 75 bp, synthetic construct
  source 1..75: mol_type = other DNA
cctagtgctgtgggtaatgcgggtggtagtttatcatctgagtttggaagctccattatccagaaaaagaaagat

SEQ ID NO: 468829 - DNA, 75 bp, synthetic construct
  source 1..75: mol_type = other DNA
taacgtaaggatttatgctacatggacaatattacctgatggcacgaaaagactttcaactgttaatacggggac

SEQ ID NO: 468830 - DNA, 75 bp, synthetic construct
  source 1..75: mol_type = other DNA
atggcacagctatatttctactattccgcaatgaatgcgggtaagtctacggcattgttgcaatcttcatacaat

SEQ ID NO: 468831 - DNA, 75 bp, synthetic construct
  source 1..75: mol_type = other DNA
gtctccctcacaagcggacatgataccaccctgtcggggctcaggtcagtggtgagaaagtcacagcggatgtgg

SEQ ID NO: 468832 - DNA, 75 bp, synthetic construct
  source 1..75: mol_type = other DNA
atgacaatcatatttcagttaatcaaggggatatttatagtataggtgctcatggcggagcctcgatcggattat

SEQ ID NO: 468833 - DNA, 75 bp, synthetic construct
  source 1..75: mol_type = other DNA
aataactcactcagtgctggctggaacaatatcctgccatcaggaacacaggattacggacaggccgtagcctcg

SEQ ID NO: 468834 - DNA, 75 bp, synthetic construct
  source 1..75: mol_type = other DNA
cgggcttaccaacagtggcgcgctgctgagccagaactcgctggcgctgagcgcaggagatgtgaccaacagcgg

SEQ ID NO: 468835 - DNA, 75 bp, synthetic construct
  source 1..75: mol_type = other DNA
aagctcacccacagcgggaaaagcagcgccccgtcgctcagcctcagtgcgccggaactgaccagcagcggtgtg

SEQ ID NO: 468836 - DNA, 75 bp, synthetic construct
  source 1..75: mol_type = other DNA
aaaaaagcggaggttttctcagtaagaaaaccacccacaccatcagtgagaacagtgcctcccgtgaagcaggct

SEQ ID NO: 468837 - DNA, 75 bp, synthetic construct
  source 1..75: mol_type = other DNA
atcacctggcgaatatcacccctattcagcttggctttgaaaaagcggtgacctacatccgcaagaaactggcaa

SEQ ID NO: 468838 - DNA, 75 bp, synthetic construct
  source 1..75: mol_type = other DNA
atggcacatccaccacggcttaatgacgacaaaccggttatctggacggtatcggtaacgcgcctgttcgagctg

SEQ ID NO: 468839 - DNA, 75 bp, synthetic construct
  source 1..75: mol_type = other DNA
atacaatgtgtatcgctattacggcaaactggccatgatccccaacgacgggcatctgcagtatggagatgcttc

SEQ ID NO: 468840 - DNA, 75 bp, synthetic construct
  source 1..75: mol_type = other DNA
cttggcgtcaagggcagttcactgctgcaaaatggtacagggcggctgtacagtgcaggcaacctgctgcttgac

SEQ ID NO: 468841 - DNA, 75 bp, synthetic construct
  source 1..75: mol_type = other DNA
gaaaacaataccatcagattttcactggatggccgggaaaaagattacacgcccggtaagacgtattattccgtt

SEQ ID NO: 468842 - DNA, 75 bp, synthetic construct
  source 1..75: mol_type = other DNA
ctgatgctcaggcaaggccaagccaggttgaagcaactcttagtcctaatgtaaaggatagaaatggctatcaac

SEQ ID NO: 468843 - DNA, 75 bp, synthetic construct
  source 1..75: mol_type = other DNA
tgctgataatccggcaggccgcattgcgtcagggcgtaatctttctgctgaggctgaacgactggaaaaccgggc

SEQ ID NO: 468844 - DNA, 75 bp, synthetic construct
  source 1..75: mol_type = other DNA
agggccgtaacggacgctggctgacggcgggcgacctctccctccgggggaaaacactgaataccgcagggacca

SEQ ID NO: 468845 - DNA, 75 bp, synthetic construct
  source 1..75: mol_type = other DNA
actgacaccggtaataccactgtcatgccccgggcaggtggtgcaggtaacacgataacggtgccttcgctgaac

SEQ ID NO: 468846 - DNA, 75 bp, synthetic construct
  source 1..75: mol_type = other DNA
gatggataacgcggccagacaacagaaaggactgggattagagtttggtgtggcgctgacagctgaacagattgc

SEQ ID NO: 468847 - DNA, 75 bp, synthetic construct
  source 1..75: mol_type = other DNA
acggttgccctttccggcacggtgggcagtgccatcaataatgcggtcaccagtgcacaggagacgaaggagagc

SEQ ID NO: 468848 - DNA, 75 bp, synthetic construct
  source 1..75: mol_type = other DNA
acgtcagggcgaccacgctggatggcgatggtctgttgcagggcgccggtgcactggcgcttgcaggcgacaccc

SEQ ID NO: 468849 - DNA, 75 bp, synthetic construct
  source 1..75: mol_type = other DNA
gcaacgctgtcagcgggtatggccggcggcattgccagtggcgatgtggctggcgcggctgctggagctggtgcc

SEQ ID NO: 468850 - DNA, 75 bp, synthetic construct
  source 1..75: mol_type = other DNA
ctgcgtgaaacgccggaatacaaaaaagagcaggaaaaattcggtactggtagtgatatccagcgtggcattcag

SEQ ID NO: 468851 - DNA, 75 bp, synthetic construct
  source 1..75: mol_type = other DNA
aacaacgtcaggaatatcttgcgaaactgcgtgacacgcaggcttacaggaatgaaatggcgaagtatggtaccg

SEQ ID NO: 468852 - DNA, 75 bp, synthetic construct
  source 1..75: mol_type = other DNA
tattactgagatagcgaaagcgtcaggcgtaagctgggaaacagcggccagccgttatgacacggcgatgcagtt

SEQ ID NO: 468853 - DNA, 75 bp, synthetic construct
  source 1..75: mol_type = other DNA
gggcttccctgacgctcggcagtacaacgctcagcaacagtggctccctgctcagtggcggtcccctgaccgtga

SEQ ID NO: 468854 - DNA, 75 bp, synthetic construct
  source 1..75: mol_type = other DNA
ccgcgctgacgcttgccgcccgtatggatatggcatcccctcaacctgcgctgatgaataacggaggttcactgc

SEQ ID NO: 468855 - DNA, 75 bp, synthetic construct
  source 1..75: mol_type = other DNA
tctgtcgccggaagatatcaccctgcataacggcagcgttatcagcgggaacaacgtgcagcttgcgggtggcaa

SEQ ID NO: 468856 - DNA, 75 bp, synthetic construct
  source 1..75: mol_type = other DNA
cggcagtggactggtacaggctgccaccctgctgctggatgtggtgaatactgtcaacggcggacgcgtacttgc

SEQ ID NO: 468857 - DNA, 75 bp, synthetic construct
  source 1..75: mol_type = other DNA
gtgaacagccaggctgccggtattacggctgaaaacagtatggatatccgcgccggacgggatgtgaacatggct

SEQ ID NO: 468858 - DNA, 75 bp, synthetic construct
  source 1..75: mol_type = other DNA
ccacacgtggcgatatcaccatgaatacggcgcatctgctgaattcatgggatgccatttcggccagccatgagg

SEQ ID NO: 468859 - DNA, 75 bp, synthetic construct
  source 1..75: mol_type = other DNA
gctgtttacagaccgtctgcataaccagcatggtgatatcctggccggcaacagtctgtgggtacagaaggacag

SEQ ID NO: 468860 - DNA, 75 bp, synthetic construct
  source 1..75: mol_type = other DNA
taggtaactctgcaagtgctgttggtgatattggtggtggctttgtttctgagttaataaactacggtattaaaa

SEQ ID NO: 468861 - DNA, 75 bp, synthetic construct
  source 1..75: mol_type = other DNA
gtgataatccttccggtgaagcctgtaagcgggggcaggctgaaaataaagcttatgctgccgcattagcgacaa

SEQ ID NO: 468862 - DNA, 75 bp, synthetic construct
  source 1..75: mol_type = other DNA
gttgcttcagagttttcatctggatttattaaagatctcaataaaccgaaaggttcgtcagaggataagaaaaaa

SEQ ID NO: 468863 - DNA, 75 bp, synthetic construct
  source 1..75: mol_type = other DNA
actgagcggcagcgggattgcgatgaatgccagcggcagcctgcaggcaggcggggacgtcagcctgaccagcag

SEQ ID NO: 468864 - DNA, 75 bp, synthetic construct
  source 1..75: mol_type = other DNA
ggagtcagggaacaattaatagctgcgggagtatcaggtgctgctaatgctgctatccaatatggaacaagcaaa

SEQ ID NO: 468865 - DNA, 75 bp, synthetic construct
  source 1..75: mol_type = other DNA
aagctcacccacagcgggaaaagcagcgccccgtcgctcagcctcagtgcgcctgaactgaccagcagcggcgta

SEQ ID NO: 468866 - DNA, 75 bp, synthetic construct
  source 1..75: mol_type = other DNA
tgatgttcttgctgccaccagtacagatacgtcctggcgctttaaggaaacgaagaaatccggtctgacgggtac

SEQ ID NO: 468867 - DNA, 75 bp, synthetic construct
  source 1..75: mol_type = other DNA
gtgaacccgaaactggatggtctcggaaaggtggacagcagtctgtttgccggactttatgacctgctcaggatg

SEQ ID NO: 468868 - DNA, 75 bp, synthetic construct
  source 1..75: mol_type = other DNA
agacacggaacagatgcggtatctgatggataacgcggccagacaacagaaaggactgggattagagtttggtgt

SEQ ID NO: 468869 - DNA, 75 bp, synthetic construct
  source 1..75: mol_type = other DNA
ctatgccacaggctctctggataaactgcccctgctgtcaccggaatttgaaaacaataccatcagattttcact

SEQ ID NO: 468870 - DNA, 75 bp, synthetic construct
  source 1..75: mol_type = other DNA
ggcgcaggtgaccacgacagcactttcagcatgaagacggttcatgattcggtccggcagcagggaacagacatg

SEQ ID NO: 468871 - DNA, 75 bp, synthetic construct
  source 1..75: mol_type = other DNA
gaacaacgtgcagcttgcgggtggcaatattaccaacagcggcggcagcatcaacgcacagaatgacctcctgct

SEQ ID NO: 468872 - DNA, 75 bp, synthetic construct
  source 1..75: mol_type = other DNA
cgcagggacagaatatcaccgtgcaggcggacagatgggcgaacagtggttccgtgctggcaaccggtaacctta

SEQ ID NO: 468873 - DNA, 75 bp, synthetic construct
  source 1..75: mol_type = other DNA
cggataaaaatctggtgctgtcttcatccgggcagattgtacagaacggtggtgaactgactgccgggcagaacg

SEQ ID NO: 468874 - DNA, 75 bp, synthetic construct
  source 1..75: mol_type = other DNA
gttttaacaaaagaatataacgaagcataccgatatcttaattcggccggagttcatttgtctcaggccgtgata

SEQ ID NO: 468875 - DNA, 75 bp, synthetic construct
  source 1..75: mol_type = other DNA
cgtccacggcaacggatgacaaaaacagcctcagtaccggcacgctgggctggtcggatatccataaccaggcag

SEQ ID NO: 468876 - DNA, 75 bp, synthetic construct
  source 1..75: mol_type = other DNA
agctggtgccgggaagaacgttgttgagaataatgcgctgagtctggttgccagaggctgtgcggtcgcagcacc

SEQ ID NO: 468877 - DNA, 75 bp, synthetic construct
  source 1..75: mol_type = other DNA
gcgccgcaaacacacaaaaaacaacgggcaggaacagcagcagtggcggtggcgtgggtgtcagtatcggtgcag

SEQ ID NO: 468878 - DNA, 75 bp, synthetic construct
  source 1..75: mol_type = other DNA
tggaatgctgactgccggtaaaggcaacagtgttttcagcgcacagcgtcttttccttaacgcaccgggttcact

SEQ ID NO: 468879 - DNA, 75 bp, synthetic construct
  source 1..75: mol_type = other DNA
acctgaagtatctgaagttgtccatcaatatggccaatctccagttcgacactgttcaacctgctgaaactcggc

SEQ ID NO: 468880 - DNA, 75 bp, synthetic construct
  source 1..75: mol_type = other DNA
gcatgttgataacattgccactctgggtattgactgggtgtgactatattgagaaagcgaatctgatcgacgatc

SEQ ID NO: 468881 - DNA, 75 bp, synthetic construct
  source 1..75: mol_type = other DNA
tattaagcgttcccgtatcaaatattggctttcatgcgacatgggggaatgagaaacccaccgatgccaaagctc

SEQ ID NO: 468882 - DNA, 75 bp, synthetic construct
  source 1..75: mol_type = other DNA
tgacaagttacctatctaaaacaaaaaagaatacagatctctaccgtctgtataaccctcacttttcaatattct

SEQ ID NO: 468883 - DNA, 75 bp, synthetic construct
  source 1..75: mol_type = other DNA
ttcttaaagaggagaatcacgatactttctatcagtcattttcttttcgtggctgcaatatcatttacacaaaca

SEQ ID NO: 468884 - DNA, 75 bp, synthetic construct
  source 1..75: mol_type = other DNA
atggttttctttttcacggatctatgacgagatcattaagataaaagaatatgaatacaacaataatacctggca

SEQ ID NO: 468885 - DNA, 75 bp, synthetic construct
  source 1..75: mol_type = other DNA
caccgcgatgaacgtacacgcagtatgctgagtcagatggcgggatttccagcccataaggcgctgagtgcattt

SEQ ID NO: 468886 - DNA, 75 bp, synthetic construct
  source 1..75: mol_type = other DNA
acgcagtgacctggagcgtgagctgaacacctggattcgccagtatgtggccgaccaggagaatccgcctgccga

SEQ ID NO: 468887 - DNA, 75 bp, synthetic construct
  source 1..75: mol_type = other DNA
ccaaaacgctcgctggcgtggtgaaggcagttaaagacaaacaggacgaatttgtctttacagaatttaacccgg

SEQ ID NO: 468888 - DNA, 75 bp, synthetic construct
  source 1..75: mol_type = other DNA
atgaacctaaagaaaacactgttaagcgtgttaataatagtgcctctctgcttattggcagggtgtgactatatt

SEQ ID NO: 468889 - DNA, 75 bp, synthetic construct
  source 1..75: mol_type = other DNA
tttataaaaagcaccgccagggcaaatatgatgtttttacatgaacagtctggtggtgtgcatacattaaaactc

SEQ ID NO: 468890 - DNA, 75 bp, synthetic construct
  source 1..75: mol_type = other DNA
aactacagacgaacaccttacgacagacctgtatacgtaacaatgacaggcgcaacgggaaaccaaatatataat

SEQ ID NO: 468891 - DNA, 75 bp, synthetic construct
  source 1..75: mol_type = other DNA
gcctgccagtttgtgattcaggcctgccagcgccatcttgatgacctgatggaggaaaaaagtaagtcgtttcgt

SEQ ID NO: 468892 - DNA, 75 bp, synthetic construct
  source 1..75: mol_type = other DNA
ggtgatatctcctggtattgattacatggaagacggtcttccagatccggtaaaagcaatggggaggatcctggt

SEQ ID NO: 468893 - DNA, 75 bp, synthetic construct
  source 1..75: mol_type = other DNA
cacgcaccacaaaaaaggggatgccggtaaaaaatcggcaaaaggtgacgcggcgaaaaaagcggctaaccgttt

SEQ ID NO: 468894 - DNA, 75 bp, synthetic construct
  source 1..75: mol_type = other DNA
gataccgggaaaaaatcggcaaaaggtgatgccgcgaaaaaagcggctaaccgttttgcggtgccaccgcccccc

SEQ ID NO: 468895 - DNA, 75 bp, synthetic construct
  source 1..75: mol_type = other DNA
ggcattattccgccgcgtcagcgaagcgcgcaccgtgcagttggcagaaaaaaacatcactctacatgttacgcc

SEQ ID NO: 468896 - DNA, 75 bp, synthetic construct
  source 1..75: mol_type = other DNA
caataaaattgttctacttgaaaaacaacaagcacagctaaagagtcaactggaaactattcaaaaacaacaaac

SEQ ID NO: 468897 - DNA, 75 bp, synthetic construct
  source 1..75: mol_type = other DNA
acgcaccataaaaaaggggataccgggaaaaaatcggcaaaaggtgatgccgcgaaaaaagcggctaaccgtttt

SEQ ID NO: 468898 - DNA, 75 bp, synthetic construct
  source 1..75: mol_type = other DNA
gacctgaaccccgtcaccatcattcagaactacaccaacatgtccgacccgatgaaagagctggaagcggcaatt

SEQ ID NO: 468899 - DNA, 75 bp, synthetic construct
  source 1..75: mol_type = other DNA
agattgacggtaaaacgcattactacagtgtggctccgcgcttctgggtaccgtatgacacggtgtacagcgtcg

SEQ ID NO: 468900 - DNA, 75 bp, synthetic construct
  source 1..75: mol_type = other DNA
ctgaagtggttgacacccgcttgcaggtactggaagtcagcgggcaagaaatcttaacgaaagataaggtcaatc

SEQ ID NO: 468901 - DNA, 75 bp, synthetic construct
  source 1..75: mol_type = other DNA
cttctgaatgtctggcttattggctctgatattgaaaatgagctgcgagagtcgatcagacaaacgtcatcaggt

SEQ ID NO: 468902 - DNA, 75 bp, synthetic construct
  source 1..75: mol_type = other DNA
accgtccggaggatggcgcgcggtttgaaccgctgatcggtaaccccggtgatggttcatcaccccactgcgccg

SEQ ID NO: 468903 - DNA, 75 bp, synthetic construct
  source 1..75: mol_type = other DNA
gccagcgccatcttgatgacctgatggcggaaaaaagtaagtcgtttcggtaccgcttcgacaaggacctggctg

SEQ ID NO: 468904 - DNA, 75 bp, synthetic construct
  source 1..75: mol_type = other DNA
acaaacaggacgaatttgtctttacagaatttaacccggcacaaacccaatacttcattttaaataacggctctg

SEQ ID NO: 468905 - DNA, 75 bp, synthetic construct
  source 1..75: mol_type = other DNA
gtggaaaaacctggctggcgcagcaactgcaaaaaagataaacatcgccgtgtgattactttaagcctcgttgtt

SEQ ID NO: 468906 - DNA, 75 bp, synthetic construct
  source 1..75: mol_type = other DNA
ctgaagcgggttatgtggatacaccccgcagacgtaacctgcaggcagtttaccttttaccggaaactcaggcag

SEQ ID NO: 468907 - DNA, 75 bp, synthetic construct
  source 1..75: mol_type = other DNA
ctcgtatctggtctgatattacatggcattctgaccggtgaggcggctagttttgcggacattggcgagcaggtc

SEQ ID NO: 468908 - DNA, 75 bp, synthetic construct
  source 1..75: mol_type = other DNA
tttcctggttgcgtgagaaacgtcagacctggcgtctgtgctatttgttgggtgaggctggaagtggaaaaacct

SEQ ID NO: 468909 - DNA, 75 bp, synthetic construct
  source 1..75: mol_type = other DNA
atggtttgagtcggtatggacgggtgattatcttctgttgtggaaaatgtcgccggaaggggagagtaccattac

SEQ ID NO: 468910 - DNA, 75 bp, synthetic construct
  source 1..75: mol_type = other DNA
cactgcaaaacaatggcgaatgatttaccgcgtattgggtgataaccgcccccggaaaatgcagcttgccgtggt

SEQ ID NO: 468911 - DNA, 75 bp, synthetic construct
  source 1..75: mol_type = other DNA
ggctcgttttgatttacgtgatgagctgcatcatcaggtggagaaaaccctggcgcagggtgcgcgtttgttact

SEQ ID NO: 468912 - DNA, 75 bp, synthetic construct
  source 1..75: mol_type = other DNA
gacgaaacacgagccagacagatggcagcacgtctggaatgcggtggcgtgtttatcaatggtttttgcgccagc

SEQ ID NO: 468913 - DNA, 75 bp, synthetic construct
  source 1..75: mol_type = other DNA
agcggctattggcgcacaggccggcgcagcgctaaaaaaatgcgtactggaactgggtggttcggatccgtttat

SEQ ID NO: 468914 - DNA, 75 bp, synthetic construct
  source 1..75: mol_type = other DNA
ttttgcagggtatcttgaggacaactttcagttagcaaatgatgtgttagtttctcgtaatggtatcgcttatct

SEQ ID NO: 468915 - DNA, 75 bp, synthetic construct
  source 1..75: mol_type = other DNA
tcatttgggagagttaaataaaagtgcatgtgaattatatgctgatgtaattagtaagcattgtgagtttaatgt

SEQ ID NO: 468916 - DNA, 75 bp, synthetic construct
  source 1..75: mol_type = other DNA
ttttttgataagtacccctttactggtatatatataataccaaaatggaatcattggtatgaaacagaaaatttt

SEQ ID NO: 468917 - DNA, 75 bp, synthetic construct
  source 1..75: mol_type = other DNA
ggcgaaacaattcgcttattacagcaagccgagcagaccagcgttttcactgcaaaacaatggcgaatgatttac

SEQ ID NO: 468918 - DNA, 75 bp, synthetic construct
  source 1..75: mol_type = other DNA
gagcgcatggggcgtcaaatggatttgattctccatgccccggagtttcaggagctggaatcgttcctgcgttca

SEQ ID NO: 468919 - DNA, 75 bp, synthetic construct
  source 1..75: mol_type = other DNA
caccctgacagccgcgatgctggatcggctgctgcaccatgcccatatcctgaccctgagcggcgaaagctaccg

SEQ ID NO: 468920 - DNA, 75 bp, synthetic construct
  source 1..75: mol_type = other DNA
acttattaagtgttcctgtatcaaatatgggtttctacgcaacatggggggagaaaaacccaccgacatcaacgc

SEQ ID NO: 468921 - DNA, 75 bp, synthetic construct
  source 1..75: mol_type = other DNA
gcggactcatcgtttcactgcttagctcgttaacaggttgcgactatattgaaaaaatcaaaatcattgatgagc

SEQ ID NO: 468922 - DNA, 75 bp, synthetic construct
  source 1..75: mol_type = other DNA
atctgttgaagcaatagaaaatggcagtgttattcatatgtcattggccaatttattaagtgttcccgtatcaaa

SEQ ID NO: 468923 - DNA, 75 bp, synthetic construct
  source 1..75: mol_type = other DNA
tttcaaaccgaacttctttggaatgtactgtaaatgcagcgctggatcgtcgtatcggtctgcgtgtcgggttcc

SEQ ID NO: 468924 - DNA, 75 bp, synthetic construct
  source 1..75: mol_type = other DNA
ttagcgaagttcttcaatacgtcaatagattacattctttatggtgctgagtttgaaggcaaactcgtcacaaac

SEQ ID NO: 468925 - DNA, 75 bp, synthetic construct
  source 1..75: mol_type = other DNA
catggaaaaatagtcattgctcgacttgatggaacgaacgaagctacagtaaaaaaattagtcatcgatggtcct

SEQ ID NO: 468926 - DNA, 75 bp, synthetic construct
  source 1..75: mol_type = other DNA
ttgttcatgcttacattaatagcaattagctatatgtcatatatactcattgaaaaaccatcgcaacaattcatc

SEQ ID NO: 468927 - DNA, 75 bp, synthetic construct
  source 1..75: mol_type = other DNA
ccataatgatcggcgcattctctttctttattggtggtctgacttataaaattacgattgcggccataaaaaata

SEQ ID NO: 468928 - DNA, 75 bp, synthetic construct
  source 1..75: mol_type = other DNA
tttttacagacccaatgtattcattttgttcatgcttacattaatagcaattagctatatgtcatatatactcat

SEQ ID NO: 468929 - DNA, 75 bp, synthetic construct
  source 1..75: mol_type = other DNA
ggatttagcgccaacgctgaaggtcaggcgttgaacaatgctgccgtcgcacagaatgcacgggtgcggatggta

SEQ ID NO: 468930 - DNA, 75 bp, synthetic construct
  source 1..75: mol_type = other DNA
aaaagcgggacaacgcgtcaacgtgatcgccagcggtgatgggtttagcgccaacgcagaaggtcaggcgctgaa

SEQ ID NO: 468931 - DNA, 75 bp, synthetic construct
  source 1..75: mol_type = other DNA
tatttaatagtgcggagtaagttaaagacacgggagctattaagggtttacgatacagaaaaagtagatttcaga

SEQ ID NO: 468932 - DNA, 75 bp, synthetic construct
  source 1..75: mol_type = other DNA
ataacgtctgcgggaaatgcctttgctaacaaaggatggtttgttacatattttaaatacaatgatttttctttt

SEQ ID NO: 468933 - DNA, 75 bp, synthetic construct
  source 1..75: mol_type = other DNA
gtacagctaaccatgctgcgccaggcctggcgagtcaaagccggtcaacgcgtcaatgtgattgccagcggggag

SEQ ID NO: 468934 - DNA, 75 bp, synthetic construct
  source 1..75: mol_type = other DNA
cgatactgttcagcccgctgagtacggctggcgatttcacatcacaattgaaaaccttttttgtggtacaactgg

SEQ ID NO: 468935 - DNA, 75 bp, synthetic construct
  source 1..75: mol_type = other DNA
gtattcgatagaccatataatactcgtgttagtacaatgcctgttttaaccttagatgctaaatatttaatagta

SEQ ID NO: 468936 - DNA, 75 bp, synthetic construct
  source 1..75: mol_type = other DNA
gtagagaatgaagacggatctcacgtccctgtttctcagccaattgttatcaatgctgccggatatcctgtgtac

SEQ ID NO: 468937 - DNA, 75 bp, synthetic construct
  source 1..75: mol_type = other DNA
tcagggggattccagtacaggtggtgcgcaattagccataaatggccttaacggttcgtgtgctttggtgttaaa

SEQ ID NO: 468938 - DNA, 75 bp, synthetic construct
  source 1..75: mol_type = other DNA
caatcagattacagctcattcctttcagaaaccaacagattttattggtcaccaggggttgacttatgattgtaa

SEQ ID NO: 468939 - DNA, 75 bp, synthetic construct
  source 1..75: mol_type = other DNA
tggttattatgtatgctttgggtgatcataaaaaacgatttgctcagttatattatgttcctttagatagaatta

SEQ ID NO: 468940 - DNA, 75 bp, synthetic construct
  source 1..75: mol_type = other DNA
agttaactttcgaatcgagagtgatatttcatcagaacaaaatacagaatggtttatcgatgcaggtttaaccaa

SEQ ID NO: 468941 - DNA, 75 bp, synthetic construct
  source 1..75: mol_type = other DNA
gaaaatgatgcttacaatcagtgcgtcgccgtcatttcaaaaaattttggtgattccattctagctaaacaagca

SEQ ID NO: 468942 - DNA, 75 bp, synthetic construct
  source 1..75: mol_type = other DNA
cgcgtattgatgaaaccatcgcccaggtcactggctcggcccatgttggtaacctgtatgttaaccgtaatatgg

SEQ ID NO: 468943 - DNA, 75 bp, synthetic construct
  source 1..75: mol_type = other DNA
aacagtacaaaaaggtgaaatgagtaatggcttcattgttgcagatgtcatatacaatgatttagatagcaaaag

SEQ ID NO: 468944 - DNA, 75 bp, synthetic construct
  source 1..75: mol_type = other DNA
actggtggagtagtgaaggcataccagattcgcccggatcttccgaagttgtttccacacactgaaaagaacgca

SEQ ID NO: 468945 - DNA, 75 bp, synthetic construct
  source 1..75: mol_type = other DNA
ttatagtgattggactcaggctattagagaaatatctataggtggatcccatgggatatcaccttctgtagcact

SEQ ID NO: 468946 - DNA, 75 bp, synthetic construct
  source 1..75: mol_type = other DNA
ttctggaacggctgtatatcgagcgttcgctgagtgtgaataccgctgccgctggcggtaacgccagtttaatga

SEQ ID NO: 468947 - DNA, 75 bp, synthetic construct
  source 1..75: mol_type = other DNA
cagcgaacgtattcaactggcgaaagcggaaaatataaccgctcaaccgtttgatgcggtgatcttccacggtga

SEQ ID NO: 468948 - DNA, 75 bp, synthetic construct
  source 1..75: mol_type = other DNA
gtataaagaaccttcgtttacgtacgtttatcggaattaaggaagaagaaattaacaaccgtcaggatattgtta

SEQ ID NO: 468949 - DNA, 75 bp, synthetic construct
  source 1..75: mol_type = other DNA
cggagaaccgattgctgataaacgctggactcacgagcaaaaagagcgtctctgccaaagccgctggaatatcac

SEQ ID NO: 468950 - DNA, 75 bp, synthetic construct
  source 1..75: mol_type = other DNA
actttacagcaaccaacctaaatccgcttactctgagcttaagcgagaatccggttatgagattctaaaaaaatt

SEQ ID NO: 468951 - DNA, 75 bp, synthetic construct
  source 1..75: mol_type = other DNA
aaaaagctggaagaagcgggttttgcgtttcgctggtacgatttagaagaggcgctggcggatgttgttcgctga

SEQ ID NO: 468952 - DNA, 75 bp, synthetic construct
  source 1..75: mol_type = other DNA
tttgccaaagccgctggagtatcacacaaaaactggtggagttaattaacgccagcgatacgccgccgtcggtgt

SEQ ID NO: 468953 - DNA, 75 bp, synthetic construct
  source 1..75: mol_type = other DNA
aaaatgctgccgccgtttcgtcttggcctgggcgggccgattggctccggtcggcagtatctggcctggattcat

SEQ ID NO: 468954 - DNA, 75 bp, synthetic construct
  source 1..75: mol_type = other DNA
tactcagggggattccagtacaggtggtgcgcaattagccataaatggccttaacggttcgtgcgctttggtatt

SEQ ID NO: 468955 - DNA, 75 bp, synthetic construct
  source 1..75: mol_type = other DNA
ccgtcaaggagcaggcggaaaacaaaatcgatggtgcggttgcactgattatggcgatcggtcgggcaatgctca

SEQ ID NO: 468956 - DNA, 75 bp, synthetic construct
  source 1..75: mol_type = other DNA
ccgggcgagcgagatatttcattatttgctaatcagggtgtggccacattatacgatgcgggatactggtcgtta

SEQ ID NO: 468957 - DNA, 75 bp, synthetic construct
  source 1..75: mol_type = other DNA
gatgccggtaaaaaatcggcaaaaggtgacgcggcgaaaaaagcggctaaccgttttgcggtgccaccaccaccc

SEQ ID NO: 468958 - DNA, 75 bp, synthetic construct
  source 1..75: mol_type = other DNA
atatttatcgatacatcatccgtggaagtatttattaacgacggggaagcggtgatgagtagtcgaatctatccg

SEQ ID NO: 468959 - DNA, 75 bp, synthetic construct
  source 1..75: mol_type = other DNA
ggaccgacccgcaggtgctggaaaaagccaatccgaatattggcgtgtcggtttatcgcgaatttttgttaagtc

SEQ ID NO: 468960 - DNA, 75 bp, synthetic construct
  source 1..75: mol_type = other DNA
gatgaaagagctggaagcagcgattgaatcgggacgttttcatcatgacggcaatcccatcatgacctggtgtat

SEQ ID NO: 468961 - DNA, 75 bp, synthetic construct
  source 1..75: mol_type = other DNA
gtacttattcgggttaataccgatgctggaataagtggtgttggcgaagtaggattagcctatggtgcaggtgca

SEQ ID NO: 468962 - DNA, 75 bp, synthetic construct
  source 1..75: mol_type = other DNA
tcggcggctccatcatgctggcggttcctcccgccgtgctgaaaacgctggagctgtcgacggacagcgaagtag

SEQ ID NO: 468963 - DNA, 75 bp, synthetic construct
  source 1..75: mol_type = other DNA
ccggcgttactggatcaggcgctggggaatttactggataacgccatcgattttacccccgagagcggtcgtata

SEQ ID NO: 468964 - DNA, 75 bp, synthetic construct
  source 1..75: mol_type = other DNA
aagacggtcttccagatccggtaaaagcaatggggaggatccttgtggaaaacctgataattgatccgaaactgg

SEQ ID NO: 468965 - DNA, 75 bp, synthetic construct
  source 1..75: mol_type = other DNA
atatctcatggtattgaatatatggaggatggtcttcccgatccggtgaaagccatggggcggatcctggtggaa

SEQ ID NO: 468966 - DNA, 75 bp, synthetic construct
  source 1..75: mol_type = other DNA
gatcaccttctgacacatgctcaggatgctgaatacgttgccgatatcattatatcgtggagcgaatgttaccta

SEQ ID NO: 468967 - DNA, 75 bp, synthetic construct
  source 1..75: mol_type = other DNA
gtcaggggtatggactttgtctatgatgccttatttgacgggtgccggttgcgcctgctgacagtcattgacctc

SEQ ID NO: 468968 - DNA, 75 bp, synthetic construct
  source 1..75: mol_type = other DNA
atgacctatatgcagcggggaaattatgtggcggttatcaaccctctcttctggagtgaagtgatgtctgatgac

SEQ ID NO: 468969 - DNA, 75 bp, synthetic construct
  source 1..75: mol_type = other DNA
cgatcgctatgtttctattaacctgtcagcctccgattttcatacgtcacggttgatagcgcgaaccaatcagaa

SEQ ID NO: 468970 - DNA, 75 bp, synthetic construct
  source 1..75: mol_type = other DNA
tggttcttcgcgaaggcgatgccgccgcaggtgtttatgcaatggatggggtcattacccgcgcgggagttaacg

SEQ ID NO: 468971 - DNA, 75 bp, synthetic construct
  source 1..75: mol_type = other DNA
atgattgataagacttgttttgtaagtcagcaggaaatcgcagaacatttcaaggtaaacagaaccactattcgc

SEQ ID NO: 468972 - DNA, 75 bp, synthetic construct
  source 1..75: mol_type = other DNA
aacaggattatgagggcgcactgcgtgcggtcgaaccgatgttcgataacgaaccagaaatgaacaccccggaaa

SEQ ID NO: 468973 - DNA, 75 bp, synthetic construct
  source 1..75: mol_type = other DNA
gataacctttttttatgttcaacattaatagttcccgttaacggctacaggatggcgtcagcaaactataagcgt

SEQ ID NO: 468974 - DNA, 75 bp, synthetic construct
  source 1..75: mol_type = other DNA
tcttatttttgcgttgcccgccggtattttggggagtcttgttctgctattactctggctacgtattcgacaaaa

SEQ ID NO: 468975 - DNA, 75 bp, synthetic construct
  source 1..75: mol_type = other DNA
accagaagcgtccccattctgtgctgggctggatgacgccatctgaattcgccgagaaatctgccggttgccaga

SEQ ID NO: 468976 - DNA, 75 bp, synthetic construct
  source 1..75: mol_type = other DNA
gccaacggacaatgccagagtggcgtcgttcaacggcaggctgcgacaggaatgcctgaacgagaactggttcat

SEQ ID NO: 468977 - DNA, 75 bp, synthetic construct
  source 1..75: mol_type = other DNA
attcgtggctatctttatattaatgaattgatctatgcccgtgataaccattttttatgctcatcgctgatagcg

SEQ ID NO: 468978 - DNA, 75 bp, synthetic construct
  source 1..75: mol_type = other DNA
gatgtcgccaaaatgacgccgattattctggctttccgtcaggctggttacgaagtggcgatcgatgactttggt

SEQ ID NO: 468979 - DNA, 75 bp, synthetic construct
  source 1..75: mol_type = other DNA
ttgggaagaaatgacctgcttattcgcaccttccctaacgtttctatctattattaccgcgatacgccttttttc

SEQ ID NO: 468980 - DNA, 75 bp, synthetic construct
  source 1..75: mol_type = other DNA
cctcaggcgtttaagcaggtcttatctaatttactgagcaatgctctcaaatttaccaccgagggggcagtaaaa

SEQ ID NO: 468981 - DNA, 75 bp, synthetic construct
  source 1..75: mol_type = other DNA
acccgctgcgtttcaagcactagaagctggcgataacagaactttccatcagtgtattcatcgcatccacggtgc

SEQ ID NO: 468982 - DNA, 75 bp, synthetic construct
  source 1..75: mol_type = other DNA
ttattggtagtaacatcattaccagcagtatgatttcccgctatttcactcactccttaaatgtagtgaaatatt

SEQ ID NO: 468983 - DNA, 75 bp, synthetic construct
  source 1..75: mol_type = other DNA
agtgtattcatcgcatccacggtgcggctaacatcctgaatttgcaaaagttgattaatcttagccaccagttag

SEQ ID NO: 468984 - DNA, 75 bp, synthetic construct
  source 1..75: mol_type = other DNA
cattaagttgcagcagtacatttcctgatcattacctggttaagatcgaccctcaggcgtttaagcaggtcttat

SEQ ID NO: 468985 - DNA, 75 bp, synthetic construct
  source 1..75: mol_type = other DNA
tatattgttacgacattatccgttttattagttggcagtagccttttatggggattctacctgttacgctcagtt

SEQ ID NO: 468986 - DNA, 75 bp, synthetic construct
  source 1..75: mol_type = other DNA
tttcattatttctcccgatgctcaaggaggaggcattaaatcttcatgcacataaaaaagtttcttcattactcg

SEQ ID NO: 468987 - DNA, 75 bp, synthetic construct
  source 1..75: mol_type = other DNA
tcagatttttacttcggcaatggctttaccgcgacacttgatttcctacttaaaccaaaaacgctacgtgacacg

SEQ ID NO: 468988 - DNA, 75 bp, synthetic construct
  source 1..75: mol_type = other DNA
gcctgttaccgcctgccgaactggatcgggatttggaacgtaagatctatgcgttcactgactacctgaaagaca

SEQ ID NO: 468989 - DNA, 75 bp, synthetic construct
  source 1..75: mol_type = other DNA
ttgaagagattgaacgcattctaaggggcgtacaggacgttacagagaacgtatcagtaccgaagactaagaaac

SEQ ID NO: 468990 - DNA, 75 bp, synthetic construct
  source 1..75: mol_type = other DNA
aaaagcacggcaatgagagcaatcgaggctctttgcaaaaaaggtttgttactaaaacagcctcgatatttaatc

SEQ ID NO: 468991 - DNA, 75 bp, synthetic construct
  source 1..75: mol_type = other DNA
caaccgaacatgcgaacacgagtttgtacggttatcaataataatatcgcccatgagtggacactagcccgaatc

SEQ ID NO: 468992 - DNA, 75 bp, synthetic construct
  source 1..75: mol_type = other DNA
ccaagcgaagttctgcgcctgacggaaaaatggattaaaatgcccaatgtgaccattgacacatgggacctctat

SEQ ID NO: 468993 - DNA, 75 bp, synthetic construct
  source 1..75: mol_type = other DNA
acttcaacgctgtcgctggctttcagctgatgtcattatggtgctggttggcctgatttgcggcatcacgctatt

SEQ ID NO: 468994 - DNA, 75 bp, synthetic construct
  source 1..75: mol_type = other DNA
cgcgtgagagtggtttttataccttgcttgagtttattggcaaccctattactgccatgtttatcgccgtatttg

SEQ ID NO: 468995 - DNA, 75 bp, synthetic construct
  source 1..75: mol_type = other DNA
gtgggcgtcgtgctattgattcctctggctttttcaattgccaaaaaaaccaatacctcattgttaaagctggcc

SEQ ID NO: 468996 - DNA, 75 bp, synthetic construct
  source 1..75: mol_type = other DNA
gcggtacttcggcgatcgtttctgttggcaccactggcgagtccgctaccttaaatcatgacgaacatgctgatg

SEQ ID NO: 468997 - DNA, 75 bp, synthetic construct
  source 1..75: mol_type = other DNA
ctggcgaaagtaaaaaatattatcggaatcaaagaggcaacagggaacttaacgcgtgtaaaccagatcaaagag

SEQ ID NO: 468998 - DNA, 75 bp, synthetic construct
  source 1..75: mol_type = other DNA
gagtctcataacagtcctggctcgctcaactactgcgctgaaaaagacaagttcaacatgcaactgcagttagca

SEQ ID NO: 468999 - DNA, 75 bp, synthetic construct
  source 1..75: mol_type = other DNA
gagcaacattattctttacccgtctgggggcttacggccaacgcacaggctaatgaacgcgacaaagggttaagt

SEQ ID NO: 469000 - DNA, 75 bp, synthetic construct
  source 1..75: mol_type = other DNA
cattaaattgcagcagtacgcttcctgaacgctacctggttaaaatcgaccctcaagcatttaagcaggtgctgt

SEQ ID NO: 469001 - DNA, 75 bp, synthetic construct
  source 1..75: mol_type = other DNA
tcagggtgatttagaaaaccaaatatcattccggaaagcactctcggattccttaccgaatccaacttatgttgt

SEQ ID NO: 469002 - DNA, 75 bp, synthetic construct
  source 1..75: mol_type = other DNA
cgtttatatctcccttaccgattccttcgtggttgatgccagtagcgccatcaataaaagaagagatgacacagg

SEQ ID NO: 469003 - DNA, 75 bp, synthetic construct
  source 1..75: mol_type = other DNA
gggcgggtgattatctcctgctattgaaaatgtctccggaaggtgaaagcacaattacgcgcgacagtagcgagg

SEQ ID NO: 469004 - DNA, 75 bp, synthetic construct
  source 1..75: mol_type = other DNA
ttctctcttgttgtctttggtcgactataagtttcgcagacgaagattacattgaatatcgtggcatcagtagta

SEQ ID NO: 469005 - DNA, 75 bp, synthetic construct
  source 1..75: mol_type = other DNA
ccggagcaccagtcaacagagtatggggatattgttgtaaagcaaagcgctgtgttaaaaacaggcaaagatgaa

SEQ ID NO: 469006 - DNA, 75 bp, synthetic construct
  source 1..75: mol_type = other DNA
tcggatttggatcgcatgaagatccggtcggttccaccatcgaggcgatcagagaagagaaagcgatcgccgctg

SEQ ID NO: 469007 - DNA, 75 bp, synthetic construct
  source 1..75: mol_type = other DNA
cattctcgcctatgtgctgggtaccgatcttgatacgccatcattagaacaacaaagccagatgctgcttgatgc

SEQ ID NO: 469008 - DNA, 75 bp, synthetic construct
  source 1..75: mol_type = other DNA
gttttccgataacgtctcagttgaagatgaactggcgctcaaacagttggcccacgaaaaagggctgctgatgat

SEQ ID NO: 469009 - DNA, 75 bp, synthetic construct
  source 1..75: mol_type = other DNA
atgaaaaaaatcatattgtttacaatcatatcaagtatcgtttctctggctgggtgcaaagaagaagccaaaacc

SEQ ID NO: 469010 - DNA, 75 bp, synthetic construct
  source 1..75: mol_type = other DNA
atgtcagaaaacaggggatgcatcagagaattgtaaaaacgccaatgaagctcactggcaaatacagcagctaaa

SEQ ID NO: 469011 - DNA, 75 bp, synthetic construct
  source 1..75: mol_type = other DNA
atttcggtcaacggtctgtttgccgctcgcgaagcgcgtcaggcgctgcaaaacgatctcaacgtgatgctgttt

SEQ ID NO: 469012 - DNA, 75 bp, synthetic construct
  source 1..75: mol_type = other DNA
cgaagaggcgcgcgatccagaagtggcggtgatcgtgatggattttgtgctcggatttggatcgcatgaagatcc

SEQ ID NO: 469013 - DNA, 75 bp, synthetic construct
  source 1..75: mol_type = other DNA
ccggagtgattctggcgagcagcagcaccaataccggattgctggcgcgtgaatttatctgcaaaggggaggaag

SEQ ID NO: 469014 - DNA, 75 bp, synthetic construct
  source 1..75: mol_type = other DNA
ctatattttatacaacacattctgttatcgaaaagggggatgctgtgcacaagaaactgctggatgcgctgcctt

SEQ ID NO: 469015 - DNA, 75 bp, synthetic construct
  source 1..75: mol_type = other DNA
tacagcaacattcagcccgatcctgaattccgcctgcaagatatcaaccgcagcatcaaacacaccttcctcgac

SEQ ID NO: 469016 - DNA, 75 bp, synthetic construct
  source 1..75: mol_type = other DNA
gaattccgcctgaaagatatcaaccgcagcgtcaaacataccttcctcgactttggcgatgacgattttaccaac

SEQ ID NO: 469017 - DNA, 75 bp, synthetic construct
  source 1..75: mol_type = other DNA
ccgcgcctgcggtggcccgcaaagtgctggaacgcgcacgcgcctgccgcaagccggtggtggtctgcttcctcg

SEQ ID NO: 469018 - DNA, 75 bp, synthetic construct
  source 1..75: mol_type = other DNA
gatgtttattccatggcctgattataaagatggtcaaagcaaagatttgaccaaagggattgataggctgcagga

SEQ ID NO: 469019 - DNA, 75 bp, synthetic construct
  source 1..75: mol_type = other DNA
gacctcttgtgcgctaacggtccagagtggaaccgcttcgttacgctggaaatgaaatatggccggatcatgctg

SEQ ID NO: 469020 - DNA, 75 bp, synthetic construct
  source 1..75: mol_type = other DNA
tttctctggataatcagataaaatcagcaactcaaaaacataacgaatttctaaaagagttaggtttacctcttt

SEQ ID NO: 469021 - DNA, 75 bp, synthetic construct
  source 1..75: mol_type = other DNA
gtttgcagctggctcaggtaaaaaagccggtgagttctacacacctcaacatatttcagatatcttatctgccat

SEQ ID NO: 469022 - DNA, 75 bp, synthetic construct
  source 1..75: mol_type = other DNA
aaatggagataatcaacttgtttaccttgtgaacaaagaacagtatgagaaaatatcagacgcgcaatcagagag

SEQ ID NO: 469023 - DNA, 75 bp, synthetic construct
  source 1..75: mol_type = other DNA
cgcagttcagtgcttactgtatgctgccaccggtgcccgggtttgtctgcgtttattggcagataatgaagcctt

SEQ ID NO: 469024 - DNA, 75 bp, synthetic construct
  source 1..75: mol_type = other DNA
gtgcagtcggcgttggagtgggggaaaatacacgtctggcaagcagcgcaaccaacggttcagtgtttgcagtat

SEQ ID NO: 469025 - DNA, 75 bp, synthetic construct
  source 1..75: mol_type = other DNA
gttggccaattcatgattatattgatacagttttggttttggttcactcccatcatctatttaattaatatcctt

SEQ ID NO: 469026 - DNA, 75 bp, synthetic construct
  source 1..75: mol_type = other DNA
tatattcgtcgataacgggaattatttaaagaaaattaatttcccaagaatctgtttgcctatcataagtatcgg

SEQ ID NO: 469027 - DNA, 75 bp, synthetic construct
  source 1..75: mol_type = other DNA
attttctccgaagtgatgaaagcaaggatgcctgataattccggcgcgtttgcctatagtatttatttatgtgca

SEQ ID NO: 469028 - DNA, 75 bp, synthetic construct
  source 1..75: mol_type = other DNA
tatggaggcacggcaccgcccggtgtcgcagaacatgtgactatggaggattcgggaatgtctgttgttgcacct

SEQ ID NO: 469029 - DNA, 75 bp, synthetic construct
  source 1..75: mol_type = other DNA
aaagatggaggcacggcaccgcccggtgtcgcagaacatgtgactatggaggattcgggaatgtctgttgttgca

SEQ ID NO: 469030 - DNA, 75 bp, synthetic construct
  source 1..75: mol_type = other DNA
cgctatggccagtattggctctcgccattattttctgtgtcatcggtttcaggatgttccgcaagcatgcggcgg

SEQ ID NO: 469031 - DNA, 75 bp, synthetic construct
  source 1..75: mol_type = other DNA
tgacctgaaagcggaagatgcagaaaaagcggcatgtgatttattcgatatgaccacagatatcatccaggagta

SEQ ID NO: 469032 - DNA, 75 bp, synthetic construct
  source 1..75: mol_type = other DNA
tgttgcgactacgactttccttgcacttgggggcgatggttttctggcattcaaagaagggaaaaatgtccaggt

SEQ ID NO: 469033 - DNA, 75 bp, synthetic construct
  source 1..75: mol_type = other DNA
atcgattgcattaactcgtgcctacggtgagtcatcgcaacttggcaacctgtttaccgatgcaatgcttgtcgc

SEQ ID NO: 469034 - DNA, 75 bp, synthetic construct
  source 1..75: mol_type = other DNA
atggataaagtcagcgttggcgcaacggtgaccatcatgtgtgctgcaaccctggcggaaggcaccacgattatt

SEQ ID NO: 469035 - DNA, 75 bp, synthetic construct
  source 1..75: mol_type = other DNA
gatacatcaatgaagctgctaagccagctgggtgcgaaagtagaacgtaatggttctgtgcatattgatgcccgc

SEQ ID NO: 469036 - DNA, 75 bp, synthetic construct
  source 1..75: mol_type = other DNA
gtcatccatgattacgatggtgaaatcagtttatgcgaggcgattggcacactcgaattgctgaagcagtcactg

SEQ ID NO: 469037 - DNA, 75 bp, synthetic construct
  source 1..75: mol_type = other DNA
gtgcatacttttgcaaacctgatgtacgacgtttacgagtccttcggcctgttccagaaaggggctcgccaagca

SEQ ID NO: 469038 - DNA, 75 bp, synthetic construct
  source 1..75: mol_type = other DNA
ggcaggataaatctgtagtttttgatgccagctataacgtgtttgacgataaagtattacgaaagaactttaatg

SEQ ID NO: 469039 - DNA, 75 bp, synthetic construct
  source 1..75: mol_type = other DNA
acggtgatttctgaacaagtgattaaagatcagggtgcaaccaaccttaccgacgcgctcaaaaacgtccccggc

SEQ ID NO: 469040 - DNA, 75 bp, synthetic construct
  source 1..75: mol_type = other DNA
ttcttgacgaaaacatcgcccatgatgacaagccaggtctgtacttccatgaagaatatgtcgatatgtgccgcg

SEQ ID NO: 469041 - DNA, 75 bp, synthetic construct
  source 1..75: mol_type = other DNA
tggaaatttgtagtagcgcaccgccgctggaagagtttacgcctggccgtctgcgtgcttgctttaaaccagtgg

SEQ ID NO: 469042 - DNA, 75 bp, synthetic construct
  source 1..75: mol_type = other DNA
cagcacaactcaacgaagggagattttttacaaatacgagcaactttataatgccctgatggctcgccccgtctt

SEQ ID NO: 469043 - DNA, 75 bp, synthetic construct
  source 1..75: mol_type = other DNA
agaagggaccggattcatcaccgaaacggtctttgaaaaccgctttatgcatgtgccagagctgagccgtatggg

SEQ ID NO: 469044 - DNA, 75 bp, synthetic construct
  source 1..75: mol_type = other DNA
gcgaaagatgcagaacatgcgctggaactggctaatgatagtgagttcggcctttcagcgaccatttttaccacc

SEQ ID NO: 469045 - DNA, 75 bp, synthetic construct
  source 1..75: mol_type = other DNA
gcttgatgggcattatgcccgcactaacagagtatccaaggtttccccgaaaacaatgaaccttgaacatgctta

SEQ ID NO: 469046 - DNA, 75 bp, synthetic construct
  source 1..75: mol_type = other DNA
gaactgctggctgaactacccgaaacaaaaggcgctctgtttccaaagccctgctataacgctttccgttccgct

SEQ ID NO: 469047 - DNA, 75 bp, synthetic construct
  source 1..75: mol_type = other DNA
ttgtgcacagttaattgcccaggtatttcaagatgccggtatcccacaaggcgtatatggttggctgaatgctga

SEQ ID NO: 469048 - DNA, 75 bp, synthetic construct
  source 1..75: mol_type = other DNA
atgaccattactccggcaactcatgcaatttcgataaatcctgccacgggtgaacaactttctgtgctgccgtgg

SEQ ID NO: 469049 - DNA, 75 bp, synthetic construct
  source 1..75: mol_type = other DNA
ctgtgcacagctcattgcccaggtgtttaaagatgcgggtatcccacaaggcgtatatggctggctgaatgccga

SEQ ID NO: 469050 - DNA, 75 bp, synthetic construct
  source 1..75: mol_type = other DNA
tgtatatgcagtatctaccgatactcatttcacccacaaagcatggcacagcagctctgaaaccatcgctaaaat

SEQ ID NO: 469051 - DNA, 75 bp, synthetic construct
  source 1..75: mol_type = other DNA
ataaaaattggttgagcaacatgctgaaaaaagccaatcgcaaccatatgtacctcaacgactggttatcaatta

SEQ ID NO: 469052 - DNA, 75 bp, synthetic construct
  source 1..75: mol_type = other DNA
cgaccatcaaactggaagaaggttacgttaaggcttccgtcgatggccgtctgaaaggcgcgcatatcgtgatgg

SEQ ID NO: 469053 - DNA, 75 bp, synthetic construct
  source 1..75: mol_type = other DNA
gctggatgggcattatgcccgcaccaacagagtatctaaggtttccccgaaaactatgaaccttgaacatgctta

SEQ ID NO: 469054 - DNA, 75 bp, synthetic construct
  source 1..75: mol_type = other DNA
caatccgcaaagaagtgcccggaatgaaaggtgctcggtgggctccgtttgatattactgatgcctggtgtcttg

SEQ ID NO: 469055 - DNA, 75 bp, synthetic construct
  source 1..75: mol_type = other DNA
ttaccaggatctggagagggacggatatactctggaacgaaaatccagaactttccggggtggtgcgacactgat

SEQ ID NO: 469056 - DNA, 75 bp, synthetic construct
  source 1..75: mol_type = other DNA
gccgtccggcaccgactacgggcgcagcgcaccgacgggctcgatcaatatgatcagcaaacagccgcgcaatga

SEQ ID NO: 469057 - DNA, 75 bp, synthetic construct
  source 1..75: mol_type = other DNA
tttatccgcttgatgccacaccggaaaatctgcgaaagctgtccggcgacatcattgaccttcatgtttgcccga

SEQ ID NO: 469058 - DNA, 75 bp, synthetic construct
  source 1..75: mol_type = other DNA
catgagctattttgaaacactcccgacagaaagcagggaaacggctcgccttgattaccttcaaacccttaccgg

SEQ ID NO: 469059 - DNA, 75 bp, synthetic construct
  source 1..75: mol_type = other DNA
cgaagtcagggccgagctaaacatctcgccgaaacgccacgtaacgtacgcgcgggaatactttggctggggcgt

SEQ ID NO: 469060 - DNA, 75 bp, synthetic construct
  source 1..75: mol_type = other DNA
cgacgaatcgcctgatccgcggtgcgtatgcttgcgtggcgatgattatcggtcacggtatggttgcttttcgcg

SEQ ID NO: 469061 - DNA, 75 bp, synthetic construct
  source 1..75: mol_type = other DNA
gggcaaaccgtaccgtcagggcttcgttaaaaaccgctatgttggccgcaccttcatcatgccgggtcagcagct

SEQ ID NO: 469062 - DNA, 75 bp, synthetic construct
  source 1..75: mol_type = other DNA
agatctggatatcgacgtggtgatcccgatcccggaaacctcgtgtgatatcgcgctggaaattgcgcgtattct

SEQ ID NO: 469063 - DNA, 75 bp, synthetic construct
  source 1..75: mol_type = other DNA
cgggcgatcgtcgctgtggcccaggcattgaatcttcaggtgatcgctgaaggtgtggagagtaaaaaggaagat

SEQ ID NO: 469064 - DNA, 75 bp, synthetic construct
  source 1..75: mol_type = other DNA
actggaaaacgatcagttggttattcactatcaaccgaaaatcacctggcgtggcgaagtgcgcagtctggaagc

SEQ ID NO: 469065 - DNA, 75 bp, synthetic construct
  source 1..75: mol_type = other DNA
cctcccctttcgtattggtttaattgaagtcagcgaaggaaggcggacgaggacaattttgcgtttttaccccag

SEQ ID NO: 469066 - DNA, 75 bp, synthetic construct
  source 1..75: mol_type = other DNA
tggataccaacctgcgtaaagcactggaaaacgatcagttagttattcactatcaaccgaaaatcacctggcgcg

SEQ ID NO: 469067 - DNA, 75 bp, synthetic construct
  source 1..75: mol_type = other DNA
atttctggtactcgcaccaaacacctcgcaaagtgccctggaagcaatggcatcgcggattttgacccgcctgcg

SEQ ID NO: 469068 - DNA, 75 bp, synthetic construct
  source 1..75: mol_type = other DNA
gcggcaaaaatgagatctatttaatctgctccggtaccgatatcaccgaagaacgccacgcccaggagcgcttgc

SEQ ID NO: 469069 - DNA, 75 bp, synthetic construct
  source 1..75: mol_type = other DNA
tgcccttcgacaggctgccatgaggcatgaaaagaatgagagggctttcttcgaaaagactgggtacgatcagtg

SEQ ID NO: 469070 - DNA, 75 bp, synthetic construct
  source 1..75: mol_type = other DNA
gtggctgctgttttctggtcacggcggcgagaaagccagtatcgataacctctggcgctttggtggtttctttgc

SEQ ID NO: 469071 - DNA, 75 bp, synthetic construct
  source 1..75: mol_type = other DNA
gaactggattatgatctgcctggcgcatctgcgttttcgcgcggcgatgcgacgtcaggggcgtgaaacacagtt

SEQ ID NO: 469072 - DNA, 75 bp, synthetic construct
  source 1..75: mol_type = other DNA
tgccgtgtggctgatgtgctgggatatccagagtattacttctatatagtgaatgacgttacggcgaagctactt

SEQ ID NO: 469073 - DNA, 75 bp, synthetic construct
  source 1..75: mol_type = other DNA
ggtgttgcgaaatatctgcccagtgtacagtggatacatgcctctgtcggacctggaaagaactgtgcgcatggc

SEQ ID NO: 469074 - DNA, 75 bp, synthetic construct
  source 1..75: mol_type = other DNA
attgtggcgctgagtgcagagcctcttgcggggtgggggtgtcatttatccaggatacgtgaactgagggcggaa

SEQ ID NO: 469075 - DNA, 75 bp, synthetic construct
  source 1..75: mol_type = other DNA
tgcgcttgtcagcgattctgctgccggtgtggattgtgttcctgtttgtggcgtttaaaacattgcgtaggaaag

SEQ ID NO: 469076 - DNA, 75 bp, synthetic construct
  source 1..75: mol_type = other DNA
atggtcaggcagtaaaagacgaccctgagttctctatttctctcggcgcagacggtattgagcgtaaactggaaa

SEQ ID NO: 469077 - DNA, 75 bp, synthetic construct
  source 1..75: mol_type = other DNA
cgatttctctatttctctcggcgcagacggtattgaacgcaaactggaaattgaaaaagcggtcactgacgttgc

SEQ ID NO: 469078 - DNA, 75 bp, synthetic construct
  source 1..75: mol_type = other DNA
cttcgaaaggctgggtacgatcagtgaccgatatgaggcgagtcctgatttcacagagtattccgctgtgtctaa

SEQ ID NO: 469079 - DNA, 75 bp, synthetic construct
  source 1..75: mol_type = other DNA
gcctgtgcaggcttactggtttcttttcttttgccgcaaaaatggaccagctcagcggtcatcacccccgcagaa

SEQ ID NO: 469080 - DNA, 75 bp, synthetic construct
  source 1..75: mol_type = other DNA
ggaagagtacctgcgctcatcaccttatgtgatggaccaattaaaagaggcgaaaatcgacgaactggatttgca

SEQ ID NO: 469081 - DNA, 75 bp, synthetic construct
  source 1..75: mol_type = other DNA
aaacattcaccaaactgcgggtgttgggacttgacgtgaatattgatcgtggtgatgtatttaatctgtttatca

SEQ ID NO: 469082 - DNA, 75 bp, synthetic construct
  source 1..75: mol_type = other DNA
tatgcagaaattcagcgacccgatggcagcgcgcactctgctccagtcgcagcagaactccgatgaagcgctcag

SEQ ID NO: 469083 - DNA, 75 bp, synthetic construct
  source 1..75: mol_type = other DNA
gattgccccggaggaacgcgacccgcagctcagggataaaattgcgcgcgagctggccgttatcgtgcgccagct

SEQ ID NO: 469084 - DNA, 75 bp, synthetic construct
  source 1..75: mol_type = other DNA
atgccatccggccaccggctgaaagcccgttcgacaccatgagcgaagcggagttttccgccatgagtaccagcg

SEQ ID NO: 469085 - DNA, 75 bp, synthetic construct
  source 1..75: mol_type = other DNA
gtggatagcgcacgcgcccttattgcccggggatggggggtaagcttagtcagccgttgtctccgggtgtcgcgt

SEQ ID NO: 469086 - DNA, 75 bp, synthetic construct
  source 1..75: mol_type = other DNA
ttccagcaaacaggtggaagcattccgctacaatgaggaaggcgttaaagcactacaacacctgctacatggctc

SEQ ID NO: 469087 - DNA, 75 bp, synthetic construct
  source 1..75: mol_type = other DNA
ggtcccggcgggagtggcaaaagtattctggctgaaatcgcgaccctgctcgccggagaggataacgccacgtca

SEQ ID NO: 469088 - DNA, 75 bp, synthetic construct
  source 1..75: mol_type = other DNA
atgaaaaaaattaagtttgttatcttttctggcattttgggtatcagcctgaatgcctttgcgggtggtagcggt

SEQ ID NO: 469089 - DNA, 75 bp, synthetic construct
  source 1..75: mol_type = other DNA
tttctggcatcttgggtatcagcctgaatgcctttgcgggtggtagcggttggaacgcagataatgtggacccgt

SEQ ID NO: 469090 - DNA, 75 bp, synthetic construct
  source 1..75: mol_type = other DNA
tggcagaacagcgatattaatagcgcgatgtatcagaatttagagaagttgttaaatactgtgcagaagtgctga

SEQ ID NO: 469091 - DNA, 75 bp, synthetic construct
  source 1..75: mol_type = other DNA
taacggcgtgctcgacacgcagaacggcacgttccacccgcacagtccgtcacactggatgcgtaccctgtgcga

SEQ ID NO: 469092 - DNA, 75 bp, synthetic construct
  source 1..75: mol_type = other DNA
aaaaggcgatgcgggtgcatgagcattacggcgaagcgctggccgtggatgcaaacggccagctcctgtcccgct

SEQ ID NO: 469093 - DNA, 75 bp, synthetic construct
  source 1..75: mol_type = other DNA
cccggctgacccggcagtgacggctgccgctggtgctgaaacagacgctgcccggaagaacgccgccgcactggc

SEQ ID NO: 469094 - DNA, 75 bp, synthetic construct
  source 1..75: mol_type = other DNA
actgggcggtgactaccggcgacttcaacagtgaaacagtacaggacgtcatgctgggagcggtggaacgtaacc

SEQ ID NO: 469095 - DNA, 75 bp, synthetic construct
  source 1..75: mol_type = other DNA
cctggtcgatgcacaggatgatggccagccgctgggcgatgtcatcgcgagtgggtcagggtgggacggcttaaa

SEQ ID NO: 469096 - DNA, 75 bp, synthetic construct
  source 1..75: mol_type = other DNA
ctcgtcgatgccgagcgacgcatcgagacgaggatcgccagtcggctgcctatgtcgatccgagaacagttgctg

SEQ ID NO: 469097 - DNA, 75 bp, synthetic construct
  source 1..75: mol_type = other DNA
tgccgacgatctcgtagactatgctgcccgcgaggaaacacggcacgagcatcttgccgagttacgggggctcta

SEQ ID NO: 469098 - DNA, 75 bp, synthetic construct
  source 1..75: mol_type = other DNA
catttgttcggagccagtagcctgctcggctacaatctcgttctgcgaatcagggatctgccatcgaagcggttg

SEQ ID NO: 469099 - DNA, 75 bp, synthetic construct
  source 1..75: mol_type = other DNA
cgcaattggcccgacatcctgcgcatcgccgccaccattgctgccgggaccgtcgcgccaagccagattctgcgg

SEQ ID NO: 469100 - DNA, 75 bp, synthetic construct
  source 1..75: mol_type = other DNA
cgcatcgagacgaggatcgccagtcggctgcctatgtcgatccgagaacagttgctggcattgctcgaggagacg

SEQ ID NO: 469101 - DNA, 75 bp, synthetic construct
  source 1..75: mol_type = other DNA
tgagattgaaaatcagaaccagccctgaggctgtctttgattttatcaaaaacacgccttattctgatgctattg

SEQ ID NO: 469102 - DNA, 75 bp, synthetic construct
  source 1..75: mol_type = other DNA
gaacgggaaatcaatggaaccggaaataccagcgacgactgggatgttgatgaatgctgtgcgcgattaatgatt

SEQ ID NO: 469103 - DNA, 75 bp, synthetic construct
  source 1..75: mol_type = other DNA
cagtttttaaaaaaggaattaaaattgtaaggaacaaacaattcaaaaaatcaaatataccttggtttatactta

SEQ ID NO: 469104 - DNA, 75 bp, synthetic construct
  source 1..75: mol_type = other DNA
tgcactgccgcttctggaagcggtgacggcccttcgtaccggtttgaacgatgccgcgatgaccagcttcttgcg

SEQ ID NO: 469105 - DNA, 75 bp, synthetic construct
  source 1..75: mol_type = other DNA
ggcccggttctggggcatgggcacgtcggcttcgagcgacggacagttcttcgtcgctacagagcaaggtgaggc

SEQ ID NO: 469106 - DNA, 75 bp, synthetic construct
  source 1..75: mol_type = other DNA
atgttaacagcatgtttatcacttggggttgcgatgacgacgaacacgcattttagaggtgaagaattgaagaag

SEQ ID NO: 469107 - DNA, 75 bp, synthetic construct
  source 1..75: mol_type = other DNA
ttaccgtcgatttagcagctcgtgtgatccatcggggcgaggaagaggtgcatctcaccccgattgagttccgcc

SEQ ID NO: 469108 - DNA, 75 bp, synthetic construct
  source 1..75: mol_type = other DNA
atgaacaggctattcgtcgctttctgcgcacagcgctggaaggcgacggaatgcgtgtctatgaagctgaaacgc

SEQ ID NO: 469109 - DNA, 75 bp, synthetic construct
  source 1..75: mol_type = other DNA
gaaaaactagttctggaagccttccgtcgacgtttcggtgaccaacgtggtgcgtcggagcgggttgttgaggca

SEQ ID NO: 469110 - DNA, 75 bp, synthetic construct
  source 1..75: mol_type = other DNA
cttgcttacattgacgttaaaaatgaaaataattttacaaaaattgtatttgatacgttgagaaagattgctctt

SEQ ID NO: 469111 - DNA, 75 bp, synthetic construct
  source 1..75: mol_type = other DNA
tataaaactgctagcgattaacggtattgcaccgactgcggaaaatattcgcaatggcaaatatccctatgtcgt

SEQ ID NO: 469112 - DNA, 75 bp, synthetic construct
  source 1..75: mol_type = other DNA
catgactcacaccatgcaggagatcgccaccagctcgcaaaaaattggcgacattatcagcgttatcgacggaat

SEQ ID NO: 469113 - DNA, 75 bp, synthetic construct
  source 1..75: mol_type = other DNA
acataacaacacagtggctatgggaaaagcttaaagcagcatacagcctgaaagaactgtccgacgctatccggg

SEQ ID NO: 469114 - DNA, 75 bp, synthetic construct
  source 1..75: mol_type = other DNA
catgccgcaatcagtcaggttacatttccgctgcacctcataaaacgggtgccgggattctcaacctgctgacta

SEQ ID NO: 469115 - DNA, 75 bp, synthetic construct
  source 1..75: mol_type = other DNA
catttccgctgcacctcataaaacgggtgccgggatttccaccccgctgacaactacagcgcacaaccgcgccag

SEQ ID NO: 469116 - DNA, 75 bp, synthetic construct
  source 1..75: mol_type = other DNA
atggctgctgattacgagccatctaaccaagagaccaaccgcttcttccaaaccattcagaataagctgcattat

SEQ ID NO: 469117 - DNA, 75 bp, synthetic construct
  source 1..75: mol_type = other DNA
gccgacttcggtcgggccggtttcttcgtttgccggtgttgagaaccccgtacgtctcgccaccccgagattctc

SEQ ID NO: 469118 - DNA, 75 bp, synthetic construct
  source 1..75: mol_type = other DNA
cggtttttttgtgcgtactgtattgccacgtctttttcgcgtcagaattatggcggggcgtacggggccgacttc

SEQ ID NO: 469119 - DNA, 75 bp, synthetic construct
  source 1..75: mol_type = other DNA
tgagttttcacaacttactacacaaggggccacaccatggcaaaccgcaaacaacagcgcgtccgcgctgagcgt

SEQ ID NO: 469120 - DNA, 75 bp, synthetic construct
  source 1..75: mol_type = other DNA
gatatcacgtccatcagaacgctggactacacccgcaaggcgtgccgcgaacgtatcagccttcgcttcccgcgt

SEQ ID NO: 469121 - DNA, 75 bp, synthetic construct
  source 1..75: mol_type = other DNA
gatccgctggtgaaattttccgatgtgaccgtcgatttagccgcccgcgtgattcaccggggtgaggaagaggtg

SEQ ID NO: 469122 - DNA, 75 bp, synthetic construct
  source 1..75: mol_type = other DNA
gattcaccggggtgaggaagaggtgcatctcacaccaattgagttccgcctgctggcggtgctgctcaacaatgc

SEQ ID NO: 469123 - DNA, 75 bp, synthetic construct
  source 1..75: mol_type = other DNA
gccgtttgagattggccccggtgacaaagtgcaaatcgttcgcgcgatcagcacctacaccaaaaacgcccaggg

SEQ ID NO: 469124 - DNA, 75 bp, synthetic construct
  source 1..75: mol_type = other DNA
gttatcgctgctataccggcgaaaagatagatgtctggttcaacaccgcgatgtgtcagcattccggcaactgcg

SEQ ID NO: 469125 - DNA, 75 bp, synthetic construct
  source 1..75: mol_type = other DNA
tggttatttgcggcgatcaaccgcagtcaacgcaatgcccgtcctgtgatgttaaggctcaccgcagataatgag

SEQ ID NO: 469126 - DNA, 75 bp, synthetic construct
  source 1..75: mol_type = other DNA
aaaaaaaatcaattcaggatgtgattcaacaatacagagataaattctatagtgcaccacctaaagaaaaacgcg

SEQ ID NO: 469127 - DNA, 75 bp, synthetic construct
  source 1..75: mol_type = other DNA
tcgatgaaaagctggcggcgaaatatccctatgaacctgcttatctgccagtcgcacgtctggaagatggcacgc

SEQ ID NO: 469128 - DNA, 75 bp, synthetic construct
  source 1..75: mol_type = other DNA
gatcaccctggcagccggtgtgaacagtgggcgcgtgtccgtcccctggtatcgcggctccgtgaagctgccagc

SEQ ID NO: 469129 - DNA, 75 bp, synthetic construct
  source 1..75: mol_type = other DNA
atttgtccgttcagtaccacgccagcccttgccgccctgaagcagcacctggagaaaaccgggaacgcgatggaa

SEQ ID NO: 469130 - DNA, 75 bp, synthetic construct
  source 1..75: mol_type = other DNA
agtgaccctgacctgccgccataaaggggcggttggtaacgacattattgtctcttccggcgtaacggcagcggg

SEQ ID NO: 469131 - DNA, 75 bp, synthetic construct
  source 1..75: mol_type = other DNA
tttcggcagcagatacggcggagaccattgcggcagcgctgacggaactgattacccagaaagacgggttgccag

SEQ ID NO: 469132 - DNA, 75 bp, synthetic construct
  source 1..75: mol_type = other DNA
actgcaacagccgcgacgggcaaaatcgccctgaccggcacagcatcttccggcgggaagctgagcgtgaccatt

SEQ ID NO: 469133 - DNA, 75 bp, synthetic construct
  source 1..75: mol_type = other DNA
ttaacggcatcatggtcggtgttgataccaaaattgacggtaacaacgctaagtggatcgtcggtgcggctgcag

SEQ ID NO: 469134 - DNA, 75 bp, synthetic construct
  source 1..75: mol_type = other DNA
aatgcagcgacctatgacacctggacttattacgacaatccaactactgctcttgactggagcaatatggatgca

SEQ ID NO: 469135 - DNA, 75 bp, synthetic construct
  source 1..75: mol_type = other DNA
tgactacaattggtacgatggtgacgtattcactctgaacgtatccaattccaccattgatgatgactatgaagc

SEQ ID NO: 469136 - DNA, 75 bp, synthetic construct
  source 1..75: mol_type = other DNA
tatttaaaagcgtactattaacagcgacattggctatttcatttaccgccagtgcattcactgaaggcactgatt

SEQ ID NO: 469137 - DNA, 75 bp, synthetic construct
  source 1..75: mol_type = other DNA
ctatgtcgtcaatggtaaatacttgatctataccaagagcattaaatctatcgacgctatggcagaccttatccg

SEQ ID NO: 469138 - DNA, 75 bp, synthetic construct
  source 1..75: mol_type = other DNA
gttttcagttatgcctgcccgttctgctataaatacgataaagcagttaccggcccggtatcggaaaaagtgaaa

SEQ ID NO: 469139 - DNA, 75 bp, synthetic construct
  source 1..75: mol_type = other DNA
gtccgttagcggacatcaacaccatctttaccgagatggaggaaggcaaaatccgtggccgtatggtgattgatt

SEQ ID NO: 469140 - DNA, 75 bp, synthetic construct
  source 1..75: mol_type = other DNA
tgttttactggggccacaggaagagatccctgcatatcctaaaaaggcacgaccgttattctctgcatcccgtta

SEQ ID NO: 469141 - DNA, 75 bp, synthetic construct
  source 1..75: mol_type = other DNA
ataaaaaatatatacttttgcaagggggaggagataaataatgaatgtactgcaaaggaatataataagaatatt

SEQ ID NO: 469142 - DNA, 75 bp, synthetic construct
  source 1..75: mol_type = other DNA
ggctgaagaatgcatcgtggtcgccgattacgcggttaaagtgccggatggcctggactcggcgtcggccagcag

SEQ ID NO: 469143 - DNA, 75 bp, synthetic construct
  source 1..75: mol_type = other DNA
tagcgattaactcacgcaccgaagacgccgccagaattgtgcaggagaaagccggtggcgctcacgcagcggtgg

SEQ ID NO: 469144 - DNA, 75 bp, synthetic construct
  source 1..75: mol_type = other DNA
ctcgccctgcaatacgcgaagaatgtctttaacgccaaagtgatcgccattgatgtcaatgatgaacagttaaaa

SEQ ID NO: 469145 - DNA, 75 bp, synthetic construct
  source 1..75: mol_type = other DNA
tgtgaacgcccgcatgaatcactgaacaatatgacgccggaggaatatcgacaacaccattatttggctgggatc

SEQ ID NO: 469146 - DNA, 75 bp, synthetic construct
  source 1..75: mol_type = other DNA
ttcactgtgctgactggcgcggttggcgtgagcggtgcgctgtcgctggtaagctacgatgtgcaaatctctccg

SEQ ID NO: 469147 - DNA, 75 bp, synthetic construct
  source 1..75: mol_type = other DNA
tgggtttattcaggtcgtctggaaaagcgcatgagcagcgtaatagcgaagttcatggagagcgtagagccggga

SEQ ID NO: 469148 - DNA, 75 bp, synthetic construct
  source 1..75: mol_type = other DNA
gttcatggagagcgtagagccgggaagagttatgacaaggccaatgtgtaatgatgatgatggaatgttgatttc

SEQ ID NO: 469149 - DNA, 75 bp, synthetic construct
  source 1..75: mol_type = other DNA
ctgggcggtaacgcaccgctgtggtgggggatcgcactgctggtactcggcatgatcaccgcattcgtcggcggt

SEQ ID NO: 469150 - DNA, 75 bp, synthetic construct
  source 1..75: mol_type = other DNA
tgcggggagcgtctggttccgtaccgggcatcgcgatatcgaaaaactcggtggtattagcaaaaaaatgccggt

SEQ ID NO: 469151 - DNA, 75 bp, synthetic construct
  source 1..75: mol_type = other DNA
ctggcggtgatgtgtatggcgaaagtttatggcgtcactttcctcggcgcgccgcgtaccaaagaagccgaaaac

SEQ ID NO: 469152 - DNA, 75 bp, synthetic construct
  source 1..75: mol_type = other DNA
tattgcaggacatattggataaaactaataccaataatctttctgctacagcgatggttattggagagctgggga

SEQ ID NO: 469153 - DNA, 75 bp, synthetic construct
  source 1..75: mol_type = other DNA
atgaagatggatgaacgatacagcagtgcatcttatggtagcgctggtcttgctgcgttctttgccagcctgtca

SEQ ID NO: 469154 - DNA, 75 bp, synthetic construct
  source 1..75: mol_type = other DNA
tgtgaatgccctcatgaatcactgaacaatatgacgccggaggaatatcggcaacacaatcgtttggccgggatc

SEQ ID NO: 469155 - DNA, 75 bp, synthetic construct
  source 1..75: mol_type = other DNA
tcaggtcgtcgattccgtcatgtacattgacaagaaagcctttggcatcctcctcagctactacgctcatggttc

SEQ ID NO: 469156 - DNA, 75 bp, synthetic construct
  source 1..75: mol_type = other DNA
atgagcataagagaactaaacctcaccaaagaacagcacgagtggctgaatggctggcttgaactgtggggcgca

SEQ ID NO: 469157 - DNA, 75 bp, synthetic construct
  source 1..75: mol_type = other DNA
cgacctttccgtatacaatcgcgacaaattatgggcaaaaacaagcaaggccggcctggagtttcagactttaac

SEQ ID NO: 469158 - DNA, 75 bp, synthetic construct
  source 1..75: mol_type = other DNA
ttttactgcttttctcttttgtagcaaatgcaaactttatgatatatccaatatcaaaagatgttcatgaaggtg

SEQ ID NO: 469159 - DNA, 75 bp, synthetic construct
  source 1..75: mol_type = other DNA
tggcgtactggacaccaatggtggctgggctgacgactcacttaatgttgatgaactgaatatcactctggataa

SEQ ID NO: 469160 - DNA, 75 bp, synthetic construct
  source 1..75: mol_type = other DNA
tttatacttcactgattcatatctggacggtgacgttaccaaatatactaacgaaaccttccataccccagctgg

SEQ ID NO: 469161 - DNA, 75 bp, synthetic construct
  source 1..75: mol_type = other DNA
caaactgcgtaaatcgattgccgatgaaagcaatgtcccgccgtacgtggtgtttaacgacgcaaccttgattga

SEQ ID NO: 469162 - DNA, 75 bp, synthetic construct
  source 1..75: mol_type = other DNA
agattgacgttgtttcatgcgggaaaatgggaggtattccgcagatgactcttaaagaatggctgaagaatacat

SEQ ID NO: 469163 - DNA, 75 bp, synthetic construct
  source 1..75: mol_type = other DNA
ggtggaattactcccccagccccgtccggggcatcttaattacctgatccacgcgcagcttcccgataccggctg

SEQ ID NO: 469164 - DNA, 75 bp, synthetic construct
  source 1..75: mol_type = other DNA
cctggggtcgtacgattgataatcaagtattccagagcggtgtgtttaacgtcactctgaataatggttctgaat

SEQ ID NO: 469165 - DNA, 75 bp, synthetic construct
  source 1..75: mol_type = other DNA
aatttcgccgttctaataatgatgaaacgcttgaaaaagtagttgaacacatggagccaaaagtaagcaaggaag

SEQ ID NO: 469166 - DNA, 75 bp, synthetic construct
  source 1..75: mol_type = other DNA
tttaaacaggataaatgaaaatattgctgctataactgatatagaggataagctacgtcagttttttaatgagga

SEQ ID NO: 469167 - DNA, 75 bp, synthetic construct
  source 1..75: mol_type = other DNA
atgatgctggcgaatgggtgattctttgcccgcgagtggcgaaaacccatccgaaaatcgttaaatggagctatg

SEQ ID NO: 469168 - DNA, 75 bp, synthetic construct
  source 1..75: mol_type = other DNA
gatggcgcacctccctgcagcaaggaactgcgcgctatgccagtgaggtcgttgcgatactcgccagacttggac

SEQ ID NO: 469169 - DNA, 75 bp, synthetic construct
  source 1..75: mol_type = other DNA
caacacagcgtgacgttgatcgcgctgaaacagatttacttatcaacctgtcaacgcttactcagcgcggtctgg

SEQ ID NO: 469170 - DNA, 75 bp, synthetic construct
  source 1..75: mol_type = other DNA
atgacacaagcaagttacagcaagccaacacagcgagaaattgatcgcgctgaaactgatttactcatcaacctg

SEQ ID NO: 469171 - DNA, 75 bp, synthetic construct
  source 1..75: mol_type = other DNA
gattatccggtaaaagttcgcaaactcatccgccgtttgcgccgcatccgcatcgaccgattaattagccgcatc

SEQ ID NO: 469172 - DNA, 75 bp, synthetic construct
  source 1..75: mol_type = other DNA
aacttgtagtatcacaattagcattggcttgcactctggctatcacctctcaggctaatgcagcgaccaacgata

SEQ ID NO: 469173 - DNA, 75 bp, synthetic construct
  source 1..75: mol_type = other DNA
tcgcattcgcatcctttggggctaccgccggtggcttcacatcatattgtggaccttacactttagtagcaaggg

SEQ ID NO: 469174 - DNA, 75 bp, synthetic construct
  source 1..75: mol_type = other DNA
gtgaaagccttagccattttaattgttgcctttatgtcatttggggcatctgcaagcggttacaccgcttattgt

SEQ ID NO: 469175 - DNA, 75 bp, synthetic construct
  source 1..75: mol_type = other DNA
taggaaaaaaaggattttcttatgctgtcattgatacaaaggatgacagaaatgaaaatagcggagagttaatta

SEQ ID NO: 469176 - DNA, 75 bp, synthetic construct
  source 1..75: mol_type = other DNA
acattatatatgcggcattaataagagtgctccccaaggatgggaaaagtgatatgagagcatcattatcaccca

SEQ ID NO: 469177 - DNA, 75 bp, synthetic construct
  source 1..75: mol_type = other DNA
aacgaagtttaccagagcggcctgttcaatgtgaccctgaacaccggttcacagtgggataccaccaaaacttct

SEQ ID NO: 469178 - DNA, 75 bp, synthetic construct
  source 1..75: mol_type = other DNA
aaacgccagtgacagcgagcagtatgccgagtcaccgaccatccgcagccgtctggatgaaatgattgtgctgct

SEQ ID NO: 469179 - DNA, 75 bp, synthetic construct
  source 1..75: mol_type = other DNA
gcagtgatcgcgttattatcgtcggcagtggcccaagcgccgcaaactttgttgcgccgcgcggagtgcctatta

SEQ ID NO: 469180 - DNA, 75 bp, synthetic construct
  source 1..75: mol_type = other DNA
ttatgccttgtgccgagcagaaactaaccatctgcacaccatacttcaacctgccagcaatccttgtgcgcaata

SEQ ID NO: 469181 - DNA, 75 bp, synthetic construct
  source 1..75: mol_type = other DNA
gcctgccaaagatggccacaattatgggttcgagtatatccatcgaccgggcaccgaaacgcgtttcctgaacgt

SEQ ID NO: 469182 - DNA, 75 bp, synthetic construct
  source 1..75: mol_type = other DNA
cttcagtgtggtggctacaaattagagttgattcctgattcattgttcaggattaatggtgagacagttacctcc

SEQ ID NO: 469183 - DNA, 75 bp, synthetic construct
  source 1..75: mol_type = other DNA
gtgaaaaagtggattgttatcggactctgtttccttccggggttagcatttgctgcgaatcctggcggtatcacg

SEQ ID NO: 469184 - DNA, 75 bp, synthetic construct
  source 1..75: mol_type = other DNA
acggttcggacagcgacgcacgggtgattcaacgtgcgcgcactaacgcccgtcttgcggggattggtgaactga

SEQ ID NO: 469185 - DNA, 75 bp, synthetic construct
  source 1..75: mol_type = other DNA
ctatttgctgcctttagtcgcctggttaatcaggcgtggaaagcctttaacgaactggattttgccctgctggaa

SEQ ID NO: 469186 - DNA, 75 bp, synthetic construct
  source 1..75: mol_type = other DNA
caccctgcctgtcgtggtgcgtctctccggtaataacgctgccgaagggcagcggttactggcagaaagtggcct

SEQ ID NO: 469187 - DNA, 75 bp, synthetic construct
  source 1..75: mol_type = other DNA
tcgatctgatctttatcgatccgccaaccttctctaactcaaaacgaatggaagatgcgtttgatgttcagcgcg

SEQ ID NO: 469188 - DNA, 75 bp, synthetic construct
  source 1..75: mol_type = other DNA
ccggaatataacgttgccgttgaccgttatgccgactgggtggtggtgcaggagtatgcgccgccaaaaactatt

SEQ ID NO: 469189 - DNA, 75 bp, synthetic construct
  source 1..75: mol_type = other DNA
tacatctgcgtggctatcgcgatcgtgctggcattgcgccgatcaaagaaaccctggcagccgctattgtgatgc

SEQ ID NO: 469190 - DNA, 75 bp, synthetic construct
  source 1..75: mol_type = other DNA
gatacagttaacatcatggtggagttggctggagaatcttaattctgcagtgaatgaggccctgaataatgaata

SEQ ID NO: 469191 - DNA, 75 bp, synthetic construct
  source 1..75: mol_type = other DNA
cgaaagccaggcagcgaagcttgatcttaattatgtctcgctggacggaaatatcggctgcatggtcaatggtgc

SEQ ID NO: 469192 - DNA, 75 bp, synthetic construct
  source 1..75: mol_type = other DNA
atcagaccgggccagaaggacagtatgtcagcagtattttactgtgcgaaaacatttatccggtacgccaggaac

SEQ ID NO: 469193 - DNA, 75 bp, synthetic construct
  source 1..75: mol_type = other DNA
ctcataaaagtagtctcattcataaaatacaacaatcagaaatgttgctacgtatgagagttagtagtgttatca

SEQ ID NO: 469194 - DNA, 75 bp, synthetic construct
  source 1..75: mol_type = other DNA
gcccttgatctcagtggtgatggtttacatctgcgtggctatcgcgatcgtgctggtattgcgccgatcaaagaa

SEQ ID NO: 469195 - DNA, 75 bp, synthetic construct
  source 1..75: mol_type = other DNA
atgagtcaattaaacagcgtctgggtctttagcgataaccctgatcgttatgctgaactgtttggcggtgcgcag

SEQ ID NO: 469196 - DNA, 75 bp, synthetic construct
  source 1..75: mol_type = other DNA
attgtcgccatcaataaagataaaaatgcgccaatcttcaactatgcttggcggcaacggcgcaaaagtgattgt

SEQ ID NO: 469197 - DNA, 75 bp, synthetic construct
  source 1..75: mol_type = other DNA
tgtatttatgttcttgagcaaaacgacgcgctgcaacgtactgaaaattacgccgaaagcattgctgccctgctg

SEQ ID NO: 469198 - DNA, 75 bp, synthetic construct
  source 1..75: mol_type = other DNA
acgttcgccagggatgcagccctgacatcggcgatgctggaccgtatcttacatcactcacacgtagtccagata

SEQ ID NO: 469199 - DNA, 75 bp, synthetic construct
  source 1..75: mol_type = other DNA
gcgatgtatacccagatggcggccttcccggcagtaaaaacgttcgaggaatatgacttcaccttcgccacaggt

SEQ ID NO: 469200 - DNA, 75 bp, synthetic construct
  source 1..75: mol_type = other DNA
ctcaggaaaagatcaacagcccgctggcgatcattacccttgcacccggtgttcaggaaccgtgcaccagtgata

SEQ ID NO: 469201 - DNA, 75 bp, synthetic construct
  source 1..75: mol_type = other DNA
ctactaagctgcctgcaactgcgtgcagacaaacagtacaaggcgaaaaacggcccgctggactgcgtgcagaaa

SEQ ID NO: 469202 - DNA, 75 bp, synthetic construct
  source 1..75: mol_type = other DNA
atggtgaattaccgtcttatatcactggcgctgacactggtgaacgatgccactgcggtggatattgtcgatggt

SEQ ID NO: 469203 - DNA, 75 bp, synthetic construct
  source 1..75: mol_type = other DNA
tgctggccgcgacgaaacgcggtaaagctctggctgcacggttaagtgtgcaactgaatgcggcgctggtgaacg

SEQ ID NO: 469204 - DNA, 75 bp, synthetic construct
  source 1..75: mol_type = other DNA
accaaagaattcgctgacaacctggacagtgattttaaagtacgtcagtacctgactaaggaactggctaaagcg

SEQ ID NO: 469205 - DNA, 75 bp, synthetic construct
  source 1..75: mol_type = other DNA
aacaagattatgaggccgcactgcgtgcggtcgaaccgatgttcgataacgaaccggaaatgaatactccggaag

SEQ ID NO: 469206 - DNA, 75 bp, synthetic construct
  source 1..75: mol_type = other DNA
gcttaatacctggatccgtcagtatgttgccgaccaggaaaacccgcctgcagacgtgcgcagccgcaaacctct

SEQ ID NO: 469207 - DNA, 75 bp, synthetic construct
  source 1..75: mol_type = other DNA
ccaaccgaggtgctggtcaccgatcgtcgcgaatttgaactggctgaagaagggtttattaccctgaccatgcgt

SEQ ID NO: 469208 - DNA, 75 bp, synthetic construct
  source 1..75: mol_type = other DNA
agaaaatatatagcgaagatgctttcattcgaaaaaataaaaatagtattcctgtgccggataaaagcgccattt

SEQ ID NO: 469209 - DNA, 75 bp, synthetic construct
  source 1..75: mol_type = other DNA
ttgatttccgtgaaaacatcaaggtcaacgtgcttcatgtcaccaagcaggaacttctggaagactttgaatttg

SEQ ID NO: 469210 - DNA, 75 bp, synthetic construct
  source 1..75: mol_type = other DNA
gcaggcatcgtcgctgcttgatcaaatcatggcacagacccgtattcagcccggttcagaaggttatgacgttgc

SEQ ID NO: 469211 - DNA, 75 bp, synthetic construct
  source 1..75: mol_type = other DNA
tggcatgcaatatcgcagacagttttgccaaataccgctggtgtccaaacattatcggtccgcaaagcggcggcg

SEQ ID NO: 469212 - DNA, 75 bp, synthetic construct
  source 1..75: mol_type = other DNA
ttagcagtttatccccctttcagctaacacagtatattgatgatcatcttttcactaatgaacagaaagtgcaga

SEQ ID NO: 469213 - DNA, 75 bp, synthetic construct
  source 1..75: mol_type = other DNA
acgctgggcattgtaggtgagtctggttcgggtaaatcgcaaactgcatttgcgttgatgggcctgttggctgcc

SEQ ID NO: 469214 - DNA, 75 bp, synthetic construct
  source 1..75: mol_type = other DNA
cagttgatggaagtgctgatgctgcataaaagcatgagcaaggctgaagcgtttgaagagtcggtgcggatgctt

SEQ ID NO: 469215 - DNA, 75 bp, synthetic construct
  source 1..75: mol_type = other DNA
agaaaatatggcgaagatgctttcattcgaaaaataaaaagagtattcctgtgccggataaaagcgccatttcag

SEQ ID NO: 469216 - DNA, 75 bp, synthetic construct
  source 1..75: mol_type = other DNA
tgcggttgaatgtggaatcgcgcggtgatgtgccgctgatggaagaaaagacaaaacttatccttgcgttattga

SEQ ID NO: 469217 - DNA, 75 bp, synthetic construct
  source 1..75: mol_type = other DNA
aaacatcatggagtttggaaactgctttcatatatcgcaagcaaagctatgccgcgacttagatattaaaaaatc

SEQ ID NO: 469218 - DNA, 75 bp, synthetic construct
  source 1..75: mol_type = other DNA
accctgcgtgactcggaagactcgcgctatttagggcttaccgcgccgcgcttcctgcttcgccaaccctattcg

SEQ ID NO: 469219 - DNA, 75 bp, synthetic construct
  source 1..75: mol_type = other DNA
gctgcatggcaaagatgttccggtgcgtgaagccctcgccggacaagtgcccagcccagcgcaggcgtcggcacc

SEQ ID NO: 469220 - DNA, 75 bp, synthetic construct
  source 1..75: mol_type = other DNA
tcgctcaacagcctgatcctgacggtggagcaaattttatggggcatgttattcgggctgatgtttcagtttttg

SEQ ID NO: 469221 - DNA, 75 bp, synthetic construct
  source 1..75: mol_type = other DNA
caaattctctcgttcaatatggggatgagcatggcggtgatgaacgacccgagcagcggcgcatcgaccaccgta

SEQ ID NO: 469222 - DNA, 75 bp, synthetic construct
  source 1..75: mol_type = other DNA
ctttcccatcaacatgctggcggggctggtctgctttgccaccctgctctacaacctgccggatcactatctgca

SEQ ID NO: 469223 - DNA, 75 bp, synthetic construct
  source 1..75: mol_type = other DNA
tgtatattttgccaatttctttgattgtctttgttggaactgttacaactggtgtatcacaaacaggattcatct

SEQ ID NO: 469224 - DNA, 75 bp, synthetic construct
  source 1..75: mol_type = other DNA
caatcacgaagattatttgtggggaaatactgcctggatgctggcgtgcaatgtcgctgacagttttgccaaatt

SEQ ID NO: 469225 - DNA, 75 bp, synthetic construct
  source 1..75: mol_type = other DNA
tggcgcacgcaccgttcctgtcatccgtttccccagagtttatggggctgaattcctggactgaactgccgaata

SEQ ID NO: 469226 - DNA, 75 bp, synthetic construct
  source 1..75: mol_type = other DNA
gaatggcgtttgatattacgttattcaataccacgattcatgtaaataaaattacactgactattactgataact

SEQ ID NO: 469227 - DNA, 75 bp, synthetic construct
  source 1..75: mol_type = other DNA
agatgtatggttttcttgttaagtatattctttctcaaaaataaagttgatttatcaaaaataagattaaagttt

SEQ ID NO: 469228 - DNA, 75 bp, synthetic construct
  source 1..75: mol_type = other DNA
actgaaggggcgattcctttcgccgctgccgatccgctgcgtgtcattccttccatcatggtcggttcagtttgt

SEQ ID NO: 469229 - DNA, 75 bp, synthetic construct
  source 1..75: mol_type = other DNA
taataatcctatgcgcttcactgatcgcagtggtggtgtgtcacgcaggagagttattctgcattttcctgagca

SEQ ID NO: 469230 - DNA, 75 bp, synthetic construct
  source 1..75: mol_type = other DNA
tgtcgtcggtgaacctcctttctctggcgagccttgcccgtcacaaatatccggcctgccggattgtgctggccg

SEQ ID NO: 469231 - DNA, 75 bp, synthetic construct
  source 1..75: mol_type = other DNA
gcgcattctcccggcgctgggggtaacggtcatcaaaaaccgccatcaggcctgtccggtgtgtggcggctccga

SEQ ID NO: 469232 - DNA, 75 bp, synthetic construct
  source 1..75: mol_type = other DNA
atgtcaggaatgaaagttagccaggctgagaaagcagctcggggtcactggtcaagaattttacctgcgctgggc

SEQ ID NO: 469233 - DNA, 75 bp, synthetic construct
  source 1..75: mol_type = other DNA
cacggcgcttaccattcattatttgacaggagaagccgtcatggtggcattttcgtcggtcaactttctttctct

SEQ ID NO: 469234 - DNA, 75 bp, synthetic construct
  source 1..75: mol_type = other DNA
cacataaaggtttcccggagcatatttgccatgagctgacttcagctcataaggccggtggtgtgatgttccgcc

SEQ ID NO: 469235 - DNA, 75 bp, synthetic construct
  source 1..75: mol_type = other DNA
gcgcattctccctgcgctgggtgtgaaggtgattaaaaaccgccatcagtcctgcccggtatgcggcggttctga

SEQ ID NO: 469236 - DNA, 75 bp, synthetic construct
  source 1..75: mol_type = other DNA
cccgttcgacaccatgagcgaagcggagttttccgccatgagtaccagcgaaaaggccatgcgtatctatgagca

SEQ ID NO: 469237 - DNA, 75 bp, synthetic construct
  source 1..75: mol_type = other DNA
accccgtcagaagccgccgggaaggtgaacgccgtgaccggcaatctgtcgccggttgccccggaagtgatggca

SEQ ID NO: 469238 - DNA, 75 bp, synthetic construct
  source 1..75: mol_type = other DNA
cgtggatttcaccccgccggtggcgggggaaacgctggagacgcacgcgccgaatttctggcgctggctcgaccg

SEQ ID NO: 469239 - DNA, 75 bp, synthetic construct
  source 1..75: mol_type = other DNA
gtggctgacttattccagcgtctgcgcgccccgttctcgtccgggaaaattgcctcggtggtggagaccctgaaa

SEQ ID NO: 469240 - DNA, 75 bp, synthetic construct
  source 1..75: mol_type = other DNA
gcgcattctcccggcgctgggtgtaaaggtgattaaaaaccgccatcaggcctgtccggtgtgtggcggctccga

SEQ ID NO: 469241 - DNA, 75 bp, synthetic construct
  source 1..75: mol_type = other DNA
atgtcaggaatgaaagtcagtcaggccgtgaaggctgcccgcggtcactgggctaagattctgccagcgctgggc

SEQ ID NO: 469242 - DNA, 75 bp, synthetic construct
  source 1..75: mol_type = other DNA
gacgaaaatcgccatcggcattttgctgttcatttttattgccttacagcgtggattaacggtgctgtgggagaa

SEQ ID NO: 469243 - DNA, 75 bp, synthetic construct
  source 1..75: mol_type = other DNA
ccactattcgcatttatatgctctccaccggactggcaacgctggcggggattgtcttctcgatttatacccagg

SEQ ID NO: 469244 - DNA, 75 bp, synthetic construct
  source 1..75: mol_type = other DNA
cacggcgcttaccattcatcatctgacaggagaagccgtcatggtggcattttcgtcggtcaactttctttctct

SEQ ID NO: 469245 - DNA, 75 bp, synthetic construct
  source 1..75: mol_type = other DNA
tgtggaactggacgctatcgcgtcggtggtgattggcggtacacttttgagcggcggcgttggaacggtattagg

SEQ ID NO: 469246 - DNA, 75 bp, synthetic construct
  source 1..75: mol_type = other DNA
gtgggatcgatctctccgtcggttcggtgatcgcttttaccggcgtgtttctggcaaaagtgattggcgacttcg

SEQ ID NO: 469247 - DNA, 75 bp, synthetic construct
  source 1..75: mol_type = other DNA
tgatcaccatcggcgtctttgtgctgggctatctctactgcctgacgcagtttcccggttttgcttccacaagag

SEQ ID NO: 469248 - DNA, 75 bp, synthetic construct
  source 1..75: mol_type = other DNA
catcaagcgtgatgctgatccagcatttgatttttgtggctatcttgaggcattacctgacaccaacggcatgtt

SEQ ID NO: 469249 - DNA, 75 bp, synthetic construct
  source 1..75: mol_type = other DNA
gtcttcagcctcttctggagtctggacgtcaaccgcagatacagatggcgggaaacaggcggcagcagcacttgc

SEQ ID NO: 469250 - DNA, 75 bp, synthetic construct
  source 1..75: mol_type = other DNA
cagggaatgcagaccaatctggcacttagagaagaatgcaatgctgactggctaccgaagtgcagtctcgaaatc

SEQ ID NO: 469251 - DNA, 75 bp, synthetic construct
  source 1..75: mol_type = other DNA
acgatgtttggcaaagggttgccagtcatgctgaaggagtacgggctacattatgagaaacggcgaactaatcag

SEQ ID NO: 469252 - DNA, 75 bp, synthetic construct
  source 1..75: mol_type = other DNA
gagaacgtgcggctctgataggtttttctcttattcgcctgcctgatcaggagaagtggagcggcgacggcgccg

SEQ ID NO: 469253 - DNA, 75 bp, synthetic construct
  source 1..75: mol_type = other DNA
acgttaaccgccgataccgatagcgggaaagatgcagcggcagcacttgccgcgcgactgctgcaagcctcgtgt

SEQ ID NO: 469254 - DNA, 75 bp, synthetic construct
  source 1..75: mol_type = other DNA
aacgtgcagctgattaacgcggagggcgtcaagcgcaccccgaagggcgggcaggttaaagaggcctgccacgtt

SEQ ID NO: 469255 - DNA, 75 bp, synthetic construct
  source 1..75: mol_type = other DNA
caactcaaagagaaaattgccagtgagctggcggtaattgttcgccagcttatgcagcgtttcagcgatccaatg

SEQ ID NO: 469256 - DNA, 75 bp, synthetic construct
  source 1..75: mol_type = other DNA
caatggtgtgctcgatacccggacaggattgttcagcccgcacgataagaagcactggttacgtacgctgtgcga

SEQ ID NO: 469257 - DNA, 75 bp, synthetic construct
  source 1..75: mol_type = other DNA
atgtcaggaatgaaagttagccaggctgagaaagctgctcgcggtcactggtcaagaattttacccgcgctgggc

SEQ ID NO: 469258 - DNA, 75 bp, synthetic construct
  source 1..75: mol_type = other DNA
tcaaacgcaccctgaaaggcggtcaggtcaaatgggcatgtcatatcatcgaagggaaaaaacaggcaggaaaac

SEQ ID NO: 469259 - DNA, 75 bp, synthetic construct
  source 1..75: mol_type = other DNA
gcgcattctccctgcgctgggtgtgaaggtgattaaaaaccgccatcagtcctgcccggtatgcggcggctccga

SEQ ID NO: 469260 - DNA, 75 bp, synthetic construct
  source 1..75: mol_type = other DNA
cattacccgacaccaacggcatgtttatgggaaacgccaatattgtcccgcgccagccacgtacatacctttacc

SEQ ID NO: 469261 - DNA, 75 bp, synthetic construct
  source 1..75: mol_type = other DNA
ccccgcctgctcatcattgatgaaacaggctatctgccgttcaatcaggaagaagcaaaactgttcttccaggtc

SEQ ID NO: 469262 - DNA, 75 bp, synthetic construct
  source 1..75: mol_type = other DNA
gccgttcagtcaggaagaagcaaaacggttcttccaggtcatcgataaacgttatgaaaagagcgcaatgatcct

SEQ ID NO: 469263 - DNA, 75 bp, synthetic construct
  source 1..75: mol_type = other DNA
cggcacgtcgtctgattggctttcgcaacggggtactcgatacccaaagcggcgtattcagcccgcaccataaat

SEQ ID NO: 469264 - DNA, 75 bp, synthetic construct
  source 1..75: mol_type = other DNA
gctggtagagaaagtgtttggcgtgaccccgtcagaagctgccggaaagataaacgccgtgaccggcaacctgcc

SEQ ID NO: 469265 - DNA, 75 bp, synthetic construct
  source 1..75: mol_type = other DNA
cgcactggctgcgcacgttgtgcgatgtggatttcaccccgccggtggagggggaaacgctggagacgcacgcgc

SEQ ID NO: 469266 - DNA, 75 bp, synthetic construct
  source 1..75: mol_type = other DNA
gcgaacggccagctcctgtcccgctatgaaaacggcatctggaaaaatatccctgccgccactttttcacggaat

SEQ ID NO: 469267 - DNA, 75 bp, synthetic construct
  source 1..75: mol_type = other DNA
caacaacccgatgcgctttaccgaccgcagcgggggcgtgtcacgccgccgggtaatcctgcacttcccggaaat

SEQ ID NO: 469268 - DNA, 75 bp, synthetic construct
  source 1..75: mol_type = other DNA
cagggcatacagaccaatctggcgctaagagaagaaagcaacgccgactggttaccgaaatgcgatgaccccata

SEQ ID NO: 469269 - DNA, 75 bp, synthetic construct
  source 1..75: mol_type = other DNA
ggggaaacgctggagactcacgcgccgaacttctggcgctggctcgaccgtgcggctggcaaaaatccacaaaaa

SEQ ID NO: 469270 - DNA, 75 bp, synthetic construct
  source 1..75: mol_type = other DNA
caggaaaagtggagtggtgacggggcaggactcaaggccatcaccggcggggatgcggtctccgttgacccgaaa

SEQ ID NO: 469271 - DNA, 75 bp, synthetic construct
  source 1..75: mol_type = other DNA
cagggcatacagaccaatctggcgctcagggaagaaagcaacgccgactggctaccgaaatgcgatgatcccata

SEQ ID NO: 469272 - DNA, 75 bp, synthetic construct
  source 1..75: mol_type = other DNA
gaagggaaaaaacaggccggaaaacgcctgtggatagcggagggttatgcgaccgcgctcaccgtgcatcacctg

SEQ ID NO: 469273 - DNA, 75 bp, synthetic construct
  source 1..75: mol_type = other DNA
gccggttgccccggaggtgattgcggccgcagaagccggaacggaggccgaccggaaagcggcggccgcgctggc

SEQ ID NO: 469274 - DNA, 75 bp, synthetic construct
  source 1..75: mol_type = other DNA
cactgcccgagcctgacggtatgtatatggggaatgcgaatatcatcccgcgacagccgcgcctgtacctgtatc

SEQ ID NO: 469275 - DNA, 75 bp, synthetic construct
  source 1..75: mol_type = other DNA
gcgcattctccctgcgctgggtgtaacggtcatcaaaaaccgccatcaggcctgtccggtgtgtggcggctccga

SEQ ID NO: 469276 - DNA, 75 bp, synthetic construct
  source 1..75: mol_type = other DNA
ccgacaatatgcgcagccggatgctcaccatgggcgattcggtggtgaaaatctctctcgcctcgctggtgggcc

SEQ ID NO: 469277 - DNA, 75 bp, synthetic construct
  source 1..75: mol_type = other DNA
gcggcgcaggtaaaagtaccctgctgaatttgatcgccggttttctgacgccagccagcggttcgctgactatcg

SEQ ID NO: 469278 - DNA, 75 bp, synthetic construct
  source 1..75: mol_type = other DNA
ttgtctggtacgcgaacagccgattttattgctcgatgaaccgttctctgcgctcgatccggcactacgccagga

SEQ ID NO: 469279 - DNA, 75 bp, synthetic construct
  source 1..75: mol_type = other DNA
tgctgaccattgccgtctatctggtgctggtaccattgatggtcttcttcctgctgaaagacaaagagcagatgc

SEQ ID NO: 469280 - DNA, 75 bp, synthetic construct
  source 1..75: mol_type = other DNA
ctgaaaatatgcgcagtcggatgctcagcatgggcgactcggtggtgaaaatttctctcgcctcgctggtaggtt

SEQ ID NO: 469281 - DNA, 75 bp, synthetic construct
  source 1..75: mol_type = other DNA
ttctccgaagcggttaacctgcatccgctggtgattattttatcggtggtgatcttcggtggtttgtggggattc

SEQ ID NO: 469282 - DNA, 75 bp, synthetic construct
  source 1..75: mol_type = other DNA
agcgacagcgcgtggcgttagcgcgttgtctggtacgcgaacagccgattttattgctcgatgaaccgttctctg

SEQ ID NO: 469283 - DNA, 75 bp, synthetic construct
  source 1..75: mol_type = other DNA
caggagaaaatgcacgctatcgcccgccagatggggattgataatttaatggcgcggttaccgggcgagctttcc

SEQ ID NO: 469284 - DNA, 75 bp, synthetic construct
  source 1..75: mol_type = other DNA
gttgctgaacaatgccgccgggatcgacgcgcaacgtggagataacctgacgctttcactgcttaactttgtccc

SEQ ID NO: 469285 - DNA, 75 bp, synthetic construct
  source 1..75: mol_type = other DNA
atgttaaaactgactgatatcacctggctttaccaccatttgccgatgcgttttagcttaacggtggaacgcggc

SEQ ID NO: 469286 - DNA, 75 bp, synthetic construct
  source 1..75: mol_type = other DNA
aagctgaacgcggtacagcaggagaaaatgcacgctatcgcccgtcaaatggggattgataatttaatggcacgg

SEQ ID NO: 469287 - DNA, 75 bp, synthetic construct
  source 1..75: mol_type = other DNA
gtagtagtcgccgacgggcgtatcgcctggcagggtaaaaccgatgagttgttaagcggtaaggcgagtgcttcg

SEQ ID NO: 469288 - DNA, 75 bp, synthetic construct
  source 1..75: mol_type = other DNA
cttattccgtacattggcgcatttgtggtgaccattccggtggttggcgtggcgctattccagtttggtgctggc

SEQ ID NO: 469289 - DNA, 75 bp, synthetic construct
  source 1..75: mol_type = other DNA
tctgttgccattggtggcggcgttgggctgatcggggtcgatgctattcgtggggctgcaatgagagtaatcggt

SEQ ID NO: 469290 - DNA, 75 bp, synthetic construct
  source 1..75: mol_type = other DNA
gagtgaagctaaagtgcgtgacctggtggacaggctaatcaaggcattgaccatcaaagtctctgacccacatct

SEQ ID NO: 469291 - DNA, 75 bp, synthetic construct
  source 1..75: mol_type = other DNA
tgatttatcaggacctctctttatttcctaacctgagtgtctgggagaatatcgccgtgaatcactatcaccacg

SEQ ID NO: 469292 - DNA, 75 bp, synthetic construct
  source 1..75: mol_type = other DNA
tgaataacattcaggacgaaattgaattagtgggcgaaaatgcctccagcattgatgcttatgccgccagtgacc

SEQ ID NO: 469293 - DNA, 75 bp, synthetic construct
  source 1..75: mol_type = other DNA
ggttgatcggtgtcgatgctattcgtggggctgcaatgagtgtaatcggtaataagtttggtggctctaaggagt

SEQ ID NO: 469294 - DNA, 75 bp, synthetic construct
  source 1..75: mol_type = other DNA
aaacgaaaaacgcttgagattctgctttgtggtgctctgacgctgacctttgcatccgcgcttgagtatgtcgga

SEQ ID NO: 469295 - DNA, 75 bp, synthetic construct
  source 1..75: mol_type = other DNA
tggcgcggcgcgggctaactttttcccgacgatttcgctgactgccagcgctggtgttggcagtgacgcattgtc

SEQ ID NO: 469296 - DNA, 75 bp, synthetic construct
  source 1..75: mol_type = other DNA
tctcgctctctcttgatgagaaaaactatggtggcagcatcgtgtctagaaataatttaaaagcattgagggcac

SEQ ID NO: 469297 - DNA, 75 bp, synthetic construct
  source 1..75: mol_type = other DNA
ttgctcacctcattggtcttggcccttccgcttctgaggaagaagaggataaaaaagccaaaaaagcgaaagccc

SEQ ID NO: 469298 - DNA, 75 bp, synthetic construct
  source 1..75: mol_type = other DNA
ctgaaaggggttaccgctatcatcaccatgaccgagtctggtcgtaccgcgctgatgacctcccgtatcagttcc

SEQ ID NO: 469299 - DNA, 75 bp, synthetic construct
  source 1..75: mol_type = other DNA
cggcctgtcggctgaagccctgaccgagaaagataaagcagatatccagactgcggcgctgattggcgtggatta

SEQ ID NO: 469300 - DNA, 75 bp, synthetic construct
  source 1..75: mol_type = other DNA
gcaaagttttcctcaatattggggataaattcctgctcgacgccaacctgggtaaaggtgaaggcgacaaagaaa

SEQ ID NO: 469301 - DNA, 75 bp, synthetic construct
  source 1..75: mol_type = other DNA
gaaccggaagccgtcagcgaaccgtggatcgccacgccggaagaagaacgtaaaaacgtcgacctgccgtcgcta

SEQ ID NO: 469302 - DNA, 75 bp, synthetic construct
  source 1..75: mol_type = other DNA
ctttttccccgtaggccattctgtagaaggtaattacaaaattcactttgagttgagcggtagttgtaaccttag

SEQ ID NO: 469303 - DNA, 75 bp, synthetic construct
  source 1..75: mol_type = other DNA
gattgatgcgctggatactgacgatctggaaatgtggctggcacaggcagaaacacaaatcaaaagtgagtacag

SEQ ID NO: 469304 - DNA, 75 bp, synthetic construct
  source 1..75: mol_type = other DNA
ttttcacgcccacgccacagtcaatggcaacaagtcagcctcaatgcattggttgaagaaactctggtactggtg

SEQ ID NO: 469305 - DNA, 75 bp, synthetic construct
  source 1..75: mol_type = other DNA
aagtgaccgatccagaagagctggaagttgaagatggtgacatcgtgatttgctgcgacatcctcagcgagtgcg

SEQ ID NO: 469306 - DNA, 75 bp, synthetic construct
  source 1..75: mol_type = other DNA
ttcttttagcgctcactacagcaatttgctggggagcgttgccaatcgcaatgaagcaggtgctggaggtcatgg

SEQ ID NO: 469307 - DNA, 75 bp, synthetic construct
  source 1..75: mol_type = other DNA
agtatcgatagtatttaccatgaaccgatttacaaagctgtttacgagtgggctgtaaagtttttctatcgatga

SEQ ID NO: 469308 - DNA, 75 bp, synthetic construct
  source 1..75: mol_type = other DNA
tgaaaataataaatatgaaatacttgcaatttacctgaggagtgagaatgagaacggttcaattgaaccgtttgt

SEQ ID NO: 469309 - DNA, 75 bp, synthetic construct
  source 1..75: mol_type = other DNA
atggcaacgcgcatcgaatttcacaagcatggtggcccggaagtactgcaagccgtggagtttactcctgccgat

SEQ ID NO: 469310 - DNA, 75 bp, synthetic construct
  source 1..75: mol_type = other DNA
aacgacagcgcgtggcgttagcgcgttgtctggtgcgcgaacagccgattttattgctcgatgaaccgttctctg

SEQ ID NO: 469311 - DNA, 75 bp, synthetic construct
  source 1..75: mol_type = other DNA
atcaggcgctaggcgatcgctacaatctctacaacaacttaccgcgtgaagagcgtatccgcgcattgaacgcag

SEQ ID NO: 469312 - DNA, 75 bp, synthetic construct
  source 1..75: mol_type = other DNA
acccagcgccgcatggcgcaagcagaacgcctcgccacactgggtgagctgatggctggcgtcgcgcatgaagta

SEQ ID NO: 469313 - DNA, 75 bp, synthetic construct
  source 1..75: mol_type = other DNA
cgcggatggatttactggaatctgccggagcggcgaaagcggaagtgctgattaacgccatcgatgatccgcaaa

SEQ ID NO: 469314 - DNA, 75 bp, synthetic construct
  source 1..75: mol_type = other DNA
tgcgctccactccagtagcggtaagtaccgcccgtgaaatcagcctggaacctgtcaataaactgatcgacgaca

SEQ ID NO: 469315 - DNA, 75 bp, synthetic construct
  source 1..75: mol_type = other DNA
ttgagcaccatctttccgcagacgaccttgaaacgctggagaaagcagcggtagaagcgtttaaactcggatatg

SEQ ID NO: 469316 - DNA, 75 bp, synthetic construct
  source 1..75: mol_type = other DNA
tcaggttgagcaactgatgacactggcggagaaattcgacgttgagtacgacggttgggggacttactttgaaga

SEQ ID NO: 469317 - DNA, 75 bp, synthetic construct
  source 1..75: mol_type = other DNA
caaccgatgagtggcaggctgccgccaacaaagtgtttcagggggaagaaggtaagaagtttgccttctttgcca

SEQ ID NO: 469318 - DNA, 75 bp, synthetic construct
  source 1..75: mol_type = other DNA
gcttaccgcgttgctgaacaatgccgccggtattgacgcgcaacgtggggataacctgacgctttcactgcttaa

SEQ ID NO: 469319 - DNA, 75 bp, synthetic construct
  source 1..75: mol_type = other DNA
ggctacgtctcgctctacggacgccaggaaaatctgcccgtgtcgcagattgtcaccgtgctggacggcgaaaag

SEQ ID NO: 469320 - DNA, 75 bp, synthetic construct
  source 1..75: mol_type = other DNA
agttgaagatggtgacatcgtgatttgctgcgacatcctcagcgagtgcgcgttgaatgccgatctgatcgatgc

SEQ ID NO: 469321 - DNA, 75 bp, synthetic construct
  source 1..75: mol_type = other DNA
aaaaaacggtgattatagagttacggcctctgtgagctctggttcccaggccaatcaacaggtgaattttatcgg

SEQ ID NO: 469322 - DNA, 75 bp, synthetic construct
  source 1..75: mol_type = other DNA
tctggttaccctgccgccgtaccggttcaccagtacgccagaaaccgataacacctggccgattgaagtcaccgc

SEQ ID NO: 469323 - DNA, 75 bp, synthetic construct
  source 1..75: mol_type = other DNA
ttatgcgggatgggaattaaactacgccgcttaactgcgggtatctgcctggtaactcaacttgcgttccctatg

SEQ ID NO: 469324 - DNA, 75 bp, synthetic construct
  source 1..75: mol_type = other DNA
gtagacctattaatgaacttaacgccggattggttacctttcgcgatgagctgcttgccgatccgctggccttaa

SEQ ID NO: 469325 - DNA, 75 bp, synthetic construct
  source 1..75: mol_type = other DNA
atgctgtcatactgtgttactcaggaatttaccgcaagctgtcgaaaaaatatcacacaattgttataccactgc

SEQ ID NO: 469326 - DNA, 75 bp, synthetic construct
  source 1..75: mol_type = other DNA
ctaagcttgatctctcggaggaaggaaaattcgccatcaatcacatataaaaaattgttacagttgcatggggat

SEQ ID NO: 469327 - DNA, 75 bp, synthetic construct
  source 1..75: mol_type = other DNA
gccatgcttcaggctggaaactttcgggaaaataagggttcgtcaaccaataattttcgggaaatctcggaaacg

SEQ ID NO: 469328 - DNA, 75 bp, synthetic construct
  source 1..75: mol_type = other DNA
attttcaaacatccggccgggaaattattctggtctttaacggatgaaagcaataaagagcaagcggacgttatt

SEQ ID NO: 469329 - DNA, 75 bp, synthetic construct
  source 1..75: mol_type = other DNA
gcgatggtcgccgcgacgggtggtaacatcgtgacgcttgaagtctgcgggccgatgggcgaaaaagtgaatgct

SEQ ID NO: 469330 - DNA, 75 bp, synthetic construct
  source 1..75: mol_type = other DNA
cgacgtggaaaaagccgtggatgaactcttacggtcacagcctgaccaccagcacaagtatctctgcaccggaac

SEQ ID NO: 469331 - DNA, 75 bp, synthetic construct
  source 1..75: mol_type = other DNA
tcgtccgcaatggtgaggagttcttcgaaacgcagagccgcaatgtaaccgactggatgcctctaccagaaccgc

SEQ ID NO: 469332 - DNA, 75 bp, synthetic construct
  source 1..75: mol_type = other DNA
gaggagaagcaacgattaagccgggcaatggtgttgagcaggtaacacactggatgccgctaccggaaccgccgc

SEQ ID NO: 469333 - DNA, 75 bp, synthetic construct
  source 1..75: mol_type = other DNA
tctcctgacaccataaccgccgacggcatcgatagcagcaccgtcacgtcacgagtagaagatgattacggattc

SEQ ID NO: 469334 - DNA, 75 bp, synthetic construct
  source 1..75: mol_type = other DNA
tggggggaaaactggtctatgaacaatactatggcgatgaagtggcgctgtttgacaagaatgatcgtcaaagta

SEQ ID NO: 469335 - DNA, 75 bp, synthetic construct
  source 1..75: mol_type = other DNA
acttttgctcgcggctttgataacgtgcgtcagggtgaagaactggatgttccggcaacaacctcgcagagaagt

SEQ ID NO: 469336 - DNA, 75 bp, synthetic construct
  source 1..75: mol_type = other DNA
tatgaaaaagaaaaaattggaacaacattacatgaaatccaaagcgctaatgaaaaactcaaaaacaaatatctg

SEQ ID NO: 469337 - DNA, 75 bp, synthetic construct
  source 1..75: mol_type = other DNA
tatgaaaaagaaaaaataggaacaacattacatgaaattcaaagcgctaatgaaaaactcaaaaacaaatatcta

SEQ ID NO: 469338 - DNA, 75 bp, synthetic construct
  source 1..75: mol_type = other DNA
taatggttggcgaaaacatcacgctacgaatacacgtacaggatgcgtttaataacgtcatagccggtcaacgcg

SEQ ID NO: 469339 - DNA, 75 bp, synthetic construct
  source 1..75: mol_type = other DNA
cgagtctgactccacgacgctggtggcttctcgctactgggatctttccagcggctggcaacgcgcgattaacct

SEQ ID NO: 469340 - DNA, 75 bp, synthetic construct
  source 1..75: mol_type = other DNA
tcgaattgttcattaaaaagccgcttgaaaacggtcttactcgtggcgaacaaatggaactggcacgtattgctc

SEQ ID NO: 469341 - DNA, 75 bp, synthetic construct
  source 1..75: mol_type = other DNA
tcgaattgttcattaaaaatccgcttgaaaacggccttactcgtggagaacaaatggaactggcacgtattgctc

SEQ ID NO: 469342 - DNA, 75 bp, synthetic construct
  source 1..75: mol_type = other DNA
tcgaattgttcattaaaaatccgcttgaaaacggacttactcgtggcgaacaaatggaactggcacgtattgctc

SEQ ID NO: 469343 - DNA, 75 bp, synthetic construct
  source 1..75: mol_type = other DNA
acaagggtcagattttcgcggcgcaagttttatgaatatgatcaccacccgcacctggttttgtagcgcctatat

SEQ ID NO: 469344 - DNA, 75 bp, synthetic construct
  source 1..75: mol_type = other DNA
ttcatgttttaccgaacaggcaattaatagtgcagaaaaagcacaaggcatgaacatcactcttgttgatggtga

SEQ ID NO: 469345 - DNA, 75 bp, synthetic construct
  source 1..75: mol_type = other DNA
tcgaattgttcattaaaaagccgcttgaaaacggccttactcgtggtgaacaaatggaactggcacgtattgctc

SEQ ID NO: 469346 - DNA, 75 bp, synthetic construct
  source 1..75: mol_type = other DNA
gtgacgccagaccggcgatttcgcgcgcgtgtcgatgatgccatccgcgaaggcctgaaggcgctgggctattac

SEQ ID NO: 469347 - DNA, 75 bp, synthetic construct
  source 1..75: mol_type = other DNA
tcgacaaagtaccgccggatctgcgtttcttcgccggtggcgatcgcagtattcgcggctacaaatacaaatcta

SEQ ID NO: 469348 - DNA, 75 bp, synthetic construct
  source 1..75: mol_type = other DNA
ttaagcgtaccgatcttaacgataccgaatctgactccactacgcttgtggcttcccgttactgggatctctcca

SEQ ID NO: 469349 - DNA, 75 bp, synthetic construct
  source 1..75: mol_type = other DNA
tatccgcttatctttttggtggtatggctgctgatgttgctggcgtggtatcttgttggtctgccgataggtccg

SEQ ID NO: 469350 - DNA, 75 bp, synthetic construct
  source 1..75: mol_type = other DNA
catccgtattgcctttagcgccggtatctccttttgttccactgtttcttggattcctgcaacgctacaaaccag

SEQ ID NO: 469351 - DNA, 75 bp, synthetic construct
  source 1..75: mol_type = other DNA
gcgctggagtctcgaccactttacccagggtgaaattaccaacaccacgatgctgttttacccgggagtgatgat

SEQ ID NO: 469352 - DNA, 75 bp, synthetic construct
  source 1..75: mol_type = other DNA
taccctgacggcaacgatcctggacgcttaccaaaatccgcttaaagaccagcaggtcactttccagagtaacga

SEQ ID NO: 469353 - DNA, 75 bp, synthetic construct
  source 1..75: mol_type = other DNA
gcatcgctggcatcacgaaatgcgcccgctgtgggcggtacatgtggtgcatcatcagggggaacactacaacct

SEQ ID NO: 469354 - DNA, 75 bp, synthetic construct
  source 1..75: mol_type = other DNA
aaaaatagtcgcttgtcctgcaacccgatgcgtgaaagtaacctgccgtttttacgcttaatgggctttcgctca

SEQ ID NO: 469355 - DNA, 75 bp, synthetic construct
  source 1..75: mol_type = other DNA
gcagtttctattattcactacagttggcagttttttaaccataacgcgctcacgccgaaactgggctggctggaa

SEQ ID NO: 469356 - DNA, 75 bp, synthetic construct
  source 1..75: mol_type = other DNA
ctcgttattcttctacgcgcttgcccggtaaaccgcttgttgatatcaacggcaagcccatgattgttcatgtgc

SEQ ID NO: 469357 - DNA, 75 bp, synthetic construct
  source 1..75: mol_type = other DNA
gacgcgcgccgatcatcagtcaggtacagaacgtctggcggaagttgtcgaaaaatgcgcattcagcgacgacac

SEQ ID NO: 469358 - DNA, 75 bp, synthetic construct
  source 1..75: mol_type = other DNA
ttgaacgcgcgcgcgaatcaggtgccgagcgcatcatcgtggcaaccgatcatgaggatgttgctcgcgctgttg

SEQ ID NO: 469359 - DNA, 75 bp, synthetic construct
  source 1..75: mol_type = other DNA
tggcggtggcggcggctggaaacgaaaaacgcttgagattctgctttgtggtgctctgacgctgacctttgcatc

SEQ ID NO: 469360 - DNA, 75 bp, synthetic construct
  source 1..75: mol_type = other DNA
gcggcatagggtttattggcgttgagcagttcagaaaactggtcatcaacattatcaacgttcgcttcggaggca

SEQ ID NO: 469361 - DNA, 75 bp, synthetic construct
  source 1..75: mol_type = other DNA
tgtggcaacgtttctgccaattttatcagcaggaaccgctgcaaagactgcgaaatgcgaatgaacgaggcacat

SEQ ID NO: 469362 - DNA, 75 bp, synthetic construct
  source 1..75: mol_type = other DNA
tctggtctggaagggattagctggcgttttgctggcccattgtgtgttattcgtgagtggtgtggggcgtaagtc

SEQ ID NO: 469363 - DNA, 75 bp, synthetic construct
  source 1..75: mol_type = other DNA
tttaatcctaatgcagttaaaacatataaaaaaaatttcagccataatatagctgagggtgatatttgggaactt

SEQ ID NO: 469364 - DNA, 75 bp, synthetic construct
  source 1..75: mol_type = other DNA
tggagttggtacagagctggtggcgtggagacacaccactgggcgcagtaattatgtcgatcgttatggctggtt

SEQ ID NO: 469365 - DNA, 75 bp, synthetic construct
  source 1..75: mol_type = other DNA
aaatattttcggacgagttatttcaggcgaagaaatccacattgaaaatttgaagttaaacttcttagaaagtat

SEQ ID NO: 469366 - DNA, 75 bp, synthetic construct
  source 1..75: mol_type = other DNA
ggctaaattcccgagcgaaggctttgcaggagcgtattacacactcaacaatgataactttgaagcgggtaaaac

SEQ ID NO: 469367 - DNA, 75 bp, synthetic construct
  source 1..75: mol_type = other DNA
cgcaaaacttacgctaacattgcaagacaagtacggtaacccgatagtgacgtctgatcatctggaatttgtcca

SEQ ID NO: 469368 - DNA, 75 bp, synthetic construct
  source 1..75: mol_type = other DNA
tcaattttgaaatccgatgttgacactctgaaggctgactaccagcagagcgcaaaacttacgctaacattgcaa

SEQ ID NO: 469369 - DNA, 75 bp, synthetic construct
  source 1..75: mol_type = other DNA
ggatgaaagtaagtcaattttgaaatccgacgttggcactctgatggctgactaccagcatagcgcgaaacttac

SEQ ID NO: 469370 - DNA, 75 bp, synthetic construct
  source 1..75: mol_type = other DNA
tcggcactactatgtgcagatgctaaccggtatgaccggaagcgacgctgattccagcccccaactgaccgcctg

SEQ ID NO: 469371 - DNA, 75 bp, synthetic construct
  source 1..75: mol_type = other DNA
accgatcagtccgggcaagtcacggcgacaataaccagtacattggcagaaaccttaacagtcaatgtgcaagtt

SEQ ID NO: 469372 - DNA, 75 bp, synthetic construct
  source 1..75: mol_type = other DNA
cgtctgactgccggagtttgtttattcacacaaatttttttccccgtcatggcgacggcacaaaatgtggttcac

SEQ ID NO: 469373 - DNA, 75 bp, synthetic construct
  source 1..75: mol_type = other DNA
accgatcagtccgggcaagtcacggcgacaataacaggtacattggcagaagctctaattgtcaatgttcaggtc

SEQ ID NO: 469374 - DNA, 75 bp, synthetic construct
  source 1..75: mol_type = other DNA
ccccatgctattaccgcaggcctcaactatacccccttcccgcttctgactctcagtgcggaacagcgtcagggg

SEQ ID NO: 469375 - DNA, 75 bp, synthetic construct
  source 1..75: mol_type = other DNA
cttactgaccagtcaggtcaggccaaagtgacgctgaccagtgacaaagtgaatgtctataccgttacggccata

SEQ ID NO: 469376 - DNA, 75 bp, synthetic construct
  source 1..75: mol_type = other DNA
cgggtcaacgcgtcagattaagtgcgcagccaacaactaacattacgataggcgatacggcttacaccgataata

SEQ ID NO: 469377 - DNA, 75 bp, synthetic construct
  source 1..75: mol_type = other DNA
accaccaatacgctgggtcaggcgacggtaacaatgaccagcaatattgccgggcaacataacgtcgtggtgagc

SEQ ID NO: 469378 - DNA, 75 bp, synthetic construct
  source 1..75: mol_type = other DNA
tctattcaattccaaggaaaataccttcaaatcgcgagtttgattaacgatttcatgtgctcaatactaaacatg

SEQ ID NO: 469379 - DNA, 75 bp, synthetic construct
  source 1..75: mol_type = other DNA
tatcaatattgacaagattgagtctgctctgacgcagaatggcgtcacaaactattcctctaatgtaaaaaacga

SEQ ID NO: 469380 - DNA, 75 bp, synthetic construct
  source 1..75: mol_type = other DNA
aagacttacgacaatatggaagcgaagggcaggaatattggtcagcaagagatttggcaccactactggattatc

SEQ ID NO: 469381 - DNA, 75 bp, synthetic construct
  source 1..75: mol_type = other DNA
caaagcatccgccccgatgatattttagcgcgactggagggtgaggtgtttggcttgctatttaccgaactcaat

SEQ ID NO: 469382 - DNA, 75 bp, synthetic construct
  source 1..75: mol_type = other DNA
gtactactggcaccacaacgaccactaccggcgcaaccacgactgctgctaccactggtggcgtggctgctggcg

SEQ ID NO: 469383 - DNA, 75 bp, synthetic construct
  source 1..75: mol_type = other DNA
gttgatagatgttcatttcttttgcagccatcaattagttgcaaaggctggaaagaagcttttggattaactgtt

SEQ ID NO: 469384 - DNA, 75 bp, synthetic construct
  source 1..75: mol_type = other DNA
cgcgatgtgtgacctgaaaatatttacctggctgggttgggctattccgtgtggagaaccaaccaatattcgccc

SEQ ID NO: 469385 - DNA, 75 bp, synthetic construct
  source 1..75: mol_type = other DNA
taccttgcacaatcaggtaacacgaaaagttcttcactaacggctgataccactatgacctggtatgggcattct

SEQ ID NO: 469386 - DNA, 75 bp, synthetic construct
  source 1..75: mol_type = other DNA
atgaagcttttgaagacagttcctgccatcgttatgttggcggggggcatgtttgcgtcactgaatgcagctgcc

SEQ ID NO: 469387 - DNA, 75 bp, synthetic construct
  source 1..75: mol_type = other DNA
ctctcaaaggcgtaaccgcccccgaagaactgaaaaaaggggatggattcactatctctcctcagcttctgctgg

SEQ ID NO: 469388 - DNA, 75 bp, synthetic construct
  source 1..75: mol_type = other DNA
cgcgatgtgtgacctgaaaatattcacgtggttggggtgggccattccgtgtggagagccaacaaatattcgccc

SEQ ID NO: 469389 - DNA, 75 bp, synthetic construct
  source 1..75: mol_type = other DNA
ttccacgatttattaacgacaaagtggcgttgagtgccgttaatgatcaatacgaaattgtatgcagcatgatcg

SEQ ID NO: 469390 - DNA, 75 bp, synthetic construct
  source 1..75: mol_type = other DNA
gataacgcaaaaacacgcgtacccatgacgataggcgcactctggacggcttaccgtgatgtgggggtgtactga

SEQ ID NO: 469391 - DNA, 75 bp, synthetic construct
  source 1..75: mol_type = other DNA
cgctggtaatacggttattaaccagggcaccattaatctggagaaaaacggtaattacgatagtagcctgggcgt

SEQ ID NO: 469392 - DNA, 75 bp, synthetic construct
  source 1..75: mol_type = other DNA
atcggtattctgatcgacggcgacaaagccatcgttaacaacgacggtgacaacgccatcagtaacggcggcacc

SEQ ID NO: 469393 - DNA, 75 bp, synthetic construct
  source 1..75: mol_type = other DNA
aacggcggcaccggcacgcaggttaacggcgacgaagccaccgtgaacaataacggcaacaccaccgttgacggc

SEQ ID NO: 469394 - DNA, 75 bp, synthetic construct
  source 1..75: mol_type = other DNA
tacggcgatatcaataaaacagccgatgctaatgtgaaacaacagtacctggagttccgtagtgaaggggcgaaa

SEQ ID NO: 469395 - DNA, 75 bp, synthetic construct
  source 1..75: mol_type = other DNA
acaaaaaagacggtaatgttgttaacagtggtgcgctttccggtgctgatattgcgattagtagcggtaagttag

SEQ ID NO: 469396 - DNA, 75 bp, synthetic construct
  source 1..75: mol_type = other DNA
tataacagtggtaccgccattaacgatcaaaccggtgttatcaatattaatgctgacaatgggcaggcattttat

SEQ ID NO: 469397 - DNA, 75 bp, synthetic construct
  source 1..75: mol_type = other DNA
gatgttactgcaaaagcgctagcgaccagcggtgttgatgccagtaccaaccatgcatacttctggaaccaaaat

SEQ ID NO: 469398 - DNA, 75 bp, synthetic construct
  source 1..75: mol_type = other DNA
ctggtatctcggtgccagcagtagtagtgatagcaataatgccagcatgatggagatttataatactgcggtgtt

SEQ ID NO: 469399 - DNA, 75 bp, synthetic construct
  source 1..75: mol_type = other DNA
ctgttatcagtgttgatggaaaatcgtccgttcatctgaacggggattccactattagcggtgatgtgctgctcg

SEQ ID NO: 469400 - DNA, 75 bp, synthetic construct
  source 1..75: mol_type = other DNA
acgagtgttaagtaaccgcttcagcatgttgtccgatgcagcaccggaagttgcaaacggtctggccttcaacgt

SEQ ID NO: 469401 - DNA, 75 bp, synthetic construct
  source 1..75: mol_type = other DNA
aggcaacaacggtatttaatgaagcacgagtgttaagtaaccgcttcagcatgttgtccgatgcagcaccggaag

SEQ ID NO: 469402 - DNA, 75 bp, synthetic construct
  source 1..75: mol_type = other DNA
tgaagtgcattatgctaattacacactgccagatgtgcccggctcgtcagttttcgtatctaccgacaatgtttc

SEQ ID NO: 469403 - DNA, 75 bp, synthetic construct
  source 1..75: mol_type = other DNA
caccaagagcatcgtggtttgctcaccattatatttttgaatacccagtattacctgcagggttgaaacttggtg

SEQ ID NO: 469404 - DNA, 75 bp, synthetic construct
  source 1..75: mol_type = other DNA
tcagtggttgtttggccggttcttctgtccgttttgatggtggtcacaaaagagctagctttttaatggacaaat

SEQ ID NO: 469405 - DNA, 75 bp, synthetic construct
  source 1..75: mol_type = other DNA
ggaccttgaatcatactttgaggtgtatcgtgataagctgatggcgattctcagaaaacctgcatcacgtaaaaa

SEQ ID NO: 469406 - DNA, 75 bp, synthetic construct
  source 1..75: mol_type = other DNA
ggacaaattaaaggatgtatcggggtttgtggtttgtgctaaatctcccagctgtggcatggagcgcgtgcgtgt

SEQ ID NO: 469407 - DNA, 75 bp, synthetic construct
  source 1..75: mol_type = other DNA
caacaatcaatgcgcgacattcagcaatataccgacaattacaaccagcaatataacgttaatgtcggtaatgga

SEQ ID NO: 469408 - DNA, 75 bp, synthetic construct
  source 1..75: mol_type = other DNA
atgcggcaaattagatttgaaatagtaaacgacgccgtaaaagaaaatgctatcaggcagataagggagatccag

SEQ ID NO: 469409 - DNA, 75 bp, synthetic construct
  source 1..75: mol_type = other DNA
tggccgatttcgccaacgcccatctggcaaccctgggcgagctgtcgggctttatcgtctgcgccaaatcgccga

SEQ ID NO: 469410 - DNA, 75 bp, synthetic construct
  source 1..75: mol_type = other DNA
ggctcattgaggagtgccgcggagaatgcccgccccgtgtcaggaaaaattatattctccagtgtggcccgggtc

SEQ ID NO: 469411 - DNA, 75 bp, synthetic construct
  source 1..75: mol_type = other DNA
acagacaaatatttcttacagaataaaggaggtatatcagggcaagaataaagaagagattattgaagagttgca

SEQ ID NO: 469412 - DNA, 75 bp, synthetic construct
  source 1..75: mol_type = other DNA
tcatattatgataattatgcaataaaacttgattattatggcgagaataataagttcgaaaccagtattgatctt

SEQ ID NO: 469413 - DNA, 75 bp, synthetic construct
  source 1..75: mol_type = other DNA
ttattgctggaaaagatactgaaaaatttcatcagcctaatattggaatttatggtctcggcaagattaaaaatg

SEQ ID NO: 469414 - DNA, 75 bp, synthetic construct
  source 1..75: mol_type = other DNA
tatggaacgaaaagggcctgttgccagggacagtggttttcttgcccgttgtcttatcagtaaacctgccaccac

SEQ ID NO: 469415 - DNA, 75 bp, synthetic construct
  source 1..75: mol_type = other DNA
gctcagcaaattacgcaggctccccttgggcttgtggcagcgtctgccctgggcgctgtttcacttgtctgccag

SEQ ID NO: 469416 - DNA, 75 bp, synthetic construct
  source 1..75: mol_type = other DNA
accccggtggttttctggctggaattggtgcgcaaaatgagaatgcgccaaaggcgagtgatgtaaatgagacac

SEQ ID NO: 469417 - DNA, 75 bp, synthetic construct
  source 1..75: mol_type = other DNA
aaagtatttcttaggtgatggaatgactgatattgccaaaatgaacattgaaaaatggactaaggaatgtgaaaa

SEQ ID NO: 469418 - DNA, 75 bp, synthetic construct
  source 1..75: mol_type = other DNA
aacagcgcgtggtcagaatatcacgatgcgcggtcaggatttatcgatgcagagagcatcaatgaaaggggcggt

SEQ ID NO: 469419 - DNA, 75 bp, synthetic construct
  source 1..75: mol_type = other DNA
cacctcggaatggctgctcttggtccgattgattacttcaatgttcaggacaagatggctggtcgtgagattgac

SEQ ID NO: 469420 - DNA, 75 bp, synthetic construct
  source 1..75: mol_type = other DNA
gtctattggactttatcgtggctgtagttggtattgctgtctggccttttattttctggctggtggctattgtag

SEQ ID NO: 469421 - DNA, 75 bp, synthetic construct
  source 1..75: mol_type = other DNA
acagaagtaggggagcttcatttgtgtctattggactttatcgtggctgtagttggtattgctgtctggcctttt

SEQ ID NO: 469422 - DNA, 75 bp, synthetic construct
  source 1..75: mol_type = other DNA
accgcccattatgggcggcagccgcaggctatgactttaattatatggattgcatgtcttatactgccaatgcat

SEQ ID NO: 469423 - DNA, 75 bp, synthetic construct
  source 1..75: mol_type = other DNA
atggctacttggcaaggaaaaaatggcggattgttggctggtatcggtggtgtcaactcaaacgctccgaacgta

SEQ ID NO: 469424 - DNA, 75 bp, synthetic construct
  source 1..75: mol_type = other DNA
tcaggcgagagggcaaaacctttcctatcagtcagcaatgactgggcacaatatcgcagcacaacgcttggccct

SEQ ID NO: 469425 - DNA, 75 bp, synthetic construct
  source 1..75: mol_type = other DNA
agcgacgaaacgcgcagtttaatgagtttaaagctgagtggatgagcgcgaatggcaaccctggacaatcgcgta

SEQ ID NO: 469426 - DNA, 75 bp, synthetic construct
  source 1..75: mol_type = other DNA
tggatgtggcgaaaatgtatcagcaaaacccacaaggtttcacagagtttgttgatcaccttggaatggccgcgc

SEQ ID NO: 469427 - DNA, 75 bp, synthetic construct
  source 1..75: mol_type = other DNA
tctacgaaggcgtcgacaacgaggggaatatggttcgcgttcctgccagttcaatcgcagcgcctgcaacatcgt

SEQ ID NO: 469428 - DNA, 75 bp, synthetic construct
  source 1..75: mol_type = other DNA
ctggcagcaagtgccagactggcagcttcatctccagaagccatgatgtcatggttgcagaacaactcatctgag

SEQ ID NO: 469429 - DNA, 75 bp, synthetic construct
  source 1..75: mol_type = other DNA
ccttgagactgcccgctcggcgcatctcgccaatgccagccgtatggatgaaaccacgacggccatcagccaggt

SEQ ID NO: 469430 - DNA, 75 bp, synthetic construct
  source 1..75: mol_type = other DNA
cacggtattgatatcaccggtgacagcgcgacggtggataacaagggcaccatgaccgtcaccgatccggagtcc

SEQ ID NO: 469431 - DNA, 75 bp, synthetic construct
  source 1..75: mol_type = other DNA
gtgtgccaatcggggaatgagtacaataatacagatgatttcacctcactgatctataccggtggcgatacgatt

SEQ ID NO: 469432 - DNA, 75 bp, synthetic construct
  source 1..75: mol_type = other DNA
tgcggccacgcccggtcagcgaaaagtctggcaggaaaaaatgcaggaacgtgaagccgatctgaaagcacgagg

SEQ ID NO: 469433 - DNA, 75 bp, synthetic construct
  source 1..75: mol_type = other DNA
tgcggccacgcccgttcagcggaaagtctggcaggaaaaaatgcgggaacgtgaagccgacctgaaagcacgggg

SEQ ID NO: 469434 - DNA, 75 bp, synthetic construct
  source 1..75: mol_type = other DNA
ccgtctgaccgatgaaccggtgctgtttaaaacaggactgtcggcctccacgctgccgcatatggagcatgacgt

SEQ ID NO: 469435 - DNA, 75 bp, synthetic construct
  source 1..75: mol_type = other DNA
tttttctgagaaatgagttgaaagaacataacaaacaattagttgaggcagcgcagcaagctggggtagcgacag

SEQ ID NO: 469436 - DNA, 75 bp, synthetic construct
  source 1..75: mol_type = other DNA
cattcaggaacttggcggaaccatgcctgaggagttgccgaccccgcaggtcagcatcaagcagttggaaaacag

SEQ ID NO: 469437 - DNA, 75 bp, synthetic construct
  source 1..75: mol_type = other DNA
caatccgtatttggggcacgattggatttattgtcgcgatgtgggcggtgagtttggcaggttttgaattaagtc

SEQ ID NO: 469438 - DNA, 75 bp, synthetic construct
  source 1..75: mol_type = other DNA
acgggcacatcgaattcatttatttttaataacgatgtcagtagcataacagggttagtcgctcaatcgaatagc

SEQ ID NO: 469439 - DNA, 75 bp, synthetic construct
  source 1..75: mol_type = other DNA
agtgataataacgtgacgctggatggaaagttaactgttgtatcagacagtgaggttacttctcgtcagagtaat

SEQ ID NO: 469440 - DNA, 75 bp, synthetic construct
  source 1..75: mol_type = other DNA
gacgctggcggcaaaagatctaaaagtggtcgggcagaaagcgacgggcataaacgtttctggcgatgcgaatac

SEQ ID NO: 469441 - DNA, 75 bp, synthetic construct
  source 1..75: mol_type = other DNA
caggaaaacggcactgattccggcgcatggcgtaccgcctttcgtgccggaggtgctgtcattaccgatgagctg

SEQ ID NO: 469442 - DNA, 75 bp, synthetic construct
  source 1..75: mol_type = other DNA
tctggaaccggttctggaagcaatgaacgcttgtggatctcttgaatggacgcgtcagcgtgccgaggaagaagc

SEQ ID NO: 469443 - DNA, 75 bp, synthetic construct
  source 1..75: mol_type = other DNA
attgcgtgtgagttaacgcatgaagcacagggatattctgcgtctctctcgtcgcacttgctgcgcgataaggag

SEQ ID NO: 469444 - DNA, 75 bp, synthetic construct
  source 1..75: mol_type = other DNA
ctcagaggctggaaaacttctgcagattgcgtgtgagttaacgcatgaagcacagggatattctgcgtctctctc

SEQ ID NO: 469445 - DNA, 75 bp, synthetic construct
  source 1..75: mol_type = other DNA
ggggtatatcgctctgttctggctgctggttcgcaggctggtacggtacgtgtaactgcaaaagttcagggaaaa

SEQ ID NO: 469446 - DNA, 75 bp, synthetic construct
  source 1..75: mol_type = other DNA
gaagctgcggctcagtgttccggtattctggcaggctgtacgccggaagaggaaaaaggcctgcaagattatggt

SEQ ID NO: 469447 - DNA, 75 bp, synthetic construct
  source 1..75: mol_type = other DNA
agacaaagccatcgcagcgttacaggtgctcccggacaccccgtggcgagaagcactcatcggcctcgcgcacat

SEQ ID NO: 469448 - DNA, 75 bp, synthetic construct
  source 1..75: mol_type = other DNA
cccgtgaccgcgttgaagacgctaccctggttctgagcgttggcgacgaagttgaagctaaattcactggcgttg

SEQ ID NO: 469449 - DNA, 75 bp, synthetic construct
  source 1..75: mol_type = other DNA
ttaaaaaggaattgcgagaatatgttaataaaatacgagtgaatactaattatttccgaagtgattttattgctg

SEQ ID NO: 469450 - DNA, 75 bp, synthetic construct
  source 1..75: mol_type = other DNA
tgccctcgtcagagcaatgaaactcagcattctggttaaagaaaatccgcttgccaacaccatcggtcatcaggg

SEQ ID NO: 469451 - DNA, 75 bp, synthetic construct
  source 1..75: mol_type = other DNA
atgaatcaggtaaaaatgaacactgttggcctgctggaatcgttggatgaacgtctggctcaggtctatgcgctc

SEQ ID NO: 469452 - DNA, 75 bp, synthetic construct
  source 1..75: mol_type = other DNA
caaattttcgtacccctgggctagaggagtgcagaagaattgtttcaacccttaatcggcttggcgctcattgtg

SEQ ID NO: 469453 - DNA, 75 bp, synthetic construct
  source 1..75: mol_type = other DNA
ctgcgaaagcgaaaaacggcgtgattggttgcggtccagacataccctggtgcagctactttttaaagcattgac

SEQ ID NO: 469454 - DNA, 75 bp, synthetic construct
  source 1..75: mol_type = other DNA
gtgaagagaaaagtgtggagtctgcgctggctgactattttgctgccatcgccaactgctttaccagcaaagaca

SEQ ID NO: 469455 - DNA, 75 bp, synthetic construct
  source 1..75: mol_type = other DNA
tgctgacctttggcattccggccttcaagctggaaaaagaggtgatgacgcgccgccgtgaaatcttcaccggca

SEQ ID NO: 469456 - DNA, 75 bp, synthetic construct
  source 1..75: mol_type = other DNA
ttcgcaaggccgcatcatcgctccggaaggcagcgacaatgctttccagaccagcaacccgaaaatctttgctgg

SEQ ID NO: 469457 - DNA, 75 bp, synthetic construct
  source 1..75: mol_type = other DNA
cgcatcaaactaataccctgccggaagtgtgtggacgcgtctgcccacaggatcgcctgtgcgaaggctcctgca

SEQ ID NO: 469458 - DNA, 75 bp, synthetic construct
  source 1..75: mol_type = other DNA
tcaatgttctggcttcaaccgcgccagtttcgcagccagccacaacccgcaagcgttcacttgaccagcggatgc

SEQ ID NO: 469459 - DNA, 75 bp, synthetic construct
  source 1..75: mol_type = other DNA
attgaagtgaatggcaacggcaaagtcagcggcgtgaaaatggtgcgtaccgaaatgggcgaacccgatgctaaa

SEQ ID NO: 469460 - DNA, 75 bp, synthetic construct
  source 1..75: mol_type = other DNA
gcatggaaggcaaacgcgtagtggtacttggcggcggcgacaccgcgatggactgcgtgcgcacttccgtgcgcc

SEQ ID NO: 469461 - DNA, 75 bp, synthetic construct
  source 1..75: mol_type = other DNA
ccagcaacccgaaaatctttgctggcggcgatatcgtccgtggttccgatctggtggtgaccgctattgccgaag

SEQ ID NO: 469462 - DNA, 75 bp, synthetic construct
  source 1..75: mol_type = other DNA
ggccgtcgccgcgcggagatcgttgcaggttccgaacatatcgttccggcagatgcggtgatcatggcgtttggt

SEQ ID NO: 469463 - DNA, 75 bp, synthetic construct
  source 1..75: mol_type = other DNA
cgaatacagggccacggtcggggatggagacacaaaagaaatcccgctggctgtagggatgctctggtcggttta

SEQ ID NO: 469464 - DNA, 75 bp, synthetic construct
  source 1..75: mol_type = other DNA
caccaaacagttaatgggctttggtgaaacccgcgaagaaccgttcgtcagcatggaaggcaaacgcgtggtggt

SEQ ID NO: 469465 - DNA, 75 bp, synthetic construct
  source 1..75: mol_type = other DNA
gactgcgtacgcacgtctgtacgccagggtgcaaagcacgttacctgtgcctatcgtcgtgatgaagagaacatg

SEQ ID NO: 469466 - DNA, 75 bp, synthetic construct
  source 1..75: mol_type = other DNA
agtttgcggacgtgtctgcccgcaagaccgtctgtgcgaaggttcctgcaccctgaacgatgagtttggcgcggt

SEQ ID NO: 469467 - DNA, 75 bp, synthetic construct
  source 1..75: mol_type = other DNA
ataatttaagaatggataccgtgggtggaattaacaatacctgctcaggccaatgccatgtaaccgcctcactga

SEQ ID NO: 469468 - DNA, 75 bp, synthetic construct
  source 1..75: mol_type = other DNA
caggaagcccaggacgtcatcggtcaggtacatccgcaaaccgcgcctgcccgtgcggtgctggagaaagaaggt

SEQ ID NO: 469469 - DNA, 75 bp, synthetic construct
  source 1..75: mol_type = other DNA
attgaggtggcggttgggctgaacgatccctggtacaactatcgcgtcggcacgctggttcacgcctcaaaagag

SEQ ID NO: 469470 - DNA, 75 bp, synthetic construct
  source 1..75: mol_type = other DNA
aggcaccgtggcggggatttgcgccattgaggtggcagttgggctgaacgatccctggtacaactatcgcgtcgg

SEQ ID NO: 469471 - DNA, 75 bp, synthetic construct
  source 1..75: mol_type = other DNA
gacatcttcgacggtgggccgacgctggagtgcgacatcgaccgtgttcgcgccatccgcaaaagtcggctggtg

SEQ ID NO: 469472 - DNA, 75 bp, synthetic construct
  source 1..75: mol_type = other DNA
cgccgcacaactggacgctctcaagtgtcatgccggggatcacgttcgtctggtacgcctgtgcgcagaggagaa

SEQ ID NO: 469473 - DNA, 75 bp, synthetic construct
  source 1..75: mol_type = other DNA
ccgtgcggtgctggagaaagaaggttttcgctaccgtaactatatcgacatctttgacggcgggccgacgcttga

SEQ ID NO: 469474 - DNA, 75 bp, synthetic construct
  source 1..75: mol_type = other DNA
tggcaaagcctcggcaagcgtttcttttcgatggattttagccgcgccgattttctctgcggtaccggtcaaaaa

SEQ ID NO: 469475 - DNA, 75 bp, synthetic construct
  source 1..75: mol_type = other DNA
cctggcaaggcgaactgcccaaaagtgagcagggttatgtgtttgtactggaagatagtgagacaggcactgtgg

SEQ ID NO: 469476 - DNA, 75 bp, synthetic construct
  source 1..75: mol_type = other DNA
gatttcacgccagtgatgaggcgcattttcaagggaaagcgcacccgccatgtgatgttgtttgatgaactgcct

SEQ ID NO: 469477 - DNA, 75 bp, synthetic construct
  source 1..75: mol_type = other DNA
atcgcgctttatgtttatggcggcttttcgcgacaagtttaatgacaaagtggtcgccgaaatgcgcggggtgat

SEQ ID NO: 469478 - DNA, 75 bp, synthetic construct
  source 1..75: mol_type = other DNA
gaagtggcagaagggcagcctgcgcagggcgattttccggcctgcctggtcgccaatgaaaattatcaccatttc

SEQ ID NO: 469479 - DNA, 75 bp, synthetic construct
  source 1..75: mol_type = other DNA
cgctgtttctcagtaacgatcacaccggcagcagcgagctgtgtacgctgtttctcgacccggactggcgcaaag

SEQ ID NO: 469480 - DNA, 75 bp, synthetic construct
  source 1..75: mol_type = other DNA
atgtgggaacaggggaaaatcagataccggacatggcttcatttagtggggtgagggattattacggaaaacaac

SEQ ID NO: 469481 - DNA, 75 bp, synthetic construct
  source 1..75: mol_type = other DNA
agcggcaaaacggggtgtgggaacaggggaaaatcagataccggacatggcttcatttagtggggtgagggatta

SEQ ID NO: 469482 - DNA, 75 bp, synthetic construct
  source 1..75: mol_type = other DNA
ttacgccaaacgaaacggaagcagaaaagctcaccggtattcgtgttgaaaatgatgaagatgcagcgaaggcgg

SEQ ID NO: 469483 - DNA, 75 bp, synthetic construct
  source 1..75: mol_type = other DNA
ttgctcggcgaggcgacggttgaatcgctccgccatgccctcttttttgagaaaacactcaccagcggcgaagac

SEQ ID NO: 469484 - DNA, 75 bp, synthetic construct
  source 1..75: mol_type = other DNA
gtgtgaagataaaaacgcaacaccacattcgccgcagcagcgaatggaaaggttaatcagccaggcgctggttcc

SEQ ID NO: 469485 - DNA, 75 bp, synthetic construct
  source 1..75: mol_type = other DNA
agaggaaaaccgttaaaaaaggtgttttctcatcatctgtaacaactattcttgaaaatcagggaatttatactg

SEQ ID NO: 469486 - DNA, 75 bp, synthetic construct
  source 1..75: mol_type = other DNA
tgatcctgatgacctttaatcagcaaggtcgcccgtgtgttttccaggtcgatggtttttacaccgcaaacgaaa

SEQ ID NO: 469487 - DNA, 75 bp, synthetic construct
  source 1..75: mol_type = other DNA
aatgcgcaattttaccgtgctgacctcgatcgtaatggcattcaggatttggttatctggcgaggtgtttcggga

SEQ ID NO: 469488 - DNA, 75 bp, synthetic construct
  source 1..75: mol_type = other DNA
gtcaggtgctttattgcgccatccaggttgcaggtgacaggctggtgaacagtaaacatattatccgctatgaaa

SEQ ID NO: 469489 - DNA, 75 bp, synthetic construct
  source 1..75: mol_type = other DNA
aatgcgcaactttaccgtgccgatcttgatcgtaacggcattcaggatctggttatctggcggggtatttcagga

SEQ ID NO: 469490 - DNA, 75 bp, synthetic construct
  source 1..75: mol_type = other DNA
aaacctgtcgccggacgtaacccgcaaacgaaagatctggtgctgacacagcgttgtttaataaagggtgatgtg

SEQ ID NO: 469491 - DNA, 75 bp, synthetic construct
  source 1..75: mol_type = other DNA
tacctccaaccgtaaactcgtcattaaacctgtcgccggacgtaacccgcaaacgaaagatctggtgctgacaca

SEQ ID NO: 469492 - DNA, 75 bp, synthetic construct
  source 1..75: mol_type = other DNA
gcggaatcagtacgggcgacgatcgcagaacatcgtgaacatttgctggagtttatccgtctggatgaacccgcc

SEQ ID NO: 469493 - DNA, 75 bp, synthetic construct
  source 1..75: mol_type = other DNA
gaagcgcgtcgccgtatttatatggtggataaagacggtctcctgctgaaagacaatccgtcattaacagacttt

SEQ ID NO: 469494 - DNA, 75 bp, synthetic construct
  source 1..75: mol_type = other DNA
ggtattgatcctcagatgtgcctgccgatggttctggatgtggggaccaacaatacgtcattactggagagtccc

SEQ ID NO: 469495 - DNA, 75 bp, synthetic construct
  source 1..75: mol_type = other DNA
ttccgtcagataatatcaggatcatcgttgtgactgacggggaacgtattcttggactgggagaccagggcattg

SEQ ID NO: 469496 - DNA, 75 bp, synthetic construct
  source 1..75: mol_type = other DNA
aactcagctgcgttctctgaccaagggtcgtgcatcatacactatggaattcctgaagtatgatgaagcgccgag

SEQ ID NO: 469497 - DNA, 75 bp, synthetic construct
  source 1..75: mol_type = other DNA
ttggggatcaaccaagtacaataaaaaacattgtacaatatttatttgcagccattattaccattagtttcatta

SEQ ID NO: 469498 - DNA, 75 bp, synthetic construct
  source 1..75: mol_type = other DNA
agcagtggccctgggaacgctgctgtctgcctgccgacataaaagacagacattatcttcgcagaccctgctttt

SEQ ID NO: 469499 - DNA, 75 bp, synthetic construct
  source 1..75: mol_type = other DNA
ttcccttttggctgtttattccgatcatatctaccgcaatcaaccattgatgctccgcgagaataagccgctgat

SEQ ID NO: 469500 - DNA, 75 bp, synthetic construct
  source 1..75: mol_type = other DNA
ctcgctatgggcacaatggtatatcggcctgatggtgccaccattaatgctggcgctactgacgcaggaaaaggc

SEQ ID NO: 469501 - DNA, 75 bp, synthetic construct
  source 1..75: mol_type = other DNA
tggcgctgctgacgcaggaaaaagcgttagacctttccccagaacatttccacgttgagtttcacgaaaccgggc

SEQ ID NO: 469502 - DNA, 75 bp, synthetic construct
  source 1..75: mol_type = other DNA
tggatttacaaaggaatggccacacgcaattgctggatatgcagtttgattccggttactggataaccagtctgt

SEQ ID NO: 469503 - DNA, 75 bp, synthetic construct
  source 1..75: mol_type = other DNA
gatggtttttataccgcaagtgaaactggcattgatgatttgctggatttacaaaggaatggccacacgcaattg

SEQ ID NO: 469504 - DNA, 75 bp, synthetic construct
  source 1..75: mol_type = other DNA
gacacacaaacggaagatctgtcgctgacgcaacgttgcttgataaagggggatgtgcttgatggggtgaatcag

SEQ ID NO: 469505 - DNA, 75 bp, synthetic construct
  source 1..75: mol_type = other DNA
actcgccagaaggtattattcatcttctggataagcgctactgtaagcaacgattaatcgaacacgcgatcccga

SEQ ID NO: 469506 - DNA, 75 bp, synthetic construct
  source 1..75: mol_type = other DNA
caacgcgccaaaagcgctggcgtctgtcgacaaacgcggtgtaccggttaatactattctggtgtctgcgctggt

SEQ ID NO: 469507 - DNA, 75 bp, synthetic construct
  source 1..75: mol_type = other DNA
ggcgcgatagggaccgggctattcctgggtagcgcctccgtaatacagtctgcagggccagggattatcctgggt

SEQ ID NO: 469508 - DNA, 75 bp, synthetic construct
  source 1..75: mol_type = other DNA
cggttgaatctaaagacaaacaagctctttggattctgcttaacgaaaagcgtactgttgcagacgttgcagaat

SEQ ID NO: 469509 - DNA, 75 bp, synthetic construct
  source 1..75: mol_type = other DNA
tatttttcttatggcggatttaataggatatataagttatttcaaagtaaaatgttttttgatcttgagaaaaga

SEQ ID NO: 469510 - DNA, 75 bp, synthetic construct
  source 1..75: mol_type = other DNA
aaagcgatgaattcaggactcgcagtgacagaaacacgttataaaggtttaaacgagagagctgatgaacttatc

SEQ ID NO: 469511 - DNA, 75 bp, synthetic construct
  source 1..75: mol_type = other DNA
gtcgccgaccttatcgtccagccaacgggggcctcccttgacgatcttgtcccggccattaaagttttcaacgcg

SEQ ID NO: 469512 - DNA, 75 bp, synthetic construct
  source 1..75: mol_type = other DNA
attacgctgactatcgtaatgggcctgatgttgctggtttactggcgcgcttctcgtctgctgaataagaaggtg

SEQ ID NO: 469513 - DNA, 75 bp, synthetic construct
  source 1..75: mol_type = other DNA
cgacagtattacgtagagcaactcaaaaagctgaatgttagcgatgtcaaatttgcaccgtttaaatatcagatg

SEQ ID NO: 469514 - DNA, 75 bp, synthetic construct
  source 1..75: mol_type = other DNA
cgaactacaaaaggcaaaccctgactggtgttttgttgaagatgccggacggggctatcgccgcgtggtcgcctc

SEQ ID NO: 469515 - DNA, 75 bp, synthetic construct
  source 1..75: mol_type = other DNA
gcaacgttcggccggagcaagaaacatcgccacaatggcaacccggagaggctaccagatggggcgcagacttgc

SEQ ID NO: 469516 - DNA, 75 bp, synthetic construct
  source 1..75: mol_type = other DNA
acgtgagctggtaaaacattctccgggcaactttggctcctggcgttcacgctggagtacagagctactggcaat

SEQ ID NO: 469517 - DNA, 75 bp, synthetic construct
  source 1..75: mol_type = other DNA
ctcgcgtcagtgacgttgccagaacgctctgctgcgcccgttcctccgtcaggcgctggattaactggttcacgc

SEQ ID NO: 469518 - DNA, 75 bp, synthetic construct
  source 1..75: mol_type = other DNA
atggctataaatgacgccggaatgttcaccgtgaaagaaatcaatcgcctcaaaatccttcaggatgtcatcgat

SEQ ID NO: 469519 - DNA, 75 bp, synthetic construct
  source 1..75: mol_type = other DNA
cgcggcaagcctgctgatggagcaagtattagctccgcgcttcgagttcaagcctaagaacccagaaagtggtcc

SEQ ID NO: 469520 - DNA, 75 bp, synthetic construct
  source 1..75: mol_type = other DNA
ctcaggatgagtccaggttcgataccgtcacctatacctactacgaacaactcaacggttacgaatacctcaagc

SEQ ID NO: 469521 - DNA, 75 bp, synthetic construct
  source 1..75: mol_type = other DNA
atttgctggataacgccgtgcgctacagtccacaaggtagcgtggtagacgtcacgctgaatgccgataatttca

SEQ ID NO: 469522 - DNA, 75 bp, synthetic construct
  source 1..75: mol_type = other DNA
ttggagtagtttttagcataaataataatccccagtgtaattcaaccactgacaatagaaatgtattcaacaaag

SEQ ID NO: 469523 - DNA, 75 bp, synthetic construct
  source 1..75: mol_type = other DNA
ttctataataacagagtgtaattatgctcctgacaatacacaacaatatctaaaggttgaagcttattctggtgg

SEQ ID NO: 469524 - DNA, 75 bp, synthetic construct
  source 1..75: mol_type = other DNA
cggagtgcgtcgctttgcgatggacgtgcgcgatttagatatagaccttatcgaccgtatcaatccctttggtga

SEQ ID NO: 469525 - DNA, 75 bp, synthetic construct
  source 1..75: mol_type = other DNA
tcagcttttgcgctgatggttccggtactggcgggttatattgctttctctattgccgatcgtccggggcttact

SEQ ID NO: 469526 - DNA, 75 bp, synthetic construct
  source 1..75: mol_type = other DNA
gaggaaataagaaatatgattctttcagttgataaaaatttgtgggatttgatatatggagccctgaagattctg

SEQ ID NO: 469527 - DNA, 75 bp, synthetic construct
  source 1..75: mol_type = other DNA
tgtacgatagaagcagccaacgcatttgcagaagaatacatggcggattataaccggcgctttgccaaagctagt

SEQ ID NO: 469528 - DNA, 75 bp, synthetic construct
  source 1..75: mol_type = other DNA
ctgttttccagctttgtcgcctggaaacaaacaacggataacgtcgatgagttgttcgacacccaactgatgctg

SEQ ID NO: 469529 - DNA, 75 bp, synthetic construct
  source 1..75: mol_type = other DNA
tagaaaaaacgcataatttctcttcatcatcggggctgagacatctctgccccgatgatgacaaacgcaaaattg

SEQ ID NO: 469530 - DNA, 75 bp, synthetic construct
  source 1..75: mol_type = other DNA
gcacgtcgcaaattcgacaaagcgcagcaggaaggcggtaaagcggctctggttctgggactgtgctttatttct

SEQ ID NO: 469531 - DNA, 75 bp, synthetic construct
  source 1..75: mol_type = other DNA
cagtaataataatgggctggactattttttaagtcttccggggaaaattaccaagaataataagctgaaaacagc

SEQ ID NO: 469532 - DNA, 75 bp, synthetic construct
  source 1..75: mol_type = other DNA
tcaatactatctttactgcactgaactttatcaattggatgaaaaactatcacttgcacatcgcaaacaaataag

SEQ ID NO: 469533 - DNA, 75 bp, synthetic construct
  source 1..75: mol_type = other DNA
atgaaagttatatgtgataatcgttatttccttattgggatcaacaaaacaattgaagatgtcatccagaaaaat

SEQ ID NO: 469534 - DNA, 75 bp, synthetic construct
  source 1..75: mol_type = other DNA
tgtggacgattcagcaaacgttgaacgctccaaaggggcaatacaataatttcgggaagtacagctatcgctcag

SEQ ID NO: 469535 - DNA, 75 bp, synthetic construct
  source 1..75: mol_type = other DNA
tatgggcgattcagcaaacgctgaacgcgccgaaaaatcagcgtaataattttggtggatataattacaggtcgg

SEQ ID NO: 469536 - DNA, 75 bp, synthetic construct
  source 1..75: mol_type = other DNA
aaaacaccgtggaagagcttaaacaggcgttcgccaaagcgtggaagatgctcgaaggcacaccggagcagcaca

SEQ ID NO: 469537 - DNA, 75 bp, synthetic construct
  source 1..75: mol_type = other DNA
cggacgtgtcactgcgtgctgagtcccgactcactgaacgcagccagacgactatcccggcagcaatacgcgatg

SEQ ID NO: 469538 - DNA, 75 bp, synthetic construct
  source 1..75: mol_type = other DNA
gaccgtgttaacaacattgattacattacaactagagccaatggtacatctaaggataatttagaaaatcttcct

SEQ ID NO: 469539 - DNA, 75 bp, synthetic construct
  source 1..75: mol_type = other DNA
ttatttctaaagtccgatataacgacaagcacactcacattacccatgtgtatgtgcatgttgataagggggata

SEQ ID NO: 469540 - DNA, 75 bp, synthetic construct
  source 1..75: mol_type = other DNA
gcagaacaatgacgagctcaaccgctcaggcctgacatttctgcaacatgggcggatcctcaatctgcccgaact

SEQ ID NO: 469541 - DNA, 75 bp, synthetic construct
  source 1..75: mol_type = other DNA
cagtccaaaataccgccgaacggtgagacgtggtgcgggtttaacttttccacgctctcacgacccggtacacct

SEQ ID NO: 469542 - DNA, 75 bp, synthetic construct
  source 1..75: mol_type = other DNA
ttagcgaagaatgttcttcgacactcgccatttattttaagacgaacagtactgagcacagttctaaaccatctg

SEQ ID NO: 469543 - DNA, 75 bp, synthetic construct
  source 1..75: mol_type = other DNA
gacaaaccgccaccggcagtgggcttgggctgtcgattgtccaacgaatcgccaaattacatggcatgaatgttg

SEQ ID NO: 469544 - DNA, 75 bp, synthetic construct
  source 1..75: mol_type = other DNA
gaaagaagttgacgtgacgcaactgaaatcgatgggatttcagaaagtatttatcgctctgcacgggcgcggcgg

SEQ ID NO: 469545 - DNA, 75 bp, synthetic construct
  source 1..75: mol_type = other DNA
tttctgctctgggtttgccggttatcgttaagccgagccgcgaaggttccagtgtgggaatgtcaaaagtagtag

SEQ ID NO: 469546 - DNA, 75 bp, synthetic construct
  source 1..75: mol_type = other DNA
atggcgcaaaaagaaatgaccagaatcactgaagagcgtatatcagagattatttcccgtatcgaaatgtatggt

SEQ ID NO: 469547 - DNA, 75 bp, synthetic construct
  source 1..75: mol_type = other DNA
acaattaaatacttcccgtggcccactgtttctttcttattcctgtcgcaacagaactgcgccaataacccggtg

SEQ ID NO: 469548 - DNA, 75 bp, synthetic construct
  source 1..75: mol_type = other DNA
ggtatgaccagccacagtctggtgccgatggcggcacgtcaggcaggcttaagcttctcgcagttggtagtacga

SEQ ID NO: 469549 - DNA, 75 bp, synthetic construct
  source 1..75: mol_type = other DNA
tgggcgggaactccgcagagagagaagtttctttgaattctggtgctgcagtgttagccgggctgcgtgaaggca

SEQ ID NO: 469550 - DNA, 75 bp, synthetic construct
  source 1..75: mol_type = other DNA
acgtacggctgacgctcaatgcccacggaatcaaacgcaccggacaaccgctattgctaagcctactggtacgaa

SEQ ID NO: 469551 - DNA, 75 bp, synthetic construct
  source 1..75: mol_type = other DNA
cggagatcccacttgaagatctcctgcaatcgtcggtaatggatatttaccacacggcgcaacaggcgaaaattg

SEQ ID NO: 469552 - DNA, 75 bp, synthetic construct
  source 1..75: mol_type = other DNA
atggcgataacggagaagatattccctatagctattttcgctgacgggcaactggtcggtgaagacgatccctgg

SEQ ID NO: 469553 - DNA, 75 bp, synthetic construct
  source 1..75: mol_type = other DNA
ttattgatgcactattggttcataagatggccagggctttattgccgctggtggctgataaaattccgaataagg

SEQ ID NO: 469554 - DNA, 75 bp, synthetic construct
  source 1..75: mol_type = other DNA
cagcaacgcgggaaaatagatgtggactgtggttgtgtgtccactgaaacattcatgcactggctgcgggtagct

SEQ ID NO: 469555 - DNA, 75 bp, synthetic construct
  source 1..75: mol_type = other DNA
tgggctatcgattgtccagcgaatcgccaagctgcatggcatgaatgttgagtttgggaatgcggaacaaggtgg

SEQ ID NO: 469556 - DNA, 75 bp, synthetic construct
  source 1..75: mol_type = other DNA
atcggcgcagggattgccgaaccgtgactcggcggcaagtattgttgcgcaaggaaatttttacggcactgaccg

SEQ ID NO: 469557 - DNA, 75 bp, synthetic construct
  source 1..75: mol_type = other DNA
ggggctgagggcaaaggcctcccggaagttcagcccggtcagctaccgcgcacacggcctgcctgtgtcagaaaa

SEQ ID NO: 469558 - DNA, 75 bp, synthetic construct
  source 1..75: mol_type = other DNA
ggagcaataccggttatttgatcaactggtatctgactgagatgaaacagctgctcggcgaggcgacggttgaat

SEQ ID NO: 469559 - DNA, 75 bp, synthetic construct
  source 1..75: mol_type = other DNA
ggttgtgcaggcactagaagcaacgggagagattaacggtaaacttatctggagcaataccggttatttgatcaa

SEQ ID NO: 469560 - DNA, 75 bp, synthetic construct
  source 1..75: mol_type = other DNA
caacaaaaatttggttccaccagcgaattacgcgcgggtgttaacggcggttctggtattgctttaacgggtagc

SEQ ID NO: 469561 - DNA, 75 bp, synthetic construct
  source 1..75: mol_type = other DNA
agagaaaaaacattaaaaatggtgttttctcatcatctgtaacatccatcctggaaaatcagggggggtacgctg

SEQ ID NO: 469562 - DNA, 75 bp, synthetic construct
  source 1..75: mol_type = other DNA
atctgttggagcaggatttttacgccagtggcccgaaccagaagtggacaggagacatcacgtacttacgtacag

SEQ ID NO: 469563 - DNA, 75 bp, synthetic construct
  source 1..75: mol_type = other DNA
ttatctggtggctgctggttggcgttctgctaattggttttgcagtcactgacggtttcgacatgggggtgggca

SEQ ID NO: 469564 - DNA, 75 bp, synthetic construct
  source 1..75: mol_type = other DNA
cagtcgcgggtgctggaaatcggcaccggttcgggatatcaaacggcaatcctggcgcatcttgtccagcatgta

SEQ ID NO: 469565 - DNA, 75 bp, synthetic construct
  source 1..75: mol_type = other DNA
gctgaccaggaaaaaatggggctggctctgggccgtctggctaaagaagacccgtctttccgtgtatggactgac

SEQ ID NO: 469566 - DNA, 75 bp, synthetic construct
  source 1..75: mol_type = other DNA
aacgaaatcaacggcaaactcatctggagtaacactggctatttgatcaactggtatctgacagagatgaaaaaa

SEQ ID NO: 469567 - DNA, 75 bp, synthetic construct
  source 1..75: mol_type = other DNA
attagatgtgtcgccggaacatttccacgttgagtttcacgaaaccggacgcgtcgcctgtttctgggtcgatgt

SEQ ID NO: 469568 - DNA, 75 bp, synthetic construct
  source 1..75: mol_type = other DNA
gcgtatttcaagctctggtgttgtccagtacctcattaaaaaatattccagccaggctattgaggagctgataaa

SEQ ID NO: 469569 - DNA, 75 bp, synthetic construct
  source 1..75: mol_type = other DNA
gaccagttcaccaataatggcggtcgtgtcgatgcggtgtacattgtggcaacgccgggtgaaatcgcttttatc

SEQ ID NO: 469570 - DNA, 75 bp, synthetic construct
  source 1..75: mol_type = other DNA
ggaggaggcattaattttccatgctcataaaaaagcaccttcgttaattattcaccactgcgccaaagaaattcc

SEQ ID NO: 469571 - DNA, 75 bp, synthetic construct
  source 1..75: mol_type = other DNA
gaagctgggcggcggcaccgttctgcaacaaaaatttggttccaccagcgaattacgcgcgggagttaacggtgg

SEQ ID NO: 469572 - DNA, 75 bp, synthetic construct
  source 1..75: mol_type = other DNA
cagcaggatggcgcgagtattgtggtcggtccgttgctgaaaaataacgttgaagagttactgaaaagcaacacc

SEQ ID NO: 469573 - DNA, 75 bp, synthetic construct
  source 1..75: mol_type = other DNA
atatcacagcgtgtcgtatttcatttacgtttttcgaaattattatgggatgacgcccacagagtatcaggagcg

SEQ ID NO: 469574 - DNA, 75 bp, synthetic construct
  source 1..75: mol_type = other DNA
ggtttgtcactgatgatgggcggtatagcgcaaatcatatctccacaagctactaacgaaagtgtgagacaggct

SEQ ID NO: 469575 - DNA, 75 bp, synthetic construct
  source 1..75: mol_type = other DNA
ggaggaggcgttaaattttcatgctcataaaaaagtaccttcgttaattattcaccactgtgccagagaaattcc

SEQ ID NO: 469576 - DNA, 75 bp, synthetic construct
  source 1..75: mol_type = other DNA
aggtagctgccgcacctgccgcagacgtagctgaacaacctcagccgcaaaccgtggatggcgttgccagcccgg

SEQ ID NO: 469577 - DNA, 75 bp, synthetic construct
  source 1..75: mol_type = other DNA
ttcaacttcaatgataaaaccattatctccgaagcacagttaactgacatcgctgtaaaattaaaaaaagaatcc

SEQ ID NO: 469578 - DNA, 75 bp, synthetic construct
  source 1..75: mol_type = other DNA
ggctcgcatgtatgcgatgggcgtcgatgcctggtcgctggcaaatcatttctcacaaatgcgccaggttcaggg

SEQ ID NO: 469579 - DNA, 75 bp, synthetic construct
  source 1..75: mol_type = other DNA
ccaggcagcggtatttggtcgcacaattcagcaaggctttgaagcagcgaaaaacattggcactcagccagtggc

SEQ ID NO: 469580 - DNA, 75 bp, synthetic construct
  source 1..75: mol_type = other DNA
ggcgcaggctgattctgccttttacctgcaacagatgcagcaaagctctgatgataccaggatcaactggcaatt

SEQ ID NO: 469581 - DNA, 75 bp, synthetic construct
  source 1..75: mol_type = other DNA
cgtgcactggtgaaagaaggtaaaaccgggcaggcggttgagttgtttaaccaactaccgcaagaactgaacgat

SEQ ID NO: 469582 - DNA, 75 bp, synthetic construct
  source 1..75: mol_type = other DNA
atgaaagaacttgtggtcgttgccattggtggcaacagcattatcaaagataacgccagccagtcgattgagcat

SEQ ID NO: 469583 - DNA, 75 bp, synthetic construct
  source 1..75: mol_type = other DNA
atcatctctaccgtaaccggcgcgcacgtcagtgccgacactctcaccacaccggactactggattgaacagatg

SEQ ID NO: 469584 - DNA, 75 bp, synthetic construct
  source 1..75: mol_type = other DNA
gagagtgcatttccttttacagcgatgaggaactgctggcgatgggaatcagtcctgaatttgttcagcacccag

SEQ ID NO: 469585 - DNA, 75 bp, synthetic construct
  source 1..75: mol_type = other DNA
gttgatctgtatttgcactcttgtgtggaggatggaaaggaacctgcccccccctttaaaaacttgccagtagct

SEQ ID NO: 469586 - DNA, 75 bp, synthetic construct
  source 1..75: mol_type = other DNA
atgaagcatctaaaatataaaggatatttaggtacagtagaaccagattttgaaaataatatcctgtacggaaaa

SEQ ID NO: 469587 - DNA, 75 bp, synthetic construct
  source 1..75: mol_type = other DNA
gggaaaaatcgtttatggaaggaagggaatataagcatgtcgctcatgacggtatgccatgggataacagcccat

SEQ ID NO: 469588 - DNA, 75 bp, synthetic construct
  source 1..75: mol_type = other DNA
gactgacgtctttatgattggtgacgtacagcgcggtccgtcctctattgtcgcggctgtcggaacggctcgacg

SEQ ID NO: 469589 - DNA, 75 bp, synthetic construct
  source 1..75: mol_type = other DNA
aacttgggtaaacatgtggtgattgtcggtgcgggtaacaccgcaatggactgcgcccgtgcggcgttacgcgtt

SEQ ID NO: 469590 - DNA, 75 bp, synthetic construct
  source 1..75: mol_type = other DNA
agcagccgccgatgcagcagttcatcgacaatatgatggacgcatctgaccatccgaaattcgctcaataccgcg

SEQ ID NO: 469591 - DNA, 75 bp, synthetic construct
  source 1..75: mol_type = other DNA
gttattgaaaaccctgaacccgttgtgtcaggttccgacactggcattggaaaatgacgagattatgacggagac

SEQ ID NO: 469592 - DNA, 75 bp, synthetic construct
  source 1..75: mol_type = other DNA
ttcagtggataaatgcttattacaacgtttatcgacctcatacaaacaatggtggtttatcgccttgccgcatga

SEQ ID NO: 469593 - DNA, 75 bp, synthetic construct
  source 1..75: mol_type = other DNA
ataaatactggaacaacgtcaacccggcggaaatctaccaacgtaaaggcgatatctctgtcaccctggtgaaca

SEQ ID NO: 469594 - DNA, 75 bp, synthetic construct
  source 1..75: mol_type = other DNA
ttgttatggcatgcaataaaaactataaccaacatgaagtggctggctgtttaaccctgtcttaccgtgaggtta

SEQ ID NO: 469595 - DNA, 75 bp, synthetic construct
  source 1..75: mol_type = other DNA
ctctgatcgtgcctcgtggcgatggcgcaatcctcaccgcaacgcaaaacggttacggtaaacgtaccgcagtgg

SEQ ID NO: 469596 - DNA, 75 bp, synthetic construct
  source 1..75: mol_type = other DNA
caccaccggtgttcgcggtattcgcttaggtgaaggcgataaagtcgtctctctgatcgtgcctcgtggcgatgg

SEQ ID NO: 469597 - DNA, 75 bp, synthetic construct
  source 1..75: mol_type = other DNA
tggtggcattgcatcatggtcagccgaagatcatgaacctgaaagacattatcgcagcgtttgtccgtcaccgcc

SEQ ID NO: 469598 - DNA, 75 bp, synthetic construct
  source 1..75: mol_type = other DNA
cgctggttgctaatccgtggcagctgggcaacgttgccgcgatgctggaacgtgctggcgacgatgctgcgcgtc

SEQ ID NO: 469599 - DNA, 75 bp, synthetic construct
  source 1..75: mol_type = other DNA
tccgatcgtcaacctgctgccgctggaacaggacgaacgtatcaccgcgatcctgccggtgaccgagtttgaaga

SEQ ID NO: 469600 - DNA, 75 bp, synthetic construct
  source 1..75: mol_type = other DNA
ttggcgcggtgcaggtagatgactgcgaccagatcatgatgatcaccgatgccggtacgctggtacgtactcgcg

SEQ ID NO: 469601 - DNA, 75 bp, synthetic construct
  source 1..75: mol_type = other DNA
cggcgttattgtttacgccagaactgatactggtattgaggtggtatctgcgccagttgcctctggcattcgcat

SEQ ID NO: 469602 - DNA, 75 bp, synthetic construct
  source 1..75: mol_type = other DNA
gaaacattgcgtccagttggtgttatgagcaagggagcattttggcggcctgagaatagtgagtcacgatttatt

SEQ ID NO: 469603 - DNA, 75 bp, synthetic construct
  source 1..75: mol_type = other DNA
atctgccgcacgtattaaagaagaagactttatcgaccgactgctggtggcgaacactcacgaccatattctgtg

SEQ ID NO: 469604 - DNA, 75 bp, synthetic construct
  source 1..75: mol_type = other DNA
ccgatcatcttaagcgtggcattgccgcctggccttgtgcgatttgaaacatcttcggaagacgcgagccagtga

SEQ ID NO: 469605 - DNA, 75 bp, synthetic construct
  source 1..75: mol_type = other DNA
cgcttcgctatttcagctactctttgcttcagatattgcagccttatgcggtgcgatcctcggcggcgttggcgg

SEQ ID NO: 469606 - DNA, 75 bp, synthetic construct
  source 1..75: mol_type = other DNA
aaaaagcaacggtcgtttaccgtcgttcactgcaagagatgcccgcatggcgcgaagagtatgaagaagcgttgc

SEQ ID NO: 469607 - DNA, 75 bp, synthetic construct
  source 1..75: mol_type = other DNA
gttttaaagagggtgaggttgagtggaaagctttgggggaaattggtgaagttcgtatgtgtaaacgaatcctaa

SEQ ID NO: 469608 - DNA, 75 bp, synthetic construct
  source 1..75: mol_type = other DNA
tcactatgtgattggcttgaacgtaaaagagtcattattttattagacgatgcagcaataagcttaactcctgaa

SEQ ID NO: 469609 - DNA, 75 bp, synthetic construct
  source 1..75: mol_type = other DNA
tattaattgaaacagggcttttttataatcttcctgatatttctcatggtgatgggcgtacttatgaaagatata

SEQ ID NO: 469610 - DNA, 75 bp, synthetic construct
  source 1..75: mol_type = other DNA
ggcgctattccagtttggtgcaggcactgaattctggagctgtttcgcggtgtatctgatcattcaggcgcttga

SEQ ID NO: 469611 - DNA, 75 bp, synthetic construct
  source 1..75: mol_type = other DNA
cggctatgtgctgggaaccgaccttgatacaccgtcgctgaaaaaacagtgtcagatgttgaccgatgccggggt

SEQ ID NO: 469612 - DNA, 75 bp, synthetic construct
  source 1..75: mol_type = other DNA
ccagggatgtatttgaggcttacaagaacaagtactcctttccaaaaaaaggtgatgttctaatttctgcatcag

SEQ ID NO: 469613 - DNA, 75 bp, synthetic construct
  source 1..75: mol_type = other DNA
ggaaatttggttatgcttcggaagcagctcaattactggagactgagttgataaatgttatcactgagtatgata

SEQ ID NO: 469614 - DNA, 75 bp, synthetic construct
  source 1..75: mol_type = other DNA
gacgaataaacgcataattacctatcaggcagtttgcgccaatcactaccggaccctgaataacggcaccgtggc

SEQ ID NO: 469615 - DNA, 75 bp, synthetic construct
  source 1..75: mol_type = other DNA
ggataaaaagctgattaagaaaataaccaaagacgtggcccgccatgttgatggtgaattgcttaaattgggaat

SEQ ID NO: 469616 - DNA, 75 bp, synthetic construct
  source 1..75: mol_type = other DNA
taccattggcgcgcgtatcacgaaaaccatcttacgtggtgatgtgatttacgacatcgaacagggcttccctgt

SEQ ID NO: 469617 - DNA, 75 bp, synthetic construct
  source 1..75: mol_type = other DNA
gatgtaaaagccgcaggattacatgaaactggcttctgtggcttttcttttaatgcgaatctatgtggtgttagg

SEQ ID NO: 469618 - DNA, 75 bp, synthetic construct
  source 1..75: mol_type = other DNA
ggaagtttggttatgcatcggaagctgcccaattattggagactgaattaataaatgccctcactgagtatgata

SEQ ID NO: 469619 - DNA, 75 bp, synthetic construct
  source 1..75: mol_type = other DNA
gggagcatattcaagaaatcaatccacgtctgatttttggttcgatcaaagggtttgatgtgaaccgccccggga

SEQ ID NO: 469620 - DNA, 75 bp, synthetic construct
  source 1..75: mol_type = other DNA
ccgctgaccgattgctacgttgccccctgtgttactgcctgcgctatcaagcaagatattccggaatacatccgt

SEQ ID NO: 469621 - DNA, 75 bp, synthetic construct
  source 1..75: mol_type = other DNA
cgataatatgatggacgcgtctgaccatccgaaattcgcacagtaccgcgatacgcttaataaactactccagga

SEQ ID NO: 469622 - DNA, 75 bp, synthetic construct
  source 1..75: mol_type = other DNA
ccgtccaaattcttgaccgcctggagctggaaaagccctgtatcgatgccgaagacgagtgctttaacaccgaat

SEQ ID NO: 469623 - DNA, 75 bp, synthetic construct
  source 1..75: mol_type = other DNA
tctggaaatccctccccttcctgcgtgagtacaacaaaggaacggcgctcaagctgggcaaacatgtggtgattg

SEQ ID NO: 469624 - DNA, 75 bp, synthetic construct
  source 1..75: mol_type = other DNA
aaactggcgggcgacaaccaaaatgtctggaaatcactccccttcctgcgtgaatacaacaagggcacagcgctc

SEQ ID NO: 469625 - DNA, 75 bp, synthetic construct
  source 1..75: mol_type = other DNA
cagttcaacaacgtaccgccagagctgaacgatatgtgccgcattatcagccatattcaccagcatcatcattat

SEQ ID NO: 469626 - DNA, 75 bp, synthetic construct
  source 1..75: mol_type = other DNA
accaaaagcggtcaaggctgcatacgaccttgcagccggcaaggcgccggccagccacactcacccgtggagtca

SEQ ID NO: 469627 - DNA, 75 bp, synthetic construct
  source 1..75: mol_type = other DNA
cgcggtgaaatacaatccgaaatataacgaactgtatgtcaccaacttcactagcggcaccatcagcgtagtgga

SEQ ID NO: 469628 - DNA, 75 bp, synthetic construct
  source 1..75: mol_type = other DNA
tgacgcgctggaacgtaatcagacactcggggagttcaccgtcaaaaaggcgctgattatagaaatcaaacgcct

SEQ ID NO: 469629 - DNA, 75 bp, synthetic construct
  source 1..75: mol_type = other DNA
taagaagattgtcgataatcaggggaatgatatgggcgttcccgttccttcctccattccagaagaggctattgt

SEQ ID NO: 469630 - DNA, 75 bp, synthetic construct
  source 1..75: mol_type = other DNA
aacaatatcctgttctggccagagtctacccgaccctccgtcttcccgatttacgcggtgagtttatccgtggat

SEQ ID NO: 469631 - DNA, 75 bp, synthetic construct
  source 1..75: mol_type = other DNA
accaaaagcggtcaaggctgcatacgacctcgcagccggcaaggcgccggtcagccacactcacccgtggagtca

SEQ ID NO: 469632 - DNA, 75 bp, synthetic construct
  source 1..75: mol_type = other DNA
gcgccaggtgatccgtgatgcttgggcaatccaccgccataagggaaccatcagcgccatcaggcgtgtggttga

SEQ ID NO: 469633 - DNA, 75 bp, synthetic construct
  source 1..75: mol_type = other DNA
cgtcccggcactggcaggcaaccgcatcagcgcagagctgccacccggaggcatacgcaaccagatacgcacgga

SEQ ID NO: 469634 - DNA, 75 bp, synthetic construct
  source 1..75: mol_type = other DNA
gctgaaggtatccgcgccgcgatggatccggcgtgggagatgcagaaggcgctgggcgagcttgaggccaaaggc

SEQ ID NO: 469635 - DNA, 75 bp, synthetic construct
  source 1..75: mol_type = other DNA
ataatgctgcaccacgacgatgaaccgctaacgtatgatctggtctgggatagtggcggttggtgtagtgcgacg

SEQ ID NO: 469636 - DNA, 75 bp, synthetic construct
  source 1..75: mol_type = other DNA
cgcgagggactttccggctggacatcggtgtactggataccggtatctccgctgcgacctataccgagctggagc

SEQ ID NO: 469637 - DNA, 75 bp, synthetic construct
  source 1..75: mol_type = other DNA
atgccgcaaaaaacgatcatcgtgagcattttatgcttaaccatgttgttgaccgtctggatgatacaccgttca

SEQ ID NO: 469638 - DNA, 75 bp, synthetic construct
  source 1..75: mol_type = other DNA
tatgacttccagtgcgctggcgacagcggaaaaaatggcccagtcactggcgcgcaaggcaggagaagcggcatg

SEQ ID NO: 469639 - DNA, 75 bp, synthetic construct
  source 1..75: mol_type = other DNA
gcaaggaatatgaggacatataaagaaaatataggtaagattaatattcatacattaccagttataattgattgg

SEQ ID NO: 469640 - DNA, 75 bp, synthetic construct
  source 1..75: mol_type = other DNA
tcatataagaagaaagacaggatcaggagctttagctactaaatcttgtccttctcttttttcatctactatgag

SEQ ID NO: 469641 - DNA, 75 bp, synthetic construct
  source 1..75: mol_type = other DNA
attcgcactttatcagcaggctgaaaaacccttatatgcctcggtgaataaaaaccagtgcgtgctgataattac

SEQ ID NO: 469642 - DNA, 75 bp, synthetic construct
  source 1..75: mol_type = other DNA
gcattttatgcttaaccatgttgttgaccgtctggatgatacaccgttctccgtgtgagttcagacttaacatca

SEQ ID NO: 469643 - DNA, 75 bp, synthetic construct
  source 1..75: mol_type = other DNA
tcgtgaactggattgtggcgttttaatggtttctcacgatctgcatctggtaatggcaaaaaccgatgaagtgct

SEQ ID NO: 469644 - DNA, 75 bp, synthetic construct
  source 1..75: mol_type = other DNA
tcaatggtctgggcttactgggctacgaagcgaccgtctcgcgcgattatcctgtaatgtttggtaccttgtata

SEQ ID NO: 469645 - DNA, 75 bp, synthetic construct
  source 1..75: mol_type = other DNA
agatgataagcctgaaaacatcctgaaaatcgtcaaagaatggcggcgttcacaggggctacccttgtttaaaga

SEQ ID NO: 469646 - DNA, 75 bp, synthetic construct
  source 1..75: mol_type = other DNA
gcaccgcagcttctcgccgtagagctcgtcgcgcaaatctgcaaagtcaggaggcgatcagctccgacaagctac

SEQ ID NO: 469647 - DNA, 75 bp, synthetic construct
  source 1..75: mol_type = other DNA
acgccgctggcgaactgtgtggcggatacgcaaggcggcattggctatctgatccagcaggcgctgaacaaccgg

SEQ ID NO: 469648 - DNA, 75 bp, synthetic construct
  source 1..75: mol_type = other DNA
gggcggtggcggcattccggtggtgcgcagtgaagcgggggattaccaaagcgtggacgcggttatcgacaaaga

SEQ ID NO: 469649 - DNA, 75 bp, synthetic construct
  source 1..75: mol_type = other DNA
gcgtggacgcggttatcgacaaagatctctctaccgctctgttggcccgtgaaattcacgccgatattctggtga

SEQ ID NO: 469650 - DNA, 75 bp, synthetic construct
  source 1..75: mol_type = other DNA
agtgctggatgaacccactcaaggcgtggatgtaaatggtcaggtggcgttatatgaccttattgaccagttgcg

SEQ ID NO: 469651 - DNA, 75 bp, synthetic construct
  source 1..75: mol_type = other DNA
ggtatctatcgccatcatcataatcatcgtcacgatttacagggacgaattgttttgcgtcggggaaatgatcgc

SEQ ID NO: 469652 - DNA, 75 bp, synthetic construct
  source 1..75: mol_type = other DNA
tcgcgaactggattgtggcgttttaatggtctctcacgatctgcatctggtaatggcaaaaaccgatgaagtgct

SEQ ID NO: 469653 - DNA, 75 bp, synthetic construct
  source 1..75: mol_type = other DNA
tctggcacaccggaagtcgtttccctgcatccagaatttatttcgatgtttggacctcgcggtgctgagcaactg

SEQ ID NO: 469654 - DNA, 75 bp, synthetic construct
  source 1..75: mol_type = other DNA
tgatggcaaaaaccgatgaagtgctgtgcctgaatcaccacatttgttgttccggcacaccggaagttgtttccc

SEQ ID NO: 469655 - DNA, 75 bp, synthetic construct
  source 1..75: mol_type = other DNA
cattgttaaatcgaccgcaattattagtgctggatgaacccactcagggcgtggatgtgaatggtcaggtggcgt

SEQ ID NO: 469656 - DNA, 75 bp, synthetic construct
  source 1..75: mol_type = other DNA
ccgcgctgggcgcggctctcattggctgaacgtcaggtcgttgtcgaacgctttgccggattgctggaaagcaat

SEQ ID NO: 469657 - DNA, 75 bp, synthetic construct
  source 1..75: mol_type = other DNA
cagaagagcttaatttgcgcaccatgcaaatgcatatttcggcattatcaccgactaccaggttatcacacgcac

SEQ ID NO: 469658 - DNA, 75 bp, synthetic construct
  source 1..75: mol_type = other DNA
gacttgctggaagacgccagcgacatgattgatgaaatattcgagttaacagacccggaaaacttctggttctgg

SEQ ID NO: 469659 - DNA, 75 bp, synthetic construct
  source 1..75: mol_type = other DNA
gaaagttgcggatccgtatattgccatactggacagaatgcaatatagcctggctgttaataaaaaatacacctt

SEQ ID NO: 469660 - DNA, 75 bp, synthetic construct
  source 1..75: mol_type = other DNA
tcgatcccgtttatggtggggggcgtatggttaaaaatacgggtaatgcgccgtgggataatgcctatgagcgta

SEQ ID NO: 469661 - DNA, 75 bp, synthetic construct
  source 1..75: mol_type = other DNA
atgtctctggaggagagattatcattatcgtcagagatagaaaataaggatttaaaggttaatatttctgtatgt

SEQ ID NO: 469662 - DNA, 75 bp, synthetic construct
  source 1..75: mol_type = other DNA
aacgcaattgccgctatacaggtgcaaacgtattgcccgaacggaaatatgcacagcgttacgcacagcgcgtat

SEQ ID NO: 469663 - DNA, 75 bp, synthetic construct
  source 1..75: mol_type = other DNA
tgcgaatacatgacctgtcagtgtgccgtctacattggcggacacttcatcttacagggcggcaagggcctataa

SEQ ID NO: 469664 - DNA, 75 bp, synthetic construct
  source 1..75: mol_type = other DNA
aaattgctgcccttgttgcgtataatgaaaagcaaataaaagaaataaacaggataattactctgcttaatgaaa

SEQ ID NO: 469665 - DNA, 75 bp, synthetic construct
  source 1..75: mol_type = other DNA
atcgatggcagtgccgcggaaggggacgatgaaatcgctccggaagtggaaagcgacgatgatgtcgcagacgac

SEQ ID NO: 469666 - DNA, 75 bp, synthetic construct
  source 1..75: mol_type = other DNA
aaacgtattgcccgtactgaaatatgcacagcgttacgcacagcgcgtatggatgaggcagaagccgcatcggat

SEQ ID NO: 469667 - DNA, 75 bp, synthetic construct
  source 1..75: mol_type = other DNA
agagatggagaatttgcgtcagtcgttagatgagttacgggtgaaacgggatatcgcgatggctgaagcgggtat

SEQ ID NO: 469668 - DNA, 75 bp, synthetic construct
  source 1..75: mol_type = other DNA
tactcgtgagagtgaagaccatgttatttgcaacatcaatattgttgttgaagaggttgaagactctgtgtgggc

SEQ ID NO: 469669 - DNA, 75 bp, synthetic construct
  source 1..75: mol_type = other DNA
aacaccgccgcgcttaaacgatacatacaaagtggtgcgaatgtagaaagcaccgcgtactggttatacaggtga

SEQ ID NO: 469670 - DNA, 75 bp, synthetic construct
  source 1..75: mol_type = other DNA
ctgaaacaggggcaagctgacgcacctcgaatacaacaaggacacgcagaaactgacctggcgcaagcccaagag

SEQ ID NO: 469671 - DNA, 75 bp, synthetic construct
  source 1..75: mol_type = other DNA
aagtcgatattatacaagccaggcaagtgacagcagctctgcgtgactggatcgatcgtgatgacgaaccagtta

SEQ ID NO: 469672 - DNA, 75 bp, synthetic construct
  source 1..75: mol_type = other DNA
cggggaacacctgttcagtcagcagactttaatgcagtggagggaggagcgtttccggatcattcagcgacagta

SEQ ID NO: 469673 - DNA, 75 bp, synthetic construct
  source 1..75: mol_type = other DNA
ccacgagttggccattagtctggatatgatgctgtaccacgatgatgagccgctaacgtttgacctggtctggca

SEQ ID NO: 469674 - DNA, 75 bp, synthetic construct
  source 1..75: mol_type = other DNA
tattacctgaaaaaacaggaagcaatacatcattgctgcgtgattccgtatgccaggatctctttcaacttttta

SEQ ID NO: 469675 - DNA, 75 bp, synthetic construct
  source 1..75: mol_type = other DNA
aaccggcctgcacgctgaccgctacgagttctggctgtaccgccagatcaggaagcgtctccaatcgggtgaact

SEQ ID NO: 469676 - DNA, 75 bp, synthetic construct
  source 1..75: mol_type = other DNA
aaatatttgtcttgcaggtgctgtggtggaagttattggcactcgcggcgcaatgaccatacgcgttaccacgcc

SEQ ID NO: 469677 - DNA, 75 bp, synthetic construct
  source 1..75: mol_type = other DNA
gtgcccgtccgcgccagtattgaaccactagcctgggaaaatgccttctttggcgttaacagcgctatcgtgcgc

SEQ ID NO: 469678 - DNA, 75 bp, synthetic construct
  source 1..75: mol_type = other DNA
ttcgtgcgccgtggtatgcgcctgacgccagcggtcgcttttatgcacagtggattgaaaatgccgtgcgcggca

SEQ ID NO: 469679 - DNA, 75 bp, synthetic construct
  source 1..75: mol_type = other DNA
caggcctgttttaatcttaatgctattaattatggagtggtggatctgaccagtataccttatgccgccagaatt

SEQ ID NO: 469680 - DNA, 75 bp, synthetic construct
  source 1..75: mol_type = other DNA
atcgttcagcccgtgatggttatggttttgaagccgactggtcagagttttacaccacgacccgcaaaccctctg

SEQ ID NO: 469681 - DNA, 75 bp, synthetic construct
  source 1..75: mol_type = other DNA
ctggcgcattacagaaaaaccagaacggcgcagatattccaggaaaagataccttcaccaaaaatattggtgcct

SEQ ID NO: 469682 - DNA, 75 bp, synthetic construct
  source 1..75: mol_type = other DNA
tcgcggagagaaaacggaagagtatcgcttgtgtaatgactactggaataagcgaattatgttccgggaatatga

SEQ ID NO: 469683 - DNA, 75 bp, synthetic construct
  source 1..75: mol_type = other DNA
ttggcccgctcattaaccgtatcattaatcgcggaaaaacttttgcggaccagtttcagtccacgaaagaacaga

SEQ ID NO: 469684 - DNA, 75 bp, synthetic construct
  source 1..75: mol_type = other DNA
tatgcgtcgctatggcatcgaaaaaccgtacgagaagttgaaagagctgactcgcggtaagcgcgttgacgccga

SEQ ID NO: 469685 - DNA, 75 bp, synthetic construct
  source 1..75: mol_type = other DNA
gtctcgtacccacggtcagccagccacgccgtcaaccatcggtaaagagatggcaaacgtcgcctaccgtatgga

SEQ ID NO: 469686 - DNA, 75 bp, synthetic construct
  source 1..75: mol_type = other DNA
catttaaaaatctcccgaaagaattcgtcggatttcttgagatattttcaggctcaattaaagaagaccagattt

SEQ ID NO: 469687 - DNA, 75 bp, synthetic construct
  source 1..75: mol_type = other DNA
atgaaaaattatatttatattgacactaatattataagtgatttcaaacccttcacacctgacaaatggcaatca

SEQ ID NO: 469688 - DNA, 75 bp, synthetic construct
  source 1..75: mol_type = other DNA
cagcaattacgccgtatgtcattaatgcaaccgaactggaaaagtttggtttacgccaggaagatgaatctgaga

SEQ ID NO: 469689 - DNA, 75 bp, synthetic construct
  source 1..75: mol_type = other DNA
ccaagattgttgcgtttactttgacttccgcagaactggaaaagttcggactccatgagcgggatgaacaagaga

SEQ ID NO: 469690 - DNA, 75 bp, synthetic construct
  source 1..75: mol_type = other DNA
tgataaacaactgactgccgtggcgtattcgtatggaacacaaattgcagccttatatgcagaacgttttcctta

SEQ ID NO: 469691 - DNA, 75 bp, synthetic construct
  source 1..75: mol_type = other DNA
gtattaaataaaattaatgcctgtatccataataccggagccgaagtcattcgccatatcggctctaacgaggct

SEQ ID NO: 469692 - DNA, 75 bp, synthetic construct
  source 1..75: mol_type = other DNA
tcactttgcctgcacttcggaagatatcaacaacctctcccacgcgttgatgctgaaaaccgcccgtgatgaagt

SEQ ID NO: 469693 - DNA, 75 bp, synthetic construct
  source 1..75: mol_type = other DNA
aattccgtgtacaagttgaagtacgttggctgcaaaaactggccgctcacgcagcgatcaaggaagttcctgctt

SEQ ID NO: 469694 - DNA, 75 bp, synthetic construct
  source 1..75: mol_type = other DNA
agttttggtcgggcaatgggagagaatattgctaactatacggatagcctccttgatcaagttcgtaataaagat

SEQ ID NO: 469695 - DNA, 75 bp, synthetic construct
  source 1..75: mol_type = other DNA
ggtatgccgtacggctttatgctatttccttggcaagtgaagaatggaaacaaaataaataaaaacatgtttata

SEQ ID NO: 469696 - DNA, 75 bp, synthetic construct
  source 1..75: mol_type = other DNA
tgccgaaaccattgagcacatacaaggaaaccttttcgcagcagtagatgaaaaaacgtctgaactattcttttt

SEQ ID NO: 469697 - DNA, 75 bp, synthetic construct
  source 1..75: mol_type = other DNA
atgctaaccatattaatattatttccatttaattgtacttacaaaaaatcacctcaagaacactcactttcattt

SEQ ID NO: 469698 - DNA, 75 bp, synthetic construct
  source 1..75: mol_type = other DNA
gggacaggctcagtatattcagatgccttttccatctgcaacaaaggatcgccagataattctgctggttgaaac

SEQ ID NO: 469699 - DNA, 75 bp, synthetic construct
  source 1..75: mol_type = other DNA
ttttcattgcgatatttattgcactaaccatattaatattatttccatttaattgtacttacaaaaaatcacctc

SEQ ID NO: 469700 - DNA, 75 bp, synthetic construct
  source 1..75: mol_type = other DNA
tttttattgcaatgtttgtcacaccaattgcattaatattatttgtatttgattatggttacaaaaaatcaccac

SEQ ID NO: 469701 - DNA, 75 bp, synthetic construct
  source 1..75: mol_type = other DNA
aataatgaaagtctgatgattctgtccgatgaatcgcgtaaattactcaagtttaacctgacagagatgtctttc

SEQ ID NO: 469702 - DNA, 75 bp, synthetic construct
  source 1..75: mol_type = other DNA
tcagcagaacaacaaatccggcactccggcattctgcaacctgattggcaatcccaaaatcccgcaacgtgccag

SEQ ID NO: 469703 - DNA, 75 bp, synthetic construct
  source 1..75: mol_type = other DNA
tactgaactctcgtccacatccggaacaaagctatcgcttctgccttggactcctgaaccttcataaaaaataca

SEQ ID NO: 469704 - DNA, 75 bp, synthetic construct
  source 1..75: mol_type = other DNA
catggttatagttcctttctggccatcgcctgacattgtaccggagccacagttaacggaagcactccgggaagc

SEQ ID NO: 469705 - DNA, 75 bp, synthetic construct
  source 1..75: mol_type = other DNA
gggaactgggaggccagtggcaagaaagtaaatcacttttttaccactggccttctgctttcaggcgtttgttaa

SEQ ID NO: 469706 - DNA, 75 bp, synthetic construct
  source 1..75: mol_type = other DNA
atactagaaagcctcattgattttaaaaagaaagataggcaaaaatttgacaaaatcattgcaagtgtaaatgat

SEQ ID NO: 469707 - DNA, 75 bp, synthetic construct
  source 1..75: mol_type = other DNA
agagcttcccaatgaatggaacatgagtaatttctacaacggtgaatatggcttaaaacccgctatgaatggcgc

SEQ ID NO: 469708 - DNA, 75 bp, synthetic construct
  source 1..75: mol_type = other DNA
ctaccgaacatggtcctatccctgtctttaatgcctacataggaaacttaaatattcaggttccgcaaggttgca

SEQ ID NO: 469709 - DNA, 75 bp, synthetic construct
  source 1..75: mol_type = other DNA
cagtggacgttcctgttaccctgaagattcgcaccggctgggcaccggaacaccgtaactgcgaagagattgccc

SEQ ID NO: 469710 - DNA, 75 bp, synthetic construct
  source 1..75: mol_type = other DNA
atgaaaagcatatatataccaagaaaaataatggatgaatatattgtcatcaatcaatctaataataagtgctat

SEQ ID NO: 469711 - DNA, 75 bp, synthetic construct
  source 1..75: mol_type = other DNA
tataataagtggtggaccaggattacctggcattaatccttatattaactttgactggccggtaacaaatcttcg

SEQ ID NO: 469712 - DNA, 75 bp, synthetic construct
  source 1..75: mol_type = other DNA
tgctatcatttataattctcttttttattgtgatatctactgttctagtccaaccaactttattatcattgctgg

SEQ ID NO: 469713 - DNA, 75 bp, synthetic construct
  source 1..75: mol_type = other DNA
tccatttatgctttcattcccaggggtaacaattactttgtttattttatgtgagttgaatagctttaaaatcga

SEQ ID NO: 469714 - DNA, 75 bp, synthetic construct
  source 1..75: mol_type = other DNA
gactgaaaccgatcatgccaaccctgatccggaaatcgtggatattgcctgcggtcgctcctctgccccaatgcc

SEQ ID NO: 469715 - DNA, 75 bp, synthetic construct
  source 1..75: mol_type = other DNA
ttgcatcgcctgcggtcaggctggcggcggcaactgtcctgactgcggcgcggtgatgggcgacgcaacgtatca

SEQ ID NO: 469716 - DNA, 75 bp, synthetic construct
  source 1..75: mol_type = other DNA
gtgaaattattgagcgtgattatcacctcagcgccgcaatgtattgtgatgtggcaaacctggacaaatttttct

SEQ ID NO: 469717 - DNA, 75 bp, synthetic construct
  source 1..75: mol_type = other DNA
aaaccgggctggaaatcagggtccgccctgatatcgaaatccgactgccatacgaaagcatctgcgccgacgtga

SEQ ID NO: 469718 - DNA, 75 bp, synthetic construct
  source 1..75: mol_type = other DNA
ttgctgcatcacgtggtgaatttgttgacggaattagcgacccgaacgatccgaaatgggttaaggggatccaga

SEQ ID NO: 469719 - DNA, 75 bp, synthetic construct
  source 1..75: mol_type = other DNA
ggctgaagaactaccagctgttactgccctggctgtttcccacaaaaccagcctgctcgacccgctggagattcg

SEQ ID NO: 469720 - DNA, 75 bp, synthetic construct
  source 1..75: mol_type = other DNA
cagcatcagatctatcgttcttgatggggtcgtcgatattgatgacctgggggacaacttcacatggcaactcaa

SEQ ID NO: 469721 - DNA, 75 bp, synthetic construct
  source 1..75: mol_type = other DNA
caaagaaacaactttgcttatggcaggcacaaagagagcgcatgaatgagcgcgaatttctttcctccccgtccg

SEQ ID NO: 469722 - DNA, 75 bp, synthetic construct
  source 1..75: mol_type = other DNA
agcacttccacacctggaccaagcacgcgttgctcaacgcaattgctcagccggaacagtttgtggaaatcagcg

SEQ ID NO: 469723 - DNA, 75 bp, synthetic construct
  source 1..75: mol_type = other DNA
gtggaaatcggggagtcgctggcgaataaacttggcattgcccagggcgatactgtgaaagtctcctccaaccgt

SEQ ID NO: 469724 - DNA, 75 bp, synthetic construct
  source 1..75: mol_type = other DNA
ggggcaatggcttgttaaaagcgccggacacgctgaatcatcaatttactgggaagatcctgaaacagcaatttt

SEQ ID NO: 469725 - DNA, 75 bp, synthetic construct
  source 1..75: mol_type = other DNA
aaaaccgcccggtcgcgtctgctgggtaaagtattgcgcgtggaggtaaaaggcttttcgacatcgttgattctg

SEQ ID NO: 469726 - DNA, 75 bp, synthetic construct
  source 1..75: mol_type = other DNA
tggtttgcggaagaaacggcagccgttgaacgtgccgtggattccctgaccaaacggctggaaaaactggaggct

SEQ ID NO: 469727 - DNA, 75 bp, synthetic construct
  source 1..75: mol_type = other DNA
tgcgcttagttcctccatagcatcggaagaggtcagtgatgctcttggcgtcatattgtgtgttgaccagggaga

SEQ ID NO: 469728 - DNA, 75 bp, synthetic construct
  source 1..75: mol_type = other DNA
ttattggcaaggagggaaattcgagacggtattaatataaaaaatgatgatatattattacttgctgcaggtcgt

SEQ ID NO: 469729 - DNA, 75 bp, synthetic construct
  source 1..75: mol_type = other DNA
aatagcctcagaagagtcaagcgatgctttgggggtaatcctttgtgttgatcagggagatgataaattaacacc

SEQ ID NO: 469730 - DNA, 75 bp, synthetic construct
  source 1..75: mol_type = other DNA
aaccgggaacgggccgcactggccgcgtacacctgggaagtgctggcccgtcagctgaaaaaggcgcgtcagcag

SEQ ID NO: 469731 - DNA, 75 bp, synthetic construct
  source 1..75: mol_type = other DNA
accgcgctacatgctgggcctgatgaacatcatccgcgaggtatttggtgttaactccatcattcaccccggcac

SEQ ID NO: 469732 - DNA, 75 bp, synthetic construct
  source 1..75: mol_type = other DNA
gcatcagtctgtggggttctacggcaaccgggaacgtacggcactggctgcatacacctgggaagtgctggcccg

SEQ ID NO: 469733 - DNA, 75 bp, synthetic construct
  source 1..75: mol_type = other DNA
gccagccgtgcaatgcaacggattgttgattccgcctggaaatttaaggcgaagactctgctggctggtgtaacg

SEQ ID NO: 469734 - DNA, 75 bp, synthetic construct
  source 1..75: mol_type = other DNA
tggagcgtcaccacgggcaggtggaatatgtggctgacccggcggcgctgcagtatctgcagagtctggagtgcg

SEQ ID NO: 469735 - DNA, 75 bp, synthetic construct
  source 1..75: mol_type = other DNA
atcaggcagagcttaagcgtcagatgcgtgaagaaaaagagcgtcaggatgaacttgaccggcgccagcgggaag

SEQ ID NO: 469736 - DNA, 75 bp, synthetic construct
  source 1..75: mol_type = other DNA
tctggtcgaaaaggtccccggacggttgcataagctctaccacaccggctttaaatacgaatcttcccgccagtt

SEQ ID NO: 469737 - DNA, 75 bp, synthetic construct
  source 1..75: mol_type = other DNA
cggaagaggaagaacggcgtcttgctgagcagcagaaactgattgaagaggcgctgcgtgcagcagaaggggctc

SEQ ID NO: 469738 - DNA, 75 bp, synthetic construct
  source 1..75: mol_type = other DNA
gaaaaaacacttcatgacagtctggaaaaataccgcattaacaggattaacctgcgtaaagaatttttccgcgtg

SEQ ID NO: 469739 - DNA, 75 bp, synthetic construct
  source 1..75: mol_type = other DNA
ggtaataccttcttccaggataccattcgtcgtaaccgcgagctttctgcagaaggctttaacttcatcggtacg

SEQ ID NO: 469740 - DNA, 75 bp, synthetic construct
  source 1..75: mol_type = other DNA
gatgtgattctggatgaagccgctaacaaaggtaccggtaaatggaccagccagagctccctggatctcggcgag

SEQ ID NO: 469741 - DNA, 75 bp, synthetic construct
  source 1..75: mol_type = other DNA
cacttttaccaagtggaatgaaggtgagctcagcagttacctgatcgacattaccaaagacattttcacccaaaa

SEQ ID NO: 469742 - DNA, 75 bp, synthetic construct
  source 1..75: mol_type = other DNA
tggaaatcatgttagccgacctgctgaacatcgacgacgacacggtgattgagctggataaactcgccggggagc

SEQ ID NO: 469743 - DNA, 75 bp, synthetic construct
  source 1..75: mol_type = other DNA
cgtcagtatcgccaggtgcgctatgaagttggactggcatggggtgtttcgtcagtgaaaccggcacatggttgt

SEQ ID NO: 469744 - DNA, 75 bp, synthetic construct
  source 1..75: mol_type = other DNA
taaagtgaatgaatctggcactgagcagctactgcgcgagggtgtgttggggcgcctggagggattcagtattca

SEQ ID NO: 469745 - DNA, 75 bp, synthetic construct
  source 1..75: mol_type = other DNA
ttaaatacgaatcttcccgccagttctgctcaaaattcgtttttgatatttataaagaggcgttatgtattccgg

SEQ ID NO: 469746 - DNA, 75 bp, synthetic construct
  source 1..75: mol_type = other DNA
tggtgactgacgggatcaaaaaaggcgtggtgtgcgtgcatgaaggcgcatggccggatctggagaatggcttgt

SEQ ID NO: 469747 - DNA, 75 bp, synthetic construct
  source 1..75: mol_type = other DNA
aggtgtatgaacagcagacctcctggccgctgattctggaaaacagccaggttgtggtgctgtgggggatgaacc

SEQ ID NO: 469748 - DNA, 75 bp, synthetic construct
  source 1..75: mol_type = other DNA
accgggtatccgcagtttgaagagtatctgacaggtaagagcgataatacgccgaagagcgcggcctgggcggcg

SEQ ID NO: 469749 - DNA, 75 bp, synthetic construct
  source 1..75: mol_type = other DNA
caatctcttcattgattcagggctattgcaagaatgccaacaagagcatcagcaagttacggacacgcaaccgta

SEQ ID NO: 469750 - DNA, 75 bp, synthetic construct
  source 1..75: mol_type = other DNA
cctatcccattttggtaccccggaatggaactccgaagaactggcttttgcgaaacaaattcaggctacgctcac

SEQ ID NO: 469751 - DNA, 75 bp, synthetic construct
  source 1..75: mol_type = other DNA
tctatgcccatgagagaaaaaaatatgaatcttgggtgttaaaaagagagttatctatgaaggataaaaggaaaa

SEQ ID NO: 469752 - DNA, 75 bp, synthetic construct
  source 1..75: mol_type = other DNA
atgagtggaaaggtaccgccgacgagaagcagttgcagcttttgactgcgcatccggcccatcgtttacatagcc

SEQ ID NO: 469753 - DNA, 75 bp, synthetic construct
  source 1..75: mol_type = other DNA
aatgtctgcggcgattgccggacaggccagcgaggccgctgatgatggcggaatgacggcgattcctgttgcccg

SEQ ID NO: 469754 - DNA, 75 bp, synthetic construct
  source 1..75: mol_type = other DNA
tcgattcgttgataaactcgctgaatcaggtttctcagagcaacgaattatagaacaatcatatcttttttgtgc

SEQ ID NO: 469755 - DNA, 75 bp, synthetic construct
  source 1..75: mol_type = other DNA
ctggcggaaaagagatctataccgaaggtaaagatgaaatggcgtggctgaaatttttctatgatgccgctcaga

SEQ ID NO: 469756 - DNA, 75 bp, synthetic construct
  source 1..75: mol_type = other DNA
ggtgcatggccagatctggaaaatggcttgtgtaaaaacggtagtgcgaacgtgttaacggcggatatccccagc

SEQ ID NO: 469757 - DNA, 75 bp, synthetic construct
  source 1..75: mol_type = other DNA
atgacattaacaagacgtgaatttattaaacacagcggtattgccgctggggcgctggtggtgacatcggctgca

SEQ ID NO: 469758 - DNA, 75 bp, synthetic construct
  source 1..75: mol_type = other DNA
atgctgaagcaacagatcggcgtagtcggtatggccgtgatggggcgcaaccttgcgctcaacatcgaaagccgt

SEQ ID NO: 469759 - DNA, 75 bp, synthetic construct
  source 1..75: mol_type = other DNA
atagttccatattatacgctaaaagactttgttgagtcacttgaaacacctcgtcgtattctgctaatggttaaa

SEQ ID NO: 469760 - DNA, 75 bp, synthetic construct
  source 1..75: mol_type = other DNA
cagttctgccagctaacctgattcaggctcagcgcgattactttggtgcgcacacctataagcgtaccgataagg

SEQ ID NO: 469761 - DNA, 75 bp, synthetic construct
  source 1..75: mol_type = other DNA
tccgtcgtaaccgtgaactgtccgcggaaggctttaacttcatcggtaccggcgtgtccggcggtgaagagggcg

SEQ ID NO: 469762 - DNA, 75 bp, synthetic construct
  source 1..75: mol_type = other DNA
gccggggctggcaccgatagcgctatcgattccctgaagccctaccttgataaaggcgacatcattattgatggt

SEQ ID NO: 469763 - DNA, 75 bp, synthetic construct
  source 1..75: mol_type = other DNA
accgtgcgttacctatattggcgcagacggcgcaggtcactatgtgaagatggttcacaacggtattgaatacgg

SEQ ID NO: 469764 - DNA, 75 bp, synthetic construct
  source 1..75: mol_type = other DNA
gagctgagcagctacctgatcgacatcactaaagatatcttcactaaaaaagatgaagacggtaactacctggtc

SEQ ID NO: 469765 - DNA, 75 bp, synthetic construct
  source 1..75: mol_type = other DNA
aaaaatatctcggccaggcggcgaagatgttgattggcattccagactatgacaactacgtcgagcatatgaaga

SEQ ID NO: 469766 - DNA, 75 bp, synthetic construct
  source 1..75: mol_type = other DNA
acccgaatctgatcctcgggcagattattctgctgatcagagaagccatgctggcgctgctaccgctgattagcg

SEQ ID NO: 469767 - DNA, 75 bp, synthetic construct
  source 1..75: mol_type = other DNA
ttcgccgtaaccgtgaactgtccgcggaaggtttcaacttcatcggtaccggtgtttccggtggcgaagaggggg

SEQ ID NO: 469768 - DNA, 75 bp, synthetic construct
  source 1..75: mol_type = other DNA
gcacctgcagccaccactgaagatattgtccctggtccgtcagcacctaattctggcgaccagaccatcggtggt

SEQ ID NO: 469769 - DNA, 75 bp, synthetic construct
  source 1..75: mol_type = other DNA
catcaccttccaggtggcgttgtaccgccagtaccgccaggtgcgttatgaagtgggtctggcatggggtgtggc

SEQ ID NO: 469770 - DNA, 75 bp, synthetic construct
  source 1..75: mol_type = other DNA
aaagtgctgagtggtccgcaggctcagccggctggtgataaagctgaatttatcgaaaaagtacgtcgtgcgttg

SEQ ID NO: 469771 - DNA, 75 bp, synthetic construct
  source 1..75: mol_type = other DNA
cgtgattactttggtgcgcacacctataagcgtactgataaagaaggtgtattccacacagaatggctgagttag

SEQ ID NO: 469772 - DNA, 75 bp, synthetic construct
  source 1..75: mol_type = other DNA
ggcaacaccttcttccaggacactatccgtcgtaatcgtgagctgtctgccgaaggttttaactttatcggtacc

SEQ ID NO: 469773 - DNA, 75 bp, synthetic construct
  source 1..75: mol_type = other DNA
cgctgaaaggtccttctatcatgcctggtggtcagaaagaagcctatgaactggttgcgcctatcctgaccaaaa

SEQ ID NO: 469774 - DNA, 75 bp, synthetic construct
  source 1..75: mol_type = other DNA
cgctgaaagggccttccattatgcctggtgggcagaaagaagcctatgaactggttgctccgatcctgaccaaaa

SEQ ID NO: 469775 - DNA, 75 bp, synthetic construct
  source 1..75: mol_type = other DNA
atgtcaaagcaacagatcggcgtcgtcggtatggccgtgatggggcgcaaccttgcgctcaacatcgaaagccgt

SEQ ID NO: 469776 - DNA, 75 bp, synthetic construct
  source 1..75: mol_type = other DNA
tggtgggcagaaagaagcctatgaactggttgcaccgatcctgaccaaaatcgccgccgttgctgaagatggcga

SEQ ID NO: 469777 - DNA, 75 bp, synthetic construct
  source 1..75: mol_type = other DNA
tgcgcagttcctgcaaaagatcactgatgcttatgcgcaaaacgctggcattgctaacctcctgctggcgccata

SEQ ID NO: 469778 - DNA, 75 bp, synthetic construct
  source 1..75: mol_type = other DNA
atgtccaagcaacagatcggggtcgtcggtatggcagtgatggggcgtaaccttgcgctaaacatcgaaagtcgt

SEQ ID NO: 469779 - DNA, 75 bp, synthetic construct
  source 1..75: mol_type = other DNA
tcggtatggctgtgatggggcgtaaccttgcgctgaacatcgaaagccgtggctataccgtctccgttttcaacc

SEQ ID NO: 469780 - DNA, 75 bp, synthetic construct
  source 1..75: mol_type = other DNA
ggtaccgacgttctctgctgcaattgcctactatgacagctaccgttctgcggttctgccggctaacctgattca

SEQ ID NO: 469781 - DNA, 75 bp, synthetic construct
  source 1..75: mol_type = other DNA
cggttctgcccgctaatctgattcaggctcagcgtgattattttggtgcgcacacctataagcgtactgataaag

SEQ ID NO: 469782 - DNA, 75 bp, synthetic construct
  source 1..75: mol_type = other DNA
cttcaaacagatcgctgatgactatcagcaagcgctgcgtgatgtggtggcttatgccgtgcagaatggtattcc

SEQ ID NO: 469783 - DNA, 75 bp, synthetic construct
  source 1..75: mol_type = other DNA
gatccccctgctgatcgtcctctgtatgctggcacggttttttttggtatatccggcattctcctgcagggtctt

SEQ ID NO: 469784 - DNA, 75 bp, synthetic construct
  source 1..75: mol_type = other DNA
attgagcaggctggatccctgcgtggtctgtcgctgtctgatgtgctgaatctgaaagcggataccatgttaatg

SEQ ID NO: 469785 - DNA, 75 bp, synthetic construct
  source 1..75: mol_type = other DNA
attgaccaggctggatccctgcgtggtctgtcgctgtctgatgtgctgaatctgaaagcggataccatgtttacg

SEQ ID NO: 469786 - DNA, 75 bp, synthetic construct
  source 1..75: mol_type = other DNA
ttttccgaggactgcgtattaatggttttagccgactctcattacgatgagaacgattacgttagagactacaat

SEQ ID NO: 469787 - DNA, 75 bp, synthetic construct
  source 1..75: mol_type = other DNA
ttgctgacatggaatatgatgaatctgattacattagagattattctatttttaaattaatagcacaagaccaga

SEQ ID NO: 469788 - DNA, 75 bp, synthetic construct
  source 1..75: mol_type = other DNA
ctatatatggcatgaaatgtatgattttagtgatgattgtgtgctgcttgtaattgcggatgatttctataaaga

SEQ ID NO: 469789 - DNA, 75 bp, synthetic construct
  source 1..75: mol_type = other DNA
ctgcgtgaccaggtagggccaacctttgaccaggtgtttacatctgccgatgacaacaaactggttgttccacag

SEQ ID NO: 469790 - DNA, 75 bp, synthetic construct
  source 1..75: mol_type = other DNA
acaggatgcctcactggatgccttcgaacgcttctttaaaccggatggcatactggataccttctaccagcagaa

SEQ ID NO: 469791 - DNA, 75 bp, synthetic construct
  source 1..75: mol_type = other DNA
ctgccctcgctgtttaacgggctggtcaaagcgatgaacgccgcgccgccggagagtgaggaaaaactcgccgtg

SEQ ID NO: 469792 - DNA, 75 bp, synthetic construct
  source 1..75: mol_type = other DNA
attgatcaggctggatccctgcgtggtctgtcgctgtctgatgtgctgaatctgaaagcggataccatgttaagg

SEQ ID NO: 469793 - DNA, 75 bp, synthetic construct
  source 1..75: mol_type = other DNA
gtatcagcttcagcgggccgtgggcgcagttccgtctgttcggagctggacagttaaccggaatacaggatggca

SEQ ID NO: 469794 - DNA, 75 bp, synthetic construct
  source 1..75: mol_type = other DNA
tatatggcaaaacgctggagcgaaaagttccacggccagcgcgatatccaggcgcaactgatgtcccatcttgac

SEQ ID NO: 469795 - DNA, 75 bp, synthetic construct
  source 1..75: mol_type = other DNA
gcgggcagaacaccccgatgcccgccaccattgcgtggcgtgggtggcgggtgcgccggatgattcacaacagtt

SEQ ID NO: 469796 - DNA, 75 bp, synthetic construct
  source 1..75: mol_type = other DNA
ttgcccctgagcattcttggttttatgggaaaagttgcttttgatttattaattgaactctcttctgtgcacagt

SEQ ID NO: 469797 - DNA, 75 bp, synthetic construct
  source 1..75: mol_type = other DNA
taagtattcttggttttatcggaaaattcgcgggtgtcttaatggaaaataaaaacaaatccctgaataaagggg

SEQ ID NO: 469798 - DNA, 75 bp, synthetic construct
  source 1..75: mol_type = other DNA
atgcaaaaacgggcgatttatccggggactttcgatcccattaccaatggtcatatcgatatcgtgacgcgcgcc

SEQ ID NO: 469799 - DNA, 75 bp, synthetic construct
  source 1..75: mol_type = other DNA
tgggcggagatcatcgaaatgtcgctcaaccttgaacaggcttccgatatcgtcgagcgcatgggcagcgaaatt

SEQ ID NO: 469800 - DNA, 75 bp, synthetic construct
  source 1..75: mol_type = other DNA
gcgagccacggcaggagaaagagctgcgtaagctggcagatgatatcaacgttctctacaccgccattaagctgt

SEQ ID NO: 469801 - DNA, 75 bp, synthetic construct
  source 1..75: mol_type = other DNA
ccggtaacgcacgtttcacgagaagaacttcaggcattacatatcgcacgagctgaagaactaccggctgttact

SEQ ID NO: 469802 - DNA, 75 bp, synthetic construct
  source 1..75: mol_type = other DNA
attaatgcattaaaggattatttggtgtcaggtgaaacaagaaaagcagcctgtgaaagacataatgtaagcaac

SEQ ID NO: 469803 - DNA, 75 bp, synthetic construct
  source 1..75: mol_type = other DNA
catagaaagctgaaacaaatggcgatttgtgtgaagggctattgtacttttactttagatgatggatttgaacga

SEQ ID NO: 469804 - DNA, 75 bp, synthetic construct
  source 1..75: mol_type = other DNA
gccgttggtttggcatgaaatgtacgattattcaccagattgtattttaatggtgttggctgatgacttatacga

SEQ ID NO: 469805 - DNA, 75 bp, synthetic construct
  source 1..75: mol_type = other DNA
cagctggcgcatatgaatcgccacttaatgccggaactggaaagtgtctttttgatgccttcaaaagagtggtcg

SEQ ID NO: 469806 - DNA, 75 bp, synthetic construct
  source 1..75: mol_type = other DNA
cagctggcgcatatgaatcgccacttaatgccggaactggaaagtgtgtttctgatgccgtcgaaagagtggtcg

SEQ ID NO: 469807 - DNA, 75 bp, synthetic construct
  source 1..75: mol_type = other DNA
aaaaccgatgtttaccctggaagagcgtgtggagctggcacagcaggcaaccgcgcatctggggaacgtggaagt

SEQ ID NO: 469808 - DNA, 75 bp, synthetic construct
  source 1..75: mol_type = other DNA
gccgggatggacaacctgaatatccgcaattttgagtccatcgggcaactgaccggggcgctggagcaggtgatc

SEQ ID NO: 469809 - DNA, 75 bp, synthetic construct
  source 1..75: mol_type = other DNA
aatttcaactcatctgttgggttctaacgcctcgagcgtgatccgccacgccaatttgccggtgctggttgtgcg

SEQ ID NO: 469810 - DNA, 75 bp, synthetic construct
  source 1..75: mol_type = other DNA
atcaccacgtattcagggacgacaaataaacgtttatgtactcaattaccagccaggagattacaactcatctga

SEQ ID NO: 469811 - DNA, 75 bp, synthetic construct
  source 1..75: mol_type = other DNA
cagcagattattgaacaaacggaggcatttcttaatgcctatgggcttagccgttttgcaccatttccatacagc

SEQ ID NO: 469812 - DNA, 75 bp, synthetic construct
  source 1..75: mol_type = other DNA
ccgtgactttattcagttatgtgcggttgccgtaaattttttgagcggtgcggactctggcgggaagaacgaaca

SEQ ID NO: 469813 - DNA, 75 bp, synthetic construct
  source 1..75: mol_type = other DNA
ctgttgcctcgcgtgacctcgccacgactggatgaagtgatgattaaaaaatgtcgtcacgcgattttattcagt

SEQ ID NO: 469814 - DNA, 75 bp, synthetic construct
  source 1..75: mol_type = other DNA
aatggcattatattcgatgtgaacgatacacaatcctttattgacgcattgtcgaaaatggaaaaaaattatgaa

SEQ ID NO: 469815 - DNA, 75 bp, synthetic construct
  source 1..75: mol_type = other DNA
caacgtccgcgatgaagtgacgaaactggcagatgaactgaaggcggatgtggtgatcattggctcacgcaatcc

SEQ ID NO: 469816 - DNA, 75 bp, synthetic construct
  source 1..75: mol_type = other DNA
ggaaacattcgatgaagagaatcaggttgaagctaaggaaaatgatccggaggaaatggaaggcgctgaacatcc

SEQ ID NO: 469817 - DNA, 75 bp, synthetic construct
  source 1..75: mol_type = other DNA
ggcggcaactgccctgattgtggcgcggtgatgggcgacgcaacataccaggaaacattcgatgaagagaatcag

SEQ ID NO: 469818 - DNA, 75 bp, synthetic construct
  source 1..75: mol_type = other DNA
cgaaatgagcgcgatgtactgtgcttctggttcttccaatagtgagttttcggagtccataaaaaagagcttgcc

SEQ ID NO: 469819 - DNA, 75 bp, synthetic construct
  source 1..75: mol_type = other DNA
aaatgaaatcaatcttgcaaaagagaaggttgagtcggggaatatagagtcactacgtgatgctctggataaaat

SEQ ID NO: 469820 - DNA, 75 bp, synthetic construct
  source 1..75: mol_type = other DNA
acatgaaatcaatattgcaaaaaagaaagttgaggacgggaatatagaatcattacgtgagtctctggataaaat

SEQ ID NO: 469821 - DNA, 75 bp, synthetic construct
  source 1..75: mol_type = other DNA
gaggcggcgaaaaaatcacgtatgtggagatcaccggggctattgagcaggctggatctctgcgagatttgtcgc

SEQ ID NO: 469822 - DNA, 75 bp, synthetic construct
  source 1..75: mol_type = other DNA
cggccctgctggtagtggtaaaaccacgttactgcgggaaggttttccgtctgacattatttatgccccggaggg

SEQ ID NO: 469823 - DNA, 75 bp, synthetic construct
  source 1..75: mol_type = other DNA
tccgtttaatccgcgctcggcgcaggatgcctcactggatgcgtttgagcgtttctttaaaccggatggcgtact

SEQ ID NO: 469824 - DNA, 75 bp, synthetic construct
  source 1..75: mol_type = other DNA
aaagcgcgcgcgccagccgctgaacgggattattctgacactcgatttacccgatctgcttaccgcagacaaacg

SEQ ID NO: 469825 - DNA, 75 bp, synthetic construct
  source 1..75: mol_type = other DNA
ccagagcctgaaaacgcgggcgctgggcgttcttcctgccgacctcaatctgcgtgaccaggtagggccaacctt

SEQ ID NO: 469826 - DNA, 75 bp, synthetic construct
  source 1..75: mol_type = other DNA
atctctgataaagaacgggagaatgccctggcggagccggacttccgcctgctgacccgcctcgggcatgaattc

SEQ ID NO: 469827 - DNA, 75 bp, synthetic construct
  source 1..75: mol_type = other DNA
gggattattctgactctcgatttacccgatctattgaccgcagacaaacgccgccgtgagtatcttttacaaata

SEQ ID NO: 469828 - DNA, 75 bp, synthetic construct
  source 1..75: mol_type = other DNA
aatttcaactcatctgttaggatctaatgcttccagtgtgatccgccacaccaacctgcctgtattagtcgttcg

SEQ ID NO: 469829 - DNA, 75 bp, synthetic construct
  source 1..75: mol_type = other DNA
gatttcgacccatctgttaggttctaacgcctcgagcgtgatccgccatgccaatctgccggttccggtggtcag

SEQ ID NO: 469830 - DNA, 75 bp, synthetic construct
  source 1..75: mol_type = other DNA
ttgatgtatttgaaatggaattgagcgacaaagctgttcgccacgctgaattcctcgcccaggatgacggagtta

SEQ ID NO: 469831 - DNA, 75 bp, synthetic construct
  source 1..75: mol_type = other DNA
gtctctgctttctggctgctgatactggcgtggatttttctgctggtgtggatctggtggaaaggcccgatgtgg

SEQ ID NO: 469832 - DNA, 75 bp, synthetic construct
  source 1..75: mol_type = other DNA
tagttattggttctcgcaacccatcgatttcgacccatctgttaggttctaacgcctcgagcgtgatccgccacg

SEQ ID NO: 469833 - DNA, 75 bp, synthetic construct
  source 1..75: mol_type = other DNA
gccaaagaactgaatgcggatgttgtggttatcggttcgcgtaatccatcaatttcaacccatctgttaggttct

SEQ ID NO: 469834 - DNA, 75 bp, synthetic construct
  source 1..75: mol_type = other DNA
atcagaaaacctttaatgaagaaaatcagaatgaatatcaggaaaaaggtctggaggaaatggaaggtgctgaac

SEQ ID NO: 469835 - DNA, 75 bp, synthetic construct
  source 1..75: mol_type = other DNA
cgaatgatccgaaatgggttaaggggatccagacccgcgattctgtgtaccagaatcagccagaaacggaacaga

SEQ ID NO: 469836 - DNA, 75 bp, synthetic construct
  source 1..75: mol_type = other DNA
cttaaagatcgcctgcaccgtgaaattattgagcgtgattatcacctcagcgccgcaatgtattgcgatgtggca

SEQ ID NO: 469837 - DNA, 75 bp, synthetic construct
  source 1..75: mol_type = other DNA
gaaatgggttaagggaattgaaacccgagattctgtgaaccagaaccagcccgaatcggaacaaaacaaccagaa

SEQ ID NO: 469838 - DNA, 75 bp, synthetic construct
  source 1..75: mol_type = other DNA
aaactgcgggcagaactccatgaagcccggaaaaccattccgcccaaaaatcctgtcgatgccgacaaattgctg

SEQ ID NO: 469839 - DNA, 75 bp, synthetic construct
  source 1..75: mol_type = other DNA
tggtatcacaatgatacttatcgcgccctctccctccgtgcaggagaaaccagccagtactgacaataccaacgt

SEQ ID NO: 469840 - DNA, 75 bp, synthetic construct
  source 1..75: mol_type = other DNA
gaatttgttgaagggattagcgacccgaatgatccgaaatggattcccggtcatcatatctcctcaaatgaagtc

SEQ ID NO: 469841 - DNA, 75 bp, synthetic construct
  source 1..75: mol_type = other DNA
acgcagtcgatggatgctcagccacagataaattctgttgatgcgaaatatcaaaaactgcgtgcagaactctat

SEQ ID NO: 469842 - DNA, 75 bp, synthetic construct
  source 1..75: mol_type = other DNA
agcagcacaatgctgaaggatgcccgcatcagcctgatgtattaccacggacggcacattgccggaactattccg

SEQ ID NO: 469843 - DNA, 75 bp, synthetic construct
  source 1..75: mol_type = other DNA
ttgaaaaccagtggagcacgggagcagcttctggatcaaattgaaactgtagacccagaactggcaaaaaaagaa

SEQ ID NO: 469844 - DNA, 75 bp, synthetic construct
  source 1..75: mol_type = other DNA
agtcagtcagcctcggttatgtgcgacaggaacgactgaaagatcgcctgcaccgtgaaattattgagcgtgatt

SEQ ID NO: 469845 - DNA, 75 bp, synthetic construct
  source 1..75: mol_type = other DNA
gttaccgctgacgaagtaaacaaaattatgcaggcagccaatatcagccagcctgacgctaatgaactgcttgct

SEQ ID NO: 469846 - DNA, 75 bp, synthetic construct
  source 1..75: mol_type = other DNA
gaaatggattaaggggatccagacccgcgattctgtgtaccagaatcagccagaaacgaaacaacctgaaccagt

SEQ ID NO: 469847 - DNA, 75 bp, synthetic construct
  source 1..75: mol_type = other DNA
ggaagcttcgcaggaactccttgaacttggtcgccaggagtatcgccggacgctacgccagataaacgaagctct

SEQ ID NO: 469848 - DNA, 75 bp, synthetic construct
  source 1..75: mol_type = other DNA
ctggctatcactgggtggcagttgtggaagcttcgcaggaactccttgaacttggtcgccaggagtatcgccgga

SEQ ID NO: 469849 - DNA, 75 bp, synthetic construct
  source 1..75: mol_type = other DNA
gcatatcgatagcagtggtgaaactggtgaagcgtcagctcctgtagcaactgaaatcatgtggccgtcatattt

SEQ ID NO: 469850 - DNA, 75 bp, synthetic construct
  source 1..75: mol_type = other DNA
actggcaaaaacgacagcaagaagaaaacgccgggaaaacgtttatcagtgcggatatgtatgaacaggcaaaaa

SEQ ID NO: 469851 - DNA, 75 bp, synthetic construct
  source 1..75: mol_type = other DNA
actggagaactggcaaaaacgccagcaagaagaaaatgcaggaaaaacgtttatcagtccagatatgtatgaaca

SEQ ID NO: 469852 - DNA, 75 bp, synthetic construct
  source 1..75: mol_type = other DNA
cgatgggcgacgcaacgtatcaggaaacatttaatgaagaaaatctggatgaatctctggaaaaagatccggagg

SEQ ID NO: 469853 - DNA, 75 bp, synthetic construct
  source 1..75: mol_type = other DNA
atgatccgaaatggattaaggggatccagacccgcgattctgtgaaccagaaccagcaagaaacggaacagaacg

SEQ ID NO: 469854 - DNA, 75 bp, synthetic construct
  source 1..75: mol_type = other DNA
cactactgcaattgcgggaatttatcgacgaaaactccggtgaattttttgttcaggtctggggtgatggggcca

SEQ ID NO: 469855 - DNA, 75 bp, synthetic construct
  source 1..75: mol_type = other DNA
aactgccctgattgtggcgcggtgatgggcgacgcaacataccaggaaacattcgatgaagagaatcaggttgaa

SEQ ID NO: 469856 - DNA, 75 bp, synthetic construct
  source 1..75: mol_type = other DNA
cgcctgcggccagaggagtggcggcaactgccctgattgtggcgcggtgatgggcgacgcaacataccaggaaac

SEQ ID NO: 469857 - DNA, 75 bp, synthetic construct
  source 1..75: mol_type = other DNA
ccagacccgcgattctgtgtaccagaatcagccagaaacggaacagaacgaccagaaagcggaacagaacagccc

SEQ ID NO: 469858 - DNA, 75 bp, synthetic construct
  source 1..75: mol_type = other DNA
agtttgcatcgcctgcggtcaggctggcggcggcaactgtcctgactgcggcgcggtgatgggcgacgcaacgta

SEQ ID NO: 469859 - DNA, 75 bp, synthetic construct
  source 1..75: mol_type = other DNA
ctctcgtggggagttcgttgaaggcatcagcgacccaaccgacccgaaatgggtgaaggggatccagactcgcga

SEQ ID NO: 469860 - DNA, 75 bp, synthetic construct
  source 1..75: mol_type = other DNA
agccagtggaacacgagagcagctcctggagcaaattgaaactgtagatccagaactggcaaaaaaagaacgtgc

SEQ ID NO: 469861 - DNA, 75 bp, synthetic construct
  source 1..75: mol_type = other DNA
agaaaaacaggatgatgaagaaaaaccgcaaccatctggcgcaatggcacatgaacaggcaacggctgaaacagt

SEQ ID NO: 469862 - DNA, 75 bp, synthetic construct
  source 1..75: mol_type = other DNA
gcaccgattaccgaaagttataccgacgaattaaacgactttgatcttcgtcgtcttgagaagatgataaataac

SEQ ID NO: 469863 - DNA, 75 bp, synthetic construct
  source 1..75: mol_type = other DNA
aaaagcttaaagagcagttacaggagttactggataaaagtttgttaaatcaagaaaaagacactgtagaagaat

SEQ ID NO: 469864 - DNA, 75 bp, synthetic construct
  source 1..75: mol_type = other DNA
acaaactggttcgtgacactgacaaagttttccctaatcctggtaattcagacttgggactgttaactgcttttt

SEQ ID NO: 469865 - DNA, 75 bp, synthetic construct
  source 1..75: mol_type = other DNA
cgacctccacaaactggttcgcgacactgacaaagttttccctaatcccgttaattccagtctgggattaatgac

SEQ ID NO: 469866 - DNA, 75 bp, synthetic construct
  source 1..75: mol_type = other DNA
atgcggcgcgcgaaacattgcgcatcggtgacgcaatggaacagatgatggaagggctgaataaagtgatgcacg

SEQ ID NO: 469867 - DNA, 75 bp, synthetic construct
  source 1..75: mol_type = other DNA
ctgcacgtcgcgtggcgctgggtagcctgctgtttaagctggtgggaagcctgattatcctgccgtttgtccatg

SEQ ID NO: 469868 - DNA, 75 bp, synthetic construct
  source 1..75: mol_type = other DNA
aaaaaagccgctcgccttttgcgcggggatcggcgttaccgcactggtgcagagcagtaatgccaccaccatgct

SEQ ID NO: 469869 - DNA, 75 bp, synthetic construct
  source 1..75: mol_type = other DNA
aactccaggcattacacattgcacgggctgaggaactaccagctgttactgccctagctgtttcccacaaaacca

SEQ ID NO: 469870 - DNA, 75 bp, synthetic construct
  source 1..75: mol_type = other DNA
tggtgctaacctcggttccggcctgctggcgatgctcaacaacagtgccgccaatgccgcagcccgccgtgtcgc

SEQ ID NO: 469871 - DNA, 75 bp, synthetic construct
  source 1..75: mol_type = other DNA
ctggatgcgctgattggcgcgatgttcgccattatcagctactccagccttgctgctgtactgctgactgcgact

SEQ ID NO: 469872 - DNA, 75 bp, synthetic construct
  source 1..75: mol_type = other DNA
ttttcaccagattcggtagcacagaaggttcctgctttaaaaagcctactagaattacgtgaacaattatgtgat

SEQ ID NO: 469873 - DNA, 75 bp, synthetic construct
  source 1..75: mol_type = other DNA
agcccggaaaaacattccatcaaaaaatcctgtcgatgccgataaattgcttgctgcatcacgtggtgaatttgt

SEQ ID NO: 469874 - DNA, 75 bp, synthetic construct
  source 1..75: mol_type = other DNA
acgggccgaactccacgaggcacgcgaaaacattccgcccaaaaatcctgtcgatgcagacaaagtactggctgc

SEQ ID NO: 469875 - DNA, 75 bp, synthetic construct
  source 1..75: mol_type = other DNA
ccggtatgctgcggactcgcgcgtatattggtcagcatatgccgctttactgttcggctatgggtaaggtttata

SEQ ID NO: 469876 - DNA, 75 bp, synthetic construct
  source 1..75: mol_type = other DNA
caaccctgatccggaaattgtggatattgcctgcggtcgctcctctgccccaatgccgcagcgtgtaacagaaga

SEQ ID NO: 469877 - DNA, 75 bp, synthetic construct
  source 1..75: mol_type = other DNA
gatattcaacgattcaaaaccgcttattacgactaccgctatcacgttcaggatgcattctacagtgacggttat

SEQ ID NO: 469878 - DNA, 75 bp, synthetic construct
  source 1..75: mol_type = other DNA
gtatttattacggaatttcgaatgagaattaccacgcgggtcccggtatcagtaagtctcagctcgatgacattg

SEQ ID NO: 469879 - DNA, 75 bp, synthetic construct
  source 1..75: mol_type = other DNA
acccgcgattctgtgtaccagcatcagccaaaaacggaacagaacgaccgaaaatcggaacaaaacggccaaaat

SEQ ID NO: 469880 - DNA, 75 bp, synthetic construct
  source 1..75: mol_type = other DNA
ggaaccggatacaactgaacataatcaggactcgcagtcgatggatgctcagccacagataaattctgttgatgc

SEQ ID NO: 469881 - DNA, 75 bp, synthetic construct
  source 1..75: mol_type = other DNA
gatgtgaaacaacctgagccagtagtgcaacaggaaccggaaatagtctgcaatgcctgcggtcagactggcgga

SEQ ID NO: 469882 - DNA, 75 bp, synthetic construct
  source 1..75: mol_type = other DNA
taccacgggcggcacattgccggaactattccgaacgaggaaagtgatgcactgctgcgtgggcggatcattcac

SEQ ID NO: 469883 - DNA, 75 bp, synthetic construct
  source 1..75: mol_type = other DNA
attcgatgaagagaatcaggttgaagctaaggaaaatgatccggaggaaatggaaggcgctgaacatccgcacaa

SEQ ID NO: 469884 - DNA, 75 bp, synthetic construct
  source 1..75: mol_type = other DNA
aactgccctgactgtggtgcggtaatgggcgacgcaacataccaggaaacattcgatgaagagaatcaggttgaa

SEQ ID NO: 469885 - DNA, 75 bp, synthetic construct
  source 1..75: mol_type = other DNA
ctgacggaaagacggccagagtggtcatcgaaacgatgggatatgaagacagtgattactgcgcgagaaaatcca

SEQ ID NO: 469886 - DNA, 75 bp, synthetic construct
  source 1..75: mol_type = other DNA
ggactgccagtatcaccggagactggaagtacacggatgaatatcgtgaggtgacgataccgcactcacagttcc

SEQ ID NO: 469887 - DNA, 75 bp, synthetic construct
  source 1..75: mol_type = other DNA
agagtgatttttacaaatttcattggacaacacttgcagacaattctaggcaaagatgagggattttccttcact

SEQ ID NO: 469888 - DNA, 75 bp, synthetic construct
  source 1..75: mol_type = other DNA
cgtctctaatggcgctggtgtagggcttattgctgctgtattgctggggcacgggcaattacctgagtgggcgct

SEQ ID NO: 469889 - DNA, 75 bp, synthetic construct
  source 1..75: mol_type = other DNA
tcggtcgttctttttgaccatgccctgagcccggcgcaagagcgtaacctggagcgtttgtgcgagtgtcgtgtt

SEQ ID NO: 469890 - DNA, 75 bp, synthetic construct
  source 1..75: mol_type = other DNA
taatattcaggtcatcagacctgtgcgggggatcagtattaggggtctgacgctcagtggaacgaaaactcacgt

SEQ ID NO: 469891 - DNA, 75 bp, synthetic construct
  source 1..75: mol_type = other DNA
tggcgtgagtttttttatgcgcccgcttggtggaattatcgtcggggcctgggccgatcgtttcggacgcaaacc

SEQ ID NO: 469892 - DNA, 75 bp, synthetic construct
  source 1..75: mol_type = other DNA
aaaggtctgatccacaaaaacaaagctgcacgtcataaggctaacttgactgcacagatcaacaaactggcttaa

SEQ ID NO: 469893 - DNA, 75 bp, synthetic construct
  source 1..75: mol_type = other DNA
atgatccccgatatccaggtcgaagccacctttccggacggctccaagctggttaccgtccataatccgataatc

SEQ ID NO: 469894 - DNA, 75 bp, synthetic construct
  source 1..75: mol_type = other DNA
tgaaaaaagccaatgtgagctttagtggtgttggtgatgcagataaatctgatctgatttctgttagcactgaag

SEQ ID NO: 469895 - DNA, 75 bp, synthetic construct
  source 1..75: mol_type = other DNA
tatctgggtggaggcacgttgctgtcgatgttggcgttgttgtacgtaaaagaaccggccaaagaattgcagtaa

SEQ ID NO: 469896 - DNA, 75 bp, synthetic construct
  source 1..75: mol_type = other DNA
ctcaatgtctttgttggttgaatcagctccggcaaatcgtcgcggcttttacagtagctggtcgctggcgaccca

SEQ ID NO: 469897 - DNA, 75 bp, synthetic construct
  source 1..75: mol_type = other DNA
agcgacaaaatattcgctggttattatgcctgtcagttttgatgctgctggcgcttctcttaagcctttgcgccg

SEQ ID NO: 469898 - DNA, 75 bp, synthetic construct
  source 1..75: mol_type = other DNA
gccgagcagggatacatcatccagcagttggtggcggcgctgtatcaatccgcagaaacagggacgcgtgtggaa

SEQ ID NO: 469899 - DNA, 75 bp, synthetic construct
  source 1..75: mol_type = other DNA
gccgagcagggatacatcatccagcaactggtggcggcgctttatcaatccgcagaaacagggacgcgtgtggaa

SEQ ID NO: 469900 - DNA, 75 bp, synthetic construct
  source 1..75: mol_type = other DNA
aggtaagcccgtgatgatagccgacgccgagcagggatacatcatccagcaactggtggcggcgctttatcaatc

SEQ ID NO: 469901 - DNA, 75 bp, synthetic construct
  source 1..75: mol_type = other DNA
tgaaaattgccatcgttacgctgattttaacgcaattgatgaacctggcgtttattggtccgttgaaacatgccg

SEQ ID NO: 469902 - DNA, 75 bp, synthetic construct
  source 1..75: mol_type = other DNA
cagtcagatctccttgatcattaacaccatttttgcctcgtttttggcatccggttctgtgtcctggatgtatta

SEQ ID NO: 469903 - DNA, 75 bp, synthetic construct
  source 1..75: mol_type = other DNA
ttccggcatttgctccaacgctgcttaacatcagcatgattggcttcgcgctgtttgccgcaccgtactttaatc

SEQ ID NO: 469904 - DNA, 75 bp, synthetic construct
  source 1..75: mol_type = other DNA
atgaatacagcatttgcactcgttctaacggtttttcttaatacgggcgagccagttgatcttgttattggtata

SEQ ID NO: 469905 - DNA, 75 bp, synthetic construct
  source 1..75: mol_type = other DNA
ggttgtgtggtttaaccgatcatcgcgtattacttcccggctgcgcgctggcaggggcgagcgcattgctgctgg

SEQ ID NO: 469906 - DNA, 75 bp, synthetic construct
  source 1..75: mol_type = other DNA
tttatctggcaaatacgtcttccgcgcacgctggctgtgctattggttggagcggcgctggcattgtccggtgca

SEQ ID NO: 469907 - DNA, 75 bp, synthetic construct
  source 1..75: mol_type = other DNA
gtggttagcgtctgctcacctaaccgttttcattacgaacataccctgatggcgctggaagcgggctgccatgtg

SEQ ID NO: 469908 - DNA, 75 bp, synthetic construct
  source 1..75: mol_type = other DNA
gtgaaaagtgcaatgacaagctctccgctgcgggtcgcgataataggcgcgggccaggtggcggataaggttcat

SEQ ID NO: 469909 - DNA, 75 bp, synthetic construct
  source 1..75: mol_type = other DNA
tgacggtttttcttaatacgggcgagccgcttgaccttattgttgacatacgtgattcaatggaagaatgcatgg

SEQ ID NO: 469910 - DNA, 75 bp, synthetic construct
  source 1..75: mol_type = other DNA
ctggatggtccaacggaggccgaagtacgctctgtcacagaggggtttgagaataaagacgggctgctgtctgtg

SEQ ID NO: 469911 - DNA, 75 bp, synthetic construct
  source 1..75: mol_type = other DNA
tgtcaatagacaccggtgttagcgccacttttttggaagaagctctgacaaaagatgtgacgaccttagaagcaa

SEQ ID NO: 469912 - DNA, 75 bp, synthetic construct
  source 1..75: mol_type = other DNA
tatttagtggcgcaatggggttagacttaggtctcgaagaggctggctttgagctcgtagcttgcgttgaacaag

SEQ ID NO: 469913 - DNA, 75 bp, synthetic construct
  source 1..75: mol_type = other DNA
agtaataaaatttgatggagtagatgttattatcgaaacagggattcataatgaatatacattccccggtgaaga

SEQ ID NO: 469914 - DNA, 75 bp, synthetic construct
  source 1..75: mol_type = other DNA
atggtattgaaggtttcaagtcgaggtttaataatcgagggatcggaggtggtaaggaagacccggtctatgctg

SEQ ID NO: 469915 - DNA, 75 bp, synthetic construct
  source 1..75: mol_type = other DNA
tcttaccaaaagagcattatatacgaataaaccatctcagcacgagtatggcattggattatatggaataggttt

SEQ ID NO: 469916 - DNA, 75 bp, synthetic construct
  source 1..75: mol_type = other DNA
acgttcctgtcagagctgggactgattacctaccagacggagtatgacccgcttattggctgcaacattccgacc

SEQ ID NO: 469917 - DNA, 75 bp, synthetic construct
  source 1..75: mol_type = other DNA
ggtgttcacaccccgtgaaggtgccggaacgctgaagttctgcgaaaaactgatggaaaaggcggtgggcttcac

SEQ ID NO: 469918 - DNA, 75 bp, synthetic construct
  source 1..75: mol_type = other DNA
ggaacgctgaagttttgcgaaaaactgatggaaaaggccgtgggcttcacctcccgttttgattttgccgcgcat

SEQ ID NO: 469919 - DNA, 75 bp, synthetic construct
  source 1..75: mol_type = other DNA
gcttatcgggtgctatatcccgaccgatatcacgttcacaccggcgctgtttgctgctctcgatgtgtctgaaga

SEQ ID NO: 469920 - DNA, 75 bp, synthetic construct
  source 1..75: mol_type = other DNA
gtgcgcgtcgtgatgcgaacagggaacgtcaggatatcgtcaccctggtgaaacggcagctgacgcgtgaaatct

SEQ ID NO: 469921 - DNA, 75 bp, synthetic construct
  source 1..75: mol_type = other DNA
gagctggggctgattacctaccagacggaatatgacccgcttatcggctgcaacattccgaccgacatcacgttc

SEQ ID NO: 469922 - DNA, 75 bp, synthetic construct
  source 1..75: mol_type = other DNA
gcggggaacgcctctggcggcacagagaaaaactcattgcggaagcgctgtaaatatcgccagaaatcatctggc

SEQ ID NO: 469923 - DNA, 75 bp, synthetic construct
  source 1..75: mol_type = other DNA
aagtgctaagatggttgttgctgaaggcagacagttgagtgatgtcacaccgggtgagtttctttctccagctac

SEQ ID NO: 469924 - DNA, 75 bp, synthetic construct
  source 1..75: mol_type = other DNA
tgcacaattttatgaaactataattggtgaaaattcatcaataggggcaaattcgaccattctgcctggagtaaa

SEQ ID NO: 469925 - DNA, 75 bp, synthetic construct
  source 1..75: mol_type = other DNA
agggacgcgtaggtggaaggcccaacgcattaaaaacccatgagcgagagcagattgggcggctattgacgaagg

SEQ ID NO: 469926 - DNA, 75 bp, synthetic construct
  source 1..75: mol_type = other DNA
cctgtctggaaaatcaagaagacagcagcacgtaaagccagccaggaaatgagagcactggccgatcatgttttt

SEQ ID NO: 469927 - DNA, 75 bp, synthetic construct
  source 1..75: mol_type = other DNA
tgcactggcttcacatgtccctgtctggaaaatcaagaagacagcagcacgtaaagccagccaggaaatgagagc

SEQ ID NO: 469928 - DNA, 75 bp, synthetic construct
  source 1..75: mol_type = other DNA
aaacagttctcgtccggcattaaagcgaatgaaatgtggggcgagatcgagccaactcgctttacccaaatgcct

SEQ ID NO: 469929 - DNA, 75 bp, synthetic construct
  source 1..75: mol_type = other DNA
ttacctaccagacggaatatgacccgcttatcgggtgctacattccgaccgacatcacgttcacaccggctctgt

SEQ ID NO: 469930 - DNA, 75 bp, synthetic construct
  source 1..75: mol_type = other DNA
gagctggggctgattacctaccagacggaatatgacccgcttattggctgcaacattccgaccgatatcacgttc

SEQ ID NO: 469931 - DNA, 75 bp, synthetic construct
  source 1..75: mol_type = other DNA
cactaactaaacaaaaaaaaatgcgtatcggtttcttccaaagctcctcaggaacgaagtcaactacatcaaatg

SEQ ID NO: 469932 - DNA, 75 bp, synthetic construct
  source 1..75: mol_type = other DNA
gccgggttagcagcagccagagcacagggacgcataggtggaaggcccaacgcattaaagcctcatgagcgagaa

SEQ ID NO: 469933 - DNA, 75 bp, synthetic construct
  source 1..75: mol_type = other DNA
aaaaaagatattccctgcttccgttcttatttgcctgatgctctgcgtttaagatttgaagataaactgaccatc

SEQ ID NO: 469934 - DNA, 75 bp, synthetic construct
  source 1..75: mol_type = other DNA
ttcccgtttcgatttcgccgtacatgtggcgtatgcccgttcgagggggctacgtcggcgcatgccaccggtact

SEQ ID NO: 469935 - DNA, 75 bp, synthetic construct
  source 1..75: mol_type = other DNA
acgcgcactcttgacgaaatggcgcaggacacctggcactggcagtcacgccatccacagggatatcccgattaa

SEQ ID NO: 469936 - DNA, 75 bp, synthetic construct
  source 1..75: mol_type = other DNA
atctggtagtgggatgtgttatgtggtttattgccttgcagctggcgagagacggtattgctcatgcacaagcct

SEQ ID NO: 469937 - DNA, 75 bp, synthetic construct
  source 1..75: mol_type = other DNA
gttgctggcgctggtcacctggggcggcgtagccttcttgctgtggtatggttttggcgcttttaaaacagcaat

SEQ ID NO: 469938 - DNA, 75 bp, synthetic construct
  source 1..75: mol_type = other DNA
tccgcaaggcattccgaataacctgatgccatacatcgcccaggttgctgtaggccgtcgcgactcgctggcgat

SEQ ID NO: 469939 - DNA, 75 bp, synthetic construct
  source 1..75: mol_type = other DNA
gcgccatgcgcgccgctaacgtcaaaaactttatttttagctcctccgccaccgtttatggcgatcagcccaaaa

SEQ ID NO: 469940 - DNA, 75 bp, synthetic construct
  source 1..75: mol_type = other DNA
aagccgtcggcgaatcggtacaaaaaccgctggaatattacgacaacaatgtcaacggcactctgcgcctgatta

SEQ ID NO: 469941 - DNA, 75 bp, synthetic construct
  source 1..75: mol_type = other DNA
cgctcaaagaacgcatcccggcagacttatatattgtttatgaaacgcagcaggtgacgcccgcgctggttaaac

SEQ ID NO: 469942 - DNA, 75 bp, synthetic construct
  source 1..75: mol_type = other DNA
atgggtattgatctgtcaattatctggtttgtcatcatcgtcttcgctacgttgatgtatatagtgatggatgga

SEQ ID NO: 469943 - DNA, 75 bp, synthetic construct
  source 1..75: mol_type = other DNA
ttggcgcagtgatcaacggtttcccggtgaccggtcgcagctacagcggcgggccgttcgactggttaaccccct

SEQ ID NO: 469944 - DNA, 75 bp, synthetic construct
  source 1..75: mol_type = other DNA
tgatgacctggtgcctgtcatatatcgaacgctgggtggatcgcattacaccggcggtgaccaaaaacttcctca

SEQ ID NO: 469945 - DNA, 75 bp, synthetic construct
  source 1..75: mol_type = other DNA
atagccagcgtggatataaaaacaggtcagaaaagtgtatttcagtacctgattaaaccaatcaccagaatgaaa

SEQ ID NO: 469946 - DNA, 75 bp, synthetic construct
  source 1..75: mol_type = other DNA
agttgctgattgaggcttatataaatccacgggatgttgcctatgtcagaacagggatgccggcacttgtaaaac

SEQ ID NO: 469947 - DNA, 75 bp, synthetic construct
  source 1..75: mol_type = other DNA
ttttggtaacgattatccgaccgaagatggcactggcgtacgcgattacatccacgtaatggatctggcggacgg

SEQ ID NO: 469948 - DNA, 75 bp, synthetic construct
  source 1..75: mol_type = other DNA
gtaaatctacccttttcaatcgcatcaccgaagcgcgggtctatgcggcagaccagttgtttgccaccctcgacc

SEQ ID NO: 469949 - DNA, 75 bp, synthetic construct
  source 1..75: mol_type = other DNA
ttgtttgaccgttatgatgctggtgagcaggcggtgctggtacacatctattttacgcaagacaaagatatggaa

SEQ ID NO: 469950 - DNA, 75 bp, synthetic construct
  source 1..75: mol_type = other DNA
agctcgaaaccgaccgtcgtttgttgcgtaatcgcatcgtgcagatacagtcgcgcctggaaagagttgaaaagc

SEQ ID NO: 469951 - DNA, 75 bp, synthetic construct
  source 1..75: mol_type = other DNA
ctatcacgaaagccgtgacggactcaaagcactgggcgcagaacgtcaccattacattaatctggcacgcgcaga

SEQ ID NO: 469952 - DNA, 75 bp, synthetic construct
  source 1..75: mol_type = other DNA
gttcaagctggatgttacaaaggcattcgcgaagcatcgcgccgctgaaccagtccgccgcgaatatctgccagg

SEQ ID NO: 469953 - DNA, 75 bp, synthetic construct
  source 1..75: mol_type = other DNA
ggcatttgcaaagcgtcgcgccgctgaacccgtacgccgcgaatatctgccgggctatcacgaaagccgtgaggg

SEQ ID NO: 469954 - DNA, 75 bp, synthetic construct
  source 1..75: mol_type = other DNA
aagaagagatcctgcaaggcgaaccggaagtaaaagtagagtcagccgaacgtcatcatgcgatggttaacttct

SEQ ID NO: 469955 - DNA, 75 bp, synthetic construct
  source 1..75: mol_type = other DNA
ccgcaggtgacggaaccggttcatcggctggcggggatgctccataagtatcaacatgcgttgaccgatagttaa

SEQ ID NO: 469956 - DNA, 75 bp, synthetic construct
  source 1..75: mol_type = other DNA
aacatattcgctttgcggtaaaactggcgaccgccattgtactggcgctgtttgttggctttcacttccagctgg

SEQ ID NO: 469957 - DNA, 75 bp, synthetic construct
  source 1..75: mol_type = other DNA
tacaccgcgctgatcattgtgatcaccattcagccggaaccgctacttacgccgcagtttgctgttgaacgttgc

SEQ ID NO: 469958 - DNA, 75 bp, synthetic construct
  source 1..75: mol_type = other DNA
acagcgcattagggcaaatcgtcggctgtgtgctcgcgttcaccgttattttgctggtgcgcgataatcatcgtc

SEQ ID NO: 469959 - DNA, 75 bp, synthetic construct
  source 1..75: mol_type = other DNA
atccctaatacccaacaaagcatgttattgctgtgtattagcctggcagtgctgggattcttccttggcattgaa

SEQ ID NO: 469960 - DNA, 75 bp, synthetic construct
  source 1..75: mol_type = other DNA
gggtttatgctggtcggtgcgctgctcatcattccggtgattttggtgtacaccttctggagttactatgtgttt

SEQ ID NO: 469961 - DNA, 75 bp, synthetic construct
  source 1..75: mol_type = other DNA
acttccagtatgtgatgagcaatgagtttatgcgccgctcagaagaaaaatcgtttgataaatttactgagatag

SEQ ID NO: 469962 - DNA, 75 bp, synthetic construct
  source 1..75: mol_type = other DNA
gatcgtaccaacgacaccagcaaagctaactatggttatggtgttattgcgatgaactctgatggtcacttgacc

SEQ ID NO: 469963 - DNA, 75 bp, synthetic construct
  source 1..75: mol_type = other DNA
atggtcggtgttgataccaaaattgacggtaacaacgctaagtggatcgtcggtgcggctgcaggcttcgctaaa

SEQ ID NO: 469964 - DNA, 75 bp, synthetic construct
  source 1..75: mol_type = other DNA
tgcgatattctggttaacgtgacccctgtcggcatgagcggtggtaaagagagtcatgagctggccttcagcgag

SEQ ID NO: 469965 - DNA, 75 bp, synthetic construct
  source 1..75: mol_type = other DNA
taatagcgactggtctgctggctggttgtggtgagaaaacaccaaaatgtagtagtgatgatgctaaaaatctgg

SEQ ID NO: 469966 - DNA, 75 bp, synthetic construct
  source 1..75: mol_type = other DNA
gatttaacgttcacaaaacctgacctgcaaaattccctaccaatcacctatcggattcagaaaactgatgaaggt

SEQ ID NO: 469967 - DNA, 75 bp, synthetic construct
  source 1..75: mol_type = other DNA
tagtgcgtttaacgttgtttgccagtgaaatgagtaaaggcaccgtctcggcggcaatgggcatgttgcaaatgc

SEQ ID NO: 469968 - DNA, 75 bp, synthetic construct
  source 1..75: mol_type = other DNA
aaatctttaccccgcaacccggctggatagcgtttctgttgcgtctggtggtggccgttctggttatgtctggcg

SEQ ID NO: 469969 - DNA, 75 bp, synthetic construct
  source 1..75: mol_type = other DNA
ggactattttgctgccgtcgctgtcgaaaagttttgccagcggtaatcatgatgaatacaaccgcttgatggact

SEQ ID NO: 469970 - DNA, 75 bp, synthetic construct
  source 1..75: mol_type = other DNA
acgtgggtaggatcagatcagttcgatactgaagctttccgtactgacaaactggaactgaccagcggcaacatc

SEQ ID NO: 469971 - DNA, 75 bp, synthetic construct
  source 1..75: mol_type = other DNA
actgactacgctaacatggcgctgagcatcccgtctgcgaacaccaatatctggaacctggaacaagacaccgtt

SEQ ID NO: 469972 - DNA, 75 bp, synthetic construct
  source 1..75: mol_type = other DNA
ttgtttgccgcattggcagcgatctcctttttcggtctgcaacgagccatgcctgaaaccgccacgcgtataggc

SEQ ID NO: 469973 - DNA, 75 bp, synthetic construct
  source 1..75: mol_type = other DNA
ggccgtcgagcagttcgcaatgtataccggcgtacggcctgatgcgcaactgattgctgaggcggcacaatttgc

SEQ ID NO: 469974 - DNA, 75 bp, synthetic construct
  source 1..75: mol_type = other DNA
atgtctgaggttatcaggaacgatatctttcattttgcttcaaaaaagaatgtgcctggatttgcccctatattt

SEQ ID NO: 469975 - DNA, 75 bp, synthetic construct
  source 1..75: mol_type = other DNA
cggtaactgttacccggttgataaagttattcgcatggacaataacgaaatcccggcaggacttaaagcagcacc

SEQ ID NO: 469976 - DNA, 75 bp, synthetic construct
  source 1..75: mol_type = other DNA
tgcgctttggcggcgaagtgatgaaaaacgtcgccggatacgatctctcgcggttaatggccggaagctacggct

SEQ ID NO: 469977 - DNA, 75 bp, synthetic construct
  source 1..75: mol_type = other DNA
aaaattcccggtaactgttatccggtcgataaagttattcgcatggataataacgaagtcccggcaggactttaa

SEQ ID NO: 469978 - DNA, 75 bp, synthetic construct
  source 1..75: mol_type = other DNA
atttatctcaaagttcaaatatagcgaatgcaacgggtggatttgcccctatatttccagacacctgttatcact

SEQ ID NO: 469979 - DNA, 75 bp, synthetic construct
  source 1..75: mol_type = other DNA
tgacggtttttcttgtttccggagaaccagttgatattgcagtcagtgttcacagaacaatgcaggaatgtatgg

SEQ ID NO: 469980 - DNA, 75 bp, synthetic construct
  source 1..75: mol_type = other DNA
tgctttggcatggacagagacttgcgccggaggactggaaagacctgttcactgccctgtggcttaagaccaaaa

SEQ ID NO: 469981 - DNA, 75 bp, synthetic construct
  source 1..75: mol_type = other DNA
atgaagcaaacctttctgcttcgcaacgaagcaatcagaaataacgccatagacgcaatactctcacttcccatc

SEQ ID NO: 469982 - DNA, 75 bp, synthetic construct
  source 1..75: mol_type = other DNA
cggaatgccgcgctttatcgaaatccttaatcagatgcgcattgccgcagaacataacgatccttacgccgatct

SEQ ID NO: 469983 - DNA, 75 bp, synthetic construct
  source 1..75: mol_type = other DNA
ctgccgcagatgaacagaaaattcccggtaactgttatccggtcgataaagttattcgcatggataataacgaag

SEQ ID NO: 469984 - DNA, 75 bp, synthetic construct
  source 1..75: mol_type = other DNA
cggtaactgttatccggtcgataaagttattcaccaggataataacgaaatcccggcaggacttaaaacagcgcc

SEQ ID NO: 469985 - DNA, 75 bp, synthetic construct
  source 1..75: mol_type = other DNA
ccagaacttgattgccagcccggaacatgcacggatccgcgataaattacgtcaggatattggccgcaaaatgac

SEQ ID NO: 469986 - DNA, 75 bp, synthetic construct
  source 1..75: mol_type = other DNA
aaagaagcgcttaagcgcgaggttgagcgccgcgtgcaggagcgcatgctgctgtcgcgcggaaacaactacacg

SEQ ID NO: 469987 - DNA, 75 bp, synthetic construct
  source 1..75: mol_type = other DNA
atgacgggagggcatcttatttcgtattgctcaaaaaaaacatatgacaaatatcacaaaaatgaaatgcaggta

SEQ ID NO: 469988 - DNA, 75 bp, synthetic construct
  source 1..75: mol_type = other DNA
ccctaaacgattgtttttaataagtgcaacagaatttgatgaccgatatttatatctacatgatgattggcgata

SEQ ID NO: 469989 - DNA, 75 bp, synthetic construct
  source 1..75: mol_type = other DNA
tccagcgtgagctggagcggcgcgtgaaagagcgcatgctgatgtcgcgtggtaacaactacacgcggctggcca

SEQ ID NO: 469990 - DNA, 75 bp, synthetic construct
  source 1..75: mol_type = other DNA
gcgtcgacgggctattgatgcgctgctgcaggggctgtgtttccactatgacctgctggccaaccgcgtccagtg

SEQ ID NO: 469991 - DNA, 75 bp, synthetic construct
  source 1..75: mol_type = other DNA
ccccgtgaagatgccggaacgctgaagttctgcgaaaaactgatggaaaaggcggtgggcttcacctcccgtttt

SEQ ID NO: 469992 - DNA, 75 bp, synthetic construct
  source 1..75: mol_type = other DNA
aagaaagccagatgcggctggcctttgagccgatcggttccgcaggatgctgtgtgcgcagtcttgccatggcga

SEQ ID NO: 469993 - DNA, 75 bp, synthetic construct
  source 1..75: mol_type = other DNA
gcggcgatgctggccggaattttgttacgctttggtttacaggcgtttgcaagtctggatggtcagtttacgtta

SEQ ID NO: 469994 - DNA, 75 bp, synthetic construct
  source 1..75: mol_type = other DNA
cagttctgtctgccctgaaggcaaatattactgagcaggtgacctggtttgacgggcgacctgcttttattgacg

SEQ ID NO: 469995 - DNA, 75 bp, synthetic construct
  source 1..75: mol_type = other DNA
ctaatgaaatagaaagtgttgagtttattgaggtaaaattacattctcccaacaatagtgaggtaaaaaatggct

SEQ ID NO: 469996 - DNA, 75 bp, synthetic construct
  source 1..75: mol_type = other DNA
gctgtttattttctgcgtcggggtcgaagccggaccgaacttttttccattttttttcgcgatgggaaaaattac

SEQ ID NO: 469997 - DNA, 75 bp, synthetic construct
  source 1..75: mol_type = other DNA
ttgccatcgtctgtttcctggcaacggcgtgatcccactgcatgagatcacgcatgagctagtgcagaagggcta

SEQ ID NO: 469998 - DNA, 75 bp, synthetic construct
  source 1..75: mol_type = other DNA
ctcgattaccaatatggccatcgagtgtggactggccaccgagtcaaggagcggcaacctgtcagtcagccgtgc

SEQ ID NO: 469999 - DNA, 75 bp, synthetic construct
  source 1..75: mol_type = other DNA
caactgactctgaccgcgccggaaatgaccgcgctggtgggcgggatgcgtgtactgggtgccaacttcgatggc

SEQ ID NO: 470000 - DNA, 75 bp, synthetic construct
  source 1..75: mol_type = other DNA
gctgacggtttccgtaactaccgcgctcgtctggatgtttccaccactgagtcactgctgattgataaagcacag

SEQ ID NO: 470001 - DNA, 75 bp, synthetic construct
  source 1..75: mol_type = other DNA
gaagcggtagacgcaccggaaattattccggatccgttcgatccgtcgaagaaacgtaaaccgacaatgctggtc

SEQ ID NO: 470002 - DNA, 75 bp, synthetic construct
  source 1..75: mol_type = other DNA
cagtaatgatatgcggactcattttcccgtctttttccaccgcaaatactttatactttaaaggaacaatagtgg

SEQ ID NO: 470003 - DNA, 75 bp, synthetic construct
  source 1..75: mol_type = other DNA
caaccgcgtgcagtgctccatcaccacgctggccattgagtgcggactggcgacggagtctgaggccgggaaact

SEQ ID NO: 470004 - DNA, 75 bp, synthetic construct
  source 1..75: mol_type = other DNA
tttcctcaacgatccgcaggcgttcaatgaagcctttgcccgtgcctggttcaaactgacgcacagggatatggg

SEQ ID NO: 470005 - DNA, 75 bp, synthetic construct
  source 1..75: mol_type = other DNA
gtcgtgaagacgtctgggaaccggatctggatgttaactggggtgatgaaaaagcctggctgacccaccgtcatc

SEQ ID NO: 470006 - DNA, 75 bp, synthetic construct
  source 1..75: mol_type = other DNA
ctgagttcgagaagatctctcgtcgcttccttaatgatccgcaagcgtttaacgaagcctttgcccgtgcgtggt

SEQ ID NO: 470007 - DNA, 75 bp, synthetic construct
  source 1..75: mol_type = other DNA
gtgaggttgagcgccgtgtgcaggagcgcatgctgctgtcgcgcggaaacaactacacgcggctggccactgccc

SEQ ID NO: 470008 - DNA, 75 bp, synthetic construct
  source 1..75: mol_type = other DNA
ctcgtctggacgtttccaccaccgagtcactgctgattgataaagcacagcaactgacgctgaccgcgccggaaa

SEQ ID NO: 470009 - DNA, 75 bp, synthetic construct
  source 1..75: mol_type = other DNA
cgtactgggtgccaacttcgatggcagcaaaaacggcgtctttactgaccgcgtgggcgtattgagcaatgactt

SEQ ID NO: 470010 - DNA, 75 bp, synthetic construct
  source 1..75: mol_type = other DNA
gtacttaccgttccatcgacggacgcggcggcgcgggtcgtggtcagcaacgttttgcaccgctgaactcctggc

SEQ ID NO: 470011 - DNA, 75 bp, synthetic construct
  source 1..75: mol_type = other DNA
ccgttctgtcagccctgaaggaaaatattgttgagcgggtgacatggtttgacgggcgacctgcttttattgacg

SEQ ID NO: 470012 - DNA, 75 bp, synthetic construct
  source 1..75: mol_type = other DNA
atgaaagtattaattgttgaaagcgagtttctccatcaagacacctgggtcggtaacgccgttgagcgtctggca

SEQ ID NO: 470013 - DNA, 75 bp, synthetic construct
  source 1..75: mol_type = other DNA
tgatgatggttttgccattctctcttcaaacgaagccattgactgcctgatgttcagctatcaaatggaacatcc

SEQ ID NO: 470014 - DNA, 75 bp, synthetic construct
  source 1..75: mol_type = other DNA
atggctaaaaataagaaaccacgccctgaggcgtggttgttattgtgcacagaaaacccccagctaggctggggg

SEQ ID NO: 470015 - DNA, 75 bp, synthetic construct
  source 1..75: mol_type = other DNA
ccgcgccgggtcaccagggcggtgtggggttcactaaaacgccagccggacgtttctaccatgactattatggtg

SEQ ID NO: 470016 - DNA, 75 bp, synthetic construct
  source 1..75: mol_type = other DNA
tttgctgacgcaccaaccaaactgctgaccaccgttcaggactgctgggtaatgcatccgggcgaaagctggcac

SEQ ID NO: 470017 - DNA, 75 bp, synthetic construct
  source 1..75: mol_type = other DNA
gatgatggacggcaacagcggcctgtcactgacacaagaagtgattgacgaagcggttgattttcgtcaggcgat

SEQ ID NO: 470018 - DNA, 75 bp, synthetic construct
  source 1..75: mol_type = other DNA
gaagaaaaaagcagaagcagaagccgccaaagccgcagtcgaagcgcagaaaaaagccgaggctgctgctgcggc

SEQ ID NO: 470019 - DNA, 75 bp, synthetic construct
  source 1..75: mol_type = other DNA
aagcaaaaaaagaaggtgttagcttagggaattggctcaaagagcttgggagagcagagcttaagcgcaacggaa

SEQ ID NO: 470020 - DNA, 75 bp, synthetic construct
  source 1..75: mol_type = other DNA
ttgggggaatatgacgccctggcaggtttaagtcaacaagcaggttgcgcgcagcctacatccacgacgcccggt

SEQ ID NO: 470021 - DNA, 75 bp, synthetic construct
  source 1..75: mol_type = other DNA
caggaagaggtcacacagagcagagaggcagcatcaccggaaccggttcgtccgctcccgacagaacagcccctg

SEQ ID NO: 470022 - DNA, 75 bp, synthetic construct
  source 1..75: mol_type = other DNA
gctaggctgggggttccggaaagctttcagctttgagccagttattaaaaccccttttgatttgttaaaacacct

SEQ ID NO: 470023 - DNA, 75 bp, synthetic construct
  source 1..75: mol_type = other DNA
ataagaaagcagcggcagaaaaagccgccgcagacaaaaaagcggcagcggcaaaagcagcagctgaaaaagccg

SEQ ID NO: 470024 - DNA, 75 bp, synthetic construct
  source 1..75: mol_type = other DNA
tgaaaccttgcagaagaaaatcagtgaaagcccgctgactaaagacaaagccgggcaaaaaccgtcttactgcgt

SEQ ID NO: 470025 - DNA, 75 bp, synthetic construct
  source 1..75: mol_type = other DNA
atcagttccgcgatgcgctgctcgccccgccagcctggcaggaaggcggcagtatggcacacttgctgggcaccg

SEQ ID NO: 470026 - DNA, 75 bp, synthetic construct
  source 1..75: mol_type = other DNA
tgttcaggcgtcgctcggtttctctaacgccattctcgatatggctgctcttggtttcctcggcatgggggcgca

SEQ ID NO: 470027 - DNA, 75 bp, synthetic construct
  source 1..75: mol_type = other DNA
ctggtgctggtggcaattttcggcccgtcgattggtaacgccgcgctggcgctgaccttcgttgccttgccgcac

SEQ ID NO: 470028 - DNA, 75 bp, synthetic construct
  source 1..75: mol_type = other DNA
ttatctgacagatgcttctgcgacggaggagtttgttgacgaggggacctgggaggccgtgcttcatatagaggt

SEQ ID NO: 470029 - DNA, 75 bp, synthetic construct
  source 1..75: mol_type = other DNA
gatccagagtttggcgttgaacttattggccaaggggagtgctttaatctacgcccatctgggcgttggatcgcg

SEQ ID NO: 470030 - DNA, 75 bp, synthetic construct
  source 1..75: mol_type = other DNA
tgattactgcaccggtgccgatgaccccgttacaggagttctggcactattttaaacgcaacaaaggcgcggttg

SEQ ID NO: 470031 - DNA, 75 bp, synthetic construct
  source 1..75: mol_type = other DNA
tgccaagccgcaaccgctacggcattatcgggccaatctatccgcaggaaatgcaacctgaaaccttgcagaaga

SEQ ID NO: 470032 - DNA, 75 bp, synthetic construct
  source 1..75: mol_type = other DNA
ggcgtatgctataacgccaaagacgcgcaggatctgctggaaaaaaccgccgatcgtctgcacttcgacgaagcc

SEQ ID NO: 470033 - DNA, 75 bp, synthetic construct
  source 1..75: mol_type = other DNA
ggaacttgttgaacaatatcctgacacttacgcgaacatggggattcacgatctgggtgacaaaatgtttgcctg

SEQ ID NO: 470034 - DNA, 75 bp, synthetic construct
  source 1..75: mol_type = other DNA
gggggcgcagccgccaacaccggagtggggcaccatgctctctgacgtgttgcagttcgcgcaaagcgcctggtg

SEQ ID NO: 470035 - DNA, 75 bp, synthetic construct
  source 1..75: mol_type = other DNA
cccgttacaggagttctggcactattttaaacgcaacaaaggcgcggtcgtcgggctggtttacgtcgtcatcgt

SEQ ID NO: 470036 - DNA, 75 bp, synthetic construct
  source 1..75: mol_type = other DNA
gggaacgctggctaacaccctctgttccttcaaacgccactacgacgctaacaccccgctggctcaggtaatgcc

SEQ ID NO: 470037 - DNA, 75 bp, synthetic construct
  source 1..75: mol_type = other DNA
cgcacgccgcagtcgtgttgaatgggaaagttaccggaacatcgtagctgacgccttcgcgttgctcagttgtcc

SEQ ID NO: 470038 - DNA, 75 bp, synthetic construct
  source 1..75: mol_type = other DNA
cgcacgccgcagtcgtgtggaatgggaaaacagacagcgcaagaagcagggactggataccctgggtatggatga

SEQ ID NO: 470039 - DNA, 75 bp, synthetic construct
  source 1..75: mol_type = other DNA
acaccggcgctgtttgctgctctcgatgtgtctgaagaagcagtggcttccgcacgccgcagccgcgtggaatgg

SEQ ID NO: 470040 - DNA, 75 bp, synthetic construct
  source 1..75: mol_type = other DNA
gactttgaaatcccggtgggtggtggtgtttctgactgctacacccgcgtaatgcttaaagtggaagagctgcgc

SEQ ID NO: 470041 - DNA, 75 bp, synthetic construct
  source 1..75: mol_type = other DNA
tgcaacatatcgataccctgatcacccacttcctgcaagtgtcgtgggggccggtgatgcctgccaatgaatcct

SEQ ID NO: 470042 - DNA, 75 bp, synthetic construct
  source 1..75: mol_type = other DNA
tcgactggatgccgaaacgtctggcgtcttacgagaaagcggcgctgcaaaacaccattctgaaaggccgttccc

SEQ ID NO: 470043 - DNA, 75 bp, synthetic construct
  source 1..75: mol_type = other DNA
caggaaaactctccatcacccgtgccacccgcgcgctgacgttcctgtcagagctggggctgattagctaccaga

SEQ ID NO: 470044 - DNA, 75 bp, synthetic construct
  source 1..75: mol_type = other DNA
cggaatatgacccgcttattggctgttatattccgaccgacatcacgttcacaccggcactgtttgccgccctcg

SEQ ID NO: 470045 - DNA, 75 bp, synthetic construct
  source 1..75: mol_type = other DNA
atgggaaaacagacagcgcaaaaagcagggctggataccctgggtatggatgaattgatagagaaagcctggcgt

SEQ ID NO: 470046 - DNA, 75 bp, synthetic construct
  source 1..75: mol_type = other DNA
aacgtcaggatatcgtcaccctggtgaaacggcagctgacgcgtgaaatctcggaagggcgcttcactgccaatc

SEQ ID NO: 470047 - DNA, 75 bp, synthetic construct
  source 1..75: mol_type = other DNA
ggctgtgtttccactatgacccgctggccaaccgcgtccagtgctccatcaccacgctggccattgagtgcggac

SEQ ID NO: 470048 - DNA, 75 bp, synthetic construct
  source 1..75: mol_type = other DNA
ccgtgcaccggagcggtggccatcagggaccattaccgtcagggtttatgacgatcagccgtttgaccggcagat

SEQ ID NO: 470049 - DNA, 75 bp, synthetic construct
  source 1..75: mol_type = other DNA
tgtcgactgcgtaccagatatcggctaccaccaccgtggcgctgagaaaatgggcgagcgtcagtcctggcatag

SEQ ID NO: 470050 - DNA, 75 bp, synthetic construct
  source 1..75: mol_type = other DNA
tgaatatgaaattggagatatcgtctttacatgtataggtgctgccttatttggtcaaatatcagctgcatcaaa

SEQ ID NO: 470051 - DNA, 75 bp, synthetic construct
  source 1..75: mol_type = other DNA
agttggcagcatcaccgcaaatattttaatattacatattcagtgaaaaaatgcgtaataaaaatatacattgcg

SEQ ID NO: 470052 - DNA, 75 bp, synthetic construct
  source 1..75: mol_type = other DNA
tggcatcatcccgctctgacgttgatttatatggaaggggtagaaacgcctcagccaaagctgaccgaggcggta

SEQ ID NO: 470053 - DNA, 75 bp, synthetic construct
  source 1..75: mol_type = other DNA
ctgttcaaaattcgtttttgatatttataaagaggcgctatgtattccggtgggtgaaatagagacgtttggaga

SEQ ID NO: 470054 - DNA, 75 bp, synthetic construct
  source 1..75: mol_type = other DNA
tggcatcatccggatctggcgttaatacatgcagaaggagtagtaacgcctcagcaaaaactgaccgaggcggta

SEQ ID NO: 470055 - DNA, 75 bp, synthetic construct
  source 1..75: mol_type = other DNA
tatgcagtaaagcgattaggtgccgggctaacagaacagcaaaaacaacggctggtagaacaggttccctcccgg

SEQ ID NO: 470056 - DNA, 75 bp, synthetic construct
  source 1..75: mol_type = other DNA
taccaccaccgtggcgctgagaaaatgggcgaacgccagtcctggcacagctatattccttacaccgaccgtatc

SEQ ID NO: 470057 - DNA, 75 bp, synthetic construct
  source 1..75: mol_type = other DNA
tcggcgcacggtgctttccgtatcgttttgcagctcgatggcgaagagattgtcgactgcgtaccagacatcggt

SEQ ID NO: 470058 - DNA, 75 bp, synthetic construct
  source 1..75: mol_type = other DNA
ggagatggaagccctgaccttcaaaccggaagagtgggggatgaagcgcggcaccgaaaatgaagacttcatgtt

SEQ ID NO: 470059 - DNA, 75 bp, synthetic construct
  source 1..75: mol_type = other DNA
tcctaggttctattccgtgggagcgtaaaaccgtcacgccagccagtttgtggcatcatccgggtttggtgttga

SEQ ID NO: 470060 - DNA, 75 bp, synthetic construct
  source 1..75: mol_type = other DNA
ttttaggctcaattccgtgggcgcgaaaaaccgtaacgccagcgagtttgtggcatcatccgggtctggtgttga

SEQ ID NO: 470061 - DNA, 75 bp, synthetic construct
  source 1..75: mol_type = other DNA
cacccgggctctgacgttcctgtcagagctggggttgattacctaccagacggaatatgacccgcttatcgggtg

SEQ ID NO: 470062 - DNA, 75 bp, synthetic construct
  source 1..75: mol_type = other DNA
gataacagccagcttgcagatgagatggcggagatgaagaccagcatcacggaaacccgcaatgaaatcacacag

SEQ ID NO: 470063 - DNA, 75 bp, synthetic construct
  source 1..75: mol_type = other DNA
caacccaactcactactcagtggcattgcgatatgacgaaaacaaaatgagtgcgccgaaagtggtcgccaaagg

SEQ ID NO: 470064 - DNA, 75 bp, synthetic construct
  source 1..75: mol_type = other DNA
catttaaaaatgaaatcatcccgaccggtggtcacgatgccgacggcgtcctgaagcagtttaattacgacgaag

SEQ ID NO: 470065 - DNA, 75 bp, synthetic construct
  source 1..75: mol_type = other DNA
agcagacgctggagcaaggttttaatatcgcccgtaacgcggcgctgctggcagaagtaccacactctgtcccgg

SEQ ID NO: 470066 - DNA, 75 bp, synthetic construct
  source 1..75: mol_type = other DNA
tacgccgcggtggcggaagtgctggcctgggtctggcaactgaaacgctggcgtctggctggtggacagcgccct

SEQ ID NO: 470067 - DNA, 75 bp, synthetic construct
  source 1..75: mol_type = other DNA
tgatcagagaagccatgctggcactgttgccgctgattagcggggtggtgctggtggcgcttatttcgccggtca

SEQ ID NO: 470068 - DNA, 75 bp, synthetic construct
  source 1..75: mol_type = other DNA
gtgtttaattgtgtgggatgcgttcattacattttcaatgacccgaatctgatcctcgggcagattattctgctg

SEQ ID NO: 470069 - DNA, 75 bp, synthetic construct
  source 1..75: mol_type = other DNA
ggatcatcaaatccgtaaatatgtcgctatccagcagtggtttgcagagaaacatccggtgccgttctactcctg

SEQ ID NO: 470070 - DNA, 75 bp, synthetic construct
  source 1..75: mol_type = other DNA
taaggcggtgaaaagcgaaaaatgcacggtgctgtttccctcacgctggcaggattttgtctgcggcaagacaac

SEQ ID NO: 470071 - DNA, 75 bp, synthetic construct
  source 1..75: mol_type = other DNA
gcttactggcgcgccacccgcaaactgcgtttaaaactcttcggcaagatagtaaaaagccgatgcctgaccgca

SEQ ID NO: 470072 - DNA, 75 bp, synthetic construct
  source 1..75: mol_type = other DNA
cacatcgcccaccagcaggatgtaagagagcgcgccaatcaacgcgacggcggagatataaaccagtgcaggtgc

SEQ ID NO: 470073 - DNA, 75 bp, synthetic construct
  source 1..75: mol_type = other DNA
cgcctttcttattggtgaagcggcaggattcatcagcgccagctcgctggaggggattagctatgcgctggacag

SEQ ID NO: 470074 - DNA, 75 bp, synthetic construct
  source 1..75: mol_type = other DNA
actgcgtttaaaactcttcggcaaaatagtaaaaagccgatgcctgaccgcaccggctttaagaaagtggattat

SEQ ID NO: 470075 - DNA, 75 bp, synthetic construct
  source 1..75: mol_type = other DNA
gtgtgttatctggtttggcggtgtgtcgctggcccgtcgattgtcgggcatgctctccgctgggctgcattttga

SEQ ID NO: 470076 - DNA, 75 bp, synthetic construct
  source 1..75: mol_type = other DNA
cgcgcctggaaattactggaacatccgaagttccgcgcggcttacgatctgctggcactgcgtgctgaagtggag

SEQ ID NO: 470077 - DNA, 75 bp, synthetic construct
  source 1..75: mol_type = other DNA
gcggtacgttttgctgcaaaactggggatgcgcatcagcccagaaaccgcagaaccgatcccccgcctcgctacc

SEQ ID NO: 470078 - DNA, 75 bp, synthetic construct
  source 1..75: mol_type = other DNA
gttggccttgcgagctgaagttgaacgtaatgctgaactgcagcgtctggtgaaatggtggggtgagttccaggt

SEQ ID NO: 470079 - DNA, 75 bp, synthetic construct
  source 1..75: mol_type = other DNA
atctgttccagccgctgttcccgaccattacccgttacttcacggaaaatggcgacagcccgatggagcggatca

SEQ ID NO: 470080 - DNA, 75 bp, synthetic construct
  source 1..75: mol_type = other DNA
gatgaagaaccgtcaccgcgtcgtcgtactcgtcgtccacgcaaacgcgcaccacgtcgtgagggtaccgcatga

SEQ ID NO: 470081 - DNA, 75 bp, synthetic construct
  source 1..75: mol_type = other DNA
gatgaagagccgtcaccgcgtcgtcgtactcgtcgtccacgcaaacgcgcaccgcgtcgtgagggtaccgcatga

SEQ ID NO: 470082 - DNA, 75 bp, synthetic construct
  source 1..75: mol_type = other DNA
gtgactgatcttcaacaaacgtattaccgccaggtaaagaacccgaatccggtgttcactccccgtgaaggtgcc

SEQ ID NO: 470083 - DNA, 75 bp, synthetic construct
  source 1..75: mol_type = other DNA
acatctgcactgtttgctgccctcgatgtatcagaggaggcagtggccgccgcgcgccgcagccgtgtggtatgg

SEQ ID NO: 470084 - DNA, 75 bp, synthetic construct
  source 1..75: mol_type = other DNA
actacactatgatacccagagtgtcagtttgtataaaaactctgtttacgctgaagaaacaattgagatgcaact

SEQ ID NO: 470085 - DNA, 75 bp, synthetic construct
  source 1..75: mol_type = other DNA
ccatgttctggtacccactgctggagacggcacagaagatcgcccaggaaagtggcctgacctatcacgacgctt

SEQ ID NO: 470086 - DNA, 75 bp, synthetic construct
  source 1..75: mol_type = other DNA
gcgtatgtcccgtcgtcagggtaaacgcgcatggaaactgctggagcatcctaagttccgtgcggcatacgacct

SEQ ID NO: 470087 - DNA, 75 bp, synthetic construct
  source 1..75: mol_type = other DNA
gcctggctggttggcggcggcgtgcgcgacctgttacttggcaaaaagccgaaagattttgacgtaaccactaac

SEQ ID NO: 470088 - DNA, 75 bp, synthetic construct
  source 1..75: mol_type = other DNA
caacacggcgaagatcgtgatatcttcgagcgtctctatgcagtgcggctcgaccgtctacgcaatctcccagaa

SEQ ID NO: 470089 - DNA, 75 bp, synthetic construct
  source 1..75: mol_type = other DNA
ctcggctgcgtgtcatttattcgaatggtacagaaagcaacctacttcggctgtcattggttcgtgctttgtata

SEQ ID NO: 470090 - DNA, 75 bp, synthetic construct
  source 1..75: mol_type = other DNA
gcaacgattgaagtgggtcattggtttatcctggatggtcaaacggcttatgtgtctgaggaaggtgaagagttc

SEQ ID NO: 470091 - DNA, 75 bp, synthetic construct
  source 1..75: mol_type = other DNA
aattcagtgttgggattagtaactatagaggcgaattaccaatcttcatgaatttagataagattacggaaacaa

SEQ ID NO: 470092 - DNA, 75 bp, synthetic construct
  source 1..75: mol_type = other DNA
gtattgaaagtgagcaaattttttttgctaagatgaatagatatagtttcaaactgtcagataagaaatggcaac

SEQ ID NO: 470093 - DNA, 75 bp, synthetic construct
  source 1..75: mol_type = other DNA
cgataaaatgccagagtcgatgcgtgttggttatcttaataccttggcatatttttcgtctgaatatagtgcagg

SEQ ID NO: 470094 - DNA, 75 bp, synthetic construct
  source 1..75: mol_type = other DNA
gtcacgccgcacgccatcacgagtatgtgcacagtgtttgccgaatcagaagtgatcagcctgcgctcagcgggc

SEQ ID NO: 470095 - DNA, 75 bp, synthetic construct
  source 1..75: mol_type = other DNA
ggattttgccgataaacaagtgacggaaatctcctgtcacgggctgggcgcacggtttcttgcgccagcaacgcg

SEQ ID NO: 470096 - DNA, 75 bp, synthetic construct
  source 1..75: mol_type = other DNA
atgcgtacaacactaaaactggcggtgtgttggcttacactttcgactttcgggccacggaatgatgagacctgt

SEQ ID NO: 470097 - DNA, 75 bp, synthetic construct
  source 1..75: mol_type = other DNA
ggctgttgcacgtatcaaggatggtagcattatcgagtatgtctatgaccccatgtctgcgaagctggtgaaggc

SEQ ID NO: 470098 - DNA, 75 bp, synthetic construct
  source 1..75: mol_type = other DNA
caatcatcgactcgttgagaatgatcggtgctcaagccggtggccttccgagagacctaactccgtcagagccta

SEQ ID NO: 470099 - DNA, 75 bp, synthetic construct
  source 1..75: mol_type = other DNA
gtgacatattcgattggcattgattccggctcaaccgccaccaaagggatcttactggcagacggcgtgattacg

SEQ ID NO: 470100 - DNA, 75 bp, synthetic construct
  source 1..75: mol_type = other DNA
atggcggcgatgttgttaacgcttatccctccggtggtgattgttttagtgatgcagcgtgccttcgtgcgcggc

SEQ ID NO: 470101 - DNA, 75 bp, synthetic construct
  source 1..75: mol_type = other DNA
atggccgatagcgaaggtcgtaagttcatgacgaccagcggcatccgcggcgtgcctgacgaagtgattgccggt

SEQ ID NO: 470102 - DNA, 75 bp, synthetic construct
  source 1..75: mol_type = other DNA
tgaccctggatcactggagcgctatcagcgccgtgttgaacgggagcagggtaacgactttctgatcccaccatc

SEQ ID NO: 470103 - DNA, 75 bp, synthetic construct
  source 1..75: mol_type = other DNA
tacgcctttccttaacgtgttctggctgcgcacagcaatgaatggtttaatattgaaccgtatacaggatgctct

SEQ ID NO: 470104 - DNA, 75 bp, synthetic construct
  source 1..75: mol_type = other DNA
cggagaacgcggcggccatgattgccgccggtgagtacaaatttatttccccggtatttggatacaaccggcgcg

SEQ ID NO: 470105 - DNA, 75 bp, synthetic construct
  source 1..75: mol_type = other DNA
tgaatcagaaagacgagcaaatcgccagcctgtcagccagtgcctatgacccgacgaagcatatccctctgacgg

SEQ ID NO: 470106 - DNA, 75 bp, synthetic construct
  source 1..75: mol_type = other DNA
taagtgcaatagcagcaggcatttctgcgtttggcacattagccgcagcggggtcggcgcttgcaagttggtgca

SEQ ID NO: 470107 - DNA, 75 bp, synthetic construct
  source 1..75: mol_type = other DNA
tatgcaaaaagtttcaaccggcctgcatggtctggcagccatcaccatcaccgtagccgtgatctggattggcta

SEQ ID NO: 470108 - DNA, 75 bp, synthetic construct
  source 1..75: mol_type = other DNA
tgcgtaacctcttcttctggatgatttttatcactctgatgctgccggttgaagtgcgtattttcccgacggtgg

SEQ ID NO: 470109 - DNA, 75 bp, synthetic construct
  source 1..75: mol_type = other DNA
ggcacacatctgctggaaaacatccacaacatctgggtgaacggggtaggcacgaatagcgcgccgttctggcgg

SEQ ID NO: 470110 - DNA, 75 bp, synthetic construct
  source 1..75: mol_type = other DNA
ttacggttgccctcggcgacggtcgtctgcttccggcacagcaggcatgggctgcgtcactggcgaaatccgatc

SEQ ID NO: 470111 - DNA, 75 bp, synthetic construct
  source 1..75: mol_type = other DNA
cctaatgatgcactggatgccgcaatgagcccgacatcaaccattccggaaggacggcctgacgaggcctgcctc

SEQ ID NO: 470112 - DNA, 75 bp, synthetic construct
  source 1..75: mol_type = other DNA
gctggaacgattccaggaattgagattaggcgaaacgtttgcgatgaaagcgggcctgacgtctgacattgattt

SEQ ID NO: 470113 - DNA, 75 bp, synthetic construct
  source 1..75: mol_type = other DNA
ctacgccagagaagtgccgaaggagaaacacctgaccggcaaaatcttcacgcaacgtattgaacgtaacaaccg

SEQ ID NO: 470114 - DNA, 75 bp, synthetic construct
  source 1..75: mol_type = other DNA
atgccctccacacaccggattggcactggcctccgtgccaatccggtacgtggaaaaaaattggcgcaggtgata

SEQ ID NO: 470115 - DNA, 75 bp, synthetic construct
  source 1..75: mol_type = other DNA
ttgacggcagcgatgcgttaatggggccgaaggttcaggccaatgatatcaagcaggccgcggagcagtttgagg

SEQ ID NO: 470116 - DNA, 75 bp, synthetic construct
  source 1..75: mol_type = other DNA
cgaagcctcaacgggtcagagtattcagccaatctgtcgcgatggcattcgaagtaaatctcgacaaaagtcgct

SEQ ID NO: 470117 - DNA, 75 bp, synthetic construct
  source 1..75: mol_type = other DNA
ctggtctggctcacctggcgggtaatgaagcgtctgcaaaagctggaaaaacagcagaaacagcagcgggaggaa

SEQ ID NO: 470118 - DNA, 75 bp, synthetic construct
  source 1..75: mol_type = other DNA
catgatggaagacaaaagtgggcgcaacaacgaggcggtaaaacagtacatggcgcggcgctggagcaatgaatt

SEQ ID NO: 470119 - DNA, 75 bp, synthetic construct
  source 1..75: mol_type = other DNA
atcctcggcgtcacgtttacccgccgcgcccatgaaagtgacgactggcgcagcgaactgggggctttctggcag

SEQ ID NO: 470120 - DNA, 75 bp, synthetic construct
  source 1..75: mol_type = other DNA
aaaaaatacacctcgggggttctgtcttttgcagagcagacactgccaccgggagagcgtgaaagggtgatggag

SEQ ID NO: 470121 - DNA, 75 bp, synthetic construct
  source 1..75: mol_type = other DNA
gcaggaacgcgaacatgagttatctctggaacgggagcgccagccggaaattcaggaacggacactggatggccc

SEQ ID NO: 470122 - DNA, 75 bp, synthetic construct
  source 1..75: mol_type = other DNA
tgtgattcaggcgctcacagaggcagggcttgaagtggtcagggtgacgcgaagcagtatcagcattgcagaccc

SEQ ID NO: 470123 - DNA, 75 bp, synthetic construct
  source 1..75: mol_type = other DNA
ctcgatgacagccgggaagagttaacacacccggtattgaaaaaactgcaacagtctctacagggacgtgggagg

SEQ ID NO: 470124 - DNA, 75 bp, synthetic construct
  source 1..75: mol_type = other DNA
aacctggggggtgacgttcgtcaatggcgagaacgggaaatttctggtgttgccggacgggatgaaaggggaaaa

SEQ ID NO: 470125 - DNA, 75 bp, synthetic construct
  source 1..75: mol_type = other DNA
cgaacagcagataagggatgaacaggaaaggctggcacgcctggaacgggagcgtgcgcggtcctggcatgaaga

SEQ ID NO: 470126 - DNA, 75 bp, synthetic construct
  source 1..75: mol_type = other DNA
gcaatgaatttcacggccagcgtgatattcaggcgcaactgatggcgcatctggagtatgcgcttgagcacacgg

SEQ ID NO: 470127 - DNA, 75 bp, synthetic construct
  source 1..75: mol_type = other DNA
agcaatggagttttgtcggcagtaaagcgcgacagcactggctctggtacgcgtacaacacgaaaactggtggcg

SEQ ID NO: 470128 - DNA, 75 bp, synthetic construct
  source 1..75: mol_type = other DNA
agcagtggagcttcgttggcagcaaggcgcaacaacactggctctggtacgcgtacaacacaaaaacgggtggtg

SEQ ID NO: 470129 - DNA, 75 bp, synthetic construct
  source 1..75: mol_type = other DNA
atcttcatgcaacgtattgagcgtaacaacctgaccctccgtacccgcatcaagcggctggctcgtaaaacaatc

SEQ ID NO: 470130 - DNA, 75 bp, synthetic construct
  source 1..75: mol_type = other DNA
aggcgtctggcccgaaaaacaatctgcttctcacgttcaattgagctgcatgaaaaggttatcggggccttcatt

SEQ ID NO: 470131 - DNA, 75 bp, synthetic construct
  source 1..75: mol_type = other DNA
atgagcaaaactatcgcgacggaaaatgcaccggcagctatcggtccttacgtacagggcgttgatctgggtaat

SEQ ID NO: 470132 - DNA, 75 bp, synthetic construct
  source 1..75: mol_type = other DNA
gtggcgcttatctgtgaacttgatgagcaatggagctttgtcggcagcaaagctcgccagcacttgctctggtac

SEQ ID NO: 470133 - DNA, 75 bp, synthetic construct
  source 1..75: mol_type = other DNA
tataaccgtgttgcgccgcagtgggcaattcactacagcatggcctataccagttggagccagttccaggagttg

SEQ ID NO: 470134 - DNA, 75 bp, synthetic construct
  source 1..75: mol_type = other DNA
tgaaactactggcagatatactaaaaaaattgtagaggaactggagcaagaagacattctggcgcaaaaactggt

SEQ ID NO: 470135 - DNA, 75 bp, synthetic construct
  source 1..75: mol_type = other DNA
tctcaacgtccgtgactatgagaccatgccggcgctgaccgacgcgctggagcagattatcagcggtgatcagcc

SEQ ID NO: 470136 - DNA, 75 bp, synthetic construct
  source 1..75: mol_type = other DNA
tacaacaccaaaacaggcagtgtactggcctacacttttggtccccgaaccgatcaaacgtgccgggagctactg

SEQ ID NO: 470137 - DNA, 75 bp, synthetic construct
  source 1..75: mol_type = other DNA
gtggcgcttatctgcgagcttgatgagcaatggagctacgttggcagtaaagcccggcaacattggctctggtac

SEQ ID NO: 470138 - DNA, 75 bp, synthetic construct
  source 1..75: mol_type = other DNA
ctgggaatgccggtacaaactcaccctgatgcgcaattcgctggtgcaattggcgcggcggtaattggtcaacga

SEQ ID NO: 470139 - DNA, 75 bp, synthetic construct
  source 1..75: mol_type = other DNA
ataaaaatttgagtcacatattagatttgagtaatttgaagatacataagggattgaatcgtatttttagaggaa

SEQ ID NO: 470140 - DNA, 75 bp, synthetic construct
  source 1..75: mol_type = other DNA
ttttatttataagggtcattgcgaattatctgatgcaaagttatgttatgttagggaaggtgcgaataagcgggg

SEQ ID NO: 470141 - DNA, 75 bp, synthetic construct
  source 1..75: mol_type = other DNA
cgcgcgcatttcacaaaacccaatatcgttatcaaacctaacgccaacagccgcccgaccggcgataccactggt

SEQ ID NO: 470142 - DNA, 75 bp, synthetic construct
  source 1..75: mol_type = other DNA
gcacgggtgagcgccgttcccggcgctcgcttcctgaaggtggaatttattccggcagaggagggcagaaaatga

SEQ ID NO: 470143 - DNA, 75 bp, synthetic construct
  source 1..75: mol_type = other DNA
gagagcaaaattatcctcgtgcagggcagtatcccggagatgcagaagtctctggacagccgtgtttactttgac

SEQ ID NO: 470144 - DNA, 75 bp, synthetic construct
  source 1..75: mol_type = other DNA
cggacttcttcttcgagaaagctattcgttataatgaattatatttttccgctcctgcgcaattgaatgatccta

SEQ ID NO: 470145 - DNA, 75 bp, synthetic construct
  source 1..75: mol_type = other DNA
aacatactctcaatactcaaccggttaaagatacatcgtcatcagcaccagctgccccgatggtggattcgttaa

SEQ ID NO: 470146 - DNA, 75 bp, synthetic construct
  source 1..75: mol_type = other DNA
aaggcctttacagataaagaagaattacttatacaacaggcatctaaccttcatgaacagaaaaaaataggggta

SEQ ID NO: 470147 - DNA, 75 bp, synthetic construct
  source 1..75: mol_type = other DNA
cagcagacaccggcgttcggtcgaagagtgtctggtgtcatagaaattgccgatgggagtcgccgtcgtaaagct

SEQ ID NO: 470148 - DNA, 75 bp, synthetic construct
  source 1..75: mol_type = other DNA
atgaccaaatgcgatggttgttatgaccgtgttgcggagggtaaaaagccgatctgtgttgaatcttgtccgctg

SEQ ID NO: 470149 - DNA, 75 bp, synthetic construct
  source 1..75: mol_type = other DNA
gtgttctggttggcgaactggatgacgagcagatggctgcattgtccagattgggtaacgattatcgtccaacaa

SEQ ID NO: 470150 - DNA, 75 bp, synthetic construct
  source 1..75: mol_type = other DNA
aacatgctcttaatactcaacttgttgaagatacttcgtcatcgacgcctgccgccccgatggtggattcgttaa

SEQ ID NO: 470151 - DNA, 75 bp, synthetic construct
  source 1..75: mol_type = other DNA
atggccagtatcaataccattgtgaaacgcaagcagtacctgtggctggggattgtggttgtcggtgcagcctct

SEQ ID NO: 470152 - DNA, 75 bp, synthetic construct
  source 1..75: mol_type = other DNA
tgtctctgcgtttaagccagaagcacagttacagtatgttgggcatctgaaaccagggatttatatcaaaacggg

SEQ ID NO: 470153 - DNA, 75 bp, synthetic construct
  source 1..75: mol_type = other DNA
aaggggaatacgtggagttgagcgacggcactttatcgtggttagggaacgccttgttctggatgccgctaccag

SEQ ID NO: 470154 - DNA, 75 bp, synthetic construct
  source 1..75: mol_type = other DNA
tgcgtgaagaatttcaatacatgcaggagcattacagcgatcctgcggatcgtgaaaaacaggaactttatattt

SEQ ID NO: 470155 - DNA, 75 bp, synthetic construct
  source 1..75: mol_type = other DNA
gtgccactacatctcccctgctttcttgtactttcggcctgtaccgttgatatcagccagccagactcatcagcc

SEQ ID NO: 470156 - DNA, 75 bp, synthetic construct
  source 1..75: mol_type = other DNA
gggcccttttttacatggattgtataaaatggataaaccaaaggcgtactgccgcctgcttctcccctgctttct

SEQ ID NO: 470157 - DNA, 75 bp, synthetic construct
  source 1..75: mol_type = other DNA
tatctctgcatttaaaccagaaacgcagttacagtatattgggcacctgaagccagggatttatattaaagcaag

SEQ ID NO: 470158 - DNA, 75 bp, synthetic construct
  source 1..75: mol_type = other DNA
ggagccgttccattgccaaaagatattctcgacctccaccacgattacgttgcggaacgcgcacgctttgaagga

SEQ ID NO: 470159 - DNA, 75 bp, synthetic construct
  source 1..75: mol_type = other DNA
cagttatgaaggcggcggcatttcctacaacattccgtatgccaaacgtgtaacgctggaaaaatcgatccgcga

SEQ ID NO: 470160 - DNA, 75 bp, synthetic construct
  source 1..75: mol_type = other DNA
aagtatgagttacatgtaccgacggttaccattccctctgctgattgtaagtcgatctctgttcagggagatgat

SEQ ID NO: 470161 - DNA, 75 bp, synthetic construct
  source 1..75: mol_type = other DNA
agctgtagtgagcgaatgcccgctcaagatgattggattttaatttattcaaagcacggcgagtatatggcagga

SEQ ID NO: 470162 - DNA, 75 bp, synthetic construct
  source 1..75: mol_type = other DNA
ggaagatgttattcttgaccggcgggtgtttaattttaatgacaggcaatatgaagagttcatcgaaatgcttga

SEQ ID NO: 470163 - DNA, 75 bp, synthetic construct
  source 1..75: mol_type = other DNA
actggcaaggacgttgaaaaattcgaagatggcgttaaataccaacaaaccattcctgaacataaacgcttctcc

SEQ ID NO: 470164 - DNA, 75 bp, synthetic construct
  source 1..75: mol_type = other DNA
ggcccgtgccggagaatcgcttcttaaatcttttgcgggtaaagagagtctgcttgaacagcaggccgctgaact

SEQ ID NO: 470165 - DNA, 75 bp, synthetic construct
  source 1..75: mol_type = other DNA
tctaacctctggtgggcgcgagccgacggtactgccgcagaactgcctgatggtcgccagttctgcccgcctgcc

SEQ ID NO: 470166 - DNA, 75 bp, synthetic construct
  source 1..75: mol_type = other DNA
agactttcaacggcgggatcaccggagcgctgacagggaacgccgataccgcaacgaaattgaaaacagccagaa

SEQ ID NO: 470167 - DNA, 75 bp, synthetic construct
  source 1..75: mol_type = other DNA
cgctggccgcaacaccaaaagcggtgaagtctgcctatgacaatgctgaaaaacgtcttcagaaagatcagaacg

SEQ ID NO: 470168 - DNA, 75 bp, synthetic construct
  source 1..75: mol_type = other DNA
ccgcacaggacgctaccacagcgcgaaaaggtcttgtccagctcagtagtgccaccaacagcacgtctgaaacgc

SEQ ID NO: 470169 - DNA, 75 bp, synthetic construct
  source 1..75: mol_type = other DNA
actctgccgataacattggtggcgtatattacagaccggttcagaaatacattaacgggacgtggtacaacgtgg

SEQ ID NO: 470170 - DNA, 75 bp, synthetic construct
  source 1..75: mol_type = other DNA
cagcgcgaaaaggccttgtccagctcagtagcgccaccaacagcgattctgaaacgcttgcggcaacgccaaagg

SEQ ID NO: 470171 - DNA, 75 bp, synthetic construct
  source 1..75: mol_type = other DNA
gaatctgttaaacgtagcggtcgtctgaccctttcagagggcgggttccacaccctcaagacggtacacaccatc

SEQ ID NO: 470172 - DNA, 75 bp, synthetic construct
  source 1..75: mol_type = other DNA
ccaaaacgccgtcaccggccccggcgcagattaaaaccggcgatgacgtcgatgtcgatatcgccatttgttcaa

SEQ ID NO: 470173 - DNA, 75 bp, synthetic construct
  source 1..75: mol_type = other DNA
aaccaccccgcttgccgcactcagcagcacccagaccggcggcaaaccacccaaaacgccgtcaccggccccggc

SEQ ID NO: 470174 - DNA, 75 bp, synthetic construct
  source 1..75: mol_type = other DNA
cgctttgagcactgaagccggaaactggacaaccgctcagtttattgaatggctggattcccgtggtgcatttaa

SEQ ID NO: 470175 - DNA, 75 bp, synthetic construct
  source 1..75: mol_type = other DNA
ccgaacaggaaaaagaatggttttacgccctaatgcaagatcgtgcggataatgctaacactctggaaaaaccat

SEQ ID NO: 470176 - DNA, 75 bp, synthetic construct
  source 1..75: mol_type = other DNA
tggatgaagcatgggacttgctcaaagaaggtgaagtttccacgtttatggaacacgcctaccgtaagtttcgta

SEQ ID NO: 470177 - DNA, 75 bp, synthetic construct
  source 1..75: mol_type = other DNA
caagggcaaacctgccagtggtcgtgccgtattgtctcaggaacaggacggcattaaatcgcacacccacagcgc

SEQ ID NO: 470178 - DNA, 75 bp, synthetic construct
  source 1..75: mol_type = other DNA
ctgttggctgaaatcaccccggacaaagcgttccaggacaagctgtatccgtttacctgggatgccgtacgttac

SEQ ID NO: 470179 - DNA, 75 bp, synthetic construct
  source 1..75: mol_type = other DNA
gccaaaatcgaagaaggtaaactggtaatctggattaacggcgataaaggctataacggtctcgctgaagtcggt

SEQ ID NO: 470180 - DNA, 75 bp, synthetic construct
  source 1..75: mol_type = other DNA
gcagaatgtcttaagctgaatgtggcattcccacattttatcagccagatggagtcgatgttgactactggtgaa

SEQ ID NO: 470181 - DNA, 75 bp, synthetic construct
  source 1..75: mol_type = other DNA
gacagagacgcacgccatctggaccagatatttccgctgctcatgaggcagatggaaagcattctgctgtccggt

SEQ ID NO: 470182 - DNA, 75 bp, synthetic construct
  source 1..75: mol_type = other DNA
cgccacccacacctctgtgggggctacagtgcaacgtgacgccatgcttcggggcgcgtctggtgcaggagggcg

SEQ ID NO: 470183 - DNA, 75 bp, synthetic construct
  source 1..75: mol_type = other DNA
ctttggcggctatgcgcagtctggcctgctggctgaaatcaccccagataaatcattccaggacaagctgtatcc

SEQ ID NO: 470184 - DNA, 75 bp, synthetic construct
  source 1..75: mol_type = other DNA
ggagggcaaccgactgtactatttggctgaccgggcaagtatcaccggtaagtttagtgatgccgaaagcctgaa

SEQ ID NO: 470185 - DNA, 75 bp, synthetic construct
  source 1..75: mol_type = other DNA
aaaaggccttgttcagctcagtagtgtgaccaacagcacgtctgaaacgctcgccgcaacgccgaaagcggtaaa

SEQ ID NO: 470186 - DNA, 75 bp, synthetic construct
  source 1..75: mol_type = other DNA
ttctgactcatacatgtggtttgaaactggtgataatggcaatgaatattttaaatggcgcatcaggtctggcag

SEQ ID NO: 470187 - DNA, 75 bp, synthetic construct
  source 1..75: mol_type = other DNA
acatgcccgcactttatccgccatatggagtcgatgctaaccaccggtgaactcagtccccaacacgcccactgc

SEQ ID NO: 470188 - DNA, 75 bp, synthetic construct
  source 1..75: mol_type = other DNA
gtcaccctgtaccacaacggttttacctgcgaagccgatactcttggtagttgcggctacgtatacatcgctgtt

SEQ ID NO: 470189 - DNA, 75 bp, synthetic construct
  source 1..75: mol_type = other DNA
caaatattaccgataagtttagtgatgccgaatgcctgaagttggatgtcgcatttccgcattttatccgtcaga

SEQ ID NO: 470190 - DNA, 75 bp, synthetic construct
  source 1..75: mol_type = other DNA
tatcgacggcggcaaaggccagcttgcgcaggcgaaaaatgtcttcgccgaactggatgtctcatgggataaaaa

SEQ ID NO: 470191 - DNA, 75 bp, synthetic construct
  source 1..75: mol_type = other DNA
cgtcctgtttattcgtcagggcaaggtgctcggtagccgtagttatttcccgaaagtacctggcggtacggaatt

SEQ ID NO: 470192 - DNA, 75 bp, synthetic construct
  source 1..75: mol_type = other DNA
aactcattagtcgtatggaaactgccagccagaatctggagtttgaagaagcggcgcggattcgcgaccaaattc

SEQ ID NO: 470193 - DNA, 75 bp, synthetic construct
  source 1..75: mol_type = other DNA
tctcatgggataaaaatcatccgctgctacttggcgttgccaaaggagcagatcgtaaggctgggctggaaacgc

SEQ ID NO: 470194 - DNA, 75 bp, synthetic construct
  source 1..75: mol_type = other DNA
gaagcggatggagtgttttgacattagccatactatgggcgaacaaaccgtcgcgtcgtgtgtggtgttcgatgc

SEQ ID NO: 470195 - DNA, 75 bp, synthetic construct
  source 1..75: mol_type = other DNA
aaaacgttgctcgccgattccctttcagaactggcaggacgcagaattaacgtccagactaaaccgcgcggcgat

SEQ ID NO: 470196 - DNA, 75 bp, synthetic construct
  source 1..75: mol_type = other DNA
aaaaatttgtgaaagataagcctatctttcttgaccagcaaggtcaggcaatcccggcctttgacgcctggaatc

SEQ ID NO: 470197 - DNA, 75 bp, synthetic construct
  source 1..75: mol_type = other DNA
ttattggtcgtttcaccggtacctggctcatcagtcgcttcgcaccacacaaagtcctggccgcctacgcattaa

SEQ ID NO: 470198 - DNA, 75 bp, synthetic construct
  source 1..75: mol_type = other DNA
agccttcgctggcggtcatgtgggcttaatagccctgactttcatgcagcgcctttatgtcgattcagtacccaa

SEQ ID NO: 470199 - DNA, 75 bp, synthetic construct
  source 1..75: mol_type = other DNA
tctgttacacgcaccgcagataaggattctgcaaaaacatttgttcaggagactctgaaagatacttgggagtct

SEQ ID NO: 470200 - DNA, 75 bp, synthetic construct
  source 1..75: mol_type = other DNA
gcaacgatggcctttctgttacgcgcaccgccgataaagattcagctaaaacttttgttcaggagacgctgaaag

SEQ ID NO: 470201 - DNA, 75 bp, synthetic construct
  source 1..75: mol_type = other DNA
aagaaaaaatgactaaaatgccaaccggtgctgtggatgcgttaaaggatgaattaaccagacgcatcagtaagc

SEQ ID NO: 470202 - DNA, 75 bp, synthetic construct
  source 1..75: mol_type = other DNA
aacacggcatcgggtgatatttctactgcgcgttcgtgcgcattccagaaacagcctgatttcaataacgccaaa

SEQ ID NO: 470203 - DNA, 75 bp, synthetic construct
  source 1..75: mol_type = other DNA
ggaatttcccctcgatgttccaccccttgcttacaatttcccacgaagaaatcgcattatcagtggtctaagtaa

SEQ ID NO: 470204 - DNA, 75 bp, synthetic construct
  source 1..75: mol_type = other DNA
cgagatgttgacggcttctactgtcgtgaagttgtgaagcgaatgtttgaagtgtggtgccactgccgtggatga

SEQ ID NO: 470205 - DNA, 75 bp, synthetic construct
  source 1..75: mol_type = other DNA
cgtgatgttgacggcttctactgccgtgaagttgtgaaacgaatgtttgacgtgtggtgccactgccgtggatga

SEQ ID NO: 470206 - DNA, 75 bp, synthetic construct
  source 1..75: mol_type = other DNA
gtttgatgagcgtgagtacattgtacggcgatgatatggtccgtatagctcgcaggttggcagaacagtcgcata

SEQ ID NO: 470207 - DNA, 75 bp, synthetic construct
  source 1..75: mol_type = other DNA
gtggcgcataaagcggccttacaggtaaatggcgtcagcattgctgtattggggaatggacttaataccattcat

SEQ ID NO: 470208 - DNA, 75 bp, synthetic construct
  source 1..75: mol_type = other DNA
aatttggattgcactggttgccagacgcccctgaaaattcattttattcaccagtgaaccgccccgggaatcctg

SEQ ID NO: 470209 - DNA, 75 bp, synthetic construct
  source 1..75: mol_type = other DNA
caccatgaccatcggtgctgatggtgaagtaatgcacagcctccatgcagaaaaaagcgggacgattaccgttaa

SEQ ID NO: 470210 - DNA, 75 bp, synthetic construct
  source 1..75: mol_type = other DNA
tctgcaagttctgaagaggggattgtggttgcgatgggcggccctaaaaacaccatgaccatcggttctgatggc

SEQ ID NO: 470211 - DNA, 75 bp, synthetic construct
  source 1..75: mol_type = other DNA
tccgccagttcagaggaggggatcactgttgcaatgggcggccccaaaaataccatgaccatcggcgctgacggc

SEQ ID NO: 470212 - DNA, 75 bp, synthetic construct
  source 1..75: mol_type = other DNA
tgacctgacgcgagatgttgacggtttctactgccgtgaagttgtgaaacgaatgtttgacgtgtggtgccactg

SEQ ID NO: 470213 - DNA, 75 bp, synthetic construct
  source 1..75: mol_type = other DNA
cgacatcgtccggtactgtactaagagcatttcgctgtagtgcaaaaacaccaggagcaatggttatctctgtta

SEQ ID NO: 470214 - DNA, 75 bp, synthetic construct
  source 1..75: mol_type = other DNA
cggttcgattgacctcgggtacggttctgcaagttctgaagaggggattgtggttgcgatgggcggtcctaaaaa

SEQ ID NO: 470215 - DNA, 75 bp, synthetic construct
  source 1..75: mol_type = other DNA
cgcatcgagttacccgcctcctggcataacgatgccatgacgcatcgttacttacgcaaaatggaatccagtccg

SEQ ID NO: 470216 - DNA, 75 bp, synthetic construct
  source 1..75: mol_type = other DNA
tggagtccaggctgaagcaggctcgtctgccgtgggtcaaaacgctggagcagttcgactttaccttccagccgg

SEQ ID NO: 470217 - DNA, 75 bp, synthetic construct
  source 1..75: mol_type = other DNA
cagaagtgacgcccgaacgtgtgcgtcaggttcgcgcgcaacttcccgtcttaaataaccgacgttttgcgccgc

SEQ ID NO: 470218 - DNA, 75 bp, synthetic construct
  source 1..75: mol_type = other DNA
caacgttgcttgccgctcgtgcgctggataccacctgttatatggtggcggcgggggagtgcgggaacaaaaata

SEQ ID NO: 470219 - DNA, 75 bp, synthetic construct
  source 1..75: mol_type = other DNA
gtattaatgacgttgaagtacggtaataaaagcgttccattcggtgcaattgtcactcacggagagaataaaaat

SEQ ID NO: 470220 - DNA, 75 bp, synthetic construct
  source 1..75: mol_type = other DNA
tgaaccgtcgatatgaaaaagcgagcatcatactgacgtcaaacaaaggggtcgcagaccggggagaaatgttcg

SEQ ID NO: 470221 - DNA, 75 bp, synthetic construct
  source 1..75: mol_type = other DNA
gttcgtggagcgcagcgaaaacgtgatcctgctgggacctcctggtgtcggaaaaacgcatctggccatagctct

SEQ ID NO: 470222 - DNA, 75 bp, synthetic construct
  source 1..75: mol_type = other DNA
acctgggaaataaatatgcttgggcgtcgcatcatgccagtcatgcatgaaatttcacggttgcccggcggccat

SEQ ID NO: 470223 - DNA, 75 bp, synthetic construct
  source 1..75: mol_type = other DNA
gttcgtggagcgctgcgaaaacgtgatcctgctgggacctcctggtgtcggaaaaactcatctggccatagctct

SEQ ID NO: 470224 - DNA, 75 bp, synthetic construct
  source 1..75: mol_type = other DNA
tgaaaaagcgagcatcatactgacgtcaaacaaagggttcgcagactggggagaaatgttcggagatcacgtgct

SEQ ID NO: 470225 - DNA, 75 bp, synthetic construct
  source 1..75: mol_type = other DNA
atgttccttcaacgccggggcgcgcatggaatatgctggtggcgctacaggcaggaaacatcgtcgcccgttatg

SEQ ID NO: 470226 - DNA, 75 bp, synthetic construct
  source 1..75: mol_type = other DNA
cacccgcaactctgggtttaaaagccagccgttctgcgaattatcaacgtaaaaaacaagggttttatgctcgtt

SEQ ID NO: 470227 - DNA, 75 bp, synthetic construct
  source 1..75: mol_type = other DNA
acctgggaaattaatatgctcgggcgtaatgtaatgcccgtcatgcatgaaatttcgcgtttgcccggaggccat

SEQ ID NO: 470228 - DNA, 75 bp, synthetic construct
  source 1..75: mol_type = other DNA
ggtagccatcaaacttattggggaacgagtaatgtcgatgagcaattccaggctggtttaaatactgcattcgaa

SEQ ID NO: 470229 - DNA, 75 bp, synthetic construct
  source 1..75: mol_type = other DNA
tgcaaaccctgagcgctgcaatggcgaacgtcacgcagatctccaacaagcagctaaccgatgtgctggcagagt

SEQ ID NO: 470230 - DNA, 75 bp, synthetic construct
  source 1..75: mol_type = other DNA
agaagctgaacggctggcgctggaaaacaaggaattagcgccaaaagcggctgtctgtgatgcgattgtaaggaa

SEQ ID NO: 470231 - DNA, 75 bp, synthetic construct
  source 1..75: mol_type = other DNA
aattacggtacgacatttttcagtgccagtcgccaaagttactggaacacgtcacgcagcgaccagcaaatatca

SEQ ID NO: 470232 - DNA, 75 bp, synthetic construct
  source 1..75: mol_type = other DNA
agcggctgaaatcgcagttaaaaccgtttcagaatttattacccgtcacgctttacccgaacaggtatactttgt

SEQ ID NO: 470233 - DNA, 75 bp, synthetic construct
  source 1..75: mol_type = other DNA
gtcatgcaaagaaagagattattctcaaaaaagaacccgccaccagtttctggaagcgggttatggtcagactgg

SEQ ID NO: 470234 - DNA, 75 bp, synthetic construct
  source 1..75: mol_type = other DNA
ttgtgccaacgcgcgcgggagtggcgcagcttttacgaatggtcagaaaaggggtcaggatagctatcttaacca

SEQ ID NO: 470235 - DNA, 75 bp, synthetic construct
  source 1..75: mol_type = other DNA
gcaatgataaaaactcaaactgtattgtcgattacaagcttcctgaagtctctcctggaaccttgctgaaccagc

SEQ ID NO: 470236 - DNA, 75 bp, synthetic construct
  source 1..75: mol_type = other DNA
gactggcgtggctatgcaatattaccatttgcgacagaatatagagaaaatcgtgtcgctcttaacgcgaattcc

SEQ ID NO: 470237 - DNA, 75 bp, synthetic construct
  source 1..75: mol_type = other DNA
ttgtctggagattcagggggccagtctagcgaccagcaaatatcatttggattaaatgtgccgtttagtgatatt

SEQ ID NO: 470238 - DNA, 75 bp, synthetic construct
  source 1..75: mol_type = other DNA
ccttcaaccttggtattggtaaagatttaggactttttggtgccttttctttcgatattacgcaggccaatacga

SEQ ID NO: 470239 - DNA, 75 bp, synthetic construct
  source 1..75: mol_type = other DNA
acaagcaagcttgatgcatggtctgaaaggaaactggacaccttatggcggaatgcaaattgcagaagattatca

SEQ ID NO: 470240 - DNA, 75 bp, synthetic construct
  source 1..75: mol_type = other DNA
cagtcagtcggcatttcgtaattcaaacgccagttacagtatgtcaaacgatttgaaaggcggcatgaccaacct

SEQ ID NO: 470241 - DNA, 75 bp, synthetic construct
  source 1..75: mol_type = other DNA
ggcacttatcgtgtggactggcgtgcggtttcatcagatacacatcctattaccggtaattatacctttacggtg

SEQ ID NO: 470242 - DNA, 75 bp, synthetic construct
  source 1..75: mol_type = other DNA
aattgtcgaaattagcactggcgaaattttcgatgatggcctgcgcaaagtgaccgcttatccgatggaacaccc

SEQ ID NO: 470243 - DNA, 75 bp, synthetic construct
  source 1..75: mol_type = other DNA
cattacccacgtcagctcgcgctatgatgacaaaggtggtaatgactccaacttattgatagtgttttatgttca

SEQ ID NO: 470244 - DNA, 75 bp, synthetic construct
  source 1..75: mol_type = other DNA
ccattcttggcaaagagggcgggtacgttaatcaccccgacgacaaaggcggcccaacaaactgggggatcacgc

SEQ ID NO: 470245 - DNA, 75 bp, synthetic construct
  source 1..75: mol_type = other DNA
gaaaaaggacgtttgtcaggagtctacacacaagtaatcttcgtgttgcacgtagcaagcgtgatcagattgcag

SEQ ID NO: 470246 - DNA, 75 bp, synthetic construct
  source 1..75: mol_type = other DNA
aatttcaccacatcaggcaaattgcagagccgccaaaaccggacagcttgcaggacacgatcagctttttaaaga

SEQ ID NO: 470247 - DNA, 75 bp, synthetic construct
  source 1..75: mol_type = other DNA
tggtgcatctgaaacgcgctcaggccgctgatattctggcattgttcgatgagcatctgcgccacgatgtgatgc

SEQ ID NO: 470248 - DNA, 75 bp, synthetic construct
  source 1..75: mol_type = other DNA
gataagggggcaccagacgaacccaccaaaaccaacctcggcacatacagccacctcattttcgtacaggagtag

SEQ ID NO: 470249 - DNA, 75 bp, synthetic construct
  source 1..75: mol_type = other DNA
ggctttgcgccttgagcagtccggcgagtatgaccgggcggcgaaggtctgggccaaagcaaaccgtgaatcacg

SEQ ID NO: 470250 - DNA, 75 bp, synthetic construct
  source 1..75: mol_type = other DNA
atgtgggtgacggaagacgaacaccggcggctgctcgagcggtgcgacggcaggcagctggcggcgtggatgcgt

SEQ ID NO: 470251 - DNA, 75 bp, synthetic construct
  source 1..75: mol_type = other DNA
ggcggtgaaattatcgatgagcgtggtggttatgccgatcacgtcaccctacgtctgaacgtcgaaaacccgaaa

SEQ ID NO: 470252 - DNA, 75 bp, synthetic construct
  source 1..75: mol_type = other DNA
atgatttcagccgcgctgtactggaggctgaagttcagatgtgcggcgagttgcgtgactacctacgggtaacag

SEQ ID NO: 470253 - DNA, 75 bp, synthetic construct
  source 1..75: mol_type = other DNA
atgaccaaagatgagatttttaacagcattcttggaaaagagggcggctatgtggatcaccctgacgacaaggga

SEQ ID NO: 470254 - DNA, 75 bp, synthetic construct
  source 1..75: mol_type = other DNA
aaaaagtacacatccggcgtcctgtcctttgccgaacaagacctgccccccggccagcgtgaaaagctgatggcg

SEQ ID NO: 470255 - DNA, 75 bp, synthetic construct
  source 1..75: mol_type = other DNA
cgggagcaggagtacgcagcgcaacaccagaaagcgctggagcaggagcgaccgcagcgacagagaacgtacgat

SEQ ID NO: 470256 - DNA, 75 bp, synthetic construct
  source 1..75: mol_type = other DNA
acaggaacgtgaacatgagctattcctagagcgtgagcgccatctggaaatacaggaacggacactggatggccc

SEQ ID NO: 470257 - DNA, 75 bp, synthetic construct
  source 1..75: mol_type = other DNA
actcatcgatgccacgccatttgcgaagaaatacacgtccggtgttctgtcgttcgcagagaaggaactgccgcc

SEQ ID NO: 470258 - DNA, 75 bp, synthetic construct
  source 1..75: mol_type = other DNA
ccgcgagcagaaagagagtctgaagaagctgaacgcgaagacatggggcgtgcgttatcacgaggagagcaacgg

SEQ ID NO: 470259 - DNA, 75 bp, synthetic construct
  source 1..75: mol_type = other DNA
gcgaggctgtgacatcaaacgagacgaaaatcagagacgctatagccctgttcacagtctcgacagagaaatcgc

SEQ ID NO: 470260 - DNA, 75 bp, synthetic construct
  source 1..75: mol_type = other DNA
gaaaggctttaggggaaaagggaacagaaaggaaagtgtttcattctctgagacacggagtagcacagcttcttg

SEQ ID NO: 470261 - DNA, 75 bp, synthetic construct
  source 1..75: mol_type = other DNA
ttctctcctaccgtaaaaagcctgatattgcattgcaagatgtaagccgcaccactgttacaggctggattgaac

SEQ ID NO: 470262 - DNA, 75 bp, synthetic construct
  source 1..75: mol_type = other DNA
cgcagacggacgcatcgggcctcgtaccatcagtgcattgcgcgccttcctgaattatcgcggtcaggacggcga

SEQ ID NO: 470263 - DNA, 75 bp, synthetic construct
  source 1..75: mol_type = other DNA
cggaaaaagtcgcccgcgctcacggatatcagggcgatatgcgtgacctgacacgcgaacaggcgctggaaatcc

SEQ ID NO: 470264 - DNA, 75 bp, synthetic construct
  source 1..75: mol_type = other DNA
acgcgtgggcaggccctcgaaattcttgaagcggactactggtacggaccacgttttcacaaggttgcgagcctg

SEQ ID NO: 470265 - DNA, 75 bp, synthetic construct
  source 1..75: mol_type = other DNA
acccgtgaacaggcgctggaaatccttgaggccgattactggtacggtccgcgctttgaccaggtcgccgcgtta

SEQ ID NO: 470266 - DNA, 75 bp, synthetic construct
  source 1..75: mol_type = other DNA
tcacgaactgaatcaggaatggagtgaacgcagatctgatttttgcctgatgcagaatatgcgtgaaaagcgtaa

SEQ ID NO: 470267 - DNA, 75 bp, synthetic construct
  source 1..75: mol_type = other DNA
cgctgactctgatctggaataaaaagctgattaaatccccaccttccacgtgggaagaaatcccggcaatggatg

SEQ ID NO: 470268 - DNA, 75 bp, synthetic construct
  source 1..75: mol_type = other DNA
gcgcttatatcgtttcctcggttctgttttgaccgattaccgaatactgaagaattacgccaaaaccctgacagg

SEQ ID NO: 470269 - DNA, 75 bp, synthetic construct
  source 1..75: mol_type = other DNA
atgcggcgtatggcttgatgttgcaggaacaagcgccgacgttgaaagtgcagggcgttgatttgcaagattacg

SEQ ID NO: 470270 - DNA, 75 bp, synthetic construct
  source 1..75: mol_type = other DNA
gttaaccgccgcgctggtgacctggtttactctgcgcttatggcgcgataaacgtctggcactactcgccgctgt

SEQ ID NO: 470271 - DNA, 75 bp, synthetic construct
  source 1..75: mol_type = other DNA
tatattcttactgatagcgtcggtgttgccgcaggtctggcatggagcctgcaacgcgatgacatcatcatgtat

SEQ ID NO: 470272 - DNA, 75 bp, synthetic construct
  source 1..75: mol_type = other DNA
tgtgaatatggtcaaaagcggacgtattagcccagatacggattatccgctagctgaagccagctttaataaagg

SEQ ID NO: 470273 - DNA, 75 bp, synthetic construct
  source 1..75: mol_type = other DNA
atggtcgatacagaaatttggctgcgtttaatgagcatcagcagcttgtacggcgatgatatggtccgtatagct

SEQ ID NO: 470274 - DNA, 75 bp, synthetic construct
  source 1..75: mol_type = other DNA
tctaagtaaaggtgtgctggtggtggaggctgctttgcgtagtggttctctggtgacagcgcgttgtgcgcttga

SEQ ID NO: 470275 - DNA, 75 bp, synthetic construct
  source 1..75: mol_type = other DNA
tggtgacagcacgttgtgcgcttgaacaggggcgagaagtttttgccttgcccggtccattagggagtccgggaa

SEQ ID NO: 470276 - DNA, 75 bp, synthetic construct
  source 1..75: mol_type = other DNA
tatctgggctatctggcgggatatcagcacattaacgactgtatggaagatgaaaattatcgtcatgcagcacat

SEQ ID NO: 470277 - DNA, 75 bp, synthetic construct
  source 1..75: mol_type = other DNA
cattcctggcgtatctggggtatcttgccggatatcagcacattaatgactgcatggaagatgaacattatcgtc

SEQ ID NO: 470278 - DNA, 75 bp, synthetic construct
  source 1..75: mol_type = other DNA
gcttcgcttataccactttcccggctctgtgctaacggactaccggatactgaagaactacatcaaaaccatagg

SEQ ID NO: 470279 - DNA, 75 bp, synthetic construct
  source 1..75: mol_type = other DNA
ttgctgctggtctggcatggagcctgagacgtgatgacatcatcatgtatcgccagacaggggaattgaaatacg

SEQ ID NO: 470280 - DNA, 75 bp, synthetic construct
  source 1..75: mol_type = other DNA
ctgccgacctcaatctgcgtgaccaggtagggccaacctttgaccaggtgtttacatctgccgatgacaacaaac

SEQ ID NO: 470281 - DNA, 75 bp, synthetic construct
  source 1..75: mol_type = other DNA
ggtagcaccgttgaatggaatatacggtatgacaataaagacaaccttcataaaattggtgatggcactttagat

SEQ ID NO: 470282 - DNA, 75 bp, synthetic construct
  source 1..75: mol_type = other DNA
agttaatcacttaatagacaattacttagatgaggccgtgaaagatttaataagcagagaagaacttaagaaaaa

SEQ ID NO: 470283 - DNA, 75 bp, synthetic construct
  source 1..75: mol_type = other DNA
ggcaccagcggcaacgcgccgcgcagtatcagcttcagcgggccgtgggcgcagttccgcctgttcggggccgga

SEQ ID NO: 470284 - DNA, 75 bp, synthetic construct
  source 1..75: mol_type = other DNA
cagcgactacaccgccacctggcgggccgggatggacaatctgaatatccgcaattttgagtccatcggacaact

SEQ ID NO: 470285 - DNA, 75 bp, synthetic construct
  source 1..75: mol_type = other DNA
atgacatggcagcttttgtgcgatgaacatggttttacccgggaacattacagtgaactgaagaaattcagtccg

SEQ ID NO: 470286 - DNA, 75 bp, synthetic construct
  source 1..75: mol_type = other DNA
ataagtggctgacaccgccggaggatattctggagcagattacccgtgaatacgaacgaagaatacaaaactgtc

SEQ ID NO: 470287 - DNA, 75 bp, synthetic construct
  source 1..75: mol_type = other DNA
ggaatcctggttaaatgaactgttttttgctgtgattgctccgttataccgtgttgcccccggacaatcagaaca

SEQ ID NO: 470288 - DNA, 75 bp, synthetic construct
  source 1..75: mol_type = other DNA
gtgatctgatccttcaactcagcaaaagttcgatttattcaacaaagcctatattaaccaataatcagtttgatg

SEQ ID NO: 470289 - DNA, 75 bp, synthetic construct
  source 1..75: mol_type = other DNA
aaagaattatcgagggccagaagactcagtactggcgaaatgctgcatgacctgattgttgaagagtataaaagg

SEQ ID NO: 470290 - DNA, 75 bp, synthetic construct
  source 1..75: mol_type = other DNA
tattctggagcaggttacccgtgaatacgtacgaagaatacataactgttcatctttcaggagcgagaaggaggc

SEQ ID NO: 470291 - DNA, 75 bp, synthetic construct
  source 1..75: mol_type = other DNA
ataacactgacgccgaaagatattggtacgcttaactcaacaacaatgtcattcagcggtggtgctggttggttc

SEQ ID NO: 470292 - DNA, 75 bp, synthetic construct
  source 1..75: mol_type = other DNA
attaataaacatcttagccgtggtgagaatgataacagacctgagacacaaaaggttatggacgctgttacagat

SEQ ID NO: 470293 - DNA, 75 bp, synthetic construct
  source 1..75: mol_type = other DNA
cgctaaagcacaggctaaacaagcctcaattgctgaaaaggcagagatcaagcgccttgcatcatatcgccagtt

SEQ ID NO: 470294 - DNA, 75 bp, synthetic construct
  source 1..75: mol_type = other DNA
aatatacagcaaatgaaagtggactggatgtacaggacgatggcgatcaggccggctttatcgcaaaaatgtcgt

SEQ ID NO: 470295 - DNA, 75 bp, synthetic construct
  source 1..75: mol_type = other DNA
ctatttgactatgggaccaaaactaccagtaacgccgggagtcatacgcattcaataccaacatcagatggtgca

SEQ ID NO: 470296 - DNA, 75 bp, synthetic construct
  source 1..75: mol_type = other DNA
tgattacgggacgaaaacaacctcactatttgactatgggaccaaaactaccagtaacgccgggagtcatacgca

SEQ ID NO: 470297 - DNA, 75 bp, synthetic construct
  source 1..75: mol_type = other DNA
tcgtcgcatcctgttaatggtgaaagcaggtgcaggcacggatgctgctattgattccctcaaaccatatctcga

SEQ ID NO: 470298 - DNA, 75 bp, synthetic construct
  source 1..75: mol_type = other DNA
tcaccaaagatatcttcaccaaaaaagatgaagacggtaactacctggttgatgtgattctggatgaagcggcta

SEQ ID NO: 470299 - DNA, 75 bp, synthetic construct
  source 1..75: mol_type = other DNA
ctgaatgcgccgccacaaaataatgaaataacgctgcccaatacgttcagccagtcgctgtacgacgtgttgatg

SEQ ID NO: 470300 - DNA, 75 bp, synthetic construct
  source 1..75: mol_type = other DNA
aaagttctctctggcccgcaagctcagccagcaggcgacaaggctgagtttatcgagaaagttcgtcgtgcgctg

SEQ ID NO: 470301 - DNA, 75 bp, synthetic construct
  source 1..75: mol_type = other DNA
tccgtcgtaaccgtgagctttctgctgaaggctttaacttcattggtaccggtgtctccggtggtgaggagggcg

SEQ ID NO: 470302 - DNA, 75 bp, synthetic construct
  source 1..75: mol_type = other DNA
ctggttgcaccaatcctgaccaaaatcgccgcagtagctgaagacggggagccatgcgttacctatattggtgcc

SEQ ID NO: 470303 - DNA, 75 bp, synthetic construct
  source 1..75: mol_type = other DNA
atgaaaaaacacttgttacttttactctgcacctgcggtggcgttgcgctggcggctggggatgacatcaccttc

SEQ ID NO: 470304 - DNA, 75 bp, synthetic construct
  source 1..75: mol_type = other DNA
cgctgtatggcattctcgatcctggcggactgattaacgtcgtgaccaagcgcccggaaaaaacattccatggtt

SEQ ID NO: 470305 - DNA, 75 bp, synthetic construct
  source 1..75: mol_type = other DNA
tttcaacgccgcaacagagcgtgtggaagtgctaaaaggcccggcctccacgctatatggcattctcgatcctgg

SEQ ID NO: 470306 - DNA, 75 bp, synthetic construct
  source 1..75: mol_type = other DNA
aacgttgatcgaaaaatacgttttgacgaaccgtttaatattacagatggtcagtccgatctggcgcaactcaac

SEQ ID NO: 470307 - DNA, 75 bp, synthetic construct
  source 1..75: mol_type = other DNA
ggcacgatggtcagcgttttaagctgaatacgccgcttgctattaacgccaccgattttacgcaaaagccgaagc

SEQ ID NO: 470308 - DNA, 75 bp, synthetic construct
  source 1..75: mol_type = other DNA
aggcctgtggtacgggggtctattccagagcggtatgtacaaagtatgtttacaggtaccagccagatttgctcc

SEQ ID NO: 470309 - DNA, 75 bp, synthetic construct
  source 1..75: mol_type = other DNA
gattacgtaccgcgtccggcatcacgtccggtgacgaaatttgaacaacgtggtcatcgtcttggtcacggagta

SEQ ID NO: 470310 - DNA, 75 bp, synthetic construct
  source 1..75: mol_type = other DNA
ttttttcatgggaagaagttctgtgaggcctgtggtacggggatttattgcagagtgaaccgccccggaaatcct

SEQ ID NO: 470311 - DNA, 75 bp, synthetic construct
  source 1..75: mol_type = other DNA
aatatcaggcattgtttctgcctttcctgccgtggtcggttgattttacggacagatgctcagggggcgtggttt

SEQ ID NO: 470312 - DNA, 75 bp, synthetic construct
  source 1..75: mol_type = other DNA
tttatccggtgtttcgctcctgccccgttcgtgacacaacggcgcgacaccggatatccgcagtcctgcttacct

SEQ ID NO: 470313 - DNA, 75 bp, synthetic construct
  source 1..75: mol_type = other DNA
gtcagtaacgtggtacagaccaatacattaggcgggactcaggatgcttttgtacgccgtgggtttggcgcaaac

SEQ ID NO: 470314 - DNA, 75 bp, synthetic construct
  source 1..75: mol_type = other DNA
gaccttcactgagtggaacaaaggcgagctgaacagctatctgatcgacatcaccaaagatatcttcacgaagaa

SEQ ID NO: 470315 - DNA, 75 bp, synthetic construct
  source 1..75: mol_type = other DNA
tcggtatggcagtgatggggcgcaaccttgcgctcaacatcgaaagccgtggttataccgtctctattttcaacc

SEQ ID NO: 470316 - DNA, 75 bp, synthetic construct
  source 1..75: mol_type = other DNA
aggcgctggaagagcgcattagcgaggagcaactccaaaacctgcagcacattagccaggagatgggcatttctc

SEQ ID NO: 470317 - DNA, 75 bp, synthetic construct
  source 1..75: mol_type = other DNA
gcaaacaggggcgccttaaaccacgacgccgacggatgcggccaccaaccgccagcaagcgtgcagaggtctggt

SEQ ID NO: 470318 - DNA, 75 bp, synthetic construct
  source 1..75: mol_type = other DNA
ttggatatcgatgagctgacggtttgtcattacttacaaaatattcgtcaggcaccacataatttggggctacat

SEQ ID NO: 470319 - DNA, 75 bp, synthetic construct
  source 1..75: mol_type = other DNA
acttttcaatagtatcagtactgtttcaggaaaagttgaacgccttattagctttgatatcgccaaacgttggta

SEQ ID NO: 470320 - DNA, 75 bp, synthetic construct
  source 1..75: mol_type = other DNA
aaagttctctctggcccgcaagcgcagccagctggcgacaaaggtgagttcatcgaaaaagttcgtcgtgctctg

SEQ ID NO: 470321 - DNA, 75 bp, synthetic construct
  source 1..75: mol_type = other DNA
tggaggctgtgccggtaaaagcgagcgatgccgtcctgaatgacggatcgttttccgcttacgccacattacggg

SEQ ID NO: 470322 - DNA, 75 bp, synthetic construct
  source 1..75: mol_type = other DNA
acaagccgggagcgattttaagctgaatacgcccttagtggtgaatgaaacatcccttccggtactaacggcagt

SEQ ID NO: 470323 - DNA, 75 bp, synthetic construct
  source 1..75: mol_type = other DNA
tccttcaaacgccactatgatgccaacacaccgctggcgcaggtgatgccggaacttgttgaacaatatcctgac

SEQ ID NO: 470324 - DNA, 75 bp, synthetic construct
  source 1..75: mol_type = other DNA
atcgataccatgatcccacggggatttaactatcagcgtgataacgatatggcaacatgggcgatggcggaaatc

SEQ ID NO: 470325 - DNA, 75 bp, synthetic construct
  source 1..75: mol_type = other DNA
actggctggcagttctgcatgtcgccgtctttatccgcgcacaggcaccggattctgatctggatacgtggatgg

SEQ ID NO: 470326 - DNA, 75 bp, synthetic construct
  source 1..75: mol_type = other DNA
tgataatctggagagcttgtttagccagtcgcgagagctggaggtggagattaaaaagcagatggcggggctgaa

SEQ ID NO: 470327 - DNA, 75 bp, synthetic construct
  source 1..75: mol_type = other DNA
ttgccgcgaagatgaaaggatttacggagaatctgaataatctctttgaacagtcgcgcgagttagaagtgcaaa

SEQ ID NO: 470328 - DNA, 75 bp, synthetic construct
  source 1..75: mol_type = other DNA
gagcgcgctcgtcaacagggtgcgctagcacaatggattgcggtttttgaaggtggtttcactggtatcgtcgcc

SEQ ID NO: 470329 - DNA, 75 bp, synthetic construct
  source 1..75: mol_type = other DNA
ttagtaccctattatacggtaaaagagtttgttgaatctcttgaaaaacctcgccgtattctgttaatggtgaag

SEQ ID NO: 470330 - DNA, 75 bp, synthetic construct
  source 1..75: mol_type = other DNA
ctgaatgcaccgccgcaaaataatgatataacgctgcccaatacgttcagtcagtcgctgtacgatgtgctgatg

SEQ ID NO: 470331 - DNA, 75 bp, synthetic construct
  source 1..75: mol_type = other DNA
ccttttgctaatttgcctgcctgcgaggcgctggaagagcgcattagcgaggagcaattacaaaacctgcaacac

SEQ ID NO: 470332 - DNA, 75 bp, synthetic construct
  source 1..75: mol_type = other DNA
attagccaggagatgggcatttctccgtcgctcttttctacccaaccgctgtggcaaatcgcgatggttcttcag

SEQ ID NO: 470333 - DNA, 75 bp, synthetic construct
  source 1..75: mol_type = other DNA
cgtcgctcttttctacccaaccactgtggcaaatcgcgatggttcttcaggcgacgcaggcgcaaaaactggggc

SEQ ID NO: 470334 - DNA, 75 bp, synthetic construct
  source 1..75: mol_type = other DNA
ctgaatacaccgccgcaaaataatgaaataacgctgccgaatacgttcagccagtcgctgtacgatgtactgatg

SEQ ID NO: 470335 - DNA, 75 bp, synthetic construct
  source 1..75: mol_type = other DNA
atggatctgttgtaccgggtaaaaacgctttgggccgcgctgcgcggtaatcattacacctggcctgctatcgat

SEQ ID NO: 470336 - DNA, 75 bp, synthetic construct
  source 1..75: mol_type = other DNA
atcctggccgttgatcgcaacaatacccgggtggcgaacatttatgacagtcttcatcctgcaatgttacgagct

SEQ ID NO: 470337 - DNA, 75 bp, synthetic construct
  source 1..75: mol_type = other DNA
ttgggtatcgccatctgtctatgaacggacgttctgtagcgcgggtaaaatacctgctgcggcgcattgattatg

SEQ ID NO: 470338 - DNA, 75 bp, synthetic construct
  source 1..75: mol_type = other DNA
gcgaacgactgaccggggcgctggaagaagcggcaaacgagtttcgccgctacagcaaacgctttgccgccggtg

SEQ ID NO: 470339 - DNA, 75 bp, synthetic construct
  source 1..75: mol_type = other DNA
cccgtgtcgttcctgtgatcaccctgagccattgtctgcggcagcggcgctggtccctgcacaacacgccatgcc

SEQ ID NO: 470340 - DNA, 75 bp, synthetic construct
  source 1..75: mol_type = other DNA
gcataaaagttatgctcaatgcggggttaagtccggaacatgaagaaaaattaggcagccgcattgatggcatcg

SEQ ID NO: 470341 - DNA, 75 bp, synthetic construct
  source 1..75: mol_type = other DNA
acaatacccgggtggcgaacatttatgacagtcttcatcctgcaatgttacgagctctggcgatgatcgcccggg

SEQ ID NO: 470342 - DNA, 75 bp, synthetic construct
  source 1..75: mol_type = other DNA
aacaactgcgacactacggaggcggcacagcttgccgctgacgtgctgggtattgattaccgggcagcgcaaacc

SEQ ID NO: 470343 - DNA, 75 bp, synthetic construct
  source 1..75: mol_type = other DNA
gctgggtggcgtggttactggctgggatgctcaaacgtgccgggatgcgatacagcacacctataacgcatggct

SEQ ID NO: 470344 - DNA, 75 bp, synthetic construct
  source 1..75: mol_type = other DNA
ggggctgataaacgaggccgccgcccacaatgacgggctgatgccgctggatgaagtcggacagggcgcagaccc

SEQ ID NO: 470345 - DNA, 75 bp, synthetic construct
  source 1..75: mol_type = other DNA
gccagagataccgctgttattcagtggtcggagtgctgcggctggtggctataccgtcagtggaacgccggaaag

SEQ ID NO: 470346 - DNA, 75 bp, synthetic construct
  source 1..75: mol_type = other DNA
caccacgccttaaacacatgaagggggcacgactaagggtgtacggccttttacttgcacaggatcatgatgatg

SEQ ID NO: 470347 - DNA, 75 bp, synthetic construct
  source 1..75: mol_type = other DNA
aaacgggctggaagtcgctacggctgcgtttaacgattcgatgtaccagattcaaggggaagccgtgaaaccgcg

SEQ ID NO: 470348 - DNA, 75 bp, synthetic construct
  source 1..75: mol_type = other DNA
atgaattatcatcagtactatcctgtcgacatcgtcaacggccccggcactcgctgcaccctgtttgtctccggg

SEQ ID NO: 470349 - DNA, 75 bp, synthetic construct
  source 1..75: mol_type = other DNA
gcctgttcctgtttgcgaggaaatcattctgggattgagaagaagagagactaattattggggggaatattctcc

SEQ ID NO: 470350 - DNA, 75 bp, synthetic construct
  source 1..75: mol_type = other DNA
tcagtatgaaaagaaacgcattgcaggctctctggcttatactccgccaggctcagtgatcaggaaaagactttg

SEQ ID NO: 470351 - DNA, 75 bp, synthetic construct
  source 1..75: mol_type = other DNA
cgtgacggattcgggattcatttttatgagcaatcgagcgccgggaaaacaaccacgcagaacgtggcgagcagt

SEQ ID NO: 470352 - DNA, 75 bp, synthetic construct
  source 1..75: mol_type = other DNA
ggacgcgacgacaaagatcagtatcttattatctcatggctggcattcggtgcaggcatacggacaacagcggct

SEQ ID NO: 470353 - DNA, 75 bp, synthetic construct
  source 1..75: mol_type = other DNA
gcaatcacggcgctgccgggcgggagtggatcagatggcttgcaggccaccagcagcaggccattgataccgttc

SEQ ID NO: 470354 - DNA, 75 bp, synthetic construct
  source 1..75: mol_type = other DNA
gcgcctgctcaatatcccgattcaaaaagcctcgcagttacacgaatacagcaacggaaaggatcacgctgacgc

SEQ ID NO: 470355 - DNA, 75 bp, synthetic construct
  source 1..75: mol_type = other DNA
tggcaatgcggagcgtacatcatgcctgatggggaaatcatcggaacacctgaaaatcctgtgctgttcagcggg

SEQ ID NO: 470356 - DNA, 75 bp, synthetic construct
  source 1..75: mol_type = other DNA
ccgggattcggtattcagcttttgcagaacgggcaacgttttcagcttaataccccgctgaccattaacgccacg

SEQ ID NO: 470357 - DNA, 75 bp, synthetic construct
  source 1..75: mol_type = other DNA
tatctggggaaaaagcagctggaggagcttgaaaggctgaatatcatcgatcaggggcgtcgttgcgtacgcgtg

SEQ ID NO: 470358 - DNA, 75 bp, synthetic construct
  source 1..75: mol_type = other DNA
agaacgaccagaaagcggaacagaacagcccaaatacgcaacaaaacgagccagaaacgaaacaacctgaaccag

SEQ ID NO: 470359 - DNA, 75 bp, synthetic construct
  source 1..75: mol_type = other DNA
ggtgaatttgttgcagggattagcgacccgaatgatccgaaatggattaaggggatccagacccgcgattctgtg

SEQ ID NO: 470360 - DNA, 75 bp, synthetic construct
  source 1..75: mol_type = other DNA
gacggactaatgccgcttgatgaagttggtcagggcgctgatcctgtcagtgtttcacagtctgcctatgcgtta

SEQ ID NO: 470361 - DNA, 75 bp, synthetic construct
  source 1..75: mol_type = other DNA
cattaatcgggctggtgggtgctgacggcttcggggttcatctttttgagcaatcatcagcaggtaaaaccacca

SEQ ID NO: 470362 - DNA, 75 bp, synthetic construct
  source 1..75: mol_type = other DNA
ccggaaaggcgcacgcagacgcgttaaaagatgcctggacagaaaatcacggggcggcgggtcgtgaatgggtta

SEQ ID NO: 470363 - DNA, 75 bp, synthetic construct
  source 1..75: mol_type = other DNA
tgtcgcgagcggtggcgcaacctgataccggagagctacggcgagcaggttcaccgtgtgggggaaagattcgcc

SEQ ID NO: 470364 - DNA, 75 bp, synthetic construct
  source 1..75: mol_type = other DNA
cagcgatgtaccgcttaatgttgatgtcgcgttactggatattaatgatgttgaggggctggttgattttgtggt

SEQ ID NO: 470365 - DNA, 75 bp, synthetic construct
  source 1..75: mol_type = other DNA
gataaaccgggcaaagatagctatgagttgcgcaaggctggcgcggcgcaaaccatcgttgccagccagcagcga

SEQ ID NO: 470366 - DNA, 75 bp, synthetic construct
  source 1..75: mol_type = other DNA
gtcgcgttactggacattaatgatattgaggggctggctgattttgttgttgggtggatgagtcagcaggctgaa

SEQ ID NO: 470367 - DNA, 75 bp, synthetic construct
  source 1..75: mol_type = other DNA
tcaagtaagcaatactgtaactcgtgttttcatgtggataatattatgcagatgttcacaggtgtagtttcttca

SEQ ID NO: 470368 - DNA, 75 bp, synthetic construct
  source 1..75: mol_type = other DNA
gaaatcctgtgtcggcgtagctccaggtaaattagagttgcattcaaacttatacgattacccaaatgctcaaaa

SEQ ID NO: 470369 - DNA, 75 bp, synthetic construct
  source 1..75: mol_type = other DNA
gcgatttttttatttatgaacaacgtgaaaaattgcgccgacttggcgtgattactaactgggggattaataaaa

SEQ ID NO: 470370 - DNA, 75 bp, synthetic construct
  source 1..75: mol_type = other DNA
atgggtcacttaccttttgataagagatttttaagtgcaaaggaaataaaggactgtgtggatttttatcataaa

SEQ ID NO: 470371 - DNA, 75 bp, synthetic construct
  source 1..75: mol_type = other DNA
gtttggtacaacattctgacgcttattggtcatttgctgtttcctgtccgcccgttgcaggacaacctggcacgc

SEQ ID NO: 470372 - DNA, 75 bp, synthetic construct
  source 1..75: mol_type = other DNA
tggattattgattgcattgttgccagaaattggtcgcctgcagcgcaggattactcaggttccgtcggaaactcc

SEQ ID NO: 470373 - DNA, 75 bp, synthetic construct
  source 1..75: mol_type = other DNA
tcaaacgctatacctggaacagcacctggctgtattacgcgcgcatttttatcgcactttgcggcacaactgcgt

SEQ ID NO: 470374 - DNA, 75 bp, synthetic construct
  source 1..75: mol_type = other DNA
atgaaaaagtatattattccgttcgtggcgacaacgttgatattcagcgtaacaaccttcgccaaggatatcgat

SEQ ID NO: 470375 - DNA, 75 bp, synthetic construct
  source 1..75: mol_type = other DNA
atgaacggtctaaaaacggggctggggatcacaccgggtgatcacattatcagtgccgactctgcactcagcaga

SEQ ID NO: 470376 - DNA, 75 bp, synthetic construct
  source 1..75: mol_type = other DNA
ctcagcagaaatatccggcattgtttctgcctttcctgtcatggccggttgattttgcagacagatgttcagggg

SEQ ID NO: 470377 - DNA, 75 bp, synthetic construct
  source 1..75: mol_type = other DNA
atcaacacctggcctgccaactgcgtgaaagagttgttgctctgtaaggggtcggtttgggaaacggaattattg

SEQ ID NO: 470378 - DNA, 75 bp, synthetic construct
  source 1..75: mol_type = other DNA
cagttttgttagtgatatggtcgtgcttaattagctttatctttgtttttatggcaggaattagcaagggaggag

SEQ ID NO: 470379 - DNA, 75 bp, synthetic construct
  source 1..75: mol_type = other DNA
gagcacgatttacatgccctgagtgcgcaacagaaggcagcctgtgtggtgctgaatccggaaaagtccccccct

SEQ ID NO: 470380 - DNA, 75 bp, synthetic construct
  source 1..75: mol_type = other DNA
atgaagaacgcgtcaatcaggcattagctgacctgaaacagcggatgcagcaacttgaaccacgggcagacagca

SEQ ID NO: 470381 - DNA, 75 bp, synthetic construct
  source 1..75: mol_type = other DNA
tcctggaacattaccagtttatacggacacagccggaaccggtaaggcgttatctgcaggtttatcgggagactc

SEQ ID NO: 470382 - DNA, 75 bp, synthetic construct
  source 1..75: mol_type = other DNA
attcctgacagacaggcgttttttgaaagcccccgaatttatgacgggaaagagacaataacactgaagcctacg

SEQ ID NO: 470383 - DNA, 75 bp, synthetic construct
  source 1..75: mol_type = other DNA
acgttaccgcagagattggttatggtcataatttcccctcaaagggcacaattcctgacagaagggatttctttg

SEQ ID NO: 470384 - DNA, 75 bp, synthetic construct
  source 1..75: mol_type = other DNA
gcttttatccgtcacgccgatcctcattcactatttcccaactgcattatgtgcgagcaagcaggccgatgggag

SEQ ID NO: 470385 - DNA, 75 bp, synthetic construct
  source 1..75: mol_type = other DNA
atcgcagacgtaatgcacttttggacatggtccgtcagcagatagccgtatcagttgatttaacgaatggagtgc

SEQ ID NO: 470386 - DNA, 75 bp, synthetic construct
  source 1..75: mol_type = other DNA
ttgttgtgaaactgatgactgaccgtactttccacagagggaagtgggaggacagaaagtttcgttataaatttc

SEQ ID NO: 470387 - DNA, 75 bp, synthetic construct
  source 1..75: mol_type = other DNA
tcgacgctcgtctgcaaggcccggactgggctgtgactgacctcgatctcagcttgcgcaacatgactttcagta

SEQ ID NO: 470388 - DNA, 75 bp, synthetic construct
  source 1..75: mol_type = other DNA
caagctgtcaatgaacgccagcgagtttatttatggttcgctgcatttatttgacccgattatgaacgcggagtt

SEQ ID NO: 470389 - DNA, 75 bp, synthetic construct
  source 1..75: mol_type = other DNA
gtctgccagccaaactataacgccacgcgccaccgcctgaagttaaggattattggtacgctggtaggtatcgcc

SEQ ID NO: 470390 - DNA, 75 bp, synthetic construct
  source 1..75: mol_type = other DNA
tggtgcatatgatggcgcagcagtgtgatctggaagtgggcgattttgtctggacggggggcgacacgcacctgt

SEQ ID NO: 470391 - DNA, 75 bp, synthetic construct
  source 1..75: mol_type = other DNA
tgctatggttcctgcagggcgataccaacattgcttatctgcatgaaaacaatgtcactatctgggacgaatggg

SEQ ID NO: 470392 - DNA, 75 bp, synthetic construct
  source 1..75: mol_type = other DNA
cgagaaaggcatcctggaagccactgccagcgtttcgcaaacgccgcagcgtcagacccatatcagcctgaacgg

SEQ ID NO: 470393 - DNA, 75 bp, synthetic construct
  source 1..75: mol_type = other DNA
cctgctaaattacgcgatggcactggataacccgacattgaacaaattgagtgaagaaatccggttacagattat

SEQ ID NO: 470394 - DNA, 75 bp, synthetic construct
  source 1..75: mol_type = other DNA
tccttacctcgtgagttttgcctttgctgattactccaggtctgcggcaagtaaggctcgctgtgagcattgttc

SEQ ID NO: 470395 - DNA, 75 bp, synthetic construct
  source 1..75: mol_type = other DNA
gtcattgataaactggttacaaagtgctggcaggaggaatcttacgctgaagcacaattgagaaaggtgacaaga

SEQ ID NO: 470396 - DNA, 75 bp, synthetic construct
  source 1..75: mol_type = other DNA
acccggcttcatggcacgcctgtttataagatttgtgggcgttgcaatggaaaccggtttagtcgtttaccaacc

SEQ ID NO: 470397 - DNA, 75 bp, synthetic construct
  source 1..75: mol_type = other DNA
tctgctgatgatcgacaacgacggcaatgttatggattgctggcataacggtgggcgtccatacgtcatggttgg

SEQ ID NO: 470398 - DNA, 75 bp, synthetic construct
  source 1..75: mol_type = other DNA
ctggaagaagcactccagtacgcaagagaaggcaaaagtcagagcctggctctgctgatgatcgacaacgacggc

SEQ ID NO: 470399 - DNA, 75 bp, synthetic construct
  source 1..75: mol_type = other DNA
catggacggggactgccacctcctacaacgactctgctattgagacggatgtaccgggcttcggaattgagcttc

SEQ ID NO: 470400 - DNA, 75 bp, synthetic construct
  source 1..75: mol_type = other DNA
ataagatttgtgggcgttgcaatggaaaacggtttagtcgtttaccaaccacactggcgcggtatcatgtccaga

SEQ ID NO: 470401 - DNA, 75 bp, synthetic construct
  source 1..75: mol_type = other DNA
ttattcctggcaaaagttggtgttcaggatcctcaatttgcgattgaaggtctgctcaattacgcgatggcactg

SEQ ID NO: 470402 - DNA, 75 bp, synthetic construct
  source 1..75: mol_type = other DNA
ttcaggggaaggcgctattgccgatgatgcaggtaacgtcagccgtaaccccgcgttgattaccatgtttgaccg

SEQ ID NO: 470403 - DNA, 75 bp, synthetic construct
  source 1..75: mol_type = other DNA
ggataaaaacaaccgctacgcgttgacctaccgttctgaagttaaaattgacttcaaaggtaactacagcagcga

SEQ ID NO: 470404 - DNA, 75 bp, synthetic construct
  source 1..75: mol_type = other DNA
gtcattgataaactggtaacaaagtgctggcaggaagaagcatacgcggaagcgcaattgaggaaggtgacgaga

SEQ ID NO: 470405 - DNA, 75 bp, synthetic construct
  source 1..75: mol_type = other DNA
catccattattcggccctgatcctgttaaggtattcgcaattaaatgtgatgtgaattggatgttaaggtggggt

SEQ ID NO: 470406 - DNA, 75 bp, synthetic construct
  source 1..75: mol_type = other DNA
tggaggcggtaccggtcaaagcggctgatgcggtgctgacggacacgaatttttctgcttacgcaaccttacggg

SEQ ID NO: 470407 - DNA, 75 bp, synthetic construct
  source 1..75: mol_type = other DNA
atgacaaagattttaactaccgcagaacacaatcaagcgacagctgatctcgccacattaaccgctatcgttgag

SEQ ID NO: 470408 - DNA, 75 bp, synthetic construct
  source 1..75: mol_type = other DNA
attaaagcgcagatctccgaagccgatatcacccgtatttccgctgggcaaaaagcccgtttcactatcttttcc

SEQ ID NO: 470409 - DNA, 75 bp, synthetic construct
  source 1..75: mol_type = other DNA
atggatacaagaaccctgggccagcgagttctggcgcgacgaaaagaattacgcttaacacaacgagaagccgcg

SEQ ID NO: 470410 - DNA, 75 bp, synthetic construct
  source 1..75: mol_type = other DNA
gatgtttgcgttacctgccgccgcgttggcgatgtatcaggaagcaaaaccggaacgtaaggcgctgattaaagg

SEQ ID NO: 470411 - DNA, 75 bp, synthetic construct
  source 1..75: mol_type = other DNA
gcgaactccgcgcccgcgttgagaattttaatcgcctgttcactgaactactggaagctcgcaaacgtaacaaac

SEQ ID NO: 470412 - DNA, 75 bp, synthetic construct
  source 1..75: mol_type = other DNA
gaggggggtaaactcattgtaaagcaacgcttaagaagagtgaaaatgatgtgtctgatgatgagtatatttgtt

SEQ ID NO: 470413 - DNA, 75 bp, synthetic construct
  source 1..75: mol_type = other DNA
tcgcaaaaacagttgattgcttcacataagaatcgtcctttttatcatctgtggcacagaaaagggggccagctc

SEQ ID NO: 470414 - DNA, 75 bp, synthetic construct
  source 1..75: mol_type = other DNA
atttaaaaggtgaatacttccacgccatccgggcgggaaagaaggtggaagaataccggctttacaatgaatact

SEQ ID NO: 470415 - DNA, 75 bp, synthetic construct
  source 1..75: mol_type = other DNA
gtttgttttcatcttttttggaactaatgatatagttgttagtgattggaaaaaagaagacacattgtggtattt

SEQ ID NO: 470416 - DNA, 75 bp, synthetic construct
  source 1..75: mol_type = other DNA
ccgggggcggtcgccaatgggaaaacactaaacataagcccgaacatcatagtgatttgctggctggtgggcaat

SEQ ID NO: 470417 - DNA, 75 bp, synthetic construct
  source 1..75: mol_type = other DNA
ccgcgctgttgtaattctttgcggagtattcgtttaatccaagtagctaatgaggtgtcgccgtctgccttggct

SEQ ID NO: 470418 - DNA, 75 bp, synthetic construct
  source 1..75: mol_type = other DNA
tatggctcgttctggcgcggcgtcattttcgacaccgaatataagaaccttgccgacatcatcactcagtcgaag

SEQ ID NO: 470419 - DNA, 75 bp, synthetic construct
  source 1..75: mol_type = other DNA
gccgggaaattattctgggctttaacggatgaaagtaataaagatcaatcggacgttattcctgtttatgccgcc

SEQ ID NO: 470420 - DNA, 75 bp, synthetic construct
  source 1..75: mol_type = other DNA
atgtcgaaaagtatggtcgatcagttcgataagctggtggcgcttttaggcattgaaccgttgcttgaccgttta

SEQ ID NO: 470421 - DNA, 75 bp, synthetic construct
  source 1..75: mol_type = other DNA
cgccatcagtgggctgacacgtccgcaaaaagggcggattgtcctcaatggtcgggtactaaatgatgccgaaaa

SEQ ID NO: 470422 - DNA, 75 bp, synthetic construct
  source 1..75: mol_type = other DNA
ggatattgcgttaacggtagggaagctgcgtgttgaactggaagcagcaaataagcgcatagcagaactggaagc

SEQ ID NO: 470423 - DNA, 75 bp, synthetic construct
  source 1..75: mol_type = other DNA
tgccagaattaatcgaaggcatggaggtttccattgatgtaagcacttgtgatgcggatttaggtaatcgctatt

SEQ ID NO: 470424 - DNA, 75 bp, synthetic construct
  source 1..75: mol_type = other DNA
tgggaataagcattatggttttatggagagtcttaaatatggagatgatagcggcaaccatccccaaactaatga

SEQ ID NO: 470425 - DNA, 75 bp, synthetic construct
  source 1..75: mol_type = other DNA
cttggggtaacctcatttggtatccgcgtcttcagcacttcctctgtgagccacgttgcaatctttttgggagat

SEQ ID NO: 470426 - DNA, 75 bp, synthetic construct
  source 1..75: mol_type = other DNA
aaaagccatgaagcatagtgataagcttttcgtcttacgagtcccggatcttaccccgcaacaagccacagaaat

SEQ ID NO: 470427 - DNA, 75 bp, synthetic construct
  source 1..75: mol_type = other DNA
ttctcctcaagccttggggtaacctcatttggaatccgcgtcttcagcacttcctctgtgagtcacgttgcaatc

SEQ ID NO: 470428 - DNA, 75 bp, synthetic construct
  source 1..75: mol_type = other DNA
agcccgtgggccagggacgaactggcaatcagaccgggtctgtggctgtacgcgcaaattaaaagtgtgtcgata

SEQ ID NO: 470429 - DNA, 75 bp, synthetic construct
  source 1..75: mol_type = other DNA
cgtcgcgttggctatgtttttcaggatgcgcggctgtttccgcattacaaagtgcgtggcaatctgcgctacggc

SEQ ID NO: 470430 - DNA, 75 bp, synthetic construct
  source 1..75: mol_type = other DNA
gtgctggaaaacggtcaggtgaaagcctttggtgcactggaagacgtctggggcagtagcgtgatgaatccgtgg

SEQ ID NO: 470431 - DNA, 75 bp, synthetic construct
  source 1..75: mol_type = other DNA
ccaaacttcgatgtaaatggcaactatccggtaactccggatggttggataagctgtagtgagcgaatgccggat

SEQ ID NO: 470432 - DNA, 75 bp, synthetic construct
  source 1..75: mol_type = other DNA
cgcgaagtggtgaaacattccagaagcggggaatccgttatcaaagaagagtgggtgaaggaactgtgtcagcat

SEQ ID NO: 470433 - DNA, 75 bp, synthetic construct
  source 1..75: mol_type = other DNA
tttaatagttccatgtacagataaaatattgatggagctaaaagaatatgcattaaaagcatctaaagaatacat

SEQ ID NO: 470434 - DNA, 75 bp, synthetic construct
  source 1..75: mol_type = other DNA
cgatcttgaaaagttggctgaccaggattgtcatatcgttttccgtggtcatcatatgatcgaaaaattagtaag

SEQ ID NO: 470435 - DNA, 75 bp, synthetic construct
  source 1..75: mol_type = other DNA
aatggaaaatcagggtgttgaatggcttgaggccaataagaagccaggctctcgagtcaacggggcttcggtatt

SEQ ID NO: 470436 - DNA, 75 bp, synthetic construct
  source 1..75: mol_type = other DNA
tcaaacctgtggtgggcatgcgccgatggcaccgcggctgagctacaggatggtcgtcagttttgcccgcccgca

SEQ ID NO: 470437 - DNA, 75 bp, synthetic construct
  source 1..75: mol_type = other DNA
aggtattgtactggatgagaaaagaacccggcttcatggtgcgcctgtttataagatttgtgggcgttgcaatgg

SEQ ID NO: 470438 - DNA, 75 bp, synthetic construct
  source 1..75: mol_type = other DNA
cacgaaggtacagcattccacctctttaatctgcaagacgggcatgaagccgtctgtgaagtgcccgatgctgac

SEQ ID NO: 470439 - DNA, 75 bp, synthetic construct
  source 1..75: mol_type = other DNA
actttggcgaacgtattccaaccgatgttcaatggtttgatggttccgatccgcagaaaatgcataaccattatg

SEQ ID NO: 470440 - DNA, 75 bp, synthetic construct
  source 1..75: mol_type = other DNA
atgtttattctcaaagtagagatatgtaatatgacaattgaaaatgataagtttgtttacaaattaattttagct

SEQ ID NO: 470441 - DNA, 75 bp, synthetic construct
  source 1..75: mol_type = other DNA
tacaagtggatttatttttgaaaatgataaaatctactttataactttgggcagactttcagtcgaaaaagatca

SEQ ID NO: 470442 - DNA, 75 bp, synthetic construct
  source 1..75: mol_type = other DNA
gtgaccgcctatatacttacaactgatgcggaagccgacctgcgaggcatcatccgctacacgcgtaaacagtgg

SEQ ID NO: 470443 - DNA, 75 bp, synthetic construct
  source 1..75: mol_type = other DNA
gtggtgcgcttcttcacgcaactgaaatgccgcatgatgccgtatctgtatcgtgaagctgcacgtgcaaacgcc

SEQ ID NO: 470444 - DNA, 75 bp, synthetic construct
  source 1..75: mol_type = other DNA
ggaagaagcgatcaaccatcggggcatttatcggcaaacctggtgaagattaccagtgccggtgcctcgctctcc

SEQ ID NO: 470445 - DNA, 75 bp, synthetic construct
  source 1..75: mol_type = other DNA
atgtggagaggtaatagtcatggcagaagccagatgatacttaccgaatatcatttcgaccacaaaaccaataaa

SEQ ID NO: 470446 - DNA, 75 bp, synthetic construct
  source 1..75: mol_type = other DNA
ttccccgcagggcgtagcactgcgccagttcaccagccgctgggaagggggtatggtcagaacgtcaggaaactg

SEQ ID NO: 470447 - DNA, 75 bp, synthetic construct
  source 1..75: mol_type = other DNA
gttactttcctttatgagccatcggaaagaccatactgccatcacgcttctgtccgggttgacgaaaaagagcgt

SEQ ID NO: 470448 - DNA, 75 bp, synthetic construct
  source 1..75: mol_type = other DNA
gttaattttctttatgagccatcggaaaggccatattgtcatcacgcctctgtccgggttgacgaaaaagagcgt

SEQ ID NO: 470449 - DNA, 75 bp, synthetic construct
  source 1..75: mol_type = other DNA
gctctctgtggcgaaaagagaaaccaggatggcagatgatgtaaaacaattgcgccaggaggaacgggaaaggcg

SEQ ID NO: 470450 - DNA, 75 bp, synthetic construct
  source 1..75: mol_type = other DNA
tttaatcaaaaagaagttaaaggatgaaaacacctgttttagcaaaatattattgacctcgcgaatgtctatggc

SEQ ID NO: 470451 - DNA, 75 bp, synthetic construct
  source 1..75: mol_type = other DNA
atattatctcatgctttagtcatgtcagataatggagaatttaataaaaaaggactaatcctagacatagacagc

SEQ ID NO: 470452 - DNA, 75 bp, synthetic construct
  source 1..75: mol_type = other DNA
cctgatgaaaatgtggcgtgaagcgaaggcgctgcatagcgatccggttgaggcatgggcttctattattgaaga

SEQ ID NO: 470453 - DNA, 75 bp, synthetic construct
  source 1..75: mol_type = other DNA
atccgctatgacgcggtactgagctgggagcgtttcccgtatcgcctgtgtccgccgcaactgcttatgtcgctg

SEQ ID NO: 470454 - DNA, 75 bp, synthetic construct
  source 1..75: mol_type = other DNA
tatccttcacagcactcatgtctactgtctgaataagcacataacagaaggcaaatctcacaatggaattgtctg

SEQ ID NO: 470455 - DNA, 75 bp, synthetic construct
  source 1..75: mol_type = other DNA
gacagtgtgctggatgagatgaagttcattcctgcggcgaaggattacgggctgggacaatatcgccaggcggtg

SEQ ID NO: 470456 - DNA, 75 bp, synthetic construct
  source 1..75: mol_type = other DNA
ccttcgcccatgaacatctgcatattgatctttccggctttaaaaacaacgtggactgccgccttgatcagtatg

SEQ ID NO: 470457 - DNA, 75 bp, synthetic construct
  source 1..75: mol_type = other DNA
accggaaaaatgacggatgaggatgactggctggcagttctgcatgtcgccgtctttatccgtgcacaggcaccg

SEQ ID NO: 470458 - DNA, 75 bp, synthetic construct
  source 1..75: mol_type = other DNA
gaagatatgctggatttccctgcgctttttggccgtgaagcgccggtgacgcttgagattggtttcggcatgggg

SEQ ID NO: 470459 - DNA, 75 bp, synthetic construct
  source 1..75: mol_type = other DNA
caaagcagtaatggcgctcaccgcgctggcccccgatcgcatcgataaactggtggcaatcgatattgcgcccgt

SEQ ID NO: 470460 - DNA, 75 bp, synthetic construct
  source 1..75: mol_type = other DNA
ggtgtggctgagtgatgctcagtacaccggaaaaatgacggatgaagatgactggcaggctgttctgcatattgc

SEQ ID NO: 470461 - DNA, 75 bp, synthetic construct
  source 1..75: mol_type = other DNA
cggcaactacggcatcattctggaagttaactgccagactgacttcgtagcaaaagacgctggtttccaggcgtt

SEQ ID NO: 470462 - DNA, 75 bp, synthetic construct
  source 1..75: mol_type = other DNA
tcgttatggaaccaagcaaaactgttggtcagctgctgaaagagcataacgctgaagtgactggcttcatccgct

SEQ ID NO: 470463 - DNA, 75 bp, synthetic construct
  source 1..75: mol_type = other DNA
caacatctgaatgaagaaggggtgattcagtttctgctgaaatcttacgttgatggtgaatggcgttttaacgtg

SEQ ID NO: 470464 - DNA, 75 bp, synthetic construct
  source 1..75: mol_type = other DNA
acccgcatcacggtaaaccgtctgcccatagcagcctgtggcatgctatctggttgattatccatctgattgccg

SEQ ID NO: 470465 - DNA, 75 bp, synthetic construct
  source 1..75: mol_type = other DNA
tcaagttatccatcattcactgttttattatcttaaggatgatggaaatagaaggtttttttaatgataataaaa

SEQ ID NO: 470466 - DNA, 75 bp, synthetic construct
  source 1..75: mol_type = other DNA
actggcgcaattcccgcaggcacgggcgcatgtgattgcgggtgcgggtcactgggtacacgcagaaaaacctga

SEQ ID NO: 470467 - DNA, 75 bp, synthetic construct
  source 1..75: mol_type = other DNA
gagattttcgcggctatcaacgcggtcagtgaatcggacgcacaaactcgccagcaagcagcagcaataatgcgc

SEQ ID NO: 470468 - DNA, 75 bp, synthetic construct
  source 1..75: mol_type = other DNA
gcgcatgtgattgcgggtgcgggtcactgggtacacgccgaaaaacctgatgcggtactgcgcgccatccgtcgc

SEQ ID NO: 470469 - DNA, 75 bp, synthetic construct
  source 1..75: mol_type = other DNA
tgactggtacaactccagctacatcattgcctggggttctaacgttccgcagacccgtactccagatgctcactt

SEQ ID NO: 470470 - DNA, 75 bp, synthetic construct
  source 1..75: mol_type = other DNA
cttgatgatgcggcaattgccggactggaatataccttgccaaaaaactggcaacagttgtggatggaaacgaca

SEQ ID NO: 470471 - DNA, 75 bp, synthetic construct
  source 1..75: mol_type = other DNA
tattttcccggttctggcgctggtagtgctgttcctgtggggaagcagccagacactaccagtggtcattgccat

SEQ ID NO: 470472 - DNA, 75 bp, synthetic construct
  source 1..75: mol_type = other DNA
caatttcactatgggaaagcgaccatacagccccgcgcgggcaaaatttgcatcgcctggctgaggtattgcaat

SEQ ID NO: 470473 - DNA, 75 bp, synthetic construct
  source 1..75: mol_type = other DNA
atacgtggaatacagcaccattactatgatctctggcaggatcattataaaatgccttacgatcagattaagcag

SEQ ID NO: 470474 - DNA, 75 bp, synthetic construct
  source 1..75: mol_type = other DNA
gccaatgtcccgctgaaacctacggttagcgggcaattgcatgccgtgaacgccacaaagcagcaagtgactcaa

SEQ ID NO: 470475 - DNA, 75 bp, synthetic construct
  source 1..75: mol_type = other DNA
cttgatgatgcggcaattgccgggctggaatataccttgccgaaaaactggcaacagttgtggatggaaacgaca

SEQ ID NO: 470476 - DNA, 75 bp, synthetic construct
  source 1..75: mol_type = other DNA
tgtggcgacccgcagcgcgcaacaactggcgcaagagatggtcgatgaaattgaacagggtattgatggcacgga

SEQ ID NO: 470477 - DNA, 75 bp, synthetic construct
  source 1..75: mol_type = other DNA
gacaaaatgaaccaaaaggtcagaacttgctggctttggccaatgcacttaagtgttctgccacatggctgcttt

SEQ ID NO: 470478 - DNA, 75 bp, synthetic construct
  source 1..75: mol_type = other DNA
ccgaaatgcgagctcgagtaaaaaatttcaataaactctttgaagaattactaaaagcccgtcagcggacaaata

SEQ ID NO: 470479 - DNA, 75 bp, synthetic construct
  source 1..75: mol_type = other DNA
atgtttggtgatgaagacaaggcaccagtgcctgcacaagaacttcatgtggaaacagagctaactcccaaccac

SEQ ID NO: 470480 - DNA, 75 bp, synthetic construct
  source 1..75: mol_type = other DNA
ctgcgccagtcaggattcagtcaggccgatgtggatgtgatgttacgtgaaaatccctctcaatttttccaataa

SEQ ID NO: 470481 - DNA, 75 bp, synthetic construct
  source 1..75: mol_type = other DNA
cctgatggcgcagggcgtgcgtaatgtgattgagatgaccaaccgctacatggggcgcaatgcgcaattcatgct

SEQ ID NO: 470482 - DNA, 75 bp, synthetic construct
  source 1..75: mol_type = other DNA
agatctggggcagcagggcggcgtgaagccggaagaagtggactggcaggacaacggtctggaaggcaagctgga

SEQ ID NO: 470483 - DNA, 75 bp, synthetic construct
  source 1..75: mol_type = other DNA
gctggaaaatctacgttaaaaagggtctggtgacctgggaaaaccaccagactgactagccgcgcactcgcccgg

SEQ ID NO: 470484 - DNA, 75 bp, synthetic construct
  source 1..75: mol_type = other DNA
gctggaaaatctacgttaaaaacggtctggtgacctgggaaaaccagcagactgactagccgcgcactcgcccgg

SEQ ID NO: 470485 - DNA, 75 bp, synthetic construct
  source 1..75: mol_type = other DNA
agcgagtttacggggcgcgaccatacacatctggcgcggcataaagaggatgaaaagatccgcttccgcgatatt

SEQ ID NO: 470486 - DNA, 75 bp, synthetic construct
  source 1..75: mol_type = other DNA
acctacagcgacaaccagttgatgctgaccttaggtcgcggtggcccggtggtctggctgagcgaagccgatgcc

SEQ ID NO: 470487 - DNA, 75 bp, synthetic construct
  source 1..75: mol_type = other DNA
tcagccgatgctcaataccgcaattgatgcggcagagatgatcctgacgctggcaccggaaaccaatggtcaggt

SEQ ID NO: 470488 - DNA, 75 bp, synthetic construct
  source 1..75: mol_type = other DNA
gctggaaaatctacgttaaaaagggtctggtgacctgggaaaaccagcagactgactacccgcgcactcgcccgg

SEQ ID NO: 470489 - DNA, 75 bp, synthetic construct
  source 1..75: mol_type = other DNA
gctacttcaaacagaagggcgaaacctttgccgatgggcatggccagcttctcaataccaaccgtgactgggagg

SEQ ID NO: 470490 - DNA, 75 bp, synthetic construct
  source 1..75: mol_type = other DNA
tacaccatcaaaaactacggcccggaccgtgtcgctggtttctcgccaattccggcaatgtcgatggtttcttac

SEQ ID NO: 470491 - DNA, 75 bp, synthetic construct
  source 1..75: mol_type = other DNA
gcaccagaagtgggggatccactccacttacagcgacaacctgctgatgctgaccttaggtcgcggtggcccggt

SEQ ID NO: 470492 - DNA, 75 bp, synthetic construct
  source 1..75: mol_type = other DNA
tcaacatgctgattttctgcggctgtgtcggtcagagcggtggcggctgggcgcactatgtaggtcaggaaaaac

SEQ ID NO: 470493 - DNA, 75 bp, synthetic construct
  source 1..75: mol_type = other DNA
gagtttatgctcaagtacctgctggggacggagcacggtatccagggtaaagatctggggcagcagggcggcgtg

SEQ ID NO: 470494 - DNA, 75 bp, synthetic construct
  source 1..75: mol_type = other DNA
tggtatctctacagcgccaaccgtctgaaatatccaatgatgcgcaaacgcctgatgaaaatgtggcgtgaagca

SEQ ID NO: 470495 - DNA, 75 bp, synthetic construct
  source 1..75: mol_type = other DNA
ctcctgttttttatacagttgacgtggaacataccgaaaacaccctgagacttaccagtgaagattcggtagccg

SEQ ID NO: 470496 - DNA, 75 bp, synthetic construct
  source 1..75: mol_type = other DNA
gctgctaactttattagtgaaaatacatcttttttagataagctaaatttaaaattacctaagataaatgatgat

SEQ ID NO: 470497 - DNA, 75 bp, synthetic construct
  source 1..75: mol_type = other DNA
gaagaggaagttagtacgcttaaacaggctgacttggataagataacatggggagttatttctgattggcttata

SEQ ID NO: 470498 - DNA, 75 bp, synthetic construct
  source 1..75: mol_type = other DNA
cggcgagcctcctgccgtgaccgcgccgctggagcaggtgcagatagaccatacggcactgttgcaaatagtcgg

SEQ ID NO: 470499 - DNA, 75 bp, synthetic construct
  source 1..75: mol_type = other DNA
acagaacgtgctgaactggcagcttacttgcgtgtatatgcttcagaaatggaaaaggagtacggtacagcggtg

SEQ ID NO: 470500 - DNA, 75 bp, synthetic construct
  source 1..75: mol_type = other DNA
tggcacaggggggaattcagctcccggtgctggatccggagagtgcgatgctgatagcacttgaaagagtggtct

SEQ ID NO: 470501 - DNA, 75 bp, synthetic construct
  source 1..75: mol_type = other DNA
aaccgtacctacacagtttcagcactggtttttatggaatccattggtgcatgccattgagctgattcgctctgg

SEQ ID NO: 470502 - DNA, 75 bp, synthetic construct
  source 1..75: mol_type = other DNA
tttaaagaagcgaataagtttctcgatttgttgatgatgccacttatgtttatctcgtgcgtcatgtatcccttg

SEQ ID NO: 470503 - DNA, 75 bp, synthetic construct
  source 1..75: mol_type = other DNA
gtgcgtgaagccacgccgcgtgaagtagaacaggcgctggaaagtgcggttaataacgcgccaatctggtttgcc

SEQ ID NO: 470504 - DNA, 75 bp, synthetic construct
  source 1..75: mol_type = other DNA
cggagtatgtcatcagggtcaagaattgaaattgagagatgcctgaatagcaaaaaagcgcctttagggcgcttt

SEQ ID NO: 470505 - DNA, 75 bp, synthetic construct
  source 1..75: mol_type = other DNA
gatggggggcatcatccattaagtagggagccaataacagcatcaatgattgtaaagtctgaagattgtattttt

SEQ ID NO: 470506 - DNA, 75 bp, synthetic construct
  source 1..75: mol_type = other DNA
aatgtcagttgggtttatttgtctgctgtcacattggtgctgctgacttttgcgatgagttgctatcgtctgagc

SEQ ID NO: 470507 - DNA, 75 bp, synthetic construct
  source 1..75: mol_type = other DNA
aatgcggaaccagaagaacaggtcgatccgcgcaaagccgccgtcgaagccgctattgcccgtgccaaagcgcgc

SEQ ID NO: 470508 - DNA, 75 bp, synthetic construct
  source 1..75: mol_type = other DNA
tcgcctcacgttatatcgggcgaaccatcgcggttatgttggttatcctcgggttatttccgatgatcggcggct

SEQ ID NO: 470509 - DNA, 75 bp, synthetic construct
  source 1..75: mol_type = other DNA
cagtatcatcagttaatctggcttcaaaaggtcgggtaaccgcgctgacagacaatacgcagggggcaacaggtc

SEQ ID NO: 470510 - DNA, 75 bp, synthetic construct
  source 1..75: mol_type = other DNA
gacatttgtttcaggtggttccagtggtgctccgggaagtggatcacctgattattctaaatacagtgttaacac

SEQ ID NO: 470511 - DNA, 75 bp, synthetic construct
  source 1..75: mol_type = other DNA
gatttggggacgaaaaccacatcgtcgtttgattacggcactaaatccacgaataacaccggggcgcatacgcac

SEQ ID NO: 470512 - DNA, 75 bp, synthetic construct
  source 1..75: mol_type = other DNA
cggcgctggtgtttggcactgttcatccacaatccgttgatgcgctgtttgaagccgccagtcatatcaatatgc

SEQ ID NO: 470513 - DNA, 75 bp, synthetic construct
  source 1..75: mol_type = other DNA
tattggaaaaattgctacagaacaactgaaaccggttattaaagaaggtagtgctgaggtaattggggcagttac

SEQ ID NO: 470514 - DNA, 75 bp, synthetic construct
  source 1..75: mol_type = other DNA
ttacagctgtgtcagcaggcgggcaaagccggttaacgtcagtttcaaaatgcccacccggggtgaaatcgcaca

SEQ ID NO: 470515 - DNA, 75 bp, synthetic construct
  source 1..75: mol_type = other DNA
ttcgcatcattatcaccaacgggttaaagcgtcgtgaaaccctgatcgtcgccacctctttgggactgggtctcg

SEQ ID NO: 470516 - DNA, 75 bp, synthetic construct
  source 1..75: mol_type = other DNA
gatatcaccgccacggcaatggtttcccgccgccccattcagggggaagagtatcagtcccgactgaaaggcggc

SEQ ID NO: 470517 - DNA, 75 bp, synthetic construct
  source 1..75: mol_type = other DNA
tacctcggcagcggcttattcaacttgaaaaaagcatggcagaagaaagtcaaagtgggcatgggaacagatatc

SEQ ID NO: 470518 - DNA, 75 bp, synthetic construct
  source 1..75: mol_type = other DNA
taattcgcgacaaaatcagcaatggtaactggcagtcacacattggtcgtagcccgtcactgtttgttaatgccg

SEQ ID NO: 470519 - DNA, 75 bp, synthetic construct
  source 1..75: mol_type = other DNA
atggtaaagaaaattttattgccatgagtcatacgaaaagcgagttaactggagggaaacgtcggtaccggatta

SEQ ID NO: 470520 - DNA, 75 bp, synthetic construct
  source 1..75: mol_type = other DNA
tttgatgatgctctgattaaggctgctgaactgaaagagaaaggcgactttcagggggcgatggcaatcatggcc

SEQ ID NO: 470521 - DNA, 75 bp, synthetic construct
  source 1..75: mol_type = other DNA
gcctagccaatttgccaatgcggccaatgccatattggttaatatggtttcgggctattaccgtatgtacaagag

SEQ ID NO: 470522 - DNA, 75 bp, synthetic construct
  source 1..75: mol_type = other DNA
tattgagcgccatattcagaccatgcgtagcaaaggccgtccggtgttccaggcggtgcgggaaaacagtgaaga

SEQ ID NO: 470523 - DNA, 75 bp, synthetic construct
  source 1..75: mol_type = other DNA
cctcaaccgttatttcaaacaactccgcgccggaaggaacatcagaaatagccaaaatcacaagacaaattcagg

SEQ ID NO: 470524 - DNA, 75 bp, synthetic construct
  source 1..75: mol_type = other DNA
ctgggctcaactggagcagttgttaaggcagcaggcagagaaaaagaatgaagacgcgacagttcagcctgataa

SEQ ID NO: 470525 - DNA, 75 bp, synthetic construct
  source 1..75: mol_type = other DNA
ggcgtgagatgacaatgagtgtatctaaagagcctgtatgtggttattgccgcggtgatatagcagccatggctg

SEQ ID NO: 470526 - DNA, 75 bp, synthetic construct
  source 1..75: mol_type = other DNA
cgctgatgcgtatggtcagatagtcaatctcctcgatatcaccagtgttgatgcacagaatcagcagcaggtgaa

SEQ ID NO: 470527 - DNA, 75 bp, synthetic construct
  source 1..75: mol_type = other DNA
tgatacttgggccggttcttcagataaaaataacccttactcgggactttatgtgaaaatagggcgttccaataa

SEQ ID NO: 470528 - DNA, 75 bp, synthetic construct
  source 1..75: mol_type = other DNA
accttggtattgggaaaaagatatcctttgatggtgatttttatactgtagatggaatgaaattcagcaaaagtt

SEQ ID NO: 470529 - DNA, 75 bp, synthetic construct
  source 1..75: mol_type = other DNA
tcttagcgtgtctgaaaagacagagcttgagatagcaaaacagacgcttaaaaatagtaaagatccggcagagcg

SEQ ID NO: 470530 - DNA, 75 bp, synthetic construct
  source 1..75: mol_type = other DNA
cgccagccgcctggacgctcagggtcgccctattccgctcatcgctgaaaccggcggcatgaacgcgatgattgt

SEQ ID NO: 470531 - DNA, 75 bp, synthetic construct
  source 1..75: mol_type = other DNA
gtacgtgaagccacgccgcgtgaagtagagcaggcgctggaaagtgcggttaataacgcgccaatctggtttgcc

SEQ ID NO: 470532 - DNA, 75 bp, synthetic construct
  source 1..75: mol_type = other DNA
attgtgtgaagccgttgccgcgcgggatggcgcaattgtttcggtgcagggttttgcccgtggcgaaagcaatat

SEQ ID NO: 470533 - DNA, 75 bp, synthetic construct
  source 1..75: mol_type = other DNA
ccagggccgacgggtgaacgcaacacctggacgctgctgccgcgtgagcgcgtgttgtgtattgcggatgatgag

SEQ ID NO: 470534 - DNA, 75 bp, synthetic construct
  source 1..75: mol_type = other DNA
gcaaaaatggcaggccttgccaatgctggaacaatcggtagcggctggtgagatgtcgcccgttattaaccctgc

SEQ ID NO: 470535 - DNA, 75 bp, synthetic construct
  source 1..75: mol_type = other DNA
caaactggtttccacccataacgaagccagcctctcccgctcgctgaaccgcattatcggtaaaagcggtgaacc

SEQ ID NO: 470536 - DNA, 75 bp, synthetic construct
  source 1..75: mol_type = other DNA
ccacctgggggcttctctttaccggcaaactggtttctacccataacgaagccagcctctctcgttcgctgaatc

SEQ ID NO: 470537 - DNA, 75 bp, synthetic construct
  source 1..75: mol_type = other DNA
gccgcattgactcagccgctaaatgcactgcgggaatgggcggcaaaccgtccagaattgcaggcgttatgtacg

SEQ ID NO: 470538 - DNA, 75 bp, synthetic construct
  source 1..75: mol_type = other DNA
gaaacgctgctggcgtatctggtgcgtcgcctgctggaaaacggtgctaacacctcgtttgttaaccgtattgcc

SEQ ID NO: 470539 - DNA, 75 bp, synthetic construct
  source 1..75: mol_type = other DNA
aaattttgccgcagtcagtttcccgcgccgccatcaccgctgcctatcgccgcccggaaaccgaagcggtttcta

SEQ ID NO: 470540 - DNA, 75 bp, synthetic construct
  source 1..75: mol_type = other DNA
acgctggcagcgatttatcaactggcaggtcagaactactatccgggtcagtacgagttccagtgcctgcatggt

SEQ ID NO: 470541 - DNA, 75 bp, synthetic construct
  source 1..75: mol_type = other DNA
taattgatagcgaagcgaaaaccaatattgagcgtcatattcagaccatgcgcagcaaaggccgtccggtgttcc

SEQ ID NO: 470542 - DNA, 75 bp, synthetic construct
  source 1..75: mol_type = other DNA
cgcttccggttatggtctgacgcttggcgttcatacgcgtattgatgaaaccatcgcccaggtcactggctcggc

SEQ ID NO: 470543 - DNA, 75 bp, synthetic construct
  source 1..75: mol_type = other DNA
agccgatcgtaaaacgcacttcagttcatgggcgcgaagaggccttgtttcagaccgcctggcaggtgccatttt

SEQ ID NO: 470544 - DNA, 75 bp, synthetic construct
  source 1..75: mol_type = other DNA
tggcgaccacgccagcctccacgggggatgcacagtctggctctgcgggtcagacgcaacagcagggtgcaggta

SEQ ID NO: 470545 - DNA, 75 bp, synthetic construct
  source 1..75: mol_type = other DNA
ggtggacggaaagcgctgcgactggaaaaacagcccggtaaactgacgtcctggaaaatgtttgtcaacgacgga

SEQ ID NO: 470546 - DNA, 75 bp, synthetic construct
  source 1..75: mol_type = other DNA
ggcgtaatgaccagaagacctggacatcagcagacagggccagccatttcagttcatgggctcgccgtgggatta

SEQ ID NO: 470547 - DNA, 75 bp, synthetic construct
  source 1..75: mol_type = other DNA
taagccgctgtatcaggatttggtgagccggactaaagccgcactggcgaagaacccgaaaaaccgtctgcttgc

SEQ ID NO: 470548 - DNA, 75 bp, synthetic construct
  source 1..75: mol_type = other DNA
gcggtggaggaggcaaaaaatcttctcagtaagggaggtgaaattgccgtgcggtttaagatcccggagggtgtc

SEQ ID NO: 470549 - DNA, 75 bp, synthetic construct
  source 1..75: mol_type = other DNA
agcaggcgatacaggccgcaacggcagcagtacaggggctggccggcggtaatctgagtgcagccctggcaggtg

SEQ ID NO: 470550 - DNA, 75 bp, synthetic construct
  source 1..75: mol_type = other DNA
ctgcatgtacctataacgatattattccggcagatcactgtctccatgatgtacaggatatgagcagccttaatc

SEQ ID NO: 470551 - DNA, 75 bp, synthetic construct
  source 1..75: mol_type = other DNA
cgatgagaaaggtgctaacacgccaacaaacctgcctgccgaagatcctgacctggcagaagccggttattacgg

SEQ ID NO: 470552 - DNA, 75 bp, synthetic construct
  source 1..75: mol_type = other DNA
tggggaagggctgccgctgccggagacatatgaccgtccggacccgcgtattaaacagctggcgcgtcgcagtac

SEQ ID NO: 470553 - DNA, 75 bp, synthetic construct
  source 1..75: mol_type = other DNA
tatcagcatgggctggcgcagacgctgaacgcctgaccgttacagctctgcccgccattaccacttatggcgaac

SEQ ID NO: 470554 - DNA, 75 bp, synthetic construct
  source 1..75: mol_type = other DNA
gatggctgtccgctgtatgaatcacgcctgaagggaaagctgcacgttatcagcaagcgttacactcagcgcatt

SEQ ID NO: 470555 - DNA, 75 bp, synthetic construct
  source 1..75: mol_type = other DNA
ggtcagtgagcaaagtgaaaaactgcatgtaaaaagcctcggaatggcgctgcgcagccggattcaggaaggtta

SEQ ID NO: 470556 - DNA, 75 bp, synthetic construct
  source 1..75: mol_type = other DNA
tgccagcgccagaaggttaccgcaaagcactgcgtctgatgcaaatggctgaacgctttaagatgcctatcatca

SEQ ID NO: 470557 - DNA, 75 bp, synthetic construct
  source 1..75: mol_type = other DNA
tcatcaaaaaggtcgtgaaaccaaagaaaaaattcgccgtaactttggtatgccagcgccagaaggttaccgcaa

SEQ ID NO: 470558 - DNA, 75 bp, synthetic construct
  source 1..75: mol_type = other DNA
ttaacatcgatgaagaagtgcatcgtctgcgtgaaaaaagcgtagaactgacacgtaaaatctttgccgatctcg

SEQ ID NO: 470559 - DNA, 75 bp, synthetic construct
  source 1..75: mol_type = other DNA
tatgcaaaagcaatcacagataatttgattaaattaccgaaagaaaaatttcctcagaagataattgaattattc

SEQ ID NO: 470560 - DNA, 75 bp, synthetic construct
  source 1..75: mol_type = other DNA
gtgctgaggaattacattggtgatgatggacgagttcgtgcaatcctcgaaatccttgattcaagtaagccgctt

SEQ ID NO: 470561 - DNA, 75 bp, synthetic construct
  source 1..75: mol_type = other DNA
atgggcatcatcgctccgcgtctgaaagagctgaaactgatcgactccatcatcccggaaccgctgggcggcgct

SEQ ID NO: 470562 - DNA, 75 bp, synthetic construct
  source 1..75: mol_type = other DNA
ctgcagacggatgcgacgaacctgaacgcgatgcaccacaagaagccgaatgcgaagctggatacgttcggggtc

SEQ ID NO: 470563 - DNA, 75 bp, synthetic construct
  source 1..75: mol_type = other DNA
ctgcccgccttgctggaagaagagctgaaccaggatatcgacgaactgcattttgccgcgttgaaaatcgaccag

SEQ ID NO: 470564 - DNA, 75 bp, synthetic construct
  source 1..75: mol_type = other DNA
ctggtaacccgttcctgatgtcgttcttcacccagaccacagacggcaaactgaatctgatgcatcacaggaaag

SEQ ID NO: 470565 - DNA, 75 bp, synthetic construct
  source 1..75: mol_type = other DNA
tcagggcggcatcgccctctgaccttgcggaacgactgacacaaaaactgaaggaggggtggcagccatttggca

SEQ ID NO: 470566 - DNA, 75 bp, synthetic construct
  source 1..75: mol_type = other DNA
gctagttatgcagggtatttaggggtgattctagcacagaatgcaaatggaaagagaattgaggaattacttccg

SEQ ID NO: 470567 - DNA, 75 bp, synthetic construct
  source 1..75: mol_type = other DNA
tgcatgatgttcaggatttgagtaagttttcacacccgaaagccagcgcagctcagtatggatgcgtggggcagg

SEQ ID NO: 470568 - DNA, 75 bp, synthetic construct
  source 1..75: mol_type = other DNA
ctggtcactgacagagacctgccatcagccattccggtaccagaaggcgaggaaaaacccgtaccgggcactacc

SEQ ID NO: 470569 - DNA, 75 bp, synthetic construct
  source 1..75: mol_type = other DNA
gcggaaacggcaatgtacagaatgaagcagttgttgggagattcactgacgctgcgtgactacgatggtcaggta

SEQ ID NO: 470570 - DNA, 75 bp, synthetic construct
  source 1..75: mol_type = other DNA
ggtcaggttgcggaggctatggccctggtacgagcgctgaacaaaatgacgaaagcaggtatgcggctttgttga

SEQ ID NO: 470571 - DNA, 75 bp, synthetic construct
  source 1..75: mol_type = other DNA
gatgacagccgttggcgaaggtgagttactcatcggctggaggggtacaagcggtgctcatgctccggcatttat

SEQ ID NO: 470572 - DNA, 75 bp, synthetic construct
  source 1..75: mol_type = other DNA
acgtccgagacgaacgccaggtcttctgaaacggcagcggaacagagtgcctccgcagcagcagactcaaaaaca

SEQ ID NO: 470573 - DNA, 75 bp, synthetic construct
  source 1..75: mol_type = other DNA
aagtcaaaaaacacggcaaagaacgccgtcgtatctggcggaagttgcatctggccgttgacagcaacacacatg

SEQ ID NO: 470574 - DNA, 75 bp, synthetic construct
  source 1..75: mol_type = other DNA
atctggctgaagtggtgaaaaccatgaccacagacccggttacgggtgaggtgaataaggctgcaaatgtggctg

SEQ ID NO: 470575 - DNA, 75 bp, synthetic construct
  source 1..75: mol_type = other DNA
gtgaataaggctgcaaatgtggctgctcatgctgtggtgaatgctgcactggcggtggcacagggtaataacgcc

SEQ ID NO: 470576 - DNA, 75 bp, synthetic construct
  source 1..75: mol_type = other DNA
tatgtcgaacttttgaatgaggatttagatgttaaagacagcaaacagttcatattgcttaaacaagctctggat

SEQ ID NO: 470577 - DNA, 75 bp, synthetic construct
  source 1..75: mol_type = other DNA
gcacaagtaattagtggattaaaggcgtctgaggggctggcaaaactacttattgctagcggaataatgttatag

SEQ ID NO: 470578 - DNA, 75 bp, synthetic construct
  source 1..75: mol_type = other DNA
tcaccttaaggatttatacactaataaaacacgcacagcggctgaacaaaaaaggctaaatgaaatattacgtgc

SEQ ID NO: 470579 - DNA, 75 bp, synthetic construct
  source 1..75: mol_type = other DNA
cctttcgtttcaaaatcccggaaggtgttcagctggcagaaaaccgcttcgccatggctctgcactggccggttt

SEQ ID NO: 470580 - DNA, 75 bp, synthetic construct
  source 1..75: mol_type = other DNA
aagtgacattacttaaacaggctctggatcacgcaaacaacgcgcaaacactacttgatgtttcacatagcaaag

SEQ ID NO: 470581 - DNA, 75 bp, synthetic construct
  source 1..75: mol_type = other DNA
aaatctctttcaaaagcggatttagagcgtaggaatgagatcctgcgttctcaagttattagtggtctacaggcg

SEQ ID NO: 470582 - DNA, 75 bp, synthetic construct
  source 1..75: mol_type = other DNA
aagtgattatgctgccttagcacaacctgagctatacgacatttcagaaagagattatttagatgaagtggaaaa

SEQ ID NO: 470583 - DNA, 75 bp, synthetic construct
  source 1..75: mol_type = other DNA
ctatcggctggttatgctcagagtaaggtacaggactttaagaatattaaaggagtgaatctgcaatatcgatat

SEQ ID NO: 470584 - DNA, 75 bp, synthetic construct
  source 1..75: mol_type = other DNA
atggttacgctttggggaaattatgaggggatctctcagatcacgtatcttcccgacaacgcagaccgttccgtg

SEQ ID NO: 470585 - DNA, 75 bp, synthetic construct
  source 1..75: mol_type = other DNA
agtaaccttttaaatatcactgctcatatgacttataacaacttaatggttccatattgttttaatgagatatct

SEQ ID NO: 470586 - DNA, 75 bp, synthetic construct
  source 1..75: mol_type = other DNA
aaccttagatgtagatttaatcataaatgccatacaaaatagctggtccatttatgatattcaaatattttcaaa

SEQ ID NO: 470587 - DNA, 75 bp, synthetic construct
  source 1..75: mol_type = other DNA
tatatatctgtgcttggattaaacagtttacaagattttaaagacaagatgttgagtgtaacttatttagaaaat

SEQ ID NO: 470588 - DNA, 75 bp, synthetic construct
  source 1..75: mol_type = other DNA
ctacacatcaacaataagcactattttttcacttttattgatttttgttgacattccaacagaaaataaaattac

SEQ ID NO: 470589 - DNA, 75 bp, synthetic construct
  source 1..75: mol_type = other DNA
agtgttgccggtcagcttgcccgacgtaatgaatccgcgcaggtggaactgcgcgaacagctcgcaaaggccagc

SEQ ID NO: 470590 - DNA, 75 bp, synthetic construct
  source 1..75: mol_type = other DNA
atgtcaaagctgatgactgtgctggttgtgttgttatcgctggcggtggccggtctgtttctggtgaaacacaaa

SEQ ID NO: 470591 - DNA, 75 bp, synthetic construct
  source 1..75: mol_type = other DNA
ccggcaaagcttactatcgttatccacaaagataagatagataaaataaacttattggatataaaatcagcgaga

SEQ ID NO: 470592 - DNA, 75 bp, synthetic construct
  source 1..75: mol_type = other DNA
aaatttgatgataaaaatagagcgtttcttaccatgcctgactatttaggttttttaataaatttctgggacaag

SEQ ID NO: 470593 - DNA, 75 bp, synthetic construct
  source 1..75: mol_type = other DNA
gtatctgatttggaccatcgtatttcaaatcatcagtttgaagaagatgaactgcttgaggtcaaccataaaaga

SEQ ID NO: 470594 - DNA, 75 bp, synthetic construct
  source 1..75: mol_type = other DNA
gattggcatgctgaaaaatcagctcagtgttaccggtcagcttgccagacgtaatgaatctgcgcaggtggcact

SEQ ID NO: 470595 - DNA, 75 bp, synthetic construct
  source 1..75: mol_type = other DNA
ccatgcctgccccgacgccagtgattgtccacaacgcctgcccgaaagtgagtctttgcccgatgccgggcagtg

SEQ ID NO: 470596 - DNA, 75 bp, synthetic construct
  source 1..75: mol_type = other DNA
atgctgtgcgccggttgcaccagcgccccgcctgcaccgacgccagtgattgtcgccaacgcctgcccgaaagtg

SEQ ID NO: 470597 - DNA, 75 bp, synthetic construct
  source 1..75: mol_type = other DNA
agtgattgtccacaacgcctgcccgaaagtgagtctttgcccgatgccgggcagcgacccggagacgaacggtga

SEQ ID NO: 470598 - DNA, 75 bp, synthetic construct
  source 1..75: mol_type = other DNA
aaaacgagctggcgcaggtggcactgcgtcaggaactggagaacgccgcgaagcgtgaagcacagcgcgagaaaa

SEQ ID NO: 470599 - DNA, 75 bp, synthetic construct
  source 1..75: mol_type = other DNA
cggtctgtttctggtgaaacacaaaaatgccagcctgcgcgcctcgctggacagggcgaacaacgtcgccagcgg

SEQ ID NO: 470600 - DNA, 75 bp, synthetic construct
  source 1..75: mol_type = other DNA
ccgtgggcgcagctttacacctcggctcatcctcctgcagagttttatccagtcggtgcaccaatcccgtggcca

SEQ ID NO: 470601 - DNA, 75 bp, synthetic construct
  source 1..75: mol_type = other DNA
cacacccatggcaatgggcggcaataaattacgtaagctggaatttctcgcggcagatgccctgcgcgaaggtgc

SEQ ID NO: 470602 - DNA, 75 bp, synthetic construct
  source 1..75: mol_type = other DNA
aaattacgcaaactagagtttctcgcggcagacgccctgcgtgaaggtgccgacactctgattaccgccggagcg

SEQ ID NO: 470603 - DNA, 75 bp, synthetic construct
  source 1..75: mol_type = other DNA
ccaactggaagagctggcgacgcgagtcgaagcacaaggctttcgcccgtatgtcattccggttggcggttctaa

SEQ ID NO: 470604 - DNA, 75 bp, synthetic construct
  source 1..75: mol_type = other DNA
gtaatgccaacgtgacgattcatacgtcaccagcatattctgctaataagccggaagggttaacggacggtacag

SEQ ID NO: 470605 - DNA, 75 bp, synthetic construct
  source 1..75: mol_type = other DNA
cttatccgtcaggcgtgatccctgatatgcgtggctggacgattaagggcaaacctgccagtggtcgggccgtat

SEQ ID NO: 470606 - DNA, 75 bp, synthetic construct
  source 1..75: mol_type = other DNA
ggagctgaccgcatcagcggaaattttactctgggatgactatttgcacctggctacggcgtgccgaacgacgaa

SEQ ID NO: 470607 - DNA, 75 bp, synthetic construct
  source 1..75: mol_type = other DNA
ctggcggcggatttatctgccatcaatgccagttcgctgaccgtgaaagcatttcttgatatgcaggatgataat

SEQ ID NO: 470608 - DNA, 75 bp, synthetic construct
  source 1..75: mol_type = other DNA
acacgcacatactgtcggtattggtgctcatacgcactccgttgcgattggttcacatggacataccatcaccgt

SEQ ID NO: 470609 - DNA, 75 bp, synthetic construct
  source 1..75: mol_type = other DNA
agaaactaaaaccgttaatattatttccattcttcccgcaaaagttgccgtagacaactcccaaaataaacggaa

SEQ ID NO: 470610 - DNA, 75 bp, synthetic construct
  source 1..75: mol_type = other DNA
atgaaggcacattacagaaatggaggtctgttctaccgttcctcaagagatggctatggttttgaggaagactgg

SEQ ID NO: 470611 - DNA, 75 bp, synthetic construct
  source 1..75: mol_type = other DNA
ccaatgcccatcaactgctgttaccgactgatgatgaagggcaaaacaacgttagcgaaaactatttccttcact

SEQ ID NO: 470612 - DNA, 75 bp, synthetic construct
  source 1..75: mol_type = other DNA
agggcgtaacctatgagcagtttgcatggttcgtgcgtcagagcgaagagcagatttcgatggtcattcttgaag

SEQ ID NO: 470613 - DNA, 75 bp, synthetic construct
  source 1..75: mol_type = other DNA
tcgtgttgttatcgctggcggtggcggggctgtttctggtgaaacataaaaatgccagcctgcgcgcctcgctgg

SEQ ID NO: 470614 - DNA, 75 bp, synthetic construct
  source 1..75: mol_type = other DNA
tattctgttggcagagaaaatcgctgagacacttaaaatagatgataacgcaagaaaaataataggtatgaaaaa

SEQ ID NO: 470615 - DNA, 75 bp, synthetic construct
  source 1..75: mol_type = other DNA
atgcagagcgaatactggcaacgtcagaagacgcttctgacagaaagggaagtcagttttatgaaaggactgttc

SEQ ID NO: 470616 - DNA, 75 bp, synthetic construct
  source 1..75: mol_type = other DNA
tggtattccgttgctcagaagccacgatgccagaaaactgctgcagatgaccggagaatggctgaatacaacagg

SEQ ID NO: 470617 - DNA, 75 bp, synthetic construct
  source 1..75: mol_type = other DNA
cagtagagctggatgatgccagccatttacgacctgaacgcagacgccgggatattcttcttgaagaggttctga

SEQ ID NO: 470618 - DNA, 75 bp, synthetic construct
  source 1..75: mol_type = other DNA
atgaaaggactgttcagaattgtggatatgaagcggtggtatctgtgtccgcaggtacgggtcgcggatatcgtc

SEQ ID NO: 470619 - DNA, 75 bp, synthetic construct
  source 1..75: mol_type = other DNA
ccgttaaaaacgctgacgcccgcagcttttatgaaaaagagacgctccgctgtggctggtctgttcgccagctag

SEQ ID NO: 470620 - DNA, 75 bp, synthetic construct
  source 1..75: mol_type = other DNA
taaacgtaaggctacgattacagaaaatctgtttgccagagcaatgcaattctttcttaaaaatcataatatttg

SEQ ID NO: 470621 - DNA, 75 bp, synthetic construct
  source 1..75: mol_type = other DNA
tgacaagcgcggcattcaatatgggatgcaatagtttacggacctactacagcaaagcgcgaggcatgcgagtag

SEQ ID NO: 470622 - DNA, 75 bp, synthetic construct
  source 1..75: mol_type = other DNA
gaaggcttaccccgtgaaatagaactacgccagaagcagtacgagtactatcgtgatttactgttcagcttcccg

SEQ ID NO: 470623 - DNA, 75 bp, synthetic construct
  source 1..75: mol_type = other DNA
atggaaagacagcttcatccccaaaatgggaatgcttctggctgttcttgaatggggtgttgaagacgaggagtt

SEQ ID NO: 470624 - DNA, 75 bp, synthetic construct
  source 1..75: mol_type = other DNA
aatggctgagctgacaaagcggctggctagttatctcacaaaagaaaaagccccgatgagcggtaactcattcga

SEQ ID NO: 470625 - DNA, 75 bp, synthetic construct
  source 1..75: mol_type = other DNA
agaaagcggctcgcatcgagtcagccttgctgaacaaactggcactgatggggcagaagacattcgctcgagcaa

SEQ ID NO: 470626 - DNA, 75 bp, synthetic construct
  source 1..75: mol_type = other DNA
cggtttttcgctttccgaaggaattatcgaaagcccgcgcgatatcttcggcatggatgtcgttccttcctgtaa

SEQ ID NO: 470627 - DNA, 75 bp, synthetic construct
  source 1..75: mol_type = other DNA
tgacctttaatctgccccggggtgtcaagccgcttacaggcgataatgtgtgggtgaaagccaacgatgagggga

SEQ ID NO: 470628 - DNA, 75 bp, synthetic construct
  source 1..75: mol_type = other DNA
gcgtcggcaggaaatgaccagccttcggatgcgcagactataacgtttgtggccgataaggctaccgcaaccgtc

SEQ ID NO: 470629 - DNA, 75 bp, synthetic construct
  source 1..75: mol_type = other DNA
accgctaaagctaaccaggaaattcaggagtggctcgggaaatacggtactgcgcgcgtcaaactgaatgtcgat

SEQ ID NO: 470630 - DNA, 75 bp, synthetic construct
  source 1..75: mol_type = other DNA
gccgtatcgcagcgaatcgccagggcgaatgaggatgcgcaagtcagactcggagatgagctggccgttgccggt

SEQ ID NO: 470631 - DNA, 75 bp, synthetic construct
  source 1..75: mol_type = other DNA
tgctggccgtggctgggctgctctggatgcgccacgaaaacaccagtctgacccgttcctttgaacgggcgaata

SEQ ID NO: 470632 - DNA, 75 bp, synthetic construct
  source 1..75: mol_type = other DNA
atgtcaaggctgatgattgtgctggtcgtgttgttatcgctggcggtggccggtctgtttctggtgaaacacaaa

SEQ ID NO: 470633 - DNA, 75 bp, synthetic construct
  source 1..75: mol_type = other DNA
atatcgtccagctgaacgggaatatccggccacgatcacgccagtggtggcagttattcaggatggtgtctcagt

SEQ ID NO: 470634 - DNA, 75 bp, synthetic construct
  source 1..75: mol_type = other DNA
atgttgccatctggcgaactggtcggcgggcatgaagacgtgggtcgccatgtggcgctggacaaactgttaggc

SEQ ID NO: 470635 - DNA, 75 bp, synthetic construct
  source 1..75: mol_type = other DNA
tccagccgccgctttatggggttgaaggagcgccgccgggcgctggcgggacgtacgggctgtggcgtatgcggt

SEQ ID NO: 470636 - DNA, 75 bp, synthetic construct
  source 1..75: mol_type = other DNA
ctaatgtgccttcgctggtggcggatgggaagtcgactgcgaagctggaggtgaccctgatgtcggcaactaacc

SEQ ID NO: 470637 - DNA, 75 bp, synthetic construct
  source 1..75: mol_type = other DNA
acaggccgacggtcaggaatcgacgaaaactgccgaatctaaattcgtcgcggatgataaaaacgcggtgctcgc

SEQ ID NO: 470638 - DNA, 75 bp, synthetic construct
  source 1..75: mol_type = other DNA
tatcgtccaactgaacgggaatatccggccacgatcacgccagtggtggcggttattcaggatggtgtctcagtg

SEQ ID NO: 470639 - DNA, 75 bp, synthetic construct
  source 1..75: mol_type = other DNA
agtttatcgagtggctggattctcagggagcatttaaccatccatactggatgtgcaagggttcctggtcttatg

SEQ ID NO: 470640 - DNA, 75 bp, synthetic construct
  source 1..75: mol_type = other DNA
tgcggcagaatccgcggcaacgcgcgccgagacagcagcaaaacgggcagaggatattgcatccgccgtggcgct

SEQ ID NO: 470641 - DNA, 75 bp, synthetic construct
  source 1..75: mol_type = other DNA
tcccgcagaatccgcggcaacgcgcgccgagacagcagcaaaacgggcagaggatattgcatccgccgtggcgct

SEQ ID NO: 470642 - DNA, 75 bp, synthetic construct
  source 1..75: mol_type = other DNA
ttcaattactaataagttagaagctcaatacatcaaaaatcaactgggaatggacgccagtaaatattcactgca

SEQ ID NO: 470643 - DNA, 75 bp, synthetic construct
  source 1..75: mol_type = other DNA
actcaacaacaatgtcattcagcggtggtgctggttggttcaaattagcaacggtaaccatgccacaggcgagtt

SEQ ID NO: 470644 - DNA, 75 bp, synthetic construct
  source 1..75: mol_type = other DNA
atactgtcggtattggtgctcatacgcactccgttgcgattggctcacatggacacaccatcaccgttaacgctg

SEQ ID NO: 470645 - DNA, 75 bp, synthetic construct
  source 1..75: mol_type = other DNA
tacagcagaatccgcggcaacgcgcgccgagacagcagcaaaacgggcagaggatattgcatccgccgtggcgct

SEQ ID NO: 470646 - DNA, 75 bp, synthetic construct
  source 1..75: mol_type = other DNA
gtctgcttcaaaagatgaggcgaccagacaagcgtcagcagcgaatggcagggccacgactgcaacgacgaaggc

SEQ ID NO: 470647 - DNA, 75 bp, synthetic construct
  source 1..75: mol_type = other DNA
gtctgcttcaaaagatgaggcgaccagacaagcgtcagcagcgaatggcagggccacgacagcatcgacgaaggc

SEQ ID NO: 470648 - DNA, 75 bp, synthetic construct
  source 1..75: mol_type = other DNA
tacggcggaatccgcggcaacgcgcgccgagacagcagcaaaacgggcagaggatattgcatccgccgtggcgct

SEQ ID NO: 470649 - DNA, 75 bp, synthetic construct
  source 1..75: mol_type = other DNA
taccgccgaatccgcggcaacgcgcgccgagacagcagcaaaacgggcagaggatattgcatccgccgtggcgct

SEQ ID NO: 470650 - DNA, 75 bp, synthetic construct
  source 1..75: mol_type = other DNA
tactgctgaatccgcggcaacgcgcgccgagacagcagcaaaacgggcagaggatattgcatccgccgtggcgct

SEQ ID NO: 470651 - DNA, 75 bp, synthetic construct
  source 1..75: mol_type = other DNA
taaccctgatactgaagcaatggcaaaggctcaaagcattatgaatacctgggggtatcataagtctaatgcaag

SEQ ID NO: 470652 - DNA, 75 bp, synthetic construct
  source 1..75: mol_type = other DNA
tttagcgccacattgcgcgataacctgttacttgcagcacctggcaccagtgatgaagcgctggcggaggtattg

SEQ ID NO: 470653 - DNA, 75 bp, synthetic construct
  source 1..75: mol_type = other DNA
cgttgtgccacagcgagtgcatctgtttagcgccacgctgcgtgataatctgttactcgcctcgcctggcagtag

SEQ ID NO: 470654 - DNA, 75 bp, synthetic construct
  source 1..75: mol_type = other DNA
ttccctgatacccaaacccatgttgccgatcaggtttccgtgacgttacgtgatgttcagttcacttatcctgag

SEQ ID NO: 470655 - DNA, 75 bp, synthetic construct
  source 1..75: mol_type = other DNA
aagcatactggcgctattatttcgctttttccgccccacagaatgtactttcacctgaaatgctcaatgagatat

SEQ ID NO: 470656 - DNA, 75 bp, synthetic construct
  source 1..75: mol_type = other DNA
ctttgattccggagataaaatgttgcaacgctaccaagacgagaatgactggttttctatacatgacctagacac

SEQ ID NO: 470657 - DNA, 75 bp, synthetic construct
  source 1..75: mol_type = other DNA
acctgatcgagaaccacggtcccgaagcattgagagaagcctcaatctacctggaagacatcgatccgttgatgg

SEQ ID NO: 470658 - DNA, 75 bp, synthetic construct
  source 1..75: mol_type = other DNA
cggctcatggcacacctttctgctcagggaaggcaggctaaccagcagatattctttttatccgacggcgcggat

SEQ ID NO: 470659 - DNA, 75 bp, synthetic construct
  source 1..75: mol_type = other DNA
accggacgctgtttggcgttattccggcatccgggcttcgggtgtaccggtgccgttgtgaagactgtgctacaa

SEQ ID NO: 470660 - DNA, 75 bp, synthetic construct
  source 1..75: mol_type = other DNA
cacttgctaccgcgatgacccaacaaccacaatcccccccccccccgggggcggcgggggggggttttttttgtc

SEQ ID NO: 470661 - DNA, 75 bp, synthetic construct
  source 1..75: mol_type = other DNA
ggatgttcagttcacttatccggagcaatcccaacaggcacttaaagggatttctcttcaggtaaacgccgggga

SEQ ID NO: 470662 - DNA, 75 bp, synthetic construct
  source 1..75: mol_type = other DNA
ccatcagacgcatcaaatgcatgtgaaaaagctgggaaaaataaaaacggtaataacataaagataagatacaca

SEQ ID NO: 470663 - DNA, 75 bp, synthetic construct
  source 1..75: mol_type = other DNA
gtccagagcgtctcctcatgcatatcatatgcaacattaaacatgggtacaataatggcgggaaacactgaaatt

SEQ ID NO: 470664 - DNA, 75 bp, synthetic construct
  source 1..75: mol_type = other DNA
gtctgcttcaaaagatgaggcgaccagacaagcgtcagcagcgaatggcagagccacgacggcatcgacgaaggc

SEQ ID NO: 470665 - DNA, 75 bp, synthetic construct
  source 1..75: mol_type = other DNA
tttccacgaggccattaaaggcattattctcaatctgttaagccgaattattgatacccagaaaattaactcacg

SEQ ID NO: 470666 - DNA, 75 bp, synthetic construct
  source 1..75: mol_type = other DNA
tattgatactcagaaaattaattcacgtctgctcacgctggcgatttgcgcctttatcgtgattacgttgacaat

SEQ ID NO: 470667 - DNA, 75 bp, synthetic construct
  source 1..75: mol_type = other DNA
gggtttaaagcctggatgattctgctgtacggcattttgttatgcttgtcgccactgttgaagttgattgagtaa

SEQ ID NO: 470668 - DNA, 75 bp, synthetic construct
  source 1..75: mol_type = other DNA
gatagtacgccatatgttacagggaaaagaccgttatccagctattgctggtaaatcgctgattcagcgttatat

SEQ ID NO: 470669 - DNA, 75 bp, synthetic construct
  source 1..75: mol_type = other DNA
attaacagtaccgagacgaataaagttgatccgtctacggtatgcagcaaggaaaaaaccactatcacgctggaa

SEQ ID NO: 470670 - DNA, 75 bp, synthetic construct
  source 1..75: mol_type = other DNA
tcctcttcagacaaccagaaggaactcaaaaacctgcagacaatcgccaccaaaatgaaagcccaaaaattccag

SEQ ID NO: 470671 - DNA, 75 bp, synthetic construct
  source 1..75: mol_type = other DNA
tcttgtctcgtgtcttgtatcccgactttacaaatgagatcagaggagaagatcacattaaagatacagacaggc

SEQ ID NO: 470672 - DNA, 75 bp, synthetic construct
  source 1..75: mol_type = other DNA
ggcaagggccaaagacatgttgcgcaggttagctttggtgatataaaaaaattagagaacaagttaataatgttt

SEQ ID NO: 470673 - DNA, 75 bp, synthetic construct
  source 1..75: mol_type = other DNA
agaaacaacccgtagtctggaatattttatcagcaaaaacagccatctcctcaacataccgatttcagaattcgg

SEQ ID NO: 470674 - DNA, 75 bp, synthetic construct
  source 1..75: mol_type = other DNA
tattatcagtcattatctggggaagaattggggaatattcctcggcgtcatctactttttgatgattattcacgg

SEQ ID NO: 470675 - DNA, 75 bp, synthetic construct
  source 1..75: mol_type = other DNA
gcgatcagaaattaccatttacgcgatacgacttcggctgggttttattatgcataggaatggcaattggtgccg

SEQ ID NO: 470676 - DNA, 75 bp, synthetic construct
  source 1..75: mol_type = other DNA
cactcggagtttctgtcaccactgtcagtcgggctcttggaggctatgcagatgtgtcagcttccacccgtgcac

SEQ ID NO: 470677 - DNA, 75 bp, synthetic construct
  source 1..75: mol_type = other DNA
cagcagcgaaatcagcgttggctactgtaatgaccagccgtgatgaagcagtgctgatcaccggcagtgatttaa

SEQ ID NO: 470678 - DNA, 75 bp, synthetic construct
  source 1..75: mol_type = other DNA
ttgatggttctactgatatcactttaaccgccgcgcatgtggctgcttttgccagaagggcaacggatacatatg
